United States Patent Application Publication US 2016/0281171 A1 - sequence listing, part 6

SEQ ID NO: 119863 - DNA, 68 bp, Homo sapiens
tgaaacagattcaaattttatgggtcccactggagggccaggacgacctaaaatggtttaaagaagga

SEQ ID NO: 119864 - DNA, 72 bp, Homo sapiens
tatgaacagaaaaacaagtaattttaaccaaaccatgcagtctttacccaggacattcagtctcatctcctt

SEQ ID NO: 119865 - DNA, 75 bp, Homo sapiens
attttaaccaaaccatgcagtctttacccaggacattcagtctcatctcctttgatgctgttcccagattattta

SEQ ID NO: 119866 - DNA, 82 bp, Homo sapiens
accatgcagtctttacccaggacattcagtctcatctcctttgatgctgttcccagattatttacagctgtgatggtatata

SEQ ID NO: 119867 - DNA, 84 bp, Homo sapiens
aggacattcagtctcatctcctttgatgctgttcccagattatttacagctgtgatggtatataagccagtgtcactcctgcga

SEQ ID NO: 119868 - DNA, 85 bp, Homo sapiens
tctcatctcctttgatgctgttcccagattatttacagctgtgatggtatataagccagtgtcactcctgcgagactgcggaata

SEQ ID NO: 119869 - DNA, 81 bp, Homo sapiens
tttgatgctgttcccagattatttacagctgtgatggtatataagccagtgtcactcctgcgagactgcggaataactaaa

SEQ ID NO: 119870 - DNA, 80 bp, Homo sapiens
ttcccagattatttacagctgtgatggtatataagccagtgtcactcctgcgagactgcggaataactaaagtgcaagta

SEQ ID NO: 119871 - DNA, 81 bp, Homo sapiens
attatttacagctgtgatggtatataagccagtgtcactcctgcgagactgcggaataactaaagtgcaagtatcatctac

SEQ ID NO: 119872 - DNA, 81 bp, Homo sapiens
tgatggtatataagccagtgtcactcctgcgagactgcggaataactaaagtgcaagtatcatctaccaccagtttgttga

SEQ ID NO: 119873 - DNA, 80 bp, Homo sapiens
gtatataagccagtgtcactcctgcgagactgcggaataactaaagtgcaagtatcatctaccaccagtttgttgacatg

SEQ ID NO: 119874 - DNA, 80 bp, Homo sapiens
agtgtcactcctgcgagactgcggaataactaaagtgcaagtatcatctaccaccagtttgttgacatgggtgtcataga

SEQ ID NO: 119875 - DNA, 77 bp, Homo sapiens
gagactgcggaataactaaagtgcaagtatcatctaccaccagtttgttgacatgggtgtcatagagaacaggttct

SEQ ID NO: 119876 - DNA, 76 bp, Homo sapiens
aataactaaagtgcaagtatcatctaccaccagtttgttgacatgggtgtcatagagaacaggttctttgttatca

SEQ ID NO: 119877 - DNA, 77 bp, Homo sapiens
taaagtgcaagtatcatctaccaccagtttgttgacatgggtgtcatagagaacaggttctttgttatcaggcttct

SEQ ID NO: 119878 - DNA, 76 bp, Homo sapiens
agtatcatctaccaccagtttgttgacatgggtgtcatagagaacaggttctttgttatcaggcttctttggagga

SEQ ID NO: 119879 - DNA, 72 bp, Homo sapiens
accagtttgttgacatgggtgtcatagagaacaggttctttgttatcaggcttctttggaggagctttaaac

SEQ ID NO: 119880 - DNA, 73 bp, Homo sapiens
ttgacatgggtgtcatagagaacaggttctttgttatcaggcttctttggaggagctttaaaccaggttagtg

SEQ ID NO: 119881 - DNA, 72 bp, Homo sapiens
tgtcatagagaacaggttctttgttatcaggcttctttggaggagctttaaaccaggttagtgtcgggaatg

SEQ ID NO: 119882 - DNA, 68 bp, Homo sapiens
aggttctttgttatcaggcttctttggaggagctttaaaccaggttagtgtcgggaatggcacacctt

SEQ ID NO: 119883 - DNA, 68 bp, Homo sapiens
tttgttatcaggcttctttggaggagctttaaaccaggttagtgtcgggaatggcacacctttaattt

SEQ ID NO: 119884 - DNA, 69 bp, Homo sapiens
tctttggaggagctttaaaccaggttagtgtcgggaatggcacacctttaattttggccacaatgttaa

SEQ ID NO: 119885 - DNA, 68 bp, Homo sapiens
agctttaaaccaggttagtgtcgggaatggcacacctttaattttggccacaatgttaacattggttc

SEQ ID NO: 119886 - DNA, 68 bp, Homo sapiens
taaaccaggttagtgtcgggaatggcacacctttaattttggccacaatgttaacattggttccttct

SEQ ID NO: 119887 - DNA, 71 bp, Homo sapiens
tcgggaatggcacacctttaattttggccacaatgttaacattggttccttcttcaacctccatgaattct

SEQ ID NO: 119888 - DNA, 70 bp, Homo sapiens
aatggcacacctttaattttggccacaatgttaacattggttccttcttcaacctccatgaattctttta

SEQ ID NO: 119889 - DNA, 73 bp, Homo sapiens
taattttggccacaatgttaacattggttccttcttcaacctccatgaattcttttagatcaattgatggtgg

SEQ ID NO: 119890 - DNA, 72 bp, Homo sapiens
ttaacattggttccttcttcaacctccatgaattcttttagatcaattgatggtgggcctagattatttaaa

SEQ ID NO: 119891 - DNA, 71 bp, Homo sapiens
ccttcttcaacctccatgaattcttttagatcaattgatggtgggcctagattatttaaaaaaagttgtca

SEQ ID NO: 119892 - DNA, 72 bp, Homo sapiens
cctccatgaattcttttagatcaattgatggtgggcctagattatttaaaaaaagttgtcattaggagcaaa

SEQ ID NO: 119893 - DNA, 77 bp, Homo sapiens
aaggcagctgtaaggaggacattctttgtcagtacattggtacttacatgtctggtctttgacagtcacagggccaa

SEQ ID NO: 119894 - DNA, 78 bp, Homo sapiens
taaggaggacattctttgtcagtacattggtacttacatgtctggtctttgacagtcacagggccaacagtggctgaa

SEQ ID NO: 119895 - DNA, 80 bp, Homo sapiens
acattctttgtcagtacattggtacttacatgtctggtctttgacagtcacagggccaacagtggctgaaggcttgctga

SEQ ID NO: 119896 - DNA, 83 bp, Homo sapiens
agtacattggtacttacatgtctggtctttgacagtcacagggccaacagtggctgaaggcttgctgactcctgcagcattga

SEQ ID NO: 119897 - DNA, 83 bp, Homo sapiens
ttggtacttacatgtctggtctttgacagtcacagggccaacagtggctgaaggcttgctgactcctgcagcattgacagctt

SEQ ID NO: 119898 - DNA, 85 bp, Homo sapiens
tctggtctttgacagtcacagggccaacagtggctgaaggcttgctgactcctgcagcattgacagctttgactcggaattcata

SEQ ID NO: 119899 - DNA, 83 bp, Homo sapiens
ctttgacagtcacagggccaacagtggctgaaggcttgctgactcctgcagcattgacagctttgactcggaattcatattcc

SEQ ID NO: 119900 - DNA, 80 bp, Homo sapiens
agggccaacagtggctgaaggcttgctgactcctgcagcattgacagctttgactcggaattcatattccccaccctcta

SEQ ID NO: 119901 - DNA, 81 bp, Homo sapiens
tggctgaaggcttgctgactcctgcagcattgacagctttgactcggaattcatattccccaccctctactaggtcttcaa

SEQ ID NO: 119902 - DNA, 78 bp, Homo sapiens
ttgctgactcctgcagcattgacagctttgactcggaattcatattccccaccctctactaggtcttcaacagtaaat

SEQ ID NO: 119903 - DNA, 77 bp, Homo sapiens
ctgcagcattgacagctttgactcggaattcatattccccaccctctactaggtcttcaacagtaaattgcagttct

SEQ ID NO: 119904 - DNA, 74 bp, Homo sapiens
attgacagctttgactcggaattcatattccccaccctctactaggtcttcaacagtaaattgcagttcttcca

SEQ ID NO: 119905 - DNA, 73 bp, Homo sapiens
actcggaattcatattccccaccctctactaggtcttcaacagtaaattgcagttcttccacatcacgcttat

SEQ ID NO: 119906 - DNA, 76 bp, Homo sapiens
aattcatattccccaccctctactaggtcttcaacagtaaattgcagttcttccacatcacgcttattgcactgcc

SEQ ID NO: 119907 - DNA, 76 bp, Homo sapiens
accctctactaggtcttcaacagtaaattgcagttcttccacatcacgcttattgcactgcctccaggcttctttc

SEQ ID NO: 119908 - DNA, 77 bp, Homo sapiens
ctactaggtcttcaacagtaaattgcagttcttccacatcacgcttattgcactgcctccaggcttctttctttgtc

SEQ ID NO: 119909 - DNA, 76 bp, Homo sapiens
ttcaacagtaaattgcagttcttccacatcacgcttattgcactgcctccaggcttctttctttgtcccagtaggg

SEQ ID NO: 119910 - DNA, 77 bp, Homo sapiens
aattgcagttcttccacatcacgcttattgcactgcctccaggcttctttctttgtcccagtagggtcccatgcaag

SEQ ID NO: 119911 - DNA, 78 bp, Homo sapiens
acatcacgcttattgcactgcctccaggcttctttctttgtcccagtagggtcccatgcaaggcactcaacaatatag

SEQ ID NO: 119912 - DNA, 76 bp, Homo sapiens
ttattgcactgcctccaggcttctttctttgtcccagtagggtcccatgcaaggcactcaacaatatagtgggtaa

SEQ ID NO: 119913 - DNA, 73 bp, Homo sapiens
actgcctccaggcttctttctttgtcccagtagggtcccatgcaaggcactcaacaatatagtgggtaacagg

SEQ ID NO: 119914 - DNA, 71 bp, Homo sapiens
aggcttctttctttgtcccagtagggtcccatgcaaggcactcaacaatatagtgggtaacaggggagccc

SEQ ID NO: 119915 - DNA, 73 bp, Homo sapiens
tttgtcccagtagggtcccatgcaaggcactcaacaatatagtgggtaacaggggagcccccatcattcttcg

SEQ ID NO: 119916 - DNA, 71 bp, Homo sapiens
tagggtcccatgcaaggcactcaacaatatagtgggtaacaggggagcccccatcattcttcgggggtttc

SEQ ID NO: 119917 - DNA, 74 bp, Homo sapiens
aaggcactcaacaatatagtgggtaacaggggagcccccatcattcttcgggggtttccatgacagatgcactg

SEQ ID NO: 119918 - DNA, 72 bp, Homo sapiens
aacaatatagtgggtaacaggggagcccccatcattcttcgggggtttccatgacagatgcactgtgttctt

SEQ ID NO: 119919 - DNA, 76 bp, Homo sapiens
tagtgggtaacaggggagcccccatcattcttcgggggtttccatgacagatgcactgtgttctttgtgatgaggc

SEQ ID NO: 119920 - DNA, 78 bp, Homo sapiens
gagcccccatcattcttcgggggtttccatgacagatgcactgtgttctttgtgatgaggccaatcttgagtttaata

SEQ ID NO: 119921 - DNA, 80 bp, Homo sapiens
gggtttccatgacagatgcactgtgttctttgtgatgaggccaatcttgagtttaataggaggatcaggaggatctgtaa

SEQ ID NO: 119922 - DNA, 76 bp, Homo sapiens
atgcactgtgttctttgtgatgaggccaatcttgagtttaataggaggatcaggaggatctgtaaaaataattaaa

SEQ ID NO: 119923 - DNA, 72 bp, Homo sapiens
ctttgtgatgaggccaatcttgagtttaataggaggatcaggaggatctgtaaaaataattaaaggaagtat

SEQ ID NO: 119924 - DNA, 70 bp, Homo sapiens
ggccaatcttgagtttaataggaggatcaggaggatctgtaaaaataattaaaggaagtattaagcgttg

SEQ ID NO: 119925 - DNA, 72 bp, Homo sapiens
acttcaattttgagaagatattttaaatttagattttaaagcttacatatcggatctctggcagtggtcctc

SEQ ID NO: 119926 - DNA, 72 bp, Homo sapiens
attttaaatttagattttaaagcttacatatcggatctctggcagtggtcctctgaatggtttccacaggtg

SEQ ID NO: 119927 - DNA, 75 bp, Homo sapiens
tagattttaaagcttacatatcggatctctggcagtggtcctctgaatggtttccacaggtgggccaataccaaa

SEQ ID NO: 119928 - DNA, 73 bp, Homo sapiens
taaagcttacatatcggatctctggcagtggtcctctgaatggtttccacaggtgggccaataccaaaacggt

SEQ ID NO: 119929 - DNA, 72 bp, Homo sapiens
gcagtggtcctctgaatggtttccacaggtgggccaataccaaaacggttttctgctcgcacacggaagaaa

SEQ ID NO: 119930 - DNA, 70 bp, Homo sapiens
ggtcctctgaatggtttccacaggtgggccaataccaaaacggttttctgctcgcacacggaagaaatat

SEQ ID NO: 119931 - DNA, 73 bp, Homo sapiens
atggtttccacaggtgggccaataccaaaacggttttctgctcgcacacggaagaaatattgctgttcagaga

SEQ ID NO: 119932 - DNA, 77 bp, Homo sapiens
tgggccaataccaaaacggttttctgctcgcacacggaagaaatattgctgttcagagaggagatcaggcactacaa

SEQ ID NO: 119933 - DNA, 76 bp, Homo sapiens
aataccaaaacggttttctgctcgcacacggaagaaatattgctgttcagagaggagatcaggcactacaaatgtg

SEQ ID NO: 119934 - DNA, 82 bp, Homo sapiens
ttttctgctcgcacacggaagaaatattgctgttcagagaggagatcaggcactacaaatgtggtgcttccacagtctggat

SEQ ID NO: 119935 - DNA, 79 bp, Homo sapiens
acacggaagaaatattgctgttcagagaggagatcaggcactacaaatgtggtgcttccacagtctggattgactttgg

SEQ ID NO: 119936 - DNA, 79 bp, Homo sapiens
aatattgctgttcagagaggagatcaggcactacaaatgtggtgcttccacagtctggattgactttggtccaggcttt

SEQ ID NO: 119937 - DNA, 81 bp, Homo sapiens
tgttcagagaggagatcaggcactacaaatgtggtgcttccacagtctggattgactttggtccaggcttttccatcaata

SEQ ID NO: 119938 - DNA, 78 bp, Homo sapiens
agatcaggcactacaaatgtggtgcttccacagtctggattgactttggtccaggcttttccatcaatagtcctcttc

SEQ ID NO: 119939 - DNA, 76 bp, Homo sapiens
actacaaatgtggtgcttccacagtctggattgactttggtccaggcttttccatcaatagtcctcttctcaataa

SEQ ID NO: 119940 - DNA, 78 bp, Homo sapiens
tggtgcttccacagtctggattgactttggtccaggcttttccatcaatagtcctcttctcaataacatagcctttga

SEQ ID NO: 119941 - DNA, 77 bp, Homo sapiens
acagtctggattgactttggtccaggcttttccatcaatagtcctcttctcaataacatagcctttgatcctgtctc

SEQ ID NO: 119942 - DNA, 76 bp, Homo sapiens
attgactttggtccaggcttttccatcaatagtcctcttctcaataacatagcctttgatcctgtctcctccatcg

SEQ ID NO: 119943 - DNA, 79 bp, Homo sapiens
ccaggcttttccatcaatagtcctcttctcaataacatagcctttgatcctgtctcctccatcgtcgtctggcatcttc

SEQ ID NO: 119944 - DNA, 80 bp, Homo sapiens
ttttccatcaatagtcctcttctcaataacatagcctttgatcctgtctcctccatcgtcgtctggcatcttccatgaaa

SEQ ID NO: 119945 - DNA, 79 bp, Homo sapiens
aataacatagcctttgatcctgtctcctccatcgtcgtctggcatcttccatgaaagtctgcaactaccccttgtgata

SEQ ID NO: 119946 - DNA, 79 bp, Homo sapiens
cctttgatcctgtctcctccatcgtcgtctggcatcttccatgaaagtctgcaactaccccttgtgatatcactgactt

SEQ ID NO: 119947 - DNA, 81 bp, Homo sapiens
ctgtctcctccatcgtcgtctggcatcttccatgaaagtctgcaactaccccttgtgatatcactgactttcagatctttg

SEQ ID NO: 119948 - DNA, 79 bp, Homo sapiens
cctccatcgtcgtctggcatcttccatgaaagtctgcaactaccccttgtgatatcactgactttcagatctttgggtg

SEQ ID NO: 119949 - DNA, 80 bp, Homo sapiens
tggcatcttccatgaaagtctgcaactaccccttgtgatatcactgactttcagatctttgggtgggcctggtacatctg

SEQ ID NO: 119950 - DNA, 78 bp, Homo sapiens
atgaaagtctgcaactaccccttgtgatatcactgactttcagatctttgggtgggcctggtacatctgttggatgta

SEQ ID NO: 119951 - DNA, 79 bp, Homo sapiens
tgcaactaccccttgtgatatcactgactttcagatctttgggtgggcctggtacatctgttggatgtaaatcacaata

SEQ ID NO: 119952 - DNA, 68 bp, Homo sapiens
aaataatttgtttttattctgtagcaactttcaaagtctttcttacccatgactttaactctgcaatt

SEQ ID NO: 119953 - DNA, 71 bp, Homo sapiens
gtttttattctgtagcaactttcaaagtctttcttacccatgactttaactctgcaatttgcagtcttttg

SEQ ID NO: 119954 - DNA, 74 bp, Homo sapiens
ttctgtagcaactttcaaagtctttcttacccatgactttaactctgcaatttgcagtcttttgtcctgcttta

SEQ ID NO: 119955 - DNA, 71 bp, Homo sapiens
aactttcaaagtctttcttacccatgactttaactctgcaatttgcagtcttttgtcctgctttattcttg

SEQ ID NO: 119956 - DNA, 77 bp, Homo sapiens
gtctttcttacccatgactttaactctgcaatttgcagtcttttgtcctgctttattcttggctgtgatgctgtatt

SEQ ID NO: 119957 - DNA, 81 bp, Homo sapiens
tgactttaactctgcaatttgcagtcttttgtcctgctttattcttggctgtgatgctgtatttgcctgtatgagatcgtt

SEQ ID NO: 119958 - DNA, 82 bp, Homo sapiens
taactctgcaatttgcagtcttttgtcctgctttattcttggctgtgatgctgtatttgcctgtatgagatcgtttacactc

SEQ ID NO: 119959 - DNA, 78 bp, Homo sapiens
cagtcttttgtcctgctttattcttggctgtgatgctgtatttgcctgtatgagatcgtttacactccggaataataa

SEQ ID NO: 119960 - DNA, 77 bp, Homo sapiens
ttttgtcctgctttattcttggctgtgatgctgtatttgcctgtatgagatcgtttacactccggaataataattac

SEQ ID NO: 119961 - DNA, 76 bp, Homo sapiens
tttattcttggctgtgatgctgtatttgcctgtatgagatcgtttacactccggaataataattactgaggagttt

SEQ ID NO: 119962 - DNA, 81 bp, Homo sapiens
tgatgctgtatttgcctgtatgagatcgtttacactccggaataataattactgaggagttttcagcagtctccagctgta

SEQ ID NO: 119963 - DNA, 77 bp, Homo sapiens
tatttgcctgtatgagatcgtttacactccggaataataattactgaggagttttcagcagtctccagctgtacaaa

SEQ ID NO: 119964 - DNA, 76 bp, Homo sapiens
tgtatgagatcgtttacactccggaataataattactgaggagttttcagcagtctccagctgtacaaagaaaata

SEQ ID NO: 119965 - DNA, 75 bp, Homo sapiens
tttacactccggaataataattactgaggagttttcagcagtctccagctgtacaaagaaaatagtagtcataca

SEQ ID NO: 119966 - DNA, 76 bp, Homo sapiens
cggaataataattactgaggagttttcagcagtctccagctgtacaaagaaaatagtagtcatacattgaatgaaa

SEQ ID NO: 119967 - DNA, 79 bp, Homo sapiens
aattactgaggagttttcagcagtctccagctgtacaaagaaaatagtagtcatacattgaatgaaatcatagcaatat

SEQ ID NO: 119968 - DNA, 82 bp, Homo sapiens
tttcagcagtctccagctgtacaaagaaaatagtagtcatacattgaatgaaatcatagcaatattgaagtcaaccatattc

SEQ ID NO: 119969 - DNA, 82 bp, Homo sapiens
gcagtctccagctgtacaaagaaaatagtagtcatacattgaatgaaatcatagcaatattgaagtcaaccatattctgaat

SEQ ID NO: 119970 - DNA, 77 bp, Homo sapiens
gaaaatagtagtcatacattgaatgaaatcatagcaatattgaagtcaaccatattctgaattattttaattattat

SEQ ID NO: 119971 - DNA, 74 bp, Homo sapiens
ttattatttttttacctgtgcatcttcgggtatgtcatgaactccatcctattagaaaaggagacagtcagttg

SEQ ID NO: 119972 - DNA, 76 bp, Homo sapiens
ttttacctgtgcatcttcgggtatgtcatgaactccatcctattagaaaaggagacagtcagttgtagtataaata

SEQ ID NO: 119973 - DNA, 75 bp, Homo sapiens
catcttcgggtatgtcatgaactccatcctattagaaaaggagacagtcagttgtagtataaatactccttatag

SEQ ID NO: 119974 - DNA, 78 bp, Homo sapiens
tatgtcatgaactccatcctattagaaaaggagacagtcagttgtagtataaatactccttatagtgattcagtggaa

SEQ ID NO: 119975 - DNA, 75 bp, Homo sapiens
catgaactccatcctattagaaaaggagacagtcagttgtagtataaatactccttatagtgattcagtggaaaa

SEQ ID NO: 119976 - DNA, 72 bp, Homo sapiens
ggagacagtcagttgtagtataaatactccttatagtgattcagtggaaaaaagaggagaatggttattttc

SEQ ID NO: 119977 - DNA, 70 bp, Homo sapiens
gtcagttgtagtataaatactccttatagtgattcagtggaaaaaagaggagaatggttattttcctacc

SEQ ID NO: 119978 - DNA, 69 bp, Homo sapiens
aaatactccttatagtgattcagtggaaaaaagaggagaatggttattttcctaccttcattgctttct

SEQ ID NO: 119979 - DNA, 70 bp, Homo sapiens
tccttatagtgattcagtggaaaaaagaggagaatggttattttcctaccttcattgctttctttgcctt

SEQ ID NO: 119980 - DNA, 70 bp, Homo sapiens
ttcagtggaaaaaagaggagaatggttattttcctaccttcattgctttctttgcctttccatcaaattc

SEQ ID NO: 119981 - DNA, 70 bp, Homo sapiens
aaagaggagaatggttattttcctaccttcattgctttctttgcctttccatcaaattcccaagatgatt

SEQ ID NO: 119982 - DNA, 70 bp, Homo sapiens
aatggttattttcctaccttcattgctttctttgcctttccatcaaattcccaagatgattttggtgttg

SEQ ID NO: 119983 - DNA, 71 bp, Homo sapiens
tattttcctaccttcattgctttctttgcctttccatcaaattcccaagatgattttggtgttgggcgtcc

SEQ ID NO: 119984 - DNA, 75 bp, Homo sapiens
attgctttctttgcctttccatcaaattcccaagatgattttggtgttgggcgtcccttgatgacagcaggaatc

SEQ ID NO: 119985 - DNA, 77 bp, Homo sapiens
tttgcctttccatcaaattcccaagatgattttggtgttgggcgtcccttgatgacagcaggaatcctaatctgtga

SEQ ID NO: 119986 - DNA, 78 bp, Homo sapiens
atcaaattcccaagatgattttggtgttgggcgtcccttgatgacagcaggaatcctaatctgtgagccagctttaca

SEQ ID NO: 119987 - DNA, 76 bp, Homo sapiens
attcccaagatgattttggtgttgggcgtcccttgatgacagcaggaatcctaatctgtgagccagctttacaaac

SEQ ID NO: 119988 - DNA, 76 bp, Homo sapiens
attttggtgttgggcgtcccttgatgacagcaggaatcctaatctgtgagccagctttacaaaccagacagtcctg

SEQ ID NO: 119989 - DNA, 82 bp, Homo sapiens
gcgtcccttgatgacagcaggaatcctaatctgtgagccagctttacaaaccagacagtcctgtgctccaatgtcaatgaaa

SEQ ID NO: 119990 - DNA, 81 bp, Homo sapiens
cttgatgacagcaggaatcctaatctgtgagccagctttacaaaccagacagtcctgtgctccaatgtcaatgaaaacttc

SEQ ID NO: 119991 - DNA, 76 bp, Homo sapiens
aggaatcctaatctgtgagccagctttacaaaccagacagtcctgtgctccaatgtcaatgaaaacttctggttcc

SEQ ID NO: 119992 - DNA, 78 bp, Homo sapiens
taatctgtgagccagctttacaaaccagacagtcctgtgctccaatgtcaatgaaaacttctggttcctctgtaatac

SEQ ID NO: 119993 - DNA, 75 bp, Homo sapiens
agctttacaaaccagacagtcctgtgctccaatgtcaatgaaaacttctggttcctctgtaataccacatacaat

SEQ ID NO: 119994 - DNA, 75 bp, Homo sapiens
acaaaccagacagtcctgtgctccaatgtcaatgaaaacttctggttcctctgtaataccacatacaatttaaca

SEQ ID NO: 119995 - DNA, 76 bp, Homo sapiens
tttcataataagatcaaaagaggaatacataaactgagtaagtactagtaccttgaatatcagtggcagggatctc

SEQ ID NO: 119996 - DNA, 74 bp, Homo sapiens
aaaagaggaatacataaactgagtaagtactagtaccttgaatatcagtggcagggatctccccagttgtatca

SEQ ID NO: 119997 - DNA, 75 bp, Homo sapiens
aatacataaactgagtaagtactagtaccttgaatatcagtggcagggatctccccagttgtatcacttggttca

SEQ ID NO: 119998 - DNA, 79 bp, Homo sapiens
agtactagtaccttgaatatcagtggcagggatctccccagttgtatcacttggttcagattcaccagcttcattgaca

SEQ ID NO: 119999 - DNA, 80 bp, Homo sapiens
agtggcagggatctccccagttgtatcacttggttcagattcaccagcttcattgacagctttcactctgaatctgtact

SEQ ID NO: 120000 - DNA, 81 bp, Homo sapiens
atctccccagttgtatcacttggttcagattcaccagcttcattgacagctttcactctgaatctgtacttcctgagctct

SEQ ID NO: 120001 - DNA, 82 bp, Homo sapiens
gttgtatcacttggttcagattcaccagcttcattgacagctttcactctgaatctgtacttcctgagctctttcagattag

SEQ ID NO: 120002 - DNA, 83 bp, Homo sapiens
ttggttcagattcaccagcttcattgacagctttcactctgaatctgtacttcctgagctctttcagattaggcaccacacat

SEQ ID NO: 120003 - DNA, 83 bp, Homo sapiens
cagcttcattgacagctttcactctgaatctgtacttcctgagctctttcagattaggcaccacacattcacaggtagttata

SEQ ID NO: 120004 - DNA, 79 bp, Homo sapiens
ttgacagctttcactctgaatctgtacttcctgagctctttcagattaggcaccacacattcacaggtagttataagtt

SEQ ID NO: 120005 - DNA, 78 bp, Homo sapiens
actctgaatctgtacttcctgagctctttcagattaggcaccacacattcacaggtagttataagtttgtctggttca

SEQ ID NO: 120006 - DNA, 76 bp, Homo sapiens
aatctgtacttcctgagctctttcagattaggcaccacacattcacaggtagttataagtttgtctggttcattta

SEQ ID NO: 120007 - DNA, 75 bp, Homo sapiens
ttcctgagctctttcagattaggcaccacacattcacaggtagttataagtttgtctggttcatttactcttttc

SEQ ID NO: 120008 - DNA, 75 bp, Homo sapiens
ttcagattaggcaccacacattcacaggtagttataagtttgtctggttcatttactcttttccagtcagtagta

SEQ ID NO: 120009 - DNA, 71 bp, Homo sapiens
ccacacattcacaggtagttataagtttgtctggttcatttactcttttccagtcagtagtaccttcttct

SEQ ID NO: 120010 - DNA, 71 bp, Homo sapiens
attcacaggtagttataagtttgtctggttcatttactcttttccagtcagtagtaccttcttcttgcatt

SEQ ID NO: 120011 - DNA, 72 bp, Homo sapiens
ataagtttgtctggttcatttactcttttccagtcagtagtaccttcttcttgcatttctacaatgtatcct

SEQ ID NO: 120012 - DNA, 74 bp, Homo sapiens
tttgtctggttcatttactcttttccagtcagtagtaccttcttcttgcatttctacaatgtatcctttgattg

SEQ ID NO: 120013 - DNA, 75 bp, Homo sapiens
ttactcttttccagtcagtagtaccttcttcttgcatttctacaatgtatcctttgattgggctgccaccatctt

SEQ ID NO: 120014 - DNA, 77 bp, Homo sapiens
ttttccagtcagtagtaccttcttcttgcatttctacaatgtatcctttgattgggctgccaccatctttggctgga

SEQ ID NO: 120015 - DNA, 75 bp, Homo sapiens
agtagtaccttcttcttgcatttctacaatgtatcctttgattgggctgccaccatctttggctggaggtttcca

SEQ ID NO: 120016 - DNA, 80 bp, Homo sapiens
ttgcatttctacaatgtatcctttgattgggctgccaccatctttggctggaggtttccatcctagtgagatgcttgact

SEQ ID NO: 120017 - DNA, 77 bp, Homo sapiens
tacaatgtatcctttgattgggctgccaccatctttggctggaggtttccatcctagtgagatgcttgacttcgttt

SEQ ID NO: 120018 - DNA, 75 bp, Homo sapiens
ctttgattgggctgccaccatctttggctggaggtttccatcctagtgagatgcttgacttcgttttatctttaa

SEQ ID NO: 120019 - DNA, 74 bp, Homo sapiens
attgggctgccaccatctttggctggaggtttccatcctagtgagatgcttgacttcgttttatctttaacttc

SEQ ID NO: 120020 - DNA, 73 bp, Homo sapiens
accatctttggctggaggtttccatcctagtgagatgcttgacttcgttttatctttaacttctgggcaagaa

SEQ ID NO: 120021 - DNA, 72 bp, Homo sapiens
ggctggaggtttccatcctagtgagatgcttgacttcgttttatctttaacttctgggcaagaaggtggccc

SEQ ID NO: 120022 - DNA, 71 bp, Homo sapiens
tcctagtgagatgcttgacttcgttttatctttaacttctgggcaagaaggtggccccggtggaactaata

SEQ ID NO: 120023 - DNA, 67 bp, Homo sapiens
atgcttgacttcgttttatctttaacttctgggcaagaaggtggccccggtggaactaataacaaaa

SEQ ID NO: 120024 - DNA, 64 bp, Homo sapiens
acttcgttttatctttaacttctgggcaagaaggtggccccggtggaactaataacaaaagaaa

SEQ ID NO: 120025 - DNA, 75 bp, Homo sapiens
tagtgactttgtgctttagaaattagtccccagaaacggaagcatacttacatatgggatctcctgcaacctctg

SEQ ID NO: 120026 - DNA, 76 bp, Homo sapiens
tttagaaattagtccccagaaacggaagcatacttacatatgggatctcctgcaacctctggatctgatggttcac

SEQ ID NO: 120027 - DNA, 76 bp, Homo sapiens
aattagtccccagaaacggaagcatacttacatatgggatctcctgcaacctctggatctgatggttcactgggag

SEQ ID NO: 120028 - DNA, 79 bp, Homo sapiens
agaaacggaagcatacttacatatgggatctcctgcaacctctggatctgatggttcactgggaggaccaattcctgca

SEQ ID NO: 120029 - DNA, 82 bp, Homo sapiens
atacttacatatgggatctcctgcaacctctggatctgatggttcactgggaggaccaattcctgcagcatttattgccatg

SEQ ID NO: 120030 - DNA, 83 bp, Homo sapiens
atatgggatctcctgcaacctctggatctgatggttcactgggaggaccaattcctgcagcatttattgccatggctctgaac

SEQ ID NO: 120031 - DNA, 81 bp, Homo sapiens
tgcaacctctggatctgatggttcactgggaggaccaattcctgcagcatttattgccatggctctgaactggtatttaac

SEQ ID NO: 120032 - DNA, 80 bp, Homo sapiens
tggatctgatggttcactgggaggaccaattcctgcagcatttattgccatggctctgaactggtatttaacgccttcaa

SEQ ID NO: 120033 - DNA, 77 bp, Homo sapiens
atggttcactgggaggaccaattcctgcagcatttattgccatggctctgaactggtatttaacgccttcaagcaaa

SEQ ID NO: 120034 - DNA, 76 bp, Homo sapiens
ggaccaattcctgcagcatttattgccatggctctgaactggtatttaacgccttcaagcaaacgaggaacattaa

SEQ ID NO: 120035 - DNA, 75 bp, Homo sapiens
aattcctgcagcatttattgccatggctctgaactggtatttaacgccttcaagcaaacgaggaacattaaattc

SEQ ID NO: 120036 - DNA, 73 bp, Homo sapiens
ttattgccatggctctgaactggtatttaacgccttcaagcaaacgaggaacattaaattccacgcctttcaa

SEQ ID NO: 120037 - DNA, 70 bp, Homo sapiens
gctctgaactggtatttaacgccttcaagcaaacgaggaacattaaattccacgcctttcaatcccactt

SEQ ID NO: 120038 - DNA, 68 bp, Homo sapiens
tggtatttaacgccttcaagcaaacgaggaacattaaattccacgcctttcaatcccactttggttat

SEQ ID NO: 120039 - DNA, 70 bp, Homo sapiens
ttaacgccttcaagcaaacgaggaacattaaattccacgcctttcaatcccactttggttattggtgctc

SEQ ID NO: 120040 - DNA, 69 bp, Homo sapiens
aaacgaggaacattaaattccacgcctttcaatcccactttggttattggtgctcggctaacacgtgac

SEQ ID NO: 120041 - DNA, 70 bp, Homo sapiens
aacattaaattccacgcctttcaatcccactttggttattggtgctcggctaacacgtgaccaataagga

SEQ ID NO: 120042 - DNA, 69 bp, Homo sapiens
aattccacgcctttcaatcccactttggttattggtgctcggctaacacgtgaccaataaggacttccc

SEQ ID NO: 120043 - DNA, 69 bp, Homo sapiens
ctttcaatcccactttggttattggtgctcggctaacacgtgaccaataaggacttccctcttctcttt

SEQ ID NO: 120044 - DNA, 71 bp, Homo sapiens
actttggttattggtgctcggctaacacgtgaccaataaggacttccctcttctcttttctccagccagta

SEQ ID NO: 120045 - DNA, 73 bp, Homo sapiens
attggtgctcggctaacacgtgaccaataaggacttccctcttctcttttctccagccagtagccagtaattg

SEQ ID NO: 120046 - DNA, 74 bp, Homo sapiens
taacacgtgaccaataaggacttccctcttctcttttctccagccagtagccagtaattggagagccaccattg

SEQ ID NO: 120047 - DNA, 72 bp, Homo sapiens
accaataaggacttccctcttctcttttctccagccagtagccagtaattggagagccaccattgtccaaag

SEQ ID NO: 120048 - DNA, 77 bp, Homo sapiens
tccctcttctcttttctccagccagtagccagtaattggagagccaccattgtccaaaggaggagtccagctcacta

SEQ ID NO: 120049 - DNA, 79 bp, Homo sapiens
tcttttctccagccagtagccagtaattggagagccaccattgtccaaaggaggagtccagctcactagcattgatcct

SEQ ID NO: 120050 - DNA, 80 bp, Homo sapiens
agccagtagccagtaattggagagccaccattgtccaaaggaggagtccagctcactagcattgatcctttggtgcgtgc

SEQ ID NO: 120051 - DNA, 76 bp, Homo sapiens
agtaattggagagccaccattgtccaaaggaggagtccagctcactagcattgatcctttggtgcgtgccaaaact

SEQ ID NO: 120052 - DNA, 74 bp, Homo sapiens
agagccaccattgtccaaaggaggagtccagctcactagcattgatcctttggtgcgtgccaaaacttttggtt

SEQ ID NO: 120053 - DNA, 72 bp, Homo sapiens
accattgtccaaaggaggagtccagctcactagcattgatcctttggtgcgtgccaaaacttttggttttcc

SEQ ID NO: 120054 - DNA, 72 bp, Homo sapiens
aaaggaggagtccagctcactagcattgatcctttggtgcgtgccaaaacttttggttttcctggaggtcca

SEQ ID NO: 120055 - DNA, 72 bp, Homo sapiens
agctcactagcattgatcctttggtgcgtgccaaaacttttggttttcctggaggtccaggaaggcgataag

SEQ ID NO: 120056 - DNA, 70 bp, Homo sapiens
attgatcctttggtgcgtgccaaaacttttggttttcctggaggtccaggaaggcgataaggatcttgaa

SEQ ID NO: 120057 - DNA, 71 bp, Homo sapiens
tggtgcgtgccaaaacttttggttttcctggaggtccaggaaggcgataaggatcttgaatgactacttta

SEQ ID NO: 120058 - DNA, 71 bp, Homo sapiens
aaaacttttggttttcctggaggtccaggaaggcgataaggatcttgaatgactactttatctgatttgca

SEQ ID NO: 120059 - DNA, 77 bp, Homo sapiens
tttggttttcctggaggtccaggaaggcgataaggatcttgaatgactactttatctgatttgcactcatcactgat

SEQ ID NO: 120060 - DNA, 81 bp, Homo sapiens
aggtccaggaaggcgataaggatcttgaatgactactttatctgatttgcactcatcactgattccatatttattcactgc

SEQ ID NO: 120061 - DNA, 81 bp, Homo sapiens
aggaaggcgataaggatcttgaatgactactttatctgatttgcactcatcactgattccatatttattcactgccctgac

SEQ ID NO: 120062 - DNA, 83 bp, Homo sapiens
taaggatcttgaatgactactttatctgatttgcactcatcactgattccatatttattcactgccctgactcggaactcata

SEQ ID NO: 120063 - DNA, 82 bp, Homo sapiens
aatgactactttatctgatttgcactcatcactgattccatatttattcactgccctgactcggaactcatactgaccattg

SEQ ID NO: 120064 - DNA, 81 bp, Homo sapiens
tatctgatttgcactcatcactgattccatatttattcactgccctgactcggaactcatactgaccattggggataagtt

SEQ ID NO: 120065 - DNA, 79 bp, Homo sapiens
actcatcactgattccatatttattcactgccctgactcggaactcatactgaccattggggataagtttccagatcta

SEQ ID NO: 120066 - DNA, 76 bp, Homo sapiens
gattccatatttattcactgccctgactcggaactcatactgaccattggggataagtttccagatctagaaatta

SEQ ID NO: 120067 - DNA, 74 bp, Homo sapiens
atatttattcactgccctgactcggaactcatactgaccattggggataagtttccagatctagaaattagaaa

SEQ ID NO: 120068 - DNA, 70 bp, Homo sapiens
ccctgactcggaactcatactgaccattggggataagtttccagatctagaaattagaaaaacagaaatt

SEQ ID NO: 120069 - DNA, 74 bp, Homo sapiens
ccagagtcatgtacttttaatgtgtataagaaaatattcagaagagtttaccccatatcttttctctacagcag

SEQ ID NO: 120070 - DNA, 73 bp, Homo sapiens
tttaatgtgtataagaaaatattcagaagagtttaccccatatcttttctctacagcagtgttggtgacttcc

SEQ ID NO: 120071 - DNA, 73 bp, Homo sapiens
gtataagaaaatattcagaagagtttaccccatatcttttctctacagcagtgttggtgacttcctcccattc

SEQ ID NO: 120072 - DNA, 73 bp, Homo sapiens
aaatattcagaagagtttaccccatatcttttctctacagcagtgttggtgacttcctcccattctgctttct

SEQ ID NO: 120073 - DNA, 74 bp, Homo sapiens
aagagtttaccccatatcttttctctacagcagtgttggtgacttcctcccattctgctttcttcctacttgca

SEQ ID NO: 120074 - DNA, 77 bp, Homo sapiens
atatcttttctctacagcagtgttggtgacttcctcccattctgctttcttcctacttgcatcacgtttgtcaataa

SEQ ID NO: 120075 - DNA, 78 bp, Homo sapiens
tttctctacagcagtgttggtgacttcctcccattctgctttcttcctacttgcatcacgtttgtcaataacataatg

SEQ ID NO: 120076 - DNA, 76 bp, Homo sapiens
agtgttggtgacttcctcccattctgctttcttcctacttgcatcacgtttgtcaataacataatgggtgatttca

SEQ ID NO: 120077 - DNA, 79 bp, Homo sapiens
tcctcccattctgctttcttcctacttgcatcacgtttgtcaataacataatgggtgatttcactgccaccattatcaa

SEQ ID NO: 120078 - DNA, 80 bp, Homo sapiens
ttcctacttgcatcacgtttgtcaataacataatgggtgatttcactgccaccattatcaagaggggcatcccatgtcaa

SEQ ID NO: 120079 - DNA, 79 bp, Homo sapiens
atcacgtttgtcaataacataatgggtgatttcactgccaccattatcaagaggggcatcccatgtcaagtagcaagat

SEQ ID NO: 120080 - DNA, 81 bp, Homo sapiens
tcaataacataatgggtgatttcactgccaccattatcaagaggggcatcccatgtcaagtagcaagattcagctttaatg

SEQ ID NO: 120081 - DNA, 80 bp, Homo sapiens
ataatgggtgatttcactgccaccattatcaagaggggcatcccatgtcaagtagcaagattcagctttaatgtcagtaa

SEQ ID NO: 120082 - DNA, 80 bp, Homo sapiens
atttcactgccaccattatcaagaggggcatcccatgtcaagtagcaagattcagctttaatgtcagtaacagcaagatt

SEQ ID NO: 120083 - DNA, 78 bp, Homo sapiens
accattatcaagaggggcatcccatgtcaagtagcaagattcagctttaatgtcagtaacagcaagatttcttggtgg

SEQ ID NO: 120084 - DNA, 77 bp, Homo sapiens
aagaggggcatcccatgtcaagtagcaagattcagctttaatgtcagtaacagcaagatttcttggtggggatgggc

SEQ ID NO: 120085 - DNA, 77 bp, Homo sapiens
catgtcaagtagcaagattcagctttaatgtcagtaacagcaagatttcttggtggggatgggcggtctggaaagga

SEQ ID NO: 120086 - DNA, 75 bp, Homo sapiens
aagtagcaagattcagctttaatgtcagtaacagcaagatttcttggtggggatgggcggtctggaaaggaatca

SEQ ID NO: 120087 - DNA, 75 bp, Homo sapiens
attcagctttaatgtcagtaacagcaagatttcttggtggggatgggcggtctggaaaggaatcaacagagaata

SEQ ID NO: 120088 - DNA, 77 bp, Homo sapiens
taatgtcagtaacagcaagatttcttggtggggatgggcggtctggaaaggaatcaacagagaatattgagaaggca

SEQ ID NO: 120089 - DNA, 75 bp, Homo sapiens
acactggatgcctttttgatgtaagaaagcaagtcacttaccatatacttcaacgtgaacatttcggaacactga

SEQ ID NO: 120090 - DNA, 74 bp, Homo sapiens
aaagcaagtcacttaccatatacttcaacgtgaacatttcggaacactgagccaaggcgattggaagcagtaac

SEQ ID NO: 120091 - DNA, 75 bp, Homo sapiens
agtcacttaccatatacttcaacgtgaacatttcggaacactgagccaaggcgattggaagcagtaactgtgtaa

SEQ ID NO: 120092 - DNA, 75 bp, Homo sapiens
atatacttcaacgtgaacatttcggaacactgagccaaggcgattggaagcagtaactgtgtaagtgcctttgtc

SEQ ID NO: 120093 - DNA, 72 bp, Homo sapiens
aacgtgaacatttcggaacactgagccaaggcgattggaagcagtaactgtgtaagtgcctttgtcctcccg

SEQ ID NO: 120094 - DNA, 71 bp, Homo sapiens
atttcggaacactgagccaaggcgattggaagcagtaactgtgtaagtgcctttgtcctcccggaccgctt

SEQ ID NO: 120095 - DNA, 73 bp, Homo sapiens
actgagccaaggcgattggaagcagtaactgtgtaagtgcctttgtcctcccggaccgctttgggaatgctaa

SEQ ID NO: 120096 - DNA, 71 bp, Homo sapiens
cgattggaagcagtaactgtgtaagtgcctttgtcctcccggaccgctttgggaatgctaagctcagtttt

SEQ ID NO: 120097 - DNA, 71 bp, Homo sapiens
agtaactgtgtaagtgcctttgtcctcccggaccgctttgggaatgctaagctcagtttttgcctcacttc

SEQ ID NO: 120098 - DNA, 71 bp, Homo sapiens
taagtgcctttgtcctcccggaccgctttgggaatgctaagctcagtttttgcctcacttcgggatacctc

SEQ ID NO: 120099 - DNA, 70 bp, Homo sapiens
tttgtcctcccggaccgctttgggaatgctaagctcagtttttgcctcacttcgggatacctcttccttg

SEQ ID NO: 120100 - DNA, 75 bp, Homo sapiens
accgctttgggaatgctaagctcagtttttgcctcacttcgggatacctcttccttggttatctgaagtgcatca

SEQ ID NO: 120101 - DNA, 73 bp, Homo sapiens
aatgctaagctcagtttttgcctcacttcgggatacctcttccttggttatctgaagtgcatcagtgggtttt

SEQ ID NO: 120102 - DNA, 73 bp, Homo sapiens
tcagtttttgcctcacttcgggatacctcttccttggttatctgaagtgcatcagtgggtttttcaattacag

SEQ ID NO: 120103 - DNA, 73 bp, Homo sapiens
ttttgcctcacttcgggatacctcttccttggttatctgaagtgcatcagtgggtttttcaattacagtttca

SEQ ID NO: 120104 - DNA, 71 bp, Homo sapiens
cttcgggatacctcttccttggttatctgaagtgcatcagtgggtttttcaattacagtttcatttttgga

SEQ ID NO: 120105 - DNA, 73 bp, Homo sapiens
tcttccttggttatctgaagtgcatcagtgggtttttcaattacagtttcatttttggaccattcaatcttag

SEQ ID NO: 120106 - DNA, 74 bp, Homo sapiens
ggttatctgaagtgcatcagtgggtttttcaattacagtttcatttttggaccattcaatcttaggcattggaa

SEQ ID NO: 120107 - DNA, 76 bp, Homo sapiens
atcagtgggtttttcaattacagtttcatttttggaccattcaatcttaggcattggaaggcctgtcacatctgca

SEQ ID NO: 120108 - DNA, 77 bp, Homo sapiens
tttttcaattacagtttcatttttggaccattcaatcttaggcattggaaggcctgtcacatctgcagggatgtgga

SEQ ID NO: 120109 - DNA, 78 bp, Homo sapiens
aattacagtttcatttttggaccattcaatcttaggcattggaaggcctgtcacatctgcagggatgtggacaggctc

SEQ ID NO: 120110 - DNA, 78 bp, Homo sapiens
atttttggaccattcaatcttaggcattggaaggcctgtcacatctgcagggatgtggacaggctctcctgccttaac

SEQ ID NO: 120111 - DNA, 81 bp, Homo sapiens
attcaatcttaggcattggaaggcctgtcacatctgcagggatgtggacaggctctcctgccttaactttgatagtgtctc

SEQ ID NO: 120112 - DNA, 81 bp, Homo sapiens
ttaggcattggaaggcctgtcacatctgcagggatgtggacaggctctcctgccttaactttgatagtgtctcctcgaaca

SEQ ID NO: 120113 - DNA, 82 bp, Homo sapiens
gcctgtcacatctgcagggatgtggacaggctctcctgccttaactttgatagtgtctcctcgaacactcagacgcaactta

SEQ ID NO: 120114 - DNA, 77 bp, Homo sapiens
atgtggacaggctctcctgccttaactttgatagtgtctcctcgaacactcagacgcaacttaatagttggaggcac

SEQ ID NO: 120115 - DNA, 77 bp, Homo sapiens
ctctcctgccttaactttgatagtgtctcctcgaacactcagacgcaacttaatagttggaggcactgcaaagagaa

SEQ ID NO: 120116 - DNA, 76 bp, Homo sapiens
tttgatagtgtctcctcgaacactcagacgcaacttaatagttggaggcactgcaaagagaagagaaagaaaaaca

SEQ ID NO: 120117 - DNA, 79 bp, Homo sapiens
gcacactgtaaaatgcattaaaattattattatattcagattccgcaccttcatcatcttgtatgactacattaagagg

SEQ ID NO: 120118 - DNA, 77 bp, Homo sapiens
atgcattaaaattattattatattcagattccgcaccttcatcatcttgtatgactacattaagaggtagggatggt

SEQ ID NO: 120119 - DNA, 77 bp, Homo sapiens
attattattatattcagattccgcaccttcatcatcttgtatgactacattaagaggtagggatggttcactttcac

SEQ ID NO: 120120 - DNA, 76 bp, Homo sapiens
attatattcagattccgcaccttcatcatcttgtatgactacattaagaggtagggatggttcactttcaccaatt

SEQ ID NO: 120121 - DNA, 77 bp, Homo sapiens
attccgcaccttcatcatcttgtatgactacattaagaggtagggatggttcactttcaccaatttcattgacagct

SEQ ID NO: 120122 - DNA, 78 bp, Homo sapiens
ttcatcatcttgtatgactacattaagaggtagggatggttcactttcaccaatttcattgacagctttgacacggaa

SEQ ID NO: 120123 - DNA, 76 bp, Homo sapiens
tatgactacattaagaggtagggatggttcactttcaccaatttcattgacagctttgacacggaactcatacatt

SEQ ID NO: 120124 - DNA, 73 bp, Homo sapiens
attaagaggtagggatggttcactttcaccaatttcattgacagctttgacacggaactcatacatttggtgt

SEQ ID NO: 120125 - DNA, 76 bp, Homo sapiens
tagggatggttcactttcaccaatttcattgacagctttgacacggaactcatacatttggtgttcatcaagattt

SEQ ID NO: 120126 - DNA, 75 bp, Homo sapiens
actttcaccaatttcattgacagctttgacacggaactcatacatttggtgttcatcaagattttcaaccagaaa

SEQ ID NO: 120127 - DNA, 75 bp, Homo sapiens
aatttcattgacagctttgacacggaactcatacatttggtgttcatcaagattttcaaccagaaaagatgtggt

SEQ ID NO: 120128 - DNA, 77 bp, Homo sapiens
ttgacagctttgacacggaactcatacatttggtgttcatcaagattttcaaccagaaaagatgtggttgggcagag

SEQ ID NO: 120129 - DNA, 74 bp, Homo sapiens
acggaactcatacatttggtgttcatcaagattttcaaccagaaaagatgtggttgggcagagtcgcttgttaa

SEQ ID NO: 120130 - DNA, 74 bp, Homo sapiens
atacatttggtgttcatcaagattttcaaccagaaaagatgtggttgggcagagtcgcttgttaactctttcaa

SEQ ID NO: 120131 - DNA, 73 bp, Homo sapiens
tgttcatcaagattttcaaccagaaaagatgtggttgggcagagtcgcttgttaactctttcaaagtcaggtt

SEQ ID NO: 120132 - DNA, 73 bp, Homo sapiens
aagattttcaaccagaaaagatgtggttgggcagagtcgcttgttaactctttcaaagtcaggtttgtcatga

SEQ ID NO: 120133 - DNA, 72 bp, Homo sapiens
gaaaagatgtggttgggcagagtcgcttgttaactctttcaaagtcaggtttgtcatgacgccgtttttcaa

SEQ ID NO: 120134 - DNA, 75 bp, Homo sapiens
atgtggttgggcagagtcgcttgttaactctttcaaagtcaggtttgtcatgacgccgtttttcaatgatatatc

SEQ ID NO: 120135 - DNA, 74 bp, Homo sapiens
agagtcgcttgttaactctttcaaagtcaggtttgtcatgacgccgtttttcaatgatatatccttggatggga

SEQ ID NO: 120136 - DNA, 75 bp, Homo sapiens
ttaactctttcaaagtcaggtttgtcatgacgccgtttttcaatgatatatccttggatgggactgccaccatta

SEQ ID NO: 120137 - DNA, 75 bp, Homo sapiens
tttcaaagtcaggtttgtcatgacgccgtttttcaatgatatatccttggatgggactgccaccattactgcggg

SEQ ID NO: 120138 - DNA, 77 bp, Homo sapiens
tttgtcatgacgccgtttttcaatgatatatccttggatgggactgccaccattactgcggggctctttccagtcaa

SEQ ID NO: 120139 - DNA, 77 bp, Homo sapiens
ttttcaatgatatatccttggatgggactgccaccattactgcggggctctttccagtcaagtgtgatagtggactt

SEQ ID NO: 120140 - DNA, 77 bp, Homo sapiens
tatatccttggatgggactgccaccattactgcggggctctttccagtcaagtgtgatagtggactttgtcctttca

SEQ ID NO: 120141 - DNA, 78 bp, Homo sapiens
atgggactgccaccattactgcggggctctttccagtcaagtgtgatagtggactttgtcctttcagtgtatgtgagc

SEQ ID NO: 120142 - DNA, 78 bp, Homo sapiens
attactgcggggctctttccagtcaagtgtgatagtggactttgtcctttcagtgtatgtgagcctctctggagatgt

SEQ ID NO: 120143 - DNA, 78 bp, Homo sapiens
tttccagtcaagtgtgatagtggactttgtcctttcagtgtatgtgagcctctctggagatgttggaggacctttagc

SEQ ID NO: 120144 - DNA, 79 bp, Homo sapiens
tgatagtggactttgtcctttcagtgtatgtgagcctctctggagatgttggaggacctttagccagaggcaagtgaaa

SEQ ID NO: 120145 - DNA, 77 bp, Homo sapiens
actttgtcctttcagtgtatgtgagcctctctggagatgttggaggacctttagccagaggcaagtgaaaatgatta

SEQ ID NO: 120146 - DNA, 73 bp, Homo sapiens
gaagcaaaacattactctataaacacaatgaaaccttctcttttacctagtggatcaactgcaagaattggtc

SEQ ID NO: 120147 - DNA, 73 bp, Homo sapiens
cattactctataaacacaatgaaaccttctcttttacctagtggatcaactgcaagaattggtcctatttcaa

SEQ ID NO: 120148 - DNA, 71 bp, Homo sapiens
ataaacacaatgaaaccttctcttttacctagtggatcaactgcaagaattggtcctatttcaacaggagg

SEQ ID NO: 120149 - DNA, 71 bp, Homo sapiens
aaaccttctcttttacctagtggatcaactgcaagaattggtcctatttcaacaggagggccacagccaaa

SEQ ID NO: 120150 - DNA, 73 bp, Homo sapiens
tctcttttacctagtggatcaactgcaagaattggtcctatttcaacaggagggccacagccaaacttgttct

SEQ ID NO: 120151 - DNA, 75 bp, Homo sapiens
cctagtggatcaactgcaagaattggtcctatttcaacaggagggccacagccaaacttgttcttggcaataaca

SEQ ID NO: 120152 - DNA, 73 bp, Homo sapiens
tgcaagaattggtcctatttcaacaggagggccacagccaaacttgttcttggcaataacacggaacttatat

SEQ ID NO: 120153 - DNA, 70 bp, Homo sapiens
aattggtcctatttcaacaggagggccacagccaaacttgttcttggcaataacacggaacttatattct

SEQ ID NO: 120154 - DNA, 73 bp, Homo sapiens
atttcaacaggagggccacagccaaacttgttcttggcaataacacggaacttatattcttgtccctcaagca

SEQ ID NO: 120155 - DNA, 76 bp, Homo sapiens
ccacagccaaacttgttcttggcaataacacggaacttatattcttgtccctcaagcagacctgtgatgtcacatt

SEQ ID NO: 120156 - DNA, 76 bp, Homo sapiens
aaacttgttcttggcaataacacggaacttatattcttgtccctcaagcagacctgtgatgtcacatttagatctc

SEQ ID NO: 120157 - DNA, 80 bp, Homo sapiens
ttcttggcaataacacggaacttatattcttgtccctcaagcagacctgtgatgtcacatttagatctctcagtctctat

SEQ ID NO: 120158 - DNA, 80 bp, Homo sapiens
taacacggaacttatattcttgtccctcaagcagacctgtgatgtcacatttagatctctcagtctctattggttgtctc

SEQ ID NO: 120159 - DNA, 84 bp, Homo sapiens
ttatattcttgtccctcaagcagacctgtgatgtcacatttagatctctcagtctctattggttgtctccaagtatgcatcttg

SEQ ID NO: 120160 - DNA, 83 bp, Homo sapiens
cctcaagcagacctgtgatgtcacatttagatctctcagtctctattggttgtctccaagtatgcatcttggcatcttttctt

SEQ ID NO: 120161 - DNA, 83 bp, Homo sapiens
acctgtgatgtcacatttagatctctcagtctctattggttgtctccaagtatgcatcttggcatcttttctttcaatgataa

SEQ ID NO: 120162 - DNA, 82 bp, Homo sapiens
tcacatttagatctctcagtctctattggttgtctccaagtatgcatcttggcatcttttctttcaatgataaagcctgtta

SEQ ID NO: 120163 - DNA, 81 bp, Homo sapiens
ttagatctctcagtctctattggttgtctccaagtatgcatcttggcatcttttctttcaatgataaagcctgttatttca

SEQ ID NO: 120164 - DNA, 77 bp, Homo sapiens
agtctctattggttgtctccaagtatgcatcttggcatcttttctttcaatgataaagcctgttatttcacttcctc

SEQ ID NO: 120165 - DNA, 82 bp, Homo sapiens
ttgtctccaagtatgcatcttggcatcttttctttcaatgataaagcctgttatttcacttcctccatcatcttctggatca

SEQ ID NO: 120166 - DNA, 78 bp, Homo sapiens
ttggcatcttttctttcaatgataaagcctgttatttcacttcctccatcatcttctggatcagaccagttaagtaga

SEQ ID NO: 120167 - DNA, 76 bp, Homo sapiens
ttctttcaatgataaagcctgttatttcacttcctccatcatcttctggatcagaccagttaagtagacacatttt

SEQ ID NO: 120168 - DNA, 74 bp, Homo sapiens
ataaagcctgttatttcacttcctccatcatcttctggatcagaccagttaagtagacacatttttctgtttgt

SEQ ID NO: 120169 - DNA, 74 bp, Homo sapiens
tatttcacttcctccatcatcttctggatcagaccagttaagtagacacatttttctgtttgttacaacaggtt

SEQ ID NO: 120170 - DNA, 72 bp, Homo sapiens
acttcctccatcatcttctggatcagaccagttaagtagacacatttttctgtttgttacaacaggttttaa

SEQ ID NO: 120171 - DNA, 71 bp, Homo sapiens
atcttctggatcagaccagttaagtagacacatttttctgtttgttacaacaggttttaagtcaagaactg

SEQ ID NO: 120172 - DNA, 69 bp, Homo sapiens
atcagaccagttaagtagacacatttttctgtttgttacaacaggttttaagtcaagaactggaccagg

SEQ ID NO: 120173 - DNA, 70 bp, Homo sapiens
ttaagtagacacatttttctgtttgttacaacaggttttaagtcaagaactggaccagggacatctgaaa

SEQ ID NO: 120174 - DNA, 69 bp, Homo sapiens
cacatttttctgtttgttacaacaggttttaagtcaagaactggaccagggacatctgaaaacaaaaca

SEQ ID NO: 120175 - DNA, 68 bp, Homo sapiens
tgtttgttacaacaggttttaagtcaagaactggaccagggacatctgaaaacaaaacaaagccaaaa

SEQ ID NO: 120176 - DNA, 73 bp, Homo sapiens
agatagtatcacttgggaaaatcctgtgaaaatcagtgcaacattccttaccaaaaacttctaccctggctgc

SEQ ID NO: 120177 - DNA, 71 bp, Homo sapiens
acttgggaaaatcctgtgaaaatcagtgcaacattccttaccaaaaacttctaccctggctgctgcaaatt

SEQ ID NO: 120178 - DNA, 75 bp, Homo sapiens
tgtgaaaatcagtgcaacattccttaccaaaaacttctaccctggctgctgcaaatttggaaccacagctatttg

SEQ ID NO: 120179 - DNA, 74 bp, Homo sapiens
agtgcaacattccttaccaaaaacttctaccctggctgctgcaaatttggaaccacagctatttgtagctgtaa

SEQ ID NO: 120180 - DNA, 75 bp, Homo sapiens
attccttaccaaaaacttctaccctggctgctgcaaatttggaaccacagctatttgtagctgtaatcacatatc

SEQ ID NO: 120181 - DNA, 77 bp, Homo sapiens
aaaaacttctaccctggctgctgcaaatttggaaccacagctatttgtagctgtaatcacatatctgccatggtctt

SEQ ID NO: 120182 - DNA, 85 bp, Homo sapiens
ctggctgctgcaaatttggaaccacagctatttgtagctgtaatcacatatctgccatggtcttttcgcagtgcatccttgataa

SEQ ID NO: 120183 - DNA, 80 bp, Homo sapiens
caaatttggaaccacagctatttgtagctgtaatcacatatctgccatggtcttttcgcagtgcatccttgataattagt

SEQ ID NO: 120184 - DNA, 82 bp, Homo sapiens
ttggaaccacagctatttgtagctgtaatcacatatctgccatggtcttttcgcagtgcatccttgataattagttcagatt

SEQ ID NO: 120185 - DNA, 81 bp, Homo sapiens
agctatttgtagctgtaatcacatatctgccatggtcttttcgcagtgcatccttgataattagttcagatttggttccaa

SEQ ID NO: 120186 - DNA, 80 bp, Homo sapiens
taatcacatatctgccatggtcttttcgcagtgcatccttgataattagttcagatttggttccaacgttgtctattaca

SEQ ID NO: 120187 - DNA, 78 bp, Homo sapiens
acatatctgccatggtcttttcgcagtgcatccttgataattagttcagatttggttccaacgttgtctattacaaca

SEQ ID NO: 120188 - DNA, 74 bp, Homo sapiens
tcttttcgcagtgcatccttgataattagttcagatttggttccaacgttgtctattacaacacggtctttatc

SEQ ID NO: 120189 - DNA, 70 bp, Homo sapiens
cttgataattagttcagatttggttccaacgttgtctattacaacacggtctttatccagctccccttct

SEQ ID NO: 120190 - DNA, 69 bp, Homo sapiens
gttccaacgttgtctattacaacacggtctttatccagctccccttcttctttggtccatacttttgta

SEQ ID NO: 120191 - DNA, 69 bp, Homo sapiens
acgttgtctattacaacacggtctttatccagctccccttcttctttggtccatacttttgtaggtaca

SEQ ID NO: 120192 - DNA, 69 bp, Homo sapiens
ttacaacacggtctttatccagctccccttcttctttggtccatacttttgtaggtacagggcgaccag

SEQ ID NO: 120193 - DNA, 72 bp, Homo sapiens
tttatccagctccccttcttctttggtccatacttttgtaggtacagggcgaccagtcaccacagctggaat

SEQ ID NO: 120194 - DNA, 71 bp, Homo sapiens
cccttcttctttggtccatacttttgtaggtacagggcgaccagtcaccacagctggaattctaagagtct

SEQ ID NO: 120195 - DNA, 74 bp, Homo sapiens
tttggtccatacttttgtaggtacagggcgaccagtcaccacagctggaattctaagagtcttcccagccatta

SEQ ID NO: 120196 - DNA, 73 bp, Homo sapiens
atacttttgtaggtacagggcgaccagtcaccacagctggaattctaagagtcttcccagccattatttgtat

SEQ ID NO: 120197 - DNA, 76 bp, Homo sapiens
tacagggcgaccagtcaccacagctggaattctaagagtcttcccagccattatttgtattccacccttgacagaa

SEQ ID NO: 120198 - DNA, 75 bp, Homo sapiens
accagtcaccacagctggaattctaagagtcttcccagccattatttgtattccacccttgacagaaacatccag

SEQ ID NO: 120199 - DNA, 75 bp, Homo sapiens
accacagctggaattctaagagtcttcccagccattatttgtattccacccttgacagaaacatccagttccaca

SEQ ID NO: 120200 - DNA, 75 bp, Homo sapiens
aattctaagagtcttcccagccattatttgtattccacccttgacagaaacatccagttccacagctggaggctc

SEQ ID NO: 120201 - DNA, 77 bp, Homo sapiens
tcttcccagccattatttgtattccacccttgacagaaacatccagttccacagctggaggctctgttgaaagagaa

SEQ ID NO: 120202 - DNA, 79 bp, Homo sapiens
attatttgtattccacccttgacagaaacatccagttccacagctggaggctctgttgaaagagaacagtcatgcatta

SEQ ID NO: 120203 - DNA, 81 bp, Homo sapiens
tattccacccttgacagaaacatccagttccacagctggaggctctgttgaaagagaacagtcatgcattagcccatgaaa

SEQ ID NO: 120204 - DNA, 71 bp, Homo sapiens
catatagagaaaatatccataattttattccaataacgttaagtaccttgtggttcagccacagtaacagg

SEQ ID NO: 120205 - DNA, 70 bp, Homo sapiens
gagaaaatatccataattttattccaataacgttaagtaccttgtggttcagccacagtaacaggttgtg

SEQ ID NO: 120206 - DNA, 70 bp, Homo sapiens
tccataattttattccaataacgttaagtaccttgtggttcagccacagtaacaggttgtgtttctccag

SEQ ID NO: 120207 - DNA, 70 bp, Homo sapiens
tattccaataacgttaagtaccttgtggttcagccacagtaacaggttgtgtttctccaggcggtccttc

SEQ ID NO: 120208 - DNA, 73 bp, Homo sapiens
ttaagtaccttgtggttcagccacagtaacaggttgtgtttctccaggcggtccttcccctgcggcattgaca

SEQ ID NO: 120209 - DNA, 76 bp, Homo sapiens
tgtggttcagccacagtaacaggttgtgtttctccaggcggtccttcccctgcggcattgacagcactcacccgaa

SEQ ID NO: 120210 - DNA, 72 bp, Homo sapiens
acagtaacaggttgtgtttctccaggcggtccttcccctgcggcattgacagcactcacccgaagtttgtaa

SEQ ID NO: 120211 - DNA, 74 bp, Homo sapiens
aacaggttgtgtttctccaggcggtccttcccctgcggcattgacagcactcacccgaagtttgtaatcagcac

SEQ ID NO: 120212 - DNA, 74 bp, Homo sapiens
tccaggcggtccttcccctgcggcattgacagcactcacccgaagtttgtaatcagcaccctctcggatttctt

SEQ ID NO: 120213 - DNA, 74 bp, Homo sapiens
cggcattgacagcactcacccgaagtttgtaatcagcaccctctcggatttctttgacggtgtactgacggacc

SEQ ID NO: 120214 - DNA, 73 bp, Homo sapiens
acccgaagtttgtaatcagcaccctctcggatttctttgacggtgtactgacggaccttgatcatcttctctg

SEQ ID NO: 120215 - DNA, 80 bp, Homo sapiens
taatcagcaccctctcggatttctttgacggtgtactgacggaccttgatcatcttctctgtgcagcgtgaccattcatt

SEQ ID NO: 120216 - DNA, 79 bp, Homo sapiens
accctctcggatttctttgacggtgtactgacggaccttgatcatcttctctgtgcagcgtgaccattcatttgtgcca

SEQ ID NO: 120217 - DNA, 80 bp, Homo sapiens
tttctttgacggtgtactgacggaccttgatcatcttctctgtgcagcgtgaccattcatttgtgccaaccaactgctta

SEQ ID NO: 120218 - DNA, 81 bp, Homo sapiens
ggtgtactgacggaccttgatcatcttctctgtgcagcgtgaccattcatttgtgccaaccaactgcttatcaacaaaata

SEQ ID NO: 120219 - DNA, 81 bp, Homo sapiens
gaccttgatcatcttctctgtgcagcgtgaccattcatttgtgccaaccaactgcttatcaacaaaatagccaacaatttc

SEQ ID NO: 120220 - DNA, 78 bp, Homo sapiens
atcttctctgtgcagcgtgaccattcatttgtgccaaccaactgcttatcaacaaaatagccaacaatttccccacca

SEQ ID NO: 120221 - DNA, 77 bp, Homo sapiens
tgcagcgtgaccattcatttgtgccaaccaactgcttatcaacaaaatagccaacaatttccccaccaccattgaaa

SEQ ID NO: 120222 - DNA, 70 bp, Homo sapiens
atttgtgccaaccaactgcttatcaacaaaatagccaacaatttccccaccaccattgaaagctgggggt

SEQ ID NO: 120223 - DNA, 69 bp, Homo sapiens
aactgcttatcaacaaaatagccaacaatttccccaccaccattgaaagctgggggttcccattctagt

SEQ ID NO: 120224 - DNA, 70 bp, Homo sapiens
tatcaacaaaatagccaacaatttccccaccaccattgaaagctgggggttcccattctagttcaatagt

SEQ ID NO: 120225 - DNA, 70 bp, Homo sapiens
aatagccaacaatttccccaccaccattgaaagctgggggttcccattctagttcaatagttgtagagct

SEQ ID NO: 120226 - DNA, 74 bp, Homo sapiens
accattgaaagctgggggttcccattctagttcaatagttgtagagcttgtgtcagtgactcttgggataggtg

SEQ ID NO: 120227 - DNA, 74 bp, Homo sapiens
aagctgggggttcccattctagttcaatagttgtagagcttgtgtcagtgactcttgggataggtggcccagga

SEQ ID NO: 120228 - DNA, 79 bp, Homo sapiens
attctagttcaatagttgtagagcttgtgtcagtgactcttgggataggtggcccaggaggagctagaatgaatgaaga

SEQ ID NO: 120229 - DNA, 80 bp, Homo sapiens
ttcaatagttgtagagcttgtgtcagtgactcttgggataggtggcccaggaggagctagaatgaatgaagatagacaaa

SEQ ID NO: 120230 - DNA, 80 bp, Homo sapiens
ttgtagagcttgtgtcagtgactcttgggataggtggcccaggaggagctagaatgaatgaagatagacaaatcaaactc

SEQ ID NO: 120231 - DNA, 75 bp, Homo sapiens
tagcttgttctactccaccttcttcttaaggaactacttacagattggatcatgtgctgttttgggatctgaagg

SEQ ID NO: 120232 - DNA, 74 bp, Homo sapiens
caccttcttcttaaggaactacttacagattggatcatgtgctgttttgggatctgaaggtggactgaactttc

SEQ ID NO: 120233 - DNA, 75 bp, Homo sapiens
ttcttaaggaactacttacagattggatcatgtgctgttttgggatctgaaggtggactgaactttccaggtcca

SEQ ID NO: 120234 - DNA, 78 bp, Homo sapiens
aactacttacagattggatcatgtgctgttttgggatctgaaggtggactgaactttccaggtccagctgcattttca

SEQ ID NO: 120235 - DNA, 82 bp, Homo sapiens
agattggatcatgtgctgttttgggatctgaaggtggactgaactttccaggtccagctgcattttcagcacatactctgaa

SEQ ID NO: 120236 - DNA, 80 bp, Homo sapiens
atgtgctgttttgggatctgaaggtggactgaactttccaggtccagctgcattttcagcacatactctgaagacatagg

SEQ ID NO: 120237 - DNA, 81 bp, Homo sapiens
gatctgaaggtggactgaactttccaggtccagctgcattttcagcacatactctgaagacataggtgagtccttctaata

SEQ ID NO: 120238 - DNA, 78 bp, Homo sapiens
aaggtggactgaactttccaggtccagctgcattttcagcacatactctgaagacataggtgagtccttctaataagc

SEQ ID NO: 120239 - DNA, 82 bp, Homo sapiens
tttccaggtccagctgcattttcagcacatactctgaagacataggtgagtccttctaataagccatctacattggctttca

SEQ ID NO: 120240 - DNA, 84 bp, Homo sapiens
cagctgcattttcagcacatactctgaagacataggtgagtccttctaataagccatctacattggctttcaaggcattcagaa

SEQ ID NO: 120241 - DNA, 80 bp, Homo sapiens
tttcagcacatactctgaagacataggtgagtccttctaataagccatctacattggctttcaaggcattcagaaggctt

SEQ ID NO: 120242 - DNA, 77 bp, Homo sapiens
acatactctgaagacataggtgagtccttctaataagccatctacattggctttcaaggcattcagaaggcttttgt

SEQ ID NO: 120243 - DNA, 77 bp, Homo sapiens
tccttctaataagccatctacattggctttcaaggcattcagaaggcttttgttgacacgagaccaatgtgtactgt

SEQ ID NO: 120244 - DNA, 76 bp, Homo sapiens
taataagccatctacattggctttcaaggcattcagaaggcttttgttgacacgagaccaatgtgtactgttaact

SEQ ID NO: 120245 - DNA, 73 bp, Homo sapiens
tacattggctttcaaggcattcagaaggcttttgttgacacgagaccaatgtgtactgttaacttcacgtttt

SEQ ID NO: 120246 - DNA, 74 bp, Homo sapiens
ttcaaggcattcagaaggcttttgttgacacgagaccaatgtgtactgttaacttcacgtttttcaagccagta

SEQ ID NO: 120247 - DNA, 69 bp, Homo sapiens
agaaggcttttgttgacacgagaccaatgtgtactgttaacttcacgtttttcaagccagtaacccaaa

SEQ ID NO: 120248 - DNA, 68 bp, Homo sapiens
cttttgttgacacgagaccaatgtgtactgttaacttcacgtttttcaagccagtaacccaaaatggg

SEQ ID NO: 120249 - DNA, 68 bp, Homo sapiens
agaccaatgtgtactgttaacttcacgtttttcaagccagtaacccaaaatggggcttccattatctt

SEQ ID NO: 120250 - DNA, 67 bp, Homo sapiens
aatgtgtactgttaacttcacgtttttcaagccagtaacccaaaatggggcttccattatcttttgg

SEQ ID NO: 120251 - DNA, 67 bp, Homo sapiens
ttaacttcacgtttttcaagccagtaacccaaaatggggcttccattatcttttggttcattccatt

SEQ ID NO: 120252 - DNA, 71 bp, Homo sapiens
tttttcaagccagtaacccaaaatggggcttccattatcttttggttcattccatttcactagcatactgt

SEQ ID NO: 120253 - DNA, 74 bp, Homo sapiens
taacccaaaatggggcttccattatcttttggttcattccatttcactagcatactgttgctggtaacatcttc

SEQ ID NO: 120254 - DNA, 75 bp, Homo sapiens
aaaatggggcttccattatcttttggttcattccatttcactagcatactgttgctggtaacatcttccacaatg

SEQ ID NO: 120255 - DNA, 80 bp, Homo sapiens
attatcttttggttcattccatttcactagcatactgttgctggtaacatcttccacaatgggcttatctggtgcatcag

SEQ ID NO: 120256 - DNA, 80 bp, Homo sapiens
ttccatttcactagcatactgttgctggtaacatcttccacaatgggcttatctggtgcatcaggtggtcctgataaaaa

SEQ ID NO: 120257 - DNA, 78 bp, Homo sapiens
actagcatactgttgctggtaacatcttccacaatgggcttatctggtgcatcaggtggtcctgataaaaaaataaca

SEQ ID NO: 120258 - DNA, 73 bp, Homo sapiens
aacatcttccacaatgggcttatctggtgcatcaggtggtcctgataaaaaaataacatttgaagtaaatttc

SEQ ID NO: 120259 - DNA, 68 bp, Homo sapiens
aagtacatggtaaaaaggcaaactttagatgccaaaggaaacttaccaaatggatctttagccacaag

SEQ ID NO: 120260 - DNA, 69 bp, Homo sapiens
taaaaaggcaaactttagatgccaaaggaaacttaccaaatggatctttagccacaagtggctttgaaa

SEQ ID NO: 120261 - DNA, 71 bp, Homo sapiens
aaactttagatgccaaaggaaacttaccaaatggatctttagccacaagtggctttgaaacacatggtgga

SEQ ID NO: 120262 - DNA, 72 bp, Homo sapiens
tgccaaaggaaacttaccaaatggatctttagccacaagtggctttgaaacacatggtggacctggcccaaa

SEQ ID NO: 120263 - DNA, 70 bp, Homo sapiens
aaacttaccaaatggatctttagccacaagtggctttgaaacacatggtggacctggcccaaatctgttt

SEQ ID NO: 120264 - DNA, 74 bp, Homo sapiens
aaatggatctttagccacaagtggctttgaaacacatggtggacctggcccaaatctgttttcagctcttacac

SEQ ID NO: 120265 - DNA, 74 bp, Homo sapiens
ttagccacaagtggctttgaaacacatggtggacctggcccaaatctgttttcagctcttacacggaagaggta

SEQ ID NO: 120266 - DNA, 71 bp, Homo sapiens
gctttgaaacacatggtggacctggcccaaatctgttttcagctcttacacggaagaggtactcttttcct

SEQ ID NO: 120267 - DNA, 72 bp, Homo sapiens
aaacacatggtggacctggcccaaatctgttttcagctcttacacggaagaggtactcttttccttcaatca

SEQ ID NO: 120268 - DNA, 70 bp, Homo sapiens
ccaaatctgttttcagctcttacacggaagaggtactcttttccttcaatcagttttgttactgaatatt

SEQ ID NO: 120269 - DNA, 73 bp, Homo sapiens
tttcagctcttacacggaagaggtactcttttccttcaatcagttttgttactgaatatttgcaatgtctaag

SEQ ID NO: 120270 - DNA, 72 bp, Homo sapiens
ttacacggaagaggtactcttttccttcaatcagttttgttactgaatatttgcaatgtctaagtgttgaag

SEQ ID NO: 120271 - DNA, 75 bp, Homo sapiens
gaggtactcttttccttcaatcagttttgttactgaatatttgcaatgtctaagtgttgaagtgacaacaatcca

SEQ ID NO: 120272 - DNA, 75 bp, Homo sapiens
ttcaatcagttttgttactgaatatttgcaatgtctaagtgttgaagtgacaacaatccattctgagtcgggttt

SEQ ID NO: 120273 - DNA, 73 bp, Homo sapiens
agttttgttactgaatatttgcaatgtctaagtgttgaagtgacaacaatccattctgagtcgggttttgtct

SEQ ID NO: 120274 - DNA, 72 bp, Homo sapiens
atgtctaagtgttgaagtgacaacaatccattctgagtcgggttttgtcttgtctttcttttccaaagtgta

SEQ ID NO: 120275 - DNA, 72 bp, Homo sapiens
tgttgaagtgacaacaatccattctgagtcgggttttgtcttgtctttcttttccaaagtgtagtttatgat

SEQ ID NO: 120276 - DNA, 71 bp, Homo sapiens
agtgacaacaatccattctgagtcgggttttgtcttgtctttcttttccaaagtgtagtttatgatttcac

SEQ ID NO: 120277 - DNA, 73 bp, Homo sapiens
attctgagtcgggttttgtcttgtctttcttttccaaagtgtagtttatgatttcactgccaccatcatcaag

SEQ ID NO: 120278 - DNA, 71 bp, Homo sapiens
ggttttgtcttgtctttcttttccaaagtgtagtttatgatttcactgccaccatcatcaaggggtggttc

SEQ ID NO: 120279 - DNA, 72 bp, Homo sapiens
tgtctttcttttccaaagtgtagtttatgatttcactgccaccatcatcaaggggtggttcccatttacaaa

SEQ ID NO: 120280 - DNA, 72 bp, Homo sapiens
ttttccaaagtgtagtttatgatttcactgccaccatcatcaaggggtggttcccatttacaaaggactgag

SEQ ID NO: 120281 - DNA, 75 bp, Homo sapiens
tagtttatgatttcactgccaccatcatcaaggggtggttcccatttacaaaggactgaggtctttctgatatct

SEQ ID NO: 120282 - DNA, 77 bp, Homo sapiens
tatgatttcactgccaccatcatcaaggggtggttcccatttacaaaggactgaggtctttctgatatcttcaaata

SEQ ID NO: 120283 - DNA, 72 bp, Homo sapiens
accatcatcaaggggtggttcccatttacaaaggactgaggtctttctgatatcttcaaatacaaagttgat

SEQ ID NO: 120284 - DNA, 71 bp, Homo sapiens
atcaaggggtggttcccatttacaaaggactgaggtctttctgatatcttcaaatacaaagttgattggtg

SEQ ID NO: 120285 - DNA, 72 bp, Homo sapiens
ttacaaaggactgaggtctttctgatatcttcaaatacaaagttgattggtggtcccggtgtatctaatatt

SEQ ID NO: 120286 - DNA, 74 bp, Homo sapiens
gtctttctgatatcttcaaatacaaagttgattggtggtcccggtgtatctaatatttcagaagagaacagtaa

SEQ ID NO: 120287 - DNA, 74 bp, Homo sapiens
ctgatatcttcaaatacaaagttgattggtggtcccggtgtatctaatatttcagaagagaacagtaatcaaaa

SEQ ID NO: 120288 - DNA, 69 bp, Homo sapiens
ttactaaaacctttttccattggaaagtgtagttttaatgactcacctaacacactgacagtacaagga

SEQ ID NO: 120289 - DNA, 68 bp, Homo sapiens
aaacctttttccattggaaagtgtagttttaatgactcacctaacacactgacagtacaaggagcttt

SEQ ID NO: 120290 - DNA, 73 bp, Homo sapiens
tggaaagtgtagttttaatgactcacctaacacactgacagtacaaggagcttttgcaataccgtggtcattt

SEQ ID NO: 120291 - DNA, 77 bp, Homo sapiens
actcacctaacacactgacagtacaaggagcttttgcaataccgtggtcattttcaactttgatcatatacagacca

SEQ ID NO: 120292 - DNA, 78 bp, Homo sapiens
ctaacacactgacagtacaaggagcttttgcaataccgtggtcattttcaactttgatcatatacagaccatggtcag

SEQ ID NO: 120293 - DNA, 76 bp, Homo sapiens
agtacaaggagcttttgcaataccgtggtcattttcaactttgatcatatacagaccatggtcaggtcggagagaa

SEQ ID NO: 120294 - DNA, 77 bp, Homo sapiens
aggagcttttgcaataccgtggtcattttcaactttgatcatatacagaccatggtcaggtcggagagaatctcgga

SEQ ID NO: 120295 - DNA, 78 bp, Homo sapiens
ataccgtggtcattttcaactttgatcatatacagaccatggtcaggtcggagagaatctcggacgcgtagctgagat

SEQ ID NO: 120296 - DNA, 77 bp, Homo sapiens
aactttgatcatatacagaccatggtcaggtcggagagaatctcggacgcgtagctgagattctccctttttgctgt

SEQ ID NO: 120297 - DNA, 79 bp, Homo sapiens
atatacagaccatggtcaggtcggagagaatctcggacgcgtagctgagattctccctttttgctgttgtcaatactca

SEQ ID NO: 120298 - DNA, 77 bp, Homo sapiens
atggtcaggtcggagagaatctcggacgcgtagctgagattctccctttttgctgttgtcaatactcaaacgctgtg

SEQ ID NO: 120299 - DNA, 79 bp, Homo sapiens
agagaatctcggacgcgtagctgagattctccctttttgctgttgtcaatactcaaacgctgtgtcagaggcaggacaa

SEQ ID NO: 120300 - DNA, 78 bp, Homo sapiens
gacgcgtagctgagattctccctttttgctgttgtcaatactcaaacgctgtgtcagaggcaggacaaatggttcttc

SEQ ID NO: 120301 - DNA, 77 bp, Homo sapiens
ctgagattctccctttttgctgttgtcaatactcaaacgctgtgtcagaggcaggacaaatggttcttcttcttgaa

SEQ ID NO: 120302 - DNA, 76 bp, Homo sapiens
ttctccctttttgctgttgtcaatactcaaacgctgtgtcagaggcaggacaaatggttcttcttcttgaacttca

SEQ ID NO: 120303 - DNA, 76 bp, Homo sapiens
ttgctgttgtcaatactcaaacgctgtgtcagaggcaggacaaatggttcttcttcttgaacttcacccttccttc

SEQ ID NO: 120304 - DNA, 72 bp, Homo sapiens
aatactcaaacgctgtgtcagaggcaggacaaatggttcttcttcttgaacttcacccttccttctcctaac

SEQ ID NO: 120305 - DNA, 72 bp, Homo sapiens
acgctgtgtcagaggcaggacaaatggttcttcttcttgaacttcacccttccttctcctaaccaagggtgc

SEQ ID NO: 120306 - DNA, 71 bp, Homo sapiens
caggacaaatggttcttcttcttgaacttcacccttccttctcctaaccaagggtgctgcacgcttcttaa

SEQ ID NO: 120307 - DNA, 69 bp, Homo sapiens
aaatggttcttcttcttgaacttcacccttccttctcctaaccaagggtgctgcacgcttcttaatttc

SEQ ID NO: 120308 - DNA, 71 bp, Homo sapiens
ttcttgaacttcacccttccttctcctaaccaagggtgctgcacgcttcttaatttcctctggtacaataa

SEQ ID NO: 120309 - DNA, 69 bp, Homo sapiens
acttcacccttccttctcctaaccaagggtgctgcacgcttcttaatttcctctggtacaataacattt

SEQ ID NO: 120310 - DNA, 74 bp, Homo sapiens
ttctcctaaccaagggtgctgcacgcttcttaatttcctctggtacaataacattttcatcctttatccatgta

SEQ ID NO: 120311 - DNA, 72 bp, Homo sapiens
aaccaagggtgctgcacgcttcttaatttcctctggtacaataacattttcatcctttatccatgtaatagt

SEQ ID NO: 120312 - DNA, 71 bp, Homo sapiens
acgcttcttaatttcctctggtacaataacattttcatcctttatccatgtaatagttgggtaaggtgatc

SEQ ID NO: 120313 - DNA, 71 bp, Homo sapiens
aatttcctctggtacaataacattttcatcctttatccatgtaatagttgggtaaggtgatccagaaatac

SEQ ID NO: 120314 - DNA, 76 bp, Homo sapiens
gtacaataacattttcatcctttatccatgtaatagttgggtaaggtgatccagaaatacttgcatcaagtgctat

SEQ ID NO: 120315 - DNA, 78 bp, Homo sapiens
ataacattttcatcctttatccatgtaatagttgggtaaggtgatccagaaatacttgcatcaagtgctatttcatca

SEQ ID NO: 120316 - DNA, 77 bp, Homo sapiens
tttatccatgtaatagttgggtaaggtgatccagaaatacttgcatcaagtgctatttcatcacctcgtttcacttc

SEQ ID NO: 120317 - DNA, 76 bp, Homo sapiens
atgtaatagttgggtaaggtgatccagaaatacttgcatcaagtgctatttcatcacctcgtttcacttctaggct

SEQ ID NO: 120318 - DNA, 78 bp, Homo sapiens
ttgggtaaggtgatccagaaatacttgcatcaagtgctatttcatcacctcgtttcacttctaggcttgttctcagaa

SEQ ID NO: 120319 - DNA, 79 bp, Homo sapiens
gtgatccagaaatacttgcatcaagtgctatttcatcacctcgtttcacttctaggcttgttctcagaatgactttggg

SEQ ID NO: 120320 - DNA, 69 bp, Homo sapiens
atttatttcaaaatgggaaagtggcaactccatgaaacaaaacttaccaatgggatctacagctttggt

SEQ ID NO: 120321 - DNA, 70 bp, Homo sapiens
aaaatgggaaagtggcaactccatgaaacaaaacttaccaatgggatctacagctttggttggaggagta

SEQ ID NO: 120322 - DNA, 71 bp, Homo sapiens
aaagtggcaactccatgaaacaaaacttaccaatgggatctacagctttggttggaggagtagcccgagaa

SEQ ID NO: 120323 - DNA, 70 bp, Homo sapiens
atgaaacaaaacttaccaatgggatctacagctttggttggaggagtagcccgagaaggttcactaatac

SEQ ID NO: 120324 - DNA, 69 bp, Homo sapiens
acaaaacttaccaatgggatctacagctttggttggaggagtagcccgagaaggttcactaatacccgc

SEQ ID NO: 120325 - DNA, 74 bp, Homo sapiens
aatgggatctacagctttggttggaggagtagcccgagaaggttcactaatacccgcggcgttctctgctcgca

SEQ ID NO: 120326 - DNA, 72 bp, Homo sapiens
agctttggttggaggagtagcccgagaaggttcactaatacccgcggcgttctctgctcgcacacggaattg

SEQ ID NO: 120327 - DNA, 72 bp, Homo sapiens
ttggaggagtagcccgagaaggttcactaatacccgcggcgttctctgctcgcacacggaattggtactctt

SEQ ID NO: 120328 - DNA, 70 bp, Homo sapiens
gttcactaatacccgcggcgttctctgctcgcacacggaattggtactctttcccctcttcaagtccttt

SEQ ID NO: 120329 - DNA, 74 bp, Homo sapiens
gttctctgctcgcacacggaattggtactctttcccctcttcaagtccttttgctgtataggtcaggattggta

SEQ ID NO: 120330 - DNA, 69 bp, Homo sapiens
acacggaattggtactctttcccctcttcaagtccttttgctgtataggtcaggattggtaccaggtgt

SEQ ID NO: 120331 - DNA, 73 bp, Homo sapiens
aattggtactctttcccctcttcaagtccttttgctgtataggtcaggattggtaccaggtgttcattgcatc

SEQ ID NO: 120332 - DNA, 73 bp, Homo sapiens
tttcccctcttcaagtccttttgctgtataggtcaggattggtaccaggtgttcattgcatctcttccacctt

SEQ ID NO: 120333 - DNA, 73 bp, Homo sapiens
aagtccttttgctgtataggtcaggattggtaccaggtgttcattgcatctcttccacctttcttcaccctta

SEQ ID NO: 120334 - DNA, 76 bp, Homo sapiens
ttttgctgtataggtcaggattggtaccaggtgttcattgcatctcttccacctttcttcacccttagcaatcttc

SEQ ID NO: 120335 - DNA, 79 bp, Homo sapiens
tcaggattggtaccaggtgttcattgcatctcttccacctttcttcacccttagcaatcttctctatgatgtagcccat

SEQ ID NO: 120336 - DNA, 78 bp, Homo sapiens
ttggtaccaggtgttcattgcatctcttccacctttcttcacccttagcaatcttctctatgatgtagcccattatct

SEQ ID NO: 120337 - DNA, 83 bp, Homo sapiens
tcattgcatctcttccacctttcttcacccttagcaatcttctctatgatgtagcccattatcttgctccctccatcatacaa

SEQ ID NO: 120338 - DNA, 78 bp, Homo sapiens
atctcttccacctttcttcacccttagcaatcttctctatgatgtagcccattatcttgctccctccatcatacaaag

SEQ ID NO: 120339 - DNA, 81 bp, Homo sapiens
tcttcacccttagcaatcttctctatgatgtagcccattatcttgctccctccatcatacaaaggtggcttccatgtaata

SEQ ID NO: 120340 - DNA, 80 bp, Homo sapiens
acccttagcaatcttctctatgatgtagcccattatcttgctccctccatcatacaaaggtggcttccatgtaatagtca

SEQ ID NO: 120341 - DNA, 83 bp, Homo sapiens
tcttctctatgatgtagcccattatcttgctccctccatcatacaaaggtggcttccatgtaatagtcattgcctccgctgta

SEQ ID NO: 120342 - DNA, 81 bp, Homo sapiens
atgtagcccattatcttgctccctccatcatacaaaggtggcttccatgtaatagtcattgcctccgctgtaggattatga

SEQ ID NO: 120343 - DNA, 79 bp, Homo sapiens
attatcttgctccctccatcatacaaaggtggcttccatgtaatagtcattgcctccgctgtaggattatgaacctcta

SEQ ID NO: 120344 - DNA, 82 bp, Homo sapiens
tccatcatacaaaggtggcttccatgtaatagtcattgcctccgctgtaggattatgaacctctacatctacaggtggatca

SEQ ID NO: 120345 - DNA, 78 bp, Homo sapiens
atacaaaggtggcttccatgtaatagtcattgcctccgctgtaggattatgaacctctacatctacaggtggatcagg

SEQ ID NO: 120346 - DNA, 78 bp, Homo sapiens
ttccatgtaatagtcattgcctccgctgtaggattatgaacctctacatctacaggtggatcagggggttctgaagaa

SEQ ID NO: 120347 - DNA, 73 bp, Homo sapiens
ttgcctccgctgtaggattatgaacctctacatctacaggtggatcagggggttctgaagaacaagaaaaaaa

SEQ ID NO: 120348 - DNA, 77 bp, Homo sapiens
tatggtttattagttcttagccatagtgcatccatgtccaaacttacgctttggatcttgagcaatgactggatttt

SEQ ID NO: 120349 - DNA, 79 bp, Homo sapiens
ttattagttcttagccatagtgcatccatgtccaaacttacgctttggatcttgagcaatgactggatttttcagttca

SEQ ID NO: 120350 - DNA, 80 bp, Homo sapiens
ttagccatagtgcatccatgtccaaacttacgctttggatcttgagcaatgactggatttttcagttcaatatattctcc

SEQ ID NO: 120351 - DNA, 76 bp, Homo sapiens
atccatgtccaaacttacgctttggatcttgagcaatgactggatttttcagttcaatatattctcctccaccaac

SEQ ID NO: 120352 - DNA, 74 bp, Homo sapiens
aaacttacgctttggatcttgagcaatgactggatttttcagttcaatatattctcctccaccaaccttgttga

SEQ ID NO: 120353 - DNA, 76 bp, Homo sapiens
ctttggatcttgagcaatgactggatttttcagttcaatatattctcctccaccaaccttgttgactgctttaaca

SEQ ID NO: 120354 - DNA, 75 bp, Homo sapiens
ttgagcaatgactggatttttcagttcaatatattctcctccaccaaccttgttgactgctttaacacggaagaa

SEQ ID NO: 120355 - DNA, 72 bp, Homo sapiens
gatttttcagttcaatatattctcctccaccaaccttgttgactgctttaacacggaagaagtattcaccat

SEQ ID NO: 120356 - DNA, 73 bp, Homo sapiens
agttcaatatattctcctccaccaaccttgttgactgctttaacacggaagaagtattcaccatttggtatga

SEQ ID NO: 120357 - DNA, 75 bp, Homo sapiens
tatattctcctccaccaaccttgttgactgctttaacacggaagaagtattcaccatttggtatgagatccttca

SEQ ID NO: 120358 - DNA, 75 bp, Homo sapiens
caaccttgttgactgctttaacacggaagaagtattcaccatttggtatgagatccttcacagtccatgacagtt

SEQ ID NO: 120359 - DNA, 78 bp, Homo sapiens
ttgttgactgctttaacacggaagaagtattcaccatttggtatgagatccttcacagtccatgacagtttgttctca

SEQ ID NO: 120360 - DNA, 78 bp, Homo sapiens
ctttaacacggaagaagtattcaccatttggtatgagatccttcacagtccatgacagtttgttctcaccagacatga

SEQ ID NO: 120361 - DNA, 80 bp, Homo sapiens
aagaagtattcaccatttggtatgagatccttcacagtccatgacagtttgttctcaccagacatgactggtatatatgt

SEQ ID NO: 120362 - DNA, 81 bp, Homo sapiens
atttggtatgagatccttcacagtccatgacagtttgttctcaccagacatgactggtatatatgttctcctcccagcttc

SEQ ID NO: 120363 - DNA, 86 bp, Homo sapiens
tatgagatccttcacagtccatgacagtttgttctcaccagacatgactggtatatatgttctcctcccagcttctctgcgctcca

SEQ ID NO: 120364 - DNA, 84 bp, Homo sapiens
ttcacagtccatgacagtttgttctcaccagacatgactggtatatatgttctcctcccagcttctctgcgctccaggacataa

SEQ ID NO: 120365 - DNA, 81 bp, Homo sapiens
ttctcaccagacatgactggtatatatgttctcctcccagcttctctgcgctccaggacataatgaagaattggggttcca

SEQ ID NO: 120366 - DNA, 78 bp, Homo sapiens
atgactggtatatatgttctcctcccagcttctctgcgctccaggacataatgaagaattggggttccaccatcaaat

SEQ ID NO: 120367 - DNA, 78 bp, Homo sapiens
tatatatgttctcctcccagcttctctgcgctccaggacataatgaagaattggggttccaccatcaaattctggagg

SEQ ID NO: 120368 - DNA, 74 bp, Homo sapiens
ctcccagcttctctgcgctccaggacataatgaagaattggggttccaccatcaaattctggaggttcccaagt

SEQ ID NO: 120369 - DNA, 73 bp, Homo sapiens
ttctctgcgctccaggacataatgaagaattggggttccaccatcaaattctggaggttcccaagttaactta

SEQ ID NO: 120370 - DNA, 70 bp, Homo sapiens
ctccaggacataatgaagaattggggttccaccatcaaattctggaggttcccaagttaacttacaagaa

SEQ ID NO: 120371 - DNA, 69 bp, Homo sapiens
taatgaagaattggggttccaccatcaaattctggaggttcccaagttaacttacaagaactcttggta

SEQ ID NO: 120372 - DNA, 69 bp, Homo sapiens
gggttccaccatcaaattctggaggttcccaagttaacttacaagaactcttggtaatgtcacttgctt

SEQ ID NO: 120373 - DNA, 72 bp, Homo sapiens
attctggaggttcccaagttaacttacaagaactcttggtaatgtcacttgctttaatatctttgcatggtc

SEQ ID NO: 120374 - DNA, 72 bp, Homo sapiens
aagttaacttacaagaactcttggtaatgtcacttgctttaatatctttgcatggtccaggtaggcctatta

SEQ ID NO: 120375 - DNA, 72 bp, Homo sapiens
aacttacaagaactcttggtaatgtcacttgctttaatatctttgcatggtccaggtaggcctattacaaaa

SEQ ID NO: 120376 - DNA, 73 bp, Homo sapiens
aactcttggtaatgtcacttgctttaatatctttgcatggtccaggtaggcctattacaaaaatggataatta

SEQ ID NO: 120377 - DNA, 76 bp, Homo sapiens
tgtcacttgctttaatatctttgcatggtccaggtaggcctattacaaaaatggataattattctagtaatcctga

SEQ ID NO: 120378 - DNA, 76 bp, Homo sapiens
aatttcctctacatgtgaagaatgtctggtttttcttcaaagaatgattacctatgactttgacattgattgaggc

SEQ ID NO: 120379 - DNA, 80 bp, Homo sapiens
tgaagaatgtctggtttttcttcaaagaatgattacctatgactttgacattgattgaggctgttgctgagccgagctta

SEQ ID NO: 120380 - DNA, 78 bp, Homo sapiens
aatgtctggtttttcttcaaagaatgattacctatgactttgacattgattgaggctgttgctgagccgagcttattc

SEQ ID NO: 120381 - DNA, 81 bp, Homo sapiens
ttcaaagaatgattacctatgactttgacattgattgaggctgttgctgagccgagcttattctccagtgtaatggtataa

SEQ ID NO: 120382 - DNA, 80 bp, Homo sapiens
agaatgattacctatgactttgacattgattgaggctgttgctgagccgagcttattctccagtgtaatggtataaattc

SEQ ID NO: 120383 - DNA, 83 bp, Homo sapiens
tatgactttgacattgattgaggctgttgctgagccgagcttattctccagtgtaatggtataaattccggcatctgcacgga

SEQ ID NO: 120384 - DNA, 81 bp, Homo sapiens
acattgattgaggctgttgctgagccgagcttattctccagtgtaatggtataaattccggcatctgcacggacactcttg

SEQ ID NO: 120385 - DNA, 78 bp, Homo sapiens
ctgttgctgagccgagcttattctccagtgtaatggtataaattccggcatctgcacggacactcttgggaacttcaa

SEQ ID NO: 120386 - DNA, 77 bp, Homo sapiens
agccgagcttattctccagtgtaatggtataaattccggcatctgcacggacactcttgggaacttcaaggtgtgca

SEQ ID NO: 120387 - DNA, 79 bp, Homo sapiens
cttattctccagtgtaatggtataaattccggcatctgcacggacactcttgggaacttcaaggtgtgcagagatgtga

SEQ ID NO: 120388 - DNA, 81 bp, Homo sapiens
taatggtataaattccggcatctgcacggacactcttgggaacttcaaggtgtgcagagatgtgatcattcttcattgtta

SEQ ID NO: 120389 - DNA, 83 bp, Homo sapiens
tataaattccggcatctgcacggacactcttgggaacttcaaggtgtgcagagatgtgatcattcttcattgttaatctatca

SEQ ID NO: 120390 - DNA, 81 bp, Homo sapiens
atctgcacggacactcttgggaacttcaaggtgtgcagagatgtgatcattcttcattgttaatctatcacttgctttaac

SEQ ID NO: 120391 - DNA, 78 bp, Homo sapiens
ggacactcttgggaacttcaaggtgtgcagagatgtgatcattcttcattgttaatctatcacttgctttaacttctt

SEQ ID NO: 120392 - DNA, 81 bp, Homo sapiens
aacttcaaggtgtgcagagatgtgatcattcttcattgttaatctatcacttgctttaacttctttgccatctttatgcca

SEQ ID NO: 120393 - DNA, 80 bp, Homo sapiens
aaggtgtgcagagatgtgatcattcttcattgttaatctatcacttgctttaacttctttgccatctttatgccaactaa

SEQ ID NO: 120394 - DNA, 78 bp, Homo sapiens
agatgtgatcattcttcattgttaatctatcacttgctttaacttctttgccatctttatgccaactaacagttggaa

SEQ ID NO: 120395 - DNA, 74 bp, Homo sapiens
attcttcattgttaatctatcacttgctttaacttctttgccatctttatgccaactaacagttggaactggga

SEQ ID NO: 120396 - DNA, 76 bp, Homo sapiens
ttgttaatctatcacttgctttaacttctttgccatctttatgccaactaacagttggaactgggacagctctgaa

SEQ ID NO: 120397 - DNA, 74 bp, Homo sapiens
atcacttgctttaacttctttgccatctttatgccaactaacagttggaactgggacagctctgaagggaacag

SEQ ID NO: 120398 - DNA, 73 bp, Homo sapiens
ttctttgccatctttatgccaactaacagttggaactgggacagctctgaagggaacaggaatgcttaacttt

SEQ ID NO: 120399 - DNA, 73 bp, Homo sapiens
atctttatgccaactaacagttggaactgggacagctctgaagggaacaggaatgcttaacttttcaccttca

SEQ ID NO: 120400 - DNA, 71 bp, Homo sapiens
aactaacagttggaactgggacagctctgaagggaacaggaatgcttaacttttcaccttcaataacaata

SEQ ID NO: 120401 - DNA, 75 bp, Homo sapiens
acagttggaactgggacagctctgaagggaacaggaatgcttaacttttcaccttcaataacaataatgtcatga

SEQ ID NO: 120402 - DNA, 76 bp, Homo sapiens
acagctctgaagggaacaggaatgcttaacttttcaccttcaataacaataatgtcatgagtctccaggtcaattg

SEQ ID NO: 120403 - DNA, 73 bp, Homo sapiens
aagggaacaggaatgcttaacttttcaccttcaataacaataatgtcatgagtctccaggtcaattgttggct

SEQ ID NO: 120404 - DNA, 78 bp, Homo sapiens
aatgcttaacttttcaccttcaataacaataatgtcatgagtctccaggtcaattgttggcttgcctgtaagatatca

SEQ ID NO: 120405 - DNA, 78 bp, Homo sapiens
ttaacttttcaccttcaataacaataatgtcatgagtctccaggtcaattgttggcttgcctgtaagatatcattcaa

SEQ ID NO: 120406 - DNA, 78 bp, Homo sapiens
accttcaataacaataatgtcatgagtctccaggtcaattgttggcttgcctgtaagatatcattcaaaagagcaaaa

SEQ ID NO: 120407 - DNA, 70 bp, Homo sapiens
tgaataaagggtattttattaactataaaagaccttgtgctcttacagtctgggtctttggcaaccacat

SEQ ID NO: 120408 - DNA, 75 bp, Homo sapiens
ttattaactataaaagaccttgtgctcttacagtctgggtctttggcaaccacattttcagagatttcagatggc

SEQ ID NO: 120409 - DNA, 78 bp, Homo sapiens
aaagaccttgtgctcttacagtctgggtctttggcaaccacattttcagagatttcagatggctcgctgacaccaata

SEQ ID NO: 120410 - DNA, 84 bp, Homo sapiens
tcttacagtctgggtctttggcaaccacattttcagagatttcagatggctcgctgacaccaatagcattgactgctctcactc

SEQ ID NO: 120411 - DNA, 85 bp, Homo sapiens
tgggtctttggcaaccacattttcagagatttcagatggctcgctgacaccaatagcattgactgctctcactctcaggacatat

SEQ ID NO: 120412 - DNA, 85 bp, Homo sapiens
tttggcaaccacattttcagagatttcagatggctcgctgacaccaatagcattgactgctctcactctcaggacatattctttg

SEQ ID NO: 120413 - DNA, 85 bp, Homo sapiens
attttcagagatttcagatggctcgctgacaccaatagcattgactgctctcactctcaggacatattctttgtcaggaacaaca

SEQ ID NO: 120414 - DNA, 84 bp, Homo sapiens
atttcagatggctcgctgacaccaatagcattgactgctctcactctcaggacatattctttgtcaggaacaacaccttcttca

SEQ ID NO: 120415 - DNA, 81 bp, Homo sapiens
tcgctgacaccaatagcattgactgctctcactctcaggacatattctttgtcaggaacaacaccttcttcaaccttgaat

SEQ ID NO: 120416 - DNA, 78 bp, Homo sapiens
accaatagcattgactgctctcactctcaggacatattctttgtcaggaacaacaccttcttcaaccttgaatttcaa

SEQ ID NO: 120417 - DNA, 72 bp, Homo sapiens
ttgtcaggaacaacaccttcttcaaccttgaatttcaagtcctttattgggcgagaattaactctcatccat

SEQ ID NO: 120418 - DNA, 71 bp, Homo sapiens
aacaacaccttcttcaaccttgaatttcaagtcctttattgggcgagaattaactctcatccatttctcag

SEQ ID NO: 120419 - DNA, 75 bp, Homo sapiens
tcaaccttgaatttcaagtcctttattgggcgagaattaactctcatccatttctcagtgcctactggacacatt

SEQ ID NO: 120420 - DNA, 77 bp, Homo sapiens
ttgaatttcaagtcctttattgggcgagaattaactctcatccatttctcagtgcctactggacacatttcaacatg

SEQ ID NO: 120421 - DNA, 79 bp, Homo sapiens
gtcctttattgggcgagaattaactctcatccatttctcagtgcctactggacacatttcaacatggtatcctatgata

SEQ ID NO: 120422 - DNA, 79 bp, Homo sapiens
gagaattaactctcatccatttctcagtgcctactggacacatttcaacatggtatcctatgataggacttccaccatt

SEQ ID NO: 120423 - DNA, 78 bp, Homo sapiens
ttaactctcatccatttctcagtgcctactggacacatttcaacatggtatcctatgataggacttccaccatttttc

SEQ ID NO: 120424 - DNA, 77 bp, Homo sapiens
atttctcagtgcctactggacacatttcaacatggtatcctatgataggacttccaccatttttctctggaggcttc

SEQ ID NO: 120425 - DNA, 76 bp, Homo sapiens
acatttcaacatggtatcctatgataggacttccaccatttttctctggaggcttccaagcaatggcaatgtgttt

SEQ ID NO: 120426 - DNA, 76 bp, Homo sapiens
aacatggtatcctatgataggacttccaccatttttctctggaggcttccaagcaatggcaatgtgttttctccca

SEQ ID NO: 120427 - DNA, 81 bp, Homo sapiens
ctatgataggacttccaccatttttctctggaggcttccaagcaatggcaatgtgttttctcccagcatcagtcacatgta

SEQ ID NO: 120428 - DNA, 78 bp, Homo sapiens
acttccaccatttttctctggaggcttccaagcaatggcaatgtgttttctcccagcatcagtcacatgtaggtcaag

SEQ ID NO: 120429 - DNA, 78 bp, Homo sapiens
atttttctctggaggcttccaagcaatggcaatgtgttttctcccagcatcagtcacatgtaggtcaaggggtggtga

SEQ ID NO: 120430 - DNA, 77 bp, Homo sapiens
aagcaatggcaatgtgttttctcccagcatcagtcacatgtaggtcaaggggtggtgagggaggacctgagaaaaga

SEQ ID NO: 120431 - DNA, 77 bp, Homo sapiens
tgttttctcccagcatcagtcacatgtaggtcaaggggtggtgagggaggacctgagaaaagagtgaaatattcata

SEQ ID NO: 120432 - DNA, 82 bp, Homo sapiens
cagcatcagtcacatgtaggtcaaggggtggtgagggaggacctgagaaaagagtgaaatattcatatccacagtctcatca

SEQ ID NO: 120433 - DNA, 81 bp, Homo sapiens
acctgagaaaagagtgaaatattcatatccacagtctcatcaagttctagacaatatcttgtgtataatcagcactactta

SEQ ID NO: 120434 - DNA, 76 bp, Homo sapiens
aagttctagacaatatcttgtgtataatcagcactacttacttgttggatcttcaatggataggatttctgtgggt

SEQ ID NO: 120435 - DNA, 76 bp, Homo sapiens
aatatcttgtgtataatcagcactacttacttgttggatcttcaatggataggatttctgtgggttcacttgggtg

SEQ ID NO: 120436 - DNA, 77 bp, Homo sapiens
tgtataatcagcactacttacttgttggatcttcaatggataggatttctgtgggttcacttgggtggccaactcca

SEQ ID NO: 120437 - DNA, 75 bp, Homo sapiens
ttgttggatcttcaatggataggatttctgtgggttcacttgggtggccaactccagcttcattttcagcccgaa

SEQ ID NO: 120438 - DNA, 73 bp, Homo sapiens
ttcaatggataggatttctgtgggttcacttgggtggccaactccagcttcattttcagcccgaacctgaaac

SEQ ID NO: 120439 - DNA, 72 bp, Homo sapiens
taggatttctgtgggttcacttgggtggccaactccagcttcattttcagcccgaacctgaaactggacctc

SEQ ID NO: 120440 - DNA, 76 bp, Homo sapiens
ttcacttgggtggccaactccagcttcattttcagcccgaacctgaaactggacctctgttccttcgatgacatca

SEQ ID NO: 120441 - DNA, 77 bp, Homo sapiens
tggccaactccagcttcattttcagcccgaacctgaaactggacctctgttccttcgatgacatcagttactctgaa

SEQ ID NO: 120442 - DNA, 77 bp, Homo sapiens
cagcttcattttcagcccgaacctgaaactggacctctgttccttcgatgacatcagttactctgaagttacagtca

SEQ ID NO: 120443 - DNA, 74 bp, Homo sapiens
attttcagcccgaacctgaaactggacctctgttccttcgatgacatcagttactctgaagttacagtcaggtc

SEQ ID NO: 120444 - DNA, 76 bp, Homo sapiens
aacctgaaactggacctctgttccttcgatgacatcagttactctgaagttacagtcaggtcctgcagtctttcca

SEQ ID NO: 120445 - DNA, 77 bp, Homo sapiens
aaactggacctctgttccttcgatgacatcagttactctgaagttacagtcaggtcctgcagtctttccagctttca

SEQ ID NO: 120446 - DNA, 76 bp, Homo sapiens
tgttccttcgatgacatcagttactctgaagttacagtcaggtcctgcagtctttccagctttcacccaacgggta

SEQ ID NO: 120447 - DNA, 71 bp, Homo sapiens
acatcagttactctgaagttacagtcaggtcctgcagtctttccagctttcacccaacgggtacctaacct

SEQ ID NO: 120448 - DNA, 69 bp, Homo sapiens
ttactctgaagttacagtcaggtcctgcagtctttccagctttcacccaacgggtacctaacctttctt

SEQ ID NO: 120449 - DNA, 73 bp, Homo sapiens
tcctgcagtctttccagctttcacccaacgggtacctaacctttctttcttctcaatgacatatctattgaaa

SEQ ID NO: 120450 - DNA, 70 bp, Homo sapiens
tttccagctttcacccaacgggtacctaacctttctttcttctcaatgacatatctattgaaacaacaaa

SEQ ID NO: 120451 - DNA, 71 bp, Homo sapiens
tttcacccaacgggtacctaacctttctttcttctcaatgacatatctattgaaacaacaaagcatttcat

SEQ ID NO: 120452 - DNA, 75 bp, Homo sapiens
gaatttgcagccaagtgtaagttattctttatgaattaattcaaattctacctctgtattggtcttccaccatca

SEQ ID NO: 120453 - DNA, 72 bp, Homo sapiens
tgtaagttattctttatgaattaattcaaattctacctctgtattggtcttccaccatcatttttaggtggc

SEQ ID NO: 120454 - DNA, 72 bp, Homo sapiens
tctttatgaattaattcaaattctacctctgtattggtcttccaccatcatttttaggtggctcccacttta

SEQ ID NO: 120455 - DNA, 70 bp, Homo sapiens
aattaattcaaattctacctctgtattggtcttccaccatcatttttaggtggctcccactttaggtcaa

SEQ ID NO: 120456 - DNA, 70 bp, Homo sapiens
aattctacctctgtattggtcttccaccatcatttttaggtggctcccactttaggtcaacatgtcgttt

SEQ ID NO: 120457 - DNA, 75 bp, Homo sapiens
tctgtattggtcttccaccatcatttttaggtggctcccactttaggtcaacatgtcgttttgtcacatcaacca

SEQ ID NO: 120458 - DNA, 75 bp, Homo sapiens
tccaccatcatttttaggtggctcccactttaggtcaacatgtcgttttgtcacatcaaccactgccagggcgta

SEQ ID NO: 120459 - DNA, 71 bp, Homo sapiens
atttttaggtggctcccactttaggtcaacatgtcgttttgtcacatcaaccactgccagggcgtagggtg

SEQ ID NO: 120460 - DNA, 73 bp, Homo sapiens
aggtggctcccactttaggtcaacatgtcgttttgtcacatcaaccactgccagggcgtagggtggtccagga

SEQ ID NO: 120461 - DNA, 74 bp, Homo sapiens
tttaggtcaacatgtcgttttgtcacatcaaccactgccagggcgtagggtggtccaggagtggctgaaaataa

SEQ ID NO: 120462 - DNA, 72 bp, Homo sapiens
aacatgtcgttttgtcacatcaaccactgccagggcgtagggtggtccaggagtggctgaaaataaaataaa

SEQ ID NO: 120463 - DNA, 73 bp, Homo sapiens
ttttgtcacatcaaccactgccagggcgtagggtggtccaggagtggctgaaaataaaataaacaatgattag

SEQ ID NO: 120464 - DNA, 69 bp, Homo sapiens
aaccactgccagggcgtagggtggtccaggagtggctgaaaataaaataaacaatgattaggaaaacca

SEQ ID NO: 120465 - DNA, 78 bp, Homo sapiens
agagcacttattgtcacaaagattaagtgcaagagcatactaaaggtgtctttggccagcacagagtcctcaatttcg

SEQ ID NO: 120466 - DNA, 77 bp, Homo sapiens
tcacaaagattaagtgcaagagcatactaaaggtgtctttggccagcacagagtcctcaatttcggtgtagtcgctt

SEQ ID NO: 120467 - DNA, 77 bp, Homo sapiens
ttaagtgcaagagcatactaaaggtgtctttggccagcacagagtcctcaatttcggtgtagtcgctttgtcctata

SEQ ID NO: 120468 - DNA, 75 bp, Homo sapiens
aagagcatactaaaggtgtctttggccagcacagagtcctcaatttcggtgtagtcgctttgtcctatagcattt

SEQ ID NO: 120469 - DNA, 78 bp, Homo sapiens
taaaggtgtctttggccagcacagagtcctcaatttcggtgtagtcgctttgtcctatagcattttctgcagcaactc

SEQ ID NO: 120470 - DNA, 80 bp, Homo sapiens
tggccagcacagagtcctcaatttcggtgtagtcgctttgtcctatagcattttctgcagcaactcggaacacatataaa

SEQ ID NO: 120471 - DNA, 77 bp, Homo sapiens
agtcctcaatttcggtgtagtcgctttgtcctatagcattttctgcagcaactcggaacacatataaagagccctca

SEQ ID NO: 120472 - DNA, 77 bp, Homo sapiens
aatttcggtgtagtcgctttgtcctatagcattttctgcagcaactcggaacacatataaagagccctcagtcagtg

SEQ ID NO: 120473 - DNA, 82 bp, Homo sapiens
tgtagtcgctttgtcctatagcattttctgcagcaactcggaacacatataaagagccctcagtcagtggggtgactgtgca

SEQ ID NO: 120474 - DNA, 81 bp, Homo sapiens
ctatagcattttctgcagcaactcggaacacatataaagagccctcagtcagtggggtgactgtgcacttggtgtccttga

SEQ ID NO: 120475 - DNA, 79 bp, Homo sapiens
attttctgcagcaactcggaacacatataaagagccctcagtcagtggggtgactgtgcacttggtgtccttgacagtg

SEQ ID NO: 120476 - DNA, 77 bp, Homo sapiens
aactcggaacacatataaagagccctcagtcagtggggtgactgtgcacttggtgtccttgacagtggtatccactg

SEQ ID NO: 120477 - DNA, 79 bp, Homo sapiens
aacacatataaagagccctcagtcagtggggtgactgtgcacttggtgtccttgacagtggtatccactgtttgccagc

SEQ ID NO: 120478 - DNA, 76 bp, Homo sapiens
aaagagccctcagtcagtggggtgactgtgcacttggtgtccttgacagtggtatccactgtttgccagccttttc

SEQ ID NO: 120479 - DNA, 76 bp, Homo sapiens
agtggggtgactgtgcacttggtgtccttgacagtggtatccactgtttgccagccttttcgcctgacgtctctct

SEQ ID NO: 120480 - DNA, 76 bp, Homo sapiens
actgtgcacttggtgtccttgacagtggtatccactgtttgccagccttttcgcctgacgtctctcttttccacaa

SEQ ID NO: 120481 - DNA, 75 bp, Homo sapiens
ccttgacagtggtatccactgtttgccagccttttcgcctgacgtctctcttttccacaatgtagttggtgatgg

SEQ ID NO: 120482 - DNA, 74 bp, Homo sapiens
tatccactgtttgccagccttttcgcctgacgtctctcttttccacaatgtagttggtgatgggggaccctcca

SEQ ID NO: 120483 - DNA, 72 bp, Homo sapiens
gtttgccagccttttcgcctgacgtctctcttttccacaatgtagttggtgatgggggaccctccatctttc

SEQ ID NO: 120484 - DNA, 73 bp, Homo sapiens
ttttcgcctgacgtctctcttttccacaatgtagttggtgatgggggaccctccatctttctcaggaactgtc

SEQ ID NO: 120485 - DNA, 71 bp, Homo sapiens
acgtctctcttttccacaatgtagttggtgatgggggaccctccatctttctcaggaactgtccattttag

SEQ ID NO: 120486 - DNA, 72 bp, Homo sapiens
cacaatgtagttggtgatgggggaccctccatctttctcaggaactgtccattttaggtctgctgtattttt

SEQ ID NO: 120487 - DNA, 73 bp, Homo sapiens
ttggtgatgggggaccctccatctttctcaggaactgtccattttaggtctgctgtattttttgtgatattaa

SEQ ID NO: 120488 - DNA, 72 bp, Homo sapiens
gggaccctccatctttctcaggaactgtccattttaggtctgctgtattttttgtgatattaataacttcaa

SEQ ID NO: 120489 - DNA, 74 bp, Homo sapiens
atctttctcaggaactgtccattttaggtctgctgtattttttgtgatattaataacttcaagccagcgtggtg

SEQ ID NO: 120490 - DNA, 78 bp, Homo sapiens
agatattagaagaatttatatatcccagacatcaagagtgacttacatagcttctcccggcaaagcacagggtcactg

SEQ ID NO: 120491 - DNA, 76 bp, Homo sapiens
aagaatttatatatcccagacatcaagagtgacttacatagcttctcccggcaaagcacagggtcactgggttcac

SEQ ID NO: 120492 - DNA, 78 bp, Homo sapiens
ttatatatcccagacatcaagagtgacttacatagcttctcccggcaaagcacagggtcactgggttcactgggttca

SEQ ID NO: 120493 - DNA, 74 bp, Homo sapiens
agacatcaagagtgacttacatagcttctcccggcaaagcacagggtcactgggttcactgggttcactttccc

SEQ ID NO: 120494 - DNA, 72 bp, Homo sapiens
acttacatagcttctcccggcaaagcacagggtcactgggttcactgggttcactttccccagccttattca

SEQ ID NO: 120495 - DNA, 74 bp, Homo sapiens
atagcttctcccggcaaagcacagggtcactgggttcactgggttcactttccccagccttattcacagctcta

SEQ ID NO: 120496 - DNA, 74 bp, Homo sapiens
caaagcacagggtcactgggttcactgggttcactttccccagccttattcacagctctaactcggaatgagta

SEQ ID NO: 120497 - DNA, 72 bp, Homo sapiens
agggtcactgggttcactgggttcactttccccagccttattcacagctctaactcggaatgagtattcctg

SEQ ID NO: 120498 - DNA, 76 bp, Homo sapiens
gttcactttccccagccttattcacagctctaactcggaatgagtattcctgtccttccatgagccctgggagcaa

SEQ ID NO: 120499 - DNA, 80 bp, Homo sapiens
cagccttattcacagctctaactcggaatgagtattcctgtccttccatgagccctgggagcaagtgctgagtggtggga

SEQ ID NO: 120500 - DNA, 74 bp, Homo sapiens
ctctaactcggaatgagtattcctgtccttccatgagccctgggagcaagtgctgagtggtgggaaccccttcc

SEQ ID NO: 120501 - DNA, 75 bp, Homo sapiens
aatgagtattcctgtccttccatgagccctgggagcaagtgctgagtggtgggaaccccttccgccactctgacc

SEQ ID NO: 120502 - DNA, 78 bp, Homo sapiens
tgtccttccatgagccctgggagcaagtgctgagtggtgggaaccccttccgccactctgacccactcatctgttcca

SEQ ID NO: 120503 - DNA, 77 bp, Homo sapiens
agccctgggagcaagtgctgagtggtgggaaccccttccgccactctgacccactcatctgttccagtcttcagcat

SEQ ID NO: 120504 - DNA, 80 bp, Homo sapiens
agcaagtgctgagtggtgggaaccccttccgccactctgacccactcatctgttccagtcttcagcatttcaatgacata

SEQ ID NO: 120505 - DNA, 77 bp, Homo sapiens
agtggtgggaaccccttccgccactctgacccactcatctgttccagtcttcagcatttcaatgacataagactcaa

SEQ ID NO: 120506 - DNA, 78 bp, Homo sapiens
aaccccttccgccactctgacccactcatctgttccagtcttcagcatttcaatgacataagactcaatctttgcacc

SEQ ID NO: 120507 - DNA, 83 bp, Homo sapiens
ccactctgacccactcatctgttccagtcttcagcatttcaatgacataagactcaatctttgcacctccatcatgttctggt

SEQ ID NO: 120508 - DNA, 82 bp, Homo sapiens
ccactcatctgttccagtcttcagcatttcaatgacataagactcaatctttgcacctccatcatgttctggttttgtccaa

SEQ ID NO: 120509 - DNA, 81 bp, Homo sapiens
atctgttccagtcttcagcatttcaatgacataagactcaatctttgcacctccatcatgttctggttttgtccaattcaa

SEQ ID NO: 120510 - DNA, 80 bp, Homo sapiens
tcagcatttcaatgacataagactcaatctttgcacctccatcatgttctggttttgtccaattcaaccttactgatgtt

SEQ ID NO: 120511 - DNA, 76 bp, Homo sapiens
atttcaatgacataagactcaatctttgcacctccatcatgttctggttttgtccaattcaaccttactgatgttt

SEQ ID NO: 120512 - DNA, 76 bp, Homo sapiens
ataagactcaatctttgcacctccatcatgttctggttttgtccaattcaaccttactgatgttttgcctacatct

SEQ ID NO: 120513 - DNA, 71 bp, Homo sapiens
atcatgttctggttttgtccaattcaaccttactgatgttttgcctacatcttttacagttggttttccag

SEQ ID NO: 120514 - DNA, 68 bp, Homo sapiens
gttctggttttgtccaattcaaccttactgatgttttgcctacatcttttacagttggttttccaggg

SEQ ID NO: 120515 - DNA, 72 bp, Homo sapiens
aattcaaccttactgatgttttgcctacatcttttacagttggttttccagggggccatggaggatctgcaa

SEQ ID NO: 120516 - DNA, 76 bp, Homo sapiens
ttactgatgttttgcctacatcttttacagttggttttccagggggccatggaggatctgcaagccaatgaaatca

SEQ ID NO: 120517 - DNA, 74 bp, Homo sapiens
atgttttgcctacatcttttacagttggttttccagggggccatggaggatctgcaagccaatgaaatcattgt

SEQ ID NO: 120518 - DNA, 70 bp, Homo sapiens
ggagttcatatgaacttcgaaataaccacaaaaattatataaataatacctatgggatcctttattaaga

SEQ ID NO: 120519 - DNA, 69 bp, Homo sapiens
tgaacttcgaaataaccacaaaaattatataaataatacctatgggatcctttattaagattggttcag

SEQ ID NO: 120520 - DNA, 69 bp, Homo sapiens
aaccacaaaaattatataaataatacctatgggatcctttattaagattggttcagttgatttgcttgg

SEQ ID NO: 120521 - DNA, 70 bp, Homo sapiens
attatataaataatacctatgggatcctttattaagattggttcagttgatttgcttggttttccaggtc

SEQ ID NO: 120522 - DNA, 71 bp, Homo sapiens
taatacctatgggatcctttattaagattggttcagttgatttgcttggttttccaggtccagcaagattt

SEQ ID NO: 120523 - DNA, 74 bp, Homo sapiens
tatgggatcctttattaagattggttcagttgatttgcttggttttccaggtccagcaagattttcagccaaca

SEQ ID NO: 120524 - DNA, 73 bp, Homo sapiens
tttattaagattggttcagttgatttgcttggttttccaggtccagcaagattttcagccaacacacggaatc

SEQ ID NO: 120525 - DNA, 72 bp, Homo sapiens
attggttcagttgatttgcttggttttccaggtccagcaagattttcagccaacacacggaatctgtatttt

SEQ ID NO: 120526 - DNA, 72 bp, Homo sapiens
gttgatttgcttggttttccaggtccagcaagattttcagccaacacacggaatctgtattttttcttatta

SEQ ID NO: 120527 - DNA, 72 bp, Homo sapiens
ttttccaggtccagcaagattttcagccaacacacggaatctgtattttttcttattagtgagacctttcac

SEQ ID NO: 120528 - DNA, 74 bp, Homo sapiens
cagcaagattttcagccaacacacggaatctgtattttttcttattagtgagacctttcactctgaattaggaa

SEQ ID NO: 120529 - DNA, 71 bp, Homo sapiens
ttttcagccaacacacggaatctgtattttttcttattagtgagacctttcactctgaattaggaacaaag

SEQ ID NO: 120530 - DNA, 75 bp, Homo sapiens
aacacacggaatctgtattttttcttattagtgagacctttcactctgaattaggaacaaagtgcatgtgtatca

SEQ ID NO: 120531 - DNA, 80 bp, Homo sapiens
atttgaatatactgctgtcttaacatcttgatggggattctgagcatacctgtatgttgtgtcctttactggcatcttat

SEQ ID NO: 120532 - DNA, 82 bp, Homo sapiens
atactgctgtcttaacatcttgatggggattctgagcatacctgtatgttgtgtcctttactggcatcttattgcatctaac

SEQ ID NO: 120533 - DNA, 80 bp, Homo sapiens
ttaacatcttgatggggattctgagcatacctgtatgttgtgtcctttactggcatcttattgcatctaacccatttatc

SEQ ID NO: 120534 - DNA, 81 bp, Homo sapiens
gggattctgagcatacctgtatgttgtgtcctttactggcatcttattgcatctaacccatttatctgtatcaggatccag

SEQ ID NO: 120535 - DNA, 80 bp, Homo sapiens
agcatacctgtatgttgtgtcctttactggcatcttattgcatctaacccatttatctgtatcaggatccagtctttcaa

SEQ ID NO: 120536 - DNA, 79 bp, Homo sapiens
tatgttgtgtcctttactggcatcttattgcatctaacccatttatctgtatcaggatccagtctttcaacccagtatc

SEQ ID NO: 120537 - DNA, 79 bp, Homo sapiens
tcctttactggcatcttattgcatctaacccatttatctgtatcaggatccagtctttcaacccagtatcctgtgattg

SEQ ID NO: 120538 - DNA, 81 bp, Homo sapiens
atcttattgcatctaacccatttatctgtatcaggatccagtctttcaacccagtatcctgtgattgggctgccaccatca

SEQ ID NO: 120539 - DNA, 83 bp, Homo sapiens
attgcatctaacccatttatctgtatcaggatccagtctttcaacccagtatcctgtgattgggctgccaccatcatcatctg

SEQ ID NO: 120540 - DNA, 86 bp, Homo sapiens
atttatctgtatcaggatccagtctttcaacccagtatcctgtgattgggctgccaccatcatcatctggctcacaccatgtgaga

SEQ ID NO: 120541 - DNA, 88 bp, Homo sapiens
tatcaggatccagtctttcaacccagtatcctgtgattgggctgccaccatcatcatctggctcacaccatgtgagagtcactgcgtc

SEQ ID NO: 120542 - DNA, 86 bp, Homo sapiens
gtctttcaacccagtatcctgtgattgggctgccaccatcatcatctggctcacaccatgtgagagtcactgcgtctttagtgata

SEQ ID NO: 120543 - DNA, 86 bp, Homo sapiens
aacccagtatcctgtgattgggctgccaccatcatcatctggctcacaccatgtgagagtcactgcgtctttagtgatatcagaag

SEQ ID NO: 120544 - DNA, 87 bp, Homo sapiens
tgtgattgggctgccaccatcatcatctggctcacaccatgtgagagtcactgcgtctttagtgatatcagaaggttctaggcgagt

SEQ ID NO: 120545 - DNA, 86 bp, Homo sapiens
tgccaccatcatcatctggctcacaccatgtgagagtcactgcgtctttagtgatatcagaaggttctaggcgagttggaggacca

SEQ ID NO: 120546 - DNA, 83 bp, Homo sapiens
atcatcatctggctcacaccatgtgagagtcactgcgtctttagtgatatcagaaggttctaggcgagttggaggaccaggtg

SEQ ID NO: 120547 - DNA, 82 bp, Homo sapiens
tcacaccatgtgagagtcactgcgtctttagtgatatcagaaggttctaggcgagttggaggaccaggtggatctatagaca

SEQ ID NO: 120548 - DNA, 80 bp, Homo sapiens
tgtgagagtcactgcgtctttagtgatatcagaaggttctaggcgagttggaggaccaggtggatctatagacaggataa

SEQ ID NO: 120549 - DNA, 77 bp, Homo sapiens
tgcgtctttagtgatatcagaaggttctaggcgagttggaggaccaggtggatctatagacaggataatggtgtaaa

SEQ ID NO: 120550 - DNA, 75 bp, Homo sapiens
tttagtgatatcagaaggttctaggcgagttggaggaccaggtggatctatagacaggataatggtgtaaaatgt

SEQ ID NO: 120551 - DNA, 75 bp, Homo sapiens
tgacataagcatccttttttttttatcagctgattgagaaacttaccaaactgatatttggctgttattggagag

SEQ ID NO: 120552 - DNA, 72 bp, Homo sapiens
atccttttttttttatcagctgattgagaaacttaccaaactgatatttggctgttattggagaggcctgaa

SEQ ID NO: 120553 - DNA, 75 bp, Homo sapiens
tttttatcagctgattgagaaacttaccaaactgatatttggctgttattggagaggcctgaactggttcaccaa

SEQ ID NO: 120554 - DNA, 76 bp, Homo sapiens
tgattgagaaacttaccaaactgatatttggctgttattggagaggcctgaactggttcaccaacaccatacatgt

SEQ ID NO: 120555 - DNA, 79 bp, Homo sapiens
gctgttattggagaggcctgaactggttcaccaacaccatacatgttttctgcagcaactctgaagatgtactctttat

SEQ ID NO: 120556 - DNA, 78 bp, Homo sapiens
tattggagaggcctgaactggttcaccaacaccatacatgttttctgcagcaactctgaagatgtactctttattggg

SEQ ID NO: 120557 - DNA, 74 bp, Homo sapiens
aactggttcaccaacaccatacatgttttctgcagcaactctgaagatgtactctttattggggattaatttgg

SEQ ID NO: 120558 - DNA, 75 bp, Homo sapiens
accaacaccatacatgttttctgcagcaactctgaagatgtactctttattggggattaatttggtggccttgaa

SEQ ID NO: 120559 - DNA, 75 bp, Homo sapiens
atacatgttttctgcagcaactctgaagatgtactctttattggggattaatttggtggccttgaagtttgtatc

SEQ ID NO: 120560 - DNA, 74 bp, Homo sapiens
ttttctgcagcaactctgaagatgtactctttattggggattaatttggtggccttgaagtttgtatccttgac

SEQ ID NO: 120561 - DNA, 72 bp, Homo sapiens
aactctgaagatgtactctttattggggattaatttggtggccttgaagtttgtatccttgacggtggatga

SEQ ID NO: 120562 - DNA, 74 bp, Homo sapiens
atgtactctttattggggattaatttggtggccttgaagtttgtatccttgacggtggatgagagcttgtgcca

SEQ ID NO: 120563 - DNA, 78 bp, Homo sapiens
ttaatttggtggccttgaagtttgtatccttgacggtggatgagagcttgtgccacacttcactatcagttgctcgtc

SEQ ID NO: 120564 - DNA, 80 bp, Homo sapiens
ttgaagtttgtatccttgacggtggatgagagcttgtgccacacttcactatcagttgctcgtctctccacaacatagtt

SEQ ID NO: 120565 - DNA, 82 bp, Homo sapiens
tttgtatccttgacggtggatgagagcttgtgccacacttcactatcagttgctcgtctctccacaacatagtttgtgatct

SEQ ID NO: 120566 - DNA, 84 bp, Homo sapiens
acggtggatgagagcttgtgccacacttcactatcagttgctcgtctctccacaacatagtttgtgatcttagatccaccatca

SEQ ID NO: 120567 - DNA, 84 bp, Homo sapiens
agagcttgtgccacacttcactatcagttgctcgtctctccacaacatagtttgtgatcttagatccaccatcatcgcgtggtg

SEQ ID NO: 120568 - DNA, 81 bp, Homo sapiens
acacttcactatcagttgctcgtctctccacaacatagtttgtgatcttagatccaccatcatcgcgtggtgggttccatg

SEQ ID NO: 120569 - DNA, 80 bp, Homo sapiens
actatcagttgctcgtctctccacaacatagtttgtgatcttagatccaccatcatcgcgtggtgggttccatgttagaa

SEQ ID NO: 120570 - DNA, 82 bp, Homo sapiens
tcgtctctccacaacatagtttgtgatcttagatccaccatcatcgcgtggtgggttccatgttagaagacatgactcattg

SEQ ID NO: 120571 - DNA, 80 bp, Homo sapiens
aacatagtttgtgatcttagatccaccatcatcgcgtggtgggttccatgttagaagacatgactcattggttacatctg

SEQ ID NO: 120572 - DNA, 83 bp, Homo sapiens
tttgtgatcttagatccaccatcatcgcgtggtgggttccatgttagaagacatgactcattggttacatctgtgatgtcaaa

SEQ ID NO: 120573 - DNA, 83 bp, Homo sapiens
cttagatccaccatcatcgcgtggtgggttccatgttagaagacatgactcattggttacatctgtgatgtcaaaggcagctg

SEQ ID NO: 120574 - DNA, 80 bp, Homo sapiens
atcatcgcgtggtgggttccatgttagaagacatgactcattggttacatctgtgatgtcaaaggcagctggtggtccgg

SEQ ID NO: 120575 - DNA, 79 bp, Homo sapiens
tgggttccatgttagaagacatgactcattggttacatctgtgatgtcaaaggcagctggtggtccgggtttatctgtg

SEQ ID NO: 120576 - DNA, 81 bp, Homo sapiens
atgttagaagacatgactcattggttacatctgtgatgtcaaaggcagctggtggtccgggtttatctgtgtatggcatta

SEQ ID NO: 120577 - DNA, 84 bp, Homo sapiens
agacatgactcattggttacatctgtgatgtcaaaggcagctggtggtccgggtttatctgtgtatggcattacagatgcagaa

SEQ ID NO: 120578 - DNA, 78 bp, Homo sapiens
attggttacatctgtgatgtcaaaggcagctggtggtccgggtttatctgtgtatggcattacagatgcagaaaaaaa

SEQ ID NO: 120579 - DNA, 66 bp, Homo sapiens
agtaactgcaaagagtttatccccttttaaaatgagaaccttccttacctaagacgttcacttcca

SEQ ID NO: 120580 - DNA, 66 bp, Homo sapiens
aaagagtttatccccttttaaaatgagaaccttccttacctaagacgttcacttccaccacagcag

SEQ ID NO: 120581 - DNA, 70 bp, Homo sapiens
ccttttaaaatgagaaccttccttacctaagacgttcacttccaccacagcagtggcccggccacacaca

SEQ ID NO: 120582 - DNA, 74 bp, Homo sapiens
taaaatgagaaccttccttacctaagacgttcacttccaccacagcagtggcccggccacacacattcacagcc

SEQ ID NO: 120583 - DNA, 77 bp, Homo sapiens
accttccttacctaagacgttcacttccaccacagcagtggcccggccacacacattcacagcctcaatgatatatg

SEQ ID NO: 120584 - DNA, 83 bp, Homo sapiens
taagacgttcacttccaccacagcagtggcccggccacacacattcacagcctcaatgatatatgtgccagtgtcacttctct

SEQ ID NO: 120585 - DNA, 85 bp, Homo sapiens
ttccaccacagcagtggcccggccacacacattcacagcctcaatgatatatgtgccagtgtcacttctcttactatcaacaata

SEQ ID NO: 120586 - DNA, 85 bp, Homo sapiens
acagcagtggcccggccacacacattcacagcctcaatgatatatgtgccagtgtcacttctcttactatcaacaatagtcactg

SEQ ID NO: 120587 - DNA, 84 bp, Homo sapiens
cggccacacacattcacagcctcaatgatatatgtgccagtgtcacttctcttactatcaacaatagtcactgtggatttctta

SEQ ID NO: 120588 - DNA, 81 bp, Homo sapiens
attcacagcctcaatgatatatgtgccagtgtcacttctcttactatcaacaatagtcactgtggatttcttagggacatt

SEQ ID NO: 120589 - DNA, 81 bp, Homo sapiens
tcaatgatatatgtgccagtgtcacttctcttactatcaacaatagtcactgtggatttcttagggacattttcaatggta

SEQ ID NO: 120590 - DNA, 77 bp, Homo sapiens
atatatgtgccagtgtcacttctcttactatcaacaatagtcactgtggatttcttagggacattttcaatggtaat

SEQ ID NO: 120591 - DNA, 74 bp, Homo sapiens
cagtgtcacttctcttactatcaacaatagtcactgtggatttcttagggacattttcaatggtaattcttttg

SEQ ID NO: 120592 - DNA, 76 bp, Homo sapiens
ttactatcaacaatagtcactgtggatttcttagggacattttcaatggtaattcttttgtcctgcttcagaatca

SEQ ID NO: 120593 - DNA, 75 bp, Homo sapiens
aatagtcactgtggatttcttagggacattttcaatggtaattcttttgtcctgcttcagaatcatatcagcctt

SEQ ID NO: 120594 - DNA, 75 bp, Homo sapiens
tgtggatttcttagggacattttcaatggtaattcttttgtcctgcttcagaatcatatcagcctttgtccaagt

SEQ ID NO: 120595 - DNA, 73 bp, Homo sapiens
tagggacattttcaatggtaattcttttgtcctgcttcagaatcatatcagcctttgtccaagttattttagg

SEQ ID NO: 120596 - DNA, 73 bp, Homo sapiens
acattttcaatggtaattcttttgtcctgcttcagaatcatatcagcctttgtccaagttattttaggttcag

SEQ ID NO: 120597 - DNA, 70 bp, Homo sapiens
attcttttgtcctgcttcagaatcatatcagcctttgtccaagttattttaggttcaggttttccggtta

SEQ ID NO: 120598 - DNA, 68 bp, Homo sapiens
aatcatatcagcctttgtccaagttattttaggttcaggttttccggttacggtggcaggaagttcaa

SEQ ID NO: 120599 - DNA, 68 bp, Homo sapiens
tatcagcctttgtccaagttattttaggttcaggttttccggttacggtggcaggaagttcaatcttg

SEQ ID NO: 120600 - DNA, 64 bp, Homo sapiens
aagttattttaggttcaggttttccggttacggtggcaggaagttcaatcttggtcccagcttt

SEQ ID NO: 120601 - DNA, 67 bp, Homo sapiens
attttaggttcaggttttccggttacggtggcaggaagttcaatcttggtcccagcttttacagtga

SEQ ID NO: 120602 - DNA, 73 bp, Homo sapiens
ttttccggttacggtggcaggaagttcaatcttggtcccagcttttacagtgagaccagcaaggagcttcaca

SEQ ID NO: 120603 - DNA, 76 bp, Homo sapiens
tacggtggcaggaagttcaatcttggtcccagcttttacagtgagaccagcaaggagcttcacatcgaggaagatt

SEQ ID NO: 120604 - DNA, 75 bp, Homo sapiens
aggaagttcaatcttggtcccagcttttacagtgagaccagcaaggagcttcacatcgaggaagatttctggggc

SEQ ID NO: 120605 - DNA, 76 bp, Homo sapiens
aatcttggtcccagcttttacagtgagaccagcaaggagcttcacatcgaggaagatttctggggcctctgaattg

SEQ ID NO: 120606 - DNA, 74 bp, Homo sapiens
cttttacagtgagaccagcaaggagcttcacatcgaggaagatttctggggcctctgaattggaaaagattatt

SEQ ID NO: 120607 - DNA, 79 bp, Homo sapiens
tgagaccagcaaggagcttcacatcgaggaagatttctggggcctctgaattggaaaagattatttatgatgttatcaa

SEQ ID NO: 120608 - DNA, 72 bp, Homo sapiens
atttaaggtcagaggcctatttgataagacaaaaatcaaaaatagataccttgtgtgtccacagcctggatt

SEQ ID NO: 120609 - DNA, 73 bp, Homo sapiens
agaggcctatttgataagacaaaaatcaaaaatagataccttgtgtgtccacagcctggatttcctctgtggg

SEQ ID NO: 120610 - DNA, 74 bp, Homo sapiens
ttgataagacaaaaatcaaaaatagataccttgtgtgtccacagcctggatttcctctgtgggtctgcttggtt

SEQ ID NO: 120611 - DNA, 74 bp, Homo sapiens
aaaaatcaaaaatagataccttgtgtgtccacagcctggatttcctctgtgggtctgcttggtttgctagcacc

SEQ ID NO: 120612 - DNA, 76 bp, Homo sapiens
aatagataccttgtgtgtccacagcctggatttcctctgtgggtctgcttggtttgctagcaccctgcctgtttaa

SEQ ID NO: 120613 - DNA, 75 bp, Homo sapiens
agcctggatttcctctgtgggtctgcttggtttgctagcaccctgcctgtttaaggccttcacgcggtaggcata

SEQ ID NO: 120614 - DNA, 73 bp, Homo sapiens
atttcctctgtgggtctgcttggtttgctagcaccctgcctgtttaaggccttcacgcggtaggcataccatt

SEQ ID NO: 120615 - DNA, 75 bp, Homo sapiens
tgggtctgcttggtttgctagcaccctgcctgtttaaggccttcacgcggtaggcataccatttgccttcctcaa

SEQ ID NO: 120616 - DNA, 75 bp, Homo sapiens
ttggtttgctagcaccctgcctgtttaaggccttcacgcggtaggcataccatttgccttcctcaagacctgtca

SEQ ID NO: 120617 - DNA, 73 bp, Homo sapiens
accctgcctgtttaaggccttcacgcggtaggcataccatttgccttcctcaagacctgtcacttccattctg

SEQ ID NO: 120618 - DNA, 75 bp, Homo sapiens
tgtttaaggccttcacgcggtaggcataccatttgccttcctcaagacctgtcacttccattctgtcagaaaaca

SEQ ID NO: 120619 - DNA, 74 bp, Homo sapiens
acgcggtaggcataccatttgccttcctcaagacctgtcacttccattctgtcagaaaacagaataggatgttt

SEQ ID NO: 120620 - DNA, 78 bp, Homo sapiens
taggcataccatttgccttcctcaagacctgtcacttccattctgtcagaaaacagaataggatgttttactgtgatg

SEQ ID NO: 120621 - DNA, 71 bp, Homo sapiens
ttttagtgactaggagtacacatttactctcatgccaaattaaaaacctactttgtttctgcaacaggttc

SEQ ID NO: 120622 - DNA, 73 bp, Homo sapiens
taggagtacacatttactctcatgccaaattaaaaacctactttgtttctgcaacaggttctccacaggcaac

SEQ ID NO: 120623 - DNA, 72 bp, Homo sapiens
atttactctcatgccaaattaaaaacctactttgtttctgcaacaggttctccacaggcaacccatttatca

SEQ ID NO: 120624 - DNA, 70 bp, Homo sapiens
caaattaaaaacctactttgtttctgcaacaggttctccacaggcaacccatttatcagaaccacgtgga

SEQ ID NO: 120625 - DNA, 71 bp, Homo sapiens
taaaaacctactttgtttctgcaacaggttctccacaggcaacccatttatcagaaccacgtggacatctt

SEQ ID NO: 120626 - DNA, 75 bp, Homo sapiens
ttgtttctgcaacaggttctccacaggcaacccatttatcagaaccacgtggacatctttcaactatatatcctt

SEQ ID NO: 120627 - DNA, 76 bp, Homo sapiens
aacaggttctccacaggcaacccatttatcagaaccacgtggacatctttcaactatatatcctttgatgcgtgaa

SEQ ID NO: 120628 - DNA, 76 bp, Homo sapiens
acaggcaacccatttatcagaaccacgtggacatctttcaactatatatcctttgatgcgtgaaccaccatcattt

SEQ ID NO: 120629 - DNA, 75 bp, Homo sapiens
aaccacgtggacatctttcaactatatatcctttgatgcgtgaaccaccatcatttttaggtggatcccatgtta

SEQ ID NO: 120630 - DNA, 77 bp, Homo sapiens
acatctttcaactatatatcctttgatgcgtgaaccaccatcatttttaggtggatcccatgttaagaagatgctat

SEQ ID NO: 120631 - DNA, 78 bp, Homo sapiens
ttcaactatatatcctttgatgcgtgaaccaccatcatttttaggtggatcccatgttaagaagatgctattggctgt

SEQ ID NO: 120632 - DNA, 79 bp, Homo sapiens
tttgatgcgtgaaccaccatcatttttaggtggatcccatgttaagaagatgctattggctgttcgatctctccattta

SEQ ID NO: 120633 - DNA, 76 bp, Homo sapiens
cgtgaaccaccatcatttttaggtggatcccatgttaagaagatgctattggctgttcgatctctccatttaacat

SEQ ID NO: 120634 - DNA, 76 bp, Homo sapiens
atcatttttaggtggatcccatgttaagaagatgctattggctgttcgatctctccatttaacattctctggtggg

SEQ ID NO: 120635 - DNA, 77 bp, Homo sapiens
ttaggtggatcccatgttaagaagatgctattggctgttcgatctctccatttaacattctctggtgggtcaggtac

SEQ ID NO: 120636 - DNA, 76 bp, Homo sapiens
atgttaagaagatgctattggctgttcgatctctccatttaacattctctggtgggtcaggtaccgctacaacatt

SEQ ID NO: 120637 - DNA, 77 bp, Homo sapiens
aagatgctattggctgttcgatctctccatttaacattctctggtgggtcaggtaccgctacaacatttggaagaga

SEQ ID NO: 120638 - DNA, 77 bp, Homo sapiens
tgttcgatctctccatttaacattctctggtgggtcaggtaccgctacaacatttggaagagagagtcagtcttaca

SEQ ID NO: 120639 - DNA, 76 bp, Homo sapiens
atctctccatttaacattctctggtgggtcaggtaccgctacaacatttggaagagagagtcagtcttacacaggc

SEQ ID NO: 120640 - DNA, 74 bp, Homo sapiens
aaaaacaggcaacaagattaggtaagaaatcatcaagaatgtactcacttgcaggagttgacatatttacaggt

SEQ ID NO: 120641 - DNA, 80 bp, Homo sapiens
aacaagattaggtaagaaatcatcaagaatgtactcacttgcaggagttgacatatttacaggttcatcaacatatgcag

SEQ ID NO: 120642 - DNA, 81 bp, Homo sapiens
ttaggtaagaaatcatcaagaatgtactcacttgcaggagttgacatatttacaggttcatcaacatatgcaggttctcca

SEQ ID NO: 120643 - DNA, 81 bp, Homo sapiens
tcaagaatgtactcacttgcaggagttgacatatttacaggttcatcaacatatgcaggttctccagggccacatttgtta

SEQ ID NO: 120644 - DNA, 79 bp, Homo sapiens
aatgtactcacttgcaggagttgacatatttacaggttcatcaacatatgcaggttctccagggccacatttgttacga

SEQ ID NO: 120645 - DNA, 76 bp, Homo sapiens
aggagttgacatatttacaggttcatcaacatatgcaggttctccagggccacatttgttacgagcacaaacttta

SEQ ID NO: 120646 - DNA, 74 bp, Homo sapiens
atatttacaggttcatcaacatatgcaggttctccagggccacatttgttacgagcacaaactttaaataagta

SEQ ID NO: 120647 - DNA, 72 bp, Homo sapiens
aggttcatcaacatatgcaggttctccagggccacatttgttacgagcacaaactttaaataagtactcttt

SEQ ID NO: 120648 - DNA, 71 bp, Homo sapiens
aacatatgcaggttctccagggccacatttgttacgagcacaaactttaaataagtactcttttccttgaa

SEQ ID NO: 120649 - DNA, 71 bp, Homo sapiens
ttctccagggccacatttgttacgagcacaaactttaaataagtactcttttccttgaacaagatcaggaa

SEQ ID NO: 120650 - DNA, 71 bp, Homo sapiens
ccacatttgttacgagcacaaactttaaataagtactcttttccttgaacaagatcaggaactgtgaattc

SEQ ID NO: 120651 - DNA, 75 bp, Homo sapiens
tgttacgagcacaaactttaaataagtactcttttccttgaacaagatcaggaactgtgaattctagatcagtca

SEQ ID NO: 120652 - DNA, 73 bp, Homo sapiens
caaactttaaataagtactcttttccttgaacaagatcaggaactgtgaattctagatcagtcacaaagtcca

SEQ ID NO: 120653 - DNA, 73 bp, Homo sapiens
aaataagtactcttttccttgaacaagatcaggaactgtgaattctagatcagtcacaaagtccataacctgg

SEQ ID NO: 120654 - DNA, 75 bp, Homo sapiens
ttttccttgaacaagatcaggaactgtgaattctagatcagtcacaaagtccataacctgggacaaagaaataca

SEQ ID NO: 120655 - DNA, 75 bp, Homo sapiens
aagatcaggaactgtgaattctagatcagtcacaaagtccataacctgggacaaagaaatacagttaatcagtta

SEQ ID NO: 120656 - DNA, 73 bp, Homo sapiens
aggaactgtgaattctagatcagtcacaaagtccataacctgggacaaagaaatacagttaatcagttatttc

SEQ ID NO: 120657 - DNA, 77 bp, Homo sapiens
ccctactctcatttttggcattgatgcagtgctgctcaaaactcactttagtccatgttttccggctgacttctcgt

SEQ ID NO: 120658 - DNA, 76 bp, Homo sapiens
atttttggcattgatgcagtgctgctcaaaactcactttagtccatgttttccggctgacttctcgtttttcaaca

SEQ ID NO: 120659 - DNA, 76 bp, Homo sapiens
attgatgcagtgctgctcaaaactcactttagtccatgttttccggctgacttctcgtttttcaacaacgtatcca

SEQ ID NO: 120660 - DNA, 72 bp, Homo sapiens
tgctgctcaaaactcactttagtccatgttttccggctgacttctcgtttttcaacaacgtatccagttaac

SEQ ID NO: 120661 - DNA, 67 bp, Homo sapiens
aaaactcactttagtccatgttttccggctgacttctcgtttttcaacaacgtatccagttaacgga

SEQ ID NO: 120662 - DNA, 70 bp, Homo sapiens
tttagtccatgttttccggctgacttctcgtttttcaacaacgtatccagttaacggacttcctccatca

SEQ ID NO: 120663 - DNA, 71 bp, Homo sapiens
ttttccggctgacttctcgtttttcaacaacgtatccagttaacggacttcctccatcatcatcaggtggt

SEQ ID NO: 120664 - DNA, 72 bp, Homo sapiens
ttctcgtttttcaacaacgtatccagttaacggacttcctccatcatcatcaggtggttcccaagtcaaatg

SEQ ID NO: 120665 - DNA, 73 bp, Homo sapiens
gtttttcaacaacgtatccagttaacggacttcctccatcatcatcaggtggttcccaagtcaaatgtactga

SEQ ID NO: 120666 - DNA, 76 bp, Homo sapiens
gtatccagttaacggacttcctccatcatcatcaggtggttcccaagtcaaatgtactgagtccttggttatatca

SEQ ID NO: 120667 - DNA, 74 bp, Homo sapiens
ttaacggacttcctccatcatcatcaggtggttcccaagtcaaatgtactgagtccttggttatatcaccaaat

SEQ ID NO: 120668 - DNA, 75 bp, Homo sapiens
ttcctccatcatcatcaggtggttcccaagtcaaatgtactgagtccttggttatatcaccaaatttcaattctt

SEQ ID NO: 120669 - DNA, 72 bp, Homo sapiens
atcaggtggttcccaagtcaaatgtactgagtccttggttatatcaccaaatttcaattctttgggtgcact

SEQ ID NO: 120670 - DNA, 74 bp, Homo sapiens
ccaagtcaaatgtactgagtccttggttatatcaccaaatttcaattctttgggtgcacttgggcgagctgaaa

SEQ ID NO: 120671 - DNA, 71 bp, Homo sapiens
aaatgtactgagtccttggttatatcaccaaatttcaattctttgggtgcacttgggcgagctgaaaaaaa

SEQ ID NO: 120672 - DNA, 73 bp, Homo sapiens
agtccttggttatatcaccaaatttcaattctttgggtgcacttgggcgagctgaaaaaaaatgcactcacga

SEQ ID NO: 120673 - DNA, 76 bp, Homo sapiens
tatatcaccaaatttcaattctttgggtgcacttgggcgagctgaaaaaaaatgcactcacgagtcactgttaata

SEQ ID NO: 120674 - DNA, 73 bp, Homo sapiens
ttgttaatactgccaaatcaccttagatgataaatgttttgttccttaccaattacattgacatcaatttccc

SEQ ID NO: 120675 - DNA, 73 bp, Homo sapiens
ctgccaaatcaccttagatgataaatgttttgttccttaccaattacattgacatcaatttccccagaaattg

SEQ ID NO: 120676 - DNA, 71 bp, Homo sapiens
tagatgataaatgttttgttccttaccaattacattgacatcaatttccccagaaattgttttcacacggt

SEQ ID NO: 120677 - DNA, 68 bp, Homo sapiens
atgttttgttccttaccaattacattgacatcaatttccccagaaattgttttcacacggttttctaa

SEQ ID NO: 120678 - DNA, 69 bp, Homo sapiens
gttccttaccaattacattgacatcaatttccccagaaattgttttcacacggttttctaatttcagtg

SEQ ID NO: 120679 - DNA, 72 bp, Homo sapiens
tacattgacatcaatttccccagaaattgttttcacacggttttctaatttcagtgtataaatgcccttgtc

SEQ ID NO: 120680 - DNA, 71 bp, Homo sapiens
cagaaattgttttcacacggttttctaatttcagtgtataaatgcccttgtctgaacgttcacttggagaa

SEQ ID NO: 120681 - DNA, 72 bp, Homo sapiens
attgttttcacacggttttctaatttcagtgtataaatgcccttgtctgaacgttcacttggagaaatgaca

SEQ ID NO: 120682 - DNA, 72 bp, Homo sapiens
acggttttctaatttcagtgtataaatgcccttgtctgaacgttcacttggagaaatgacaagttcggcata

SEQ ID NO: 120683 - DNA, 77 bp, Homo sapiens
tcagtgtataaatgcccttgtctgaacgttcacttggagaaatgacaagttcggcataggcagacaaggtcttcatt

SEQ ID NO: 120684 - DNA, 76 bp, Homo sapiens
gtataaatgcccttgtctgaacgttcacttggagaaatgacaagttcggcataggcagacaaggtcttcattttca

SEQ ID NO: 120685 - DNA, 73 bp, Homo sapiens
cttgtctgaacgttcacttggagaaatgacaagttcggcataggcagacaaggtcttcattttcacccggtcc

SEQ ID NO: 120686 - DNA, 72 bp, Homo sapiens
cacttggagaaatgacaagttcggcataggcagacaaggtcttcattttcacccggtcccctgtttctagta

SEQ ID NO: 120687 - DNA, 70 bp, Homo sapiens
agaaatgacaagttcggcataggcagacaaggtcttcattttcacccggtcccctgtttctagtacttta

SEQ ID NO: 120688 - DNA, 69 bp, Homo sapiens
aagttcggcataggcagacaaggtcttcattttcacccggtcccctgtttctagtactttatctccaaa

SEQ ID NO: 120689 - DNA, 68 bp, Homo sapiens
ataggcagacaaggtcttcattttcacccggtcccctgtttctagtactttatctccaaaacaccagg

SEQ ID NO: 120690 - DNA, 67 bp, Homo sapiens
aaggtcttcattttcacccggtcccctgtttctagtactttatctccaaaacaccaggttgcagttg

SEQ ID NO: 120691 - DNA, 69 bp, Homo sapiens
ttttcacccggtcccctgtttctagtactttatctccaaaacaccaggttgcagttggccttggatagc

SEQ ID NO: 120692 - DNA, 72 bp, Homo sapiens
ctgtttctagtactttatctccaaaacaccaggttgcagttggccttggatagcctgtacttggaaccagga

SEQ ID NO: 120693 - DNA, 74 bp, Homo sapiens
tactttatctccaaaacaccaggttgcagttggccttggatagcctgtacttggaaccaggatcgtgataggat

SEQ ID NO: 120694 - DNA, 74 bp, Homo sapiens
tccaaaacaccaggttgcagttggccttggatagcctgtacttggaaccaggatcgtgataggatttgggacaa

SEQ ID NO: 120695 - DNA, 73 bp, Homo sapiens
accaggttgcagttggccttggatagcctgtacttggaaccaggatcgtgataggatttgggacaataacttc

SEQ ID NO: 120696 - DNA, 74 bp, Homo sapiens
tggccttggatagcctgtacttggaaccaggatcgtgataggatttgggacaataacttccagaccatctttaa

SEQ ID NO: 120697 - DNA, 74 bp, Homo sapiens
atagcctgtacttggaaccaggatcgtgataggatttgggacaataacttccagaccatctttaaatgcactta

SEQ ID NO: 120698 - DNA, 73 bp, Homo sapiens
tacttggaaccaggatcgtgataggatttgggacaataacttccagaccatctttaaatgcacttaaatccat

SEQ ID NO: 120699 - DNA, 74 bp, Homo sapiens
gatcgtgataggatttgggacaataacttccagaccatctttaaatgcacttaaatccattgttggttcaacta

SEQ ID NO: 120700 - DNA, 71 bp, Homo sapiens
aggatttgggacaataacttccagaccatctttaaatgcacttaaatccattgttggttcaactacaaaga

SEQ ID NO: 120701 - DNA, 75 bp, Homo sapiens
aaagtagctatgtgctattccccgatctaaaaataaaatatctatttaccaaatgcatcgtcagcggtgagagga

SEQ ID NO: 120702 - DNA, 75 bp, Homo sapiens
tatgtgctattccccgatctaaaaataaaatatctatttaccaaatgcatcgtcagcggtgagaggaccaagaat

SEQ ID NO: 120703 - DNA, 77 bp, Homo sapiens
gatctaaaaataaaatatctatttaccaaatgcatcgtcagcggtgagaggaccaagaatttcagatggatctgaaa

SEQ ID NO: 120704 - DNA, 78 bp, Homo sapiens
taaaatatctatttaccaaatgcatcgtcagcggtgagaggaccaagaatttcagatggatctgaaacaccagcttta

SEQ ID NO: 120705 - DNA, 78 bp, Homo sapiens
tatctatttaccaaatgcatcgtcagcggtgagaggaccaagaatttcagatggatctgaaacaccagctttattttc

SEQ ID NO: 120706 - DNA, 82 bp, Homo sapiens
aatgcatcgtcagcggtgagaggaccaagaatttcagatggatctgaaacaccagctttattttctgcagatactctatata

SEQ ID NO: 120707 - DNA, 77 bp, Homo sapiens
agcggtgagaggaccaagaatttcagatggatctgaaacaccagctttattttctgcagatactctatataaatatt

SEQ ID NO: 120708 - DNA, 77 bp, Homo sapiens
gagaggaccaagaatttcagatggatctgaaacaccagctttattttctgcagatactctatataaatatttatttc

SEQ ID NO: 120709 - DNA, 75 bp, Homo sapiens
ttcagatggatctgaaacaccagctttattttctgcagatactctatataaatatttatttcctttttccaatcc

SEQ ID NO: 120710 - DNA, 72 bp, Homo sapiens
ggatctgaaacaccagctttattttctgcagatactctatataaatatttatttcctttttccaatccggta

SEQ ID NO: 120711 - DNA, 70 bp, Homo sapiens
caccagctttattttctgcagatactctatataaatatttatttcctttttccaatccggtaacctacga

SEQ ID NO: 120712 - DNA, 70 bp, Homo sapiens
ttttctgcagatactctatataaatatttatttcctttttccaatccggtaacctacgattatgaattaa

SEQ ID NO: 120713 - DNA, 69 bp, Homo sapiens
cagatactctatataaatatttatttcctttttccaatccggtaacctacgattatgaattaatatttg

SEQ ID NO: 120714 - DNA, 65 bp, Homo sapiens
atataaatatttatttcctttttccaatccggtaacctacgattatgaattaatatttgtaaaaa

SEQ ID NO: 120715 - DNA, 76 bp, Homo sapiens
tatgtccatgatccacattgaatattcttttttatatgcaaatgacctaccttgtaagtcagttcagggacaagtt

SEQ ID NO: 120716 - DNA, 77 bp, Homo sapiens
gatccacattgaatattcttttttatatgcaaatgacctaccttgtaagtcagttcagggacaagtttcatattgca

SEQ ID NO: 120717 - DNA, 73 bp, Homo sapiens
ttcttttttatatgcaaatgacctaccttgtaagtcagttcagggacaagtttcatattgcaacgaatccaat

SEQ ID NO: 120718 - DNA, 75 bp, Homo sapiens
ttatatgcaaatgacctaccttgtaagtcagttcagggacaagtttcatattgcaacgaatccaattatcttttc

SEQ ID NO: 120719 - DNA, 71 bp, Homo sapiens
aaatgacctaccttgtaagtcagttcagggacaagtttcatattgcaacgaatccaattatcttttccttc

SEQ ID NO: 120720 - DNA, 77 bp, Homo sapiens
taagtcagttcagggacaagtttcatattgcaacgaatccaattatcttttccttcttcgcatcgctcaattatata

SEQ ID NO: 120721 - DNA, 77 bp, Homo sapiens
ttcagggacaagtttcatattgcaacgaatccaattatcttttccttcttcgcatcgctcaattatatagcctaata

SEQ ID NO: 120722 - DNA, 75 bp, Homo sapiens
aagtttcatattgcaacgaatccaattatcttttccttcttcgcatcgctcaattatatagcctaatattgggct

SEQ ID NO: 120723 - DNA, 77 bp, Homo sapiens
tattgcaacgaatccaattatcttttccttcttcgcatcgctcaattatatagcctaatattgggcttcctccatct

SEQ ID NO: 120724 - DNA, 76 bp, Homo sapiens
aatccaattatcttttccttcttcgcatcgctcaattatatagcctaatattgggcttcctccatctttcagagga

SEQ ID NO: 120725 - DNA, 74 bp, Homo sapiens
ttttccttcttcgcatcgctcaattatatagcctaatattgggcttcctccatctttcagaggaggttcccatt

SEQ ID NO: 120726 - DNA, 81 bp, Homo sapiens
ttcgcatcgctcaattatatagcctaatattgggcttcctccatctttcagaggaggttcccatttgagctgaactgatga

SEQ ID NO: 120727 - DNA, 79 bp, Homo sapiens
aattatatagcctaatattgggcttcctccatctttcagaggaggttcccatttgagctgaactgatgactgagtctga

SEQ ID NO: 120728 - DNA, 80 bp, Homo sapiens
taatattgggcttcctccatctttcagaggaggttcccatttgagctgaactgatgactgagtctgatctgaggaagtta

SEQ ID NO: 120729 - DNA, 78 bp, Homo sapiens
cttcctccatctttcagaggaggttcccatttgagctgaactgatgactgagtctgatctgaggaagttaggtttaca

SEQ ID NO: 120730 - DNA, 77 bp, Homo sapiens
tctttcagaggaggttcccatttgagctgaactgatgactgagtctgatctgaggaagttaggtttacaggaggact

SEQ ID NO: 120731 - DNA, 76 bp, Homo sapiens
agaggaggttcccatttgagctgaactgatgactgagtctgatctgaggaagttaggtttacaggaggacttggtc

SEQ ID NO: 120732 - DNA, 77 bp, Homo sapiens
atttgagctgaactgatgactgagtctgatctgaggaagttaggtttacaggaggacttggtctctctggaataaaa

SEQ ID NO: 120733 - DNA, 76 bp, Homo sapiens
ctgaactgatgactgagtctgatctgaggaagttaggtttacaggaggacttggtctctctggaataaaagaagga

SEQ ID NO: 120734 - DNA, 73 bp, Homo sapiens
agtctgatctgaggaagttaggtttacaggaggacttggtctctctggaataaaagaaggagttggagcatac

SEQ ID NO: 120735 - DNA, 72 bp, Homo sapiens
tctgaggaagttaggtttacaggaggacttggtctctctggaataaaagaaggagttggagcataccattta

SEQ ID NO: 120736 - DNA, 75 bp, Homo sapiens
taatatctggatttcatgcagtaattatttcccttttttgatgggcttaccaattggatcagcaactttgacgaa

SEQ ID NO: 120737 - DNA, 72 bp, Homo sapiens
atttcatgcagtaattatttcccttttttgatgggcttaccaattggatcagcaactttgacgaagggtgtg

SEQ ID NO: 120738 - DNA, 73 bp, Homo sapiens
tttttgatgggcttaccaattggatcagcaactttgacgaagggtgtggctgcacttggttttccaactccaa

SEQ ID NO: 120739 - DNA, 73 bp, Homo sapiens
gcttaccaattggatcagcaactttgacgaagggtgtggctgcacttggttttccaactccaattcgattttg

SEQ ID NO: 120740 - DNA, 70 bp, Homo sapiens
aactttgacgaagggtgtggctgcacttggttttccaactccaattcgattttgggctctcactcggaaa

SEQ ID NO: 120741 - DNA, 71 bp, Homo sapiens
aagggtgtggctgcacttggttttccaactccaattcgattttgggctctcactcggaaactgtactcctg

SEQ ID NO: 120742 - DNA, 73 bp, Homo sapiens
tgcacttggttttccaactccaattcgattttgggctctcactcggaaactgtactcctgtccttctaccaca

SEQ ID NO: 120743 - DNA, 73 bp, Homo sapiens
ttttccaactccaattcgattttgggctctcactcggaaactgtactcctgtccttctaccacatcagtaaca

SEQ ID NO: 120744 - DNA, 75 bp, Homo sapiens
aactccaattcgattttgggctctcactcggaaactgtactcctgtccttctaccacatcagtaacagttgcaga

SEQ ID NO: 120745 - DNA, 77 bp, Homo sapiens
attttgggctctcactcggaaactgtactcctgtccttctaccacatcagtaacagttgcagacaggtcttcagctc

SEQ ID NO: 120746 - DNA, 83 bp, Homo sapiens
ctctcactcggaaactgtactcctgtccttctaccacatcagtaacagttgcagacaggtcttcagctctcacagtcatggca

SEQ ID NO: 120747 - DNA, 81 bp, Homo sapiens
aaactgtactcctgtccttctaccacatcagtaacagttgcagacaggtcttcagctctcacagtcatggcagtatcccac

SEQ ID NO: 120748 - DNA, 84 bp, Homo sapiens
tccttctaccacatcagtaacagttgcagacaggtcttcagctctcacagtcatggcagtatcccacctgatagaagtcttgtc

SEQ ID NO: 120749 - DNA, 84 bp, Homo sapiens
acatcagtaacagttgcagacaggtcttcagctctcacagtcatggcagtatcccacctgatagaagtcttgtctcttaattca

SEQ ID NO: 120750 - DNA, 83 bp, Homo sapiens
agtaacagttgcagacaggtcttcagctctcacagtcatggcagtatcccacctgatagaagtcttgtctcttaattcaatga

SEQ ID NO: 120751 - DNA, 81 bp, Homo sapiens
acaggtcttcagctctcacagtcatggcagtatcccacctgatagaagtcttgtctcttaattcaatgacgtagtttgtga

SEQ ID NO: 120752 - DNA, 84 bp, Homo sapiens
ttcagctctcacagtcatggcagtatcccacctgatagaagtcttgtctcttaattcaatgacgtagtttgtgatctcagcacc

SEQ ID NO: 120753 - DNA, 83 bp, Homo sapiens
acagtcatggcagtatcccacctgatagaagtcttgtctcttaattcaatgacgtagtttgtgatctcagcacctccatcata

SEQ ID NO: 120754 - DNA, 80 bp, Homo sapiens
agtatcccacctgatagaagtcttgtctcttaattcaatgacgtagtttgtgatctcagcacctccatcatactctggtg

SEQ ID NO: 120755 - DNA, 80 bp, Homo sapiens
atagaagtcttgtctcttaattcaatgacgtagtttgtgatctcagcacctccatcatactctggtggttcccatgtcag

SEQ ID NO: 120756 - DNA, 81 bp, Homo sapiens
ttaattcaatgacgtagtttgtgatctcagcacctccatcatactctggtggttcccatgtcagtgagacaccaaatcgat

SEQ ID NO: 120757 - DNA, 85 bp, Homo sapiens
tagtttgtgatctcagcacctccatcatactctggtggttcccatgtcagtgagacaccaaatcgattcacatcagtgatggtta

SEQ ID NO: 120758 - DNA, 80 bp, Homo sapiens
acctccatcatactctggtggttcccatgtcagtgagacaccaaatcgattcacatcagtgatggttacattcaaaggag

SEQ ID NO: 120759 - DNA, 79 bp, Homo sapiens
atactctggtggttcccatgtcagtgagacaccaaatcgattcacatcagtgatggttacattcaaaggagggcctgga

SEQ ID NO: 120760 - DNA, 81 bp, Homo sapiens
ttcccatgtcagtgagacaccaaatcgattcacatcagtgatggttacattcaaaggagggcctggaacatctggatttca

SEQ ID NO: 120761 - DNA, 80 bp, Homo sapiens
tgagacaccaaatcgattcacatcagtgatggttacattcaaaggagggcctggaacatctggatttcaccacagaagaa

SEQ ID NO: 120762 - DNA, 76 bp, Homo sapiens
aaatcgattcacatcagtgatggttacattcaaaggagggcctggaacatctggatttcaccacagaagaagaaaa

SEQ ID NO: 120763 - DNA, 77 bp, Homo sapiens
attcacatcagtgatggttacattcaaaggagggcctggaacatctggatttcaccacagaagaagaaaatatgagt

SEQ ID NO: 120764 - DNA, 68 bp, Homo sapiens
gactgcaatttacttaaaagctaacttgaatttacttaaaacttcttaccatatttactccttgcttc

SEQ ID NO: 120765 - DNA, 71 bp, Homo sapiens
aatttacttaaaacttcttaccatatttactccttgcttctacaggattgtcagtttctactggctcacca

SEQ ID NO: 120766 - DNA, 74 bp, Homo sapiens
aacttcttaccatatttactccttgcttctacaggattgtcagtttctactggctcaccagtgccaactctgtt

SEQ ID NO: 120767 - DNA, 78 bp, Homo sapiens
atatttactccttgcttctacaggattgtcagtttctactggctcaccagtgccaactctgtttcttgcactcacacg

SEQ ID NO: 120768 - DNA, 80 bp, Homo sapiens
tgcttctacaggattgtcagtttctactggctcaccagtgccaactctgtttcttgcactcacacggaataggtactcaa

SEQ ID NO: 120769 - DNA, 78 bp, Homo sapiens
tacaggattgtcagtttctactggctcaccagtgccaactctgtttcttgcactcacacggaataggtactcaactcc

SEQ ID NO: 120770 - DNA, 76 bp, Homo sapiens
gtttctactggctcaccagtgccaactctgtttcttgcactcacacggaataggtactcaactcctcctttctgta

SEQ ID NO: 120771 - DNA, 78 bp, Homo sapiens
tcaccagtgccaactctgtttcttgcactcacacggaataggtactcaactcctcctttctgtagaccagtgacagta

SEQ ID NO: 120772 - DNA, 76 bp, Homo sapiens
caactctgtttcttgcactcacacggaataggtactcaactcctcctttctgtagaccagtgacagtaaactcaca

SEQ ID NO: 120773 - DNA, 76 bp, Homo sapiens
tgtttcttgcactcacacggaataggtactcaactcctcctttctgtagaccagtgacagtaaactcacaactctc

SEQ ID NO: 120774 - DNA, 75 bp, Homo sapiens
acacggaataggtactcaactcctcctttctgtagaccagtgacagtaaactcacaactctctgcacggtctgtg

SEQ ID NO: 120775 - DNA, 76 bp, Homo sapiens
aataggtactcaactcctcctttctgtagaccagtgacagtaaactcacaactctctgcacggtctgtggccagaa

SEQ ID NO: 120776 - DNA, 74 bp, Homo sapiens
aactcctcctttctgtagaccagtgacagtaaactcacaactctctgcacggtctgtggccagaacccaggtct

SEQ ID NO: 120777 - DNA, 76 bp, Homo sapiens
tttctgtagaccagtgacagtaaactcacaactctctgcacggtctgtggccagaacccaggtctttctcttaatg

SEQ ID NO: 120778 - DNA, 77 bp, Homo sapiens
tgacagtaaactcacaactctctgcacggtctgtggccagaacccaggtctttctcttaatgtcacgtctttcaaca

SEQ ID NO: 120779 - DNA, 74 bp, Homo sapiens
actcacaactctctgcacggtctgtggccagaacccaggtctttctcttaatgtcacgtctttcaacaacgtaa

SEQ ID NO: 120780 - DNA, 73 bp, Homo sapiens
tctgcacggtctgtggccagaacccaggtctttctcttaatgtcacgtctttcaacaacgtaacctatgattt

SEQ ID NO: 120781 - DNA, 73 bp, Homo sapiens
gtctgtggccagaacccaggtctttctcttaatgtcacgtctttcaacaacgtaacctatgattttgcttcca

SEQ ID NO: 120782 - DNA, 71 bp, Homo sapiens
aacccaggtctttctcttaatgtcacgtctttcaacaacgtaacctatgattttgcttccaccatcagtta

SEQ ID NO: 120783 - DNA, 71 bp, Homo sapiens
tttctcttaatgtcacgtctttcaacaacgtaacctatgattttgcttccaccatcagttaaaggttcttc

SEQ ID NO: 120784 - DNA, 70 bp, Homo sapiens
cttaatgtcacgtctttcaacaacgtaacctatgattttgcttccaccatcagttaaaggttcttcccaa

SEQ ID NO: 120785 - DNA, 73 bp, Homo sapiens
tctttcaacaacgtaacctatgattttgcttccaccatcagttaaaggttcttcccaagcaaggctcacttca

SEQ ID NO: 120786 - DNA, 74 bp, Homo sapiens
taacctatgattttgcttccaccatcagttaaaggttcttcccaagcaaggctcacttcaccatcaaatgtttc

SEQ ID NO: 120787 - DNA, 76 bp, Homo sapiens
tatgattttgcttccaccatcagttaaaggttcttcccaagcaaggctcacttcaccatcaaatgtttctgtcact

SEQ ID NO: 120788 - DNA, 74 bp, Homo sapiens
ttccaccatcagttaaaggttcttcccaagcaaggctcacttcaccatcaaatgtttctgtcacttctaagtta

SEQ ID NO: 120789 - DNA, 76 bp, Homo sapiens
ttcccaagcaaggctcacttcaccatcaaatgtttctgtcacttctaagttacgtactggcccaggaacatctgaa

SEQ ID NO: 120790 - DNA, 76 bp, Homo sapiens
aaggctcacttcaccatcaaatgtttctgtcacttctaagttacgtactggcccaggaacatctgaaattcacata

SEQ ID NO: 120791 - DNA, 74 bp, Homo sapiens
accatcaaatgtttctgtcacttctaagttacgtactggcccaggaacatctgaaattcacatatagaggaatt

SEQ ID NO: 120792 - DNA, 71 bp, Homo sapiens
aaatgtttctgtcacttctaagttacgtactggcccaggaacatctgaaattcacatatagaggaattttt

SEQ ID NO: 120793 - DNA, 71 bp, Homo sapiens
ttaaattgtgctttgccaattaagtctgagagacccaagggcttaccaataacttttaaattgatgaatcc

SEQ ID NO: 120794 - DNA, 70 bp, Homo sapiens
ctttgccaattaagtctgagagacccaagggcttaccaataacttttaaattgatgaatccttctgcttt

SEQ ID NO: 120795 - DNA, 70 bp, Homo sapiens
aattaagtctgagagacccaagggcttaccaataacttttaaattgatgaatccttctgcttttccatgt

SEQ ID NO: 120796 - DNA, 72 bp, Homo sapiens
agagacccaagggcttaccaataacttttaaattgatgaatccttctgcttttccatgtttgttctgaagca

SEQ ID NO: 120797 - DNA, 71 bp, Homo sapiens
caagggcttaccaataacttttaaattgatgaatccttctgcttttccatgtttgttctgaagcacaattt

SEQ ID NO: 120798 - DNA, 70 bp, Homo sapiens
aacttttaaattgatgaatccttctgcttttccatgtttgttctgaagcacaattttatacctccctttg

SEQ ID NO: 120799 - DNA, 72 bp, Homo sapiens
ttaaattgatgaatccttctgcttttccatgtttgttctgaagcacaattttatacctccctttgtctcctt

SEQ ID NO: 120800 - DNA, 71 bp, Homo sapiens
cttctgcttttccatgtttgttctgaagcacaattttatacctccctttgtctcctttcttggcttctaaa

SEQ ID NO: 120801 - DNA, 71 bp, Homo sapiens
tttccatgtttgttctgaagcacaattttatacctccctttgtctcctttcttggcttctaaaattctgaa

SEQ ID NO: 120802 - DNA, 69 bp, Homo sapiens
gtttgttctgaagcacaattttatacctccctttgtctcctttcttggcttctaaaattctgaaagaag

SEQ ID NO: 120803 - DNA, 68 bp, Homo sapiens
caattttatacctccctttgtctcctttcttggcttctaaaattctgaaagaagtttgttcagccgta

SEQ ID NO: 120804 - DNA, 70 bp, Homo sapiens
ttatacctccctttgtctcctttcttggcttctaaaattctgaaagaagtttgttcagccgtagtatcaa

SEQ ID NO: 120805 - DNA, 71 bp, Homo sapiens
gtctcctttcttggcttctaaaattctgaaagaagtttgttcagccgtagtatcaatggtttttgtagata

SEQ ID NO: 120806 - DNA, 70 bp, Homo sapiens
cttggcttctaaaattctgaaagaagtttgttcagccgtagtatcaatggtttttgtagataaaggttca

SEQ ID NO: 120807 - DNA, 68 bp, Homo sapiens
ctaaaattctgaaagaagtttgttcagccgtagtatcaatggtttttgtagataaaggttcattttct

SEQ ID NO: 120808 - DNA, 69 bp, Homo sapiens
gaagtttgttcagccgtagtatcaatggtttttgtagataaaggttcattttctttaaaccattcagct

SEQ ID NO: 120809 - DNA, 71 bp, Homo sapiens
gttcagccgtagtatcaatggtttttgtagataaaggttcattttctttaaaccattcagcttctgctttg

SEQ ID NO: 120810 - DNA, 70 bp, Homo sapiens
agtatcaatggtttttgtagataaaggttcattttctttaaaccattcagcttctgctttggggtaggca

SEQ ID NO: 120811 - DNA, 73 bp, Homo sapiens
tttttgtagataaaggttcattttctttaaaccattcagcttctgctttggggtaggcatcatatggcaccac

SEQ ID NO: 120812 - DNA, 76 bp, Homo sapiens
agataaaggttcattttctttaaaccattcagcttctgctttggggtaggcatcatatggcaccaccattgtcaga

SEQ ID NO: 120813 - DNA, 79 bp, Homo sapiens
ttttctttaaaccattcagcttctgctttggggtaggcatcatatggcaccaccattgtcagaggcttgccaacatcaa

SEQ ID NO: 120814 - DNA, 80 bp, Homo sapiens
taaaccattcagcttctgctttggggtaggcatcatatggcaccaccattgtcagaggcttgccaacatcaaccacaagg

SEQ ID NO: 120815 - DNA, 82 bp, Homo sapiens
tctgctttggggtaggcatcatatggcaccaccattgtcagaggcttgccaacatcaaccacaaggtcttggtcagctgtct

SEQ ID NO: 120816 - DNA, 80 bp, Homo sapiens
gggtaggcatcatatggcaccaccattgtcagaggcttgccaacatcaaccacaaggtcttggtcagctgtcttgatttt

SEQ ID NO: 120817 - DNA, 83 bp, Homo sapiens
atcatatggcaccaccattgtcagaggcttgccaacatcaaccacaaggtcttggtcagctgtcttgatttttggtgcagcta

SEQ ID NO: 120818 - DNA, 81 bp, Homo sapiens
ccattgtcagaggcttgccaacatcaaccacaaggtcttggtcagctgtcttgatttttggtgcagctagtgagaaagata

SEQ ID NO: 120819 - DNA, 80 bp, Homo sapiens
aggcttgccaacatcaaccacaaggtcttggtcagctgtcttgatttttggtgcagctagtgagaaagataacatgtgaa

SEQ ID NO: 120820 - DNA, 78 bp, Homo sapiens
aacatcaaccacaaggtcttggtcagctgtcttgatttttggtgcagctagtgagaaagataacatgtgaacgctttc

SEQ ID NO: 120821 - DNA, 72 bp, Homo sapiens
aaatctaaactctgtgatattggaaggatattttaaaataaagggactgacctgccagttcaagcttagctc

SEQ ID NO: 120822 - DNA, 73 bp, Homo sapiens
tgatattggaaggatattttaaaataaagggactgacctgccagttcaagcttagctctggcttctttgtctt

SEQ ID NO: 120823 - DNA, 72 bp, Homo sapiens
ggatattttaaaataaagggactgacctgccagttcaagcttagctctggcttctttgtctttggcaataaa

SEQ ID NO: 120824 - DNA, 73 bp, Homo sapiens
tttaaaataaagggactgacctgccagttcaagcttagctctggcttctttgtctttggcaataaatctgtat

SEQ ID NO: 120825 - DNA, 76 bp, Homo sapiens
aagggactgacctgccagttcaagcttagctctggcttctttgtctttggcaataaatctgtattcaccctggtca

SEQ ID NO: 120826 - DNA, 76 bp, Homo sapiens
cagttcaagcttagctctggcttctttgtctttggcaataaatctgtattcaccctggtcacggggcttaatatca

SEQ ID NO: 120827 - DNA, 76 bp, Homo sapiens
ttagctctggcttctttgtctttggcaataaatctgtattcaccctggtcacggggcttaatatcacaaatctgta

SEQ ID NO: 120828 - DNA, 75 bp, Homo sapiens
cttctttgtctttggcaataaatctgtattcaccctggtcacggggcttaatatcacaaatctgtagtcgatgta

SEQ ID NO: 120829 - DNA, 74 bp, Homo sapiens
ctttggcaataaatctgtattcaccctggtcacggggcttaatatcacaaatctgtagtcgatgtatctttcct

SEQ ID NO: 120830 - DNA, 77 bp, Homo sapiens
aataaatctgtattcaccctggtcacggggcttaatatcacaaatctgtagtcgatgtatctttccttcactcatca

SEQ ID NO: 120831 - DNA, 78 bp, Homo sapiens
tattcaccctggtcacggggcttaatatcacaaatctgtagtcgatgtatctttccttcactcatcatctggtgttta

SEQ ID NO: 120832 - DNA, 77 bp, Homo sapiens
acggggcttaatatcacaaatctgtagtcgatgtatctttccttcactcatcatctggtgtttatcaccctggacaa

SEQ ID NO: 120833 - DNA, 80 bp, Homo sapiens
taatatcacaaatctgtagtcgatgtatctttccttcactcatcatctggtgtttatcaccctggacaacaaccatgtta

SEQ ID NO: 120834 - DNA, 77 bp, Homo sapiens
aatctgtagtcgatgtatctttccttcactcatcatctggtgtttatcaccctggacaacaaccatgttatttctta

SEQ ID NO: 120835 - DNA, 76 bp, Homo sapiens
atgtatctttccttcactcatcatctggtgtttatcaccctggacaacaaccatgttatttcttagccattggact

SEQ ID NO: 120836 - DNA, 76 bp, Homo sapiens
tccttcactcatcatctggtgtttatcaccctggacaacaaccatgttatttcttagccattggacttccacctta

SEQ ID NO: 120837 - DNA, 73 bp, Homo sapiens
atcatctggtgtttatcaccctggacaacaaccatgttatttcttagccattggacttccaccttatctttat

SEQ ID NO: 120838 - DNA, 72 bp, Homo sapiens
tggtgtttatcaccctggacaacaaccatgttatttcttagccattggacttccaccttatctttattgagt

SEQ ID NO: 120839 - DNA, 73 bp, Homo sapiens
tggacaacaaccatgttatttcttagccattggacttccaccttatctttattgagttctgctaaaaagacaa

SEQ ID NO: 120840 - DNA, 73 bp, Homo sapiens
aacaaccatgttatttcttagccattggacttccaccttatctttattgagttctgctaaaaagacaacatca

SEQ ID NO: 120841 - DNA, 74 bp, Homo sapiens
tatttcttagccattggacttccaccttatctttattgagttctgctaaaaagacaacatcagcaccaggggct

SEQ ID NO: 120842 - DNA, 74 bp, Homo sapiens
attggacttccaccttatctttattgagttctgctaaaaagacaacatcagcaccaggggcttcaagaatatct

SEQ ID NO: 120843 - DNA, 76 bp, Homo sapiens
accttatctttattgagttctgctaaaaagacaacatcagcaccaggggcttcaagaatatcttgtggaggcctga

SEQ ID NO: 120844 - DNA, 81 bp, Homo sapiens
tctttattgagttctgctaaaaagacaacatcagcaccaggggcttcaagaatatcttgtggaggcctgatgatctcaaca

SEQ ID NO: 120845 - DNA, 78 bp, Homo sapiens
aaagacaacatcagcaccaggggcttcaagaatatcttgtggaggcctgatgatctcaacaggaatttctggaaagaa

SEQ ID NO: 120846 - DNA, 75 bp, Homo sapiens
accaggggcttcaagaatatcttgtggaggcctgatgatctcaacaggaatttctggaaagaaaatgtgaaataa

SEQ ID NO: 120847 - DNA, 76 bp, Homo sapiens
ggcttcaagaatatcttgtggaggcctgatgatctcaacaggaatttctggaaagaaaatgtgaaataaatacaaa

SEQ ID NO: 120848 - DNA, 67 bp, Homo sapiens
ttaaaaaattggtaacattagaattgttttttcacttaatatgtaccttccacaaaaagtctagcac

SEQ ID NO: 120849 - DNA, 70 bp, Homo sapiens
ggtaacattagaattgttttttcacttaatatgtaccttccacaaaaagtctagcacgagacttcctgtc

SEQ ID NO: 120850 - DNA, 69 bp, Homo sapiens
agaattgttttttcacttaatatgtaccttccacaaaaagtctagcacgagacttcctgtcttctaccc

SEQ ID NO: 120851 - DNA, 74 bp, Homo sapiens
ttttcacttaatatgtaccttccacaaaaagtctagcacgagacttcctgtcttctaccccgcaagcatattca

SEQ ID NO: 120852 - DNA, 78 bp, Homo sapiens
ttaatatgtaccttccacaaaaagtctagcacgagacttcctgtcttctaccccgcaagcatattcacactcatcatc

SEQ ID NO: 120853 - DNA, 80 bp, Homo sapiens
cacaaaaagtctagcacgagacttcctgtcttctaccccgcaagcatattcacactcatcatccagcctgcaatctttta

SEQ ID NO: 120854 - DNA, 81 bp, Homo sapiens
aaagtctagcacgagacttcctgtcttctaccccgcaagcatattcacactcatcatccagcctgcaatcttttataatga

SEQ ID NO: 120855 - DNA, 81 bp, Homo sapiens
acttcctgtcttctaccccgcaagcatattcacactcatcatccagcctgcaatcttttataatgagtctgtgtatacttc

SEQ ID NO: 120856 - DNA, 81 bp, Homo sapiens
tcttctaccccgcaagcatattcacactcatcatccagcctgcaatcttttataatgagtctgtgtatacttccatctttt

SEQ ID NO: 120857 - DNA, 80 bp, Homo sapiens
cccgcaagcatattcacactcatcatccagcctgcaatcttttataatgagtctgtgtatacttccatctttttcaaatt

SEQ ID NO: 120858 - DNA, 80 bp, Homo sapiens
tcacactcatcatccagcctgcaatcttttataatgagtctgtgtatacttccatctttttcaaatttgtatctaaagga

SEQ ID NO: 120859 - DNA, 78 bp, Homo sapiens
catcatccagcctgcaatcttttataatgagtctgtgtatacttccatctttttcaaatttgtatctaaaggagacat

SEQ ID NO: 120860 - DNA, 76 bp, Homo sapiens
gcctgcaatcttttataatgagtctgtgtatacttccatctttttcaaatttgtatctaaaggagacattggatta

SEQ ID NO: 120861 - DNA, 79 bp, Homo sapiens
taatgagtctgtgtatacttccatctttttcaaatttgtatctaaaggagacattggattatcagttagcttgcaatga

SEQ ID NO: 120862 - DNA, 74 bp, Homo sapiens
agtgtatatatagctacagaaatagagaataaaaagatcttgcttactttttgccttctttgatttctctccca

SEQ ID NO: 120863 - DNA, 73 bp, Homo sapiens
tagctacagaaatagagaataaaaagatcttgcttactttttgccttctttgatttctctcccatttctgtac

SEQ ID NO: 120864 - DNA, 71 bp, Homo sapiens
cagaaatagagaataaaaagatcttgcttactttttgccttctttgatttctctcccatttctgtaccatt

SEQ ID NO: 120865 - DNA, 70 bp, Homo sapiens
aaaagatcttgcttactttttgccttctttgatttctctcccatttctgtaccattttacattggctttc

SEQ ID NO: 120866 - DNA, 73 bp, Homo sapiens
atcttgcttactttttgccttctttgatttctctcccatttctgtaccattttacattggctttctctctgga

SEQ ID NO: 120867 - DNA, 76 bp, Homo sapiens
ttttgccttctttgatttctctcccatttctgtaccattttacattggctttctctctggagagctggcaggagaa

SEQ ID NO: 120868 - DNA, 80 bp, Homo sapiens
ttgatttctctcccatttctgtaccattttacattggctttctctctggagagctggcaggagaagacagcgtcatcgaa

SEQ ID NO: 120869 - DNA, 81 bp, Homo sapiens
ccatttctgtaccattttacattggctttctctctggagagctggcaggagaagacagcgtcatcgaactcagtgactgtc

SEQ ID NO: 120870 - DNA, 83 bp, Homo sapiens
taccattttacattggctttctctctggagagctggcaggagaagacagcgtcatcgaactcagtgactgtctgatcttccaa

SEQ ID NO: 120871 - DNA, 83 bp, Homo sapiens
tttacattggctttctctctggagagctggcaggagaagacagcgtcatcgaactcagtgactgtctgatcttccaagtgttc

SEQ ID NO: 120872 - DNA, 83 bp, Homo sapiens
tttctctctggagagctggcaggagaagacagcgtcatcgaactcagtgactgtctgatcttccaagtgttccacaaattctg

SEQ ID NO: 120873 - DNA, 81 bp, Homo sapiens
gctggcaggagaagacagcgtcatcgaactcagtgactgtctgatcttccaagtgttccacaaattctgtcggggcttcta

SEQ ID NO: 120874 - DNA, 81 bp, Homo sapiens
agaagacagcgtcatcgaactcagtgactgtctgatcttccaagtgttccacaaattctgtcggggcttctatgatgagaa

SEQ ID NO: 120875 - DNA, 84 bp, Homo sapiens
tcatcgaactcagtgactgtctgatcttccaagtgttccacaaattctgtcggggcttctatgatgagaagctcagcaacagat

SEQ ID NO: 120876 - DNA, 81 bp, Homo sapiens
aactcagtgactgtctgatcttccaagtgttccacaaattctgtcggggcttctatgatgagaagctcagcaacagattta

SEQ ID NO: 120877 - DNA, 81 bp, Homo sapiens
actgtctgatcttccaagtgttccacaaattctgtcggggcttctatgatgagaagctcagcaacagatttatcttgtcca

SEQ ID NO: 120878 - DNA, 81 bp, Homo sapiens
aagtgttccacaaattctgtcggggcttctatgatgagaagctcagcaacagatttatcttgtccagcagtgacaatgtat

SEQ ID NO: 120879 - DNA, 83 bp, Homo sapiens
acaaattctgtcggggcttctatgatgagaagctcagcaacagatttatcttgtccagcagtgacaatgtattcaccttcatc

SEQ ID NO: 120880 - DNA, 85 bp, Homo sapiens
tctgtcggggcttctatgatgagaagctcagcaacagatttatcttgtccagcagtgacaatgtattcaccttcatctgggaagc

SEQ ID NO: 120881 - DNA, 85 bp, Homo sapiens
ttctatgatgagaagctcagcaacagatttatcttgtccagcagtgacaatgtattcaccttcatctgggaagccacagtcttta

SEQ ID NO: 120882 - DNA, 80 bp, Homo sapiens
agctcagcaacagatttatcttgtccagcagtgacaatgtattcaccttcatctgggaagccacagtctttaatggttaa

SEQ ID NO: 120883 - DNA, 79 bp, Homo sapiens
agatttatcttgtccagcagtgacaatgtattcaccttcatctgggaagccacagtctttaatggttaacatgtgcttg

SEQ ID NO: 120884 - DNA, 80 bp, Homo sapiens
ttgtccagcagtgacaatgtattcaccttcatctgggaagccacagtctttaatggttaacatgtgcttgtacttatcaa

SEQ ID NO: 120885 - DNA, 78 bp, Homo sapiens
agtgacaatgtattcaccttcatctgggaagccacagtctttaatggttaacatgtgcttgtacttatcaactctgta

SEQ ID NO: 120886 - DNA, 79 bp, Homo sapiens
atgtattcaccttcatctgggaagccacagtctttaatggttaacatgtgcttgtacttatcaactctgtatgagacac

SEQ ID NO: 120887 - DNA, 76 bp, Homo sapiens
atctgggaagccacagtctttaatggttaacatgtgcttgtacttatcaactctgtatgagacacggttgtcaaaa

SEQ ID NO: 120888 - DNA, 75 bp, Homo sapiens
aagccacagtctttaatggttaacatgtgcttgtacttatcaactctgtatgagacacggttgtcaaaaggcact

SEQ ID NO: 120889 - DNA, 75 bp, Homo sapiens
tttaatggttaacatgtgcttgtacttatcaactctgtatgagacacggttgtcaaaaggcacttcttcaccatt

SEQ ID NO: 120890 - DNA, 76 bp, Homo sapiens
ttaacatgtgcttgtacttatcaactctgtatgagacacggttgtcaaaaggcacttcttcaccatttttggtcca

SEQ ID NO: 120891 - DNA, 75 bp, Homo sapiens
tgtacttatcaactctgtatgagacacggttgtcaaaaggcacttcttcaccatttttggtccacttcagtgtta

SEQ ID NO: 120892 - DNA, 77 bp, Homo sapiens
tctgtatgagacacggttgtcaaaaggcacttcttcaccatttttggtccacttcagtgttacattgagacgattca

SEQ ID NO: 120893 - DNA, 72 bp, Homo sapiens
agacacggttgtcaaaaggcacttcttcaccatttttggtccacttcagtgttacattgagacgattcacct

SEQ ID NO: 120894 - DNA, 76 bp, Homo sapiens
ttgtcaaaaggcacttcttcaccatttttggtccacttcagtgttacattgagacgattcaccttgcaccagaatg

SEQ ID NO: 120895 - DNA, 76 bp, Homo sapiens
acttcttcaccatttttggtccacttcagtgttacattgagacgattcaccttgcaccagaatgtgacagatttct

SEQ ID NO: 120896 - DNA, 76 bp, Homo sapiens
atttttggtccacttcagtgttacattgagacgattcaccttgcaccagaatgtgacagatttcttctccattgtt

SEQ ID NO: 120897 - DNA, 80 bp, Homo sapiens
tgttacattgagacgattcaccttgcaccagaatgtgacagatttcttctccattgtttcaatatctttaagaggctcaa

SEQ ID NO: 120898 - DNA, 77 bp, Homo sapiens
acgattcaccttgcaccagaatgtgacagatttcttctccattgtttcaatatctttaagaggctcaacaatcctaa

SEQ ID NO: 120899 - DNA, 75 bp, Homo sapiens
atgtgacagatttcttctccattgtttcaatatctttaagaggctcaacaatcctaaggtcttcctctgttgtaa

SEQ ID NO: 120900 - DNA, 72 bp, Homo sapiens
ttcttctccattgtttcaatatctttaagaggctcaacaatcctaaggtcttcctctgttgtaaaggagaaa

SEQ ID NO: 120901 - DNA, 72 bp, Homo sapiens
tcaatatctttaagaggctcaacaatcctaaggtcttcctctgttgtaaaggagaaaaatatgttgatttta

SEQ ID NO: 120902 - DNA, 72 bp, Homo sapiens
aacagaaactgatgaaaaaatctctagtggtatataaattacttaccttctactattagattggctgcactt

SEQ ID NO: 120903 - DNA, 74 bp, Homo sapiens
atctctagtggtatataaattacttaccttctactattagattggctgcacttttaacattttcacctctgtga

SEQ ID NO: 120904 - DNA, 74 bp, Homo sapiens
gtggtatataaattacttaccttctactattagattggctgcacttttaacattttcacctctgtgattggtca

SEQ ID NO: 120905 - DNA, 75 bp, Homo sapiens
tacttaccttctactattagattggctgcacttttaacattttcacctctgtgattggtcaaagacacattatag

SEQ ID NO: 120906 - DNA, 76 bp, Homo sapiens
ttctactattagattggctgcacttttaacattttcacctctgtgattggtcaaagacacattatagttggcttgg

SEQ ID NO: 120907 - DNA, 78 bp, Homo sapiens
ttttaacattttcacctctgtgattggtcaaagacacattatagttggcttggtcatctaagtgtgcatctctaattc

SEQ ID NO: 120908 - DNA, 80 bp, Homo sapiens
ttttcacctctgtgattggtcaaagacacattatagttggcttggtcatctaagtgtgcatctctaattctgagggtgta

SEQ ID NO: 120909 - DNA, 79 bp, Homo sapiens
tgattggtcaaagacacattatagttggcttggtcatctaagtgtgcatctctaattctgagggtgtagactaggtctt

SEQ ID NO: 120910 - DNA, 76 bp, Homo sapiens
aaagacacattatagttggcttggtcatctaagtgtgcatctctaattctgagggtgtagactaggtctttttgga

SEQ ID NO: 120911 - DNA, 78 bp, Homo sapiens
attatagttggcttggtcatctaagtgtgcatctctaattctgagggtgtagactaggtctttttggagaatgatgta

SEQ ID NO: 120912 - DNA, 77 bp, Homo sapiens
cttggtcatctaagtgtgcatctctaattctgagggtgtagactaggtctttttggagaatgatgtattttgaacta

SEQ ID NO: 120913 - DNA, 77 bp, Homo sapiens
catctctaattctgagggtgtagactaggtctttttggagaatgatgtattttgaactatcaaatatagcttcttca

SEQ ID NO: 120914 - DNA, 76 bp, Homo sapiens
tctgagggtgtagactaggtctttttggagaatgatgtattttgaactatcaaatatagcttcttcatttctgaac

SEQ ID NO: 120915 - DNA, 75 bp, Homo sapiens
gtagactaggtctttttggagaatgatgtattttgaactatcaaatatagcttcttcatttctgaaccatttggc

SEQ ID NO: 120916 - DNA, 76 bp, Homo sapiens
ttttggagaatgatgtattttgaactatcaaatatagcttcttcatttctgaaccatttggctttggcaccttcag

SEQ ID NO: 120917 - DNA, 77 bp, Homo sapiens
atgtattttgaactatcaaatatagcttcttcatttctgaaccatttggctttggcaccttcagtattgacttcaca

SEQ ID NO: 120918 - DNA, 77 bp, Homo sapiens
tttgaactatcaaatatagcttcttcatttctgaaccatttggctttggcaccttcagtattgacttcacagttgaa

SEQ ID NO: 120919 - DNA, 75 bp, Homo sapiens
aaatatagcttcttcatttctgaaccatttggctttggcaccttcagtattgacttcacagttgaagacaacttc

SEQ ID NO: 120920 - DNA, 74 bp, Homo sapiens
ttcatttctgaaccatttggctttggcaccttcagtattgacttcacagttgaagacaacttcctgttgttcct

SEQ ID NO: 120921 - DNA, 71 bp, Homo sapiens
aaccatttggctttggcaccttcagtattgacttcacagttgaagacaacttcctgttgttccttcacccg

SEQ ID NO: 120922 - DNA, 71 bp, Homo sapiens
tttggcaccttcagtattgacttcacagttgaagacaacttcctgttgttccttcacccgggtgtccttaa

SEQ ID NO: 120923 - DNA, 71 bp, Homo sapiens
ttcagtattgacttcacagttgaagacaacttcctgttgttccttcacccgggtgtccttaagaggaacta

SEQ ID NO: 120924 - DNA, 70 bp, Homo sapiens
attgacttcacagttgaagacaacttcctgttgttccttcacccgggtgtccttaagaggaactacgatc

SEQ ID NO: 120925 - DNA, 68 bp, Homo sapiens
ttgaagacaacttcctgttgttccttcacccgggtgtccttaagaggaactacgatcctgagtttttc

SEQ ID NO: 120926 - DNA, 69 bp, Homo sapiens
ttgttccttcacccgggtgtccttaagaggaactacgatcctgagtttttctgaaagcaaccgacaaga

SEQ ID NO: 120927 - DNA, 72 bp, Homo sapiens
acaaacaaaaaaccctaaaagcaagaacaaacttaccaatgactgtcaagtgagctgctgctctggcggccc

SEQ ID NO: 120928 - DNA, 74 bp, Homo sapiens
aaaaaccctaaaagcaagaacaaacttaccaatgactgtcaagtgagctgctgctctggcggcccctaccatga

SEQ ID NO: 120929 - DNA, 79 bp, Homo sapiens
agcaagaacaaacttaccaatgactgtcaagtgagctgctgctctggcggcccctaccatgacaacgtaagtgcccata

SEQ ID NO: 120930 - DNA, 78 bp, Homo sapiens
aaacttaccaatgactgtcaagtgagctgctgctctggcggcccctaccatgacaacgtaagtgcccatatcttgtaa

SEQ ID NO: 120931 - DNA, 83 bp, Homo sapiens
aatgactgtcaagtgagctgctgctctggcggcccctaccatgacaacgtaagtgcccatatcttgtaatgtggcatctttca

SEQ ID NO: 120932 - DNA, 80 bp, Homo sapiens
aagtgagctgctgctctggcggcccctaccatgacaacgtaagtgcccatatcttgtaatgtggcatctttcacaactag

SEQ ID NO: 120933 - DNA, 75 bp, Homo sapiens
ctctggcggcccctaccatgacaacgtaagtgcccatatcttgtaatgtggcatctttcacaactaggaccctct

SEQ ID NO: 120934 - DNA, 73 bp, Homo sapiens
ccctaccatgacaacgtaagtgcccatatcttgtaatgtggcatctttcacaactaggaccctctttttacca

SEQ ID NO: 120935 - DNA, 76 bp, Homo sapiens
agtgcccatatcttgtaatgtggcatctttcacaactaggaccctctttttaccatcagcaataacgtcatattta

SEQ ID NO: 120936 - DNA, 77 bp, Homo sapiens
atatcttgtaatgtggcatctttcacaactaggaccctctttttaccatcagcaataacgtcatatttatctccaga

SEQ ID NO: 120937 - DNA, 78 bp, Homo sapiens
gcatctttcacaactaggaccctctttttaccatcagcaataacgtcatatttatctccagattcaagtgtcttatca

SEQ ID NO: 120938 - DNA, 76 bp, Homo sapiens
tttcacaactaggaccctctttttaccatcagcaataacgtcatatttatctccagattcaagtgtcttatcatcc

SEQ ID NO: 120939 - DNA, 75 bp, Homo sapiens
aggaccctctttttaccatcagcaataacgtcatatttatctccagattcaagtgtcttatcatccctcttccac

SEQ ID NO: 120940 - DNA, 78 bp, Homo sapiens
ttaccatcagcaataacgtcatatttatctccagattcaagtgtcttatcatccctcttccactggactggaaagctt

SEQ ID NO: 120941 - DNA, 75 bp, Homo sapiens
agcaataacgtcatatttatctccagattcaagtgtcttatcatccctcttccactggactggaaagctttcttt

SEQ ID NO: 120942 - DNA, 79 bp, Homo sapiens
tatttatctccagattcaagtgtcttatcatccctcttccactggactggaaagctttcttttgatatagagcagacaa

SEQ ID NO: 120943 - DNA, 77 bp, Homo sapiens
agattcaagtgtcttatcatccctcttccactggactggaaagctttcttttgatatagagcagacaaattcagcct

SEQ ID NO: 120944 - DNA, 75 bp, Homo sapiens
aagtgtcttatcatccctcttccactggactggaaagctttcttttgatatagagcagacaaattcagccttttc

SEQ ID NO: 120945 - DNA, 73 bp, Homo sapiens
cctcttccactggactggaaagctttcttttgatatagagcagacaaattcagccttttctccttcaagtatt

SEQ ID NO: 120946 - DNA, 72 bp, Homo sapiens
tggactggaaagctttcttttgatatagagcagacaaattcagccttttctccttcaagtatttcaaggttt

SEQ ID NO: 120947 - DNA, 73 bp, Homo sapiens
cttttgatatagagcagacaaattcagccttttctccttcaagtatttcaaggttttgaggctttgagataaa

SEQ ID NO: 120948 - DNA, 74 bp, Homo sapiens
cagacaaattcagccttttctccttcaagtatttcaaggttttgaggctttgagataaattcagcagccagttc

SEQ ID NO: 120949 - DNA, 72 bp, Homo sapiens
aaattcagccttttctccttcaagtatttcaaggttttgaggctttgagataaattcagcagccagttctgg

SEQ ID NO: 120950 - DNA, 71 bp, Homo sapiens
ttttctccttcaagtatttcaaggttttgaggctttgagataaattcagcagccagttctgggaagaaaaa

SEQ ID NO: 120951 - DNA, 72 bp, Homo sapiens
atttcaaggttttgaggctttgagataaattcagcagccagttctgggaagaaaaagttacaagatattaga

SEQ ID NO: 120952 - DNA, 71 bp, Homo sapiens
aaggttttgaggctttgagataaattcagcagccagttctgggaagaaaaagttacaagatattagaaaca

SEQ ID NO: 120953 - DNA, 74 bp, Homo sapiens
gcaagtgtgaattgttagaaataaaagattattcactgtagttttcataccatgtactttgactttgccatcgg

SEQ ID NO: 120954 - DNA, 73 bp, Homo sapiens
ttagaaataaaagattattcactgtagttttcataccatgtactttgactttgccatcggttcgagagcttgg

SEQ ID NO: 120955 - DNA, 73 bp, Homo sapiens
aataaaagattattcactgtagttttcataccatgtactttgactttgccatcggttcgagagcttgggagtc

SEQ ID NO: 120956 - DNA, 75 bp, Homo sapiens
actgtagttttcataccatgtactttgactttgccatcggttcgagagcttgggagtcgacagttgtagttgcca

SEQ ID NO: 120957 - DNA, 78 bp, Homo sapiens
ttttcataccatgtactttgactttgccatcggttcgagagcttgggagtcgacagttgtagttgccagcatcctcaa

SEQ ID NO: 120958 - DNA, 79 bp, Homo sapiens
tactttgactttgccatcggttcgagagcttgggagtcgacagttgtagttgccagcatcctcaaggtgagcgttctga

SEQ ID NO: 120959 - DNA, 79 bp, Homo sapiens
actttgccatcggttcgagagcttgggagtcgacagttgtagttgccagcatcctcaaggtgagcgttctgaatgacca

SEQ ID NO: 120960 - DNA, 79 bp, Homo sapiens
atcggttcgagagcttgggagtcgacagttgtagttgccagcatcctcaaggtgagcgttctgaatgaccaggattctc

SEQ ID NO: 120961 - DNA, 78 bp, Homo sapiens
ttgggagtcgacagttgtagttgccagcatcctcaaggtgagcgttctgaatgaccaggattctcttccgtccttcag

SEQ ID NO: 120962 - DNA, 79 bp, Homo sapiens
acagttgtagttgccagcatcctcaaggtgagcgttctgaatgaccaggattctcttccgtccttcagtcagtatttca

SEQ ID NO: 120963 - DNA, 80 bp, Homo sapiens
gtagttgccagcatcctcaaggtgagcgttctgaatgaccaggattctcttccgtccttcagtcagtatttcatatcttc

SEQ ID NO: 120964 - DNA, 79 bp, Homo sapiens
agcgttctgaatgaccaggattctcttccgtccttcagtcagtatttcatatcttcctgtttcaatgatctcctcatcc

SEQ ID NO: 120965 - DNA, 77 bp, Homo sapiens
atgaccaggattctcttccgtccttcagtcagtatttcatatcttcctgtttcaatgatctcctcatcccctttata

SEQ ID NO: 120966 - DNA, 76 bp, Homo sapiens
attctcttccgtccttcagtcagtatttcatatcttcctgtttcaatgatctcctcatcccctttataccaaatca

SEQ ID NO: 120967 - DNA, 78 bp, Homo sapiens
tccgtccttcagtcagtatttcatatcttcctgtttcaatgatctcctcatcccctttataccaaatcacttctgcgc

SEQ ID NO: 120968 - DNA, 76 bp, Homo sapiens
agtatttcatatcttcctgtttcaatgatctcctcatcccctttataccaaatcacttctgcgccaggtttggaga

SEQ ID NO: 120969 - DNA, 76 bp, Homo sapiens
tatcttcctgtttcaatgatctcctcatcccctttataccaaatcacttctgcgccaggtttggagacttcacaaa

SEQ ID NO: 120970 - DNA, 75 bp, Homo sapiens
tcaatgatctcctcatcccctttataccaaatcacttctgcgccaggtttggagacttcacaaaccagttttata

SEQ ID NO: 120971 - DNA, 72 bp, Homo sapiens
atctcctcatcccctttataccaaatcacttctgcgccaggtttggagacttcacaaaccagttttatagtg

SEQ ID NO: 120972 - DNA, 72 bp, Homo sapiens
aaatcacttctgcgccaggtttggagacttcacaaaccagttttatagtgtctgtttcactaacttcaatgt

SEQ ID NO: 120973 - DNA, 71 bp, Homo sapiens
cgccaggtttggagacttcacaaaccagttttatagtgtctgtttcactaacttcaatgttggcaagattt

SEQ ID NO: 120974 - DNA, 71 bp, Homo sapiens
gtttggagacttcacaaaccagttttatagtgtctgtttcactaacttcaatgttggcaagatttttggta

SEQ ID NO: 120975 - DNA, 71 bp, Homo sapiens
cacaaaccagttttatagtgtctgtttcactaacttcaatgttggcaagatttttggtaaagacagcttct

SEQ ID NO: 120976 - DNA, 75 bp, Homo sapiens
gtgtctgtttcactaacttcaatgttggcaagatttttggtaaagacagcttcttcttctgcaagcattgaaaaa

SEQ ID NO: 120977 - DNA, 72 bp, Homo sapiens
cactaacttcaatgttggcaagatttttggtaaagacagcttcttcttctgcaagcattgaaaaaacaaaaa

SEQ ID NO: 120978 - DNA, 74 bp, Homo sapiens
ttattttttcccaacacatatacttcacaaagaatgactttactcttacccagaactgtcagcatgccagaagt

SEQ ID NO: 120979 - DNA, 77 bp, Homo sapiens
acacatatacttcacaaagaatgactttactcttacccagaactgtcagcatgccagaagttctcgctgtccttact

SEQ ID NO: 120980 - DNA, 78 bp, Homo sapiens
ttcacaaagaatgactttactcttacccagaactgtcagcatgccagaagttctcgctgtccttacttcacaggaata

SEQ ID NO: 120981 - DNA, 77 bp, Homo sapiens
aaagaatgactttactcttacccagaactgtcagcatgccagaagttctcgctgtccttacttcacaggaatattca

SEQ ID NO: 120982 - DNA, 82 bp, Homo sapiens
ttactcttacccagaactgtcagcatgccagaagttctcgctgtccttacttcacaggaatattcagcttcatcatccagta

SEQ ID NO: 120983 - DNA, 85 bp, Homo sapiens
agaactgtcagcatgccagaagttctcgctgtccttacttcacaggaatattcagcttcatcatccagtagacatttgttgatga

SEQ ID NO: 120984 - DNA, 85 bp, Homo sapiens
atgccagaagttctcgctgtccttacttcacaggaatattcagcttcatcatccagtagacatttgttgatgacaagaatgcgca

SEQ ID NO: 120985 - DNA, 84 bp, Homo sapiens
aagttctcgctgtccttacttcacaggaatattcagcttcatcatccagtagacatttgttgatgacaagaatgcgcactgctc

SEQ ID NO: 120986 - DNA, 86 bp, Homo sapiens
tccttacttcacaggaatattcagcttcatcatccagtagacatttgttgatgacaagaatgcgcactgctcccttggatatgatg

SEQ ID NO: 120987 - DNA, 85 bp, Homo sapiens
acaggaatattcagcttcatcatccagtagacatttgttgatgacaagaatgcgcactgctcccttggatatgatgtcatatttt

SEQ ID NO: 120988 - DNA, 85 bp, Homo sapiens
atattcagcttcatcatccagtagacatttgttgatgacaagaatgcgcactgctcccttggatatgatgtcatattttttgccc

SEQ ID NO: 120989 - DNA, 78 bp, Homo sapiens
atccagtagacatttgttgatgacaagaatgcgcactgctcccttggatatgatgtcatattttttgccctttttaat

SEQ ID NO: 120990 - DNA, 80 bp, Homo sapiens
gtagacatttgttgatgacaagaatgcgcactgctcccttggatatgatgtcatattttttgccctttttaatttcagca

SEQ ID NO: 120991 - DNA, 77 bp, Homo sapiens
atgacaagaatgcgcactgctcccttggatatgatgtcatattttttgccctttttaatttcagcaccatctttaaa

SEQ ID NO: 120992 - DNA, 75 bp, Homo sapiens
atgcgcactgctcccttggatatgatgtcatattttttgccctttttaatttcagcaccatctttaaaccactta

SEQ ID NO: 120993 - DNA, 71 bp, Homo sapiens
gctcccttggatatgatgtcatattttttgccctttttaatttcagcaccatctttaaaccacttaaccta

SEQ ID NO: 120994 - DNA, 70 bp, Homo sapiens
ggatatgatgtcatattttttgccctttttaatttcagcaccatctttaaaccacttaacctatatttaa

SEQ ID NO: 120995 - DNA, 66 bp, Homo sapiens
ttttttgccctttttaatttcagcaccatctttaaaccacttaacctatatttaagataaatagat

SEQ ID NO: 120996 - DNA, 68 bp, Homo sapiens
gccctttttaatttcagcaccatctttaaaccacttaacctatatttaagataaatagattatcagtt

SEQ ID NO: 120997 - DNA, 75 bp, Homo sapiens
atataaagttatttgacagtacaagatgacaggtatacagtcacagaccttagcattttctcgggaaagttcaca

SEQ ID NO: 120998 - DNA, 75 bp, Homo sapiens
agttatttgacagtacaagatgacaggtatacagtcacagaccttagcattttctcgggaaagttcacactcaaa

SEQ ID NO: 120999 - DNA, 76 bp, Homo sapiens
tacaagatgacaggtatacagtcacagaccttagcattttctcgggaaagttcacactcaaatcgagccatttctt

SEQ ID NO: 121000 - DNA, 73 bp, Homo sapiens
acaggtatacagtcacagaccttagcattttctcgggaaagttcacactcaaatcgagccatttctttttctc

SEQ ID NO: 121001 - DNA, 72 bp, Homo sapiens
agtcacagaccttagcattttctcgggaaagttcacactcaaatcgagccatttctttttctctaacttgaa

SEQ ID NO: 121002 - DNA, 69 bp, Homo sapiens
accttagcattttctcgggaaagttcacactcaaatcgagccatttctttttctctaacttgaaggtcg

SEQ ID NO: 121003 - DNA, 71 bp, Homo sapiens
ttctcgggaaagttcacactcaaatcgagccatttctttttctctaacttgaaggtcggtgagtggtctta

SEQ ID NO: 121004 - DNA, 71 bp, Homo sapiens
aagttcacactcaaatcgagccatttctttttctctaacttgaaggtcggtgagtggtcttaagaattcca

SEQ ID NO: 121005 - DNA, 73 bp, Homo sapiens
aaatcgagccatttctttttctctaacttgaaggtcggtgagtggtcttaagaattccacatgaggagctgta

SEQ ID NO: 121006 - DNA, 77 bp, Homo sapiens
tctttttctctaacttgaaggtcggtgagtggtcttaagaattccacatgaggagctgtaagagaatgtcatcagaa

SEQ ID NO: 121007 - DNA, 78 bp, Homo sapiens
ttctctaacttgaaggtcggtgagtggtcttaagaattccacatgaggagctgtaagagaatgtcatcagaattcaaa

SEQ ID NO: 121008 - DNA, 76 bp, Homo sapiens
aaggtcggtgagtggtcttaagaattccacatgaggagctgtaagagaatgtcatcagaattcaaaatgaggtttc

SEQ ID NO: 121009 - DNA, 70 bp, Homo sapiens
attaaagaattgcaaatgaaaagtcctttgtaagaagaatacttacgcacgacattcaggttacaggaag

SEQ ID NO: 121010 - DNA, 71 bp, Homo sapiens
ttgcaaatgaaaagtcctttgtaagaagaatacttacgcacgacattcaggttacaggaagtcttaaaatc

SEQ ID NO: 121011 - DNA, 69 bp, Homo sapiens
aaaagtcctttgtaagaagaatacttacgcacgacattcaggttacaggaagtcttaaaatccttagca

SEQ ID NO: 121012 - DNA, 73 bp, Homo sapiens
taagaagaatacttacgcacgacattcaggttacaggaagtcttaaaatccttagcatcacaagtgtatgttt

SEQ ID NO: 121013 - DNA, 73 bp, Homo sapiens
agaatacttacgcacgacattcaggttacaggaagtcttaaaatccttagcatcacaagtgtatgttttaata

SEQ ID NO: 121014 - DNA, 72 bp, Homo sapiens
acgacattcaggttacaggaagtcttaaaatccttagcatcacaagtgtatgttttaatatcctctggggta

SEQ ID NO: 121015 - DNA, 75 bp, Homo sapiens
ttacaggaagtcttaaaatccttagcatcacaagtgtatgttttaatatcctctggggtacagtcatgtataaca

SEQ ID NO: 121016 - DNA, 73 bp, Homo sapiens
gaagtcttaaaatccttagcatcacaagtgtatgttttaatatcctctggggtacagtcatgtataacaagtt

SEQ ID NO: 121017 - DNA, 73 bp, Homo sapiens
aaatccttagcatcacaagtgtatgttttaatatcctctggggtacagtcatgtataacaagttttctgaccc

SEQ ID NO: 121018 - DNA, 75 bp, Homo sapiens
caagtgtatgttttaatatcctctggggtacagtcatgtataacaagttttctgaccctgccatcagcaacaatt

SEQ ID NO: 121019 - DNA, 75 bp, Homo sapiens
ttttaatatcctctggggtacagtcatgtataacaagttttctgaccctgccatcagcaacaatttcatacttct

SEQ ID NO: 121020 - DNA, 76 bp, Homo sapiens
atatcctctggggtacagtcatgtataacaagttttctgaccctgccatcagcaacaatttcatacttcttgcttt

SEQ ID NO: 121021 - DNA, 74 bp, Homo sapiens
tataacaagttttctgaccctgccatcagcaacaatttcatacttcttgcttttgaggatttctgtcccatttt

SEQ ID NO: 121022 - DNA, 74 bp, Homo sapiens
ttttctgaccctgccatcagcaacaatttcatacttcttgcttttgaggatttctgtcccatttttgaaccatt

SEQ ID NO: 121023 - DNA, 74 bp, Homo sapiens
ccatcagcaacaatttcatacttcttgcttttgaggatttctgtcccatttttgaaccatttcaccttagcatt

SEQ ID NO: 121024 - DNA, 72 bp, Homo sapiens
agcaacaatttcatacttcttgcttttgaggatttctgtcccatttttgaaccatttcaccttagcattttc

SEQ ID NO: 121025 - DNA, 73 bp, Homo sapiens
atacttcttgcttttgaggatttctgtcccatttttgaaccatttcaccttagcattttctctggagacttca

SEQ ID NO: 121026 - DNA, 74 bp, Homo sapiens
cttttgaggatttctgtcccatttttgaaccatttcaccttagcattttctctggagacttcacactccagcac

SEQ ID NO: 121027 - DNA, 77 bp, Homo sapiens
atttctgtcccatttttgaaccatttcaccttagcattttctctggagacttcacactccagcactgcagtggctcc

SEQ ID NO: 121028 - DNA, 76 bp, Homo sapiens
atttttgaaccatttcaccttagcattttctctggagacttcacactccagcactgcagtggctccctcttcgacc

SEQ ID NO: 121029 - DNA, 78 bp, Homo sapiens
atttcaccttagcattttctctggagacttcacactccagcactgcagtggctccctcttcgaccgtctggtcctcaa

SEQ ID NO: 121030 - DNA, 79 bp, Homo sapiens
cattttctctggagacttcacactccagcactgcagtggctccctcttcgaccgtctggtcctcaagaggcttagtgaa

SEQ ID NO: 121031 - DNA, 80 bp, Homo sapiens
tctggagacttcacactccagcactgcagtggctccctcttcgaccgtctggtcctcaagaggcttagtgaattcaactg

SEQ ID NO: 121032 - DNA, 73 bp, Homo sapiens
actgcagtggctccctcttcgaccgtctggtcctcaagaggcttagtgaattcaactgggggttctgaaagaa

SEQ ID NO: 121033 - DNA, 74 bp, Homo sapiens
tccctcttcgaccgtctggtcctcaagaggcttagtgaattcaactgggggttctgaaagaatcatactcatta

SEQ ID NO: 121034 - DNA, 73 bp, Homo sapiens
accgtctggtcctcaagaggcttagtgaattcaactgggggttctgaaagaatcatactcattagccaaggta

SEQ ID NO: 121035 - DNA, 73 bp, Homo sapiens
ttcatgagcctctgccttatacatgtttttaaaataagccttgtaattacctttcacaaagaggttggcgtga

SEQ ID NO: 121036 - DNA, 69 bp, Homo sapiens
ctgccttatacatgtttttaaaataagccttgtaattacctttcacaaagaggttggcgtgagttttga

SEQ ID NO: 121037 - DNA, 66 bp, Homo sapiens
gtttttaaaataagccttgtaattacctttcacaaagaggttggcgtgagttttgaaatcttttgc

SEQ ID NO: 121038 - DNA, 69 bp, Homo sapiens
aataagccttgtaattacctttcacaaagaggttggcgtgagttttgaaatcttttgctgttagttgga

SEQ ID NO: 121039 - DNA, 68 bp, Homo sapiens
cttgtaattacctttcacaaagaggttggcgtgagttttgaaatcttttgctgttagttggacttccc

SEQ ID NO: 121040 - DNA, 72 bp, Homo sapiens
tcacaaagaggttggcgtgagttttgaaatcttttgctgttagttggacttccccagcatcttctaacttta

SEQ ID NO: 121041 - DNA, 71 bp, Homo sapiens
agaggttggcgtgagttttgaaatcttttgctgttagttggacttccccagcatcttctaactttacatcc

SEQ ID NO: 121042 - DNA, 74 bp, Homo sapiens
ttttgaaatcttttgctgttagttggacttccccagcatcttctaactttacatccctcagagtaagtgtatga

SEQ ID NO: 121043 - DNA, 72 bp, Homo sapiens
atcttttgctgttagttggacttccccagcatcttctaactttacatccctcagagtaagtgtatgaacttt

SEQ ID NO: 121044 - DNA, 73 bp, Homo sapiens
tgttagttggacttccccagcatcttctaactttacatccctcagagtaagtgtatgaacttttccttctgaa

SEQ ID NO: 121045 - DNA, 71 bp, Homo sapiens
acttccccagcatcttctaactttacatccctcagagtaagtgtatgaacttttccttctgaacgtgggac

SEQ ID NO: 121046 - DNA, 69 bp, Homo sapiens
ttctaactttacatccctcagagtaagtgtatgaacttttccttctgaacgtgggaccacctagttgtt

SEQ ID NO: 121047 - DNA, 68 bp, Homo sapiens
tttacatccctcagagtaagtgtatgaacttttccttctgaacgtgggaccacctagttgtttttaaa

SEQ ID NO: 121048 - DNA, 66 bp, Homo sapiens
cctcagagtaagtgtatgaacttttccttctgaacgtgggaccacctagttgtttttaaaaaaaga

SEQ ID NO: 121049 - DNA, 69 bp, Homo sapiens
aactccagaaaaagaacgggaaagacaaggcatgcctgctttttaccttatcgctgggctctagtttct

SEQ ID NO: 121050 - DNA, 67 bp, Homo sapiens
aaaaagaacgggaaagacaaggcatgcctgctttttaccttatcgctgggctctagtttcttccctt

SEQ ID NO: 121051 - DNA, 73 bp, Homo sapiens
aaagacaaggcatgcctgctttttaccttatcgctgggctctagtttcttccctttgagataccattccactg

SEQ ID NO: 121052 - DNA, 74 bp, Homo sapiens
catgcctgctttttaccttatcgctgggctctagtttcttccctttgagataccattccactgggatatcttcg

SEQ ID NO: 121053 - DNA, 72 bp, Homo sapiens
tttttaccttatcgctgggctctagtttcttccctttgagataccattccactgggatatcttcgtaggaga

SEQ ID NO: 121054 - DNA, 77 bp, Homo sapiens
ttatcgctgggctctagtttcttccctttgagataccattccactgggatatcttcgtaggagagctcgcagtcgaa

SEQ ID NO: 121055 - DNA, 74 bp, Homo sapiens
ctagtttcttccctttgagataccattccactgggatatcttcgtaggagagctcgcagtcgaaggtggctgtt

SEQ ID NO: 121056 - DNA, 74 bp, Homo sapiens
ttcttccctttgagataccattccactgggatatcttcgtaggagagctcgcagtcgaaggtggctgtttcccc

SEQ ID NO: 121057 - DNA, 78 bp, Homo sapiens
ataccattccactgggatatcttcgtaggagagctcgcagtcgaaggtggctgtttcccctgcagtcacggtgacatc

SEQ ID NO: 121058 - DNA, 75 bp, Homo sapiens
actgggatatcttcgtaggagagctcgcagtcgaaggtggctgtttcccctgcagtcacggtgacatcctttaaa

SEQ ID NO: 121059 - DNA, 76 bp, Homo sapiens
atatcttcgtaggagagctcgcagtcgaaggtggctgtttcccctgcagtcacggtgacatcctttaaaggcctca

SEQ ID NO: 121060 - DNA, 75 bp, Homo sapiens
agagctcgcagtcgaaggtggctgtttcccctgcagtcacggtgacatcctttaaaggcctcagaagaccaatta

SEQ ID NO: 121061 - DNA, 73 bp, Homo sapiens
tcgaaggtggctgtttcccctgcagtcacggtgacatcctttaaaggcctcagaagaccaattactcgtgctt

SEQ ID NO: 121062 - DNA, 73 bp, Homo sapiens
tgtttcccctgcagtcacggtgacatcctttaaaggcctcagaagaccaattactcgtgcttttcgagaggga

SEQ ID NO: 121063 - DNA, 72 bp, Homo sapiens
ccctgcagtcacggtgacatcctttaaaggcctcagaagaccaattactcgtgcttttcgagagggaagaaa

SEQ ID NO: 121064 - DNA, 72 bp, Homo sapiens
tgacatcctttaaaggcctcagaagaccaattactcgtgcttttcgagagggaagaaacagctttgcgttac

SEQ ID NO: 121065 - DNA, 67 bp, Homo sapiens
tgaaaaagtgtttatttaatttccctgaaaaatatacaatacttacgcttaactcggaggtgggcac

SEQ ID NO: 121066 - DNA, 68 bp, Homo sapiens
gtgtttatttaatttccctgaaaaatatacaatacttacgcttaactcggaggtgggcactagattta

SEQ ID NO: 121067 - DNA, 71 bp, Homo sapiens
taatttccctgaaaaatatacaatacttacgcttaactcggaggtgggcactagatttaacattggcagct

SEQ ID NO: 121068 - DNA, 71 bp, Homo sapiens
aaaaatatacaatacttacgcttaactcggaggtgggcactagatttaacattggcagcttggaaatccac

SEQ ID NO: 121069 - DNA, 70 bp, Homo sapiens
acaatacttacgcttaactcggaggtgggcactagatttaacattggcagcttggaaatccaccccaccc

SEQ ID NO: 121070 - DNA, 72 bp, Homo sapiens
ttaactcggaggtgggcactagatttaacattggcagcttggaaatccaccccacccgtctggtccaggcga

SEQ ID NO: 121071 - DNA, 75 bp, Homo sapiens
tgggcactagatttaacattggcagcttggaaatccaccccacccgtctggtccaggcgacagttgtgcaaaaca

SEQ ID NO: 121072 - DNA, 72 bp, Homo sapiens
actagatttaacattggcagcttggaaatccaccccacccgtctggtccaggcgacagttgtgcaaaacaag

SEQ ID NO: 121073 - DNA, 71 bp, Homo sapiens
attggcagcttggaaatccaccccacccgtctggtccaggcgacagttgtgcaaaacaagggagtgtattt

SEQ ID NO: 121074 - DNA, 70 bp, Homo sapiens
ttggaaatccaccccacccgtctggtccaggcgacagttgtgcaaaacaagggagtgtattttgccttct

SEQ ID NO: 121075 - DNA, 71 bp, Homo sapiens
cacccgtctggtccaggcgacagttgtgcaaaacaagggagtgtattttgccttcttccttaatttcacaa

SEQ ID NO: 121076 - DNA, 72 bp, Homo sapiens
gtccaggcgacagttgtgcaaaacaagggagtgtattttgccttcttccttaatttcacaatcctgtaccaa

SEQ ID NO: 121077 - DNA, 70 bp, Homo sapiens
acagttgtgcaaaacaagggagtgtattttgccttcttccttaatttcacaatcctgtaccaacaaaaca

SEQ ID NO: 121078 - DNA, 69 bp, Homo sapiens
gtgcaaaacaagggagtgtattttgccttcttccttaatttcacaatcctgtaccaacaaaacagaaaa

SEQ ID NO: 121079 - DNA, 69 bp, Homo sapiens
gggagtgtattttgccttcttccttaatttcacaatcctgtaccaacaaaacagaaaaactttcataga

SEQ ID NO: 121080 - DNA, 73 bp, Homo sapiens
taattcacacagctcctttaggtgttgacaagttcagaaatagccttacaggtgtttggagtagggcctctcc

SEQ ID NO: 121081 - DNA, 69 bp, Homo sapiens
ctcctttaggtgttgacaagttcagaaatagccttacaggtgtttggagtagggcctctcccttgagtt

SEQ ID NO: 121082 - DNA, 71 bp, Homo sapiens
taggtgttgacaagttcagaaatagccttacaggtgtttggagtagggcctctcccttgagtttccagttg

SEQ ID NO: 121083 - DNA, 75 bp, Homo sapiens
ttcagaaatagccttacaggtgtttggagtagggcctctcccttgagtttccagttggcgtggatatcatcttca

SEQ ID NO: 121084 - DNA, 74 bp, Homo sapiens
aatagccttacaggtgtttggagtagggcctctcccttgagtttccagttggcgtggatatcatcttcagagat

SEQ ID NO: 121085 - DNA, 73 bp, Homo sapiens
gtgtttggagtagggcctctcccttgagtttccagttggcgtggatatcatcttcagagatttcggtttcaaa

SEQ ID NO: 121086 - DNA, 75 bp, Homo sapiens
agtagggcctctcccttgagtttccagttggcgtggatatcatcttcagagatttcggtttcaaagcgtgctgtc

SEQ ID NO: 121087 - DNA, 79 bp, Homo sapiens
ctcccttgagtttccagttggcgtggatatcatcttcagagatttcggtttcaaagcgtgctgtctcagtctccatcac

SEQ ID NO: 121088 - DNA, 80 bp, Homo sapiens
gtttccagttggcgtggatatcatcttcagagatttcggtttcaaagcgtgctgtctcagtctccatcacctccacactg

SEQ ID NO: 121089 - DNA, 83 bp, Homo sapiens
tggatatcatcttcagagatttcggtttcaaagcgtgctgtctcagtctccatcacctccacactgtgcaggggtcgcaccag

SEQ ID NO: 121090 - DNA, 78 bp, Homo sapiens
ttcagagatttcggtttcaaagcgtgctgtctcagtctccatcacctccacactgtgcaggggtcgcaccagtttaat

SEQ ID NO: 121091 - DNA, 76 bp, Homo sapiens
agatttcggtttcaaagcgtgctgtctcagtctccatcacctccacactgtgcaggggtcgcaccagtttaatttc

SEQ ID NO: 121092 - DNA, 76 bp, Homo sapiens
aaagcgtgctgtctcagtctccatcacctccacactgtgcaggggtcgcaccagtttaatttcccgatctagaaaa

SEQ ID NO: 121093 - DNA, 76 bp, Homo sapiens
tctcagtctccatcacctccacactgtgcaggggtcgcaccagtttaatttcccgatctagaaaagtgaagggcca

SEQ ID NO: 121094 - DNA, 75 bp, Homo sapiens
atcacctccacactgtgcaggggtcgcaccagtttaatttcccgatctagaaaagtgaagggccagcatgggtca

SEQ ID NO: 121095 - DNA, 74 bp, Homo sapiens
acactgtgcaggggtcgcaccagtttaatttcccgatctagaaaagtgaagggccagcatgggtcattagcctc

SEQ ID NO: 121096 - DNA, 71 bp, Homo sapiens
acaaataaccccaatgcttcaagagtgaaactcatggaaatttccttaccctcaatgtcaagttttcctga

SEQ ID NO: 121097 - DNA, 73 bp, Homo sapiens
aatgcttcaagagtgaaactcatggaaatttccttaccctcaatgtcaagttttcctgaggtcttatctgtcc

SEQ ID NO: 121098 - DNA, 73 bp, Homo sapiens
aagagtgaaactcatggaaatttccttaccctcaatgtcaagttttcctgaggtcttatctgtcccacagtca

SEQ ID NO: 121099 - DNA, 73 bp, Homo sapiens
aactcatggaaatttccttaccctcaatgtcaagttttcctgaggtcttatctgtcccacagtcacaggtgta

SEQ ID NO: 121100 - DNA, 73 bp, Homo sapiens
aatttccttaccctcaatgtcaagttttcctgaggtcttatctgtcccacagtcacaggtgtactgtccaata

SEQ ID NO: 121101 - DNA, 76 bp, Homo sapiens
aatgtcaagttttcctgaggtcttatctgtcccacagtcacaggtgtactgtccaatatctgatttcaaggctttc

SEQ ID NO: 121102 - DNA, 74 bp, Homo sapiens
aagttttcctgaggtcttatctgtcccacagtcacaggtgtactgtccaatatctgatttcaaggctttcttta

SEQ ID NO: 121103 - DNA, 78 bp, Homo sapiens
tcttatctgtcccacagtcacaggtgtactgtccaatatctgatttcaaggctttctttaggattagcatgcgtttct

SEQ ID NO: 121104 - DNA, 80 bp, Homo sapiens
tctgtcccacagtcacaggtgtactgtccaatatctgatttcaaggctttctttaggattagcatgcgtttcttgccatc

SEQ ID NO: 121105 - DNA, 77 bp, Homo sapiens
acaggtgtactgtccaatatctgatttcaaggctttctttaggattagcatgcgtttcttgccatctgccttaataa

SEQ ID NO: 121106 - DNA, 78 bp, Homo sapiens
tactgtccaatatctgatttcaaggctttctttaggattagcatgcgtttcttgccatctgccttaataacagcattt

SEQ ID NO: 121107 - DNA, 77 bp, Homo sapiens
tgatttcaaggctttctttaggattagcatgcgtttcttgccatctgccttaataacagcatttttggatggcttta

SEQ ID NO: 121108 - DNA, 74 bp, Homo sapiens
aaggctttctttaggattagcatgcgtttcttgccatctgccttaataacagcatttttggatggctttatttc

SEQ ID NO: 121109 - DNA, 75 bp, Homo sapiens
ctttaggattagcatgcgtttcttgccatctgccttaataacagcatttttggatggctttatttccttcccatc

SEQ ID NO: 121110 - DNA, 72 bp, Homo sapiens
atgcgtttcttgccatctgccttaataacagcatttttggatggctttatttccttcccatccttaaaccat

SEQ ID NO: 121111 - DNA, 75 bp, Homo sapiens
taataacagcatttttggatggctttatttccttcccatccttaaaccatttcactggtgcatctgctttgctaa

SEQ ID NO: 121112 - DNA, 73 bp, Homo sapiens
atttttggatggctttatttccttcccatccttaaaccatttcactggtgcatctgctttgctaatttcacac

SEQ ID NO: 121113 - DNA, 75 bp, Homo sapiens
atggctttatttccttcccatccttaaaccatttcactggtgcatctgctttgctaatttcacactgtagaataa

SEQ ID NO: 121114 - DNA, 78 bp, Homo sapiens
cttaaaccatttcactggtgcatctgctttgctaatttcacactgtagaataacttcatctttctctacaccagtata

SEQ ID NO: 121115 - DNA, 79 bp, Homo sapiens
tttcactggtgcatctgctttgctaatttcacactgtagaataacttcatctttctctacaccagtataatcttgaagt

SEQ ID NO: 121116 - DNA, 74 bp, Homo sapiens
gctttgctaatttcacactgtagaataacttcatctttctctacaccagtataatcttgaagttttcctgtaaa

SEQ ID NO: 121117 - DNA, 74 bp, Homo sapiens
tcacactgtagaataacttcatctttctctacaccagtataatcttgaagttttcctgtaaaatatgggtctcc

SEQ ID NO: 121118 - DNA, 73 bp, Homo sapiens
taacttcatctttctctacaccagtataatcttgaagttttcctgtaaaatatgggtctccctctgcaagtaa

SEQ ID NO: 121119 - DNA, 71 bp, Homo sapiens
tttctctacaccagtataatcttgaagttttcctgtaaaatatgggtctccctctgcaagtaaagtataag

SEQ ID NO: 121120 - DNA, 71 bp, Homo sapiens
ctacaccagtataatcttgaagttttcctgtaaaatatgggtctccctctgcaagtaaagtataagtgaaa

SEQ ID NO: 121121 - DNA, 68 bp, Homo sapiens
aatcttgaagttttcctgtaaaatatgggtctccctctgcaagtaaagtataagtgaaaagcttttat

SEQ ID NO: 121122 - DNA, 73 bp, Homo sapiens
taaaatttaaaaagcacttaccaagcacagtgagtttagcttctgaactcatccccatagcttctactctaat

SEQ ID NO: 121123 - DNA, 74 bp, Homo sapiens
ttaaaaagcacttaccaagcacagtgagtttagcttctgaactcatccccatagcttctactctaatttgggag

SEQ ID NO: 121124 - DNA, 77 bp, Homo sapiens
acttaccaagcacagtgagtttagcttctgaactcatccccatagcttctactctaatttgggaggtgtcatcaata

SEQ ID NO: 121125 - DNA, 78 bp, Homo sapiens
tgagtttagcttctgaactcatccccatagcttctactctaatttgggaggtgtcatcaatagacaggtctttgaatg

SEQ ID NO: 121126 - DNA, 80 bp, Homo sapiens
ttctgaactcatccccatagcttctactctaatttgggaggtgtcatcaatagacaggtctttgaatgtgatcgaatgag

SEQ ID NO: 121127 - DNA, 76 bp, Homo sapiens
atccccatagcttctactctaatttgggaggtgtcatcaatagacaggtctttgaatgtgatcgaatgagttttcc

SEQ ID NO: 121128 - DNA, 74 bp, Homo sapiens
cttctactctaatttgggaggtgtcatcaatagacaggtctttgaatgtgatcgaatgagttttcccttcgtct

SEQ ID NO: 121129 - DNA, 77 bp, Homo sapiens
actctaatttgggaggtgtcatcaatagacaggtctttgaatgtgatcgaatgagttttcccttcgtcttgcattga

SEQ ID NO: 121130 - DNA, 77 bp, Homo sapiens
aggtgtcatcaatagacaggtctttgaatgtgatcgaatgagttttcccttcgtcttgcattgagaccgacctggtg

SEQ ID NO: 121131 - DNA, 77 bp, Homo sapiens
atcaatagacaggtctttgaatgtgatcgaatgagttttcccttcgtcttgcattgagaccgacctggtggtgtgta

SEQ ID NO: 121132 - DNA, 77 bp, Homo sapiens
tttgaatgtgatcgaatgagttttcccttcgtcttgcattgagaccgacctggtggtgtgtaggcgctggtcattct

SEQ ID NO: 121133 - DNA, 77 bp, Homo sapiens
atgtgatcgaatgagttttcccttcgtcttgcattgagaccgacctggtggtgtgtaggcgctggtcattcttgaac

SEQ ID NO: 121134 - DNA, 74 bp, Homo sapiens
atgagttttcccttcgtcttgcattgagaccgacctggtggtgtgtaggcgctggtcattcttgaaccatttaa

SEQ ID NO: 121135 - DNA, 79 bp, Homo sapiens
ttcgtcttgcattgagaccgacctggtggtgtgtaggcgctggtcattcttgaaccatttaactcggatgttatcatga

SEQ ID NO: 121136 - DNA, 77 bp, Homo sapiens
attgagaccgacctggtggtgtgtaggcgctggtcattcttgaaccatttaactcggatgttatcatgagataactc

SEQ ID NO: 121137 - DNA, 78 bp, Homo sapiens
gtgtgtaggcgctggtcattcttgaaccatttaactcggatgttatcatgagataactccacagtaaatacagcactt

SEQ ID NO: 121138 - DNA, 76 bp, Homo sapiens
tggtcattcttgaaccatttaactcggatgttatcatgagataactccacagtaaatacagcactttccttctctt

SEQ ID NO: 121139 - DNA, 76 bp, Homo sapiens
ttgaaccatttaactcggatgttatcatgagataactccacagtaaatacagcactttccttctctttggcagtta

SEQ ID NO: 121140 - DNA, 78 bp, Homo sapiens
ttaactcggatgttatcatgagataactccacagtaaatacagcactttccttctctttggcagttacatctttgaga

SEQ ID NO: 121141 - DNA, 74 bp, Homo sapiens
agataactccacagtaaatacagcactttccttctctttggcagttacatctttgagaggggtgaggaatttga

SEQ ID NO: 121142 - DNA, 75 bp, Homo sapiens
taaatacagcactttccttctctttggcagttacatctttgagaggggtgaggaatttgagccggattcctatca

SEQ ID NO: 121143 - DNA, 71 bp, Homo sapiens
ctttccttctctttggcagttacatctttgagaggggtgaggaatttgagccggattcctatcaagaaaaa

SEQ ID NO: 121144 - DNA, 71 bp, Homo sapiens
cttctctttggcagttacatctttgagaggggtgaggaatttgagccggattcctatcaagaaaaaaaaga

SEQ ID NO: 121145 - DNA, 69 bp, Homo sapiens
ggcaaaaaaaatgattttggggtggactatttgataaaactatttaccttcaatgatcagtttgccact

SEQ ID NO: 121146 - DNA, 75 bp, Homo sapiens
atgattttggggtggactatttgataaaactatttaccttcaatgatcagtttgccacttgtgtgcttatcttca

SEQ ID NO: 121147 - DNA, 78 bp, Homo sapiens
gtggactatttgataaaactatttaccttcaatgatcagtttgccacttgtgtgcttatcttcagcttcaaacatgta

SEQ ID NO: 121148 - DNA, 80 bp, Homo sapiens
tgataaaactatttaccttcaatgatcagtttgccacttgtgtgcttatcttcagcttcaaacatgtattttgcttcatc

SEQ ID NO: 121149 - DNA, 79 bp, Homo sapiens
aaactatttaccttcaatgatcagtttgccacttgtgtgcttatcttcagcttcaaacatgtattttgcttcatcttca

SEQ ID NO: 121150 - DNA, 86 bp, Homo sapiens
ttcaatgatcagtttgccacttgtgtgcttatcttcagcttcaaacatgtattttgcttcatcttcaaaagcagctgacttgatca

SEQ ID NO: 121151 - DNA, 83 bp, Homo sapiens
gtttgccacttgtgtgcttatcttcagcttcaaacatgtattttgcttcatcttcaaaagcagctgacttgatcaccattgaa

SEQ ID NO: 121152 - DNA, 83 bp, Homo sapiens
acttgtgtgcttatcttcagcttcaaacatgtattttgcttcatcttcaaaagcagctgacttgatcaccattgaatgcttag

SEQ ID NO: 121153 - DNA, 83 bp, Homo sapiens
ttcagcttcaaacatgtattttgcttcatcttcaaaagcagctgacttgatcaccattgaatgcttagtgccatcctttataa

SEQ ID NO: 121154 - DNA, 81 bp, Homo sapiens
aaacatgtattttgcttcatcttcaaaagcagctgacttgatcaccattgaatgcttagtgccatcctttataagctcaaa

SEQ ID NO: 121155 - DNA, 85 bp, Homo sapiens
tattttgcttcatcttcaaaagcagctgacttgatcaccattgaatgcttagtgccatcctttataagctcaaatctgtcatcac

SEQ ID NO: 121156 - DNA, 84 bp, Homo sapiens
atcttcaaaagcagctgacttgatcaccattgaatgcttagtgccatcctttataagctcaaatctgtcatcacctgtgatttc

SEQ ID NO: 121157 - DNA, 82 bp, Homo sapiens
aagcagctgacttgatcaccattgaatgcttagtgccatcctttataagctcaaatctgtcatcacctgtgatttcctgggt

SEQ ID NO: 121158 - DNA, 79 bp, Homo sapiens
ttgatcaccattgaatgcttagtgccatcctttataagctcaaatctgtcatcacctgtgatttcctgggttcctttta

SEQ ID NO: 121159 - DNA, 76 bp, Homo sapiens
attgaatgcttagtgccatcctttataagctcaaatctgtcatcacctgtgatttcctgggttccttttagccaac

SEQ ID NO: 121160 - DNA, 72 bp, Homo sapiens
ccatcctttataagctcaaatctgtcatcacctgtgatttcctgggttccttttagccaacggaatgttttg

SEQ ID NO: 121161 - DNA, 72 bp, Homo sapiens
tttataagctcaaatctgtcatcacctgtgatttcctgggttccttttagccaacggaatgttttgggctcc

SEQ ID NO: 121162 - DNA, 69 bp, Homo sapiens
acctgtgatttcctgggttccttttagccaacggaatgttttgggctccctggatacttcacactcaaa

SEQ ID NO: 121163 - DNA, 68 bp, Homo sapiens
atttcctgggttccttttagccaacggaatgttttgggctccctggatacttcacactcaaacttagc

SEQ ID NO: 121164 - DNA, 71 bp, Homo sapiens
aacggaatgttttgggctccctggatacttcacactcaaacttagcctcatctttctcgaagactttaaca

SEQ ID NO: 121165 - DNA, 75 bp, Homo sapiens
ttttgggctccctggatacttcacactcaaacttagcctcatctttctcgaagactttaacatcactgagaggtg

SEQ ID NO: 121166 - DNA, 79 bp, Homo sapiens
tccctggatacttcacactcaaacttagcctcatctttctcgaagactttaacatcactgagaggtgtgatgaagataa

SEQ ID NO: 121167 - DNA, 79 bp, Homo sapiens
acactcaaacttagcctcatctttctcgaagactttaacatcactgagaggtgtgatgaagataagaggcaattctgaa

SEQ ID NO: 121168 - DNA, 77 bp, Homo sapiens
aaacttagcctcatctttctcgaagactttaacatcactgagaggtgtgatgaagataagaggcaattctgaaagaa

SEQ ID NO: 121169 - DNA, 80 bp, Homo sapiens
aagactttaacatcactgagaggtgtgatgaagataagaggcaattctgaaagaagtggacagtggatgaagtcagaata

SEQ ID NO: 121170 - DNA, 77 bp, Homo sapiens
aagtcttgcagagaaaatacaaaaacgtggctgacaagtagagcatacctttcactttcagattggctgcagatttg

SEQ ID NO: 121171 - DNA, 79 bp, Homo sapiens
gaaaatacaaaaacgtggctgacaagtagagcatacctttcactttcagattggctgcagatttggcattagcagcctg

SEQ ID NO: 121172 - DNA, 78 bp, Homo sapiens
aaaaacgtggctgacaagtagagcatacctttcactttcagattggctgcagatttggcattagcagcctggaaggaa

SEQ ID NO: 121173 - DNA, 82 bp, Homo sapiens
tgacaagtagagcatacctttcactttcagattggctgcagatttggcattagcagcctggaaggaaacctctcctgtcata

SEQ ID NO: 121174 - DNA, 80 bp, Homo sapiens
gtagagcatacctttcactttcagattggctgcagatttggcattagcagcctggaaggaaacctctcctgtcataccca

SEQ ID NO: 121175 - DNA, 82 bp, Homo sapiens
ttcactttcagattggctgcagatttggcattagcagcctggaaggaaacctctcctgtcatacccagctgacagttatgaa

SEQ ID NO: 121176 - DNA, 82 bp, Homo sapiens
attggctgcagatttggcattagcagcctggaaggaaacctctcctgtcatacccagctgacagttatgaaggatcagaata

SEQ ID NO: 121177 - DNA, 79 bp, Homo sapiens
atttggcattagcagcctggaaggaaacctctcctgtcatacccagctgacagttatgaaggatcagaatatgcttctt

SEQ ID NO: 121178 - DNA, 79 bp, Homo sapiens
attagcagcctggaaggaaacctctcctgtcatacccagctgacagttatgaaggatcagaatatgcttctttccatcc

SEQ ID NO: 121179 - DNA, 80 bp, Homo sapiens
aaggaaacctctcctgtcatacccagctgacagttatgaaggatcagaatatgcttctttccatcctcaatgatttcaca

SEQ ID NO: 121180 - DNA, 83 bp, Homo sapiens
tctcctgtcatacccagctgacagttatgaaggatcagaatatgcttctttccatcctcaatgatttcacagtcctgtttgga

SEQ ID NO: 121181 - DNA, 80 bp, Homo sapiens
atacccagctgacagttatgaaggatcagaatatgcttctttccatcctcaatgatttcacagtcctgtttggagtgagg

SEQ ID NO: 121182 - DNA, 77 bp, Homo sapiens
acagttatgaaggatcagaatatgcttctttccatcctcaatgatttcacagtcctgtttggagtgagggttagaag

SEQ ID NO: 121183 - DNA, 75 bp, Homo sapiens
aaggatcagaatatgcttctttccatcctcaatgatttcacagtcctgtttggagtgagggttagaaggaaagaa

SEQ ID NO: 121184 - DNA, 72 bp, Homo sapiens
acaaccaagcaacccctctcctatataattagctaatcttgacttacaggggaagctgtcaaaggctgtcct

SEQ ID NO: 121185 - DNA, 73 bp, Homo sapiens
aagcaacccctctcctatataattagctaatcttgacttacaggggaagctgtcaaaggctgtcctttcagct

SEQ ID NO: 121186 - DNA, 78 bp, Homo sapiens
tatataattagctaatcttgacttacaggggaagctgtcaaaggctgtcctttcagcttccactggccgtgaacatca

SEQ ID NO: 121187 - DNA, 75 bp, Homo sapiens
aattagctaatcttgacttacaggggaagctgtcaaaggctgtcctttcagcttccactggccgtgaacatcagg

SEQ ID NO: 121188 - DNA, 74 bp, Homo sapiens
acttacaggggaagctgtcaaaggctgtcctttcagcttccactggccgtgaacatcaggttcagaaagttcaa

SEQ ID NO: 121189 - DNA, 75 bp, Homo sapiens
ggaagctgtcaaaggctgtcctttcagcttccactggccgtgaacatcaggttcagaaagttcaatttcaaagtg

SEQ ID NO: 121190 - DNA, 74 bp, Homo sapiens
tttcagcttccactggccgtgaacatcaggttcagaaagttcaatttcaaagtgggctgtttcaccaacaaaca

SEQ ID NO: 121191 - DNA, 73 bp, Homo sapiens
ttccactggccgtgaacatcaggttcagaaagttcaatttcaaagtgggctgtttcaccaacaaacacctcta

SEQ ID NO: 121192 - DNA, 73 bp, Homo sapiens
tgaacatcaggttcagaaagttcaatttcaaagtgggctgtttcaccaacaaacacctctactccgtacagag

SEQ ID NO: 121193 - DNA, 71 bp, Homo sapiens
ttcagaaagttcaatttcaaagtgggctgtttcaccaacaaacacctctactccgtacagaggcttttcca

SEQ ID NO: 121194 - DNA, 69 bp, Homo sapiens
ttcaatttcaaagtgggctgtttcaccaacaaacacctctactccgtacagaggcttttccacttttat

SEQ ID NO: 121195 - DNA, 70 bp, Homo sapiens
ttcaaagtgggctgtttcaccaacaaacacctctactccgtacagaggcttttccacttttattagtcga

SEQ ID NO: 121196 - DNA, 72 bp, Homo sapiens
tttcaccaacaaacacctctactccgtacagaggcttttccacttttattagtcgagctgaaatgatacagt

SEQ ID NO: 121197 - DNA, 71 bp, Homo sapiens
acaaacacctctactccgtacagaggcttttccacttttattagtcgagctgaaatgatacagttttgtta

SEQ ID NO: 121198 - DNA, 75 bp, Homo sapiens
tactccgtacagaggcttttccacttttattagtcgagctgaaatgatacagttttgttagcatgactgaactaa

SEQ ID NO: 121199 - DNA, 74 bp, Homo sapiens
aataaactgcagattcagatagggtaaattttacattgttgagcaactcaccctcaacagtaacatttgccttg

SEQ ID NO: 121200 - DNA, 74 bp, Homo sapiens
agattcagatagggtaaattttacattgttgagcaactcaccctcaacagtaacatttgccttggtcttgtctg

SEQ ID NO: 121201 - DNA, 78 bp, Homo sapiens
aaattttacattgttgagcaactcaccctcaacagtaacatttgccttggtcttgtctgtgccacagtcacacacata

SEQ ID NO: 121202 - DNA, 79 bp, Homo sapiens
attgttgagcaactcaccctcaacagtaacatttgccttggtcttgtctgtgccacagtcacacacatattcgccttta

SEQ ID NO: 121203 - DNA, 76 bp, Homo sapiens
aactcaccctcaacagtaacatttgccttggtcttgtctgtgccacagtcacacacatattcgcctttatctttaa

SEQ ID NO: 121204 - DNA, 74 bp, Homo sapiens
aacagtaacatttgccttggtcttgtctgtgccacagtcacacacatattcgcctttatctttaaggtccgcct

SEQ ID NO: 121205 - DNA, 76 bp, Homo sapiens
tgccacagtcacacacatattcgcctttatctttaaggtccgcctttttgatttttaagatgcggcgcaggccatc

SEQ ID NO: 121206 - DNA, 75 bp, Homo sapiens
cacacatattcgcctttatctttaaggtccgcctttttgatttttaagatgcggcgcaggccatctgccttgata

SEQ ID NO: 121207 - DNA, 74 bp, Homo sapiens
tattcgcctttatctttaaggtccgcctttttgatttttaagatgcggcgcaggccatctgccttgatagaata

SEQ ID NO: 121208 - DNA, 74 bp, Homo sapiens
ttatctttaaggtccgcctttttgatttttaagatgcggcgcaggccatctgccttgatagaatatttgggtga

SEQ ID NO: 121209 - DNA, 76 bp, Homo sapiens
cgcctttttgatttttaagatgcggcgcaggccatctgccttgatagaatatttgggtgaagggacaatctcttca

SEQ ID NO: 121210 - DNA, 77 bp, Homo sapiens
atttttaagatgcggcgcaggccatctgccttgatagaatatttgggtgaagggacaatctcttcaccatctttgaa

SEQ ID NO: 121211 - DNA, 79 bp, Homo sapiens
aagatgcggcgcaggccatctgccttgatagaatatttgggtgaagggacaatctcttcaccatctttgaaccatttca

SEQ ID NO: 121212 - DNA, 76 bp, Homo sapiens
ccatctgccttgatagaatatttgggtgaagggacaatctcttcaccatctttgaaccatttcactggtacatctt

SEQ ID NO: 121213 - DNA, 78 bp, Homo sapiens
ttgatagaatatttgggtgaagggacaatctcttcaccatctttgaaccatttcactggtacatctttgctcacttca

SEQ ID NO: 121214 - DNA, 75 bp, Homo sapiens
aatatttgggtgaagggacaatctcttcaccatctttgaaccatttcactggtacatctttgctcacttcacact

SEQ ID NO: 121215 - DNA, 77 bp, Homo sapiens
aagggacaatctcttcaccatctttgaaccatttcactggtacatctttgctcacttcacacttcaaagtaatctca

SEQ ID NO: 121216 - DNA, 77 bp, Homo sapiens
atctttgaaccatttcactggtacatctttgctcacttcacacttcaaagtaatctcatccttctccactgcagttt

SEQ ID NO: 121217 - DNA, 78 bp, Homo sapiens
atttcactggtacatctttgctcacttcacacttcaaagtaatctcatccttctccactgcagttttgtcatgtaatt

SEQ ID NO: 121218 - DNA, 81 bp, Homo sapiens
tacatctttgctcacttcacacttcaaagtaatctcatccttctccactgcagttttgtcatgtaatttcacagtgaagta

SEQ ID NO: 121219 - DNA, 80 bp, Homo sapiens
ttgctcacttcacacttcaaagtaatctcatccttctccactgcagttttgtcatgtaatttcacagtgaagtagggatc

SEQ ID NO: 121220 - DNA, 77 bp, Homo sapiens
ttcaaagtaatctcatccttctccactgcagttttgtcatgtaatttcacagtgaagtagggatcggcctctgtaaa

SEQ ID NO: 121221 - DNA, 77 bp, Homo sapiens
taatctcatccttctccactgcagttttgtcatgtaatttcacagtgaagtagggatcggcctctgtaaaagacatt

SEQ ID NO: 121222 - DNA, 76 bp, Homo sapiens
ttctccactgcagttttgtcatgtaatttcacagtgaagtagggatcggcctctgtaaaagacatttagcataaaa

SEQ ID NO: 121223 - DNA, 74 bp, Homo sapiens
cagttttgtcatgtaatttcacagtgaagtagggatcggcctctgtaaaagacatttagcataaaattagaaga

SEQ ID NO: 121224 - DNA, 79 bp, Homo sapiens
ctcccatgattcagaaactggctatctggttatacttggttacatttacctaagaccttcagctgtgctgtggagctca

SEQ ID NO: 121225 - DNA, 77 bp, Homo sapiens
attcagaaactggctatctggttatacttggttacatttacctaagaccttcagctgtgctgtggagctcagctcct

SEQ ID NO: 121226 - DNA, 80 bp, Homo sapiens
ttatacttggttacatttacctaagaccttcagctgtgctgtggagctcagctccttgacttgagcttttatctgagata

SEQ ID NO: 121227 - DNA, 85 bp, Homo sapiens
ttacatttacctaagaccttcagctgtgctgtggagctcagctccttgacttgagcttttatctgagatatatcatccaatgtca

SEQ ID NO: 121228 - DNA, 85 bp, Homo sapiens
taagaccttcagctgtgctgtggagctcagctccttgacttgagcttttatctgagatatatcatccaatgtcacttctttcatt

SEQ ID NO: 121229 - DNA, 85 bp, Homo sapiens
ctgtgctgtggagctcagctccttgacttgagcttttatctgagatatatcatccaatgtcacttctttcatttccaatttgtga

SEQ ID NO: 121230 - DNA, 83 bp, Homo sapiens
tgtggagctcagctccttgacttgagcttttatctgagatatatcatccaatgtcacttctttcatttccaatttgtgagtct

SEQ ID NO: 121231 - DNA, 81 bp, Homo sapiens
tccttgacttgagcttttatctgagatatatcatccaatgtcacttctttcatttccaatttgtgagtcttgccctcagaa

SEQ ID NO: 121232 - DNA, 83 bp, Homo sapiens
ttgagcttttatctgagatatatcatccaatgtcacttctttcatttccaatttgtgagtcttgccctcagaagagatgagta

SEQ ID NO: 121233 - DNA, 84 bp, Homo sapiens
tgagatatatcatccaatgtcacttctttcatttccaatttgtgagtcttgccctcagaagagatgagtactgttctgcttgta

SEQ ID NO: 121234 - DNA, 82 bp, Homo sapiens
atatcatccaatgtcacttctttcatttccaatttgtgagtcttgccctcagaagagatgagtactgttctgcttgtatgga

SEQ ID NO: 121235 - DNA, 79 bp, Homo sapiens
acttctttcatttccaatttgtgagtcttgccctcagaagagatgagtactgttctgcttgtatggagtttggcatcat

SEQ ID NO: 121236 - DNA, 78 bp, Homo sapiens
atttccaatttgtgagtcttgccctcagaagagatgagtactgttctgcttgtatggagtttggcatcatttttgaac

SEQ ID NO: 121237 - DNA, 79 bp, Homo sapiens
aatttgtgagtcttgccctcagaagagatgagtactgttctgcttgtatggagtttggcatcatttttgaaccagacta

SEQ ID NO: 121238 - DNA, 80 bp, Homo sapiens
tcttgccctcagaagagatgagtactgttctgcttgtatggagtttggcatcatttttgaaccagactacatgcattttt

SEQ ID NO: 121239 - DNA, 80 bp, Homo sapiens
agaagagatgagtactgttctgcttgtatggagtttggcatcatttttgaaccagactacatgcattttttcatgagaaa

SEQ ID NO: 121240 - DNA, 78 bp, Homo sapiens
tgttctgcttgtatggagtttggcatcatttttgaaccagactacatgcattttttcatgagaaagttcacaaacaaa

SEQ ID NO: 121241 - DNA, 76 bp, Homo sapiens
tgcttgtatggagtttggcatcatttttgaaccagactacatgcattttttcatgagaaagttcacaaacaaaagt

SEQ ID NO: 121242 - DNA, 75 bp, Homo sapiens
ttggcatcatttttgaaccagactacatgcattttttcatgagaaagttcacaaacaaaagttgctgtttcacct

SEQ ID NO: 121243 - DNA, 73 bp, Homo sapiens
tcatttttgaaccagactacatgcattttttcatgagaaagttcacaaacaaaagttgctgtttcaccttctt

SEQ ID NO: 121244 - DNA, 73 bp, Homo sapiens
ccagactacatgcattttttcatgagaaagttcacaaacaaaagttgctgtttcaccttcttttactgtttga

SEQ ID NO: 121245 - DNA, 72 bp, Homo sapiens
gcattttttcatgagaaagttcacaaacaaaagttgctgtttcaccttcttttactgtttgatcttcaagag

SEQ ID NO: 121246 - DNA, 75 bp, Homo sapiens
tcatgagaaagttcacaaacaaaagttgctgtttcaccttcttttactgtttgatcttcaagaggtgacatgaat

SEQ ID NO: 121247 - DNA, 73 bp, Homo sapiens
gttcacaaacaaaagttgctgtttcaccttcttttactgtttgatcttcaagaggtgacatgaatttcagtct

SEQ ID NO: 121248 - DNA, 73 bp, Homo sapiens
aaagttgctgtttcaccttcttttactgtttgatcttcaagaggtgacatgaatttcagtcttatacctgaaa

SEQ ID NO: 121249 - DNA, 78 bp, Homo sapiens
tttcaccttcttttactgtttgatcttcaagaggtgacatgaatttcagtcttatacctgaaatgcaagcatagataa

SEQ ID NO: 121250 - DNA, 80 bp, Homo sapiens
cttttactgtttgatcttcaagaggtgacatgaatttcagtcttatacctgaaatgcaagcatagataatgcctcagaaa

SEQ ID NO: 121251 - DNA, 81 bp, Homo sapiens
atatatttgcatgcctttatgggatgtcacagatctcattagctcgcttacctgtgacaaacaaccgagctgaggtcttct

SEQ ID NO: 121252 - DNA, 80 bp, Homo sapiens
atgcctttatgggatgtcacagatctcattagctcgcttacctgtgacaaacaaccgagctgaggtcttcttgccctcca

SEQ ID NO: 121253 - DNA, 82 bp, Homo sapiens
atgtcacagatctcattagctcgcttacctgtgacaaacaaccgagctgaggtcttcttgccctccacctcagcagtataga

SEQ ID NO: 121254 - DNA, 80 bp, Homo sapiens
tgacaaacaaccgagctgaggtcttcttgccctccacctcagcagtatagaccccttcatcatcaaattgagaatcatta

SEQ ID NO: 121255 - DNA, 78 bp, Homo sapiens
acaaccgagctgaggtcttcttgccctccacctcagcagtatagaccccttcatcatcaaattgagaatcattaataa

SEQ ID NO: 121256 - DNA, 78 bp, Homo sapiens
tcttcttgccctccacctcagcagtatagaccccttcatcatcaaattgagaatcattaataacaagaatatgtttct

SEQ ID NO: 121257 - DNA, 78 bp, Homo sapiens
ttgccctccacctcagcagtatagaccccttcatcatcaaattgagaatcattaataacaagaatatgtttctttcca

SEQ ID NO: 121258 - DNA, 83 bp, Homo sapiens
tcagcagtatagaccccttcatcatcaaattgagaatcattaataacaagaatatgtttctttccatcagcgatgatatcaaa

SEQ ID NO: 121259 - DNA, 81 bp, Homo sapiens
gaccccttcatcatcaaattgagaatcattaataacaagaatatgtttctttccatcagcgatgatatcaaatttgtcaga

SEQ ID NO: 121260 - DNA, 82 bp, Homo sapiens
catcatcaaattgagaatcattaataacaagaatatgtttctttccatcagcgatgatatcaaatttgtcagatgacttaat

SEQ ID NO: 121261 - DNA, 80 bp, Homo sapiens
gaatcattaataacaagaatatgtttctttccatcagcgatgatatcaaatttgtcagatgacttaattatatcaggtcc

SEQ ID NO: 121262 - DNA, 79 bp, Homo sapiens
taacaagaatatgtttctttccatcagcgatgatatcaaatttgtcagatgacttaattatatcaggtcctttggacca

SEQ ID NO: 121263 - DNA, 78 bp, Homo sapiens
atgtttctttccatcagcgatgatatcaaatttgtcagatgacttaattatatcaggtcctttggaccatataacatt

SEQ ID NO: 121264 - DNA, 81 bp, Homo sapiens
tctttccatcagcgatgatatcaaatttgtcagatgacttaattatatcaggtcctttggaccatataacatttgcctctc

SEQ ID NO: 121265 - DNA, 78 bp, Homo sapiens
atgatatcaaatttgtcagatgacttaattatatcaggtcctttggaccatataacatttgcctctcgggtgaggaca

SEQ ID NO: 121266 - DNA, 75 bp, Homo sapiens
aaatttgtcagatgacttaattatatcaggtcctttggaccatataacatttgcctctcgggtgaggacacattc

SEQ ID NO: 121267 - DNA, 76 bp, Homo sapiens
atgacttaattatatcaggtcctttggaccatataacatttgcctctcgggtgaggacacattcgaatcgagcctg

SEQ ID NO: 121268 - DNA, 75 bp, Homo sapiens
attatatcaggtcctttggaccatataacatttgcctctcgggtgaggacacattcgaatcgagcctgtcgcctt

SEQ ID NO: 121269 - DNA, 75 bp, Homo sapiens
ggtcctttggaccatataacatttgcctctcgggtgaggacacattcgaatcgagcctgtcgcctttctggaaca

SEQ ID NO: 121270 - DNA, 78 bp, Homo sapiens
accatataacatttgcctctcgggtgaggacacattcgaatcgagcctgtcgcctttctggaacagtgacatccttca

SEQ ID NO: 121271 - DNA, 79 bp, Homo sapiens
atttgcctctcgggtgaggacacattcgaatcgagcctgtcgcctttctggaacagtgacatccttcaggggcacagca

SEQ ID NO: 121272 - DNA, 79 bp, Homo sapiens
tgaggacacattcgaatcgagcctgtcgcctttctggaacagtgacatccttcaggggcacagcaaagtcaagttcgat

SEQ ID NO: 121273 - DNA, 77 bp, Homo sapiens
attcgaatcgagcctgtcgcctttctggaacagtgacatccttcaggggcacagcaaagtcaagttcgatttctgaa

SEQ ID NO: 121274 - DNA, 77 bp, Homo sapiens
cctgtcgcctttctggaacagtgacatccttcaggggcacagcaaagtcaagttcgatttctgaaaatcagacatta

SEQ ID NO: 121275 - DNA, 77 bp, Homo sapiens
ctttctggaacagtgacatccttcaggggcacagcaaagtcaagttcgatttctgaaaatcagacattaagaatgag

SEQ ID NO: 121276 - DNA, 77 bp, Homo sapiens
aacagtgacatccttcaggggcacagcaaagtcaagttcgatttctgaaaatcagacattaagaatgaggcttttca

SEQ ID NO: 121277 - DNA, 65 bp, Homo sapiens
aagtgaaataaagttgagacccctccccaaattctaaaagccccataccttttactgtcaaaatg

SEQ ID NO: 121278 - DNA, 67 bp, Homo sapiens
ataaagttgagacccctccccaaattctaaaagccccataccttttactgtcaaaatggcagttgta

SEQ ID NO: 121279 - DNA, 69 bp, Homo sapiens
ctccccaaattctaaaagccccataccttttactgtcaaaatggcagttgtaattgcattaagggcctg

SEQ ID NO: 121280 - DNA, 69 bp, Homo sapiens
aaattctaaaagccccataccttttactgtcaaaatggcagttgtaattgcattaagggcctggtagag

SEQ ID NO: 121281 - DNA, 73 bp, Homo sapiens
ccataccttttactgtcaaaatggcagttgtaattgcattaagggcctggtagaggacttcaccagcttggtc

SEQ ID NO: 121282 - DNA, 74 bp, Homo sapiens
ttttactgtcaaaatggcagttgtaattgcattaagggcctggtagaggacttcaccagcttggtccagtttga

SEQ ID NO: 121283 - DNA, 74 bp, Homo sapiens
aaatggcagttgtaattgcattaagggcctggtagaggacttcaccagcttggtccagtttgactttgtgcaaa

SEQ ID NO: 121284 - DNA, 73 bp, Homo sapiens
ttgtaattgcattaagggcctggtagaggacttcaccagcttggtccagtttgactttgtgcaaagttaagaa

SEQ ID NO: 121285 - DNA, 69 bp, Homo sapiens
attaagggcctggtagaggacttcaccagcttggtccagtttgactttgtgcaaagttaagaagcgttt

SEQ ID NO: 121286 - DNA, 71 bp, Homo sapiens
gtagaggacttcaccagcttggtccagtttgactttgtgcaaagttaagaagcgttttccaccttctgctt

SEQ ID NO: 121287 - DNA, 72 bp, Homo sapiens
acttcaccagcttggtccagtttgactttgtgcaaagttaagaagcgttttccaccttctgctttgatttca

SEQ ID NO: 121288 - DNA, 71 bp, Homo sapiens
gtccagtttgactttgtgcaaagttaagaagcgttttccaccttctgctttgatttcacaagtctgaaaaa

SEQ ID NO: 121289 - DNA, 71 bp, Homo sapiens
gtttgactttgtgcaaagttaagaagcgttttccaccttctgctttgatttcacaagtctgaaaaacaata

SEQ ID NO: 121290 - DNA, 70 bp, Homo sapiens
gtgcaaagttaagaagcgttttccaccttctgctttgatttcacaagtctgaaaaacaatagttttagta

SEQ ID NO: 121291 - DNA, 70 bp, Homo sapiens
gtggttattttatatgactaacaatttaaaatgtgaaattactcacaggtgagggccttagaagttctcc

SEQ ID NO: 121292 - DNA, 72 bp, Homo sapiens
tatatgactaacaatttaaaatgtgaaattactcacaggtgagggccttagaagttctcctttcagtttcca

SEQ ID NO: 121293 - DNA, 69 bp, Homo sapiens
actaacaatttaaaatgtgaaattactcacaggtgagggccttagaagttctcctttcagtttccattg

SEQ ID NO: 121294 - DNA, 72 bp, Homo sapiens
ttaaaatgtgaaattactcacaggtgagggccttagaagttctcctttcagtttccattgtccaggaatgtc

SEQ ID NO: 121295 - DNA, 74 bp, Homo sapiens
aaattactcacaggtgagggccttagaagttctcctttcagtttccattgtccaggaatgtctgcctctgagat

SEQ ID NO: 121296 - DNA, 77 bp, Homo sapiens
aggtgagggccttagaagttctcctttcagtttccattgtccaggaatgtctgcctctgagatttctgcatcaaagc

SEQ ID NO: 121297 - DNA, 78 bp, Homo sapiens
ttagaagttctcctttcagtttccattgtccaggaatgtctgcctctgagatttctgcatcaaagcttgcactttctt

SEQ ID NO: 121298 - DNA, 80 bp, Homo sapiens
tttcagtttccattgtccaggaatgtctgcctctgagatttctgcatcaaagcttgcactttctttctcataaatggtaa

SEQ ID NO: 121299 - DNA, 80 bp, Homo sapiens
cattgtccaggaatgtctgcctctgagatttctgcatcaaagcttgcactttctttctcataaatggtaacgtcctctat

SEQ ID NO: 121300 - DNA, 78 bp, Homo sapiens
gaatgtctgcctctgagatttctgcatcaaagcttgcactttctttctcataaatggtaacgtcctctattggtttaa

SEQ ID NO: 121301 - DNA, 77 bp, Homo sapiens
ctctgagatttctgcatcaaagcttgcactttctttctcataaatggtaacgtcctctattggtttaagcagttcaa

SEQ ID NO: 121302 - DNA, 75 bp, Homo sapiens
atttctgcatcaaagcttgcactttctttctcataaatggtaacgtcctctattggtttaagcagttcaacttca

SEQ ID NO: 121303 - DNA, 73 bp, Homo sapiens
aagcttgcactttctttctcataaatggtaacgtcctctattggtttaagcagttcaacttcacgctctgtat

SEQ ID NO: 121304 - DNA, 72 bp, Homo sapiens
actttctttctcataaatggtaacgtcctctattggtttaagcagttcaacttcacgctctgtattggtcag

SEQ ID NO: 121305 - DNA, 74 bp, Homo sapiens
taaatggtaacgtcctctattggtttaagcagttcaacttcacgctctgtattggtcagggatgaagtaacata

SEQ ID NO: 121306 - DNA, 75 bp, Homo sapiens
taacgtcctctattggtttaagcagttcaacttcacgctctgtattggtcagggatgaagtaacataatgcttta

SEQ ID NO: 121307 - DNA, 70 bp, Homo sapiens
acacatacgcaaaacttataatttgaataaaaggtaagattttatacctccaagtgtcagctttgcaggg

SEQ ID NO: 121308 - DNA, 69 bp, Homo sapiens
acgcaaaacttataatttgaataaaaggtaagattttatacctccaagtgtcagctttgcagggtatct

SEQ ID NO: 121309 - DNA, 69 bp, Homo sapiens
tttgaataaaaggtaagattttatacctccaagtgtcagctttgcagggtatctttttccttcaatttc

SEQ ID NO: 121310 - DNA, 72 bp, Homo sapiens
taaaaggtaagattttatacctccaagtgtcagctttgcagggtatctttttccttcaatttccactgcata

SEQ ID NO: 121311 - DNA, 76 bp, Homo sapiens
agattttatacctccaagtgtcagctttgcagggtatctttttccttcaatttccactgcatactcagcaatatct

SEQ ID NO: 121312 - DNA, 80 bp, Homo sapiens
aagtgtcagctttgcagggtatctttttccttcaatttccactgcatactcagcaatatcttctggcatagcattcttaa

SEQ ID NO: 121313 - DNA, 79 bp, Homo sapiens
agctttgcagggtatctttttccttcaatttccactgcatactcagcaatatcttctggcatagcattcttaattttga

SEQ ID NO: 121314 - DNA, 79 bp, Homo sapiens
atctttttccttcaatttccactgcatactcagcaatatcttctggcatagcattcttaattttgaggtacagatgatt

SEQ ID NO: 121315 - DNA, 84 bp, Homo sapiens
ttcaatttccactgcatactcagcaatatcttctggcatagcattcttaattttgaggtacagatgatttccatctctcagtat

SEQ ID NO: 121316 - DNA, 84 bp, Homo sapiens
actgcatactcagcaatatcttctggcatagcattcttaattttgaggtacagatgatttccatctctcagtatttcagtctta

SEQ ID NO: 121317 - DNA, 83 bp, Homo sapiens
atactcagcaatatcttctggcatagcattcttaattttgaggtacagatgatttccatctctcagtatttcagtcttatcat

SEQ ID NO: 121318 - DNA, 80 bp, Homo sapiens
atatcttctggcatagcattcttaattttgaggtacagatgatttccatctctcagtatttcagtcttatcatttggttc

SEQ ID NO: 121319 - DNA, 77 bp, Homo sapiens
tagcattcttaattttgaggtacagatgatttccatctctcagtatttcagtcttatcatttggttccgcagggatt

SEQ ID NO: 121320 - DNA, 78 bp, Homo sapiens
cttaattttgaggtacagatgatttccatctctcagtatttcagtcttatcatttggttccgcagggatttcatcata

SEQ ID NO: 121321 - DNA, 79 bp, Homo sapiens
cagatgatttccatctctcagtatttcagtcttatcatttggttccgcagggatttcatcatatcctttgaaccactta

SEQ ID NO: 121322 - DNA, 76 bp, Homo sapiens
ttccatctctcagtatttcagtcttatcatttggttccgcagggatttcatcatatcctttgaaccacttaatgtt

SEQ ID NO: 121323 - DNA, 74 bp, Homo sapiens
gtatttcagtcttatcatttggttccgcagggatttcatcatatcctttgaaccacttaatgtttggagtatct

SEQ ID NO: 121324 - DNA, 74 bp, Homo sapiens
agtcttatcatttggttccgcagggatttcatcatatcctttgaaccacttaatgtttggagtatcttttgcta

SEQ ID NO: 121325 - DNA, 76 bp, Homo sapiens
atttggttccgcagggatttcatcatatcctttgaaccacttaatgtttggagtatcttttgctatatcacaggca

SEQ ID NO: 121326 - DNA, 76 bp, Homo sapiens
agggatttcatcatatcctttgaaccacttaatgtttggagtatcttttgctatatcacaggcaaaaatagctgtc

SEQ ID NO: 121327 - DNA, 74 bp, Homo sapiens
atcatatcctttgaaccacttaatgtttggagtatcttttgctatatcacaggcaaaaatagctgtccccttgg

SEQ ID NO: 121328 - DNA, 73 bp, Homo sapiens
tttgaaccacttaatgtttggagtatcttttgctatatcacaggcaaaaatagctgtccccttgggtttcaca

SEQ ID NO: 121329 - DNA, 77 bp, Homo sapiens
taatgtttggagtatcttttgctatatcacaggcaaaaatagctgtccccttgggtttcacatgctggtctcgtata

SEQ ID NO: 121330 - DNA, 75 bp, Homo sapiens
agtatcttttgctatatcacaggcaaaaatagctgtccccttgggtttcacatgctggtctcgtataggtttcac

SEQ ID NO: 121331 - DNA, 77 bp, Homo sapiens
tatatcacaggcaaaaatagctgtccccttgggtttcacatgctggtctcgtataggtttcaccagccaatctctaa

SEQ ID NO: 121332 - DNA, 76 bp, Homo sapiens
tgtccccttgggtttcacatgctggtctcgtataggtttcaccagccaatctctaatgacttctatatgaaaataa

SEQ ID NO: 121333 - DNA, 77 bp, Homo sapiens
ggtttcacatgctggtctcgtataggtttcaccagccaatctctaatgacttctatatgaaaataagatcagaaaaa

SEQ ID NO: 121334 - DNA, 78 bp, Homo sapiens
acatgctggtctcgtataggtttcaccagccaatctctaatgacttctatatgaaaataagatcagaaaaaatgatta

SEQ ID NO: 121335 - DNA, 71 bp, Homo sapiens
ttagtgtaacaataagcagaacgaaatctcccaggaaagtactaacctactacttttacgcaagatgaaca

SEQ ID NO: 121336 - DNA, 70 bp, Homo sapiens
aacaataagcagaacgaaatctcccaggaaagtactaacctactacttttacgcaagatgaacactccag

SEQ ID NO: 121337 - DNA, 69 bp, Homo sapiens
ccaggaaagtactaacctactacttttacgcaagatgaacactccaggttgttggcgttttccacagta

SEQ ID NO: 121338 - DNA, 68 bp, Homo sapiens
aaagtactaacctactacttttacgcaagatgaacactccaggttgttggcgttttccacagtaactg

SEQ ID NO: 121339 - DNA, 75 bp, Homo sapiens
ctactacttttacgcaagatgaacactccaggttgttggcgttttccacagtaactgtgtatgttccagcatctg

SEQ ID NO: 121340 - DNA, 81 bp, Homo sapiens
ttacgcaagatgaacactccaggttgttggcgttttccacagtaactgtgtatgttccagcatctgtgtcatctgcatcgt

SEQ ID NO: 121341 - DNA, 82 bp, Homo sapiens
aacactccaggttgttggcgttttccacagtaactgtgtatgttccagcatctgtgtcatctgcatcgttgatggtcagagc

SEQ ID NO: 121342 - DNA, 83 bp, Homo sapiens
aggttgttggcgttttccacagtaactgtgtatgttccagcatctgtgtcatctgcatcgttgatggtcagagcccgcatcaa

SEQ ID NO: 121343 - DNA, 89 bp, Homo sapiens
tccacagtaactgtgtatgttccagcatctgtgtcatctgcatcgttgatggtcagagcccgcatcaagccaatgacgcctggcacaat

SEQ ID NO: 121344 - DNA, 87 bp, Homo sapiens
agtaactgtgtatgttccagcatctgtgtcatctgcatcgttgatggtcagagcccgcatcaagccaatgacgcctggcacaattcg

SEQ ID NO: 121345 - DNA, 87 bp, Homo sapiens
tatgttccagcatctgtgtcatctgcatcgttgatggtcagagcccgcatcaagccaatgacgcctggcacaattcggccaggtttc

SEQ ID NO: 121346 - DNA, 85 bp, Homo sapiens
tgtgtcatctgcatcgttgatggtcagagcccgcatcaagccaatgacgcctggcacaattcggccaggtttctccaccacaatc

SEQ ID NO: 121347 - DNA, 83 bp, Homo sapiens
atctgcatcgttgatggtcagagcccgcatcaagccaatgacgcctggcacaattcggccaggtttctccaccacaatcttgc

SEQ ID NO: 121348 - DNA, 81 bp, Homo sapiens
ttgatggtcagagcccgcatcaagccaatgacgcctggcacaattcggccaggtttctccaccacaatcttgccatccttc

SEQ ID NO: 121349 - DNA, 78 bp, Homo sapiens
agcccgcatcaagccaatgacgcctggcacaattcggccaggtttctccaccacaatcttgccatccttcctccagac

SEQ ID NO: 121350 - DNA, 76 bp, Homo sapiens
aagccaatgacgcctggcacaattcggccaggtttctccaccacaatcttgccatccttcctccagaccacgtcac

SEQ ID NO: 121351 - DNA, 75 bp, Homo sapiens
tggcacaattcggccaggtttctccaccacaatcttgccatccttcctccagaccacgtcacgctctttgtttaa

SEQ ID NO: 121352 - DNA, 72 bp, Homo sapiens
aattcggccaggtttctccaccacaatcttgccatccttcctccagaccacgtcacgctctttgtttaactc

SEQ ID NO: 121353 - DNA, 77 bp, Homo sapiens
tttctccaccacaatcttgccatccttcctccagaccacgtcacgctctttgtttaactcgcagctcaagtacaatg

SEQ ID NO: 121354 - DNA, 77 bp, Homo sapiens
aatcttgccatccttcctccagaccacgtcacgctctttgtttaactcgcagctcaagtacaatggctgtcctttga

SEQ ID NO: 121355 - DNA, 77 bp, Homo sapiens
atccttcctccagaccacgtcacgctctttgtttaactcgcagctcaagtacaatggctgtcctttgaccactgtga

SEQ ID NO: 121356 - DNA, 77 bp, Homo sapiens
tccagaccacgtcacgctctttgtttaactcgcagctcaagtacaatggctgtcctttgaccactgtgacttcctct

SEQ ID NO: 121357 - DNA, 74 bp, Homo sapiens
acgctctttgtttaactcgcagctcaagtacaatggctgtcctttgaccactgtgacttcctcttccagtgttt

SEQ ID NO: 121358 - DNA, 74 bp, Homo sapiens
tttgtttaactcgcagctcaagtacaatggctgtcctttgaccactgtgacttcctcttccagtgtttttacaa

SEQ ID NO: 121359 - DNA, 72 bp, Homo sapiens
agtacaatggctgtcctttgaccactgtgacttcctcttccagtgtttttacaaaacgcacaggaagttcta

SEQ ID NO: 121360 - DNA, 72 bp, Homo sapiens
gtcctttgaccactgtgacttcctcttccagtgtttttacaaaacgcacaggaagttctatggagaatttca

SEQ ID NO: 121361 - DNA, 73 bp, Homo sapiens
actgtgacttcctcttccagtgtttttacaaaacgcacaggaagttctatggagaatttcagtatatatttca

SEQ ID NO: 121362 - DNA, 71 bp, Homo sapiens
acttcctcttccagtgtttttacaaaacgcacaggaagttctatggagaatttcagtatatatttcaataa

SEQ ID NO: 121363 - DNA, 69 bp, Homo sapiens
gtttaatatagattatgttcagaagactagaaattaccttctacaacaagtttagccgtggaggtcttt

SEQ ID NO: 121364 - DNA, 69 bp, Homo sapiens
atagattatgttcagaagactagaaattaccttctacaacaagtttagccgtggaggtcttttctttgt

SEQ ID NO: 121365 - DNA, 67 bp, Homo sapiens
ttcagaagactagaaattaccttctacaacaagtttagccgtggaggtcttttctttgtttcccaaa

SEQ ID NO: 121366 - DNA, 64 bp, Homo sapiens
aattaccttctacaacaagtttagccgtggaggtcttttctttgtttcccaaacgtaaaacaca

SEQ ID NO: 121367 - DNA, 67 bp, Homo sapiens
ttctacaacaagtttagccgtggaggtcttttctttgtttcccaaacgtaaaacacaggtgtattca

SEQ ID NO: 121368 - DNA, 68 bp, Homo sapiens
tttagccgtggaggtcttttctttgtttcccaaacgtaaaacacaggtgtattcaccagcatcggaaa

SEQ ID NO: 121369 - DNA, 69 bp, Homo sapiens
aggtcttttctttgtttcccaaacgtaaaacacaggtgtattcaccagcatcggaaagttgaacatcaa

SEQ ID NO: 121370 - DNA, 76 bp, Homo sapiens
tttgtttcccaaacgtaaaacacaggtgtattcaccagcatcggaaagttgaacatcaatgatgtgcagctttctg

SEQ ID NO: 121371 - DNA, 77 bp, Homo sapiens
ttcccaaacgtaaaacacaggtgtattcaccagcatcggaaagttgaacatcaatgatgtgcagctttctgtcttta

SEQ ID NO: 121372 - DNA, 81 bp, Homo sapiens
taaaacacaggtgtattcaccagcatcggaaagttgaacatcaatgatgtgcagctttctgtctttaccatctgcaataaa

SEQ ID NO: 121373 - DNA, 83 bp, Homo sapiens
tgtattcaccagcatcggaaagttgaacatcaatgatgtgcagctttctgtctttaccatctgcaataaacctgtgcttggga

SEQ ID NO: 121374 - DNA, 81 bp, Homo sapiens
tcggaaagttgaacatcaatgatgtgcagctttctgtctttaccatctgcaataaacctgtgcttgggactctcacggata

SEQ ID NO: 121375 - DNA, 82 bp, Homo sapiens
aagttgaacatcaatgatgtgcagctttctgtctttaccatctgcaataaacctgtgcttgggactctcacggatattgcta

SEQ ID NO: 121376 - DNA, 80 bp, Homo sapiens
aatgatgtgcagctttctgtctttaccatctgcaataaacctgtgcttgggactctcacggatattgctaccgtctttca

SEQ ID NO: 121377 - DNA, 76 bp, Homo sapiens
tttctgtctttaccatctgcaataaacctgtgcttgggactctcacggatattgctaccgtctttcatccaggttg

SEQ ID NO: 121378 - DNA, 75 bp, Homo sapiens
gtctttaccatctgcaataaacctgtgcttgggactctcacggatattgctaccgtctttcatccaggttgtaat

SEQ ID NO: 121379 - DNA, 73 bp, Homo sapiens
aataaacctgtgcttgggactctcacggatattgctaccgtctttcatccaggttgtaattgcagtggaaggg

SEQ ID NO: 121380 - DNA, 75 bp, Homo sapiens
tgcttgggactctcacggatattgctaccgtctttcatccaggttgtaattgcagtggaaggggagaccaaacat

SEQ ID NO: 121381 - DNA, 74 bp, Homo sapiens
ggactctcacggatattgctaccgtctttcatccaggttgtaattgcagtggaaggggagaccaaacattcaaa

SEQ ID NO: 121382 - DNA, 76 bp, Homo sapiens
ggatattgctaccgtctttcatccaggttgtaattgcagtggaaggggagaccaaacattcaaagattgctgaaga

SEQ ID NO: 121383 - DNA, 77 bp, Homo sapiens
tctttcatccaggttgtaattgcagtggaaggggagaccaaacattcaaagattgctgaagagccaacgaactctga

SEQ ID NO: 121384 - DNA, 76 bp, Homo sapiens
aggttgtaattgcagtggaaggggagaccaaacattcaaagattgctgaagagccaacgaactctgattctgtcaa

SEQ ID NO: 121385 - DNA, 80 bp, Homo sapiens
taattgcagtggaaggggagaccaaacattcaaagattgctgaagagccaacgaactctgattctgtcaagatgatgtct

SEQ ID NO: 121386 - DNA, 77 bp, Homo sapiens
aaggggagaccaaacattcaaagattgctgaagagccaacgaactctgattctgtcaagatgatgtctttgatttct

SEQ ID NO: 121387 - DNA, 81 bp, Homo sapiens
aaagattgctgaagagccaacgaactctgattctgtcaagatgatgtctttgatttctttcacaaacttcagtggcacagc

SEQ ID NO: 121388 - DNA, 79 bp, Homo sapiens
aagagccaacgaactctgattctgtcaagatgatgtctttgatttctttcacaaacttcagtggcacagcctttagctg

SEQ ID NO: 121389 - DNA, 78 bp, Homo sapiens
aactctgattctgtcaagatgatgtctttgatttctttcacaaacttcagtggcacagcctttagctggtaggtgaac

SEQ ID NO: 121390 - DNA, 76 bp, Homo sapiens
ttctgtcaagatgatgtctttgatttctttcacaaacttcagtggcacagcctttagctggtaggtgaacggggct

SEQ ID NO: 121391 - DNA, 77 bp, Homo sapiens
agatgatgtctttgatttctttcacaaacttcagtggcacagcctttagctggtaggtgaacggggcttcatcagga

SEQ ID NO: 121392 - DNA, 73 bp, Homo sapiens
atttctttcacaaacttcagtggcacagcctttagctggtaggtgaacggggcttcatcaggaggtttctctc

SEQ ID NO: 121393 - DNA, 74 bp, Homo sapiens
ttcacaaacttcagtggcacagcctttagctggtaggtgaacggggcttcatcaggaggtttctctccaccact

SEQ ID NO: 121394 - DNA, 73 bp, Homo sapiens
tggcacagcctttagctggtaggtgaacggggcttcatcaggaggtttctctccaccacttcctggccttaac

SEQ ID NO: 121395 - DNA, 69 bp, Homo sapiens
agcctttagctggtaggtgaacggggcttcatcaggaggtttctctccaccacttcctggccttaactt

SEQ ID NO: 121396 - DNA, 69 bp, Homo sapiens
tggtaggtgaacggggcttcatcaggaggtttctctccaccacttcctggccttaactttctcctttcg

SEQ ID NO: 121397 - DNA, 72 bp, Homo sapiens
gcttcatcaggaggtttctctccaccacttcctggccttaactttctcctttcggcttctattggtgaagga

SEQ ID NO: 121398 - DNA, 68 bp, Homo sapiens
gaggtttctctccaccacttcctggccttaactttctcctttcggcttctattggtgaaggagtcttt

SEQ ID NO: 121399 - DNA, 68 bp, Homo sapiens
tccaccacttcctggccttaactttctcctttcggcttctattggtgaaggagtctttttgggtacac

SEQ ID NO: 121400 - DNA, 68 bp, Homo sapiens
tcctggccttaactttctcctttcggcttctattggtgaaggagtctttttgggtacacctaattcaa

SEQ ID NO: 121401 - DNA, 65 bp, Homo sapiens
aactttctcctttcggcttctattggtgaaggagtctttttgggtacacctaattcaaagtaaaa

SEQ ID NO: 121402 - DNA, 65 bp, Homo sapiens
ctcctttcggcttctattggtgaaggagtctttttgggtacacctaattcaaagtaaaataaaaa

SEQ ID NO: 121403 - DNA, 71 bp, Homo sapiens
ccccttgaatatgaactttggaaattcagagtggaaggttacaatgcaagtactagaaaaatgaatttcac

SEQ ID NO: 121404 - DNA, 73 bp, Homo sapiens
tatgaactttggaaattcagagtggaaggttacaatgcaagtactagaaaaatgaatttcacctttgatagga

SEQ ID NO: 121405 - DNA, 70 bp, Homo sapiens
ggaaattcagagtggaaggttacaatgcaagtactagaaaaatgaatttcacctttgataggaccttttg

SEQ ID NO: 121406 - DNA, 72 bp, Homo sapiens
agagtggaaggttacaatgcaagtactagaaaaatgaatttcacctttgataggaccttttggcttggcagc

SEQ ID NO: 121407 - DNA, 72 bp, Homo sapiens
gttacaatgcaagtactagaaaaatgaatttcacctttgataggaccttttggcttggcagcctcttcctta

SEQ ID NO: 121408 - DNA, 69 bp, Homo sapiens
aagtactagaaaaatgaatttcacctttgataggaccttttggcttggcagcctcttccttaggtgctt

SEQ ID NO: 121409 - DNA, 72 bp, Homo sapiens
aatgaatttcacctttgataggaccttttggcttggcagcctcttccttaggtgctttggcttctgaaataa

SEQ ID NO: 121410 - DNA, 71 bp, Homo sapiens
tttcacctttgataggaccttttggcttggcagcctcttccttaggtgctttggcttctgaaataaaaata

SEQ ID NO: 121411 - DNA, 69 bp, Homo sapiens
ttattaagtcaccaaaacaaactagcaaaaagaaagctacaggataaatacctgctttctttccaacca

SEQ ID NO: 121412 - DNA, 70 bp, Homo sapiens
aagtcaccaaaacaaactagcaaaaagaaagctacaggataaatacctgctttctttccaaccactggca

SEQ ID NO: 121413 - DNA, 70 bp, Homo sapiens
aacaaactagcaaaaagaaagctacaggataaatacctgctttctttccaaccactggcactgttactgg

SEQ ID NO: 121414 - DNA, 71 bp, Homo sapiens
aaaaagaaagctacaggataaatacctgctttctttccaaccactggcactgttactggggcagcgatggg

SEQ ID NO: 121415 - DNA, 70 bp, Homo sapiens
aggataaatacctgctttctttccaaccactggcactgttactggggcagcgatgggggttggttcaggt

SEQ ID NO: 121416 - DNA, 71 bp, Homo sapiens
aaatacctgctttctttccaaccactggcactgttactggggcagcgatgggggttggttcaggttccaca

SEQ ID NO: 121417 - DNA, 71 bp, Homo sapiens
tttccaaccactggcactgttactggggcagcgatgggggttggttcaggttccacaggaggtggtttgat

SEQ ID NO: 121418 - DNA, 70 bp, Homo sapiens
accactggcactgttactggggcagcgatgggggttggttcaggttccacaggaggtggtttgattgttt

SEQ ID NO: 121419 - DNA, 72 bp, Homo sapiens
tgttactggggcagcgatgggggttggttcaggttccacaggaggtggtttgattgttttcacttctgtaga

SEQ ID NO: 121420 - DNA, 71 bp, Homo sapiens
agcgatgggggttggttcaggttccacaggaggtggtttgattgttttcacttctgtagagagaagtccat

SEQ ID NO: 121421 - DNA, 76 bp, Homo sapiens
ttggttcaggttccacaggaggtggtttgattgttttcacttctgtagagagaagtccattgcattagtgtatcaa

SEQ ID NO: 121422 - DNA, 82 bp, Homo sapiens
tattaagtacatgttatgtgtgtgaatacagaaagaatatgctgttgacattgaggataagcttgctcacctgcttcgggct

SEQ ID NO: 121423 - DNA, 80 bp, Homo sapiens
atgttatgtgtgtgaatacagaaagaatatgctgttgacattgaggataagcttgctcacctgcttcgggctttggtttc

SEQ ID NO: 121424 - DNA, 78 bp, Homo sapiens
atacagaaagaatatgctgttgacattgaggataagcttgctcacctgcttcgggctttggtttcggttcaggtgcag

SEQ ID NO: 121425 - DNA, 77 bp, Homo sapiens
aaagaatatgctgttgacattgaggataagcttgctcacctgcttcgggctttggtttcggttcaggtgcagggaga

SEQ ID NO: 121426 - DNA, 77 bp, Homo sapiens
ctgttgacattgaggataagcttgctcacctgcttcgggctttggtttcggttcaggtgcagggagaggtattgctg

SEQ ID NO: 121427 - DNA, 76 bp, Homo sapiens
ttgaggataagcttgctcacctgcttcgggctttggtttcggttcaggtgcagggagaggtattgctggcttgatt

SEQ ID NO: 121428 - DNA, 76 bp, Homo sapiens
ctcacctgcttcgggctttggtttcggttcaggtgcagggagaggtattgctggcttgatttcaggcactgaaata

SEQ ID NO: 121429 - DNA, 73 bp, Homo sapiens
cttcgggctttggtttcggttcaggtgcagggagaggtattgctggcttgatttcaggcactgaaataattta

SEQ ID NO: 121430 - DNA, 74 bp, Homo sapiens
ctttggtttcggttcaggtgcagggagaggtattgctggcttgatttcaggcactgaaataatttagagtagag

SEQ ID NO: 121431 - DNA, 77 bp, Homo sapiens
aggtgcagggagaggtattgctggcttgatttcaggcactgaaataatttagagtagagggcagattattacaggat

SEQ ID NO: 121432 - DNA, 75 bp, Homo sapiens
agaggtattgctggcttgatttcaggcactgaaataatttagagtagagggcagattattacaggatttttgaag

SEQ ID NO: 121433 - DNA, 73 bp, Homo sapiens
attgctggcttgatttcaggcactgaaataatttagagtagagggcagattattacaggatttttgaagtttt

SEQ ID NO: 121434 - DNA, 74 bp, Homo sapiens
gatacatatttgcatttttagagacaactaagaatgacagtagatttgtaccttttgttggttcaggaatcttc

SEQ ID NO: 121435 - DNA, 71 bp, Homo sapiens
ttgcatttttagagacaactaagaatgacagtagatttgtaccttttgttggttcaggaatcttcctttcc

SEQ ID NO: 121436 - DNA, 68 bp, Homo sapiens
ttttagagacaactaagaatgacagtagatttgtaccttttgttggttcaggaatcttcctttccctt

SEQ ID NO: 121437 - DNA, 67 bp, Homo sapiens
agaatgacagtagatttgtaccttttgttggttcaggaatcttcctttccctttttgtaacagtagg

SEQ ID NO: 121438 - DNA, 67 bp, Homo sapiens
cagtagatttgtaccttttgttggttcaggaatcttcctttccctttttgtaacagtaggtacttca

SEQ ID NO: 121439 - DNA, 66 bp, Homo sapiens
taccttttgttggttcaggaatcttcctttccctttttgtaacagtaggtacttcaacctcttcaa

SEQ ID NO: 121440 - DNA, 66 bp, Homo sapiens
tgttggttcaggaatcttcctttccctttttgtaacagtaggtacttcaacctcttcaacaggttt

SEQ ID NO: 121441 - DNA, 65 bp, Homo sapiens
aatcttcctttccctttttgtaacagtaggtacttcaacctcttcaacaggttttggaggtggtg

SEQ ID NO: 121442 - DNA, 66 bp, Homo sapiens
ctttttgtaacagtaggtacttcaacctcttcaacaggttttggaggtggtggttctggtacttta

SEQ ID NO: 121443 - DNA, 68 bp, Homo sapiens
taacagtaggtacttcaacctcttcaacaggttttggaggtggtggttctggtactttaagataagat

SEQ ID NO: 121444 - DNA, 66 bp, Homo sapiens
ggtacttcaacctcttcaacaggttttggaggtggtggttctggtactttaagataagattatttt

SEQ ID NO: 121445 - DNA, 67 bp, Homo sapiens
cctcttcaacaggttttggaggtggtggttctggtactttaagataagattattttttcagtgttaa

SEQ ID NO: 121446 - DNA, 70 bp, Homo sapiens
ccttttgttaaatgtccattttgttaaaagataatcttacaaattgtcactgagattcctacctgcaggt

SEQ ID NO: 121447 - DNA, 69 bp, Homo sapiens
atgtccattttgttaaaagataatcttacaaattgtcactgagattcctacctgcaggttttttaactt

SEQ ID NO: 121448 - DNA, 67 bp, Homo sapiens
gttaaaagataatcttacaaattgtcactgagattcctacctgcaggttttttaactttttctagtt

SEQ ID NO: 121449 - DNA, 66 bp, Homo sapiens
atcttacaaattgtcactgagattcctacctgcaggttttttaactttttctagttttttaggttc

SEQ ID NO: 121450 - DNA, 65 bp, Homo sapiens
ttgtcactgagattcctacctgcaggttttttaactttttctagttttttaggttctactttagg

SEQ ID NO: 121451 - DNA, 64 bp, Homo sapiens
tgagattcctacctgcaggttttttaactttttctagttttttaggttctactttaggttcttc

SEQ ID NO: 121452 - DNA, 62 bp, Homo sapiens
cctgcaggttttttaactttttctagttttttaggttctactttaggttcttcttcttcagg

SEQ ID NO: 121453 - DNA, 63 bp, Homo sapiens
ttaactttttctagttttttaggttctactttaggttcttcttcttcaggtctttttcttaga

SEQ ID NO: 121454 - DNA, 64 bp, Homo sapiens
tctagttttttaggttctactttaggttcttcttcttcaggtctttttcttagaactttaaaga

SEQ ID NO: 121455 - DNA, 63 bp, Homo sapiens
ttaggttctactttaggttcttcttcttcaggtctttttcttagaactttaaagacaaaaagg

SEQ ID NO: 121456 - DNA, 64 bp, Homo sapiens
ctactttaggttcttcttcttcaggtctttttcttagaactttaaagacaaaaaggtttatatg

SEQ ID NO: 121457 - DNA, 65 bp, Homo sapiens
tcttcttcaggtctttttcttagaactttaaagacaaaaaggtttatatgtaaaccaagacaaac

SEQ ID NO: 121458 - DNA, 71 bp, Homo sapiens
tcaagttcatttttaaaatatacttaacgctgacagaatggttgaaaaatactataccgcttttcagaaca

SEQ ID NO: 121459 - DNA, 69 bp, Homo sapiens
tttaaaatatacttaacgctgacagaatggttgaaaaatactataccgcttttcagaacaacttcttcc

SEQ ID NO: 121460 - DNA, 70 bp, Homo sapiens
atacttaacgctgacagaatggttgaaaaatactataccgcttttcagaacaacttcttcctttggttca

SEQ ID NO: 121461 - DNA, 68 bp, Homo sapiens
tgacagaatggttgaaaaatactataccgcttttcagaacaacttcttcctttggttcaggtttacgt

SEQ ID NO: 121462 - DNA, 65 bp, Homo sapiens
ttgaaaaatactataccgcttttcagaacaacttcttcctttggttcaggtttacgttccggaag

SEQ ID NO: 121463 - DNA, 64 bp, Homo sapiens
aaatactataccgcttttcagaacaacttcttcctttggttcaggtttacgttccggaagtaat

SEQ ID NO: 121464 - DNA, 64 bp, Homo sapiens
tttcagaacaacttcttcctttggttcaggtttacgttccggaagtaatttgcgaactttcttt

SEQ ID NO: 121465 - DNA, 63 bp, Homo sapiens
aacaacttcttcctttggttcaggtttacgttccggaagtaatttgcgaactttcttttcacc

SEQ ID NO: 121466 - DNA, 65 bp, Homo sapiens
tttggttcaggtttacgttccggaagtaatttgcgaactttcttttcacctccaggcacttaaaa

SEQ ID NO: 121467 - DNA, 66 bp, Homo sapiens
aggtttacgttccggaagtaatttgcgaactttcttttcacctccaggcacttaaaagaatatgat

SEQ ID NO: 121468 - DNA, 67 bp, Homo sapiens
gttccggaagtaatttgcgaactttcttttcacctccaggcacttaaaagaatatgatttcaaattt

SEQ ID NO: 121469 - DNA, 69 bp, Homo sapiens
aatttgcgaactttcttttcacctccaggcacttaaaagaatatgatttcaaattttgaagtgaattta

SEQ ID NO: 121470 - DNA, 71 bp, Homo sapiens
aaagagcaaggagtcaggtaaaggggtactacataagtatgtatttttcagcctgtgaaatacctttcaga

SEQ ID NO: 121471 - DNA, 70 bp, Homo sapiens
aggagtcaggtaaaggggtactacataagtatgtatttttcagcctgtgaaatacctttcagaggtgtaa

SEQ ID NO: 121472 - DNA, 70 bp, Homo sapiens
taaaggggtactacataagtatgtatttttcagcctgtgaaatacctttcagaggtgtaagctccacttt

SEQ ID NO: 121473 - DNA, 72 bp, Homo sapiens
tactacataagtatgtatttttcagcctgtgaaatacctttcagaggtgtaagctccactttttctggaacc

SEQ ID NO: 121474 - DNA, 70 bp, Homo sapiens
tatgtatttttcagcctgtgaaatacctttcagaggtgtaagctccactttttctggaacctgaggtttt

SEQ ID NO: 121475 - DNA, 68 bp, Homo sapiens
agcctgtgaaatacctttcagaggtgtaagctccactttttctggaacctgaggtttttcaggaactt

SEQ ID NO: 121476 - DNA, 66 bp, Homo sapiens
aaatacctttcagaggtgtaagctccactttttctggaacctgaggtttttcaggaactttcttct

SEQ ID NO: 121477 - DNA, 67 bp, Homo sapiens
aggtgtaagctccactttttctggaacctgaggtttttcaggaactttcttctttggaatagcttta

SEQ ID NO: 121478 - DNA, 69 bp, Homo sapiens
gctccactttttctggaacctgaggtttttcaggaactttcttctttggaatagctttaaagaatatga

SEQ ID NO: 121479 - DNA, 67 bp, Homo sapiens
ttttctggaacctgaggtttttcaggaactttcttctttggaatagctttaaagaatatgattttac

SEQ ID NO: 121480 - DNA, 66 bp, Homo sapiens
cctgaggtttttcaggaactttcttctttggaatagctttaaagaatatgattttacttttgttat

SEQ ID NO: 121481 - DNA, 69 bp, Homo sapiens
tcaggaactttcttctttggaatagctttaaagaatatgattttacttttgttatttgtatatttaatc

SEQ ID NO: 121482 - DNA, 67 bp, Homo sapiens
ggatagaagtttgaagcaggctaataaaactttggaagtggcattttttacctttaagttggaatat

SEQ ID NO: 121483 - DNA, 69 bp, Homo sapiens
tgaagcaggctaataaaactttggaagtggcattttttacctttaagttggaatattttctccttcaca

SEQ ID NO: 121484 - DNA, 66 bp, Homo sapiens
taaaactttggaagtggcattttttacctttaagttggaatattttctccttcacatcttccttag

SEQ ID NO: 121485 - DNA, 69 bp, Homo sapiens
tttggaagtggcattttttacctttaagttggaatattttctccttcacatcttccttaggtggagcag

SEQ ID NO: 121486 - DNA, 68 bp, Homo sapiens
tttttacctttaagttggaatattttctccttcacatcttccttaggtggagcaggtggaggaggtgg

SEQ ID NO: 121487 - DNA, 69 bp, Homo sapiens
taagttggaatattttctccttcacatcttccttaggtggagcaggtggaggaggtgggggtcttggtt

SEQ ID NO: 121488 - DNA, 68 bp, Homo sapiens
aatattttctccttcacatcttccttaggtggagcaggtggaggaggtgggggtcttggtttgagttt

SEQ ID NO: 121489 - DNA, 71 bp, Homo sapiens
ttcacatcttccttaggtggagcaggtggaggaggtgggggtcttggtttgagttttggcttctcaataac

SEQ ID NO: 121490 - DNA, 67 bp, Homo sapiens
ttccttaggtggagcaggtggaggaggtgggggtcttggtttgagttttggcttctcaataaccttt

SEQ ID NO: 121491 - DNA, 67 bp, Homo sapiens
agcaggtggaggaggtgggggtcttggtttgagttttggcttctcaataaccttttcaggttcaggt

SEQ ID NO: 121492 - DNA, 66 bp, Homo sapiens
aggaggtgggggtcttggtttgagttttggcttctcaataaccttttcaggttcaggttcttgaaa

SEQ ID NO: 121493 - DNA, 69 bp, Homo sapiens
gggtcttggtttgagttttggcttctcaataaccttttcaggttcaggttcttgaaagagtatttcaga

SEQ ID NO: 121494 - DNA, 70 bp, Homo sapiens
agttttggcttctcaataaccttttcaggttcaggttcttgaaagagtatttcagaggtgttagtatatg

SEQ ID NO: 121495 - DNA, 72 bp, Homo sapiens
accatatacatttcaagagaaagaatatgataaagaagatttaagtccactggattgaataccttttactgg

SEQ ID NO: 121496 - DNA, 72 bp, Homo sapiens
caagagaaagaatatgataaagaagatttaagtccactggattgaataccttttactggtatttcttcaggc

SEQ ID NO: 121497 - DNA, 72 bp, Homo sapiens
aatatgataaagaagatttaagtccactggattgaataccttttactggtatttcttcaggctgtggttcag

SEQ ID NO: 121498 - DNA, 70 bp, Homo sapiens
ataaagaagatttaagtccactggattgaataccttttactggtatttcttcaggctgtggttcaggttc

SEQ ID NO: 121499 - DNA, 71 bp, Homo sapiens
atttaagtccactggattgaataccttttactggtatttcttcaggctgtggttcaggttcgggctcttca

SEQ ID NO: 121500 - DNA, 69 bp, Homo sapiens
attgaataccttttactggtatttcttcaggctgtggttcaggttcgggctcttcaggtttaatatact

SEQ ID NO: 121501 - DNA, 69 bp, Homo sapiens
ataccttttactggtatttcttcaggctgtggttcaggttcgggctcttcaggtttaatatacttttca

SEQ ID NO: 121502 - DNA, 70 bp, Homo sapiens
tatttcttcaggctgtggttcaggttcgggctcttcaggtttaatatacttttcaatttcacgttcttta

SEQ ID NO: 121503 - DNA, 69 bp, Homo sapiens
ttcaggctgtggttcaggttcgggctcttcaggtttaatatacttttcaatttcacgttctttaaagaa

SEQ ID NO: 121504 - DNA, 68 bp, Homo sapiens
ggttcaggttcgggctcttcaggtttaatatacttttcaatttcacgttctttaaagaatgttgacaa

SEQ ID NO: 121505 - DNA, 69 bp, Homo sapiens
cgggctcttcaggtttaatatacttttcaatttcacgttctttaaagaatgttgacaaaggagatgagg

SEQ ID NO: 121506 - DNA, 71 bp, Homo sapiens
taatatacttttcaatttcacgttctttaaagaatgttgacaaaggagatgaggttgcaatgtaaagttct

SEQ ID NO: 121507 - DNA, 73 bp, Homo sapiens
tatatatataccttcaacagggggagtctcttttctaccaatggttatagatgctttttcttcatatattatt

SEQ ID NO: 121508 - DNA, 72 bp, Homo sapiens
ataccttcaacagggggagtctcttttctaccaatggttatagatgctttttcttcatatattatttcctca

SEQ ID NO: 121509 - DNA, 73 bp, Homo sapiens
ggggagtctcttttctaccaatggttatagatgctttttcttcatatattatttcctcaggagtctcttcaac

SEQ ID NO: 121510 - DNA, 73 bp, Homo sapiens
gtctcttttctaccaatggttatagatgctttttcttcatatattatttcctcaggagtctcttcaactttaa

SEQ ID NO: 121511 - DNA, 71 bp, Homo sapiens
accaatggttatagatgctttttcttcatatattatttcctcaggagtctcttcaactttaaaaaacatag

SEQ ID NO: 121512 - DNA, 71 bp, Homo sapiens
tatagatgctttttcttcatatattatttcctcaggagtctcttcaactttaaaaaacatagtattttatt

SEQ ID NO: 121513 - DNA, 70 bp, Homo sapiens
tcttcatatattatttcctcaggagtctcttcaactttaaaaaacatagtattttattttagactatatt

SEQ ID NO: 121514 - DNA, 75 bp, Homo sapiens
aaagcaagaggatgaagacaattgtcatctttccaagatttatggagaagccgtgtaccttcagcaggtggaact

SEQ ID NO: 121515 - DNA, 78 bp, Homo sapiens
atgaagacaattgtcatctttccaagatttatggagaagccgtgtaccttcagcaggtggaacttctggctctgcagg

SEQ ID NO: 121516 - DNA, 78 bp, Homo sapiens
aattgtcatctttccaagatttatggagaagccgtgtaccttcagcaggtggaacttctggctctgcagggataggca

SEQ ID NO: 121517 - DNA, 76 bp, Homo sapiens
aagatttatggagaagccgtgtaccttcagcaggtggaacttctggctctgcagggataggcacagacacttcctt

SEQ ID NO: 121518 - DNA, 77 bp, Homo sapiens
ttatggagaagccgtgtaccttcagcaggtggaacttctggctctgcagggataggcacagacacttccttttctgg

SEQ ID NO: 121519 - DNA, 76 bp, Homo sapiens
ccgtgtaccttcagcaggtggaacttctggctctgcagggataggcacagacacttccttttctgggatgattttc

SEQ ID NO: 121520 - DNA, 79 bp, Homo sapiens
ttcagcaggtggaacttctggctctgcagggataggcacagacacttccttttctgggatgattttctcaggcactttg

SEQ ID NO: 121521 - DNA, 77 bp, Homo sapiens
ttctggctctgcagggataggcacagacacttccttttctgggatgattttctcaggcactttgggcactttaaaga

SEQ ID NO: 121522 - DNA, 76 bp, Homo sapiens
tgcagggataggcacagacacttccttttctgggatgattttctcaggcactttgggcactttaaagatatgattt

SEQ ID NO: 121523 - DNA, 73 bp, Homo sapiens
ataggcacagacacttccttttctgggatgattttctcaggcactttgggcactttaaagatatgattttgtt

SEQ ID NO: 121524 - DNA, 72 bp, Homo sapiens
gacacttccttttctgggatgattttctcaggcactttgggcactttaaagatatgattttgtttactatta

SEQ ID NO: 121525 - DNA, 72 bp, Homo sapiens
gggatgattttctcaggcactttgggcactttaaagatatgattttgtttactattaagaatttagaagaca

SEQ ID NO: 121526 - DNA, 70 bp, Homo sapiens
ttaacatgcttaaatagcagttagagaaatctattttttcttcatggtaggtacctttttctggaagaac

SEQ ID NO: 121527 - DNA, 69 bp, Homo sapiens
gcttaaatagcagttagagaaatctattttttcttcatggtaggtacctttttctggaagaacttctgg

SEQ ID NO: 121528 - DNA, 66 bp, Homo sapiens
agcagttagagaaatctattttttcttcatggtaggtacctttttctggaagaacttctggttttt

SEQ ID NO: 121529 - DNA, 66 bp, Homo sapiens
ctattttttcttcatggtaggtacctttttctggaagaacttctggttttttggtaacaggcacag

SEQ ID NO: 121530 - DNA, 66 bp, Homo sapiens
tttcttcatggtaggtacctttttctggaagaacttctggttttttggtaacaggcacaggttctt

SEQ ID NO: 121531 - DNA, 66 bp, Homo sapiens
taggtacctttttctggaagaacttctggttttttggtaacaggcacaggttctttctttactgga

SEQ ID NO: 121532 - DNA, 66 bp, Homo sapiens
tttctggaagaacttctggttttttggtaacaggcacaggttctttctttactggaacaagtttct

SEQ ID NO: 121533 - DNA, 67 bp, Homo sapiens
aacttctggttttttggtaacaggcacaggttctttctttactggaacaagtttcttgggcacctca

SEQ ID NO: 121534 - DNA, 71 bp, Homo sapiens
ttttggtaacaggcacaggttctttctttactggaacaagtttcttgggcacctcaggcactttgaagata

SEQ ID NO: 121535 - DNA, 70 bp, Homo sapiens
gcacaggttctttctttactggaacaagtttcttgggcacctcaggcactttgaagatattagttttgtt

SEQ ID NO: 121536 - DNA, 68 bp, Homo sapiens
ggttctttctttactggaacaagtttcttgggcacctcaggcactttgaagatattagttttgtttta

SEQ ID NO: 121537 - DNA, 68 bp, Homo sapiens
ttactggaacaagtttcttgggcacctcaggcactttgaagatattagttttgttttaaaaatagtat

SEQ ID NO: 121538 - DNA, 75 bp, Homo sapiens
attccactttaagatatcagaatactttcttttttatgatgccaacgatgaagtgaatacctttagctgctggtg

SEQ ID NO: 121539 - DNA, 76 bp, Homo sapiens
ttaagatatcagaatactttcttttttatgatgccaacgatgaagtgaatacctttagctgctggtgtttctggct

SEQ ID NO: 121540 - DNA, 73 bp, Homo sapiens
actttcttttttatgatgccaacgatgaagtgaatacctttagctgctggtgtttctggcttcttaacagttg

SEQ ID NO: 121541 - DNA, 74 bp, Homo sapiens
ttttatgatgccaacgatgaagtgaatacctttagctgctggtgtttctggcttcttaacagttgggaccttct

SEQ ID NO: 121542 - DNA, 73 bp, Homo sapiens
aacgatgaagtgaatacctttagctgctggtgtttctggcttcttaacagttgggaccttcttcactggaaca

SEQ ID NO: 121543 - DNA, 70 bp, Homo sapiens
aagtgaatacctttagctgctggtgtttctggcttcttaacagttgggaccttcttcactggaacaactt

SEQ ID NO: 121544 - DNA, 71 bp, Homo sapiens
acctttagctgctggtgtttctggcttcttaacagttgggaccttcttcactggaacaactttctttggca

SEQ ID NO: 121545 - DNA, 71 bp, Homo sapiens
tgtttctggcttcttaacagttgggaccttcttcactggaacaactttctttggcatctcaggttctttaa

SEQ ID NO: 121546 - DNA, 72 bp, Homo sapiens
ttcttaacagttgggaccttcttcactggaacaactttctttggcatctcaggttctttaaagatatcagta

SEQ ID NO: 121547 - DNA, 73 bp, Homo sapiens
ttgggaccttcttcactggaacaactttctttggcatctcaggttctttaaagatatcagtagcatttaataa

SEQ ID NO: 121548 - DNA, 73 bp, Homo sapiens
accttcttcactggaacaactttctttggcatctcaggttctttaaagatatcagtagcatttaataatacaa

SEQ ID NO: 121549 - DNA, 75 bp, Homo sapiens
ctggaacaactttctttggcatctcaggttctttaaagatatcagtagcatttaataatacaaagttgtgagatg

SEQ ID NO: 121550 - DNA, 70 bp, Homo sapiens
gaagagtgtaaaattgtagacaccacaaaaatgaagtattcattttaacatgagtacctttaggaggcgg

SEQ ID NO: 121551 - DNA, 72 bp, Homo sapiens
tgtaaaattgtagacaccacaaaaatgaagtattcattttaacatgagtacctttaggaggcggtgcttctg

SEQ ID NO: 121552 - DNA, 69 bp, Homo sapiens
gtagacaccacaaaaatgaagtattcattttaacatgagtacctttaggaggcggtgcttctggttttt

SEQ ID NO: 121553 - DNA, 70 bp, Homo sapiens
aaaaatgaagtattcattttaacatgagtacctttaggaggcggtgcttctggttttttgatgacaggaa

SEQ ID NO: 121554 - DNA, 71 bp, Homo sapiens
attcattttaacatgagtacctttaggaggcggtgcttctggttttttgatgacaggaactttcttctctg

SEQ ID NO: 121555 - DNA, 74 bp, Homo sapiens
taacatgagtacctttaggaggcggtgcttctggttttttgatgacaggaactttcttctctgggatgatcttc

SEQ ID NO: 121556 - DNA, 74 bp, Homo sapiens
ctttaggaggcggtgcttctggttttttgatgacaggaactttcttctctgggatgatcttcttgggctcttca

SEQ ID NO: 121557 - DNA, 77 bp, Homo sapiens
tgcttctggttttttgatgacaggaactttcttctctgggatgatcttcttgggctcttcaggcacttgaataatag

SEQ ID NO: 121558 - DNA, 75 bp, Homo sapiens
tttttgatgacaggaactttcttctctgggatgatcttcttgggctcttcaggcacttgaataataggaatttct

SEQ ID NO: 121559 - DNA, 73 bp, Homo sapiens
acaggaactttcttctctgggatgatcttcttgggctcttcaggcacttgaataataggaatttcttttagaa

SEQ ID NO: 121560 - DNA, 75 bp, Homo sapiens
ttcttctctgggatgatcttcttgggctcttcaggcacttgaataataggaatttcttttagaattaggtgatta

SEQ ID NO: 121561 - DNA, 74 bp, Homo sapiens
ggatgatcttcttgggctcttcaggcacttgaataataggaatttcttttagaattaggtgattacaatgaaaa

SEQ ID NO: 121562 - DNA, 73 bp, Homo sapiens
aaaaatgaaatgactgtattttcccatacagtggattctgctttgtacctgctggaggtggaacctctggttc

SEQ ID NO: 121563 - DNA, 73 bp, Homo sapiens
aaatgactgtattttcccatacagtggattctgctttgtacctgctggaggtggaacctctggttcctcctct

SEQ ID NO: 121564 - DNA, 75 bp, Homo sapiens
attttcccatacagtggattctgctttgtacctgctggaggtggaacctctggttcctcctcttctgcaacagga

SEQ ID NO: 121565 - DNA, 74 bp, Homo sapiens
acagtggattctgctttgtacctgctggaggtggaacctctggttcctcctcttctgcaacaggaactggcttt

SEQ ID NO: 121566 - DNA, 73 bp, Homo sapiens
ctttgtacctgctggaggtggaacctctggttcctcctcttctgcaacaggaactggcttttcctcttcagga

SEQ ID NO: 121567 - DNA, 73 bp, Homo sapiens
tggaggtggaacctctggttcctcctcttctgcaacaggaactggcttttcctcttcaggagcaatttcctct

SEQ ID NO: 121568 - DNA, 74 bp, Homo sapiens
acctctggttcctcctcttctgcaacaggaactggcttttcctcttcaggagcaatttcctcttcaggagcaat

SEQ ID NO: 121569 - DNA, 74 bp, Homo sapiens
cctcctcttctgcaacaggaactggcttttcctcttcaggagcaatttcctcttcaggagcaatttcctcaggt

SEQ ID NO: 121570 - DNA, 77 bp, Homo sapiens
ttctgcaacaggaactggcttttcctcttcaggagcaatttcctcttcaggagcaatttcctcaggttcttcatata

SEQ ID NO: 121571 - DNA, 72 bp, Homo sapiens
aactggcttttcctcttcaggagcaatttcctcttcaggagcaatttcctcaggttcttcatatactttaaa

SEQ ID NO: 121572 - DNA, 74 bp, Homo sapiens
ttcctcttcaggagcaatttcctcttcaggagcaatttcctcaggttcttcatatactttaaagatattagtta

SEQ ID NO: 121573 - DNA, 72 bp, Homo sapiens
caggagcaatttcctcttcaggagcaatttcctcaggttcttcatatactttaaagatattagttaatttta

SEQ ID NO: 121574 - DNA, 73 bp, Homo sapiens
tcctcttcaggagcaatttcctcaggttcttcatatactttaaagatattagttaattttatttcaatgtatg

SEQ ID NO: 121575 - DNA, 72 bp, Homo sapiens
ttaaattagaaatagtcgcaagtggcaaggtcattaatcaccggtctcacgtgtaccttctgggggaggaga

SEQ ID NO: 121576 - DNA, 72 bp, Homo sapiens
aaatagtcgcaagtggcaaggtcattaatcaccggtctcacgtgtaccttctgggggaggagactccgctct

SEQ ID NO: 121577 - DNA, 72 bp, Homo sapiens
aagtggcaaggtcattaatcaccggtctcacgtgtaccttctgggggaggagactccgctctttctggaaca

SEQ ID NO: 121578 - DNA, 72 bp, Homo sapiens
aggtcattaatcaccggtctcacgtgtaccttctgggggaggagactccgctctttctggaacaggaacagc

SEQ ID NO: 121579 - DNA, 72 bp, Homo sapiens
tcaccggtctcacgtgtaccttctgggggaggagactccgctctttctggaacaggaacagctggtttctct

SEQ ID NO: 121580 - DNA, 71 bp, Homo sapiens
tgtaccttctgggggaggagactccgctctttctggaacaggaacagctggtttctcttccaagacaggtt

SEQ ID NO: 121581 - DNA, 71 bp, Homo sapiens
ggggaggagactccgctctttctggaacaggaacagctggtttctcttccaagacaggtttctttggcact

SEQ ID NO: 121582 - DNA, 73 bp, Homo sapiens
ctccgctctttctggaacaggaacagctggtttctcttccaagacaggtttctttggcacttctggcacttta

SEQ ID NO: 121583 - DNA, 72 bp, Homo sapiens
tttctggaacaggaacagctggtttctcttccaagacaggtttctttggcacttctggcactttaaagatat

SEQ ID NO: 121584 - DNA, 71 bp, Homo sapiens
gaacagctggtttctcttccaagacaggtttctttggcacttctggcactttaaagatattaattcatttt

SEQ ID NO: 121585 - DNA, 71 bp, Homo sapiens
gctggtttctcttccaagacaggtttctttggcacttctggcactttaaagatattaattcatttttctta

SEQ ID NO: 121586 - DNA, 72 bp, Homo sapiens
cttccaagacaggtttctttggcacttctggcactttaaagatattaattcatttttcttatgagtagttga

SEQ ID NO: 121587 - DNA, 77 bp, Homo sapiens
aataggtgacttattagacaagggtgagtgcttttctgcagaatctcattagtgacatgtaccttttgctggtggga

SEQ ID NO: 121588 - DNA, 77 bp, Homo sapiens
ttattagacaagggtgagtgcttttctgcagaatctcattagtgacatgtaccttttgctggtgggacttctggctt

SEQ ID NO: 121589 - DNA, 75 bp, Homo sapiens
agggtgagtgcttttctgcagaatctcattagtgacatgtaccttttgctggtgggacttctggctttttgggaa

SEQ ID NO: 121590 - DNA, 75 bp, Homo sapiens
tttctgcagaatctcattagtgacatgtaccttttgctggtgggacttctggctttttgggaacagctactttct

SEQ ID NO: 121591 - DNA, 72 bp, Homo sapiens
aatctcattagtgacatgtaccttttgctggtgggacttctggctttttgggaacagctactttcttttctg

SEQ ID NO: 121592 - DNA, 69 bp, Homo sapiens
acatgtaccttttgctggtgggacttctggctttttgggaacagctactttcttttctggaacaacttc

SEQ ID NO: 121593 - DNA, 68 bp, Homo sapiens
ttttgctggtgggacttctggctttttgggaacagctactttcttttctggaacaacttcttttggaa

SEQ ID NO: 121594 - DNA, 70 bp, Homo sapiens
gacttctggctttttgggaacagctactttcttttctggaacaacttcttttggaacttcaggcacttca

SEQ ID NO: 121595 - DNA, 69 bp, Homo sapiens
gctttttgggaacagctactttcttttctggaacaacttcttttggaacttcaggcacttcaaatatat

SEQ ID NO: 121596 - DNA, 69 bp, Homo sapiens
gggaacagctactttcttttctggaacaacttcttttggaacttcaggcacttcaaatatattagtatt

SEQ ID NO: 121597 - DNA, 69 bp, Homo sapiens
cttttctggaacaacttcttttggaacttcaggcacttcaaatatattagtattttaacattagaaaca

SEQ ID NO: 121598 - DNA, 71 bp, Homo sapiens
ctggaacaacttcttttggaacttcaggcacttcaaatatattagtattttaacattagaaacaatcacca

SEQ ID NO: 121599 - DNA, 72 bp, Homo sapiens
ccttttagaagctgggggctccatccgcccccatcaaacagtggacagccacatatacctttagcaggtggg

SEQ ID NO: 121600 - DNA, 73 bp, Homo sapiens
ggggctccatccgcccccatcaaacagtggacagccacatatacctttagcaggtggggcttctggctttttg

SEQ ID NO: 121601 - DNA, 72 bp, Homo sapiens
atccgcccccatcaaacagtggacagccacatatacctttagcaggtggggcttctggctttttgggaacca

SEQ ID NO: 121602 - DNA, 73 bp, Homo sapiens
atcaaacagtggacagccacatatacctttagcaggtggggcttctggctttttgggaaccaccagaggcacc

SEQ ID NO: 121603 - DNA, 71 bp, Homo sapiens
acagccacatatacctttagcaggtggggcttctggctttttgggaaccaccagaggcaccttcttttcag

SEQ ID NO: 121604 - DNA, 69 bp, Homo sapiens
atatacctttagcaggtggggcttctggctttttgggaaccaccagaggcaccttcttttcaggaacaa

SEQ ID NO: 121605 - DNA, 68 bp, Homo sapiens
tttagcaggtggggcttctggctttttgggaaccaccagaggcaccttcttttcaggaacaacctcct

SEQ ID NO: 121606 - DNA, 69 bp, Homo sapiens
ttctggctttttgggaaccaccagaggcaccttcttttcaggaacaacctccttgggcacctcgggcac

SEQ ID NO: 121607 - DNA, 70 bp, Homo sapiens
ttgggaaccaccagaggcaccttcttttcaggaacaacctccttgggcacctcgggcactataaaagata

SEQ ID NO: 121608 - DNA, 69 bp, Homo sapiens
accagaggcaccttcttttcaggaacaacctccttgggcacctcgggcactataaaagatattagtagt

SEQ ID NO: 121609 - DNA, 67 bp, Homo sapiens
accttcttttcaggaacaacctccttgggcacctcgggcactataaaagatattagtagttgtttaa

SEQ ID NO: 121610 - DNA, 70 bp, Homo sapiens
tttcaggaacaacctccttgggcacctcgggcactataaaagatattagtagttgtttaagctcatggtt

SEQ ID NO: 121611 - DNA, 71 bp, Homo sapiens
tagaatatgacacttcaaagaaagttttttgttagggagttagtggcagtgaggaatacctttcactggtg

SEQ ID NO: 121612 - DNA, 68 bp, Homo sapiens
acttcaaagaaagttttttgttagggagttagtggcagtgaggaatacctttcactggtggtagttca

SEQ ID NO: 121613 - DNA, 65 bp, Homo sapiens
aagttttttgttagggagttagtggcagtgaggaatacctttcactggtggtagttcaggttttt

SEQ ID NO: 121614 - DNA, 71 bp, Homo sapiens
gttagggagttagtggcagtgaggaatacctttcactggtggtagttcaggttttttggcaacgacagcag

SEQ ID NO: 121615 - DNA, 72 bp, Homo sapiens
tagtggcagtgaggaatacctttcactggtggtagttcaggttttttggcaacgacagcaggtgctttcttt

SEQ ID NO: 121616 - DNA, 70 bp, Homo sapiens
aggaatacctttcactggtggtagttcaggttttttggcaacgacagcaggtgctttcttttctgggaca

SEQ ID NO: 121617 - DNA, 70 bp, Homo sapiens
tttcactggtggtagttcaggttttttggcaacgacagcaggtgctttcttttctgggacaggtttctta

SEQ ID NO: 121618 - DNA, 68 bp, Homo sapiens
tagttcaggttttttggcaacgacagcaggtgctttcttttctgggacaggtttcttaggtggtacgg

SEQ ID NO: 121619 - DNA, 70 bp, Homo sapiens
tttggcaacgacagcaggtgctttcttttctgggacaggtttcttaggtggtacggtcactaaagaatta

SEQ ID NO: 121620 - DNA, 68 bp, Homo sapiens
aacgacagcaggtgctttcttttctgggacaggtttcttaggtggtacggtcactaaagaattagaag

SEQ ID NO: 121621 - DNA, 66 bp, Homo sapiens
tttcttttctgggacaggtttcttaggtggtacggtcactaaagaattagaaggtatgttttagaa

SEQ ID NO: 121622 - DNA, 66 bp, Homo sapiens
tttctgggacaggtttcttaggtggtacggtcactaaagaattagaaggtatgttttagaaagaac

SEQ ID NO: 121623 - DNA, 74 bp, Homo sapiens
agggcaggaaggggaaagagtggccgaggtgtcctagcagctttcttgccatgtaccttgtggaggcgccgctg

SEQ ID NO: 121624 - DNA, 79 bp, Homo sapiens
ggaaagagtggccgaggtgtcctagcagctttcttgccatgtaccttgtggaggcgccgctggctctggctcttccaca

SEQ ID NO: 121625 - DNA, 79 bp, Homo sapiens
agtggccgaggtgtcctagcagctttcttgccatgtaccttgtggaggcgccgctggctctggctcttccacaacttca

SEQ ID NO: 121626 - DNA, 82 bp, Homo sapiens
tcctagcagctttcttgccatgtaccttgtggaggcgccgctggctctggctcttccacaacttcagcaggaggctcttcta

SEQ ID NO: 121627 - DNA, 79 bp, Homo sapiens
ttcttgccatgtaccttgtggaggcgccgctggctctggctcttccacaacttcagcaggaggctcttctagggcaact

SEQ ID NO: 121628 - DNA, 78 bp, Homo sapiens
atgtaccttgtggaggcgccgctggctctggctcttccacaacttcagcaggaggctcttctagggcaacttcctcag

SEQ ID NO: 121629 - DNA, 80 bp, Homo sapiens
tggaggcgccgctggctctggctcttccacaacttcagcaggaggctcttctagggcaacttcctcaggctcctcgaaca

SEQ ID NO: 121630 - DNA, 77 bp, Homo sapiens
tggctctggctcttccacaacttcagcaggaggctcttctagggcaacttcctcaggctcctcgaacactttaaaga

SEQ ID NO: 121631 - DNA, 75 bp, Homo sapiens
aacttcagcaggaggctcttctagggcaacttcctcaggctcctcgaacactttaaagacatgagctcattttaa

SEQ ID NO: 121632 - DNA, 76 bp, Homo sapiens
aggctcttctagggcaacttcctcaggctcctcgaacactttaaagacatgagctcattttaatgccagaattgac

SEQ ID NO: 121633 - DNA, 75 bp, Homo sapiens
ttctagggcaacttcctcaggctcctcgaacactttaaagacatgagctcattttaatgccagaattgactaaaa

SEQ ID NO: 121634 - DNA, 62 bp, Homo sapiens
ttttttaaaaaacactaatttgaatagtttcattattaccttcagggggaggactttccggt

SEQ ID NO: 121635 - DNA, 64 bp, Homo sapiens
aaaaacactaatttgaatagtttcattattaccttcagggggaggactttccggtttgggagga

SEQ ID NO: 121636 - DNA, 69 bp, Homo sapiens
taatttgaatagtttcattattaccttcagggggaggactttccggtttgggaggaatagcttcaggca

SEQ ID NO: 121637 - DNA, 67 bp, Homo sapiens
tttcattattaccttcagggggaggactttccggtttgggaggaatagcttcaggcaccttcttttc

SEQ ID NO: 121638 - DNA, 69 bp, Homo sapiens
taccttcagggggaggactttccggtttgggaggaatagcttcaggcaccttcttttctgggacagcta

SEQ ID NO: 121639 - DNA, 69 bp, Homo sapiens
aggactttccggtttgggaggaatagcttcaggcaccttcttttctgggacagctacctttggcacctc

SEQ ID NO: 121640 - DNA, 70 bp, Homo sapiens
gtttgggaggaatagcttcaggcaccttcttttctgggacagctacctttggcacctctgggactttaaa

SEQ ID NO: 121641 - DNA, 71 bp, Homo sapiens
aatagcttcaggcaccttcttttctgggacagctacctttggcacctctgggactttaaaagatattatta

SEQ ID NO: 121642 - DNA, 69 bp, Homo sapiens
cttcaggcaccttcttttctgggacagctacctttggcacctctgggactttaaaagatattattattt

SEQ ID NO: 121643 - DNA, 70 bp, Homo sapiens
tttctgggacagctacctttggcacctctgggactttaaaagatattattattttcattgttagacaaag

SEQ ID NO: 121644 - DNA, 69 bp, Homo sapiens
gggacagctacctttggcacctctgggactttaaaagatattattattttcattgttagacaaagtaaa

SEQ ID NO: 121645 - DNA, 70 bp, Homo sapiens
tctgggactttaaaagatattattattttcattgttagacaaagtaaagacaaacaaacaatatcaaaca

SEQ ID NO: 121646 - DNA, 74 bp, Homo sapiens
agatattattattttcattgttagacaaagtaaagacaaacaaacaatatcaaacacagcaccatgagggtgtc

SEQ ID NO: 121647 - DNA, 74 bp, Homo sapiens
tgttagacaaagtaaagacaaacaaacaatatcaaacacagcaccatgagggtgtctaccttttgtgggtggca

SEQ ID NO: 121648 - DNA, 73 bp, Homo sapiens
agacaaacaaacaatatcaaacacagcaccatgagggtgtctaccttttgtgggtggcacttcaggcttttta

SEQ ID NO: 121649 - DNA, 72 bp, Homo sapiens
aacaaacaatatcaaacacagcaccatgagggtgtctaccttttgtgggtggcacttcaggctttttaggag

SEQ ID NO: 121650 - DNA, 73 bp, Homo sapiens
aacacagcaccatgagggtgtctaccttttgtgggtggcacttcaggctttttaggaggaggcactggcactt

SEQ ID NO: 121651 - DNA, 70 bp, Homo sapiens
accatgagggtgtctaccttttgtgggtggcacttcaggctttttaggaggaggcactggcactttcttt

SEQ ID NO: 121652 - DNA, 73 bp, Homo sapiens
tttaggaggaggcactggcactttcttttcaggaacaacttctttgggagcctcaggcacttgaaagataata

SEQ ID NO: 121653 - DNA, 74 bp, Homo sapiens
gcactggcactttcttttcaggaacaacttctttgggagcctcaggcacttgaaagataatagtgaaattacat

SEQ ID NO: 121654 - DNA, 70 bp, Homo sapiens
actttcttttcaggaacaacttctttgggagcctcaggcacttgaaagataatagtgaaattacatttag

SEQ ID NO: 121655 - DNA, 75 bp, Homo sapiens
tttcaggaacaacttctttgggagcctcaggcacttgaaagataatagtgaaattacatttaggcattatgaaga

SEQ ID NO: 121656 - DNA, 71 bp, Homo sapiens
tttaggaggagccgctggcactttcttttcaggaacaacttctttcggagcctctggcacttaaaagatat

SEQ ID NO: 121657 - DNA, 71 bp, Homo sapiens
ccgctggcactttcttttcaggaacaacttctttcggagcctctggcacttaaaagatattagtgaaatta

SEQ ID NO: 121658 - DNA, 71 bp, Homo sapiens
gcactttcttttcaggaacaacttctttcggagcctctggcacttaaaagatattagtgaaattacattta

SEQ ID NO: 121659 - DNA, 71 bp, Homo sapiens
ggaacaacttctttcggagcctctggcacttaaaagatattagtgaaattacatttagaagttatgaagac

SEQ ID NO: 121660 - DNA, 67 bp, Homo sapiens
atttcctagttaaaataacagttatttttctcctatagtttgtatagctttggcattaccttcaggg

SEQ ID NO: 121661 - DNA, 67 bp, Homo sapiens
aaataacagttatttttctcctatagtttgtatagctttggcattaccttcagggggaggactttcc

SEQ ID NO: 121662 - DNA, 66 bp, Homo sapiens
atttttctcctatagtttgtatagctttggcattaccttcagggggaggactttccggtttgggag

SEQ ID NO: 121663 - DNA, 70 bp, Homo sapiens
tcctatagtttgtatagctttggcattaccttcagggggaggactttccggtttgggaggaatagcttca

SEQ ID NO: 121664 - DNA, 69 bp, Homo sapiens
tatagctttggcattaccttcagggggaggactttccggtttgggaggaatagcttcaggcaccttctt

SEQ ID NO: 121665 - DNA, 67 bp, Homo sapiens
attaccttcagggggaggactttccggtttgggaggaatagcttcaggcaccttcttttctgggaca

SEQ ID NO: 121666 - DNA, 70 bp, Homo sapiens
ggggaggactttccggtttgggaggaatagcttcaggcaccttcttttctgggacagctgcctttggcac

SEQ ID NO: 121667 - DNA, 71 bp, Homo sapiens
actttccggtttgggaggaatagcttcaggcaccttcttttctgggacagctgcctttggcacctctggga

SEQ ID NO: 121668 - DNA, 73 bp, Homo sapiens
tttgggaggaatagcttcaggcaccttcttttctgggacagctgcctttggcacctctgggactttaaagata

SEQ ID NO: 121669 - DNA, 72 bp, Homo sapiens
aatagcttcaggcaccttcttttctgggacagctgcctttggcacctctgggactttaaagatattagtatt

SEQ ID NO: 121670 - DNA, 72 bp, Homo sapiens
cttcttttctgggacagctgcctttggcacctctgggactttaaagatattagtattttcattattagacaa

SEQ ID NO: 121671 - DNA, 73 bp, Homo sapiens
tctgggacagctgcctttggcacctctgggactttaaagatattagtattttcattattagacaaagtaaaga

SEQ ID NO: 121672 - DNA, 72 bp, Homo sapiens
ttaaagatattagtattttcattattagacaaagtaaagacaaacaaacaatatcaaacacagcaacaagag

SEQ ID NO: 121673 - DNA, 71 bp, Homo sapiens
tattagacaaagtaaagacaaacaaacaatatcaaacacagcaacaagagggtgtctaccttttgtgggtg

SEQ ID NO: 121674 - DNA, 71 bp, Homo sapiens
agacaaacaaacaatatcaaacacagcaacaagagggtgtctaccttttgtgggtggcacttcaggctttt

SEQ ID NO: 121675 - DNA, 71 bp, Homo sapiens
aacaaacaatatcaaacacagcaacaagagggtgtctaccttttgtgggtggcacttcaggctttttagga

SEQ ID NO: 121676 - DNA, 72 bp, Homo sapiens
acacagcaacaagagggtgtctaccttttgtgggtggcacttcaggctttttaggaggaggcactggcactt

SEQ ID NO: 121677 - DNA, 69 bp, Homo sapiens
aacaagagggtgtctaccttttgtgggtggcacttcaggctttttaggaggaggcactggcactttctt

SEQ ID NO: 121678 - DNA, 73 bp, Homo sapiens
tttaggaggaggcactggcactttcttttcaggaacaacttctttgggagcctcaggcacttgaaagatatta

SEQ ID NO: 121679 - DNA, 74 bp, Homo sapiens
gcactggcactttcttttcaggaacaacttctttgggagcctcaggcacttgaaagatattagtgaaattacat

SEQ ID NO: 121680 - DNA, 70 bp, Homo sapiens
actttcttttcaggaacaacttctttgggagcctcaggcacttgaaagatattagtgaaattacatttag

SEQ ID NO: 121681 - DNA, 75 bp, Homo sapiens
tttcaggaacaacttctttgggagcctcaggcacttgaaagatattagtgaaattacatttaggcattatgaaga

SEQ ID NO: 121682 - DNA, 68 bp, Homo sapiens
tatttcttctgcagaaaaaggacaggggtaaaaaatacctgtggcaggtggggcttctggttttgtgg

SEQ ID NO: 121683 - DNA, 65 bp, Homo sapiens
aaaaaggacaggggtaaaaaatacctgtggcaggtggggcttctggttttgtgggaggagcctta

SEQ ID NO: 121684 - DNA, 65 bp, Homo sapiens
gggtaaaaaatacctgtggcaggtggggcttctggttttgtgggaggagccttaggaactttctt

SEQ ID NO: 121685 - DNA, 66 bp, Homo sapiens
aaaaatacctgtggcaggtggggcttctggttttgtgggaggagccttaggaactttcttttctgg

SEQ ID NO: 121686 - DNA, 67 bp, Homo sapiens
aggtggggcttctggttttgtgggaggagccttaggaactttcttttctgggacaacttcttgagct

SEQ ID NO: 121687 - DNA, 70 bp, Homo sapiens
ggcttctggttttgtgggaggagccttaggaactttcttttctgggacaacttcttgagcttcaggcact

SEQ ID NO: 121688 - DNA, 72 bp, Homo sapiens
acttcttgagcttcaggcacttgaaagatattagtagttttagacttaagttaatgaagagaaatgggctaa

SEQ ID NO: 121689 - DNA, 72 bp, Homo sapiens
tgagcttcaggcacttgaaagatattagtagttttagacttaagttaatgaagagaaatgggctaaaattgt

SEQ ID NO: 121690 - DNA, 69 bp, Homo sapiens
ggcacttgaaagatattagtagttttagacttaagttaatgaagagaaatgggctaaaattgtttacag

SEQ ID NO: 121691 - DNA, 76 bp, Homo sapiens
ttaagttaatgaagagaaatgggctaaaattgtttacagtaggagaggagatatctcttctgcagaatgaagtcag

SEQ ID NO: 121692 - DNA, 77 bp, Homo sapiens
ttgtttacagtaggagaggagatatctcttctgcagaatgaagtcagggctaaagtgtacctgggacaatcggagct

SEQ ID NO: 121693 - DNA, 76 bp, Homo sapiens
taggagaggagatatctcttctgcagaatgaagtcagggctaaagtgtacctgggacaatcggagcttctggtttt

SEQ ID NO: 121694 - DNA, 74 bp, Homo sapiens
atatctcttctgcagaatgaagtcagggctaaagtgtacctgggacaatcggagcttctggttttttgggtgga

SEQ ID NO: 121695 - DNA, 70 bp, Homo sapiens
agaatgaagtcagggctaaagtgtacctgggacaatcggagcttctggttttttgggtggagccacggga

SEQ ID NO: 121696 - DNA, 68 bp, Homo sapiens
tcagggctaaagtgtacctgggacaatcggagcttctggttttttgggtggagccacgggaatttctt

SEQ ID NO: 121697 - DNA, 66 bp, Homo sapiens
ctaaagtgtacctgggacaatcggagcttctggttttttgggtggagccacgggaatttctttttc

SEQ ID NO: 121698 - DNA, 69 bp, Homo sapiens
ggacaatcggagcttctggttttttgggtggagccacgggaatttctttttctgcggcttcttgaggaa

SEQ ID NO: 121699 - DNA, 69 bp, Homo sapiens
gcttctggttttttgggtggagccacgggaatttctttttctgcggcttcttgaggaacttctggcact

SEQ ID NO: 121700 - DNA, 70 bp, Homo sapiens
tttttgggtggagccacgggaatttctttttctgcggcttcttgaggaacttctggcacttgaaagatat

SEQ ID NO: 121701 - DNA, 70 bp, Homo sapiens
agccacgggaatttctttttctgcggcttcttgaggaacttctggcacttgaaagatattagtagtttta

SEQ ID NO: 121702 - DNA, 70 bp, Homo sapiens
gaatttctttttctgcggcttcttgaggaacttctggcacttgaaagatattagtagttttatacttagg

SEQ ID NO: 121703 - DNA, 76 bp, Homo sapiens
ttgttttcaggaatggaagagagatttcttctgcaggataaggttgagctgacatgtacctgtaactgcgggggct

SEQ ID NO: 121704 - DNA, 74 bp, Homo sapiens
atggaagagagatttcttctgcaggataaggttgagctgacatgtacctgtaactgcgggggcttctggttttt

SEQ ID NO: 121705 - DNA, 75 bp, Homo sapiens
agatttcttctgcaggataaggttgagctgacatgtacctgtaactgcgggggcttctggttttttgattggtgc

SEQ ID NO: 121706 - DNA, 71 bp, Homo sapiens
aggataaggttgagctgacatgtacctgtaactgcgggggcttctggttttttgattggtgccttgggaat

SEQ ID NO: 121707 - DNA, 70 bp, Homo sapiens
gttgagctgacatgtacctgtaactgcgggggcttctggttttttgattggtgccttgggaattttcttt

SEQ ID NO: 121708 - DNA, 68 bp, Homo sapiens
acatgtacctgtaactgcgggggcttctggttttttgattggtgccttgggaattttcttttctggga

SEQ ID NO: 121709 - DNA, 68 bp, Homo sapiens
taactgcgggggcttctggttttttgattggtgccttgggaattttcttttctgggacaacttcttga

SEQ ID NO: 121710 - DNA, 72 bp, Homo sapiens
gggcttctggttttttgattggtgccttgggaattttcttttctgggacaacttcttgagcagcttcaggca

SEQ ID NO: 121711 - DNA, 71 bp, Homo sapiens
agtgattgtgaggggtacagacgataagtttttcttagcagaggagagggaataaataccttttgcacgtg

SEQ ID NO: 121712 - DNA, 68 bp, Homo sapiens
tacagacgataagtttttcttagcagaggagagggaataaataccttttgcacgtggggcttccggtt

SEQ ID NO: 121713 - DNA, 65 bp, Homo sapiens
acgataagtttttcttagcagaggagagggaataaataccttttgcacgtggggcttccggtttt

SEQ ID NO: 121714 - DNA, 70 bp, Homo sapiens
tttcttagcagaggagagggaataaataccttttgcacgtggggcttccggttttttgggcacagccaca

SEQ ID NO: 121715 - DNA, 68 bp, Homo sapiens
agagggaataaataccttttgcacgtggggcttccggttttttgggcacagccacagatgctttcttt

SEQ ID NO: 121716 - DNA, 69 bp, Homo sapiens
aataaataccttttgcacgtggggcttccggttttttgggcacagccacagatgctttcttttcaagta

SEQ ID NO: 121717 - DNA, 70 bp, Homo sapiens
ttttgcacgtggggcttccggttttttgggcacagccacagatgctttcttttcaagtacaacttcttta

SEQ ID NO: 121718 - DNA, 70 bp, Homo sapiens
ttccggttttttgggcacagccacagatgctttcttttcaagtacaacttctttaggagcttcaggaact

SEQ ID NO: 121719 - DNA, 73 bp, Homo sapiens
tttttgggcacagccacagatgctttcttttcaagtacaacttctttaggagcttcaggaactttgaagatat

SEQ ID NO: 121720 - DNA, 70 bp, Homo sapiens
gctttcttttcaagtacaacttctttaggagcttcaggaactttgaagatattagtatcttttagttaga

SEQ ID NO: 121721 - DNA, 69 bp, Homo sapiens
agtacaacttctttaggagcttcaggaactttgaagatattagtatcttttagttagaagctataaagg

SEQ ID NO: 121722 - DNA, 70 bp, Homo sapiens
cttctatacagtctttccccagggccccccgactgacaatgtgtaatgatacctacctttaggaggtgga

SEQ ID NO: 121723 - DNA, 69 bp, Homo sapiens
ttccccagggccccccgactgacaatgtgtaatgatacctacctttaggaggtggagcttctggctttt

SEQ ID NO: 121724 - DNA, 72 bp, Homo sapiens
cccccgactgacaatgtgtaatgatacctacctttaggaggtggagcttctggctttttggcaggaggcacc

SEQ ID NO: 121725 - DNA, 71 bp, Homo sapiens
acaatgtgtaatgatacctacctttaggaggtggagcttctggctttttggcaggaggcaccggtactttc

SEQ ID NO: 121726 - DNA, 70 bp, Homo sapiens
tgtaatgatacctacctttaggaggtggagcttctggctttttggcaggaggcaccggtactttcttttc

SEQ ID NO: 121727 - DNA, 68 bp, Homo sapiens
tacctttaggaggtggagcttctggctttttggcaggaggcaccggtactttcttttctgggaccact

SEQ ID NO: 121728 - DNA, 68 bp, Homo sapiens
aggtggagcttctggctttttggcaggaggcaccggtactttcttttctgggaccacttccttcggtg

SEQ ID NO: 121729 - DNA, 71 bp, Homo sapiens
ttctggctttttggcaggaggcaccggtactttcttttctgggaccacttccttcggtggcagcacttcag

SEQ ID NO: 121730 - DNA, 73 bp, Homo sapiens
gcaggaggcaccggtactttcttttctgggaccacttccttcggtggcagcacttcaggcacttcaaagatat

SEQ ID NO: 121731 - DNA, 70 bp, Homo sapiens
accggtactttcttttctgggaccacttccttcggtggcagcacttcaggcacttcaaagatatttgtaa

SEQ ID NO: 121732 - DNA, 72 bp, Homo sapiens
tttcttttctgggaccacttccttcggtggcagcacttcaggcacttcaaagatatttgtaatttgtgttta

SEQ ID NO: 121733 - DNA, 71 bp, Homo sapiens
accacttccttcggtggcagcacttcaggcacttcaaagatatttgtaatttgtgtttagaaaaggtgaaa

SEQ ID NO: 121734 - DNA, 67 bp, Homo sapiens; identical to SEQ ID NO: 121660

SEQ ID NO: 121735 - DNA, 67 bp, Homo sapiens; identical to SEQ ID NO: 121661

SEQ ID NO: 121736 - DNA, 66 bp, Homo sapiens; identical to SEQ ID NO: 121662

SEQ ID NO: 121737 - DNA, 70 bp, Homo sapiens; identical to SEQ ID NO: 121663

SEQ ID NO: 121738 - DNA, 69 bp, Homo sapiens; identical to SEQ ID NO: 121664

SEQ ID NO: 121739 - DNA, 67 bp, Homo sapiens; identical to SEQ ID NO: 121665

SEQ ID NO: 121740 - DNA, 70 bp, Homo sapiens; identical to SEQ ID NO: 121666

SEQ ID NO: 121741 - DNA, 71 bp, Homo sapiens; identical to SEQ ID NO: 121667

SEQ ID NO: 121742 - DNA, 73 bp, Homo sapiens; identical to SEQ ID NO: 121668

SEQ ID NO: 121743 - DNA, 72 bp, Homo sapiens; identical to SEQ ID NO: 121669

SEQ ID NO: 121744 - DNA, 72 bp, Homo sapiens; identical to SEQ ID NO: 121670

SEQ ID NO: 121745 - DNA, 73 bp, Homo sapiens; identical to SEQ ID NO: 121671

SEQ ID NO: 121746 - DNA, 72 bp, Homo sapiens; identical to SEQ ID NO: 121672

SEQ ID NO: 121747 - DNA, 71 bp, Homo sapiens; identical to SEQ ID NO: 121673

SEQ ID NO: 121748 - DNA, 71 bp, Homo sapiens; identical to SEQ ID NO: 121674

SEQ ID NO: 121749 - DNA, 71 bp, Homo sapiens; identical to SEQ ID NO: 121675

SEQ ID NO: 121750 - DNA, 72 bp, Homo sapiens; identical to SEQ ID NO: 121676

SEQ ID NO: 121751 - DNA, 69 bp, Homo sapiens; identical to SEQ ID NO: 121677

SEQ ID NO: 121752 - DNA, 73 bp, Homo sapiens; identical to SEQ ID NO: 121678

SEQ ID NO: 121753 - DNA, 74 bp, Homo sapiens; identical to SEQ ID NO: 121679

SEQ ID NO: 121754 - DNA, 70 bp, Homo sapiens; identical to SEQ ID NO: 121680

SEQ ID NO: 121755 - DNA, 75 bp, Homo sapiens; identical to SEQ ID NO: 121681

SEQ ID NO: 121756 - DNA, 70 bp, Homo sapiens
tttaggaggagccgagggcactttcttttcaaggacaacttctttgggagcctctggcacttaaaagata

SEQ ID NO: 121757 - DNA, 69 bp, Homo sapiens
agccgagggcactttcttttcaaggacaacttctttgggagcctctggcacttaaaagatattagtaaa

SEQ ID NO: 121758 - DNA, 69 bp, Homo sapiens
actttcttttcaaggacaacttctttgggagcctctggcacttaaaagatattagtaaagttacatgtg

SEQ ID NO: 121759 - DNA, 73 bp, Homo sapiens
aaggacaacttctttgggagcctctggcacttaaaagatattagtaaagttacatgtggagctatggagacta

SEQ ID NO: 121760 - DNA, 73 bp, Homo sapiens
aaaatatacagcagaggaattggatcttctgaagcttaaggtcaaatgacaagtacctgtaacaggtggaact

SEQ ID NO: 121761 - DNA, 73 bp, Homo sapiens
agcagaggaattggatcttctgaagcttaaggtcaaatgacaagtacctgtaacaggtggaacttctggcttt

SEQ ID NO: 121762 - DNA, 71 bp, Homo sapiens
attggatcttctgaagcttaaggtcaaatgacaagtacctgtaacaggtggaacttctggctttttaggaa

SEQ ID NO: 121763 - DNA, 71 bp, Homo sapiens
tgaagcttaaggtcaaatgacaagtacctgtaacaggtggaacttctggctttttaggaagcaccagtgtt

SEQ ID NO: 121764 - DNA, 69 bp, Homo sapiens
ttaaggtcaaatgacaagtacctgtaacaggtggaacttctggctttttaggaagcaccagtgttttct

SEQ ID NO: 121765 - DNA, 68 bp, Homo sapiens
aagtacctgtaacaggtggaacttctggctttttaggaagcaccagtgttttcttttctggcacaatt

SEQ ID NO: 121766 - DNA, 71 bp, Homo sapiens
tgtaacaggtggaacttctggctttttaggaagcaccagtgttttcttttctggcacaatttcttgtggga

SEQ ID NO: 121767 - DNA, 70 bp, Homo sapiens
aacttctggctttttaggaagcaccagtgttttcttttctggcacaatttcttgtgggacttcaggcact

SEQ ID NO: 121768 - DNA, 72 bp, Homo sapiens
tttttaggaagcaccagtgttttcttttctggcacaatttcttgtgggacttcaggcacttgaaagatatta

SEQ ID NO: 121769 - DNA, 72 bp, Homo sapiens
caccagtgttttcttttctggcacaatttcttgtgggacttcaggcacttgaaagatattagtagtttttca

SEQ ID NO: 121770 - DNA, 70 bp, Homo sapiens
tttcttttctggcacaatttcttgtgggacttcaggcacttgaaagatattagtagtttttcacttaggt

SEQ ID NO: 121771 - DNA, 76 bp, Homo sapiens; identical to SEQ ID NO: 121703

SEQ ID NO: 121772 - DNA, 74 bp, Homo sapiens; identical to SEQ ID NO: 121704

SEQ ID NO: 121773 - DNA, 75 bp, Homo sapiens; identical to SEQ ID NO: 121705

SEQ ID NO: 121774 - DNA, 71 bp, Homo sapiens; identical to SEQ ID NO: 121706

SEQ ID NO: 121775 - DNA, 70 bp, Homo sapiens; identical to SEQ ID NO: 121707

SEQ ID NO: 121776 - DNA, 68 bp, Homo sapiens; identical to SEQ ID NO: 121708

SEQ ID NO: 121777 - DNA, 68 bp, Homo sapiens; identical to SEQ ID NO: 121709

SEQ ID NO: 121778 - DNA, 72 bp, Homo sapiens; identical to SEQ ID NO: 121710

SEQ ID NO: 121779 - DNA, 71 bp, Homo sapiens; identical to SEQ ID NO: 121711

SEQ ID NO: 121780 - DNA, 68 bp, Homo sapiens; identical to SEQ ID NO: 121712

SEQ ID NO: 121781 - DNA, 65 bp, Homo sapiens; identical to SEQ ID NO: 121713

SEQ ID NO: 121782 - DNA, 70 bp, Homo sapiens; identical to SEQ ID NO: 121714

SEQ ID NO: 121783 - DNA, 68 bp, Homo sapiens; identical to SEQ ID NO: 121715

SEQ ID NO: 121784 - DNA, 69 bp, Homo sapiens; identical to SEQ ID NO: 121716

SEQ ID NO: 121785 - DNA, 70 bp, Homo sapiens; identical to SEQ ID NO: 121717

SEQ ID NO: 121786 - DNA, 70 bp, Homo sapiens; identical to SEQ ID NO: 121718

SEQ ID NO: 121787 - DNA, 73 bp, Homo sapiens; identical to SEQ ID NO: 121719

SEQ ID NO: 121788 - DNA, 72 bp, Homo sapiens
agccacagatgctttcttttcaagtacaacttctttaggagcttcaggaactttgaagatattagtatcttt

SEQ ID NO: 121789 - DNA, 70 bp, Homo sapiens; identical to SEQ ID NO: 121720

SEQ ID NO: 121790 - DNA, 69 bp, Homo sapiens; identical to SEQ ID NO: 121721

SEQ ID NO: 121791 - DNA, 72 bp, Homo sapiens
ttctatgcagtctttccccagggccccccgactgacaatgtgtaatgatacctacctttaggaggtggagct

SEQ ID NO: 121792 - DNA, 69 bp, Homo sapiens; identical to SEQ ID NO: 121723

SEQ ID NO: 121793 - DNA, 72 bp, Homo sapiens; identical to SEQ ID NO: 121724

SEQ ID NO: 121794 - DNA, 71 bp, Homo sapiens; identical to SEQ ID NO: 121725

SEQ ID NO: 121795 - DNA, 70 bp, Homo sapiens; identical to SEQ ID NO: 121726

SEQ ID NO: 121796 - DNA, 68 bp, Homo sapiens; identical to SEQ ID NO: 121727

SEQ ID NO: 121797 - DNA, 68 bp, Homo sapiens; identical to SEQ ID NO: 121728

SEQ ID NO: 121798 - DNA, 71 bp, Homo sapiens; identical to SEQ ID NO: 121729

SEQ ID NO: 121799 - DNA, 73 bp, Homo sapiens; identical to SEQ ID NO: 121730

SEQ ID NO: 121800 - DNA, 70 bp, Homo sapiens; identical to SEQ ID NO: 121731

SEQ ID NO: 121801 - DNA, 72 bp, Homo sapiens; identical to SEQ ID NO: 121732

SEQ ID NO: 121802 - DNA, 71 bp, Homo sapiens; identical to SEQ ID NO: 121733

SEQ ID NO: 121803 - DNA, 67 bp, Homo sapiens; identical to SEQ ID NO: 121660

SEQ ID NO: 121804 - DNA, 67 bp, Homo sapiens; identical to SEQ ID NO: 121661

SEQ ID NO: 121805 - DNA, 66 bp, Homo sapiens; identical to SEQ ID NO: 121662

SEQ ID NO: 121806 - DNA, 70 bp, Homo sapiens; identical to SEQ ID NO: 121663

SEQ ID NO: 121807 - DNA, 69 bp, Homo sapiens
tatagctttggcattaccttcagggggaggactttccggtttgggaggaatagcttcaggcaacttctt

SEQ ID NO: 121808 - DNA, 67 bp, Homo sapiens
attaccttcagggggaggactttccggtttgggaggaatagcttcaggcaacttcttttctgggaca

SEQ ID NO: 121809 - DNA, 70 bp, Homo sapiens
ggggaggactttccggtttgggaggaatagcttcaggcaacttcttttctgggacagctgcctttggcac

SEQ ID NO: 121810 - DNA, 71 bp, Homo sapiens
actttccggtttgggaggaatagcttcaggcaacttcttttctgggacagctgcctttggcacctctggga

SEQ ID NO: 121811 - DNA, 73 bp, Homo sapiens
tttgggaggaatagcttcaggcaacttcttttctgggacagctgcctttggcacctctgggactttaaagata

SEQ ID NO: 121812 - DNA, 72 bp, Homo sapiens
aatagcttcaggcaacttcttttctgggacagctgcctttggcacctctgggactttaaagatattagtatt

SEQ ID NO: 121813 - DNA, 71 bp, Homo sapiens
aacttcttttctgggacagctgcctttggcacctctgggactttaaagatattagtattttcattattaga

SEQ ID NO: 121814 - DNA, 73 bp, Homo sapiens; identical to SEQ ID NO: 121671

SEQ ID NO: 121815 - DNA, 72 bp, Homo sapiens; identical to SEQ ID NO: 121672

SEQ ID NO: 121816 - DNA, 71 bp, Homo sapiens; identical to SEQ ID NO: 121673

SEQ ID NO: 121817 - DNA, 71 bp, Homo sapiens; identical to SEQ ID NO: 121674

SEQ ID NO: 121818 - DNA, 71 bp, Homo sapiens; identical to SEQ ID NO: 121675

SEQ ID NO: 121819 - DNA, 72 bp, Homo sapiens; identical to SEQ ID NO: 121676

SEQ ID NO: 121820 - DNA, 69 bp, Homo sapiens; identical to SEQ ID NO: 121677

SEQ ID NO: 121821 - DNA, 73 bp, Homo sapiens; identical to SEQ ID NO: 121678

SEQ ID NO: 121822 - DNA, 74 bp, Homo sapiens; identical to SEQ ID NO: 121679

SEQ ID NO: 121823 - DNA, 70 bp, Homo sapiens; identical to SEQ ID NO: 121680

SEQ ID NO: 121824 - DNA, 75 bp, Homo sapiens; identical to SEQ ID NO: 121681

SEQ ID NO: 121825 - DNA, 70 bp, Homo sapiens
tttaacaggtgggacttcaggctctttaggaggagccactggcgctttcttttcaggaactacttctttg

SEQ ID NO: 121826 - DNA, 70 bp, Homo sapiens
aggtgggacttcaggctctttaggaggagccactggcgctttcttttcaggaactacttctttgggaggc

SEQ ID NO: 121827 - DNA, 70 bp, Homo sapiens
gctctttaggaggagccactggcgctttcttttcaggaactacttctttgggaggctctggtacttaaaa

SEQ ID NO: 121828 - DNA, 70 bp, Homo sapiens
ttaggaggagccactggcgctttcttttcaggaactacttctttgggaggctctggtacttaaaagatat

SEQ ID NO: 121829 - DNA, 69 bp, Homo sapiens
actggcgctttcttttcaggaactacttctttgggaggctctggtacttaaaagatattagcaaaatta

SEQ ID NO: 121830 - DNA, 69 bp, Homo sapiens
cttttcaggaactacttctttgggaggctctggtacttaaaagatattagcaaaattacattcagaagt

SEQ ID NO: 121831 - DNA, 71 bp, Homo sapiens
ggaactacttctttgggaggctctggtacttaaaagatattagcaaaattacattcagaagttatgaagac

SEQ ID NO: 121832 - DNA, 73 bp, Homo sapiens
aaaaatatcttcaagagcaaaagaatgagatctgaagcctaaggtcagtggcaactacctttaacaggtggga

SEQ ID NO: 121833 - DNA, 73 bp, Homo sapiens
aagagcaaaagaatgagatctgaagcctaaggtcagtggcaactacctttaacaggtgggacttcaggctctt

SEQ ID NO: 121834 - DNA, 72 bp, Homo sapiens
aaagaatgagatctgaagcctaaggtcagtggcaactacctttaacaggtgggacttcaggctctttaggag

SEQ ID NO: 121835 - DNA, 70 bp, Homo sapiens
tttaacaggtgggacttcaggctctttaggaggagccaagggcactttctcttcgcggataacctctttg

SEQ ID NO: 121836 - DNA, 70 bp, Homo sapiens
aggtgggacttcaggctctttaggaggagccaagggcactttctcttcgcggataacctctttggaagct

SEQ ID NO: 121837 - DNA, 74 bp, Homo sapiens
gctctttaggaggagccaagggcactttctcttcgcggataacctctttggaagcttctggcacttgaaagata

SEQ ID NO: 121838 - DNA, 73 bp, Homo sapiens
aggagccaagggcactttctcttcgcggataacctctttggaagcttctggcacttgaaagatattagtgaaa

SEQ ID NO: 121839 - DNA, 72 bp, Homo sapiens
aagggcactttctcttcgcggataacctctttggaagcttctggcacttgaaagatattagtgaaattacat

SEQ ID NO: 121840 - DNA, 74 bp, Homo sapiens
tcttcgcggataacctctttggaagcttctggcacttgaaagatattagtgaaattacatttaggtgttatgaa

SEQ ID NO: 121841 - DNA, 67 bp, Homo sapiens
atacctttaacaggtgggacttcaggctttttaggaggcaccaccgacactttcttttcagggataa

SEQ ID NO: 121842 - DNA, 68 bp, Homo sapiens
tttaacaggtgggacttcaggctttttaggaggcaccaccgacactttcttttcagggataatctctt

SEQ ID NO: 121843 - DNA, 73 bp, Homo sapiens
ttcaggctttttaggaggcaccaccgacactttcttttcagggataatctctttgggagcttcgtgcacttga

SEQ ID NO: 121844 - DNA, 72 bp, Homo sapiens
tttttaggaggcaccaccgacactttcttttcagggataatctctttgggagcttcgtgcacttgaaagata

SEQ ID NO: 121845 - DNA, 70 bp, Homo sapiens
accaccgacactttcttttcagggataatctctttgggagcttcgtgcacttgaaagatattagtatttt

SEQ ID NO: 121846 - DNA, 72 bp, Homo sapiens
actttcttttcagggataatctctttgggagcttcgtgcacttgaaagatattagtatttttacactcagaa

SEQ ID NO: 121847 - DNA, 75 bp, Homo sapiens
tttcagggataatctctttgggagcttcgtgcacttgaaagatattagtatttttacactcagaaaatacagaga

SEQ ID NO: 121848 - DNA, 68 bp, Homo sapiens
aaggtggtcctttctatcgccccacccactatcccaccataaaaagacagttaagaatgtacctttga

SEQ ID NO: 121849 - DNA, 69 bp, Homo sapiens
tttctatcgccccacccactatcccaccataaaaagacagttaagaatgtacctttgacaggtacaact

SEQ ID NO: 121850 - DNA, 68 bp, Homo sapiens
acccactatcccaccataaaaagacagttaagaatgtacctttgacaggtacaacttcagccctttgg

SEQ ID NO: 121851 - DNA, 69 bp, Homo sapiens
accataaaaagacagttaagaatgtacctttgacaggtacaacttcagccctttggggaggatgcactt

SEQ ID NO: 121852 - DNA, 68 bp, Homo sapiens
aaaaagacagttaagaatgtacctttgacaggtacaacttcagccctttggggaggatgcactttctt

SEQ ID NO: 121853 - DNA, 69 bp, Homo sapiens
ttaagaatgtacctttgacaggtacaacttcagccctttggggaggatgcactttcttttccgggacaa

SEQ ID NO: 121854 - DNA, 70 bp, Homo sapiens
acctttgacaggtacaacttcagccctttggggaggatgcactttcttttccgggacaacttctctgaga

SEQ ID NO: 121855 - DNA, 71 bp, Homo sapiens
aacttcagccctttggggaggatgcactttcttttccgggacaacttctctgagagcctccggcactttga

SEQ ID NO: 121856 - DNA, 72 bp, Homo sapiens
ctttggggaggatgcactttcttttccgggacaacttctctgagagcctccggcactttgaagatattaata

SEQ ID NO: 121857 - DNA, 72 bp, Homo sapiens
gatgcactttcttttccgggacaacttctctgagagcctccggcactttgaagatattaataattttacatt

SEQ ID NO: 121858 - DNA, 69 bp, Homo sapiens
actttcttttccgggacaacttctctgagagcctccggcactttgaagatattaataattttacattta

SEQ ID NO: 121859 - DNA, 73 bp, Homo sapiens
gggacaacttctctgagagcctccggcactttgaagatattaataattttacatttagaagttacaagaatca

SEQ ID NO: 121860 - DNA, 72 bp, Homo sapiens
aaaacatttatacaagaaaagacatgttcccacccctctaagcttccagcaagatataccttcatcaggaag

SEQ ID NO: 121861 - DNA, 73 bp, Homo sapiens
aagaaaagacatgttcccacccctctaagcttccagcaagatataccttcatcaggaaggacttcaggctttc

SEQ ID NO: 121862 - DNA, 75 bp, Homo sapiens
atgttcccacccctctaagcttccagcaagatataccttcatcaggaaggacttcaggctttctgagaggaacca

SEQ ID NO: 121863 - DNA, 75 bp, Homo sapiens
ctctaagcttccagcaagatataccttcatcaggaaggacttcaggctttctgagaggaaccacaagcgttttct

SEQ ID NO: 121864 - DNA, 75 bp, Homo sapiens
agcttccagcaagatataccttcatcaggaaggacttcaggctttctgagaggaaccacaagcgttttcttttca

SEQ ID NO: 121865 - DNA, 71 bp, Homo sapiens
atataccttcatcaggaaggacttcaggctttctgagaggaaccacaagcgttttcttttcagggacaatt

SEQ ID NO: 121866 - DNA, 73 bp, Homo sapiens
ttcatcaggaaggacttcaggctttctgagaggaaccacaagcgttttcttttcagggacaatttcttggaga

SEQ ID NO: 121867 - DNA, 73 bp, Homo sapiens
ttcaggctttctgagaggaaccacaagcgttttcttttcagggacaatttcttggagagcttcaggcacttta

SEQ ID NO: 121868 - DNA, 71 bp, Homo sapiens
tttctgagaggaaccacaagcgttttcttttcagggacaatttcttggagagcttcaggcactttaagaaa

SEQ ID NO: 121869 - DNA, 68 bp, Homo sapiens
aaccacaagcgttttcttttcagggacaatttcttggagagcttcaggcactttaagaaattagtagt

SEQ ID NO: 121870 - DNA, 68 bp, Homo sapiens
agcgttttcttttcagggacaatttcttggagagcttcaggcactttaagaaattagtagttttatgt

SEQ ID NO: 121871 - DNA, 72 bp, Homo sapiens
gggacaatttcttggagagcttcaggcactttaagaaattagtagttttatgtttagtgttatgcagataac

SEQ ID NO: 121872 - DNA, 73 bp, Homo sapiens
aaaaatattctcaaaactacaagagctagttcttgaccctgagagcatggtgacttgtacctttaactgatgg

SEQ ID NO: 121873 - DNA, 73 bp, Homo sapiens
tcaaaactacaagagctagttcttgaccctgagagcatggtgacttgtacctttaactgatgggggttctctt

SEQ ID NO: 121874 - DNA, 71 bp, Homo sapiens
ctacaagagctagttcttgaccctgagagcatggtgacttgtacctttaactgatgggggttctctttttt

SEQ ID NO: 121875 - DNA, 70 bp, Homo sapiens
tagttcttgaccctgagagcatggtgacttgtacctttaactgatgggggttctctttttttggaaggaa

SEQ ID NO: 121876 - DNA, 70 bp, Homo sapiens
agagcatggtgacttgtacctttaactgatgggggttctctttttttggaaggaactgtcttggcaggaa

SEQ ID NO: 121877 - DNA, 68 bp, Homo sapiens
tgacttgtacctttaactgatgggggttctctttttttggaaggaactgtcttggcaggaataatttc

SEQ ID NO: 121878 - DNA, 68 bp, Homo sapiens
tacctttaactgatgggggttctctttttttggaaggaactgtcttggcaggaataatttcttgagga

SEQ ID NO: 121879 - DNA, 68 bp, Homo sapiens
atgggggttctctttttttggaaggaactgtcttggcaggaataatttcttgaggagcttcgggcgct

SEQ ID NO: 121880 - DNA, 72 bp, Homo sapiens
tttttttggaaggaactgtcttggcaggaataatttcttgaggagcttcgggcgcttgaaagatattagcaa

SEQ ID NO: 121881 - DNA, 74 bp, Homo sapiens
aaggaactgtcttggcaggaataatttcttgaggagcttcgggcgcttgaaagatattagcaattcacatttaa

SEQ ID NO: 121882 - DNA, 74 bp, Homo sapiens
tcttggcaggaataatttcttgaggagcttcgggcgcttgaaagatattagcaattcacatttaagagttaaaa

SEQ ID NO: 121883 - DNA, 73 bp, Homo sapiens
aggaataatttcttgaggagcttcgggcgcttgaaagatattagcaattcacatttaagagttaaaatgatta

SEQ ID NO: 121884 - DNA, 71 bp, Homo sapiens
agttttaagagcagaggacagataatttcttcttccacatttgttcagaggtaacgtacttttcatacgtg

SEQ ID NO: 121885 - DNA, 71 bp, Homo sapiens
aggacagataatttcttcttccacatttgttcagaggtaacgtacttttcatacgtggagtttctggctct

SEQ ID NO: 121886 - DNA, 71 bp, Homo sapiens
ataatttcttcttccacatttgttcagaggtaacgtacttttcatacgtggagtttctggctcttcaggta

SEQ ID NO: 121887 - DNA, 72 bp, Homo sapiens
cacatttgttcagaggtaacgtacttttcatacgtggagtttctggctcttcaggtacatcctcaaatattt

SEQ ID NO: 121888 - DNA, 72 bp, Homo sapiens
ttgttcagaggtaacgtacttttcatacgtggagtttctggctcttcaggtacatcctcaaatattttcatt

SEQ ID NO: 121889 - DNA, 72 bp, Homo sapiens
gtaacgtacttttcatacgtggagtttctggctcttcaggtacatcctcaaatattttcatttcagggacaa

SEQ ID NO: 121890 - DNA, 75 bp, Homo sapiens
tttcatacgtggagtttctggctcttcaggtacatcctcaaatattttcatttcagggacaacttctttcatagc

SEQ ID NO: 121891 - DNA, 76 bp, Homo sapiens
tttctggctcttcaggtacatcctcaaatattttcatttcagggacaacttctttcatagcttctggtgctttgaa

SEQ ID NO: 121892 - DNA, 76 bp, Homo sapiens
ttcaggtacatcctcaaatattttcatttcagggacaacttctttcatagcttctggtgctttgaagatattagta

SEQ ID NO: 121893 - DNA, 75 bp, Homo sapiens
catcctcaaatattttcatttcagggacaacttctttcatagcttctggtgctttgaagatattagtattatggt

SEQ ID NO: 121894 - DNA, 73 bp, Homo sapiens
tttcatttcagggacaacttctttcatagcttctggtgctttgaagatattagtattatggttagaggttaaa

SEQ ID NO: 121895 - DNA, 74 bp, Homo sapiens
ttcagggacaacttctttcatagcttctggtgctttgaagatattagtattatggttagaggttaaaaggatca

SEQ ID NO: 121896 - DNA, 74 bp, Homo sapiens
tacatgtgttaagtacaactgcaaacatgagattaaaaaggtgactttcttccaacttgtacctgttggtgatg

SEQ ID NO: 121897 - DNA, 70 bp, Homo sapiens
aagtacaactgcaaacatgagattaaaaaggtgactttcttccaacttgtacctgttggtgatggtgttt

SEQ ID NO: 121898 - DNA, 69 bp, Homo sapiens
gcaaacatgagattaaaaaggtgactttcttccaacttgtacctgttggtgatggtgtttttcttcttt

SEQ ID NO: 121899 - DNA, 66 bp, Homo sapiens
aaaaggtgactttcttccaacttgtacctgttggtgatggtgtttttcttcttttaacaataggag

SEQ ID NO: 121900 - DNA, 66 bp, Homo sapiens
actttcttccaacttgtacctgttggtgatggtgtttttcttcttttaacaataggagtttctccc

SEQ ID NO: 121901 - DNA, 68 bp, Homo sapiens
aacttgtacctgttggtgatggtgtttttcttcttttaacaataggagtttctccctctggaatgact

SEQ ID NO: 121902 - DNA, 71 bp, Homo sapiens
ttggtgatggtgtttttcttcttttaacaataggagtttctccctctggaatgacttccttgaagacttca

SEQ ID NO: 121903 - DNA, 68 bp, Homo sapiens
gtgtttttcttcttttaacaataggagtttctccctctggaatgacttccttgaagacttcaaactct

SEQ ID NO: 121904 - DNA, 69 bp, Homo sapiens
cttcttttaacaataggagtttctccctctggaatgacttccttgaagacttcaaactctttaaagata

SEQ ID NO: 121905 - DNA, 69 bp, Homo sapiens
aacaataggagtttctccctctggaatgacttccttgaagacttcaaactctttaaagatattagtatt

SEQ ID NO: 121906 - DNA, 67 bp, Homo sapiens
gtttctccctctggaatgacttccttgaagacttcaaactctttaaagatattagtattttttttaa

SEQ ID NO: 121907 - DNA, 73 bp, Homo sapiens
gcagactgaagacagtatattttcttctttagattttcctaactagagaattataccttcagttggaggatgt

SEQ ID NO: 121908 - DNA, 72 bp, Homo sapiens
gaagacagtatattttcttctttagattttcctaactagagaattataccttcagttggaggatgttctgga

SEQ ID NO: 121909 - DNA, 72 bp, Homo sapiens
tcttctttagattttcctaactagagaattataccttcagttggaggatgttctggaatttcaggaatagcc

SEQ ID NO: 121910 - DNA, 72 bp, Homo sapiens
tttagattttcctaactagagaattataccttcagttggaggatgttctggaatttcaggaatagcctcagg

SEQ ID NO: 121911 - DNA, 74 bp, Homo sapiens
cctaactagagaattataccttcagttggaggatgttctggaatttcaggaatagcctcaggtggctccacctc

SEQ ID NO: 121912 - DNA, 74 bp, Homo sapiens
aattataccttcagttggaggatgttctggaatttcaggaatagcctcaggtggctccacctctggaaaaatgc

SEQ ID NO: 121913 - DNA, 76 bp, Homo sapiens
agttggaggatgttctggaatttcaggaatagcctcaggtggctccacctctggaaaaatgcctctggttgtatca

SEQ ID NO: 121914 - DNA, 74 bp, Homo sapiens
ttctggaatttcaggaatagcctcaggtggctccacctctggaaaaatgcctctggttgtatcaggttctttaa

SEQ ID NO: 121915 - DNA, 73 bp, Homo sapiens
aatttcaggaatagcctcaggtggctccacctctggaaaaatgcctctggttgtatcaggttctttaaagata

SEQ ID NO: 121916 - DNA, 71 bp, Homo sapiens
cctcaggtggctccacctctggaaaaatgcctctggttgtatcaggttctttaaagatattagtaggttta

SEQ ID NO: 121917 - DNA, 70 bp, Homo sapiens
gctccacctctggaaaaatgcctctggttgtatcaggttctttaaagatattagtaggtttacatttaaa

SEQ ID NO: 121918 - DNA, 67 bp, Homo sapiens
cctctggaaaaatgcctctggttgtatcaggttctttaaagatattagtaggtttacatttaaaagt

SEQ ID NO: 121919 - DNA, 75 bp, Homo sapiens
tttgagtcataaagctaaagatactcatctgggtttgatgtatttgaaatatacctttagttgctggtgtttctc

SEQ ID NO: 121920 - DNA, 74 bp, Homo sapiens
gtcataaagctaaagatactcatctgggtttgatgtatttgaaatatacctttagttgctggtgtttctctctt

SEQ ID NO: 121921 - DNA, 74 bp, Homo sapiens
gatactcatctgggtttgatgtatttgaaatatacctttagttgctggtgtttctctctttttaggaatagtca

SEQ ID NO: 121922 - DNA, 74 bp, Homo sapiens
catctgggtttgatgtatttgaaatatacctttagttgctggtgtttctctctttttaggaatagtcacatata

SEQ ID NO: 121923 - DNA, 72 bp, Homo sapiens
gtatttgaaatatacctttagttgctggtgtttctctctttttaggaatagtcacatatattttgtcttctg

SEQ ID NO: 121924 - DNA, 70 bp, Homo sapiens
atacctttagttgctggtgtttctctctttttaggaatagtcacatatattttgtcttctggaacaactt

SEQ ID NO: 121925 - DNA, 71 bp, Homo sapiens
ttagttgctggtgtttctctctttttaggaatagtcacatatattttgtcttctggaacaactttcttggg

SEQ ID NO: 121926 - DNA, 73 bp, Homo sapiens
ttctctctttttaggaatagtcacatatattttgtcttctggaacaactttcttgggtggctcaggcacttaa

SEQ ID NO: 121927 - DNA, 72 bp, Homo sapiens
tttttaggaatagtcacatatattttgtcttctggaacaactttcttgggtggctcaggcacttaaaagata

SEQ ID NO: 121928 - DNA, 75 bp, Homo sapiens
gtcacatatattttgtcttctggaacaactttcttgggtggctcaggcacttaaaagatatgagtatagttatat

SEQ ID NO: 121929 - DNA, 72 bp, Homo sapiens
attttgtcttctggaacaactttcttgggtggctcaggcacttaaaagatatgagtatagttatatttataa

SEQ ID NO: 121930 - DNA, 73 bp, Homo sapiens
cttctggaacaactttcttgggtggctcaggcacttaaaagatatgagtatagttatatttataaatggtgaa

SEQ ID NO: 121931 - DNA, 68 bp, Homo sapiens
taaaaggggccaaaaaataatttttcttcagagtggatcattggtgttatataccttttgctagtttg

SEQ ID NO: 121932 - DNA, 67 bp, Homo sapiens
gggccaaaaaataatttttcttcagagtggatcattggtgttatataccttttgctagtttgggttt

SEQ ID NO: 121933 - DNA, 70 bp, Homo sapiens
tttttcttcagagtggatcattggtgttatataccttttgctagtttgggttttgtcttttgaggttgag

SEQ ID NO: 121934 - DNA, 73 bp, Homo sapiens
ttcagagtggatcattggtgttatataccttttgctagtttgggttttgtcttttgaggttgagtcacaagta

SEQ ID NO: 121935 - DNA, 69 bp, Homo sapiens
gatcattggtgttatataccttttgctagtttgggttttgtcttttgaggttgagtcacaagtactttt

SEQ ID NO: 121936 - DNA, 67 bp, Homo sapiens
atataccttttgctagtttgggttttgtcttttgaggttgagtcacaagtactttttcttctaggac

SEQ ID NO: 121937 - DNA, 70 bp, Homo sapiens
ttttgctagtttgggttttgtcttttgaggttgagtcacaagtactttttcttctaggactgcttcttca

SEQ ID NO: 121938 - DNA, 73 bp, Homo sapiens
ttttgtcttttgaggttgagtcacaagtactttttcttctaggactgcttcttcagatgcttcataaacttta

SEQ ID NO: 121939 - DNA, 73 bp, Homo sapiens
cttttgaggttgagtcacaagtactttttcttctaggactgcttcttcagatgcttcataaactttaaagata

SEQ ID NO: 121940 - DNA, 74 bp, Homo sapiens
ttgagtcacaagtactttttcttctaggactgcttcttcagatgcttcataaactttaaagatattagtattta

SEQ ID NO: 121941 - DNA, 72 bp, Homo sapiens
tttttcttctaggactgcttcttcagatgcttcataaactttaaagatattagtatttaaataattaggatg

SEQ ID NO: 121942 - DNA, 73 bp, Homo sapiens
taggactgcttcttcagatgcttcataaactttaaagatattagtatttaaataattaggatgtttcaaggtg

SEQ ID NO: 121943 - DNA, 72 bp, Homo sapiens
catagtgaatttaaggacataaatgaaacgaaaaagaaccactaatttttctacactcactgtacatctctg

SEQ ID NO: 121944 - DNA, 71 bp, Homo sapiens
gaatttaaggacataaatgaaacgaaaaagaaccactaatttttctacactcactgtacatctctgtgtct

SEQ ID NO: 121945 - DNA, 73 bp, Homo sapiens
acataaatgaaacgaaaaagaaccactaatttttctacactcactgtacatctctgtgtcttcagaaataaca

SEQ ID NO: 121946 - DNA, 72 bp, Homo sapiens
aacgaaaaagaaccactaatttttctacactcactgtacatctctgtgtcttcagaaataacaataggtgat

SEQ ID NO: 121947 - DNA, 75 bp, Homo sapiens
cactaatttttctacactcactgtacatctctgtgtcttcagaaataacaataggtgatttttcttcttgaacac

SEQ ID NO: 121948 - DNA, 75 bp, Homo sapiens
ttctacactcactgtacatctctgtgtcttcagaaataacaataggtgatttttcttcttgaacacttttcttag

SEQ ID NO: 121949 - DNA, 75 bp, Homo sapiens
tgtacatctctgtgtcttcagaaataacaataggtgatttttcttcttgaacacttttcttaggcatcccaggaa

SEQ ID NO: 121950 - DNA, 71 bp, Homo sapiens
ctgtgtcttcagaaataacaataggtgatttttcttcttgaacacttttcttaggcatcccaggaacttta

SEQ ID NO: 121951 - DNA, 69 bp, Homo sapiens
cagaaataacaataggtgatttttcttcttgaacacttttcttaggcatcccaggaactttaaagatat

SEQ ID NO: 121952 - DNA, 69 bp, Homo sapiens
acaataggtgatttttcttcttgaacacttttcttaggcatcccaggaactttaaagatattagtatat

SEQ ID NO: 121953 - DNA, 72 bp, Homo sapiens
tcttcttgaacacttttcttaggcatcccaggaactttaaagatattagtatattaattgttacagataaca

SEQ ID NO: 121954 - DNA, 71 bp, Homo sapiens
ttgaacacttttcttaggcatcccaggaactttaaagatattagtatattaattgttacagataacaaata

SEQ ID NO: 121955 - DNA, 75 bp, Homo sapiens
catgaaaaactaaaccaagaattatttcatgttctgattagcatcactgtatacctttagctggtggaacttcag

SEQ ID NO: 121956 - DNA, 73 bp, Homo sapiens
aactaaaccaagaattatttcatgttctgattagcatcactgtatacctttagctggtggaacttcaggcttt

SEQ ID NO: 121957 - DNA, 76 bp, Homo sapiens
aagaattatttcatgttctgattagcatcactgtatacctttagctggtggaacttcaggctttttcagaacagct

SEQ ID NO: 121958 - DNA, 75 bp, Homo sapiens
tgttctgattagcatcactgtatacctttagctggtggaacttcaggctttttcagaacagcttcacgaactttt

SEQ ID NO: 121959 - DNA, 73 bp, Homo sapiens
attagcatcactgtatacctttagctggtggaacttcaggctttttcagaacagcttcacgaactttttcttc

SEQ ID NO: 121960 - DNA, 70 bp, Homo sapiens
tatacctttagctggtggaacttcaggctttttcagaacagcttcacgaactttttcttctgggacaatt

SEQ ID NO: 121961 - DNA, 70 bp, Homo sapiens
tttagctggtggaacttcaggctttttcagaacagcttcacgaactttttcttctgggacaattttcttg

SEQ ID NO: 121962 - DNA, 67 bp, Homo sapiens
aacttcaggctttttcagaacagcttcacgaactttttcttctgggacaattttcttgggtacttcg

SEQ ID NO: 121963 - DNA, 67 bp, Homo sapiens
ttttcagaacagcttcacgaactttttcttctgggacaattttcttgggtacttcgggtgctttaaa

SEQ ID NO: 121964 - DNA, 66 bp, Homo sapiens
aacagcttcacgaactttttcttctgggacaattttcttgggtacttcgggtgctttaaagatatt

SEQ ID NO: 121965 - DNA, 65 bp, Homo sapiens
cgaactttttcttctgggacaattttcttgggtacttcgggtgctttaaagatatttatttatct

SEQ ID NO: 121966 - DNA, 67 bp, Homo sapiens
cttctgggacaattttcttgggtacttcgggtgctttaaagatatttatttatcttattttttcaga

SEQ ID NO: 121967 - DNA, 70 bp, Homo sapiens
catagtaagtgaataaaaaaggattttatattaatgatgaatgagaaaagccagttacctttagttggtg

SEQ ID NO: 121968 - DNA, 69 bp, Homo sapiens
gaataaaaaaggattttatattaatgatgaatgagaaaagccagttacctttagttggtggaactctgg

SEQ ID NO: 121969 - DNA, 71 bp, Homo sapiens
aaaaggattttatattaatgatgaatgagaaaagccagttacctttagttggtggaactctgggctcttca

SEQ ID NO: 121970 - DNA, 71 bp, Homo sapiens
taatgatgaatgagaaaagccagttacctttagttggtggaactctgggctcttcaggaacacgtactttt

SEQ ID NO: 121971 - DNA, 69 bp, Homo sapiens
atgagaaaagccagttacctttagttggtggaactctgggctcttcaggaacacgtactttttcttcta

SEQ ID NO: 121972 - DNA, 67 bp, Homo sapiens
cagttacctttagttggtggaactctgggctcttcaggaacacgtactttttcttctaccacaattt

SEQ ID NO: 121973 - DNA, 67 bp, Homo sapiens
acctttagttggtggaactctgggctcttcaggaacacgtactttttcttctaccacaattttctta

SEQ ID NO: 121974 - DNA, 67 bp, Homo sapiens
aactctgggctcttcaggaacacgtactttttcttctaccacaattttcttaggcacctccggtact

SEQ ID NO: 121975 - DNA, 67 bp, Homo sapiens
tcttcaggaacacgtactttttcttctaccacaattttcttaggcacctccggtactttaaagataa

SEQ ID NO: 121976 - DNA, 65 bp, Homo sapiens
aggaacacgtactttttcttctaccacaattttcttaggcacctccggtactttaaagataatag

SEQ ID NO: 121977 - DNA, 65 bp, Homo sapiens
actttttcttctaccacaattttcttaggcacctccggtactttaaagataatagtaataatttc

SEQ ID NO: 121978 - DNA, 64 bp, Homo sapiens
ctaccacaattttcttaggcacctccggtactttaaagataatagtaataatttcttttatttt

SEQ ID NO: 121979 - DNA, 70 bp, Homo sapiens
caaccaaggtgctattgtatgtaaagttaagtagtaatttttcacaaagaagatacctttagctggtggc

SEQ ID NO: 121980 - DNA, 70 bp, Homo sapiens
gctattgtatgtaaagttaagtagtaatttttcacaaagaagatacctttagctggtggctcttttcgag

SEQ ID NO: 121981 - DNA, 67 bp, Homo sapiens
gtaaagttaagtagtaatttttcacaaagaagatacctttagctggtggctcttttcgaggaacaac

SEQ ID NO: 121982 - DNA, 67 bp, Homo sapiens
aagtagtaatttttcacaaagaagatacctttagctggtggctcttttcgaggaacaactttagtgg

SEQ ID NO: 121983 - DNA, 66 bp, Homo sapiens
ttttcacaaagaagatacctttagctggtggctcttttcgaggaacaactttagtgggcggttttt

SEQ ID NO: 121984 - DNA, 65 bp, Homo sapiens
aaagaagatacctttagctggtggctcttttcgaggaacaactttagtgggcggtttttttggag

SEQ ID NO: 121985 - DNA, 66 bp, Homo sapiens
cctttagctggtggctcttttcgaggaacaactttagtgggcggtttttttggagggatgattttc

SEQ ID NO: 121986 - DNA, 69 bp, Homo sapiens
tcttttcgaggaacaactttagtgggcggtttttttggagggatgattttctcagatatctcaggccct

SEQ ID NO: 121987 - DNA, 71 bp, Homo sapiens
gaacaactttagtgggcggtttttttggagggatgattttctcagatatctcaggcccttcaaagatatta

SEQ ID NO: 121988 - DNA, 70 bp, Homo sapiens
tttagtgggcggtttttttggagggatgattttctcagatatctcaggcccttcaaagatattagtattt

SEQ ID NO: 121989 - DNA, 72 bp, Homo sapiens
ttttttggagggatgattttctcagatatctcaggcccttcaaagatattagtattttggtttagaatgaac

SEQ ID NO: 121990 - DNA, 75 bp, Homo sapiens
gagggatgattttctcagatatctcaggcccttcaaagatattagtattttggtttagaatgaactcttgaagta

SEQ ID NO: 121991 - DNA, 69 bp, Homo sapiens
aagttagagcaagatataagaatttgtagtatttgaagaattccctatacctttaggtggagcttttgg

SEQ ID NO: 121992 - DNA, 68 bp, Homo sapiens
caagatataagaatttgtagtatttgaagaattccctatacctttaggtggagcttttggtttttcaa

SEQ ID NO: 121993 - DNA, 67 bp, Homo sapiens
tgtagtatttgaagaattccctatacctttaggtggagcttttggtttttcaaatacttccacttct

SEQ ID NO: 121994 - DNA, 68 bp, Homo sapiens
tatttgaagaattccctatacctttaggtggagcttttggtttttcaaatacttccacttcttcagcc

SEQ ID NO: 121995 - DNA, 67 bp, Homo sapiens
cctatacctttaggtggagcttttggtttttcaaatacttccacttcttcagcctcaaaaacttcta

SEQ ID NO: 121996 - DNA, 69 bp, Homo sapiens
taggtggagcttttggtttttcaaatacttccacttcttcagcctcaaaaacttctattaccctatgaa

SEQ ID NO: 121997 - DNA, 67 bp, Homo sapiens
gagcttttggtttttcaaatacttccacttcttcagcctcaaaaacttctattaccctatgaacttt

SEQ ID NO: 121998 - DNA, 70 bp, Homo sapiens
caaatacttccacttcttcagcctcaaaaacttctattaccctatgaactttttcaactctgtgttcttc

SEQ ID NO: 121999 - DNA, 70 bp, Homo sapiens
acttccacttcttcagcctcaaaaacttctattaccctatgaactttttcaactctgtgttcttcttcaa

SEQ ID NO: 122000 - DNA, 72 bp, Homo sapiens
cagcctcaaaaacttctattaccctatgaactttttcaactctgtgttcttcttcaactctatgttgttcta

SEQ ID NO: 122001 - DNA, 73 bp, Homo sapiens
cttctattaccctatgaactttttcaactctgtgttcttcttcaactctatgttgttctaatttgatgaattc

SEQ ID NO: 122002 - DNA, 75 bp, Homo sapiens
ttttcaactctgtgttcttcttcaactctatgttgttctaatttgatgaattcttctacttcatgaaactcgcct

SEQ ID NO: 122003 - DNA, 76 bp, Homo sapiens
ctctgtgttcttcttcaactctatgttgttctaatttgatgaattcttctacttcatgaaactcgccttcttcaaa

SEQ ID NO: 122004 - DNA, 75 bp, Homo sapiens
tcttcttcaactctatgttgttctaatttgatgaattcttctacttcatgaaactcgccttcttcaaaatattct

SEQ ID NO: 122005 - DNA, 75 bp, Homo sapiens
tgttgttctaatttgatgaattcttctacttcatgaaactcgccttcttcaaaatattcttcaacttcatggaac

SEQ ID NO: 122006 - DNA, 74 bp, Homo sapiens
atttgatgaattcttctacttcatgaaactcgccttcttcaaaatattcttcaacttcatggaactcttcttct

SEQ ID NO: 122007 - DNA, 72 bp, Homo sapiens
ttcttctacttcatgaaactcgccttcttcaaaatattcttcaacttcatggaactcttcttcttccggaat

SEQ ID NO: 122008 - DNA, 72 bp, Homo sapiens
tacttcatgaaactcgccttcttcaaaatattcttcaacttcatggaactcttcttcttccggaatttcttc

SEQ ID NO: 122009 - DNA, 69 bp, Homo sapiens
aaactcgccttcttcaaaatattcttcaacttcatggaactcttcttcttccggaatttcttccacttc

SEQ ID NO: 122010 - DNA, 71 bp, Homo sapiens
aaaatattcttcaacttcatggaactcttcttcttccggaatttcttccacttctgcttctactacttcta

SEQ ID NO: 122011 - DNA, 72 bp, Homo sapiens
attcttcaacttcatggaactcttcttcttccggaatttcttccacttctgcttctactacttctaattcta

SEQ ID NO: 122012 - DNA, 70 bp, Homo sapiens
tggaactcttcttcttccggaatttcttccacttctgcttctactacttctaattctagtctttctttta

SEQ ID NO: 122013 - DNA, 69 bp, Homo sapiens
cttcttcttccggaatttcttccacttctgcttctactacttctaattctagtctttcttttactacta

SEQ ID NO: 122014 - DNA, 71 bp, Homo sapiens
cttctgcttctactacttctaattctagtctttcttttactactacttcttggcggaaggcaactgatact

SEQ ID NO: 122015 - DNA, 69 bp, Homo sapiens
gcttctactacttctaattctagtctttcttttactactacttcttggcggaaggcaactgatactttt

SEQ ID NO: 122016 - DNA, 70 bp, Homo sapiens
ttctaattctagtctttcttttactactacttcttggcggaaggcaactgatactttttcttcaaggaca

SEQ ID NO: 122017 - DNA, 69 bp, Homo sapiens
tttcttttactactacttcttggcggaaggcaactgatactttttcttcaaggacagttctccctgaaa

SEQ ID NO: 122018 - DNA, 73 bp, Homo sapiens
tactacttcttggcggaaggcaactgatactttttcttcaaggacagttctccctgaaagagcatctatttta

SEQ ID NO: 122019 - DNA, 72 bp, Homo sapiens
ttggcggaaggcaactgatactttttcttcaaggacagttctccctgaaagagcatctattttaagacttat

SEQ ID NO: 122020 - DNA, 70 bp, Homo sapiens
gaaggcaactgatactttttcttcaaggacagttctccctgaaagagcatctattttaagacttattttt

SEQ ID NO: 122021 - DNA, 71 bp, Homo sapiens
aaaactgaataaaggattgcatgcaacaatacacgaaaatccaggatctttccaaaaatacctttagctgg

SEQ ID NO: 122022 - DNA, 71 bp, Homo sapiens
aataaaggattgcatgcaacaatacacgaaaatccaggatctttccaaaaatacctttagctgggggaaca

SEQ ID NO: 122023 - DNA, 69 bp, Homo sapiens
tgcaacaatacacgaaaatccaggatctttccaaaaatacctttagctgggggaacagcttccttttta

SEQ ID NO: 122024 - DNA, 67 bp, Homo sapiens
aatacacgaaaatccaggatctttccaaaaatacctttagctgggggaacagcttcctttttaggca

SEQ ID NO: 122025 - DNA, 65 bp, Homo sapiens
aggatctttccaaaaatacctttagctgggggaacagcttcctttttaggcacaaggactttctt

SEQ ID NO: 122026 - DNA, 65 bp, Homo sapiens
ctttccaaaaatacctttagctgggggaacagcttcctttttaggcacaaggactttcttttctg

SEQ ID NO: 122027 - DNA, 65 bp, Homo sapiens
atacctttagctgggggaacagcttcctttttaggcacaaggactttcttttctgggactttctt

SEQ ID NO: 122028 - DNA, 67 bp, Homo sapiens
ggaacagcttcctttttaggcacaaggactttcttttctgggactttctttggtacttcaggcactt

SEQ ID NO: 122029 - DNA, 67 bp, Homo sapiens
ttcctttttaggcacaaggactttcttttctgggactttctttggtacttcaggcactttaaagata

SEQ ID NO: 122030 - DNA, 68 bp, Homo sapiens
ttaggcacaaggactttcttttctgggactttctttggtacttcaggcactttaaagatacagtttta

SEQ ID NO: 122031 - DNA, 68 bp, Homo sapiens
ttcttttctgggactttctttggtacttcaggcactttaaagatacagttttaatatttaggactgtc

SEQ ID NO: 122032 - DNA, 70 bp, Homo sapiens
ggactttctttggtacttcaggcactttaaagatacagttttaatatttaggactgtcgagagcaagctt

SEQ ID NO: 122033 - DNA, 68 bp, Homo sapiens
catgaaacataaaagtcttaacgaaaaaagacagaagaggaagtcaggtttaaaagagaagatgtacc

SEQ ID NO: 122034 - DNA, 66 bp, Homo sapiens
aaaagtcttaacgaaaaaagacagaagaggaagtcaggtttaaaagagaagatgtacctttggctg

SEQ ID NO: 122035 - DNA, 66 bp, Homo sapiens
aaaagacagaagaggaagtcaggtttaaaagagaagatgtacctttggctgggggtgcctcttttt

SEQ ID NO: 122036 - DNA, 68 bp, Homo sapiens
aagaggaagtcaggtttaaaagagaagatgtacctttggctgggggtgcctcttttttctgaacagga

SEQ ID NO: 122037 - DNA, 66 bp, Homo sapiens
aggtttaaaagagaagatgtacctttggctgggggtgcctcttttttctgaacaggaacaggtact

SEQ ID NO: 122038 - DNA, 67 bp, Homo sapiens
taaaagagaagatgtacctttggctgggggtgcctcttttttctgaacaggaacaggtactttttcc

SEQ ID NO: 122039 - DNA, 66 bp, Homo sapiens
atgtacctttggctgggggtgcctcttttttctgaacaggaacaggtactttttcctcaggaattt

SEQ ID NO: 122040 - DNA, 67 bp, Homo sapiens
tgggggtgcctcttttttctgaacaggaacaggtactttttcctcaggaattttctttgacacttta

SEQ ID NO: 122041 - DNA, 67 bp, Homo sapiens
gcctcttttttctgaacaggaacaggtactttttcctcaggaattttctttgacactttaaagatat

SEQ ID NO: 122042 - DNA, 66 bp, Homo sapiens
gaacaggaacaggtactttttcctcaggaattttctttgacactttaaagatattaggtgttttag

SEQ ID NO: 122043 - DNA, 68 bp, Homo sapiens
acaggtactttttcctcaggaattttctttgacactttaaagatattaggtgttttagttagctgaga

SEQ ID NO: 122044 - DNA, 72 bp, Homo sapiens
cctcaggaattttctttgacactttaaagatattaggtgttttagttagctgagaatgttcaataacacaca

SEQ ID NO: 122045 - DNA, 69 bp, Homo sapiens
tttaagaaagaaaattaatgggaagttaaagatattaataatgaggatttgatatacctttagctggtg

SEQ ID NO: 122046 - DNA, 71 bp, Homo sapiens
gaaaattaatgggaagttaaagatattaataatgaggatttgatatacctttagctggtggtgcctccact

SEQ ID NO: 122047 - DNA, 70 bp, Homo sapiens
gggaagttaaagatattaataatgaggatttgatatacctttagctggtggtgcctccacttttttagga

SEQ ID NO: 122048 - DNA, 71 bp, Homo sapiens
aaagatattaataatgaggatttgatatacctttagctggtggtgcctccacttttttaggaacaggagta

SEQ ID NO: 122049 - DNA, 73 bp, Homo sapiens
taataatgaggatttgatatacctttagctggtggtgcctccacttttttaggaacaggagtaggtgcttcag

SEQ ID NO: 122050 - DNA, 71 bp, Homo sapiens
atttgatatacctttagctggtggtgcctccacttttttaggaacaggagtaggtgcttcaggtactgctt

SEQ ID NO: 122051 - DNA, 71 bp, Homo sapiens
acctttagctggtggtgcctccacttttttaggaacaggagtaggtgcttcaggtactgctttcttaatca

SEQ ID NO: 122052 - DNA, 72 bp, Homo sapiens
tgcctccacttttttaggaacaggagtaggtgcttcaggtactgctttcttaatcacttcaggcacttaaaa

SEQ ID NO: 122053 - DNA, 69 bp, Homo sapiens
tttttaggaacaggagtaggtgcttcaggtactgctttcttaatcacttcaggcacttaaaagaaattt

SEQ ID NO: 122054 - DNA, 71 bp, Homo sapiens
aacaggagtaggtgcttcaggtactgctttcttaatcacttcaggcacttaaaagaaattttatgaacatt

SEQ ID NO: 122055 - DNA, 73 bp, Homo sapiens
gtgcttcaggtactgctttcttaatcacttcaggcacttaaaagaaattttatgaacattttgaaaagtggca

SEQ ID NO: 122056 - DNA, 76 bp, Homo sapiens
ggtactgctttcttaatcacttcaggcacttaaaagaaattttatgaacattttgaaaagtggcatgtgatgagca

SEQ ID NO: 122057 - DNA, 68 bp, Homo sapiens
aagatttggaacaccaggaattttaaatgttcaatccttaaaagcggttatacctctaggtggtgcca

SEQ ID NO: 122058 - DNA, 67 bp, Homo sapiens
aggaattttaaatgttcaatccttaaaagcggttatacctctaggtggtgccacctcttcaacttcc

SEQ ID NO: 122059 - DNA, 71 bp, Homo sapiens
tttaaatgttcaatccttaaaagcggttatacctctaggtggtgccacctcttcaacttcctctatgctag

SEQ ID NO: 122060 - DNA, 70 bp, Homo sapiens
aatccttaaaagcggttatacctctaggtggtgccacctcttcaacttcctctatgctaggtggttcttc

SEQ ID NO: 122061 - DNA, 71 bp, Homo sapiens
aaagcggttatacctctaggtggtgccacctcttcaacttcctctatgctaggtggttcttctgggatttc

SEQ ID NO: 122062 - DNA, 74 bp, Homo sapiens
tacctctaggtggtgccacctcttcaacttcctctatgctaggtggttcttctgggatttcttcttctgaaata

SEQ ID NO: 122063 - DNA, 76 bp, Homo sapiens
tggtgccacctcttcaacttcctctatgctaggtggttcttctgggatttcttcttctgaaataggctcttcttca

SEQ ID NO: 122064 - DNA, 77 bp, Homo sapiens
ttcaacttcctctatgctaggtggttcttctgggatttcttcttctgaaataggctcttcttcaggctcctcagtca

SEQ ID NO: 122065 - DNA, 74 bp, Homo sapiens
tatgctaggtggttcttctgggatttcttcttctgaaataggctcttcttcaggctcctcagtcactttaaaaa

SEQ ID NO: 122066 - DNA, 72 bp, Homo sapiens
gttcttctgggatttcttcttctgaaataggctcttcttcaggctcctcagtcactttaaaaagattattat

SEQ ID NO: 122067 - DNA, 72 bp, Homo sapiens
ctgggatttcttcttctgaaataggctcttcttcaggctcctcagtcactttaaaaagattattattttgta

SEQ ID NO: 122068 - DNA, 70 bp, Homo sapiens
cttcttctgaaataggctcttcttcaggctcctcagtcactttaaaaagattattattttgtaaattatt

SEQ ID NO: 122069 - DNA, 71 bp, Homo sapiens
ttagacaataataagacaaggatgactttgaaatgttattttcttagaaagttatctaccttcaactggta

SEQ ID NO: 122070 - DNA, 69 bp, Homo sapiens
ataagacaaggatgactttgaaatgttattttcttagaaagttatctaccttcaactggtagaacttcc

SEQ ID NO: 122071 - DNA, 69 bp, Homo sapiens
acaaggatgactttgaaatgttattttcttagaaagttatctaccttcaactggtagaacttcctcttc

SEQ ID NO: 122072 - DNA, 69 bp, Homo sapiens
gaaatgttattttcttagaaagttatctaccttcaactggtagaacttcctcttctttagggagaatga

SEQ ID NO: 122073 - DNA, 68 bp, Homo sapiens
ttcttagaaagttatctaccttcaactggtagaacttcctcttctttagggagaatgattcgtttttc

SEQ ID NO: 122074 - DNA, 68 bp, Homo sapiens
agaaagttatctaccttcaactggtagaacttcctcttctttagggagaatgattcgtttttcttcca

SEQ ID NO: 122075 - DNA, 67 bp, Homo sapiens
ctaccttcaactggtagaacttcctcttctttagggagaatgattcgtttttcttccaccttcttag

SEQ ID NO: 122076 - DNA, 70 bp, Homo sapiens
tagaacttcctcttctttagggagaatgattcgtttttcttccaccttcttaggcacctcaggaacttga

SEQ ID NO: 122077 - DNA, 73 bp, Homo sapiens
tcttctttagggagaatgattcgtttttcttccaccttcttaggcacctcaggaacttgagagacattgatta

SEQ ID NO: 122078 - DNA, 72 bp, Homo sapiens
ttagggagaatgattcgtttttcttccaccttcttaggcacctcaggaacttgagagacattgattatttta

SEQ ID NO: 122079 - DNA, 70 bp, Homo sapiens
attcgtttttcttccaccttcttaggcacctcaggaacttgagagacattgattattttagacacttaaa

SEQ ID NO: 122080 - DNA, 73 bp, Homo sapiens
ttccaccttcttaggcacctcaggaacttgagagacattgattattttagacacttaaaatgcaagaaccaaa

SEQ ID NO: 122081 - DNA, 71 bp, Homo sapiens
ttttgacttttataggagaaggaaggaaatggcatagtctaatttacttcggaatagcaatacctttggca

SEQ ID NO: 122082 - DNA, 71 bp, Homo sapiens
ttataggagaaggaaggaaatggcatagtctaatttacttcggaatagcaatacctttggcagggggagcc

SEQ ID NO: 122083 - DNA, 70 bp, Homo sapiens
aaggaaatggcatagtctaatttacttcggaatagcaatacctttggcagggggagcctcctctttcttg

SEQ ID NO: 122084 - DNA, 70 bp, Homo sapiens
atagtctaatttacttcggaatagcaatacctttggcagggggagcctcctctttcttgggaatgaccac

SEQ ID NO: 122085 - DNA, 69 bp, Homo sapiens
taatttacttcggaatagcaatacctttggcagggggagcctcctctttcttgggaatgaccactttct

SEQ ID NO: 122086 - DNA, 71 bp, Homo sapiens
aatagcaatacctttggcagggggagcctcctctttcttgggaatgaccactttcttctctgtcactttct

SEQ ID NO: 122087 - DNA, 70 bp, Homo sapiens
atacctttggcagggggagcctcctctttcttgggaatgaccactttcttctctgtcactttcttcttaa

SEQ ID NO: 122088 - DNA, 71 bp, Homo sapiens
ggagcctcctctttcttgggaatgaccactttcttctctgtcactttcttcttaatttcaggcactttaaa

SEQ ID NO: 122089 - DNA, 74 bp, Homo sapiens
tctttcttgggaatgaccactttcttctctgtcactttcttcttaatttcaggcactttaaagacatcatttca

SEQ ID NO: 122090 - DNA, 75 bp, Homo sapiens
ggaatgaccactttcttctctgtcactttcttcttaatttcaggcactttaaagacatcatttcatgataaggat

SEQ ID NO: 122091 - DNA, 73 bp, Homo sapiens
ccactttcttctctgtcactttcttcttaatttcaggcactttaaagacatcatttcatgataaggatttatt

SEQ ID NO: 122092 - DNA, 74 bp, Homo sapiens
ctctgtcactttcttcttaatttcaggcactttaaagacatcatttcatgataaggatttattttgaaggacaa

SEQ ID NO: 122093 - DNA, 71 bp, Homo sapiens
ataatttatgtgaccaagctatgggtgaacaatgtgtattcactttggggaggtgtacctttgggtggtgg

SEQ ID NO: 122094 - DNA, 69 bp, Homo sapiens
aagctatgggtgaacaatgtgtattcactttggggaggtgtacctttgggtggtggtggaggttccact

SEQ ID NO: 122095 - DNA, 67 bp, Homo sapiens
atgggtgaacaatgtgtattcactttggggaggtgtacctttgggtggtggtggaggttccactttt

SEQ ID NO: 122096 - DNA, 65 bp, Homo sapiens
aatgtgtattcactttggggaggtgtacctttgggtggtggtggaggttccacttttttaggggc

SEQ ID NO: 122097 - DNA, 62 bp, Homo sapiens
actttggggaggtgtacctttgggtggtggtggaggttccacttttttaggggcgggaacag

SEQ ID NO: 122098 - DNA, 62 bp, Homo sapiens
aggtgtacctttgggtggtggtggaggttccacttttttaggggcgggaacagggactttct

SEQ ID NO: 122099 - DNA, 65 bp, Homo sapiens
tggtggtggaggttccacttttttaggggcgggaacagggactttcttctctggtacaggtttct

SEQ ID NO: 122100 - DNA, 64 bp, Homo sapiens
aggttccacttttttaggggcgggaacagggactttcttctctggtacaggtttctttggcact

SEQ ID NO: 122101 - DNA, 67 bp, Homo sapiens
tttttaggggcgggaacagggactttcttctctggtacaggtttctttggcacttcaggcacttaaa

SEQ ID NO: 122102 - DNA, 68 bp, Homo sapiens
cgggaacagggactttcttctctggtacaggtttctttggcacttcaggcacttaaaaacatttcatt

SEQ ID NO: 122103 - DNA, 70 bp, Homo sapiens
actttcttctctggtacaggtttctttggcacttcaggcacttaaaaacatttcatttgaaggcattaaa

SEQ ID NO: 122104 - DNA, 71 bp, Homo sapiens
ctggtacaggtttctttggcacttcaggcacttaaaaacatttcatttgaaggcattaaaaaccacatata

SEQ ID NO: 122105 - DNA, 76 bp, Homo sapiens
ttcaacacaaaagaggccttgatgattccaagaagagctgctatacctggtgcaggtactggcaccttaggtttaa

SEQ ID NO: 122106 - DNA, 74 bp, Homo sapiens
acaaaagaggccttgatgattccaagaagagctgctatacctggtgcaggtactggcaccttaggtttaacttc

SEQ ID NO: 122107 - DNA, 75 bp, Homo sapiens
ttgatgattccaagaagagctgctatacctggtgcaggtactggcaccttaggtttaacttctggaaggacttct

SEQ ID NO: 122108 - DNA, 73 bp, Homo sapiens
agaagagctgctatacctggtgcaggtactggcaccttaggtttaacttctggaaggacttcttcttcaggta

SEQ ID NO: 122109 - DNA, 70 bp, Homo sapiens
ctatacctggtgcaggtactggcaccttaggtttaacttctggaaggacttcttcttcaggtacaaattc

SEQ ID NO: 122110 - DNA, 70 bp, Homo sapiens
tggcaccttaggtttaacttctggaaggacttcttcttcaggtacaaattcttcttcctcaggtacatat

SEQ ID NO: 122111 - DNA, 70 bp, Homo sapiens
ttctggaaggacttcttcttcaggtacaaattcttcttcctcaggtacatattcttcttcgggaggaact

SEQ ID NO: 122112 - DNA, 69 bp, Homo sapiens
acttcttcttcaggtacaaattcttcttcctcaggtacatattcttcttcgggaggaacttcctcttcc

SEQ ID NO: 122113 - DNA, 70 bp, Homo sapiens
gtacaaattcttcttcctcaggtacatattcttcttcgggaggaacttcctcttcctcaggtggaatttc

SEQ ID NO: 122114 - DNA, 70 bp, Homo sapiens
ttcttcttcctcaggtacatattcttcttcgggaggaacttcctcttcctcaggtggaatttcctcttct

SEQ ID NO: 122115 - DNA, 69 bp, Homo sapiens
aggtacatattcttcttcgggaggaacttcctcttcctcaggtggaatttcctcttcttcaggtagaac

SEQ ID NO: 122116 - DNA, 69 bp, Homo sapiens
atattcttcttcgggaggaacttcctcttcctcaggtggaatttcctcttcttcaggtagaacttcctc

SEQ ID NO: 122117 - DNA, 69 bp, Homo sapiens
aggaacttcctcttcctcaggtggaatttcctcttcttcaggtagaacttcctcttcttcaggtagaac

SEQ ID NO: 122118 - DNA, 70 bp, Homo sapiens
cttcctcttcctcaggtggaatttcctcttcttcaggtagaacttcctcttcttcaggtagaacttcctc

SEQ ID NO: 122119 - DNA, 70 bp, Homo sapiens
aggtggaatttcctcttcttcaggtagaacttcctcttcttcaggtagaacttcctcttcctcaggtaga

SEQ ID NO: 122120 - DNA, 69 bp, Homo sapiens
atttcctcttcttcaggtagaacttcctcttcttcaggtagaacttcctcttcctcaggtagaacttcc

SEQ ID NO: 122121 - DNA, 70 bp, Homo sapiens
ggtagaacttcctcttcttcaggtagaacttcctcttcctcaggtagaacttcctcttcctcaggtagaa

SEQ ID NO: 122122 - DNA, 69 bp, Homo sapiens
aacttcctcttcttcaggtagaacttcctcttcctcaggtagaacttcctcttcctcaggtagaacttc

SEQ ID NO: 122123 - DNA, 69 bp, Homo sapiens
aggtagaacttcctcttcctcaggtagaacttcctcttcctcaggtagaacttcctcttcaggaacaat

SEQ ID NO: 122124 - DNA, 71 bp, Homo sapiens
ttcctcttcctcaggtagaacttcctcttcctcaggtagaacttcctcttcaggaacaatttcttcttcaa

SEQ ID NO: 122125 - DNA, 71 bp, Homo sapiens
ttcctcaggtagaacttcctcttcctcaggtagaacttcctcttcaggaacaatttcttcttcaaatagaa

SEQ ID NO: 122126 - DNA, 69 bp, Homo sapiens
aacttcctcttcctcaggtagaacttcctcttcaggaacaatttcttcttcaaatagaacttcctcttc

SEQ ID NO: 122127 - DNA, 71 bp, Homo sapiens
cttcctcaggtagaacttcctcttcaggaacaatttcttcttcaaatagaacttcctcttcctgaggtaga

SEQ ID NO: 122128 - DNA, 73 bp, Homo sapiens
ttcaggaacaatttcttcttcaaatagaacttcctcttcctgaggtagagctacaggaactggaactggttca

SEQ ID NO: 122129 - DNA, 70 bp, Homo sapiens
aatagaacttcctcttcctgaggtagagctacaggaactggaactggttcacgtttctttggcactttaa

SEQ ID NO: 122130 - DNA, 71 bp, Homo sapiens
ttcctcttcctgaggtagagctacaggaactggaactggttcacgtttctttggcactttaaagatattta

SEQ ID NO: 122131 - DNA, 70 bp, Homo sapiens
ctgtataacaccagttagttttgtcttttaccatggctctgttacagattaatgtacctttgggtggtgg

SEQ ID NO: 122132 - DNA, 69 bp, Homo sapiens
gttagttttgtcttttaccatggctctgttacagattaatgtacctttgggtggtggtgcttccacttt

SEQ ID NO: 122133 - DNA, 69 bp, Homo sapiens
ttttgtcttttaccatggctctgttacagattaatgtacctttgggtggtggtgcttccacttttttcg

SEQ ID NO: 122134 - DNA, 69 bp, Homo sapiens
tggctctgttacagattaatgtacctttgggtggtggtgcttccacttttttcggaacaggtgttggtt

SEQ ID NO: 122135 - DNA, 66 bp, Homo sapiens
ttacagattaatgtacctttgggtggtggtgcttccacttttttcggaacaggtgttggtttcttt

SEQ ID NO: 122136 - DNA, 66 bp, Homo sapiens
ttaatgtacctttgggtggtggtgcttccacttttttcggaacaggtgttggtttcttttcttctg

SEQ ID NO: 122137 - DNA, 68 bp, Homo sapiens
tttgggtggtggtgcttccacttttttcggaacaggtgttggtttcttttcttctgggatgagcttct

SEQ ID NO: 122138 - DNA, 70 bp, Homo sapiens
ttccacttttttcggaacaggtgttggtttcttttcttctgggatgagcttcttgggcacctctggcact

SEQ ID NO: 122139 - DNA, 71 bp, Homo sapiens
ttttcggaacaggtgttggtttcttttcttctgggatgagcttcttgggcacctctggcactttaaagata

SEQ ID NO: 122140 - DNA, 71 bp, Homo sapiens
aggtgttggtttcttttcttctgggatgagcttcttgggcacctctggcactttaaagatattatttatat

SEQ ID NO: 122141 - DNA, 74 bp, Homo sapiens
tcttttcttctgggatgagcttcttgggcacctctggcactttaaagatattatttatatttaggaatatgttc

SEQ ID NO: 122142 - DNA, 73 bp, Homo sapiens
cttctgggatgagcttcttgggcacctctggcactttaaagatattatttatatttaggaatatgttctttta

SEQ ID NO: 122143 - DNA, 73 bp, Homo sapiens
agtatacatagatgtgagttttttcccccaagtactctaagtgatgaaattatgtaccttttgcaggtggagc

SEQ ID NO: 122144 - DNA, 70 bp, Homo sapiens
atgtgagttttttcccccaagtactctaagtgatgaaattatgtaccttttgcaggtggagcctccactt

SEQ ID NO: 122145 - DNA, 70 bp, Homo sapiens
tttttcccccaagtactctaagtgatgaaattatgtaccttttgcaggtggagcctccactttcttagga

SEQ ID NO: 122146 - DNA, 74 bp, Homo sapiens
aagtactctaagtgatgaaattatgtaccttttgcaggtggagcctccactttcttaggagcaggaactggcac

SEQ ID NO: 122147 - DNA, 75 bp, Homo sapiens
aagtgatgaaattatgtaccttttgcaggtggagcctccactttcttaggagcaggaactggcaccttcttctca

SEQ ID NO: 122148 - DNA, 75 bp, Homo sapiens
attatgtaccttttgcaggtggagcctccactttcttaggagcaggaactggcaccttcttctcaggcacaggct

SEQ ID NO: 122149 - DNA, 75 bp, Homo sapiens
ttttgcaggtggagcctccactttcttaggagcaggaactggcaccttcttctcaggcacaggcttcttgggtac

SEQ ID NO: 122150 - DNA, 74 bp, Homo sapiens
ctccactttcttaggagcaggaactggcaccttcttctcaggcacaggcttcttgggtacctctggcactttaa

SEQ ID NO: 122151 - DNA, 74 bp, Homo sapiens
ttaggagcaggaactggcaccttcttctcaggcacaggcttcttgggtacctctggcactttaacgaaatgatt

SEQ ID NO: 122152 - DNA, 73 bp, Homo sapiens
gaactggcaccttcttctcaggcacaggcttcttgggtacctctggcactttaacgaaatgatttagagaaaa

SEQ ID NO: 122153 - DNA, 69 bp, Homo sapiens
accttcttctcaggcacaggcttcttgggtacctctggcactttaacgaaatgatttagagaaaaattt

SEQ ID NO: 122154 - DNA, 70 bp, Homo sapiens
ggcacaggcttcttgggtacctctggcactttaacgaaatgatttagagaaaaattttatacgacataaa

SEQ ID NO: 122155 - DNA, 75 bp, Homo sapiens
atttttacccatatgcaaatgtgaaataaaaatattgcaacattgcaagttcatgtacctttggcaggtggagct

SEQ ID NO: 122156 - DNA, 76 bp, Homo sapiens
tatgcaaatgtgaaataaaaatattgcaacattgcaagttcatgtacctttggcaggtggagcttccaccttttta

SEQ ID NO: 122157 - DNA, 71 bp, Homo sapiens
aaataaaaatattgcaacattgcaagttcatgtacctttggcaggtggagcttccacctttttaggaactg

SEQ ID NO: 122158 - DNA, 73 bp, Homo sapiens
aatattgcaacattgcaagttcatgtacctttggcaggtggagcttccacctttttaggaactggtactggta

SEQ ID NO: 122159 - DNA, 71 bp, Homo sapiens
acattgcaagttcatgtacctttggcaggtggagcttccacctttttaggaactggtactggtactttctc

SEQ ID NO: 122160 - DNA, 72 bp, Homo sapiens
ttcatgtacctttggcaggtggagcttccacctttttaggaactggtactggtactttctcctctggcacag

SEQ ID NO: 122161 - DNA, 70 bp, Homo sapiens
tttggcaggtggagcttccacctttttaggaactggtactggtactttctcctctggcacaggtttcttg

SEQ ID NO: 122162 - DNA, 69 bp, Homo sapiens
ttccacctttttaggaactggtactggtactttctcctctggcacaggtttcttgggcacttcaggaac

SEQ ID NO: 122163 - DNA, 71 bp, Homo sapiens
ttttaggaactggtactggtactttctcctctggcacaggtttcttgggcacttcaggaacttcaaagata

SEQ ID NO: 122164 - DNA, 74 bp, Homo sapiens
tggtactggtactttctcctctggcacaggtttcttgggcacttcaggaacttcaaagatatcaaatagagtta

SEQ ID NO: 122165 - DNA, 74 bp, Homo sapiens
tttctcctctggcacaggtttcttgggcacttcaggaacttcaaagatatcaaatagagttagtgtcacatttt

SEQ ID NO: 122166 - DNA, 74 bp, Homo sapiens
tggcacaggtttcttgggcacttcaggaacttcaaagatatcaaatagagttagtgtcacattttttacccata

SEQ ID NO: 122167 - DNA, 81 bp, Homo sapiens
aagttatgctgcatgggtgaattatcatgctattccactgatggattataaggatgtaccttttgctggcggaggcttctc

SEQ ID NO: 122168 - DNA, 76 bp, Homo sapiens
atgggtgaattatcatgctattccactgatggattataaggatgtaccttttgctggcggaggcttctccttttta

SEQ ID NO: 122169 - DNA, 75 bp, Homo sapiens
attatcatgctattccactgatggattataaggatgtaccttttgctggcggaggcttctcctttttaggaataa

SEQ ID NO: 122170 - DNA, 74 bp, Homo sapiens
tattccactgatggattataaggatgtaccttttgctggcggaggcttctcctttttaggaataagcacaggaa

SEQ ID NO: 122171 - DNA, 71 bp, Homo sapiens
atggattataaggatgtaccttttgctggcggaggcttctcctttttaggaataagcacaggaactttctc

SEQ ID NO: 122172 - DNA, 71 bp, Homo sapiens
ataaggatgtaccttttgctggcggaggcttctcctttttaggaataagcacaggaactttctcctctggc

SEQ ID NO: 122173 - DNA, 70 bp, Homo sapiens
accttttgctggcggaggcttctcctttttaggaataagcacaggaactttctcctctggcttcttagga

SEQ ID NO: 122174 - DNA, 70 bp, Homo sapiens
aggcttctcctttttaggaataagcacaggaactttctcctctggcttcttaggaacctcaggcacttta

SEQ ID NO: 122175 - DNA, 70 bp, Homo sapiens
tttttaggaataagcacaggaactttctcctctggcttcttaggaacctcaggcactttaaagatattgt

SEQ ID NO: 122176 - DNA, 71 bp, Homo sapiens
aataagcacaggaactttctcctctggcttcttaggaacctcaggcactttaaagatattgtttattgtta

SEQ ID NO: 122177 - DNA, 69 bp, Homo sapiens
gaactttctcctctggcttcttaggaacctcaggcactttaaagatattgtttattgttaagttctaac

SEQ ID NO: 122178 - DNA, 70 bp, Homo sapiens
ctcctctggcttcttaggaacctcaggcactttaaagatattgtttattgttaagttctaactactagta

SEQ ID NO: 122179 - DNA, 73 bp, Homo sapiens
gttaactatttctaggcagatgaagtctcttagatacccgtcaatgaatggtggtgtaccttttgccggtgga

SEQ ID NO: 122180 - DNA, 74 bp, Homo sapiens
taggcagatgaagtctcttagatacccgtcaatgaatggtggtgtaccttttgccggtggagcttccttcttct

SEQ ID NO: 122181 - DNA, 70 bp, Homo sapiens
aagtctcttagatacccgtcaatgaatggtggtgtaccttttgccggtggagcttccttcttcttgggaa

SEQ ID NO: 122182 - DNA, 71 bp, Homo sapiens
tagatacccgtcaatgaatggtggtgtaccttttgccggtggagcttccttcttcttgggaacaggaacag

SEQ ID NO: 122183 - DNA, 69 bp, Homo sapiens
aatgaatggtggtgtaccttttgccggtggagcttccttcttcttgggaacaggaacaggtttcttctc

SEQ ID NO: 122184 - DNA, 70 bp, Homo sapiens
tggtgtaccttttgccggtggagcttccttcttcttgggaacaggaacaggtttcttctcttctggaaca

SEQ ID NO: 122185 - DNA, 68 bp, Homo sapiens
ttttgccggtggagcttccttcttcttgggaacaggaacaggtttcttctcttctggaacaggtttcc

SEQ ID NO: 122186 - DNA, 68 bp, Homo sapiens
agcttccttcttcttgggaacaggaacaggtttcttctcttctggaacaggtttcctgggtacctcag

SEQ ID NO: 122187 - DNA, 69 bp, Homo sapiens
ttgggaacaggaacaggtttcttctcttctggaacaggtttcctgggtacctcaggcactttaaagata

SEQ ID NO: 122188 - DNA, 68 bp, Homo sapiens
aacaggaacaggtttcttctcttctggaacaggtttcctgggtacctcaggcactttaaagatattat

SEQ ID NO: 122189 - DNA, 70 bp, Homo sapiens
tcttctcttctggaacaggtttcctgggtacctcaggcactttaaagatattattaagaatgttggaaat

SEQ ID NO: 122190 - DNA, 70 bp, Homo sapiens
cttctggaacaggtttcctgggtacctcaggcactttaaagatattattaagaatgttggaaattttgca

SEQ ID NO: 122191 - DNA, 80 bp, Homo sapiens
aaactccaaagatgctgttgcacagccctttgcaggaggcatcatctacctttgactggtatcactggcaccacttcttc

SEQ ID NO: 122192 - DNA, 83 bp, Homo sapiens
aagatgctgttgcacagccctttgcaggaggcatcatctacctttgactggtatcactggcaccacttcttcctcagttatga

SEQ ID NO: 122193 - DNA, 78 bp, Homo sapiens
agccctttgcaggaggcatcatctacctttgactggtatcactggcaccacttcttcctcagttatgaactcctcttc

SEQ ID NO: 122194 - DNA, 80 bp, Homo sapiens
aggaggcatcatctacctttgactggtatcactggcaccacttcttcctcagttatgaactcctcttcttcatgaatgta

SEQ ID NO: 122195 - DNA, 77 bp, Homo sapiens
atctacctttgactggtatcactggcaccacttcttcctcagttatgaactcctcttcttcatgaatgtactcttct

SEQ ID NO: 122196 - DNA, 77 bp, Homo sapiens
ctttgactggtatcactggcaccacttcttcctcagttatgaactcctcttcttcatgaatgtactcttcttcttct

SEQ ID NO: 122197 - DNA, 73 bp, Homo sapiens
tcttcttcttctacaagatattcttctacatgggttacaacttcctcttcaaaggcaacctcttctggttcaa

SEQ ID NO: 122198 - DNA, 72 bp, Homo sapiens
tctacaagatattcttctacatgggttacaacttcctcttcaaaggcaacctcttctggttcaagttcttta

SEQ ID NO: 122199 - DNA, 70 bp, Homo sapiens
atattcttctacatgggttacaacttcctcttcaaaggcaacctcttctggttcaagttctttaggcact

SEQ ID NO: 122200 - DNA, 70 bp, Homo sapiens
atgggttacaacttcctcttcaaaggcaacctcttctggttcaagttctttaggcacttctggcacttta

SEQ ID NO: 122201 - DNA, 70 bp, Homo sapiens
aacttcctcttcaaaggcaacctcttctggttcaagttctttaggcacttctggcactttaaagatatta

SEQ ID NO: 122202 - DNA, 70 bp, Homo sapiens
ttcaaaggcaacctcttctggttcaagttctttaggcacttctggcactttaaagatattatctttaagt

SEQ ID NO: 122203 - DNA, 71 bp, Homo sapiens
aactgaagaggaattcaacagcaaaagacgaacaaaacattaaaatgagtgccattaggtacctctaacag

SEQ ID NO: 122204 - DNA, 72 bp, Homo sapiens
tcaacagcaaaagacgaacaaaacattaaaatgagtgccattaggtacctctaacaggtggtgctacttctt

SEQ ID NO: 122205 - DNA, 69 bp, Homo sapiens
aaaagacgaacaaaacattaaaatgagtgccattaggtacctctaacaggtggtgctacttcttttcta

SEQ ID NO: 122206 - DNA, 69 bp, Homo sapiens
aacattaaaatgagtgccattaggtacctctaacaggtggtgctacttcttttctagggacaggtactt

SEQ ID NO: 122207 - DNA, 69 bp, Homo sapiens
taaaatgagtgccattaggtacctctaacaggtggtgctacttcttttctagggacaggtactttttct

SEQ ID NO: 122208 - DNA, 68 bp, Homo sapiens
attaggtacctctaacaggtggtgctacttcttttctagggacaggtactttttcttctgcgacaacc

SEQ ID NO: 122209 - DNA, 68 bp, Homo sapiens
acctctaacaggtggtgctacttcttttctagggacaggtactttttcttctgcgacaaccctcttgg

SEQ ID NO: 122210 - DNA, 72 bp, Homo sapiens
tgctacttcttttctagggacaggtactttttcttctgcgacaaccctcttgggcttcatgggcacttgaaa

SEQ ID NO: 122211 - DNA, 72 bp, Homo sapiens
ttcttttctagggacaggtactttttcttctgcgacaaccctcttgggcttcatgggcacttgaaatatgaa

SEQ ID NO: 122212 - DNA, 71 bp, Homo sapiens
acaggtactttttcttctgcgacaaccctcttgggcttcatgggcacttgaaatatgaagtataaggaaat

SEQ ID NO: 122213 - DNA, 70 bp, Homo sapiens
actttttcttctgcgacaaccctcttgggcttcatgggcacttgaaatatgaagtataaggaaattttat

SEQ ID NO: 122214 - DNA, 71 bp, Homo sapiens
acaaccctcttgggcttcatgggcacttgaaatatgaagtataaggaaattttattgtcagtaaaaggcca

SEQ ID NO: 122215 - DNA, 76 bp, Homo sapiens
taatttcaaaagaggcatcagaaaagatcacaatcgaggaaggaaatcattatacctttagcagcgggttcagtca

SEQ ID NO: 122216 - DNA, 75 bp, Homo sapiens
aggcatcagaaaagatcacaatcgaggaaggaaatcattatacctttagcagcgggttcagtcacctgctctttt

SEQ ID NO: 122217 - DNA, 72 bp, Homo sapiens
aaaagatcacaatcgaggaaggaaatcattatacctttagcagcgggttcagtcacctgctctttttcacgt

SEQ ID NO: 122218 - DNA, 71 bp, Homo sapiens
gaggaaggaaatcattatacctttagcagcgggttcagtcacctgctctttttcacgtttggtaattgaaa

SEQ ID NO: 122219 - DNA, 70 bp, Homo sapiens
atcattatacctttagcagcgggttcagtcacctgctctttttcacgtttggtaattgaaatacgtattt

SEQ ID NO: 122220 - DNA, 69 bp, Homo sapiens
tatacctttagcagcgggttcagtcacctgctctttttcacgtttggtaattgaaatacgtattttttc

SEQ ID NO: 122221 - DNA, 66 bp, Homo sapiens
agcgggttcagtcacctgctctttttcacgtttggtaattgaaatacgtattttttcctcaaaaac

SEQ ID NO: 122222 - DNA, 66 bp, Homo sapiens
cagtcacctgctctttttcacgtttggtaattgaaatacgtattttttcctcaaaaactttctttg

SEQ ID NO: 122223 - DNA, 65 bp, Homo sapiens
ttttcacgtttggtaattgaaatacgtattttttcctcaaaaactttctttggttcttcaggcac

SEQ ID NO: 122224 - DNA, 64 bp, Homo sapiens
cgtttggtaattgaaatacgtattttttcctcaaaaactttctttggttcttcaggcactttaa

SEQ ID NO: 122225 - DNA, 66 bp, Homo sapiens
ttgaaatacgtattttttcctcaaaaactttctttggttcttcaggcactttaaagatattaatta

SEQ ID NO: 122226 - DNA, 67 bp, Homo sapiens
tttcctcaaaaactttctttggttcttcaggcactttaaagatattaattattaaagagcattaaaa

SEQ ID NO: 122227 - DNA, 71 bp, Homo sapiens
catgattttagaacatacataacaaagttgtttttggtgattattactcagtaatgtacctttgggtggtg

SEQ ID NO: 122228 - DNA, 69 bp, Homo sapiens
tttagaacatacataacaaagttgtttttggtgattattactcagtaatgtacctttgggtggtggagg

SEQ ID NO: 122229 - DNA, 68 bp, Homo sapiens
cataacaaagttgtttttggtgattattactcagtaatgtacctttgggtggtggaggtttgagtttc

SEQ ID NO: 122230 - DNA, 67 bp, Homo sapiens
agttgtttttggtgattattactcagtaatgtacctttgggtggtggaggtttgagtttcttaggaa

SEQ ID NO: 122231 - DNA, 68 bp, Homo sapiens
ttattactcagtaatgtacctttgggtggtggaggtttgagtttcttaggaatgggcactggtacttt

SEQ ID NO: 122232 - DNA, 67 bp, Homo sapiens
actcagtaatgtacctttgggtggtggaggtttgagtttcttaggaatgggcactggtactttttct

SEQ ID NO: 122233 - DNA, 68 bp, Homo sapiens
tttgggtggtggaggtttgagtttcttaggaatgggcactggtactttttcttcagggacagctttct

SEQ ID NO: 122234 - DNA, 72 bp, Homo sapiens
tggaggtttgagtttcttaggaatgggcactggtactttttcttcagggacagctttcttcagcacttcaaa

SEQ ID NO: 122235 - DNA, 73 bp, Homo sapiens
tttgagtttcttaggaatgggcactggtactttttcttcagggacagctttcttcagcacttcaaaatatcaa

SEQ ID NO: 122236 - DNA, 74 bp, Homo sapiens
gaatgggcactggtactttttcttcagggacagctttcttcagcacttcaaaatatcaatattaagagatttta

SEQ ID NO: 122237 - DNA, 72 bp, Homo sapiens
gcactggtactttttcttcagggacagctttcttcagcacttcaaaatatcaatattaagagattttaaaaa

SEQ ID NO: 122238 - DNA, 71 bp, Homo sapiens
cttcagggacagctttcttcagcacttcaaaatatcaatattaagagattttaaaaattgaaacaggtttc

SEQ ID NO: 122239 - DNA, 70 bp, Homo sapiens
agtaggacagacatggaggaaacaaagatctcttacaggtaataatgtttttttcactctacctttagcc

SEQ ID NO: 122240 - DNA, 66 bp, Homo sapiens
gaggaaacaaagatctcttacaggtaataatgtttttttcactctacctttagccggtggggcctt

SEQ ID NO: 122241 - DNA, 64 bp, Homo sapiens
aaagatctcttacaggtaataatgtttttttcactctacctttagccggtggggcctttggttt

SEQ ID NO: 122242 - DNA, 65 bp, Homo sapiens
tcttacaggtaataatgtttttttcactctacctttagccggtggggcctttggttttgtgggaa

SEQ ID NO: 122243 - DNA, 63 bp, Homo sapiens
aataatgtttttttcactctacctttagccggtggggcctttggttttgtgggaactggttct

SEQ ID NO: 122244 - DNA, 67 bp, Homo sapiens
ttcactctacctttagccggtggggcctttggttttgtgggaactggttcttctgggacaggcttta

SEQ ID NO: 122245 - DNA, 66 bp, Homo sapiens
cctttagccggtggggcctttggttttgtgggaactggttcttctgggacaggctttacagggata

SEQ ID NO: 122246 - DNA, 68 bp, Homo sapiens
gggcctttggttttgtgggaactggttcttctgggacaggctttacagggataggcttctctggttct

SEQ ID NO: 122247 - DNA, 68 bp, Homo sapiens
ttggttttgtgggaactggttcttctgggacaggctttacagggataggcttctctggttctttaaaa

SEQ ID NO: 122248 - DNA, 69 bp, Homo sapiens
aactggttcttctgggacaggctttacagggataggcttctctggttctttaaaagtacatacaaggta

SEQ ID NO: 122249 - DNA, 72 bp, Homo sapiens
ttctgggacaggctttacagggataggcttctctggttctttaaaagtacatacaaggtatttcatgttaga

SEQ ID NO: 122250 - DNA, 70 bp, Homo sapiens
aggctttacagggataggcttctctggttctttaaaagtacatacaaggtatttcatgttagacttagaa

SEQ ID NO: 122251 - DNA, 84 bp, Homo sapiens
tgtgcacatatttagtgtggttttgagtttgcagttttgctcatacctgtgatgtattcttcatgctcttcatatcgttcatac

SEQ ID NO: 122252 - DNA, 81 bp, Homo sapiens
acatatttagtgtggttttgagtttgcagttttgctcatacctgtgatgtattcttcatgctcttcatatcgttcatactc

SEQ ID NO: 122253 - DNA, 81 bp, Homo sapiens
ttttgagtttgcagttttgctcatacctgtgatgtattcttcatgctcttcatatcgttcatactcccgctcctcgtattc

SEQ ID NO: 122254 - DNA, 83 bp, Homo sapiens
tttgcagttttgctcatacctgtgatgtattcttcatgctcttcatatcgttcatactcccgctcctcgtattcttcatattg

SEQ ID NO: 122255 - DNA, 84 bp, Homo sapiens
tcatacctgtgatgtattcttcatgctcttcatatcgttcatactcccgctcctcgtattcttcatattggtcatattcttctg

SEQ ID NO: 122256 - DNA, 83 bp, Homo sapiens
tgatgtattcttcatgctcttcatatcgttcatactcccgctcctcgtattcttcatattggtcatattcttctgttggttca

SEQ ID NO: 122257 - DNA, 80 bp, Homo sapiens
attcttcatgctcttcatatcgttcatactcccgctcctcgtattcttcatattggtcatattcttctgttggttcatac

SEQ ID NO: 122258 - DNA, 78 bp, Homo sapiens
tcttcatatcgttcatactcccgctcctcgtattcttcatattggtcatattcttctgttggttcatactcctcaaat

SEQ ID NO: 122259 - DNA, 76 bp, Homo sapiens
ttcatactcccgctcctcgtattcttcatattggtcatattcttctgttggttcatactcctcaaattctttataa

SEQ ID NO: 122260 - DNA, 76 bp, Homo sapiens
ccgctcctcgtattcttcatattggtcatattcttctgttggttcatactcctcaaattctttataatcatattct

SEQ ID NO: 122261 - DNA, 79 bp, Homo sapiens
cttcatattggtcatattcttctgttggttcatactcctcaaattctttataatcatattcttcatattcctcatattc

SEQ ID NO: 122262 - DNA, 77 bp, Homo sapiens
ggtcatattcttctgttggttcatactcctcaaattctttataatcatattcttcatattcctcatattcttcttcc

SEQ ID NO: 122263 - DNA, 77 bp, Homo sapiens
tctgttggttcatactcctcaaattctttataatcatattcttcatattcctcatattcttcttcccgttgtactga

SEQ ID NO: 122264 - DNA, 76 bp, Homo sapiens
gttcatactcctcaaattctttataatcatattcttcatattcctcatattcttcttcccgttgtactgaaacagc

SEQ ID NO: 122265 - DNA, 74 bp, Homo sapiens
cctcaaattctttataatcatattcttcatattcctcatattcttcttcccgttgtactgaaacagcttcttct

SEQ ID NO: 122266 - DNA, 76 bp, Homo sapiens
tataatcatattcttcatattcctcatattcttcttcccgttgtactgaaacagcttcttcttctagggtataagc

SEQ ID NO: 122267 - DNA, 72 bp, Homo sapiens
tattcttcatattcctcatattcttcttcccgttgtactgaaacagcttcttcttctagggtataagccctt

SEQ ID NO: 122268 - DNA, 71 bp, Homo sapiens
tattcctcatattcttcttcccgttgtactgaaacagcttcttcttctagggtataagccctttctttctc

SEQ ID NO: 122269 - DNA, 70 bp, Homo sapiens
ttcttcttcccgttgtactgaaacagcttcttcttctagggtataagccctttctttctcttccattata

SEQ ID NO: 122270 - DNA, 71 bp, Homo sapiens
ttgtactgaaacagcttcttcttctagggtataagccctttctttctcttccattatagttacttctgaaa

SEQ ID NO: 122271 - DNA, 70 bp, Homo sapiens
gaaacagcttcttcttctagggtataagccctttctttctcttccattatagttacttctgaaacaatat

SEQ ID NO: 122272 - DNA, 73 bp, Homo sapiens
tcttctagggtataagccctttctttctcttccattatagttacttctgaaacaatattaacaacaggcagca

SEQ ID NO: 122273 - DNA, 71 bp, Homo sapiens
ggtataagccctttctttctcttccattatagttacttctgaaacaatattaacaacaggcagcactttac

SEQ ID NO: 122274 - DNA, 74 bp, Homo sapiens
aaggcaaagagccagatagtttcatgcctcacattacttaatcaaagttcaatatacctttgatgggttgaggt

SEQ ID NO: 122275 - DNA, 73 bp, Homo sapiens
agccagatagtttcatgcctcacattacttaatcaaagttcaatatacctttgatgggttgaggttctctttt

SEQ ID NO: 122276 - DNA, 74 bp, Homo sapiens
ttcatgcctcacattacttaatcaaagttcaatatacctttgatgggttgaggttctctttttggagcttcaat

SEQ ID NO: 122277 - DNA, 73 bp, Homo sapiens
ctcacattacttaatcaaagttcaatatacctttgatgggttgaggttctctttttggagcttcaattgatac

SEQ ID NO: 122278 - DNA, 70 bp, Homo sapiens
cttaatcaaagttcaatatacctttgatgggttgaggttctctttttggagcttcaattgatactttttc

SEQ ID NO: 122279 - DNA, 69 bp, Homo sapiens
caatatacctttgatgggttgaggttctctttttggagcttcaattgatactttttcttctttaaccac

SEQ ID NO: 122280 - DNA, 67 bp, Homo sapiens
cctttgatgggttgaggttctctttttggagcttcaattgatactttttcttctttaaccactcttt

SEQ ID NO: 122281 - DNA, 70 bp, Homo sapiens
gaggttctctttttggagcttcaattgatactttttcttctttaaccactctttttctgaattcagtcac

SEQ ID NO: 122282 - DNA, 69 bp, Homo sapiens
tttggagcttcaattgatactttttcttctttaaccactctttttctgaattcagtcactttaaaggag

SEQ ID NO: 122283 - DNA, 69 bp, Homo sapiens
gcttcaattgatactttttcttctttaaccactctttttctgaattcagtcactttaaaggagtaatta

SEQ ID NO: 122284 - DNA, 66 bp, Homo sapiens
ctttttcttctttaaccactctttttctgaattcagtcactttaaaggagtaattattaaaagtga

SEQ ID NO: 122285 - DNA, 71 bp, Homo sapiens
ttaaccactctttttctgaattcagtcactttaaaggagtaattattaaaagtgaattgcaagattctgaa

SEQ ID NO: 122286 - DNA, 67 bp, Homo sapiens
tttttaagagtcagtatacctttagctggtggttcctcctctcttttaggtttgagtttcagaactt

SEQ ID NO: 122287 - DNA, 67 bp, Homo sapiens
aagagtcagtatacctttagctggtggttcctcctctcttttaggtttgagtttcagaactttttct

SEQ ID NO: 122288 - DNA, 68 bp, Homo sapiens
atacctttagctggtggttcctcctctcttttaggtttgagtttcagaactttttcttctgggacagc

SEQ ID NO: 122289 - DNA, 69 bp, Homo sapiens
tggttcctcctctcttttaggtttgagtttcagaactttttcttctgggacagctctcttcggttcctc

SEQ ID NO: 122290 - DNA, 70 bp, Homo sapiens
tctcttttaggtttgagtttcagaactttttcttctgggacagctctcttcggttcctctggcactttaa

SEQ ID NO: 122291 - DNA, 71 bp, Homo sapiens
taggtttgagtttcagaactttttcttctgggacagctctcttcggttcctctggcactttaaagagagat

SEQ ID NO: 122292 - DNA, 69 bp, Homo sapiens
agaactttttcttctgggacagctctcttcggttcctctggcactttaaagagagatttcactttaaag

SEQ ID NO: 122293 - DNA, 70 bp, Homo sapiens
ttttcttctgggacagctctcttcggttcctctggcactttaaagagagatttcactttaaagtattgtt

SEQ ID NO: 122294 - DNA, 73 bp, Homo sapiens
atttggtaaagagagtagggcaagtacaatattgtgcataatggaagggcggatgtacctcttgcttttggag

SEQ ID NO: 122295 - DNA, 72 bp, Homo sapiens
agtagggcaagtacaatattgtgcataatggaagggcggatgtacctcttgcttttggaggcgcctcttttt

SEQ ID NO: 122296 - DNA, 72 bp, Homo sapiens
aagtacaatattgtgcataatggaagggcggatgtacctcttgcttttggaggcgcctcttttttagttaca

SEQ ID NO: 122297 - DNA, 74 bp, Homo sapiens
tattgtgcataatggaagggcggatgtacctcttgcttttggaggcgcctcttttttagttacagcaacaagaa

SEQ ID NO: 122298 - DNA, 67 bp, Homo sapiens
aagggcggatgtacctcttgcttttggaggcgcctcttttttagttacagcaacaagaactttttct

SEQ ID NO: 122299 - DNA, 68 bp, Homo sapiens
atgtacctcttgcttttggaggcgcctcttttttagttacagcaacaagaactttttcttcctgggta

SEQ ID NO: 122300 - DNA, 70 bp, Homo sapiens
tcttgcttttggaggcgcctcttttttagttacagcaacaagaactttttcttcctgggtaatttgcatg

SEQ ID NO: 122301 - DNA, 72 bp, Homo sapiens
cgcctcttttttagttacagcaacaagaactttttcttcctgggtaatttgcatgtgcctctcagtcactta

SEQ ID NO: 122302 - DNA, 72 bp, Homo sapiens
tttttagttacagcaacaagaactttttcttcctgggtaatttgcatgtgcctctcagtcacttaaaagata

SEQ ID NO: 122303 - DNA, 71 bp, Homo sapiens
agcaacaagaactttttcttcctgggtaatttgcatgtgcctctcagtcacttaaaagataattttaggat

SEQ ID NO: 122304 - DNA, 70 bp, Homo sapiens
ctttttcttcctgggtaatttgcatgtgcctctcagtcacttaaaagataattttaggattagggagtta

SEQ ID NO: 122305 - DNA, 73 bp, Homo sapiens
ttcctgggtaatttgcatgtgcctctcagtcacttaaaagataattttaggattagggagttatatcaaagtg

SEQ ID NO: 122306 - DNA, 69 bp, Homo sapiens
agaaagaaagacaagccatatgttcctagtttttctgctggggaggtttgtttacctttggctgggaga

SEQ ID NO: 122307 - DNA, 68 bp, Homo sapiens
aagacaagccatatgttcctagtttttctgctggggaggtttgtttacctttggctgggagaggttct

SEQ ID NO: 122308 - DNA, 68 bp, Homo sapiens
atatgttcctagtttttctgctggggaggtttgtttacctttggctgggagaggttcttccatcttaa

SEQ ID NO: 122309 - DNA, 68 bp, Homo sapiens
tagtttttctgctggggaggtttgtttacctttggctgggagaggttcttccatcttaatgacttttg

SEQ ID NO: 122310 - DNA, 65 bp, Homo sapiens
ggaggtttgtttacctttggctgggagaggttcttccatcttaatgacttttggaggaacctttt

SEQ ID NO: 122311 - DNA, 66 bp, Homo sapiens
tttgtttacctttggctgggagaggttcttccatcttaatgacttttggaggaacctttttttctg

SEQ ID NO: 122312 - DNA, 66 bp, Homo sapiens
ctgggagaggttcttccatcttaatgacttttggaggaacctttttttctggaactggtttctttg

SEQ ID NO: 122313 - DNA, 66 bp, Homo sapiens
agaggttcttccatcttaatgacttttggaggaacctttttttctggaactggtttctttggctct

SEQ ID NO: 122314 - DNA, 67 bp, Homo sapiens
tcttaatgacttttggaggaacctttttttctggaactggtttctttggctcttctggcacttaaaa

SEQ ID NO: 122315 - DNA, 66 bp, Homo sapiens
acttttggaggaacctttttttctggaactggtttctttggctcttctggcacttaaaagatacca

SEQ ID NO: 122316 - DNA, 71 bp, Homo sapiens
ctttttttctggaactggtttctttggctcttctggcacttaaaagataccaggcaataccatcaaacata

SEQ ID NO: 122317 - DNA, 74 bp, Homo sapiens
tggaactggtttctttggctcttctggcacttaaaagataccaggcaataccatcaaacatacgatatggaaaa

SEQ ID NO: 122318 - DNA, 68 bp, Homo sapiens
tgtatcaatttaagattaaaaaaagacagtcttgagaataaaataaaatccaatatacctttaggtgg

SEQ ID NO: 122319 - DNA, 65 bp, Homo sapiens
gattaaaaaaagacagtcttgagaataaaataaaatccaatatacctttaggtgggggcaccttt

SEQ ID NO: 122320 - DNA, 66 bp, Homo sapiens
gacagtcttgagaataaaataaaatccaatatacctttaggtgggggcaccttttcctttttagga

SEQ ID NO: 122321 - DNA, 65 bp, Homo sapiens
agaataaaataaaatccaatatacctttaggtgggggcaccttttcctttttaggaactggagca

SEQ ID NO: 122322 - DNA, 64 bp, Homo sapiens
ataaaatccaatatacctttaggtgggggcaccttttcctttttaggaactggagcaggaactt

SEQ ID NO: 122323 - DNA, 64 bp, Homo sapiens
aatatacctttaggtgggggcaccttttcctttttaggaactggagcaggaactttcttttctg

SEQ ID NO: 122324 - DNA, 65 bp, Homo sapiens
tttaggtgggggcaccttttcctttttaggaactggagcaggaactttcttttctggcacaattt

SEQ ID NO: 122325 - DNA, 68 bp, Homo sapiens
cttttcctttttaggaactggagcaggaactttcttttctggcacaattttcttaggtgcttcaggaa

SEQ ID NO: 122326 - DNA, 69 bp, Homo sapiens
tttttaggaactggagcaggaactttcttttctggcacaattttcttaggtgcttcaggaactttagaa

SEQ ID NO: 122327 - DNA, 69 bp, Homo sapiens
gagcaggaactttcttttctggcacaattttcttaggtgcttcaggaactttagaaagattaggtttaa

SEQ ID NO: 122328 - DNA, 69 bp, Homo sapiens
ctttcttttctggcacaattttcttaggtgcttcaggaactttagaaagattaggtttaagaatatgag

SEQ ID NO: 122329 - DNA, 71 bp, Homo sapiens
ctggcacaattttcttaggtgcttcaggaactttagaaagattaggtttaagaatatgagtttgccttaca

SEQ ID NO: 122330 - DNA, 71 bp, Homo sapiens
ggtattattatatacattaaaataaatagtgttgcatttctttgaaagaaatcatacctttagccggtgga

SEQ ID NO: 122331 - DNA, 72 bp, Homo sapiens
tatacattaaaataaatagtgttgcatttctttgaaagaaatcatacctttagccggtggaggctcctctat

SEQ ID NO: 122332 - DNA, 71 bp, Homo sapiens
aaaataaatagtgttgcatttctttgaaagaaatcatacctttagccggtggaggctcctctattttagca

SEQ ID NO: 122333 - DNA, 71 bp, Homo sapiens
atagtgttgcatttctttgaaagaaatcatacctttagccggtggaggctcctctattttagcaggaattt

SEQ ID NO: 122334 - DNA, 70 bp, Homo sapiens
tttgaaagaaatcatacctttagccggtggaggctcctctattttagcaggaatttttggtttcagtaca

SEQ ID NO: 122335 - DNA, 68 bp, Homo sapiens
agaaatcatacctttagccggtggaggctcctctattttagcaggaatttttggtttcagtacaattt

SEQ ID NO: 122336 - DNA, 67 bp, Homo sapiens
acctttagccggtggaggctcctctattttagcaggaatttttggtttcagtacaattttcttctcc

SEQ ID NO: 122337 - DNA, 72 bp, Homo sapiens
aggctcctctattttagcaggaatttttggtttcagtacaattttcttctcctgcctctctgtcacttgaaa

SEQ ID NO: 122338 - DNA, 72 bp, Homo sapiens
ctctattttagcaggaatttttggtttcagtacaattttcttctcctgcctctctgtcacttgaaaagatta

SEQ ID NO: 122339 - DNA, 72 bp, Homo sapiens
agcaggaatttttggtttcagtacaattttcttctcctgcctctctgtcacttgaaaagattataaaatatg

SEQ ID NO: 122340 - DNA, 73 bp, Homo sapiens
ggtttcagtacaattttcttctcctgcctctctgtcacttgaaaagattataaaatatgtttgtagaaatgtc

SEQ ID NO: 122341 - DNA, 74 bp, Homo sapiens
gtacaattttcttctcctgcctctctgtcacttgaaaagattataaaatatgtttgtagaaatgtctagatttc

SEQ ID NO: 122342 - DNA, 75 bp, Homo sapiens
aacataaagaaggagacaagctaacatagggataaaactaattaaagagtcagcataccttcagctggctcagct

SEQ ID NO: 122343 - DNA, 78 bp, Homo sapiens
gagacaagctaacatagggataaaactaattaaagagtcagcataccttcagctggctcagcttccactctcttagaa

SEQ ID NO: 122344 - DNA, 76 bp, Homo sapiens
aagctaacatagggataaaactaattaaagagtcagcataccttcagctggctcagcttccactctcttagaaata

SEQ ID NO: 122345 - DNA, 77 bp, Homo sapiens
ataaaactaattaaagagtcagcataccttcagctggctcagcttccactctcttagaaataatgtgcagcttttct

SEQ ID NO: 122346 - DNA, 81 bp, Homo sapiens
taattaaagagtcagcataccttcagctggctcagcttccactctcttagaaataatgtgcagcttttcttccacaacata

SEQ ID NO: 122347 - DNA, 81 bp, Homo sapiens
agcataccttcagctggctcagcttccactctcttagaaataatgtgcagcttttcttccacaacatattcctcaggctct

SEQ ID NO: 122348 - DNA, 80 bp, Homo sapiens
agctggctcagcttccactctcttagaaataatgtgcagcttttcttccacaacatattcctcaggctcttccatcactt

SEQ ID NO: 122349 - DNA, 77 bp, Homo sapiens
agcttccactctcttagaaataatgtgcagcttttcttccacaacatattcctcaggctcttccatcactttaaaga

SEQ ID NO: 122350 - DNA, 77 bp, Homo sapiens
tcttagaaataatgtgcagcttttcttccacaacatattcctcaggctcttccatcactttaaagacagcagtttta

SEQ ID NO: 122351 - DNA, 75 bp, Homo sapiens
aaataatgtgcagcttttcttccacaacatattcctcaggctcttccatcactttaaagacagcagttttaaaga

SEQ ID NO: 122352 - DNA, 72 bp, Homo sapiens
agcttttcttccacaacatattcctcaggctcttccatcactttaaagacagcagttttaaagaagataaat

SEQ ID NO: 122353 - DNA, 73 bp, Homo sapiens
ttccacaacatattcctcaggctcttccatcactttaaagacagcagttttaaagaagataaattacagtgtt

SEQ ID NO: 122354 - DNA, 76 bp, Homo sapiens
aacacctcatcaaaaccccagatcatctctagcttatttgcattgtttaccttcatattctgtaacctctgcttct

SEQ ID NO: 122355 - DNA, 74 bp, Homo sapiens
aaaaccccagatcatctctagcttatttgcattgtttaccttcatattctgtaacctctgcttcttcctcctcc

SEQ ID NO: 122356 - DNA, 73 bp, Homo sapiens
cttcctcctcctctctttcttcttctctataaactgaaatggacacaccttcctcctcttctgagtaactcca

SEQ ID NO: 122357 - DNA, 76 bp, Homo sapiens
ctctctttcttcttctctataaactgaaatggacacaccttcctcctcttctgagtaactccattcctcctctgca

SEQ ID NO: 122358 - DNA, 76 bp, Homo sapiens
tcttctctataaactgaaatggacacaccttcctcctcttctgagtaactccattcctcctctgcagatactttaa

SEQ ID NO: 122359 - DNA, 75 bp, Homo sapiens
tataaactgaaatggacacaccttcctcctcttctgagtaactccattcctcctctgcagatactttaaaagata

SEQ ID NO: 122360 - DNA, 71 bp, Homo sapiens
aaatggacacaccttcctcctcttctgagtaactccattcctcctctgcagatactttaaaagataaggtt

SEQ ID NO: 122361 - DNA, 72 bp, Homo sapiens
cttcctcctcttctgagtaactccattcctcctctgcagatactttaaaagataaggtttcatttaaattca

SEQ ID NO: 122362 - DNA, 72 bp, Homo sapiens
ggaaacacacacaaactcatttatcccctgacttccgattatataccttcgtgccgcgtgacttccactctt

SEQ ID NO: 122363 - DNA, 72 bp, Homo sapiens
acacaaactcatttatcccctgacttccgattatataccttcgtgccgcgtgacttccactctttgaggaac

SEQ ID NO: 122364 - DNA, 73 bp, Homo sapiens
atttatcccctgacttccgattatataccttcgtgccgcgtgacttccactctttgaggaactgcgaaggata

SEQ ID NO: 122365 - DNA, 72 bp, Homo sapiens
acttccgattatataccttcgtgccgcgtgacttccactctttgaggaactgcgaaggatagtttttcttca

SEQ ID NO: 122366 - DNA, 73 bp, Homo sapiens
attatataccttcgtgccgcgtgacttccactctttgaggaactgcgaaggatagtttttcttcagcaacaaa

SEQ ID NO: 122367 - DNA, 73 bp, Homo sapiens
ttcgtgccgcgtgacttccactctttgaggaactgcgaaggatagtttttcttcagcaacaaatctcttttct

SEQ ID NO: 122368 - DNA, 71 bp, Homo sapiens
acttccactctttgaggaactgcgaaggatagtttttcttcagcaacaaatctcttttcttctacaacagt

SEQ ID NO: 122369 - DNA, 71 bp, Homo sapiens
ctttgaggaactgcgaaggatagtttttcttcagcaacaaatctcttttcttctacaacagttttcttaga

SEQ ID NO: 122370 - DNA, 73 bp, Homo sapiens
tgcgaaggatagtttttcttcagcaacaaatctcttttcttctacaacagttttcttagagacttcagcttta

SEQ ID NO: 122371 - DNA, 71 bp, Homo sapiens
ggatagtttttcttcagcaacaaatctcttttcttctacaacagttttcttagagacttcagctttaagaa

SEQ ID NO: 122372 - DNA, 70 bp, Homo sapiens
cttcagcaacaaatctcttttcttctacaacagttttcttagagacttcagctttaagaaagtgttaaag

SEQ ID NO: 122373 - DNA, 68 bp, Homo sapiens
tctcttttcttctacaacagttttcttagagacttcagctttaagaaagtgttaaagttgaagtttaa

SEQ ID NO: 122374 - DNA, 70 bp, Homo sapiens
tttttttttgtcagaggattgaggcaaatcctacctcggggaggaggagctttcttagcgacaggaactg

SEQ ID NO: 122375 - DNA, 75 bp, Homo sapiens
ttgtcagaggattgaggcaaatcctacctcggggaggaggagctttcttagcgacaggaactggcactgcaactt

SEQ ID NO: 122376 - DNA, 74 bp, Homo sapiens
attgaggcaaatcctacctcggggaggaggagctttcttagcgacaggaactggcactgcaactttctcctctg

SEQ ID NO: 122377 - DNA, 71 bp, Homo sapiens
aaatcctacctcggggaggaggagctttcttagcgacaggaactggcactgcaactttctcctctgggacg

SEQ ID NO: 122378 - DNA, 73 bp, Homo sapiens
gggaggaggagctttcttagcgacaggaactggcactgcaactttctcctctgggacgggtttcttaggcaga

SEQ ID NO: 122379 - DNA, 75 bp, Homo sapiens
tttcttagcgacaggaactggcactgcaactttctcctctgggacgggtttcttaggcagagctggcactttaga

SEQ ID NO: 122380 - DNA, 77 bp, Homo sapiens
tagcgacaggaactggcactgcaactttctcctctgggacgggtttcttaggcagagctggcactttagagacatta

SEQ ID NO: 122381 - DNA, 76 bp, Homo sapiens
gcactgcaactttctcctctgggacgggtttcttaggcagagctggcactttagagacattatgcacttttagaaa

SEQ ID NO: 122382 - DNA, 71 bp, Homo sapiens
aactttctcctctgggacgggtttcttaggcagagctggcactttagagacattatgcacttttagaaatt

SEQ ID NO: 122383 - DNA, 68 bp, Homo sapiens
aaactaacaaaatcactggaacataaagacagttcttgggaagatggagaaacaataccttttggtgg

SEQ ID NO: 122384 - DNA, 69 bp, Homo sapiens
aaatcactggaacataaagacagttcttgggaagatggagaaacaataccttttggtggtggtggaact

SEQ ID NO: 122385 - DNA, 68 bp, Homo sapiens
aacataaagacagttcttgggaagatggagaaacaataccttttggtggtggtggaacttcttcctcc

SEQ ID NO: 122386 - DNA, 67 bp, Homo sapiens
agttcttgggaagatggagaaacaataccttttggtggtggtggaacttcttcctccttccgaggaa

SEQ ID NO: 122387 - DNA, 65 bp, Homo sapiens
atggagaaacaataccttttggtggtggtggaacttcttcctccttccgaggaacaggtttcctt

SEQ ID NO: 122388 - DNA, 65 bp, Homo sapiens
aaacaataccttttggtggtggtggaacttcttcctccttccgaggaacaggtttcctttcttca

SEQ ID NO: 122389 - DNA, 66 bp, Homo sapiens
tggtggtggtggaacttcttcctccttccgaggaacaggtttcctttcttcaggaactttcttctt

SEQ ID NO: 122390 - DNA, 65 bp, Homo sapiens
aacttcttcctccttccgaggaacaggtttcctttcttcaggaactttcttctttggtatttctg

SEQ ID NO: 122391 - DNA, 67 bp, Homo sapiens
ttcctccttccgaggaacaggtttcctttcttcaggaactttcttctttggtatttctggcacttaa

SEQ ID NO: 122392 - DNA, 68 bp, Homo sapiens
ggaacaggtttcctttcttcaggaactttcttctttggtatttctggcacttaaaggatagtattgaa

SEQ ID NO: 122393 - DNA, 67 bp, Homo sapiens
ggtttcctttcttcaggaactttcttctttggtatttctggcacttaaaggatagtattgaatttta

SEQ ID NO: 122394 - DNA, 68 bp, Homo sapiens
cttcaggaactttcttctttggtatttctggcacttaaaggatagtattgaattttaaaatttgtcaa

SEQ ID NO: 122395 - DNA, 72 bp, Homo sapiens
aattaaagaggcttgaaggaaagacaaggttatttcatggagatgggattaagtacctgctggtggtggaga

SEQ ID NO: 122396 - DNA, 75 bp, Homo sapiens
gcttgaaggaaagacaaggttatttcatggagatgggattaagtacctgctggtggtggagattcctctctttga

SEQ ID NO: 122397 - DNA, 73 bp, Homo sapiens
aaagacaaggttatttcatggagatgggattaagtacctgctggtggtggagattcctctctttgagttacaa

SEQ ID NO: 122398 - DNA, 73 bp, Homo sapiens
ttatttcatggagatgggattaagtacctgctggtggtggagattcctctctttgagttacaatggttatttt

SEQ ID NO: 122399 - DNA, 72 bp, Homo sapiens
atggagatgggattaagtacctgctggtggtggagattcctctctttgagttacaatggttattttttcttc

SEQ ID NO: 122400 - DNA, 72 bp, Homo sapiens
attaagtacctgctggtggtggagattcctctctttgagttacaatggttattttttcttctgtcacaactc

SEQ ID NO: 122401 - DNA, 73 bp, Homo sapiens
tggtggtggagattcctctctttgagttacaatggttattttttcttctgtcacaactcccttctgtacttca

SEQ ID NO: 122402 - DNA, 70 bp, Homo sapiens
agattcctctctttgagttacaatggttattttttcttctgtcacaactcccttctgtacttcaggaact

SEQ ID NO: 122403 - DNA, 71 bp, Homo sapiens
tttgagttacaatggttattttttcttctgtcacaactcccttctgtacttcaggaacttgaagagacatt

SEQ ID NO: 122404 - DNA, 70 bp, Homo sapiens
gttacaatggttattttttcttctgtcacaactcccttctgtacttcaggaacttgaagagacattttta

SEQ ID NO: 122405 - DNA, 71 bp, Homo sapiens
ttttcttctgtcacaactcccttctgtacttcaggaacttgaagagacatttttagaattgactttatatt

SEQ ID NO: 122406 - DNA, 72 bp, Homo sapiens
ttctgtcacaactcccttctgtacttcaggaacttgaagagacatttttagaattgactttatattttctaa

SEQ ID NO: 122407 - DNA, 70 bp, Homo sapiens
acacaacatattttgtatcaaagataaaagatagggctttacgtcgaaagccactgtacctttagctggg

SEQ ID NO: 122408 - DNA, 68 bp, Homo sapiens
tatcaaagataaaagatagggctttacgtcgaaagccactgtacctttagctgggggagcttcctttt

SEQ ID NO: 122409 - DNA, 66 bp, Homo sapiens
aagataaaagatagggctttacgtcgaaagccactgtacctttagctgggggagcttcctttttct

SEQ ID NO: 122410 - DNA, 68 bp, Homo sapiens
atagggctttacgtcgaaagccactgtacctttagctgggggagcttcctttttctttgcaacaggaa

SEQ ID NO: 122411 - DNA, 67 bp, Homo sapiens
gaaagccactgtacctttagctgggggagcttcctttttctttgcaacaggaacgggaatcttttct

SEQ ID NO: 122412 - DNA, 67 bp, Homo sapiens
actgtacctttagctgggggagcttcctttttctttgcaacaggaacgggaatcttttcttcaggga

SEQ ID NO: 122413 - DNA, 67 bp, Homo sapiens
tttagctgggggagcttcctttttctttgcaacaggaacgggaatcttttcttcagggacaggtttc

SEQ ID NO: 122414 - DNA, 68 bp, Homo sapiens
ttcctttttctttgcaacaggaacgggaatcttttcttcagggacaggtttctttggcacctctggga

SEQ ID NO: 122415 - DNA, 67 bp, Homo sapiens
tttgcaacaggaacgggaatcttttcttcagggacaggtttctttggcacctctgggacttaaagtt

SEQ ID NO: 122416 - DNA, 64 bp, Homo sapiens
aacaggaacgggaatcttttcttcagggacaggtttctttggcacctctgggacttaaagtttt

SEQ ID NO: 122417 - DNA, 67 bp, Homo sapiens
aatcttttcttcagggacaggtttctttggcacctctgggacttaaagtttttgaaacacaatgtta

SEQ ID NO: 122418 - DNA, 71 bp, Homo sapiens
agggacaggtttctttggcacctctgggacttaaagtttttgaaacacaatgttagttcagacatatatca

SEQ ID NO: 122419 - DNA, 76 bp, Homo sapiens
agaaagcaaaaggctggcacttggagcaaagagtctccccatcattggctctggcgtaccttttgggggagcagca

SEQ ID NO: 122420 - DNA, 75 bp, Homo sapiens
tggcacttggagcaaagagtctccccatcattggctctggcgtaccttttgggggagcagcaggttccttcttag

SEQ ID NO: 122421 - DNA, 74 bp, Homo sapiens
agcaaagagtctccccatcattggctctggcgtaccttttgggggagcagcaggttccttcttaggcacaggaa

SEQ ID NO: 122422 - DNA, 72 bp, Homo sapiens
tccccatcattggctctggcgtaccttttgggggagcagcaggttccttcttaggcacaggaactggctttt

SEQ ID NO: 122423 - DNA, 72 bp, Homo sapiens
atcattggctctggcgtaccttttgggggagcagcaggttccttcttaggcacaggaactggctttttctcc

SEQ ID NO: 122424 - DNA, 69 bp, Homo sapiens
gtaccttttgggggagcagcaggttccttcttaggcacaggaactggctttttctcctctggcacgggt

SEQ ID NO: 122425 - DNA, 70 bp, Homo sapiens
ggggagcagcaggttccttcttaggcacaggaactggctttttctcctctggcacgggtttcttgggaac

SEQ ID NO: 122426 - DNA, 68 bp, Homo sapiens
aggttccttcttaggcacaggaactggctttttctcctctggcacgggtttcttgggaacctcaggaa

SEQ ID NO: 122427 - DNA, 69 bp, Homo sapiens
ttaggcacaggaactggctttttctcctctggcacgggtttcttgggaacctcaggaactttaaagata

SEQ ID NO: 122428 - DNA, 69 bp, Homo sapiens
gaactggctttttctcctctggcacgggtttcttgggaacctcaggaactttaaagatacaattgttga

SEQ ID NO: 122429 - DNA, 67 bp, Homo sapiens
ctttttctcctctggcacgggtttcttgggaacctcaggaactttaaagatacaattgttgaaataa

SEQ ID NO: 122430 - DNA, 71 bp, Homo sapiens
tctggcacgggtttcttgggaacctcaggaactttaaagatacaattgttgaaataatgtggaatattcta

SEQ ID NO: 122431 - DNA, 71 bp, Homo sapiens
tagaaaaagatacaagatggatgctaagaattatttttttcacaaatattattctaccttttggtgctggg

SEQ ID NO: 122432 - DNA, 70 bp, Homo sapiens
acaagatggatgctaagaattatttttttcacaaatattattctaccttttggtgctgggggctccactt

SEQ ID NO: 122433 - DNA, 66 bp, Homo sapiens
gctaagaattatttttttcacaaatattattctaccttttggtgctgggggctccacttttttagg

SEQ ID NO: 122434 - DNA, 66 bp, Homo sapiens
tttttttcacaaatattattctaccttttggtgctgggggctccacttttttagggataggaacag

SEQ ID NO: 122435 - DNA, 66 bp, Homo sapiens
aaatattattctaccttttggtgctgggggctccacttttttagggataggaacaggggccacttc

SEQ ID NO: 122436 - DNA, 68 bp, Homo sapiens
ttattctaccttttggtgctgggggctccacttttttagggataggaacaggggccacttcttctgga

SEQ ID NO: 122437 - DNA, 70 bp, Homo sapiens
ttttggtgctgggggctccacttttttagggataggaacaggggccacttcttctggagctggtttctca

SEQ ID NO: 122438 - DNA, 70 bp, Homo sapiens
ctccacttttttagggataggaacaggggccacttcttctggagctggtttctcaggtagctcagggact

SEQ ID NO: 122439 - DNA, 69 bp, Homo sapiens
tttttagggataggaacaggggccacttcttctggagctggtttctcaggtagctcagggactttaaaa

SEQ ID NO: 122440 - DNA, 70 bp, Homo sapiens
gaacaggggccacttcttctggagctggtttctcaggtagctcagggactttaaaagaaaagtgccattt

SEQ ID NO: 122441 - DNA, 70 bp, Homo sapiens
ccacttcttctggagctggtttctcaggtagctcagggactttaaaagaaaagtgccatttttgagaaag

SEQ ID NO: 122442 - DNA, 74 bp, Homo sapiens
tggagctggtttctcaggtagctcagggactttaaaagaaaagtgccatttttgagaaagtgtgcatttgacaa

SEQ ID NO: 122443 - DNA, 64 bp, Homo sapiens
tggtatttgtactaatttttattaaaagagtttaaacttagaatgaattactaatacctttagg

SEQ ID NO: 122444 - DNA, 64 bp, Homo sapiens
ctaatttttattaaaagagtttaaacttagaatgaattactaatacctttaggtggtggttcaa

SEQ ID NO: 122445 - DNA, 64 bp, Homo sapiens
ttaaaagagtttaaacttagaatgaattactaatacctttaggtggtggttcaacccttttgga

SEQ ID NO: 122446 - DNA, 67 bp, Homo sapiens
ttaaacttagaatgaattactaatacctttaggtggtggttcaacccttttggaaatggcaacgtga

SEQ ID NO: 122447 - DNA, 67 bp, Homo sapiens
gaatgaattactaatacctttaggtggtggttcaacccttttggaaatggcaacgtgaattttctct

SEQ ID NO: 122448 - DNA, 67 bp, Homo sapiens
attactaatacctttaggtggtggttcaacccttttggaaatggcaacgtgaattttctcttcagta

SEQ ID NO: 122449 - DNA, 66 bp, Homo sapiens
tttaggtggtggttcaacccttttggaaatggcaacgtgaattttctcttcagtaacaatttcctt

SEQ ID NO: 122450 - DNA, 67 bp, Homo sapiens
tggttcaacccttttggaaatggcaacgtgaattttctcttcagtaacaatttccttttgtacctcg

SEQ ID NO: 122451 - DNA, 66 bp, Homo sapiens
ttggaaatggcaacgtgaattttctcttcagtaacaatttccttttgtacctcggggacttaaaaa

SEQ ID NO: 122452 - DNA, 66 bp, Homo sapiens
ggcaacgtgaattttctcttcagtaacaatttccttttgtacctcggggacttaaaaaaatgtaca

SEQ ID NO: 122453 - DNA, 66 bp, Homo sapiens
ttctcttcagtaacaatttccttttgtacctcggggacttaaaaaaatgtacattttaattactga

SEQ ID NO: 122454 - DNA, 69 bp, Homo sapiens
tcagtaacaatttccttttgtacctcggggacttaaaaaaatgtacattttaattactgatatgccatg

SEQ ID NO: 122455 - DNA, 71 bp, Homo sapiens
ataaaaatctgcctaaaacccttccatttgagcccccacattccagtttgccttatacctgtgactgacac

SEQ ID NO: 122456 - DNA, 71 bp, Homo sapiens
cctaaaacccttccatttgagcccccacattccagtttgccttatacctgtgactgacacctcctcctctg

SEQ ID NO: 122457 - DNA, 77 bp, Homo sapiens
ttccatttgagcccccacattccagtttgccttatacctgtgactgacacctcctcctctgtgtgagaagcaaagaa

SEQ ID NO: 122458 - DNA, 78 bp, Homo sapiens
ccacattccagtttgccttatacctgtgactgacacctcctcctctgtgtgagaagcaaagaacatcttttcttctga

SEQ ID NO: 122459 - DNA, 75 bp, Homo sapiens
agtttgccttatacctgtgactgacacctcctcctctgtgtgagaagcaaagaacatcttttcttctgaaataac

SEQ ID NO: 122460 - DNA, 76 bp, Homo sapiens
ttatacctgtgactgacacctcctcctctgtgtgagaagcaaagaacatcttttcttctgaaataaccatcttctt

SEQ ID NO: 122461 - DNA, 80 bp, Homo sapiens
tgacacctcctcctctgtgtgagaagcaaagaacatcttttcttctgaaataaccatcttctttgtatgcacagctggta

SEQ ID NO: 122462 - DNA, 77 bp, Homo sapiens
tcctctgtgtgagaagcaaagaacatcttttcttctgaaataaccatcttctttgtatgcacagctggtactttaaa

SEQ ID NO: 122463 - DNA, 76 bp, Homo sapiens
tgagaagcaaagaacatcttttcttctgaaataaccatcttctttgtatgcacagctggtactttaaagagagtat

SEQ ID NO: 122464 - DNA, 76 bp, Homo sapiens
gcaaagaacatcttttcttctgaaataaccatcttctttgtatgcacagctggtactttaaagagagtatttcaca

SEQ ID NO: 122465 - DNA, 74 bp, Homo sapiens
tcttctgaaataaccatcttctttgtatgcacagctggtactttaaagagagtatttcacattagtattccttt

SEQ ID NO: 122466 - DNA, 71 bp, Homo sapiens
gaaataaccatcttctttgtatgcacagctggtactttaaagagagtatttcacattagtattcctttttt

SEQ ID NO: 122467 - DNA, 73 bp, Homo sapiens
catgtccatacacataaataaaaaaattttgaacttgtagctgaaacacaaagatgtatacctttcacttcaa

SEQ ID NO: 122468 - DNA, 69 bp, Homo sapiens
taaataaaaaaattttgaacttgtagctgaaacacaaagatgtatacctttcacttcaataacttcttc

SEQ ID NO: 122469 - DNA, 72 bp, Homo sapiens
aattttgaacttgtagctgaaacacaaagatgtatacctttcacttcaataacttcttcctgtactggagtc

SEQ ID NO: 122470 - DNA, 71 bp, Homo sapiens
aacttgtagctgaaacacaaagatgtatacctttcacttcaataacttcttcctgtactggagtccgggaa

SEQ ID NO: 122471 - DNA, 67 bp, Homo sapiens
aaacacaaagatgtatacctttcacttcaataacttcttcctgtactggagtccgggaaggtttttg

SEQ ID NO: 122472 - DNA, 68 bp, Homo sapiens
aaagatgtatacctttcacttcaataacttcttcctgtactggagtccgggaaggtttttgtggaaca

SEQ ID NO: 122473 - DNA, 68 bp, Homo sapiens
tttcacttcaataacttcttcctgtactggagtccgggaaggtttttgtggaacaatcttctttgaaa

SEQ ID NO: 122474 - DNA, 67 bp, Homo sapiens
ataacttcttcctgtactggagtccgggaaggtttttgtggaacaatcttctttgaaacttcaggta

SEQ ID NO: 122475 - DNA, 65 bp, Homo sapiens
ctgtactggagtccgggaaggtttttgtggaacaatcttctttgaaacttcaggtactttaaaaa

SEQ ID NO: 122476 - DNA, 66 bp, Homo sapiens
ggagtccgggaaggtttttgtggaacaatcttctttgaaacttcaggtactttaaaaatatgtaca

SEQ ID NO: 122477 - DNA, 67 bp, Homo sapiens
gaaggtttttgtggaacaatcttctttgaaacttcaggtactttaaaaatatgtacaaatatatttg

SEQ ID NO: 122478 - DNA, 69 bp, Homo sapiens
gtggaacaatcttctttgaaacttcaggtactttaaaaatatgtacaaatatatttgtattttgaagaa

SEQ ID NO: 122479 - DNA, 73 bp, Homo sapiens
gagtatagatcagtaaacatattacttgtgtacatgggtgctaggaatgttttaaataatacctttggtgact

SEQ ID NO: 122480 - DNA, 70 bp, Homo sapiens
cagtaaacatattacttgtgtacatgggtgctaggaatgttttaaataatacctttggtgacttgaactt

SEQ ID NO: 122481 - DNA, 70 bp, Homo sapiens
tacttgtgtacatgggtgctaggaatgttttaaataatacctttggtgacttgaactttttcttcctcca

SEQ ID NO: 122482 - DNA, 70 bp, Homo sapiens
tacatgggtgctaggaatgttttaaataatacctttggtgacttgaactttttcttcctccattcttcga

SEQ ID NO: 122483 - DNA, 67 bp, Homo sapiens
ctaggaatgttttaaataatacctttggtgacttgaactttttcttcctccattcttcgagaagtct

SEQ ID NO: 122484 - DNA, 66 bp, Homo sapiens
tttaaataatacctttggtgacttgaactttttcttcctccattcttcgagaagtcttttcaattt

SEQ ID NO: 122485 - DNA, 69 bp, Homo sapiens
ttggtgacttgaactttttcttcctccattcttcgagaagtcttttcaattttttcaattactggcttc

SEQ ID NO: 122486 - DNA, 67 bp, Homo sapiens
gaactttttcttcctccattcttcgagaagtcttttcaattttttcaattactggcttctttataac

SEQ ID NO: 122487 - DNA, 73 bp, Homo sapiens
tcctccattcttcgagaagtcttttcaattttttcaattactggcttctttataactgcaagcattttagaga

SEQ ID NO: 122488 - DNA, 72 bp, Homo sapiens
cttcgagaagtcttttcaattttttcaattactggcttctttataactgcaagcattttagagaaattgcag

SEQ ID NO: 122489 - DNA, 71 bp, Homo sapiens
cttttcaattttttcaattactggcttctttataactgcaagcattttagagaaattgcagtacttttaga

SEQ ID NO: 122490 - DNA, 72 bp, Homo sapiens
ttttcaattactggcttctttataactgcaagcattttagagaaattgcagtacttttagaattcctattaa

SEQ ID NO: 122491 - DNA, 76 bp, Homo sapiens
gctgccaaacaagccatgataatgatgttgatgctctagtctatttaaatatttctaattacttacctttaggagg

SEQ ID NO: 122492 - DNA, 75 bp, Homo sapiens
aagccatgataatgatgttgatgctctagtctatttaaatatttctaattacttacctttaggaggtggtggtgc

SEQ ID NO: 122493 - DNA, 73 bp, Homo sapiens
gataatgatgttgatgctctagtctatttaaatatttctaattacttacctttaggaggtggtggtgctttct

SEQ ID NO: 122494 - DNA, 70 bp, Homo sapiens
gttgatgctctagtctatttaaatatttctaattacttacctttaggaggtggtggtgctttcttttcag

SEQ ID NO: 122495 - DNA, 67 bp, Homo sapiens
tatttaaatatttctaattacttacctttaggaggtggtggtgctttcttttcaggtactttggctg

SEQ ID NO: 122496 - DNA, 65 bp, Homo sapiens
atttctaattacttacctttaggaggtggtggtgctttcttttcaggtactttggctggaacttt

SEQ ID NO: 122497 - DNA, 68 bp, Homo sapiens
aattacttacctttaggaggtggtggtgctttcttttcaggtactttggctggaacttttctctcatg

SEQ ID NO: 122498 - DNA, 72 bp, Homo sapiens
tttaggaggtggtggtgctttcttttcaggtactttggctggaacttttctctcatgtgattctgaaataaa

SEQ ID NO: 122499 - DNA, 73 bp, Homo sapiens
gtgctttcttttcaggtactttggctggaacttttctctcatgtgattctgaaataaaaacacaggaataaga

SEQ ID NO: 122500 - DNA, 71 bp, Homo sapiens
ttcttttcaggtactttggctggaacttttctctcatgtgattctgaaataaaaacacaggaataagaagg

SEQ ID NO: 122501 - DNA, 73 bp, Homo sapiens
ttggctggaacttttctctcatgtgattctgaaataaaaacacaggaataagaagggatgcttaaataggtaa

SEQ ID NO: 122502 - DNA, 71 bp, Homo sapiens
ggaacttttctctcatgtgattctgaaataaaaacacaggaataagaagggatgcttaaataggtaagttc

SEQ ID NO: 122503 - DNA, 71 bp, Homo sapiens
gagcaaaaatgaagaaaagagggaaacaagtcattcagtttatacataccttcatagacctccttttgaac

SEQ ID NO: 122504 - DNA, 70 bp, Homo sapiens
gaaaagagggaaacaagtcattcagtttatacataccttcatagacctccttttgaacttgaattacttc

SEQ ID NO: 122505 - DNA, 69 bp, Homo sapiens
gagggaaacaagtcattcagtttatacataccttcatagacctccttttgaacttgaattacttccctt

SEQ ID NO: 122506 - DNA, 69 bp, Homo sapiens
ttcagtttatacataccttcatagacctccttttgaacttgaattacttccctttcttggtaagcctct

SEQ ID NO: 122507 - DNA, 69 bp, Homo sapiens
tttatacataccttcatagacctccttttgaacttgaattacttccctttcttggtaagcctcttccca

SEQ ID NO: 122508 - DNA, 68 bp, Homo sapiens
ccttcatagacctccttttgaacttgaattacttccctttcttggtaagcctcttcccactcttcctc

SEQ ID NO: 122509 - DNA, 68 bp, Homo sapiens
tccttttgaacttgaattacttccctttcttggtaagcctcttcccactcttcctccccttcgtcata

SEQ ID NO: 122510 - DNA, 67 bp, Homo sapiens
aacttgaattacttccctttcttggtaagcctcttcccactcttcctccccttcgtcatagccttct

SEQ ID NO: 122511 - DNA, 69 bp, Homo sapiens
cctttcttggtaagcctcttcccactcttcctccccttcgtcatagccttcttccctttcatagtattc

SEQ ID NO: 122512 - DNA, 72 bp, Homo sapiens
taagcctcttcccactcttcctccccttcgtcatagccttcttccctttcatagtattcttgcccttcttca

SEQ ID NO: 122513 - DNA, 70 bp, Homo sapiens
ttcccactcttcctccccttcgtcatagccttcttccctttcatagtattcttgcccttcttcaaaatct

SEQ ID NO: 122514 - DNA, 70 bp, Homo sapiens
ttcctccccttcgtcatagccttcttccctttcatagtattcttgcccttcttcaaaatcttcttcccat

SEQ ID NO: 122515 - DNA, 72 bp, Homo sapiens
tcatagccttcttccctttcatagtattcttgcccttcttcaaaatcttcttcccattcctcgtgaacttct

SEQ ID NO: 122516 - DNA, 68 bp, Homo sapiens
ttcttccctttcatagtattcttgcccttcttcaaaatcttcttcccattcctcgtgaacttcttttt

SEQ ID NO: 122517 - DNA, 70 bp, Homo sapiens
ctttcatagtattcttgcccttcttcaaaatcttcttcccattcctcgtgaacttcttttttagcttcta

SEQ ID NO: 122518 - DNA, 68 bp, Homo sapiens
attcttgcccttcttcaaaatcttcttcccattcctcgtgaacttcttttttagcttctaccttaatc

SEQ ID NO: 122519 - DNA, 71 bp, Homo sapiens
cttcaaaatcttcttcccattcctcgtgaacttcttttttagcttctaccttaatctcttcatagtcttca

SEQ ID NO: 122520 - DNA, 73 bp, Homo sapiens
ttcccattcctcgtgaacttcttttttagcttctaccttaatctcttcatagtcttcatctggttcttcataa

SEQ ID NO: 122521 - DNA, 71 bp, Homo sapiens
cctcgtgaacttcttttttagcttctaccttaatctcttcatagtcttcatctggttcttcataataaggt

SEQ ID NO: 122522 - DNA, 73 bp, Homo sapiens
cttttttagcttctaccttaatctcttcatagtcttcatctggttcttcataataaggttgttcaaatggctc

SEQ ID NO: 122523 - DNA, 77 bp, Homo sapiens
ttctaccttaatctcttcatagtcttcatctggttcttcataataaggttgttcaaatggctctgtgtatggttcta

SEQ ID NO: 122524 - DNA, 77 bp, Homo sapiens
taatctcttcatagtcttcatctggttcttcataataaggttgttcaaatggctctgtgtatggttctacctccagt

SEQ ID NO: 122525 - DNA, 76 bp, Homo sapiens
atagtcttcatctggttcttcataataaggttgttcaaatggctctgtgtatggttctacctccagttcgtcataa

SEQ ID NO: 122526 - DNA, 73 bp, Homo sapiens
atctggttcttcataataaggttgttcaaatggctctgtgtatggttctacctccagttcgtcataaggttct

SEQ ID NO: 122527 - DNA, 73 bp, Homo sapiens
taataaggttgttcaaatggctctgtgtatggttctacctccagttcgtcataaggttcttcgaaagattcaa

SEQ ID NO: 122528 - DNA, 74 bp, Homo sapiens
aggttgttcaaatggctctgtgtatggttctacctccagttcgtcataaggttcttcgaaagattcaatgaaga

SEQ ID NO: 122529 - DNA, 75 bp, Homo sapiens
aatggctctgtgtatggttctacctccagttcgtcataaggttcttcgaaagattcaatgaagactctcttctcc

SEQ ID NO: 122530 - DNA, 75 bp, Homo sapiens
tatggttctacctccagttcgtcataaggttcttcgaaagattcaatgaagactctcttctccttgtggactgct

SEQ ID NO: 122531 - DNA, 74 bp, Homo sapiens
tacctccagttcgtcataaggttcttcgaaagattcaatgaagactctcttctccttgtggactgcttgctttt

SEQ ID NO: 122532 - DNA, 76 bp, Homo sapiens
ataaggttcttcgaaagattcaatgaagactctcttctccttgtggactgcttgctttttctcatacacagcttct

SEQ ID NO: 122533 - DNA, 76 bp, Homo sapiens
ttcttcgaaagattcaatgaagactctcttctccttgtggactgcttgctttttctcatacacagcttctttttct

SEQ ID NO: 122534 - DNA, 76 bp, Homo sapiens
agattcaatgaagactctcttctccttgtggactgcttgctttttctcatacacagcttctttttctttctgaacc

SEQ ID NO: 122535 - DNA, 73 bp, Homo sapiens
aagactctcttctccttgtggactgcttgctttttctcatacacagcttctttttctttctgaacctctttct

SEQ ID NO: 122536 - DNA, 74 bp, Homo sapiens
ttgtggactgcttgctttttctcatacacagcttctttttctttctgaacctctttctttctggttatagtcat

SEQ ID NO: 122537 - DNA, 73 bp, Homo sapiens
gactgcttgctttttctcatacacagcttctttttctttctgaacctctttctttctggttatagtcattatt

SEQ ID NO: 122538 - DNA, 73 bp, Homo sapiens
tctcatacacagcttctttttctttctgaacctctttctttctggttatagtcattatttttacttcttcagc

SEQ ID NO: 122539 - DNA, 69 bp, Homo sapiens
gcttctttttctttctgaacctctttctttctggttatagtcattatttttacttcttcagctttagag

SEQ ID NO: 122540 - DNA, 73 bp, Homo sapiens
ctttctgaacctctttctttctggttatagtcattatttttacttcttcagctttagaggatacatcaatgat

SEQ ID NO: 122541 - DNA, 75 bp, Homo sapiens
cctctttctttctggttatagtcattatttttacttcttcagctttagaggatacatcaatgatttcaggagcta

SEQ ID NO: 122542 - DNA, 75 bp, Homo sapiens
ctttctggttatagtcattatttttacttcttcagctttagaggatacatcaatgatttcaggagctaaaataga

SEQ ID NO: 122543 - DNA, 78 bp, Homo sapiens
tcattatttttacttcttcagctttagaggatacatcaatgatttcaggagctaaaatagataaagatactattagca

SEQ ID NO: 122544 - DNA, 78 bp, Homo sapiens
ttacttcttcagctttagaggatacatcaatgatttcaggagctaaaatagataaagatactattagcatattaattc

SEQ ID NO: 122545 - DNA, 70 bp, Homo sapiens
ttaaaataagaatagttagcagaagtgcaaatctcaggaataaacagaataaaaataatttatctttatt

SEQ ID NO: 122546 - DNA, 71 bp, Homo sapiens
gaatagttagcagaagtgcaaatctcaggaataaacagaataaaaataatttatctttatttaccttttgc

SEQ ID NO: 122547 - DNA, 72 bp, Homo sapiens
tagcagaagtgcaaatctcaggaataaacagaataaaaataatttatctttatttaccttttgctggaatta

SEQ ID NO: 122548 - DNA, 68 bp, Homo sapiens
tctcaggaataaacagaataaaaataatttatctttatttaccttttgctggaattaaggtagtagga

SEQ ID NO: 122549 - DNA, 65 bp, Homo sapiens
aaacagaataaaaataatttatctttatttaccttttgctggaattaaggtagtaggaggtggag

SEQ ID NO: 122550 - DNA, 67 bp, Homo sapiens
aaaataatttatctttatttaccttttgctggaattaaggtagtaggaggtggaggcttcttgacaa

SEQ ID NO: 122551 - DNA, 69 bp, Homo sapiens
aatttatctttatttaccttttgctggaattaaggtagtaggaggtggaggcttcttgacaatctctgg

SEQ ID NO: 122552 - DNA, 69 bp, Homo sapiens
tatttaccttttgctggaattaaggtagtaggaggtggaggcttcttgacaatctctgggagtttaaaa

SEQ ID NO: 122553 - DNA, 70 bp, Homo sapiens
ttgctggaattaaggtagtaggaggtggaggcttcttgacaatctctgggagtttaaaaacataaaaatg

SEQ ID NO: 122554 - DNA, 69 bp, Homo sapiens
taaggtagtaggaggtggaggcttcttgacaatctctgggagtttaaaaacataaaaatgtgtgtttat

SEQ ID NO: 122555 - DNA, 70 bp, Homo sapiens
gaggtggaggcttcttgacaatctctgggagtttaaaaacataaaaatgtgtgtttatttttagattaca

SEQ ID NO: 122556 - DNA, 70 bp, Homo sapiens
gcttcttgacaatctctgggagtttaaaaacataaaaatgtgtgtttatttttagattacattattatta

SEQ ID NO: 122557 - DNA, 66 bp, Homo sapiens
gaatttaaaagttttggccaagaaaaaagtgttaagactgctttttgattaattataataccttca

SEQ ID NO: 122558 - DNA, 70 bp, Homo sapiens
gttttggccaagaaaaaagtgttaagactgctttttgattaattataataccttcacgtggtgtcatctc

SEQ ID NO: 122559 - DNA, 72 bp, Homo sapiens
gaaaaaagtgttaagactgctttttgattaattataataccttcacgtggtgtcatctctttgggctttgca

SEQ ID NO: 122560 - DNA, 71 bp, Homo sapiens
gttaagactgctttttgattaattataataccttcacgtggtgtcatctctttgggctttgcaacaacttt

SEQ ID NO: 122561 - DNA, 71 bp, Homo sapiens
ctttttgattaattataataccttcacgtggtgtcatctctttgggctttgcaacaacttttttggcatct

SEQ ID NO: 122562 - DNA, 73 bp, Homo sapiens
attaattataataccttcacgtggtgtcatctctttgggctttgcaacaacttttttggcatctttcttcaca

SEQ ID NO: 122563 - DNA, 71 bp, Homo sapiens
aataccttcacgtggtgtcatctctttgggctttgcaacaacttttttggcatctttcttcacagcctttt

SEQ ID NO: 122564 - DNA, 70 bp, Homo sapiens
gtgtcatctctttgggctttgcaacaacttttttggcatctttcttcacagcctttttggtaactaaaaa

SEQ ID NO: 122565 - DNA, 66 bp, Homo sapiens
ctctttgggctttgcaacaacttttttggcatctttcttcacagcctttttggtaactaaaaaaaa

SEQ ID NO: 122566 - DNA, 72 bp, Homo sapiens
ttttcgggtcagcagagtgaaattcttatttcgacatctaggtagatgaggtataataccttcaatacgttt

SEQ ID NO: 122567 - DNA, 70 bp, Homo sapiens
agagtgaaattcttatttcgacatctaggtagatgaggtataataccttcaatacgttttggtggtggtt

SEQ ID NO: 122568 - DNA, 69 bp, Homo sapiens
attcttatttcgacatctaggtagatgaggtataataccttcaatacgttttggtggtggtttcttttc

SEQ ID NO: 122569 - DNA, 68 bp, Homo sapiens
acatctaggtagatgaggtataataccttcaatacgttttggtggtggtttcttttcttcgggtgttg

SEQ ID NO: 122570 - DNA, 68 bp, Homo sapiens
tagatgaggtataataccttcaatacgttttggtggtggtttcttttcttcgggtgttggtagcaaaa

SEQ ID NO: 122571 - DNA, 64 bp, Homo sapiens
gtataataccttcaatacgttttggtggtggtttcttttcttcgggtgttggtagcaaaagggg

SEQ ID NO: 122572 - DNA, 65 bp, Homo sapiens
aatacgttttggtggtggtttcttttcttcgggtgttggtagcaaaagggggataggaggagcaa

SEQ ID NO: 122573 - DNA, 67 bp, Homo sapiens
tggtggtttcttttcttcgggtgttggtagcaaaagggggataggaggagcaaccacaggagggatt

SEQ ID NO: 122574 - DNA, 69 bp, Homo sapiens
tttcttttcttcgggtgttggtagcaaaagggggataggaggagcaaccacaggagggatttctgaaga

SEQ ID NO: 122575 - DNA, 70 bp, Homo sapiens
gtgttggtagcaaaagggggataggaggagcaaccacaggagggatttctgaagaaaataaatgccgtta

SEQ ID NO: 122576 - DNA, 69 bp, Homo sapiens
caaaagggggataggaggagcaaccacaggagggatttctgaagaaaataaatgccgttagtaacatgt

SEQ ID NO: 122577 - DNA, 69 bp, Homo sapiens
ataggaggagcaaccacaggagggatttctgaagaaaataaatgccgttagtaacatgttttagtttct

SEQ ID NO: 122578 - DNA, 77 bp, Homo sapiens
aaatttcgtacagattcctagtgctagaatattgctgctccaagctcagatgttgaggttctgggtcttaccttctg

SEQ ID NO: 122579 - DNA, 83 bp, Homo sapiens
agattcctagtgctagaatattgctgctccaagctcagatgttgaggttctgggtcttaccttctggtggcactgctctgata

SEQ ID NO: 122580 - DNA, 83 bp, Homo sapiens
tagaatattgctgctccaagctcagatgttgaggttctgggtcttaccttctggtggcactgctctgataggcatggttggga

SEQ ID NO: 122581 - DNA, 81 bp, Homo sapiens
tgctccaagctcagatgttgaggttctgggtcttaccttctggtggcactgctctgataggcatggttgggattggaactc

SEQ ID NO: 122582 - DNA, 79 bp, Homo sapiens
aagctcagatgttgaggttctgggtcttaccttctggtggcactgctctgataggcatggttgggattggaactctgga

SEQ ID NO: 122583 - DNA, 78 bp, Homo sapiens
ttgaggttctgggtcttaccttctggtggcactgctctgataggcatggttgggattggaactctggagtcaggaata

SEQ ID NO: 122584 - DNA, 79 bp, Homo sapiens
tcttaccttctggtggcactgctctgataggcatggttgggattggaactctggagtcaggaatatctggaaagggaca

SEQ ID NO: 122585 - DNA, 80 bp, Homo sapiens
ttctggtggcactgctctgataggcatggttgggattggaactctggagtcaggaatatctggaaagggacatgtaataa

SEQ ID NO: 122586 - DNA, 81 bp, Homo sapiens
actgctctgataggcatggttgggattggaactctggagtcaggaatatctggaaagggacatgtaataagcatagagaga

SEQ ID NO: 122587 - DNA, 79 bp, Homo sapiens
ataggcatggttgggattggaactctggagtcaggaatatctggaaagggacatgtaataagcatagagagactgagaa

SEQ ID NO: 122588 - DNA, 79 bp, Homo sapiens
gattggaactctggagtcaggaatatctggaaagggacatgtaataagcatagagagactgagaacaagctatttatta

SEQ ID NO: 122589 - DNA, 77 bp, Homo sapiens
aactctggagtcaggaatatctggaaagggacatgtaataagcatagagagactgagaacaagctatttattagaaa

SEQ ID NO: 122590 - DNA, 72 bp, Homo sapiens
tacattttagtttggcttctgtgatttacaaaattatgccaaatttattgtaagcaaggattgatttttaca

SEQ ID NO: 122591 - DNA, 70 bp, Homo sapiens
gtttggcttctgtgatttacaaaattatgccaaatttattgtaagcaaggattgatttttacaaaacaac

SEQ ID NO: 122592 - DNA, 69 bp, Homo sapiens
gtgatttacaaaattatgccaaatttattgtaagcaaggattgatttttacaaaacaacttaccaggag

SEQ ID NO: 122593 - DNA, 72 bp, Homo sapiens
caaaattatgccaaatttattgtaagcaaggattgatttttacaaaacaacttaccaggaggcttcagctca

SEQ ID NO: 122594 - DNA, 71 bp, Homo sapiens
gccaaatttattgtaagcaaggattgatttttacaaaacaacttaccaggaggcttcagctcaagtttgat

SEQ ID NO: 122595 - DNA, 72 bp, Homo sapiens
attgtaagcaaggattgatttttacaaaacaacttaccaggaggcttcagctcaagtttgatttctgcaaaa

SEQ ID NO: 122596 - DNA, 69 bp, Homo sapiens
aaggattgatttttacaaaacaacttaccaggaggcttcagctcaagtttgatttctgcaaaataaaaa

SEQ ID NO: 122597 - DNA, 70 bp, Homo sapiens
aaaaaaaaatgatatttttgtgttcagaatggtataggtaggctacgtgtttcgaagatggcagggtggc

SEQ ID NO: 122598 - DNA, 74 bp, Homo sapiens
aaaatgatatttttgtgttcagaatggtataggtaggctacgtgtttcgaagatggcagggtggctttctgatg

SEQ ID NO: 122599 - DNA, 76 bp, Homo sapiens
tgttcagaatggtataggtaggctacgtgtttcgaagatggcagggtggctttctgatggcgctacctcacctttc

SEQ ID NO: 122600 - DNA, 74 bp, Homo sapiens
agaatggtataggtaggctacgtgtttcgaagatggcagggtggctttctgatggcgctacctcacctttcgtc

SEQ ID NO: 122601 - DNA, 74 bp, Homo sapiens
tggtataggtaggctacgtgtttcgaagatggcagggtggctttctgatggcgctacctcacctttcgtcgtta

SEQ ID NO: 122602 - DNA, 74 bp, Homo sapiens
aggctacgtgtttcgaagatggcagggtggctttctgatggcgctacctcacctttcgtcgttaggtacagctc

SEQ ID NO: 122603 - DNA, 76 bp, Homo sapiens
tttcgaagatggcagggtggctttctgatggcgctacctcacctttcgtcgttaggtacagctctgccgtgcttct

SEQ ID NO: 122604 - DNA, 75 bp, Homo sapiens
agggtggctttctgatggcgctacctcacctttcgtcgttaggtacagctctgccgtgcttcttgcttcacctct

SEQ ID NO: 122605 - DNA, 78 bp, Homo sapiens
ctttctgatggcgctacctcacctttcgtcgttaggtacagctctgccgtgcttcttgcttcacctcttggctccagc

SEQ ID NO: 122606 - DNA, 78 bp, Homo sapiens
tacctcacctttcgtcgttaggtacagctctgccgtgcttcttgcttcacctcttggctccagccgagcgatgaccga

SEQ ID NO: 122607 - DNA, 77 bp, Homo sapiens
acctttcgtcgttaggtacagctctgccgtgcttcttgcttcacctcttggctccagccgagcgatgaccgagtaga

SEQ ID NO: 122608 - DNA, 78 bp, Homo sapiens
gtacagctctgccgtgcttcttgcttcacctcttggctccagccgagcgatgaccgagtagacacctagggtgaaaaa

SEQ ID NO: 122609 - DNA, 79 bp, Homo sapiens
tctgccgtgcttcttgcttcacctcttggctccagccgagcgatgaccgagtagacacctagggtgaaaaatcatccaa

SEQ ID NO: 122610 - DNA, 74 bp, Homo sapiens
ttgcttcacctcttggctccagccgagcgatgaccgagtagacacctagggtgaaaaatcatccaacttttgtt

SEQ ID NO: 122611 - DNA, 73 bp, Homo sapiens
acctcttggctccagccgagcgatgaccgagtagacacctagggtgaaaaatcatccaacttttgttttctga

SEQ ID NO: 122612 - DNA, 76 bp, Homo sapiens
acagacgaggcttaaattatacattcactggaaaactgtcaatgaaatcaccttcatcgtctggggtcacattgtg

SEQ ID NO: 122613 - DNA, 78 bp, Homo sapiens
ttaaattatacattcactggaaaactgtcaatgaaatcaccttcatcgtctggggtcacattgtggatggtcatataa

SEQ ID NO: 122614 - DNA, 82 bp, Homo sapiens
ttcactggaaaactgtcaatgaaatcaccttcatcgtctggggtcacattgtggatggtcatataatggcagcggccatcat

SEQ ID NO: 122615 - DNA, 81 bp, Homo sapiens
aaaactgtcaatgaaatcaccttcatcgtctggggtcacattgtggatggtcatataatggcagcggccatcattcctgaa

SEQ ID NO: 122616 - DNA, 80 bp, Homo sapiens
aatgaaatcaccttcatcgtctggggtcacattgtggatggtcatataatggcagcggccatcattcctgaagttgtatt

SEQ ID NO: 122617 - DNA, 82 bp, Homo sapiens
atcgtctggggtcacattgtggatggtcatataatggcagcggccatcattcctgaagttgtatttctggctctctgtcagt

SEQ ID NO: 122618 - DNA, 83 bp, Homo sapiens
gtcacattgtggatggtcatataatggcagcggccatcattcctgaagttgtatttctggctctctgtcagttctgttggtcc

SEQ ID NO: 122619 - DNA, 80 bp, Homo sapiens
attgtggatggtcatataatggcagcggccatcattcctgaagttgtatttctggctctctgtcagttctgttggtcctt

SEQ ID NO: 122620 - DNA, 79 bp, Homo sapiens
atataatggcagcggccatcattcctgaagttgtatttctggctctctgtcagttctgttggtcctttgtaccatgtta

SEQ ID NO: 122621 - DNA, 80 bp, Homo sapiens
agcggccatcattcctgaagttgtatttctggctctctgtcagttctgttggtcctttgtaccatgttacaatggcatca

SEQ ID NO: 122622 - DNA, 79 bp, Homo sapiens
atcattcctgaagttgtatttctggctctctgtcagttctgttggtcctttgtaccatgttacaatggcatcatcaaag

SEQ ID NO: 122623 - DNA, 78 bp, Homo sapiens
aagttgtatttctggctctctgtcagttctgttggtcctttgtaccatgttacaatggcatcatcaaaggacacttca

SEQ ID NO: 122624 - DNA, 80 bp, Homo sapiens
tctggctctctgtcagttctgttggtcctttgtaccatgttacaatggcatcatcaaaggacacttcacactcaaaggtg

SEQ ID NO: 122625 - DNA, 81 bp, Homo sapiens
agttctgttggtcctttgtaccatgttacaatggcatcatcaaaggacacttcacactcaaaggtggcagactgatgctca

SEQ ID NO: 122626 - DNA, 83 bp, Homo sapiens
tcctttgtaccatgttacaatggcatcatcaaaggacacttcacactcaaaggtggcagactgatgctcactcaccacgatgt

SEQ ID NO: 122627 - DNA, 86 bp, Homo sapiens
catgttacaatggcatcatcaaaggacacttcacactcaaaggtggcagactgatgctcactcaccacgatgttctgtatgcgctt

SEQ ID NO: 122628 - DNA, 84 bp, Homo sapiens
aatggcatcatcaaaggacacttcacactcaaaggtggcagactgatgctcactcaccacgatgttctgtatgcgctttgtaaa

SEQ ID NO: 122629 - DNA, 81 bp, Homo sapiens
atcaaaggacacttcacactcaaaggtggcagactgatgctcactcaccacgatgttctgtatgcgctttgtaaactgaat

SEQ ID NO: 122630 - DNA, 83 bp, Homo sapiens
tcacactcaaaggtggcagactgatgctcactcaccacgatgttctgtatgcgctttgtaaactgaattggttcagctgttta

SEQ ID NO: 122631 - DNA, 79 bp, Homo sapiens
aaaggtggcagactgatgctcactcaccacgatgttctgtatgcgctttgtaaactgaattggttcagctgtttaagta

SEQ ID NO: 122632 - DNA, 78 bp, Homo sapiens
agactgatgctcactcaccacgatgttctgtatgcgctttgtaaactgaattggttcagctgtttaagtacaaagagg

SEQ ID NO: 122633 - DNA, 73 bp, Homo sapiens
actcaccacgatgttctgtatgcgctttgtaaactgaattggttcagctgtttaagtacaaagagggttcaaa

SEQ ID NO: 122634 - DNA, 72 bp, Homo sapiens
atgttctgtatgcgctttgtaaactgaattggttcagctgtttaagtacaaagagggttcaaagttagatta

SEQ ID NO: 122635 - DNA, 77 bp, Homo sapiens
attgacctatgctgtacccacaaggactccatagtgtttcacgcaccttcgattctgagttctgctgaagtttcaag

SEQ ID NO: 122636 - DNA, 79 bp, Homo sapiens
tatgctgtacccacaaggactccatagtgtttcacgcaccttcgattctgagttctgctgaagtttcaaggtcttcata

SEQ ID NO: 122637 - DNA, 77 bp, Homo sapiens
acccacaaggactccatagtgtttcacgcaccttcgattctgagttctgctgaagtttcaaggtcttcatatttgca

SEQ ID NO: 122638 - DNA, 78 bp, Homo sapiens
actccatagtgtttcacgcaccttcgattctgagttctgctgaagtttcaaggtcttcatatttgcaggtgtactgac

SEQ ID NO: 122639 - DNA, 77 bp, Homo sapiens
tttcacgcaccttcgattctgagttctgctgaagtttcaaggtcttcatatttgcaggtgtactgaccctggtcttc

SEQ ID NO: 122640 - DNA, 82 bp, Homo sapiens
ttcgattctgagttctgctgaagtttcaaggtcttcatatttgcaggtgtactgaccctggtcttctgctcgaacatctgca

SEQ ID NO: 122641 - DNA, 81 bp, Homo sapiens
tctgctgaagtttcaaggtcttcatatttgcaggtgtactgaccctggtcttctgctcgaacatctgcaatggtcaattta

SEQ ID NO: 122642 - DNA, 78 bp, Homo sapiens
tttcaaggtcttcatatttgcaggtgtactgaccctggtcttctgctcgaacatctgcaatggtcaatttatggactt

SEQ ID NO: 122643 - DNA, 79 bp, Homo sapiens
ttcatatttgcaggtgtactgaccctggtcttctgctcgaacatctgcaatggtcaatttatggactttgtgttccact

SEQ ID NO: 122644 - DNA, 76 bp, Homo sapiens
caggtgtactgaccctggtcttctgctcgaacatctgcaatggtcaatttatggactttgtgttccacttctgttt

SEQ ID NO: 122645 - DNA, 78 bp, Homo sapiens
tactgaccctggtcttctgctcgaacatctgcaatggtcaatttatggactttgtgttccacttctgttttatgtcta

SEQ ID NO: 122646 - DNA, 76 bp, Homo sapiens
tggtcttctgctcgaacatctgcaatggtcaatttatggactttgtgttccacttctgttttatgtctaccttggg

SEQ ID NO: 122647 - DNA, 71 bp, Homo sapiens
aacatctgcaatggtcaatttatggactttgtgttccacttctgttttatgtctaccttggggtttaagga

SEQ ID NO: 122648 - DNA, 70 bp, Homo sapiens
atggtcaatttatggactttgtgttccacttctgttttatgtctaccttggggtttaaggattctgccat

SEQ ID NO: 122649 - DNA, 70 bp, Homo sapiens
aatttatggactttgtgttccacttctgttttatgtctaccttggggtttaaggattctgccatttctga

SEQ ID NO: 122650 - DNA, 72 bp, Homo sapiens
tgtgttccacttctgttttatgtctaccttggggtttaaggattctgccatttctgaaccattcagatttta

SEQ ID NO: 122651 - DNA, 70 bp, Homo sapiens
acttctgttttatgtctaccttggggtttaaggattctgccatttctgaaccattcagattttacatttg

SEQ ID NO: 122652 - DNA, 70 bp, Homo sapiens
atgtctaccttggggtttaaggattctgccatttctgaaccattcagattttacatttggtacagaaaat

SEQ ID NO: 122653 - DNA, 76 bp, Homo sapiens
ggtttaaggattctgccatttctgaaccattcagattttacatttggtacagaaaattggcatgtcatggtgcaag

SEQ ID NO: 122654 - DNA, 78 bp, Homo sapiens
ttctgccatttctgaaccattcagattttacatttggtacagaaaattggcatgtcatggtgcaagtctggccttctt

SEQ ID NO: 122655 - DNA, 77 bp, Homo sapiens
atttctgaaccattcagattttacatttggtacagaaaattggcatgtcatggtgcaagtctggccttctttcagag

SEQ ID NO: 122656 - DNA, 80 bp, Homo sapiens
attcagattttacatttggtacagaaaattggcatgtcatggtgcaagtctggccttctttcagagtcacatcctgaaga

SEQ ID NO: 122657 - DNA, 79 bp, Homo sapiens
ttttacatttggtacagaaaattggcatgtcatggtgcaagtctggccttctttcagagtcacatcctgaagatgccgt

SEQ ID NO: 122658 - DNA, 84 bp, Homo sapiens
agaaaattggcatgtcatggtgcaagtctggccttctttcagagtcacatcctgaagatgccgttcccatgcaggctctgttca

SEQ ID NO: 122659 - DNA, 88 bp, Homo sapiens
attggcatgtcatggtgcaagtctggccttctttcagagtcacatcctgaagatgccgttcccatgcaggctctgttcatgtgataca

SEQ ID NO: 122660 - DNA, 85 bp, Homo sapiens
tgcaagtctggccttctttcagagtcacatcctgaagatgccgttcccatgcaggctctgttcatgtgatacaacacgcattttg

SEQ ID NO: 122661 - DNA, 83 bp, Homo sapiens
ggccttctttcagagtcacatcctgaagatgccgttcccatgcaggctctgttcatgtgatacaacacgcattttgttcaata

SEQ ID NO: 122662 - DNA, 70 bp, Homo sapiens
cagtaatttaaatctcacaagtatttcataagccttttctaacttaccaattacagttagtttagcgcta

SEQ ID NO: 122663 - DNA, 74 bp, Homo sapiens
taaatctcacaagtatttcataagccttttctaacttaccaattacagttagtttagcgctagcgatgtgtgga

SEQ ID NO: 122664 - DNA, 71 bp, Homo sapiens
agccttttctaacttaccaattacagttagtttagcgctagcgatgtgtggaccacaaaccaatcgataat

SEQ ID NO: 122665 - DNA, 73 bp, Homo sapiens
taacttaccaattacagttagtttagcgctagcgatgtgtggaccacaaaccaatcgataattgccctggtct

SEQ ID NO: 122666 - DNA, 73 bp, Homo sapiens
aattacagttagtttagcgctagcgatgtgtggaccacaaaccaatcgataattgccctggtctttaagttga

SEQ ID NO: 122667 - DNA, 72 bp, Homo sapiens
ttagtttagcgctagcgatgtgtggaccacaaaccaatcgataattgccctggtctttaagttgacagtttt

SEQ ID NO: 122668 - DNA, 76 bp, Homo sapiens
tagcgatgtgtggaccacaaaccaatcgataattgccctggtctttaagttgacagtttttgactctgagtgtatg

SEQ ID NO: 122669 - DNA, 73 bp, Homo sapiens
accacaaaccaatcgataattgccctggtctttaagttgacagtttttgactctgagtgtatgtcggtcacca

SEQ ID NO: 122670 - DNA, 75 bp, Homo sapiens
aatcgataattgccctggtctttaagttgacagtttttgactctgagtgtatgtcggtcaccatcaatgcttatt

SEQ ID NO: 122671 - DNA, 75 bp, Homo sapiens
ataattgccctggtctttaagttgacagtttttgactctgagtgtatgtcggtcaccatcaatgcttatttcaaa

SEQ ID NO: 122672 - DNA, 75 bp, Homo sapiens
tctttaagttgacagtttttgactctgagtgtatgtcggtcaccatcaatgcttatttcaaatttatcactgggt

SEQ ID NO: 122673 - DNA, 73 bp, Homo sapiens
acagtttttgactctgagtgtatgtcggtcaccatcaatgcttatttcaaatttatcactgggttccagtttt

SEQ ID NO: 122674 - DNA, 72 bp, Homo sapiens
agtgtatgtcggtcaccatcaatgcttatttcaaatttatcactgggttccagtttttcagttcctttgtac

SEQ ID NO: 122675 - DNA, 71 bp, Homo sapiens
ccatcaatgcttatttcaaatttatcactgggttccagtttttcagttcctttgtaccacgaaagcttgat

SEQ ID NO: 122676 - DNA, 69 bp, Homo sapiens
cttatttcaaatttatcactgggttccagtttttcagttcctttgtaccacgaaagcttgatttctgga

SEQ ID NO: 122677 - DNA, 69 bp, Homo sapiens
caaatttatcactgggttccagtttttcagttcctttgtaccacgaaagcttgatttctggataattaa

SEQ ID NO: 122678 - DNA, 68 bp, Homo sapiens
cactgggttccagtttttcagttcctttgtaccacgaaagcttgatttctggataattaattttaatg

SEQ ID NO: 122679 - DNA, 74 bp, Homo sapiens
gttcctttgtaccacgaaagcttgatttctggataattaattttaatgtcaatttcaaagacagcatcattatc

SEQ ID NO: 122680 - DNA, 74 bp, Homo sapiens
ccacgaaagcttgatttctggataattaattttaatgtcaatttcaaagacagcatcattatctttcaaaactg

SEQ ID NO: 122681 - DNA, 76 bp, Homo sapiens
cttgatttctggataattaattttaatgtcaatttcaaagacagcatcattatctttcaaaactgtctgattttca

SEQ ID NO: 122682 - DNA, 77 bp, Homo sapiens
attaattttaatgtcaatttcaaagacagcatcattatctttcaaaactgtctgattttcaatgtccttgatcagag

SEQ ID NO: 122683 - DNA, 81 bp, Homo sapiens
tttaatgtcaatttcaaagacagcatcattatctttcaaaactgtctgattttcaatgtccttgatcagagtgacaggcta

SEQ ID NO: 122684 - DNA, 78 bp, Homo sapiens
agcatcattatctttcaaaactgtctgattttcaatgtccttgatcagagtgacaggctaggagaataaagaattaaa

SEQ ID NO: 122685 - DNA, 75 bp, Homo sapiens
atctttcaaaactgtctgattttcaatgtccttgatcagagtgacaggctaggagaataaagaattaaaacacat

SEQ ID NO: 122686 - DNA, 75 bp, Homo sapiens
aactgtctgattttcaatgtccttgatcagagtgacaggctaggagaataaagaattaaaacacatttgttactc

SEQ ID NO: 122687 - DNA, 76 bp, Homo sapiens
taatactcaataataacttgttcattttattatcaacataattctttttacctctgtctgtgacagtctttgctga

SEQ ID NO: 122688 - DNA, 75 bp, Homo sapiens
ctcaataataacttgttcattttattatcaacataattctttttacctctgtctgtgacagtctttgctgaataa

SEQ ID NO: 122689 - DNA, 77 bp, Homo sapiens
ttcattttattatcaacataattctttttacctctgtctgtgacagtctttgctgaataaatgatacaagttcctca

SEQ ID NO: 122690 - DNA, 75 bp, Homo sapiens
ttatcaacataattctttttacctctgtctgtgacagtctttgctgaataaatgatacaagttcctcaaattcct

SEQ ID NO: 122691 - DNA, 72 bp, Homo sapiens
aattctttttacctctgtctgtgacagtctttgctgaataaatgatacaagttcctcaaattccttttcgtc

SEQ ID NO: 122692 - DNA, 75 bp, Homo sapiens
ttttacctctgtctgtgacagtctttgctgaataaatgatacaagttcctcaaattccttttcgtccctctctga

SEQ ID NO: 122693 - DNA, 76 bp, Homo sapiens
tctgtgacagtctttgctgaataaatgatacaagttcctcaaattccttttcgtccctctctgacctctctatttc

SEQ ID NO: 122694 - DNA, 73 bp, Homo sapiens
tctttgctgaataaatgatacaagttcctcaaattccttttcgtccctctctgacctctctatttcctcaatt

SEQ ID NO: 122695 - DNA, 72 bp, Homo sapiens
ataaatgatacaagttcctcaaattccttttcgtccctctctgacctctctatttcctcaatttcctgagaa

SEQ ID NO: 122696 - DNA, 69 bp, Homo sapiens
aagttcctcaaattccttttcgtccctctctgacctctctatttcctcaatttcctgagaagaacaaaa

SEQ ID NO: 122697 - DNA, 72 bp, Homo sapiens
aattccttttcgtccctctctgacctctctatttcctcaatttcctgagaagaacaaaaatgataggcatta

SEQ ID NO: 122698 - DNA, 79 bp, Homo sapiens
atgttttaaatgtgacttttttagcatgatgctatatatgaaggagcataccagtctatgtgtctcttcttcttggctt

SEQ ID NO: 122699 - DNA, 82 bp, Homo sapiens
acttttttagcatgatgctatatatgaaggagcataccagtctatgtgtctcttcttcttggctttgcttgagcagttcaaa

SEQ ID NO: 122700 - DNA, 87 bp, Homo sapiens
ttagcatgatgctatatatgaaggagcataccagtctatgtgtctcttcttcttggctttgcttgagcagttcaaatgcttgaagaa

SEQ ID NO: 122701 - DNA, 82 bp, Homo sapiens
tatatatgaaggagcataccagtctatgtgtctcttcttcttggctttgcttgagcagttcaaatgcttgaagaagacctcg

SEQ ID NO: 122702 - DNA, 81 bp, Homo sapiens
gcataccagtctatgtgtctcttcttcttggctttgcttgagcagttcaaatgcttgaagaagacctcggaagtcagtgat

SEQ ID NO: 122703 - DNA, 80 bp, Homo sapiens
cttcttcttggctttgcttgagcagttcaaatgcttgaagaagacctcggaagtcagtgattccatacatgcgggcatat

SEQ ID NO: 122704 - DNA, 81 bp, Homo sapiens
ttggctttgcttgagcagttcaaatgcttgaagaagacctcggaagtcagtgattccatacatgcgggcatatttttcata

SEQ ID NO: 122705 - DNA, 79 bp, Homo sapiens
cttgagcagttcaaatgcttgaagaagacctcggaagtcagtgattccatacatgcgggcatatttttcatattcttta

SEQ ID NO: 122706 - DNA, 77 bp, Homo sapiens
atgcttgaagaagacctcggaagtcagtgattccatacatgcgggcatatttttcatattctttaggatcaacattt

SEQ ID NO: 122707 - DNA, 76 bp, Homo sapiens
aagaagacctcggaagtcagtgattccatacatgcgggcatatttttcatattctttaggatcaacatttttgaga

SEQ ID NO: 122708 - DNA, 80 bp, Homo sapiens
gaagtcagtgattccatacatgcgggcatatttttcatattctttaggatcaacatttttgagaagttccatgatatcaa

SEQ ID NO: 122709 - DNA, 78 bp, Homo sapiens
gtgattccatacatgcgggcatatttttcatattctttaggatcaacatttttgagaagttccatgatatcaatttcc

SEQ ID NO: 122710 - DNA, 77 bp, Homo sapiens
catgcgggcatatttttcatattctttaggatcaacatttttgagaagttccatgatatcaatttcctcttcttctc

SEQ ID NO: 122711 - DNA, 75 bp, Homo sapiens
ttttcatattctttaggatcaacatttttgagaagttccatgatatcaatttcctcttcttctccagctcctttc

SEQ ID NO: 122712 - DNA, 73 bp, Homo sapiens
ctttaggatcaacatttttgagaagttccatgatatcaatttcctcttcttctccagctcctttctttaagat

SEQ ID NO: 122713 - DNA, 73 bp, Homo sapiens
aacatttttgagaagttccatgatatcaatttcctcttcttctccagctcctttctttaagattggagtccta

SEQ ID NO: 122714 - DNA, 72 bp, Homo sapiens
gagaagttccatgatatcaatttcctcttcttctccagctcctttctttaagattggagtcctaaataaaat

SEQ ID NO: 122715 - DNA, 71 bp, Homo sapiens
ttccatgatatcaatttcctcttcttctccagctcctttctttaagattggagtcctaaataaaatttaaa

SEQ ID NO: 122716 - DNA, 77 bp, Homo sapiens
tatatggagggctgattgtacgatttgtggtttttattgaactcactttttcagcattgctctaagatcgccttcaa

SEQ ID NO: 122717 - DNA, 73 bp, Homo sapiens
agggctgattgtacgatttgtggtttttattgaactcactttttcagcattgctctaagatcgccttcaattt

SEQ ID NO: 122718 - DNA, 73 bp, Homo sapiens
ttgtacgatttgtggtttttattgaactcactttttcagcattgctctaagatcgccttcaattttctcttgt

SEQ ID NO: 122719 - DNA, 71 bp, Homo sapiens
gtggtttttattgaactcactttttcagcattgctctaagatcgccttcaattttctcttgtttcttcctt

SEQ ID NO: 122720 - DNA, 75 bp, Homo sapiens
ttgaactcactttttcagcattgctctaagatcgccttcaattttctcttgtttcttcctttcatccacctgtaa

SEQ ID NO: 122721 - DNA, 74 bp, Homo sapiens
ttttcagcattgctctaagatcgccttcaattttctcttgtttcttcctttcatccacctgtaagttaacatta

SEQ ID NO: 122722 - DNA, 72 bp, Homo sapiens
attgctctaagatcgccttcaattttctcttgtttcttcctttcatccacctgtaagttaacattactttca

SEQ ID NO: 122723 - DNA, 71 bp, Homo sapiens
gatcgccttcaattttctcttgtttcttcctttcatccacctgtaagttaacattactttcaatttcacca

SEQ ID NO: 122724 - DNA, 72 bp, Homo sapiens
tctcttgtttcttcctttcatccacctgtaagttaacattactttcaatttcaccatgttcgttaaatgcca

SEQ ID NO: 122725 - DNA, 73 bp, Homo sapiens
tcttcctttcatccacctgtaagttaacattactttcaatttcaccatgttcgttaaatgccacgcatcggta

SEQ ID NO: 122726 - DNA, 72 bp, Homo sapiens
tttcatccacctgtaagttaacattactttcaatttcaccatgttcgttaaatgccacgcatcggtataacc

SEQ ID NO: 122727 - DNA, 70 bp, Homo sapiens
aagttaacattactttcaatttcaccatgttcgttaaatgccacgcatcggtataacccagaatcagttt

SEQ ID NO: 122728 - DNA, 72 bp, Homo sapiens
attactttcaatttcaccatgttcgttaaatgccacgcatcggtataacccagaatcagtttttgtggtgtc

SEQ ID NO: 122729 - DNA, 73 bp, Homo sapiens
tcaccatgttcgttaaatgccacgcatcggtataacccagaatcagtttttgtggtgtccctaatctccagtt

SEQ ID NO: 122730 - DNA, 72 bp, Homo sapiens
atgttcgttaaatgccacgcatcggtataacccagaatcagtttttgtggtgtccctaatctccagttttgc

SEQ ID NO: 122731 - DNA, 72 bp, Homo sapiens
cacgcatcggtataacccagaatcagtttttgtggtgtccctaatctccagttttgcttcatcgcctttttg

SEQ ID NO: 122732 - DNA, 72 bp, Homo sapiens
tataacccagaatcagtttttgtggtgtccctaatctccagttttgcttcatcgcctttttggtggatgaaa

SEQ ID NO: 122733 - DNA, 70 bp, Homo sapiens
aatcagtttttgtggtgtccctaatctccagttttgcttcatcgcctttttggtggatgaaaacacgacc

SEQ ID NO: 122734 - DNA, 70 bp, Homo sapiens
tttttgtggtgtccctaatctccagttttgcttcatcgcctttttggtggatgaaaacacgacctccttg

SEQ ID NO: 122735 - DNA, 73 bp, Homo sapiens
ctaatctccagttttgcttcatcgcctttttggtggatgaaaacacgacctccttggttcagctgtctccact

SEQ ID NO: 122736 - DNA, 70 bp, Homo sapiens
agttttgcttcatcgcctttttggtggatgaaaacacgacctccttggttcagctgtctccacttccctt

SEQ ID NO: 122737 - DNA, 70 bp, Homo sapiens
atcgcctttttggtggatgaaaacacgacctccttggttcagctgtctccacttcccttttgtccattta

SEQ ID NO: 122738 - DNA, 69 bp, Homo sapiens
atgaaaacacgacctccttggttcagctgtctccacttcccttttgtccatttaacatttgggattggg

SEQ ID NO: 122739 - DNA, 69 bp, Homo sapiens
tccttggttcagctgtctccacttcccttttgtccatttaacatttgggattgggtcacctccaacttt

SEQ ID NO: 122740 - DNA, 72 bp, Homo sapiens
gttcagctgtctccacttcccttttgtccatttaacatttgggattgggtcacctccaacttttgcaatgaa

SEQ ID NO: 122741 - DNA, 69 bp, Homo sapiens
acttcccttttgtccatttaacatttgggattgggtcacctccaacttttgcaatgaaggtcgcagtgg

SEQ ID NO: 122742 - DNA, 70 bp, Homo sapiens
ttttgtccatttaacatttgggattgggtcacctccaacttttgcaatgaaggtcgcagtggtttctaag

SEQ ID NO: 122743 - DNA, 71 bp, Homo sapiens
tttaacatttgggattgggtcacctccaacttttgcaatgaaggtcgcagtggtttctaaggaataatgaa

SEQ ID NO: 122744 - DNA, 71 bp, Homo sapiens
attgggtcacctccaacttttgcaatgaaggtcgcagtggtttctaaggaataatgaaaacaagtgaataa

SEQ ID NO: 122745 - DNA, 69 bp, Homo sapiens
cacctccaacttttgcaatgaaggtcgcagtggtttctaaggaataatgaaaacaagtgaataaaaatt

SEQ ID NO: 122746 - DNA, 78 bp, Homo sapiens
ataagtaaaaggtataagatagatgaagatgtacttctcatgaagtgcacttactttctacgactctgatactctgag

SEQ ID NO: 122747 - DNA, 81 bp, Homo sapiens
tataagatagatgaagatgtacttctcatgaagtgcacttactttctacgactctgatactctgaggttctgacacaaaaa

SEQ ID NO: 122748 - DNA, 78 bp, Homo sapiens
atgaagatgtacttctcatgaagtgcacttactttctacgactctgatactctgaggttctgacacaaaaaagagtct

SEQ ID NO: 122749 - DNA, 79 bp, Homo sapiens
tgtacttctcatgaagtgcacttactttctacgactctgatactctgaggttctgacacaaaaaagagtcttccatcta

SEQ ID NO: 122750 - DNA, 75 bp, Homo sapiens
aagtgcacttactttctacgactctgatactctgaggttctgacacaaaaaagagtcttccatctaccgcagctt

SEQ ID NO: 122751 - DNA, 74 bp, Homo sapiens
ttactttctacgactctgatactctgaggttctgacacaaaaaagagtcttccatctaccgcagctttcttggt

SEQ ID NO: 122752 - DNA, 76 bp, Homo sapiens
acgactctgatactctgaggttctgacacaaaaaagagtcttccatctaccgcagctttcttggttgctggggcca

SEQ ID NO: 122753 - DNA, 75 bp, Homo sapiens
tactctgaggttctgacacaaaaaagagtcttccatctaccgcagctttcttggttgctggggccacagctggtt

SEQ ID NO: 122754 - DNA, 75 bp, Homo sapiens
ttctgacacaaaaaagagtcttccatctaccgcagctttcttggttgctggggccacagctggtttgtctgaaaa

SEQ ID NO: 122755 - DNA, 71 bp, Homo sapiens
aaaaagagtcttccatctaccgcagctttcttggttgctggggccacagctggtttgtctgaaaaaacatt

SEQ ID NO: 122756 - DNA, 73 bp, Homo sapiens
tctaccgcagctttcttggttgctggggccacagctggtttgtctgaaaaaacatttacatgttttgttacta

SEQ ID NO: 122757 - DNA, 72 bp, Homo sapiens
agctttcttggttgctggggccacagctggtttgtctgaaaaaacatttacatgttttgttactacaatcac

SEQ ID NO: 122758 - DNA, 77 bp, Homo sapiens
acatgagtggttgctggcttgagctgcataatacttttgaggtgtctgtacctttaatggtcacttttgatttggta

SEQ ID NO: 122759 - DNA, 77 bp, Homo sapiens
ttgctggcttgagctgcataatacttttgaggtgtctgtacctttaatggtcacttttgatttggtagtgtcacttc

SEQ ID NO: 122760 - DNA, 76 bp, Homo sapiens
tgcataatacttttgaggtgtctgtacctttaatggtcacttttgatttggtagtgtcacttccagccacatttga

SEQ ID NO: 122761 - DNA, 73 bp, Homo sapiens
ttttgaggtgtctgtacctttaatggtcacttttgatttggtagtgtcacttccagccacatttgaagcttta

SEQ ID NO: 122762 - DNA, 76 bp, Homo sapiens
tgtctgtacctttaatggtcacttttgatttggtagtgtcacttccagccacatttgaagctttacacacataatc

SEQ ID NO: 122763 - DNA, 75 bp, Homo sapiens
tttaatggtcacttttgatttggtagtgtcacttccagccacatttgaagctttacacacataatctcccgaatc

SEQ ID NO: 122764 - DNA, 79 bp, Homo sapiens
tttggtagtgtcacttccagccacatttgaagctttacacacataatctcccgaatctgctttagccacatctctgagt

SEQ ID NO: 122765 - DNA, 80 bp, Homo sapiens
acttccagccacatttgaagctttacacacataatctcccgaatctgctttagccacatctctgagttccagtacagctg

SEQ ID NO: 122766 - DNA, 80 bp, Homo sapiens
tttgaagctttacacacataatctcccgaatctgctttagccacatctctgagttccagtacagctgtcccactagcaaa

SEQ ID NO: 122767 - DNA, 81 bp, Homo sapiens
agctttacacacataatctcccgaatctgctttagccacatctctgagttccagtacagctgtcccactagcaaagctgaa

SEQ ID NO: 122768 - DNA, 85 bp, Homo sapiens
ataatctcccgaatctgctttagccacatctctgagttccagtacagctgtcccactagcaaagctgaagctgcatctgtctgaa

SEQ ID NO: 122769 - DNA, 83 bp, Homo sapiens
aatctgctttagccacatctctgagttccagtacagctgtcccactagcaaagctgaagctgcatctgtctgaaggctttatt

SEQ ID NO: 122770 - DNA, 83 bp, Homo sapiens
tttagccacatctctgagttccagtacagctgtcccactagcaaagctgaagctgcatctgtctgaaggctttatttccctgc

SEQ ID NO: 122771 - DNA, 83 bp, Homo sapiens
tctctgagttccagtacagctgtcccactagcaaagctgaagctgcatctgtctgaaggctttatttccctgccagccttcaa

SEQ ID NO: 122772 - DNA, 82 bp, Homo sapiens
tacagctgtcccactagcaaagctgaagctgcatctgtctgaaggctttatttccctgccagccttcaaccactggatccta

SEQ ID NO: 122773 - DNA, 80 bp, Homo sapiens
tgtcccactagcaaagctgaagctgcatctgtctgaaggctttatttccctgccagccttcaaccactggatcctaattg

SEQ ID NO: 122774 - DNA, 79 bp, Homo sapiens
aaagctgaagctgcatctgtctgaaggctttatttccctgccagccttcaaccactggatcctaattggctcagatccc

SEQ ID NO: 122775 - DNA, 82 bp, Homo sapiens
agctgcatctgtctgaaggctttatttccctgccagccttcaaccactggatcctaattggctcagatccctggacatggca

SEQ ID NO: 122776 - DNA, 80 bp, Homo sapiens
aaggctttatttccctgccagccttcaaccactggatcctaattggctcagatccctggacatggcagctgagctgcacg

SEQ ID NO: 122777 - DNA, 82 bp, Homo sapiens
tttatttccctgccagccttcaaccactggatcctaattggctcagatccctggacatggcagctgagctgcacgtattctc

SEQ ID NO: 122778 - DNA, 83 bp, Homo sapiens
agccttcaaccactggatcctaattggctcagatccctggacatggcagctgagctgcacgtattctccttcactcactgtta

SEQ ID NO: 122779 - DNA, 82 bp, Homo sapiens
actggatcctaattggctcagatccctggacatggcagctgagctgcacgtattctccttcactcactgttactggagtaag

SEQ ID NO: 122780 - DNA, 85 bp, Homo sapiens
taattggctcagatccctggacatggcagctgagctgcacgtattctccttcactcactgttactggagtaaggtgctgatcaaa

SEQ ID NO: 122781 - DNA, 83 bp, Homo sapiens
agatccctggacatggcagctgagctgcacgtattctccttcactcactgttactggagtaaggtgctgatcaaatacaggtg

SEQ ID NO: 122782 - DNA, 82 bp, Homo sapiens
acatggcagctgagctgcacgtattctccttcactcactgttactggagtaaggtgctgatcaaatacaggtggcttcttag

SEQ ID NO: 122783 - DNA, 80 bp, Homo sapiens
tgagctgcacgtattctccttcactcactgttactggagtaaggtgctgatcaaatacaggtggcttcttaggttctgga

SEQ ID NO: 122784 - DNA, 76 bp, Homo sapiens
tattctccttcactcactgttactggagtaaggtgctgatcaaatacaggtggcttcttaggttctggaattgaaa

SEQ ID NO: 122785 - DNA, 74 bp, Homo sapiens
ttcactcactgttactggagtaaggtgctgatcaaatacaggtggcttcttaggttctggaattgaaaaggtat

SEQ ID NO: 122786 - DNA, 72 bp, Homo sapiens
actgttactggagtaaggtgctgatcaaatacaggtggcttcttaggttctggaattgaaaaggtattttca

SEQ ID NO: 122787 - DNA, 73 bp, Homo sapiens
agtaaggtgctgatcaaatacaggtggcttcttaggttctggaattgaaaaggtattttcatgaggaacataa

SEQ ID NO: 122788 - DNA, 76 bp, Homo sapiens
aacaggcagtgaagaaaaacacaacaggttggggctgtgaggataactcacctttgatgacgattgaagacgtgca

SEQ ID NO: 122789 - DNA, 81 bp, Homo sapiens
aaaacacaacaggttggggctgtgaggataactcacctttgatgacgattgaagacgtgcacagagcagagcctgcatcat

SEQ ID NO: 122790 - DNA, 82 bp, Homo sapiens
aacaggttggggctgtgaggataactcacctttgatgacgattgaagacgtgcacagagcagagcctgcatcattggacact

SEQ ID NO: 122791 - DNA, 87 bp, Homo sapiens
tgtgaggataactcacctttgatgacgattgaagacgtgcacagagcagagcctgcatcattggacactttgcatgtgtacaaacca

SEQ ID NO: 122792 - DNA, 85 bp, Homo sapiens
ataactcacctttgatgacgattgaagacgtgcacagagcagagcctgcatcattggacactttgcatgtgtacaaaccagcgtc

SEQ ID NO: 122793 - DNA, 88 bp, Homo sapiens
tttgatgacgattgaagacgtgcacagagcagagcctgcatcattggacactttgcatgtgtacaaaccagcgtcgttcatgcctgct

SEQ ID NO: 122794 - DNA, 86 bp, Homo sapiens
attgaagacgtgcacagagcagagcctgcatcattggacactttgcatgtgtacaaaccagcgtcgttcatgcctgctttcctgac

SEQ ID NO: 122795 - DNA, 86 bp, Homo sapiens
acagagcagagcctgcatcattggacactttgcatgtgtacaaaccagcgtcgttcatgcctgctttcctgacttgcagcactaac

SEQ ID NO: 122796 - DNA, 83 bp, Homo sapiens
gcctgcatcattggacactttgcatgtgtacaaaccagcgtcgttcatgcctgctttcctgacttgcagcactaacgtgttgt

SEQ ID NO: 122797 - DNA, 80 bp, Homo sapiens
ttggacactttgcatgtgtacaaaccagcgtcgttcatgcctgctttcctgacttgcagcactaacgtgttgttcttgaa

SEQ ID NO: 122798 - DNA, 79 bp, Homo sapiens
tttgcatgtgtacaaaccagcgtcgttcatgcctgctttcctgacttgcagcactaacgtgttgttcttgaatgttatt

SEQ ID NO: 122799 - DNA, 78 bp, Homo sapiens
tacaaaccagcgtcgttcatgcctgctttcctgacttgcagcactaacgtgttgttcttgaatgttatttcacagtta

SEQ ID NO: 122800 - DNA, 77 bp, Homo sapiens
tcgttcatgcctgctttcctgacttgcagcactaacgtgttgttcttgaatgttatttcacagttagaagttggttg

SEQ ID NO: 122801 - DNA, 77 bp, Homo sapiens
ctgctttcctgacttgcagcactaacgtgttgttcttgaatgttatttcacagttagaagttggttgtatctctata

SEQ ID NO: 122802 - DNA, 76 bp, Homo sapiens
ttcctgacttgcagcactaacgtgttgttcttgaatgttatttcacagttagaagttggttgtatctctatattat

SEQ ID NO: 122803 - DNA, 74 bp, Homo sapiens
gcagcactaacgtgttgttcttgaatgttatttcacagttagaagttggttgtatctctatattatttttgtac

SEQ ID NO: 122804 - DNA, 73 bp, Homo sapiens
cgtgttgttcttgaatgttatttcacagttagaagttggttgtatctctatattatttttgtaccaggcaaca

SEQ ID NO: 122805 - DNA, 72 bp, Homo sapiens
tgttatttcacagttagaagttggttgtatctctatattatttttgtaccaggcaacagttataggttggga

SEQ ID NO: 122806 - DNA, 71 bp, Homo sapiens
tttcacagttagaagttggttgtatctctatattatttttgtaccaggcaacagttataggttgggaacca

SEQ ID NO: 122807 - DNA, 71 bp, Homo sapiens
agaagttggttgtatctctatattatttttgtaccaggcaacagttataggttgggaaccagccacacgtc

SEQ ID NO: 122808 - DNA, 70 bp, Homo sapiens
ctctatattatttttgtaccaggcaacagttataggttgggaaccagccacacgtccctcaagtttgaaa

SEQ ID NO: 122809 - DNA, 68 bp, Homo sapiens
attatttttgtaccaggcaacagttataggttgggaaccagccacacgtccctcaagtttgaaagaat

SEQ ID NO: 122810 - DNA, 69 bp, Homo sapiens
taccaggcaacagttataggttgggaaccagccacacgtccctcaagtttgaaagaattcccttctgtt

SEQ ID NO: 122811 - DNA, 68 bp, Homo sapiens
acagttataggttgggaaccagccacacgtccctcaagtttgaaagaattcccttctgtttcttctac

SEQ ID NO: 122812 - DNA, 72 bp, Homo sapiens
gaaccagccacacgtccctcaagtttgaaagaattcccttctgtttcttctactgtctctgagagtctttta

SEQ ID NO: 122813 - DNA, 70 bp, Homo sapiens
acacgtccctcaagtttgaaagaattcccttctgtttcttctactgtctctgagagtcttttagtgaaac

SEQ ID NO: 122814 - DNA, 71 bp, Homo sapiens
aagtttgaaagaattcccttctgtttcttctactgtctctgagagtcttttagtgaaacttggtgggatga

SEQ ID NO: 122815 - DNA, 74 bp, Homo sapiens
agaattcccttctgtttcttctactgtctctgagagtcttttagtgaaacttggtgggatgagccgctctataa

SEQ ID NO: 122816 - DNA, 79 bp, Homo sapiens
tactgtctctgagagtcttttagtgaaacttggtgggatgagccgctctataagaaattgcaaggatatatgaagtaga

SEQ ID NO: 122817 - DNA, 75 bp, Homo sapiens
acaaaatgattacacttttgttggaccacttgcaaaataaacgataccttttatattcagctgagctgtgcaaga

SEQ ID NO: 122818 - DNA, 73 bp, Homo sapiens
attacacttttgttggaccacttgcaaaataaacgataccttttatattcagctgagctgtgcaagagtcttt

SEQ ID NO: 122819 - DNA, 75 bp, Homo sapiens
tttgttggaccacttgcaaaataaacgataccttttatattcagctgagctgtgcaagagtcttttcccacttca

SEQ ID NO: 122820 - DNA, 81 bp, Homo sapiens
tgcaaaataaacgataccttttatattcagctgagctgtgcaagagtcttttcccacttcattcacagcatagcaggtata

SEQ ID NO: 122821 - DNA, 80 bp, Homo sapiens
ataaacgataccttttatattcagctgagctgtgcaagagtcttttcccacttcattcacagcatagcaggtatattgtc

SEQ ID NO: 122822 - DNA, 82 bp, Homo sapiens
ttttatattcagctgagctgtgcaagagtcttttcccacttcattcacagcatagcaggtatattgtccagaatctcctttg

SEQ ID NO: 122823 - DNA, 82 bp, Homo sapiens
agctgagctgtgcaagagtcttttcccacttcattcacagcatagcaggtatattgtccagaatctcctttgtctactttga

SEQ ID NO: 122824 - DNA, 78 bp, Homo sapiens
aagagtcttttcccacttcattcacagcatagcaggtatattgtccagaatctcctttgtctactttgaggactgtca

SEQ ID NO: 122825 - DNA, 78 bp, Homo sapiens
tcttttcccacttcattcacagcatagcaggtatattgtccagaatctcctttgtctactttgaggactgtcaggtgg

SEQ ID NO: 122826 - DNA, 80 bp, Homo sapiens
ttcacagcatagcaggtatattgtccagaatctcctttgtctactttgaggactgtcaggtgggcgctgttttccagata

SEQ ID NO: 122827 - DNA, 76 bp, Homo sapiens
atagcaggtatattgtccagaatctcctttgtctactttgaggactgtcaggtgggcgctgttttccagataacta

SEQ ID NO: 122828 - DNA, 76 bp, Homo sapiens
tatattgtccagaatctcctttgtctactttgaggactgtcaggtgggcgctgttttccagataactaatctggta

SEQ ID NO: 122829 - DNA, 72 bp, Homo sapiens
agaatctcctttgtctactttgaggactgtcaggtgggcgctgttttccagataactaatctggtactttcc

SEQ ID NO: 122830 - DNA, 72 bp, Homo sapiens
tctactttgaggactgtcaggtgggcgctgttttccagataactaatctggtactttccgccacttcgtatt

SEQ ID NO: 122831 - DNA, 75 bp, Homo sapiens
ttgaggactgtcaggtgggcgctgttttccagataactaatctggtactttccgccacttcgtatttctctgctg

SEQ ID NO: 122832 - DNA, 72 bp, Homo sapiens
aggtgggcgctgttttccagataactaatctggtactttccgccacttcgtatttctctgctgtctttggcc

SEQ ID NO: 122833 - DNA, 73 bp, Homo sapiens
ttttccagataactaatctggtactttccgccacttcgtatttctctgctgtctttggcccagctgaccttta

SEQ ID NO: 122834 - DNA, 72 bp, Homo sapiens
ataactaatctggtactttccgccacttcgtatttctctgctgtctttggcccagctgacctttatcggttg

SEQ ID NO: 122835 - DNA, 75 bp, Homo sapiens
tctggtactttccgccacttcgtatttctctgctgtctttggcccagctgacctttatcggttgtgtgcccgtga

SEQ ID NO: 122836 - DNA, 77 bp, Homo sapiens
cacttcgtatttctctgctgtctttggcccagctgacctttatcggttgtgtgcccgtgacgtggcactcaaagtca

SEQ ID NO: 122837 - DNA, 78 bp, Homo sapiens
tatttctctgctgtctttggcccagctgacctttatcggttgtgtgcccgtgacgtggcactcaaagtcagcactttc

SEQ ID NO: 122838 - DNA, 76 bp, Homo sapiens
ctgtctttggcccagctgacctttatcggttgtgtgcccgtgacgtggcactcaaagtcagcactttctcccacca

SEQ ID NO: 122839 - DNA, 77 bp, Homo sapiens
agctgacctttatcggttgtgtgcccgtgacgtggcactcaaagtcagcactttctcccaccacagcatccacaggg

SEQ ID NO: 122840 - DNA, 76 bp, Homo sapiens
acctttatcggttgtgtgcccgtgacgtggcactcaaagtcagcactttctcccaccacagcatccacaggggcaa

SEQ ID NO: 122841 - DNA, 80 bp, Homo sapiens
ttgtgtgcccgtgacgtggcactcaaagtcagcactttctcccaccacagcatccacaggggcaagacggatgtcaaaga

SEQ ID NO: 122842 - DNA, 77 bp, Homo sapiens
cgtgacgtggcactcaaagtcagcactttctcccaccacagcatccacaggggcaagacggatgtcaaagaagggtg

SEQ ID NO: 122843 - DNA, 71 bp, Homo sapiens
actttctcccaccacagcatccacaggggcaagacggatgtcaaagaagggtgggttcttcccctctaata

SEQ ID NO: 122844 - DNA, 73 bp, Homo sapiens
accacagcatccacaggggcaagacggatgtcaaagaagggtgggttcttcccctctaatagtagagcagaaa

SEQ ID NO: 122845 - DNA, 74 bp, Homo sapiens
ttataatactttaattctagaaatgaaagtttaagaatccacaaacctgtgagaatgagcctggcactggaaga

SEQ ID NO: 122846 - DNA, 75 bp, Homo sapiens
atactttaattctagaaatgaaagtttaagaatccacaaacctgtgagaatgagcctggcactggaagaagcaga

SEQ ID NO: 122847 - DNA, 74 bp, Homo sapiens
aaatgaaagtttaagaatccacaaacctgtgagaatgagcctggcactggaagaagcagagcctatagggtttg

SEQ ID NO: 122848 - DNA, 75 bp, Homo sapiens
aaagtttaagaatccacaaacctgtgagaatgagcctggcactggaagaagcagagcctatagggtttgtagctg

SEQ ID NO: 122849 - DNA, 80 bp, Homo sapiens
aatccacaaacctgtgagaatgagcctggcactggaagaagcagagcctatagggtttgtagctgtgcaggaatactggc

SEQ ID NO: 122850 - DNA, 83 bp, Homo sapiens
tgagaatgagcctggcactggaagaagcagagcctatagggtttgtagctgtgcaggaatactggcctgcaaggctccggtca

SEQ ID NO: 122851 - DNA, 78 bp, Homo sapiens
ctggcactggaagaagcagagcctatagggtttgtagctgtgcaggaatactggcctgcaaggctccggtcagtttta

SEQ ID NO: 122852 - DNA, 74 bp, Homo sapiens
aagaagcagagcctatagggtttgtagctgtgcaggaatactggcctgcaaggctccggtcagttttaaaaata

SEQ ID NO: 122853 - DNA, 74 bp, Homo sapiens
agagcctatagggtttgtagctgtgcaggaatactggcctgcaaggctccggtcagttttaaaaatattgagtg

SEQ ID NO: 122854 - DNA, 77 bp, Homo sapiens
tttgtagctgtgcaggaatactggcctgcaaggctccggtcagttttaaaaatattgagtgtggctgtattgtctaa

SEQ ID NO: 122855 - DNA, 76 bp, Homo sapiens
tgcaggaatactggcctgcaaggctccggtcagttttaaaaatattgagtgtggctgtattgtctaaaaatgatgt

SEQ ID NO: 122856 - DNA, 74 bp, Homo sapiens
atactggcctgcaaggctccggtcagttttaaaaatattgagtgtggctgtattgtctaaaaatgatgtttgta

SEQ ID NO: 122857 - DNA, 71 bp, Homo sapiens
aaggctccggtcagttttaaaaatattgagtgtggctgtattgtctaaaaatgatgtttgtacatttgggc

SEQ ID NO: 122858 - DNA, 74 bp, Homo sapiens
cagttttaaaaatattgagtgtggctgtattgtctaaaaatgatgtttgtacatttgggctgtctttcaatggc

SEQ ID NO: 122859 - DNA, 76 bp, Homo sapiens
aatattgagtgtggctgtattgtctaaaaatgatgtttgtacatttgggctgtctttcaatggcttgccgtcttta

SEQ ID NO: 122860 - DNA, 75 bp, Homo sapiens
agtgtggctgtattgtctaaaaatgatgtttgtacatttgggctgtctttcaatggcttgccgtctttataccaa

SEQ ID NO: 122861 - DNA, 75 bp, Homo sapiens
ttgtctaaaaatgatgtttgtacatttgggctgtctttcaatggcttgccgtctttataccaagacacggagata

SEQ ID NO: 122862 - DNA, 75 bp, Homo sapiens
aaatgatgtttgtacatttgggctgtctttcaatggcttgccgtctttataccaagacacggagataggttctga

SEQ ID NO: 122863 - DNA, 75 bp, Homo sapiens
tttgtacatttgggctgtctttcaatggcttgccgtctttataccaagacacggagataggttctgatccactta

SEQ ID NO: 122864 - DNA, 77 bp, Homo sapiens
tgtctttcaatggcttgccgtctttataccaagacacggagataggttctgatccacttatggcacaatcaaaaaca

SEQ ID NO: 122865 - DNA, 76 bp, Homo sapiens
ttcaatggcttgccgtctttataccaagacacggagataggttctgatccacttatggcacaatcaaaaacaactg

SEQ ID NO: 122866 - DNA, 75 bp, Homo sapiens
tctttataccaagacacggagataggttctgatccacttatggcacaatcaaaaacaactggcagtccaactgtt

SEQ ID NO: 122867 - DNA, 76 bp, Homo sapiens
ataccaagacacggagataggttctgatccacttatggcacaatcaaaaacaactggcagtccaactgtttcttga

SEQ ID NO: 122868 - DNA, 78 bp, Homo sapiens
agataggttctgatccacttatggcacaatcaaaaacaactggcagtccaactgtttcttgaacatctctcaattgtc

SEQ ID NO: 122869 - DNA, 78 bp, Homo sapiens
ttctgatccacttatggcacaatcaaaaacaactggcagtccaactgtttcttgaacatctctcaattgtcgagaaaa

SEQ ID NO: 122870 - DNA, 77 bp, Homo sapiens
acttatggcacaatcaaaaacaactggcagtccaactgtttcttgaacatctctcaattgtcgagaaaatgatggtg

SEQ ID NO: 122871 - DNA, 76 bp, Homo sapiens
aactggcagtccaactgtttcttgaacatctctcaattgtcgagaaaatgatggtggaagtttttgctctgtagga

SEQ ID NO: 122872 - DNA, 74 bp, Homo sapiens
aactgtttcttgaacatctctcaattgtcgagaaaatgatggtggaagtttttgctctgtaggaacagaataaa

SEQ ID NO: 122873 - DNA, 75 bp, Homo sapiens
tcttgaacatctctcaattgtcgagaaaatgatggtggaagtttttgctctgtaggaacagaataaaagtaacaa

SEQ ID NO: 122874 - DNA, 71 bp, Homo sapiens
ctctcaattgtcgagaaaatgatggtggaagtttttgctctgtaggaacagaataaaagtaacaaatactt

SEQ ID NO: 122875 - DNA, 66 bp, Homo sapiens
gttcaaaagaaacacaaattcgttcactttaaaaatattgcaatcaccttgaacggtaaggaaagt

SEQ ID NO: 122876 - DNA, 70 bp, Homo sapiens
gaaacacaaattcgttcactttaaaaatattgcaatcaccttgaacggtaaggaaagttgatgcagaaac

SEQ ID NO: 122877 - DNA, 70 bp, Homo sapiens
aattcgttcactttaaaaatattgcaatcaccttgaacggtaaggaaagttgatgcagaaacttctccca

SEQ ID NO: 122878 - DNA, 71 bp, Homo sapiens
aaaaatattgcaatcaccttgaacggtaaggaaagttgatgcagaaacttctcccacgctgttttcagctt

SEQ ID NO: 122879 - DNA, 76 bp, Homo sapiens
attgcaatcaccttgaacggtaaggaaagttgatgcagaaacttctcccacgctgttttcagctttgcagatatat

SEQ ID NO: 122880 - DNA, 76 bp, Homo sapiens
aacggtaaggaaagttgatgcagaaacttctcccacgctgttttcagctttgcagatatattctccactatcatta

SEQ ID NO: 122881 - DNA, 79 bp, Homo sapiens
taaggaaagttgatgcagaaacttctcccacgctgttttcagctttgcagatatattctccactatcattaatatcaac

SEQ ID NO: 122882 - DNA, 78 bp, Homo sapiens
atgcagaaacttctcccacgctgttttcagctttgcagatatattctccactatcattaatatcaacctggttgaaaa

SEQ ID NO: 122883 - DNA, 77 bp, Homo sapiens
cttctcccacgctgttttcagctttgcagatatattctccactatcattaatatcaacctggttgaaaaccagtgta

SEQ ID NO: 122884 - DNA, 78 bp, Homo sapiens
ttttcagctttgcagatatattctccactatcattaatatcaacctggttgaaaaccagtgtagcaacattattccta

SEQ ID NO: 122885 - DNA, 78 bp, Homo sapiens
ctttgcagatatattctccactatcattaatatcaacctggttgaaaaccagtgtagcaacattattcctaaaatgca

SEQ ID NO: 122886 - DNA, 71 bp, Homo sapiens
ggttgaaaaccagtgtagcaacattattcctaaaatgcattttgtaagtcgtagtgggtctcaattttgta

SEQ ID NO: 122887 - DNA, 72 bp, Homo sapiens
gtagcaacattattcctaaaatgcattttgtaagtcgtagtgggtctcaattttgtatctcctttataccag

SEQ ID NO: 122888 - DNA, 70 bp, Homo sapiens
ttattcctaaaatgcattttgtaagtcgtagtgggtctcaattttgtatctcctttataccaggataccc

SEQ ID NO: 122889 - DNA, 70 bp, Homo sapiens
aaaatgcattttgtaagtcgtagtgggtctcaattttgtatctcctttataccaggataccccaatttca

SEQ ID NO: 122890 - DNA, 67 bp, Homo sapiens
ttttgtaagtcgtagtgggtctcaattttgtatctcctttataccaggataccccaatttcaggggt

SEQ ID NO: 122891 - DNA, 74 bp, Homo sapiens
tgggtctcaattttgtatctcctttataccaggataccccaatttcaggggttccagcaagctggcattgtaga

SEQ ID NO: 122892 - DNA, 77 bp, Homo sapiens
tatctcctttataccaggataccccaatttcaggggttccagcaagctggcattgtagagaggcagaatctccaaca

SEQ ID NO: 122893 - DNA, 76 bp, Homo sapiens
ataccaggataccccaatttcaggggttccagcaagctggcattgtagagaggcagaatctccaacagacacctta

SEQ ID NO: 122894 - DNA, 76 bp, Homo sapiens
aatttcaggggttccagcaagctggcattgtagagaggcagaatctccaacagacaccttaaccggctccaactgc

SEQ ID NO: 122895 - DNA, 78 bp, Homo sapiens
ggttccagcaagctggcattgtagagaggcagaatctccaacagacaccttaaccggctccaactgcttgacaaaata

SEQ ID NO: 122896 - DNA, 76 bp, Homo sapiens
attgtagagaggcagaatctccaacagacaccttaaccggctccaactgcttgacaaaatacggtggttctgcagc

SEQ ID NO: 122897 - DNA, 77 bp, Homo sapiens
aacagacaccttaaccggctccaactgcttgacaaaatacggtggttctgcagccaagagagataatcaatcagtca

SEQ ID NO: 122898 - DNA, 77 bp, Homo sapiens
accttaaccggctccaactgcttgacaaaatacggtggttctgcagccaagagagataatcaatcagtcatgaagga

SEQ ID NO: 122899 - DNA, 81 bp, Homo sapiens
cagatcatcgattgtatacaaagataaaaatgtgcaatcatgacaaacctagtatgagtatttgtgctgaacaggaatctt

SEQ ID NO: 122900 - DNA, 78 bp, Homo sapiens
cgattgtatacaaagataaaaatgtgcaatcatgacaaacctagtatgagtatttgtgctgaacaggaatcttttcca

SEQ ID NO: 122901 - DNA, 76 bp, Homo sapiens
aaagataaaaatgtgcaatcatgacaaacctagtatgagtatttgtgctgaacaggaatcttttccagaggcattt

SEQ ID NO: 122902 - DNA, 81 bp, Homo sapiens
tgcaatcatgacaaacctagtatgagtatttgtgctgaacaggaatcttttccagaggcattttcaatgtagcagttgtat

SEQ ID NO: 122903 - DNA, 78 bp, Homo sapiens
atgacaaacctagtatgagtatttgtgctgaacaggaatcttttccagaggcattttcaatgtagcagttgtattgtc

SEQ ID NO: 122904 - DNA, 81 bp, Homo sapiens
ctagtatgagtatttgtgctgaacaggaatcttttccagaggcattttcaatgtagcagttgtattgtcctgcatcctcta

SEQ ID NO: 122905 - DNA, 81 bp, Homo sapiens
tatttgtgctgaacaggaatcttttccagaggcattttcaatgtagcagttgtattgtcctgcatcctctactgtgctact

SEQ ID NO: 122906 - DNA, 77 bp, Homo sapiens
aacaggaatcttttccagaggcattttcaatgtagcagttgtattgtcctgcatcctctactgtgctacttggaatt

SEQ ID NO: 122907 - DNA, 80 bp, Homo sapiens
tccagaggcattttcaatgtagcagttgtattgtcctgcatcctctactgtgctacttggaatttccaggattgccgatt

SEQ ID NO: 122908 - DNA, 78 bp, Homo sapiens
tagcagttgtattgtcctgcatcctctactgtgctacttggaatttccaggattgccgatttttcagtcgtagttata

SEQ ID NO: 122909 - DNA, 77 bp, Homo sapiens
ttgtattgtcctgcatcctctactgtgctacttggaatttccaggattgccgatttttcagtcgtagttatattaca

SEQ ID NO: 122910 - DNA, 74 bp, Homo sapiens
atcctctactgtgctacttggaatttccaggattgccgatttttcagtcgtagttatattacacctctgagaag

SEQ ID NO: 122911 - DNA, 73 bp, Homo sapiens
tgctacttggaatttccaggattgccgatttttcagtcgtagttatattacacctctgagaaggagttacatt

SEQ ID NO: 122912 - DNA, 72 bp, Homo sapiens
aatttccaggattgccgatttttcagtcgtagttatattacacctctgagaaggagttacatttatgccatt

SEQ ID NO: 122913 - DNA, 72 bp, Homo sapiens
ccaggattgccgatttttcagtcgtagttatattacacctctgagaaggagttacatttatgccatttttct

SEQ ID NO: 122914 - DNA, 71 bp, Homo sapiens
cgatttttcagtcgtagttatattacacctctgagaaggagttacatttatgccatttttcttccaggtaa

SEQ ID NO: 122915 - DNA, 71 bp, Homo sapiens
tagttatattacacctctgagaaggagttacatttatgccatttttcttccaggtaaccgaaatgggagga

SEQ ID NO: 122916 - DNA, 71 bp, Homo sapiens
tattacacctctgagaaggagttacatttatgccatttttcttccaggtaaccgaaatgggaggagttcca

SEQ ID NO: 122917 - DNA, 69 bp, Homo sapiens
agaaggagttacatttatgccatttttcttccaggtaaccgaaatgggaggagttccagtgaatgtacc

SEQ ID NO: 122918 - DNA, 72 bp, Homo sapiens
ttacatttatgccatttttcttccaggtaaccgaaatgggaggagttccagtgaatgtaccctctaggatca

SEQ ID NO: 122919 - DNA, 66 bp, Homo sapiens
atttttcttccaggtaaccgaaatgggaggagttccagtgaatgtaccctctaggatcaggggttt

SEQ ID NO: 122920 - DNA, 74 bp, Homo sapiens
aaatgggaggagttccagtgaatgtaccctctaggatcaggggttttcctttctctatgctgtaatcattcagc

SEQ ID NO: 122921 - DNA, 75 bp, Homo sapiens
agttccagtgaatgtaccctctaggatcaggggttttcctttctctatgctgtaatcattcagcctcttcacaaa

SEQ ID NO: 122922 - DNA, 76 bp, Homo sapiens
tctaggatcaggggttttcctttctctatgctgtaatcattcagcctcttcacaaatttggctggggctaaagtga

SEQ ID NO: 122923 - DNA, 74 bp, Homo sapiens
ggttttcctttctctatgctgtaatcattcagcctcttcacaaatttggctggggctaaagtgaccaaattgaa

SEQ ID NO: 122924 - DNA, 76 bp, Homo sapiens
tcctttctctatgctgtaatcattcagcctcttcacaaatttggctggggctaaagtgaccaaattgaaaatataa

SEQ ID NO: 122925 - DNA, 75 bp, Homo sapiens
atgctgtaatcattcagcctcttcacaaatttggctggggctaaagtgaccaaattgaaaatataaaatcaaaca

SEQ ID NO: 122926 - DNA, 78 bp, Homo sapiens
gacacatctaattactaatcgtataaatctagaagagcagtctgacaaaccttttatgtagagatgtgttgtacaaga

SEQ ID NO: 122927 - DNA, 80 bp, Homo sapiens
tataaatctagaagagcagtctgacaaaccttttatgtagagatgtgttgtacaagaagccttgccagcttcattgctaa

SEQ ID NO: 122928 - DNA, 81 bp, Homo sapiens
gagcagtctgacaaaccttttatgtagagatgtgttgtacaagaagccttgccagcttcattgctaactatgcaagtatat

SEQ ID NO: 122929 - DNA, 84 bp, Homo sapiens
ttatgtagagatgtgttgtacaagaagccttgccagcttcattgctaactatgcaagtatattctccactttgtgatgtatcta

SEQ ID NO: 122930 - DNA, 83 bp, Homo sapiens
tgtgttgtacaagaagccttgccagcttcattgctaactatgcaagtatattctccactttgtgatgtatctacatcgaacaa

SEQ ID NO: 122931 - DNA, 80 bp, Homo sapiens
aagaagccttgccagcttcattgctaactatgcaagtatattctccactttgtgatgtatctacatcgaacaactccagt

SEQ ID NO: 122932 - DNA, 81 bp, Homo sapiens
attgctaactatgcaagtatattctccactttgtgatgtatctacatcgaacaactccagttcagcaactgaatcctccaa

SEQ ID NO: 122933 - DNA, 80 bp, Homo sapiens
aactatgcaagtatattctccactttgtgatgtatctacatcgaacaactccagttcagcaactgaatcctccaaagaca

SEQ ID NO: 122934 - DNA, 83 bp, Homo sapiens
tatattctccactttgtgatgtatctacatcgaacaactccagttcagcaactgaatcctccaaagacacgttgcatctgtca

SEQ ID NO: 122935 - DNA, 81 bp, Homo sapiens
tttgtgatgtatctacatcgaacaactccagttcagcaactgaatcctccaaagacacgttgcatctgtcacctggtacta

SEQ ID NO: 122936 - DNA, 80 bp, Homo sapiens
tgtatctacatcgaacaactccagttcagcaactgaatcctccaaagacacgttgcatctgtcacctggtactagttcac

SEQ ID NO: 122937 - DNA, 76 bp, Homo sapiens
aacaactccagttcagcaactgaatcctccaaagacacgttgcatctgtcacctggtactagttcactgctacctt

SEQ ID NO: 122938 - DNA, 79 bp, Homo sapiens
ttcagcaactgaatcctccaaagacacgttgcatctgtcacctggtactagttcactgctacctttgaaccagctaaca

SEQ ID NO: 122939 - DNA, 75 bp, Homo sapiens
aatcctccaaagacacgttgcatctgtcacctggtactagttcactgctacctttgaaccagctaacactgaaag

SEQ ID NO: 122940 - DNA, 74 bp, Homo sapiens
aaagacacgttgcatctgtcacctggtactagttcactgctacctttgaaccagctaacactgaaaggaggtgt

SEQ ID NO: 122941 - DNA, 73 bp, Homo sapiens
catctgtcacctggtactagttcactgctacctttgaaccagctaacactgaaaggaggtgttccttttacga

SEQ ID NO: 122942 - DNA, 69 bp, Homo sapiens
acctggtactagttcactgctacctttgaaccagctaacactgaaaggaggtgttccttttacgatact

SEQ ID NO: 122943 - DNA, 71 bp, Homo sapiens
ttcactgctacctttgaaccagctaacactgaaaggaggtgttccttttacgatacttgtgaaagttacat

SEQ ID NO: 122944 - DNA, 68 bp, Homo sapiens
agctaacactgaaaggaggtgttccttttacgatacttgtgaaagttacattggtcccagttaaaaca

SEQ ID NO: 122945 - DNA, 69 bp, Homo sapiens
acactgaaaggaggtgttccttttacgatacttgtgaaagttacattggtcccagttaaaacatccatg

SEQ ID NO: 122946 - DNA, 71 bp, Homo sapiens
tgttccttttacgatacttgtgaaagttacattggtcccagttaaaacatccatgggatcaggtttctgaa

SEQ ID NO: 122947 - DNA, 70 bp, Homo sapiens
ttttacgatacttgtgaaagttacattggtcccagttaaaacatccatgggatcaggtttctgaacaaaa

SEQ ID NO: 122948 - DNA, 71 bp, Homo sapiens
tgaaagttacattggtcccagttaaaacatccatgggatcaggtttctgaacaaaagatggtggttctaaa

SEQ ID NO: 122949 - DNA, 71 bp, Homo sapiens
ttacattggtcccagttaaaacatccatgggatcaggtttctgaacaaaagatggtggttctaaacacaaa

SEQ ID NO: 122950 - DNA, 73 bp, Homo sapiens
agttaaaacatccatgggatcaggtttctgaacaaaagatggtggttctaaacacaaaagcacatatcagaaa

SEQ ID NO: 122951 - DNA, 75 bp, Homo sapiens
gcttaataaactatgaaatgcaattcattttactgttttgtaaactgacctctcacagtcaaaggagcactacat

SEQ ID NO: 122952 - DNA, 77 bp, Homo sapiens
aactatgaaatgcaattcattttactgttttgtaaactgacctctcacagtcaaaggagcactacattcatcagaac

SEQ ID NO: 122953 - DNA, 77 bp, Homo sapiens
attcattttactgttttgtaaactgacctctcacagtcaaaggagcactacattcatcagaaccagccatattagta

SEQ ID NO: 122954 - DNA, 81 bp, Homo sapiens
tgttttgtaaactgacctctcacagtcaaaggagcactacattcatcagaaccagccatattagtagctatacatgtgtag

SEQ ID NO: 122955 - DNA, 83 bp, Homo sapiens
taaactgacctctcacagtcaaaggagcactacattcatcagaaccagccatattagtagctatacatgtgtagtcaccactg

SEQ ID NO: 122956 - DNA, 85 bp, Homo sapiens
ctctcacagtcaaaggagcactacattcatcagaaccagccatattagtagctatacatgtgtagtcaccactgtctgattcttc

SEQ ID NO: 122957 - DNA, 85 bp, Homo sapiens
aaaggagcactacattcatcagaaccagccatattagtagctatacatgtgtagtcaccactgtctgattcttccagcatgttca

SEQ ID NO: 122958 - DNA, 84 bp, Homo sapiens
actacattcatcagaaccagccatattagtagctatacatgtgtagtcaccactgtctgattcttccagcatgttcacagttaa

SEQ ID NO: 122959 - DNA, 82 bp, Homo sapiens
accagccatattagtagctatacatgtgtagtcaccactgtctgattcttccagcatgttcacagttaaagcacaagtatta

SEQ ID NO: 122960 - DNA, 83 bp, Homo sapiens
atattagtagctatacatgtgtagtcaccactgtctgattcttccagcatgttcacagttaaagcacaagtattatctgtcag

SEQ ID NO: 122961 - DNA, 82 bp, Homo sapiens
agctatacatgtgtagtcaccactgtctgattcttccagcatgttcacagttaaagcacaagtattatctgtcagggtggtc

SEQ ID NO: 122962 - DNA, 80 bp, Homo sapiens
tgtagtcaccactgtctgattcttccagcatgttcacagttaaagcacaagtattatctgtcagggtggtctggtatttc

SEQ ID NO: 122963 - DNA, 79 bp, Homo sapiens
tctgattcttccagcatgttcacagttaaagcacaagtattatctgtcagggtggtctggtatttccttccactactga

SEQ ID NO: 122964 - DNA, 78 bp, Homo sapiens
ttccagcatgttcacagttaaagcacaagtattatctgtcagggtggtctggtatttccttccactactgatctcatt

SEQ ID NO: 122965 - DNA, 75 bp, Homo sapiens
atgttcacagttaaagcacaagtattatctgtcagggtggtctggtatttccttccactactgatctcatttcct

SEQ ID NO: 122966 - DNA, 77 bp, Homo sapiens
agtattatctgtcagggtggtctggtatttccttccactactgatctcatttccttcatggaaccaggagacagaga

SEQ ID NO: 122967 - DNA, 75 bp, Homo sapiens
agggtggtctggtatttccttccactactgatctcatttccttcatggaaccaggagacagagattggaggtgac

SEQ ID NO: 122968 - DNA, 77 bp, Homo sapiens
tatttccttccactactgatctcatttccttcatggaaccaggagacagagattggaggtgacccatagactttaca

SEQ ID NO: 122969 - DNA, 78 bp, Homo sapiens
cactactgatctcatttccttcatggaaccaggagacagagattggaggtgacccatagactttacactccattacaa

SEQ ID NO: 122970 - DNA, 77 bp, Homo sapiens
ttcatggaaccaggagacagagattggaggtgacccatagactttacactccattacaactgaggagccggatagac

SEQ ID NO: 122971 - DNA, 76 bp, Homo sapiens
aggagacagagattggaggtgacccatagactttacactccattacaactgaggagccggatagaccatttgtctc

SEQ ID NO: 122972 - DNA, 74 bp, Homo sapiens
agattggaggtgacccatagactttacactccattacaactgaggagccggatagaccatttgtctctttcaat

SEQ ID NO: 122973 - DNA, 72 bp, Homo sapiens
aggtgacccatagactttacactccattacaactgaggagccggatagaccatttgtctctttcaattttct

SEQ ID NO: 122974 - DNA, 74 bp, Homo sapiens
atagactttacactccattacaactgaggagccggatagaccatttgtctctttcaattttcttgtgaatgaag

SEQ ID NO: 122975 - DNA, 73 bp, Homo sapiens
tccattacaactgaggagccggatagaccatttgtctctttcaattttcttgtgaatgaaggaggaacggttc

SEQ ID NO: 122976 - DNA, 75 bp, Homo sapiens
tgaggagccggatagaccatttgtctctttcaattttcttgtgaatgaaggaggaacggttcggtctgaatgata

SEQ ID NO: 122977 - DNA, 72 bp, Homo sapiens
atagaccatttgtctctttcaattttcttgtgaatgaaggaggaacggttcggtctgaatgatacaaaacaa

SEQ ID NO: 122978 - DNA, 76 bp, Homo sapiens
aggaactacattattataatgatgaaggaaaagcccaagaaatcaaccaacctgaaacctgcaatgaagctgtgca

SEQ ID NO: 122979 - DNA, 79 bp, Homo sapiens
tattataatgatgaaggaaaagcccaagaaatcaaccaacctgaaacctgcaatgaagctgtgcagctgtctttgccaa

SEQ ID NO: 122980 - DNA, 75 bp, Homo sapiens
atgaaggaaaagcccaagaaatcaaccaacctgaaacctgcaatgaagctgtgcagctgtctttgccaacagggt

SEQ ID NO: 122981 - DNA, 78 bp, Homo sapiens
caagaaatcaaccaacctgaaacctgcaatgaagctgtgcagctgtctttgccaacagggttctgcacctcaaaactg

SEQ ID NO: 122982 - DNA, 78 bp, Homo sapiens
aatcaaccaacctgaaacctgcaatgaagctgtgcagctgtctttgccaacagggttctgcacctcaaaactgtatac

SEQ ID NO: 122983 - DNA, 78 bp, Homo sapiens
aaacctgcaatgaagctgtgcagctgtctttgccaacagggttctgcacctcaaaactgtataccccactgtcactcg

SEQ ID NO: 122984 - DNA, 79 bp, Homo sapiens
aatgaagctgtgcagctgtctttgccaacagggttctgcacctcaaaactgtataccccactgtcactcggtgctacat

SEQ ID NO: 122985 - DNA, 78 bp, Homo sapiens
agctgtctttgccaacagggttctgcacctcaaaactgtataccccactgtcactcggtgctacattgatgatcttaa

SEQ ID NO: 122986 - DNA, 77 bp, Homo sapiens
tctttgccaacagggttctgcacctcaaaactgtataccccactgtcactcggtgctacattgatgatcttaaggcc

SEQ ID NO: 122987 - DNA, 77 bp, Homo sapiens
ttctgcacctcaaaactgtataccccactgtcactcggtgctacattgatgatcttaaggccggatactttgttgaa

SEQ ID NO: 122988 - DNA, 74 bp, Homo sapiens
acctcaaaactgtataccccactgtcactcggtgctacattgatgatcttaaggccggatactttgttgaagaa

SEQ ID NO: 122989 - DNA, 75 bp, Homo sapiens
tataccccactgtcactcggtgctacattgatgatcttaaggccggatactttgttgaagaagcttattttgtat

SEQ ID NO: 122990 - DNA, 76 bp, Homo sapiens
actgtcactcggtgctacattgatgatcttaaggccggatactttgttgaagaagcttattttgtatttgttgtca

SEQ ID NO: 122991 - DNA, 74 bp, Homo sapiens
ctacattgatgatcttaaggccggatactttgttgaagaagcttattttgtatttgttgtcacttgttagctct

SEQ ID NO: 122992 - DNA, 74 bp, Homo sapiens
tgatgatcttaaggccggatactttgttgaagaagcttattttgtatttgttgtcacttgttagctcttttcca

SEQ ID NO: 122993 - DNA, 70 bp, Homo sapiens
aaggccggatactttgttgaagaagcttattttgtatttgttgtcacttgttagctcttttccatcctta

SEQ ID NO: 122994 - DNA, 72 bp, Homo sapiens
tgttgaagaagcttattttgtatttgttgtcacttgttagctcttttccatccttaaaccacttagtactga

SEQ ID NO: 122995 - DNA, 70 bp, Homo sapiens
agcttattttgtatttgttgtcacttgttagctcttttccatccttaaaccacttagtactgagttcagg

SEQ ID NO: 122996 - DNA, 73 bp, Homo sapiens
ttgtatttgttgtcacttgttagctcttttccatccttaaaccacttagtactgagttcaggggtgccagcta

SEQ ID NO: 122997 - DNA, 74 bp, Homo sapiens
tcacttgttagctcttttccatccttaaaccacttagtactgagttcaggggtgccagctactgtacactccaa

SEQ ID NO: 122998 - DNA, 73 bp, Homo sapiens
ttagctcttttccatccttaaaccacttagtactgagttcaggggtgccagctactgtacactccaaggtaca

SEQ ID NO: 122999 - DNA, 73 bp, Homo sapiens
ttccatccttaaaccacttagtactgagttcaggggtgccagctactgtacactccaaggtacaggtgtctcc

SEQ ID NO: 123000 - DNA, 70 bp, Homo sapiens
acttagtactgagttcaggggtgccagctactgtacactccaaggtacaggtgtctcccgtggtaacttt

SEQ ID NO: 123001 - DNA, 72 bp, Homo sapiens
gtactgagttcaggggtgccagctactgtacactccaaggtacaggtgtctcccgtggtaacttttatggat

SEQ ID NO: 123002 - DNA, 73 bp, Homo sapiens
gtgccagctactgtacactccaaggtacaggtgtctcccgtggtaacttttatggattctggcttttctacaa

SEQ ID NO: 123003 - DNA, 70 bp, Homo sapiens
ctactgtacactccaaggtacaggtgtctcccgtggtaacttttatggattctggcttttctacaattgt

SEQ ID NO: 123004 - DNA, 73 bp, Homo sapiens
tccaaggtacaggtgtctcccgtggtaacttttatggattctggcttttctacaattgttgcaggctctggaa

SEQ ID NO: 123005 - DNA, 75 bp, Homo sapiens
gtggtaacttttatggattctggcttttctacaattgttgcaggctctggaatgaaatgtaaaagatatccatat

SEQ ID NO: 123006 - DNA, 81 bp, Homo sapiens
gtgagtgtgtgccttgtatctgtgataacatcatctttttactaaccgagaacggatagcgtggcgaagcactcttgcatc

SEQ ID NO: 123007 - DNA, 82 bp, Homo sapiens
tgtgtgccttgtatctgtgataacatcatctttttactaaccgagaacggatagcgtggcgaagcactcttgcatcccagca

SEQ ID NO: 123008 - DNA, 78 bp, Homo sapiens
tatctgtgataacatcatctttttactaaccgagaacggatagcgtggcgaagcactcttgcatcccagcatcgtttt

SEQ ID NO: 123009 - DNA, 77 bp, Homo sapiens
atcatctttttactaaccgagaacggatagcgtggcgaagcactcttgcatcccagcatcgtttttgatctgacaag

SEQ ID NO: 123010 - DNA, 76 bp, Homo sapiens
tttttactaaccgagaacggatagcgtggcgaagcactcttgcatcccagcatcgtttttgatctgacaagtgtat

SEQ ID NO: 123011 - DNA, 79 bp, Homo sapiens
aacggatagcgtggcgaagcactcttgcatcccagcatcgtttttgatctgacaagtgtattttccagcattggctggt

SEQ ID NO: 123012 - DNA, 81 bp, Homo sapiens
gtggcgaagcactcttgcatcccagcatcgtttttgatctgacaagtgtattttccagcattggctggttccactcttgaa

SEQ ID NO: 123013 - DNA, 78 bp, Homo sapiens
actcttgcatcccagcatcgtttttgatctgacaagtgtattttccagcattggctggttccactcttgaaaactgta

SEQ ID NO: 123014 - DNA, 74 bp, Homo sapiens
atcccagcatcgtttttgatctgacaagtgtattttccagcattggctggttccactcttgaaaactgtaaggt

SEQ ID NO: 123015 - DNA, 74 bp, Homo sapiens
tttttgatctgacaagtgtattttccagcattggctggttccactcttgaaaactgtaaggttgcaatgttttc

SEQ ID NO: 123016 - DNA, 75 bp, Homo sapiens
atctgacaagtgtattttccagcattggctggttccactcttgaaaactgtaaggttgcaatgttttctgaataa

SEQ ID NO: 123017 - DNA, 74 bp, Homo sapiens
attttccagcattggctggttccactcttgaaaactgtaaggttgcaatgttttctgaataagaaatccatatg

SEQ ID NO: 123018 - DNA, 73 bp, Homo sapiens
attggctggttccactcttgaaaactgtaaggttgcaatgttttctgaataagaaatccatatgttgtcactt

SEQ ID NO: 123019 - DNA, 73 bp, Homo sapiens
ccactcttgaaaactgtaaggttgcaatgttttctgaataagaaatccatatgttgtcactttctctaacgat

SEQ ID NO: 123020 - DNA, 72 bp, Homo sapiens
gaaaactgtaaggttgcaatgttttctgaataagaaatccatatgttgtcactttctctaacgatttctccc

SEQ ID NO: 123021 - DNA, 73 bp, Homo sapiens
ggttgcaatgttttctgaataagaaatccatatgttgtcactttctctaacgatttctcccttatctttgaac

SEQ ID NO: 123022 - DNA, 74 bp, Homo sapiens
tttctgaataagaaatccatatgttgtcactttctctaacgatttctcccttatctttgaaccacaccactgaa

SEQ ID NO: 123023 - DNA, 72 bp, Homo sapiens
aataagaaatccatatgttgtcactttctctaacgatttctcccttatctttgaaccacaccactgaaatgg

SEQ ID NO: 123024 - DNA, 74 bp, Homo sapiens
tatgttgtcactttctctaacgatttctcccttatctttgaaccacaccactgaaatgggttcagcgccttcaa

SEQ ID NO: 123025 - DNA, 71 bp, Homo sapiens
actttctctaacgatttctcccttatctttgaaccacaccactgaaatgggttcagcgccttcaatggtag

SEQ ID NO: 123026 - DNA, 76 bp, Homo sapiens
ctaacgatttctcccttatctttgaaccacaccactgaaatgggttcagcgccttcaatggtagtctgcagctgaa

SEQ ID NO: 123027 - DNA, 76 bp, Homo sapiens
ttatctttgaaccacaccactgaaatgggttcagcgccttcaatggtagtctgcagctgaacttctttaccaacga

SEQ ID NO: 123028 - DNA, 76 bp, Homo sapiens
aaccacaccactgaaatgggttcagcgccttcaatggtagtctgcagctgaacttctttaccaacgacagtagata

SEQ ID NO: 123029 - DNA, 79 bp, Homo sapiens
actgaaatgggttcagcgccttcaatggtagtctgcagctgaacttctttaccaacgacagtagatatgtcactgagct

SEQ ID NO: 123030 - DNA, 81 bp, Homo sapiens
ttcagcgccttcaatggtagtctgcagctgaacttctttaccaacgacagtagatatgtcactgagcttcttcacaaatct

SEQ ID NO: 123031 - DNA, 79 bp, Homo sapiens
ccttcaatggtagtctgcagctgaacttctttaccaacgacagtagatatgtcactgagcttcttcacaaatcttggtg

SEQ ID NO: 123032 - DNA, 82 bp, Homo sapiens
tagtctgcagctgaacttctttaccaacgacagtagatatgtcactgagcttcttcacaaatcttggtggtgctgatgaaaa

SEQ ID NO: 123033 - DNA, 76 bp, Homo sapiens
aacttctttaccaacgacagtagatatgtcactgagcttcttcacaaatcttggtggtgctgatgaaaaaggagga

SEQ ID NO: 123034 - DNA, 77 bp, Homo sapiens
tttaccaacgacagtagatatgtcactgagcttcttcacaaatcttggtggtgctgatgaaaaaggaggaaagcctg

SEQ ID NO: 123035 - DNA, 74 bp, Homo sapiens
tagatatgtcactgagcttcttcacaaatcttggtggtgctgatgaaaaaggaggaaagcctgggttttaaaat

SEQ ID NO: 123036 - DNA, 77 bp, Homo sapiens
attacaattagaagggaagtagtgagcagaagtgaatgcagtccatctaacctttgagagcgatggaaccaacgcaa

SEQ ID NO: 123037 - DNA, 81 bp, Homo sapiens
gaagtagtgagcagaagtgaatgcagtccatctaacctttgagagcgatggaaccaacgcaagtgtcgcttcccacatcat

SEQ ID NO: 123038 - DNA, 80 bp, Homo sapiens
gcagaagtgaatgcagtccatctaacctttgagagcgatggaaccaacgcaagtgtcgcttcccacatcatttgtggctt

SEQ ID NO: 123039 - DNA, 79 bp, Homo sapiens
agtgaatgcagtccatctaacctttgagagcgatggaaccaacgcaagtgtcgcttcccacatcatttgtggctttaca

SEQ ID NO: 123040 - DNA, 76 bp, Homo sapiens
atctaacctttgagagcgatggaaccaacgcaagtgtcgcttcccacatcatttgtggctttacactgatattccc

SEQ ID NO: 123041 - DNA, 77 bp, Homo sapiens
cctttgagagcgatggaaccaacgcaagtgtcgcttcccacatcatttgtggctttacactgatattccccaatgtc

SEQ ID NO: 123042 - DNA, 82 bp, Homo sapiens
atggaaccaacgcaagtgtcgcttcccacatcatttgtggctttacactgatattccccaatgtctgcagcatcgacattca

SEQ ID NO: 123043 - DNA, 83 bp, Homo sapiens
aagtgtcgcttcccacatcatttgtggctttacactgatattccccaatgtctgcagcatcgacattcaggatgtggatactg

SEQ ID NO: 123044 - DNA, 82 bp, Homo sapiens
ttcccacatcatttgtggctttacactgatattccccaatgtctgcagcatcgacattcaggatgtggatactggttaggaa

SEQ ID NO: 123045 - DNA, 82 bp, Homo sapiens
atcatttgtggctttacactgatattccccaatgtctgcagcatcgacattcaggatgtggatactggttaggaagttctca

SEQ ID NO: 123046 - DNA, 82 bp, Homo sapiens
tttacactgatattccccaatgtctgcagcatcgacattcaggatgtggatactggttaggaagttctcagacattatcttg

SEQ ID NO: 123047 - DNA, 80 bp, Homo sapiens
atattccccaatgtctgcagcatcgacattcaggatgtggatactggttaggaagttctcagacattatcttgtacttct

SEQ ID NO: 123048 - DNA, 82 bp, Homo sapiens
atgtctgcagcatcgacattcaggatgtggatactggttaggaagttctcagacattatcttgtacttcttgccgctcctaa

SEQ ID NO: 123049 - DNA, 77 bp, Homo sapiens
atcgacattcaggatgtggatactggttaggaagttctcagacattatcttgtacttcttgccgctcctaagttctc

SEQ ID NO: 123050 - DNA, 76 bp, Homo sapiens
gatgtggatactggttaggaagttctcagacattatcttgtacttcttgccgctcctaagttctctcttgtcttta

SEQ ID NO: 123051 - DNA, 74 bp, Homo sapiens
atactggttaggaagttctcagacattatcttgtacttcttgccgctcctaagttctctcttgtctttatacca

SEQ ID NO: 123052 - DNA, 73 bp, Homo sapiens
agttctcagacattatcttgtacttcttgccgctcctaagttctctcttgtctttataccaagaaacgtgaaa

SEQ ID NO: 123053 - DNA, 71 bp, Homo sapiens
agacattatcttgtacttcttgccgctcctaagttctctcttgtctttataccaagaaacgtgaaatgggg

SEQ ID NO: 123054 - DNA, 72 bp, Homo sapiens
ttgtacttcttgccgctcctaagttctctcttgtctttataccaagaaacgtgaaatgggggagtgccctga

SEQ ID NO: 123055 - DNA, 73 bp, Homo sapiens
ccgctcctaagttctctcttgtctttataccaagaaacgtgaaatgggggagtgccctgaagctcacattcaa

SEQ ID NO: 123056 - DNA, 74 bp, Homo sapiens
taagttctctcttgtctttataccaagaaacgtgaaatgggggagtgccctgaagctcacattcaaggtgaaca

SEQ ID NO: 123057 - DNA, 76 bp, Homo sapiens
ttgtctttataccaagaaacgtgaaatgggggagtgccctgaagctcacattcaaggtgaacatcagctcctttca

SEQ ID NO: 123058 - DNA, 78 bp, Homo sapiens
taccaagaaacgtgaaatgggggagtgccctgaagctcacattcaaggtgaacatcagctcctttcagtgtctctata

SEQ ID NO: 123059 - DNA, 77 bp, Homo sapiens
aaatgggggagtgccctgaagctcacattcaaggtgaacatcagctcctttcagtgtctctataggatgaggctttt

SEQ ID NO: 123060 - DNA, 79 bp, Homo sapiens
agtgccctgaagctcacattcaaggtgaacatcagctcctttcagtgtctctataggatgaggctttttgcggaaaatg

SEQ ID NO: 123061 - DNA, 76 bp, Homo sapiens
aagctcacattcaaggtgaacatcagctcctttcagtgtctctataggatgaggctttttgcggaaaatgggtggt

SEQ ID NO: 123062 - DNA, 72 bp, Homo sapiens
aaggtgaacatcagctcctttcagtgtctctataggatgaggctttttgcggaaaatgggtggttctaaaat

SEQ ID NO: 123063 - DNA, 71 bp, Homo sapiens
atcagctcctttcagtgtctctataggatgaggctttttgcggaaaatgggtggttctaaaattggaaaaa

SEQ ID NO: 123064 - DNA, 68 bp, Homo sapiens
tttcagtgtctctataggatgaggctttttgcggaaaatgggtggttctaaaattggaaaaaaggaaa

SEQ ID NO: 123065 - DNA, 67 bp, Homo sapiens
tctctataggatgaggctttttgcggaaaatgggtggttctaaaattggaaaaaaggaaaatacgga

SEQ ID NO: 123066 - DNA, 69 bp, Homo sapiens
aattaaagaggaggctaatgtgaaaaacacacaggtggggagagcgctgacctttaacttttaaggatg

SEQ ID NO: 123067 - DNA, 79 bp, Homo sapiens
aaaaacacacaggtggggagagcgctgacctttaacttttaaggatgtgctgctgctggcactgcctgctgcattgtgg

SEQ ID NO: 123068 - DNA, 83 bp, Homo sapiens
tggggagagcgctgacctttaacttttaaggatgtgctgctgctggcactgcctgctgcattgtgggcctcacaggtgtagtc

SEQ ID NO: 123069 - DNA, 83 bp, Homo sapiens
gctgacctttaacttttaaggatgtgctgctgctggcactgcctgctgcattgtgggcctcacaggtgtagtctccactgtct

SEQ ID NO: 123070 - DNA, 83 bp, Homo sapiens
tttaacttttaaggatgtgctgctgctggcactgcctgctgcattgtgggcctcacaggtgtagtctccactgtcttcaacac

SEQ ID NO: 123071 - DNA, 89 bp, Homo sapiens
ttaaggatgtgctgctgctggcactgcctgctgcattgtgggcctcacaggtgtagtctccactgtcttcaacactgagattgtgcatt

SEQ ID NO: 123072 - DNA, 89 bp, Homo sapiens
tgctggcactgcctgctgcattgtgggcctcacaggtgtagtctccactgtcttcaacactgagattgtgcatttccagcacagccacc

SEQ ID NO: 123073 - DNA, 87 bp, Homo sapiens
tgcctgctgcattgtgggcctcacaggtgtagtctccactgtcttcaacactgagattgtgcatttccagcacagccaccgagtcaa

SEQ ID NO: 123074 - DNA, 81 bp, Homo sapiens
attgtgggcctcacaggtgtagtctccactgtcttcaacactgagattgtgcatttccagcacagccaccgagtcaacgaa

SEQ ID NO: 123075 - DNA, 84 bp, Homo sapiens
tcacaggtgtagtctccactgtcttcaacactgagattgtgcatttccagcacagccaccgagtcaacgaatgacattctgaat

SEQ ID NO: 123076 - DNA, 82 bp, Homo sapiens
gtgtagtctccactgtcttcaacactgagattgtgcatttccagcacagccaccgagtcaacgaatgacattctgaatttac

SEQ ID NO: 123077 - DNA, 84 bp, Homo sapiens
tcttcaacactgagattgtgcatttccagcacagccaccgagtcaacgaatgacattctgaatttactgctctcttgaatttca

SEQ ID NO: 123078 - DNA, 79 bp, Homo sapiens
catttccagcacagccaccgagtcaacgaatgacattctgaatttactgctctcttgaatttcagtctcgtccttatac

SEQ ID NO: 123079 - DNA, 76 bp, Homo sapiens
acagccaccgagtcaacgaatgacattctgaatttactgctctcttgaatttcagtctcgtccttataccataaaa

SEQ ID NO: 123080 - DNA, 75 bp, Homo sapiens
gagtcaacgaatgacattctgaatttactgctctcttgaatttcagtctcgtccttataccataaaactttgatt

SEQ ID NO: 123081 - DNA, 75 bp, Homo sapiens
acgaatgacattctgaatttactgctctcttgaatttcagtctcgtccttataccataaaactttgatttctgga

SEQ ID NO: 123082 - DNA, 71 bp, Homo sapiens
aatttactgctctcttgaatttcagtctcgtccttataccataaaactttgatttctggagacccaccgat

SEQ ID NO: 123083 - DNA, 74 bp, Homo sapiens
ctctcttgaatttcagtctcgtccttataccataaaactttgatttctggagacccaccgattttgcattcata

SEQ ID NO: 123084 - DNA, 71 bp, Homo sapiens
aatttcagtctcgtccttataccataaaactttgatttctggagacccaccgattttgcattcataccttg

SEQ ID NO: 123085 - DNA, 73 bp, Homo sapiens
tccttataccataaaactttgatttctggagacccaccgattttgcattcataccttgtgaattcatcctgtt

SEQ ID NO: 123086 - DNA, 73 bp, Homo sapiens
ataaaactttgatttctggagacccaccgattttgcattcataccttgtgaattcatcctgtttcacaattct

SEQ ID NO: 123087 - DNA, 76 bp, Homo sapiens
ttgatttctggagacccaccgattttgcattcataccttgtgaattcatcctgtttcacaattcttgaaggttcta

SEQ ID NO: 123088 - DNA, 74 bp, Homo sapiens
accgattttgcattcataccttgtgaattcatcctgtttcacaattcttgaaggttctagcttcttaatgaacc

SEQ ID NO: 123089 - DNA, 74 bp, Homo sapiens
ttcataccttgtgaattcatcctgtttcacaattcttgaaggttctagcttcttaatgaacctgggtggttcta

SEQ ID NO: 123090 - DNA, 72 bp, Homo sapiens
aattcatcctgtttcacaattcttgaaggttctagcttcttaatgaacctgggtggttctatggaaccaaga

SEQ ID NO: 123091 - DNA, 70 bp, Homo sapiens
tgtttcacaattcttgaaggttctagcttcttaatgaacctgggtggttctatggaaccaagaggaaaaa

SEQ ID NO: 123092 - DNA, 69 bp, Homo sapiens
acaattcttgaaggttctagcttcttaatgaacctgggtggttctatggaaccaagaggaaaaacacag

SEQ ID NO: 123093 - DNA, 66 bp, Homo sapiens
aaggttctagcttcttaatgaacctgggtggttctatggaaccaagaggaaaaacacagggtaagg

SEQ ID NO: 123094 - DNA, 74 bp, Homo sapiens
aaatgtaaaagagatcttgctccttcactctaacaagtaccttgtacacccagctgagcagaacaagagtcttt

SEQ ID NO: 123095 - DNA, 81 bp, Homo sapiens
tcttgctccttcactctaacaagtaccttgtacacccagctgagcagaacaagagtcttttccagcgatgttgcttgcata

SEQ ID NO: 123096 - DNA, 81 bp, Homo sapiens
ttcactctaacaagtaccttgtacacccagctgagcagaacaagagtcttttccagcgatgttgcttgcatagcaggtgta

SEQ ID NO: 123097 - DNA, 80 bp, Homo sapiens
taacaagtaccttgtacacccagctgagcagaacaagagtcttttccagcgatgttgcttgcatagcaggtgtactgccc

SEQ ID NO: 123098 - DNA, 83 bp, Homo sapiens
tacacccagctgagcagaacaagagtcttttccagcgatgttgcttgcatagcaggtgtactgcccggcatcgcctttgccta

SEQ ID NO: 123099 - DNA, 82 bp, Homo sapiens
tgagcagaacaagagtcttttccagcgatgttgcttgcatagcaggtgtactgcccggcatcgcctttgcctactttgagaa

SEQ ID NO: 123100 - DNA, 78 bp, Homo sapiens
aacaagagtcttttccagcgatgttgcttgcatagcaggtgtactgcccggcatcgcctttgcctactttgagaactg

SEQ ID NO: 123101 - DNA, 82 bp, Homo sapiens
ttttccagcgatgttgcttgcatagcaggtgtactgcccggcatcgcctttgcctactttgagaactgtcagagtggcagta

SEQ ID NO: 123102 - DNA, 80 bp, Homo sapiens
atgttgcttgcatagcaggtgtactgcccggcatcgcctttgcctactttgagaactgtcagagtggcagtattttctac

SEQ ID NO: 123103 - DNA, 77 bp, Homo sapiens
atagcaggtgtactgcccggcatcgcctttgcctactttgagaactgtcagagtggcagtattttctaccaaagtca

SEQ ID NO: 123104 - DNA, 76 bp, Homo sapiens
tactgcccggcatcgcctttgcctactttgagaactgtcagagtggcagtattttctaccaaagtcatcttgtagt

SEQ ID NO: 123105 - DNA, 75 bp, Homo sapiens
atcgcctttgcctactttgagaactgtcagagtggcagtattttctaccaaagtcatcttgtagttgcctccagg

SEQ ID NO: 123106 - DNA, 76 bp, Homo sapiens
tttgcctactttgagaactgtcagagtggcagtattttctaccaaagtcatcttgtagttgcctccagggcgaatc

SEQ ID NO: 123107 - DNA, 74 bp, Homo sapiens
aactgtcagagtggcagtattttctaccaaagtcatcttgtagttgcctccagggcgaatctctcggttatctt

SEQ ID NO: 123108 - DNA, 73 bp, Homo sapiens
agtggcagtattttctaccaaagtcatcttgtagttgcctccagggcgaatctctcggttatctttggcccaa

SEQ ID NO: 123109 - DNA, 71 bp, Homo sapiens
attttctaccaaagtcatcttgtagttgcctccagggcgaatctctcggttatctttggcccaagtgattt

SEQ ID NO: 123110 - DNA, 75 bp, Homo sapiens
aaagtcatcttgtagttgcctccagggcgaatctctcggttatctttggcccaagtgattttgattggtgcagtc

SEQ ID NO: 123111 - DNA, 75 bp, Homo sapiens
tcttgtagttgcctccagggcgaatctctcggttatctttggcccaagtgattttgattggtgcagtcccagtta

SEQ ID NO: 123112 - DNA, 74 bp, Homo sapiens
cagggcgaatctctcggttatctttggcccaagtgattttgattggtgcagtcccagttacatgacatttaaaa

SEQ ID NO: 123113 - DNA, 73 bp, Homo sapiens
aatctctcggttatctttggcccaagtgattttgattggtgcagtcccagttacatgacatttaaaagtacca

SEQ ID NO: 123114 - DNA, 73 bp, Homo sapiens
ttatctttggcccaagtgattttgattggtgcagtcccagttacatgacatttaaaagtaccactttctccaa

SEQ ID NO: 123115 - DNA, 76 bp, Homo sapiens
aagtgattttgattggtgcagtcccagttacatgacatttaaaagtaccactttctccaagagcaagatctactga

SEQ ID NO: 123116 - DNA, 76 bp, Homo sapiens
attttgattggtgcagtcccagttacatgacatttaaaagtaccactttctccaagagcaagatctactgatacag

SEQ ID NO: 123117 - DNA, 75 bp, Homo sapiens
agtcccagttacatgacatttaaaagtaccactttctccaagagcaagatctactgatacaggctttagatcaaa

SEQ ID NO: 123118 - DNA, 74 bp, Homo sapiens
agttacatgacatttaaaagtaccactttctccaagagcaagatctactgatacaggctttagatcaaagaaag

SEQ ID NO: 123119 - DNA, 74 bp, Homo sapiens
atttaaaagtaccactttctccaagagcaagatctactgatacaggctttagatcaaagaaaggaggcacttca

SEQ ID NO: 123120 - DNA, 79 bp, Homo sapiens
actttctccaagagcaagatctactgatacaggctttagatcaaagaaaggaggcacttcatgctctgaaaagaatgaa

SEQ ID NO: 123121 - DNA, 80 bp, Homo sapiens
aagagcaagatctactgatacaggctttagatcaaagaaaggaggcacttcatgctctgaaaagaatgaagaccaacatg

SEQ ID NO: 123122 - DNA, 78 bp, Homo sapiens
tactgatacaggctttagatcaaagaaaggaggcacttcatgctctgaaaagaatgaagaccaacatggtgattttta

SEQ ID NO: 123123 - DNA, 75 bp, Homo sapiens
atacaggctttagatcaaagaaaggaggcacttcatgctctgaaaagaatgaagaccaacatggtgatttttatt

SEQ ID NO: 123124 - DNA, 83 bp, Homo sapiens
agcagtgaagctgctttacaatgaagagggtactgtgagttactcacctgagagaatgagcttggcactggatgaagcagtcc

SEQ ID NO: 123125 - DNA, 81 bp, Homo sapiens
tgctttacaatgaagagggtactgtgagttactcacctgagagaatgagcttggcactggatgaagcagtcccaagaggat

SEQ ID NO: 123126 - DNA, 81 bp, Homo sapiens
tacaatgaagagggtactgtgagttactcacctgagagaatgagcttggcactggatgaagcagtcccaagaggattagaa

SEQ ID NO: 123127 - DNA, 83 bp, Homo sapiens
ggtactgtgagttactcacctgagagaatgagcttggcactggatgaagcagtcccaagaggattagaagcagagcaattata

SEQ ID NO: 123128 - DNA, 82 bp, Homo sapiens
agttactcacctgagagaatgagcttggcactggatgaagcagtcccaagaggattagaagcagagcaattatactgcccta

SEQ ID NO: 123129 - DNA, 84 bp, Homo sapiens
gagaatgagcttggcactggatgaagcagtcccaagaggattagaagcagagcaattatactgccctatgtggctctggtcagt

SEQ ID NO: 123130 - DNA, 81 bp, Homo sapiens
ttggcactggatgaagcagtcccaagaggattagaagcagagcaattatactgccctatgtggctctggtcagtttgtaaa

SEQ ID NO: 123131 - DNA, 79 bp, Homo sapiens
actggatgaagcagtcccaagaggattagaagcagagcaattatactgccctatgtggctctggtcagtttgtaaaatc

SEQ ID NO: 123132 - DNA, 80 bp, Homo sapiens
tcccaagaggattagaagcagagcaattatactgccctatgtggctctggtcagtttgtaaaatctgaagagttgctaca

SEQ ID NO: 123133 - DNA, 80 bp, Homo sapiens
attagaagcagagcaattatactgccctatgtggctctggtcagtttgtaaaatctgaagagttgctacattatgaacaa

SEQ ID NO: 123134 - DNA, 79 bp, Homo sapiens
agagcaattatactgccctatgtggctctggtcagtttgtaaaatctgaagagttgctacattatgaacaaaagatgtc

SEQ ID NO: 123135 - DNA, 81 bp, Homo sapiens
tggctctggtcagtttgtaaaatctgaagagttgctacattatgaacaaaagatgtctgcaaattagcatcatctttcaaa

SEQ ID NO: 123136 - DNA, 79 bp, Homo sapiens
ctggtcagtttgtaaaatctgaagagttgctacattatgaacaaaagatgtctgcaaattagcatcatctttcaaaaga

SEQ ID NO: 123137 - DNA, 76 bp, Homo sapiens
aaaatctgaagagttgctacattatgaacaaaagatgtctgcaaattagcatcatctttcaaaagaaccccatcct

SEQ ID NO: 123138 - DNA, 76 bp, Homo sapiens
aagagttgctacattatgaacaaaagatgtctgcaaattagcatcatctttcaaaagaaccccatccttgtaccaa

SEQ ID NO: 123139 - DNA, 76 bp, Homo sapiens
attatgaacaaaagatgtctgcaaattagcatcatctttcaaaagaaccccatccttgtaccaagacacttgaaga

SEQ ID NO: 123140 - DNA, 75 bp, Homo sapiens
aaaagatgtctgcaaattagcatcatctttcaaaagaaccccatccttgtaccaagacacttgaagaggttctga

SEQ ID NO: 123141 - DNA, 77 bp, Homo sapiens
aaattagcatcatctttcaaaagaaccccatccttgtaccaagacacttgaagaggttctgagccattgatgcggca

SEQ ID NO: 123142 - DNA, 78 bp, Homo sapiens
catctttcaaaagaaccccatccttgtaccaagacacttgaagaggttctgagccattgatgcggcattcaaatgcaa

SEQ ID NO: 123143 - DNA, 77 bp, Homo sapiens
ttcaaaagaaccccatccttgtaccaagacacttgaagaggttctgagccattgatgcggcattcaaatgcaactgg

SEQ ID NO: 123144 - DNA, 82 bp, Homo sapiens
atccttgtaccaagacacttgaagaggttctgagccattgatgcggcattcaaatgcaactgggaagcctagagtctcatga

SEQ ID NO: 123145 - DNA, 81 bp, Homo sapiens
aagacacttgaagaggttctgagccattgatgcggcattcaaatgcaactgggaagcctagagtctcatgaacgtctttca

SEQ ID NO: 123146 - DNA, 78 bp, Homo sapiens
aagaggttctgagccattgatgcggcattcaaatgcaactgggaagcctagagtctcatgaacgtctttcagttttct

SEQ ID NO: 123147 - DNA, 81 bp, Homo sapiens
ttctgagccattgatgcggcattcaaatgcaactgggaagcctagagtctcatgaacgtctttcagttttcttgcaaagaa

SEQ ID NO: 123148 - DNA, 72 bp, Homo sapiens
attcaaatgcaactgggaagcctagagtctcatgaacgtctttcagttttcttgcaaagaaaggtggaagtt

SEQ ID NO: 123149 - DNA, 74 bp, Homo sapiens
tgggaagcctagagtctcatgaacgtctttcagttttcttgcaaagaaaggtggaagtttgcgcgctgtaaaga

SEQ ID NO: 123150 - DNA, 73 bp, Homo sapiens
ctagagtctcatgaacgtctttcagttttcttgcaaagaaaggtggaagtttgcgcgctgtaaagaagttaca

SEQ ID NO: 123151 - DNA, 69 bp, Homo sapiens
aacgtctttcagttttcttgcaaagaaaggtggaagtttgcgcgctgtaaagaagttacagataatcct

SEQ ID NO: 123152 - DNA, 71 bp, Homo sapiens
tttcagttttcttgcaaagaaaggtggaagtttgcgcgctgtaaagaagttacagataatccttatttaca

SEQ ID NO: 123153 - DNA, 76 bp, Homo sapiens
tttaagaaaatgaatctgttcacacacactaggttaaacaacaccatcacctttgataacaagcacagctgaagaa

SEQ ID NO: 123154 - DNA, 78 bp, Homo sapiens
atgaatctgttcacacacactaggttaaacaacaccatcacctttgataacaagcacagctgaagaagcgactgcccc

SEQ ID NO: 123155 - DNA, 76 bp, Homo sapiens
acacactaggttaaacaacaccatcacctttgataacaagcacagctgaagaagcgactgcccccacactgttgtc

SEQ ID NO: 123156 - DNA, 81 bp, Homo sapiens
ttaaacaacaccatcacctttgataacaagcacagctgaagaagcgactgcccccacactgttgtctgccttgcatgaata

SEQ ID NO: 123157 - DNA, 81 bp, Homo sapiens
aacaccatcacctttgataacaagcacagctgaagaagcgactgcccccacactgttgtctgccttgcatgaatactctcc

SEQ ID NO: 123158 - DNA, 83 bp, Homo sapiens
acagctgaagaagcgactgcccccacactgttgtctgccttgcatgaatactctcccacatcactgtgatccactttgttgat

SEQ ID NO: 123159 - DNA, 81 bp, Homo sapiens
aagaagcgactgcccccacactgttgtctgccttgcatgaatactctcccacatcactgtgatccactttgttgattacta

SEQ ID NO: 123160 - DNA, 79 bp, Homo sapiens
ccccacactgttgtctgccttgcatgaatactctcccacatcactgtgatccactttgttgattactaaggaagcaacg

SEQ ID NO: 123161 - DNA, 79 bp, Homo sapiens
ttgtctgccttgcatgaatactctcccacatcactgtgatccactttgttgattactaaggaagcaacgttatttttga

SEQ ID NO: 123162 - DNA, 78 bp, Homo sapiens
ttgcatgaatactctcccacatcactgtgatccactttgttgattactaaggaagcaacgttatttttgaattgcatt

SEQ ID NO: 123163 - DNA, 75 bp, Homo sapiens
gaatactctcccacatcactgtgatccactttgttgattactaaggaagcaacgttatttttgaattgcatttta

SEQ ID NO: 123164 - DNA, 79 bp, Homo sapiens
tcactgtgatccactttgttgattactaaggaagcaacgttatttttgaattgcattttatatgcaggagctgatcgta

SEQ ID NO: 123165 - DNA, 75 bp, Homo sapiens
atccactttgttgattactaaggaagcaacgttatttttgaattgcattttatatgcaggagctgatcgtagctt

SEQ ID NO: 123166 - DNA, 76 bp, Homo sapiens
ttgattactaaggaagcaacgttatttttgaattgcattttatatgcaggagctgatcgtagctttgtgtgttctt

SEQ ID NO: 123167 - DNA, 76 bp, Homo sapiens
taaggaagcaacgttatttttgaattgcattttatatgcaggagctgatcgtagctttgtgtgttctttataccaa

SEQ ID NO: 123168 - DNA, 74 bp, Homo sapiens
aacgttatttttgaattgcattttatatgcaggagctgatcgtagctttgtgtgttctttataccaagaaattc

SEQ ID NO: 123169 - DNA, 76 bp, Homo sapiens
aattgcattttatatgcaggagctgatcgtagctttgtgtgttctttataccaagaaattctaatttctggagttc

SEQ ID NO: 123170 - DNA, 77 bp, Homo sapiens
tatatgcaggagctgatcgtagctttgtgtgttctttataccaagaaattctaatttctggagttccatccacttta

SEQ ID NO: 123171 - DNA, 73 bp, Homo sapiens
ctgatcgtagctttgtgtgttctttataccaagaaattctaatttctggagttccatccactttacactgtaa

SEQ ID NO: 123172 - DNA, 70 bp, Homo sapiens
cgtagctttgtgtgttctttataccaagaaattctaatttctggagttccatccactttacactgtaaag

SEQ ID NO: 123173 - DNA, 71 bp, Homo sapiens
ttctttataccaagaaattctaatttctggagttccatccactttacactgtaaagttgcaggttctccaa

SEQ ID NO: 123174 - DNA, 73 bp, Homo sapiens
ataccaagaaattctaatttctggagttccatccactttacactgtaaagttgcaggttctccaatgactgct

SEQ ID NO: 123175 - DNA, 76 bp, Homo sapiens
attctaatttctggagttccatccactttacactgtaaagttgcaggttctccaatgactgcttccacatgttcca

SEQ ID NO: 123176 - DNA, 75 bp, Homo sapiens
agttccatccactttacactgtaaagttgcaggttctccaatgactgcttccacatgttccagaggttcaataaa

SEQ ID NO: 123177 - DNA, 73 bp, Homo sapiens
aggttctccaatgactgcttccacatgttccagaggttcaataaagtacggtggttctatggtacaaaggatg

SEQ ID NO: 123178 - DNA, 75 bp, Homo sapiens
cttccacatgttccagaggttcaataaagtacggtggttctatggtacaaaggatggtagtcagcaagtcagtca

SEQ ID NO: 123179 - DNA, 77 bp, Homo sapiens
atgtttgaaaagaaagagagcaataaaaagaggtagctgtcaacacacctaagacagacaccagagcttcacagata

SEQ ID NO: 123180 - DNA, 77 bp, Homo sapiens
aaaagaaagagagcaataaaaagaggtagctgtcaacacacctaagacagacaccagagcttcacagatatcttgac

SEQ ID NO: 123181 - DNA, 78 bp, Homo sapiens
aataaaaagaggtagctgtcaacacacctaagacagacaccagagcttcacagatatcttgaccagcctcattttcta

SEQ ID NO: 123182 - DNA, 84 bp, Homo sapiens
agaggtagctgtcaacacacctaagacagacaccagagcttcacagatatcttgaccagcctcattttctatcaggcagctgta

SEQ ID NO: 123183 - DNA, 87 bp, Homo sapiens
tgtcaacacacctaagacagacaccagagcttcacagatatcttgaccagcctcattttctatcaggcagctgtactgtgcataatc

SEQ ID NO: 123184 - DNA, 88 bp, Homo sapiens
taagacagacaccagagcttcacagatatcttgaccagcctcattttctatcaggcagctgtactgtgcataatcctctattgtgctc

SEQ ID NO: 123185 - DNA, 86 bp, Homo sapiens
agagcttcacagatatcttgaccagcctcattttctatcaggcagctgtactgtgcataatcctctattgtgctctcaagaatttc

SEQ ID NO: 123186 - DNA, 86 bp, Homo sapiens
ttcacagatatcttgaccagcctcattttctatcaggcagctgtactgtgcataatcctctattgtgctctcaagaatttccagta

SEQ ID NO: 123187 - DNA, 81 bp, Homo sapiens
accagcctcattttctatcaggcagctgtactgtgcataatcctctattgtgctctcaagaatttccagtatggtagattt

SEQ ID NO: 123188 - DNA, 82 bp, Homo sapiens
attttctatcaggcagctgtactgtgcataatcctctattgtgctctcaagaatttccagtatggtagatttttctgtcata

SEQ ID NO: 123189 - DNA, 83 bp, Homo sapiens
tatcaggcagctgtactgtgcataatcctctattgtgctctcaagaatttccagtatggtagatttttctgtcatagtaatac

SEQ ID NO: 123190 - DNA, 84 bp, Homo sapiens
tactgtgcataatcctctattgtgctctcaagaatttccagtatggtagatttttctgtcatagtaatactgcatctctcagat

SEQ ID NO: 123191 - DNA, 82 bp, Homo sapiens
ataatcctctattgtgctctcaagaatttccagtatggtagatttttctgtcatagtaatactgcatctctcagattgtgaa

SEQ ID NO: 123192 - DNA, 82 bp, Homo sapiens
tattgtgctctcaagaatttccagtatggtagatttttctgtcatagtaatactgcatctctcagattgtgaaataagatac

SEQ ID NO: 123193 - DNA, 78 bp, Homo sapiens
gaatttccagtatggtagatttttctgtcatagtaatactgcatctctcagattgtgaaataagatactcgtccttta

SEQ ID NO: 123194 - DNA, 80 bp, Homo sapiens
agtatggtagatttttctgtcatagtaatactgcatctctcagattgtgaaataagatactcgtcctttatccagctcac

SEQ ID NO: 123195 - DNA, 81 bp, Homo sapiens
atttttctgtcatagtaatactgcatctctcagattgtgaaataagatactcgtcctttatccagctcactgagattggag

SEQ ID NO: 123196 - DNA, 83 bp, Homo sapiens
atagtaatactgcatctctcagattgtgaaataagatactcgtcctttatccagctcactgagattggaggtgtgccagtgta

SEQ ID NO: 123197 - DNA, 84 bp, Homo sapiens
catctctcagattgtgaaataagatactcgtcctttatccagctcactgagattggaggtgtgccagtgtatgtggcctcgaga

SEQ ID NO: 123198 - DNA, 80 bp, Homo sapiens
attgtgaaataagatactcgtcctttatccagctcactgagattggaggtgtgccagtgtatgtggcctcgagaactatg

SEQ ID NO: 123199 - DNA, 78 bp, Homo sapiens
aaataagatactcgtcctttatccagctcactgagattggaggtgtgccagtgtatgtggcctcgagaactatggggc

SEQ ID NO: 123200 - DNA, 81 bp, Homo sapiens
tcgtcctttatccagctcactgagattggaggtgtgccagtgtatgtggcctcgagaactatggggcttcctgtctcaaca

SEQ ID NO: 123201 - DNA, 82 bp, Homo sapiens
agctcactgagattggaggtgtgccagtgtatgtggcctcgagaactatggggcttcctgtctcaacactgaaatcagccaa

SEQ ID NO: 123202 - DNA, 78 bp, Homo sapiens
agattggaggtgtgccagtgtatgtggcctcgagaactatggggcttcctgtctcaacactgaaatcagccaatcttt

SEQ ID NO: 123203 - DNA, 78 bp, Homo sapiens
aggtgtgccagtgtatgtggcctcgagaactatggggcttcctgtctcaacactgaaatcagccaatcttttcacaaa

SEQ ID NO: 123204 - DNA, 76 bp, Homo sapiens
tcgagaactatggggcttcctgtctcaacactgaaatcagccaatcttttcacaaaggtggctggttctataagga

SEQ ID NO: 123205 - DNA, 75 bp, Homo sapiens
gggcttcctgtctcaacactgaaatcagccaatcttttcacaaaggtggctggttctataaggagaaaacatgtg

SEQ ID NO: 123206 - DNA, 73 bp, Homo sapiens
tctcaacactgaaatcagccaatcttttcacaaaggtggctggttctataaggagaaaacatgtgggtaaaat

SEQ ID NO: 123207 - DNA, 71 bp, Homo sapiens
acactgaaatcagccaatcttttcacaaaggtggctggttctataaggagaaaacatgtgggtaaaattct

SEQ ID NO: 123208 - DNA, 69 bp, Homo sapiens
gacttaagagaaattttaaaagatgtatatattgggggaaagagcaaacctttcacaaaaagatgtgtg

SEQ ID NO: 123209 - DNA, 70 bp, Homo sapiens
attttaaaagatgtatatattgggggaaagagcaaacctttcacaaaaagatgtgtggtacaggaagcac

SEQ ID NO: 123210 - DNA, 76 bp, Homo sapiens
aagatgtatatattgggggaaagagcaaacctttcacaaaaagatgtgtggtacaggaagcactgccagcatcatt

SEQ ID NO: 123211 - DNA, 75 bp, Homo sapiens
atattgggggaaagagcaaacctttcacaaaaagatgtgtggtacaggaagcactgccagcatcatttgtaacga

SEQ ID NO: 123212 - DNA, 76 bp, Homo sapiens
aaagagcaaacctttcacaaaaagatgtgtggtacaggaagcactgccagcatcatttgtaacgaggcaagaatag

SEQ ID NO: 123213 - DNA, 78 bp, Homo sapiens
tttcacaaaaagatgtgtggtacaggaagcactgccagcatcatttgtaacgaggcaagaatagtctccactttctaa

SEQ ID NO: 123214 - DNA, 81 bp, Homo sapiens
tacaggaagcactgccagcatcatttgtaacgaggcaagaatagtctccactttctaatggctgcacctcaaacaactcca

SEQ ID NO: 123215 - DNA, 76 bp, Homo sapiens
atcatttgtaacgaggcaagaatagtctccactttctaatggctgcacctcaaacaactccagttctgtgacaaaa

SEQ ID NO: 123216 - DNA, 76 bp, Homo sapiens
aacgaggcaagaatagtctccactttctaatggctgcacctcaaacaactccagttctgtgacaaaatcttccaga

SEQ ID NO: 123217 - DNA, 80 bp, Homo sapiens
aatagtctccactttctaatggctgcacctcaaacaactccagttctgtgacaaaatcttccagagagatgttgcatgac

SEQ ID NO: 123218 - DNA, 80 bp, Homo sapiens
actttctaatggctgcacctcaaacaactccagttctgtgacaaaatcttccagagagatgttgcatgactccccaggca

SEQ ID NO: 123219 - DNA, 80 bp, Homo sapiens
tggctgcacctcaaacaactccagttctgtgacaaaatcttccagagagatgttgcatgactccccaggcaccagttccc

SEQ ID NO: 123220 - DNA, 78 bp, Homo sapiens
acaactccagttctgtgacaaaatcttccagagagatgttgcatgactccccaggcaccagttccctgctgcctttaa

SEQ ID NO: 123221 - DNA, 76 bp, Homo sapiens
agttctgtgacaaaatcttccagagagatgttgcatgactccccaggcaccagttccctgctgcctttaaaccact

SEQ ID NO: 123222 - DNA, 75 bp, Homo sapiens
aaatcttccagagagatgttgcatgactccccaggcaccagttccctgctgcctttaaaccacttgaccttgaaa

SEQ ID NO: 123223 - DNA, 75 bp, Homo sapiens
tccagagagatgttgcatgactccccaggcaccagttccctgctgcctttaaaccacttgaccttgaaaggaggg

SEQ ID NO: 123224 - DNA, 76 bp, Homo sapiens
ttgcatgactccccaggcaccagttccctgctgcctttaaaccacttgaccttgaaaggaggggtgcctctgatga

SEQ ID NO: 123225 - DNA, 77 bp, Homo sapiens
ttccctgctgcctttaaaccacttgaccttgaaaggaggggtgcctctgatgacactggtgaatgtgaggctcattc

SEQ ID NO: 123226 - DNA, 75 bp, Homo sapiens
cctttaaaccacttgaccttgaaaggaggggtgcctctgatgacactggtgaatgtgaggctcattccaggcaaa

SEQ ID NO: 123227 - DNA, 75 bp, Homo sapiens
aaaccacttgaccttgaaaggaggggtgcctctgatgacactggtgaatgtgaggctcattccaggcaaaacttc

SEQ ID NO: 123228 - DNA, 77 bp, Homo sapiens
accttgaaaggaggggtgcctctgatgacactggtgaatgtgaggctcattccaggcaaaacttccacagaatcagg

SEQ ID NO: 123229 - DNA, 79 bp, Homo sapiens
gtgcctctgatgacactggtgaatgtgaggctcattccaggcaaaacttccacagaatcaggggtttgttcaaaagatg

SEQ ID NO: 123230 - DNA, 75 bp, Homo sapiens
atgacactggtgaatgtgaggctcattccaggcaaaacttccacagaatcaggggtttgttcaaaagatggtggt

SEQ ID NO: 123231 - DNA, 75 bp, Homo sapiens
gtgaatgtgaggctcattccaggcaaaacttccacagaatcaggggtttgttcaaaagatggtggttctagatat

SEQ ID NO: 123232 - DNA, 74 bp, Homo sapiens
ctcattccaggcaaaacttccacagaatcaggggtttgttcaaaagatggtggttctagatattgcaaggcgga

SEQ ID NO: 123233 - DNA, 71 bp, Homo sapiens
acttccacagaatcaggggtttgttcaaaagatggtggttctagatattgcaaggcggaaggggagataaa

SEQ ID NO: 123234 - DNA, 85 bp, Homo sapiens
atgaaagaggtgttagagaagcagcagctttatccttgcacactgaccttgcacagtcaggactgctgagcactcatcggaacca

SEQ ID NO: 123235 - DNA, 85 bp, Homo sapiens
aggtgttagagaagcagcagctttatccttgcacactgaccttgcacagtcaggactgctgagcactcatcggaaccagctacat

SEQ ID NO: 123236 - DNA, 88 bp, Homo sapiens
aagcagcagctttatccttgcacactgaccttgcacagtcaggactgctgagcactcatcggaaccagctacattggcagccacacac

SEQ ID NO: 123237 - DNA, 86 bp, Homo sapiens
ctttatccttgcacactgaccttgcacagtcaggactgctgagcactcatcggaaccagctacattggcagccacacacgtgtata

SEQ ID NO: 123238 - DNA, 87 bp, Homo sapiens
acactgaccttgcacagtcaggactgctgagcactcatcggaaccagctacattggcagccacacacgtgtatatgcctgtgtcgga

SEQ ID NO: 123239 - DNA, 87 bp, Homo sapiens
ttgcacagtcaggactgctgagcactcatcggaaccagctacattggcagccacacacgtgtatatgcctgtgtcggagggctccaa

SEQ ID NO: 123240 - DNA, 85 bp, Homo sapiens
actgctgagcactcatcggaaccagctacattggcagccacacacgtgtatatgcctgtgtcggagggctccaacaagctcagat

SEQ ID NO: 123241 - DNA, 83 bp, Homo sapiens
agcactcatcggaaccagctacattggcagccacacacgtgtatatgcctgtgtcggagggctccaacaagctcagattcaaa

SEQ ID NO: 123242 - DNA, 80 bp, Homo sapiens
aaccagctacattggcagccacacacgtgtatatgcctgtgtcggagggctccaacaagctcagattcaaagtacagacg

SEQ ID NO: 123243 - DNA, 76 bp, Homo sapiens
cacacgtgtatatgcctgtgtcggagggctccaacaagctcagattcaaagtacagacgttttccgaaaagctgga

SEQ ID NO: 123244 - DNA, 76 bp, Homo sapiens
tatatgcctgtgtcggagggctccaacaagctcagattcaaagtacagacgttttccgaaaagctggactgacatt

SEQ ID NO: 123245 - DNA, 74 bp, Homo sapiens
ctgtgtcggagggctccaacaagctcagattcaaagtacagacgttttccgaaaagctggactgacatttgggc

SEQ ID NO: 123246 - DNA, 75 bp, Homo sapiens
tccaacaagctcagattcaaagtacagacgttttccgaaaagctggactgacatttgggcccactaacaatctca

SEQ ID NO: 123247 - DNA, 73 bp, Homo sapiens
aagctcagattcaaagtacagacgttttccgaaaagctggactgacatttgggcccactaacaatctcatttc

SEQ ID NO: 123248 - DNA, 71 bp, Homo sapiens
aaagtacagacgttttccgaaaagctggactgacatttgggcccactaacaatctcatttccatcctgaaa

SEQ ID NO: 123249 - DNA, 73 bp, Homo sapiens
ttttccgaaaagctggactgacatttgggcccactaacaatctcatttccatcctgaaaccagccaactgaaa

SEQ ID NO: 123250 - DNA, 73 bp, Homo sapiens
aaaagctggactgacatttgggcccactaacaatctcatttccatcctgaaaccagccaactgaaatcggggc

SEQ ID NO: 123251 - DNA, 76 bp, Homo sapiens
actgacatttgggcccactaacaatctcatttccatcctgaaaccagccaactgaaatcggggctgagccagagac

SEQ ID NO: 123252 - DNA, 77 bp, Homo sapiens
cactaacaatctcatttccatcctgaaaccagccaactgaaatcggggctgagccagagactcggcactccaaaaca

SEQ ID NO: 123253 - DNA, 77 bp, Homo sapiens
acaatctcatttccatcctgaaaccagccaactgaaatcggggctgagccagagactcggcactccaaaacaactga

SEQ ID NO: 123254 - DNA, 75 bp, Homo sapiens
ttccatcctgaaaccagccaactgaaatcggggctgagccagagactcggcactccaaaacaactgaggccccca

SEQ ID NO: 123255 - DNA, 74 bp, Homo sapiens
aaaccagccaactgaaatcggggctgagccagagactcggcactccaaaacaactgaggcccccaggatggcat

SEQ ID NO: 123256 - DNA, 76 bp, Homo sapiens
actgaaatcggggctgagccagagactcggcactccaaaacaactgaggcccccaggatggcattcacgtctttca

SEQ ID NO: 123257 - DNA, 79 bp, Homo sapiens
tgagccagagactcggcactccaaaacaactgaggcccccaggatggcattcacgtctttcagcttgcggatgaaggaa

SEQ ID NO: 123258 - DNA, 76 bp, Homo sapiens
agagactcggcactccaaaacaactgaggcccccaggatggcattcacgtctttcagcttgcggatgaaggaagga

SEQ ID NO: 123259 - DNA, 77 bp, Homo sapiens
caaaacaactgaggcccccaggatggcattcacgtctttcagcttgcggatgaaggaaggaggcacaatccgatcta

SEQ ID NO: 123260 - DNA, 77 bp, Homo sapiens
aactgaggcccccaggatggcattcacgtctttcagcttgcggatgaaggaaggaggcacaatccgatctatgtggg

SEQ ID NO: 123261 - DNA, 75 bp, Homo sapiens
aggatggcattcacgtctttcagcttgcggatgaaggaaggaggcacaatccgatctatgtggggaagggtagtt

SEQ ID NO: 123262 - DNA, 73 bp, Homo sapiens
tttcagcttgcggatgaaggaaggaggcacaatccgatctatgtggggaagggtagttttgcgtttaaagaga

SEQ ID NO: 123263 - DNA, 75 bp, Homo sapiens
accccctggaaatattgtatattcataaaaatctcattctactcaccagaaacatggacggatacagtgcagtta

SEQ ID NO: 123264 - DNA, 77 bp, Homo sapiens
aatattgtatattcataaaaatctcattctactcaccagaaacatggacggatacagtgcagttacttttgccaaca

SEQ ID NO: 123265 - DNA, 74 bp, Homo sapiens
attcataaaaatctcattctactcaccagaaacatggacggatacagtgcagttacttttgccaacactgtttt

SEQ ID NO: 123266 - DNA, 76 bp, Homo sapiens
ttctactcaccagaaacatggacggatacagtgcagttacttttgccaacactgtttttcacttcaaagctatata

SEQ ID NO: 123267 - DNA, 74 bp, Homo sapiens
aaacatggacggatacagtgcagttacttttgccaacactgtttttcacttcaaagctatataatcctttgtca

SEQ ID NO: 123268 - DNA, 74 bp, Homo sapiens
acggatacagtgcagttacttttgccaacactgtttttcacttcaaagctatataatcctttgtcactcatttc

SEQ ID NO: 123269 - DNA, 74 bp, Homo sapiens
agtgcagttacttttgccaacactgtttttcacttcaaagctatataatcctttgtcactcatttcggcacagg

SEQ ID NO: 123270 - DNA, 72 bp, Homo sapiens
ttttgccaacactgtttttcacttcaaagctatataatcctttgtcactcatttcggcacaggggattttaa

SEQ ID NO: 123271 - DNA, 70 bp, Homo sapiens
tttttcacttcaaagctatataatcctttgtcactcatttcggcacaggggattttaagggaagccactt

SEQ ID NO: 123272 - DNA, 73 bp, Homo sapiens
acttcaaagctatataatcctttgtcactcatttcggcacaggggattttaagggaagccactttattgatga

SEQ ID NO: 123273 - DNA, 76 bp, Homo sapiens
tatataatcctttgtcactcatttcggcacaggggattttaagggaagccactttattgatgaatgtaatgtgatg

SEQ ID NO: 123274 - DNA, 76 bp, Homo sapiens
ctttgtcactcatttcggcacaggggattttaagggaagccactttattgatgaatgtaatgtgatgtttgctgtc

SEQ ID NO: 123275 - DNA, 77 bp, Homo sapiens
atttcggcacaggggattttaagggaagccactttattgatgaatgtaatgtgatgtttgctgtctgcagacaattc

SEQ ID NO: 123276 - DNA, 79 bp, Homo sapiens
gattttaagggaagccactttattgatgaatgtaatgtgatgtttgctgtctgcagacaattctcttccatctttgaac

SEQ ID NO: 123277 - DNA, 82 bp, Homo sapiens
actttattgatgaatgtaatgtgatgtttgctgtctgcagacaattctcttccatctttgaaccacttggctgagagttctg

SEQ ID NO: 123278 - DNA, 82 bp, Homo sapiens
aatgtaatgtgatgtttgctgtctgcagacaattctcttccatctttgaaccacttggctgagagttctggtgttccagtca

SEQ ID NO: 123279 - DNA, 82 bp, Homo sapiens
tgtttgctgtctgcagacaattctcttccatctttgaaccacttggctgagagttctggtgttccagtcactacacactcta

SEQ ID NO: 123280 - DNA, 81 bp, Homo sapiens
tctgcagacaattctcttccatctttgaaccacttggctgagagttctggtgttccagtcactacacactctaatgcaaaa

SEQ ID NO: 123281 - DNA, 76 bp, Homo sapiens
attctcttccatctttgaaccacttggctgagagttctggtgttccagtcactacacactctaatgcaaaaggatt

SEQ ID NO: 123282 - DNA, 77 bp, Homo sapiens
ttccatctttgaaccacttggctgagagttctggtgttccagtcactacacactctaatgcaaaaggatttccagta

SEQ ID NO: 123283 - DNA, 78 bp, Homo sapiens
aaccacttggctgagagttctggtgttccagtcactacacactctaatgcaaaaggatttccagtagtgacagtcatg

SEQ ID NO: 123284 - DNA, 75 bp, Homo sapiens
agagttctggtgttccagtcactacacactctaatgcaaaaggatttccagtagtgacagtcatgggttcgggct

SEQ ID NO: 123285 - DNA, 78 bp, Homo sapiens
tgttccagtcactacacactctaatgcaaaaggatttccagtagtgacagtcatgggttcgggcttctctatgattct

SEQ ID NO: 123286 - DNA, 76 bp, Homo sapiens
taatgcaaaaggatttccagtagtgacagtcatgggttcgggcttctctatgattcttgctggttctaaaagaaga

SEQ ID NO: 123287 - DNA, 73 bp, Homo sapiens
aaaggatttccagtagtgacagtcatgggttcgggcttctctatgattcttgctggttctaaaagaagaagta

SEQ ID NO: 123288 - DNA, 75 bp, Homo sapiens
agtagtgacagtcatgggttcgggcttctctatgattcttgctggttctaaaagaagaagtattttgcattgaaa

SEQ ID NO: 123289 - DNA, 73 bp, Homo sapiens
acagtcatgggttcgggcttctctatgattcttgctggttctaaaagaagaagtattttgcattgaaaacaaa

SEQ ID NO: 123290 - DNA, 81 bp, Homo sapiens
atcatggatcaagtaaattgattttttctctggctgtgctttgctactaacctagtacagtcaagactgcagagcattctc

SEQ ID NO: 123291 - DNA, 79 bp, Homo sapiens
aagtaaattgattttttctctggctgtgctttgctactaacctagtacagtcaagactgcagagcattctctcattcca

SEQ ID NO: 123292 - DNA, 81 bp, Homo sapiens
ttttctctggctgtgctttgctactaacctagtacagtcaagactgcagagcattctctcattccagcatcgtttttgatt

SEQ ID NO: 123293 - DNA, 83 bp, Homo sapiens
tgtgctttgctactaacctagtacagtcaagactgcagagcattctctcattccagcatcgtttttgatttggcatatatatt

SEQ ID NO: 123294 - DNA, 82 bp, Homo sapiens
ttgctactaacctagtacagtcaagactgcagagcattctctcattccagcatcgtttttgatttggcatatatattttcca

SEQ ID NO: 123295 - DNA, 84 bp, Homo sapiens
tagtacagtcaagactgcagagcattctctcattccagcatcgtttttgatttggcatatatattttccagaattagatgcttc

SEQ ID NO: 123296 - DNA, 82 bp, Homo sapiens
aagactgcagagcattctctcattccagcatcgtttttgatttggcatatatattttccagaattagatgcttctggactcc

SEQ ID NO: 123297 - DNA, 79 bp, Homo sapiens
attctctcattccagcatcgtttttgatttggcatatatattttccagaattagatgcttctggactccccagctggag

SEQ ID NO: 123298 - DNA, 78 bp, Homo sapiens
ttccagcatcgtttttgatttggcatatatattttccagaattagatgcttctggactccccagctggagggttgcaa

SEQ ID NO: 123299 - DNA, 79 bp, Homo sapiens
tttttgatttggcatatatattttccagaattagatgcttctggactccccagctggagggttgcaatgttatcaatga

SEQ ID NO: 123300 - DNA, 79 bp, Homo sapiens
atttggcatatatattttccagaattagatgcttctggactccccagctggagggttgcaatgttatcaatgaatgaaa

SEQ ID NO: 123301 - DNA, 76 bp, Homo sapiens
ttttccagaattagatgcttctggactccccagctggagggttgcaatgttatcaatgaatgaaatcctggtattt

SEQ ID NO: 123302 - DNA, 78 bp, Homo sapiens
agaattagatgcttctggactccccagctggagggttgcaatgttatcaatgaatgaaatcctggtattttcactctc

SEQ ID NO: 123303 - DNA, 80 bp, Homo sapiens
cttctggactccccagctggagggttgcaatgttatcaatgaatgaaatcctggtattttcactctctctgatgacttca

SEQ ID NO: 123304 - DNA, 81 bp, Homo sapiens
ccagctggagggttgcaatgttatcaatgaatgaaatcctggtattttcactctctctgatgacttcacctctatctttca

SEQ ID NO: 123305 - DNA, 83 bp, Homo sapiens
gttgcaatgttatcaatgaatgaaatcctggtattttcactctctctgatgacttcacctctatctttcagccagacaacaga

SEQ ID NO: 123306 - DNA, 80 bp, Homo sapiens
atgttatcaatgaatgaaatcctggtattttcactctctctgatgacttcacctctatctttcagccagacaacagaaat

SEQ ID NO: 123307 - DNA, 80 bp, Homo sapiens
atgaatgaaatcctggtattttcactctctctgatgacttcacctctatctttcagccagacaacagaaattggctggaa

SEQ ID NO: 123308 - DNA, 80 bp, Homo sapiens
tggtattttcactctctctgatgacttcacctctatctttcagccagacaacagaaattggctggaagccctccactatg

SEQ ID NO: 123309 - DNA, 77 bp, Homo sapiens
tctatctttcagccagacaacagaaattggctggaagccctccactatggcccgtaactcaacagcatccccaataa

SEQ ID NO: 123310 - DNA, 74 bp, Homo sapiens
agccagacaacagaaattggctggaagccctccactatggcccgtaactcaacagcatccccaataagggttga

SEQ ID NO: 123311 - DNA, 72 bp, Homo sapiens
agaaattggctggaagccctccactatggcccgtaactcaacagcatccccaataagggttgaggtgtcact

SEQ ID NO: 123312 - DNA, 73 bp, Homo sapiens
tggaagccctccactatggcccgtaactcaacagcatccccaataagggttgaggtgtcacttagctttttca

SEQ ID NO: 123313 - DNA, 73 bp, Homo sapiens
tccactatggcccgtaactcaacagcatccccaataagggttgaggtgtcacttagctttttcacgaatcgtg

SEQ ID NO: 123314 - DNA, 72 bp, Homo sapiens
ccgtaactcaacagcatccccaataagggttgaggtgtcacttagctttttcacgaatcgtggaggttctga

SEQ ID NO: 123315 - DNA, 74 bp, Homo sapiens
actcaacagcatccccaataagggttgaggtgtcacttagctttttcacgaatcgtggaggttctgatgaaaga

SEQ ID NO: 123316 - DNA, 71 bp, Homo sapiens
caataagggttgaggtgtcacttagctttttcacgaatcgtggaggttctgatgaaagaaatttgtggtta

SEQ ID NO: 123317 - DNA, 71 bp, Homo sapiens
ttgaggtgtcacttagctttttcacgaatcgtggaggttctgatgaaagaaatttgtggttagaggaaaaa

SEQ ID NO: 123318 - DNA, 74 bp, Homo sapiens
aagaacagataggaggaaggggcatatatttttgtgtccatgtatacaaacctttgaacttgacagagcaagaa

SEQ ID NO: 123319 - DNA, 74 bp, Homo sapiens
aggaaggggcatatatttttgtgtccatgtatacaaacctttgaacttgacagagcaagaacacgtgtcacttc

SEQ ID NO: 123320 - DNA, 75 bp, Homo sapiens
atatatttttgtgtccatgtatacaaacctttgaacttgacagagcaagaacacgtgtcacttcccacctcatta

SEQ ID NO: 123321 - DNA, 75 bp, Homo sapiens
tttgtgtccatgtatacaaacctttgaacttgacagagcaagaacacgtgtcacttcccacctcattagtagctt

SEQ ID NO: 123322 - DNA, 78 bp, Homo sapiens
tgtatacaaacctttgaacttgacagagcaagaacacgtgtcacttcccacctcattagtagctttgcagtgatattc

SEQ ID NO: 123323 - DNA, 78 bp, Homo sapiens
tttgaacttgacagagcaagaacacgtgtcacttcccacctcattagtagctttgcagtgatattccccgacatcgga

SEQ ID NO: 123324 - DNA, 78 bp, Homo sapiens
gagcaagaacacgtgtcacttcccacctcattagtagctttgcagtgatattccccgacatcggaggcttcaagatta

SEQ ID NO: 123325 - DNA, 75 bp, Homo sapiens
agaacacgtgtcacttcccacctcattagtagctttgcagtgatattccccgacatcggaggcttcaagattaag

SEQ ID NO: 123326 - DNA, 76 bp, Homo sapiens
attagtagctttgcagtgatattccccgacatcggaggcttcaagattaaggatatgaagacttgtatcaaaatgt

SEQ ID NO: 123327 - DNA, 76 bp, Homo sapiens
agctttgcagtgatattccccgacatcggaggcttcaagattaaggatatgaagacttgtatcaaaatgttttgaa

SEQ ID NO: 123328 - DNA, 75 bp, Homo sapiens
tgatattccccgacatcggaggcttcaagattaaggatatgaagacttgtatcaaaatgttttgaagtgatttta

SEQ ID NO: 123329 - DNA, 72 bp, Homo sapiens
cgacatcggaggcttcaagattaaggatatgaagacttgtatcaaaatgttttgaagtgattttaaatttct

SEQ ID NO: 123330 - DNA, 73 bp, Homo sapiens
ggcttcaagattaaggatatgaagacttgtatcaaaatgttttgaagtgattttaaatttcttgctgtttcta

SEQ ID NO: 123331 - DNA, 73 bp, Homo sapiens
ggatatgaagacttgtatcaaaatgttttgaagtgattttaaatttcttgctgtttctaacctgctttcgatc

SEQ ID NO: 123332 - DNA, 69 bp, Homo sapiens
cttgtatcaaaatgttttgaagtgattttaaatttcttgctgtttctaacctgctttcgatctttaacc

SEQ ID NO: 123333 - DNA, 68 bp, Homo sapiens
aatgttttgaagtgattttaaatttcttgctgtttctaacctgctttcgatctttaacccatactact

SEQ ID NO: 123334 - DNA, 69 bp, Homo sapiens
gaagtgattttaaatttcttgctgtttctaacctgctttcgatctttaacccatactacttcaaatggg

SEQ ID NO: 123335 - DNA, 68 bp, Homo sapiens
tttaaatttcttgctgtttctaacctgctttcgatctttaacccatactacttcaaatgggggagttc

SEQ ID NO: 123336 - DNA, 68 bp, Homo sapiens
tgtttctaacctgctttcgatctttaacccatactacttcaaatgggggagttcccgaaatttcacat

SEQ ID NO: 123337 - DNA, 69 bp, Homo sapiens
taacctgctttcgatctttaacccatactacttcaaatgggggagttcccgaaatttcacattggagaa

SEQ ID NO: 123338 - DNA, 70 bp, Homo sapiens
atctttaacccatactacttcaaatgggggagttcccgaaatttcacattggagaatcacatcagaacct

SEQ ID NO: 123339 - DNA, 70 bp, Homo sapiens
aacccatactacttcaaatgggggagttcccgaaatttcacattggagaatcacatcagaacctttaaga

SEQ ID NO: 123340 - DNA, 73 bp, Homo sapiens
ttcaaatgggggagttcccgaaatttcacattggagaatcacatcagaacctttaagagctcctactggagaa

SEQ ID NO: 123341 - DNA, 74 bp, Homo sapiens
agttcccgaaatttcacattggagaatcacatcagaacctttaagagctcctactggagaaggcttctgggtga

SEQ ID NO: 123342 - DNA, 74 bp, Homo sapiens
aaatttcacattggagaatcacatcagaacctttaagagctcctactggagaaggcttctgggtgaaaacagga

SEQ ID NO: 123343 - DNA, 75 bp, Homo sapiens
gagaatcacatcagaacctttaagagctcctactggagaaggcttctgggtgaaaacaggaggtgctaccagaaa

SEQ ID NO: 123344 - DNA, 72 bp, Homo sapiens
ctcctactggagaaggcttctgggtgaaaacaggaggtgctaccagaaaaaaggagataaacaatgagaaca

SEQ ID NO: 123345 - DNA, 77 bp, Homo sapiens
agcccaaatcagaggagaataaagaaacaaagaagcttagtgtgtctaacctttcactgtcaacgctgtgctgcagc

SEQ ID NO: 123346 - DNA, 79 bp, Homo sapiens
aagaaacaaagaagcttagtgtgtctaacctttcactgtcaacgctgtgctgcagctggcgtcaccaacaccattatga

SEQ ID NO: 123347 - DNA, 81 bp, Homo sapiens
aagaagcttagtgtgtctaacctttcactgtcaacgctgtgctgcagctggcgtcaccaacaccattatgagcctcacaaa

SEQ ID NO: 123348 - DNA, 81 bp, Homo sapiens
gtgtgtctaacctttcactgtcaacgctgtgctgcagctggcgtcaccaacaccattatgagcctcacaaatgtagtcccc

SEQ ID NO: 123349 - DNA, 85 bp, Homo sapiens
tttcactgtcaacgctgtgctgcagctggcgtcaccaacaccattatgagcctcacaaatgtagtccccgctgtcttcagcacta

SEQ ID NO: 123350 - DNA, 85 bp, Homo sapiens
aacgctgtgctgcagctggcgtcaccaacaccattatgagcctcacaaatgtagtccccgctgtcttcagcactagcttcattga

SEQ ID NO: 123351 - DNA, 82 bp, Homo sapiens
agctggcgtcaccaacaccattatgagcctcacaaatgtagtccccgctgtcttcagcactagcttcattgatcgtaagcaa

SEQ ID NO: 123352 - DNA, 82 bp, Homo sapiens
accaacaccattatgagcctcacaaatgtagtccccgctgtcttcagcactagcttcattgatcgtaagcaatgccacagaa

SEQ ID NO: 123353 - DNA, 83 bp, Homo sapiens
accattatgagcctcacaaatgtagtccccgctgtcttcagcactagcttcattgatcgtaagcaatgccacagaattaatga

SEQ ID NO: 123354 - DNA, 84 bp, Homo sapiens
tcacaaatgtagtccccgctgtcttcagcactagcttcattgatcgtaagcaatgccacagaattaatgaatgacatgttgtat

SEQ ID NO: 123355 - DNA, 83 bp, Homo sapiens
atgtagtccccgctgtcttcagcactagcttcattgatcgtaagcaatgccacagaattaatgaatgacatgttgtatttcca

SEQ ID NO: 123356 - DNA, 83 bp, Homo sapiens
tgtcttcagcactagcttcattgatcgtaagcaatgccacagaattaatgaatgacatgttgtatttccaactttcatgaagt

SEQ ID NO: 123357 - DNA, 82 bp, Homo sapiens
tagcttcattgatcgtaagcaatgccacagaattaatgaatgacatgttgtatttccaactttcatgaagttcgctgtcatt

SEQ ID NO: 123358 - DNA, 80 bp, Homo sapiens
attgatcgtaagcaatgccacagaattaatgaatgacatgttgtatttccaactttcatgaagttcgctgtcatttcgga

SEQ ID NO: 123359 - DNA, 77 bp, Homo sapiens
aatgccacagaattaatgaatgacatgttgtatttccaactttcatgaagttcgctgtcatttcggaaccatgaaac

SEQ ID NO: 123360 - DNA, 76 bp, Homo sapiens
cagaattaatgaatgacatgttgtatttccaactttcatgaagttcgctgtcatttcggaaccatgaaactttgat

SEQ ID NO: 123361 - DNA, 75 bp, Homo sapiens
atgaatgacatgttgtatttccaactttcatgaagttcgctgtcatttcggaaccatgaaactttgatttctggg

SEQ ID NO: 123362 - DNA, 72 bp, Homo sapiens
tatttccaactttcatgaagttcgctgtcatttcggaaccatgaaactttgatttctggggagccacttatt

SEQ ID NO: 123363 - DNA, 71 bp, Homo sapiens
aactttcatgaagttcgctgtcatttcggaaccatgaaactttgatttctggggagccacttattttacat

SEQ ID NO: 123364 - DNA, 71 bp, Homo sapiens
aagttcgctgtcatttcggaaccatgaaactttgatttctggggagccacttattttacattccagttgaa

SEQ ID NO: 123365 - DNA, 70 bp, Homo sapiens
atttcggaaccatgaaactttgatttctggggagccacttattttacattccagttgaatggattctccc

SEQ ID NO: 123366 - DNA, 72 bp, Homo sapiens
atgaaactttgatttctggggagccacttattttacattccagttgaatggattctccctgctttgcaactt

SEQ ID NO: 123367 - DNA, 72 bp, Homo sapiens
actttgatttctggggagccacttattttacattccagttgaatggattctccctgctttgcaacttttgaa

SEQ ID NO: 123368 - DNA, 73 bp, Homo sapiens
gagccacttattttacattccagttgaatggattctccctgctttgcaacttttgaagcttctaatttcttaa

SEQ ID NO: 123369 - DNA, 70 bp, Homo sapiens
attttacattccagttgaatggattctccctgctttgcaacttttgaagcttctaatttcttaacaaact

SEQ ID NO: 123370 - DNA, 71 bp, Homo sapiens
cagttgaatggattctccctgctttgcaacttttgaagcttctaatttcttaacaaactttggaggttcta

SEQ ID NO: 123371 - DNA, 69 bp, Homo sapiens
gattctccctgctttgcaacttttgaagcttctaatttcttaacaaactttggaggttctagtaaacca

SEQ ID NO: 123372 - DNA, 67 bp, Homo sapiens
ccctgctttgcaacttttgaagcttctaatttcttaacaaactttggaggttctagtaaaccaaaca

SEQ ID NO: 123373 - DNA, 67 bp, Homo sapiens
gcaacttttgaagcttctaatttcttaacaaactttggaggttctagtaaaccaaacaaaacagtca

SEQ ID NO: 123374 - DNA, 79 bp, Homo sapiens
caaatatggtaaggaacaaatattgtcaaaagtcatggaatgataccttttacactgagctgagctgagcacatgtctt

SEQ ID NO: 123375 - DNA, 82 bp, Homo sapiens
taaggaacaaatattgtcaaaagtcatggaatgataccttttacactgagctgagctgagcacatgtctttgccaacatcat

SEQ ID NO: 123376 - DNA, 82 bp, Homo sapiens
aaatattgtcaaaagtcatggaatgataccttttacactgagctgagctgagcacatgtctttgccaacatcattggttgct

SEQ ID NO: 123377 - DNA, 83 bp, Homo sapiens
aaagtcatggaatgataccttttacactgagctgagctgagcacatgtctttgccaacatcattggttgcttggcaagtatat

SEQ ID NO: 123378 - DNA, 84 bp, Homo sapiens
aatgataccttttacactgagctgagctgagcacatgtctttgccaacatcattggttgcttggcaagtatattgaccagagtc

SEQ ID NO: 123379 - DNA, 82 bp, Homo sapiens
ccttttacactgagctgagctgagcacatgtctttgccaacatcattggttgcttggcaagtatattgaccagagtctcctt

SEQ ID NO: 123380 - DNA, 82 bp, Homo sapiens
tgagctgagcacatgtctttgccaacatcattggttgcttggcaagtatattgaccagagtctcctttgcctactttaagaa

SEQ ID NO: 123381 - DNA, 78 bp, Homo sapiens
acatgtctttgccaacatcattggttgcttggcaagtatattgaccagagtctcctttgcctactttaagaattctca

SEQ ID NO: 123382 - DNA, 78 bp, Homo sapiens
tctttgccaacatcattggttgcttggcaagtatattgaccagagtctcctttgcctactttaagaattctcaaatga

SEQ ID NO: 123383 - DNA, 75 bp, Homo sapiens
atcattggttgcttggcaagtatattgaccagagtctcctttgcctactttaagaattctcaaatgaggagtgtt

SEQ ID NO: 123384 - DNA, 77 bp, Homo sapiens
tggcaagtatattgaccagagtctcctttgcctactttaagaattctcaaatgaggagtgtttcccacacatgtgat

SEQ ID NO: 123385 - DNA, 77 bp, Homo sapiens
gtatattgaccagagtctcctttgcctactttaagaattctcaaatgaggagtgtttcccacacatgtgattgtata

SEQ ID NO: 123386 - DNA, 74 bp, Homo sapiens
agtctcctttgcctactttaagaattctcaaatgaggagtgtttcccacacatgtgattgtatagtttcctcca

SEQ ID NO: 123387 - DNA, 74 bp, Homo sapiens
tttgcctactttaagaattctcaaatgaggagtgtttcccacacatgtgattgtatagtttcctccaggacgga

SEQ ID NO: 123388 - DNA, 74 bp, Homo sapiens
aattctcaaatgaggagtgtttcccacacatgtgattgtatagtttcctccaggacggatctccttgttatctt

SEQ ID NO: 123389 - DNA, 74 bp, Homo sapiens
aaatgaggagtgtttcccacacatgtgattgtatagtttcctccaggacggatctccttgttatcttttgacca

SEQ ID NO: 123390 - DNA, 74 bp, Homo sapiens
agtgtttcccacacatgtgattgtatagtttcctccaggacggatctccttgttatcttttgaccaagtgattc

SEQ ID NO: 123391 - DNA, 75 bp, Homo sapiens
ttgtatagtttcctccaggacggatctccttgttatcttttgaccaagtgattcgcatcggttgagcaccagtaa

SEQ ID NO: 123392 - DNA, 79 bp, Homo sapiens
tccaggacggatctccttgttatcttttgaccaagtgattcgcatcggttgagcaccagtaacatgacactcaaaatca

SEQ ID NO: 123393 - DNA, 79 bp, Homo sapiens
atctccttgttatcttttgaccaagtgattcgcatcggttgagcaccagtaacatgacactcaaaatcagcactttctc

SEQ ID NO: 123394 - DNA, 81 bp, Homo sapiens
tgttatcttttgaccaagtgattcgcatcggttgagcaccagtaacatgacactcaaaatcagcactttctccagcaataa

SEQ ID NO: 123395 - DNA, 84 bp, Homo sapiens
catcggttgagcaccagtaacatgacactcaaaatcagcactttctccagcaataacatctatagatacaggcttgatgtcaaa

SEQ ID NO: 123396 - DNA, 83 bp, Homo sapiens
gttgagcaccagtaacatgacactcaaaatcagcactttctccagcaataacatctatagatacaggcttgatgtcaaagaag

SEQ ID NO: 123397 - DNA, 80 bp, Homo sapiens
agtaacatgacactcaaaatcagcactttctccagcaataacatctatagatacaggcttgatgtcaaagaagggagatt

SEQ ID NO: 123398 - DNA, 78 bp, Homo sapiens
actttctccagcaataacatctatagatacaggcttgatgtcaaagaagggagatttcttgggttctggaggatgaga

SEQ ID NO: 123399 - DNA, 76 bp, Homo sapiens
tatagatacaggcttgatgtcaaagaagggagatttcttgggttctggaggatgagaagaaaggcaatgtgtattt

SEQ ID NO: 123400 - DNA, 73 bp, Homo sapiens
atacaggcttgatgtcaaagaagggagatttcttgggttctggaggatgagaagaaaggcaatgtgtattttt

SEQ ID NO: 123401 - DNA, 77 bp, Homo sapiens
aaatatgaagccacagtttgcaaagaaaaagagtgacgtgtgaacaaacctcttgctgtgagtctagcactagaaga

SEQ ID NO: 123402 - DNA, 77 bp, Homo sapiens
acagtttgcaaagaaaaagagtgacgtgtgaacaaacctcttgctgtgagtctagcactagaagatgctgttccaag

SEQ ID NO: 123403 - DNA, 76 bp, Homo sapiens
agaaaaagagtgacgtgtgaacaaacctcttgctgtgagtctagcactagaagatgctgttccaagtgggttggaa

SEQ ID NO: 123404 - DNA, 80 bp, Homo sapiens
aagagtgacgtgtgaacaaacctcttgctgtgagtctagcactagaagatgctgttccaagtgggttggaagctgagcaa

SEQ ID NO: 123405 - DNA, 82 bp, Homo sapiens
tgtgaacaaacctcttgctgtgagtctagcactagaagatgctgttccaagtgggttggaagctgagcaagagtactggcca

SEQ ID NO: 123406 - DNA, 85 bp, Homo sapiens
tcttgctgtgagtctagcactagaagatgctgttccaagtgggttggaagctgagcaagagtactggccagagtgactcaagtca

SEQ ID NO: 123407 - DNA, 82 bp, Homo sapiens
tctagcactagaagatgctgttccaagtgggttggaagctgagcaagagtactggccagagtgactcaagtcagtttgcaaa

SEQ ID NO: 123408 - DNA, 78 bp, Homo sapiens
tagaagatgctgttccaagtgggttggaagctgagcaagagtactggccagagtgactcaagtcagtttgcaaaattt

SEQ ID NO: 123409 - DNA, 78 bp, Homo sapiens
ttggaagctgagcaagagtactggccagagtgactcaagtcagtttgcaaaatttttaaagttgccacattatctaca

SEQ ID NO: 123410 - DNA, 75 bp, Homo sapiens
agcaagagtactggccagagtgactcaagtcagtttgcaaaatttttaaagttgccacattatctacaaatgaag

SEQ ID NO: 123411 - DNA, 76 bp, Homo sapiens
tactggccagagtgactcaagtcagtttgcaaaatttttaaagttgccacattatctacaaatgaagtctgtagat

SEQ ID NO: 123412 - DNA, 75 bp, Homo sapiens
gtgactcaagtcagtttgcaaaatttttaaagttgccacattatctacaaatgaagtctgtagattttcatcgtc

SEQ ID NO: 123413 - DNA, 74 bp, Homo sapiens
caagtcagtttgcaaaatttttaaagttgccacattatctacaaatgaagtctgtagattttcatcgtctctta

SEQ ID NO: 123414 - DNA, 72 bp, Homo sapiens
aatttttaaagttgccacattatctacaaatgaagtctgtagattttcatcgtctcttaaaagtactccatc

SEQ ID NO: 123415 - DNA, 78 bp, Homo sapiens
taaagttgccacattatctacaaatgaagtctgtagattttcatcgtctcttaaaagtactccatctctataccagca

SEQ ID NO: 123416 - DNA, 77 bp, Homo sapiens
attatctacaaatgaagtctgtagattttcatcgtctcttaaaagtactccatctctataccagcacacttggatgg

SEQ ID NO: 123417 - DNA, 80 bp, Homo sapiens
tgaagtctgtagattttcatcgtctcttaaaagtactccatctctataccagcacacttggatgggtgcagagccattta

SEQ ID NO: 123418 - DNA, 79 bp, Homo sapiens
tagattttcatcgtctcttaaaagtactccatctctataccagcacacttggatgggtgcagagccatttaatcgacaa

SEQ ID NO: 123419 - DNA, 79 bp, Homo sapiens
atcgtctcttaaaagtactccatctctataccagcacacttggatgggtgcagagccatttaatcgacaagtgagtgta

SEQ ID NO: 123420 - DNA, 78 bp, Homo sapiens
taaaagtactccatctctataccagcacacttggatgggtgcagagccatttaatcgacaagtgagtgtaacaggtaa

SEQ ID NO: 123421 - DNA, 76 bp, Homo sapiens
atctctataccagcacacttggatgggtgcagagccatttaatcgacaagtgagtgtaacaggtaaccccacagtt

SEQ ID NO: 123422 - DNA, 76 bp, Homo sapiens
ataccagcacacttggatgggtgcagagccatttaatcgacaagtgagtgtaacaggtaaccccacagtttgttca

SEQ ID NO: 123423 - DNA, 73 bp, Homo sapiens
gatgggtgcagagccatttaatcgacaagtgagtgtaacaggtaaccccacagtttgttcaatgtcctttaat

SEQ ID NO: 123424 - DNA, 73 bp, Homo sapiens
agagccatttaatcgacaagtgagtgtaacaggtaaccccacagtttgttcaatgtcctttaattgtcttgca

SEQ ID NO: 123425 - DNA, 69 bp, Homo sapiens
aagtgagtgtaacaggtaaccccacagtttgttcaatgtcctttaattgtcttgcaaaagaaggtggga

SEQ ID NO: 123426 - DNA, 70 bp, Homo sapiens
aggtaaccccacagtttgttcaatgtcctttaattgtcttgcaaaagaaggtgggagttggcgctctgta

SEQ ID NO: 123427 - DNA, 74 bp, Homo sapiens
cagtttgttcaatgtcctttaattgtcttgcaaaagaaggtgggagttggcgctctgtagggagacatgtaata

SEQ ID NO: 123428 - DNA, 73 bp, Homo sapiens
ttcaatgtcctttaattgtcttgcaaaagaaggtgggagttggcgctctgtagggagacatgtaatacttaag

SEQ ID NO: 123429 - DNA, 72 bp, Homo sapiens
tttaattgtcttgcaaaagaaggtgggagttggcgctctgtagggagacatgtaatacttaaggtgttagga

SEQ ID NO: 123430 - DNA, 72 bp, Homo sapiens
agaatttttttaatttgtaaaatatcatcaccttgaattctgaacacagtcttagaagaagcagttcctata

SEQ ID NO: 123431 - DNA, 80 bp, Homo sapiens
tgtaaaatatcatcaccttgaattctgaacacagtcttagaagaagcagttcctatactattttctgctttgcatgtgta

SEQ ID NO: 123432 - DNA, 79 bp, Homo sapiens
ccttgaattctgaacacagtcttagaagaagcagttcctatactattttctgctttgcatgtgtactctccactgtcat

SEQ ID NO: 123433 - DNA, 80 bp, Homo sapiens
aattctgaacacagtcttagaagaagcagttcctatactattttctgctttgcatgtgtactctccactgtcattgatgt

SEQ ID NO: 123434 - DNA, 79 bp, Homo sapiens
tcttagaagaagcagttcctatactattttctgctttgcatgtgtactctccactgtcattgatgttcactttattaaa

SEQ ID NO: 123435 - DNA, 79 bp, Homo sapiens
tatactattttctgctttgcatgtgtactctccactgtcattgatgttcactttattaaaaacaagtgtggccacattg

SEQ ID NO: 123436 - DNA, 78 bp, Homo sapiens
tgctttgcatgtgtactctccactgtcattgatgttcactttattaaaaacaagtgtggccacattgtttgtaaagta

SEQ ID NO: 123437 - DNA, 74 bp, Homo sapiens
atgtgtactctccactgtcattgatgttcactttattaaaaacaagtgtggccacattgtttgtaaagtaggtc

SEQ ID NO: 123438 - DNA, 74 bp, Homo sapiens
tccactgtcattgatgttcactttattaaaaacaagtgtggccacattgtttgtaaagtaggtcctgtattcag

SEQ ID NO: 123439 - DNA, 71 bp, Homo sapiens
attgatgttcactttattaaaaacaagtgtggccacattgtttgtaaagtaggtcctgtattcaggagttg

SEQ ID NO: 123440 - DNA, 68 bp, Homo sapiens
tttattaaaaacaagtgtggccacattgtttgtaaagtaggtcctgtattcaggagttggccgtaatt

SEQ ID NO: 123441 - DNA, 69 bp, Homo sapiens
aaaaacaagtgtggccacattgtttgtaaagtaggtcctgtattcaggagttggccgtaatttggtatc

SEQ ID NO: 123442 - DNA, 71 bp, Homo sapiens
cacattgtttgtaaagtaggtcctgtattcaggagttggccgtaatttggtatctcctttgtaccaagaca

SEQ ID NO: 123443 - DNA, 70 bp, Homo sapiens
tttgtaaagtaggtcctgtattcaggagttggccgtaatttggtatctcctttgtaccaagacactgtaa

SEQ ID NO: 123444 - DNA, 71 bp, Homo sapiens
gtaggtcctgtattcaggagttggccgtaatttggtatctcctttgtaccaagacactgtaatttctggtg

SEQ ID NO: 123445 - DNA, 72 bp, Homo sapiens
tattcaggagttggccgtaatttggtatctcctttgtaccaagacactgtaatttctggtgtcccagcaact

SEQ ID NO: 123446 - DNA, 72 bp, Homo sapiens
cgtaatttggtatctcctttgtaccaagacactgtaatttctggtgtcccagcaacttggcattgtaaagaa

SEQ ID NO: 123447 - DNA, 72 bp, Homo sapiens
ttggtatctcctttgtaccaagacactgtaatttctggtgtcccagcaacttggcattgtaaagaaaccgaa

SEQ ID NO: 123448 - DNA, 71 bp, Homo sapiens
cctttgtaccaagacactgtaatttctggtgtcccagcaacttggcattgtaaagaaaccgaatctccaac

SEQ ID NO: 123449 - DNA, 75 bp, Homo sapiens
aagacactgtaatttctggtgtcccagcaacttggcattgtaaagaaaccgaatctccaactgctgcctccagag

SEQ ID NO: 123450 - DNA, 73 bp, Homo sapiens
aatttctggtgtcccagcaacttggcattgtaaagaaaccgaatctccaactgctgcctccagaggttccagt

SEQ ID NO: 123451 - DNA, 72 bp, Homo sapiens
agcaacttggcattgtaaagaaaccgaatctccaactgctgcctccagaggttccagttccgtaacaaaata

SEQ ID NO: 123452 - DNA, 69 bp, Homo sapiens
cattgtaaagaaaccgaatctccaactgctgcctccagaggttccagttccgtaacaaaataaggcggt

SEQ ID NO: 123453 - DNA, 69 bp, Homo sapiens
taaagaaaccgaatctccaactgctgcctccagaggttccagttccgtaacaaaataaggcggttctaa

SEQ ID NO: 123454 - DNA, 69 bp, Homo sapiens
aatctccaactgctgcctccagaggttccagttccgtaacaaaataaggcggttctaaggaagaaaggc

SEQ ID NO: 123455 - DNA, 70 bp, Homo sapiens
tgcctccagaggttccagttccgtaacaaaataaggcggttctaaggaagaaaggctcacagttagcaac

SEQ ID NO: 123456 - DNA, 80 bp, Homo sapiens
tacatgttagaagaatgcaaatgatttaagagacaataagacaacacacctaatgtagataccagagctccacaaacatc

SEQ ID NO: 123457 - DNA, 76 bp, Homo sapiens
aagaatgcaaatgatttaagagacaataagacaacacacctaatgtagataccagagctccacaaacatcccttcc

SEQ ID NO: 123458 - DNA, 76 bp, Homo sapiens
aatgatttaagagacaataagacaacacacctaatgtagataccagagctccacaaacatcccttcctgcctcatt

SEQ ID NO: 123459 - DNA, 79 bp, Homo sapiens
agagacaataagacaacacacctaatgtagataccagagctccacaaacatcccttcctgcctcattttcaatctcgca

SEQ ID NO: 123460 - DNA, 79 bp, Homo sapiens
agacaacacacctaatgtagataccagagctccacaaacatcccttcctgcctcattttcaatctcgcaggaatactgc

SEQ ID NO: 123461 - DNA, 80 bp, Homo sapiens
taatgtagataccagagctccacaaacatcccttcctgcctcattttcaatctcgcaggaatactgccctgcatctcttt

SEQ ID NO: 123462 - DNA, 80 bp, Homo sapiens
ataccagagctccacaaacatcccttcctgcctcattttcaatctcgcaggaatactgccctgcatctctttttgtgcta

SEQ ID NO: 123463 - DNA, 78 bp, Homo sapiens
acaaacatcccttcctgcctcattttcaatctcgcaggaatactgccctgcatctctttttgtgctattcagaatttc

SEQ ID NO: 123464 - DNA, 79 bp, Homo sapiens
tcctgcctcattttcaatctcgcaggaatactgccctgcatctctttttgtgctattcagaatttccaggatacaagtt

SEQ ID NO: 123465 - DNA, 77 bp, Homo sapiens
attttcaatctcgcaggaatactgccctgcatctctttttgtgctattcagaatttccaggatacaagttttctctg

SEQ ID NO: 123466 - DNA, 79 bp, Homo sapiens
atctcgcaggaatactgccctgcatctctttttgtgctattcagaatttccaggatacaagttttctctgttgtgacta

SEQ ID NO: 123467 - DNA, 77 bp, Homo sapiens
aatactgccctgcatctctttttgtgctattcagaatttccaggatacaagttttctctgttgtgactatgttacat

SEQ ID NO: 123468 - DNA, 75 bp, Homo sapiens
catctctttttgtgctattcagaatttccaggatacaagttttctctgttgtgactatgttacatttttcagagg

SEQ ID NO: 123469 - DNA, 75 bp, Homo sapiens
gtgctattcagaatttccaggatacaagttttctctgttgtgactatgttacatttttcagaggtagttatgtta

SEQ ID NO: 123470 - DNA, 71 bp, Homo sapiens
gaatttccaggatacaagttttctctgttgtgactatgttacatttttcagaggtagttatgttaaaacca

SEQ ID NO: 123471 - DNA, 70 bp, Homo sapiens
ccaggatacaagttttctctgttgtgactatgttacatttttcagaggtagttatgttaaaaccatcctt

SEQ ID NO: 123472 - DNA, 72 bp, Homo sapiens
tttctctgttgtgactatgttacatttttcagaggtagttatgttaaaaccatcctttttccaagtgacaga

SEQ ID NO: 123473 - DNA, 69 bp, Homo sapiens
gactatgttacatttttcagaggtagttatgttaaaaccatcctttttccaagtgacagaaattggaag

SEQ ID NO: 123474 - DNA, 69 bp, Homo sapiens
catttttcagaggtagttatgttaaaaccatcctttttccaagtgacagaaattggaagtgttccagtg

SEQ ID NO: 123475 - DNA, 71 bp, Homo sapiens
ttcagaggtagttatgttaaaaccatcctttttccaagtgacagaaattggaagtgttccagtgtaggtgc

SEQ ID NO: 123476 - DNA, 72 bp, Homo sapiens
ttatgttaaaaccatcctttttccaagtgacagaaattggaagtgttccagtgtaggtgctctccagaatta

SEQ ID NO: 123477 - DNA, 72 bp, Homo sapiens
aaccatcctttttccaagtgacagaaattggaagtgttccagtgtaggtgctctccagaattatggacttcc

SEQ ID NO: 123478 - DNA, 77 bp, Homo sapiens
aagtgacagaaattggaagtgttccagtgtaggtgctctccagaattatggacttccctggttctacagaatgatca

SEQ ID NO: 123479 - DNA, 75 bp, Homo sapiens
aaattggaagtgttccagtgtaggtgctctccagaattatggacttccctggttctacagaatgatcacttaatc

SEQ ID NO: 123480 - DNA, 76 bp, Homo sapiens
aagtgttccagtgtaggtgctctccagaattatggacttccctggttctacagaatgatcacttaatctcttcaaa

SEQ ID NO: 123481 - DNA, 79 bp, Homo sapiens
taggtgctctccagaattatggacttccctggttctacagaatgatcacttaatctcttcaaaaatgcagctggttcta

SEQ ID NO: 123482 - DNA, 78 bp, Homo sapiens
tccagaattatggacttccctggttctacagaatgatcacttaatctcttcaaaaatgcagctggttctagtaagtga

SEQ ID NO: 123483 - DNA, 78 bp, Homo sapiens
ttatggacttccctggttctacagaatgatcacttaatctcttcaaaaatgcagctggttctagtaagtgacaaagca

SEQ ID NO: 123484 - DNA, 70 bp, Homo sapiens
aaggatgtcggtatacagaaaacagaaaaagtgaatccacttgagcaaacctttcacaaagagacgggta

SEQ ID NO: 123485 - DNA, 74 bp, Homo sapiens
gtatacagaaaacagaaaaagtgaatccacttgagcaaacctttcacaaagagacgggtagtgcaagatgcttg

SEQ ID NO: 123486 - DNA, 74 bp, Homo sapiens
agaaaaagtgaatccacttgagcaaacctttcacaaagagacgggtagtgcaagatgcttggccagcgttgtta

SEQ ID NO: 123487 - DNA, 75 bp, Homo sapiens
agtgaatccacttgagcaaacctttcacaaagagacgggtagtgcaagatgcttggccagcgttgttagaaacca

SEQ ID NO: 123488 - DNA, 75 bp, Homo sapiens
ttgagcaaacctttcacaaagagacgggtagtgcaagatgcttggccagcgttgttagaaaccacacaggtgtat

SEQ ID NO: 123489 - DNA, 76 bp, Homo sapiens
tttcacaaagagacgggtagtgcaagatgcttggccagcgttgttagaaaccacacaggtgtattccccactctga

SEQ ID NO: 123490 - DNA, 78 bp, Homo sapiens
cgggtagtgcaagatgcttggccagcgttgttagaaaccacacaggtgtattccccactctgagatatgtcaatatta

SEQ ID NO: 123491 - DNA, 78 bp, Homo sapiens
agtgcaagatgcttggccagcgttgttagaaaccacacaggtgtattccccactctgagatatgtcaatattaaataa

SEQ ID NO: 123492 - DNA, 75 bp, Homo sapiens
ttggccagcgttgttagaaaccacacaggtgtattccccactctgagatatgtcaatattaaataattccagttc

SEQ ID NO: 123493 - DNA, 77 bp, Homo sapiens
ttgttagaaaccacacaggtgtattccccactctgagatatgtcaatattaaataattccagttctgccacagtgtc

SEQ ID NO: 123494 - DNA, 78 bp, Homo sapiens
acacaggtgtattccccactctgagatatgtcaatattaaataattccagttctgccacagtgtcttcaaaatagatg

SEQ ID NO: 123495 - DNA, 76 bp, Homo sapiens
tatgtcaatattaaataattccagttctgccacagtgtcttcaaaatagatgttgcaccggtctcctttcactagt

SEQ ID NO: 123496 - DNA, 76 bp, Homo sapiens
ttaaataattccagttctgccacagtgtcttcaaaatagatgttgcaccggtctcctttcactagttctctggcac

SEQ ID NO: 123497 - DNA, 76 bp, Homo sapiens
agttctgccacagtgtcttcaaaatagatgttgcaccggtctcctttcactagttctctggcacctctgaaccagt

SEQ ID NO: 123498 - DNA, 75 bp, Homo sapiens
agtgtcttcaaaatagatgttgcaccggtctcctttcactagttctctggcacctctgaaccagttgactttgaa

SEQ ID NO: 123499 - DNA, 73 bp, Homo sapiens
aaaatagatgttgcaccggtctcctttcactagttctctggcacctctgaaccagttgactttgaatggaggg

SEQ ID NO: 123500 - DNA, 72 bp, Homo sapiens
caccggtctcctttcactagttctctggcacctctgaaccagttgactttgaatggaggggttcctctaata

SEQ ID NO: 123501 - DNA, 73 bp, Homo sapiens
ctttcactagttctctggcacctctgaaccagttgactttgaatggaggggttcctctaataacgcttgtgaa

SEQ ID NO: 123502 - DNA, 72 bp, Homo sapiens
ttctctggcacctctgaaccagttgactttgaatggaggggttcctctaataacgcttgtgaaggttacatt

SEQ ID NO: 123503 - DNA, 69 bp, Homo sapiens
acctctgaaccagttgactttgaatggaggggttcctctaataacgcttgtgaaggttacatttttgcc

SEQ ID NO: 123504 - DNA, 68 bp, Homo sapiens
agttgactttgaatggaggggttcctctaataacgcttgtgaaggttacatttttgcctggtagtact

SEQ ID NO: 123505 - DNA, 67 bp, Homo sapiens
gttcctctaataacgcttgtgaaggttacatttttgcctggtagtacttccaaaggttcaggttctt

SEQ ID NO: 123506 - DNA, 68 bp, Homo sapiens
taataacgcttgtgaaggttacatttttgcctggtagtacttccaaaggttcaggttctttcacaaaa

SEQ ID NO: 123507 - DNA, 67 bp, Homo sapiens
tgaaggttacatttttgcctggtagtacttccaaaggttcaggttctttcacaaaagagggtggttc

SEQ ID NO: 123508 - DNA, 69 bp, Homo sapiens
atttttgcctggtagtacttccaaaggttcaggttctttcacaaaagagggtggttctatatagacatg

SEQ ID NO: 123509 - DNA, 70 bp, Homo sapiens
gtagtacttccaaaggttcaggttctttcacaaaagagggtggttctatatagacatggagaacaattaa

SEQ ID NO: 123510 - DNA, 69 bp, Homo sapiens
acttccaaaggttcaggttctttcacaaaagagggtggttctatatagacatggagaacaattaaaaga

SEQ ID NO: 123511 - DNA, 73 bp, Homo sapiens
aagaggaatttgtaagaaattccttacaagtttgactgtctactgaccttgtacagttagcactgcacgacat

SEQ ID NO: 123512 - DNA, 76 bp, Homo sapiens
aatttgtaagaaattccttacaagtttgactgtctactgaccttgtacagttagcactgcacgacattcatcagac

SEQ ID NO: 123513 - DNA, 78 bp, Homo sapiens
aaattccttacaagtttgactgtctactgaccttgtacagttagcactgcacgacattcatcagacccagcgacatta

SEQ ID NO: 123514 - DNA, 84 bp, Homo sapiens
gtttgactgtctactgaccttgtacagttagcactgcacgacattcatcagacccagcgacattagcagccacgcatgtgtaat

SEQ ID NO: 123515 - DNA, 86 bp, Homo sapiens
ccttgtacagttagcactgcacgacattcatcagacccagcgacattagcagccacgcatgtgtaattgcccatatctgaggaatc

SEQ ID NO: 123516 - DNA, 88 bp, Homo sapiens
ttagcactgcacgacattcatcagacccagcgacattagcagccacgcatgtgtaattgcccatatctgaggaatccagagaattcaa

SEQ ID NO: 123517 - DNA, 86 bp, Homo sapiens
acgacattcatcagacccagcgacattagcagccacgcatgtgtaattgcccatatctgaggaatccagagaattcaactgcaatg

SEQ ID NO: 123518 - DNA, 88 bp, Homo sapiens
acccagcgacattagcagccacgcatgtgtaattgcccatatctgaggaatccagagaattcaactgcaatgtgcagacattatctga

SEQ ID NO: 123519 - DNA, 83 bp, Homo sapiens
acgcatgtgtaattgcccatatctgaggaatccagagaattcaactgcaatgtgcagacattatctgaaaatgtggtttggta

SEQ ID NO: 123520 - DNA, 80 bp, Homo sapiens
gtgtaattgcccatatctgaggaatccagagaattcaactgcaatgtgcagacattatctgaaaatgtggtttggtactt

SEQ ID NO: 123521 - DNA, 82 bp, Homo sapiens
atatctgaggaatccagagaattcaactgcaatgtgcagacattatctgaaaatgtggtttggtactttgctccactgacaa

SEQ ID NO: 123522 - DNA, 79 bp, Homo sapiens
tccagagaattcaactgcaatgtgcagacattatctgaaaatgtggtttggtactttgctccactgacaatcttggttt

SEQ ID NO: 123523 - DNA, 80 bp, Homo sapiens
aattcaactgcaatgtgcagacattatctgaaaatgtggtttggtactttgctccactgacaatcttggttttctcatga

SEQ ID NO: 123524 - DNA, 78 bp, Homo sapiens
atgtgcagacattatctgaaaatgtggtttggtactttgctccactgacaatcttggttttctcatgaaaccaggcaa

SEQ ID NO: 123525 - DNA, 75 bp, Homo sapiens
ttatctgaaaatgtggtttggtactttgctccactgacaatcttggttttctcatgaaaccaggcaactgaaata

SEQ ID NO: 123526 - DNA, 73 bp, Homo sapiens
aaaatgtggtttggtactttgctccactgacaatcttggttttctcatgaaaccaggcaactgaaataggtga

SEQ ID NO: 123527 - DNA, 77 bp, Homo sapiens
tttggtactttgctccactgacaatcttggttttctcatgaaaccaggcaactgaaataggtgatgatccagctact

SEQ ID NO: 123528 - DNA, 82 bp, Homo sapiens
tccactgacaatcttggttttctcatgaaaccaggcaactgaaataggtgatgatccagctactttgcattccaagatgcaa

SEQ ID NO: 123529 - DNA, 80 bp, Homo sapiens
cttggttttctcatgaaaccaggcaactgaaataggtgatgatccagctactttgcattccaagatgcaagaagcaccta

SEQ ID NO: 123530 - DNA, 80 bp, Homo sapiens
ttttctcatgaaaccaggcaactgaaataggtgatgatccagctactttgcattccaagatgcaagaagcacctaacacc

SEQ ID NO: 123531 - DNA, 77 bp, Homo sapiens
aggcaactgaaataggtgatgatccagctactttgcattccaagatgcaagaagcacctaacaccccaccagtattt

SEQ ID NO: 123532 - DNA, 76 bp, Homo sapiens
aaataggtgatgatccagctactttgcattccaagatgcaagaagcacctaacaccccaccagtatttttcagtct

SEQ ID NO: 123533 - DNA, 77 bp, Homo sapiens
atgatccagctactttgcattccaagatgcaagaagcacctaacaccccaccagtatttttcagtcttcgtgtgaaa

SEQ ID NO: 123534 - DNA, 74 bp, Homo sapiens
ctactttgcattccaagatgcaagaagcacctaacaccccaccagtatttttcagtcttcgtgtgaaagaggga

SEQ ID NO: 123535 - DNA, 71 bp, Homo sapiens
aagaagcacctaacaccccaccagtatttttcagtcttcgtgtgaaagagggaggaactgctcggtctgtg

SEQ ID NO: 123536 - DNA, 71 bp, Homo sapiens
acctaacaccccaccagtatttttcagtcttcgtgtgaaagagggaggaactgctcggtctgtgtgaggaa

SEQ ID NO: 123537 - DNA, 76 bp, Homo sapiens
acttgtaaaaggaatttgcataagcaaccagaagaaaacagcagaactaacctgaaacatcaaccacagctgtgca

SEQ ID NO: 123538 - DNA, 80 bp, Homo sapiens
ttgcataagcaaccagaagaaaacagcagaactaacctgaaacatcaaccacagctgtgcagctgcttttcccaacatta

SEQ ID NO: 123539 - DNA, 76 bp, Homo sapiens
aaccagaagaaaacagcagaactaacctgaaacatcaaccacagctgtgcagctgcttttcccaacattattttga

SEQ ID NO: 123540 - DNA, 75 bp, Homo sapiens
aaaacagcagaactaacctgaaacatcaaccacagctgtgcagctgcttttcccaacattattttgaacctggaa

SEQ ID NO: 123541 - DNA, 75 bp, Homo sapiens
agaactaacctgaaacatcaaccacagctgtgcagctgcttttcccaacattattttgaacctggaaagtgtatg

SEQ ID NO: 123542 - DNA, 79 bp, Homo sapiens
aacatcaaccacagctgtgcagctgcttttcccaacattattttgaacctggaaagtgtatgtgcctgcatcttgcctt

SEQ ID NO: 123543 - DNA, 81 bp, Homo sapiens
acagctgtgcagctgcttttcccaacattattttgaacctggaaagtgtatgtgcctgcatcttgcctttcaactgagaga

SEQ ID NO: 123544 - DNA, 76 bp, Homo sapiens
agctgcttttcccaacattattttgaacctggaaagtgtatgtgcctgcatcttgcctttcaactgagagaatcct

SEQ ID NO: 123545 - DNA, 74 bp, Homo sapiens
cttttcccaacattattttgaacctggaaagtgtatgtgcctgcatcttgcctttcaactgagagaatccttaa

SEQ ID NO: 123546 - DNA, 74 bp, Homo sapiens
attattttgaacctggaaagtgtatgtgcctgcatcttgcctttcaactgagagaatccttaaggaagagattt

SEQ ID NO: 123547 - DNA, 77 bp, Homo sapiens
tggaaagtgtatgtgcctgcatcttgcctttcaactgagagaatccttaaggaagagattttgttgtagaagctaaa

SEQ ID NO: 123548 - DNA, 76 bp, Homo sapiens
tatgtgcctgcatcttgcctttcaactgagagaatccttaaggaagagattttgttgtagaagctaaatttgtgtt

SEQ ID NO: 123549 - DNA, 71 bp, Homo sapiens
atcttgcctttcaactgagagaatccttaaggaagagattttgttgtagaagctaaatttgtgtttttggc

SEQ ID NO: 123550 - DNA, 73 bp, Homo sapiens
tttcaactgagagaatccttaaggaagagattttgttgtagaagctaaatttgtgtttttggctgctggtcaa

SEQ ID NO: 123551 - DNA, 72 bp, Homo sapiens
agaatccttaaggaagagattttgttgtagaagctaaatttgtgtttttggctgctggtcaacagctttcca

SEQ ID NO: 123552 - DNA, 73 bp, Homo sapiens
ttaaggaagagattttgttgtagaagctaaatttgtgtttttggctgctggtcaacagctttccatccttgta

SEQ ID NO: 123553 - DNA, 74 bp, Homo sapiens
attttgttgtagaagctaaatttgtgtttttggctgctggtcaacagctttccatccttgtaccattcaacaga

SEQ ID NO: 123554 - DNA, 75 bp, Homo sapiens
tagaagctaaatttgtgtttttggctgctggtcaacagctttccatccttgtaccattcaacagagagttccgga

SEQ ID NO: 123555 - DNA, 77 bp, Homo sapiens
tgtttttggctgctggtcaacagctttccatccttgtaccattcaacagagagttccggagtgccagccaccttaca

SEQ ID NO: 123556 - DNA, 79 bp, Homo sapiens
ttggctgctggtcaacagctttccatccttgtaccattcaacagagagttccggagtgccagccaccttacactccaga

SEQ ID NO: 123557 - DNA, 75 bp, Homo sapiens
aacagctttccatccttgtaccattcaacagagagttccggagtgccagccaccttacactccagagtgcacgtt

SEQ ID NO: 123558 - DNA, 77 bp, Homo sapiens
ttccatccttgtaccattcaacagagagttccggagtgccagccaccttacactccagagtgcacgtttctcctaca

SEQ ID NO: 123559 - DNA, 76 bp, Homo sapiens
attcaacagagagttccggagtgccagccaccttacactccagagtgcacgtttctcctacagtcaccgtcatcgg

SEQ ID NO: 123560 - DNA, 77 bp, Homo sapiens
acagagagttccggagtgccagccaccttacactccagagtgcacgtttctcctacagtcaccgtcatcggtcctgc

SEQ ID NO: 123561 - DNA, 78 bp, Homo sapiens
agtgccagccaccttacactccagagtgcacgtttctcctacagtcaccgtcatcggtcctgccttctcaacaatgac

SEQ ID NO: 123562 - DNA, 79 bp, Homo sapiens
ccttacactccagagtgcacgtttctcctacagtcaccgtcatcggtcctgccttctcaacaatgactgcgggctctga

SEQ ID NO: 123563 - DNA, 78 bp, Homo sapiens
tccagagtgcacgtttctcctacagtcaccgtcatcggtcctgccttctcaacaatgactgcgggctctgaaataaaa

SEQ ID NO: 123564 - DNA, 75 bp, Homo sapiens
acgtttctcctacagtcaccgtcatcggtcctgccttctcaacaatgactgcgggctctgaaataaaacgtgata

SEQ ID NO: 123565 - DNA, 79 bp, Homo sapiens
ctacagtcaccgtcatcggtcctgccttctcaacaatgactgcgggctctgaaataaaacgtgatatccatctgtcaaa

SEQ ID NO: 123566 - DNA, 78 bp, Homo sapiens
ttcattccagcatttggcaccagtttctatcgtgggctattgtaccaacctaagaccatcagtgtggccatgttctcc

SEQ ID NO: 123567 - DNA, 76 bp, Homo sapiens
atttggcaccagtttctatcgtgggctattgtaccaacctaagaccatcagtgtggccatgttctccctcattcca

SEQ ID NO: 123568 - DNA, 78 bp, Homo sapiens
tttctatcgtgggctattgtaccaacctaagaccatcagtgtggccatgttctccctcattccaccatcattcttgat

SEQ ID NO: 123569 - DNA, 81 bp, Homo sapiens
tgggctattgtaccaacctaagaccatcagtgtggccatgttctccctcattccaccatcattcttgatttggcagatata

SEQ ID NO: 123570 - DNA, 78 bp, Homo sapiens
attgtaccaacctaagaccatcagtgtggccatgttctccctcattccaccatcattcttgatttggcagatatactt

SEQ ID NO: 123571 - DNA, 82 bp, Homo sapiens
cctaagaccatcagtgtggccatgttctccctcattccaccatcattcttgatttggcagatatactttccagcattagctg

SEQ ID NO: 123572 - DNA, 84 bp, Homo sapiens
tgtggccatgttctccctcattccaccatcattcttgatttggcagatatactttccagcattagctggctctgcttttgcaaa

SEQ ID NO: 123573 - DNA, 82 bp, Homo sapiens
atgttctccctcattccaccatcattcttgatttggcagatatactttccagcattagctggctctgcttttgcaaactgta

SEQ ID NO: 123574 - DNA, 82 bp, Homo sapiens
tccaccatcattcttgatttggcagatatactttccagcattagctggctctgcttttgcaaactgtagagttgcaacattt

SEQ ID NO: 123575 - DNA, 80 bp, Homo sapiens
ttcttgatttggcagatatactttccagcattagctggctctgcttttgcaaactgtagagttgcaacattttccacaaa

SEQ ID NO: 123576 - DNA, 79 bp, Homo sapiens
atttggcagatatactttccagcattagctggctctgcttttgcaaactgtagagttgcaacattttccacaaatgtaa

SEQ ID NO: 123577 - DNA, 79 bp, Homo sapiens
tatactttccagcattagctggctctgcttttgcaaactgtagagttgcaacattttccacaaatgtaatcctgatgtt

SEQ ID NO: 123578 - DNA, 77 bp, Homo sapiens
attagctggctctgcttttgcaaactgtagagttgcaacattttccacaaatgtaatcctgatgttttcactttctc

SEQ ID NO: 123579 - DNA, 77 bp, Homo sapiens
tctgcttttgcaaactgtagagttgcaacattttccacaaatgtaatcctgatgttttcactttctctaatcacttc

SEQ ID NO: 123580 - DNA, 75 bp, Homo sapiens
tttgcaaactgtagagttgcaacattttccacaaatgtaatcctgatgttttcactttctctaatcacttcttcc

SEQ ID NO: 123581 - DNA, 74 bp, Homo sapiens
gttgcaacattttccacaaatgtaatcctgatgttttcactttctctaatcacttcttccttctctttaagcca

SEQ ID NO: 123582 - DNA, 73 bp, Homo sapiens
tttccacaaatgtaatcctgatgttttcactttctctaatcacttcttccttctctttaagccactggacaaa

SEQ ID NO: 123583 - DNA, 72 bp, Homo sapiens
caaatgtaatcctgatgttttcactttctctaatcacttcttccttctctttaagccactggacaaaaatag

SEQ ID NO: 123584 - DNA, 71 bp, Homo sapiens
atgttttcactttctctaatcacttcttccttctctttaagccactggacaaaaataggctgggcgccttc

SEQ ID NO: 123585 - DNA, 75 bp, Homo sapiens
tttctctaatcacttcttccttctctttaagccactggacaaaaataggctgggcgccttctatggatgcttgta

SEQ ID NO: 123586 - DNA, 75 bp, Homo sapiens
ctaatcacttcttccttctctttaagccactggacaaaaataggctgggcgccttctatggatgcttgtaattca

SEQ ID NO: 123587 - DNA, 78 bp, Homo sapiens
ttctctttaagccactggacaaaaataggctgggcgccttctatggatgcttgtaattcagcaggctctccggctaca

SEQ ID NO: 123588 - DNA, 77 bp, Homo sapiens
tttaagccactggacaaaaataggctgggcgccttctatggatgcttgtaattcagcaggctctccggctacaacag

SEQ ID NO: 123589 - DNA, 77 bp, Homo sapiens
aaaaataggctgggcgccttctatggatgcttgtaattcagcaggctctccggctacaacagtgaggctgttcagtt

SEQ ID NO: 123590 - DNA, 80 bp, Homo sapiens
tgggcgccttctatggatgcttgtaattcagcaggctctccggctacaacagtgaggctgttcagtttggagacaaatct

SEQ ID NO: 123591 - DNA, 79 bp, Homo sapiens
ttctatggatgcttgtaattcagcaggctctccggctacaacagtgaggctgttcagtttggagacaaatcttggtggt

SEQ ID NO: 123592 - DNA, 79 bp, Homo sapiens
atgcttgtaattcagcaggctctccggctacaacagtgaggctgttcagtttggagacaaatcttggtggttctgaaca

SEQ ID NO: 123593 - DNA, 76 bp, Homo sapiens
attcagcaggctctccggctacaacagtgaggctgttcagtttggagacaaatcttggtggttctgaacaggaaaa

SEQ ID NO: 123594 - DNA, 73 bp, Homo sapiens
agtgaggctgttcagtttggagacaaatcttggtggttctgaacaggaaaagatggatggaaattgttgaaaa

SEQ ID NO: 123595 - DNA, 78 bp, Homo sapiens
tttgcacatttatgacatttctgccatgtggatgaactatatttacctttcaattttacagtacaaacacaagtatca

SEQ ID NO: 123596 - DNA, 76 bp, Homo sapiens
tatgacatttctgccatgtggatgaactatatttacctttcaattttacagtacaaacacaagtatcacttcccac

SEQ ID NO: 123597 - DNA, 76 bp, Homo sapiens
tggatgaactatatttacctttcaattttacagtacaaacacaagtatcacttcccacttcattctgtgctttgca

SEQ ID NO: 123598 - DNA, 75 bp, Homo sapiens
tatttacctttcaattttacagtacaaacacaagtatcacttcccacttcattctgtgctttgcagtggtattca

SEQ ID NO: 123599 - DNA, 78 bp, Homo sapiens
ttcaattttacagtacaaacacaagtatcacttcccacttcattctgtgctttgcagtggtattcaccgatgtctgaa

SEQ ID NO: 123600 - DNA, 82 bp, Homo sapiens
acaagtatcacttcccacttcattctgtgctttgcagtggtattcaccgatgtctgaagtgtccacattgagaatgtgaata

SEQ ID NO: 123601 - DNA, 82 bp, Homo sapiens
ttcccacttcattctgtgctttgcagtggtattcaccgatgtctgaagtgtccacattgagaatgtgaatacttgtgtggaa

SEQ ID NO: 123602 - DNA, 79 bp, Homo sapiens
attctgtgctttgcagtggtattcaccgatgtctgaagtgtccacattgagaatgtgaatacttgtgtggaagtttttg

SEQ ID NO: 123603 - DNA, 80 bp, Homo sapiens
tttgcagtggtattcaccgatgtctgaagtgtccacattgagaatgtgaatacttgtgtggaagtttttggatgcaatct

SEQ ID NO: 123604 - DNA, 79 bp, Homo sapiens
tattcaccgatgtctgaagtgtccacattgagaatgtgaatacttgtgtggaagtttttggatgcaatcttgtatttct

SEQ ID NO: 123605 - DNA, 82 bp, Homo sapiens
atgtctgaagtgtccacattgagaatgtgaatacttgtgtggaagtttttggatgcaatcttgtatttcttgctgcttctga

SEQ ID NO: 123606 - DNA, 80 bp, Homo sapiens
agtgtccacattgagaatgtgaatacttgtgtggaagtttttggatgcaatcttgtatttcttgctgcttctgagttgcc

SEQ ID NO: 123607 - DNA, 78 bp, Homo sapiens
aatgtgaatacttgtgtggaagtttttggatgcaatcttgtatttcttgctgcttctgagttgccgcttgtctttgta

SEQ ID NO: 123608 - DNA, 77 bp, Homo sapiens
aatacttgtgtggaagtttttggatgcaatcttgtatttcttgctgcttctgagttgccgcttgtctttgtaccata

SEQ ID NO: 123609 - DNA, 75 bp, Homo sapiens
aagtttttggatgcaatcttgtatttcttgctgcttctgagttgccgcttgtctttgtaccataccacctcaaac

SEQ ID NO: 123610 - DNA, 77 bp, Homo sapiens
ttggatgcaatcttgtatttcttgctgcttctgagttgccgcttgtctttgtaccataccacctcaaacggtggtgt

SEQ ID NO: 123611 - DNA, 72 bp, Homo sapiens
tatttcttgctgcttctgagttgccgcttgtctttgtaccataccacctcaaacggtggtgttcccgaaagt

SEQ ID NO: 123612 - DNA, 73 bp, Homo sapiens
ctgcttctgagttgccgcttgtctttgtaccataccacctcaaacggtggtgttcccgaaagttcacattcaa

SEQ ID NO: 123613 - DNA, 71 bp, Homo sapiens
agttgccgcttgtctttgtaccataccacctcaaacggtggtgttcccgaaagttcacattcaagactgac

SEQ ID NO: 123614 - DNA, 72 bp, Homo sapiens
ttgtctttgtaccataccacctcaaacggtggtgttcccgaaagttcacattcaagactgacttcagcattt

SEQ ID NO: 123615 - DNA, 68 bp, Homo sapiens
ataccacctcaaacggtggtgttcccgaaagttcacattcaagactgacttcagcatttttaagggtt

SEQ ID NO: 123616 - DNA, 68 bp, Homo sapiens
aaacggtggtgttcccgaaagttcacattcaagactgacttcagcatttttaagggtttctactatag

SEQ ID NO: 123617 - DNA, 70 bp, Homo sapiens
gtggtgttcccgaaagttcacattcaagactgacttcagcatttttaagggtttctactataggagggaa

SEQ ID NO: 123618 - DNA, 71 bp, Homo sapiens
aaagttcacattcaagactgacttcagcatttttaagggtttctactataggagggaagctgctaaaaaca

SEQ ID NO: 123619 - DNA, 72 bp, Homo sapiens
aagactgacttcagcatttttaagggtttctactataggagggaagctgctaaaaacaggtggctctgcaaa

SEQ ID NO: 123620 - DNA, 71 bp, Homo sapiens
tcagcatttttaagggtttctactataggagggaagctgctaaaaacaggtggctctgcaaaaaacaagaa

SEQ ID NO: 123621 - DNA, 74 bp, Homo sapiens
tttctactataggagggaagctgctaaaaacaggtggctctgcaaaaaacaagaatttctcatgaattgggcta

SEQ ID NO: 123622 - DNA, 71 bp, Homo sapiens
gaaggtggttttcatttaatgagaaacacaagaacaagatgtctaccttttactataaccttggtactgca

SEQ ID NO: 123623 - DNA, 74 bp, Homo sapiens
tggttttcatttaatgagaaacacaagaacaagatgtctaccttttactataaccttggtactgcagcttgtgc

SEQ ID NO: 123624 - DNA, 76 bp, Homo sapiens
ttaatgagaaacacaagaacaagatgtctaccttttactataaccttggtactgcagcttgtgctgccagcgggat

SEQ ID NO: 123625 - DNA, 77 bp, Homo sapiens
aagaacaagatgtctaccttttactataaccttggtactgcagcttgtgctgccagcgggattctgagcctcacaaa

SEQ ID NO: 123626 - DNA, 78 bp, Homo sapiens
aagatgtctaccttttactataaccttggtactgcagcttgtgctgccagcgggattctgagcctcacaaatgaaatc

SEQ ID NO: 123627 - DNA, 81 bp, Homo sapiens
tttactataaccttggtactgcagcttgtgctgccagcgggattctgagcctcacaaatgaaatctccactgtcctcagta

SEQ ID NO: 123628 - DNA, 83 bp, Homo sapiens
taaccttggtactgcagcttgtgctgccagcgggattctgagcctcacaaatgaaatctccactgtcctcagtactgagattg

SEQ ID NO: 123629 - DNA, 87 bp, Homo sapiens
actgcagcttgtgctgccagcgggattctgagcctcacaaatgaaatctccactgtcctcagtactgagattgttcatctgtatgac

SEQ ID NO: 123630 - DNA, 86 bp, Homo sapiens
tgccagcgggattctgagcctcacaaatgaaatctccactgtcctcagtactgagattgttcatctgtatgacggccactgagtca

SEQ ID NO: 123631 - DNA, 83 bp, Homo sapiens
attctgagcctcacaaatgaaatctccactgtcctcagtactgagattgttcatctgtatgacggccactgagtcaatgaaag

SEQ ID NO: 123632 - DNA, 84 bp, Homo sapiens
ctcacaaatgaaatctccactgtcctcagtactgagattgttcatctgtatgacggccactgagtcaatgaaagtcattctgta

SEQ ID NO: 123633 - DNA, 84 bp, Homo sapiens
atgaaatctccactgtcctcagtactgagattgttcatctgtatgacggccactgagtcaatgaaagtcattctgtacttatca

SEQ ID NO: 123634 - DNA, 84 bp, Homo sapiens
tcctcagtactgagattgttcatctgtatgacggccactgagtcaatgaaagtcattctgtacttatcactggctggaagttca

SEQ ID NO: 123635 - DNA, 84 bp, Homo sapiens
tactgagattgttcatctgtatgacggccactgagtcaatgaaagtcattctgtacttatcactggctggaagttcatgttcat

SEQ ID NO: 123636 - DNA, 81 bp, Homo sapiens
ttcatctgtatgacggccactgagtcaatgaaagtcattctgtacttatcactggctggaagttcatgttcatttcggaac

SEQ ID NO: 123637 - DNA, 80 bp, Homo sapiens
tatgacggccactgagtcaatgaaagtcattctgtacttatcactggctggaagttcatgttcatttcggaaccacacaa

SEQ ID NO: 123638 - DNA, 78 bp, Homo sapiens
actgagtcaatgaaagtcattctgtacttatcactggctggaagttcatgttcatttcggaaccacacaactctgatt

SEQ ID NO: 123639 - DNA, 77 bp, Homo sapiens
atgaaagtcattctgtacttatcactggctggaagttcatgttcatttcggaaccacacaactctgatttctgggga

SEQ ID NO: 123640 - DNA, 81 bp, Homo sapiens
tacttatcactggctggaagttcatgttcatttcggaaccacacaactctgatttctggggatccagctatcttgcattca

SEQ ID NO: 123641 - DNA, 80 bp, Homo sapiens
tggctggaagttcatgttcatttcggaaccacacaactctgatttctggggatccagctatcttgcattcaagtcgtgaa

SEQ ID NO: 123642 - DNA, 79 bp, Homo sapiens
aagttcatgttcatttcggaaccacacaactctgatttctggggatccagctatcttgcattcaagtcgtgaagagtca

SEQ ID NO: 123643 - DNA, 80 bp, Homo sapiens
ttcatttcggaaccacacaactctgatttctggggatccagctatcttgcattcaagtcgtgaagagtcacctgctttca

SEQ ID NO: 123644 - DNA, 78 bp, Homo sapiens
aaccacacaactctgatttctggggatccagctatcttgcattcaagtcgtgaagagtcacctgctttcacaattttg

SEQ ID NO: 123645 - DNA, 78 bp, Homo sapiens
tgatttctggggatccagctatcttgcattcaagtcgtgaagagtcacctgctttcacaattttggaggcttctaatt

SEQ ID NO: 123646 - DNA, 77 bp, Homo sapiens
gatccagctatcttgcattcaagtcgtgaagagtcacctgctttcacaattttggaggcttctaatttctttacaaa

SEQ ID NO: 123647 - DNA, 73 bp, Homo sapiens
ctatcttgcattcaagtcgtgaagagtcacctgctttcacaattttggaggcttctaatttctttacaaactt

SEQ ID NO: 123648 - DNA, 70 bp, Homo sapiens
attcaagtcgtgaagagtcacctgctttcacaattttggaggcttctaatttctttacaaactttggtgg

SEQ ID NO: 123649 - DNA, 68 bp, Homo sapiens
aagagtcacctgctttcacaattttggaggcttctaatttctttacaaactttggtggttctaaagag

SEQ ID NO: 123650 - DNA, 68 bp, Homo sapiens
acctgctttcacaattttggaggcttctaatttctttacaaactttggtggttctaaagagtcaggaa

SEQ ID NO: 123651 - DNA, 69 bp, Homo sapiens
attttggaggcttctaatttctttacaaactttggtggttctaaagagtcaggaaagaggagagtatca

SEQ ID NO: 123652 - DNA, 77 bp, Homo sapiens
aaccaaagacacagtcagacagaaacataaaggaatcaaatttgcacacctgtcacaagcaacatcgtagtacaaga

SEQ ID NO: 123653 - DNA, 78 bp, Homo sapiens
agtcagacagaaacataaaggaatcaaatttgcacacctgtcacaagcaacatcgtagtacaagagtcgctaccaaca

SEQ ID NO: 123654 - DNA, 77 bp, Homo sapiens
aacataaaggaatcaaatttgcacacctgtcacaagcaacatcgtagtacaagagtcgctaccaacatcattggtaa

SEQ ID NO: 123655 - DNA, 80 bp, Homo sapiens
aatcaaatttgcacacctgtcacaagcaacatcgtagtacaagagtcgctaccaacatcattggtaacatggcaagtata

SEQ ID NO: 123656 - DNA, 80 bp, Homo sapiens
aatttgcacacctgtcacaagcaacatcgtagtacaagagtcgctaccaacatcattggtaacatggcaagtatactgtc

SEQ ID NO: 123657 - DNA, 82 bp, Homo sapiens
tcacaagcaacatcgtagtacaagagtcgctaccaacatcattggtaacatggcaagtatactgtccagtcttagaagcatc

SEQ ID NO: 123658 - DNA, 80 bp, Homo sapiens
aacatcgtagtacaagagtcgctaccaacatcattggtaacatggcaagtatactgtccagtcttagaagcatccactga

SEQ ID NO: 123659 - DNA, 79 bp, Homo sapiens
aagagtcgctaccaacatcattggtaacatggcaagtatactgtccagtcttagaagcatccactgagtagagatttaa

SEQ ID NO: 123660 - DNA, 76 bp, Homo sapiens
attggtaacatggcaagtatactgtccagtcttagaagcatccactgagtagagatttaagaagctagtcgaccct

SEQ ID NO: 123661 - DNA, 77 bp, Homo sapiens
aacatggcaagtatactgtccagtcttagaagcatccactgagtagagatttaagaagctagtcgacccttccaagc

SEQ ID NO: 123662 - DNA, 77 bp, Homo sapiens
tatactgtccagtcttagaagcatccactgagtagagatttaagaagctagtcgacccttccaagccaatgaaacat

SEQ ID NO: 123663 - DNA, 74 bp, Homo sapiens
agtcttagaagcatccactgagtagagatttaagaagctagtcgacccttccaagccaatgaaacatttaggac

SEQ ID NO: 123664 - DNA, 73 bp, Homo sapiens
atccactgagtagagatttaagaagctagtcgacccttccaagccaatgaaacatttaggacctgagacaagt

SEQ ID NO: 123665 - DNA, 74 bp, Homo sapiens
agtagagatttaagaagctagtcgacccttccaagccaatgaaacatttaggacctgagacaagttccacatca

SEQ ID NO: 123666 - DNA, 73 bp, Homo sapiens
ttaagaagctagtcgacccttccaagccaatgaaacatttaggacctgagacaagttccacatcatccttaaa

SEQ ID NO: 123667 - DNA, 69 bp, Homo sapiens
acccttccaagccaatgaaacatttaggacctgagacaagttccacatcatccttaaaccattttattt

SEQ ID NO: 123668 - DNA, 70 bp, Homo sapiens
ccaagccaatgaaacatttaggacctgagacaagttccacatcatccttaaaccattttattttaaatgg

SEQ ID NO: 123669 - DNA, 70 bp, Homo sapiens
tgaaacatttaggacctgagacaagttccacatcatccttaaaccattttattttaaatggtggtgttcc

SEQ ID NO: 123670 - DNA, 70 bp, Homo sapiens
gacctgagacaagttccacatcatccttaaaccattttattttaaatggtggtgttccttttagtattgc

SEQ ID NO: 123671 - DNA, 67 bp, Homo sapiens
acaagttccacatcatccttaaaccattttattttaaatggtggtgttccttttagtattgccttaa

SEQ ID NO: 123672 - DNA, 67 bp, Homo sapiens
catccttaaaccattttattttaaatggtggtgttccttttagtattgccttaaattccactgtaga

SEQ ID NO: 123673 - DNA, 69 bp, Homo sapiens
ccattttattttaaatggtggtgttccttttagtattgccttaaattccactgtagaatcaggtatggc

SEQ ID NO: 123674 - DNA, 74 bp, Homo sapiens
tgttccttttagtattgccttaaattccactgtagaatcaggtatggcttgctgtcgcccaggtttcactagga

SEQ ID NO: 123675 - DNA, 74 bp, Homo sapiens
ttttagtattgccttaaattccactgtagaatcaggtatggcttgctgtcgcccaggtttcactaggaagcttg

SEQ ID NO: 123676 - DNA, 75 bp, Homo sapiens
taaattccactgtagaatcaggtatggcttgctgtcgcccaggtttcactaggaagcttggtggttctatagatt

SEQ ID NO: 123677 - DNA, 77 bp, Homo sapiens
tgtagaatcaggtatggcttgctgtcgcccaggtttcactaggaagcttggtggttctatagattttaagagagata

SEQ ID NO: 123678 - DNA, 74 bp, Homo sapiens
gtatggcttgctgtcgcccaggtttcactaggaagcttggtggttctatagattttaagagagatatatttaat

SEQ ID NO: 123679 - DNA, 72 bp, Homo sapiens
ttgctgtcgcccaggtttcactaggaagcttggtggttctatagattttaagagagatatatttaattaaat

SEQ ID NO: 123680 - DNA, 72 bp, Homo sapiens
tttaagaagcattcgcaaggaagaatcaagaagaggtaaagaaattctaacctttcacagttaagatgccac

SEQ ID NO: 123681 - DNA, 78 bp, Homo sapiens
attcgcaaggaagaatcaagaagaggtaaagaaattctaacctttcacagttaagatgccactgcatgcatcatctcc

SEQ ID NO: 123682 - DNA, 80 bp, Homo sapiens
aagaatcaagaagaggtaaagaaattctaacctttcacagttaagatgccactgcatgcatcatctcctgctacatttga

SEQ ID NO: 123683 - DNA, 84 bp, Homo sapiens
aaattctaacctttcacagttaagatgccactgcatgcatcatctcctgctacatttgacactttgcatgtgtaatttgcagta

SEQ ID NO: 123684 - DNA, 88 bp, Homo sapiens
tttcacagttaagatgccactgcatgcatcatctcctgctacatttgacactttgcatgtgtaatttgcagtatcttctaattccaga

SEQ ID NO: 123685 - DNA, 87 bp, Homo sapiens
ttaagatgccactgcatgcatcatctcctgctacatttgacactttgcatgtgtaatttgcagtatcttctaattccagattattaa

SEQ ID NO: 123686 - DNA, 84 bp, Homo sapiens
atgcatcatctcctgctacatttgacactttgcatgtgtaatttgcagtatcttctaattccagattattaacttccagagaca

SEQ ID NO: 123687 - DNA, 81 bp, Homo sapiens
atctcctgctacatttgacactttgcatgtgtaatttgcagtatcttctaattccagattattaacttccagagacacaga

SEQ ID NO: 123688 - DNA, 82 bp, Homo sapiens
ctacatttgacactttgcatgtgtaatttgcagtatcttctaattccagattattaacttccagagacacagatctctcatg

SEQ ID NO: 123689 - DNA, 84 bp, Homo sapiens
tgcatgtgtaatttgcagtatcttctaattccagattattaacttccagagacacagatctctcatggcacacaagtctgtatt

SEQ ID NO: 123690 - DNA, 80 bp, Homo sapiens
gtgtaatttgcagtatcttctaattccagattattaacttccagagacacagatctctcatggcacacaagtctgtattt

SEQ ID NO: 123691 - DNA, 80 bp, Homo sapiens
taattccagattattaacttccagagacacagatctctcatggcacacaagtctgtattttgcacttgtagatatttctt

SEQ ID NO: 123692 - DNA, 79 bp, Homo sapiens
ttattaacttccagagacacagatctctcatggcacacaagtctgtattttgcacttgtagatatttcttttccatcct

SEQ ID NO: 123693 - DNA, 79 bp, Homo sapiens
agatctctcatggcacacaagtctgtattttgcacttgtagatatttcttttccatccttaaaccactgagcactaatg

SEQ ID NO: 123694 - DNA, 74 bp, Homo sapiens
acacaagtctgtattttgcacttgtagatatttcttttccatccttaaaccactgagcactaatgggaagtgaa

SEQ ID NO: 123695 - DNA, 73 bp, Homo sapiens
tattttgcacttgtagatatttcttttccatccttaaaccactgagcactaatgggaagtgaaccagacacct

SEQ ID NO: 123696 - DNA, 77 bp, Homo sapiens
ttgtagatatttcttttccatccttaaaccactgagcactaatgggaagtgaaccagacaccttgcactccatatga

SEQ ID NO: 123697 - DNA, 75 bp, Homo sapiens
atttcttttccatccttaaaccactgagcactaatgggaagtgaaccagacaccttgcactccatatgaatagaa

SEQ ID NO: 123698 - DNA, 76 bp, Homo sapiens
atccttaaaccactgagcactaatgggaagtgaaccagacaccttgcactccatatgaatagaagagcccagaact

SEQ ID NO: 123699 - DNA, 77 bp, Homo sapiens
actgagcactaatgggaagtgaaccagacaccttgcactccatatgaatagaagagcccagaactttatccattttg

SEQ ID NO: 123700 - DNA, 74 bp, Homo sapiens
taatgggaagtgaaccagacaccttgcactccatatgaatagaagagcccagaactttatccattttggttaat

SEQ ID NO: 123701 - DNA, 71 bp, Homo sapiens
aagtgaaccagacaccttgcactccatatgaatagaagagcccagaactttatccattttggttaattttt

SEQ ID NO: 123702 - DNA, 74 bp, Homo sapiens
agacaccttgcactccatatgaatagaagagcccagaactttatccattttggttaattttttggtgaatgatg

SEQ ID NO: 123703 - DNA, 73 bp, Homo sapiens
cactccatatgaatagaagagcccagaactttatccattttggttaattttttggtgaatgatggaggaatat

SEQ ID NO: 123704 - DNA, 72 bp, Homo sapiens
gaagagcccagaactttatccattttggttaattttttggtgaatgatggaggaatattttgatctgtccaa

SEQ ID NO: 123705 - DNA, 73 bp, Homo sapiens
gcccagaactttatccattttggttaattttttggtgaatgatggaggaatattttgatctgtccaatgcaaa

SEQ ID NO: 123706 - DNA, 76 bp, Homo sapiens
tccattttggttaattttttggtgaatgatggaggaatattttgatctgtccaatgcaaacagcaaaacacatcca

SEQ ID NO: 123707 - DNA, 74 bp, Homo sapiens
aaaggacatactataaataagggaagctgactggggtgaagatacaaacctagcactcttaagtaggcatcaca

SEQ ID NO: 123708 - DNA, 77 bp, Homo sapiens
tactataaataagggaagctgactggggtgaagatacaaacctagcactcttaagtaggcatcacagctactgcttc

SEQ ID NO: 123709 - DNA, 77 bp, Homo sapiens
aagctgactggggtgaagatacaaacctagcactcttaagtaggcatcacagctactgcttccgaagtcattttcca

SEQ ID NO: 123710 - DNA, 75 bp, Homo sapiens
gggtgaagatacaaacctagcactcttaagtaggcatcacagctactgcttccgaagtcattttccaccttgaaa

SEQ ID NO: 123711 - DNA, 75 bp, Homo sapiens
aagatacaaacctagcactcttaagtaggcatcacagctactgcttccgaagtcattttccaccttgaaagtgta

SEQ ID NO: 123712 - DNA, 77 bp, Homo sapiens
cactcttaagtaggcatcacagctactgcttccgaagtcattttccaccttgaaagtgtactgaccgctgtcctgct

SEQ ID NO: 123713 - DNA, 73 bp, Homo sapiens
cttccgaagtcattttccaccttgaaagtgtactgaccgctgtcctgcttcattactgactgaattctaaaac

SEQ ID NO: 123714 - DNA, 73 bp, Homo sapiens
ttttccaccttgaaagtgtactgaccgctgtcctgcttcattactgactgaattctaaaactggccacgttat

SEQ ID NO: 123715 - DNA, 73 bp, Homo sapiens
ttgaaagtgtactgaccgctgtcctgcttcattactgactgaattctaaaactggccacgttattttcaaaac

SEQ ID NO: 123716 - DNA, 74 bp, Homo sapiens
tactgaccgctgtcctgcttcattactgactgaattctaaaactggccacgttattttcaaaactcattgaaaa

SEQ ID NO: 123717 - DNA, 74 bp, Homo sapiens
tgtcctgcttcattactgactgaattctaaaactggccacgttattttcaaaactcattgaaaagtatctactg

SEQ ID NO: 123718 - DNA, 71 bp, Homo sapiens
cattactgactgaattctaaaactggccacgttattttcaaaactcattgaaaagtatctactgggaacta

SEQ ID NO: 123719 - DNA, 69 bp, Homo sapiens
gactgaattctaaaactggccacgttattttcaaaactcattgaaaagtatctactgggaactatttgt

SEQ ID NO: 123720 - DNA, 66 bp, Homo sapiens
aaaactggccacgttattttcaaaactcattgaaaagtatctactgggaactatttgtttcccgtc

SEQ ID NO: 123721 - DNA, 67 bp, Homo sapiens
cacgttattttcaaaactcattgaaaagtatctactgggaactatttgtttcccgtctttaagccat

SEQ ID NO: 123722 - DNA, 69 bp, Homo sapiens
aactcattgaaaagtatctactgggaactatttgtttcccgtctttaagccatttcactttgagttctg

SEQ ID NO: 123723 - DNA, 69 bp, Homo sapiens
ttgaaaagtatctactgggaactatttgtttcccgtctttaagccatttcactttgagttctggtgttc

SEQ ID NO: 123724 - DNA, 71 bp, Homo sapiens
tactgggaactatttgtttcccgtctttaagccatttcactttgagttctggtgttccagccacaacacat

SEQ ID NO: 123725 - DNA, 70 bp, Homo sapiens
actatttgtttcccgtctttaagccatttcactttgagttctggtgttccagccacaacacattccaagg

SEQ ID NO: 123726 - DNA, 75 bp, Homo sapiens
tctttaagccatttcactttgagttctggtgttccagccacaacacattccaaggtcatgggatctttctccgta

SEQ ID NO: 123727 - DNA, 76 bp, Homo sapiens
atttcactttgagttctggtgttccagccacaacacattccaaggtcatgggatctttctccgtaacatcaactga

SEQ ID NO: 123728 - DNA, 75 bp, Homo sapiens
actttgagttctggtgttccagccacaacacattccaaggtcatgggatctttctccgtaacatcaactgattta

SEQ ID NO: 123729 - DNA, 76 bp, Homo sapiens
tgttccagccacaacacattccaaggtcatgggatctttctccgtaacatcaactgatttagctttctctacgatt

SEQ ID NO: 123730 - DNA, 75 bp, Homo sapiens
caaggtcatgggatctttctccgtaacatcaactgatttagctttctctacgatttgagctggttctgtagtaaa

SEQ ID NO: 123731 - DNA, 74 bp, Homo sapiens
atgggatctttctccgtaacatcaactgatttagctttctctacgatttgagctggttctgtagtaaaaatgaa

SEQ ID NO: 123732 - DNA, 74 bp, Homo sapiens
tttctccgtaacatcaactgatttagctttctctacgatttgagctggttctgtagtaaaaatgaaaatgtgga

SEQ ID NO: 123733 - DNA, 73 bp, Homo sapiens
ctaatgaaactgtcgctatagactatctttgaaagagaatagcttacaaaccttgtactaaaaggaaagcata

SEQ ID NO: 123734 - DNA, 74 bp, Homo sapiens
tgtcgctatagactatctttgaaagagaatagcttacaaaccttgtactaaaaggaaagcataacacctctcaa

SEQ ID NO: 123735 - DNA, 73 bp, Homo sapiens
tatctttgaaagagaatagcttacaaaccttgtactaaaaggaaagcataacacctctcaactcctgactcat

SEQ ID NO: 123736 - DNA, 72 bp, Homo sapiens
aagagaatagcttacaaaccttgtactaaaaggaaagcataacacctctcaactcctgactcattcttggct

SEQ ID NO: 123737 - DNA, 74 bp, Homo sapiens
ttacaaaccttgtactaaaaggaaagcataacacctctcaactcctgactcattcttggcttgacaggtatatc

SEQ ID NO: 123738 - DNA, 76 bp, Homo sapiens
cttgtactaaaaggaaagcataacacctctcaactcctgactcattcttggcttgacaggtatatctcccactgtg

SEQ ID NO: 123739 - DNA, 78 bp, Homo sapiens
aaaggaaagcataacacctctcaactcctgactcattcttggcttgacaggtatatctcccactgtgtccattatcca

SEQ ID NO: 123740 - DNA, 79 bp, Homo sapiens
ataacacctctcaactcctgactcattcttggcttgacaggtatatctcccactgtgtccattatccacacttctgatt

SEQ ID NO: 123741 - DNA, 80 bp, Homo sapiens
aactcctgactcattcttggcttgacaggtatatctcccactgtgtccattatccacacttctgatttgaagtgtggcca

SEQ ID NO: 123742 - DNA, 80 bp, Homo sapiens
attcttggcttgacaggtatatctcccactgtgtccattatccacacttctgatttgaagtgtggccacactgtccacaa

SEQ ID NO: 123743 - DNA, 81 bp, Homo sapiens
ttgacaggtatatctcccactgtgtccattatccacacttctgatttgaagtgtggccacactgtccacaaatgaaatata

SEQ ID NO: 123744 - DNA, 83 bp, Homo sapiens
tatatctcccactgtgtccattatccacacttctgatttgaagtgtggccacactgtccacaaatgaaatatagacattatca

SEQ ID NO: 123745 - DNA, 84 bp, Homo sapiens
tgtgtccattatccacacttctgatttgaagtgtggccacactgtccacaaatgaaatatagacattatcatcttcatcaagaa

SEQ ID NO: 123746 - DNA, 85 bp, Homo sapiens
ttctgatttgaagtgtggccacactgtccacaaatgaaatatagacattatcatcttcatcaagaatctgatcatcctttagcca

SEQ ID NO: 123747 - DNA, 83 bp, Homo sapiens
tgtggccacactgtccacaaatgaaatatagacattatcatcttcatcaagaatctgatcatcctttagccaggttatagaaa

SEQ ID NO: 123748 - DNA, 81 bp, Homo sapiens
acactgtccacaaatgaaatatagacattatcatcttcatcaagaatctgatcatcctttagccaggttatagaaatagga

SEQ ID NO: 123749 - DNA, 78 bp, Homo sapiens
aaatgaaatatagacattatcatcttcatcaagaatctgatcatcctttagccaggttatagaaataggaggagaacc

SEQ ID NO: 123750 - DNA, 80 bp, Homo sapiens
tatagacattatcatcttcatcaagaatctgatcatcctttagccaggttatagaaataggaggagaacctgccacggta

SEQ ID NO: 123751 - DNA, 78 bp, Homo sapiens
atcatcttcatcaagaatctgatcatcctttagccaggttatagaaataggaggagaacctgccacggtactctgaaa

SEQ ID NO: 123752 - DNA, 75 bp, Homo sapiens
aagaatctgatcatcctttagccaggttatagaaataggaggagaacctgccacggtactctgaaaggtggcaga

SEQ ID NO: 123753 - DNA, 71 bp, Homo sapiens
atcctttagccaggttatagaaataggaggagaacctgccacggtactctgaaaggtggcagaacttttca

SEQ ID NO: 123754 - DNA, 69 bp, Homo sapiens
aggttatagaaataggaggagaacctgccacggtactctgaaaggtggcagaacttttcaaaacagtag

SEQ ID NO: 123755 - DNA, 68 bp, Homo sapiens
aaataggaggagaacctgccacggtactctgaaaggtggcagaacttttcaaaacagtagtggtattt

SEQ ID NO: 123756 - DNA, 70 bp, Homo sapiens
agaacctgccacggtactctgaaaggtggcagaacttttcaaaacagtagtggtattttctatcttctta

SEQ ID NO: 123757 - DNA, 71 bp, Homo sapiens
acggtactctgaaaggtggcagaacttttcaaaacagtagtggtattttctatcttcttaatgaatgatgg

SEQ ID NO: 123758 - DNA, 74 bp, Homo sapiens
tgaaaggtggcagaacttttcaaaacagtagtggtattttctatcttcttaatgaatgatggtggttctgtgat

SEQ ID NO: 123759 - DNA, 73 bp, Homo sapiens
ggcagaacttttcaaaacagtagtggtattttctatcttcttaatgaatgatggtggttctgtgattaaataa

SEQ ID NO: 123760 - DNA, 75 bp, Homo sapiens
ttcaaaacagtagtggtattttctatcttcttaatgaatgatggtggttctgtgattaaataagagagtgtgaaa

SEQ ID NO: 123761 - DNA, 74 bp, Homo sapiens
gtagtggtattttctatcttcttaatgaatgatggtggttctgtgattaaataagagagtgtgaaaagaagaaa

SEQ ID NO: 123762 - DNA, 72 bp, Homo sapiens
taaaagcgttacagaatttttatttgataggctgcttcttgtataactgacctttcagggcaactctagtac

SEQ ID NO: 123763 - DNA, 80 bp, Homo sapiens
atttttatttgataggctgcttcttgtataactgacctttcagggcaactctagtactgcatgagcagctgccgccttca

SEQ ID NO: 123764 - DNA, 83 bp, Homo sapiens
ttcttgtataactgacctttcagggcaactctagtactgcatgagcagctgccgccttcattggatacaatgcactggtattc

SEQ ID NO: 123765 - DNA, 82 bp, Homo sapiens
gtataactgacctttcagggcaactctagtactgcatgagcagctgccgccttcattggatacaatgcactggtattcccca

SEQ ID NO: 123766 - DNA, 82 bp, Homo sapiens
cctttcagggcaactctagtactgcatgagcagctgccgccttcattggatacaatgcactggtattccccagtgtctgaag

SEQ ID NO: 123767 - DNA, 83 bp, Homo sapiens
tctagtactgcatgagcagctgccgccttcattggatacaatgcactggtattccccagtgtctgaagggtcacacttggtta

SEQ ID NO: 123768 - DNA, 83 bp, Homo sapiens
actgcatgagcagctgccgccttcattggatacaatgcactggtattccccagtgtctgaagggtcacacttggttatatgga

SEQ ID NO: 123769 - DNA, 76 bp, Homo sapiens
tgccgccttcattggatacaatgcactggtattccccagtgtctgaagggtcacacttggttatatggaggttaaa

SEQ ID NO: 123770 - DNA, 77 bp, Homo sapiens
ttcattggatacaatgcactggtattccccagtgtctgaagggtcacacttggttatatggaggttaaacacagaca

SEQ ID NO: 123771 - DNA, 76 bp, Homo sapiens
tacaatgcactggtattccccagtgtctgaagggtcacacttggttatatggaggttaaacacagacactctgtcg

SEQ ID NO: 123772 - DNA, 74 bp, Homo sapiens
ttccccagtgtctgaagggtcacacttggttatatggaggttaaacacagacactctgtcggtcaatgtgtatt

SEQ ID NO: 123773 - DNA, 74 bp, Homo sapiens
agtgtctgaagggtcacacttggttatatggaggttaaacacagacactctgtcggtcaatgtgtattttttgc

SEQ ID NO: 123774 - DNA, 75 bp, Homo sapiens
tcacacttggttatatggaggttaaacacagacactctgtcggtcaatgtgtattttttgctgcttcgaatttcc

SEQ ID NO: 123775 - DNA, 73 bp, Homo sapiens
gttatatggaggttaaacacagacactctgtcggtcaatgtgtattttttgctgcttcgaatttccctgttat

SEQ ID NO: 123776 - DNA, 76 bp, Homo sapiens
ttaaacacagacactctgtcggtcaatgtgtattttttgctgcttcgaatttccctgttattcttcagccaagtga

SEQ ID NO: 123777 - DNA, 75 bp, Homo sapiens
agacactctgtcggtcaatgtgtattttttgctgcttcgaatttccctgttattcttcagccaagtgacttcaaa

SEQ ID NO: 123778 - DNA, 72 bp, Homo sapiens
ggtcaatgtgtattttttgctgcttcgaatttccctgttattcttcagccaagtgacttcaaacggaggtgt

SEQ ID NO: 123779 - DNA, 70 bp, Homo sapiens
tattttttgctgcttcgaatttccctgttattcttcagccaagtgacttcaaacggaggtgttcccgtaa

SEQ ID NO: 123780 - DNA, 72 bp, Homo sapiens
tttgctgcttcgaatttccctgttattcttcagccaagtgacttcaaacggaggtgttcccgtaacttcaca

SEQ ID NO: 123781 - DNA, 71 bp, Homo sapiens
aatttccctgttattcttcagccaagtgacttcaaacggaggtgttcccgtaacttcacactccagctcca

SEQ ID NO: 123782 - DNA, 73 bp, Homo sapiens
ttcttcagccaagtgacttcaaacggaggtgttcccgtaacttcacactccagctccacgtcactatatttta

SEQ ID NO: 123783 - DNA, 71 bp, Homo sapiens
agccaagtgacttcaaacggaggtgttcccgtaacttcacactccagctccacgtcactatattttactac

SEQ ID NO: 123784 - DNA, 70 bp, Homo sapiens
acttcaaacggaggtgttcccgtaacttcacactccagctccacgtcactatattttactacctccacag

SEQ ID NO: 123785 - DNA, 76 bp, Homo sapiens
gtgttcccgtaacttcacactccagctccacgtcactatattttactacctccacaggcttcagctctctgataaa

SEQ ID NO: 123786 - DNA, 73 bp, Homo sapiens
cagctccacgtcactatattttactacctccacaggcttcagctctctgataaaggtggggggttctaaagat

SEQ ID NO: 123787 - DNA, 71 bp, Homo sapiens
acgtcactatattttactacctccacaggcttcagctctctgataaaggtggggggttctaaagattcaaa

SEQ ID NO: 123788 - DNA, 70 bp, Homo sapiens
atattttactacctccacaggcttcagctctctgataaaggtggggggttctaaagattcaaaaggaaga

SEQ ID NO: 123789 - DNA, 80 bp, Homo sapiens
aaacttatcaggcagcacagccaaaatggagaatagattccattcacgaacctttcactttgagttcaatgctgcagctc

SEQ ID NO: 123790 - DNA, 81 bp, Homo sapiens
cacagccaaaatggagaatagattccattcacgaacctttcactttgagttcaatgctgcagctcgccgtgcctgcgtcat

SEQ ID NO: 123791 - DNA, 82 bp, Homo sapiens
atggagaatagattccattcacgaacctttcactttgagttcaatgctgcagctcgccgtgcctgcgtcatttcgagcttca

SEQ ID NO: 123792 - DNA, 83 bp, Homo sapiens
tagattccattcacgaacctttcactttgagttcaatgctgcagctcgccgtgcctgcgtcatttcgagcttcacacacataa

SEQ ID NO: 123793 - DNA, 81 bp, Homo sapiens
attcacgaacctttcactttgagttcaatgctgcagctcgccgtgcctgcgtcatttcgagcttcacacacataagtccca

SEQ ID NO: 123794 - DNA, 81 bp, Homo sapiens
tttcactttgagttcaatgctgcagctcgccgtgcctgcgtcatttcgagcttcacacacataagtcccactattttctac

SEQ ID NO: 123795 - DNA, 82 bp, Homo sapiens
tcaatgctgcagctcgccgtgcctgcgtcatttcgagcttcacacacataagtcccactattttctaccctggcaccagaaa

SEQ ID NO: 123796 - DNA, 78 bp, Homo sapiens
agctcgccgtgcctgcgtcatttcgagcttcacacacataagtcccactattttctaccctggcaccagaaatctgga

SEQ ID NO: 123797 - DNA, 75 bp, Homo sapiens
ccgtgcctgcgtcatttcgagcttcacacacataagtcccactattttctaccctggcaccagaaatctggaaag

SEQ ID NO: 123798 - DNA, 73 bp, Homo sapiens
atttcgagcttcacacacataagtcccactattttctaccctggcaccagaaatctggaaagtggctaaacca

SEQ ID NO: 123799 - DNA, 75 bp, Homo sapiens
agcttcacacacataagtcccactattttctaccctggcaccagaaatctggaaagtggctaaaccatcaatgaa

SEQ ID NO: 123800 - DNA, 73 bp, Homo sapiens
acataagtcccactattttctaccctggcaccagaaatctggaaagtggctaaaccatcaatgaaggaaatgc

SEQ ID NO: 123801 - DNA, 74 bp, Homo sapiens
actattttctaccctggcaccagaaatctggaaagtggctaaaccatcaatgaaggaaatgccatgtttctgaa

SEQ ID NO: 123802 - DNA, 75 bp, Homo sapiens
aaatctggaaagtggctaaaccatcaatgaaggaaatgccatgtttctgaatggctgttatttcattcccgtcta

SEQ ID NO: 123803 - DNA, 75 bp, Homo sapiens
aaagtggctaaaccatcaatgaaggaaatgccatgtttctgaatggctgttatttcattcccgtctagataccaa

SEQ ID NO: 123804 - DNA, 77 bp, Homo sapiens
catcaatgaaggaaatgccatgtttctgaatggctgttatttcattcccgtctagataccaagacactcggatttta

SEQ ID NO: 123805 - DNA, 75 bp, Homo sapiens
atgaaggaaatgccatgtttctgaatggctgttatttcattcccgtctagataccaagacactcggattttagga

SEQ ID NO: 123806 - DNA, 73 bp, Homo sapiens
atgtttctgaatggctgttatttcattcccgtctagataccaagacactcggattttaggagtgcctgttatt

SEQ ID NO: 123807 - DNA, 74 bp, Homo sapiens
aatggctgttatttcattcccgtctagataccaagacactcggattttaggagtgcctgttatttggcattcaa

SEQ ID NO: 123808 - DNA, 73 bp, Homo sapiens
ttatttcattcccgtctagataccaagacactcggattttaggagtgcctgttatttggcattcaaatgttgt

SEQ ID NO: 123809 - DNA, 77 bp, Homo sapiens
gtctagataccaagacactcggattttaggagtgcctgttatttggcattcaaatgttgttgactgtccattcctca

SEQ ID NO: 123810 - DNA, 76 bp, Homo sapiens
actcggattttaggagtgcctgttatttggcattcaaatgttgttgactgtccattcctcagcactaagactggac

SEQ ID NO: 123811 - DNA, 78 bp, Homo sapiens
gtgcctgttatttggcattcaaatgttgttgactgtccattcctcagcactaagactggactgggcttcttaatgaat

SEQ ID NO: 123812 - DNA, 79 bp, Homo sapiens
tgttatttggcattcaaatgttgttgactgtccattcctcagcactaagactggactgggcttcttaatgaattgagga

SEQ ID NO: 123813 - DNA, 76 bp, Homo sapiens
ttcaaatgttgttgactgtccattcctcagcactaagactggactgggcttcttaatgaattgaggaggttctaaa

SEQ ID NO: 123814 - DNA, 75 bp, Homo sapiens
ttgactgtccattcctcagcactaagactggactgggcttcttaatgaattgaggaggttctaaagatggaaaaa

SEQ ID NO: 123815 - DNA, 74 bp, Homo sapiens
attcctcagcactaagactggactgggcttcttaatgaattgaggaggttctaaagatggaaaaagaattgtga

SEQ ID NO: 123816 - DNA, 73 bp, Homo sapiens
actaagactggactgggcttcttaatgaattgaggaggttctaaagatggaaaaagaattgtgatgttgaata

SEQ ID NO: 123817 - DNA, 74 bp, Homo sapiens
agaaaatctagacaagcaagaaagtgaggagatgtagagaccagaccttttacaaagagagtggctttgctggt

SEQ ID NO: 123818 - DNA, 79 bp, Homo sapiens
tagacaagcaagaaagtgaggagatgtagagaccagaccttttacaaagagagtggctttgctggttgctgtgccaaca

SEQ ID NO: 123819 - DNA, 79 bp, Homo sapiens
agaaagtgaggagatgtagagaccagaccttttacaaagagagtggctttgctggttgctgtgccaacatcattgctta

SEQ ID NO: 123820 - DNA, 80 bp, Homo sapiens
gatgtagagaccagaccttttacaaagagagtggctttgctggttgctgtgccaacatcattgcttagttggcaaatgta

SEQ ID NO: 123821 - DNA, 76 bp, Homo sapiens
agaccagaccttttacaaagagagtggctttgctggttgctgtgccaacatcattgcttagttggcaaatgtaggt

SEQ ID NO: 123822 - DNA, 78 bp, Homo sapiens
tttacaaagagagtggctttgctggttgctgtgccaacatcattgcttagttggcaaatgtaggttccagaatcggta

SEQ ID NO: 123823 - DNA, 80 bp, Homo sapiens
gtggctttgctggttgctgtgccaacatcattgcttagttggcaaatgtaggttccagaatcggtagctttggctgcaaa

SEQ ID NO: 123824 - DNA, 81 bp, Homo sapiens
tttgctggttgctgtgccaacatcattgcttagttggcaaatgtaggttccagaatcggtagctttggctgcaaagagctc

SEQ ID NO: 123825 - DNA, 81 bp, Homo sapiens
tgtgccaacatcattgcttagttggcaaatgtaggttccagaatcggtagctttggctgcaaagagctctagactggtaga

SEQ ID NO: 123826 - DNA, 79 bp, Homo sapiens
atcattgcttagttggcaaatgtaggttccagaatcggtagctttggctgcaaagagctctagactggtagaggtgtca

SEQ ID NO: 123827 - DNA, 77 bp, Homo sapiens
ttggcaaatgtaggttccagaatcggtagctttggctgcaaagagctctagactggtagaggtgtcatccttccaaa

SEQ ID NO: 123828 - DNA, 77 bp, Homo sapiens
atgtaggttccagaatcggtagctttggctgcaaagagctctagactggtagaggtgtcatccttccaaactgagcg

SEQ ID NO: 123829 - DNA, 79 bp, Homo sapiens
agaatcggtagctttggctgcaaagagctctagactggtagaggtgtcatccttccaaactgagcgggctgctcctgag

SEQ ID NO: 123830 - DNA, 80 bp, Homo sapiens
tggctgcaaagagctctagactggtagaggtgtcatccttccaaactgagcgggctgctcctgagtgtaactctttgtta

SEQ ID NO: 123831 - DNA, 76 bp, Homo sapiens
aaagagctctagactggtagaggtgtcatccttccaaactgagcgggctgctcctgagtgtaactctttgttatct

SEQ ID NO: 123832 - DNA, 75 bp, Homo sapiens
tagactggtagaggtgtcatccttccaaactgagcgggctgctcctgagtgtaactctttgttatctttaaacca

SEQ ID NO: 123833 - DNA, 72 bp, Homo sapiens
agaggtgtcatccttccaaactgagcgggctgctcctgagtgtaactctttgttatctttaaaccactttat

SEQ ID NO: 123834 - DNA, 75 bp, Homo sapiens
tccttccaaactgagcgggctgctcctgagtgtaactctttgttatctttaaaccactttattgtcatgggtgca

SEQ ID NO: 123835 - DNA, 75 bp, Homo sapiens
cgggctgctcctgagtgtaactctttgttatctttaaaccactttattgtcatgggtgcagtgccacccacaaga

SEQ ID NO: 123836 - DNA, 73 bp, Homo sapiens
ctgagtgtaactctttgttatctttaaaccactttattgtcatgggtgcagtgccacccacaagagcctttaa

SEQ ID NO: 123837 - DNA, 73 bp, Homo sapiens
tgtaactctttgttatctttaaaccactttattgtcatgggtgcagtgccacccacaagagcctttaactgta

SEQ ID NO: 123838 - DNA, 72 bp, Homo sapiens
ttatctttaaaccactttattgtcatgggtgcagtgccacccacaagagcctttaactgtacccttgtgttg

SEQ ID NO: 123839 - DNA, 77 bp, Homo sapiens
tcatgggtgcagtgccacccacaagagcctttaactgtacccttgtgttgggattgacatcttgtgactgtggcttt

SEQ ID NO: 123840 - DNA, 74 bp, Homo sapiens
agtgccacccacaagagcctttaactgtacccttgtgttgggattgacatcttgtgactgtggcttttccacaa

SEQ ID NO: 123841 - DNA, 71 bp, Homo sapiens
acaagagcctttaactgtacccttgtgttgggattgacatcttgtgactgtggcttttccacaaagtaagg

SEQ ID NO: 123842 - DNA, 71 bp, Homo sapiens
tttaactgtacccttgtgttgggattgacatcttgtgactgtggcttttccacaaagtaagggggttctga

SEQ ID NO: 123843 - DNA, 71 bp, Homo sapiens
cttgtgttgggattgacatcttgtgactgtggcttttccacaaagtaagggggttctgaggtgaaagaaaa

SEQ ID NO: 123844 - DNA, 70 bp, Homo sapiens
gttgggattgacatcttgtgactgtggcttttccacaaagtaagggggttctgaggtgaaagaaaaaaca

SEQ ID NO: 123845 - DNA, 67 bp, Homo sapiens
ttgtgactgtggcttttccacaaagtaagggggttctgaggtgaaagaaaaaacaagcaaaagaaaa

SEQ ID NO: 123846 - DNA, 73 bp, Homo sapiens
attttgtaagttcttgataagtggaaataaaatttgccaacctttgactgtcagatgcccactgcattggttg

SEQ ID NO: 123847 - DNA, 76 bp, Homo sapiens
ttcttgataagtggaaataaaatttgccaacctttgactgtcagatgcccactgcattggttgtgccctgccttat

SEQ ID NO: 123848 - DNA, 76 bp, Homo sapiens
aaataaaatttgccaacctttgactgtcagatgcccactgcattggttgtgccctgccttatttgtggcagaacaa

SEQ ID NO: 123849 - DNA, 79 bp, Homo sapiens
aatttgccaacctttgactgtcagatgcccactgcattggttgtgccctgccttatttgtggcagaacaagtgtatgtc

SEQ ID NO: 123850 - DNA, 81 bp, Homo sapiens
cctttgactgtcagatgcccactgcattggttgtgccctgccttatttgtggcagaacaagtgtatgtcccactgtctgta

SEQ ID NO: 123851 - DNA, 80 bp, Homo sapiens
agatgcccactgcattggttgtgccctgccttatttgtggcagaacaagtgtatgtcccactgtctgtaccttccagctg

SEQ ID NO: 123852 - DNA, 78 bp, Homo sapiens
attggttgtgccctgccttatttgtggcagaacaagtgtatgtcccactgtctgtaccttccagctggctgatttcca

SEQ ID NO: 123853 - DNA, 78 bp, Homo sapiens
ttgtgccctgccttatttgtggcagaacaagtgtatgtcccactgtctgtaccttccagctggctgatttccaagaag

SEQ ID NO: 123854 - DNA, 81 bp, Homo sapiens
tatttgtggcagaacaagtgtatgtcccactgtctgtaccttccagctggctgatttccaagaaggcagtattgtcatgaa

SEQ ID NO: 123855 - DNA, 77 bp, Homo sapiens
aacaagtgtatgtcccactgtctgtaccttccagctggctgatttccaagaaggcagtattgtcatgaaaagagaat

SEQ ID NO: 123856 - DNA, 77 bp, Homo sapiens
tatgtcccactgtctgtaccttccagctggctgatttccaagaaggcagtattgtcatgaaaagagaatttgtactt

SEQ ID NO: 123857 - DNA, 79 bp, Homo sapiens
tctgtaccttccagctggctgatttccaagaaggcagtattgtcatgaaaagagaatttgtacttttcactagctgata

SEQ ID NO: 123858 - DNA, 78 bp, Homo sapiens
ttccagctggctgatttccaagaaggcagtattgtcatgaaaagagaatttgtacttttcactagctgatatttcttg

SEQ ID NO: 123859 - DNA, 76 bp, Homo sapiens
ctgatttccaagaaggcagtattgtcatgaaaagagaatttgtacttttcactagctgatatttcttggtcatctt

SEQ ID NO: 123860 - DNA, 75 bp, Homo sapiens
aagaaggcagtattgtcatgaaaagagaatttgtacttttcactagctgatatttcttggtcatctttgaaccac

SEQ ID NO: 123861 - DNA, 77 bp, Homo sapiens
agtattgtcatgaaaagagaatttgtacttttcactagctgatatttcttggtcatctttgaaccactggatgctta

SEQ ID NO: 123862 - DNA, 76 bp, Homo sapiens
aaaagagaatttgtacttttcactagctgatatttcttggtcatctttgaaccactggatgcttatgggatgtgac

SEQ ID NO: 123863 - DNA, 79 bp, Homo sapiens
tttgtacttttcactagctgatatttcttggtcatctttgaaccactggatgcttatgggatgtgacccagccactata

SEQ ID NO: 123864 - DNA, 79 bp, Homo sapiens
atatttcttggtcatctttgaaccactggatgcttatgggatgtgacccagccactatacattctaaatcaatgaaaga

SEQ ID NO: 123865 - DNA, 77 bp, Homo sapiens
gtcatctttgaaccactggatgcttatgggatgtgacccagccactatacattctaaatcaatgaaagaacctttaa

SEQ ID NO: 123866 - DNA, 77 bp, Homo sapiens
actggatgcttatgggatgtgacccagccactatacattctaaatcaatgaaagaacctttaatgctgtccattttc

SEQ ID NO: 123867 - DNA, 76 bp, Homo sapiens
ttatgggatgtgacccagccactatacattctaaatcaatgaaagaacctttaatgctgtccattttcttcagctt

SEQ ID NO: 123868 - DNA, 75 bp, Homo sapiens
gccactatacattctaaatcaatgaaagaacctttaatgctgtccattttcttcagctttttggtgaatgaagga

SEQ ID NO: 123869 - DNA, 75 bp, Homo sapiens
taaatcaatgaaagaacctttaatgctgtccattttcttcagctttttggtgaatgaaggaggtatgataagatc

SEQ ID NO: 123870 - DNA, 76 bp, Homo sapiens
gaaagaacctttaatgctgtccattttcttcagctttttggtgaatgaaggaggtatgataagatctattcaatga

SEQ ID NO: 123871 - DNA, 76 bp, Homo sapiens
cctttaatgctgtccattttcttcagctttttggtgaatgaaggaggtatgataagatctattcaatgaaaaagca

SEQ ID NO: 123872 - DNA, 75 bp, Homo sapiens
ctgtccattttcttcagctttttggtgaatgaaggaggtatgataagatctattcaatgaaaaagcaaacaacaa

SEQ ID NO: 123873 - DNA, 76 bp, Homo sapiens
aagaaggagcatggaaatgcccaatcctctctgtagaagaacaataccaacctaatacattaattctagccttgca

SEQ ID NO: 123874 - DNA, 76 bp, Homo sapiens
aatcctctctgtagaagaacaataccaacctaatacattaattctagccttgcagctgctcctcccaacatcattt

SEQ ID NO: 123875 - DNA, 76 bp, Homo sapiens
tagaagaacaataccaacctaatacattaattctagccttgcagctgctcctcccaacatcattttggacctcgaa

SEQ ID NO: 123876 - DNA, 74 bp, Homo sapiens
aataccaacctaatacattaattctagccttgcagctgctcctcccaacatcattttggacctcgaaagtatat

SEQ ID NO: 123877 - DNA, 77 bp, Homo sapiens
taatacattaattctagccttgcagctgctcctcccaacatcattttggacctcgaaagtatattctccactatctt

SEQ ID NO: 123878 - DNA, 76 bp, Homo sapiens
taattctagccttgcagctgctcctcccaacatcattttggacctcgaaagtatattctccactatctttcttttc

SEQ ID NO: 123879 - DNA, 74 bp, Homo sapiens
agctgctcctcccaacatcattttggacctcgaaagtatattctccactatctttcttttctgtagaaataatc

SEQ ID NO: 123880 - DNA, 73 bp, Homo sapiens
ctcctcccaacatcattttggacctcgaaagtatattctccactatctttcttttctgtagaaataatcttca

SEQ ID NO: 123881 - DNA, 75 bp, Homo sapiens
catcattttggacctcgaaagtatattctccactatctttcttttctgtagaaataatcttcagtattgagactg

SEQ ID NO: 123882 - DNA, 76 bp, Homo sapiens
acctcgaaagtatattctccactatctttcttttctgtagaaataatcttcagtattgagactgtatcagtgacac

SEQ ID NO: 123883 - DNA, 78 bp, Homo sapiens
gtatattctccactatctttcttttctgtagaaataatcttcagtattgagactgtatcagtgacactgattttatat

SEQ ID NO: 123884 - DNA, 76 bp, Homo sapiens
tctttcttttctgtagaaataatcttcagtattgagactgtatcagtgacactgattttatattttgagcccaggg

SEQ ID NO: 123885 - DNA, 77 bp, Homo sapiens
tttctgtagaaataatcttcagtattgagactgtatcagtgacactgattttatattttgagcccagggtcagttct

SEQ ID NO: 123886 - DNA, 78 bp, Homo sapiens
taatcttcagtattgagactgtatcagtgacactgattttatattttgagcccagggtcagttcttggccatctttaa

SEQ ID NO: 123887 - DNA, 76 bp, Homo sapiens
tattgagactgtatcagtgacactgattttatattttgagcccagggtcagttcttggccatctttaaaccatttg

SEQ ID NO: 123888 - DNA, 76 bp, Homo sapiens
tgtatcagtgacactgattttatattttgagcccagggtcagttcttggccatctttaaaccatttggctgtaatc

SEQ ID NO: 123889 - DNA, 71 bp, Homo sapiens
actgattttatattttgagcccagggtcagttcttggccatctttaaaccatttggctgtaatctccttag

SEQ ID NO: 123890 - DNA, 70 bp, Homo sapiens
ttttatattttgagcccagggtcagttcttggccatctttaaaccatttggctgtaatctccttagtccc

SEQ ID NO: 123891 - DNA, 69 bp, Homo sapiens
agcccagggtcagttcttggccatctttaaaccatttggctgtaatctccttagtccctgaaaatttaa

SEQ ID NO: 123892 - DNA, 69 bp, Homo sapiens
agttcttggccatctttaaaccatttggctgtaatctccttagtccctgaaaatttaacctgcaaagtg

SEQ ID NO: 123893 - DNA, 69 bp, Homo sapiens
tctttaaaccatttggctgtaatctccttagtccctgaaaatttaacctgcaaagtggctgggtctcct

SEQ ID NO: 123894 - DNA, 72 bp, Homo sapiens
atttggctgtaatctccttagtccctgaaaatttaacctgcaaagtggctgggtctccttgggtgacatcta

SEQ ID NO: 123895 - DNA, 73 bp, Homo sapiens
ttagtccctgaaaatttaacctgcaaagtggctgggtctccttgggtgacatctatagacacagcttcctcgg

SEQ ID NO: 123896 - DNA, 75 bp, Homo sapiens
aaaatttaacctgcaaagtggctgggtctccttgggtgacatctatagacacagcttcctcggtgattgttgcag

SEQ ID NO: 123897 - DNA, 77 bp, Homo sapiens
caaagtggctgggtctccttgggtgacatctatagacacagcttcctcggtgattgttgcaggttctgtagaaaaca

SEQ ID NO: 123898 - DNA, 76 bp, Homo sapiens
tgggtctccttgggtgacatctatagacacagcttcctcggtgattgttgcaggttctgtagaaaacaaagggata

SEQ ID NO: 123899 - DNA, 76 bp, Homo sapiens
ttgggtgacatctatagacacagcttcctcggtgattgttgcaggttctgtagaaaacaaagggatagatgtgggt

SEQ ID NO: 123900 - DNA, 78 bp, Homo sapiens
acatctatagacacagcttcctcggtgattgttgcaggttctgtagaaaacaaagggatagatgtgggttgtgcatta

SEQ ID NO: 123901 - DNA, 74 bp, Homo sapiens
ttacatctgcatttcttcctcaaacccaaggcaaacgttctgaaccaaccttttactgagagtaatgcagaaca

SEQ ID NO: 123902 - DNA, 71 bp, Homo sapiens
ttcttcctcaaacccaaggcaaacgttctgaaccaaccttttactgagagtaatgcagaacatctttgtat

SEQ ID NO: 123903 - DNA, 75 bp, Homo sapiens
aaacgttctgaaccaaccttttactgagagtaatgcagaacatctttgtattcctgcatcatttttggcctgaca

SEQ ID NO: 123904 - DNA, 76 bp, Homo sapiens
aaccaaccttttactgagagtaatgcagaacatctttgtattcctgcatcatttttggcctgacagacatatttcc

SEQ ID NO: 123905 - DNA, 82 bp, Homo sapiens
ttttactgagagtaatgcagaacatctttgtattcctgcatcatttttggcctgacagacatatttcccatcatgcttgact

SEQ ID NO: 123906 - DNA, 85 bp, Homo sapiens
agtaatgcagaacatctttgtattcctgcatcatttttggcctgacagacatatttcccatcatgcttgacttcaatgccactga

SEQ ID NO: 123907 - DNA, 81 bp, Homo sapiens
atctttgtattcctgcatcatttttggcctgacagacatatttcccatcatgcttgacttcaatgccactgaggtacaaac

SEQ ID NO: 123908 - DNA, 83 bp, Homo sapiens
tattcctgcatcatttttggcctgacagacatatttcccatcatgcttgacttcaatgccactgaggtacaaactggccacat

SEQ ID NO: 123909 - DNA, 80 bp, Homo sapiens
atttttggcctgacagacatatttcccatcatgcttgacttcaatgccactgaggtacaaactggccacattgttctcaa

SEQ ID NO: 123910 - DNA, 82 bp, Homo sapiens
tgacagacatatttcccatcatgcttgacttcaatgccactgaggtacaaactggccacattgttctcaaaggtcattctta

SEQ ID NO: 123911 - DNA, 79 bp, Homo sapiens
atatttcccatcatgcttgacttcaatgccactgaggtacaaactggccacattgttctcaaaggtcattcttatatta

SEQ ID NO: 123912 - DNA, 80 bp, Homo sapiens
tgcttgacttcaatgccactgaggtacaaactggccacattgttctcaaaggtcattcttatattatcgtcttcagtgat

SEQ ID NO: 123913 - DNA, 78 bp, Homo sapiens
acttcaatgccactgaggtacaaactggccacattgttctcaaaggtcattcttatattatcgtcttcagtgatttca

SEQ ID NO: 123914 - DNA, 78 bp, Homo sapiens
tgaggtacaaactggccacattgttctcaaaggtcattcttatattatcgtcttcagtgatttcatcgctgtctttta

SEQ ID NO: 123915 - DNA, 75 bp, Homo sapiens
attgttctcaaaggtcattcttatattatcgtcttcagtgatttcatcgctgtcttttagccaagtcaccgtaat

SEQ ID NO: 123916 - DNA, 75 bp, Homo sapiens
aaaggtcattcttatattatcgtcttcagtgatttcatcgctgtcttttagccaagtcaccgtaattggcaagga

SEQ ID NO: 123917 - DNA, 77 bp, Homo sapiens
ttcttatattatcgtcttcagtgatttcatcgctgtcttttagccaagtcaccgtaattggcaaggagcccttcaga

SEQ ID NO: 123918 - DNA, 77 bp, Homo sapiens
atcgtcttcagtgatttcatcgctgtcttttagccaagtcaccgtaattggcaaggagcccttcagagtggcctgga

SEQ ID NO: 123919 - DNA, 77 bp, Homo sapiens
atttcatcgctgtcttttagccaagtcaccgtaattggcaaggagcccttcagagtggcctggaaggcagctgtgcc

SEQ ID NO: 123920 - DNA, 75 bp, Homo sapiens
tgtcttttagccaagtcaccgtaattggcaaggagcccttcagagtggcctggaaggcagctgtgcctccccgga

SEQ ID NO: 123921 - DNA, 74 bp, Homo sapiens
aagtcaccgtaattggcaaggagcccttcagagtggcctggaaggcagctgtgcctccccggagggagctggta

SEQ ID NO: 123922 - DNA, 76 bp, Homo sapiens
aaggagcccttcagagtggcctggaaggcagctgtgcctccccggagggagctggtactctcgatcttctttatga

SEQ ID NO: 123923 - DNA, 76 bp, Homo sapiens
cttcagagtggcctggaaggcagctgtgcctccccggagggagctggtactctcgatcttctttatgaaggatggg

SEQ ID NO: 123924 - DNA, 74 bp, Homo sapiens
agctgtgcctccccggagggagctggtactctcgatcttctttatgaaggatgggggttctaacagaagaatga

SEQ ID NO: 123925 - DNA, 75 bp, Homo sapiens
ggagggagctggtactctcgatcttctttatgaaggatgggggttctaacagaagaatgaattctcaatcaatat

SEQ ID NO: 123926 - DNA, 71 bp, Homo sapiens
aaagaattgactcttcagaaaagccagtccctcactggaaccaacactaacctcttaaagtcaccctggca

SEQ ID NO: 123927 - DNA, 79 bp, Homo sapiens
tcttcagaaaagccagtccctcactggaaccaacactaacctcttaaagtcaccctggcactgcagatgctgctgccca

SEQ ID NO: 123928 - DNA, 78 bp, Homo sapiens
agtccctcactggaaccaacactaacctcttaaagtcaccctggcactgcagatgctgctgcccacctcattggtcac

SEQ ID NO: 123929 - DNA, 77 bp, Homo sapiens
actggaaccaacactaacctcttaaagtcaccctggcactgcagatgctgctgcccacctcattggtcacccgacac

SEQ ID NO: 123930 - DNA, 78 bp, Homo sapiens
aacactaacctcttaaagtcaccctggcactgcagatgctgctgcccacctcattggtcacccgacactggtattcgc

SEQ ID NO: 123931 - DNA, 85 bp, Homo sapiens
ttaaagtcaccctggcactgcagatgctgctgcccacctcattggtcacccgacactggtattcgccagcatctgcagctacaaa

SEQ ID NO: 123932 - DNA, 85 bp, Homo sapiens
accctggcactgcagatgctgctgcccacctcattggtcacccgacactggtattcgccagcatctgcagctacaaacttgagga

SEQ ID NO: 123933 - DNA, 85 bp, Homo sapiens
agatgctgctgcccacctcattggtcacccgacactggtattcgccagcatctgcagctacaaacttgaggatctgcaggctaac

SEQ ID NO: 123934 - DNA, 85 bp, Homo sapiens
tgcccacctcattggtcacccgacactggtattcgccagcatctgcagctacaaacttgaggatctgcaggctaaccagatgatc

SEQ ID NO: 123935 - DNA, 84 bp, Homo sapiens
attggtcacccgacactggtattcgccagcatctgcagctacaaacttgaggatctgcaggctaaccagatgatcctgaatgaa

SEQ ID NO: 123936 - DNA, 84 bp, Homo sapiens
gacactggtattcgccagcatctgcagctacaaacttgaggatctgcaggctaaccagatgatcctgaatgaaagtcttatact

SEQ ID NO: 123937 - DNA, 84 bp, Homo sapiens
tggtattcgccagcatctgcagctacaaacttgaggatctgcaggctaaccagatgatcctgaatgaaagtcttatactttcta

SEQ ID NO: 123938 - DNA, 81 bp, Homo sapiens
atctgcagctacaaacttgaggatctgcaggctaaccagatgatcctgaatgaaagtcttatactttctaccacttcgcag

SEQ ID NO: 123939 - DNA, 79 bp, Homo sapiens
tacaaacttgaggatctgcaggctaaccagatgatcctgaatgaaagtcttatactttctaccacttcgcaggattgtg

SEQ ID NO: 123940 - DNA, 79 bp, Homo sapiens
ttgaggatctgcaggctaaccagatgatcctgaatgaaagtcttatactttctaccacttcgcaggattgtgttatctt

SEQ ID NO: 123941 - DNA, 76 bp, Homo sapiens
ctaaccagatgatcctgaatgaaagtcttatactttctaccacttcgcaggattgtgttatctttgaaccaagtga

SEQ ID NO: 123942 - DNA, 77 bp, Homo sapiens
agatgatcctgaatgaaagtcttatactttctaccacttcgcaggattgtgttatctttgaaccaagtgatctcaaa

SEQ ID NO: 123943 - DNA, 73 bp, Homo sapiens
aatgaaagtcttatactttctaccacttcgcaggattgtgttatctttgaaccaagtgatctcaaagggagga

SEQ ID NO: 123944 - DNA, 76 bp, Homo sapiens
tcttatactttctaccacttcgcaggattgtgttatctttgaaccaagtgatctcaaagggaggagtgcctgccac

SEQ ID NO: 123945 - DNA, 81 bp, Homo sapiens
taccacttcgcaggattgtgttatctttgaaccaagtgatctcaaagggaggagtgcctgccacctcagccagcaacatga

SEQ ID NO: 123946 - DNA, 80 bp, Homo sapiens
gattgtgttatctttgaaccaagtgatctcaaagggaggagtgcctgccacctcagccagcaacatgacatcgtactcct

SEQ ID NO: 123947 - DNA, 79 bp, Homo sapiens
ttatctttgaaccaagtgatctcaaagggaggagtgcctgccacctcagccagcaacatgacatcgtactcctttaaga

SEQ ID NO: 123948 - DNA, 77 bp, Homo sapiens
aaccaagtgatctcaaagggaggagtgcctgccacctcagccagcaacatgacatcgtactcctttaagacttcaat

SEQ ID NO: 123949 - DNA, 75 bp, Homo sapiens
aaagggaggagtgcctgccacctcagccagcaacatgacatcgtactcctttaagacttcaattggcttaaattc

SEQ ID NO: 123950 - DNA, 71 bp, Homo sapiens
acctcagccagcaacatgacatcgtactcctttaagacttcaattggcttaaattccttggtaaaataagg

SEQ ID NO: 123951 - DNA, 66 bp, Homo sapiens
ctcctttaagacttcaattggcttaaattccttggtaaaataaggtgactctacagtaaaaaagga

SEQ ID NO: 123952 - DNA, 69 bp, Homo sapiens
tcaattggcttaaattccttggtaaaataaggtgactctacagtaaaaaaggaatgatttgcattaagg

SEQ ID NO: 123953 - DNA, 78 bp, Homo sapiens
catgggccataactttggcaacacaagaggcaaagtgaacacaaacctttgactattacaatgctactgcagtggtca

SEQ ID NO: 123954 - DNA, 78 bp, Homo sapiens
ccataactttggcaacacaagaggcaaagtgaacacaaacctttgactattacaatgctactgcagtggtcactgcca

SEQ ID NO: 123955 - DNA, 77 bp, Homo sapiens
aacacaagaggcaaagtgaacacaaacctttgactattacaatgctactgcagtggtcactgccagcctcattttgg

SEQ ID NO: 123956 - DNA, 80 bp, Homo sapiens
caaagtgaacacaaacctttgactattacaatgctactgcagtggtcactgccagcctcattttgggcctcacacatata

SEQ ID NO: 123957 - DNA, 80 bp, Homo sapiens
aacacaaacctttgactattacaatgctactgcagtggtcactgccagcctcattttgggcctcacacatatattcacca

SEQ ID NO: 123958 - DNA, 85 bp, Homo sapiens
ttgactattacaatgctactgcagtggtcactgccagcctcattttgggcctcacacatatattcaccactgtcttcgatgccaa

SEQ ID NO: 123959 - DNA, 87 bp, Homo sapiens
ttacaatgctactgcagtggtcactgccagcctcattttgggcctcacacatatattcaccactgtcttcgatgccaacatctgtca

SEQ ID NO: 123960 - DNA, 82 bp, Homo sapiens
agtggtcactgccagcctcattttgggcctcacacatatattcaccactgtcttcgatgccaacatctgtcagtcttagaac

SEQ ID NO: 123961 - DNA, 84 bp, Homo sapiens
actgccagcctcattttgggcctcacacatatattcaccactgtcttcgatgccaacatctgtcagtcttagaactgcagtaga

SEQ ID NO: 123962 - DNA, 81 bp, Homo sapiens
ttttgggcctcacacatatattcaccactgtcttcgatgccaacatctgtcagtcttagaactgcagtagactccacaaaa

SEQ ID NO: 123963 - DNA, 84 bp, Homo sapiens
tcacacatatattcaccactgtcttcgatgccaacatctgtcagtcttagaactgcagtagactccacaaaagacattctgtgt

SEQ ID NO: 123964 - DNA, 82 bp, Homo sapiens
atatattcaccactgtcttcgatgccaacatctgtcagtcttagaactgcagtagactccacaaaagacattctgtgtttgc

SEQ ID NO: 123965 - DNA, 81 bp, Homo sapiens
tcttcgatgccaacatctgtcagtcttagaactgcagtagactccacaaaagacattctgtgtttgctgctctccttaatt

SEQ ID NO: 123966 - DNA, 81 bp, Homo sapiens
caacatctgtcagtcttagaactgcagtagactccacaaaagacattctgtgtttgctgctctccttaatttctctatcat

SEQ ID NO: 123967 - DNA, 81 bp, Homo sapiens
tgtcagtcttagaactgcagtagactccacaaaagacattctgtgtttgctgctctccttaatttctctatcatttgcaaa

SEQ ID NO: 123968 - DNA, 78 bp, Homo sapiens
aactgcagtagactccacaaaagacattctgtgtttgctgctctccttaatttctctatcatttgcaaaccatgttat

SEQ ID NO: 123969 - DNA, 76 bp, Homo sapiens
agtagactccacaaaagacattctgtgtttgctgctctccttaatttctctatcatttgcaaaccatgttatttta

SEQ ID NO: 123970 - DNA, 74 bp, Homo sapiens
caaaagacattctgtgtttgctgctctccttaatttctctatcatttgcaaaccatgttattttaattggaggg

SEQ ID NO: 123971 - DNA, 72 bp, Homo sapiens
tgtttgctgctctccttaatttctctatcatttgcaaaccatgttattttaattggaggggtaccagttact

SEQ ID NO: 123972 - DNA, 72 bp, Homo sapiens
tctccttaatttctctatcatttgcaaaccatgttattttaattggaggggtaccagttactttgcaggcta

SEQ ID NO: 123973 - DNA, 72 bp, Homo sapiens
ttaatttctctatcatttgcaaaccatgttattttaattggaggggtaccagttactttgcaggctagctgg

SEQ ID NO: 123974 - DNA, 72 bp, Homo sapiens
tttgcaaaccatgttattttaattggaggggtaccagttactttgcaggctagctgggtggcatctcccttc

SEQ ID NO: 123975 - DNA, 71 bp, Homo sapiens
atgttattttaattggaggggtaccagttactttgcaggctagctgggtggcatctcccttctttaacagc

SEQ ID NO: 123976 - DNA, 76 bp, Homo sapiens
gtaccagttactttgcaggctagctgggtggcatctcccttctttaacagctgtgatggctctaacttttcaacaa

SEQ ID NO: 123977 - DNA, 76 bp, Homo sapiens
agttactttgcaggctagctgggtggcatctcccttctttaacagctgtgatggctctaacttttcaacaaatgtg

SEQ ID NO: 123978 - DNA, 77 bp, Homo sapiens
ctagctgggtggcatctcccttctttaacagctgtgatggctctaacttttcaacaaatgtggcaggttctgtggaa

SEQ ID NO: 123979 - DNA, 76 bp, Homo sapiens
tggcatctcccttctttaacagctgtgatggctctaacttttcaacaaatgtggcaggttctgtggaaggaaggaa

SEQ ID NO: 123980 - DNA, 73 bp, Homo sapiens
ttctttaacagctgtgatggctctaacttttcaacaaatgtggcaggttctgtggaaggaaggaagttattaa

SEQ ID NO: 123981 - DNA, 73 bp, Homo sapiens
gaatttataacaaggttagcacaaagatgtcaagaaaacaatgcaaaccttttacaaacaagtttgcactgca

SEQ ID NO: 123982 - DNA, 73 bp, Homo sapiens
taacaaggttagcacaaagatgtcaagaaaacaatgcaaaccttttacaaacaagtttgcactgcattccacc

SEQ ID NO: 123983 - DNA, 73 bp, Homo sapiens
acaaagatgtcaagaaaacaatgcaaaccttttacaaacaagtttgcactgcattccacccctccagcgacat

SEQ ID NO: 123984 - DNA, 73 bp, Homo sapiens
aagaaaacaatgcaaaccttttacaaacaagtttgcactgcattccacccctccagcgacattgctgacttta

SEQ ID NO: 123985 - DNA, 76 bp, Homo sapiens
acaatgcaaaccttttacaaacaagtttgcactgcattccacccctccagcgacattgctgactttacatgtgtac

SEQ ID NO: 123986 - DNA, 78 bp, Homo sapiens
ttttacaaacaagtttgcactgcattccacccctccagcgacattgctgactttacatgtgtacgtgcccgaatcaga

SEQ ID NO: 123987 - DNA, 77 bp, Homo sapiens
tttgcactgcattccacccctccagcgacattgctgactttacatgtgtacgtgcccgaatcagaggtttttactaa

SEQ ID NO: 123988 - DNA, 73 bp, Homo sapiens
attccacccctccagcgacattgctgactttacatgtgtacgtgcccgaatcagaggtttttactaaatagag

SEQ ID NO: 123989 - DNA, 74 bp, Homo sapiens
ctccagcgacattgctgactttacatgtgtacgtgcccgaatcagaggtttttactaaatagagttccagggaa

SEQ ID NO: 123990 - DNA, 72 bp, Homo sapiens
ttgctgactttacatgtgtacgtgcccgaatcagaggtttttactaaatagagttccagggaactctctaaa

SEQ ID NO: 123991 - DNA, 69 bp, Homo sapiens
actttacatgtgtacgtgcccgaatcagaggtttttactaaatagagttccagggaactctctaaagct

SEQ ID NO: 123992 - DNA, 69 bp, Homo sapiens
tacgtgcccgaatcagaggtttttactaaatagagttccagggaactctctaaagcttctttggtaata

SEQ ID NO: 123993 - DNA, 71 bp, Homo sapiens
aatcagaggtttttactaaatagagttccagggaactctctaaagcttctttggtaatatagcagcttcca

SEQ ID NO: 123994 - DNA, 70 bp, Homo sapiens
tttttactaaatagagttccagggaactctctaaagcttctttggtaatatagcagcttccaccagaaac

SEQ ID NO: 123995 - DNA, 72 bp, Homo sapiens
aaatagagttccagggaactctctaaagcttctttggtaatatagcagcttccaccagaaaccagctctttg

SEQ ID NO: 123996 - DNA, 76 bp, Homo sapiens
taaagcttctttggtaatatagcagcttccaccagaaaccagctctttgttgcccttaaaccatctgattgtgaga

SEQ ID NO: 123997 - DNA, 77 bp, Homo sapiens
tttggtaatatagcagcttccaccagaaaccagctctttgttgcccttaaaccatctgattgtgagaggagtagatc

SEQ ID NO: 123998 - DNA, 77 bp, Homo sapiens
tatagcagcttccaccagaaaccagctctttgttgcccttaaaccatctgattgtgagaggagtagatccttggaaa

SEQ ID NO: 123999 - DNA, 75 bp, Homo sapiens
accagaaaccagctctttgttgcccttaaaccatctgattgtgagaggagtagatccttggaaagtgctcttcag

SEQ ID NO: 124000 - DNA, 80 bp, Homo sapiens
accagctctttgttgcccttaaaccatctgattgtgagaggagtagatccttggaaagtgctcttcaggcagactgctga

SEQ ID NO: 124001 - DNA, 83 bp, Homo sapiens
tgttgcccttaaaccatctgattgtgagaggagtagatccttggaaagtgctcttcaggcagactgctgagccaggcagaaca

SEQ ID NO: 124002 - DNA, 83 bp, Homo sapiens
aaaccatctgattgtgagaggagtagatccttggaaagtgctcttcaggcagactgctgagccaggcagaacatcctttgagc

SEQ ID NO: 124003 - DNA, 80 bp, Homo sapiens
ttgtgagaggagtagatccttggaaagtgctcttcaggcagactgctgagccaggcagaacatcctttgagccgggttta

SEQ ID NO: 124004 - DNA, 77 bp, Homo sapiens
tagatccttggaaagtgctcttcaggcagactgctgagccaggcagaacatcctttgagccgggtttagttacaaaa

SEQ ID NO: 124005 - DNA, 75 bp, Homo sapiens
ttcaggcagactgctgagccaggcagaacatcctttgagccgggtttagttacaaaactgggtggttctgaagaa

SEQ ID NO: 124006 - DNA, 71 bp, Homo sapiens
agactgctgagccaggcagaacatcctttgagccgggtttagttacaaaactgggtggttctgaagaaggg

SEQ ID NO: 124007 - DNA, 67 bp, Homo sapiens
aggcagaacatcctttgagccgggtttagttacaaaactgggtggttctgaagaaggggtataagaa

SEQ ID NO: 124008 - DNA, 64 bp, Homo sapiens
atcctttgagccgggtttagttacaaaactgggtggttctgaagaaggggtataagaaagaatt

SEQ ID NO: 124009 - DNA, 77 bp, Homo sapiens
taatttgaacataatctttaataaggataaaatgcaaagtctccagccaaccttgcacaatcagggctccactgctg

SEQ ID NO: 124010 - DNA, 77 bp, Homo sapiens
ataatctttaataaggataaaatgcaaagtctccagccaaccttgcacaatcagggctccactgctgtctttgcttc

SEQ ID NO: 124011 - DNA, 76 bp, Homo sapiens
aaagtctccagccaaccttgcacaatcagggctccactgctgtctttgcttcccacggaatttgtggctcgacaag

SEQ ID NO: 124012 - DNA, 76 bp, Homo sapiens
agccaaccttgcacaatcagggctccactgctgtctttgcttcccacggaatttgtggctcgacaagtgaaattcc

SEQ ID NO: 124013 - DNA, 81 bp, Homo sapiens
cacaatcagggctccactgctgtctttgcttcccacggaatttgtggctcgacaagtgaaattccctgcatcattcatgtc

SEQ ID NO: 124014 - DNA, 84 bp, Homo sapiens
gctccactgctgtctttgcttcccacggaatttgtggctcgacaagtgaaattccctgcatcattcatgtctactctgatgatc

SEQ ID NO: 124015 - DNA, 82 bp, Homo sapiens
aatttgtggctcgacaagtgaaattccctgcatcattcatgtctactctgatgatctccaaagaggctgtgccttccacaaa

SEQ ID NO: 124016 - DNA, 86 bp, Homo sapiens
tcgacaagtgaaattccctgcatcattcatgtctactctgatgatctccaaagaggctgtgccttccacaaatgctatcctgtatc

SEQ ID NO: 124017 - DNA, 87 bp, Homo sapiens
gtgaaattccctgcatcattcatgtctactctgatgatctccaaagaggctgtgccttccacaaatgctatcctgtatctgtcagaa

SEQ ID NO: 124018 - DNA, 86 bp, Homo sapiens
atcattcatgtctactctgatgatctccaaagaggctgtgccttccacaaatgctatcctgtatctgtcagaagcagctatttctt

SEQ ID NO: 124019 - DNA, 86 bp, Homo sapiens
atgtctactctgatgatctccaaagaggctgtgccttccacaaatgctatcctgtatctgtcagaagcagctatttctttgccatc

SEQ ID NO: 124020 - DNA, 81 bp, Homo sapiens
atgatctccaaagaggctgtgccttccacaaatgctatcctgtatctgtcagaagcagctatttctttgccatccttaaac

SEQ ID NO: 124021 - DNA, 79 bp, Homo sapiens
aaagaggctgtgccttccacaaatgctatcctgtatctgtcagaagcagctatttctttgccatccttaaaccaggaca

SEQ ID NO: 124022 - DNA, 77 bp, Homo sapiens
ccttccacaaatgctatcctgtatctgtcagaagcagctatttctttgccatccttaaaccaggacaccctcatggg

SEQ ID NO: 124023 - DNA, 77 bp, Homo sapiens
acaaatgctatcctgtatctgtcagaagcagctatttctttgccatccttaaaccaggacaccctcatggggaggga

SEQ ID NO: 124024 - DNA, 79 bp, Homo sapiens
tgtatctgtcagaagcagctatttctttgccatccttaaaccaggacaccctcatggggagggagcctgcaattttgca

SEQ ID NO: 124025 - DNA, 75 bp, Homo sapiens
aagcagctatttctttgccatccttaaaccaggacaccctcatggggagggagcctgcaattttgcagtccagtc

SEQ ID NO: 124026 - DNA, 76 bp, Homo sapiens
tatttctttgccatccttaaaccaggacaccctcatggggagggagcctgcaattttgcagtccagtctgcaggta

SEQ ID NO: 124027 - DNA, 74 bp, Homo sapiens
atccttaaaccaggacaccctcatggggagggagcctgcaattttgcagtccagtctgcaggtaccattaacaa

SEQ ID NO: 124028 - DNA, 75 bp, Homo sapiens
aaaccaggacaccctcatggggagggagcctgcaattttgcagtccagtctgcaggtaccattaacaacactatc

SEQ ID NO: 124029 - DNA, 77 bp, Homo sapiens
tcatggggagggagcctgcaattttgcagtccagtctgcaggtaccattaacaacactatccacgttgcgcaagggt

SEQ ID NO: 124030 - DNA, 71 bp, Homo sapiens
aattttgcagtccagtctgcaggtaccattaacaacactatccacgttgcgcaagggtttggtaaaaaatg

SEQ ID NO: 124031 - DNA, 73 bp, Homo sapiens
agtccagtctgcaggtaccattaacaacactatccacgttgcgcaagggtttggtaaaaaatggagcaatgtc

SEQ ID NO: 124032 - DNA, 76 bp, Homo sapiens
attaacaacactatccacgttgcgcaagggtttggtaaaaaatggagcaatgtctcgatctgtgtgttgcacaaga

SEQ ID NO: 124033 - DNA, 75 bp, Homo sapiens
tatccacgttgcgcaagggtttggtaaaaaatggagcaatgtctcgatctgtgtgttgcacaagaagggagaaaa

SEQ ID NO: 124034 - DNA, 78 bp, Homo sapiens
tgttgggtttcaaatgcatatgtagcatcattttctaaaaatactaacctaatacagtgaatgtagtctcacaggagc

SEQ ID NO: 124035 - DNA, 81 bp, Homo sapiens
aaatgcatatgtagcatcattttctaaaaatactaacctaatacagtgaatgtagtctcacaggagctgctgcccacttca

SEQ ID NO: 124036 - DNA, 79 bp, Homo sapiens
tagcatcattttctaaaaatactaacctaatacagtgaatgtagtctcacaggagctgctgcccacttcattggaaatc

SEQ ID NO: 124037 - DNA, 76 bp, Homo sapiens
ttttctaaaaatactaacctaatacagtgaatgtagtctcacaggagctgctgcccacttcattggaaatctcaaa

SEQ ID NO: 124038 - DNA, 78 bp, Homo sapiens
aaaatactaacctaatacagtgaatgtagtctcacaggagctgctgcccacttcattggaaatctcaaatgtgtattg

SEQ ID NO: 124039 - DNA, 86 bp, Homo sapiens
ctaatacagtgaatgtagtctcacaggagctgctgcccacttcattggaaatctcaaatgtgtattggccactgtcgtgcagctca

SEQ ID NO: 124040 - DNA, 85 bp, Homo sapiens
aatgtagtctcacaggagctgctgcccacttcattggaaatctcaaatgtgtattggccactgtcgtgcagctcagctgaataaa

SEQ ID NO: 124041 - DNA, 83 bp, Homo sapiens
aggagctgctgcccacttcattggaaatctcaaatgtgtattggccactgtcgtgcagctcagctgaataaaatttgagctgg

SEQ ID NO: 124042 - DNA, 83 bp, Homo sapiens
tgcccacttcattggaaatctcaaatgtgtattggccactgtcgtgcagctcagctgaataaaatttgagctgggcaacattg

SEQ ID NO: 124043 - DNA, 79 bp, Homo sapiens
attggaaatctcaaatgtgtattggccactgtcgtgcagctcagctgaataaaatttgagctgggcaacattgttttta

SEQ ID NO: 124044 - DNA, 77 bp, Homo sapiens
aatctcaaatgtgtattggccactgtcgtgcagctcagctgaataaaatttgagctgggcaacattgtttttaaaac

SEQ ID NO: 124045 - DNA, 71 bp, Homo sapiens
actgtcgtgcagctcagctgaataaaatttgagctgggcaacattgtttttaaaacttattcggtattttt

SEQ ID NO: 124046 - DNA, 70 bp, Homo sapiens
gctcagctgaataaaatttgagctgggcaacattgtttttaaaacttattcggtattttttactggcgac

SEQ ID NO: 124047 - DNA, 65 bp, Homo sapiens
aaatttgagctgggcaacattgtttttaaaacttattcggtattttttactggcgaccaagggtc

SEQ ID NO: 124048 - DNA, 66 bp, Homo sapiens
tgggcaacattgtttttaaaacttattcggtattttttactggcgaccaagggtctcccatctttg

SEQ ID NO: 124049 - DNA, 65 bp, Homo sapiens
tgtttttaaaacttattcggtattttttactggcgaccaagggtctcccatctttgtaccatttg

SEQ ID NO: 124050 - DNA, 67 bp, Homo sapiens
ttaaaacttattcggtattttttactggcgaccaagggtctcccatctttgtaccatttgggcttca

SEQ ID NO: 124051 - DNA, 70 bp, Homo sapiens
ttcggtattttttactggcgaccaagggtctcccatctttgtaccatttgggcttcagttctggcgtgcc

SEQ ID NO: 124052 - DNA, 75 bp, Homo sapiens
tttactggcgaccaagggtctcccatctttgtaccatttgggcttcagttctggcgtgcctgccactgtgtactc

SEQ ID NO: 124053 - DNA, 75 bp, Homo sapiens
aagggtctcccatctttgtaccatttgggcttcagttctggcgtgcctgccactgtgtactccagtgtggcggga

SEQ ID NO: 124054 - DNA, 79 bp, Homo sapiens
atctttgtaccatttgggcttcagttctggcgtgcctgccactgtgtactccagtgtggcgggatctcctgctgtcacc

SEQ ID NO: 124055 - DNA, 81 bp, Homo sapiens
taccatttgggcttcagttctggcgtgcctgccactgtgtactccagtgtggcgggatctcctgctgtcacctggatcagt

SEQ ID NO: 124056 - DNA, 86 bp, Homo sapiens
ttcagttctggcgtgcctgccactgtgtactccagtgtggcgggatctcctgctgtcacctggatcagttctgctcgctcaatgat

SEQ ID NO: 124057 - DNA, 84 bp, Homo sapiens
gtgcctgccactgtgtactccagtgtggcgggatctcctgctgtcacctggatcagttctgctcgctcaatgattttggcaggt

SEQ ID NO: 124058 - DNA, 82 bp, Homo sapiens
actgtgtactccagtgtggcgggatctcctgctgtcacctggatcagttctgctcgctcaatgattttggcaggttctacaa

SEQ ID NO: 124059 - DNA, 83 bp, Homo sapiens
cagtgtggcgggatctcctgctgtcacctggatcagttctgctcgctcaatgattttggcaggttctacaatggtatgaaata

SEQ ID NO: 124060 - DNA, 82 bp, Homo sapiens
tggcgggatctcctgctgtcacctggatcagttctgctcgctcaatgattttggcaggttctacaatggtatgaaatagtta

SEQ ID NO: 124061 - DNA, 80 bp, Homo sapiens
ctgtcacctggatcagttctgctcgctcaatgattttggcaggttctacaatggtatgaaatagttagcaccctaaatgc

SEQ ID NO: 124062 - DNA, 65 bp, Homo sapiens
ctttaattctaaatagcaatttgaggtttaaatgttcctacacaaacctttaactattaattccc

SEQ ID NO: 124063 - DNA, 67 bp, Homo sapiens
aatagcaatttgaggtttaaatgttcctacacaaacctttaactattaattccccaacagatgtttg

SEQ ID NO: 124064 - DNA, 68 bp, Homo sapiens
ttgaggtttaaatgttcctacacaaacctttaactattaattccccaacagatgtttggcttccagct

SEQ ID NO: 124065 - DNA, 76 bp, Homo sapiens
taattccccaacagatgtttggcttccagcttcattttcagccaggcacgtgtatttgcctccaaaactaatctga

SEQ ID NO: 124066 - DNA, 78 bp, Homo sapiens
atgtttggcttccagcttcattttcagccaggcacgtgtatttgcctccaaaactaatctgaacatcagggattatca

SEQ ID NO: 124067 - DNA, 80 bp, Homo sapiens
ttccagcttcattttcagccaggcacgtgtatttgcctccaaaactaatctgaacatcagggattatcaagactgcaaca

SEQ ID NO: 124068 - DNA, 78 bp, Homo sapiens
ttttcagccaggcacgtgtatttgcctccaaaactaatctgaacatcagggattatcaagactgcaacaccattggaa

SEQ ID NO: 124069 - DNA, 77 bp, Homo sapiens
aggcacgtgtatttgcctccaaaactaatctgaacatcagggattatcaagactgcaacaccattggaaaagctcat

SEQ ID NO: 124070 - DNA, 73 bp, Homo sapiens
aaaactaatctgaacatcagggattatcaagactgcaacaccattggaaaagctcattttgatttttccgtct

SEQ ID NO: 124071 - DNA, 77 bp, Homo sapiens
gattatcaagactgcaacaccattggaaaagctcattttgatttttccgtcttctctgatgacctcttgacctttca

SEQ ID NO: 124072 - DNA, 76 bp, Homo sapiens
aagactgcaacaccattggaaaagctcattttgatttttccgtcttctctgatgacctcttgacctttcatccatg

SEQ ID NO: 124073 - DNA, 76 bp, Homo sapiens
acaccattggaaaagctcattttgatttttccgtcttctctgatgacctcttgacctttcatccatgtgacagaaa

SEQ ID NO: 124074 - DNA, 77 bp, Homo sapiens
aaaagctcattttgatttttccgtcttctctgatgacctcttgacctttcatccatgtgacagaaatgggctctgac

SEQ ID NO: 124075 - DNA, 80 bp, Homo sapiens
ttttgatttttccgtcttctctgatgacctcttgacctttcatccatgtgacagaaatgggctctgaccctctcacagca

SEQ ID NO: 124076 - DNA, 83 bp, Homo sapiens
tccgtcttctctgatgacctcttgacctttcatccatgtgacagaaatgggctctgaccctctcacagcagcttgcagggtaa

SEQ ID NO: 124077 - DNA, 78 bp, Homo sapiens
ttgacctttcatccatgtgacagaaatgggctctgaccctctcacagcagcttgcagggtaacggtttgtcctcctag

SEQ ID NO: 124078 - DNA, 81 bp, Homo sapiens
atgtgacagaaatgggctctgaccctctcacagcagcttgcagggtaacggtttgtcctcctagtgcaatcaaatcatcta

SEQ ID NO: 124079 - DNA, 77 bp, Homo sapiens
agaaatgggctctgaccctctcacagcagcttgcagggtaacggtttgtcctcctagtgcaatcaaatcatctactt

SEQ ID NO: 124080 - DNA, 77 bp, Homo sapiens
tctgaccctctcacagcagcttgcagggtaacggtttgtcctcctagtgcaatcaaatcatctactttctttacaaa

SEQ ID NO: 124081 - DNA, 73 bp, Homo sapiens
acagcagcttgcagggtaacggtttgtcctcctagtgcaatcaaatcatctactttctttacaaaggttggag

SEQ ID NO: 124082 - DNA, 71 bp, Homo sapiens
ttgcagggtaacggtttgtcctcctagtgcaatcaaatcatctactttctttacaaaggttggaggttcta

SEQ ID NO: 124083 - DNA, 69 bp, Homo sapiens
taacggtttgtcctcctagtgcaatcaaatcatctactttctttacaaaggttggaggttctagttaag

SEQ ID NO: 124084 - DNA, 73 bp, Homo sapiens
ctcctagtgcaatcaaatcatctactttctttacaaaggttggaggttctagttaaggaaagagagcatataa

SEQ ID NO: 124085 - DNA, 74 bp, Homo sapiens
gcaatcaaatcatctactttctttacaaaggttggaggttctagttaaggaaagagagcatataaaacatatca

SEQ ID NO: 124086 - DNA, 72 bp, Homo sapiens
ctagtttgacaatttattaaagagacattagtttttcaagcactaacctttgagtaagtgggttgccatgca

SEQ ID NO: 124087 - DNA, 72 bp, Homo sapiens
acaatttattaaagagacattagtttttcaagcactaacctttgagtaagtgggttgccatgcagccacact

SEQ ID NO: 124088 - DNA, 75 bp, Homo sapiens
aagagacattagtttttcaagcactaacctttgagtaagtgggttgccatgcagccacacttgccgacttcatta

SEQ ID NO: 124089 - DNA, 75 bp, Homo sapiens
attagtttttcaagcactaacctttgagtaagtgggttgccatgcagccacacttgccgacttcattagcaacaa

SEQ ID NO: 124090 - DNA, 78 bp, Homo sapiens
actaacctttgagtaagtgggttgccatgcagccacacttgccgacttcattagcaacaacacattcatattcaccaa

SEQ ID NO: 124091 - DNA, 84 bp, Homo sapiens
ttgagtaagtgggttgccatgcagccacacttgccgacttcattagcaacaacacattcatattcaccaacatctgcactatta

SEQ ID NO: 124092 - DNA, 82 bp, Homo sapiens
gttgccatgcagccacacttgccgacttcattagcaacaacacattcatattcaccaacatctgcactattaaacgaaaaga

SEQ ID NO: 124093 - DNA, 80 bp, Homo sapiens
agccacacttgccgacttcattagcaacaacacattcatattcaccaacatctgcactattaaacgaaaagatctccaga

SEQ ID NO: 124094 - DNA, 80 bp, Homo sapiens
acttgccgacttcattagcaacaacacattcatattcaccaacatctgcactattaaacgaaaagatctccagacacaca

SEQ ID NO: 124095 - DNA, 82 bp, Homo sapiens
ttcattagcaacaacacattcatattcaccaacatctgcactattaaacgaaaagatctccagacacacaagagacttctga

SEQ ID NO: 124096 - DNA, 78 bp, Homo sapiens
aacaacacattcatattcaccaacatctgcactattaaacgaaaagatctccagacacacaagagacttctgagaaaa

SEQ ID NO: 124097 - DNA, 77 bp, Homo sapiens
atattcaccaacatctgcactattaaacgaaaagatctccagacacacaagagacttctgagaaaacaatctgtatt

SEQ ID NO: 124098 - DNA, 75 bp, Homo sapiens
caacatctgcactattaaacgaaaagatctccagacacacaagagacttctgagaaaacaatctgtattttttac

SEQ ID NO: 124099 - DNA, 72 bp, Homo sapiens
ctattaaacgaaaagatctccagacacacaagagacttctgagaaaacaatctgtattttttactacttcga

SEQ ID NO: 124100 - DNA, 73 bp, Homo sapiens
agatctccagacacacaagagacttctgagaaaacaatctgtattttttactacttcgaatttgtttcttgtc

SEQ ID NO: 124101 - DNA, 72 bp, Homo sapiens
ccagacacacaagagacttctgagaaaacaatctgtattttttactacttcgaatttgtttcttgtctttga

SEQ ID NO: 124102 - DNA, 70 bp, Homo sapiens
gagacttctgagaaaacaatctgtattttttactacttcgaatttgtttcttgtctttgaaccagctaat

SEQ ID NO: 124103 - DNA, 68 bp, Homo sapiens
aaacaatctgtattttttactacttcgaatttgtttcttgtctttgaaccagctaatttcaaatggtc

SEQ ID NO: 124104 - DNA, 71 bp, Homo sapiens
tattttttactacttcgaatttgtttcttgtctttgaaccagctaatttcaaatggtccagtgcctgagac

SEQ ID NO: 124105 - DNA, 73 bp, Homo sapiens
tttactacttcgaatttgtttcttgtctttgaaccagctaatttcaaatggtccagtgcctgagacttcacac

SEQ ID NO: 124106 - DNA, 75 bp, Homo sapiens
aatttgtttcttgtctttgaaccagctaatttcaaatggtccagtgcctgagacttcacactgaagtagagcatt

SEQ ID NO: 124107 - DNA, 79 bp, Homo sapiens
ttgtctttgaaccagctaatttcaaatggtccagtgcctgagacttcacactgaagtagagcatttgttcctctcacta

SEQ ID NO: 124108 - DNA, 83 bp, Homo sapiens
agctaatttcaaatggtccagtgcctgagacttcacactgaagtagagcatttgttcctctcactatgtctgcaggctcaaga

SEQ ID NO: 124109 - DNA, 82 bp, Homo sapiens
agtgcctgagacttcacactgaagtagagcatttgttcctctcactatgtctgcaggctcaagagttttgatgaaagaagga

SEQ ID NO: 124110 - DNA, 79 bp, Homo sapiens
acttcacactgaagtagagcatttgttcctctcactatgtctgcaggctcaagagttttgatgaaagaaggaggttcta

SEQ ID NO: 124111 - DNA, 77 bp, Homo sapiens
actgaagtagagcatttgttcctctcactatgtctgcaggctcaagagttttgatgaaagaaggaggttctacaaaa

SEQ ID NO: 124112 - DNA, 78 bp, Homo sapiens
atttgttcctctcactatgtctgcaggctcaagagttttgatgaaagaaggaggttctacaaaagcatgaaagcattg

SEQ ID NO: 124113 - DNA, 80 bp, Homo sapiens
tctcactatgtctgcaggctcaagagttttgatgaaagaaggaggttctacaaaagcatgaaagcattgtgtaagtaatg

SEQ ID NO: 124114 - DNA, 72 bp, Homo sapiens
gaaatcttttctcagaaaaatactggatggaaactcagtaaacaaacctttgataactatttcagtactgca

SEQ ID NO: 124115 - DNA, 75 bp, Homo sapiens
aaatactggatggaaactcagtaaacaaacctttgataactatttcagtactgcagctatcactgccgacgtcat

SEQ ID NO: 124116 - DNA, 80 bp, Homo sapiens
aactcagtaaacaaacctttgataactatttcagtactgcagctatcactgccgacgtcattcactgcttcacatgagta

SEQ ID NO: 124117 - DNA, 79 bp, Homo sapiens
agtaaacaaacctttgataactatttcagtactgcagctatcactgccgacgtcattcactgcttcacatgagtaactc

SEQ ID NO: 124118 - DNA, 82 bp, Homo sapiens
tgataactatttcagtactgcagctatcactgccgacgtcattcactgcttcacatgagtaactcccactgtcttcaacttt

SEQ ID NO: 124119 - DNA, 82 bp, Homo sapiens
tatttcagtactgcagctatcactgccgacgtcattcactgcttcacatgagtaactcccactgtcttcaacttttacatcc

SEQ ID NO: 124120 - DNA, 79 bp, Homo sapiens
agctatcactgccgacgtcattcactgcttcacatgagtaactcccactgtcttcaacttttacatccgtaatatcaag

SEQ ID NO: 124121 - DNA, 78 bp, Homo sapiens
actgccgacgtcattcactgcttcacatgagtaactcccactgtcttcaacttttacatccgtaatatcaagtatagc

SEQ ID NO: 124122 - DNA, 79 bp, Homo sapiens
ttcactgcttcacatgagtaactcccactgtcttcaacttttacatccgtaatatcaagtatagcctcagaattgacaa

SEQ ID NO: 124123 - DNA, 76 bp, Homo sapiens
cttcacatgagtaactcccactgtcttcaacttttacatccgtaatatcaagtatagcctcagaattgacaaaata

SEQ ID NO: 124124 - DNA, 73 bp, Homo sapiens
agtaactcccactgtcttcaacttttacatccgtaatatcaagtatagcctcagaattgacaaaatacattcg

SEQ ID NO: 124125 - DNA, 73 bp, Homo sapiens
gtcttcaacttttacatccgtaatatcaagtatagcctcagaattgacaaaatacattcggactgtgttactt

SEQ ID NO: 124126 - DNA, 74 bp, Homo sapiens
acttttacatccgtaatatcaagtatagcctcagaattgacaaaatacattcggactgtgttactttcactgag

SEQ ID NO: 124127 - DNA, 75 bp, Homo sapiens
tccgtaatatcaagtatagcctcagaattgacaaaatacattcggactgtgttactttcactgagttctttgtta

SEQ ID NO: 124128 - DNA, 72 bp, Homo sapiens
caagtatagcctcagaattgacaaaatacattcggactgtgttactttcactgagttctttgttatttttaa

SEQ ID NO: 124129 - DNA, 70 bp, Homo sapiens
ctcagaattgacaaaatacattcggactgtgttactttcactgagttctttgttatttttaaaccaagta

SEQ ID NO: 124130 - DNA, 69 bp, Homo sapiens
atacattcggactgtgttactttcactgagttctttgttatttttaaaccaagtaacctggatcacagg

SEQ ID NO: 124131 - DNA, 70 bp, Homo sapiens
actgtgttactttcactgagttctttgttatttttaaaccaagtaacctggatcacaggtgagcctttca

SEQ ID NO: 124132 - DNA, 72 bp, Homo sapiens
ttactttcactgagttctttgttatttttaaaccaagtaacctggatcacaggtgagcctttcagcttgcaa

SEQ ID NO: 124133 - DNA, 76 bp, Homo sapiens
ttctttgttatttttaaaccaagtaacctggatcacaggtgagcctttcagcttgcaatggaggcgtgctgattca

SEQ ID NO: 124134 - DNA, 77 bp, Homo sapiens
tttttaaaccaagtaacctggatcacaggtgagcctttcagcttgcaatggaggcgtgctgattcacctgggagcat

SEQ ID NO: 124135 - DNA, 78 bp, Homo sapiens
aaaccaagtaacctggatcacaggtgagcctttcagcttgcaatggaggcgtgctgattcacctgggagcattaaata

SEQ ID NO: 124136 - DNA, 80 bp, Homo sapiens
gatcacaggtgagcctttcagcttgcaatggaggcgtgctgattcacctgggagcattaaataagagggatccaccttct

SEQ ID NO: 124137 - DNA, 79 bp, Homo sapiens
tgagcctttcagcttgcaatggaggcgtgctgattcacctgggagcattaaataagagggatccaccttcttcacgaag

SEQ ID NO: 124138 - DNA, 78 bp, Homo sapiens
tttcagcttgcaatggaggcgtgctgattcacctgggagcattaaataagagggatccaccttcttcacgaaggatgg

SEQ ID NO: 124139 - DNA, 77 bp, Homo sapiens
aatggaggcgtgctgattcacctgggagcattaaataagagggatccaccttcttcacgaaggatggtggctctaca

SEQ ID NO: 124140 - DNA, 76 bp, Homo sapiens
tgattcacctgggagcattaaataagagggatccaccttcttcacgaaggatggtggctctacatgaagtttacaa

SEQ ID NO: 124141 - DNA, 72 bp, Homo sapiens
acctgggagcattaaataagagggatccaccttcttcacgaaggatggtggctctacatgaagtttacaaaa

SEQ ID NO: 124142 - DNA, 78 bp, Homo sapiens
aggattccttgcagagaagggactagaaaatacattcacacgtttcttacctctgacagtgactgtggctgagcagga

SEQ ID NO: 124143 - DNA, 79 bp, Homo sapiens
agagaagggactagaaaatacattcacacgtttcttacctctgacagtgactgtggctgagcaggagctgcttccagcc

SEQ ID NO: 124144 - DNA, 83 bp, Homo sapiens
tagaaaatacattcacacgtttcttacctctgacagtgactgtggctgagcaggagctgcttccagcctcatttgaagctgta

SEQ ID NO: 124145 - DNA, 85 bp, Homo sapiens
atacattcacacgtttcttacctctgacagtgactgtggctgagcaggagctgcttccagcctcatttgaagctgtacagacata

SEQ ID NO: 124146 - DNA, 84 bp, Homo sapiens
ttcttacctctgacagtgactgtggctgagcaggagctgcttccagcctcatttgaagctgtacagacataggttcctgaatct

SEQ ID NO: 124147 - DNA, 85 bp, Homo sapiens
tctgacagtgactgtggctgagcaggagctgcttccagcctcatttgaagctgtacagacataggttcctgaatctttcagtttg

SEQ ID NO: 124148 - DNA, 81 bp, Homo sapiens
actgtggctgagcaggagctgcttccagcctcatttgaagctgtacagacataggttcctgaatctttcagtttggccaaa

SEQ ID NO: 124149 - DNA, 78 bp, Homo sapiens
aggagctgcttccagcctcatttgaagctgtacagacataggttcctgaatctttcagtttggccaaaggaatctcaa

SEQ ID NO: 124150 - DNA, 78 bp, Homo sapiens
tccagcctcatttgaagctgtacagacataggttcctgaatctttcagtttggccaaaggaatctcaagtgttgctat

SEQ ID NO: 124151 - DNA, 75 bp, Homo sapiens
atttgaagctgtacagacataggttcctgaatctttcagtttggccaaaggaatctcaagtgttgctattttatc

SEQ ID NO: 124152 - DNA, 75 bp, Homo sapiens
agctgtacagacataggttcctgaatctttcagtttggccaaaggaatctcaagtgttgctattttatcttcaaa

SEQ ID NO: 124153 - DNA, 74 bp, Homo sapiens
cataggttcctgaatctttcagtttggccaaaggaatctcaagtgttgctattttatcttcaaaacagatctta

SEQ ID NO: 124154 - DNA, 73 bp, Homo sapiens
tctttcagtttggccaaaggaatctcaagtgttgctattttatcttcaaaacagatcttataatctttccctg

SEQ ID NO: 124155 - DNA, 70 bp, Homo sapiens
agtttggccaaaggaatctcaagtgttgctattttatcttcaaaacagatcttataatctttccctgggg

SEQ ID NO: 124156 - DNA, 70 bp, Homo sapiens
aatctcaagtgttgctattttatcttcaaaacagatcttataatctttccctggggggagtttttgccca

SEQ ID NO: 124157 - DNA, 68 bp, Homo sapiens
aagtgttgctattttatcttcaaaacagatcttataatctttccctggggggagtttttgcccatctt

SEQ ID NO: 124158 - DNA, 69 bp, Homo sapiens
ttttatcttcaaaacagatcttataatctttccctggggggagtttttgcccatctttgctccacgtaa

SEQ ID NO: 124159 - DNA, 68 bp, Homo sapiens
aaacagatcttataatctttccctggggggagtttttgcccatctttgctccacgtaactgtgacttt

SEQ ID NO: 124160 - DNA, 71 bp, Homo sapiens
tcttataatctttccctggggggagtttttgcccatctttgctccacgtaactgtgacttttctgtcttca

SEQ ID NO: 124161 - DNA, 72 bp, Homo sapiens
tttccctggggggagtttttgcccatctttgctccacgtaactgtgacttttctgtcttcatctacttggca

SEQ ID NO: 124162 - DNA, 74 bp, Homo sapiens
tttttgcccatctttgctccacgtaactgtgacttttctgtcttcatctacttggcactcaaggtggaccttct

SEQ ID NO: 124163 - DNA, 76 bp, Homo sapiens
atctttgctccacgtaactgtgacttttctgtcttcatctacttggcactcaaggtggaccttcttattgatagcg

SEQ ID NO: 124164 - DNA, 78 bp, Homo sapiens
ctccacgtaactgtgacttttctgtcttcatctacttggcactcaaggtggaccttcttattgatagcggactgcaca

SEQ ID NO: 124165 - DNA, 77 bp, Homo sapiens
gacttttctgtcttcatctacttggcactcaaggtggaccttcttattgatagcggactgcacaggctctaattctt

SEQ ID NO: 124166 - DNA, 79 bp, Homo sapiens
ttctgtcttcatctacttggcactcaaggtggaccttcttattgatagcggactgcacaggctctaattctttaatgaa

SEQ ID NO: 124167 - DNA, 79 bp, Homo sapiens
tacttggcactcaaggtggaccttcttattgatagcggactgcacaggctctaattctttaatgaaatgtggcttatca

SEQ ID NO: 124168 - DNA, 83 bp, Homo sapiens
accttcttattgatagcggactgcacaggctctaattctttaatgaaatgtggcttatcaatgatgatcaactctgcttggca

SEQ ID NO: 124169 - DNA, 86 bp, Homo sapiens
atagcggactgcacaggctctaattctttaatgaaatgtggcttatcaatgatgatcaactctgcttggcagatgtctgctccaaa

SEQ ID NO: 124170 - DNA, 84 bp, Homo sapiens
cacaggctctaattctttaatgaaatgtggcttatcaatgatgatcaactctgcttggcagatgtctgctccaaacttgttgga

SEQ ID NO: 124171 - DNA, 81 bp, Homo sapiens
aattctttaatgaaatgtggcttatcaatgatgatcaactctgcttggcagatgtctgctccaaacttgttggaagcctta

SEQ ID NO: 124172 - DNA, 83 bp, Homo sapiens
taatgaaatgtggcttatcaatgatgatcaactctgcttggcagatgtctgctccaaacttgttggaagccttacaagaataa

SEQ ID NO: 124173 - DNA, 81 bp, Homo sapiens
cttatcaatgatgatcaactctgcttggcagatgtctgctccaaacttgttggaagccttacaagaataaactcctctatc

SEQ ID NO: 124174 - DNA, 80 bp, Homo sapiens
aatgatgatcaactctgcttggcagatgtctgctccaaacttgttggaagccttacaagaataaactcctctatcttgaa

SEQ ID NO: 124175 - DNA, 76 bp, Homo sapiens
aactctgcttggcagatgtctgctccaaacttgttggaagccttacaagaataaactcctctatcttgaatggtaa

SEQ ID NO: 124176 - DNA, 73 bp, Homo sapiens
gatgtctgctccaaacttgttggaagccttacaagaataaactcctctatcttgaatggtaaggtttgagagt

SEQ ID NO: 124177 - DNA, 70 bp, Homo sapiens
tccaaacttgttggaagccttacaagaataaactcctctatcttgaatggtaaggtttgagagttctaaa

SEQ ID NO: 124178 - DNA, 70 bp, Homo sapiens
cttgttggaagccttacaagaataaactcctctatcttgaatggtaaggtttgagagttctaaaatgtgt

SEQ ID NO: 124179 - DNA, 70 bp, Homo sapiens
acaagaataaactcctctatcttgaatggtaaggtttgagagttctaaaatgtgtttgttttctgcgtcg

SEQ ID NO: 124180 - DNA, 70 bp, Homo sapiens
ataaactcctctatcttgaatggtaaggtttgagagttctaaaatgtgtttgttttctgcgtcggaaatc

SEQ ID NO: 124181 - DNA, 71 bp, Homo sapiens
tctatcttgaatggtaaggtttgagagttctaaaatgtgtttgttttctgcgtcggaaatcctccagttag

SEQ ID NO: 124182 - DNA, 68 bp, Homo sapiens
atggtaaggtttgagagttctaaaatgtgtttgttttctgcgtcggaaatcctccagttaggtgaagg

SEQ ID NO: 124183 - DNA, 73 bp, Homo sapiens
agttctaaaatgtgtttgttttctgcgtcggaaatcctccagttaggtgaaggtgagagtgcagcaccatctt

SEQ ID NO: 124184 - DNA, 76 bp, Homo sapiens
ttgttttctgcgtcggaaatcctccagttaggtgaaggtgagagtgcagcaccatctttctgccaaatggtttcta

SEQ ID NO: 124185 - DNA, 79 bp, Homo sapiens
gaaatcctccagttaggtgaaggtgagagtgcagcaccatctttctgccaaatggtttctatcacaggagtccctgtca

SEQ ID NO: 124186 - DNA, 82 bp, Homo sapiens
agttaggtgaaggtgagagtgcagcaccatctttctgccaaatggtttctatcacaggagtccctgtcactgtgcagatgaa

SEQ ID NO: 124187 - DNA, 83 bp, Homo sapiens
tgcagcaccatctttctgccaaatggtttctatcacaggagtccctgtcactgtgcagatgaacttggctgccttacccacaa

SEQ ID NO: 124188 - DNA, 77 bp, Homo sapiens
tctttctgccaaatggtttctatcacaggagtccctgtcactgtgcagatgaacttggctgccttacccacaaaagt

SEQ ID NO: 124189 - DNA, 74 bp, Homo sapiens
aaatggtttctatcacaggagtccctgtcactgtgcagatgaacttggctgccttacccacaaaagttgtaagg

SEQ ID NO: 124190 - DNA, 75 bp, Homo sapiens
tttctatcacaggagtccctgtcactgtgcagatgaacttggctgccttacccacaaaagttgtaagggacttag

SEQ ID NO: 124191 - DNA, 74 bp, Homo sapiens
agtccctgtcactgtgcagatgaacttggctgccttacccacaaaagttgtaagggacttaggtctggagagaa

SEQ ID NO: 124192 - DNA, 71 bp, Homo sapiens
actgtgcagatgaacttggctgccttacccacaaaagttgtaagggacttaggtctggagagaaaggttgg

SEQ ID NO: 124193 - DNA, 70 bp, Homo sapiens
agatgaacttggctgccttacccacaaaagttgtaagggacttaggtctggagagaaaggttggtggata

SEQ ID NO: 124194 - DNA, 70 bp, Homo sapiens
ccttacccacaaaagttgtaagggacttaggtctggagagaaaggttggtggatatgcctctgcaaaaga

SEQ ID NO: 124195 - DNA, 86 bp, Homo sapiens
aatatgaaatgaagtgacaacatctgtgccaatgtatggcatttacctgtcacagttagtgtggctgtacagctgacactgccata

SEQ ID NO: 124196 - DNA, 85 bp, Homo sapiens
aaatgaagtgacaacatctgtgccaatgtatggcatttacctgtcacagttagtgtggctgtacagctgacactgccatactcat

SEQ ID NO: 124197 - DNA, 84 bp, Homo sapiens
acaacatctgtgccaatgtatggcatttacctgtcacagttagtgtggctgtacagctgacactgccatactcattggaagctt

SEQ ID NO: 124198 - DNA, 85 bp, Homo sapiens
aatgtatggcatttacctgtcacagttagtgtggctgtacagctgacactgccatactcattggaagctttgcatgtatactcgc

SEQ ID NO: 124199 - DNA, 84 bp, Homo sapiens
atttacctgtcacagttagtgtggctgtacagctgacactgccatactcattggaagctttgcatgtatactcgccgcagtcaa

SEQ ID NO: 124200 - DNA, 85 bp, Homo sapiens
tgtcacagttagtgtggctgtacagctgacactgccatactcattggaagctttgcatgtatactcgccgcagtcaaccacctgg

SEQ ID NO: 124201 - DNA, 84 bp, Homo sapiens
ttagtgtggctgtacagctgacactgccatactcattggaagctttgcatgtatactcgccgcagtcaaccacctgggttctca

SEQ ID NO: 124202 - DNA, 83 bp, Homo sapiens
tgtacagctgacactgccatactcattggaagctttgcatgtatactcgccgcagtcaaccacctgggttctcaggatttcaa

SEQ ID NO: 124203 - DNA, 82 bp, Homo sapiens
tgccatactcattggaagctttgcatgtatactcgccgcagtcaaccacctgggttctcaggatttcaaggctggagatata

SEQ ID NO: 124204 - DNA, 78 bp, Homo sapiens
attggaagctttgcatgtatactcgccgcagtcaaccacctgggttctcaggatttcaaggctggagatatactttga

SEQ ID NO: 124205 - DNA, 79 bp, Homo sapiens
tttgcatgtatactcgccgcagtcaaccacctgggttctcaggatttcaaggctggagatatactttgaagatcgaata

SEQ ID NO: 124206 - DNA, 77 bp, Homo sapiens
gtatactcgccgcagtcaaccacctgggttctcaggatttcaaggctggagatatactttgaagatcgaatagaaca

SEQ ID NO: 124207 - DNA, 78 bp, Homo sapiens
tcaaccacctgggttctcaggatttcaaggctggagatatactttgaagatcgaatagaacacttgtcactctcataa

SEQ ID NO: 124208 - DNA, 75 bp, Homo sapiens
acctgggttctcaggatttcaaggctggagatatactttgaagatcgaatagaacacttgtcactctcataaatt

SEQ ID NO: 124209 - DNA, 77 bp, Homo sapiens
gatttcaaggctggagatatactttgaagatcgaatagaacacttgtcactctcataaatttctcggccagctttaa

SEQ ID NO: 124210 - DNA, 75 bp, Homo sapiens
aaggctggagatatactttgaagatcgaatagaacacttgtcactctcataaatttctcggccagctttaaacca

SEQ ID NO: 124211 - DNA, 73 bp, Homo sapiens
atatactttgaagatcgaatagaacacttgtcactctcataaatttctcggccagctttaaaccactggaacc

SEQ ID NO: 124212 - DNA, 72 bp, Homo sapiens
aagatcgaatagaacacttgtcactctcataaatttctcggccagctttaaaccactggaaccggacattgg

SEQ ID NO: 124213 - DNA, 73 bp, Homo sapiens
tagaacacttgtcactctcataaatttctcggccagctttaaaccactggaaccggacattgggagcactttg

SEQ ID NO: 124214 - DNA, 74 bp, Homo sapiens
tctcataaatttctcggccagctttaaaccactggaaccggacattgggagcactttggatctcacaggtgaat

SEQ ID NO: 124215 - DNA, 72 bp, Homo sapiens
taaatttctcggccagctttaaaccactggaaccggacattgggagcactttggatctcacaggtgaatttg

SEQ ID NO: 124216 - DNA, 72 bp, Homo sapiens
agctttaaaccactggaaccggacattgggagcactttggatctcacaggtgaatttggctaggtggcccag

SEQ ID NO: 124217 - DNA, 73 bp, Homo sapiens
aaaccactggaaccggacattgggagcactttggatctcacaggtgaatttggctaggtggcccagtgctact

SEQ ID NO: 124218 - DNA, 74 bp, Homo sapiens
gacattgggagcactttggatctcacaggtgaatttggctaggtggcccagtgctacttccaggggttcgattt

SEQ ID NO: 124219 - DNA, 74 bp, Homo sapiens
agcactttggatctcacaggtgaatttggctaggtggcccagtgctacttccaggggttcgattttcctcttga

SEQ ID NO: 124220 - DNA, 75 bp, Homo sapiens
ttggatctcacaggtgaatttggctaggtggcccagtgctacttccaggggttcgattttcctcttgatcactgg

SEQ ID NO: 124221 - DNA, 75 bp, Homo sapiens
aggtgaatttggctaggtggcccagtgctacttccaggggttcgattttcctcttgatcactggggcagctgcaa

SEQ ID NO: 124222 - DNA, 74 bp, Homo sapiens
ctaggtggcccagtgctacttccaggggttcgattttcctcttgatcactggggcagctgcaaagggaagtaga

SEQ ID NO: 124223 - DNA, 74 bp, Homo sapiens
agtgctacttccaggggttcgattttcctcttgatcactggggcagctgcaaagggaagtagagtccattaaca

SEQ ID NO: 124224 - DNA, 74 bp, Homo sapiens
tccagtgaatgttagcatttgatctattttatccttaaaatccaacctctttttactacagtgagtttggctga

SEQ ID NO: 124225 - DNA, 72 bp, Homo sapiens
gttagcatttgatctattttatccttaaaatccaacctctttttactacagtgagtttggctgaagttgctg

SEQ ID NO: 124226 - DNA, 69 bp, Homo sapiens
gatctattttatccttaaaatccaacctctttttactacagtgagtttggctgaagttgctgtttttcc

SEQ ID NO: 124227 - DNA, 70 bp, Homo sapiens
tttatccttaaaatccaacctctttttactacagtgagtttggctgaagttgctgtttttccgctgtcat

SEQ ID NO: 124228 - DNA, 73 bp, Homo sapiens
taaaatccaacctctttttactacagtgagtttggctgaagttgctgtttttccgctgtcattcaaggcctca

SEQ ID NO: 124229 - DNA, 77 bp, Homo sapiens
tttttactacagtgagtttggctgaagttgctgtttttccgctgtcattcaaggcctcacagacatactctccttga

SEQ ID NO: 124230 - DNA, 79 bp, Homo sapiens
tacagtgagtttggctgaagttgctgtttttccgctgtcattcaaggcctcacagacatactctccttgatggtcttcg

SEQ ID NO: 124231 - DNA, 75 bp, Homo sapiens
ctgaagttgctgtttttccgctgtcattcaaggcctcacagacatactctccttgatggtcttcggtatttactt

SEQ ID NO: 124232 - DNA, 77 bp, Homo sapiens
tgtttttccgctgtcattcaaggcctcacagacatactctccttgatggtcttcggtatttactttgtcgatgacta

SEQ ID NO: 124233 - DNA, 79 bp, Homo sapiens
ctgtcattcaaggcctcacagacatactctccttgatggtcttcggtatttactttgtcgatgactagcgtatatgtat

SEQ ID NO: 124234 - DNA, 76 bp, Homo sapiens
attcaaggcctcacagacatactctccttgatggtcttcggtatttactttgtcgatgactagcgtatatgtattt

SEQ ID NO: 124235 - DNA, 76 bp, Homo sapiens
acagacatactctccttgatggtcttcggtatttactttgtcgatgactagcgtatatgtattttgatcttgtaaa

SEQ ID NO: 124236 - DNA, 74 bp, Homo sapiens
tccttgatggtcttcggtatttactttgtcgatgactagcgtatatgtattttgatcttgtaaacacttgaact

SEQ ID NO: 124237 - DNA, 73 bp, Homo sapiens
ggtcttcggtatttactttgtcgatgactagcgtatatgtattttgatcttgtaaacacttgaacttttcatc

SEQ ID NO: 124238 - DNA, 76 bp, Homo sapiens
gtatttactttgtcgatgactagcgtatatgtattttgatcttgtaaacacttgaacttttcatctgaaggcacca

SEQ ID NO: 124239 - DNA, 76 bp, Homo sapiens
cgatgactagcgtatatgtattttgatcttgtaaacacttgaacttttcatctgaaggcaccagtttattctcaaa

SEQ ID NO: 124240 - DNA, 74 bp, Homo sapiens
agcgtatatgtattttgatcttgtaaacacttgaacttttcatctgaaggcaccagtttattctcaaaatacca

SEQ ID NO: 124241 - DNA, 73 bp, Homo sapiens
ttgatcttgtaaacacttgaacttttcatctgaaggcaccagtttattctcaaaataccaattcacctcttta

SEQ ID NO: 124242 - DNA, 72 bp, Homo sapiens
gtaaacacttgaacttttcatctgaaggcaccagtttattctcaaaataccaattcacctctttagcatttg

SEQ ID NO: 124243 - DNA, 75 bp, Homo sapiens
acttttcatctgaaggcaccagtttattctcaaaataccaattcacctctttagcatttgttatggatgttgtga

SEQ ID NO: 124244 - DNA, 76 bp, Homo sapiens
tgaaggcaccagtttattctcaaaataccaattcacctctttagcatttgttatggatgttgtgaggtgtacaata

SEQ ID NO: 124245 - DNA, 75 bp, Homo sapiens
cagtttattctcaaaataccaattcacctctttagcatttgttatggatgttgtgaggtgtacaatatcaccttc

SEQ ID NO: 124246 - DNA, 76 bp, Homo sapiens
attctcaaaataccaattcacctctttagcatttgttatggatgttgtgaggtgtacaatatcaccttcctcagaa

SEQ ID NO: 124247 - DNA, 77 bp, Homo sapiens
tttagcatttgttatggatgttgtgaggtgtacaatatcaccttcctcagaaacagtgtccactaaaggtgtatgta

SEQ ID NO: 124248 - DNA, 78 bp, Homo sapiens
ttgtgaggtgtacaatatcaccttcctcagaaacagtgtccactaaaggtgtatgtatcatggggccatcctctttga

SEQ ID NO: 124249 - DNA, 76 bp, Homo sapiens
ggtgtacaatatcaccttcctcagaaacagtgtccactaaaggtgtatgtatcatggggccatcctctttgattaa

SEQ ID NO: 124250 - DNA, 76 bp, Homo sapiens
atcaccttcctcagaaacagtgtccactaaaggtgtatgtatcatggggccatcctctttgattaagccaccctca

SEQ ID NO: 124251 - DNA, 75 bp, Homo sapiens
aaacagtgtccactaaaggtgtatgtatcatggggccatcctctttgattaagccaccctcagcttcctgtatct

SEQ ID NO: 124252 - DNA, 79 bp, Homo sapiens
tgtatgtatcatggggccatcctctttgattaagccaccctcagcttcctgtatctttactgtagcaacctcctcagta

SEQ ID NO: 124253 - DNA, 74 bp, Homo sapiens
atggggccatcctctttgattaagccaccctcagcttcctgtatctttactgtagcaacctcctcagtaccact

SEQ ID NO: 124254 - DNA, 75 bp, Homo sapiens
atcctctttgattaagccaccctcagcttcctgtatctttactgtagcaacctcctcagtaccactttcagagga

SEQ ID NO: 124255 - DNA, 74 bp, Homo sapiens
attaagccaccctcagcttcctgtatctttactgtagcaacctcctcagtaccactttcagaggaagactcctc

SEQ ID NO: 124256 - DNA, 72 bp, Homo sapiens
ccctcagcttcctgtatctttactgtagcaacctcctcagtaccactttcagaggaagactcctctttttcc

SEQ ID NO: 124257 - DNA, 75 bp, Homo sapiens
tgtatctttactgtagcaacctcctcagtaccactttcagaggaagactcctctttttcctctgatggtttcaga

SEQ ID NO: 124258 - DNA, 75 bp, Homo sapiens
tagcaacctcctcagtaccactttcagaggaagactcctctttttcctctgatggtttcagactctcatcttgtt

SEQ ID NO: 124259 - DNA, 72 bp, Homo sapiens
acctcctcagtaccactttcagaggaagactcctctttttcctctgatggtttcagactctcatcttgtttt

SEQ ID NO: 124260 - DNA, 77 bp, Homo sapiens
agaggaagactcctctttttcctctgatggtttcagactctcatcttgtttttcgtcagagacaacagctgaagcaa

SEQ ID NO: 124261 - DNA, 76 bp, Homo sapiens
tttttcctctgatggtttcagactctcatcttgtttttcgtcagagacaacagctgaagcaacccctttagtgaca

SEQ ID NO: 124262 - DNA, 80 bp, Homo sapiens
tgatggtttcagactctcatcttgtttttcgtcagagacaacagctgaagcaacccctttagtgacaggtgtggcatcca

SEQ ID NO: 124263 - DNA, 76 bp, Homo sapiens
agactctcatcttgtttttcgtcagagacaacagctgaagcaacccctttagtgacaggtgtggcatccaaatatt

SEQ ID NO: 124264 - DNA, 73 bp, Homo sapiens
atcttgtttttcgtcagagacaacagctgaagcaacccctttagtgacaggtgtggcatccaaatatttaacc

SEQ ID NO: 124265 - DNA, 71 bp, Homo sapiens
acagctgaagcaacccctttagtgacaggtgtggcatccaaatatttaaccctactttgcacgttaaaata

SEQ ID NO: 124266 - DNA, 69 bp, Homo sapiens
aagcaacccctttagtgacaggtgtggcatccaaatatttaaccctactttgcacgttaaaataactga

SEQ ID NO: 124267 - DNA, 75 bp, Homo sapiens
tgtggcatccaaatatttaaccctactttgcacgttaaaataactgacctcttcagttgagatcagatatttaga

SEQ ID NO: 124268 - DNA, 74 bp, Homo sapiens
taaccctactttgcacgttaaaataactgacctcttcagttgagatcagatatttagattcaacttctggttca

SEQ ID NO: 124269 - DNA, 74 bp, Homo sapiens
aaataactgacctcttcagttgagatcagatatttagattcaacttctggttcagtaatgggttcaaccttctg

SEQ ID NO: 124270 - DNA, 75 bp, Homo sapiens
tcttcagttgagatcagatatttagattcaacttctggttcagtaatgggttcaaccttctgtgaacctgaaaaa

SEQ ID NO: 124271 - DNA, 70 bp, Homo sapiens
atttagattcaacttctggttcagtaatgggttcaaccttctgtgaacctgaaaaagaatccatttcttc

SEQ ID NO: 124272 - DNA, 70 bp, Homo sapiens
ttctggttcagtaatgggttcaaccttctgtgaacctgaaaaagaatccatttcttcttgcaaacttgtt

SEQ ID NO: 124273 - DNA, 71 bp, Homo sapiens
ttcagtaatgggttcaaccttctgtgaacctgaaaaagaatccatttcttcttgcaaacttgttttggctc

SEQ ID NO: 124274 - DNA, 73 bp, Homo sapiens
ttcaaccttctgtgaacctgaaaaagaatccatttcttcttgcaaacttgttttggctccttgctgaattcta

SEQ ID NO: 124275 - DNA, 74 bp, Homo sapiens
tctgtgaacctgaaaaagaatccatttcttcttgcaaacttgttttggctccttgctgaattctaggaccctca

SEQ ID NO: 124276 - DNA, 72 bp, Homo sapiens
aaaaagaatccatttcttcttgcaaacttgttttggctccttgctgaattctaggaccctcagctgttagga

SEQ ID NO: 124277 - DNA, 77 bp, Homo sapiens
ttcttcttgcaaacttgttttggctccttgctgaattctaggaccctcagctgttaggatgtctatttcctcatata

SEQ ID NO: 124278 - DNA, 77 bp, Homo sapiens
aaacttgttttggctccttgctgaattctaggaccctcagctgttaggatgtctatttcctcatatataatagcaca

SEQ ID NO: 124279 - DNA, 81 bp, Homo sapiens
tgttttggctccttgctgaattctaggaccctcagctgttaggatgtctatttcctcatatataatagcacacaaagcatc

SEQ ID NO: 124280 - DNA, 78 bp, Homo sapiens
ctgaattctaggaccctcagctgttaggatgtctatttcctcatatataatagcacacaaagcatccctaagttccat

SEQ ID NO: 124281 - DNA, 78 bp, Homo sapiens
ttctaggaccctcagctgttaggatgtctatttcctcatatataatagcacacaaagcatccctaagttccattttca

SEQ ID NO: 124282 - DNA, 77 bp, Homo sapiens
ctgttaggatgtctatttcctcatatataatagcacacaaagcatccctaagttccattttcaggttagccatttga

SEQ ID NO: 124283 - DNA, 75 bp, Homo sapiens
taagttccattttcaggttagccatttgaggatcaacatcttcaataatgatggttacttcttctgttacagact

SEQ ID NO: 124284 - DNA, 76 bp, Homo sapiens
tagccatttgaggatcaacatcttcaataatgatggttacttcttctgttacagactttgccgaagtaacaaggta

SEQ ID NO: 124285 - DNA, 80 bp, Homo sapiens
atcaacatcttcaataatgatggttacttcttctgttacagactttgccgaagtaacaaggtacatgcacatgatgtgtc

SEQ ID NO: 124286 - DNA, 78 bp, Homo sapiens
tggttacttcttctgttacagactttgccgaagtaacaaggtacatgcacatgatgtgtctgggctcttgggtgatgt

SEQ ID NO: 124287 - DNA, 79 bp, Homo sapiens
ttcttctgttacagactttgccgaagtaacaaggtacatgcacatgatgtgtctgggctcttgggtgatgtttacagcc

SEQ ID NO: 124288 - DNA, 77 bp, Homo sapiens
aagtaacaaggtacatgcacatgatgtgtctgggctcttgggtgatgtttacagcctcgacctccaccttttcaata

SEQ ID NO: 124289 - DNA, 77 bp, Homo sapiens
aaggtacatgcacatgatgtgtctgggctcttgggtgatgtttacagcctcgacctccaccttttcaatatttctta

SEQ ID NO: 124290 - DNA, 77 bp, Homo sapiens
atgatgtgtctgggctcttgggtgatgtttacagcctcgacctccaccttttcaatatttcttagccactcagagaa

SEQ ID NO: 124291 - DNA, 75 bp, Homo sapiens
tgtctgggctcttgggtgatgtttacagcctcgacctccaccttttcaatatttcttagccactcagagaaaaga

SEQ ID NO: 124292 - DNA, 75 bp, Homo sapiens
ttgggtgatgtttacagcctcgacctccaccttttcaatatttcttagccactcagagaaaagacctggctgctc

SEQ ID NO: 124293 - DNA, 77 bp, Homo sapiens
cagcctcgacctccaccttttcaatatttcttagccactcagagaaaagacctggctgctcgctggccacggctgct

SEQ ID NO: 124294 - DNA, 78 bp, Homo sapiens
tcgacctccaccttttcaatatttcttagccactcagagaaaagacctggctgctcgctggccacggctgcttgcaaa

SEQ ID NO: 124295 - DNA, 80 bp, Homo sapiens
tcaatatttcttagccactcagagaaaagacctggctgctcgctggccacggctgcttgcaaagcccggcagatttgaat

SEQ ID NO: 124296 - DNA, 76 bp, Homo sapiens
agagaaaagacctggctgctcgctggccacggctgcttgcaaagcccggcagatttgaattttcaggtttaatctc

SEQ ID NO: 124297 - DNA, 76 bp, Homo sapiens
ggctgcttgcaaagcccggcagatttgaattttcaggtttaatctctgctcttctggaataccagaaagcaagctt

SEQ ID NO: 124298 - DNA, 72 bp, Homo sapiens
aaagcccggcagatttgaattttcaggtttaatctctgctcttctggaataccagaaagcaagctttcctta

SEQ ID NO: 124299 - DNA, 69 bp, Homo sapiens
aattttcaggtttaatctctgctcttctggaataccagaaagcaagctttccttagaaagaaggtccct

SEQ ID NO: 124300 - DNA, 70 bp, Homo sapiens
tcttctggaataccagaaagcaagctttccttagaaagaaggtcccttccctgtacctcctgcactttct

SEQ ID NO: 124301 - DNA, 69 bp, Homo sapiens
aataccagaaagcaagctttccttagaaagaaggtcccttccctgtacctcctgcactttctttattgc

SEQ ID NO: 124302 - DNA, 68 bp, Homo sapiens
aagctttccttagaaagaaggtcccttccctgtacctcctgcactttctttattgccacgggctctct

SEQ ID NO: 124303 - DNA, 70 bp, Homo sapiens
ttagaaagaaggtcccttccctgtacctcctgcactttctttattgccacgggctctcttttagactcaa

SEQ ID NO: 124304 - DNA, 71 bp, Homo sapiens
agaaggtcccttccctgtacctcctgcactttctttattgccacgggctctcttttagactcaatgatttg

SEQ ID NO: 124305 - DNA, 75 bp, Homo sapiens
ttccctgtacctcctgcactttctttattgccacgggctctcttttagactcaatgatttggtctgggggcatca

SEQ ID NO: 124306 - DNA, 77 bp, Homo sapiens
gcactttctttattgccacgggctctcttttagactcaatgatttggtctgggggcatcaccacgttgtcagaatgc

SEQ ID NO: 124307 - DNA, 77 bp, Homo sapiens
ttctttattgccacgggctctcttttagactcaatgatttggtctgggggcatcaccacgttgtcagaatgctcttc

SEQ ID NO: 124308 - DNA, 77 bp, Homo sapiens
acgggctctcttttagactcaatgatttggtctgggggcatcaccacgttgtcagaatgctcttctttgagcagtac

SEQ ID NO: 124309 - DNA, 77 bp, Homo sapiens
ttttagactcaatgatttggtctgggggcatcaccacgttgtcagaatgctcttctttgagcagtacctgcttttct

SEQ ID NO: 124310 - DNA, 78 bp, Homo sapiens
tgggggcatcaccacgttgtcagaatgctcttctttgagcagtacctgcttttcttcaagtgctagtggaaatcttaa

SEQ ID NO: 124311 - DNA, 76 bp, Homo sapiens
atcaccacgttgtcagaatgctcttctttgagcagtacctgcttttcttcaagtgctagtggaaatcttaaggact

SEQ ID NO: 124312 - DNA, 75 bp, Homo sapiens
agaatgctcttctttgagcagtacctgcttttcttcaagtgctagtggaaatcttaaggacttgccttcctcaat

SEQ ID NO: 124313 - DNA, 75 bp, Homo sapiens
tcttctttgagcagtacctgcttttcttcaagtgctagtggaaatcttaaggacttgccttcctcaattctgacc

SEQ ID NO: 124314 - DNA, 75 bp, Homo sapiens
ttttcttcaagtgctagtggaaatcttaaggacttgccttcctcaattctgaccgcagaatcttgccctgcattt

SEQ ID NO: 124315 - DNA, 76 bp, Homo sapiens
aagtgctagtggaaatcttaaggacttgccttcctcaattctgaccgcagaatcttgccctgcattttccagtgga

SEQ ID NO: 124316 - DNA, 76 bp, Homo sapiens
aatcttaaggacttgccttcctcaattctgaccgcagaatcttgccctgcattttccagtggatttgcactttcta

SEQ ID NO: 124317 - DNA, 75 bp, Homo sapiens
acttgccttcctcaattctgaccgcagaatcttgccctgcattttccagtggatttgcactttctatcaaaattt

SEQ ID NO: 124318 - DNA, 75 bp, Homo sapiens
cttcctcaattctgaccgcagaatcttgccctgcattttccagtggatttgcactttctatcaaaattttacctc

SEQ ID NO: 124319 - DNA, 77 bp, Homo sapiens
aatcttgccctgcattttccagtggatttgcactttctatcaaaattttacctccttctgtgcatgagtgttctgaa

SEQ ID NO: 124320 - DNA, 75 bp, Homo sapiens
gatttgcactttctatcaaaattttacctccttctgtgcatgagtgttctgaagggactaggggctcatagttta

SEQ ID NO: 124321 - DNA, 77 bp, Homo sapiens
ttctatcaaaattttacctccttctgtgcatgagtgttctgaagggactaggggctcatagtttacctgagagatca

SEQ ID NO: 124322 - DNA, 78 bp, Homo sapiens
aaaattttacctccttctgtgcatgagtgttctgaagggactaggggctcatagtttacctgagagatcatgacatca

SEQ ID NO: 124323 - DNA, 82 bp, Homo sapiens
acctccttctgtgcatgagtgttctgaagggactaggggctcatagtttacctgagagatcatgacatcaggactctggaga

SEQ ID NO: 124324 - DNA, 81 bp, Homo sapiens
atgagtgttctgaagggactaggggctcatagtttacctgagagatcatgacatcaggactctggagactctccacgtgtc

SEQ ID NO: 124325 - DNA, 86 bp, Homo sapiens
tagtttacctgagagatcatgacatcaggactctggagactctccacgtgtccctcagctaagctctgactcaagatgagcgcact

SEQ ID NO: 124326 - DNA, 88 bp, Homo sapiens
ctgagagatcatgacatcaggactctggagactctccacgtgtccctcagctaagctctgactcaagatgagcgcactttgtgcctct

SEQ ID NO: 124327 - DNA, 84 bp, Homo sapiens
atgacatcaggactctggagactctccacgtgtccctcagctaagctctgactcaagatgagcgcactttgtgcctcttgcttt

SEQ ID NO: 124328 - DNA, 83 bp, Homo sapiens
actctggagactctccacgtgtccctcagctaagctctgactcaagatgagcgcactttgtgcctcttgcttttgaagagtca

SEQ ID NO: 124329 - DNA, 82 bp, Homo sapiens
actctccacgtgtccctcagctaagctctgactcaagatgagcgcactttgtgcctcttgcttttgaagagtcactctttgc

SEQ ID NO: 124330 - DNA, 85 bp, Homo sapiens
taagctctgactcaagatgagcgcactttgtgcctcttgcttttgaagagtcactctttgctctctgttggtgtcagatactgtc

SEQ ID NO: 124331 - DNA, 79 bp, Homo sapiens
aagatgagcgcactttgtgcctcttgcttttgaagagtcactctttgctctctgttggtgtcagatactgtcttttctt

SEQ ID NO: 124332 - DNA, 75 bp, Homo sapiens
ctcttgcttttgaagagtcactctttgctctctgttggtgtcagatactgtcttttcttttggtgaaagtacttc

SEQ ID NO: 124333 - DNA, 76 bp, Homo sapiens
ttttgaagagtcactctttgctctctgttggtgtcagatactgtcttttcttttggtgaaagtacttcctcagcca

SEQ ID NO: 124334 - DNA, 76 bp, Homo sapiens
ctctttgctctctgttggtgtcagatactgtcttttcttttggtgaaagtacttcctcagccacagaggttagata

SEQ ID NO: 124335 - DNA, 77 bp, Homo sapiens
tctctgttggtgtcagatactgtcttttcttttggtgaaagtacttcctcagccacagaggttagataagaatgcat

SEQ ID NO: 124336 - DNA, 76 bp, Homo sapiens
tcagatactgtcttttcttttggtgaaagtacttcctcagccacagaggttagataagaatgcattggaggttcta

SEQ ID NO: 124337 - DNA, 74 bp, Homo sapiens
tcttttcttttggtgaaagtacttcctcagccacagaggttagataagaatgcattggaggttctattgaagac

SEQ ID NO: 124338 - DNA, 76 bp, Homo sapiens
ttttggtgaaagtacttcctcagccacagaggttagataagaatgcattggaggttctattgaagactgtggataa

SEQ ID NO: 124339 - DNA, 74 bp, Homo sapiens
aaagtacttcctcagccacagaggttagataagaatgcattggaggttctattgaagactgtggataattccct

SEQ ID NO: 124340 - DNA, 73 bp, Homo sapiens
gttagataagaatgcattggaggttctattgaagactgtggataattcccttcaggttcagctaataaagttt

SEQ ID NO: 124341 - DNA, 74 bp, Homo sapiens
gttctattgaagactgtggataattcccttcaggttcagctaataaagttttcagaggctcaactgttaatgaa

SEQ ID NO: 124342 - DNA, 73 bp, Homo sapiens
attgaagactgtggataattcccttcaggttcagctaataaagttttcagaggctcaactgttaatgaattaa

SEQ ID NO: 124343 - DNA, 72 bp, Homo sapiens
gtggataattcccttcaggttcagctaataaagttttcagaggctcaactgttaatgaattaatttgttcta

SEQ ID NO: 124344 - DNA, 75 bp, Homo sapiens
cttcaggttcagctaataaagttttcagaggctcaactgttaatgaattaatttgttctatggacatggcacttg

SEQ ID NO: 124345 - DNA, 75 bp, Homo sapiens
tcagctaataaagttttcagaggctcaactgttaatgaattaatttgttctatggacatggcacttgggaagatt

SEQ ID NO: 124346 - DNA, 77 bp, Homo sapiens
tttcagaggctcaactgttaatgaattaatttgttctatggacatggcacttgggaagattttctcggtatctgata

SEQ ID NO: 124347 - DNA, 75 bp, Homo sapiens
aggctcaactgttaatgaattaatttgttctatggacatggcacttgggaagattttctcggtatctgatagaac

SEQ ID NO: 124348 - DNA, 79 bp, Homo sapiens
acatggcacttgggaagattttctcggtatctgatagaactgcctgtgtctcaggctcttcaggcattagaataccttc

SEQ ID NO: 124349 - DNA, 76 bp, Homo sapiens
acttgggaagattttctcggtatctgatagaactgcctgtgtctcaggctcttcaggcattagaataccttctttg

SEQ ID NO: 124350 - DNA, 75 bp, Homo sapiens
attttctcggtatctgatagaactgcctgtgtctcaggctcttcaggcattagaataccttctttggagaaggtt

SEQ ID NO: 124351 - DNA, 78 bp, Homo sapiens
tatctgatagaactgcctgtgtctcaggctcttcaggcattagaataccttctttggagaaggttttctgggactgta

SEQ ID NO: 124352 - DNA, 75 bp, Homo sapiens
agaactgcctgtgtctcaggctcttcaggcattagaataccttctttggagaaggttttctgggactgtacaatc

SEQ ID NO: 124353 - DNA, 77 bp, Homo sapiens
tctcaggctcttcaggcattagaataccttctttggagaaggttttctgggactgtacaatctgcagctgtaggttg

SEQ ID NO: 124354 - DNA, 76 bp, Homo sapiens
tcttcaggcattagaataccttctttggagaaggttttctgggactgtacaatctgcagctgtaggttgggagatg

SEQ ID NO: 124355 - DNA, 72 bp, Homo sapiens
attagaataccttctttggagaaggttttctgggactgtacaatctgcagctgtaggttgggagatggttcc

SEQ ID NO: 124356 - DNA, 75 bp, Homo sapiens
ttctttggagaaggttttctgggactgtacaatctgcagctgtaggttgggagatggttccttgagaggctgaaa

SEQ ID NO: 124357 - DNA, 80 bp, Homo sapiens
actgtacaatctgcagctgtaggttgggagatggttccttgagaggctgaaagtgaatactgccattgatgcaaagaaat

SEQ ID NO: 124358 - DNA, 78 bp, Homo sapiens
tgtaggttgggagatggttccttgagaggctgaaagtgaatactgccattgatgcaaagaaattccctggtgctttca

SEQ ID NO: 124359 - DNA, 79 bp, Homo sapiens
agatggttccttgagaggctgaaagtgaatactgccattgatgcaaagaaattccctggtgctttcaggagtgagcttg

SEQ ID NO: 124360 - DNA, 80 bp, Homo sapiens
aaagtgaatactgccattgatgcaaagaaattccctggtgctttcaggagtgagcttgtcttgctccaaaatggattgca

SEQ ID NO: 124361 - DNA, 81 bp, Homo sapiens
atactgccattgatgcaaagaaattccctggtgctttcaggagtgagcttgtcttgctccaaaatggattgcaattcctga

SEQ ID NO: 124362 - DNA, 76 bp, Homo sapiens
aaattccctggtgctttcaggagtgagcttgtcttgctccaaaatggattgcaattcctgagctcccaaaggaagc

SEQ ID NO: 124363 - DNA, 81 bp, Homo sapiens
ctttcaggagtgagcttgtcttgctccaaaatggattgcaattcctgagctcccaaaggaagctgactgctcaattcattg

SEQ ID NO: 124364 - DNA, 85 bp, Homo sapiens
tgctccaaaatggattgcaattcctgagctcccaaaggaagctgactgctcaattcattggctttagcaatatgctcataagata

SEQ ID NO: 124365 - DNA, 81 bp, Homo sapiens
aaaatggattgcaattcctgagctcccaaaggaagctgactgctcaattcattggctttagcaatatgctcataagatagt

SEQ ID NO: 124366 - DNA, 80 bp, Homo sapiens
attcctgagctcccaaaggaagctgactgctcaattcattggctttagcaatatgctcataagatagttgctggttttct

SEQ ID NO: 124367 - DNA, 79 bp, Homo sapiens
ccaaaggaagctgactgctcaattcattggctttagcaatatgctcataagatagttgctggttttcttctgtaattaa

SEQ ID NO: 124368 - DNA, 81 bp, Homo sapiens
ctgactgctcaattcattggctttagcaatatgctcataagatagttgctggttttcttctgtaattaaagcagctttcaa

SEQ ID NO: 124369 - DNA, 78 bp, Homo sapiens
ctcaattcattggctttagcaatatgctcataagatagttgctggttttcttctgtaattaaagcagctttcaaaatg

SEQ ID NO: 124370 - DNA, 76 bp, Homo sapiens
ttggctttagcaatatgctcataagatagttgctggttttcttctgtaattaaagcagctttcaaaatggtgtctt

SEQ ID NO: 124371 - DNA, 71 bp, Homo sapiens
gatagttgctggttttcttctgtaattaaagcagctttcaaaatggtgtcttttacaaacgttgcaatttc

SEQ ID NO: 124372 - DNA, 72 bp, Homo sapiens
tggttttcttctgtaattaaagcagctttcaaaatggtgtcttttacaaacgttgcaatttcctgctctgag

SEQ ID NO: 124373 - DNA, 76 bp, Homo sapiens
tctgtaattaaagcagctttcaaaatggtgtcttttacaaacgttgcaatttcctgctctgagtcaagtgcttcaa

SEQ ID NO: 124374 - DNA, 75 bp, Homo sapiens
ttaaagcagctttcaaaatggtgtcttttacaaacgttgcaatttcctgctctgagtcaagtgcttcaactgcgg

SEQ ID NO: 124375 - DNA, 71 bp, Homo sapiens
aaaatggtgtcttttacaaacgttgcaatttcctgctctgagtcaagtgcttcaactgcgggaccctttaa

SEQ ID NO: 124376 - DNA, 73 bp, Homo sapiens
tgtcttttacaaacgttgcaatttcctgctctgagtcaagtgcttcaactgcgggaccctttaagggtgtctg

SEQ ID NO: 124377 - DNA, 72 bp, Homo sapiens
aaacgttgcaatttcctgctctgagtcaagtgcttcaactgcgggaccctttaagggtgtctgtggaaaatc

SEQ ID NO: 124378 - DNA, 72 bp, Homo sapiens
gtgcttcaactgcgggaccctttaagggtgtctgtggaaaatcctcaggagcctctggtgtggactttgctt

SEQ ID NO: 124379 - DNA, 72 bp, Homo sapiens
ggaccctttaagggtgtctgtggaaaatcctcaggagcctctggtgtggactttgctttgcagggggtatca

SEQ ID NO: 124380 - DNA, 76 bp, Homo sapiens
tttaagggtgtctgtggaaaatcctcaggagcctctggtgtggactttgctttgcagggggtatcagtcatgtctg

SEQ ID NO: 124381 - DNA, 80 bp, Homo sapiens
tggaaaatcctcaggagcctctggtgtggactttgctttgcagggggtatcagtcatgtctgtgtcttccagaagcacaa

SEQ ID NO: 124382 - DNA, 84 bp, Homo sapiens
atcctcaggagcctctggtgtggactttgctttgcagggggtatcagtcatgtctgtgtcttccagaagcacaagcagctctgc

SEQ ID NO: 124383 - DNA, 87 bp, Homo sapiens
tctggtgtggactttgctttgcagggggtatcagtcatgtctgtgtcttccagaagcacaagcagctctgctgcacaggtggactca

SEQ ID NO: 124384 - DNA, 85 bp, Homo sapiens
tttgctttgcagggggtatcagtcatgtctgtgtcttccagaagcacaagcagctctgctgcacaggtggactcacccaacatat

SEQ ID NO: 124385 - DNA, 84 bp, Homo sapiens
agggggtatcagtcatgtctgtgtcttccagaagcacaagcagctctgctgcacaggtggactcacccaacatattctctgctt

SEQ ID NO: 124386 - DNA, 90 bp, Homo sapiens
tatcagtcatgtctgtgtcttccagaagcacaagcagctctgctgcacaggtggactcacccaacatattctctgctttacagatataga

SEQ ID NO: 124387 - DNA, 87 bp, Homo sapiens
tgtgtcttccagaagcacaagcagctctgctgcacaggtggactcacccaacatattctctgctttacagatatagaggccactgtc

SEQ ID NO: 124388 - DNA, 85 bp, Homo sapiens
ttccagaagcacaagcagctctgctgcacaggtggactcacccaacatattctctgctttacagatatagaggccactgtcttcc

SEQ ID NO: 124389 - DNA, 83 bp, Homo sapiens
cagctctgctgcacaggtggactcacccaacatattctctgctttacagatatagaggccactgtcttccctctgagggtcat

SEQ ID NO: 124390 - DNA, 80 bp, Homo sapiens
acatattctctgctttacagatatagaggccactgtcttccctctgagggtcattgacaatgaaagttccagagccatta

SEQ ID NO: 124391 - DNA, 79 bp, Homo sapiens
tgctttacagatatagaggccactgtcttccctctgagggtcattgacaatgaaagttccagagccattagggttatga

SEQ ID NO: 124392 - DNA, 79 bp, Homo sapiens
acagatatagaggccactgtcttccctctgagggtcattgacaatgaaagttccagagccattagggttatgaatgata

SEQ ID NO: 124393 - DNA, 77 bp, Homo sapiens
cctctgagggtcattgacaatgaaagttccagagccattagggttatgaatgatagtgtaataaacactggtgcaaa

SEQ ID NO: 124394 - DNA, 74 bp, Homo sapiens
aatgaaagttccagagccattagggttatgaatgatagtgtaataaacactggtgcaaagctgcttgttttctt

SEQ ID NO: 124395 - DNA, 76 bp, Homo sapiens
agagccattagggttatgaatgatagtgtaataaacactggtgcaaagctgcttgttttctttgaaccatgtaaca

SEQ ID NO: 124396 - DNA, 74 bp, Homo sapiens
attagggttatgaatgatagtgtaataaacactggtgcaaagctgcttgttttctttgaaccatgtaacagtag

SEQ ID NO: 124397 - DNA, 76 bp, Homo sapiens
atgatagtgtaataaacactggtgcaaagctgcttgttttctttgaaccatgtaacagtaggggcaggctctccaa

SEQ ID NO: 124398 - DNA, 75 bp, Homo sapiens
ataaacactggtgcaaagctgcttgttttctttgaaccatgtaacagtaggggcaggctctccaaccactgtgta

SEQ ID NO: 124399 - DNA, 75 bp, Homo sapiens
actggtgcaaagctgcttgttttctttgaaccatgtaacagtaggggcaggctctccaaccactgtgtactcaaa

SEQ ID NO: 124400 - DNA, 76 bp, Homo sapiens
taacagtaggggcaggctctccaaccactgtgtactcaaagatggcaggaagcccttgagcacagcgaattggttt

SEQ ID NO: 124401 - DNA, 76 bp, Homo sapiens
ggcaggctctccaaccactgtgtactcaaagatggcaggaagcccttgagcacagcgaattggttttaactcctta

SEQ ID NO: 124402 - DNA, 74 bp, Homo sapiens
tctccaaccactgtgtactcaaagatggcaggaagcccttgagcacagcgaattggttttaactccttaaggaa

SEQ ID NO: 124403 - DNA, 73 bp, Homo sapiens
actgtgtactcaaagatggcaggaagcccttgagcacagcgaattggttttaactccttaaggaagtgaggag

SEQ ID NO: 124404 - DNA, 71 bp, Homo sapiens
aaagatggcaggaagcccttgagcacagcgaattggttttaactccttaaggaagtgaggaggacaaggac

SEQ ID NO: 124405 - DNA, 69 bp, Homo sapiens
aagcccttgagcacagcgaattggttttaactccttaaggaagtgaggaggacaaggacctcccagctt

SEQ ID NO: 124406 - DNA, 69 bp, Homo sapiens
cacagcgaattggttttaactccttaaggaagtgaggaggacaaggacctcccagcttttccagagatt

SEQ ID NO: 124407 - DNA, 74 bp, Homo sapiens
aaggaagtgaggaggacaaggacctcccagcttttccagagattttgccactgctgattctgtttcagtgtctt

SEQ ID NO: 124408 - DNA, 74 bp, Homo sapiens
acaaggacctcccagcttttccagagattttgccactgctgattctgtttcagtgtctttgtgaccctctcctt

SEQ ID NO: 124409 - DNA, 74 bp, Homo sapiens
attttgccactgctgattctgtttcagtgtctttgtgaccctctcctttggaattaatttttagataggcacta

SEQ ID NO: 124410 - DNA, 74 bp, Homo sapiens
tgattctgtttcagtgtctttgtgaccctctcctttggaattaatttttagataggcactacatattgtctttc

SEQ ID NO: 124411 - DNA, 75 bp, Homo sapiens
tcagtgtctttgtgaccctctcctttggaattaatttttagataggcactacatattgtctttccatagtcatta

SEQ ID NO: 124412 - DNA, 75 bp, Homo sapiens
ttgtgaccctctcctttggaattaatttttagataggcactacatattgtctttccatagtcattactggccata

SEQ ID NO: 124413 - DNA, 76 bp, Homo sapiens
cctttggaattaatttttagataggcactacatattgtctttccatagtcattactggccatacatgtatactctc

SEQ ID NO: 124414 - DNA, 77 bp, Homo sapiens
aattaatttttagataggcactacatattgtctttccatagtcattactggccatacatgtatactctccctcatcc

SEQ ID NO: 124415 - DNA, 79 bp, Homo sapiens
tttagataggcactacatattgtctttccatagtcattactggccatacatgtatactctccctcatcctccaatttgg

SEQ ID NO: 124416 - DNA, 80 bp, Homo sapiens
actacatattgtctttccatagtcattactggccatacatgtatactctccctcatcctccaatttggtgaacagaatga

SEQ ID NO: 124417 - DNA, 86 bp, Homo sapiens
tctttccatagtcattactggccatacatgtatactctccctcatcctccaatttggtgaacagaatgatcaggctatgatcatca

SEQ ID NO: 124418 - DNA, 82 bp, Homo sapiens
attactggccatacatgtatactctccctcatcctccaatttggtgaacagaatgatcaggctatgatcatcaccgtcaaaa

SEQ ID NO: 124419 - DNA, 79 bp, Homo sapiens
atacatgtatactctccctcatcctccaatttggtgaacagaatgatcaggctatgatcatcaccgtcaaaaacaaatt

SEQ ID NO: 124420 - DNA, 79 bp, Homo sapiens
tgtatactctccctcatcctccaatttggtgaacagaatgatcaggctatgatcatcaccgtcaaaaacaaatttgtag

SEQ ID NO: 124421 - DNA, 79 bp, Homo sapiens
ctcatcctccaatttggtgaacagaatgatcaggctatgatcatcaccgtcaaaaacaaatttgtagtcagcagaaggg

SEQ ID NO: 124422 - DNA, 76 bp, Homo sapiens
aatttggtgaacagaatgatcaggctatgatcatcaccgtcaaaaacaaatttgtagtcagcagaaggggttaata

SEQ ID NO: 124423 - DNA, 72 bp, Homo sapiens
atcatcaccgtcaaaaacaaatttgtagtcagcagaaggggttaatagcactccattaaagaaccactgaat

SEQ ID NO: 124424 - DNA, 68 bp, Homo sapiens
aaacaaatttgtagtcagcagaaggggttaatagcactccattaaagaaccactgaattttaggtttg

SEQ ID NO: 124425 - DNA, 70 bp, Homo sapiens
aatttgtagtcagcagaaggggttaatagcactccattaaagaaccactgaattttaggtttggggatgc

SEQ ID NO: 124426 - DNA, 70 bp, Homo sapiens
agaaggggttaatagcactccattaaagaaccactgaattttaggtttggggatgccaatgacagttaca

SEQ ID NO: 124427 - DNA, 73 bp, Homo sapiens
actccattaaagaaccactgaattttaggtttggggatgccaatgacagttacagacagtgtagccacatccc

SEQ ID NO: 124428 - DNA, 80 bp, Homo sapiens
cactgaattttaggtttggggatgccaatgacagttacagacagtgtagccacatcccccatgcttatatcagcatttga

SEQ ID NO: 124429 - DNA, 79 bp, Homo sapiens
ttaggtttggggatgccaatgacagttacagacagtgtagccacatcccccatgcttatatcagcatttgacacttctt

SEQ ID NO: 124430 - DNA, 82 bp, Homo sapiens
gggatgccaatgacagttacagacagtgtagccacatcccccatgcttatatcagcatttgacacttctttgatgaaaattg

SEQ ID NO: 124431 - DNA, 80 bp, Homo sapiens
aatgacagttacagacagtgtagccacatcccccatgcttatatcagcatttgacacttctttgatgaaaattgggccag

SEQ ID NO: 124432 - DNA, 77 bp, Homo sapiens
acagtgtagccacatcccccatgcttatatcagcatttgacacttctttgatgaaaattgggccagtgccttccttt

SEQ ID NO: 124433 - DNA, 77 bp, Homo sapiens
cacatcccccatgcttatatcagcatttgacacttctttgatgaaaattgggccagtgccttccttttcggaatcaa

SEQ ID NO: 124434 - DNA, 74 bp, Homo sapiens
atgcttatatcagcatttgacacttctttgatgaaaattgggccagtgccttccttttcggaatcaaatttagt

SEQ ID NO: 124435 - DNA, 72 bp, Homo sapiens
tcagcatttgacacttctttgatgaaaattgggccagtgccttccttttcggaatcaaatttagttgggtaa

SEQ ID NO: 124436 - DNA, 68 bp, Homo sapiens
tttgacacttctttgatgaaaattgggccagtgccttccttttcggaatcaaatttagttgggtaaac

SEQ ID NO: 124437 - DNA, 69 bp, Homo sapiens
atgaaaattgggccagtgccttccttttcggaatcaaatttagttgggtaaactggagattcagacaaa

SEQ ID NO: 124438 - DNA, 67 bp, Homo sapiens
aattgggccagtgccttccttttcggaatcaaatttagttgggtaaactggagattcagacaaaagt

SEQ ID NO: 124439 - DNA, 69 bp, Homo sapiens
tgccttccttttcggaatcaaatttagttgggtaaactggagattcagacaaaagttcaagtgtttcat

SEQ ID NO: 124440 - DNA, 70 bp, Homo sapiens
tagttgggtaaactggagattcagacaaaagttcaagtgtttcatttattttagataattgaagttcggc

SEQ ID NO: 124441 - DNA, 72 bp, Homo sapiens
aactggagattcagacaaaagttcaagtgtttcatttattttagataattgaagttcggcgctatgaagtcc

SEQ ID NO: 124442 - DNA, 71 bp, Homo sapiens
aaaagttcaagtgtttcatttattttagataattgaagttcggcgctatgaagtccttcttcctcggcaga

SEQ ID NO: 124443 - DNA, 70 bp, Homo sapiens
aaacactttgtggaggaggcatgagggtaaatagaagtacaaacaattaggtagccaaggagagatttaa

SEQ ID NO: 124444 - DNA, 73 bp, Homo sapiens
gaggaggcatgagggtaaatagaagtacaaacaattaggtagccaaggagagatttaattgtgtttgatatta

SEQ ID NO: 124445 - DNA, 76 bp, Homo sapiens
catgagggtaaatagaagtacaaacaattaggtagccaaggagagatttaattgtgtttgatattacacagcatga

SEQ ID NO: 124446 - DNA, 80 bp, Homo sapiens
tagaagtacaaacaattaggtagccaaggagagatttaattgtgtttgatattacacagcatgattgacacaagtgatga

SEQ ID NO: 124447 - DNA, 81 bp, Homo sapiens
tacaaacaattaggtagccaaggagagatttaattgtgtttgatattacacagcatgattgacacaagtgatgattccaca

SEQ ID NO: 124448 - DNA, 82 bp, Homo sapiens
tagccaaggagagatttaattgtgtttgatattacacagcatgattgacacaagtgatgattccacagttcagataacaaaa

SEQ ID NO: 124449 - DNA, 80 bp, Homo sapiens
aggagagatttaattgtgtttgatattacacagcatgattgacacaagtgatgattccacagttcagataacaaaatatt

SEQ ID NO: 124450 - DNA, 82 bp, Homo sapiens
gtgtttgatattacacagcatgattgacacaagtgatgattccacagttcagataacaaaatatttacatgtattacaaaga

SEQ ID NO: 124451 - DNA, 82 bp, Homo sapiens
attacacagcatgattgacacaagtgatgattccacagttcagataacaaaatatttacatgtattacaaagatgagatttc

SEQ ID NO: 124452 - DNA, 84 bp, Homo sapiens
gcatgattgacacaagtgatgattccacagttcagataacaaaatatttacatgtattacaaagatgagatttctacatagaga

SEQ ID NO: 124453 - DNA, 80 bp, Homo sapiens
gacacaagtgatgattccacagttcagataacaaaatatttacatgtattacaaagatgagatttctacatagagattat

SEQ ID NO: 124454 - DNA, 75 bp, Homo sapiens
tccacagttcagataacaaaatatttacatgtattacaaagatgagatttctacatagagattatttctttaggg

SEQ ID NO: 124455 - DNA, 75 bp, Homo sapiens
tcagataacaaaatatttacatgtattacaaagatgagatttctacatagagattatttctttaggggtctccaa

SEQ ID NO: 124456 - DNA, 73 bp, Homo sapiens
atatttacatgtattacaaagatgagatttctacatagagattatttctttaggggtctccaaggtaatgaat

SEQ ID NO: 124457 - DNA, 73 bp, Homo sapiens
gtattacaaagatgagatttctacatagagattatttctttaggggtctccaaggtaatgaattcaaatatgg

SEQ ID NO: 124458 - DNA, 73 bp, Homo sapiens
gatgagatttctacatagagattatttctttaggggtctccaaggtaatgaattcaaatatggtggacctgtt

SEQ ID NO: 124459 - DNA, 71 bp, Homo sapiens
tttctacatagagattatttctttaggggtctccaaggtaatgaattcaaatatggtggacctgtttggaa

SEQ ID NO: 124460 - DNA, 69 bp, Homo sapiens
gattatttctttaggggtctccaaggtaatgaattcaaatatggtggacctgtttggaagtttattaga

SEQ ID NO: 124461 - DNA, 70 bp, Homo sapiens
ttaggggtctccaaggtaatgaattcaaatatggtggacctgtttggaagtttattagatccacataatt

SEQ ID NO: 124462 - DNA, 71 bp, Homo sapiens
gtctccaaggtaatgaattcaaatatggtggacctgtttggaagtttattagatccacataatttggaaaa

SEQ ID NO: 124463 - DNA, 76 bp, Homo sapiens
gaattcaaatatggtggacctgtttggaagtttattagatccacataatttggaaaatatgaaagcactcagatca

SEQ ID NO: 124464 - DNA, 76 bp, Homo sapiens
atggtggacctgtttggaagtttattagatccacataatttggaaaatatgaaagcactcagatcaatgctaataa

SEQ ID NO: 124465 - DNA, 77 bp, Homo sapiens
gtttggaagtttattagatccacataatttggaaaatatgaaagcactcagatcaatgctaataattactgaggcac

SEQ ID NO: 124466 - DNA, 77 bp, Homo sapiens
gaagtttattagatccacataatttggaaaatatgaaagcactcagatcaatgctaataattactgaggcactaaaa

SEQ ID NO: 124467 - DNA, 77 bp, Homo sapiens
agatccacataatttggaaaatatgaaagcactcagatcaatgctaataattactgaggcactaaaacattacattt

SEQ ID NO: 124468 - DNA, 75 bp, Homo sapiens
ggaaaatatgaaagcactcagatcaatgctaataattactgaggcactaaaacattacattttaagttaaggtga

SEQ ID NO: 124469 - DNA, 78 bp, Homo sapiens
atgaaagcactcagatcaatgctaataattactgaggcactaaaacattacattttaagttaaggtgagtgctgcaaa

SEQ ID NO: 124470 - DNA, 77 bp, Homo sapiens
tactgaggcactaaaacattacattttaagttaaggtgagtgctgcaaagctctcagccattcctgatttgtttgta

SEQ ID NO: 124471 - DNA, 77 bp, Homo sapiens
aacattacattttaagttaaggtgagtgctgcaaagctctcagccattcctgatttgtttgtagctacacacctata

SEQ ID NO: 124472 - DNA, 76 bp, Homo sapiens
attttaagttaaggtgagtgctgcaaagctctcagccattcctgatttgtttgtagctacacacctatactctcct

SEQ ID NO: 124473 - DNA, 78 bp, Homo sapiens
tctcagccattcctgatttgtttgtagctacacacctatactctccttcatcactctttactaagcttgttataaaca

SEQ ID NO: 124474 - DNA, 75 bp, Homo sapiens
tgatttgtttgtagctacacacctatactctccttcatcactctttactaagcttgttataaacaggttatggaa

SEQ ID NO: 124475 - DNA, 73 bp, Homo sapiens
tgtttgtagctacacacctatactctccttcatcactctttactaagcttgttataaacaggttatggaaccc

SEQ ID NO: 124476 - DNA, 73 bp, Homo sapiens
tacacacctatactctccttcatcactctttactaagcttgttataaacaggttatggaaccctgtgccactt

SEQ ID NO: 124477 - DNA, 69 bp, Homo sapiens
actctttactaagcttgttataaacaggttatggaaccctgtgccactttcctcaacagtgaaccttct

SEQ ID NO: 124478 - DNA, 71 bp, Homo sapiens
tactaagcttgttataaacaggttatggaaccctgtgccactttcctcaacagtgaaccttcttccttgga

SEQ ID NO: 124479 - DNA, 69 bp, Homo sapiens
ttataaacaggttatggaaccctgtgccactttcctcaacagtgaaccttcttccttggactaattttc

SEQ ID NO: 124480 - DNA, 70 bp, Homo sapiens
tgtgccactttcctcaacagtgaaccttcttccttggactaattttccatctttgtaccagtaaaccgtg

SEQ ID NO: 124481 - DNA, 67 bp, Homo sapiens
tttcctcaacagtgaaccttcttccttggactaattttccatctttgtaccagtaaaccgtgggtct

SEQ ID NO: 124482 - DNA, 67 bp, Homo sapiens
aaccttcttccttggactaattttccatctttgtaccagtaaaccgtgggtcttggagagccacgaa

SEQ ID NO: 124483 - DNA, 70 bp, Homo sapiens
cttggactaattttccatctttgtaccagtaaaccgtgggtcttggagagccacgaactaagcactgaaa

SEQ ID NO: 124484 - DNA, 74 bp, Homo sapiens
atctttgtaccagtaaaccgtgggtcttggagagccacgaactaagcactgaaaatatgctgctgtacctattg

SEQ ID NO: 124485 - DNA, 78 bp, Homo sapiens
taaaccgtgggtcttggagagccacgaactaagcactgaaaatatgctgctgtacctattggtgcataacagtcagaa

SEQ ID NO: 124486 - DNA, 77 bp, Homo sapiens
agagccacgaactaagcactgaaaatatgctgctgtacctattggtgcataacagtcagaaatacctttgataaacc

SEQ ID NO: 124487 - DNA, 74 bp, Homo sapiens
aaaatatgctgctgtacctattggtgcataacagtcagaaatacctttgataaacctgggaggcccttccacca

SEQ ID NO: 124488 - DNA, 73 bp, Homo sapiens
tgtacctattggtgcataacagtcagaaatacctttgataaacctgggaggcccttccaccacctgaaattca

SEQ ID NO: 124489 - DNA, 71 bp, Homo sapiens
tattggtgcataacagtcagaaatacctttgataaacctgggaggcccttccaccacctgaaattcaaaaa

SEQ ID NO: 124490 - DNA, 68 bp, Homo sapiens
taacagtcagaaatacctttgataaacctgggaggcccttccaccacctgaaattcaaaaaaactgtc

SEQ ID NO: 124491 - DNA, 66 bp, Homo sapiens
aaatacctttgataaacctgggaggcccttccaccacctgaaattcaaaaaaactgtctgtgtagt

SEQ ID NO: 124492 - DNA, 68 bp, Homo sapiens
ataaacctgggaggcccttccaccacctgaaattcaaaaaaactgtctgtgtagttgctctttaagac

SEQ ID NO: 124493 - DNA, 71 bp, Homo sapiens
caccacctgaaattcaaaaaaactgtctgtgtagttgctctttaagaccaattcttccattaaactgctta

SEQ ID NO: 124494 - DNA, 70 bp, Homo sapiens
caaaaaaactgtctgtgtagttgctctttaagaccaattcttccattaaactgcttaaagtcactttgct

SEQ ID NO: 124495 - DNA, 70 bp, Homo sapiens
aaactgtctgtgtagttgctctttaagaccaattcttccattaaactgcttaaagtcactttgcttttct

SEQ ID NO: 124496 - DNA, 75 bp, Homo sapiens
tgtagttgctctttaagaccaattcttccattaaactgcttaaagtcactttgcttttctttgctatcacagcaa

SEQ ID NO: 124497 - DNA, 75 bp, Homo sapiens
agaccaattcttccattaaactgcttaaagtcactttgcttttctttgctatcacagcaaatatttcagaatctc

SEQ ID NO: 124498 - DNA, 75 bp, Homo sapiens
attcttccattaaactgcttaaagtcactttgcttttctttgctatcacagcaaatatttcagaatctcccatgg

SEQ ID NO: 124499 - DNA, 78 bp, Homo sapiens
ttttctttgctatcacagcaaatatttcagaatctcccatggtgaggaatccccgacagatagcctctcctacacaat

SEQ ID NO: 124500 - DNA, 80 bp, Homo sapiens
aatatttcagaatctcccatggtgaggaatccccgacagatagcctctcctacacaattcacagctctgcacctgtatgt

SEQ ID NO: 124501 - DNA, 83 bp, Homo sapiens
aatctcccatggtgaggaatccccgacagatagcctctcctacacaattcacagctctgcacctgtatgttgcactatcagaa

SEQ ID NO: 124502 - DNA, 84 bp, Homo sapiens
atggtgaggaatccccgacagatagcctctcctacacaattcacagctctgcacctgtatgttgcactatcagaaagacagaca

SEQ ID NO: 124503 - DNA, 81 bp, Homo sapiens
agatagcctctcctacacaattcacagctctgcacctgtatgttgcactatcagaaagacagacatttcgaattttaagag

SEQ ID NO: 124504 - DNA, 79 bp, Homo sapiens
attcacagctctgcacctgtatgttgcactatcagaaagacagacatttcgaattttaagagtgtgacttcccttctcc

SEQ ID NO: 124505 - DNA, 76 bp, Homo sapiens
acctgtatgttgcactatcagaaagacagacatttcgaattttaagagtgtgacttcccttctcctcgctaatcac

SEQ ID NO: 124506 - DNA, 76 bp, Homo sapiens
tgcactatcagaaagacagacatttcgaattttaagagtgtgacttcccttctcctcgctaatcacgtatttaata

SEQ ID NO: 124507 - DNA, 72 bp, Homo sapiens
aaagacagacatttcgaattttaagagtgtgacttcccttctcctcgctaatcacgtatttaatattatctg

SEQ ID NO: 124508 - DNA, 74 bp, Homo sapiens
atttcgaattttaagagtgtgacttcccttctcctcgctaatcacgtatttaatattatctggctcaatacaca

SEQ ID NO: 124509 - DNA, 76 bp, Homo sapiens
gaattttaagagtgtgacttcccttctcctcgctaatcacgtatttaatattatctggctcaatacacatatattc

SEQ ID NO: 124510 - DNA, 75 bp, Homo sapiens
tctcctcgctaatcacgtatttaatattatctggctcaatacacatatattctttataccacttaacttcgggag

SEQ ID NO: 124511 - DNA, 74 bp, Homo sapiens
gctaatcacgtatttaatattatctggctcaatacacatatattctttataccacttaacttcgggagtcggga

SEQ ID NO: 124512 - DNA, 76 bp, Homo sapiens
ttatctggctcaatacacatatattctttataccacttaacttcgggagtcgggatccctatgactgaacatttga

SEQ ID NO: 124513 - DNA, 73 bp, Homo sapiens
atattctttataccacttaacttcgggagtcgggatccctatgactgaacatttgaatacagcatctgaattt

SEQ ID NO: 124514 - DNA, 73 bp, Homo sapiens
taccacttaacttcgggagtcgggatccctatgactgaacatttgaatacagcatctgaattttctggaattt

SEQ ID NO: 124515 - DNA, 75 bp, Homo sapiens
gaatacagcatctgaattttctggaattttaaaatcacaaataggcattataaagcgaggaggcatttcaaatac

SEQ ID NO: 124516 - DNA, 74 bp, Homo sapiens
agcatctgaattttctggaattttaaaatcacaaataggcattataaagcgaggaggcatttcaaatacttcta

SEQ ID NO: 124517 - DNA, 70 bp, Homo sapiens
ctggaattttaaaatcacaaataggcattataaagcgaggaggcatttcaaatacttctaaatcaatttt

SEQ ID NO: 124518 - DNA, 70 bp, Homo sapiens
ttaaaatcacaaataggcattataaagcgaggaggcatttcaaatacttctaaatcaatttttagttctt

SEQ ID NO: 124519 - DNA, 71 bp, Homo sapiens
taggcattataaagcgaggaggcatttcaaatacttctaaatcaatttttagttctttgtcttctccctcc

SEQ ID NO: 124520 - DNA, 70 bp, Homo sapiens
ggaggcatttcaaatacttctaaatcaatttttagttctttgtcttctccctcccttgaatccatatttg

SEQ ID NO: 124521 - DNA, 71 bp, Homo sapiens
tcaaatacttctaaatcaatttttagttctttgtcttctccctcccttgaatccatatttggatctacaaa

SEQ ID NO: 124522 - DNA, 70 bp, Homo sapiens
atcaatttttagttctttgtcttctccctcccttgaatccatatttggatctacaaaattaaatggaaga

SEQ ID NO: 124523 - DNA, 74 bp, Homo sapiens
tagttctttgtcttctccctcccttgaatccatatttggatctacaaaattaaatggaagaacatctagactca

SEQ ID NO: 124524 - DNA, 74 bp, Homo sapiens
cttctccctcccttgaatccatatttggatctacaaaattaaatggaagaacatctagactcacaatcatactt

SEQ ID NO: 124525 - DNA, 75 bp, Homo sapiens
cccttgaatccatatttggatctacaaaattaaatggaagaacatctagactcacaatcatacttttatggtcag

SEQ ID NO: 124526 - DNA, 75 bp, Homo sapiens
catatttggatctacaaaattaaatggaagaacatctagactcacaatcatacttttatggtcaggagtaaattc

SEQ ID NO: 124527 - DNA, 74 bp, Homo sapiens
aaatggaagaacatctagactcacaatcatacttttatggtcaggagtaaattcgggaactgtcactattttca

SEQ ID NO: 124528 - DNA, 71 bp, Homo sapiens
atcatacttttatggtcaggagtaaattcgggaactgtcactattttcacctgcttctcaaattctttaac

SEQ ID NO: 124529 - DNA, 70 bp, Homo sapiens
tcaggagtaaattcgggaactgtcactattttcacctgcttctcaaattctttaacgtctttttcactta

SEQ ID NO: 124530 - DNA, 69 bp, Homo sapiens
gtaaattcgggaactgtcactattttcacctgcttctcaaattctttaacgtctttttcacttaattca

SEQ ID NO: 124531 - DNA, 71 bp, Homo sapiens
ttcacctgcttctcaaattctttaacgtctttttcacttaattcaacttccaggacaatttcttgaggaga

SEQ ID NO: 124532 - DNA, 69 bp, Homo sapiens
tctcaaattctttaacgtctttttcacttaattcaacttccaggacaatttcttgaggagaaggtgttc

SEQ ID NO: 124533 - DNA, 73 bp, Homo sapiens
tttttcacttaattcaacttccaggacaatttcttgaggagaaggtgttcttgatgatgtggtgtgttccaaa

SEQ ID NO: 124534 - DNA, 73 bp, Homo sapiens
acttaattcaacttccaggacaatttcttgaggagaaggtgttcttgatgatgtggtgtgttccaaatcaaac

SEQ ID NO: 124535 - DNA, 82 bp, Homo sapiens
tccaggacaatttcttgaggagaaggtgttcttgatgatgtggtgtgttccaaatcaaactccatgacatgctgatgtgtta

SEQ ID NO: 124536 - DNA, 80 bp, Homo sapiens
aatttcttgaggagaaggtgttcttgatgatgtggtgtgttccaaatcaaactccatgacatgctgatgtgttactggag

SEQ ID NO: 124537 - DNA, 81 bp, Homo sapiens
aaggtgttcttgatgatgtggtgtgttccaaatcaaactccatgacatgctgatgtgttactggaggtggtagtgccacca

SEQ ID NO: 124538 - DNA, 82 bp, Homo sapiens
ttcttgatgatgtggtgtgttccaaatcaaactccatgacatgctgatgtgttactggaggtggtagtgccaccactctttc

SEQ ID NO: 124539 - DNA, 79 bp, Homo sapiens
atgtggtgtgttccaaatcaaactccatgacatgctgatgtgttactggaggtggtagtgccaccactctttcttcctg

SEQ ID NO: 124540 - DNA, 79 bp, Homo sapiens
aaatcaaactccatgacatgctgatgtgttactggaggtggtagtgccaccactctttcttcctggggcattatgtcta

SEQ ID NO: 124541 - DNA, 78 bp, Homo sapiens
atgctgatgtgttactggaggtggtagtgccaccactctttcttcctggggcattatgtctacatttgcaaagctctt

SEQ ID NO: 124542 - DNA, 81 bp, Homo sapiens
ttcttcctggggcattatgtctacatttgcaaagctctttgcttcccctatgatgtttacagcatgacacatgtactctcc

SEQ ID NO: 124543 - DNA, 78 bp, Homo sapiens
attatgtctacatttgcaaagctctttgcttcccctatgatgtttacagcatgacacatgtactctcccccttctcct

SEQ ID NO: 124544 - DNA, 77 bp, Homo sapiens
tacatttgcaaagctctttgcttcccctatgatgtttacagcatgacacatgtactctcccccttctcctttttgaa

SEQ ID NO: 124545 - DNA, 75 bp, Homo sapiens
ccctatgatgtttacagcatgacacatgtactctcccccttctcctttttgaatgttagaaatttccagtgaaca

SEQ ID NO: 124546 - DNA, 75 bp, Homo sapiens
atgtttacagcatgacacatgtactctcccccttctcctttttgaatgttagaaatttccagtgaacacacatta

SEQ ID NO: 124547 - DNA, 72 bp, Homo sapiens
atgacacatgtactctcccccttctcctttttgaatgttagaaatttccagtgaacacacattacccactct

SEQ ID NO: 124548 - DNA, 69 bp, Homo sapiens
tactctcccccttctcctttttgaatgttagaaatttccagtgaacacacattacccactctttccatt

SEQ ID NO: 124549 - DNA, 69 bp, Homo sapiens
cccttctcctttttgaatgttagaaatttccagtgaacacacattacccactctttccattttgattct

SEQ ID NO: 124550 - DNA, 75 bp, Homo sapiens
tgaatgttagaaatttccagtgaacacacattacccactctttccattttgattctttcatctggctctagtaaa

SEQ ID NO: 124551 - DNA, 73 bp, Homo sapiens
gaaatttccagtgaacacacattacccactctttccattttgattctttcatctggctctagtaaagatttat

SEQ ID NO: 124552 - DNA, 74 bp, Homo sapiens
gtgaacacacattacccactctttccattttgattctttcatctggctctagtaaagatttatttcgataccat

SEQ ID NO: 124553 - DNA, 74 bp, Homo sapiens
cacattacccactctttccattttgattctttcatctggctctagtaaagatttatttcgataccatttcacac

SEQ ID NO: 124554 - DNA, 74 bp, Homo sapiens
tttccattttgattctttcatctggctctagtaaagatttatttcgataccatttcacaccaggaactggaaga

SEQ ID NO: 124555 - DNA, 74 bp, Homo sapiens
tttgattctttcatctggctctagtaaagatttatttcgataccatttcacaccaggaactggaagaccttcaa

SEQ ID NO: 124556 - DNA, 74 bp, Homo sapiens
ttcatctggctctagtaaagatttatttcgataccatttcacaccaggaactggaagaccttcaacttcaacaa

SEQ ID NO: 124557 - DNA, 72 bp, Homo sapiens
taaagatttatttcgataccatttcacaccaggaactggaagaccttcaacttcaacaatgaagcctagtgt

SEQ ID NO: 124558 - DNA, 72 bp, Homo sapiens
atttatttcgataccatttcacaccaggaactggaagaccttcaacttcaacaatgaagcctagtgttgtgt

SEQ ID NO: 124559 - DNA, 72 bp, Homo sapiens
atttcacaccaggaactggaagaccttcaacttcaacaatgaagcctagtgttgtgttttcatataccttcc

SEQ ID NO: 124560 - DNA, 71 bp, Homo sapiens
aacttcaacaatgaagcctagtgttgtgttttcatataccttccttttggtcagaggttcaataaaagatg

SEQ ID NO: 124561 - DNA, 73 bp, Homo sapiens
aatgaagcctagtgttgtgttttcatataccttccttttggtcagaggttcaataaaagatggaggcatttca

SEQ ID NO: 124562 - DNA, 71 bp, Homo sapiens
agtgttgtgttttcatataccttccttttggtcagaggttcaataaaagatggaggcatttcattgtcttt

SEQ ID NO: 124563 - DNA, 73 bp, Homo sapiens
gttttcatataccttccttttggtcagaggttcaataaaagatggaggcatttcattgtcttttggctcaatg

SEQ ID NO: 124564 - DNA, 76 bp, Homo sapiens
taaaagatggaggcatttcattgtcttttggctcaatggcttcattgggtgtaccaaatgaatcggaacgccatat

SEQ ID NO: 124565 - DNA, 77 bp, Homo sapiens
atggaggcatttcattgtcttttggctcaatggcttcattgggtgtaccaaatgaatcggaacgccatatttcataa

SEQ ID NO: 124566 - DNA, 76 bp, Homo sapiens
tttcattgtcttttggctcaatggcttcattgggtgtaccaaatgaatcggaacgccatatttcataagctgaacc

SEQ ID NO: 124567 - DNA, 75 bp, Homo sapiens
ttttggctcaatggcttcattgggtgtaccaaatgaatcggaacgccatatttcataagctgaacccctctcttc

SEQ ID NO: 124568 - DNA, 75 bp, Homo sapiens
ttcattgggtgtaccaaatgaatcggaacgccatatttcataagctgaacccctctcttctgtaggtgtgtagaa

SEQ ID NO: 124569 - DNA, 76 bp, Homo sapiens
gtgtaccaaatgaatcggaacgccatatttcataagctgaacccctctcttctgtaggtgtgtagaaatgctcatt

SEQ ID NO: 124570 - DNA, 76 bp, Homo sapiens
aaatgaatcggaacgccatatttcataagctgaacccctctcttctgtaggtgtgtagaaatgctcatttggtgta

SEQ ID NO: 124571 - DNA, 73 bp, Homo sapiens
ccctctcttctgtaggtgtgtagaaatgctcatttggtgtaccgtcttccctttctatttttgatggatatgt

SEQ ID NO: 124572 - DNA, 73 bp, Homo sapiens
tcttctgtaggtgtgtagaaatgctcatttggtgtaccgtcttccctttctatttttgatggatatgttttaa

SEQ ID NO: 124573 - DNA, 70 bp, Homo sapiens
gtgtagaaatgctcatttggtgtaccgtcttccctttctatttttgatggatatgttttaaaagtaccag

SEQ ID NO: 124574 - DNA, 67 bp, Homo sapiens
tcatttggtgtaccgtcttccctttctatttttgatggatatgttttaaaagtaccagtggggtttg

SEQ ID NO: 124575 - DNA, 70 bp, Homo sapiens
atttttgatggatatgttttaaaagtaccagtggggtttggtcctccagtaggaatagaatatctctcta

SEQ ID NO: 124576 - DNA, 74 bp, Homo sapiens
ggtttggtcctccagtaggaatagaatatctctctagtgcctcccctgggggtgtggaatatcgctctagagtc

SEQ ID NO: 124577 - DNA, 76 bp, Homo sapiens
ggtcctccagtaggaatagaatatctctctagtgcctcccctgggggtgtggaatatcgctctagagtctctcctg

SEQ ID NO: 124578 - DNA, 75 bp, Homo sapiens
aatagaatatctctctagtgcctcccctgggggtgtggaatatcgctctagagtctctcctgggggtgtggagta

SEQ ID NO: 124579 - DNA, 77 bp, Homo sapiens
atatctctctagtgcctcccctgggggtgtggaatatcgctctagagtctctcctgggggtgtggagtatctctcca

SEQ ID NO: 124580 - DNA, 76 bp, Homo sapiens
agtgcctcccctgggggtgtggaatatcgctctagagtctctcctgggggtgtggagtatctctccagagtctctc

SEQ ID NO: 124581 - DNA, 77 bp, Homo sapiens
ggtgtggaatatcgctctagagtctctcctgggggtgtggagtatctctccagagtctctcctgggggtgtggaata

SEQ ID NO: 124582 - DNA, 78 bp, Homo sapiens
aatatcgctctagagtctctcctgggggtgtggagtatctctccagagtctctcctgggggtgtggaatatctctcta

SEQ ID NO: 124583 - DNA, 79 bp, Homo sapiens
tctagagtctctcctgggggtgtggagtatctctccagagtctctcctgggggtgtggaatatctctctagagtctctc

SEQ ID NO: 124584 - DNA, 76 bp, Homo sapiens
tgggggtgtggagtatctctccagagtctctcctgggggtgtggaatatctctctagagtctctcctgggggtgtg

SEQ ID NO: 124585 - DNA, 78 bp, Homo sapiens
agtatctctccagagtctctcctgggggtgtggaatatctctctagagtctctcctgggggtgtggagtatctctcta

SEQ ID NO: 124586 - DNA, 79 bp, Homo sapiens
tccagagtctctcctgggggtgtggaatatctctctagagtctctcctgggggtgtggagtatctctctagagtctctc

SEQ ID NO: 124587 - DNA, 81 bp, Homo sapiens
tggaatatctctctagagtctctcctgggggtgtggagtatctctctagagtctctcctggaggtgtggagtatctctcta

SEQ ID NO: 124588 - DNA, 81 bp, Homo sapiens
tatctctctagagtctctcctgggggtgtggagtatctctctagagtctctcctggaggtgtggagtatctctctagtgtc

SEQ ID NO: 124589 - DNA, 77 bp, Homo sapiens
agtctctcctgggggtgtggagtatctctctagagtctctcctggaggtgtggagtatctctctagtgtctcccctg

SEQ ID NO: 124590 - DNA, 78 bp, Homo sapiens
gtgtggagtatctctctagagtctctcctggaggtgtggagtatctctctagtgtctcccctgggggtgtggagtatc

SEQ ID NO: 124591 - DNA, 76 bp, Homo sapiens
agtatctctctagagtctctcctggaggtgtggagtatctctctagtgtctcccctgggggtgtggagtatctttc

SEQ ID NO: 124592 - DNA, 76 bp, Homo sapiens
tagagtctctcctggaggtgtggagtatctctctagtgtctcccctgggggtgtggagtatctttctcctacctca

SEQ ID NO: 124593 - DNA, 73 bp, Homo sapiens
tggaggtgtggagtatctctctagtgtctcccctgggggtgtggagtatctttctcctacctcaccttcggaa

SEQ ID NO: 124594 - DNA, 72 bp, Homo sapiens
gtatctctctagtgtctcccctgggggtgtggagtatctttctcctacctcaccttcggaaggtgttgaata

SEQ ID NO: 124595 - DNA, 71 bp, Homo sapiens
tggagtatctttctcctacctcaccttcggaaggtgttgaatatctttcagcaacttcccctaaaggtgtg

SEQ ID NO: 124596 - DNA, 70 bp, Homo sapiens
ttctcctacctcaccttcggaaggtgttgaatatctttcagcaacttcccctaaaggtgtggaatatctt

SEQ ID NO: 124597 - DNA, 71 bp, Homo sapiens
tacctcaccttcggaaggtgttgaatatctttcagcaacttcccctaaaggtgtggaatatctttcaactg

SEQ ID NO: 124598 - DNA, 74 bp, Homo sapiens
aggtgttgaatatctttcagcaacttcccctaaaggtgtggaatatctttcaactgtctcacctcctgaatgta

SEQ ID NO: 124599 - DNA, 74 bp, Homo sapiens
aatatctttcagcaacttcccctaaaggtgtggaatatctttcaactgtctcacctcctgaatgtattgaggat

SEQ ID NO: 124600 - DNA, 72 bp, Homo sapiens
caacttcccctaaaggtgtggaatatctttcaactgtctcacctcctgaatgtattgaggattgtttagtta

SEQ ID NO: 124601 - DNA, 76 bp, Homo sapiens
taaaggtgtggaatatctttcaactgtctcacctcctgaatgtattgaggattgtttagttatatctgaaggatta

SEQ ID NO: 124602 - DNA, 76 bp, Homo sapiens
gtgtggaatatctttcaactgtctcacctcctgaatgtattgaggattgtttagttatatctgaaggattaaaata

SEQ ID NO: 124603 - DNA, 74 bp, Homo sapiens
ctttcaactgtctcacctcctgaatgtattgaggattgtttagttatatctgaaggattaaaatataagtcagg

SEQ ID NO: 124604 - DNA, 74 bp, Homo sapiens
tcacctcctgaatgtattgaggattgtttagttatatctgaaggattaaaatataagtcaggggactttggaga

SEQ ID NO: 124605 - DNA, 73 bp, Homo sapiens
ctgaatgtattgaggattgtttagttatatctgaaggattaaaatataagtcaggggactttggagattcaaa

SEQ ID NO: 124606 - DNA, 72 bp, Homo sapiens
gaggattgtttagttatatctgaaggattaaaatataagtcaggggactttggagattcaaaatattcaaca

SEQ ID NO: 124607 - DNA, 73 bp, Homo sapiens
agttatatctgaaggattaaaatataagtcaggggactttggagattcaaaatattcaacagatgatggtggg

SEQ ID NO: 124608 - DNA, 72 bp, Homo sapiens
ggattaaaatataagtcaggggactttggagattcaaaatattcaacagatgatggtggggtataaaactga

SEQ ID NO: 124609 - DNA, 74 bp, Homo sapiens
aatataagtcaggggactttggagattcaaaatattcaacagatgatggtggggtataaaactgatctaactca

SEQ ID NO: 124610 - DNA, 76 bp, Homo sapiens
ggactttggagattcaaaatattcaacagatgatggtggggtataaaactgatctaactcagatatttcttcactg

SEQ ID NO: 124611 - DNA, 74 bp, Homo sapiens
aaaatattcaacagatgatggtggggtataaaactgatctaactcagatatttcttcactggttgtacttccca

SEQ ID NO: 124612 - DNA, 74 bp, Homo sapiens
agatgatggtggggtataaaactgatctaactcagatatttcttcactggttgtacttcccacaccaatggaaa

SEQ ID NO: 124613 - DNA, 77 bp, Homo sapiens
gtataaaactgatctaactcagatatttcttcactggttgtacttcccacaccaatggaaatgtcagactcaggaga

SEQ ID NO: 124614 - DNA, 75 bp, Homo sapiens
agatatttcttcactggttgtacttcccacaccaatggaaatgtcagactcaggagaaagtggacgacctagtga

SEQ ID NO: 124615 - DNA, 74 bp, Homo sapiens
ttcactggttgtacttcccacaccaatggaaatgtcagactcaggagaaagtggacgacctagtgattcctgtt

SEQ ID NO: 124616 - DNA, 75 bp, Homo sapiens
tgtacttcccacaccaatggaaatgtcagactcaggagaaagtggacgacctagtgattcctgtttctggttgta

SEQ ID NO: 124617 - DNA, 76 bp, Homo sapiens
accaatggaaatgtcagactcaggagaaagtggacgacctagtgattcctgtttctggttgtagtattcatacaca

SEQ ID NO: 124618 - DNA, 76 bp, Homo sapiens
aaatgtcagactcaggagaaagtggacgacctagtgattcctgtttctggttgtagtattcatacacagtgttgaa

SEQ ID NO: 124619 - DNA, 73 bp, Homo sapiens
caggagaaagtggacgacctagtgattcctgtttctggttgtagtattcatacacagtgttgaaagttacttc

SEQ ID NO: 124620 - DNA, 75 bp, Homo sapiens
tagtgattcctgtttctggttgtagtattcatacacagtgttgaaagttacttcttccacctccattgaagtgat

SEQ ID NO: 124621 - DNA, 76 bp, Homo sapiens
ttcctgtttctggttgtagtattcatacacagtgttgaaagttacttcttccacctccattgaagtgattgattca

SEQ ID NO: 124622 - DNA, 77 bp, Homo sapiens
attcatacacagtgttgaaagttacttcttccacctccattgaagtgattgattcactctggacaagctttgcctgg

SEQ ID NO: 124623 - DNA, 77 bp, Homo sapiens
tgaaagttacttcttccacctccattgaagtgattgattcactctggacaagctttgcctggtctctggtgtcttta

SEQ ID NO: 124624 - DNA, 77 bp, Homo sapiens
tccattgaagtgattgattcactctggacaagctttgcctggtctctggtgtctttagtttcaggaacctcacgctt

SEQ ID NO: 124625 - DNA, 77 bp, Homo sapiens
aagtgattgattcactctggacaagctttgcctggtctctggtgtctttagtttcaggaacctcacgctttccagca

SEQ ID NO: 124626 - DNA, 75 bp, Homo sapiens
actctggacaagctttgcctggtctctggtgtctttagtttcaggaacctcacgctttccagcagcaagtaaata

SEQ ID NO: 124627 - DNA, 75 bp, Homo sapiens
tggtctctggtgtctttagtttcaggaacctcacgctttccagcagcaagtaaatattgtgttagggaggtctca

SEQ ID NO: 124628 - DNA, 79 bp, Homo sapiens
tttcaggaacctcacgctttccagcagcaagtaaatattgtgttagggaggtctcagattctgctgcctcagtggtatg

SEQ ID NO: 124629 - DNA, 82 bp, Homo sapiens
tcacgctttccagcagcaagtaaatattgtgttagggaggtctcagattctgctgcctcagtggtatgtgcctcatctaatt

SEQ ID NO: 124630 - DNA, 80 bp, Homo sapiens
agcagcaagtaaatattgtgttagggaggtctcagattctgctgcctcagtggtatgtgcctcatctaatttaggaatat

SEQ ID NO: 124631 - DNA, 76 bp, Homo sapiens
aagtaaatattgtgttagggaggtctcagattctgctgcctcagtggtatgtgcctcatctaatttaggaatattt

SEQ ID NO: 124632 - DNA, 76 bp, Homo sapiens
attctgctgcctcagtggtatgtgcctcatctaatttaggaatattttgagaaaaactagtttctatcatttctcc

SEQ ID NO: 124633 - DNA, 75 bp, Homo sapiens
ctgcctcagtggtatgtgcctcatctaatttaggaatattttgagaaaaactagtttctatcatttctccttcta

SEQ ID NO: 124634 - DNA, 72 bp, Homo sapiens
ggtatgtgcctcatctaatttaggaatattttgagaaaaactagtttctatcatttctccttctaaagtgga

SEQ ID NO: 124635 - DNA, 71 bp, Homo sapiens
tcatctaatttaggaatattttgagaaaaactagtttctatcatttctccttctaaagtggagaaagaagc

SEQ ID NO: 124636 - DNA, 71 bp, Homo sapiens
gagaaaaactagtttctatcatttctccttctaaagtggagaaagaagcttcattctgaacttgaacttct

SEQ ID NO: 124637 - DNA, 73 bp, Homo sapiens
actagtttctatcatttctccttctaaagtggagaaagaagcttcattctgaacttgaacttcttcataacat

SEQ ID NO: 124638 - DNA, 76 bp, Homo sapiens
gagaaagaagcttcattctgaacttgaacttcttcataacatttttcttctccagaggcatgaatgtttgtactta

SEQ ID NO: 124639 - DNA, 76 bp, Homo sapiens
tcattctgaacttgaacttcttcataacatttttcttctccagaggcatgaatgtttgtacttatttgttcacctg

SEQ ID NO: 124640 - DNA, 80 bp, Homo sapiens
agaggcatgaatgtttgtacttatttgttcacctggattctgttgttcttcagtcatcaagagtgggaagcactgactca

SEQ ID NO: 124641 - DNA, 78 bp, Homo sapiens
atgaatgtttgtacttatttgttcacctggattctgttgttcttcagtcatcaagagtgggaagcactgactcaggga

SEQ ID NO: 124642 - DNA, 81 bp, Homo sapiens
tacttatttgttcacctggattctgttgttcttcagtcatcaagagtgggaagcactgactcagggagagctgtctatgga

SEQ ID NO: 124643 - DNA, 84 bp, Homo sapiens
ttcacctggattctgttgttcttcagtcatcaagagtgggaagcactgactcagggagagctgtctatggagtgtgtcagcttc

SEQ ID NO: 124644 - DNA, 85 bp, Homo sapiens
attctgttgttcttcagtcatcaagagtgggaagcactgactcagggagagctgtctatggagtgtgtcagcttcctgaacatca

SEQ ID NO: 124645 - DNA, 84 bp, Homo sapiens
agtcatcaagagtgggaagcactgactcagggagagctgtctatggagtgtgtcagcttcctgaacatcacctctgtggtcttc

SEQ ID NO: 124646 - DNA, 83 bp, Homo sapiens
actgactcagggagagctgtctatggagtgtgtcagcttcctgaacatcacctctgtggtcttccaaagtggcatctgtatat

SEQ ID NO: 124647 - DNA, 82 bp, Homo sapiens
agggagagctgtctatggagtgtgtcagcttcctgaacatcacctctgtggtcttccaaagtggcatctgtatattcctgtg

SEQ ID NO: 124648 - DNA, 81 bp, Homo sapiens
ctatggagtgtgtcagcttcctgaacatcacctctgtggtcttccaaagtggcatctgtatattcctgtgtcccaccatcc

SEQ ID NO: 124649 - DNA, 78 bp, Homo sapiens
agcttcctgaacatcacctctgtggtcttccaaagtggcatctgtatattcctgtgtcccaccatcctgctttggaaa

SEQ ID NO: 124650 - DNA, 79 bp, Homo sapiens
aacatcacctctgtggtcttccaaagtggcatctgtatattcctgtgtcccaccatcctgctttggaaatgctgccaac

SEQ ID NO: 124651 - DNA, 80 bp, Homo sapiens
aaagtggcatctgtatattcctgtgtcccaccatcctgctttggaaatgctgccaactctggttctagagtgcattcttc

SEQ ID NO: 124652 - DNA, 79 bp, Homo sapiens
atctgtatattcctgtgtcccaccatcctgctttggaaatgctgccaactctggttctagagtgcattcttcttccatt

SEQ ID NO: 124653 - DNA, 79 bp, Homo sapiens
tattcctgtgtcccaccatcctgctttggaaatgctgccaactctggttctagagtgcattcttcttccatttcaccaa

SEQ ID NO: 124654 - DNA, 74 bp, Homo sapiens
accatcctgctttggaaatgctgccaactctggttctagagtgcattcttcttccatttcaccaacccctaaag

SEQ ID NO: 124655 - DNA, 71 bp, Homo sapiens
actctggttctagagtgcattcttcttccatttcaccaacccctaaaggcttttcctcacttgctgctttt

SEQ ID NO: 124656 - DNA, 74 bp, Homo sapiens
tagagtgcattcttcttccatttcaccaacccctaaaggcttttcctcacttgctgcttttttcaaatgtgaga

SEQ ID NO: 124657 - DNA, 71 bp, Homo sapiens
ttcttccatttcaccaacccctaaaggcttttcctcacttgctgcttttttcaaatgtgagatggaacttc

SEQ ID NO: 124658 - DNA, 70 bp, Homo sapiens
accaacccctaaaggcttttcctcacttgctgcttttttcaaatgtgagatggaacttctgcctccattt

SEQ ID NO: 124659 - DNA, 74 bp, Homo sapiens
taaaggcttttcctcacttgctgcttttttcaaatgtgagatggaacttctgcctccattttctagaggacaac

SEQ ID NO: 124660 - DNA, 75 bp, Homo sapiens
ttttcctcacttgctgcttttttcaaatgtgagatggaacttctgcctccattttctagaggacaacttttctca

SEQ ID NO: 124661 - DNA, 75 bp, Homo sapiens
tgcttttttcaaatgtgagatggaacttctgcctccattttctagaggacaacttttctcagaaagatcagtttc

SEQ ID NO: 124662 - DNA, 76 bp, Homo sapiens
tttcaaatgtgagatggaacttctgcctccattttctagaggacaacttttctcagaaagatcagtttcttctata

SEQ ID NO: 124663 - DNA, 77 bp, Homo sapiens
atggaacttctgcctccattttctagaggacaacttttctcagaaagatcagtttcttctatatctgcagatgaggt

SEQ ID NO: 124664 - DNA, 75 bp, Homo sapiens
cctccattttctagaggacaacttttctcagaaagatcagtttcttctatatctgcagatgaggttggaagtagg

SEQ ID NO: 124665 - DNA, 78 bp, Homo sapiens
ttttctagaggacaacttttctcagaaagatcagtttcttctatatctgcagatgaggttggaagtagggcacatgat

SEQ ID NO: 124666 - DNA, 79 bp, Homo sapiens
acttttctcagaaagatcagtttcttctatatctgcagatgaggttggaagtagggcacatgattcactatagatttct

SEQ ID NO: 124667 - DNA, 79 bp, Homo sapiens
agaaagatcagtttcttctatatctgcagatgaggttggaagtagggcacatgattcactatagatttcttcagaaaag

SEQ ID NO: 124668 - DNA, 77 bp, Homo sapiens
agtttcttctatatctgcagatgaggttggaagtagggcacatgattcactatagatttcttcagaaaaggatttaa

SEQ ID NO: 124669 - DNA, 74 bp, Homo sapiens
gatgaggttggaagtagggcacatgattcactatagatttcttcagaaaaggatttaagagaaagatcagtttt

SEQ ID NO: 124670 - DNA, 72 bp, Homo sapiens
ggaagtagggcacatgattcactatagatttcttcagaaaaggatttaagagaaagatcagtttttaaaatg

SEQ ID NO: 124671 - DNA, 69 bp, Homo sapiens
tagatttcttcagaaaaggatttaagagaaagatcagtttttaaaatgtctaagttttgttcctgtaca

SEQ ID NO: 124672 - DNA, 69 bp, Homo sapiens
tcagaaaaggatttaagagaaagatcagtttttaaaatgtctaagttttgttcctgtacatgtcggact

SEQ ID NO: 124673 - DNA, 68 bp, Homo sapiens
gagaaagatcagtttttaaaatgtctaagttttgttcctgtacatgtcggacttctttttctaaagaa

SEQ ID NO: 124674 - DNA, 69 bp, Homo sapiens
ttaaaatgtctaagttttgttcctgtacatgtcggacttctttttctaaagaaatggaattttcatcaa

SEQ ID NO: 124675 - DNA, 69 bp, Homo sapiens
gtctaagttttgttcctgtacatgtcggacttctttttctaaagaaatggaattttcatcaatactact

SEQ ID NO: 124676 - DNA, 71 bp, Homo sapiens
ttgttcctgtacatgtcggacttctttttctaaagaaatggaattttcatcaatactacttttctccacca

SEQ ID NO: 124677 - DNA, 71 bp, Homo sapiens
tacatgtcggacttctttttctaaagaaatggaattttcatcaatactacttttctccaccatagttctat

SEQ ID NO: 124678 - DNA, 71 bp, Homo sapiens
tttttctaaagaaatggaattttcatcaatactacttttctccaccatagttctatttgaaagctcttgac

SEQ ID NO: 124679 - DNA, 72 bp, Homo sapiens
gaaatggaattttcatcaatactacttttctccaccatagttctatttgaaagctcttgactggaagaaatt

SEQ ID NO: 124680 - DNA, 75 bp, Homo sapiens
tttcatcaatactacttttctccaccatagttctatttgaaagctcttgactggaagaaatttcttgactggcaa

SEQ ID NO: 124681 - DNA, 74 bp, Homo sapiens
agttctatttgaaagctcttgactggaagaaatttcttgactggcaaatacattattttgcacacttttagaga

SEQ ID NO: 124682 - DNA, 77 bp, Homo sapiens
ttgaaagctcttgactggaagaaatttcttgactggcaaatacattattttgcacacttttagagatattgtgtgtg

SEQ ID NO: 124683 - DNA, 74 bp, Homo sapiens
atttcttgactggcaaatacattattttgcacacttttagagatattgtgtgtgtcaggttgtaacgtttcagg

SEQ ID NO: 124684 - DNA, 74 bp, Homo sapiens
tggcaaatacattattttgcacacttttagagatattgtgtgtgtcaggttgtaacgtttcagggctaggaatt

SEQ ID NO: 124685 - DNA, 71 bp, Homo sapiens
agatattgtgtgtgtcaggttgtaacgtttcagggctaggaattttttctttataatgtatttcctgctgt

SEQ ID NO: 124686 - DNA, 69 bp, Homo sapiens
tgtgtcaggttgtaacgtttcagggctaggaattttttctttataatgtatttcctgctgttccctagt

SEQ ID NO: 124687 - DNA, 68 bp, Homo sapiens
gttgtaacgtttcagggctaggaattttttctttataatgtatttcctgctgttccctagtttcttgc

SEQ ID NO: 124688 - DNA, 68 bp, Homo sapiens
gtttcagggctaggaattttttctttataatgtatttcctgctgttccctagtttcttgcccttggaa

SEQ ID NO: 124689 - DNA, 71 bp, Homo sapiens
aattttttctttataatgtatttcctgctgttccctagtttcttgcccttggaactccagagctggatctc

SEQ ID NO: 124690 - DNA, 77 bp, Homo sapiens
tataatgtatttcctgctgttccctagtttcttgcccttggaactccagagctggatctcctatatgagaatacatt

SEQ ID NO: 124691 - DNA, 75 bp, Homo sapiens
tatttcctgctgttccctagtttcttgcccttggaactccagagctggatctcctatatgagaatacatttgttt

SEQ ID NO: 124692 - DNA, 76 bp, Homo sapiens
tgttccctagtttcttgcccttggaactccagagctggatctcctatatgagaatacatttgttttagatcaaata

SEQ ID NO: 124693 - DNA, 76 bp, Homo sapiens
agtttcttgcccttggaactccagagctggatctcctatatgagaatacatttgttttagatcaaatacaatgttc

SEQ ID NO: 124694 - DNA, 82 bp, Homo sapiens
ttggaactccagagctggatctcctatatgagaatacatttgttttagatcaaatacaatgttctcagtgtcagcaggatgt

SEQ ID NO: 124695 - DNA, 80 bp, Homo sapiens
agctggatctcctatatgagaatacatttgttttagatcaaatacaatgttctcagtgtcagcaggatgttggattttaa

SEQ ID NO: 124696 - DNA, 77 bp, Homo sapiens
cctatatgagaatacatttgttttagatcaaatacaatgttctcagtgtcagcaggatgttggattttaaaataagc

SEQ ID NO: 124697 - DNA, 76 bp, Homo sapiens
ttttagatcaaatacaatgttctcagtgtcagcaggatgttggattttaaaataagcttcttctggttgaccacta

SEQ ID NO: 124698 - DNA, 76 bp, Homo sapiens
atcaaatacaatgttctcagtgtcagcaggatgttggattttaaaataagcttcttctggttgaccactatctaat

SEQ ID NO: 124699 - DNA, 75 bp, Homo sapiens
agcaggatgttggattttaaaataagcttcttctggttgaccactatctaattcttggaatttcacatctgtgtg

SEQ ID NO: 124700 - DNA, 72 bp, Homo sapiens
gttggattttaaaataagcttcttctggttgaccactatctaattcttggaatttcacatctgtgtgtttta

SEQ ID NO: 124701 - DNA, 74 bp, Homo sapiens
aataagcttcttctggttgaccactatctaattcttggaatttcacatctgtgtgttttatttgagtgtgaaac

SEQ ID NO: 124702 - DNA, 76 bp, Homo sapiens
ttctggttgaccactatctaattcttggaatttcacatctgtgtgttttatttgagtgtgaaactgctttaagtca

SEQ ID NO: 124703 - DNA, 76 bp, Homo sapiens
ttcttggaatttcacatctgtgtgttttatttgagtgtgaaactgctttaagtcaaatgtaataggtgattcatgt

SEQ ID NO: 124704 - DNA, 77 bp, Homo sapiens
tgtgttttatttgagtgtgaaactgctttaagtcaaatgtaataggtgattcatgttcagctcttttagaaattgca

SEQ ID NO: 124705 - DNA, 76 bp, Homo sapiens
tttgagtgtgaaactgctttaagtcaaatgtaataggtgattcatgttcagctcttttagaaattgcaggtttatc

SEQ ID NO: 124706 - DNA, 75 bp, Homo sapiens
gaaactgctttaagtcaaatgtaataggtgattcatgttcagctcttttagaaattgcaggtttatctataagac

SEQ ID NO: 124707 - DNA, 73 bp, Homo sapiens
ctttaagtcaaatgtaataggtgattcatgttcagctcttttagaaattgcaggtttatctataagacttatt

SEQ ID NO: 124708 - DNA, 72 bp, Homo sapiens
aatgtaataggtgattcatgttcagctcttttagaaattgcaggtttatctataagacttattttttcctgt

SEQ ID NO: 124709 - DNA, 71 bp, Homo sapiens
gtgattcatgttcagctcttttagaaattgcaggtttatctataagacttattttttcctgttgttccctt

SEQ ID NO: 124710 - DNA, 71 bp, Homo sapiens
cagctcttttagaaattgcaggtttatctataagacttattttttcctgttgttccctttcttgtgcgtca

SEQ ID NO: 124711 - DNA, 69 bp, Homo sapiens
gaaattgcaggtttatctataagacttattttttcctgttgttccctttcttgtgcgtcaaattcttta

SEQ ID NO: 124712 - DNA, 70 bp, Homo sapiens
gacttattttttcctgttgttccctttcttgtgcgtcaaattctttatgagtttgagaggaaagcagctt

SEQ ID NO: 124713 - DNA, 70 bp, Homo sapiens
tttcctgttgttccctttcttgtgcgtcaaattctttatgagtttgagaggaaagcagctttaaatttat

SEQ ID NO: 124714 - DNA, 72 bp, Homo sapiens
gttgttccctttcttgtgcgtcaaattctttatgagtttgagaggaaagcagctttaaatttattgcaatgt

SEQ ID NO: 124715 - DNA, 78 bp, Homo sapiens
cttgtgcgtcaaattctttatgagtttgagaggaaagcagctttaaatttattgcaatgttagatgaatctgattcag

SEQ ID NO: 124716 - DNA, 78 bp, Homo sapiens
ttctttatgagtttgagaggaaagcagctttaaatttattgcaatgttagatgaatctgattcagtatttggagacat

SEQ ID NO: 124717 - DNA, 81 bp, Homo sapiens
gaggaaagcagctttaaatttattgcaatgttagatgaatctgattcagtatttggagacattttctctgcctgatacata

SEQ ID NO: 124718 - DNA, 85 bp, Homo sapiens
ttattgcaatgttagatgaatctgattcagtatttggagacattttctctgcctgatacatatttgcatttagattgcttgatct

SEQ ID NO: 124719 - DNA, 84 bp, Homo sapiens
ttagatgaatctgattcagtatttggagacattttctctgcctgatacatatttgcatttagattgcttgatcttgattctctt

SEQ ID NO: 124720 - DNA, 79 bp, Homo sapiens
ggagacattttctctgcctgatacatatttgcatttagattgcttgatcttgattctctttgctttaatgaaaaggctt

SEQ ID NO: 124721 - DNA, 82 bp, Homo sapiens
ttctctgcctgatacatatttgcatttagattgcttgatcttgattctctttgctttaatgaaaaggctttgtcatcaatct

SEQ ID NO: 124722 - DNA, 80 bp, Homo sapiens
gcctgatacatatttgcatttagattgcttgatcttgattctctttgctttaatgaaaaggctttgtcatcaatcttctt

SEQ ID NO: 124723 - DNA, 78 bp, Homo sapiens
tttgcatttagattgcttgatcttgattctctttgctttaatgaaaaggctttgtcatcaatcttcttttgaggagga

SEQ ID NO: 124724 - DNA, 78 bp, Homo sapiens
tgcttgatcttgattctctttgctttaatgaaaaggctttgtcatcaatcttcttttgaggaggattaacaattgatg

SEQ ID NO: 124725 - DNA, 75 bp, Homo sapiens
ttgattctctttgctttaatgaaaaggctttgtcatcaatcttcttttgaggaggattaacaattgatgttctgg

SEQ ID NO: 124726 - DNA, 73 bp, Homo sapiens
tgctttaatgaaaaggctttgtcatcaatcttcttttgaggaggattaacaattgatgttctggtaggtcttt

SEQ ID NO: 124727 - DNA, 72 bp, Homo sapiens
gaaaaggctttgtcatcaatcttcttttgaggaggattaacaattgatgttctggtaggtcttttttctaga

SEQ ID NO: 124728 - DNA, 69 bp, Homo sapiens
cttcttttgaggaggattaacaattgatgttctggtaggtcttttttctagaactcctttttctacatg

SEQ ID NO: 124729 - DNA, 69 bp, Homo sapiens
ttgaggaggattaacaattgatgttctggtaggtcttttttctagaactcctttttctacatgtaattt

SEQ ID NO: 124730 - DNA, 69 bp, Homo sapiens
taacaattgatgttctggtaggtcttttttctagaactcctttttctacatgtaatttttcaaattcga

SEQ ID NO: 124731 - DNA, 68 bp, Homo sapiens
aggtcttttttctagaactcctttttctacatgtaatttttcaaattcgataattctatgcttcacct

SEQ ID NO: 124732 - DNA, 67 bp, Homo sapiens
gaactcctttttctacatgtaatttttcaaattcgataattctatgcttcacctttttccccgggta

SEQ ID NO: 124733 - DNA, 68 bp, Homo sapiens
aatttttcaaattcgataattctatgcttcacctttttccccgggtagtgtatctcttcaccaaggga

SEQ ID NO: 124734 - DNA, 72 bp, Homo sapiens
acctttttccccgggtagtgtatctcttcaccaagggattcttcatatacaatggcagatgaatcttttgta

SEQ ID NO: 124735 - DNA, 77 bp, Homo sapiens
cgggtagtgtatctcttcaccaagggattcttcatatacaatggcagatgaatcttttgtattgtaactgtcagaaa

SEQ ID NO: 124736 - DNA, 80 bp, Homo sapiens
agtgtatctcttcaccaagggattcttcatatacaatggcagatgaatcttttgtattgtaactgtcagaaattctctca

SEQ ID NO: 124737 - DNA, 80 bp, Homo sapiens
ttcaccaagggattcttcatatacaatggcagatgaatcttttgtattgtaactgtcagaaattctctcagagtgaatat

SEQ ID NO: 124738 - DNA, 77 bp, Homo sapiens
caatggcagatgaatcttttgtattgtaactgtcagaaattctctcagagtgaatatttggtaaatagtcactttgg

SEQ ID NO: 124739 - DNA, 77 bp, Homo sapiens
gatgaatcttttgtattgtaactgtcagaaattctctcagagtgaatatttggtaaatagtcactttgggcacattc

SEQ ID NO: 124740 - DNA, 75 bp, Homo sapiens
gtattgtaactgtcagaaattctctcagagtgaatatttggtaaatagtcactttgggcacattcttgtacattt

SEQ ID NO: 124741 - DNA, 73 bp, Homo sapiens
aactgtcagaaattctctcagagtgaatatttggtaaatagtcactttgggcacattcttgtacattttcctt

SEQ ID NO: 124742 - DNA, 75 bp, Homo sapiens
attctctcagagtgaatatttggtaaatagtcactttgggcacattcttgtacattttccttttctgatctacca

SEQ ID NO: 124743 - DNA, 69 bp, Homo sapiens
gtcactttgggcacattcttgtacattttccttttctgatctaccaagttttccaaaattatttcttat

SEQ ID NO: 124744 - DNA, 69 bp, Homo sapiens
gcacattcttgtacattttccttttctgatctaccaagttttccaaaattatttcttatttctttctta

SEQ ID NO: 124745 - DNA, 74 bp, Homo sapiens
tttctgatctaccaagttttccaaaattatttcttatttctttcttaatagtgacatcactgaaatcatcaaca

SEQ ID NO: 124746 - DNA, 72 bp, Homo sapiens
ctaccaagttttccaaaattatttcttatttctttcttaatagtgacatcactgaaatcatcaacaaatgga

SEQ ID NO: 124747 - DNA, 74 bp, Homo sapiens
aaattatttcttatttctttcttaatagtgacatcactgaaatcatcaacaaatggataaacagtaccctctgc

SEQ ID NO: 124748 - DNA, 79 bp, Homo sapiens
ttatttctttcttaatagtgacatcactgaaatcatcaacaaatggataaacagtaccctctgcttggtgcagctttga

SEQ ID NO: 124749 - DNA, 81 bp, Homo sapiens
tagtgacatcactgaaatcatcaacaaatggataaacagtaccctctgcttggtgcagctttgatttttcacttacatgtc

SEQ ID NO: 124750 - DNA, 77 bp, Homo sapiens
actgaaatcatcaacaaatggataaacagtaccctctgcttggtgcagctttgatttttcacttacatgtctctctt

SEQ ID NO: 124751 - DNA, 75 bp, Homo sapiens
aacaaatggataaacagtaccctctgcttggtgcagctttgatttttcacttacatgtctctctttcccttcagc

SEQ ID NO: 124752 - DNA, 77 bp, Homo sapiens
ataaacagtaccctctgcttggtgcagctttgatttttcacttacatgtctctctttcccttcagcctgacattgta

SEQ ID NO: 124753 - DNA, 82 bp, Homo sapiens
tctgcttggtgcagctttgatttttcacttacatgtctctctttcccttcagcctgacattgtatgaattcagccctgatgg

SEQ ID NO: 124754 - DNA, 81 bp, Homo sapiens
cagctttgatttttcacttacatgtctctctttcccttcagcctgacattgtatgaattcagccctgatgggcttgctgat

SEQ ID NO: 124755 - DNA, 80 bp, Homo sapiens
ttacatgtctctctttcccttcagcctgacattgtatgaattcagccctgatgggcttgctgatttttatggttcttgaa

SEQ ID NO: 124756 - DNA, 81 bp, Homo sapiens
agcctgacattgtatgaattcagccctgatgggcttgctgatttttatggttcttgaagcaccatgcacaaatctgggaat

SEQ ID NO: 124757 - DNA, 77 bp, Homo sapiens
aattcagccctgatgggcttgctgatttttatggttcttgaagcaccatgcacaaatctgggaattttttctctaga

SEQ ID NO: 124758 - DNA, 76 bp, Homo sapiens
atgggcttgctgatttttatggttcttgaagcaccatgcacaaatctgggaattttttctctagaaggtatgcaac

SEQ ID NO: 124759 - DNA, 75 bp, Homo sapiens
tttttatggttcttgaagcaccatgcacaaatctgggaattttttctctagaaggtatgcaacgcacctgctctt

SEQ ID NO: 124760 - DNA, 77 bp, Homo sapiens
accatgcacaaatctgggaattttttctctagaaggtatgcaacgcacctgctctttctggtctatttgctcaatag

SEQ ID NO: 124761 - DNA, 76 bp, Homo sapiens
tttttctctagaaggtatgcaacgcacctgctctttctggtctatttgctcaatagtctcaaggctttgaaaatag

SEQ ID NO: 124762 - DNA, 77 bp, Homo sapiens
tctagaaggtatgcaacgcacctgctctttctggtctatttgctcaatagtctcaaggctttgaaaatagtccctta

SEQ ID NO: 124763 - DNA, 74 bp, Homo sapiens
aacgcacctgctctttctggtctatttgctcaatagtctcaaggctttgaaaatagtcccttactgaatattct

SEQ ID NO: 124764 - DNA, 74 bp, Homo sapiens
tctggtctatttgctcaatagtctcaaggctttgaaaatagtcccttactgaatattcttttacatttgtccag

SEQ ID NO: 124765 - DNA, 70 bp, Homo sapiens
ctcaatagtctcaaggctttgaaaatagtcccttactgaatattcttttacatttgtccagggagtaaag

SEQ ID NO: 124766 - DNA, 69 bp, Homo sapiens
gtctcaaggctttgaaaatagtcccttactgaatattcttttacatttgtccagggagtaaagggacca

SEQ ID NO: 124767 - DNA, 70 bp, Homo sapiens
aaaatagtcccttactgaatattcttttacatttgtccagggagtaaagggaccagctggataatcataa

SEQ ID NO: 124768 - DNA, 72 bp, Homo sapiens
ttcttttacatttgtccagggagtaaagggaccagctggataatcataaaaatgtgcccttacagattctcc

SEQ ID NO: 124769 - DNA, 73 bp, Homo sapiens
tacatttgtccagggagtaaagggaccagctggataatcataaaaatgtgcccttacagattctccctggtct

SEQ ID NO: 124770 - DNA, 76 bp, Homo sapiens
agggagtaaagggaccagctggataatcataaaaatgtgcccttacagattctccctggtcttgcagttgctgatc

SEQ ID NO: 124771 - DNA, 79 bp, Homo sapiens
accagctggataatcataaaaatgtgcccttacagattctccctggtcttgcagttgctgatctctggaatattttcca

SEQ ID NO: 124772 - DNA, 76 bp, Homo sapiens
taaaaatgtgcccttacagattctccctggtcttgcagttgctgatctctggaatattttccataaatttcaccaa

SEQ ID NO: 124773 - DNA, 77 bp, Homo sapiens
ttacagattctccctggtcttgcagttgctgatctctggaatattttccataaatttcaccaatattttcgaattga

SEQ ID NO: 124774 - DNA, 77 bp, Homo sapiens
gcagttgctgatctctggaatattttccataaatttcaccaatattttcgaattgactattttctctataagtgaca

SEQ ID NO: 124775 - DNA, 76 bp, Homo sapiens
gctgatctctggaatattttccataaatttcaccaatattttcgaattgactattttctctataagtgacaggctc

SEQ ID NO: 124776 - DNA, 74 bp, Homo sapiens
tattttccataaatttcaccaatattttcgaattgactattttctctataagtgacaggctccactgttagatc

SEQ ID NO: 124777 - DNA, 75 bp, Homo sapiens
cataaatttcaccaatattttcgaattgactattttctctataagtgacaggctccactgttagatctgaaacac

SEQ ID NO: 124778 - DNA, 75 bp, Homo sapiens
accaatattttcgaattgactattttctctataagtgacaggctccactgttagatctgaaacactttcaactgc

SEQ ID NO: 124779 - DNA, 77 bp, Homo sapiens
tattttctctataagtgacaggctccactgttagatctgaaacactttcaactgcccctgaattgttttcagcaaca

SEQ ID NO: 124780 - DNA, 77 bp, Homo sapiens
tataagtgacaggctccactgttagatctgaaacactttcaactgcccctgaattgttttcagcaacacatttatat

SEQ ID NO: 124781 - DNA, 75 bp, Homo sapiens
tccactgttagatctgaaacactttcaactgcccctgaattgttttcagcaacacatttatattttccagaatct

SEQ ID NO: 124782 - DNA, 76 bp, Homo sapiens
tgttagatctgaaacactttcaactgcccctgaattgttttcagcaacacatttatattttccagaatcttgagaa

SEQ ID NO: 124783 - DNA, 73 bp, Homo sapiens
aacactttcaactgcccctgaattgttttcagcaacacatttatattttccagaatcttgagaattaacatcc

SEQ ID NO: 124784 - DNA, 75 bp, Homo sapiens
caactgcccctgaattgttttcagcaacacatttatattttccagaatcttgagaattaacatccttaatatata

SEQ ID NO: 124785 - DNA, 75 bp, Homo sapiens
tgttttcagcaacacatttatattttccagaatcttgagaattaacatccttaatatataattggtggctacaat

SEQ ID NO: 124786 - DNA, 74 bp, Homo sapiens
gcaacacatttatattttccagaatcttgagaattaacatccttaatatataattggtggctacaattaacttc

SEQ ID NO: 124787 - DNA, 73 bp, Homo sapiens
tattttccagaatcttgagaattaacatccttaatatataattggtggctacaattaacttcttcaaactgaa

SEQ ID NO: 124788 - DNA, 72 bp, Homo sapiens
gagaattaacatccttaatatataattggtggctacaattaacttcttcaaactgaaacttctggttctgct

SEQ ID NO: 124789 - DNA, 69 bp, Homo sapiens
aattggtggctacaattaacttcttcaaactgaaacttctggttctgctttaaaaggactccattttga

SEQ ID NO: 124790 - DNA, 70 bp, Homo sapiens
tggctacaattaacttcttcaaactgaaacttctggttctgctttaaaaggactccattttgaaaccatg

SEQ ID NO: 124791 - DNA, 75 bp, Homo sapiens
cattttgaaaccatgttacaactggctggggctcaccagatattaaacattcaagaatgatggaatccccttctc

SEQ ID NO: 124792 - DNA, 78 bp, Homo sapiens
ttacaactggctggggctcaccagatattaaacattcaagaatgatggaatccccttctctacacctggcatgctttg

SEQ ID NO: 124793 - DNA, 75 bp, Homo sapiens
agatattaaacattcaagaatgatggaatccccttctctacacctggcatgctttggcatttcttgtaacatttt

SEQ ID NO: 124794 - DNA, 76 bp, Homo sapiens
ttcaagaatgatggaatccccttctctacacctggcatgctttggcatttcttgtaacatttttggtggttcatta

SEQ ID NO: 124795 - DNA, 75 bp, Homo sapiens
atgatggaatccccttctctacacctggcatgctttggcatttcttgtaacatttttggtggttcattagtaata

SEQ ID NO: 124796 - DNA, 76 bp, Homo sapiens
ttctctacacctggcatgctttggcatttcttgtaacatttttggtggttcattagtaatatcagacaaaaataca

SEQ ID NO: 124797 - DNA, 73 bp, Homo sapiens
ttggcatttcttgtaacatttttggtggttcattagtaatatcagacaaaaatacaaatctgtgttttggtga

SEQ ID NO: 124798 - DNA, 72 bp, Homo sapiens
ttgtaacatttttggtggttcattagtaatatcagacaaaaatacaaatctgtgttttggtgattgagtaac

SEQ ID NO: 124799 - DNA, 76 bp, Homo sapiens
tttggtggttcattagtaatatcagacaaaaatacaaatctgtgttttggtgattgagtaacttgatcttgaggca

SEQ ID NO: 124800 - DNA, 76 bp, Homo sapiens
ggttcattagtaatatcagacaaaaatacaaatctgtgttttggtgattgagtaacttgatcttgaggcattgctt

SEQ ID NO: 124801 - DNA, 75 bp, Homo sapiens
aatctgtgttttggtgattgagtaacttgatcttgaggcattgctttaggttccagctcctcagtttgaaacact

SEQ ID NO: 124802 - DNA, 76 bp, Homo sapiens
tgattgagtaacttgatcttgaggcattgctttaggttccagctcctcagtttgaaacacttctttagactcttta

SEQ ID NO: 124803 - DNA, 74 bp, Homo sapiens
taacttgatcttgaggcattgctttaggttccagctcctcagtttgaaacacttctttagactctttatcctgt

SEQ ID NO: 124804 - DNA, 72 bp, Homo sapiens
attgctttaggttccagctcctcagtttgaaacacttctttagactctttatcctgttctgggataggagta

SEQ ID NO: 124805 - DNA, 73 bp, Homo sapiens
agtttgaaacacttctttagactctttatcctgttctgggataggagtagctgctgttacctgaatttctaca

SEQ ID NO: 124806 - DNA, 72 bp, Homo sapiens
aacacttctttagactctttatcctgttctgggataggagtagctgctgttacctgaatttctacaggaaag

SEQ ID NO: 124807 - DNA, 75 bp, Homo sapiens
tagactctttatcctgttctgggataggagtagctgctgttacctgaatttctacaggaaaggaaagcaattctg

SEQ ID NO: 124808 - DNA, 76 bp, Homo sapiens
atcctgttctgggataggagtagctgctgttacctgaatttctacaggaaaggaaagcaattctgtgtctccagag

SEQ ID NO: 124809 - DNA, 74 bp, Homo sapiens
ataggagtagctgctgttacctgaatttctacaggaaaggaaagcaattctgtgtctccagagggaggaactgg

SEQ ID NO: 124810 - DNA, 72 bp, Homo sapiens
tgctgttacctgaatttctacaggaaaggaaagcaattctgtgtctccagagggaggaactggtgggttagt

SEQ ID NO: 124811 - DNA, 70 bp, Homo sapiens
tgaatttctacaggaaaggaaagcaattctgtgtctccagagggaggaactggtgggttagtttttaaca

SEQ ID NO: 124812 - DNA, 68 bp, Homo sapiens
aggaaaggaaagcaattctgtgtctccagagggaggaactggtgggttagtttttaacaaatgaagat

SEQ ID NO: 124813 - DNA, 68 bp, Homo sapiens
aggaaagcaattctgtgtctccagagggaggaactggtgggttagtttttaacaaatgaagatttgtt

SEQ ID NO: 124814 - DNA, 71 bp, Homo sapiens
tgtctccagagggaggaactggtgggttagtttttaacaaatgaagatttgtttggccctcttgactcata

SEQ ID NO: 124815 - DNA, 70 bp, Homo sapiens
agggaggaactggtgggttagtttttaacaaatgaagatttgtttggccctcttgactcatagatggatg

SEQ ID NO: 124816 - DNA, 70 bp, Homo sapiens
aactggtgggttagtttttaacaaatgaagatttgtttggccctcttgactcatagatggatgggcgcct

SEQ ID NO: 124817 - DNA, 75 bp, Homo sapiens
atttgtttggccctcttgactcatagatggatgggcgccttttgcttggtcaaacaccaatgctaactcttcttc

SEQ ID NO: 124818 - DNA, 77 bp, Homo sapiens
atagatggatgggcgccttttgcttggtcaaacaccaatgctaactcttcttcctcatccaagtagtcatggaacac

SEQ ID NO: 124819 - DNA, 75 bp, Homo sapiens
gcgccttttgcttggtcaaacaccaatgctaactcttcttcctcatccaagtagtcatggaacactgggacttta

SEQ ID NO: 124820 - DNA, 76 bp, Homo sapiens
ttttgcttggtcaaacaccaatgctaactcttcttcctcatccaagtagtcatggaacactgggactttatgtgct

SEQ ID NO: 124821 - DNA, 77 bp, Homo sapiens
aaacaccaatgctaactcttcttcctcatccaagtagtcatggaacactgggactttatgtgctttgacatcatgtt

SEQ ID NO: 124822 - DNA, 76 bp, Homo sapiens
atgctaactcttcttcctcatccaagtagtcatggaacactgggactttatgtgctttgacatcatgtttttgttt

SEQ ID NO: 124823 - DNA, 75 bp, Homo sapiens
aagtagtcatggaacactgggactttatgtgctttgacatcatgtttttgttttgctttcactttaagcatactg

SEQ ID NO: 124824 - DNA, 72 bp, Homo sapiens
gaacactgggactttatgtgctttgacatcatgtttttgttttgctttcactttaagcatactggttgtttt

SEQ ID NO: 124825 - DNA, 71 bp, Homo sapiens
gggactttatgtgctttgacatcatgtttttgttttgctttcactttaagcatactggttgtttttactgt

SEQ ID NO: 124826 - DNA, 73 bp, Homo sapiens
tgtgctttgacatcatgtttttgttttgctttcactttaagcatactggttgtttttactgttccatattggt

SEQ ID NO: 124827 - DNA, 71 bp, Homo sapiens
tgtttttgttttgctttcactttaagcatactggttgtttttactgttccatattggttaaatagcacaca

SEQ ID NO: 124828 - DNA, 72 bp, Homo sapiens
ttgctttcactttaagcatactggttgtttttactgttccatattggttaaatagcacacaagtaatagaac

SEQ ID NO: 124829 - DNA, 72 bp, Homo sapiens
tcactttaagcatactggttgtttttactgttccatattggttaaatagcacacaagtaatagaaccttcat

SEQ ID NO: 124830 - DNA, 77 bp, Homo sapiens
gcatactggttgtttttactgttccatattggttaaatagcacacaagtaatagaaccttcattctgatgatgaaca

SEQ ID NO: 124831 - DNA, 76 bp, Homo sapiens
gtttttactgttccatattggttaaatagcacacaagtaatagaaccttcattctgatgatgaacagatgaaagag

SEQ ID NO: 124832 - DNA, 78 bp, Homo sapiens
gttccatattggttaaatagcacacaagtaatagaaccttcattctgatgatgaacagatgaaagagttaatattgaa

SEQ ID NO: 124833 - DNA, 77 bp, Homo sapiens
aatagcacacaagtaatagaaccttcattctgatgatgaacagatgaaagagttaatattgaatagttttccaacga

SEQ ID NO: 124834 - DNA, 77 bp, Homo sapiens
cacacaagtaatagaaccttcattctgatgatgaacagatgaaagagttaatattgaatagttttccaacgaatgaa

SEQ ID NO: 124835 - DNA, 76 bp, Homo sapiens
atagaaccttcattctgatgatgaacagatgaaagagttaatattgaatagttttccaacgaatgaatgataaagt

SEQ ID NO: 124836 - DNA, 75 bp, Homo sapiens
ctgatgatgaacagatgaaagagttaatattgaatagttttccaacgaatgaatgataaagttttgattacgtgg

SEQ ID NO: 124837 - DNA, 74 bp, Homo sapiens
cagatgaaagagttaatattgaatagttttccaacgaatgaatgataaagttttgattacgtgggattggcatg

SEQ ID NO: 124838 - DNA, 75 bp, Homo sapiens
ttgaatagttttccaacgaatgaatgataaagttttgattacgtgggattggcatgtcattgttataccacgtca

SEQ ID NO: 124839 - DNA, 76 bp, Homo sapiens
aatgataaagttttgattacgtgggattggcatgtcattgttataccacgtcactataggttgaggatatccttga

SEQ ID NO: 124840 - DNA, 73 bp, Homo sapiens
aaagttttgattacgtgggattggcatgtcattgttataccacgtcactataggttgaggatatccttgaaaa

SEQ ID NO: 124841 - DNA, 76 bp, Homo sapiens
attacgtgggattggcatgtcattgttataccacgtcactataggttgaggatatccttgaaaatgacacacaaaa

SEQ ID NO: 124842 - DNA, 78 bp, Homo sapiens
attggcatgtcattgttataccacgtcactataggttgaggatatccttgaaaatgacacacaaaattacaactgtca

SEQ ID NO: 124843 - DNA, 75 bp, Homo sapiens
attgttataccacgtcactataggttgaggatatccttgaaaatgacacacaaaattacaactgtcaccttcata

SEQ ID NO: 124844 - DNA, 77 bp, Homo sapiens
tcactataggttgaggatatccttgaaaatgacacacaaaattacaactgtcaccttcataaacttcttgagattca

SEQ ID NO: 124845 - DNA, 74 bp, Homo sapiens
ggttgaggatatccttgaaaatgacacacaaaattacaactgtcaccttcataaacttcttgagattcaatttc

SEQ ID NO: 124846 - DNA, 74 bp, Homo sapiens
gacacacaaaattacaactgtcaccttcataaacttcttgagattcaatttcttgaagaaatgaaggtgggcaa

SEQ ID NO: 124847 - DNA, 71 bp, Homo sapiens
aaattacaactgtcaccttcataaacttcttgagattcaatttcttgaagaaatgaaggtgggcaacgttg

SEQ ID NO: 124848 - DNA, 69 bp, Homo sapiens
taaacttcttgagattcaatttcttgaagaaatgaaggtgggcaacgttgtgggcgttttcgaaaagaa

SEQ ID NO: 124849 - DNA, 73 bp, Homo sapiens
gaattttcaaaaaatctcatgttttcttccttctgttcggttttgaattcatcaattcgtgtagaagcagaga

SEQ ID NO: 124850 - DNA, 75 bp, Homo sapiens
gttttcttccttctgttcggttttgaattcatcaattcgtgtagaagcagagagttgtaattctctcaaatcatc

SEQ ID NO: 124851 - DNA, 73 bp, Homo sapiens
ttcggttttgaattcatcaattcgtgtagaagcagagagttgtaattctctcaaatcatccttttttattctt

SEQ ID NO: 124852 - DNA, 77 bp, Homo sapiens
catcaattcgtgtagaagcagagagttgtaattctctcaaatcatccttttttattctttcactagctatttcttca

SEQ ID NO: 124853 - DNA, 74 bp, Homo sapiens
agcagagagttgtaattctctcaaatcatccttttttattctttcactagctatttcttcactttcttcaacat

SEQ ID NO: 124854 - DNA, 73 bp, Homo sapiens
gagttgtaattctctcaaatcatccttttttattctttcactagctatttcttcactttcttcaacatttaca

SEQ ID NO: 124855 - DNA, 73 bp, Homo sapiens
ttctctcaaatcatccttttttattctttcactagctatttcttcactttcttcaacatttacaagtgtacca

SEQ ID NO: 124856 - DNA, 72 bp, Homo sapiens
ctctcaaatcatccttttttattctttcactagctatttcttcactttcttcaacatttacaagtgtaccaa

SEQ ID NO: 124857 - DNA, 74 bp, Homo sapiens
tttattctttcactagctatttcttcactttcttcaacatttacaagtgtaccaaaagattcgctggcatgtgg

SEQ ID NO: 124858 - DNA, 76 bp, Homo sapiens
tctttcactagctatttcttcactttcttcaacatttacaagtgtaccaaaagattcgctggcatgtggtgtaata

SEQ ID NO: 124859 - DNA, 75 bp, Homo sapiens
ctttcactagctatttcttcactttcttcaacatttacaagtgtaccaaaagattcgctggcatgtggtgtaata

SEQ ID NO: 124860 - DNA, 77 bp, Homo sapiens
ttcactttcttcaacatttacaagtgtaccaaaagattcgctggcatgtggtgtaatagcttgagacacattttcag

SEQ ID NO: 124861 - DNA, 78 bp, Homo sapiens
acatttacaagtgtaccaaaagattcgctggcatgtggtgtaatagcttgagacacattttcaggagtctcatatact

SEQ ID NO: 124862 - DNA, 77 bp, Homo sapiens
aagtgtaccaaaagattcgctggcatgtggtgtaatagcttgagacacattttcaggagtctcatatacttcctcct

SEQ ID NO: 124863 - DNA, 81 bp, Homo sapiens
aaagattcgctggcatgtggtgtaatagcttgagacacattttcaggagtctcatatacttcctccttctcacatacatta

SEQ ID NO: 124864 - DNA, 86 bp, Homo sapiens
gcatgtggtgtaatagcttgagacacattttcaggagtctcatatacttcctccttctcacatacattagtgatatatgtggatga

SEQ ID NO: 124865 - DNA, 84 bp, Homo sapiens
taatagcttgagacacattttcaggagtctcatatacttcctccttctcacatacattagtgatatatgtggatgactctccaa

SEQ ID NO: 124866 - DNA, 82 bp, Homo sapiens
agacacattttcaggagtctcatatacttcctccttctcacatacattagtgatatatgtggatgactctccaattgtagta

SEQ ID NO: 124867 - DNA, 81 bp, Homo sapiens
attttcaggagtctcatatacttcctccttctcacatacattagtgatatatgtggatgactctccaattgtagtattggc

SEQ ID NO: 124868 - DNA, 81 bp, Homo sapiens
agtctcatatacttcctccttctcacatacattagtgatatatgtggatgactctccaattgtagtattggccataatttc

SEQ ID NO: 124869 - DNA, 80 bp, Homo sapiens
acttcctccttctcacatacattagtgatatatgtggatgactctccaattgtagtattggccataatttcttccagctg

SEQ ID NO: 124870 - DNA, 81 bp, Homo sapiens
catacattagtgatatatgtggatgactctccaattgtagtattggccataatttcttccagctgtcctcttgcttgggta

SEQ ID NO: 124871 - DNA, 78 bp, Homo sapiens
attagtgatatatgtggatgactctccaattgtagtattggccataatttcttccagctgtcctcttgcttgggtatt

SEQ ID NO: 124872 - DNA, 77 bp, Homo sapiens
tatgtggatgactctccaattgtagtattggccataatttcttccagctgtcctcttgcttgggtattttcatttac

SEQ ID NO: 124873 - DNA, 73 bp, Homo sapiens
actctccaattgtagtattggccataatttcttccagctgtcctcttgcttgggtattttcatttactagaat

SEQ ID NO: 124874 - DNA, 75 bp, Homo sapiens
tgtagtattggccataatttcttccagctgtcctcttgcttgggtattttcatttactagaatttcaccatataa

SEQ ID NO: 124875 - DNA, 72 bp, Homo sapiens
ccataatttcttccagctgtcctcttgcttgggtattttcatttactagaatttcaccatataaatggtctt

SEQ ID NO: 124876 - DNA, 71 bp, Homo sapiens
agctgtcctcttgcttgggtattttcatttactagaatttcaccatataaatggtcttttggtagactttc

SEQ ID NO: 124877 - DNA, 69 bp, Homo sapiens
tcctcttgcttgggtattttcatttactagaatttcaccatataaatggtcttttggtagactttcctt

SEQ ID NO: 124878 - DNA, 69 bp, Homo sapiens
ggtattttcatttactagaatttcaccatataaatggtcttttggtagactttcctttaccagtgcttc

SEQ ID NO: 124879 - DNA, 71 bp, Homo sapiens
actagaatttcaccatataaatggtcttttggtagactttcctttaccagtgcttcttggctcattcttat

SEQ ID NO: 124880 - DNA, 71 bp, Homo sapiens
aatttcaccatataaatggtcttttggtagactttcctttaccagtgcttcttggctcattcttatttcag

SEQ ID NO: 124881 - DNA, 70 bp, Homo sapiens
taaatggtcttttggtagactttcctttaccagtgcttcttggctcattcttatttcagtctggaaaatt

SEQ ID NO: 124882 - DNA, 74 bp, Homo sapiens
ttggtagactttcctttaccagtgcttcttggctcattcttatttcagtctggaaaatttcttcatcaacaata

SEQ ID NO: 124883 - DNA, 74 bp, Homo sapiens
ttcctttaccagtgcttcttggctcattcttatttcagtctggaaaatttcttcatcaacaatagtttgaaagc

SEQ ID NO: 124884 - DNA, 75 bp, Homo sapiens
tgcttcttggctcattcttatttcagtctggaaaatttcttcatcaacaatagtttgaaagcttgtgggaagttc

SEQ ID NO: 124885 - DNA, 74 bp, Homo sapiens
ctcattcttatttcagtctggaaaatttcttcatcaacaatagtttgaaagcttgtgggaagttcctcagattc

SEQ ID NO: 124886 - DNA, 73 bp, Homo sapiens
cttatttcagtctggaaaatttcttcatcaacaatagtttgaaagcttgtgggaagttcctcagattctatat

SEQ ID NO: 124887 - DNA, 74 bp, Homo sapiens
gtctggaaaatttcttcatcaacaatagtttgaaagcttgtgggaagttcctcagattctatattttgatccat

SEQ ID NO: 124888 - DNA, 76 bp, Homo sapiens
ttcatcaacaatagtttgaaagcttgtgggaagttcctcagattctatattttgatccatttgattagaaagggca

SEQ ID NO: 124889 - DNA, 74 bp, Homo sapiens
tagtttgaaagcttgtgggaagttcctcagattctatattttgatccatttgattagaaagggcatgtggattt

SEQ ID NO: 124890 - DNA, 76 bp, Homo sapiens
aaagcttgtgggaagttcctcagattctatattttgatccatttgattagaaagggcatgtggattttgcacaata

SEQ ID NO: 124891 - DNA, 82 bp, Homo sapiens
agttcctcagattctatattttgatccatttgattagaaagggcatgtggattttgcacaatactctcagctgaatgatcta

SEQ ID NO: 124892 - DNA, 81 bp, Homo sapiens
gattctatattttgatccatttgattagaaagggcatgtggattttgcacaatactctcagctgaatgatctaccttataa

SEQ ID NO: 124893 - DNA, 78 bp, Homo sapiens
atattttgatccatttgattagaaagggcatgtggattttgcacaatactctcagctgaatgatctaccttataactt

SEQ ID NO: 124894 - DNA, 83 bp, Homo sapiens
tttgattagaaagggcatgtggattttgcacaatactctcagctgaatgatctaccttataactttcagctagatcagacata

SEQ ID NO: 124895 - DNA, 83 bp, Homo sapiens
aaagggcatgtggattttgcacaatactctcagctgaatgatctaccttataactttcagctagatcagacatagatctgatt

SEQ ID NO: 124896 - DNA, 85 bp, Homo sapiens
acaatactctcagctgaatgatctaccttataactttcagctagatcagacatagatctgattttcatgtcctctctagagaaca

SEQ ID NO: 124897 - DNA, 83 bp, Homo sapiens
ctgaatgatctaccttataactttcagctagatcagacatagatctgattttcatgtcctctctagagaacagaatatcttta

SEQ ID NO: 124898 - DNA, 82 bp, Homo sapiens
atctaccttataactttcagctagatcagacatagatctgattttcatgtcctctctagagaacagaatatctttatcacta

SEQ ID NO: 124899 - DNA, 78 bp, Homo sapiens
attttcatgtcctctctagagaacagaatatctttatcactagcttcacttctcaaagttcttgagcttatttcagaa

SEQ ID NO: 124900 - DNA, 77 bp, Homo sapiens
ctctagagaacagaatatctttatcactagcttcacttctcaaagttcttgagcttatttcagaagacgtatctaaa

SEQ ID NO: 124901 - DNA, 75 bp, Homo sapiens
tatctttatcactagcttcacttctcaaagttcttgagcttatttcagaagacgtatctaaaagagataatttct

SEQ ID NO: 124902 - DNA, 73 bp, Homo sapiens
ctagcttcacttctcaaagttcttgagcttatttcagaagacgtatctaaaagagataatttctttttctcca

SEQ ID NO: 124903 - DNA, 71 bp, Homo sapiens
cttctcaaagttcttgagcttatttcagaagacgtatctaaaagagataatttctttttctccattaatgt

SEQ ID NO: 124904 - DNA, 70 bp, Homo sapiens
gagcttatttcagaagacgtatctaaaagagataatttctttttctccattaatgtttttctagcctccc

SEQ ID NO: 124905 - DNA, 67 bp, Homo sapiens
cagaagacgtatctaaaagagataatttctttttctccattaatgtttttctagcctcccttaaacg

SEQ ID NO: 124906 - DNA, 68 bp, Homo sapiens
gataatttctttttctccattaatgtttttctagcctcccttaaacgttgcaacttcactttggtctc

SEQ ID NO: 124907 - DNA, 69 bp, Homo sapiens
ttctagcctcccttaaacgttgcaacttcactttggtctccttgtccaggaaactttcacctacattaa

SEQ ID NO: 124908 - DNA, 69 bp, Homo sapiens
ttaaacgttgcaacttcactttggtctccttgtccaggaaactttcacctacattaagccaacctctta

SEQ ID NO: 124909 - DNA, 73 bp, Homo sapiens
ttgcaacttcactttggtctccttgtccaggaaactttcacctacattaagccaacctcttatgtcagattta

SEQ ID NO: 124910 - DNA, 70 bp, Homo sapiens
tttggtctccttgtccaggaaactttcacctacattaagccaacctcttatgtcagatttactttctaaa

SEQ ID NO: 124911 - DNA, 70 bp, Homo sapiens
ctccttgtccaggaaactttcacctacattaagccaacctcttatgtcagatttactttctaaatattct

SEQ ID NO: 124912 - DNA, 75 bp, Homo sapiens
gaaactttcacctacattaagccaacctcttatgtcagatttactttctaaatattcttcatcatacatgtaatc

SEQ ID NO: 124913 - DNA, 78 bp, Homo sapiens
gccaacctcttatgtcagatttactttctaaatattcttcatcatacatgtaatctgttttcttggcagaactcattg

SEQ ID NO: 124914 - DNA, 77 bp, Homo sapiens
attcttcatcatacatgtaatctgttttcttggcagaactcattgtcttaaaatgtatagttctcatcattcccttt

SEQ ID NO: 124915 - DNA, 76 bp, Homo sapiens
tgtaatctgttttcttggcagaactcattgtcttaaaatgtatagttctcatcattcccttttgttccacatcttg

SEQ ID NO: 124916 - DNA, 73 bp, Homo sapiens
tttcttggcagaactcattgtcttaaaatgtatagttctcatcattcccttttgttccacatcttgttttttg

SEQ ID NO: 124917 - DNA, 71 bp, Homo sapiens
cattgtcttaaaatgtatagttctcatcattcccttttgttccacatcttgttttttgttaaagggagagc

SEQ ID NO: 124918 - DNA, 69 bp, Homo sapiens
aaatgtatagttctcatcattcccttttgttccacatcttgttttttgttaaagggagagccagtaaac

SEQ ID NO: 124919 - DNA, 70 bp, Homo sapiens
tatagttctcatcattcccttttgttccacatcttgttttttgttaaagggagagccagtaaacctcagg

SEQ ID NO: 124920 - DNA, 66 bp, Homo sapiens
ttcccttttgttccacatcttgttttttgttaaagggagagccagtaaacctcaggtcaaccttta

SEQ ID NO: 124921 - DNA, 68 bp, Homo sapiens
tttgttccacatcttgttttttgttaaagggagagccagtaaacctcaggtcaacctttatcctatct

SEQ ID NO: 124922 - DNA, 66 bp, Homo sapiens
gttttttgttaaagggagagccagtaaacctcaggtcaacctttatcctatcttctcccctttcaa

SEQ ID NO: 124923 - DNA, 68 bp, Homo sapiens
ttgttaaagggagagccagtaaacctcaggtcaacctttatcctatcttctcccctttcaactaaagc

SEQ ID NO: 124924 - DNA, 70 bp, Homo sapiens
agagccagtaaacctcaggtcaacctttatcctatcttctcccctttcaactaaagcctccacattttca

SEQ ID NO: 124925 - DNA, 69 bp, Homo sapiens
aaacctcaggtcaacctttatcctatcttctcccctttcaactaaagcctccacattttcatgtgtccg

SEQ ID NO: 124926 - DNA, 71 bp, Homo sapiens
aacctttatcctatcttctcccctttcaactaaagcctccacattttcatgtgtccgttctgctcttttca

SEQ ID NO: 124927 - DNA, 73 bp, Homo sapiens
tatcttctcccctttcaactaaagcctccacattttcatgtgtccgttctgctcttttcagaaattctaaata

SEQ ID NO: 124928 - DNA, 75 bp, Homo sapiens
cattttcatgtgtccgttctgctcttttcagaaattctaaatatttctcatcttgccctttttggataacaagca

SEQ ID NO: 124929 - DNA, 77 bp, Homo sapiens
tccgttctgctcttttcagaaattctaaatatttctcatcttgccctttttggataacaagcaatgatgcagttgat

SEQ ID NO: 124930 - DNA, 78 bp, Homo sapiens
tcttttcagaaattctaaatatttctcatcttgccctttttggataacaagcaatgatgcagttgattctgcagaccc

SEQ ID NO: 124931 - DNA, 78 bp, Homo sapiens
aattctaaatatttctcatcttgccctttttggataacaagcaatgatgcagttgattctgcagacccttcactatta

SEQ ID NO: 124932 - DNA, 80 bp, Homo sapiens
tatttctcatcttgccctttttggataacaagcaatgatgcagttgattctgcagacccttcactattaattgctagtaa

SEQ ID NO: 124933 - DNA, 78 bp, Homo sapiens
tcttgccctttttggataacaagcaatgatgcagttgattctgcagacccttcactattaattgctagtaacctataa

SEQ ID NO: 124934 - DNA, 78 bp, Homo sapiens
tttttggataacaagcaatgatgcagttgattctgcagacccttcactattaattgctagtaacctataacttccaga

SEQ ID NO: 124935 - DNA, 79 bp, Homo sapiens
aacaagcaatgatgcagttgattctgcagacccttcactattaattgctagtaacctataacttccagaatctctgtct

SEQ ID NO: 124936 - DNA, 73 bp, Homo sapiens
agttgattctgcagacccttcactattaattgctagtaacctataacttccagaatctctgtcttggaccctt

SEQ ID NO: 124937 - DNA, 72 bp, Homo sapiens
attctgcagacccttcactattaattgctagtaacctataacttccagaatctctgtcttggacccttttaa

SEQ ID NO: 124938 - DNA, 73 bp, Homo sapiens
ttcactattaattgctagtaacctataacttccagaatctctgtcttggacccttttaatctctaagctggaa

SEQ ID NO: 124939 - DNA, 74 bp, Homo sapiens
taacctataacttccagaatctctgtcttggacccttttaatctctaagctggaagagtgatggtgtaaatcac

SEQ ID NO: 124940 - DNA, 77 bp, Homo sapiens
tccagaatctctgtcttggacccttttaatctctaagctggaagagtgatggtgtaaatcactctcagcttttataa

SEQ ID NO: 124941 - DNA, 75 bp, Homo sapiens
tgtcttggacccttttaatctctaagctggaagagtgatggtgtaaatcactctcagcttttataatccgacgaa

SEQ ID NO: 124942 - DNA, 74 bp, Homo sapiens
cttttaatctctaagctggaagagtgatggtgtaaatcactctcagcttttataatccgacgaagacctgttgg

SEQ ID NO: 124943 - DNA, 76 bp, Homo sapiens
aatctctaagctggaagagtgatggtgtaaatcactctcagcttttataatccgacgaagacctgttgggatgggc

SEQ ID NO: 124944 - DNA, 75 bp, Homo sapiens
agagtgatggtgtaaatcactctcagcttttataatccgacgaagacctgttgggatgggccgattgttatgaaa

SEQ ID NO: 124945 - DNA, 73 bp, Homo sapiens
tctcagcttttataatccgacgaagacctgttgggatgggccgattgttatgaaaccaagtcatttctggagt

SEQ ID NO: 124946 - DNA, 71 bp, Homo sapiens
cttttataatccgacgaagacctgttgggatgggccgattgttatgaaaccaagtcatttctggagttgga

SEQ ID NO: 124947 - DNA, 73 bp, Homo sapiens
acgaagacctgttgggatgggccgattgttatgaaaccaagtcatttctggagttggacaggcaattaatcta

SEQ ID NO: 124948 - DNA, 74 bp, Homo sapiens
tgttgggatgggccgattgttatgaaaccaagtcatttctggagttggacaggcaattaatctacatgtaaaaa

SEQ ID NO: 124949 - DNA, 70 bp, Homo sapiens
ccgattgttatgaaaccaagtcatttctggagttggacaggcaattaatctacatgtaaaaacaaccggt

SEQ ID NO: 124950 - DNA, 71 bp, Homo sapiens
tgaaaccaagtcatttctggagttggacaggcaattaatctacatgtaaaaacaaccggttcaccctctaa

SEQ ID NO: 124951 - DNA, 71 bp, Homo sapiens
tcatttctggagttggacaggcaattaatctacatgtaaaaacaaccggttcaccctctaaaacatattta

SEQ ID NO: 124952 - DNA, 70 bp, Homo sapiens
tctggagttggacaggcaattaatctacatgtaaaaacaaccggttcaccctctaaaacatatttaaatg

SEQ ID NO: 124953 - DNA, 68 bp, Homo sapiens
gacaggcaattaatctacatgtaaaaacaaccggttcaccctctaaaacatatttaaatgtaagtttc

SEQ ID NO: 124954 - DNA, 66 bp, Homo sapiens
tctacatgtaaaaacaaccggttcaccctctaaaacatatttaaatgtaagtttctgggtaaaaga

SEQ ID NO: 124955 - DNA, 63 bp, Homo sapiens
gtaaaaacaaccggttcaccctctaaaacatatttaaatgtaagtttctgggtaaaagaaggc

SEQ ID NO: 124956 - DNA, 68 bp, Homo sapiens
tcaccctctaaaacatatttaaatgtaagtttctgggtaaaagaaggcttaaaatattcaggccagga

SEQ ID NO: 124957 - DNA, 70 bp, Homo sapiens
aaacatatttaaatgtaagtttctgggtaaaagaaggcttaaaatattcaggccaggagcttgtagatga

SEQ ID NO: 124958 - DNA, 74 bp, Homo sapiens
taaatgtaagtttctgggtaaaagaaggcttaaaatattcaggccaggagcttgtagatgatattctacttgca

SEQ ID NO: 124959 - DNA, 78 bp, Homo sapiens
taaaagaaggcttaaaatattcaggccaggagcttgtagatgatattctacttgcatatcttttagcagccatggatt

SEQ ID NO: 124960 - DNA, 81 bp, Homo sapiens
ttaaaatattcaggccaggagcttgtagatgatattctacttgcatatcttttagcagccatggatttgtggtctatgtct

SEQ ID NO: 124961 - DNA, 83 bp, Homo sapiens
aggccaggagcttgtagatgatattctacttgcatatcttttagcagccatggatttgtggtctatgtcttcagaatctgaaa

SEQ ID NO: 124962 - DNA, 83 bp, Homo sapiens
agcttgtagatgatattctacttgcatatcttttagcagccatggatttgtggtctatgtcttcagaatctgaaaaggcgtca

SEQ ID NO: 124963 - DNA, 82 bp, Homo sapiens
atgatattctacttgcatatcttttagcagccatggatttgtggtctatgtcttcagaatctgaaaaggcgtcacgtgtatc

SEQ ID NO: 124964 - DNA, 80 bp, Homo sapiens
ttgcatatcttttagcagccatggatttgtggtctatgtcttcagaatctgaaaaggcgtcacgtgtatccctttctgaa

SEQ ID NO: 124965 - DNA, 79 bp, Homo sapiens
tcttttagcagccatggatttgtggtctatgtcttcagaatctgaaaaggcgtcacgtgtatccctttctgaatgttca

SEQ ID NO: 124966 - DNA, 76 bp, Homo sapiens
ccatggatttgtggtctatgtcttcagaatctgaaaaggcgtcacgtgtatccctttctgaatgttcagattcccc

SEQ ID NO: 124967 - DNA, 77 bp, Homo sapiens
tctatgtcttcagaatctgaaaaggcgtcacgtgtatccctttctgaatgttcagattccccctcagagaataattc

SEQ ID NO: 124968 - DNA, 75 bp, Homo sapiens
ttcagaatctgaaaaggcgtcacgtgtatccctttctgaatgttcagattccccctcagagaataattctggaaa

SEQ ID NO: 124969 - DNA, 72 bp, Homo sapiens
tctgaaaaggcgtcacgtgtatccctttctgaatgttcagattccccctcagagaataattctggaaaaaaa

SEQ ID NO: 124970 - DNA, 72 bp, Homo sapiens
agaaggcaactcaaggatcctattaatcctttagaatttctacttaaatctcacatccattataacaatacc

SEQ ID NO: 124971 - DNA, 72 bp, Homo sapiens
ctcaaggatcctattaatcctttagaatttctacttaaatctcacatccattataacaatacctttcatttc

SEQ ID NO: 124972 - DNA, 73 bp, Homo sapiens
cctattaatcctttagaatttctacttaaatctcacatccattataacaatacctttcatttccatctcaatc

SEQ ID NO: 124973 - DNA, 80 bp, Homo sapiens
gaatttctacttaaatctcacatccattataacaatacctttcatttccatctcaatctcttgttcaatcctctcatgca

SEQ ID NO: 124974 - DNA, 79 bp, Homo sapiens
cttaaatctcacatccattataacaatacctttcatttccatctcaatctcttgttcaatcctctcatgcaaaattgat

SEQ ID NO: 124975 - DNA, 80 bp, Homo sapiens
acatccattataacaatacctttcatttccatctcaatctcttgttcaatcctctcatgcaaaattgattcaggagctaa

SEQ ID NO: 124976 - DNA, 77 bp, Homo sapiens
aacaatacctttcatttccatctcaatctcttgttcaatcctctcatgcaaaattgattcaggagctaaaatagaaa

SEQ ID NO: 124977 - DNA, 77 bp, Homo sapiens
acctttcatttccatctcaatctcttgttcaatcctctcatgcaaaattgattcaggagctaaaatagaaaaacata

SEQ ID NO: 124978 - DNA, 77 bp, Homo sapiens
ccatctcaatctcttgttcaatcctctcatgcaaaattgattcaggagctaaaatagaaaaacatataaagagattt

SEQ ID NO: 124979 - DNA, 76 bp, Homo sapiens
atctcttgttcaatcctctcatgcaaaattgattcaggagctaaaatagaaaaacatataaagagattttagtgat

SEQ ID NO: 124980 - DNA, 78 bp, Homo sapiens
caatcctctcatgcaaaattgattcaggagctaaaatagaaaaacatataaagagattttagtgattaattgcatata

SEQ ID NO: 124981 - DNA, 79 bp, Homo sapiens
tgcaaaattgattcaggagctaaaatagaaaaacatataaagagattttagtgattaattgcatatattttctgcatca

SEQ ID NO: 124982 - DNA, 77 bp, Homo sapiens
ataaagcgatgaggatgaaatgaagcaagtcatagctaaaaatcaattaaccaccttctacacttagtactgctgac

SEQ ID NO: 124983 - DNA, 77 bp, Homo sapiens
tgaaatgaagcaagtcatagctaaaaatcaattaaccaccttctacacttagtactgctgacgttgtcctctctcca

SEQ ID NO: 124984 - DNA, 76 bp, Homo sapiens
aagcaagtcatagctaaaaatcaattaaccaccttctacacttagtactgctgacgttgtcctctctccacagtca

SEQ ID NO: 124985 - DNA, 76 bp, Homo sapiens
tagctaaaaatcaattaaccaccttctacacttagtactgctgacgttgtcctctctccacagtcattgtgtacaa

SEQ ID NO: 124986 - DNA, 80 bp, Homo sapiens
aatcaattaaccaccttctacacttagtactgctgacgttgtcctctctccacagtcattgtgtacaatgcagctgtata

SEQ ID NO: 124987 - DNA, 80 bp, Homo sapiens
accttctacacttagtactgctgacgttgtcctctctccacagtcattgtgtacaatgcagctgtatagtccttggtcta

SEQ ID NO: 124988 - DNA, 83 bp, Homo sapiens
ttagtactgctgacgttgtcctctctccacagtcattgtgtacaatgcagctgtatagtccttggtctaccagctgaacatta

SEQ ID NO: 124989 - DNA, 81 bp, Homo sapiens
acgttgtcctctctccacagtcattgtgtacaatgcagctgtatagtccttggtctaccagctgaacattacatatggtaa

SEQ ID NO: 124990 - DNA, 83 bp, Homo sapiens
tctctccacagtcattgtgtacaatgcagctgtatagtccttggtctaccagctgaacattacatatggtaagaaactgaata

SEQ ID NO: 124991 - DNA, 80 bp, Homo sapiens
tcattgtgtacaatgcagctgtatagtccttggtctaccagctgaacattacatatggtaagaaactgaatatttccatt

SEQ ID NO: 124992 - DNA, 78 bp, Homo sapiens
gtgtacaatgcagctgtatagtccttggtctaccagctgaacattacatatggtaagaaactgaatatttccattttg

SEQ ID NO: 124993 - DNA, 75 bp, Homo sapiens
agctgtatagtccttggtctaccagctgaacattacatatggtaagaaactgaatatttccattttgtgattgtt

SEQ ID NO: 124994 - DNA, 76 bp, Homo sapiens
ttggtctaccagctgaacattacatatggtaagaaactgaatatttccattttgtgattgtttcagtctctcggat

SEQ ID NO: 124995 - DNA, 76 bp, Homo sapiens
agctgaacattacatatggtaagaaactgaatatttccattttgtgattgtttcagtctctcggattcctctatct

SEQ ID NO: 124996 - DNA, 76 bp, Homo sapiens
acattacatatggtaagaaactgaatatttccattttgtgattgtttcagtctctcggattcctctatctttgcac

SEQ ID NO: 124997 - DNA, 76 bp, Homo sapiens
taagaaactgaatatttccattttgtgattgtttcagtctctcggattcctctatctttgcaccttcgtgagtcca

SEQ ID NO: 124998 - DNA, 78 bp, Homo sapiens
tatttccattttgtgattgtttcagtctctcggattcctctatctttgcaccttcgtgagtccaggttacatcaatga

SEQ ID NO: 124999 - DNA, 76 bp, Homo sapiens
attttgtgattgtttcagtctctcggattcctctatctttgcaccttcgtgagtccaggttacatcaatgaaagaa

SEQ ID NO: 125000 - DNA, 76 bp, Homo sapiens
attgtttcagtctctcggattcctctatctttgcaccttcgtgagtccaggttacatcaatgaaagaatcatcttt

SEQ ID NO: 125001 - DNA, 77 bp, Homo sapiens
tctctcggattcctctatctttgcaccttcgtgagtccaggttacatcaatgaaagaatcatcttttaaaacacaga

SEQ ID NO: 125002 - DNA, 77 bp, Homo sapiens
tcctctatctttgcaccttcgtgagtccaggttacatcaatgaaagaatcatcttttaaaacacagaggaattgagc

SEQ ID NO: 125003 - DNA, 76 bp, Homo sapiens
ttgcaccttcgtgagtccaggttacatcaatgaaagaatcatcttttaaaacacagaggaattgagccgtgtcacc

SEQ ID NO: 125004 - DNA, 74 bp, Homo sapiens
agtccaggttacatcaatgaaagaatcatcttttaaaacacagaggaattgagccgtgtcaccgcactttacag

SEQ ID NO: 125005 - DNA, 76 bp, Homo sapiens
gaatcatcttttaaaacacagaggaattgagccgtgtcaccgcactttacagtgacgtcctgaagatgcaggaaaa

SEQ ID NO: 125006 - DNA, 74 bp, Homo sapiens
ttttaaaacacagaggaattgagccgtgtcaccgcactttacagtgacgtcctgaagatgcaggaaaatcttgg

SEQ ID NO: 125007 - DNA, 77 bp, Homo sapiens
acacagaggaattgagccgtgtcaccgcactttacagtgacgtcctgaagatgcaggaaaatcttgggcgcctcacc

SEQ ID NO: 125008 - DNA, 75 bp, Homo sapiens
gccgtgtcaccgcactttacagtgacgtcctgaagatgcaggaaaatcttgggcgcctcacccgtggactcttta

SEQ ID NO: 125009 - DNA, 75 bp, Homo sapiens
accgcactttacagtgacgtcctgaagatgcaggaaaatcttgggcgcctcacccgtggactctttagcacattc

SEQ ID NO: 125010 - DNA, 76 bp, Homo sapiens
tttacagtgacgtcctgaagatgcaggaaaatcttgggcgcctcacccgtggactctttagcacattccttagata

SEQ ID NO: 125011 - DNA, 80 bp, Homo sapiens
tgaagatgcaggaaaatcttgggcgcctcacccgtggactctttagcacattccttagatagctcagtgctttctgcaat

SEQ ID NO: 125012 - DNA, 77 bp, Homo sapiens
aggaaaatcttgggcgcctcacccgtggactctttagcacattccttagatagctcagtgctttctgcaatttgtga

SEQ ID NO: 125013 - DNA, 77 bp, Homo sapiens
atcttgggcgcctcacccgtggactctttagcacattccttagatagctcagtgctttctgcaatttgtgaaaggga

SEQ ID NO: 125014 - DNA, 79 bp, Homo sapiens
acccgtggactctttagcacattccttagatagctcagtgctttctgcaatttgtgaaagggatgcagtatggcacaac

SEQ ID NO: 125015 - DNA, 86 bp, Homo sapiens
acattccttagatagctcagtgctttctgcaatttgtgaaagggatgcagtatggcacaactgtgtatcttgaacagatgcagctg

SEQ ID NO: 125016 - DNA, 86 bp, Homo sapiens
tttctgcaatttgtgaaagggatgcagtatggcacaactgtgtatcttgaacagatgcagctgtgtggatggaactttgagataca

SEQ ID NO: 125017 - DNA, 82 bp, Homo sapiens
aatttgtgaaagggatgcagtatggcacaactgtgtatcttgaacagatgcagctgtgtggatggaactttgagatacactt

SEQ ID NO: 125018 - DNA, 81 bp, Homo sapiens
aaagggatgcagtatggcacaactgtgtatcttgaacagatgcagctgtgtggatggaactttgagatacactttcaaaaa

SEQ ID NO: 125019 - DNA, 83 bp, Homo sapiens
tatggcacaactgtgtatcttgaacagatgcagctgtgtggatggaactttgagatacactttcaaaaacctgcacttcatat

SEQ ID NO: 125020 - DNA, 83 bp, Homo sapiens
aactgtgtatcttgaacagatgcagctgtgtggatggaactttgagatacactttcaaaaacctgcacttcatattcatatga

SEQ ID NO: 125021 - DNA, 84 bp, Homo sapiens
aacagatgcagctgtgtggatggaactttgagatacactttcaaaaacctgcacttcatattcatatgatgatccttgaaatga

SEQ ID NO: 125022 - DNA, 79 bp, Homo sapiens
ctgtgtggatggaactttgagatacactttcaaaaacctgcacttcatattcatatgatgatccttgaaatgacttaat

SEQ ID NO: 125023 - DNA, 78 bp, Homo sapiens
tggatggaactttgagatacactttcaaaaacctgcacttcatattcatatgatgatccttgaaatgacttaatttcc

SEQ ID NO: 125024 - DNA, 78 bp, Homo sapiens
tttgagatacactttcaaaaacctgcacttcatattcatatgatgatccttgaaatgacttaatttccttttgagata

SEQ ID NO: 125025 - DNA, 78 bp, Homo sapiens
tcaaaaacctgcacttcatattcatatgatgatccttgaaatgacttaatttccttttgagatattttgctctcctcc

SEQ ID NO: 125026 - DNA, 78 bp, Homo sapiens
ttcatatgatgatccttgaaatgacttaatttccttttgagatattttgctctcctcctttgtgaaagaggaatctgc

SEQ ID NO: 125027 - DNA, 76 bp, Homo sapiens
atgatccttgaaatgacttaatttccttttgagatattttgctctcctcctttgtgaaagaggaatctgccactgc

SEQ ID NO: 125028 - DNA, 73 bp, Homo sapiens
aatgacttaatttccttttgagatattttgctctcctcctttgtgaaagaggaatctgccactgcctgggact

SEQ ID NO: 125029 - DNA, 74 bp, Homo sapiens
taatttccttttgagatattttgctctcctcctttgtgaaagaggaatctgccactgcctgggacttggcggac

SEQ ID NO: 125030 - DNA, 77 bp, Homo sapiens
ttgagatattttgctctcctcctttgtgaaagaggaatctgccactgcctgggacttggcggactctcttacatctt

SEQ ID NO: 125031 - DNA, 74 bp, Homo sapiens
tctcctcctttgtgaaagaggaatctgccactgcctgggacttggcggactctcttacatctttcccagaactt

SEQ ID NO: 125032 - DNA, 76 bp, Homo sapiens
tttgtgaaagaggaatctgccactgcctgggacttggcggactctcttacatctttcccagaactttgcctatcta

SEQ ID NO: 125033 - DNA, 76 bp, Homo sapiens
actgcctgggacttggcggactctcttacatctttcccagaactttgcctatctagggcttgcactgtataatcaa

SEQ ID NO: 125034 - DNA, 76 bp, Homo sapiens
ttggcggactctcttacatctttcccagaactttgcctatctagggcttgcactgtataatcaagtgacaagaaaa

SEQ ID NO: 125035 - DNA, 75 bp, Homo sapiens
ggactctcttacatctttcccagaactttgcctatctagggcttgcactgtataatcaagtgacaagaaaaagaa

SEQ ID NO: 125036 - DNA, 78 bp, Homo sapiens
agaggtatacagcaaatcaaagtccttgaagcaagatgggctttaccttttggagtcactgtgagtgtagctgcacaa

SEQ ID NO: 125037 - DNA, 79 bp, Homo sapiens
tatacagcaaatcaaagtccttgaagcaagatgggctttaccttttggagtcactgtgagtgtagctgcacaagtggct

SEQ ID NO: 125038 - DNA, 78 bp, Homo sapiens
atcaaagtccttgaagcaagatgggctttaccttttggagtcactgtgagtgtagctgcacaagtggcttccccagca

SEQ ID NO: 125039 - DNA, 80 bp, Homo sapiens
ctttaccttttggagtcactgtgagtgtagctgcacaagtggcttccccagcactattggctgctttgcaagagtactgc

SEQ ID NO: 125040 - DNA, 87 bp, Homo sapiens
ttttggagtcactgtgagtgtagctgcacaagtggcttccccagcactattggctgctttgcaagagtactgcccagcatgctctga

SEQ ID NO: 125041 - DNA, 89 bp, Homo sapiens
tgtgagtgtagctgcacaagtggcttccccagcactattggctgctttgcaagagtactgcccagcatgctctgagtaagcatcaacta

SEQ ID NO: 125042 - DNA, 87 bp, Homo sapiens
ctgcacaagtggcttccccagcactattggctgctttgcaagagtactgcccagcatgctctgagtaagcatcaactataagcatta

SEQ ID NO: 125043 - DNA, 83 bp, Homo sapiens
aagtggcttccccagcactattggctgctttgcaagagtactgcccagcatgctctgagtaagcatcaactataagcattaaa

SEQ ID NO: 125044 - DNA, 87 bp, Homo sapiens
agcactattggctgctttgcaagagtactgcccagcatgctctgagtaagcatcaactataagcattaaagccatgcctgtggactc

SEQ ID NO: 125045 - DNA, 85 bp, Homo sapiens
ctgctttgcaagagtactgcccagcatgctctgagtaagcatcaactataagcattaaagccatgcctgtggactcctcaaaatg

SEQ ID NO: 125046 - DNA, 81 bp, Homo sapiens
aagagtactgcccagcatgctctgagtaagcatcaactataagcattaaagccatgcctgtggactcctcaaaatggaaaa

SEQ ID NO: 125047 - DNA, 80 bp, Homo sapiens
ccagcatgctctgagtaagcatcaactataagcattaaagccatgcctgtggactcctcaaaatggaaaactacatcttt

SEQ ID NO: 125048 - DNA, 78 bp, Homo sapiens
atgctctgagtaagcatcaactataagcattaaagccatgcctgtggactcctcaaaatggaaaactacatcttttgt

SEQ ID NO: 125049 - DNA, 74 bp, Homo sapiens
atcaactataagcattaaagccatgcctgtggactcctcaaaatggaaaactacatcttttgttggtagaatta

SEQ ID NO: 125050 - DNA, 76 bp, Homo sapiens
tataagcattaaagccatgcctgtggactcctcaaaatggaaaactacatcttttgttggtagaattagctgctgg

SEQ ID NO: 125051 - DNA, 75 bp, Homo sapiens
taaagccatgcctgtggactcctcaaaatggaaaactacatcttttgttggtagaattagctgctggttatgaaa

SEQ ID NO: 125052 - DNA, 73 bp, Homo sapiens
tgtggactcctcaaaatggaaaactacatcttttgttggtagaattagctgctggttatgaaaccattggatt

SEQ ID NO: 125053 - DNA, 71 bp, Homo sapiens
aaaatggaaaactacatcttttgttggtagaattagctgctggttatgaaaccattggatttctggcttgg

SEQ ID NO: 125054 - DNA, 74 bp, Homo sapiens
aaactacatcttttgttggtagaattagctgctggttatgaaaccattggatttctggcttgggaatgccagaa

SEQ ID NO: 125055 - DNA, 76 bp, Homo sapiens
ttgttggtagaattagctgctggttatgaaaccattggatttctggcttgggaatgccagaaaccctcgcatgaaa

SEQ ID NO: 125056 - DNA, 79 bp, Homo sapiens
tagaattagctgctggttatgaaaccattggatttctggcttgggaatgccagaaaccctcgcatgaaatctgactgtc

SEQ ID NO: 125057 - DNA, 75 bp, Homo sapiens
tggttatgaaaccattggatttctggcttgggaatgccagaaaccctcgcatgaaatctgactgtctccccgttg

SEQ ID NO: 125058 - DNA, 74 bp, Homo sapiens
aaaccattggatttctggcttgggaatgccagaaaccctcgcatgaaatctgactgtctccccgttgtgcaccc

SEQ ID NO: 125059 - DNA, 78 bp, Homo sapiens
atttctggcttgggaatgccagaaaccctcgcatgaaatctgactgtctccccgttgtgcaccctgaggcttgacaga

SEQ ID NO: 125060 - DNA, 80 bp, Homo sapiens
ttgggaatgccagaaaccctcgcatgaaatctgactgtctccccgttgtgcaccctgaggcttgacagaggctggatgaa

SEQ ID NO: 125061 - DNA, 77 bp, Homo sapiens
aaaccctcgcatgaaatctgactgtctccccgttgtgcaccctgaggcttgacagaggctggatgaagctgggcttt

SEQ ID NO: 125062 - DNA, 77 bp, Homo sapiens
atgaaatctgactgtctccccgttgtgcaccctgaggcttgacagaggctggatgaagctgggcttttggccaaggg

SEQ ID NO: 125063 - DNA, 75 bp, Homo sapiens
cgttgtgcaccctgaggcttgacagaggctggatgaagctgggcttttggccaaggggctccttcttaaatgaaa

SEQ ID NO: 125064 - DNA, 74 bp, Homo sapiens
accctgaggcttgacagaggctggatgaagctgggcttttggccaaggggctccttcttaaatgaaactgataa

SEQ ID NO: 125065 - DNA, 77 bp, Homo sapiens
ttgacagaggctggatgaagctgggcttttggccaaggggctccttcttaaatgaaactgataaagagacatgccat

SEQ ID NO: 125066 - DNA, 72 bp, Homo sapiens
caaggggctccttcttaaatgaaactgataaagagacatgccattgggagtttgatgtattttcttcaaatt

SEQ ID NO: 125067 - DNA, 75 bp, Homo sapiens
gctccttcttaaatgaaactgataaagagacatgccattgggagtttgatgtattttcttcaaatttgctaaatc

SEQ ID NO: 125068 - DNA, 76 bp, Homo sapiens
gaaactgataaagagacatgccattgggagtttgatgtattttcttcaaatttgctaaatcctgaaaagaagcata

SEQ ID NO: 125069 - DNA, 75 bp, Homo sapiens
gataaagagacatgccattgggagtttgatgtattttcttcaaatttgctaaatcctgaaaagaagcataccaat

SEQ ID NO: 125070 - DNA, 69 bp, Homo sapiens
taagattcgatctatatttaaatggggttctgaaagttgttttactttaccttccagactcaggttggc

SEQ ID NO: 125071 - DNA, 70 bp, Homo sapiens
tatatttaaatggggttctgaaagttgttttactttaccttccagactcaggttggctgtgcttgatact

SEQ ID NO: 125072 - DNA, 73 bp, Homo sapiens
gggttctgaaagttgttttactttaccttccagactcaggttggctgtgcttgatacttggcctacagcatta

SEQ ID NO: 125073 - DNA, 75 bp, Homo sapiens
tttactttaccttccagactcaggttggctgtgcttgatacttggcctacagcattactagcaacaaacgtgtaa

SEQ ID NO: 125074 - DNA, 77 bp, Homo sapiens
cttccagactcaggttggctgtgcttgatacttggcctacagcattactagcaacaaacgtgtaagttccttcatct

SEQ ID NO: 125075 - DNA, 78 bp, Homo sapiens
ttggctgtgcttgatacttggcctacagcattactagcaacaaacgtgtaagttccttcatcttctggataagcttcg

SEQ ID NO: 125076 - DNA, 76 bp, Homo sapiens
ttgatacttggcctacagcattactagcaacaaacgtgtaagttccttcatcttctggataagcttcggcaatttc

SEQ ID NO: 125077 - DNA, 76 bp, Homo sapiens
gcctacagcattactagcaacaaacgtgtaagttccttcatcttctggataagcttcggcaatttccagttgataa

SEQ ID NO: 125078 - DNA, 73 bp, Homo sapiens
attactagcaacaaacgtgtaagttccttcatcttctggataagcttcggcaatttccagttgataagtgtct

SEQ ID NO: 125079 - DNA, 73 bp, Homo sapiens
aacaaacgtgtaagttccttcatcttctggataagcttcggcaatttccagttgataagtgtcttcaaattga

SEQ ID NO: 125080 - DNA, 76 bp, Homo sapiens
tgtaagttccttcatcttctggataagcttcggcaatttccagttgataagtgtcttcaaattgagtcattctaaa

SEQ ID NO: 125081 - DNA, 77 bp, Homo sapiens
ttcatcttctggataagcttcggcaatttccagttgataagtgtcttcaaattgagtcattctaaagaaccgagatg

SEQ ID NO: 125082 - DNA, 74 bp, Homo sapiens
ataagcttcggcaatttccagttgataagtgtcttcaaattgagtcattctaaagaaccgagatggcttgattt

SEQ ID NO: 125083 - DNA, 74 bp, Homo sapiens
ggcaatttccagttgataagtgtcttcaaattgagtcattctaaagaaccgagatggcttgattttcttgtctt

SEQ ID NO: 125084 - DNA, 75 bp, Homo sapiens
agttgataagtgtcttcaaattgagtcattctaaagaaccgagatggcttgattttcttgtctttgctgtaccac

SEQ ID NO: 125085 - DNA, 75 bp, Homo sapiens
tcttcaaattgagtcattctaaagaaccgagatggcttgattttcttgtctttgctgtaccacgacacttttaga

SEQ ID NO: 125086 - DNA, 76 bp, Homo sapiens
aattgagtcattctaaagaaccgagatggcttgattttcttgtctttgctgtaccacgacacttttagatctgcga

SEQ ID NO: 125087 - DNA, 74 bp, Homo sapiens
taaagaaccgagatggcttgattttcttgtctttgctgtaccacgacacttttagatctgcgacacaaaagaaa

SEQ ID NO: 125088 - DNA, 75 bp, Homo sapiens
atggcttgattttcttgtctttgctgtaccacgacacttttagatctgcgacacaaaagaaaagagatacttcaa

SEQ ID NO: 125089 - DNA, 67 bp, Homo sapiens
aattatttgtaagtattggcaatgacaccttttgttcttaaacctacctgttccagaaacccggcat

SEQ ID NO: 125090 - DNA, 68 bp, Homo sapiens
ttgtaagtattggcaatgacaccttttgttcttaaacctacctgttccagaaacccggcattgaaaac

SEQ ID NO: 125091 - DNA, 67 bp, Homo sapiens
atgacaccttttgttcttaaacctacctgttccagaaacccggcattgaaaacgggctggctgccct

SEQ ID NO: 125092 - DNA, 69 bp, Homo sapiens
ttttgttcttaaacctacctgttccagaaacccggcattgaaaacgggctggctgcccttcagaagtga

SEQ ID NO: 125093 - DNA, 72 bp, Homo sapiens
ttaaacctacctgttccagaaacccggcattgaaaacgggctggctgcccttcagaagtgacagtgtcctga

SEQ ID NO: 125094 - DNA, 76 bp, Homo sapiens
tgttccagaaacccggcattgaaaacgggctggctgcccttcagaagtgacagtgtcctgaagcggggtgatgatg

SEQ ID NO: 125095 - DNA, 78 bp, Homo sapiens
cggcattgaaaacgggctggctgcccttcagaagtgacagtgtcctgaagcggggtgatgatggcaggtggataaaca

SEQ ID NO: 125096 - DNA, 76 bp, Homo sapiens
aaaacgggctggctgcccttcagaagtgacagtgtcctgaagcggggtgatgatggcaggtggataaacaggcatt

SEQ ID NO: 125097 - DNA, 82 bp, Homo sapiens
ctgcccttcagaagtgacagtgtcctgaagcggggtgatgatggcaggtggataaacaggcatttcctgatcaggagacaca

SEQ ID NO: 125098 - DNA, 80 bp, Homo sapiens
agaagtgacagtgtcctgaagcggggtgatgatggcaggtggataaacaggcatttcctgatcaggagacacaacttctg

SEQ ID NO: 125099 - DNA, 78 bp, Homo sapiens
agtgtcctgaagcggggtgatgatggcaggtggataaacaggcatttcctgatcaggagacacaacttctggaactaa

SEQ ID NO: 125100 - DNA, 76 bp, Homo sapiens
aagcggggtgatgatggcaggtggataaacaggcatttcctgatcaggagacacaacttctggaactaaagaaaga

SEQ ID NO: 125101 - DNA, 74 bp, Homo sapiens
atggcaggtggataaacaggcatttcctgatcaggagacacaacttctggaactaaagaaagaaaccacaagat

SEQ ID NO: 125102 - DNA, 76 bp, Homo sapiens
gataaacaggcatttcctgatcaggagacacaacttctggaactaaagaaagaaaccacaagatttgtcatgatta

SEQ ID NO: 125103 - DNA, 77 bp, Homo sapiens
ctgcttcttaggttttattttcagctggaagtagcgaggcattcctaccttccactgagagtgaagctgatgttgtg

SEQ ID NO: 125104 - DNA, 83 bp, Homo sapiens
tagcgaggcattcctaccttccactgagagtgaagctgatgttgtggcaacaccatagtcattcttggcttcacaggtataga

SEQ ID NO: 125105 - DNA, 82 bp, Homo sapiens
attcctaccttccactgagagtgaagctgatgttgtggcaacaccatagtcattcttggcttcacaggtatagactgccgca

SEQ ID NO: 125106 - DNA, 84 bp, Homo sapiens
ttccactgagagtgaagctgatgttgtggcaacaccatagtcattcttggcttcacaggtatagactgccgcatcctctgggaa

SEQ ID NO: 125107 - DNA, 83 bp, Homo sapiens
tgaagctgatgttgtggcaacaccatagtcattcttggcttcacaggtatagactgccgcatcctctgggaaggcttcaatta

SEQ ID NO: 125108 - DNA, 80 bp, Homo sapiens
atgttgtggcaacaccatagtcattcttggcttcacaggtatagactgccgcatcctctgggaaggcttcaattagcaaa

SEQ ID NO: 125109 - DNA, 78 bp, Homo sapiens
accatagtcattcttggcttcacaggtatagactgccgcatcctctgggaaggcttcaattagcaaaagcgtgtattc

SEQ ID NO: 125110 - DNA, 79 bp, Homo sapiens
attcttggcttcacaggtatagactgccgcatcctctgggaaggcttcaattagcaaaagcgtgtattcttgcccatca

SEQ ID NO: 125111 - DNA, 79 bp, Homo sapiens
ttcacaggtatagactgccgcatcctctgggaaggcttcaattagcaaaagcgtgtattcttgcccatcatgaagaaat

SEQ ID NO: 125112 - DNA, 81 bp, Homo sapiens
tatagactgccgcatcctctgggaaggcttcaattagcaaaagcgtgtattcttgcccatcatgaagaaatttgcacttga

SEQ ID NO: 125113 - DNA, 78 bp, Homo sapiens
tcctctgggaaggcttcaattagcaaaagcgtgtattcttgcccatcatgaagaaatttgcacttgaagccagtggaa

SEQ ID NO: 125114 - DNA, 79 bp, Homo sapiens
tgggaaggcttcaattagcaaaagcgtgtattcttgcccatcatgaagaaatttgcacttgaagccagtggaaagcagc

SEQ ID NO: 125115 - DNA, 80 bp, Homo sapiens
attagcaaaagcgtgtattcttgcccatcatgaagaaatttgcacttgaagccagtggaaagcagctgctcttccttgta

SEQ ID NO: 125116 - DNA, 78 bp, Homo sapiens
gtgtattcttgcccatcatgaagaaatttgcacttgaagccagtggaaagcagctgctcttccttgtaccaggaaatt

SEQ ID NO: 125117 - DNA, 77 bp, Homo sapiens
ttcttgcccatcatgaagaaatttgcacttgaagccagtggaaagcagctgctcttccttgtaccaggaaattttgg

SEQ ID NO: 125118 - DNA, 75 bp, Homo sapiens
atgaagaaatttgcacttgaagccagtggaaagcagctgctcttccttgtaccaggaaattttgggctgtggtct

SEQ ID NO: 125119 - DNA, 75 bp, Homo sapiens
atttgcacttgaagccagtggaaagcagctgctcttccttgtaccaggaaattttgggctgtggtcttccggata

SEQ ID NO: 125120 - DNA, 76 bp, Homo sapiens
agccagtggaaagcagctgctcttccttgtaccaggaaattttgggctgtggtcttccggatatcacggcacagaa

SEQ ID NO: 125121 - DNA, 75 bp, Homo sapiens
aaagcagctgctcttccttgtaccaggaaattttgggctgtggtcttccggatatcacggcacagaagcgggcag

SEQ ID NO: 125122 - DNA, 75 bp, Homo sapiens
tcttccttgtaccaggaaattttgggctgtggtcttccggatatcacggcacagaagcgggcaggcttgccagac

SEQ ID NO: 125123 - DNA, 81 bp, Homo sapiens
attttgggctgtggtcttccggatatcacggcacagaagcgggcaggcttgccagactgcacagtgacaggctggagctcc

SEQ ID NO: 125124 - DNA, 83 bp, Homo sapiens
gtggtcttccggatatcacggcacagaagcgggcaggcttgccagactgcacagtgacaggctggagctcctgcagaacttgg

SEQ ID NO: 125125 - DNA, 83 bp, Homo sapiens
atatcacggcacagaagcgggcaggcttgccagactgcacagtgacaggctggagctcctgcagaacttggggcggttcagga

SEQ ID NO: 125126 - DNA, 81 bp, Homo sapiens
gaagcgggcaggcttgccagactgcacagtgacaggctggagctcctgcagaacttggggcggttcaggagctaggagtaa

SEQ ID NO: 125127 - DNA, 81 bp, Homo sapiens
aggcttgccagactgcacagtgacaggctggagctcctgcagaacttggggcggttcaggagctaggagtaaatgttgaca

SEQ ID NO: 125128 - DNA, 79 bp, Homo sapiens
actgcacagtgacaggctggagctcctgcagaacttggggcggttcaggagctaggagtaaatgttgacaaatagccca

SEQ ID NO: 125129 - DNA, 77 bp, Homo sapiens
tgacaggctggagctcctgcagaacttggggcggttcaggagctaggagtaaatgttgacaaatagcccatgaaaaa

SEQ ID NO: 125130 - DNA, 81 bp, Homo sapiens
attatttctgatggatccacaaaatatgctgaaatctgtccctacataccattgacatagagagtgacagaactcctgttc

SEQ ID NO: 125131 - DNA, 81 bp, Homo sapiens
atggatccacaaaatatgctgaaatctgtccctacataccattgacatagagagtgacagaactcctgttccttcctgcca

SEQ ID NO: 125132 - DNA, 79 bp, Homo sapiens
atatgctgaaatctgtccctacataccattgacatagagagtgacagaactcctgttccttcctgccacaaaggtgtat

SEQ ID NO: 125133 - DNA, 76 bp, Homo sapiens
aaatctgtccctacataccattgacatagagagtgacagaactcctgttccttcctgccacaaaggtgtattctcc

SEQ ID NO: 125134 - DNA, 82 bp, Homo sapiens
tacataccattgacatagagagtgacagaactcctgttccttcctgccacaaaggtgtattctcctgcatcgctctgtctgg

SEQ ID NO: 125135 - DNA, 84 bp, Homo sapiens
tgacatagagagtgacagaactcctgttccttcctgccacaaaggtgtattctcctgcatcgctctgtctggtctcagagataa

SEQ ID NO: 125136 - DNA, 80 bp, Homo sapiens
agagtgacagaactcctgttccttcctgccacaaaggtgtattctcctgcatcgctctgtctggtctcagagataaacat

SEQ ID NO: 125137 - DNA, 79 bp, Homo sapiens
tcctgttccttcctgccacaaaggtgtattctcctgcatcgctctgtctggtctcagagataaacattcggtggattct

SEQ ID NO: 125138 - DNA, 79 bp, Homo sapiens
ttcctgccacaaaggtgtattctcctgcatcgctctgtctggtctcagagataaacattcggtggattcttctttccac

SEQ ID NO: 125139 - DNA, 77 bp, Homo sapiens
aaaggtgtattctcctgcatcgctctgtctggtctcagagataaacattcggtggattcttctttccactacatatt

SEQ ID NO: 125140 - DNA, 80 bp, Homo sapiens
tattctcctgcatcgctctgtctggtctcagagataaacattcggtggattcttctttccactacatatttgtgtcgttc

SEQ ID NO: 125141 - DNA, 76 bp, Homo sapiens
atcgctctgtctggtctcagagataaacattcggtggattcttctttccactacatatttgtgtcgttcttgaact

SEQ ID NO: 125142 - DNA, 74 bp, Homo sapiens
gtctcagagataaacattcggtggattcttctttccactacatatttgtgtcgttcttgaacttggaaattgat

SEQ ID NO: 125143 - DNA, 73 bp, Homo sapiens
agagataaacattcggtggattcttctttccactacatatttgtgtcgttcttgaacttggaaattgatttca

SEQ ID NO: 125144 - DNA, 73 bp, Homo sapiens
attcggtggattcttctttccactacatatttgtgtcgttcttgaacttggaaattgatttcaatgccatctt

SEQ ID NO: 125145 - DNA, 74 bp, Homo sapiens
ttcttctttccactacatatttgtgtcgttcttgaacttggaaattgatttcaatgccatctttataccagtgg

SEQ ID NO: 125146 - DNA, 79 bp, Homo sapiens
tacatatttgtgtcgttcttgaacttggaaattgatttcaatgccatctttataccagtgggcatcaacatcgtcttca

SEQ ID NO: 125147 - DNA, 78 bp, Homo sapiens
tcgttcttgaacttggaaattgatttcaatgccatctttataccagtgggcatcaacatcgtcttcattgacctcaaa

SEQ ID NO: 125148 - DNA, 77 bp, Homo sapiens
aacttggaaattgatttcaatgccatctttataccagtgggcatcaacatcgtcttcattgacctcaaattcaacaa

SEQ ID NO: 125149 - DNA, 80 bp, Homo sapiens
attgatttcaatgccatctttataccagtgggcatcaacatcgtcttcattgacctcaaattcaacaacagcacgctgtt

SEQ ID NO: 125150 - DNA, 81 bp, Homo sapiens
aatgccatctttataccagtgggcatcaacatcgtcttcattgacctcaaattcaacaacagcacgctgtttctcaatgac

SEQ ID NO: 125151 - DNA, 81 bp, Homo sapiens
tttataccagtgggcatcaacatcgtcttcattgacctcaaattcaacaacagcacgctgtttctcaatgacctgttgatg

SEQ ID NO: 125152 - DNA, 80 bp, Homo sapiens
catcaacatcgtcttcattgacctcaaattcaacaacagcacgctgtttctcaatgacctgttgatggaacaacataaaa

SEQ ID NO: 125153 - DNA, 77 bp, Homo sapiens
acatcgtcttcattgacctcaaattcaacaacagcacgctgtttctcaatgacctgttgatggaacaacataaaaaa

SEQ ID NO: 125154 - DNA, 75 bp, Homo sapiens
attgacctcaaattcaacaacagcacgctgtttctcaatgacctgttgatggaacaacataaaaaaacaacaaca

SEQ ID NO: 125155 - DNA, 71 bp, Homo sapiens
tatggactactgatgatttttcaaaacatttagtatgtagacaatacctgaacctcctttttaatacttcg

SEQ ID NO: 125156 - DNA, 72 bp, Homo sapiens
gatgatttttcaaaacatttagtatgtagacaatacctgaacctcctttttaatacttcggatgcgaacatc

SEQ ID NO: 125157 - DNA, 72 bp, Homo sapiens
tttcaaaacatttagtatgtagacaatacctgaacctcctttttaatacttcggatgcgaacatctctgcct

SEQ ID NO: 125158 - DNA, 73 bp, Homo sapiens
atttagtatgtagacaatacctgaacctcctttttaatacttcggatgcgaacatctctgccttctacaaaga

SEQ ID NO: 125159 - DNA, 73 bp, Homo sapiens
tagacaatacctgaacctcctttttaatacttcggatgcgaacatctctgccttctacaaagagttttgcagt

SEQ ID NO: 125160 - DNA, 72 bp, Homo sapiens
aacctcctttttaatacttcggatgcgaacatctctgccttctacaaagagttttgcagttgacacgttgcc

SEQ ID NO: 125161 - DNA, 75 bp, Homo sapiens
ctttttaatacttcggatgcgaacatctctgccttctacaaagagttttgcagttgacacgttgcctcctgccac

SEQ ID NO: 125162 - DNA, 78 bp, Homo sapiens
cttcggatgcgaacatctctgccttctacaaagagttttgcagttgacacgttgcctcctgccaccactgtgtacttc

SEQ ID NO: 125163 - DNA, 80 bp, Homo sapiens
aacatctctgccttctacaaagagttttgcagttgacacgttgcctcctgccaccactgtgtacttcccagcatcagaca

SEQ ID NO: 125164 - DNA, 78 bp, Homo sapiens
ttctacaaagagttttgcagttgacacgttgcctcctgccaccactgtgtacttcccagcatcagacatccgggtgga

SEQ ID NO: 125165 - DNA, 79 bp, Homo sapiens
agttttgcagttgacacgttgcctcctgccaccactgtgtacttcccagcatcagacatccgggtggatgggatcagaa

SEQ ID NO: 125166 - DNA, 81 bp, Homo sapiens
tgacacgttgcctcctgccaccactgtgtacttcccagcatcagacatccgggtggatgggatcagaaggcggtggacata

SEQ ID NO: 125167 - DNA, 78 bp, Homo sapiens
ctcctgccaccactgtgtacttcccagcatcagacatccgggtggatgggatcagaaggcggtggacatatttctcct

SEQ ID NO: 125168 - DNA, 78 bp, Homo sapiens
cactgtgtacttcccagcatcagacatccgggtggatgggatcagaaggcggtggacatatttctccttctgaatctt

SEQ ID NO: 125169 - DNA, 78 bp, Homo sapiens
tacttcccagcatcagacatccgggtggatgggatcagaaggcggtggacatatttctccttctgaatctttattcta

SEQ ID NO: 125170 - DNA, 78 bp, Homo sapiens
atcagacatccgggtggatgggatcagaaggcggtggacatatttctccttctgaatctttattctatggatgaaatg

SEQ ID NO: 125171 - DNA, 75 bp, Homo sapiens
atccgggtggatgggatcagaaggcggtggacatatttctccttctgaatctttattctatggatgaaatggaaa

SEQ ID NO: 125172 - DNA, 75 bp, Homo sapiens
atgggatcagaaggcggtggacatatttctccttctgaatctttattctatggatgaaatggaaattcgagttta

SEQ ID NO: 125173 - DNA, 77 bp, Homo sapiens
gaggaaactgggaattactggaatgtagcaagacaaaacaactgacctgtctgtgatctgcagttcctggtcatctt

SEQ ID NO: 125174 - DNA, 79 bp, Homo sapiens
aactgggaattactggaatgtagcaagacaaaacaactgacctgtctgtgatctgcagttcctggtcatctttcatcca

SEQ ID NO: 125175 - DNA, 85 bp, Homo sapiens
tactggaatgtagcaagacaaaacaactgacctgtctgtgatctgcagttcctggtcatctttcatccactgtacagtgatgtca

SEQ ID NO: 125176 - DNA, 81 bp, Homo sapiens
aagacaaaacaactgacctgtctgtgatctgcagttcctggtcatctttcatccactgtacagtgatgtcaggttcagaaa

SEQ ID NO: 125177 - DNA, 82 bp, Homo sapiens
aaacaactgacctgtctgtgatctgcagttcctggtcatctttcatccactgtacagtgatgtcaggttcagaaacttcaca

SEQ ID NO: 125178 - DNA, 85 bp, Homo sapiens
tctgtgatctgcagttcctggtcatctttcatccactgtacagtgatgtcaggttcagaaacttcacattcaaacatggctcgct

SEQ ID NO: 125179 - DNA, 81 bp, Homo sapiens
cagttcctggtcatctttcatccactgtacagtgatgtcaggttcagaaacttcacattcaaacatggctcgcttcttctc

SEQ ID NO: 125180 - DNA, 81 bp, Homo sapiens
tcatctttcatccactgtacagtgatgtcaggttcagaaacttcacattcaaacatggctcgcttcttctccagtacctta

SEQ ID NO: 125181 - DNA, 79 bp, Homo sapiens
tttcatccactgtacagtgatgtcaggttcagaaacttcacattcaaacatggctcgcttcttctccagtaccttaatg

SEQ ID NO: 125182 - DNA, 76 bp, Homo sapiens
agtgatgtcaggttcagaaacttcacattcaaacatggctcgcttcttctccagtaccttaatgtccttaatgtgt

SEQ ID NO: 125183 - DNA, 73 bp, Homo sapiens
aggttcagaaacttcacattcaaacatggctcgcttcttctccagtaccttaatgtccttaatgtgtttccta

SEQ ID NO: 125184 - DNA, 73 bp, Homo sapiens
aacttcacattcaaacatggctcgcttcttctccagtaccttaatgtccttaatgtgtttcctaaattctata

SEQ ID NO: 125185 - DNA, 75 bp, Homo sapiens
attcaaacatggctcgcttcttctccagtaccttaatgtccttaatgtgtttcctaaattctatatgacgagctg

SEQ ID NO: 125186 - DNA, 76 bp, Homo sapiens
tcgcttcttctccagtaccttaatgtccttaatgtgtttcctaaattctatatgacgagctggaaaatagcatgta

SEQ ID NO: 125187 - DNA, 74 bp, Homo sapiens
cttctccagtaccttaatgtccttaatgtgtttcctaaattctatatgacgagctggaaaatagcatgtagaaa

SEQ ID NO: 125188 - DNA, 72 bp, Homo sapiens
accttaatgtccttaatgtgtttcctaaattctatatgacgagctggaaaatagcatgtagaaaaattaaca

SEQ ID NO: 125189 - DNA, 78 bp, Homo sapiens
aaagcatgtatgacattttttctatggatctaatatgtatgaaaccataccttccacataaagtgtggctgttgatgt

SEQ ID NO: 125190 - DNA, 76 bp, Homo sapiens
acattttttctatggatctaatatgtatgaaaccataccttccacataaagtgtggctgttgatgttgcttttcca

SEQ ID NO: 125191 - DNA, 78 bp, Homo sapiens
ttctatggatctaatatgtatgaaaccataccttccacataaagtgtggctgttgatgttgcttttccagccacaaag

SEQ ID NO: 125192 - DNA, 77 bp, Homo sapiens
ctaatatgtatgaaaccataccttccacataaagtgtggctgttgatgttgcttttccagccacaaaggtgtagtca

SEQ ID NO: 125193 - DNA, 77 bp, Homo sapiens
aaaccataccttccacataaagtgtggctgttgatgttgcttttccagccacaaaggtgtagtcagcagcatcccca

SEQ ID NO: 125194 - DNA, 79 bp, Homo sapiens
ttccacataaagtgtggctgttgatgttgcttttccagccacaaaggtgtagtcagcagcatccccaaagtgaacattc

SEQ ID NO: 125195 - DNA, 78 bp, Homo sapiens
aaagtgtggctgttgatgttgcttttccagccacaaaggtgtagtcagcagcatccccaaagtgaacattcctgatgt

SEQ ID NO: 125196 - DNA, 83 bp, Homo sapiens
tgttgatgttgcttttccagccacaaaggtgtagtcagcagcatccccaaagtgaacattcctgatgttcagtgagtgtgtga

SEQ ID NO: 125197 - DNA, 79 bp, Homo sapiens
ttttccagccacaaaggtgtagtcagcagcatccccaaagtgaacattcctgatgttcagtgagtgtgtgagctttttg

SEQ ID NO: 125198 - DNA, 80 bp, Homo sapiens
acaaaggtgtagtcagcagcatccccaaagtgaacattcctgatgttcagtgagtgtgtgagctttttggttctcatctg

SEQ ID NO: 125199 - DNA, 84 bp, Homo sapiens
tcagcagcatccccaaagtgaacattcctgatgttcagtgagtgtgtgagctttttggttctcatctggcacttgtcagttgat

SEQ ID NO: 125200 - DNA, 79 bp, Homo sapiens
cccaaagtgaacattcctgatgttcagtgagtgtgtgagctttttggttctcatctggcacttgtcagttgatttgatt

SEQ ID NO: 125201 - DNA, 80 bp, Homo sapiens
aacattcctgatgttcagtgagtgtgtgagctttttggttctcatctggcacttgtcagttgatttgatttccacaccat

SEQ ID NO: 125202 - DNA, 78 bp, Homo sapiens
atgttcagtgagtgtgtgagctttttggttctcatctggcacttgtcagttgatttgatttccacaccattctttaac

SEQ ID NO: 125203 - DNA, 76 bp, Homo sapiens
agtgtgtgagctttttggttctcatctggcacttgtcagttgatttgatttccacaccattctttaaccatttgta

SEQ ID NO: 125204 - DNA, 75 bp, Homo sapiens
tttttggttctcatctggcacttgtcagttgatttgatttccacaccattctttaaccatttgtaagagatgcct

SEQ ID NO: 125205 - DNA, 79 bp, Homo sapiens
ttctcatctggcacttgtcagttgatttgatttccacaccattctttaaccatttgtaagagatgccttcatagttcac

SEQ ID NO: 125206 - DNA, 77 bp, Homo sapiens
acttgtcagttgatttgatttccacaccattctttaaccatttgtaagagatgccttcatagttcactgtcacctca

SEQ ID NO: 125207 - DNA, 76 bp, Homo sapiens
tgatttgatttccacaccattctttaaccatttgtaagagatgccttcatagttcactgtcacctcaaaagtaata

SEQ ID NO: 125208 - DNA, 74 bp, Homo sapiens
tccacaccattctttaaccatttgtaagagatgccttcatagttcactgtcacctcaaaagtaatagtgtcttt

SEQ ID NO: 125209 - DNA, 72 bp, Homo sapiens
ccattctttaaccatttgtaagagatgccttcatagttcactgtcacctcaaaagtaatagtgtctttttct

SEQ ID NO: 125210 - DNA, 75 bp, Homo sapiens
atttgtaagagatgccttcatagttcactgtcacctcaaaagtaatagtgtctttttcttcagcgttgatgtctt

SEQ ID NO: 125211 - DNA, 78 bp, Homo sapiens
atgccttcatagttcactgtcacctcaaaagtaatagtgtctttttcttcagcgttgatgtctttcagcatggaagta

SEQ ID NO: 125212 - DNA, 78 bp, Homo sapiens
atagttcactgtcacctcaaaagtaatagtgtctttttcttcagcgttgatgtctttcagcatggaagtaatcatgat

SEQ ID NO: 125213 - DNA, 79 bp, Homo sapiens
acctcaaaagtaatagtgtctttttcttcagcgttgatgtctttcagcatggaagtaatcatgattgctgcaaaggaga

SEQ ID NO: 125214 - DNA, 77 bp, Homo sapiens
aaaagtaatagtgtctttttcttcagcgttgatgtctttcagcatggaagtaatcatgattgctgcaaaggagaaaa

SEQ ID NO: 125215 - DNA, 76 bp, Homo sapiens
tttttcttcagcgttgatgtctttcagcatggaagtaatcatgattgctgcaaaggagaaaagaaaaaacacccaa

SEQ ID NO: 125216 - DNA, 76 bp, Homo sapiens
tatatatattttttaacttacgggtgactgtcagggtggcactgacttggtcattgccacagacaaatgtgtattc

SEQ ID NO: 125217 - DNA, 76 bp, Homo sapiens
tttttaacttacgggtgactgtcagggtggcactgacttggtcattgccacagacaaatgtgtattctgccgagtc

SEQ ID NO: 125218 - DNA, 80 bp, Homo sapiens
acttacgggtgactgtcagggtggcactgacttggtcattgccacagacaaatgtgtattctgccgagtcctctgtgctg

SEQ ID NO: 125219 - DNA, 90 bp, Homo sapiens
tgtcagggtggcactgacttggtcattgccacagacaaatgtgtattctgccgagtcctctgtgctggtgttcatgatgatcagctgatg

SEQ ID NO: 125220 - DNA, 86 bp, Homo sapiens
actgacttggtcattgccacagacaaatgtgtattctgccgagtcctctgtgctggtgttcatgatgatcagctgatggagttttc

SEQ ID NO: 125221 - DNA, 88 bp, Homo sapiens
tcattgccacagacaaatgtgtattctgccgagtcctctgtgctggtgttcatgatgatcagctgatggagttttccctgcacaacta

SEQ ID NO: 125222 - DNA, 85 bp, Homo sapiens
agacaaatgtgtattctgccgagtcctctgtgctggtgttcatgatgatcagctgatggagttttccctgcacaactatcttgaa

SEQ ID NO: 125223 - DNA, 83 bp, Homo sapiens
atgtgtattctgccgagtcctctgtgctggtgttcatgatgatcagctgatggagttttccctgcacaactatcttgaacttt

SEQ ID NO: 125224 - DNA, 84 bp, Homo sapiens
gagtcctctgtgctggtgttcatgatgatcagctgatggagttttccctgcacaactatcttgaacttttcactcatctcaatt

SEQ ID NO: 125225 - DNA, 84 bp, Homo sapiens
tgctggtgttcatgatgatcagctgatggagttttccctgcacaactatcttgaacttttcactcatctcaatttccacaccat

SEQ ID NO: 125226 - DNA, 84 bp, Homo sapiens
tgttcatgatgatcagctgatggagttttccctgcacaactatcttgaacttttcactcatctcaatttccacaccattcttca

SEQ ID NO: 125227 - DNA, 81 bp, Homo sapiens
atcagctgatggagttttccctgcacaactatcttgaacttttcactcatctcaatttccacaccattcttcagccacatg

SEQ ID NO: 125228 - DNA, 77 bp, Homo sapiens
atggagttttccctgcacaactatcttgaacttttcactcatctcaatttccacaccattcttcagccacatggaag

SEQ ID NO: 125229 - DNA, 78 bp, Homo sapiens
cacaactatcttgaacttttcactcatctcaatttccacaccattcttcagccacatggaagggacattgaagtggga

SEQ ID NO: 125230 - DNA, 79 bp, Homo sapiens
tatcttgaacttttcactcatctcaatttccacaccattcttcagccacatggaagggacattgaagtgggacacctca

SEQ ID NO: 125231 - DNA, 78 bp, Homo sapiens
ttttcactcatctcaatttccacaccattcttcagccacatggaagggacattgaagtgggacacctcacactcaaaa

SEQ ID NO: 125232 - DNA, 74 bp, Homo sapiens
aatttccacaccattcttcagccacatggaagggacattgaagtgggacacctcacactcaaaagaggcagttt

SEQ ID NO: 125233 - DNA, 76 bp, Homo sapiens
acaccattcttcagccacatggaagggacattgaagtgggacacctcacactcaaaagaggcagttttggtctcag

SEQ ID NO: 125234 - DNA, 76 bp, Homo sapiens
gccacatggaagggacattgaagtgggacacctcacactcaaaagaggcagttttggtctcaggcacctcgatatt

SEQ ID NO: 125235 - DNA, 74 bp, Homo sapiens
aagggacattgaagtgggacacctcacactcaaaagaggcagttttggtctcaggcacctcgatatttttcatg

SEQ ID NO: 125236 - DNA, 72 bp, Homo sapiens
attgaagtgggacacctcacactcaaaagaggcagttttggtctcaggcacctcgatatttttcatggtttt

SEQ ID NO: 125237 - DNA, 73 bp, Homo sapiens
acacctcacactcaaaagaggcagttttggtctcaggcacctcgatatttttcatggtttttgtaatatgtaa

SEQ ID NO: 125238 - DNA, 71 bp, Homo sapiens
aaaagaggcagttttggtctcaggcacctcgatatttttcatggtttttgtaatatgtaatgcttggtaaa

SEQ ID NO: 125239 - DNA, 72 bp, Homo sapiens
aggcagttttggtctcaggcacctcgatatttttcatggtttttgtaatatgtaatgcttggtaaaatcaaa

SEQ ID NO: 125240 - DNA, 75 bp, Homo sapiens
gtctcaggcacctcgatatttttcatggtttttgtaatatgtaatgcttggtaaaatcaaagagcacttcagtta

SEQ ID NO: 125241 - DNA, 72 bp, Homo sapiens
acctcgatatttttcatggtttttgtaatatgtaatgcttggtaaaatcaaagagcacttcagttaatacaa

SEQ ID NO: 125242 - DNA, 71 bp, Homo sapiens
atacatggggttcattaaggaaagggctgtagggggctgcctgatacttactctccacaaacagttttgct

SEQ ID NO: 125243 - DNA, 73 bp, Homo sapiens
ttcattaaggaaagggctgtagggggctgcctgatacttactctccacaaacagttttgctttgcattccaat

SEQ ID NO: 125244 - DNA, 73 bp, Homo sapiens
aaagggctgtagggggctgcctgatacttactctccacaaacagttttgctttgcattccaattgcccgacca

SEQ ID NO: 125245 - DNA, 77 bp, Homo sapiens
gggctgcctgatacttactctccacaaacagttttgctttgcattccaattgcccgaccacagctgtgtattcccca

SEQ ID NO: 125246 - DNA, 77 bp, Homo sapiens
atacttactctccacaaacagttttgctttgcattccaattgcccgaccacagctgtgtattccccagcatctgagg

SEQ ID NO: 125247 - DNA, 78 bp, Homo sapiens
tccacaaacagttttgctttgcattccaattgcccgaccacagctgtgtattccccagcatctgagggggagatgttc

SEQ ID NO: 125248 - DNA, 84 bp, Homo sapiens
ttttgctttgcattccaattgcccgaccacagctgtgtattccccagcatctgagggggagatgttctgcagcatcagcttgtg

SEQ ID NO: 125249 - DNA, 83 bp, Homo sapiens
tttgcattccaattgcccgaccacagctgtgtattccccagcatctgagggggagatgttctgcagcatcagcttgtggactt

SEQ ID NO: 125250 - DNA, 80 bp, Homo sapiens
aattgcccgaccacagctgtgtattccccagcatctgagggggagatgttctgcagcatcagcttgtggactttcctttc

SEQ ID NO: 125251 - DNA, 82 bp, Homo sapiens
gctgtgtattccccagcatctgagggggagatgttctgcagcatcagcttgtggactttcctttctgagaccagtctgtgtt

SEQ ID NO: 125252 - DNA, 82 bp, Homo sapiens
gtattccccagcatctgagggggagatgttctgcagcatcagcttgtggactttcctttctgagaccagtctgtgtttgtca

SEQ ID NO: 125253 - DNA, 79 bp, Homo sapiens
tgagggggagatgttctgcagcatcagcttgtggactttcctttctgagaccagtctgtgtttgtcacttggcttaatt

SEQ ID NO: 125254 - DNA, 79 bp, Homo sapiens
atgttctgcagcatcagcttgtggactttcctttctgagaccagtctgtgtttgtcacttggcttaatttccacactct

SEQ ID NO: 125255 - DNA, 77 bp, Homo sapiens
agcatcagcttgtggactttcctttctgagaccagtctgtgtttgtcacttggcttaatttccacactcttatggaa

SEQ ID NO: 125256 - DNA, 73 bp, Homo sapiens
tgtggactttcctttctgagaccagtctgtgtttgtcacttggcttaatttccacactcttatggaaccattt

SEQ ID NO: 125257 - DNA, 73 bp, Homo sapiens
ttcctttctgagaccagtctgtgtttgtcacttggcttaatttccacactcttatggaaccattttactggaa

SEQ ID NO: 125258 - DNA, 74 bp, Homo sapiens
agaccagtctgtgtttgtcacttggcttaatttccacactcttatggaaccattttactggaacagtgtcatgg

SEQ ID NO: 125259 - DNA, 73 bp, Homo sapiens
tgtttgtcacttggcttaatttccacactcttatggaaccattttactggaacagtgtcatgggaaacactaa

SEQ ID NO: 125260 - DNA, 71 bp, Homo sapiens
acttggcttaatttccacactcttatggaaccattttactggaacagtgtcatgggaaacactaacttcaa

SEQ ID NO: 125261 - DNA, 71 bp, Homo sapiens
aatttccacactcttatggaaccattttactggaacagtgtcatgggaaacactaacttcaaaggcaacag

SEQ ID NO: 125262 - DNA, 73 bp, Homo sapiens
tcttatggaaccattttactggaacagtgtcatgggaaacactaacttcaaaggcaacagtggcattttccaa

SEQ ID NO: 125263 - DNA, 74 bp, Homo sapiens
ttttactggaacagtgtcatgggaaacactaacttcaaaggcaacagtggcattttccaaggctgtcacatcct

SEQ ID NO: 125264 - DNA, 74 bp, Homo sapiens
cagtgtcatgggaaacactaacttcaaaggcaacagtggcattttccaaggctgtcacatcctttggcttttta

SEQ ID NO: 125265 - DNA, 75 bp, Homo sapiens
actaacttcaaaggcaacagtggcattttccaaggctgtcacatcctttggctttttaatgatcttgacagctaa

SEQ ID NO: 125266 - DNA, 76 bp, Homo sapiens
attttccaaggctgtcacatcctttggctttttaatgatcttgacagctaagaggaaaattggagcaattcagtga

SEQ ID NO: 125267 - DNA, 78 bp, Homo sapiens
taatggtaaccatgggctgactgcttgaaaagtgtttctaaatcaacttactctccacgtgcagtctggcactggctc

SEQ ID NO: 125268 - DNA, 78 bp, Homo sapiens
atgggctgactgcttgaaaagtgtttctaaatcaacttactctccacgtgcagtctggcactggctccaagccttcca

SEQ ID NO: 125269 - DNA, 78 bp, Homo sapiens
tgaaaagtgtttctaaatcaacttactctccacgtgcagtctggcactggctccaagccttccaagcctgaagccata

SEQ ID NO: 125270 - DNA, 79 bp, Homo sapiens
tttctaaatcaacttactctccacgtgcagtctggcactggctccaagccttccaagcctgaagccataaacagactca

SEQ ID NO: 125271 - DNA, 80 bp, Homo sapiens
aatcaacttactctccacgtgcagtctggcactggctccaagccttccaagcctgaagccataaacagactcatccacga

SEQ ID NO: 125272 - DNA, 80 bp, Homo sapiens
cacgtgcagtctggcactggctccaagccttccaagcctgaagccataaacagactcatccacgatggcacagtttttaa

SEQ ID NO: 125273 - DNA, 76 bp, Homo sapiens
ctccaagccttccaagcctgaagccataaacagactcatccacgatggcacagtttttaatcctcagagagtaaat

SEQ ID NO: 125274 - DNA, 75 bp, Homo sapiens
ttccaagcctgaagccataaacagactcatccacgatggcacagtttttaatcctcagagagtaaattgttcctt

SEQ ID NO: 125275 - DNA, 78 bp, Homo sapiens
ctgaagccataaacagactcatccacgatggcacagtttttaatcctcagagagtaaattgttcctttgacagagata

SEQ ID NO: 125276 - DNA, 77 bp, Homo sapiens
taaacagactcatccacgatggcacagtttttaatcctcagagagtaaattgttcctttgacagagatagcatactt

SEQ ID NO: 125277 - DNA, 76 bp, Homo sapiens
atccacgatggcacagtttttaatcctcagagagtaaattgttcctttgacagagatagcatacttttcattggat

SEQ ID NO: 125278 - DNA, 75 bp, Homo sapiens
acagtttttaatcctcagagagtaaattgttcctttgacagagatagcatacttttcattggattccagcacaac

SEQ ID NO: 125279 - DNA, 76 bp, Homo sapiens
ttaatcctcagagagtaaattgttcctttgacagagatagcatacttttcattggattccagcacaactccatttt

SEQ ID NO: 125280 - DNA, 77 bp, Homo sapiens
agtaaattgttcctttgacagagatagcatacttttcattggattccagcacaactccatttttgatccactggaca

SEQ ID NO: 125281 - DNA, 79 bp, Homo sapiens
tcctttgacagagatagcatacttttcattggattccagcacaactccatttttgatccactggacacctttgacatta

SEQ ID NO: 125282 - DNA, 77 bp, Homo sapiens
agatagcatacttttcattggattccagcacaactccatttttgatccactggacacctttgacattagggtgtgta

SEQ ID NO: 125283 - DNA, 75 bp, Homo sapiens
atacttttcattggattccagcacaactccatttttgatccactggacacctttgacattagggtgtgtaagctc

SEQ ID NO: 125284 - DNA, 76 bp, Homo sapiens
ttggattccagcacaactccatttttgatccactggacacctttgacattagggtgtgtaagctcgacagtgaaaa

SEQ ID NO: 125285 - DNA, 76 bp, Homo sapiens
caactccatttttgatccactggacacctttgacattagggtgtgtaagctcgacagtgaaaacagcatcctgtgt

SEQ ID NO: 125286 - DNA, 77 bp, Homo sapiens
atttttgatccactggacacctttgacattagggtgtgtaagctcgacagtgaaaacagcatcctgtgtttctgtca

SEQ ID NO: 125287 - DNA, 79 bp, Homo sapiens
tggacacctttgacattagggtgtgtaagctcgacagtgaaaacagcatcctgtgtttctgtcactgtgaggttcttca

SEQ ID NO: 125288 - DNA, 79 bp, Homo sapiens
tttgacattagggtgtgtaagctcgacagtgaaaacagcatcctgtgtttctgtcactgtgaggttcttcagagtcttc

SEQ ID NO: 125289 - DNA, 77 bp, Homo sapiens
ttagggtgtgtaagctcgacagtgaaaacagcatcctgtgtttctgtcactgtgaggttcttcagagtcttcttaat

SEQ ID NO: 125290 - DNA, 79 bp, Homo sapiens
taagctcgacagtgaaaacagcatcctgtgtttctgtcactgtgaggttcttcagagtcttcttaattttgacagctaa

SEQ ID NO: 125291 - DNA, 74 bp, Homo sapiens
ctgtgtttctgtcactgtgaggttcttcagagtcttcttaattttgacagctaaagacaaatttatgattgggt

SEQ ID NO: 125292 - DNA, 73 bp, Homo sapiens
ctgtcactgtgaggttcttcagagtcttcttaattttgacagctaaagacaaatttatgattgggttagaaaa

SEQ ID NO: 125293 - DNA, 75 bp, Homo sapiens
acgatcaagattgtaatatgatttgaaaaggacaaatcctatgttacttgccttcaactttgagtttggcagatg

SEQ ID NO: 125294 - DNA, 72 bp, Homo sapiens
aatatgatttgaaaaggacaaatcctatgttacttgccttcaactttgagtttggcagatgttttggaggtg

SEQ ID NO: 125295 - DNA, 71 bp, Homo sapiens
atttgaaaaggacaaatcctatgttacttgccttcaactttgagtttggcagatgttttggaggtggccac

SEQ ID NO: 125296 - DNA, 71 bp, Homo sapiens
aaatcctatgttacttgccttcaactttgagtttggcagatgttttggaggtggccaccttgtaggtatat

SEQ ID NO: 125297 - DNA, 73 bp, Homo sapiens
atgttacttgccttcaactttgagtttggcagatgttttggaggtggccaccttgtaggtatattctccaatg

SEQ ID NO: 125298 - DNA, 73 bp, Homo sapiens
ccttcaactttgagtttggcagatgttttggaggtggccaccttgtaggtatattctccaatgtcatctaatt

SEQ ID NO: 125299 - DNA, 78 bp, Homo sapiens
tttggcagatgttttggaggtggccaccttgtaggtatattctccaatgtcatctaatttggtggcagcaatgataag

SEQ ID NO: 125300 - DNA, 75 bp, Homo sapiens
ttttggaggtggccaccttgtaggtatattctccaatgtcatctaatttggtggcagcaatgataagtctccttt

SEQ ID NO: 125301 - DNA, 77 bp, Homo sapiens
aggtggccaccttgtaggtatattctccaatgtcatctaatttggtggcagcaatgataagtctccttttgtggcca

SEQ ID NO: 125302 - DNA, 82 bp, Homo sapiens
ttgtaggtatattctccaatgtcatctaatttggtggcagcaatgataagtctccttttgtggccatcagactcacttctga

SEQ ID NO: 125303 - DNA, 82 bp, Homo sapiens
atattctccaatgtcatctaatttggtggcagcaatgataagtctccttttgtggccatcagactcacttctgatgttgtta

SEQ ID NO: 125304 - DNA, 82 bp, Homo sapiens
atgtcatctaatttggtggcagcaatgataagtctccttttgtggccatcagactcacttctgatgttgttagtcagtggta

SEQ ID NO: 125305 - DNA, 78 bp, Homo sapiens
atttggtggcagcaatgataagtctccttttgtggccatcagactcacttctgatgttgttagtcagtggtaggtgtt

SEQ ID NO: 125306 - DNA, 78 bp, Homo sapiens
aatgataagtctccttttgtggccatcagactcacttctgatgttgttagtcagtggtaggtgtttgccatccctcaa

SEQ ID NO: 125307 - DNA, 77 bp, Homo sapiens
agtctccttttgtggccatcagactcacttctgatgttgttagtcagtggtaggtgtttgccatccctcaaccattc

SEQ ID NO: 125308 - DNA, 77 bp, Homo sapiens
ccatcagactcacttctgatgttgttagtcagtggtaggtgtttgccatccctcaaccattcgcctttggaatctgg

SEQ ID NO: 125309 - DNA, 74 bp, Homo sapiens
agactcacttctgatgttgttagtcagtggtaggtgtttgccatccctcaaccattcgcctttggaatctgggt

SEQ ID NO: 125310 - DNA, 74 bp, Homo sapiens
atgttgttagtcagtggtaggtgtttgccatccctcaaccattcgcctttggaatctgggttggcaacttcaca

SEQ ID NO: 125311 - DNA, 75 bp, Homo sapiens
tagtcagtggtaggtgtttgccatccctcaaccattcgcctttggaatctgggttggcaacttcacattcaaaca

SEQ ID NO: 125312 - DNA, 75 bp, Homo sapiens
taggtgtttgccatccctcaaccattcgcctttggaatctgggttggcaacttcacattcaaacacagcttcctg

SEQ ID NO: 125313 - DNA, 75 bp, Homo sapiens
atccctcaaccattcgcctttggaatctgggttggcaacttcacattcaaacacagcttcctgggattcagctac

SEQ ID NO: 125314 - DNA, 78 bp, Homo sapiens
attcgcctttggaatctgggttggcaacttcacattcaaacacagcttcctgggattcagctacggtctgatctgtga

SEQ ID NO: 125315 - DNA, 79 bp, Homo sapiens
tttggaatctgggttggcaacttcacattcaaacacagcttcctgggattcagctacggtctgatctgtgagtggcttg

SEQ ID NO: 125316 - DNA, 79 bp, Homo sapiens
gggttggcaacttcacattcaaacacagcttcctgggattcagctacggtctgatctgtgagtggcttggagatggccc

SEQ ID NO: 125317 - DNA, 78 bp, Homo sapiens
cattcaaacacagcttcctgggattcagctacggtctgatctgtgagtggcttggagatggccccacctttggaacaa

SEQ ID NO: 125318 - DNA, 79 bp, Homo sapiens
acagcttcctgggattcagctacggtctgatctgtgagtggcttggagatggccccacctttggaacaagagatgtaca

SEQ ID NO: 125319 - DNA, 79 bp, Homo sapiens
ggattcagctacggtctgatctgtgagtggcttggagatggccccacctttggaacaagagatgtacagtatgagtcct

SEQ ID NO: 125320 - DNA, 70 bp, Homo sapiens
ataacaatcactcctcgtaagaatttaggttaataaatataccaacctgccacagtaagttttccagatg

SEQ ID NO: 125321 - DNA, 71 bp, Homo sapiens
aatcactcctcgtaagaatttaggttaataaatataccaacctgccacagtaagttttccagatgtcatat

SEQ ID NO: 125322 - DNA, 70 bp, Homo sapiens
gaatttaggttaataaatataccaacctgccacagtaagttttccagatgtcatattttctcccgcgtaa

SEQ ID NO: 125323 - DNA, 71 bp, Homo sapiens
gttaataaatataccaacctgccacagtaagttttccagatgtcatattttctcccgcgtaaaatgtgtat

SEQ ID NO: 125324 - DNA, 70 bp, Homo sapiens
aatataccaacctgccacagtaagttttccagatgtcatattttctcccgcgtaaaatgtgtattttcct

SEQ ID NO: 125325 - DNA, 75 bp, Homo sapiens
ccacagtaagttttccagatgtcatattttctcccgcgtaaaatgtgtattttccttcatcatctttcatcatat

SEQ ID NO: 125326 - DNA, 75 bp, Homo sapiens
gttttccagatgtcatattttctcccgcgtaaaatgtgtattttccttcatcatctttcatcatatttagaactg

SEQ ID NO: 125327 - DNA, 77 bp, Homo sapiens
gatgtcatattttctcccgcgtaaaatgtgtattttccttcatcatctttcatcatatttagaactgtcaatttata

SEQ ID NO: 125328 - DNA, 73 bp, Homo sapiens
ttttctcccgcgtaaaatgtgtattttccttcatcatctttcatcatatttagaactgtcaatttatatattt

SEQ ID NO: 125329 - DNA, 77 bp, Homo sapiens
cgtaaaatgtgtattttccttcatcatctttcatcatatttagaactgtcaatttatatatttttccatgtgcttca

SEQ ID NO: 125330 - DNA, 76 bp, Homo sapiens
gtattttccttcatcatctttcatcatatttagaactgtcaatttatatatttttccatgtgcttcaattttatat

SEQ ID NO: 125331 - DNA, 77 bp, Homo sapiens
catcatctttcatcatatttagaactgtcaatttatatatttttccatgtgcttcaattttatatttagaactgggc

SEQ ID NO: 125332 - DNA, 74 bp, Homo sapiens
tcatatttagaactgtcaatttatatatttttccatgtgcttcaattttatatttagaactgggcttgatttcc

SEQ ID NO: 125333 - DNA, 72 bp, Homo sapiens
gaactgtcaatttatatatttttccatgtgcttcaattttatatttagaactgggcttgatttccttgtcct

SEQ ID NO: 125334 - DNA, 71 bp, Homo sapiens
atatatttttccatgtgcttcaattttatatttagaactgggcttgatttccttgtccttaaaattccaca

SEQ ID NO: 125335 - DNA, 74 bp, Homo sapiens
tccatgtgcttcaattttatatttagaactgggcttgatttccttgtccttaaaattccacaggacatcaattc

SEQ ID NO: 125336 - DNA, 71 bp, Homo sapiens
caattttatatttagaactgggcttgatttccttgtccttaaaattccacaggacatcaattccagagtgg

SEQ ID NO: 125337 - DNA, 75 bp, Homo sapiens
tatatttagaactgggcttgatttccttgtccttaaaattccacaggacatcaattccagagtgggacagctcaa

SEQ ID NO: 125338 - DNA, 73 bp, Homo sapiens
aactgggcttgatttccttgtccttaaaattccacaggacatcaattccagagtgggacagctcaacctcaaa

SEQ ID NO: 125339 - DNA, 72 bp, Homo sapiens
atttccttgtccttaaaattccacaggacatcaattccagagtgggacagctcaacctcaaacaccacattt

SEQ ID NO: 125340 - DNA, 75 bp, Homo sapiens
ttaaaattccacaggacatcaattccagagtgggacagctcaacctcaaacaccacattttgagtttctgtacag

SEQ ID NO: 125341 - DNA, 75 bp, Homo sapiens
aggacatcaattccagagtgggacagctcaacctcaaacaccacattttgagtttctgtacaggtaaggtcacga

SEQ ID NO: 125342 - DNA, 74 bp, Homo sapiens
atcaattccagagtgggacagctcaacctcaaacaccacattttgagtttctgtacaggtaaggtcacgaagac

SEQ ID NO: 125343 - DNA, 73 bp, Homo sapiens
ggacagctcaacctcaaacaccacattttgagtttctgtacaggtaaggtcacgaagacctctgataatttta

SEQ ID NO: 125344 - DNA, 68 bp, Homo sapiens
accacattttgagtttctgtacaggtaaggtcacgaagacctctgataattttaatttctggggaaaa

SEQ ID NO: 125345 - DNA, 67 bp, Homo sapiens
ttttgagtttctgtacaggtaaggtcacgaagacctctgataattttaatttctggggaaaaaataa

SEQ ID NO: 125346 - DNA, 71 bp, Homo sapiens
gggaaagtagaatgcttaaagtaattattagataggtagaataatccttactttctacagagagattacag

SEQ ID NO: 125347 - DNA, 72 bp, Homo sapiens
ttaaagtaattattagataggtagaataatccttactttctacagagagattacagttggtttcaactctgc

SEQ ID NO: 125348 - DNA, 74 bp, Homo sapiens
ataggtagaataatccttactttctacagagagattacagttggtttcaactctgccaactatcagcttgtaag

SEQ ID NO: 125349 - DNA, 73 bp, Homo sapiens
ataatccttactttctacagagagattacagttggtttcaactctgccaactatcagcttgtaaggtccttcg

SEQ ID NO: 125350 - DNA, 78 bp, Homo sapiens
tttctacagagagattacagttggtttcaactctgccaactatcagcttgtaaggtccttcgtctgaagcatgagttc

SEQ ID NO: 125351 - DNA, 76 bp, Homo sapiens
ttacagttggtttcaactctgccaactatcagcttgtaaggtccttcgtctgaagcatgagttcggttaatgacta

SEQ ID NO: 125352 - DNA, 77 bp, Homo sapiens
tttcaactctgccaactatcagcttgtaaggtccttcgtctgaagcatgagttcggttaatgactagtcgctgttta

SEQ ID NO: 125353 - DNA, 75 bp, Homo sapiens
tgccaactatcagcttgtaaggtccttcgtctgaagcatgagttcggttaatgactagtcgctgtttagtacctt

SEQ ID NO: 125354 - DNA, 75 bp, Homo sapiens
ctatcagcttgtaaggtccttcgtctgaagcatgagttcggttaatgactagtcgctgtttagtacctttcacaa

SEQ ID NO: 125355 - DNA, 75 bp, Homo sapiens
taaggtccttcgtctgaagcatgagttcggttaatgactagtcgctgtttagtacctttcacaatggcctgtaca

SEQ ID NO: 125356 - DNA, 78 bp, Homo sapiens
tgaagcatgagttcggttaatgactagtcgctgtttagtacctttcacaatggcctgtacacggtcatcaggcttgat

SEQ ID NO: 125357 - DNA, 73 bp, Homo sapiens
agttcggttaatgactagtcgctgtttagtacctttcacaatggcctgtacacggtcatcaggcttgatttgt

SEQ ID NO: 125358 - DNA, 77 bp, Homo sapiens
ttaatgactagtcgctgtttagtacctttcacaatggcctgtacacggtcatcaggcttgatttgttcatcatttaa

SEQ ID NO: 125359 - DNA, 74 bp, Homo sapiens
ctgtttagtacctttcacaatggcctgtacacggtcatcaggcttgatttgttcatcatttaagtaccacttaa

SEQ ID NO: 125360 - DNA, 75 bp, Homo sapiens
tagtacctttcacaatggcctgtacacggtcatcaggcttgatttgttcatcatttaagtaccacttaacagaag

SEQ ID NO: 125361 - DNA, 78 bp, Homo sapiens
tgtacacggtcatcaggcttgatttgttcatcatttaagtaccacttaacagaagtcacatcagggactgacacctta

SEQ ID NO: 125362 - DNA, 79 bp, Homo sapiens
atcaggcttgatttgttcatcatttaagtaccacttaacagaagtcacatcagggactgacaccttacattcaagcaca

SEQ ID NO: 125363 - DNA, 76 bp, Homo sapiens
atttgttcatcatttaagtaccacttaacagaagtcacatcagggactgacaccttacattcaagcacagccttgg

SEQ ID NO: 125364 - DNA, 77 bp, Homo sapiens
atttaagtaccacttaacagaagtcacatcagggactgacaccttacattcaagcacagccttggtgccttcaatca

SEQ ID NO: 125365 - DNA, 79 bp, Homo sapiens
ttaacagaagtcacatcagggactgacaccttacattcaagcacagccttggtgccttcaatcacattaacatctttta

SEQ ID NO: 125366 - DNA, 81 bp, Homo sapiens
tcacatcagggactgacaccttacattcaagcacagccttggtgccttcaatcacattaacatcttttagaggtgttatca

SEQ ID NO: 125367 - DNA, 79 bp, Homo sapiens
gactgacaccttacattcaagcacagccttggtgccttcaatcacattaacatcttttagaggtgttatcacgtccaca

SEQ ID NO: 125368 - DNA, 80 bp, Homo sapiens
ttcaagcacagccttggtgccttcaatcacattaacatcttttagaggtgttatcacgtccacacctgcaaaatcataca

SEQ ID NO: 125369 - DNA, 80 bp, Homo sapiens
ttggtgccttcaatcacattaacatcttttagaggtgttatcacgtccacacctgcaaaatcatacacacacaagatgaa

SEQ ID NO: 125370 - DNA, 79 bp, Homo sapiens
ttcaatcacattaacatcttttagaggtgttatcacgtccacacctgcaaaatcatacacacacaagatgaatgaattt

SEQ ID NO: 125371 - DNA, 75 bp, Homo sapiens
tatgttgcttaatagtgtaaacataaaattttataattaggactcactatagacagagacacgcccactggtgga

SEQ ID NO: 125372 - DNA, 74 bp, Homo sapiens
taatagtgtaaacataaaattttataattaggactcactatagacagagacacgcccactggtggagaggccaa

SEQ ID NO: 125373 - DNA, 73 bp, Homo sapiens
aacataaaattttataattaggactcactatagacagagacacgcccactggtggagaggccaagggctggaa

SEQ ID NO: 125374 - DNA, 76 bp, Homo sapiens
ttaggactcactatagacagagacacgcccactggtggagaggccaagggctggaatggtgaaagagtaatttcca

SEQ ID NO: 125375 - DNA, 77 bp, Homo sapiens
tatagacagagacacgcccactggtggagaggccaagggctggaatggtgaaagagtaatttccagcatcttcctta

SEQ ID NO: 125376 - DNA, 76 bp, Homo sapiens
acgcccactggtggagaggccaagggctggaatggtgaaagagtaatttccagcatcttccttagtcatgtcttca

SEQ ID NO: 125377 - DNA, 83 bp, Homo sapiens
tggagaggccaagggctggaatggtgaaagagtaatttccagcatcttccttagtcatgtcttcaatgagcagcatatgagat

SEQ ID NO: 125378 - DNA, 81 bp, Homo sapiens
aagggctggaatggtgaaagagtaatttccagcatcttccttagtcatgtcttcaatgagcagcatatgagattgtttgtc

SEQ ID NO: 125379 - DNA, 85 bp, Homo sapiens
atggtgaaagagtaatttccagcatcttccttagtcatgtcttcaatgagcagcatatgagattgtttgtctatcacaatgtgaa

SEQ ID NO: 125380 - DNA, 82 bp, Homo sapiens
aaagagtaatttccagcatcttccttagtcatgtcttcaatgagcagcatatgagattgtttgtctatcacaatgtgaaccc

SEQ ID NO: 125381 - DNA, 87 bp, Homo sapiens
agcatcttccttagtcatgtcttcaatgagcagcatatgagattgtttgtctatcacaatgtgaaccctgtcactgggctgcacttc

SEQ ID NO: 125382 - DNA, 85 bp, Homo sapiens
cttccttagtcatgtcttcaatgagcagcatatgagattgtttgtctatcacaatgtgaaccctgtcactgggctgcacttcttg

SEQ ID NO: 125383 - DNA, 85 bp, Homo sapiens
atgtcttcaatgagcagcatatgagattgtttgtctatcacaatgtgaaccctgtcactgggctgcacttcttggccgtctttca

SEQ ID NO: 125384 - DNA, 82 bp, Homo sapiens
cagcatatgagattgtttgtctatcacaatgtgaaccctgtcactgggctgcacttcttggccgtctttcatccagacgcct

SEQ ID NO: 125385 - DNA, 81 bp, Homo sapiens
tatgagattgtttgtctatcacaatgtgaaccctgtcactgggctgcacttcttggccgtctttcatccagacgccttcca

SEQ ID NO: 125386 - DNA, 78 bp, Homo sapiens
tttgtctatcacaatgtgaaccctgtcactgggctgcacttcttggccgtctttcatccagacgccttccacactttc

SEQ ID NO: 125387 - DNA, 76 bp, Homo sapiens
acaatgtgaaccctgtcactgggctgcacttcttggccgtctttcatccagacgccttccacactttccaaggaga

SEQ ID NO: 125388 - DNA, 75 bp, Homo sapiens
tgtcactgggctgcacttcttggccgtctttcatccagacgccttccacactttccaaggagactttaacttcaa

SEQ ID NO: 125389 - DNA, 75 bp, Homo sapiens
tgcacttcttggccgtctttcatccagacgccttccacactttccaaggagactttaacttcaagctgaacaatg

SEQ ID NO: 125390 - DNA, 74 bp, Homo sapiens
tcttggccgtctttcatccagacgccttccacactttccaaggagactttaacttcaagctgaacaatgtcacc

SEQ ID NO: 125391 - DNA, 72 bp, Homo sapiens
atccagacgccttccacactttccaaggagactttaacttcaagctgaacaatgtcaccctcacagactttt

SEQ ID NO: 125392 - DNA, 72 bp, Homo sapiens
cttccacactttccaaggagactttaacttcaagctgaacaatgtcaccctcacagactttttggtcactaa

SEQ ID NO: 125393 - DNA, 72 bp, Homo sapiens
tttccaaggagactttaacttcaagctgaacaatgtcaccctcacagactttttggtcactaagtccttgta

SEQ ID NO: 125394 - DNA, 74 bp, Homo sapiens
agactttaacttcaagctgaacaatgtcaccctcacagactttttggtcactaagtccttgtaggatagcaatg

SEQ ID NO: 125395 - DNA, 73 bp, Homo sapiens
aacttcaagctgaacaatgtcaccctcacagactttttggtcactaagtccttgtaggatagcaatggggcgg

SEQ ID NO: 125396 - DNA, 74 bp, Homo sapiens
aacaatgtcaccctcacagactttttggtcactaagtccttgtaggatagcaatggggcgggctgtgaaatatg

SEQ ID NO: 125397 - DNA, 72 bp, Homo sapiens
ctcacagactttttggtcactaagtccttgtaggatagcaatggggcgggctgtgaaatatggggagaaaaa

SEQ ID NO: 125398 - DNA, 75 bp, Homo sapiens
aataaaccataatgatgctcactgcaggctgacaggaatgggaggacttacgtttcatctttaatttacaggttg

SEQ ID NO: 125399 - DNA, 74 bp, Homo sapiens
aatgatgctcactgcaggctgacaggaatgggaggacttacgtttcatctttaatttacaggttgtctttttcc

SEQ ID NO: 125400 - DNA, 70 bp, Homo sapiens
aggctgacaggaatgggaggacttacgtttcatctttaatttacaggttgtctttttcccgtcgatgaca

SEQ ID NO: 125401 - DNA, 69 bp, Homo sapiens
gaatgggaggacttacgtttcatctttaatttacaggttgtctttttcccgtcgatgacaaagctgtat

SEQ ID NO: 125402 - DNA, 68 bp, Homo sapiens
aggacttacgtttcatctttaatttacaggttgtctttttcccgtcgatgacaaagctgtattctccc

SEQ ID NO: 125403 - DNA, 70 bp, Homo sapiens
tcatctttaatttacaggttgtctttttcccgtcgatgacaaagctgtattctccctggtcctccttggt

SEQ ID NO: 125404 - DNA, 70 bp, Homo sapiens
ttaatttacaggttgtctttttcccgtcgatgacaaagctgtattctccctggtcctccttggttacatc

SEQ ID NO: 125405 - DNA, 71 bp, Homo sapiens
tctttttcccgtcgatgacaaagctgtattctccctggtcctccttggttacatccttgaccgtgaggttc

SEQ ID NO: 125406 - DNA, 73 bp, Homo sapiens
ttcccgtcgatgacaaagctgtattctccctggtcctccttggttacatccttgaccgtgaggttctgacgtc

SEQ ID NO: 125407 - DNA, 73 bp, Homo sapiens
aagctgtattctccctggtcctccttggttacatccttgaccgtgaggttctgacgtccacgacgagatgtaa

SEQ ID NO: 125408 - DNA, 74 bp, Homo sapiens
tattctccctggtcctccttggttacatccttgaccgtgaggttctgacgtccacgacgagatgtaattgtata

SEQ ID NO: 125409 - DNA, 74 bp, Homo sapiens
ctccttggttacatccttgaccgtgaggttctgacgtccacgacgagatgtaattgtatatttgccattggatt

SEQ ID NO: 125410 - DNA, 77 bp, Homo sapiens
ttacatccttgaccgtgaggttctgacgtccacgacgagatgtaattgtatatttgccattggatttaagctccaca

SEQ ID NO: 125411 - DNA, 80 bp, Homo sapiens
ttgaccgtgaggttctgacgtccacgacgagatgtaattgtatatttgccattggatttaagctccacatcattatgata

SEQ ID NO: 125412 - DNA, 77 bp, Homo sapiens
aggttctgacgtccacgacgagatgtaattgtatatttgccattggatttaagctccacatcattatgataccattt

SEQ ID NO: 125413 - DNA, 78 bp, Homo sapiens
tccacgacgagatgtaattgtatatttgccattggatttaagctccacatcattatgataccattttccttctatatt

SEQ ID NO: 125414 - DNA, 76 bp, Homo sapiens
agatgtaattgtatatttgccattggatttaagctccacatcattatgataccattttccttctatattttctggg

SEQ ID NO: 125415 - DNA, 79 bp, Homo sapiens
tatttgccattggatttaagctccacatcattatgataccattttccttctatattttctggggatacaatgcactcta

SEQ ID NO: 125416 - DNA, 77 bp, Homo sapiens
attggatttaagctccacatcattatgataccattttccttctatattttctggggatacaatgcactctaattctc

SEQ ID NO: 125417 - DNA, 78 bp, Homo sapiens
tatgataccattttccttctatattttctggggatacaatgcactctaattctcctgaatatgattctggaacttcta

SEQ ID NO: 125418 - DNA, 77 bp, Homo sapiens
ttctatattttctggggatacaatgcactctaattctcctgaatatgattctggaacttctatgtcctgaagttctt

SEQ ID NO: 125419 - DNA, 78 bp, Homo sapiens
gggatacaatgcactctaattctcctgaatatgattctggaacttctatgtcctgaagttctttcacaaactcaacaa

SEQ ID NO: 125420 - DNA, 78 bp, Homo sapiens
cactctaattctcctgaatatgattctggaacttctatgtcctgaagttctttcacaaactcaacaactgcacctgaa

SEQ ID NO: 125421 - DNA, 78 bp, Homo sapiens
ttctcctgaatatgattctggaacttctatgtcctgaagttctttcacaaactcaacaactgcacctgaagtgtataa

SEQ ID NO: 125422 - DNA, 76 bp, Homo sapiens
aatatgattctggaacttctatgtcctgaagttctttcacaaactcaacaactgcacctgaagtgtataacagaaa

SEQ ID NO: 125423 - DNA, 75 bp, Homo sapiens
gaacttctatgtcctgaagttctttcacaaactcaacaactgcacctgaagtgtataacagaaagataaatcaat

SEQ ID NO: 125424 - DNA, 72 bp, Homo sapiens
atgtcctgaagttctttcacaaactcaacaactgcacctgaagtgtataacagaaagataaatcaatttttt

SEQ ID NO: 125425 - DNA, 70 bp, Homo sapiens
gactttagagcttaggtaaacaatgaaatccttcgttgttgaataccttcaacaataagtttagcagtcg

SEQ ID NO: 125426 - DNA, 71 bp, Homo sapiens
gagcttaggtaaacaatgaaatccttcgttgttgaataccttcaacaataagtttagcagtcgttttgaca

SEQ ID NO: 125427 - DNA, 73 bp, Homo sapiens
caatgaaatccttcgttgttgaataccttcaacaataagtttagcagtcgttttgacattttcatcttccaca

SEQ ID NO: 125428 - DNA, 72 bp, Homo sapiens
atccttcgttgttgaataccttcaacaataagtttagcagtcgttttgacattttcatcttccacaagtaca

SEQ ID NO: 125429 - DNA, 76 bp, Homo sapiens
ttgaataccttcaacaataagtttagcagtcgttttgacattttcatcttccacaagtacacagctgtaatcttca

SEQ ID NO: 125430 - DNA, 79 bp, Homo sapiens
aacaataagtttagcagtcgttttgacattttcatcttccacaagtacacagctgtaatcttcagcatcagacgtatca

SEQ ID NO: 125431 - DNA, 81 bp, Homo sapiens
taagtttagcagtcgttttgacattttcatcttccacaagtacacagctgtaatcttcagcatcagacgtatcaatggtca

SEQ ID NO: 125432 - DNA, 83 bp, Homo sapiens
ttttgacattttcatcttccacaagtacacagctgtaatcttcagcatcagacgtatcaatggtcagtatggagaggaagtga

SEQ ID NO: 125433 - DNA, 80 bp, Homo sapiens
ttttcatcttccacaagtacacagctgtaatcttcagcatcagacgtatcaatggtcagtatggagaggaagtgaacctt

SEQ ID NO: 125434 - DNA, 82 bp, Homo sapiens
cttccacaagtacacagctgtaatcttcagcatcagacgtatcaatggtcagtatggagaggaagtgaacctttctgtcaga

SEQ ID NO: 125435 - DNA, 83 bp, Homo sapiens
agctgtaatcttcagcatcagacgtatcaatggtcagtatggagaggaagtgaacctttctgtcagagtgcatcctgtattta

SEQ ID NO: 125436 - DNA, 83 bp, Homo sapiens
taatcttcagcatcagacgtatcaatggtcagtatggagaggaagtgaacctttctgtcagagtgcatcctgtatttatctcc

SEQ ID NO: 125437 - DNA, 80 bp, Homo sapiens
atcaatggtcagtatggagaggaagtgaacctttctgtcagagtgcatcctgtatttatctccctcatgaacctccatac

SEQ ID NO: 125438 - DNA, 79 bp, Homo sapiens
gtatggagaggaagtgaacctttctgtcagagtgcatcctgtatttatctccctcatgaacctccataccatctttata

SEQ ID NO: 125439 - DNA, 79 bp, Homo sapiens
tgaacctttctgtcagagtgcatcctgtatttatctccctcatgaacctccataccatctttataccatttcactttga

SEQ ID NO: 125440 - DNA, 79 bp, Homo sapiens
tttctgtcagagtgcatcctgtatttatctccctcatgaacctccataccatctttataccatttcactttgacaaatg

SEQ ID NO: 125441 - DNA, 75 bp, Homo sapiens
catcctgtatttatctccctcatgaacctccataccatctttataccatttcactttgacaaatggttctgaagt

SEQ ID NO: 125442 - DNA, 75 bp, Homo sapiens
tatttatctccctcatgaacctccataccatctttataccatttcactttgacaaatggttctgaagtttcacat

SEQ ID NO: 125443 - DNA, 73 bp, Homo sapiens
cctcatgaacctccataccatctttataccatttcactttgacaaatggttctgaagtttcacattcaaaggt

SEQ ID NO: 125444 - DNA, 74 bp, Homo sapiens
cataccatctttataccatttcactttgacaaatggttctgaagtttcacattcaaaggttgccatagtgtctt

SEQ ID NO: 125445 - DNA, 71 bp, Homo sapiens
ctttataccatttcactttgacaaatggttctgaagtttcacattcaaaggttgccatagtgtctttttcc

SEQ ID NO: 125446 - DNA, 72 bp, Homo sapiens
atttcactttgacaaatggttctgaagtttcacattcaaaggttgccatagtgtctttttccttagcaacaa

SEQ ID NO: 125447 - DNA, 72 bp, Homo sapiens
aaatggttctgaagtttcacattcaaaggttgccatagtgtctttttccttagcaacaacatcttgtaattc

SEQ ID NO: 125448 - DNA, 73 bp, Homo sapiens
gaagtttcacattcaaaggttgccatagtgtctttttccttagcaacaacatcttgtaattcctgtgtgaaag

SEQ ID NO: 125449 - DNA, 76 bp, Homo sapiens
ttcacattcaaaggttgccatagtgtctttttccttagcaacaacatcttgtaattcctgtgtgaaagtgatcaat

SEQ ID NO: 125450 - DNA, 78 bp, Homo sapiens
tgccatagtgtctttttccttagcaacaacatcttgtaattcctgtgtgaaagtgatcaattgcttggctacaagaaa

SEQ ID NO: 125451 - DNA, 75 bp, Homo sapiens
tagtgtctttttccttagcaacaacatcttgtaattcctgtgtgaaagtgatcaattgcttggctacaagaaaaa

SEQ ID NO: 125452 - DNA, 73 bp, Homo sapiens
ttagcaacaacatcttgtaattcctgtgtgaaagtgatcaattgcttggctacaagaaaaaggtgggggaaaa

SEQ ID NO: 125453 - DNA, 70 bp, Homo sapiens
acaacatcttgtaattcctgtgtgaaagtgatcaattgcttggctacaagaaaaaggtgggggaaaaagg

SEQ ID NO: 125454 - DNA, 75 bp, Homo sapiens
atattcttgaatacaaagacaggtccatcaaaggaaagacatgcaaattaccttggacaagtaagaatgcgtgac

SEQ ID NO: 125455 - DNA, 73 bp, Homo sapiens
atacaaagacaggtccatcaaaggaaagacatgcaaattaccttggacaagtaagaatgcgtgactggaggtt

SEQ ID NO: 125456 - DNA, 77 bp, Homo sapiens
ccatcaaaggaaagacatgcaaattaccttggacaagtaagaatgcgtgactggaggtttctccagctatgttgatg

SEQ ID NO: 125457 - DNA, 75 bp, Homo sapiens
aaagacatgcaaattaccttggacaagtaagaatgcgtgactggaggtttctccagctatgttgatggcttttac

SEQ ID NO: 125458 - DNA, 79 bp, Homo sapiens
aattaccttggacaagtaagaatgcgtgactggaggtttctccagctatgttgatggcttttaccatgatgctggcaga

SEQ ID NO: 125459 - DNA, 81 bp, Homo sapiens
ccttggacaagtaagaatgcgtgactggaggtttctccagctatgttgatggcttttaccatgatgctggcagagtcctca

SEQ ID NO: 125460 - DNA, 86 bp, Homo sapiens
taagaatgcgtgactggaggtttctccagctatgttgatggcttttaccatgatgctggcagagtcctcagcagtcacatctctta

SEQ ID NO: 125461 - DNA, 86 bp, Homo sapiens
tggaggtttctccagctatgttgatggcttttaccatgatgctggcagagtcctcagcagtcacatctcttatgaccaattcacaa

SEQ ID NO: 125462 - DNA, 85 bp, Homo sapiens
gtttctccagctatgttgatggcttttaccatgatgctggcagagtcctcagcagtcacatctcttatgaccaattcacaaacat

SEQ ID NO: 125463 - DNA, 84 bp, Homo sapiens
ctatgttgatggcttttaccatgatgctggcagagtcctcagcagtcacatctcttatgaccaattcacaaacattgtcttcgg

SEQ ID NO: 125464 - DNA, 83 bp, Homo sapiens
tttaccatgatgctggcagagtcctcagcagtcacatctcttatgaccaattcacaaacattgtcttcgggccagtaccagta

SEQ ID NO: 125465 - DNA, 83 bp, Homo sapiens
atgatgctggcagagtcctcagcagtcacatctcttatgaccaattcacaaacattgtcttcgggccagtaccagtagatccg

SEQ ID NO: 125466 - DNA, 78 bp, Homo sapiens
tcctcagcagtcacatctcttatgaccaattcacaaacattgtcttcgggccagtaccagtagatccggtcagaccgt

SEQ ID NO: 125467 - DNA, 75 bp, Homo sapiens
tcacatctcttatgaccaattcacaaacattgtcttcgggccagtaccagtagatccggtcagaccgttcaattt

SEQ ID NO: 125468 - DNA, 75 bp, Homo sapiens
tctcttatgaccaattcacaaacattgtcttcgggccagtaccagtagatccggtcagaccgttcaattttgaca

SEQ ID NO: 125469 - DNA, 70 bp, Homo sapiens
aattcacaaacattgtcttcgggccagtaccagtagatccggtcagaccgttcaattttgacaccatttt

SEQ ID NO: 125470 - DNA, 70 bp, Homo sapiens
aacattgtcttcgggccagtaccagtagatccggtcagaccgttcaattttgacaccatttttgtaccat

SEQ ID NO: 125471 - DNA, 71 bp, Homo sapiens
tcgggccagtaccagtagatccggtcagaccgttcaattttgacaccatttttgtaccattcacattcggg

SEQ ID NO: 125472 - DNA, 69 bp, Homo sapiens
accagtagatccggtcagaccgttcaattttgacaccatttttgtaccattcacattcggggtctggtt

SEQ ID NO: 125473 - DNA, 71 bp, Homo sapiens
gtcagaccgttcaattttgacaccatttttgtaccattcacattcggggtctggtttccccacgactctga

SEQ ID NO: 125474 - DNA, 69 bp, Homo sapiens
ttcaattttgacaccatttttgtaccattcacattcggggtctggtttccccacgactctgacccggaa

SEQ ID NO: 125475 - DNA, 72 bp, Homo sapiens
ccatttttgtaccattcacattcggggtctggtttccccacgactctgacccggaagtgtgcatcagatcct

SEQ ID NO: 125476 - DNA, 74 bp, Homo sapiens
tttgtaccattcacattcggggtctggtttccccacgactctgacccggaagtgtgcatcagatccttggccca

SEQ ID NO: 125477 - DNA, 73 bp, Homo sapiens
acattcggggtctggtttccccacgactctgacccggaagtgtgcatcagatccttggcccactgtttggctc

SEQ ID NO: 125478 - DNA, 75 bp, Homo sapiens
tggtttccccacgactctgacccggaagtgtgcatcagatccttggcccactgtttggctctggattctttcgaa

SEQ ID NO: 125479 - DNA, 75 bp, Homo sapiens
acccggaagtgtgcatcagatccttggcccactgtttggctctggattctttcgaagatttttggagcctccata

SEQ ID NO: 125480 - DNA, 76 bp, Homo sapiens
tgcatcagatccttggcccactgtttggctctggattctttcgaagatttttggagcctccatactaggacttagt

SEQ ID NO: 125481 - DNA, 70 bp, Homo sapiens
tctggattctttcgaagatttttggagcctccatactaggacttagttcaatcttgtcaggtttaaaagt

SEQ ID NO: 125482 - DNA, 70 bp, Homo sapiens
tctttcgaagatttttggagcctccatactaggacttagttcaatcttgtcaggtttaaaagttggaatc

SEQ ID NO: 125483 - DNA, 72 bp, Homo sapiens
tccatactaggacttagttcaatcttgtcaggtttaaaagttggaatcgtgattttgccttcttcggcaaga

SEQ ID NO: 125484 - DNA, 69 bp, Homo sapiens
acttagttcaatcttgtcaggtttaaaagttggaatcgtgattttgccttcttcggcaagagctttctt

SEQ ID NO: 125485 - DNA, 70 bp, Homo sapiens
aatcttgtcaggtttaaaagttggaatcgtgattttgccttcttcggcaagagctttcttttcctcttca

SEQ ID NO: 125486 - DNA, 70 bp, Homo sapiens
agttggaatcgtgattttgccttcttcggcaagagctttcttttcctcttcagttaactctttggtccag

SEQ ID NO: 125487 - DNA, 71 bp, Homo sapiens
attttgccttcttcggcaagagctttcttttcctcttcagttaactctttggtccagtggagaagttcatc

SEQ ID NO: 125488 - DNA, 71 bp, Homo sapiens
ttcttcggcaagagctttcttttcctcttcagttaactctttggtccagtggagaagttcatcttttgtct

SEQ ID NO: 125489 - DNA, 70 bp, Homo sapiens
ctttcttttcctcttcagttaactctttggtccagtggagaagttcatcttttgtcttcctgaggagttc

SEQ ID NO: 125490 - DNA, 72 bp, Homo sapiens
ttttcctcttcagttaactctttggtccagtggagaagttcatcttttgtcttcctgaggagttcctcatag

SEQ ID NO: 125491 - DNA, 73 bp, Homo sapiens
ttaactctttggtccagtggagaagttcatcttttgtcttcctgaggagttcctcataggattcatccttctt

SEQ ID NO: 125492 - DNA, 74 bp, Homo sapiens
tttggtccagtggagaagttcatcttttgtcttcctgaggagttcctcataggattcatccttctttcgagact

SEQ ID NO: 125493 - DNA, 76 bp, Homo sapiens
aagttcatcttttgtcttcctgaggagttcctcataggattcatccttctttcgagacttgagctccacagcggta

SEQ ID NO: 125494 - DNA, 78 bp, Homo sapiens
tttgtcttcctgaggagttcctcataggattcatccttctttcgagacttgagctccacagcggtaatggcttcataa

SEQ ID NO: 125495 - DNA, 77 bp, Homo sapiens
agttcctcataggattcatccttctttcgagacttgagctccacagcggtaatggcttcataatagccctcttctgt

SEQ ID NO: 125496 - DNA, 79 bp, Homo sapiens
ttcatccttctttcgagacttgagctccacagcggtaatggcttcataatagccctcttctgttctgcgcttgaattta

SEQ ID NO: 125497 - DNA, 81 bp, Homo sapiens
ttgagctccacagcggtaatggcttcataatagccctcttctgttctgcgcttgaatttactgcgcagctcttccgactct

SEQ ID NO: 125498 - DNA, 76 bp, Homo sapiens
tgttctgcgcttgaatttactgcgcagctcttccgactcttcaggcactttttcatgggtaattctttcagccctt

SEQ ID NO: 125499 - DNA, 73 bp, Homo sapiens
ttgaatttactgcgcagctcttccgactcttcaggcactttttcatgggtaattctttcagcccttttcaact

SEQ ID NO: 125500 - DNA, 69 bp, Homo sapiens
ttccgactcttcaggcactttttcatgggtaattctttcagcccttttcaacttcacaacttctttggt

SEQ ID NO: 125501 - DNA, 70 bp, Homo sapiens
ctcttcaggcactttttcatgggtaattctttcagcccttttcaacttcacaacttctttggtttcagtg

SEQ ID NO: 125502 - DNA, 69 bp, Homo sapiens
actttttcatgggtaattctttcagcccttttcaacttcacaacttctttggtttcagtggtgtcaaca

SEQ ID NO: 125503 - DNA, 70 bp, Homo sapiens
taattctttcagcccttttcaacttcacaacttctttggtttcagtggtgtcaacaggtctatccacttt

SEQ ID NO: 125504 - DNA, 69 bp, Homo sapiens
cccttttcaacttcacaacttctttggtttcagtggtgtcaacaggtctatccactttttgtacttcaa

SEQ ID NO: 125505 - DNA, 70 bp, Homo sapiens
aacttcacaacttctttggtttcagtggtgtcaacaggtctatccactttttgtacttcaaactgaagct

SEQ ID NO: 125506 - DNA, 73 bp, Homo sapiens
tctttggtttcagtggtgtcaacaggtctatccactttttgtacttcaaactgaagctttcctggttcatgta

SEQ ID NO: 125507 - DNA, 73 bp, Homo sapiens
tttcagtggtgtcaacaggtctatccactttttgtacttcaaactgaagctttcctggttcatgtacgtgaaa

SEQ ID NO: 125508 - DNA, 71 bp, Homo sapiens
aacaggtctatccactttttgtacttcaaactgaagctttcctggttcatgtacgtgaaactcaggccttg

SEQ ID NO: 125509 - DNA, 73 bp, Homo sapiens
tctatccactttttgtacttcaaactgaagctttcctggttcatgtacgtgaaactcaggccttggttcagga

SEQ ID NO: 125510 - DNA, 73 bp, Homo sapiens
actgaagctttcctggttcatgtacgtgaaactcaggccttggttcaggagctctcctaaggacagacctaaa

SEQ ID NO: 125511 - DNA, 72 bp, Homo sapiens
tttcctggttcatgtacgtgaaactcaggccttggttcaggagctctcctaaggacagacctaaaatcttcc

SEQ ID NO: 125512 - DNA, 74 bp, Homo sapiens
ttcatgtacgtgaaactcaggccttggttcaggagctctcctaaggacagacctaaaatcttccctctgttgaa

SEQ ID NO: 125513 - DNA, 76 bp, Homo sapiens
taaggacagacctaaaatcttccctctgttgaatctcaagcttcactttatgctctatcacaccttcaggattttc

SEQ ID NO: 125514 - DNA, 75 bp, Homo sapiens
taaaatcttccctctgttgaatctcaagcttcactttatgctctatcacaccttcaggattttccgcggtgacct

SEQ ID NO: 125515 - DNA, 77 bp, Homo sapiens
ttccctctgttgaatctcaagcttcactttatgctctatcacaccttcaggattttccgcggtgaccttcacttcac

SEQ ID NO: 125516 - DNA, 79 bp, Homo sapiens
atctcaagcttcactttatgctctatcacaccttcaggattttccgcggtgaccttcacttcacctgtgtcatatgatt

SEQ ID NO: 125517 - DNA, 80 bp, Homo sapiens
ttcactttatgctctatcacaccttcaggattttccgcggtgaccttcacttcacctgtgtcatatgatttgcagtccac

SEQ ID NO: 125518 - DNA, 80 bp, Homo sapiens
tctatcacaccttcaggattttccgcggtgaccttcacttcacctgtgtcatatgatttgcagtccacgatgtccaggta

SEQ ID NO: 125519 - DNA, 79 bp, Homo sapiens
ttcaggattttccgcggtgaccttcacttcacctgtgtcatatgatttgcagtccacgatgtccaggtaatggatacca

SEQ ID NO: 125520 - DNA, 80 bp, Homo sapiens
attttccgcggtgaccttcacttcacctgtgtcatatgatttgcagtccacgatgtccaggtaatggataccatcatagc

SEQ ID NO: 125521 - DNA, 80 bp, Homo sapiens
ccttcacttcacctgtgtcatatgatttgcagtccacgatgtccaggtaatggataccatcatagcgaactctgaacctt

SEQ ID NO: 125522 - DNA, 81 bp, Homo sapiens
atatgatttgcagtccacgatgtccaggtaatggataccatcatagcgaactctgaaccttttgcttttgcggatgagctg

SEQ ID NO: 125523 - DNA, 80 bp, Homo sapiens
tttgcagtccacgatgtccaggtaatggataccatcatagcgaactctgaaccttttgcttttgcggatgagctgtccat

SEQ ID NO: 125524 - DNA, 78 bp, Homo sapiens
acgatgtccaggtaatggataccatcatagcgaactctgaaccttttgcttttgcggatgagctgtccattgaggtac

SEQ ID NO: 125525 - DNA, 77 bp, Homo sapiens
accatcatagcgaactctgaaccttttgcttttgcggatgagctgtccattgaggtaccagttgactttgggctgag

SEQ ID NO: 125526 - DNA, 72 bp, Homo sapiens
accttttgcttttgcggatgagctgtccattgaggtaccagttgactttgggctgagggtagcctgttaccc

SEQ ID NO: 125527 - DNA, 75 bp, Homo sapiens
agctgtccattgaggtaccagttgactttgggctgagggtagcctgttaccctgcagcggaaccttgcagtctcc

SEQ ID NO: 125528 - DNA, 73 bp, Homo sapiens
taccagttgactttgggctgagggtagcctgttaccctgcagcggaaccttgcagtctccccttcaagtactc

SEQ ID NO: 125529 - DNA, 73 bp, Homo sapiens
ttgactttgggctgagggtagcctgttaccctgcagcggaaccttgcagtctccccttcaagtactctaactg

SEQ ID NO: 125530 - DNA, 75 bp, Homo sapiens
ctgttaccctgcagcggaaccttgcagtctccccttcaagtactctaactggctctgggtacaagacaatgtctg

SEQ ID NO: 125531 - DNA, 73 bp, Homo sapiens
agcggaaccttgcagtctccccttcaagtactctaactggctctgggtacaagacaatgtctggcttttgctt

SEQ ID NO: 125532 - DNA, 72 bp, Homo sapiens
aaccttgcagtctccccttcaagtactctaactggctctgggtacaagacaatgtctggcttttgcttttct

SEQ ID NO: 125533 - DNA, 75 bp, Homo sapiens
ccttcaagtactctaactggctctgggtacaagacaatgtctggcttttgcttttctttctgatctgttgttaca

SEQ ID NO: 125534 - DNA, 75 bp, Homo sapiens
agtactctaactggctctgggtacaagacaatgtctggcttttgcttttctttctgatctgttgttacacctgta

SEQ ID NO: 125535 - DNA, 79 bp, Homo sapiens
tggctctgggtacaagacaatgtctggcttttgcttttctttctgatctgttgttacacctgtaagtgcaccttcatga

SEQ ID NO: 125536 - DNA, 79 bp, Homo sapiens
aagacaatgtctggcttttgcttttctttctgatctgttgttacacctgtaagtgcaccttcatgagccattctctcta

SEQ ID NO: 125537 - DNA, 79 bp, Homo sapiens
tctggcttttgcttttctttctgatctgttgttacacctgtaagtgcaccttcatgagccattctctctaattcttcaa

SEQ ID NO: 125538 - DNA, 78 bp, Homo sapiens
cttttctttctgatctgttgttacacctgtaagtgcaccttcatgagccattctctctaattcttcaattctctgtaa

SEQ ID NO: 125539 - DNA, 79 bp, Homo sapiens
tttctgatctgttgttacacctgtaagtgcaccttcatgagccattctctctaattcttcaattctctgtaagcctttc

SEQ ID NO: 125540 - DNA, 76 bp, Homo sapiens
tgttgttacacctgtaagtgcaccttcatgagccattctctctaattcttcaattctctgtaagcctttcctcccc

SEQ ID NO: 125541 - DNA, 72 bp, Homo sapiens
attctctgtaagcctttcctcccctcaggcaattgggattcttccacaagacttttctcatctttaacaata

SEQ ID NO: 125542 - DNA, 70 bp, Homo sapiens
taagcctttcctcccctcaggcaattgggattcttccacaagacttttctcatctttaacaataagggta

SEQ ID NO: 125543 - DNA, 76 bp, Homo sapiens
ttgggattcttccacaagacttttctcatctttaacaataagggtagcagatgtgtgatctgttccatatttgtta

SEQ ID NO: 125544 - DNA, 80 bp, Homo sapiens
tttctcatctttaacaataagggtagcagatgtgtgatctgttccatatttgttagtggctctgcaagtaatgataccac

SEQ ID NO: 125545 - DNA, 81 bp, Homo sapiens
tttaacaataagggtagcagatgtgtgatctgttccatatttgttagtggctctgcaagtaatgataccactgtctctaga

SEQ ID NO: 125546 - DNA, 83 bp, Homo sapiens
aataagggtagcagatgtgtgatctgttccatatttgttagtggctctgcaagtaatgataccactgtctctagaatatgcaa

SEQ ID NO: 125547 - DNA, 84 bp, Homo sapiens
agatgtgtgatctgttccatatttgttagtggctctgcaagtaatgataccactgtctctagaatatgcaacgccataatcaag

SEQ ID NO: 125548 - DNA, 84 bp, Homo sapiens
atctgttccatatttgttagtggctctgcaagtaatgataccactgtctctagaatatgcaacgccataatcaaggctgcagta

SEQ ID NO: 125549 - DNA, 81 bp, Homo sapiens
atatttgttagtggctctgcaagtaatgataccactgtctctagaatatgcaacgccataatcaaggctgcagtacccaaa

SEQ ID NO: 125550 - DNA, 84 bp, Homo sapiens
ctctgcaagtaatgataccactgtctctagaatatgcaacgccataatcaaggctgcagtacccaaattcattgatcatacgga

SEQ ID NO: 125551 - DNA, 81 bp, Homo sapiens
aagtaatgataccactgtctctagaatatgcaacgccataatcaaggctgcagtacccaaattcattgatcatacggagcc

SEQ ID NO: 125552 - DNA, 83 bp, Homo sapiens
actgtctctagaatatgcaacgccataatcaaggctgcagtacccaaattcattgatcatacggagcctgttggctgcttcaa

SEQ ID NO: 125553 - DNA, 82 bp, Homo sapiens
tagaatatgcaacgccataatcaaggctgcagtacccaaattcattgatcatacggagcctgttggctgcttcaagtggctt

SEQ ID NO: 125554 - DNA, 81 bp, Homo sapiens
aacgccataatcaaggctgcagtacccaaattcattgatcatacggagcctgttggctgcttcaagtggctttccatcatg

SEQ ID NO: 125555 - DNA, 78 bp, Homo sapiens
ggagcctgttggctgcttcaagtggctttccatcatggagccactccaccaccatcgttgggtcaccaatgggtgtta

SEQ ID NO: 125556 - DNA, 78 bp, Homo sapiens
ttcaagtggctttccatcatggagccactccaccaccatcgttgggtcaccaatgggtgttagcctgcattcaaagtg

SEQ ID NO: 125557 - DNA, 78 bp, Homo sapiens
ttccatcatggagccactccaccaccatcgttgggtcaccaatgggtgttagcctgcattcaaagtgggcaggcccaa

SEQ ID NO: 125558 - DNA, 72 bp, Homo sapiens
accatcgttgggtcaccaatgggtgttagcctgcattcaaagtgggcaggcccaaagcgcttaagtcttaag

SEQ ID NO: 125559 - DNA, 72 bp, Homo sapiens
ggtcaccaatgggtgttagcctgcattcaaagtgggcaggcccaaagcgcttaagtcttaaggaagtgagtt

SEQ ID NO: 125560 - DNA, 70 bp, Homo sapiens
ccaatgggtgttagcctgcattcaaagtgggcaggcccaaagcgcttaagtcttaaggaagtgagttttt

SEQ ID NO: 125561 - DNA, 70 bp, Homo sapiens
ttagcctgcattcaaagtgggcaggcccaaagcgcttaagtcttaaggaagtgagttttttcttgaaaaa

SEQ ID NO: 125562 - DNA, 67 bp, Homo sapiens
ttcaaagtgggcaggcccaaagcgcttaagtcttaaggaagtgagttttttcttgaaaaatggtttc

SEQ ID NO: 125563 - DNA, 66 bp, Homo sapiens
aggcccaaagcgcttaagtcttaaggaagtgagttttttcttgaaaaatggtttctgttgtttctc

SEQ ID NO: 125564 - DNA, 70 bp, Homo sapiens
gcgcttaagtcttaaggaagtgagttttttcttgaaaaatggtttctgttgtttctctttgtcatagaga

SEQ ID NO: 125565 - DNA, 70 bp, Homo sapiens
aggaagtgagttttttcttgaaaaatggtttctgttgtttctctttgtcatagagatcaccttcttccca

SEQ ID NO: 125566 - DNA, 71 bp, Homo sapiens
agttttttcttgaaaaatggtttctgttgtttctctttgtcatagagatcaccttcttcccattgctcttg

SEQ ID NO: 125567 - DNA, 76 bp, Homo sapiens
aaaaatggtttctgttgtttctctttgtcatagagatcaccttcttcccattgctcttggccatatcgcaaatgga

SEQ ID NO: 125568 - DNA, 78 bp, Homo sapiens
ttctgttgtttctctttgtcatagagatcaccttcttcccattgctcttggccatatcgcaaatggaggggctccagt

SEQ ID NO: 125569 - DNA, 77 bp, Homo sapiens
gtttctctttgtcatagagatcaccttcttcccattgctcttggccatatcgcaaatggaggggctccagttctggg

SEQ ID NO: 125570 - DNA, 78 bp, Homo sapiens
atagagatcaccttcttcccattgctcttggccatatcgcaaatggaggggctccagttctggggctgcaatctcctt

SEQ ID NO: 125571 - DNA, 78 bp, Homo sapiens
accttcttcccattgctcttggccatatcgcaaatggaggggctccagttctggggctgcaatctcctttgctctata

SEQ ID NO: 125572 - DNA, 78 bp, Homo sapiens
attgctcttggccatatcgcaaatggaggggctccagttctggggctgcaatctcctttgctctatatgtcccccgtg

SEQ ID NO: 125573 - DNA, 77 bp, Homo sapiens
ccatatcgcaaatggaggggctccagttctggggctgcaatctcctttgctctatatgtcccccgtgggatgattaa

SEQ ID NO: 125574 - DNA, 73 bp, Homo sapiens
aaatggaggggctccagttctggggctgcaatctcctttgctctatatgtcccccgtgggatgattaactttc

SEQ ID NO: 125575 - DNA, 77 bp, Homo sapiens
gggctccagttctggggctgcaatctcctttgctctatatgtcccccgtgggatgattaactttctctctggctcag

SEQ ID NO: 125576 - DNA, 80 bp, Homo sapiens
tggggctgcaatctcctttgctctatatgtcccccgtgggatgattaactttctctctggctcaggctctgcaaactcaa

SEQ ID NO: 125577 - DNA, 75 bp, Homo sapiens
ctctatatgtcccccgtgggatgattaactttctctctggctcaggctctgcaaactcaacttcaacatttactt

SEQ ID NO: 125578 - DNA, 76 bp, Homo sapiens
ccccgtgggatgattaactttctctctggctcaggctctgcaaactcaacttcaacatttactttgcatcttgtag

SEQ ID NO: 125579 - DNA, 81 bp, Homo sapiens
atgattaactttctctctggctcaggctctgcaaactcaacttcaacatttactttgcatcttgtagtgtctctgccagct

SEQ ID NO: 125580 - DNA, 81 bp, Homo sapiens
tttctctctggctcaggctctgcaaactcaacttcaacatttactttgcatcttgtagtgtctctgccagctttattaata

SEQ ID NO: 125581 - DNA, 83 bp, Homo sapiens
tcaggctctgcaaactcaacttcaacatttactttgcatcttgtagtgtctctgccagctttattaatagcagtcgcagtata

SEQ ID NO: 125582 - DNA, 81 bp, Homo sapiens
tctgcaaactcaacttcaacatttactttgcatcttgtagtgtctctgccagctttattaatagcagtcgcagtataccag

SEQ ID NO: 125583 - DNA, 81 bp, Homo sapiens
ttgtagtgtctctgccagctttattaatagcagtcgcagtataccaggcagaatcttggctgacagtggaatcgattttaa

SEQ ID NO: 125584 - DNA, 81 bp, Homo sapiens
tctgccagctttattaatagcagtcgcagtataccaggcagaatcttggctgacagtggaatcgattttaagggcagcttc

SEQ ID NO: 125585 - DNA, 77 bp, Homo sapiens
tttattaatagcagtcgcagtataccaggcagaatcttggctgacagtggaatcgattttaagggcagcttctccct

SEQ ID NO: 125586 - DNA, 76 bp, Homo sapiens
tataccaggcagaatcttggctgacagtggaatcgattttaagggcagcttctcccttggttccttcaattctata

SEQ ID NO: 125587 - DNA, 66 bp, Homo sapiens
aatcgattttaagggcagcttctcccttggttccttcaattctataaaaagttgggggagggaata

SEQ ID NO: 125588 - DNA, 75 bp, Homo sapiens
tggttattggatttgtataatgagcttagctttattatttccatacttacctgattttgggatatttatgaggca

SEQ ID NO: 125589 - DNA, 77 bp, Homo sapiens
gtataatgagcttagctttattatttccatacttacctgattttgggatatttatgaggcacaatgatgtcactgtt

SEQ ID NO: 125590 - DNA, 75 bp, Homo sapiens
gcttagctttattatttccatacttacctgattttgggatatttatgaggcacaatgatgtcactgtttttcaac

SEQ ID NO: 125591 - DNA, 77 bp, Homo sapiens
ttatttccatacttacctgattttgggatatttatgaggcacaatgatgtcactgtttttcaaccatacaatgtcag

SEQ ID NO: 125592 - DNA, 75 bp, Homo sapiens
atacttacctgattttgggatatttatgaggcacaatgatgtcactgtttttcaaccatacaatgtcagggttgg

SEQ ID NO: 125593 - DNA, 72 bp, Homo sapiens
attttgggatatttatgaggcacaatgatgtcactgtttttcaaccatacaatgtcagggttggggttaccc

SEQ ID NO: 125594 - DNA, 74 bp, Homo sapiens
tttatgaggcacaatgatgtcactgtttttcaaccatacaatgtcagggttggggttacccgtagctctgactt

SEQ ID NO: 125595 - DNA, 73 bp, Homo sapiens
acaatgatgtcactgtttttcaaccatacaatgtcagggttggggttacccgtagctctgactttcatttcaa

SEQ ID NO: 125596 - DNA, 71 bp, Homo sapiens
atgtcactgtttttcaaccatacaatgtcagggttggggttacccgtagctctgactttcatttcaagtcg

SEQ ID NO: 125597 - DNA, 68 bp, Homo sapiens
ttttcaaccatacaatgtcagggttggggttacccgtagctctgactttcatttcaagtcgggaacct

SEQ ID NO: 125598 - DNA, 68 bp, Homo sapiens
atacaatgtcagggttggggttacccgtagctctgactttcatttcaagtcgggaaccttcctttata

SEQ ID NO: 125599 - DNA, 66 bp, Homo sapiens
agggttggggttacccgtagctctgactttcatttcaagtcgggaaccttcctttatattgacatt

SEQ ID NO: 125600 - DNA, 68 bp, Homo sapiens
ttacccgtagctctgactttcatttcaagtcgggaaccttcctttatattgacatttttcagtttttc

SEQ ID NO: 125601 - DNA, 68 bp, Homo sapiens
ctgactttcatttcaagtcgggaaccttcctttatattgacatttttcagtttttctacaaacatcgg

SEQ ID NO: 125602 - DNA, 67 bp, Homo sapiens
caagtcgggaaccttcctttatattgacatttttcagtttttctacaaacatcggttttacctgatg

SEQ ID NO: 125603 - DNA, 71 bp, Homo sapiens
gaaccttcctttatattgacatttttcagtttttctacaaacatcggttttacctgatgttccacagctga

SEQ ID NO: 125604 - DNA, 72 bp, Homo sapiens
atattgacatttttcagtttttctacaaacatcggttttacctgatgttccacagctgaaagagaaaggtca

SEQ ID NO: 125605 - DNA, 72 bp, Homo sapiens
ttttcagtttttctacaaacatcggttttacctgatgttccacagctgaaagagaaaggtcatgatttagag

SEQ ID NO: 125606 - DNA, 72 bp, Homo sapiens
tttttctacaaacatcggttttacctgatgttccacagctgaaagagaaaggtcatgatttagagggagtaa

SEQ ID NO: 125607 - DNA, 71 bp, Homo sapiens
ttttattttatctcattttaccttccacagttaaaatcactgaaattgaagatctgcctgccctgttttgg

SEQ ID NO: 125608 - DNA, 73 bp, Homo sapiens
ttttatctcattttaccttccacagttaaaatcactgaaattgaagatctgcctgccctgttttgggcaacca

SEQ ID NO: 125609 - DNA, 73 bp, Homo sapiens
ttttaccttccacagttaaaatcactgaaattgaagatctgcctgccctgttttgggcaaccacagtccattc

SEQ ID NO: 125610 - DNA, 75 bp, Homo sapiens
acagttaaaatcactgaaattgaagatctgcctgccctgttttgggcaaccacagtccattccccagaatcactg

SEQ ID NO: 125611 - DNA, 77 bp, Homo sapiens
atcactgaaattgaagatctgcctgccctgttttgggcaaccacagtccattccccagaatcactgggtgtggcagg

SEQ ID NO: 125612 - DNA, 75 bp, Homo sapiens
aagatctgcctgccctgttttgggcaaccacagtccattccccagaatcactgggtgtggcagggacaataatta

SEQ ID NO: 125613 - DNA, 74 bp, Homo sapiens
ccctgttttgggcaaccacagtccattccccagaatcactgggtgtggcagggacaataattagtgattgagta

SEQ ID NO: 125614 - DNA, 76 bp, Homo sapiens
ggcaaccacagtccattccccagaatcactgggtgtggcagggacaataattagtgattgagtaccatcttcttta

SEQ ID NO: 125615 - DNA, 76 bp, Homo sapiens
acagtccattccccagaatcactgggtgtggcagggacaataattagtgattgagtaccatcttctttaatgacta

SEQ ID NO: 125616 - DNA, 76 bp, Homo sapiens
cagaatcactgggtgtggcagggacaataattagtgattgagtaccatcttctttaatgactactttatgggtata

SEQ ID NO: 125617 - DNA, 77 bp, Homo sapiens
tgggtgtggcagggacaataattagtgattgagtaccatcttctttaatgactactttatgggtatagtcattgaca

SEQ ID NO: 125618 - DNA, 76 bp, Homo sapiens
cagggacaataattagtgattgagtaccatcttctttaatgactactttatgggtatagtcattgacaatttgctg

SEQ ID NO: 125619 - DNA, 76 bp, Homo sapiens
aattagtgattgagtaccatcttctttaatgactactttatgggtatagtcattgacaatttgctggcctgtgaaa

SEQ ID NO: 125620 - DNA, 76 bp, Homo sapiens
gattgagtaccatcttctttaatgactactttatgggtatagtcattgacaatttgctggcctgtgaaaatatgtt

SEQ ID NO: 125621 - DNA, 74 bp, Homo sapiens
catcttctttaatgactactttatgggtatagtcattgacaatttgctggcctgtgaaaatatgtttaaaagaa

SEQ ID NO: 125622 - DNA, 72 bp, Homo sapiens
aatgactactttatgggtatagtcattgacaatttgctggcctgtgaaaatatgtttaaaagaaagtagatt

SEQ ID NO: 125623 - DNA, 76 bp, Homo sapiens
gtttttgtgtttttatgattcatgagcaaaaacttatcacgcttaccatcatgaaaccagaacgtctctggcatag

SEQ ID NO: 125624 - DNA, 78 bp, Homo sapiens
ttttatgattcatgagcaaaaacttatcacgcttaccatcatgaaaccagaacgtctctggcataggtctaccaacaa

SEQ ID NO: 125625 - DNA, 76 bp, Homo sapiens
tcatgagcaaaaacttatcacgcttaccatcatgaaaccagaacgtctctggcataggtctaccaacaacctttaa

SEQ ID NO: 125626 - DNA, 72 bp, Homo sapiens
aaaaacttatcacgcttaccatcatgaaaccagaacgtctctggcataggtctaccaacaacctttaagtca

SEQ ID NO: 125627 - DNA, 73 bp, Homo sapiens
acgcttaccatcatgaaaccagaacgtctctggcataggtctaccaacaacctttaagtcaaatctggcagtt

SEQ ID NO: 125628 - DNA, 72 bp, Homo sapiens
atgaaaccagaacgtctctggcataggtctaccaacaacctttaagtcaaatctggcagtttgcccttctaa

SEQ ID NO: 125629 - DNA, 71 bp, Homo sapiens
aacgtctctggcataggtctaccaacaacctttaagtcaaatctggcagtttgcccttctaaacatttgaa

SEQ ID NO: 125630 - DNA, 71 bp, Homo sapiens
ctctggcataggtctaccaacaacctttaagtcaaatctggcagtttgcccttctaaacatttgaaagaaa

SEQ ID NO: 125631 - DNA, 67 bp, Homo sapiens
gtctaccaacaacctttaagtcaaatctggcagtttgcccttctaaacatttgaaagaaacaggttt

SEQ ID NO: 125632 - DNA, 67 bp, Homo sapiens
cctttaagtcaaatctggcagtttgcccttctaaacatttgaaagaaacaggttttaacacaaagac

SEQ ID NO: 125633 - DNA, 69 bp, Homo sapiens
atctggcagtttgcccttctaaacatttgaaagaaacaggttttaacacaaagactggtttatatagtc

SEQ ID NO: 125634 - DNA, 70 bp, Homo sapiens
gcagtttgcccttctaaacatttgaaagaaacaggttttaacacaaagactggtttatatagtctctcaa

SEQ ID NO: 125635 - DNA, 72 bp, Homo sapiens
aaacatttgaaagaaacaggttttaacacaaagactggtttatatagtctctcaagttgtgactcatctgtc

SEQ ID NO: 125636 - DNA, 74 bp, Homo sapiens
tttgaaagaaacaggttttaacacaaagactggtttatatagtctctcaagttgtgactcatctgtctcctcca

SEQ ID NO: 125637 - DNA, 75 bp, Homo sapiens
acaggttttaacacaaagactggtttatatagtctctcaagttgtgactcatctgtctcctccagcctacgtcca

SEQ ID NO: 125638 - DNA, 76 bp, Homo sapiens
acacaaagactggtttatatagtctctcaagttgtgactcatctgtctcctccagcctacgtccaggggacattct

SEQ ID NO: 125639 - DNA, 79 bp, Homo sapiens
tggtttatatagtctctcaagttgtgactcatctgtctcctccagcctacgtccaggggacattcttgcaggggacatc

SEQ ID NO: 125640 - DNA, 80 bp, Homo sapiens
agtctctcaagttgtgactcatctgtctcctccagcctacgtccaggggacattcttgcaggggacatccgtgcaggaga

SEQ ID NO: 125641 - DNA, 81 bp, Homo sapiens
gttgtgactcatctgtctcctccagcctacgtccaggggacattcttgcaggggacatccgtgcaggagacatccttgcag

SEQ ID NO: 125642 - DNA, 81 bp, Homo sapiens
tctcctccagcctacgtccaggggacattcttgcaggggacatccgtgcaggagacatccttgcaggtgacatccgtgcag

SEQ ID NO: 125643 - DNA, 82 bp, Homo sapiens
tccagcctacgtccaggggacattcttgcaggggacatccgtgcaggagacatccttgcaggtgacatccgtgcaggagaca

SEQ ID NO: 125644 - DNA, 82 bp, Homo sapiens
aggggacattcttgcaggggacatccgtgcaggagacatccttgcaggtgacatccgtgcaggagacatgcgtataggagac

SEQ ID NO: 125645 - DNA, 86 bp, Homo sapiens
attcttgcaggggacatccgtgcaggagacatccttgcaggtgacatccgtgcaggagacatgcgtataggagacctgctcactga

SEQ ID NO: 125646 - DNA, 86 bp, Homo sapiens
acatccgtgcaggagacatccttgcaggtgacatccgtgcaggagacatgcgtataggagacctgctcactgaacgtggagagaga

SEQ ID NO: 125647 - DNA, 84 bp, Homo sapiens
atccttgcaggtgacatccgtgcaggagacatgcgtataggagacctgctcactgaacgtggagagagagatctgcaaaacaaa

SEQ ID NO: 125648 - DNA, 83 bp, Homo sapiens
acatccgtgcaggagacatgcgtataggagacctgctcactgaacgtggagagagagatctgcaaaacaaagacacacaatac

SEQ ID NO: 125649 - DNA, 81 bp, Homo sapiens
aggagacatgcgtataggagacctgctcactgaacgtggagagagagatctgcaaaacaaagacacacaatactttcgtga

SEQ ID NO: 125650 - DNA, 73 bp, Homo sapiens
gaaaacaatttacatactaaataacccaaattattacaagtcttacctgattctgctcactggctctagtgtg

SEQ ID NO: 125651 - DNA, 74 bp, Homo sapiens
tttacatactaaataacccaaattattacaagtcttacctgattctgctcactggctctagtgtgggaatgtaa

SEQ ID NO: 125652 - DNA, 73 bp, Homo sapiens
actaaataacccaaattattacaagtcttacctgattctgctcactggctctagtgtgggaatgtaagtcgga

SEQ ID NO: 125653 - DNA, 79 bp, Homo sapiens
aaattattacaagtcttacctgattctgctcactggctctagtgtgggaatgtaagtcggagctccaagtggtgcagca

SEQ ID NO: 125654 - DNA, 82 bp, Homo sapiens
tcttacctgattctgctcactggctctagtgtgggaatgtaagtcggagctccaagtggtgcagcaggctccacatacaatt

SEQ ID NO: 125655 - DNA, 83 bp, Homo sapiens
attctgctcactggctctagtgtgggaatgtaagtcggagctccaagtggtgcagcaggctccacatacaatttccctgagca

SEQ ID NO: 125656 - DNA, 81 bp, Homo sapiens
tggctctagtgtgggaatgtaagtcggagctccaagtggtgcagcaggctccacatacaatttccctgagcaaattgcatt

SEQ ID NO: 125657 - DNA, 79 bp, Homo sapiens
tagtgtgggaatgtaagtcggagctccaagtggtgcagcaggctccacatacaatttccctgagcaaattgcatttcct

SEQ ID NO: 125658 - DNA, 77 bp, Homo sapiens
aatgtaagtcggagctccaagtggtgcagcaggctccacatacaatttccctgagcaaattgcatttcctttaatat

SEQ ID NO: 125659 - DNA, 83 bp, Homo sapiens
tccaagtggtgcagcaggctccacatacaatttccctgagcaaattgcatttcctttaatattgctggcaaatgcagtgtaga

SEQ ID NO: 125660 - DNA, 84 bp, Homo sapiens
tgcagcaggctccacatacaatttccctgagcaaattgcatttcctttaatattgctggcaaatgcagtgtagattccttcatc

SEQ ID NO: 125661 - DNA, 79 bp, Homo sapiens
aggctccacatacaatttccctgagcaaattgcatttcctttaatattgctggcaaatgcagtgtagattccttcatct

SEQ ID NO: 125662 - DNA, 79 bp, Homo sapiens
tacaatttccctgagcaaattgcatttcctttaatattgctggcaaatgcagtgtagattccttcatcttctggaagaa

SEQ ID NO: 125663 - DNA, 78 bp, Homo sapiens
agcaaattgcatttcctttaatattgctggcaaatgcagtgtagattccttcatcttctggaagaacaacaggtatac

SEQ ID NO: 125664 - DNA, 79 bp, Homo sapiens
tttcctttaatattgctggcaaatgcagtgtagattccttcatcttctggaagaacaacaggtatacgcagactagctc

SEQ ID NO: 125665 - DNA, 84 bp, Homo sapiens
taatattgctggcaaatgcagtgtagattccttcatcttctggaagaacaacaggtatacgcagactagctctgccatcttgta

SEQ ID NO: 125666 - DNA, 80 bp, Homo sapiens
aatgcagtgtagattccttcatcttctggaagaacaacaggtatacgcagactagctctgccatcttgtagaaagtccat

SEQ ID NO: 125667 - DNA, 78 bp, Homo sapiens
atcttctggaagaacaacaggtatacgcagactagctctgccatcttgtagaaagtccatttggtatctttctccatg

SEQ ID NO: 125668 - DNA, 78 bp, Homo sapiens
ctggaagaacaacaggtatacgcagactagctctgccatcttgtagaaagtccatttggtatctttctccatgtttga

SEQ ID NO: 125669 - DNA, 82 bp, Homo sapiens
gtatacgcagactagctctgccatcttgtagaaagtccatttggtatctttctccatgtttgatgcgcttgccatctttgta

SEQ ID NO: 125670 - DNA, 80 bp, Homo sapiens
actagctctgccatcttgtagaaagtccatttggtatctttctccatgtttgatgcgcttgccatctttgtaccaagcaa

SEQ ID NO: 125671 - DNA, 80 bp, Homo sapiens
ccatcttgtagaaagtccatttggtatctttctccatgtttgatgcgcttgccatctttgtaccaagcaatctgcaaaga

SEQ ID NO: 125672 - DNA, 79 bp, Homo sapiens
ttgtagaaagtccatttggtatctttctccatgtttgatgcgcttgccatctttgtaccaagcaatctgcaaagaatac

SEQ ID NO: 125673 - DNA, 83 bp, Homo sapiens
ttggtatctttctccatgtttgatgcgcttgccatctttgtaccaagcaatctgcaaagaataccatgcatgtatgaataaaa

SEQ ID NO: 125674 - DNA, 82 bp, Homo sapiens
atctttctccatgtttgatgcgcttgccatctttgtaccaagcaatctgcaaagaataccatgcatgtatgaataaaattta

SEQ ID NO: 125675 - DNA, 78 bp, Homo sapiens
tgtatctttactgtggcaaggagctatgataaatgtttatattttacctttggtaatggatatccagacatcttgcaa

SEQ ID NO: 125676 - DNA, 76 bp, Homo sapiens
actgtggcaaggagctatgataaatgtttatattttacctttggtaatggatatccagacatcttgcaatgaaaag

SEQ ID NO: 125677 - DNA, 76 bp, Homo sapiens
agctatgataaatgtttatattttacctttggtaatggatatccagacatcttgcaatgaaaagtgacacccatcc

SEQ ID NO: 125678 - DNA, 74 bp, Homo sapiens
aatgtttatattttacctttggtaatggatatccagacatcttgcaatgaaaagtgacacccatcccctcaaga

SEQ ID NO: 125679 - DNA, 74 bp, Homo sapiens
attttacctttggtaatggatatccagacatcttgcaatgaaaagtgacacccatcccctcaagaattctataa

SEQ ID NO: 125680 - DNA, 77 bp, Homo sapiens
tttggtaatggatatccagacatcttgcaatgaaaagtgacacccatcccctcaagaattctataattcttgattct

SEQ ID NO: 125681 - DNA, 78 bp, Homo sapiens
atatccagacatcttgcaatgaaaagtgacacccatcccctcaagaattctataattcttgattcttgaatcaaatcc

SEQ ID NO: 125682 - DNA, 78 bp, Homo sapiens
acatcttgcaatgaaaagtgacacccatcccctcaagaattctataattcttgattcttgaatcaaatcctgattcaa

SEQ ID NO: 125683 - DNA, 77 bp, Homo sapiens
aatgaaaagtgacacccatcccctcaagaattctataattcttgattcttgaatcaaatcctgattcaacagcttca

SEQ ID NO: 125684 - DNA, 79 bp, Homo sapiens
cccatcccctcaagaattctataattcttgattcttgaatcaaatcctgattcaacagcttcagattcagaaatgtcaa

SEQ ID NO: 125685 - DNA, 81 bp, Homo sapiens
ctcaagaattctataattcttgattcttgaatcaaatcctgattcaacagcttcagattcagaaatgtcaactgccatctt

SEQ ID NO: 125686 - DNA, 81 bp, Homo sapiens
ttctataattcttgattcttgaatcaaatcctgattcaacagcttcagattcagaaatgtcaactgccatcttttcttctc

SEQ ID NO: 125687 - DNA, 82 bp, Homo sapiens
ttgattcttgaatcaaatcctgattcaacagcttcagattcagaaatgtcaactgccatcttttcttctccatcttcttcaa

SEQ ID NO: 125688 - DNA, 79 bp, Homo sapiens
aatcaaatcctgattcaacagcttcagattcagaaatgtcaactgccatcttttcttctccatcttcttcaagaagttc

SEQ ID NO: 125689 - DNA, 78 bp, Homo sapiens
attcaacagcttcagattcagaaatgtcaactgccatcttttcttctccatcttcttcaagaagttcttctaatgtag

SEQ ID NO: 125690 - DNA, 76 bp, Homo sapiens
cttcagattcagaaatgtcaactgccatcttttcttctccatcttcttcaagaagttcttctaatgtagtctttat

SEQ ID NO: 125691 - DNA, 77 bp, Homo sapiens
tcagaaatgtcaactgccatcttttcttctccatcttcttcaagaagttcttctaatgtagtctttattattctata

SEQ ID NO: 125692 - DNA, 74 bp, Homo sapiens
ctgccatcttttcttctccatcttcttcaagaagttcttctaatgtagtctttattattctatattcaatttct

SEQ ID NO: 125693 - DNA, 71 bp, Homo sapiens
cttttcttctccatcttcttcaagaagttcttctaatgtagtctttattattctatattcaatttctttaa

SEQ ID NO: 125694 - DNA, 74 bp, Homo sapiens
catcttcttcaagaagttcttctaatgtagtctttattattctatattcaatttctttaataagtctctcttca

SEQ ID NO: 125695 - DNA, 71 bp, Homo sapiens
caagaagttcttctaatgtagtctttattattctatattcaatttctttaataagtctctcttcaaaggaa

SEQ ID NO: 125696 - DNA, 71 bp, Homo sapiens
atgtagtctttattattctatattcaatttctttaataagtctctcttcaaaggaagaaatatggaattcc

SEQ ID NO: 125697 - DNA, 73 bp, Homo sapiens
gtctttattattctatattcaatttctttaataagtctctcttcaaaggaagaaatatggaattcctatgcaa

SEQ ID NO: 125698 - DNA, 73 bp, Homo sapiens
tattcaatttctttaataagtctctcttcaaaggaagaaatatggaattcctatgcaaaaagattatggtctg

SEQ ID NO: 125699 - DNA, 71 bp, Homo sapiens
tctttaataagtctctcttcaaaggaagaaatatggaattcctatgcaaaaagattatggtctgttaaaaa

SEQ ID NO: 125700 - DNA, 73 bp, Homo sapiens
gtataatttatgaaattgtttggttggtcattacttttatactcacctgatcttctacataagttctgaccac

SEQ ID NO: 125701 - DNA, 74 bp, Homo sapiens
tgaaattgtttggttggtcattacttttatactcacctgatcttctacataagttctgaccactacagtatctt

SEQ ID NO: 125702 - DNA, 74 bp, Homo sapiens
tttggttggtcattacttttatactcacctgatcttctacataagttctgaccactacagtatctttggccatt

SEQ ID NO: 125703 - DNA, 75 bp, Homo sapiens
tcattacttttatactcacctgatcttctacataagttctgaccactacagtatctttggccattttcttcctaa

SEQ ID NO: 125704 - DNA, 74 bp, Homo sapiens
ttatactcacctgatcttctacataagttctgaccactacagtatctttggccattttcttcctaattaaggct

SEQ ID NO: 125705 - DNA, 71 bp, Homo sapiens
acataagttctgaccactacagtatctttggccattttcttcctaattaaggcttgttctttttcatactc

SEQ ID NO: 125706 - DNA, 70 bp, Homo sapiens
gaccactacagtatctttggccattttcttcctaattaaggcttgttctttttcatactctttttcatac

SEQ ID NO: 125707 - DNA, 72 bp, Homo sapiens
gtatctttggccattttcttcctaattaaggcttgttctttttcatactctttttcatactcagagtataca

SEQ ID NO: 125708 - DNA, 72 bp, Homo sapiens
ttttcttcctaattaaggcttgttctttttcatactctttttcatactcagagtatacaaatccaggtgctg

SEQ ID NO: 125709 - DNA, 74 bp, Homo sapiens
tcctaattaaggcttgttctttttcatactctttttcatactcagagtatacaaatccaggtgctgtttctcca

SEQ ID NO: 125710 - DNA, 72 bp, Homo sapiens
tgttctttttcatactctttttcatactcagagtatacaaatccaggtgctgtttctccaactttaggttct

SEQ ID NO: 125711 - DNA, 73 bp, Homo sapiens
tttcatactctttttcatactcagagtatacaaatccaggtgctgtttctccaactttaggttcttgaacaaa

SEQ ID NO: 125712 - DNA, 75 bp, Homo sapiens
tctttttcatactcagagtatacaaatccaggtgctgtttctccaactttaggttcttgaacaaatgcagtcact

SEQ ID NO: 125713 - DNA, 77 bp, Homo sapiens
agagtatacaaatccaggtgctgtttctccaactttaggttcttgaacaaatgcagtcacttgtgtctgataaagca

SEQ ID NO: 125714 - DNA, 76 bp, Homo sapiens
tacaaatccaggtgctgtttctccaactttaggttcttgaacaaatgcagtcacttgtgtctgataaagcatttct

SEQ ID NO: 125715 - DNA, 78 bp, Homo sapiens
tgtttctccaactttaggttcttgaacaaatgcagtcacttgtgtctgataaagcatttcttgctgggacttcatcag

SEQ ID NO: 125716 - DNA, 78 bp, Homo sapiens
aactttaggttcttgaacaaatgcagtcacttgtgtctgataaagcatttcttgctgggacttcatcagtaactcata

SEQ ID NO: 125717 - DNA, 83 bp, Homo sapiens
tcttgaacaaatgcagtcacttgtgtctgataaagcatttcttgctgggacttcatcagtaactcataatcagctaagagtta

SEQ ID NO: 125718 - DNA, 79 bp, Homo sapiens
ttgtgtctgataaagcatttcttgctgggacttcatcagtaactcataatcagctaagagttaagaacatcagttaatt

SEQ ID NO: 125719 - DNA, 77 bp, Homo sapiens
ctgataaagcatttcttgctgggacttcatcagtaactcataatcagctaagagttaagaacatcagttaattttta

SEQ ID NO: 125720 - DNA, 80 bp, Homo sapiens
ttgtatttcagttcttatcatgcacatagaaactggagttgcacttaccttcttcaagcaaggaagcagatgcagaagtt

SEQ ID NO: 125721 - DNA, 82 bp, Homo sapiens
ttcttatcatgcacatagaaactggagttgcacttaccttcttcaagcaaggaagcagatgcagaagtttctccatgcttat

SEQ ID NO: 125722 - DNA, 80 bp, Homo sapiens
cacatagaaactggagttgcacttaccttcttcaagcaaggaagcagatgcagaagtttctccatgcttattgcgaacaa

SEQ ID NO: 125723 - DNA, 78 bp, Homo sapiens
aaactggagttgcacttaccttcttcaagcaaggaagcagatgcagaagtttctccatgcttattgcgaacaacaata

SEQ ID NO: 125724 - DNA, 81 bp, Homo sapiens
ttgcacttaccttcttcaagcaaggaagcagatgcagaagtttctccatgcttattgcgaacaacaatagtgtattctcca

SEQ ID NO: 125725 - DNA, 85 bp, Homo sapiens
ttcttcaagcaaggaagcagatgcagaagtttctccatgcttattgcgaacaacaatagtgtattctccagcatcatcagcaaaa

SEQ ID NO: 125726 - DNA, 84 bp, Homo sapiens
aaggaagcagatgcagaagtttctccatgcttattgcgaacaacaatagtgtattctccagcatcatcagcaaaagtcatagaa

SEQ ID NO: 125727 - DNA, 84 bp, Homo sapiens
atgcagaagtttctccatgcttattgcgaacaacaatagtgtattctccagcatcatcagcaaaagtcatagaaatcaccagct

SEQ ID NO: 125728 - DNA, 85 bp, Homo sapiens
tttctccatgcttattgcgaacaacaatagtgtattctccagcatcatcagcaaaagtcatagaaatcaccagcttgcattcacc

SEQ ID NO: 125729 - DNA, 81 bp, Homo sapiens
ttattgcgaacaacaatagtgtattctccagcatcatcagcaaaagtcatagaaatcaccagcttgcattcaccggtttgt

SEQ ID NO: 125730 - DNA, 79 bp, Homo sapiens
aacaatagtgtattctccagcatcatcagcaaaagtcatagaaatcaccagcttgcattcaccggtttgtttgttgtaa

SEQ ID NO: 125731 - DNA, 80 bp, Homo sapiens
tattctccagcatcatcagcaaaagtcatagaaatcaccagcttgcattcaccggtttgtttgttgtaactcactttgta

SEQ ID NO: 125732 - DNA, 77 bp, Homo sapiens
atcatcagcaaaagtcatagaaatcaccagcttgcattcaccggtttgtttgttgtaactcactttgtatctttatg

SEQ ID NO: 125733 - DNA, 74 bp, Homo sapiens
agcaaaagtcatagaaatcaccagcttgcattcaccggtttgtttgttgtaactcactttgtatctttatgtaa

SEQ ID NO: 125734 - DNA, 73 bp, Homo sapiens
atagaaatcaccagcttgcattcaccggtttgtttgttgtaactcactttgtatctttatgtaaatgtacaaa

SEQ ID NO: 125735 - DNA, 70 bp, Homo sapiens
ccagcttgcattcaccggtttgtttgttgtaactcactttgtatctttatgtaaatgtacaaaatttaaa

SEQ ID NO: 125736 - DNA, 67 bp, Homo sapiens
ttcaccggtttgtttgttgtaactcactttgtatctttatgtaaatgtacaaaatttaaaaatcagt

SEQ ID NO: 125737 - DNA, 77 bp, Homo sapiens
gtattatacaagtcacagagaactctatattcagccatcaaaatacctgtatccagtggttagaggaacaccagatt

SEQ ID NO: 125738 - DNA, 75 bp, Homo sapiens
atacaagtcacagagaactctatattcagccatcaaaatacctgtatccagtggttagaggaacaccagattttt

SEQ ID NO: 125739 - DNA, 75 bp, Homo sapiens
agagaactctatattcagccatcaaaatacctgtatccagtggttagaggaacaccagattttttccagtataca

SEQ ID NO: 125740 - DNA, 74 bp, Homo sapiens
tatattcagccatcaaaatacctgtatccagtggttagaggaacaccagattttttccagtatacatggggctt

SEQ ID NO: 125741 - DNA, 71 bp, Homo sapiens
atcaaaatacctgtatccagtggttagaggaacaccagattttttccagtatacatggggctttgggttgc

SEQ ID NO: 125742 - DNA, 73 bp, Homo sapiens
tatccagtggttagaggaacaccagattttttccagtatacatggggctttgggttgccgccaacttggcatc

SEQ ID NO: 125743 - DNA, 72 bp, Homo sapiens
tggttagaggaacaccagattttttccagtatacatggggctttgggttgccgccaacttggcatccaaaca

SEQ ID NO: 125744 - DNA, 71 bp, Homo sapiens
aacaccagattttttccagtatacatggggctttgggttgccgccaacttggcatccaaacaccacgctcc

SEQ ID NO: 125745 - DNA, 71 bp, Homo sapiens
tttttccagtatacatggggctttgggttgccgccaacttggcatccaaacaccacgctcccaccttccac

SEQ ID NO: 125746 - DNA, 73 bp, Homo sapiens
tatacatggggctttgggttgccgccaacttggcatccaaacaccacgctcccaccttccaccagtttctgga

SEQ ID NO: 125747 - DNA, 70 bp, Homo sapiens
tttgggttgccgccaacttggcatccaaacaccacgctcccaccttccaccagtttctggaccactggtt

SEQ ID NO: 125748 - DNA, 70 bp, Homo sapiens
caacttggcatccaaacaccacgctcccaccttccaccagtttctggaccactggttttgtaataaagta

SEQ ID NO: 125749 - DNA, 68 bp, Homo sapiens
atccaaacaccacgctcccaccttccaccagtttctggaccactggttttgtaataaagtaaggcgcg

SEQ ID NO: 125750 - DNA, 70 bp, Homo sapiens
cttccaccagtttctggaccactggttttgtaataaagtaaggcgcggcaggttctccaggccctgcttg

SEQ ID NO: 125751 - DNA, 69 bp, Homo sapiens
accagtttctggaccactggttttgtaataaagtaaggcgcggcaggttctccaggccctgcttgttcc

SEQ ID NO: 125752 - DNA, 73 bp, Homo sapiens
actggttttgtaataaagtaaggcgcggcaggttctccaggccctgcttgttcctctgtgaggctagtatcag

SEQ ID NO: 125753 - DNA, 81 bp, Homo sapiens
taaggcgcggcaggttctccaggccctgcttgttcctctgtgaggctagtatcagtcataaccacatctcttgactcaaca

SEQ ID NO: 125754 - DNA, 79 bp, Homo sapiens
aggttctccaggccctgcttgttcctctgtgaggctagtatcagtcataaccacatctcttgactcaacaaagctggaa

SEQ ID NO: 125755 - DNA, 79 bp, Homo sapiens
aggccctgcttgttcctctgtgaggctagtatcagtcataaccacatctcttgactcaacaaagctggaaagagaattc

SEQ ID NO: 125756 - DNA, 80 bp, Homo sapiens
tgttcctctgtgaggctagtatcagtcataaccacatctcttgactcaacaaagctggaaagagaattcccctcatatta

SEQ ID NO: 125757 - DNA, 79 bp, Homo sapiens
tgtgaggctagtatcagtcataaccacatctcttgactcaacaaagctggaaagagaattcccctcatattagcttccg

SEQ ID NO: 125758 - DNA, 69 bp, Homo sapiens
caatactggtggggctgaaagtcaaaatggtactagaacagctactaattagcaaaatattttaccgtt

SEQ ID NO: 125759 - DNA, 70 bp, Homo sapiens
gggctgaaagtcaaaatggtactagaacagctactaattagcaaaatattttaccgtttctcttctgtag

SEQ ID NO: 125760 - DNA, 69 bp, Homo sapiens
gaaagtcaaaatggtactagaacagctactaattagcaaaatattttaccgtttctcttctgtagtaaa

SEQ ID NO: 125761 - DNA, 71 bp, Homo sapiens
actagaacagctactaattagcaaaatattttaccgtttctcttctgtagtaaatttctcagtcacggctg

SEQ ID NO: 125762 - DNA, 70 bp, Homo sapiens
agctactaattagcaaaatattttaccgtttctcttctgtagtaaatttctcagtcacggctgtggtttc

SEQ ID NO: 125763 - DNA, 68 bp, Homo sapiens
agcaaaatattttaccgtttctcttctgtagtaaatttctcagtcacggctgtggtttccttttcaaa

SEQ ID NO: 125764 - DNA, 70 bp, Homo sapiens
tattttaccgtttctcttctgtagtaaatttctcagtcacggctgtggtttccttttcaaattcttctga

SEQ ID NO: 125765 - DNA, 71 bp, Homo sapiens
tttctcttctgtagtaaatttctcagtcacggctgtggtttccttttcaaattcttctgacactaaaagaa

SEQ ID NO: 125766 - DNA, 70 bp, Homo sapiens
tgtagtaaatttctcagtcacggctgtggtttccttttcaaattcttctgacactaaaagaagacaaaag

SEQ ID NO: 125767 - DNA, 73 bp, Homo sapiens
ttctcagtcacggctgtggtttccttttcaaattcttctgacactaaaagaagacaaaagtttctcattgaga

SEQ ID NO: 125768 - DNA, 73 bp, Homo sapiens
gctgtggtttccttttcaaattcttctgacactaaaagaagacaaaagtttctcattgagatgagatgtttag

SEQ ID NO: 125769 - DNA, 83 bp, Homo sapiens
atgaaagtgatggcatgtgcattaggactgtgggagggtggccactaaccctgcacagccagatagcaggatgtgctgacggt

SEQ ID NO: 125770 - DNA, 82 bp, Homo sapiens
catgtgcattaggactgtgggagggtggccactaaccctgcacagccagatagcaggatgtgctgacggttccagcctcatt

SEQ ID NO: 125771 - DNA, 79 bp, Homo sapiens
attaggactgtgggagggtggccactaaccctgcacagccagatagcaggatgtgctgacggttccagcctcatttaca

SEQ ID NO: 125772 - DNA, 82 bp, Homo sapiens
gagggtggccactaaccctgcacagccagatagcaggatgtgctgacggttccagcctcatttacagcactgcaagtaaatc

SEQ ID NO: 125773 - DNA, 82 bp, Homo sapiens
actaaccctgcacagccagatagcaggatgtgctgacggttccagcctcatttacagcactgcaagtaaatcgcccgctgtc

SEQ ID NO: 125774 - DNA, 84 bp, Homo sapiens
cacagccagatagcaggatgtgctgacggttccagcctcatttacagcactgcaagtaaatcgcccgctgtcttccgcaaatgc

SEQ ID NO: 125775 - DNA, 82 bp, Homo sapiens
tagcaggatgtgctgacggttccagcctcatttacagcactgcaagtaaatcgcccgctgtcttccgcaaatgcttcgcgaa

SEQ ID NO: 125776 - DNA, 81 bp, Homo sapiens
atgtgctgacggttccagcctcatttacagcactgcaagtaaatcgcccgctgtcttccgcaaatgcttcgcgaatcataa

SEQ ID NO: 125777 - DNA, 82 bp, Homo sapiens
tccagcctcatttacagcactgcaagtaaatcgcccgctgtcttccgcaaatgcttcgcgaatcataagacgagcaattcca

SEQ ID NO: 125778 - DNA, 80 bp, Homo sapiens
cctcatttacagcactgcaagtaaatcgcccgctgtcttccgcaaatgcttcgcgaatcataagacgagcaattccactc

SEQ ID NO: 125779 - DNA, 77 bp, Homo sapiens
actgcaagtaaatcgcccgctgtcttccgcaaatgcttcgcgaatcataagacgagcaattccactctggaaggtta

SEQ ID NO: 125780 - DNA, 77 bp, Homo sapiens
gtaaatcgcccgctgtcttccgcaaatgcttcgcgaatcataagacgagcaattccactctggaaggttatctggaa

SEQ ID NO: 125781 - DNA, 77 bp, Homo sapiens
tgtcttccgcaaatgcttcgcgaatcataagacgagcaattccactctggaaggttatctggaagtcaatggaactt

SEQ ID NO: 125782 - DNA, 73 bp, Homo sapiens
aatcataagacgagcaattccactctggaaggttatctggaagtcaatggaactttcgatttggtagtcttcc

SEQ ID NO: 125783 - DNA, 73 bp, Homo sapiens
taagacgagcaattccactctggaaggttatctggaagtcaatggaactttcgatttggtagtcttccctgta

SEQ ID NO: 125784 - DNA, 72 bp, Homo sapiens
aattccactctggaaggttatctggaagtcaatggaactttcgatttggtagtcttccctgtaccatgtcac

SEQ ID NO: 125785 - DNA, 71 bp, Homo sapiens
aaggttatctggaagtcaatggaactttcgatttggtagtcttccctgtaccatgtcactgtcggggatgg

SEQ ID NO: 125786 - DNA, 74 bp, Homo sapiens
aagtcaatggaactttcgatttggtagtcttccctgtaccatgtcactgtcggggatgggtatccagagatgtg

SEQ ID NO: 125787 - DNA, 75 bp, Homo sapiens
aatggaactttcgatttggtagtcttccctgtaccatgtcactgtcggggatgggtatccagagatgtggcactc

SEQ ID NO: 125788 - DNA, 78 bp, Homo sapiens
atttggtagtcttccctgtaccatgtcactgtcggggatgggtatccagagatgtggcactccaaggtgacagattca

SEQ ID NO: 125789 - DNA, 78 bp, Homo sapiens
agtcttccctgtaccatgtcactgtcggggatgggtatccagagatgtggcactccaaggtgacagattcaccttcta

SEQ ID NO: 125790 - DNA, 77 bp, Homo sapiens
actgtcggggatgggtatccagagatgtggcactccaaggtgacagattcaccttctatgacagtcacattttttaa

SEQ ID NO: 125791 - DNA, 79 bp, Homo sapiens
atgggtatccagagatgtggcactccaaggtgacagattcaccttctatgacagtcacattttttaagccctgaagaga

SEQ ID NO: 125792 - DNA, 77 bp, Homo sapiens
agagatgtggcactccaaggtgacagattcaccttctatgacagtcacattttttaagccctgaagagaggagaaaa

SEQ ID NO: 125793 - DNA, 72 bp, Homo sapiens
actccaaggtgacagattcaccttctatgacagtcacattttttaagccctgaagagaggagaaaaaataaa

SEQ ID NO: 125794 - DNA, 74 bp, Homo sapiens
acgtgtattaaaatgatttgaggagatatgaatagggtccagcattatcaacttctttactcaccgagaccaaa

SEQ ID NO: 125795 - DNA, 73 bp, Homo sapiens
attaaaatgatttgaggagatatgaatagggtccagcattatcaacttctttactcaccgagaccaaagttgg

SEQ ID NO: 125796 - DNA, 74 bp, Homo sapiens
tttgaggagatatgaatagggtccagcattatcaacttctttactcaccgagaccaaagttggtggagtaacag

SEQ ID NO: 125797 - DNA, 73 bp, Homo sapiens
tatgaatagggtccagcattatcaacttctttactcaccgagaccaaagttggtggagtaacaggaatttcaa

SEQ ID NO: 125798 - DNA, 72 bp, Homo sapiens
agcattatcaacttctttactcaccgagaccaaagttggtggagtaacaggaatttcaacaggtgctggtac

SEQ ID NO: 125799 - DNA, 71 bp, Homo sapiens
cttctttactcaccgagaccaaagttggtggagtaacaggaatttcaacaggtgctggtactcttgctgtt

SEQ ID NO: 125800 - DNA, 73 bp, Homo sapiens
ttactcaccgagaccaaagttggtggagtaacaggaatttcaacaggtgctggtactcttgctgtttctgtta

SEQ ID NO: 125801 - DNA, 70 bp, Homo sapiens
aaagttggtggagtaacaggaatttcaacaggtgctggtactcttgctgtttctgttacctagattttta

SEQ ID NO: 125802 - DNA, 72 bp, Homo sapiens
tggtggagtaacaggaatttcaacaggtgctggtactcttgctgtttctgttacctagatttttacaaatta

SEQ ID NO: 125803 - DNA, 72 bp, Homo sapiens
ggaatttcaacaggtgctggtactcttgctgtttctgttacctagatttttacaaattatattacaaaatgc

SEQ ID NO: 125804 - DNA, 74 bp, Homo sapiens
caacaggtgctggtactcttgctgtttctgttacctagatttttacaaattatattacaaaatgctcatgaaat

SEQ ID NO: 125805 - DNA, 71 bp, Homo sapiens
ggtactcttgctgtttctgttacctagatttttacaaattatattacaaaatgctcatgaaattaagggaa

SEQ ID NO: 125806 - DNA, 76 bp, Homo sapiens
tgctcaatgggagtggaccatgtaacagcgggtaaccagtgaccaaccttggcttcgcgtccgtgcagtacttcaa

SEQ ID NO: 125807 - DNA, 73 bp, Homo sapiens
atgtaacagcgggtaaccagtgaccaaccttggcttcgcgtccgtgcagtacttcaaagcgctcttcacggac

SEQ ID NO: 125808 - DNA, 75 bp, Homo sapiens
gtaaccagtgaccaaccttggcttcgcgtccgtgcagtacttcaaagcgctcttcacggacggtggtgccagtga

SEQ ID NO: 125809 - DNA, 77 bp, Homo sapiens
agtgaccaaccttggcttcgcgtccgtgcagtacttcaaagcgctcttcacggacggtggtgccagtgatgctcacc

SEQ ID NO: 125810 - DNA, 76 bp, Homo sapiens
ccttggcttcgcgtccgtgcagtacttcaaagcgctcttcacggacggtggtgccagtgatgctcacccctacttc

SEQ ID NO: 125811 - DNA, 74 bp, Homo sapiens
cgtccgtgcagtacttcaaagcgctcttcacggacggtggtgccagtgatgctcacccctacttcctttttcac

SEQ ID NO: 125812 - DNA, 73 bp, Homo sapiens
agtacttcaaagcgctcttcacggacggtggtgccagtgatgctcacccctacttcctttttcacctcaacgc

SEQ ID NO: 125813 - DNA, 75 bp, Homo sapiens
tcttcacggacggtggtgccagtgatgctcacccctacttcctttttcacctcaacgccagcttcactcttgtaa

SEQ ID NO: 125814 - DNA, 74 bp, Homo sapiens
acggtggtgccagtgatgctcacccctacttcctttttcacctcaacgccagcttcactcttgtaagtatctgg

SEQ ID NO: 125815 - DNA, 76 bp, Homo sapiens
agtgatgctcacccctacttcctttttcacctcaacgccagcttcactcttgtaagtatctggtgtgtcagcgaag

SEQ ID NO: 125816 - DNA, 71 bp, Homo sapiens
acccctacttcctttttcacctcaacgccagcttcactcttgtaagtatctggtgtgtcagcgaaggggaa

SEQ ID NO: 125817 - DNA, 74 bp, Homo sapiens
ttcctttttcacctcaacgccagcttcactcttgtaagtatctggtgtgtcagcgaaggggaactgtggcaagg

SEQ ID NO: 125818 - DNA, 77 bp, Homo sapiens
ttcacctcaacgccagcttcactcttgtaagtatctggtgtgtcagcgaaggggaactgtggcaagggtgtgggctc

SEQ ID NO: 125819 - DNA, 76 bp, Homo sapiens
agcttcactcttgtaagtatctggtgtgtcagcgaaggggaactgtggcaagggtgtgggctctgcccttactcta

SEQ ID NO: 125820 - DNA, 76 bp, Homo sapiens
actcttgtaagtatctggtgtgtcagcgaaggggaactgtggcaagggtgtgggctctgcccttactctagtctca

SEQ ID NO: 125821 - DNA, 78 bp, Homo sapiens
gtatctggtgtgtcagcgaaggggaactgtggcaagggtgtgggctctgcccttactctagtctcactgggcttcaca

SEQ ID NO: 125822 - DNA, 75 bp, Homo sapiens
aactgtggcaagggtgtgggctctgcccttactctagtctcactgggcttcacagtaggagccttcaccgatttg

SEQ ID NO: 125823 - DNA, 75 bp, Homo sapiens
aagggtgtgggctctgcccttactctagtctcactgggcttcacagtaggagccttcaccgatttggtgatcttc

SEQ ID NO: 125824 - DNA, 83 bp, Homo sapiens
tctgcccttactctagtctcactgggcttcacagtaggagccttcaccgatttggtgatcttctgagcagaagatgtggctga

SEQ ID NO: 125825 - DNA, 82 bp, Homo sapiens
tactctagtctcactgggcttcacagtaggagccttcaccgatttggtgatcttctgagcagaagatgtggctgacaactct

SEQ ID NO: 125826 - DNA, 78 bp, Homo sapiens
actgggcttcacagtaggagccttcaccgatttggtgatcttctgagcagaagatgtggctgacaactctttttgtaa

SEQ ID NO: 125827 - DNA, 81 bp, Homo sapiens
ttcacagtaggagccttcaccgatttggtgatcttctgagcagaagatgtggctgacaactctttttgtaatgtggcaata

SEQ ID NO: 125828 - DNA, 80 bp, Homo sapiens
aggagccttcaccgatttggtgatcttctgagcagaagatgtggctgacaactctttttgtaatgtggcaatagcactac

SEQ ID NO: 125829 - DNA, 82 bp, Homo sapiens
atttggtgatcttctgagcagaagatgtggctgacaactctttttgtaatgtggcaatagcactaccggctattgatgccta

SEQ ID NO: 125830 - DNA, 82 bp, Homo sapiens
atcttctgagcagaagatgtggctgacaactctttttgtaatgtggcaatagcactaccggctattgatgcctacatggaaa

SEQ ID NO: 125831 - DNA, 80 bp, Homo sapiens
aagatgtggctgacaactctttttgtaatgtggcaatagcactaccggctattgatgcctacatggaaacagagtcagaa

SEQ ID NO: 125832 - DNA, 77 bp, Homo sapiens
ctgacaactctttttgtaatgtggcaatagcactaccggctattgatgcctacatggaaacagagtcagaaaataaa

SEQ ID NO: 125833 - DNA, 76 bp, Homo sapiens
cttatttcctttaaacatttctgtatcatgctctgtaacttcttacctcatatccatgttctgtcttaggaacaga

SEQ ID NO: 125834 - DNA, 74 bp, Homo sapiens
cctttaaacatttctgtatcatgctctgtaacttcttacctcatatccatgttctgtcttaggaacagaaattt

SEQ ID NO: 125835 - DNA, 77 bp, Homo sapiens
catttctgtatcatgctctgtaacttcttacctcatatccatgttctgtcttaggaacagaaatttttgaaacagta

SEQ ID NO: 125836 - DNA, 73 bp, Homo sapiens
atgctctgtaacttcttacctcatatccatgttctgtcttaggaacagaaatttttgaaacagtaaagtgagg

SEQ ID NO: 125837 - DNA, 73 bp, Homo sapiens
taacttcttacctcatatccatgttctgtcttaggaacagaaatttttgaaacagtaaagtgagggctagctg

SEQ ID NO: 125838 - DNA, 72 bp, Homo sapiens
tatccatgttctgtcttaggaacagaaatttttgaaacagtaaagtgagggctagctgtgcgggggcgttta

SEQ ID NO: 125839 - DNA, 71 bp, Homo sapiens
atgttctgtcttaggaacagaaatttttgaaacagtaaagtgagggctagctgtgcgggggcgtttatcca

SEQ ID NO: 125840 - DNA, 70 bp, Homo sapiens
aacagaaatttttgaaacagtaaagtgagggctagctgtgcgggggcgtttatccacatggactaatctt

SEQ ID NO: 125841 - DNA, 71 bp, Homo sapiens
ttttgaaacagtaaagtgagggctagctgtgcgggggcgtttatccacatggactaatctttccgttgtta

SEQ ID NO: 125842 - DNA, 72 bp, Homo sapiens
taaagtgagggctagctgtgcgggggcgtttatccacatggactaatctttccgttgttagatctgtagttt

SEQ ID NO: 125843 - DNA, 78 bp, Homo sapiens
gctagctgtgcgggggcgtttatccacatggactaatctttccgttgttagatctgtagttttcttgatctgcattga

SEQ ID NO: 125844 - DNA, 74 bp, Homo sapiens
cgggggcgtttatccacatggactaatctttccgttgttagatctgtagttttcttgatctgcattgaaatgaa

SEQ ID NO: 125845 - DNA, 78 bp, Homo sapiens
gtttatccacatggactaatctttccgttgttagatctgtagttttcttgatctgcattgaaatgaaactcagtgata

SEQ ID NO: 125846 - DNA, 80 bp, Homo sapiens
acatggactaatctttccgttgttagatctgtagttttcttgatctgcattgaaatgaaactcagtgataccattgatca

SEQ ID NO: 125847 - DNA, 81 bp, Homo sapiens
ttgctttaccatgaacaaggtgaaaaatcagcaggtatagactcacctgtgatgatatgtgcattcccttttgatcagtag

SEQ ID NO: 125848 - DNA, 82 bp, Homo sapiens
atgaacaaggtgaaaaatcagcaggtatagactcacctgtgatgatatgtgcattcccttttgatcagtagttttgatatga

SEQ ID NO: 125849 - DNA, 82 bp, Homo sapiens
aaggtgaaaaatcagcaggtatagactcacctgtgatgatatgtgcattcccttttgatcagtagttttgatatgagtctca

SEQ ID NO: 125850 - DNA, 84 bp, Homo sapiens
aatcagcaggtatagactcacctgtgatgatatgtgcattcccttttgatcagtagttttgatatgagtctcagaaggagcctg

SEQ ID NO: 125851 - DNA, 84 bp, Homo sapiens
tatagactcacctgtgatgatatgtgcattcccttttgatcagtagttttgatatgagtctcagaaggagcctggattactcta

SEQ ID NO: 125852 - DNA, 83 bp, Homo sapiens
tgatgatatgtgcattcccttttgatcagtagttttgatatgagtctcagaaggagcctggattactctaggcttgactgctt

SEQ ID NO: 125853 - DNA, 80 bp, Homo sapiens
tatgtgcattcccttttgatcagtagttttgatatgagtctcagaaggagcctggattactctaggcttgactgctttag

SEQ ID NO: 125854 - DNA, 77 bp, Homo sapiens
ttttgatcagtagttttgatatgagtctcagaaggagcctggattactctaggcttgactgctttagggacaacgtg

SEQ ID NO: 125855 - DNA, 76 bp, Homo sapiens
tagttttgatatgagtctcagaaggagcctggattactctaggcttgactgctttagggacaacgtggggttctga

SEQ ID NO: 125856 - DNA, 76 bp, Homo sapiens
atatgagtctcagaaggagcctggattactctaggcttgactgctttagggacaacgtggggttctgaggctggac

SEQ ID NO: 125857 - DNA, 71 bp, Homo sapiens
agaaggagcctggattactctaggcttgactgctttagggacaacgtggggttctgaggctggacgttggg

SEQ ID NO: 125858 - DNA, 72 bp, Homo sapiens
attactctaggcttgactgctttagggacaacgtggggttctgaggctggacgttggggaggctcagctacc

SEQ ID NO: 125859 - DNA, 73 bp, Homo sapiens
tctaggcttgactgctttagggacaacgtggggttctgaggctggacgttggggaggctcagctacctttgcg

SEQ ID NO: 125860 - DNA, 70 bp, Homo sapiens
tttagggacaacgtggggttctgaggctggacgttggggaggctcagctacctttgcggcggaaatgcgt

SEQ ID NO: 125861 - DNA, 71 bp, Homo sapiens
aacgtggggttctgaggctggacgttggggaggctcagctacctttgcggcggaaatgcgttccttatatc

SEQ ID NO: 125862 - DNA, 73 bp, Homo sapiens
ttctgaggctggacgttggggaggctcagctacctttgcggcggaaatgcgttccttatatccgtactccaaa

SEQ ID NO: 125863 - DNA, 73 bp, Homo sapiens
acgttggggaggctcagctacctttgcggcggaaatgcgttccttatatccgtactccaaagtggtctgctga

SEQ ID NO: 125864 - DNA, 76 bp, Homo sapiens
aggctcagctacctttgcggcggaaatgcgttccttatatccgtactccaaagtggtctgctgagcataggattct

SEQ ID NO: 125865 - DNA, 76 bp, Homo sapiens
agctacctttgcggcggaaatgcgttccttatatccgtactccaaagtggtctgctgagcataggattcttcaaga

SEQ ID NO: 125866 - DNA, 78 bp, Homo sapiens
cggcggaaatgcgttccttatatccgtactccaaagtggtctgctgagcataggattcttcaagatgcccaggctctc

SEQ ID NO: 125867 - DNA, 81 bp, Homo sapiens
gttccttatatccgtactccaaagtggtctgctgagcataggattcttcaagatgcccaggctctctgggctctctgactc

SEQ ID NO: 125868 - DNA, 81 bp, Homo sapiens
atatccgtactccaaagtggtctgctgagcataggattcttcaagatgcccaggctctctgggctctctgactcgggcctg

SEQ ID NO: 125869 - DNA, 84 bp, Homo sapiens
aagtggtctgctgagcataggattcttcaagatgcccaggctctctgggctctctgactcgggcctggtctactgcagcaacaa

SEQ ID NO: 125870 - DNA, 85 bp, Homo sapiens
ctgagcataggattcttcaagatgcccaggctctctgggctctctgactcgggcctggtctactgcagcaacaactgttgctaca

SEQ ID NO: 125871 - DNA, 82 bp, Homo sapiens
ataggattcttcaagatgcccaggctctctgggctctctgactcgggcctggtctactgcagcaacaactgttgctacagct

SEQ ID NO: 125872 - DNA, 80 bp, Homo sapiens
aagatgcccaggctctctgggctctctgactcgggcctggtctactgcagcaacaactgttgctacagcttcagcctttt

SEQ ID NO: 125873 - DNA, 79 bp, Homo sapiens
tctctgggctctctgactcgggcctggtctactgcagcaacaactgttgctacagcttcagccttttttccaacgtcca

SEQ ID NO: 125874 - DNA, 78 bp, Homo sapiens
tctctgactcgggcctggtctactgcagcaacaactgttgctacagcttcagccttttttccaacgtccacctggaga

SEQ ID NO: 125875 - DNA, 74 bp, Homo sapiens
ggcctggtctactgcagcaacaactgttgctacagcttcagccttttttccaacgtccacctggagacaaggtt

SEQ ID NO: 125876 - DNA, 72 bp, Homo sapiens
acaactgttgctacagcttcagccttttttccaacgtccacctggagacaaggtttccagaattaatacata

SEQ ID NO: 125877 - DNA, 70 bp, Homo sapiens
aatgtattataataggggatttcacacttggaacaacaatagtcacctttccatgggtaacttggatttg

SEQ ID NO: 125878 - DNA, 69 bp, Homo sapiens
attataataggggatttcacacttggaacaacaatagtcacctttccatgggtaacttggatttgttct

SEQ ID NO: 125879 - DNA, 72 bp, Homo sapiens
ttcacacttggaacaacaatagtcacctttccatgggtaacttggatttgttcttgtctagtagccatagtt

SEQ ID NO: 125880 - DNA, 72 bp, Homo sapiens
ttggaacaacaatagtcacctttccatgggtaacttggatttgttcttgtctagtagccatagtttctctag

SEQ ID NO: 125881 - DNA, 72 bp, Homo sapiens
aatagtcacctttccatgggtaacttggatttgttcttgtctagtagccatagtttctctagttctcagtat

SEQ ID NO: 125882 - DNA, 72 bp, Homo sapiens
tttccatgggtaacttggatttgttcttgtctagtagccatagtttctctagttctcagtattgtttcttgt

SEQ ID NO: 125883 - DNA, 71 bp, Homo sapiens
aacttggatttgttcttgtctagtagccatagtttctctagttctcagtattgtttcttgttctttggctt

SEQ ID NO: 125884 - DNA, 75 bp, Homo sapiens
tttgttcttgtctagtagccatagtttctctagttctcagtattgtttcttgttctttggctttagcagtagcaa

SEQ ID NO: 125885 - DNA, 78 bp, Homo sapiens
tctagtagccatagtttctctagttctcagtattgtttcttgttctttggctttagcagtagcaactgctattgtaga

SEQ ID NO: 125886 - DNA, 75 bp, Homo sapiens
tttctctagttctcagtattgtttcttgttctttggctttagcagtagcaactgctattgtagacaaggcagttt

SEQ ID NO: 125887 - DNA, 75 bp, Homo sapiens
ctagttctcagtattgtttcttgttctttggctttagcagtagcaactgctattgtagacaaggcagttttctcg

SEQ ID NO: 125888 - DNA, 74 bp, Homo sapiens
tattgtttcttgttctttggctttagcagtagcaactgctattgtagacaaggcagttttctcggcttcctttc

SEQ ID NO: 125889 - DNA, 78 bp, Homo sapiens
ttctttggctttagcagtagcaactgctattgtagacaaggcagttttctcggcttcctttctcatctgattattaca

SEQ ID NO: 125890 - DNA, 76 bp, Homo sapiens
ctttagcagtagcaactgctattgtagacaaggcagttttctcggcttcctttctcatctgattattacagtaaaa

SEQ ID NO: 125891 - DNA, 75 bp, Homo sapiens
caactgctattgtagacaaggcagttttctcggcttcctttctcatctgattattacagtaaaatcaagatttaa

SEQ ID NO: 125892 - DNA, 75 bp, Homo sapiens
attagtttaaagatgaacttttcacagctcaaatatctgtattcaccttctcctgagttatttgcacttgttctc

SEQ ID NO: 125893 - DNA, 75 bp, Homo sapiens
aaagatgaacttttcacagctcaaatatctgtattcaccttctcctgagttatttgcacttgttctcttttggta

SEQ ID NO: 125894 - DNA, 75 bp, Homo sapiens
aacttttcacagctcaaatatctgtattcaccttctcctgagttatttgcacttgttctcttttggtagtaatgc

SEQ ID NO: 125895 - DNA, 73 bp, Homo sapiens
aaatatctgtattcaccttctcctgagttatttgcacttgttctcttttggtagtaatgccttctctacctct

SEQ ID NO: 125896 - DNA, 74 bp, Homo sapiens
tattcaccttctcctgagttatttgcacttgttctcttttggtagtaatgccttctctacctcttgatactaaa

SEQ ID NO: 125897 - DNA, 73 bp, Homo sapiens
tcctgagttatttgcacttgttctcttttggtagtaatgccttctctacctcttgatactaaatcttgttctt

SEQ ID NO: 125898 - DNA, 72 bp, Homo sapiens
agttatttgcacttgttctcttttggtagtaatgccttctctacctcttgatactaaatcttgttctttgac

SEQ ID NO: 125899 - DNA, 70 bp, Homo sapiens
acttgttctcttttggtagtaatgccttctctacctcttgatactaaatcttgttctttgactttgggtg

SEQ ID NO: 125900 - DNA, 74 bp, Homo sapiens
tggtagtaatgccttctctacctcttgatactaaatcttgttctttgactttgggtgtggcaactatgacttta

SEQ ID NO: 125901 - DNA, 72 bp, Homo sapiens
cttctctacctcttgatactaaatcttgttctttgactttgggtgtggcaactatgactttaggtacaactg

SEQ ID NO: 125902 - DNA, 71 bp, Homo sapiens
tacctcttgatactaaatcttgttctttgactttgggtgtggcaactatgactttaggtacaactgttttc

SEQ ID NO: 125903 - DNA, 69 bp, Homo sapiens
tactaaatcttgttctttgactttgggtgtggcaactatgactttaggtacaactgttttcctagtttc

SEQ ID NO: 125904 - DNA, 70 bp, Homo sapiens
ttgttctttgactttgggtgtggcaactatgactttaggtacaactgttttcctagtttccttcattatc

SEQ ID NO: 125905 - DNA, 73 bp, Homo sapiens
tttgggtgtggcaactatgactttaggtacaactgttttcctagtttccttcattatctgatcatacaaaaga

SEQ ID NO: 125906 - DNA, 73 bp, Homo sapiens
tggcaactatgactttaggtacaactgttttcctagtttccttcattatctgatcatacaaaagaaagtaaga

SEQ ID NO: 125907 - DNA, 69 bp, Homo sapiens
gactttaggtacaactgttttcctagtttccttcattatctgatcatacaaaagaaagtaagaaaatag

SEQ ID NO: 125908 - DNA, 78 bp, Homo sapiens
aatgaaatggtgcaagagtgactttcacattggcaggaagtcatcaccttttcataacttaggtgcatttgatcttgt

SEQ ID NO: 125909 - DNA, 79 bp, Homo sapiens
tgcaagagtgactttcacattggcaggaagtcatcaccttttcataacttaggtgcatttgatcttgttgtgtggtagt

SEQ ID NO: 125910 - DNA, 75 bp, Homo sapiens
actttcacattggcaggaagtcatcaccttttcataacttaggtgcatttgatcttgttgtgtggtagtttcttc

SEQ ID NO: 125911 - DNA, 77 bp, Homo sapiens
acattggcaggaagtcatcaccttttcataacttaggtgcatttgatcttgttgtgtggtagtttcttcttgagctc

SEQ ID NO: 125912 - DNA, 74 bp, Homo sapiens
tcatcaccttttcataacttaggtgcatttgatcttgttgtgtggtagtttcttcttgagctcccgggactgtt

SEQ ID NO: 125913 - DNA, 72 bp, Homo sapiens
ttttcataacttaggtgcatttgatcttgttgtgtggtagtttcttcttgagctcccgggactgtttctagt

SEQ ID NO: 125914 - DNA, 72 bp, Homo sapiens
taggtgcatttgatcttgttgtgtggtagtttcttcttgagctcccgggactgtttctagttttgtggactt

SEQ ID NO: 125915 - DNA, 72 bp, Homo sapiens
atttgatcttgttgtgtggtagtttcttcttgagctcccgggactgtttctagttttgtggactttgcagtg

SEQ ID NO: 125916 - DNA, 72 bp, Homo sapiens
ttgtgtggtagtttcttcttgagctcccgggactgtttctagttttgtggactttgcagtggcaactaccac

SEQ ID NO: 125917 - DNA, 77 bp, Homo sapiens
ttcttcttgagctcccgggactgtttctagttttgtggactttgcagtggcaactaccaccatggatgcagcagtta

SEQ ID NO: 125918 - DNA, 76 bp, Homo sapiens
agctcccgggactgtttctagttttgtggactttgcagtggcaactaccaccatggatgcagcagttatctcagtt

SEQ ID NO: 125919 - DNA, 80 bp, Homo sapiens
gtttctagttttgtggactttgcagtggcaactaccaccatggatgcagcagttatctcagtttcctgtcttatctgatg

SEQ ID NO: 125920 - DNA, 81 bp, Homo sapiens
ttgtggactttgcagtggcaactaccaccatggatgcagcagttatctcagtttcctgtcttatctgatgtttagagtaaa

SEQ ID NO: 125921 - DNA, 79 bp, Homo sapiens
actttgcagtggcaactaccaccatggatgcagcagttatctcagtttcctgtcttatctgatgtttagagtaaaataa

SEQ ID NO: 125922 - DNA, 76 bp, Homo sapiens
aactaccaccatggatgcagcagttatctcagtttcctgtcttatctgatgtttagagtaaaataaagatttgagt

SEQ ID NO: 125923 - DNA, 77 bp, Homo sapiens
caccatggatgcagcagttatctcagtttcctgtcttatctgatgtttagagtaaaataaagatttgagtttcaaaa

SEQ ID NO: 125924 - DNA, 73 bp, Homo sapiens
gtaatgtgatattgtcaacaaactacaaaatatttagaaaatcagacttactgcttcttgagttacttgtttc

SEQ ID NO: 125925 - DNA, 71 bp, Homo sapiens
tgtcaacaaactacaaaatatttagaaaatcagacttactgcttcttgagttacttgtttctgtttcttag

SEQ ID NO: 125926 - DNA, 71 bp, Homo sapiens
caaaatatttagaaaatcagacttactgcttcttgagttacttgtttctgtttcttagtaatttcttcaga

SEQ ID NO: 125927 - DNA, 71 bp, Homo sapiens
ttagaaaatcagacttactgcttcttgagttacttgtttctgtttcttagtaatttcttcagaaattctag

SEQ ID NO: 125928 - DNA, 71 bp, Homo sapiens
atcagacttactgcttcttgagttacttgtttctgtttcttagtaatttcttcagaaattctagtttcttg

SEQ ID NO: 125929 - DNA, 70 bp, Homo sapiens
ctgcttcttgagttacttgtttctgtttcttagtaatttcttcagaaattctagtttcttgttctttggc

SEQ ID NO: 125930 - DNA, 69 bp, Homo sapiens
cttgtttctgtttcttagtaatttcttcagaaattctagtttcttgttctttggctttagctgcggaaa

SEQ ID NO: 125931 - DNA, 69 bp, Homo sapiens
tgtttcttagtaatttcttcagaaattctagtttcttgttctttggctttagctgcggaaattactacc

SEQ ID NO: 125932 - DNA, 69 bp, Homo sapiens
gtaatttcttcagaaattctagtttcttgttctttggctttagctgcggaaattactacctttggtaca

SEQ ID NO: 125933 - DNA, 67 bp, Homo sapiens
cagaaattctagtttcttgttctttggctttagctgcggaaattactacctttggtacaaatgtttt

SEQ ID NO: 125934 - DNA, 66 bp, Homo sapiens
ctagtttcttgttctttggctttagctgcggaaattactacctttggtacaaatgttttttcagtt

SEQ ID NO: 125935 - DNA, 69 bp, Homo sapiens
ctttggctttagctgcggaaattactacctttggtacaaatgttttttcagtttcttttcttatctgca

SEQ ID NO: 125936 - DNA, 70 bp, Homo sapiens
tttagctgcggaaattactacctttggtacaaatgttttttcagtttcttttcttatctgcaaagaatga

SEQ ID NO: 125937 - DNA, 68 bp, Homo sapiens
gaaattactacctttggtacaaatgttttttcagtttcttttcttatctgcaaagaatgatttaagaa

SEQ ID NO: 125938 - DNA, 65 bp, Homo sapiens
cctttggtacaaatgttttttcagtttcttttcttatctgcaaagaatgatttaagaaaaaactt

SEQ ID NO: 125939 - DNA, 73 bp, Homo sapiens
gttgacccctgtaagaacctcagtgaatttaaaatacaaacccattttcacctgctcatgagttacgtgcatc

SEQ ID NO: 125940 - DNA, 77 bp, Homo sapiens
taagaacctcagtgaatttaaaatacaaacccattttcacctgctcatgagttacgtgcatctgctcttgctttgtg

SEQ ID NO: 125941 - DNA, 74 bp, Homo sapiens
aatttaaaatacaaacccattttcacctgctcatgagttacgtgcatctgctcttgctttgtggtaattacttc

SEQ ID NO: 125942 - DNA, 74 bp, Homo sapiens
aaatacaaacccattttcacctgctcatgagttacgtgcatctgctcttgctttgtggtaattacttctttggt

SEQ ID NO: 125943 - DNA, 75 bp, Homo sapiens
attttcacctgctcatgagttacgtgcatctgctcttgctttgtggtaattacttctttggttcttgattttaat

SEQ ID NO: 125944 - DNA, 74 bp, Homo sapiens
ctcatgagttacgtgcatctgctcttgctttgtggtaattacttctttggttcttgattttaattcttgttcct

SEQ ID NO: 125945 - DNA, 73 bp, Homo sapiens
tacgtgcatctgctcttgctttgtggtaattacttctttggttcttgattttaattcttgttccttggcttta

SEQ ID NO: 125946 - DNA, 71 bp, Homo sapiens
atctgctcttgctttgtggtaattacttctttggttcttgattttaattcttgttccttggctttatcggc

SEQ ID NO: 125947 - DNA, 69 bp, Homo sapiens
ttgtggtaattacttctttggttcttgattttaattcttgttccttggctttatcggcggccactacta

SEQ ID NO: 125948 - DNA, 67 bp, Homo sapiens
aattacttctttggttcttgattttaattcttgttccttggctttatcggcggccactactacctta

SEQ ID NO: 125949 - DNA, 70 bp, Homo sapiens
ttggttcttgattttaattcttgttccttggctttatcggcggccactactaccttagttacagcagtct

SEQ ID NO: 125950 - DNA, 70 bp, Homo sapiens
ttaattcttgttccttggctttatcggcggccactactaccttagttacagcagtcttctccgcttcctt

SEQ ID NO: 125951 - DNA, 70 bp, Homo sapiens
ttgttccttggctttatcggcggccactactaccttagttacagcagtcttctccgcttcctttcttacc

SEQ ID NO: 125952 - DNA, 72 bp, Homo sapiens
ctttatcggcggccactactaccttagttacagcagtcttctccgcttcctttcttacctgcttttcataga

SEQ ID NO: 125953 - DNA, 71 bp, Homo sapiens
ccactactaccttagttacagcagtcttctccgcttcctttcttacctgcttttcatagagaaaggaagaa

SEQ ID NO: 125954 - DNA, 70 bp, Homo sapiens
ttagttacagcagtcttctccgcttcctttcttacctgcttttcatagagaaaggaagaaaacaccttaa

SEQ ID NO: 125955 - DNA, 82 bp, Homo sapiens
actgaaggacgtggctctgcgggtgccccatggcagcctcgcacgtacctgttcttgagcaggttggatgtgcacagcagtc

SEQ ID NO: 125956 - DNA, 83 bp, Homo sapiens
tggctctgcgggtgccccatggcagcctcgcacgtacctgttcttgagcaggttggatgtgcacagcagtcgtggttgtcctc

SEQ ID NO: 125957 - DNA, 86 bp, Homo sapiens
gtgccccatggcagcctcgcacgtacctgttcttgagcaggttggatgtgcacagcagtcgtggttgtcctctgagcagtctgctc

SEQ ID NO: 125958 - DNA, 90 bp, Homo sapiens
gcagcctcgcacgtacctgttcttgagcaggttggatgtgcacagcagtcgtggttgtcctctgagcagtctgctctacagcgctgatca

SEQ ID NO: 125959 - DNA, 85 bp, Homo sapiens
acgtacctgttcttgagcaggttggatgtgcacagcagtcgtggttgtcctctgagcagtctgctctacagcgctgatcactggt

SEQ ID NO: 125960 - DNA, 90 bp, Homo sapiens
tgttcttgagcaggttggatgtgcacagcagtcgtggttgtcctctgagcagtctgctctacagcgctgatcactggttctctcactctg

SEQ ID NO: 125961 - DNA, 89 bp, Homo sapiens
aggttggatgtgcacagcagtcgtggttgtcctctgagcagtctgctctacagcgctgatcactggttctctcactctggccatatcaa

SEQ ID NO: 125962 - DNA, 89 bp, Homo sapiens
cacagcagtcgtggttgtcctctgagcagtctgctctacagcgctgatcactggttctctcactctggccatatcaacggcagcaacaa

SEQ ID NO: 125963 - DNA, 86 bp, Homo sapiens
agtcgtggttgtcctctgagcagtctgctctacagcgctgatcactggttctctcactctggccatatcaacggcagcaacaacag

SEQ ID NO: 125964 - DNA, 90 bp, Homo sapiens
tctgagcagtctgctctacagcgctgatcactggttctctcactctggccatatcaacggcagcaacaacagtcgcaacagctgcacttt

SEQ ID NO: 125965 - DNA, 88 bp, Homo sapiens
agtctgctctacagcgctgatcactggttctctcactctggccatatcaacggcagcaacaacagtcgcaacagctgcacttttgtca

SEQ ID NO: 125966 - DNA, 86 bp, Homo sapiens
agcgctgatcactggttctctcactctggccatatcaacggcagcaacaacagtcgcaacagctgcacttttgtcagcatcttgtt

SEQ ID NO: 125967 - DNA, 83 bp, Homo sapiens
actggttctctcactctggccatatcaacggcagcaacaacagtcgcaacagctgcacttttgtcagcatcttgtttcaccta

SEQ ID NO: 125968 - DNA, 85 bp, Homo sapiens
tcactctggccatatcaacggcagcaacaacagtcgcaacagctgcacttttgtcagcatcttgtttcacctagattagaaatga

SEQ ID NO: 125969 - DNA, 81 bp, Homo sapiens
atatcaacggcagcaacaacagtcgcaacagctgcacttttgtcagcatcttgtttcacctagattagaaatgaccaagta

SEQ ID NO: 125970 - DNA, 79 bp, Homo sapiens
cagcaacaacagtcgcaacagctgcacttttgtcagcatcttgtttcacctagattagaaatgaccaagtagattactt

SEQ ID NO: 125971 - DNA, 75 bp, Homo sapiens
aacagtcgcaacagctgcacttttgtcagcatcttgtttcacctagattagaaatgaccaagtagattacttttt

SEQ ID NO: 125972 - DNA, 73 bp, Homo sapiens
tggagaaactagaatgtgaaataaggaaaaacaaaaccattctgacagtacctctttagcaccagtggcaaca

SEQ ID NO: 125973 - DNA, 75 bp, Homo sapiens
aatgtgaaataaggaaaaacaaaaccattctgacagtacctctttagcaccagtggcaacagcctctgctgcgta

SEQ ID NO: 125974 - DNA, 79 bp, Homo sapiens
gaaaaacaaaaccattctgacagtacctctttagcaccagtggcaacagcctctgctgcgtagctagcactggccgaca

SEQ ID NO: 125975 - DNA, 87 bp, Homo sapiens
tctgacagtacctctttagcaccagtggcaacagcctctgctgcgtagctagcactggccgacacactggcggcagcacccgcagca

SEQ ID NO: 125976 - DNA, 88 bp, Homo sapiens
tctttagcaccagtggcaacagcctctgctgcgtagctagcactggccgacacactggcggcagcacccgcagcaccactgatggtca

SEQ ID NO: 125977 - DNA, 87 bp, Homo sapiens
accagtggcaacagcctctgctgcgtagctagcactggccgacacactggcggcagcacccgcagcaccactgatggtcacttgctc

SEQ ID NO: 125978 - DNA, 86 bp, Homo sapiens
ctctgctgcgtagctagcactggccgacacactggcggcagcacccgcagcaccactgatggtcacttgctcctggacaccgtatc

SEQ ID NO: 125979 - DNA, 83 bp, Homo sapiens
tagctagcactggccgacacactggcggcagcacccgcagcaccactgatggtcacttgctcctggacaccgtatctcccttc

SEQ ID NO: 125980 - DNA, 81 bp, Homo sapiens
agcactggccgacacactggcggcagcacccgcagcaccactgatggtcacttgctcctggacaccgtatctcccttccca

SEQ ID NO: 125981 - DNA, 81 bp, Homo sapiens
acacactggcggcagcacccgcagcaccactgatggtcacttgctcctggacaccgtatctcccttcccatctctcttctg

SEQ ID NO: 125982 - DNA, 82 bp, Homo sapiens
agcacccgcagcaccactgatggtcacttgctcctggacaccgtatctcccttcccatctctcttctgtcctgatctgagta

SEQ ID NO: 125983 - DNA, 81 bp, Homo sapiens
caccactgatggtcacttgctcctggacaccgtatctcccttcccatctctcttctgtcctgatctgagtagaggttgtca

SEQ ID NO: 125984 - DNA, 79 bp, Homo sapiens
atggtcacttgctcctggacaccgtatctcccttcccatctctcttctgtcctgatctgagtagaggttgtcagcgttg

SEQ ID NO: 125985 - DNA, 82 bp, Homo sapiens
ttgctcctggacaccgtatctcccttcccatctctcttctgtcctgatctgagtagaggttgtcagcgttgtctctctcatc

SEQ ID NO: 125986 - DNA, 84 bp, Homo sapiens
accgtatctcccttcccatctctcttctgtcctgatctgagtagaggttgtcagcgttgtctctctcatctcagcctcagatga

SEQ ID NO: 125987 - DNA, 85 bp, Homo sapiens
cttcccatctctcttctgtcctgatctgagtagaggttgtcagcgttgtctctctcatctcagcctcagatgaggaggccacgta

SEQ ID NO: 125988 - DNA, 85 bp, Homo sapiens
tcttctgtcctgatctgagtagaggttgtcagcgttgtctctctcatctcagcctcagatgaggaggccacgtagccctcttgct

SEQ ID NO: 125989 - DNA, 85 bp, Homo sapiens
tgtcctgatctgagtagaggttgtcagcgttgtctctctcatctcagcctcagatgaggaggccacgtagccctcttgcttccaa

SEQ ID NO: 125990 - DNA, 79 bp, Homo sapiens
agtagaggttgtcagcgttgtctctctcatctcagcctcagatgaggaggccacgtagccctcttgcttccaaggggga

SEQ ID NO: 125991 - DNA, 81 bp, Homo sapiens
ttgtcagcgttgtctctctcatctcagcctcagatgaggaggccacgtagccctcttgcttccaagggggaggcacttcag

SEQ ID NO: 125992 - DNA, 81 bp, Homo sapiens
tctctctcatctcagcctcagatgaggaggccacgtagccctcttgcttccaagggggaggcacttcaggacctgtggcca

SEQ ID NO: 125993 - DNA, 76 bp, Homo sapiens
atctcagcctcagatgaggaggccacgtagccctcttgcttccaagggggaggcacttcaggacctgtggccacgg

SEQ ID NO: 125994 - DNA, 76 bp, Homo sapiens
agatgaggaggccacgtagccctcttgcttccaagggggaggcacttcaggacctgtggccacggtggatgcctga

SEQ ID NO: 125995 - DNA, 76 bp, Homo sapiens
acgtagccctcttgcttccaagggggaggcacttcaggacctgtggccacggtggatgcctgagtcttacgcatga

SEQ ID NO: 125996 - DNA, 79 bp, Homo sapiens
ttgcttccaagggggaggcacttcaggacctgtggccacggtggatgcctgagtcttacgcatgagcaatggagaccta

SEQ ID NO: 125997 - DNA, 77 bp, Homo sapiens
aagggggaggcacttcaggacctgtggccacggtggatgcctgagtcttacgcatgagcaatggagacctaacagac

SEQ ID NO: 125998 - DNA, 79 bp, Homo sapiens
aggcacttcaggacctgtggccacggtggatgcctgagtcttacgcatgagcaatggagacctaacagacctgatgggg

SEQ ID NO: 125999 - DNA, 80 bp, Homo sapiens
acctgtggccacggtggatgcctgagtcttacgcatgagcaatggagacctaacagacctgatgggggatgtggagattc

SEQ ID NO: 126000 - DNA, 83 bp, Homo sapiens
acggtggatgcctgagtcttacgcatgagcaatggagacctaacagacctgatgggggatgtggagattcttgctgctggaga

SEQ ID NO: 126001 - DNA, 83 bp, Homo sapiens
tgagtcttacgcatgagcaatggagacctaacagacctgatgggggatgtggagattcttgctgctggagacacggacctgaa

SEQ ID NO: 126002 - DNA, 79 bp, Homo sapiens
catgagcaatggagacctaacagacctgatgggggatgtggagattcttgctgctggagacacggacctgaaaaccaaa

SEQ ID NO: 126003 - DNA, 74 bp, Homo sapiens
aatggagacctaacagacctgatgggggatgtggagattcttgctgctggagacacggacctgaaaaccaaaag

SEQ ID NO: 126004 - DNA, 77 bp, Homo sapiens
taacagacctgatgggggatgtggagattcttgctgctggagacacggacctgaaaaccaaaaggcagaggtcaaga

SEQ ID NO: 126005 - DNA, 77 bp, Homo sapiens
ctgatgggggatgtggagattcttgctgctggagacacggacctgaaaaccaaaaggcagaggtcaagaatgtcaaa

SEQ ID NO: 126006 - DNA, 70 bp, Homo sapiens
aagtaagcatagaagtccattttattttctagataaaataacacaagcatatgcaaaatatttaaaaggt

SEQ ID NO: 126007 - DNA, 71 bp, Homo sapiens
tccattttattttctagataaaataacacaagcatatgcaaaatatttaaaaggttttacttaccatctga

SEQ ID NO: 126008 - DNA, 72 bp, Homo sapiens
tttctagataaaataacacaagcatatgcaaaatatttaaaaggttttacttaccatctgaatataagaata

SEQ ID NO: 126009 - DNA, 74 bp, Homo sapiens
gataaaataacacaagcatatgcaaaatatttaaaaggttttacttaccatctgaatataagaatattggcata

SEQ ID NO: 126010 - DNA, 73 bp, Homo sapiens
cacaagcatatgcaaaatatttaaaaggttttacttaccatctgaatataagaatattggcataattattttc

SEQ ID NO: 126011 - DNA, 70 bp, Homo sapiens
gcaaaatatttaaaaggttttacttaccatctgaatataagaatattggcataattattttctatttaca

SEQ ID NO: 126012 - DNA, 70 bp, Homo sapiens
aaggttttacttaccatctgaatataagaatattggcataattattttctatttacaaggcactttcaac

SEQ ID NO: 126013 - DNA, 76 bp, Homo sapiens
cttaccatctgaatataagaatattggcataattattttctatttacaaggcactttcaactaattatctcattga

SEQ ID NO: 126014 - DNA, 75 bp, Homo sapiens
atctgaatataagaatattggcataattattttctatttacaaggcactttcaactaattatctcattgaagccc

SEQ ID NO: 126015 - DNA, 77 bp, Homo sapiens
tattggcataattattttctatttacaaggcactttcaactaattatctcattgaagccccaaaatgcagcttgaga

SEQ ID NO: 126016 - DNA, 76 bp, Homo sapiens
attattttctatttacaaggcactttcaactaattatctcattgaagccccaaaatgcagcttgagatcattctta

SEQ ID NO: 126017 - DNA, 78 bp, Homo sapiens
tttctatttacaaggcactttcaactaattatctcattgaagccccaaaatgcagcttgagatcattcttattgtgac

SEQ ID NO: 126018 - DNA, 78 bp, Homo sapiens
cactttcaactaattatctcattgaagccccaaaatgcagcttgagatcattcttattgtgactctctttaatttaca

SEQ ID NO: 126019 - DNA, 80 bp, Homo sapiens
aactaattatctcattgaagccccaaaatgcagcttgagatcattcttattgtgactctctttaatttacagatgacaca

SEQ ID NO: 126020 - DNA, 76 bp, Homo sapiens
cccaaaatgcagcttgagatcattcttattgtgactctctttaatttacagatgacacaactgaaaccttaaataa

SEQ ID NO: 126021 - DNA, 77 bp, Homo sapiens
gcagcttgagatcattcttattgtgactctctttaatttacagatgacacaactgaaaccttaaataaactgcttaa

SEQ ID NO: 126022 - DNA, 73 bp, Homo sapiens
gatcattcttattgtgactctctttaatttacagatgacacaactgaaaccttaaataaactgcttaacttct

SEQ ID NO: 126023 - DNA, 71 bp, Homo sapiens
tgtgactctctttaatttacagatgacacaactgaaaccttaaataaactgcttaacttctttaattccag

SEQ ID NO: 126024 - DNA, 69 bp, Homo sapiens
aatttacagatgacacaactgaaaccttaaataaactgcttaacttctttaattccagttacctatcaa

SEQ ID NO: 126025 - DNA, 71 bp, Homo sapiens
tgacacaactgaaaccttaaataaactgcttaacttctttaattccagttacctatcaataacattgagga

SEQ ID NO: 126026 - DNA, 69 bp, Homo sapiens
caactgaaaccttaaataaactgcttaacttctttaattccagttacctatcaataacattgaggataa

SEQ ID NO: 126027 - DNA, 70 bp, Homo sapiens
ataaactgcttaacttctttaattccagttacctatcaataacattgaggataataattcttacaggttg

SEQ ID NO: 126028 - DNA, 72 bp, Homo sapiens
ctgcttaacttctttaattccagttacctatcaataacattgaggataataattcttacaggttgtgaacat

SEQ ID NO: 126029 - DNA, 73 bp, Homo sapiens
ctttaattccagttacctatcaataacattgaggataataattcttacaggttgtgaacatttaatgagataa

SEQ ID NO: 126030 - DNA, 77 bp, Homo sapiens
tacctatcaataacattgaggataataattcttacaggttgtgaacatttaatgagataatgtatgtatagttccaa

SEQ ID NO: 126031 - DNA, 78 bp, Homo sapiens
aacattgaggataataattcttacaggttgtgaacatttaatgagataatgtatgtatagttccaatctgatagagga

SEQ ID NO: 126032 - DNA, 79 bp, Homo sapiens
ggataataattcttacaggttgtgaacatttaatgagataatgtatgtatagttccaatctgatagaggaagtgatcca

SEQ ID NO: 126033 - DNA, 80 bp, Homo sapiens
cttacaggttgtgaacatttaatgagataatgtatgtatagttccaatctgatagaggaagtgatccatatataataaca

SEQ ID NO: 126034 - DNA, 77 bp, Homo sapiens
atttaatgagataatgtatgtatagttccaatctgatagaggaagtgatccatatataataacaattattttattat

SEQ ID NO: 126035 - DNA, 71 bp, Homo sapiens
ttattttattatttatacttattgccctaaatcaaactgttaagtgatcaggctgatttgtccttagggct

SEQ ID NO: 126036 - DNA, 72 bp, Homo sapiens
atttatacttattgccctaaatcaaactgttaagtgatcaggctgatttgtccttagggctttgaactctaa

SEQ ID NO: 126037 - DNA, 73 bp, Homo sapiens
tacttattgccctaaatcaaactgttaagtgatcaggctgatttgtccttagggctttgaactctaacttctg

SEQ ID NO: 126038 - DNA, 77 bp, Homo sapiens
ttaagtgatcaggctgatttgtccttagggctttgaactctaacttctgtgctcttctcctttcactgtgccatatt

SEQ ID NO: 126039 - DNA, 76 bp, Homo sapiens
atcaggctgatttgtccttagggctttgaactctaacttctgtgctcttctcctttcactgtgccatattttggcc

SEQ ID NO: 126040 - DNA, 72 bp, Homo sapiens
atttgtccttagggctttgaactctaacttctgtgctcttctcctttcactgtgccatattttggcccctaa

SEQ ID NO: 126041 - DNA, 74 bp, Homo sapiens
tttgaactctaacttctgtgctcttctcctttcactgtgccatattttggcccctaaagtagatatttattaca

SEQ ID NO: 126042 - DNA, 76 bp, Homo sapiens
tctaacttctgtgctcttctcctttcactgtgccatattttggcccctaaagtagatatttattacatgaaatata

SEQ ID NO: 126043 - DNA, 75 bp, Homo sapiens
ctgtgctcttctcctttcactgtgccatattttggcccctaaagtagatatttattacatgaaatataaataaga

SEQ ID NO: 126044 - DNA, 72 bp, Homo sapiens
cctttcactgtgccatattttggcccctaaagtagatatttattacatgaaatataaataagaattcagaag

SEQ ID NO: 126045 - DNA, 74 bp, Homo sapiens
tacatgaaatataaataagaattcagaagtttataagggtcttcaatttacctgtggacagtgaggatttgtga

SEQ ID NO: 126046 - DNA, 72 bp, Homo sapiens
ataaataagaattcagaagtttataagggtcttcaatttacctgtggacagtgaggatttgtgaaaatcata

SEQ ID NO: 126047 - DNA, 73 bp, Homo sapiens
gaattcagaagtttataagggtcttcaatttacctgtggacagtgaggatttgtgaaaatcatattcagtaac

SEQ ID NO: 126048 - DNA, 71 bp, Homo sapiens
agtttataagggtcttcaatttacctgtggacagtgaggatttgtgaaaatcatattcagtaacttcttgg

SEQ ID NO: 126049 - DNA, 72 bp, Homo sapiens
tcttcaatttacctgtggacagtgaggatttgtgaaaatcatattcagtaacttcttggtttacctcctttg

SEQ ID NO: 126050 - DNA, 71 bp, Homo sapiens
atttacctgtggacagtgaggatttgtgaaaatcatattcagtaacttcttggtttacctcctttgtcacc

SEQ ID NO: 126051 - DNA, 75 bp, Homo sapiens
tgtgaaaatcatattcagtaacttcttggtttacctcctttgtcacctgctacatttttgagtgcatgaaactta

SEQ ID NO: 126052 - DNA, 73 bp, Homo sapiens
aatcatattcagtaacttcttggtttacctcctttgtcacctgctacatttttgagtgcatgaaacttacacg

SEQ ID NO: 126053 - DNA, 73 bp, Homo sapiens
tggtttacctcctttgtcacctgctacatttttgagtgcatgaaacttacacgggaggagggcagggaagtgc

SEQ ID NO: 126054 - DNA, 74 bp, Homo sapiens
cctttgtcacctgctacatttttgagtgcatgaaacttacacgggaggagggcagggaagtgctgggaagagaa

SEQ ID NO: 126055 - DNA, 74 bp, Homo sapiens
tacatttttgagtgcatgaaacttacacgggaggagggcagggaagtgctgggaagagaagtgcgtggtcccta

SEQ ID NO: 126056 - DNA, 75 bp, Homo sapiens
tttgagtgcatgaaacttacacgggaggagggcagggaagtgctgggaagagaagtgcgtggtccctagcgaggc

SEQ ID NO: 126057 - DNA, 74 bp, Homo sapiens
tgaaacttacacgggaggagggcagggaagtgctgggaagagaagtgcgtggtccctagcgaggcctgtgccca

SEQ ID NO: 126058 - DNA, 75 bp, Homo sapiens
aggagggcagggaagtgctgggaagagaagtgcgtggtccctagcgaggcctgtgcccatggacctaggtgagga

SEQ ID NO: 126059 - DNA, 75 bp, Homo sapiens
ggaagtgctgggaagagaagtgcgtggtccctagcgaggcctgtgcccatggacctaggtgaggacaaacactcc

SEQ ID NO: 126060 - DNA, 75 bp, Homo sapiens
actcctgccttcccgcccaaatgttgcatttcccaagatcaccctgacctgccacgcccacaccctatgcctata

SEQ ID NO: 126061 - DNA, 72 bp, Homo sapiens
ccttcccgcccaaatgttgcatttcccaagatcaccctgacctgccacgcccacaccctatgcctataaaaa

SEQ ID NO: 126062 - DNA, 73 bp, Homo sapiens
atgttgcatttcccaagatcaccctgacctgccacgcccacaccctatgcctataaaaacccctgagacccta

SEQ ID NO: 126063 - DNA, 70 bp, Homo sapiens
atttcccaagatcaccctgacctgccacgcccacaccctatgcctataaaaacccctgagaccctagtag

SEQ ID NO: 126064 - DNA, 74 bp, Homo sapiens
ctataaaaacccctgagaccctagtaggcagacacacaagcggctggatgtccagaggaacacggagccccaca

SEQ ID NO: 126065 - DNA, 74 bp, Homo sapiens
ccctgagaccctagtaggcagacacacaagcggctggatgtccagaggaacacggagccccacaacctgcccgt

SEQ ID NO: 126066 - DNA, 74 bp, Homo sapiens
agaccctagtaggcagacacacaagcggctggatgtccagaggaacacggagccccacaacctgcccgtttgta

SEQ ID NO: 126067 - DNA, 76 bp, Homo sapiens
aggcagacacacaagcggctggatgtccagaggaacacggagccccacaacctgcccgtttgtatgctcccctaga

SEQ ID NO: 126068 - DNA, 75 bp, Homo sapiens
cctagaggtttgagcagcgggacactgaagaagcgaaccactctccgcgtcgcatgccctgcgagggggacaagg

SEQ ID NO: 126069 - DNA, 76 bp, Homo sapiens
tttgagcagcgggacactgaagaagcgaaccactctccgcgtcgcatgccctgcgagggggacaagggaatctttc

SEQ ID NO: 126070 - DNA, 74 bp, Homo sapiens
gacactgaagaagcgaaccactctccgcgtcgcatgccctgcgagggggacaagggaatctttctcgtttcaaa

SEQ ID NO: 126071 - DNA, 71 bp, Homo sapiens
agaagcgaaccactctccgcgtcgcatgccctgcgagggggacaagggaatctttctcgtttcaaaaccta

SEQ ID NO: 126072 - DNA, 69 bp, Homo sapiens
actctccgcgtcgcatgccctgcgagggggacaagggaatctttctcgtttcaaaacctagttccaaaa

SEQ ID NO: 126073 - DNA, 72 bp, Homo sapiens
gtcgcatgccctgcgagggggacaagggaatctttctcgtttcaaaacctagttccaaaatgtgcaataatc

SEQ ID NO: 126074 - DNA, 74 bp, Homo sapiens
tgcgagggggacaagggaatctttctcgtttcaaaacctagttccaaaatgtgcaataatctgctctctctatg

SEQ ID NO: 126075 - DNA, 74 bp, Homo sapiens
acaagggaatctttctcgtttcaaaacctagttccaaaatgtgcaataatctgctctctctatggcagctttac

SEQ ID NO: 126076 - DNA, 74 bp, Homo sapiens
aatctttctcgtttcaaaacctagttccaaaatgtgcaataatctgctctctctatggcagctttacctgaccg

SEQ ID NO: 126077 - DNA, 75 bp, Homo sapiens
tttcaaaacctagttccaaaatgtgcaataatctgctctctctatggcagctttacctgaccggagatggggtcg

SEQ ID NO: 126078 - DNA, 80 bp, Homo sapiens
ttccaaaatgtgcaataatctgctctctctatggcagctttacctgaccggagatggggtcggtgcccgcacgtgtctga

SEQ ID NO: 126079 - DNA, 78 bp, Homo sapiens
aaatgtgcaataatctgctctctctatggcagctttacctgaccggagatggggtcggtgcccgcacgtgtctgaccg

SEQ ID NO: 126080 - DNA, 75 bp, Homo sapiens
aataatctgctctctctatggcagctttacctgaccggagatggggtcggtgcccgcacgtgtctgaccggggaa

SEQ ID NO: 126081 - DNA, 75 bp, Homo sapiens
taatctgctctctctatggcagctttacctgaccggagatggggtcggtgcccgcacgtgtctgaccggggaagg

SEQ ID NO: 126082 - DNA, 73 bp, Homo sapiens
tctctctatggcagctttacctgaccggagatggggtcggtgcccgcacgtgtctgaccggggaaggggagtg

SEQ ID NO: 126083 - DNA, 72 bp, Homo sapiens
tatggcagctttacctgaccggagatggggtcggtgcccgcacgtgtctgaccggggaaggggagtgtctta

SEQ ID NO: 126084 - DNA, 69 bp, Homo sapiens
agctttacctgaccggagatggggtcggtgcccgcacgtgtctgaccggggaaggggagtgtcttatgg

SEQ ID NO: 126085 - DNA, 71 bp, Homo sapiens
tacctgaccggagatggggtcggtgcccgcacgtgtctgaccggggaaggggagtgtcttatgggcgatgg

SEQ ID NO: 126086 - DNA, 69 bp, Homo sapiens
accggagatggggtcggtgcccgcacgtgtctgaccggggaaggggagtgtcttatgggcgatggggac

SEQ ID NO: 126087 - DNA, 73 bp, Homo sapiens
agatggggtcggtgcccgcacgtgtctgaccggggaaggggagtgtcttatgggcgatggggactgctgccga

SEQ ID NO: 126088 - DNA, 76 bp, Homo sapiens
ggtgcccgcacgtgtctgaccggggaaggggagtgtcttatgggcgatggggactgctgccgagccagctgtgctt

SEQ ID NO: 126089 - DNA, 78 bp, Homo sapiens
gaaggggagtgtcttatgggcgatggggactgctgccgagccagctgtgctttggcagcaatagacggtggtgttggg

SEQ ID NO: 126090 - DNA, 80 bp, Homo sapiens
tgtcttatgggcgatggggactgctgccgagccagctgtgctttggcagcaatagacggtggtgttggggatcttgactt

SEQ ID NO: 126091 - DNA, 79 bp, Homo sapiens
atgggcgatggggactgctgccgagccagctgtgctttggcagcaatagacggtggtgttggggatcttgactttggct

SEQ ID NO: 126092 - DNA, 72 bp, Homo sapiens
tttggcagcaatagacggtggtgttggggatcttgactttggcttcggaggaatcctgggaggtgttttatg

SEQ ID NO: 126093 - DNA, 72 bp, Homo sapiens
aatagacggtggtgttggggatcttgactttggcttcggaggaatcctgggaggtgttttatgtggcagctg

SEQ ID NO: 126094 - DNA, 73 bp, Homo sapiens
cggtggtgttggggatcttgactttggcttcggaggaatcctgggaggtgttttatgtggcagctgttgccca

SEQ ID NO: 126095 - DNA, 78 bp, Homo sapiens
actttggcttcggaggaatcctgggaggtgttttatgtggcagctgttgcccagcggcaccatctatgaccatctcaa

SEQ ID NO: 126096 - DNA, 85 bp, Homo sapiens
tgggaggtgttttatgtggcagctgttgcccagcggcaccatctatgaccatctcaactgttgcaattgatctggcatcaaagtg

SEQ ID NO: 126097 - DNA, 86 bp, Homo sapiens
tttatgtggcagctgttgcccagcggcaccatctatgaccatctcaactgttgcaattgatctggcatcaaagtgggcttcaatct

SEQ ID NO: 126098 - DNA, 83 bp, Homo sapiens
ctgttgcccagcggcaccatctatgaccatctcaactgttgcaattgatctggcatcaaagtgggcttcaatcttctgtaaaa

SEQ ID NO: 126099 - DNA, 81 bp, Homo sapiens
agcggcaccatctatgaccatctcaactgttgcaattgatctggcatcaaagtgggcttcaatcttctgtaaaagattaaa

SEQ ID NO: 126100 - DNA, 69 bp, Homo sapiens
aatagctggggacgcaacagcctgaaaggcttgaaaaccaacagtatagaaaaataccttttcaattcg

SEQ ID NO: 126101 - DNA, 68 bp, Homo sapiens
caacagcctgaaaggcttgaaaaccaacagtatagaaaaataccttttcaattcgggtttgtcttgat

SEQ ID NO: 126102 - DNA, 70 bp, Homo sapiens
ctgaaaggcttgaaaaccaacagtatagaaaaataccttttcaattcgggtttgtcttgattctgagatc

SEQ ID NO: 126103 - DNA, 71 bp, Homo sapiens
aaaaccaacagtatagaaaaataccttttcaattcgggtttgtcttgattctgagatctgagcagtcgaaa

SEQ ID NO: 126104 - DNA, 74 bp, Homo sapiens
tatagaaaaataccttttcaattcgggtttgtcttgattctgagatctgagcagtcgaaacaattgtctttgtc

SEQ ID NO: 126105 - DNA, 71 bp, Homo sapiens
aaaataccttttcaattcgggtttgtcttgattctgagatctgagcagtcgaaacaattgtctttgtcttt

SEQ ID NO: 126106 - DNA, 74 bp, Homo sapiens
tttcaattcgggtttgtcttgattctgagatctgagcagtcgaaacaattgtctttgtctttttagcaggtact

SEQ ID NO: 126107 - DNA, 77 bp, Homo sapiens
tttgtcttgattctgagatctgagcagtcgaaacaattgtctttgtctttttagcaggtacttcttcttcacctgtg

SEQ ID NO: 126108 - DNA, 74 bp, Homo sapiens
attctgagatctgagcagtcgaaacaattgtctttgtctttttagcaggtacttcttcttcacctgtgggaagg

SEQ ID NO: 126109 - DNA, 71 bp, Homo sapiens
agcagtcgaaacaattgtctttgtctttttagcaggtacttcttcttcacctgtgggaagggaaagatgaa

SEQ ID NO: 126110 - DNA, 69 bp, Homo sapiens
aaacaattgtctttgtctttttagcaggtacttcttcttcacctgtgggaagggaaagatgaatgtttg

SEQ ID NO: 126111 - DNA, 68 bp, Homo sapiens
gtctttgtctttttagcaggtacttcttcttcacctgtgggaagggaaagatgaatgtttgggagggg

SEQ ID NO: 126112 - DNA, 74 bp, Homo sapiens
aaaccagctctctccccttctctctgttcctcaacctccagcacgtaccttgaaccagtaattcagcagtcgaa

SEQ ID NO: 126113 - DNA, 75 bp, Homo sapiens
tccccttctctctgttcctcaacctccagcacgtaccttgaaccagtaattcagcagtcgaagtagctcttccaa

SEQ ID NO: 126114 - DNA, 76 bp, Homo sapiens
tctgttcctcaacctccagcacgtaccttgaaccagtaattcagcagtcgaagtagctcttccaacgctattggtg

SEQ ID NO: 126115 - DNA, 74 bp, Homo sapiens
aacctccagcacgtaccttgaaccagtaattcagcagtcgaagtagctcttccaacgctattggtggcatttac

SEQ ID NO: 126116 - DNA, 76 bp, Homo sapiens
ccagcacgtaccttgaaccagtaattcagcagtcgaagtagctcttccaacgctattggtggcatttactgaatag

SEQ ID NO: 126117 - DNA, 76 bp, Homo sapiens
ttgaaccagtaattcagcagtcgaagtagctcttccaacgctattggtggcatttactgaataggtccctgagtcc

SEQ ID NO: 126118 - DNA, 76 bp, Homo sapiens
gtaattcagcagtcgaagtagctcttccaacgctattggtggcatttactgaataggtccctgagtcctcagggta

SEQ ID NO: 126119 - DNA, 78 bp, Homo sapiens
aagtagctcttccaacgctattggtggcatttactgaataggtccctgagtcctcagggtatgcttctgcaatcagta

SEQ ID NO: 126120 - DNA, 80 bp, Homo sapiens
tcttccaacgctattggtggcatttactgaataggtccctgagtcctcagggtatgcttctgcaatcagtaagctgtaga

SEQ ID NO: 126121 - DNA, 79 bp, Homo sapiens
tattggtggcatttactgaataggtccctgagtcctcagggtatgcttctgcaatcagtaagctgtagaggtcgccttc

SEQ ID NO: 126122 - DNA, 77 bp, Homo sapiens
tttactgaataggtccctgagtcctcagggtatgcttctgcaatcagtaagctgtagaggtcgccttcttgtgaaat

SEQ ID NO: 126123 - DNA, 76 bp, Homo sapiens
aataggtccctgagtcctcagggtatgcttctgcaatcagtaagctgtagaggtcgccttcttgtgaaatttggaa

SEQ ID NO: 126124 - DNA, 77 bp, Homo sapiens
agtcctcagggtatgcttctgcaatcagtaagctgtagaggtcgccttcttgtgaaatttggaaatcaagggagctc

SEQ ID NO: 126125 - DNA, 76 bp, Homo sapiens
agggtatgcttctgcaatcagtaagctgtagaggtcgccttcttgtgaaatttggaaatcaagggagctctggatt

SEQ ID NO: 126126 - DNA, 74 bp, Homo sapiens
aatcagtaagctgtagaggtcgccttcttgtgaaatttggaaatcaagggagctctggatttcggctccatccc

SEQ ID NO: 126127 - DNA, 74 bp, Homo sapiens
taagctgtagaggtcgccttcttgtgaaatttggaaatcaagggagctctggatttcggctccatcccggtaga

SEQ ID NO: 126128 - DNA, 71 bp, Homo sapiens
aggtcgccttcttgtgaaatttggaaatcaagggagctctggatttcggctccatcccggtagaacttcac

SEQ ID NO: 126129 - DNA, 73 bp, Homo sapiens
aaatcaagggagctctggatttcggctccatcccggtagaacttcaccacaggtgtagggattccagtcactc

SEQ ID NO: 126130 - DNA, 73 bp, Homo sapiens
aagggagctctggatttcggctccatcccggtagaacttcaccacaggtgtagggattccagtcactctcact

SEQ ID NO: 126131 - DNA, 74 bp, Homo sapiens
atttcggctccatcccggtagaacttcaccacaggtgtagggattccagtcactctcacttggagtctcacttg

SEQ ID NO: 126132 - DNA, 74 bp, Homo sapiens
atcccggtagaacttcaccacaggtgtagggattccagtcactctcacttggagtctcacttggcttccttgtc

SEQ ID NO: 126133 - DNA, 77 bp, Homo sapiens
gtagaacttcaccacaggtgtagggattccagtcactctcacttggagtctcacttggcttccttgtctcacggtca

SEQ ID NO: 126134 - DNA, 80 bp, Homo sapiens
aggtgtagggattccagtcactctcacttggagtctcacttggcttccttgtctcacggtcatgctctgcagtcgttgaa

SEQ ID NO: 126135 - DNA, 79 bp, Homo sapiens
attccagtcactctcacttggagtctcacttggcttccttgtctcacggtcatgctctgcagtcgttgaacgaagttgg

SEQ ID NO: 126136 - DNA, 78 bp, Homo sapiens
agtcactctcacttggagtctcacttggcttccttgtctcacggtcatgctctgcagtcgttgaacgaagttgggtgg

SEQ ID NO: 126137 - DNA, 80 bp, Homo sapiens
acttggagtctcacttggcttccttgtctcacggtcatgctctgcagtcgttgaacgaagttgggtggtgctgtctcagc

SEQ ID NO: 126138 - DNA, 81 bp, Homo sapiens
tggcttccttgtctcacggtcatgctctgcagtcgttgaacgaagttgggtggtgctgtctcagctgcggggacaagagaa

SEQ ID NO: 126139 - DNA, 80 bp, Homo sapiens
tccttgtctcacggtcatgctctgcagtcgttgaacgaagttgggtggtgctgtctcagctgcggggacaagagaacaaa

SEQ ID NO: 126140 - DNA, 78 bp, Homo sapiens
acggtcatgctctgcagtcgttgaacgaagttgggtggtgctgtctcagctgcggggacaagagaacaaagtcaagag

SEQ ID NO: 126141 - DNA, 78 bp, Homo sapiens
atgtcctctgggggagcagaggattggcaggtccccagcagcctacctttcacgagaagctcagcagtactagtcgct

SEQ ID NO: 126142 - DNA, 80 bp, Homo sapiens
ggggagcagaggattggcaggtccccagcagcctacctttcacgagaagctcagcagtactagtcgcttgtccagatcca

SEQ ID NO: 126143 - DNA, 79 bp, Homo sapiens
agaggattggcaggtccccagcagcctacctttcacgagaagctcagcagtactagtcgcttgtccagatccattggtg

SEQ ID NO: 126144 - DNA, 78 bp, Homo sapiens
gtccccagcagcctacctttcacgagaagctcagcagtactagtcgcttgtccagatccattggtggctttcagggaa

SEQ ID NO: 126145 - DNA, 78 bp, Homo sapiens
agcctacctttcacgagaagctcagcagtactagtcgcttgtccagatccattggtggctttcagggaatatcgtcca

SEQ ID NO: 126146 - DNA, 79 bp, Homo sapiens
tttcacgagaagctcagcagtactagtcgcttgtccagatccattggtggctttcagggaatatcgtccactgttggct

SEQ ID NO: 126147 - DNA, 78 bp, Homo sapiens
aagctcagcagtactagtcgcttgtccagatccattggtggctttcagggaatatcgtccactgttggctttagtcac

SEQ ID NO: 126148 - DNA, 74 bp, Homo sapiens
agtactagtcgcttgtccagatccattggtggctttcagggaatatcgtccactgttggctttagtcacggcgg

SEQ ID NO: 126149 - DNA, 75 bp, Homo sapiens
tgtccagatccattggtggctttcagggaatatcgtccactgttggctttagtcacggcggggatcgtcagttta

SEQ ID NO: 126150 - DNA, 73 bp, Homo sapiens
attggtggctttcagggaatatcgtccactgttggctttagtcacggcggggatcgtcagtttagcgcggcca

SEQ ID NO: 126151 - DNA, 73 bp, Homo sapiens
tttcagggaatatcgtccactgttggctttagtcacggcggggatcgtcagtttagcgcggccatcgctaaag

SEQ ID NO: 126152 - DNA, 76 bp, Homo sapiens
aatatcgtccactgttggctttagtcacggcggggatcgtcagtttagcgcggccatcgctaaaggagatctgcac

SEQ ID NO: 126153 - DNA, 77 bp, Homo sapiens
ttggctttagtcacggcggggatcgtcagtttagcgcggccatcgctaaaggagatctgcacgccgggcagagtgga

SEQ ID NO: 126154 - DNA, 76 bp, Homo sapiens
tttagtcacggcggggatcgtcagtttagcgcggccatcgctaaaggagatctgcacgccgggcagagtggaagtg

SEQ ID NO: 126155 - DNA, 79 bp, Homo sapiens
ggatcgtcagtttagcgcggccatcgctaaaggagatctgcacgccgggcagagtggaagtggaaatcacctggccatc

SEQ ID NO: 126156 - DNA, 76 bp, Homo sapiens
agtttagcgcggccatcgctaaaggagatctgcacgccgggcagagtggaagtggaaatcacctggccatccctaa

SEQ ID NO: 126157 - DNA, 78 bp, Homo sapiens
ccatcgctaaaggagatctgcacgccgggcagagtggaagtggaaatcacctggccatccctaaaccagctcacctca

SEQ ID NO: 126158 - DNA, 76 bp, Homo sapiens
ctaaaggagatctgcacgccgggcagagtggaagtggaaatcacctggccatccctaaaccagctcacctcaggaa

SEQ ID NO: 126159 - DNA, 71 bp, Homo sapiens
acgccgggcagagtggaagtggaaatcacctggccatccctaaaccagctcacctcaggaactggaaaacc

SEQ ID NO: 126160 - DNA, 74 bp, Homo sapiens
agagtggaagtggaaatcacctggccatccctaaaccagctcacctcaggaactggaaaacctgaagagcaaga

SEQ ID NO: 126161 - DNA, 72 bp, Homo sapiens
aagtggaaatcacctggccatccctaaaccagctcacctcaggaactggaaaacctgaagagcaagaacaat

SEQ ID NO: 126162 - DNA, 74 bp, Homo sapiens
tggccatccctaaaccagctcacctcaggaactggaaaacctgaagagcaagaacaattcacctttatgtttga

SEQ ID NO: 126163 - DNA, 70 bp, Homo sapiens
aggaaaaaaaaacaaaagtgtgaatgtgtgagcttaccactaatgtgagcctcaaaggttgcggtactac

SEQ ID NO: 126164 - DNA, 72 bp, Homo sapiens
aaaaacaaaagtgtgaatgtgtgagcttaccactaatgtgagcctcaaaggttgcggtactaccctccagta

SEQ ID NO: 126165 - DNA, 75 bp, Homo sapiens
tgaatgtgtgagcttaccactaatgtgagcctcaaaggttgcggtactaccctccagtaccacaacgctttgtaa

SEQ ID NO: 126166 - DNA, 73 bp, Homo sapiens
tgtgagcttaccactaatgtgagcctcaaaggttgcggtactaccctccagtaccacaacgctttgtaacggc

SEQ ID NO: 126167 - DNA, 70 bp, Homo sapiens
actaatgtgagcctcaaaggttgcggtactaccctccagtaccacaacgctttgtaacggctgcgtaaac

SEQ ID NO: 126168 - DNA, 70 bp, Homo sapiens
ctcaaaggttgcggtactaccctccagtaccacaacgctttgtaacggctgcgtaaacgtcggtgcttga

SEQ ID NO: 126169 - DNA, 72 bp, Homo sapiens
ttgcggtactaccctccagtaccacaacgctttgtaacggctgcgtaaacgtcggtgcttgagttgtcatct

SEQ ID NO: 126170 - DNA, 75 bp, Homo sapiens
ctccagtaccacaacgctttgtaacggctgcgtaaacgtcggtgcttgagttgtcatctttctaggcactctgaa

SEQ ID NO: 126171 - DNA, 73 bp, Homo sapiens
gtaccacaacgctttgtaacggctgcgtaaacgtcggtgcttgagttgtcatctttctaggcactctgaaaaa

SEQ ID NO: 126172 - DNA, 72 bp, Homo sapiens
ctttgtaacggctgcgtaaacgtcggtgcttgagttgtcatctttctaggcactctgaaaaagaagagaaaa

SEQ ID NO: 126173 - DNA, 70 bp, Homo sapiens
cgtaaacgtcggtgcttgagttgtcatctttctaggcactctgaaaaagaagagaaaataaattagggtg

SEQ ID NO: 126174 - DNA, 75 bp, Homo sapiens
gatcaataagaaagtgactctactattaaaataagaaaagttgctgctcacctgatttctcaagagtgcctaaaa

SEQ ID NO: 126175 - DNA, 71 bp, Homo sapiens
aaagtgactctactattaaaataagaaaagttgctgctcacctgatttctcaagagtgcctaaaaagggtg

SEQ ID NO: 126176 - DNA, 70 bp, Homo sapiens
ttaaaataagaaaagttgctgctcacctgatttctcaagagtgcctaaaaagggtgggactaagcccaag

SEQ ID NO: 126177 - DNA, 71 bp, Homo sapiens
ataagaaaagttgctgctcacctgatttctcaagagtgcctaaaaagggtgggactaagcccaaggttgct

SEQ ID NO: 126178 - DNA, 72 bp, Homo sapiens
tgctcacctgatttctcaagagtgcctaaaaagggtgggactaagcccaaggttgcttctgaaacgacgtcc

SEQ ID NO: 126179 - DNA, 70 bp, Homo sapiens
atttctcaagagtgcctaaaaagggtgggactaagcccaaggttgcttctgaaacgacgtcctatggaga

SEQ ID NO: 126180 - DNA, 67 bp, Homo sapiens
agtgcctaaaaagggtgggactaagcccaaggttgcttctgaaacgacgtcctatggagagttggtt

SEQ ID NO: 126181 - DNA, 68 bp, Homo sapiens
taaaaagggtgggactaagcccaaggttgcttctgaaacgacgtcctatggagagttggtttttctga

SEQ ID NO: 126182 - DNA, 73 bp, Homo sapiens
actaagcccaaggttgcttctgaaacgacgtcctatggagagttggtttttctgaccatctccgacatgaatc

SEQ ID NO: 126183 - DNA, 76 bp, Homo sapiens
gttgcttctgaaacgacgtcctatggagagttggtttttctgaccatctccgacatgaatcggtgagcctctaatc

SEQ ID NO: 126184 - DNA, 72 bp, Homo sapiens
aaacgacgtcctatggagagttggtttttctgaccatctccgacatgaatcggtgagcctctaatcctaaaa

SEQ ID NO: 126185 - DNA, 72 bp, Homo sapiens
acgtcctatggagagttggtttttctgaccatctccgacatgaatcggtgagcctctaatcctaaaaacaaa

SEQ ID NO: 126186 - DNA, 72 bp, Homo sapiens
agttggtttttctgaccatctccgacatgaatcggtgagcctctaatcctaaaaacaaaactacacagtcaa

SEQ ID NO: 126187 - DNA, 75 bp, Homo sapiens
ttttctgaccatctccgacatgaatcggtgagcctctaatcctaaaaacaaaactacacagtcaagactgtgtag

SEQ ID NO: 126188 - DNA, 73 bp, Homo sapiens
atctccgacatgaatcggtgagcctctaatcctaaaaacaaaactacacagtcaagactgtgtagttttgctt

SEQ ID NO: 126189 - DNA, 73 bp, Homo sapiens
aatcggtgagcctctaatcctaaaaacaaaactacacagtcaagactgtgtagttttgcttttctatgcaatc

SEQ ID NO: 126190 - DNA, 72 bp, Homo sapiens
tctaatcctaaaaacaaaactacacagtcaagactgtgtagttttgcttttctatgcaatccctacacccga

SEQ ID NO: 126191 - DNA, 72 bp, Homo sapiens
aaaacaaaactacacagtcaagactgtgtagttttgcttttctatgcaatccctacacccgaggcgaggctg

SEQ ID NO: 126192 - DNA, 75 bp, Homo sapiens
aaactacacagtcaagactgtgtagttttgcttttctatgcaatccctacacccgaggcgaggctgggaatgcac

SEQ ID NO: 126193 - DNA, 78 bp, Homo sapiens
aagactgtgtagttttgcttttctatgcaatccctacacccgaggcgaggctgggaatgcacgactgctcaagagcca

SEQ ID NO: 126194 - DNA, 77 bp, Homo sapiens
gtagttttgcttttctatgcaatccctacacccgaggcgaggctgggaatgcacgactgctcaagagccagggtctg

SEQ ID NO: 126195 - DNA, 81 bp, Homo sapiens
tctatgcaatccctacacccgaggcgaggctgggaatgcacgactgctcaagagccagggtctggcctgcccttatattca

SEQ ID NO: 126196 - DNA, 77 bp, Homo sapiens
aatccctacacccgaggcgaggctgggaatgcacgactgctcaagagccagggtctggcctgcccttatattcacca

SEQ ID NO: 126197 - DNA, 72 bp, Homo sapiens
ctttatcaaagttccgcattttacaagtcatgttcaaaaaacacacacaaattagcattttgtacacaaatg

SEQ ID NO: 126198 - DNA, 70 bp, Homo sapiens
acacacacaaattagcattttgtacacaaatgtttatttctcaattaaacattccctttaaacacaagga

SEQ ID NO: 126199 - DNA, 70 bp, Homo sapiens
cacaaattagcattttgtacacaaatgtttatttctcaattaaacattccctttaaacacaaggaatgag

SEQ ID NO: 126200 - DNA, 71 bp, Homo sapiens
tgtacacaaatgtttatttctcaattaaacattccctttaaacacaaggaatgagttctaaatcttcataa

SEQ ID NO: 126201 - DNA, 70 bp, Homo sapiens
atgtttatttctcaattaaacattccctttaaacacaaggaatgagttctaaatcttcataaagatgaat

SEQ ID NO: 126202 - DNA, 69 bp, Homo sapiens
atttctcaattaaacattccctttaaacacaaggaatgagttctaaatcttcataaagatgaattaaaa

SEQ ID NO: 126203 - DNA, 70 bp, Homo sapiens
cattccctttaaacacaaggaatgagttctaaatcttcataaagatgaattaaaaatgaaatccctccag

SEQ ID NO: 126204 - DNA, 71 bp, Homo sapiens
ctttaaacacaaggaatgagttctaaatcttcataaagatgaattaaaaatgaaatccctccagtatagtg

SEQ ID NO: 126205 - DNA, 76 bp, Homo sapiens
gaatgagttctaaatcttcataaagatgaattaaaaatgaaatccctccagtatagtgtatataatcactgtgttc

SEQ ID NO: 126206 - DNA, 75 bp, Homo sapiens
aatcttcataaagatgaattaaaaatgaaatccctccagtatagtgtatataatcactgtgttcttggtcactac

SEQ ID NO: 126207 - DNA, 75 bp, Homo sapiens
aagatgaattaaaaatgaaatccctccagtatagtgtatataatcactgtgttcttggtcactactggcatttac

SEQ ID NO: 126208 - DNA, 74 bp, Homo sapiens
aaaaatgaaatccctccagtatagtgtatataatcactgtgttcttggtcactactggcatttactgtttaaca

SEQ ID NO: 126209 - DNA, 76 bp, Homo sapiens
tgaaatccctccagtatagtgtatataatcactgtgttcttggtcactactggcatttactgtttaacatcaaaaa

SEQ ID NO: 126210 - DNA, 75 bp, Homo sapiens
ccagtatagtgtatataatcactgtgttcttggtcactactggcatttactgtttaacatcaaaaacaaagacag

SEQ ID NO: 126211 - DNA, 73 bp, Homo sapiens
gtatataatcactgtgttcttggtcactactggcatttactgtttaacatcaaaaacaaagacaggttattta

SEQ ID NO: 126212 - DNA, 72 bp, Homo sapiens
ctgtgttcttggtcactactggcatttactgtttaacatcaaaaacaaagacaggttatttaaaaatcatgc

SEQ ID NO: 126213 - DNA, 72 bp, Homo sapiens
tggtcactactggcatttactgtttaacatcaaaaacaaagacaggttatttaaaaatcatgctactggatt

SEQ ID NO: 126214 - DNA, 72 bp, Homo sapiens
gcatttactgtttaacatcaaaaacaaagacaggttatttaaaaatcatgctactggatttctagctcttcc

SEQ ID NO: 126215 - DNA, 73 bp, Homo sapiens
ctgtttaacatcaaaaacaaagacaggttatttaaaaatcatgctactggatttctagctcttcctctatgac

SEQ ID NO: 126216 - DNA, 73 bp, Homo sapiens
aacatcaaaaacaaagacaggttatttaaaaatcatgctactggatttctagctcttcctctatgaccagttc

SEQ ID NO: 126217 - DNA, 73 bp, Homo sapiens
caaaaacaaagacaggttatttaaaaatcatgctactggatttctagctcttcctctatgaccagttctacac

SEQ ID NO: 126218 - DNA, 74 bp, Homo sapiens
aaaacaaagacaggttatttaaaaatcatgctactggatttctagctcttcctctatgaccagttctacactga

SEQ ID NO: 126219 - DNA, 77 bp, Homo sapiens
gttatttaaaaatcatgctactggatttctagctcttcctctatgaccagttctacactgatctgcaatgtttaaaa

SEQ ID NO: 126220 - DNA, 76 bp, Homo sapiens
tttaaaaatcatgctactggatttctagctcttcctctatgaccagttctacactgatctgcaatgtttaaaagtt

SEQ ID NO: 126221 - DNA, 78 bp, Homo sapiens
atgctactggatttctagctcttcctctatgaccagttctacactgatctgcaatgtttaaaagtttacatcaccaaa

SEQ ID NO: 126222 - DNA, 78 bp, Homo sapiens
tactggatttctagctcttcctctatgaccagttctacactgatctgcaatgtttaaaagtttacatcaccaaatcaa

SEQ ID NO: 126223 - DNA, 77 bp, Homo sapiens
atttctagctcttcctctatgaccagttctacactgatctgcaatgtttaaaagtttacatcaccaaatcaaagcaa

SEQ ID NO: 126224 - DNA, 75 bp, Homo sapiens
ctcttcctctatgaccagttctacactgatctgcaatgtttaaaagtttacatcaccaaatcaaagcaagtttaa

SEQ ID NO: 126225 - DNA, 75 bp, Homo sapiens
ctatgaccagttctacactgatctgcaatgtttaaaagtttacatcaccaaatcaaagcaagtttaaggtgtgaa

SEQ ID NO: 126226 - DNA, 75 bp, Homo sapiens
tctgcaatgtttaaaagtttacatcaccaaatcaaagcaagtttaaggtgtgaagtagctgtgcattaaacacaa

SEQ ID NO: 126227 - DNA, 71 bp, Homo sapiens
tttaaaagtttacatcaccaaatcaaagcaagtttaaggtgtgaagtagctgtgcattaaacacaaaataa

SEQ ID NO: 126228 - DNA, 73 bp, Homo sapiens
tacatcaccaaatcaaagcaagtttaaggtgtgaagtagctgtgcattaaacacaaaataaacaataaaatta

SEQ ID NO: 126229 - DNA, 74 bp, Homo sapiens
tcaaagcaagtttaaggtgtgaagtagctgtgcattaaacacaaaataaacaataaaattataagatatagtca

SEQ ID NO: 126230 - DNA, 74 bp, Homo sapiens
taaggtgtgaagtagctgtgcattaaacacaaaataaacaataaaattataagatatagtcaagttcataacga

SEQ ID NO: 126231 - DNA, 74 bp, Homo sapiens
tgaagtagctgtgcattaaacacaaaataaacaataaaattataagatatagtcaagttcataacgaatatagg

SEQ ID NO: 126232 - DNA, 74 bp, Homo sapiens
tgcattaaacacaaaataaacaataaaattataagatatagtcaagttcataacgaatataggtgttcttatca

SEQ ID NO: 126233 - DNA, 74 bp, Homo sapiens
taaaattataagatatagtcaagttcataacgaatataggtgttcttatcatcgttgtagattcttgggtaatg

SEQ ID NO: 126234 - DNA, 80 bp, Homo sapiens
tataagatatagtcaagttcataacgaatataggtgttcttatcatcgttgtagattcttgggtaatgtgctatgagagc

SEQ ID NO: 126235 - DNA, 76 bp, Homo sapiens
aagttcataacgaatataggtgttcttatcatcgttgtagattcttgggtaatgtgctatgagagcgtcctgggaa

SEQ ID NO: 126236 - DNA, 77 bp, Homo sapiens
taacgaatataggtgttcttatcatcgttgtagattcttgggtaatgtgctatgagagcgtcctgggaaccaatgta

SEQ ID NO: 126237 - DNA, 78 bp, Homo sapiens
tgttcttatcatcgttgtagattcttgggtaatgtgctatgagagcgtcctgggaaccaatgtagatggagttgtaaa

SEQ ID NO: 126238 - DNA, 76 bp, Homo sapiens
ttatcatcgttgtagattcttgggtaatgtgctatgagagcgtcctgggaaccaatgtagatggagttgtaaattt

SEQ ID NO: 126239 - DNA, 77 bp, Homo sapiens
tgtagattcttgggtaatgtgctatgagagcgtcctgggaaccaatgtagatggagttgtaaattttccaatataca

SEQ ID NO: 126240 - DNA, 77 bp, Homo sapiens
tgggtaatgtgctatgagagcgtcctgggaaccaatgtagatggagttgtaaattttccaatatacatctctgactt

SEQ ID NO: 126241 - DNA, 75 bp, Homo sapiens
ctatgagagcgtcctgggaaccaatgtagatggagttgtaaattttccaatatacatctctgactttccgggctg

SEQ ID NO: 126242 - DNA, 71 bp, Homo sapiens
aatgtagatggagttgtaaattttccaatatacatctctgactttccgggctgggtgaaacagaccctaaa

SEQ ID NO: 126243 - DNA, 69 bp, Homo sapiens
agttgtaaattttccaatatacatctctgactttccgggctgggtgaaacagaccctaaaataattgaa

SEQ ID NO: 126244 - DNA, 70 bp, Homo sapiens
ttccaatatacatctctgactttccgggctgggtgaaacagaccctaaaataattgaacggttacattat

SEQ ID NO: 126245 - DNA, 70 bp, Homo sapiens
atatacatctctgactttccgggctgggtgaaacagaccctaaaataattgaacggttacattatttcaa

SEQ ID NO: 126246 - DNA, 71 bp, Homo sapiens
aaaaaaaaatctttaacttacctgtaaacaatattgcaacattctacatggtccaatagcaactctcaggc

SEQ ID NO: 126247 - DNA, 73 bp, Homo sapiens
aaaatctttaacttacctgtaaacaatattgcaacattctacatggtccaatagcaactctcaggccctctag

SEQ ID NO: 126248 - DNA, 75 bp, Homo sapiens
acttacctgtaaacaatattgcaacattctacatggtccaatagcaactctcaggccctctagggctcccataac

SEQ ID NO: 126249 - DNA, 78 bp, Homo sapiens
aaacaatattgcaacattctacatggtccaatagcaactctcaggccctctagggctcccataactgcctgaattaca

SEQ ID NO: 126250 - DNA, 80 bp, Homo sapiens
attctacatggtccaatagcaactctcaggccctctagggctcccataactgcctgaattacatgaggagatgtctcaaa

SEQ ID NO: 126251 - DNA, 80 bp, Homo sapiens
acatggtccaatagcaactctcaggccctctagggctcccataactgcctgaattacatgaggagatgtctcaaatacat

SEQ ID NO: 126252 - DNA, 79 bp, Homo sapiens
aactctcaggccctctagggctcccataactgcctgaattacatgaggagatgtctcaaatacattgggccatacatag

SEQ ID NO: 126253 - DNA, 78 bp, Homo sapiens
ccctctagggctcccataactgcctgaattacatgaggagatgtctcaaatacattgggccatacatagttcaacaag

SEQ ID NO: 126254 - DNA, 82 bp, Homo sapiens
ctcccataactgcctgaattacatgaggagatgtctcaaatacattgggccatacatagttcaacaagtgattcagcgaatc

SEQ ID NO: 126255 - DNA, 83 bp, Homo sapiens
taactgcctgaattacatgaggagatgtctcaaatacattgggccatacatagttcaacaagtgattcagcgaatcttcacaa

SEQ ID NO: 126256 - DNA, 80 bp, Homo sapiens
aattacatgaggagatgtctcaaatacattgggccatacatagttcaacaagtgattcagcgaatcttcacaaccaaatc

SEQ ID NO: 126257 - DNA, 77 bp, Homo sapiens
agatgtctcaaatacattgggccatacatagttcaacaagtgattcagcgaatcttcacaaccaaatccataaaccc

SEQ ID NO: 126258 - DNA, 78 bp, Homo sapiens
ccatacatagttcaacaagtgattcagcgaatcttcacaaccaaatccataaaccccaagtgacatgtgctgtaccac

SEQ ID NO: 126259 - DNA, 79 bp, Homo sapiens
atagttcaacaagtgattcagcgaatcttcacaaccaaatccataaaccccaagtgacatgtgctgtaccactgcacta

SEQ ID NO: 126260 - DNA, 80 bp, Homo sapiens
attcagcgaatcttcacaaccaaatccataaaccccaagtgacatgtgctgtaccactgcactagccgtctgtctgtgta

SEQ ID NO: 126261 - DNA, 77 bp, Homo sapiens
aatcttcacaaccaaatccataaaccccaagtgacatgtgctgtaccactgcactagccgtctgtctgtgtacaagg

SEQ ID NO: 126262 - DNA, 77 bp, Homo sapiens
aaccaaatccataaaccccaagtgacatgtgctgtaccactgcactagccgtctgtctgtgtacaaggtctctacaa

SEQ ID NO: 126263 - DNA, 76 bp, Homo sapiens
taaaccccaagtgacatgtgctgtaccactgcactagccgtctgtctgtgtacaaggtctctacaacggaagggaa

SEQ ID NO: 126264 - DNA, 75 bp, Homo sapiens
aagtgacatgtgctgtaccactgcactagccgtctgtctgtgtacaaggtctctacaacggaagggaaaaaagtc

SEQ ID NO: 126265 - DNA, 72 bp, Homo sapiens
gtaccactgcactagccgtctgtctgtgtacaaggtctctacaacggaagggaaaaaagtcctttaagatgc

SEQ ID NO: 126266 - DNA, 71 bp, Homo sapiens
gaaggaagagttataattattttcttgtatttagttcaagtcacttacctatccattaaagcatcttcaag

SEQ ID NO: 126267 - DNA, 70 bp, Homo sapiens
ataattattttcttgtatttagttcaagtcacttacctatccattaaagcatcttcaagtaacggtgtta

SEQ ID NO: 126268 - DNA, 73 bp, Homo sapiens
tcttgtatttagttcaagtcacttacctatccattaaagcatcttcaagtaacggtgttacggcataaatgta

SEQ ID NO: 126269 - DNA, 71 bp, Homo sapiens
atttagttcaagtcacttacctatccattaaagcatcttcaagtaacggtgttacggcataaatgtagtct

SEQ ID NO: 126270 - DNA, 70 bp, Homo sapiens
aagtcacttacctatccattaaagcatcttcaagtaacggtgttacggcataaatgtagtcttttcccat

SEQ ID NO: 126271 - DNA, 72 bp, Homo sapiens
ctatccattaaagcatcttcaagtaacggtgttacggcataaatgtagtcttttcccatttcaccaatatat

SEQ ID NO: 126272 - DNA, 72 bp, Homo sapiens
aagcatcttcaagtaacggtgttacggcataaatgtagtcttttcccatttcaccaatatattcaaacaaga

SEQ ID NO: 126273 - DNA, 70 bp, Homo sapiens
taacggtgttacggcataaatgtagtcttttcccatttcaccaatatattcaaacaagaaggaaagcgat

SEQ ID NO: 126274 - DNA, 71 bp, Homo sapiens
cggcataaatgtagtcttttcccatttcaccaatatattcaaacaagaaggaaagcgattttaacactcca

SEQ ID NO: 126275 - DNA, 70 bp, Homo sapiens
gtagtcttttcccatttcaccaatatattcaaacaagaaggaaagcgattttaacactccattttgaaca

SEQ ID NO: 126276 - DNA, 72 bp, Homo sapiens
cccatttcaccaatatattcaaacaagaaggaaagcgattttaacactccattttgaacattcagttcagga

SEQ ID NO: 126277 - DNA, 73 bp, Homo sapiens
caccaatatattcaaacaagaaggaaagcgattttaacactccattttgaacattcagttcaggaactctgta

SEQ ID NO: 126278 - DNA, 73 bp, Homo sapiens
attcaaacaagaaggaaagcgattttaacactccattttgaacattcagttcaggaactctgtattcattcat

SEQ ID NO: 126279 - DNA, 73 bp, Homo sapiens
agaaggaaagcgattttaacactccattttgaacattcagttcaggaactctgtattcattcattaaggcagg

SEQ ID NO: 126280 - DNA, 74 bp, Homo sapiens
gattttaacactccattttgaacattcagttcaggaactctgtattcattcattaaggcagggagtactgtaaa

SEQ ID NO: 126281 - DNA, 73 bp, Homo sapiens
attttgaacattcagttcaggaactctgtattcattcattaaggcagggagtactgtaaagggtgaacatgtt

SEQ ID NO: 126282 - DNA, 76 bp, Homo sapiens
attcagttcaggaactctgtattcattcattaaggcagggagtactgtaaagggtgaacatgtttctgcaacaata

SEQ ID NO: 126283 - DNA, 77 bp, Homo sapiens
aggaactctgtattcattcattaaggcagggagtactgtaaagggtgaacatgtttctgcaacaatagctattgcta

SEQ ID NO: 126284 - DNA, 77 bp, Homo sapiens
ttcattcattaaggcagggagtactgtaaagggtgaacatgtttctgcaacaatagctattgctacagtggtacaaa

SEQ ID NO: 126285 - DNA, 75 bp, Homo sapiens
ttaaggcagggagtactgtaaagggtgaacatgtttctgcaacaatagctattgctacagtggtacaaactctgt

SEQ ID NO: 126286 - DNA, 75 bp, Homo sapiens
agtactgtaaagggtgaacatgtttctgcaacaatagctattgctacagtggtacaaactctgttctgcctttct

SEQ ID NO: 126287 - DNA, 75 bp, Homo sapiens
taaagggtgaacatgtttctgcaacaatagctattgctacagtggtacaaactctgttctgcctttcttgaactt

SEQ ID NO: 126288 - DNA, 75 bp, Homo sapiens
aacatgtttctgcaacaatagctattgctacagtggtacaaactctgttctgcctttcttgaactttgaggttgt

SEQ ID NO: 126289 - DNA, 75 bp, Homo sapiens
aacaatagctattgctacagtggtacaaactctgttctgcctttcttgaactttgaggttgttcagaagtgtagc

SEQ ID NO: 126290 - DNA, 79 bp, Homo sapiens
tattgctacagtggtacaaactctgttctgcctttcttgaactttgaggttgttcagaagtgtagccaatacatcatga

SEQ ID NO: 126291 - DNA, 76 bp, Homo sapiens
gtacaaactctgttctgcctttcttgaactttgaggttgttcagaagtgtagccaatacatcatgagggctgaaaa

SEQ ID NO: 126292 - DNA, 74 bp, Homo sapiens
aactctgttctgcctttcttgaactttgaggttgttcagaagtgtagccaatacatcatgagggctgaaaaaaa

SEQ ID NO: 126293 - DNA, 74 bp, Homo sapiens
ttcttgaactttgaggttgttcagaagtgtagccaatacatcatgagggctgaaaaaaacaaatgggtcaacaa

SEQ ID NO: 126294 - DNA, 76 bp, Homo sapiens
ttgaggttgttcagaagtgtagccaatacatcatgagggctgaaaaaaacaaatgggtcaacaagctgttacatta

SEQ ID NO: 126295 - DNA, 70 bp, Homo sapiens
tttttttttaatggaagtaaataacactcacccaatggcctttgcaatataaccaaatgtgttgactgtg

SEQ ID NO: 126296 - DNA, 75 bp, Homo sapiens
ttaatggaagtaaataacactcacccaatggcctttgcaatataaccaaatgtgttgactgtggctctacgaata

SEQ ID NO: 126297 - DNA, 74 bp, Homo sapiens
taaataacactcacccaatggcctttgcaatataaccaaatgtgttgactgtggctctacgaatagcctttttg

SEQ ID NO: 126298 - DNA, 72 bp, Homo sapiens
acccaatggcctttgcaatataaccaaatgtgttgactgtggctctacgaatagcctttttgtgggctttta

SEQ ID NO: 126299 - DNA, 73 bp, Homo sapiens
tttgcaatataaccaaatgtgttgactgtggctctacgaatagcctttttgtgggcttttaagagctctaaaa

SEQ ID NO: 126300 - DNA, 73 bp, Homo sapiens
tataaccaaatgtgttgactgtggctctacgaatagcctttttgtgggcttttaagagctctaaaagctcaaa

SEQ ID NO: 126301 - DNA, 73 bp, Homo sapiens
aatgtgttgactgtggctctacgaatagcctttttgtgggcttttaagagctctaaaagctcaaagcaaatcc

SEQ ID NO: 126302 - DNA, 75 bp, Homo sapiens
tgtggctctacgaatagcctttttgtgggcttttaagagctctaaaagctcaaagcaaatcctcatccactctct

SEQ ID NO: 126303 - DNA, 76 bp, Homo sapiens
aatagcctttttgtgggcttttaagagctctaaaagctcaaagcaaatcctcatccactctcttgcagatacatat

SEQ ID NO: 126304 - DNA, 78 bp, Homo sapiens
tttttgtgggcttttaagagctctaaaagctcaaagcaaatcctcatccactctcttgcagatacatattcagctccc

SEQ ID NO: 126305 - DNA, 77 bp, Homo sapiens
tttaagagctctaaaagctcaaagcaaatcctcatccactctcttgcagatacatattcagctcccctaatttaaaa

SEQ ID NO: 126306 - DNA, 76 bp, Homo sapiens
aaaagctcaaagcaaatcctcatccactctcttgcagatacatattcagctcccctaatttaaaaaatacacatat

SEQ ID NO: 126307 - DNA, 79 bp, Homo sapiens
gcaaatcctcatccactctcttgcagatacatattcagctcccctaatttaaaaaatacacatattaattattgtgaca

SEQ ID NO: 126308 - DNA, 77 bp, Homo sapiens
tttgaaaattgatactgcttataaaaatgtgtgggtaatctgcttacctgtcagcaatacgaccaacaagatcaata

SEQ ID NO: 126309 - DNA, 77 bp, Homo sapiens
aattgatactgcttataaaaatgtgtgggtaatctgcttacctgtcagcaatacgaccaacaagatcaatacaattc

SEQ ID NO: 126310 - DNA, 74 bp, Homo sapiens
taaaaatgtgtgggtaatctgcttacctgtcagcaatacgaccaacaagatcaatacaattctcttgtactttt

SEQ ID NO: 126311 - DNA, 78 bp, Homo sapiens
atgtgtgggtaatctgcttacctgtcagcaatacgaccaacaagatcaatacaattctcttgtactttttcatgtctg

SEQ ID NO: 126312 - DNA, 76 bp, Homo sapiens
aatctgcttacctgtcagcaatacgaccaacaagatcaatacaattctcttgtactttttcatgtctgttctttaa

SEQ ID NO: 126313 - DNA, 76 bp, Homo sapiens
ctgtcagcaatacgaccaacaagatcaatacaattctcttgtactttttcatgtctgttctttaagatgggggtga

SEQ ID NO: 126314 - DNA, 73 bp, Homo sapiens
atacgaccaacaagatcaatacaattctcttgtactttttcatgtctgttctttaagatgggggtgagtctag

SEQ ID NO: 126315 - DNA, 75 bp, Homo sapiens
atcaatacaattctcttgtactttttcatgtctgttctttaagatgggggtgagtctaggcagcagatctttaat

SEQ ID NO: 126316 - DNA, 74 bp, Homo sapiens
acaattctcttgtactttttcatgtctgttctttaagatgggggtgagtctaggcagcagatctttaattggtg

SEQ ID NO: 126317 - DNA, 79 bp, Homo sapiens
tactttttcatgtctgttctttaagatgggggtgagtctaggcagcagatctttaattggtggagtcatcttatgcata

SEQ ID NO: 126318 - DNA, 77 bp, Homo sapiens
ctgttctttaagatgggggtgagtctaggcagcagatctttaattggtggagtcatcttatgcatacctatttaata

SEQ ID NO: 126319 - DNA, 78 bp, Homo sapiens
tttaagatgggggtgagtctaggcagcagatctttaattggtggagtcatcttatgcatacctatttaatagaagtca

SEQ ID NO: 126320 - DNA, 79 bp, Homo sapiens
ggtgagtctaggcagcagatctttaattggtggagtcatcttatgcatacctatttaatagaagtcaataaactatcaa

SEQ ID NO: 126321 - DNA, 71 bp, Homo sapiens
gaaagttaaaacaagaaaaagtcttatgtaaccagcaaattccatacctatgacatttacaatggccttca

SEQ ID NO: 126322 - DNA, 74 bp, Homo sapiens
aacaagaaaaagtcttatgtaaccagcaaattccatacctatgacatttacaatggccttcagtgctccaagaa

SEQ ID NO: 126323 - DNA, 78 bp, Homo sapiens
aaagtcttatgtaaccagcaaattccatacctatgacatttacaatggccttcagtgctccaagaatgctgcccaata

SEQ ID NO: 126324 - DNA, 79 bp, Homo sapiens
tgtaaccagcaaattccatacctatgacatttacaatggccttcagtgctccaagaatgctgcccaatacttcagggta

SEQ ID NO: 126325 - DNA, 77 bp, Homo sapiens
aaattccatacctatgacatttacaatggccttcagtgctccaagaatgctgcccaatacttcagggtactcttcac

SEQ ID NO: 126326 - DNA, 80 bp, Homo sapiens
tatgacatttacaatggccttcagtgctccaagaatgctgcccaatacttcagggtactcttcacccaaatactcataca

SEQ ID NO: 126327 - DNA, 78 bp, Homo sapiens
ttacaatggccttcagtgctccaagaatgctgcccaatacttcagggtactcttcacccaaatactcatacaatacaa

SEQ ID NO: 126328 - DNA, 76 bp, Homo sapiens
agtgctccaagaatgctgcccaatacttcagggtactcttcacccaaatactcatacaatacaacacccaagtgtc

SEQ ID NO: 126329 - DNA, 74 bp, Homo sapiens
aatgctgcccaatacttcagggtactcttcacccaaatactcatacaatacaacacccaagtgtcccatcaatt

SEQ ID NO: 126330 - DNA, 71 bp, Homo sapiens
aatacttcagggtactcttcacccaaatactcatacaatacaacacccaagtgtcccatcaatttttccta

SEQ ID NO: 126331 - DNA, 72 bp, Homo sapiens
ttcagggtactcttcacccaaatactcatacaatacaacacccaagtgtcccatcaatttttcctataataa

SEQ ID NO: 126332 - DNA, 71 bp, Homo sapiens
tcttcacccaaatactcatacaatacaacacccaagtgtcccatcaatttttcctataataaaacaaataa

SEQ ID NO: 126333 - DNA, 70 bp, Homo sapiens
atactcatacaatacaacacccaagtgtcccatcaatttttcctataataaaacaaataatgttaaaatg

SEQ ID NO: 126334 - DNA, 72 bp, Homo sapiens
cattaaactatttggggaagaagtaagaatttgatgcaaaagtttacctcttgacaagtcttcatgacaaca

SEQ ID NO: 126335 - DNA, 74 bp, Homo sapiens
ttggggaagaagtaagaatttgatgcaaaagtttacctcttgacaagtcttcatgacaacagcagttcgagaaa

SEQ ID NO: 126336 - DNA, 76 bp, Homo sapiens
aagaagtaagaatttgatgcaaaagtttacctcttgacaagtcttcatgacaacagcagttcgagaaatcaagtca

SEQ ID NO: 126337 - DNA, 80 bp, Homo sapiens
tttgatgcaaaagtttacctcttgacaagtcttcatgacaacagcagttcgagaaatcaagtcagctgcctgttgcctaa

SEQ ID NO: 126338 - DNA, 76 bp, Homo sapiens
aaagtttacctcttgacaagtcttcatgacaacagcagttcgagaaatcaagtcagctgcctgttgcctaacttta

SEQ ID NO: 126339 - DNA, 80 bp, Homo sapiens
ttgacaagtcttcatgacaacagcagttcgagaaatcaagtcagctgcctgttgcctaactttagcagatttgttattta

SEQ ID NO: 126340 - DNA, 77 bp, Homo sapiens
agtcttcatgacaacagcagttcgagaaatcaagtcagctgcctgttgcctaactttagcagatttgttatttaaac

SEQ ID NO: 126341 - DNA, 74 bp, Homo sapiens
aacagcagttcgagaaatcaagtcagctgcctgttgcctaactttagcagatttgttatttaaacgccacaaaa

SEQ ID NO: 126342 - DNA, 74 bp, Homo sapiens
ttcgagaaatcaagtcagctgcctgttgcctaactttagcagatttgttatttaaacgccacaaaactgtacca

SEQ ID NO: 126343 - DNA, 77 bp, Homo sapiens
tcagctgcctgttgcctaactttagcagatttgttatttaaacgccacaaaactgtaccacagatctgaggcaagta

SEQ ID NO: 126344 - DNA, 74 bp, Homo sapiens
ttgcctaactttagcagatttgttatttaaacgccacaaaactgtaccacagatctgaggcaagtatggtttga

SEQ ID NO: 126345 - DNA, 73 bp, Homo sapiens
taactttagcagatttgttatttaaacgccacaaaactgtaccacagatctgaggcaagtatggtttgactcg

SEQ ID NO: 126346 - DNA, 74 bp, Homo sapiens
tttgttatttaaacgccacaaaactgtaccacagatctgaggcaagtatggtttgactcgtttgccaagagcat

SEQ ID NO: 126347 - DNA, 74 bp, Homo sapiens
tttaaacgccacaaaactgtaccacagatctgaggcaagtatggtttgactcgtttgccaagagcattaaccac

SEQ ID NO: 126348 - DNA, 75 bp, Homo sapiens
aaactgtaccacagatctgaggcaagtatggtttgactcgtttgccaagagcattaaccactgtgccaaagccgt

SEQ ID NO: 126349 - DNA, 78 bp, Homo sapiens
acagatctgaggcaagtatggtttgactcgtttgccaagagcattaaccactgtgccaaagccgttcaacattactga

SEQ ID NO: 126350 - DNA, 74 bp, Homo sapiens
caagtatggtttgactcgtttgccaagagcattaaccactgtgccaaagccgttcaacattactgagtcctaaa

SEQ ID NO: 126351 - DNA, 72 bp, Homo sapiens
tttgactcgtttgccaagagcattaaccactgtgccaaagccgttcaacattactgagtcctaaaaaataaa

SEQ ID NO: 126352 - DNA, 71 bp, Homo sapiens
tcgtttgccaagagcattaaccactgtgccaaagccgttcaacattactgagtcctaaaaaataaatttaa

SEQ ID NO: 126353 - DNA, 75 bp, Homo sapiens
ctacaaatattaaagttagtagcaatgtgccataatagttttcattacctctgtagtctgttcttggaaagcata

SEQ ID NO: 126354 - DNA, 76 bp, Homo sapiens
aagttagtagcaatgtgccataatagttttcattacctctgtagtctgttcttggaaagcataaagaataccatca

SEQ ID NO: 126355 - DNA, 78 bp, Homo sapiens
tagcaatgtgccataatagttttcattacctctgtagtctgttcttggaaagcataaagaataccatcaatcagttgt

SEQ ID NO: 126356 - DNA, 76 bp, Homo sapiens
gccataatagttttcattacctctgtagtctgttcttggaaagcataaagaataccatcaatcagttgttcttcaa

SEQ ID NO: 126357 - DNA, 78 bp, Homo sapiens
cattacctctgtagtctgttcttggaaagcataaagaataccatcaatcagttgttcttcaagtttatgatcaatatc

SEQ ID NO: 126358 - DNA, 81 bp, Homo sapiens
tgtagtctgttcttggaaagcataaagaataccatcaatcagttgttcttcaagtttatgatcaatatctgctgctcccaa

SEQ ID NO: 126359 - DNA, 79 bp, Homo sapiens
ctgttcttggaaagcataaagaataccatcaatcagttgttcttcaagtttatgatcaatatctgctgctcccaaatta

SEQ ID NO: 126360 - DNA, 78 bp, Homo sapiens
gcataaagaataccatcaatcagttgttcttcaagtttatgatcaatatctgctgctcccaaattacccataattttc

SEQ ID NO: 126361 - DNA, 78 bp, Homo sapiens
gaataccatcaatcagttgttcttcaagtttatgatcaatatctgctgctcccaaattacccataattttctcaattg

SEQ ID NO: 126362 - DNA, 78 bp, Homo sapiens
aatcagttgttcttcaagtttatgatcaatatctgctgctcccaaattacccataattttctcaattgtctccatcac

SEQ ID NO: 126363 - DNA, 76 bp, Homo sapiens
aagtttatgatcaatatctgctgctcccaaattacccataattttctcaattgtctccatcaccatttttctgtac

SEQ ID NO: 126364 - DNA, 76 bp, Homo sapiens
atcaatatctgctgctcccaaattacccataattttctcaattgtctccatcaccatttttctgtactgttcggct

SEQ ID NO: 126365 - DNA, 75 bp, Homo sapiens
ctgctcccaaattacccataattttctcaattgtctccatcaccatttttctgtactgttcggcttcatctttca

SEQ ID NO: 126366 - DNA, 76 bp, Homo sapiens
aaattacccataattttctcaattgtctccatcaccatttttctgtactgttcggcttcatctttcagatcatcca

SEQ ID NO: 126367 - DNA, 79 bp, Homo sapiens
attttctcaattgtctccatcaccatttttctgtactgttcggcttcatctttcagatcatccacaatcctggatataa

SEQ ID NO: 126368 - DNA, 81 bp, Homo sapiens
ctcaattgtctccatcaccatttttctgtactgttcggcttcatctttcagatcatccacaatcctggatataatttctgc

SEQ ID NO: 126369 - DNA, 79 bp, Homo sapiens
atcaccatttttctgtactgttcggcttcatctttcagatcatccacaatcctggatataatttctgctgcacctactt

SEQ ID NO: 126370 - DNA, 79 bp, Homo sapiens
tttttctgtactgttcggcttcatctttcagatcatccacaatcctggatataatttctgctgcacctactttgtttgc

SEQ ID NO: 126371 - DNA, 81 bp, Homo sapiens
tgttcggcttcatctttcagatcatccacaatcctggatataatttctgctgcacctactttgtttgccaactccacagta

SEQ ID NO: 126372 - DNA, 80 bp, Homo sapiens
tctttcagatcatccacaatcctggatataatttctgctgcacctactttgtttgccaactccacagtagtatcaactaa

SEQ ID NO: 126373 - DNA, 75 bp, Homo sapiens
atccacaatcctggatataatttctgctgcacctactttgtttgccaactccacagtagtatcaactaactaaaa

SEQ ID NO: 126374 - DNA, 73 bp, Homo sapiens
aatcctggatataatttctgctgcacctactttgtttgccaactccacagtagtatcaactaactaaaaagaa

SEQ ID NO: 126375 - DNA, 71 bp, Homo sapiens
ataatttctgctgcacctactttgtttgccaactccacagtagtatcaactaactaaaaagaacagaaaaa

SEQ ID NO: 126376 - DNA, 68 bp, Homo sapiens
ctgcacctactttgtttgccaactccacagtagtatcaactaactaaaaagaacagaaaaacaaaaaa

SEQ ID NO: 126377 - DNA, 69 bp, Homo sapiens
gagttgaaaggacttttgagaatattcttttacaataaaagcttacctgtcggtaatttcttctatcca

SEQ ID NO: 126378 - DNA, 69 bp, Homo sapiens
ggacttttgagaatattcttttacaataaaagcttacctgtcggtaatttcttctatccaaagccatcc

SEQ ID NO: 126379 - DNA, 72 bp, Homo sapiens
aatattcttttacaataaaagcttacctgtcggtaatttcttctatccaaagccatcctgtgctgccagaag

SEQ ID NO: 126380 - DNA, 72 bp, Homo sapiens
tttacaataaaagcttacctgtcggtaatttcttctatccaaagccatcctgtgctgccagaagtgtttaaa

SEQ ID NO: 126381 - DNA, 70 bp, Homo sapiens
taaaagcttacctgtcggtaatttcttctatccaaagccatcctgtgctgccagaagtgtttaaaaaagg

SEQ ID NO: 126382 - DNA, 72 bp, Homo sapiens
tcggtaatttcttctatccaaagccatcctgtgctgccagaagtgtttaaaaaagggaggaagaatctctgt

SEQ ID NO: 126383 - DNA, 71 bp, Homo sapiens
atttcttctatccaaagccatcctgtgctgccagaagtgtttaaaaaagggaggaagaatctctgttttaa

SEQ ID NO: 126384 - DNA, 72 bp, Homo sapiens
aagccatcctgtgctgccagaagtgtttaaaaaagggaggaagaatctctgttttaatgtagtttgcttcta

SEQ ID NO: 126385 - DNA, 74 bp, Homo sapiens
tgtgctgccagaagtgtttaaaaaagggaggaagaatctctgttttaatgtagtttgcttctacaccatctgtc

SEQ ID NO: 126386 - DNA, 69 bp, Homo sapiens
aagtgtttaaaaaagggaggaagaatctctgttttaatgtagtttgcttctacaccatctgtcccacaa

SEQ ID NO: 126387 - DNA, 70 bp, Homo sapiens
aaaaagggaggaagaatctctgttttaatgtagtttgcttctacaccatctgtcccacaacactgtttta

SEQ ID NO: 126388 - DNA, 70 bp, Homo sapiens
aagaatctctgttttaatgtagtttgcttctacaccatctgtcccacaacactgttttaccacctaaaag

SEQ ID NO: 126389 - DNA, 68 bp, Homo sapiens
gttttaatgtagtttgcttctacaccatctgtcccacaacactgttttaccacctaaaaggttaagaa

SEQ ID NO: 126390 - DNA, 69 bp, Homo sapiens
atgtagtttgcttctacaccatctgtcccacaacactgttttaccacctaaaaggttaagaaatagtaa

SEQ ID NO: 126391 - DNA, 69 bp, Homo sapiens
cttctacaccatctgtcccacaacactgttttaccacctaaaaggttaagaaatagtaataataaatca

SEQ ID NO: 126392 - DNA, 72 bp, Homo sapiens
ttagaaccatgaaacatatccagtttacattaacaaatctggaataattaccttcagcacaatttttttcat

SEQ ID NO: 126393 - DNA, 74 bp, Homo sapiens
catatccagtttacattaacaaatctggaataattaccttcagcacaatttttttcatttcctcatcaggagac

SEQ ID NO: 126394 - DNA, 75 bp, Homo sapiens
tacattaacaaatctggaataattaccttcagcacaatttttttcatttcctcatcaggagactggaattctcga

SEQ ID NO: 126395 - DNA, 74 bp, Homo sapiens
caaatctggaataattaccttcagcacaatttttttcatttcctcatcaggagactggaattctcgaataagga

SEQ ID NO: 126396 - DNA, 73 bp, Homo sapiens
aattaccttcagcacaatttttttcatttcctcatcaggagactggaattctcgaataaggattaacatcact

SEQ ID NO: 126397 - DNA, 75 bp, Homo sapiens
agcacaatttttttcatttcctcatcaggagactggaattctcgaataaggattaacatcacttctctagtatag

SEQ ID NO: 126398 - DNA, 77 bp, Homo sapiens
ttttcatttcctcatcaggagactggaattctcgaataaggattaacatcacttctctagtatagtagttggcatat

SEQ ID NO: 126399 - DNA, 80 bp, Homo sapiens
atttcctcatcaggagactggaattctcgaataaggattaacatcacttctctagtatagtagttggcatattctgcatc

SEQ ID NO: 126400 - DNA, 79 bp, Homo sapiens
agactggaattctcgaataaggattaacatcacttctctagtatagtagttggcatattctgcatccataagaggaata

SEQ ID NO: 126401 - DNA, 78 bp, Homo sapiens
aattctcgaataaggattaacatcacttctctagtatagtagttggcatattctgcatccataagaggaataagatac

SEQ ID NO: 126402 - DNA, 78 bp, Homo sapiens
taaggattaacatcacttctctagtatagtagttggcatattctgcatccataagaggaataagatacccaatagcct

SEQ ID NO: 126403 - DNA, 80 bp, Homo sapiens
acatcacttctctagtatagtagttggcatattctgcatccataagaggaataagatacccaatagccttcaagaaagca

SEQ ID NO: 126404 - DNA, 77 bp, Homo sapiens
tatagtagttggcatattctgcatccataagaggaataagatacccaatagccttcaagaaagcagccaaaccctat

SEQ ID NO: 126405 - DNA, 75 bp, Homo sapiens
ttggcatattctgcatccataagaggaataagatacccaatagccttcaagaaagcagccaaaccctatttttaa

SEQ ID NO: 126406 - DNA, 72 bp, Homo sapiens
attctgcatccataagaggaataagatacccaatagccttcaagaaagcagccaaaccctatttttaaataa

SEQ ID NO: 126407 - DNA, 68 bp, Homo sapiens
cataagaggaataagatacccaatagccttcaagaaagcagccaaaccctatttttaaataaaaaata

SEQ ID NO: 126408 - DNA, 69 bp, Homo sapiens
gccttaactttaatgaagataaatcaaaaggtaattggtggatttacctttcctctgtgttggcggata

SEQ ID NO: 126409 - DNA, 70 bp, Homo sapiens
taatgaagataaatcaaaaggtaattggtggatttacctttcctctgtgttggcggatacccttccataa

SEQ ID NO: 126410 - DNA, 67 bp, Homo sapiens
aatcaaaaggtaattggtggatttacctttcctctgtgttggcggatacccttccataaaggcttta

SEQ ID NO: 126411 - DNA, 70 bp, Homo sapiens
taattggtggatttacctttcctctgtgttggcggatacccttccataaaggctttaacacagaatcaaa

SEQ ID NO: 126412 - DNA, 70 bp, Homo sapiens
atttacctttcctctgtgttggcggatacccttccataaaggctttaacacagaatcaaaagattcgata

SEQ ID NO: 126413 - DNA, 72 bp, Homo sapiens
tcctctgtgttggcggatacccttccataaaggctttaacacagaatcaaaagattcgataccataaggagt

SEQ ID NO: 126414 - DNA, 75 bp, Homo sapiens
tgttggcggatacccttccataaaggctttaacacagaatcaaaagattcgataccataaggagttgctgcttca

SEQ ID NO: 126415 - DNA, 75 bp, Homo sapiens
atacccttccataaaggctttaacacagaatcaaaagattcgataccataaggagttgctgcttcagccaaggca

SEQ ID NO: 126416 - DNA, 77 bp, Homo sapiens
ataaaggctttaacacagaatcaaaagattcgataccataaggagttgctgcttcagccaaggcagcaatggccaaa

SEQ ID NO: 126417 - DNA, 80 bp, Homo sapiens
cagaatcaaaagattcgataccataaggagttgctgcttcagccaaggcagcaatggccaaagcactgatggtccgaact

SEQ ID NO: 126418 - DNA, 79 bp, Homo sapiens
aaaagattcgataccataaggagttgctgcttcagccaaggcagcaatggccaaagcactgatggtccgaactttctgc

SEQ ID NO: 126419 - DNA, 84 bp, Homo sapiens
ataccataaggagttgctgcttcagccaaggcagcaatggccaaagcactgatggtccgaactttctgctgctcatccacaaga

SEQ ID NO: 126420 - DNA, 82 bp, Homo sapiens
agttgctgcttcagccaaggcagcaatggccaaagcactgatggtccgaactttctgctgctcatccacaagacctacaaaa

SEQ ID NO: 126421 - DNA, 79 bp, Homo sapiens
cttcagccaaggcagcaatggccaaagcactgatggtccgaactttctgctgctcatccacaagacctacaaaaccaaa

SEQ ID NO: 126422 - DNA, 75 bp, Homo sapiens
agcaatggccaaagcactgatggtccgaactttctgctgctcatccacaagacctacaaaaccaaacacaggttt

SEQ ID NO: 126423 - DNA, 74 bp, Homo sapiens
aaagcactgatggtccgaactttctgctgctcatccacaagacctacaaaaccaaacacaggttttaactatgc

SEQ ID NO: 126424 - DNA, 70 bp, Homo sapiens
aaaaaaaagacaaagttacattacaacttaccatgttcaatgatttcaactaaacttctaagatgtggca

SEQ ID NO: 126425 - DNA, 75 bp, Homo sapiens
aaagacaaagttacattacaacttaccatgttcaatgatttcaactaaacttctaagatgtggcaagatggcaca

SEQ ID NO: 126426 - DNA, 81 bp, Homo sapiens
ttaccatgttcaatgatttcaactaaacttctaagatgtggcaagatggcacagcccataagaatagctatctgttgtaca

SEQ ID NO: 126427 - DNA, 79 bp, Homo sapiens
aatgatttcaactaaacttctaagatgtggcaagatggcacagcccataagaatagctatctgttgtacaatcttaata

SEQ ID NO: 126428 - DNA, 78 bp, Homo sapiens
aactaaacttctaagatgtggcaagatggcacagcccataagaatagctatctgttgtacaatcttaataccagtgtg

SEQ ID NO: 126429 - DNA, 83 bp, Homo sapiens
ttctaagatgtggcaagatggcacagcccataagaatagctatctgttgtacaatcttaataccagtgtgtctcgcttgccag

SEQ ID NO: 126430 - DNA, 80 bp, Homo sapiens
agatggcacagcccataagaatagctatctgttgtacaatcttaataccagtgtgtctcgcttgccaggacttcttgctt

SEQ ID NO: 126431 - DNA, 80 bp, Homo sapiens
agcccataagaatagctatctgttgtacaatcttaataccagtgtgtctcgcttgccaggacttcttgcttttgcacaca

SEQ ID NO: 126432 - DNA, 78 bp, Homo sapiens
aatagctatctgttgtacaatcttaataccagtgtgtctcgcttgccaggacttcttgcttttgcacacagcttttaa

SEQ ID NO: 126433 - DNA, 77 bp, Homo sapiens
tatctgttgtacaatcttaataccagtgtgtctcgcttgccaggacttcttgcttttgcacacagcttttaagaagg

SEQ ID NO: 126434 - DNA, 75 bp, Homo sapiens
acaatcttaataccagtgtgtctcgcttgccaggacttcttgcttttgcacacagcttttaagaagggcaataaa

SEQ ID NO: 126435 - DNA, 76 bp, Homo sapiens
taccagtgtgtctcgcttgccaggacttcttgcttttgcacacagcttttaagaagggcaataaagaaggaatgcc

SEQ ID NO: 126436 - DNA, 76 bp, Homo sapiens
tctcgcttgccaggacttcttgcttttgcacacagcttttaagaagggcaataaagaaggaatgcccagggcagag

SEQ ID NO: 126437 - DNA, 75 bp, Homo sapiens
cttcttgcttttgcacacagcttttaagaagggcaataaagaaggaatgcccagggcagaggctacaacagcaaa

SEQ ID NO: 126438 - DNA, 75 bp, Homo sapiens
cttttgcacacagcttttaagaagggcaataaagaaggaatgcccagggcagaggctacaacagcaaaagctcta

SEQ ID NO: 126439 - DNA, 74 bp, Homo sapiens
cttttaagaagggcaataaagaaggaatgcccagggcagaggctacaacagcaaaagctctagctgttgtgtta

SEQ ID NO: 126440 - DNA, 76 bp, Homo sapiens
agaagggcaataaagaaggaatgcccagggcagaggctacaacagcaaaagctctagctgttgtgttacggacata

SEQ ID NO: 126441 - DNA, 79 bp, Homo sapiens
taaagaaggaatgcccagggcagaggctacaacagcaaaagctctagctgttgtgttacggacatactcatccatgtta

SEQ ID NO: 126442 - DNA, 83 bp, Homo sapiens
ccagggcagaggctacaacagcaaaagctctagctgttgtgttacggacatactcatccatgttatctatatcaggtctcatg

SEQ ID NO: 126443 - DNA, 85 bp, Homo sapiens
ggctacaacagcaaaagctctagctgttgtgttacggacatactcatccatgttatctatatcaggtctcatggtagagatcata

SEQ ID NO: 126444 - DNA, 84 bp, Homo sapiens
aacagcaaaagctctagctgttgtgttacggacatactcatccatgttatctatatcaggtctcatggtagagatcatagtagc

SEQ ID NO: 126445 - DNA, 86 bp, Homo sapiens
tagctgttgtgttacggacatactcatccatgttatctatatcaggtctcatggtagagatcatagtagccagaccagcagcctaa

SEQ ID NO: 126446 - DNA, 84 bp, Homo sapiens
tgttacggacatactcatccatgttatctatatcaggtctcatggtagagatcatagtagccagaccagcagcctaaaatgtaa

SEQ ID NO: 126447 - DNA, 83 bp, Homo sapiens
ggacatactcatccatgttatctatatcaggtctcatggtagagatcatagtagccagaccagcagcctaaaatgtaaacaaa

SEQ ID NO: 126448 - DNA, 80 bp, Homo sapiens
atccatgttatctatatcaggtctcatggtagagatcatagtagccagaccagcagcctaaaatgtaaacaaagaaagga

SEQ ID NO: 126449 - DNA, 81 bp, Homo sapiens
tctatatcaggtctcatggtagagatcatagtagccagaccagcagcctaaaatgtaaacaaagaaaggacagtcatgagt

SEQ ID NO: 126450 - DNA, 71 bp, Homo sapiens
taatcaattccataaacagatataaattttcttctctagaaattaaatgtaaatacctttgccaaattaga

SEQ ID NO: 126451 - DNA, 70 bp, Homo sapiens
aaacagatataaattttcttctctagaaattaaatgtaaatacctttgccaaattagaaatgatctctcg

SEQ ID NO: 126452 - DNA, 69 bp, Homo sapiens
aaattttcttctctagaaattaaatgtaaatacctttgccaaattagaaatgatctctcggccttccac

SEQ ID NO: 126453 - DNA, 75 bp, Homo sapiens
tctctagaaattaaatgtaaatacctttgccaaattagaaatgatctctcggccttccactctagcatagtaatc

SEQ ID NO: 126454 - DNA, 78 bp, Homo sapiens
taaatgtaaatacctttgccaaattagaaatgatctctcggccttccactctagcatagtaatcttcatcaatcaata

SEQ ID NO: 126455 - DNA, 77 bp, Homo sapiens
taaatacctttgccaaattagaaatgatctctcggccttccactctagcatagtaatcttcatcaatcaatagcggt

SEQ ID NO: 126456 - DNA, 79 bp, Homo sapiens
aaattagaaatgatctctcggccttccactctagcatagtaatcttcatcaatcaatagcggttcaatgaccacgagga

SEQ ID NO: 126457 - DNA, 80 bp, Homo sapiens
aaatgatctctcggccttccactctagcatagtaatcttcatcaatcaatagcggttcaatgaccacgaggatctgaaaa

SEQ ID NO: 126458 - DNA, 79 bp, Homo sapiens
tctcggccttccactctagcatagtaatcttcatcaatcaatagcggttcaatgaccacgaggatctgaaaaagagaaa

SEQ ID NO: 126459 - DNA, 80 bp, Homo sapiens
tctagcatagtaatcttcatcaatcaatagcggttcaatgaccacgaggatctgaaaaagagaaaagagaagaagctaca

SEQ ID NO: 126460 - DNA, 76 bp, Homo sapiens
atagtaatcttcatcaatcaatagcggttcaatgaccacgaggatctgaaaaagagaaaagagaagaagctacact

SEQ ID NO: 126461 - DNA, 77 bp, Homo sapiens
atcaatcaatagcggttcaatgaccacgaggatctgaaaaagagaaaagagaagaagctacactttcacatcaatta

SEQ ID NO: 126462 - DNA, 69 bp, Homo sapiens
aagttaaaactttaaactatcagaaacactattaaggagaacaaaccttatgcacatatggacgaacta

SEQ ID NO: 126463 - DNA, 72 bp, Homo sapiens
ctttaaactatcagaaacactattaaggagaacaaaccttatgcacatatggacgaactaagtcatcaagtt

SEQ ID NO: 126464 - DNA, 75 bp, Homo sapiens
actatcagaaacactattaaggagaacaaaccttatgcacatatggacgaactaagtcatcaagtttgtacagta

SEQ ID NO: 126465 - DNA, 76 bp, Homo sapiens
acactattaaggagaacaaaccttatgcacatatggacgaactaagtcatcaagtttgtacagtatcctatcaata

SEQ ID NO: 126466 - DNA, 75 bp, Homo sapiens
agaacaaaccttatgcacatatggacgaactaagtcatcaagtttgtacagtatcctatcaataactttcacaag

SEQ ID NO: 126467 - DNA, 78 bp, Homo sapiens
ttatgcacatatggacgaactaagtcatcaagtttgtacagtatcctatcaataactttcacaagtaaatgacgctct

SEQ ID NO: 126468 - DNA, 76 bp, Homo sapiens
atatggacgaactaagtcatcaagtttgtacagtatcctatcaataactttcacaagtaaatgacgctcttgatcc

SEQ ID NO: 126469 - DNA, 76 bp, Homo sapiens
actaagtcatcaagtttgtacagtatcctatcaataactttcacaagtaaatgacgctcttgatcctcaagtgtag

SEQ ID NO: 126470 - DNA, 79 bp, Homo sapiens
aagtttgtacagtatcctatcaataactttcacaagtaaatgacgctcttgatcctcaagtgtaggagacatcagcaga

SEQ ID NO: 126471 - DNA, 82 bp, Homo sapiens
tatcctatcaataactttcacaagtaaatgacgctcttgatcctcaagtgtaggagacatcagcagaggaagaatctgatta

SEQ ID NO: 126472 - DNA, 78 bp, Homo sapiens
aataactttcacaagtaaatgacgctcttgatcctcaagtgtaggagacatcagcagaggaagaatctgattaaacaa

SEQ ID NO: 126473 - DNA, 79 bp, Homo sapiens
acaagtaaatgacgctcttgatcctcaagtgtaggagacatcagcagaggaagaatctgattaaacaaaggaccagctc

SEQ ID NO: 126474 - DNA, 80 bp, Homo sapiens
atgacgctcttgatcctcaagtgtaggagacatcagcagaggaagaatctgattaaacaaaggaccagctccaaattcac

SEQ ID NO: 126475 - DNA, 79 bp, Homo sapiens
ctcaagtgtaggagacatcagcagaggaagaatctgattaaacaaaggaccagctccaaattcacgagctttatcagta

SEQ ID NO: 126476 - DNA, 80 bp, Homo sapiens
gtgtaggagacatcagcagaggaagaatctgattaaacaaaggaccagctccaaattcacgagctttatcagtaatctga

SEQ ID NO: 126477 - DNA, 80 bp, Homo sapiens
agcagaggaagaatctgattaaacaaaggaccagctccaaattcacgagctttatcagtaatctgacgcaatgcagcctg

SEQ ID NO: 126478 - DNA, 76 bp, Homo sapiens
aatctgattaaacaaaggaccagctccaaattcacgagctttatcagtaatctgacgcaatgcagcctgggaaaaa

SEQ ID NO: 126479 - DNA, 77 bp, Homo sapiens
attaaacaaaggaccagctccaaattcacgagctttatcagtaatctgacgcaatgcagcctgggaaaaagagcaga

SEQ ID NO: 126480 - DNA, 78 bp, Homo sapiens
cagctccaaattcacgagctttatcagtaatctgacgcaatgcagcctgggaaaaagagcagagtaataggtgtggtt

SEQ ID NO: 126481 - DNA, 76 bp, Homo sapiens
aattcacgagctttatcagtaatctgacgcaatgcagcctgggaaaaagagcagagtaataggtgtggtttcttta

SEQ ID NO: 126482 - DNA, 69 bp, Homo sapiens
aaataaataagcaacaaacatgacaatttaacaaactgggacttacctttctcattggtggtgttccat

SEQ ID NO: 126483 - DNA, 69 bp, Homo sapiens
aagcaacaaacatgacaatttaacaaactgggacttacctttctcattggtggtgttccattcttaatt

SEQ ID NO: 126484 - DNA, 67 bp, Homo sapiens
aaacatgacaatttaacaaactgggacttacctttctcattggtggtgttccattcttaatttttaa

SEQ ID NO: 126485 - DNA, 67 bp, Homo sapiens
tttaacaaactgggacttacctttctcattggtggtgttccattcttaatttttaaaagcaacttca

SEQ ID NO: 126486 - DNA, 67 bp, Homo sapiens
ctgggacttacctttctcattggtggtgttccattcttaatttttaaaagcaacttcattatttttc

SEQ ID NO: 126487 - DNA, 73 bp, Homo sapiens
tttttaaaagcaacttcattatttttctctctttttgctcttctggactaagtgttgattcatcaacatcaac

SEQ ID NO: 126488 - DNA, 75 bp, Homo sapiens
gcaacttcattatttttctctctttttgctcttctggactaagtgttgattcatcaacatcaacctatagtaaaa

SEQ ID NO: 126489 - DNA, 71 bp, Homo sapiens
atttttctctctttttgctcttctggactaagtgttgattcatcaacatcaacctatagtaaaaagaaaaa

SEQ ID NO: 126490 - DNA, 74 bp, Homo sapiens
aattctggaacacaattaatagtttatttctgctagtatcacttaccaatagtttatcaaagtattgaatatca

SEQ ID NO: 126491 - DNA, 75 bp, Homo sapiens
tggaacacaattaatagtttatttctgctagtatcacttaccaatagtttatcaaagtattgaatatcatcaggt

SEQ ID NO: 126492 - DNA, 72 bp, Homo sapiens
agtttatttctgctagtatcacttaccaatagtttatcaaagtattgaatatcatcaggttttaaaaatgga

SEQ ID NO: 126493 - DNA, 74 bp, Homo sapiens
ctgctagtatcacttaccaatagtttatcaaagtattgaatatcatcaggttttaaaaatggaagatttccaga

SEQ ID NO: 126494 - DNA, 74 bp, Homo sapiens
cacttaccaatagtttatcaaagtattgaatatcatcaggttttaaaaatggaagatttccagatggctggtca

SEQ ID NO: 126495 - DNA, 74 bp, Homo sapiens
caatagtttatcaaagtattgaatatcatcaggttttaaaaatggaagatttccagatggctggtcattaacac

SEQ ID NO: 126496 - DNA, 74 bp, Homo sapiens
agtattgaatatcatcaggttttaaaaatggaagatttccagatggctggtcattaacacttttcatagttcga

SEQ ID NO: 126497 - DNA, 76 bp, Homo sapiens
tgaatatcatcaggttttaaaaatggaagatttccagatggctggtcattaacacttttcatagttcgatcttcag

SEQ ID NO: 126498 - DNA, 75 bp, Homo sapiens
tttaaaaatggaagatttccagatggctggtcattaacacttttcatagttcgatcttcagtttgcatgtggaaa

SEQ ID NO: 126499 - DNA, 78 bp, Homo sapiens
aatggaagatttccagatggctggtcattaacacttttcatagttcgatcttcagtttgcatgtggaaaccagtcata

SEQ ID NO: 126500 - DNA, 77 bp, Homo sapiens
ttccagatggctggtcattaacacttttcatagttcgatcttcagtttgcatgtggaaaccagtcataccacccaaa

SEQ ID NO: 126501 - DNA, 75 bp, Homo sapiens
tcattaacacttttcatagttcgatcttcagtttgcatgtggaaaccagtcataccacccaaaggtgttggagta

SEQ ID NO: 126502 - DNA, 74 bp, Homo sapiens
aacacttttcatagttcgatcttcagtttgcatgtggaaaccagtcataccacccaaaggtgttggagtagctg

SEQ ID NO: 126503 - DNA, 77 bp, Homo sapiens
atagttcgatcttcagtttgcatgtggaaaccagtcataccacccaaaggtgttggagtagctgtcagctttcgagc

SEQ ID NO: 126504 - DNA, 76 bp, Homo sapiens
agtttgcatgtggaaaccagtcataccacccaaaggtgttggagtagctgtcagctttcgagctggagttcgaata

SEQ ID NO: 126505 - DNA, 75 bp, Homo sapiens
tggaaaccagtcataccacccaaaggtgttggagtagctgtcagctttcgagctggagttcgaataggaacataa

SEQ ID NO: 126506 - DNA, 76 bp, Homo sapiens
agtcataccacccaaaggtgttggagtagctgtcagctttcgagctggagttcgaataggaacataaccagctgga

SEQ ID NO: 126507 - DNA, 74 bp, Homo sapiens
acccaaaggtgttggagtagctgtcagctttcgagctggagttcgaataggaacataaccagctggaggaggaa

SEQ ID NO: 126508 - DNA, 75 bp, Homo sapiens
ttggagtagctgtcagctttcgagctggagttcgaataggaacataaccagctggaggaggaagtacctaataaa

SEQ ID NO: 126509 - DNA, 73 bp, Homo sapiens
tgtcagctttcgagctggagttcgaataggaacataaccagctggaggaggaagtacctaataaaagttataa

SEQ ID NO: 126510 - DNA, 70 bp, Homo sapiens
agctggagttcgaataggaacataaccagctggaggaggaagtacctaataaaagttataagacagttta

SEQ ID NO: 126511 - DNA, 68 bp, Homo sapiens
agttcgaataggaacataaccagctggaggaggaagtacctaataaaagttataagacagtttaggat

SEQ ID NO: 126512 - DNA, 76 bp, Homo sapiens
taaatgtatatcctaaataccacctcattcaaatttgatgtactaccttatatccttctgggaacatagcatctaa

SEQ ID NO: 126513 - DNA, 76 bp, Homo sapiens
atatcctaaataccacctcattcaaatttgatgtactaccttatatccttctgggaacatagcatctaattcctca

SEQ ID NO: 126514 - DNA, 76 bp, Homo sapiens
aataccacctcattcaaatttgatgtactaccttatatccttctgggaacatagcatctaattcctcatcagaaag

SEQ ID NO: 126515 - DNA, 76 bp, Homo sapiens
attcaaatttgatgtactaccttatatccttctgggaacatagcatctaattcctcatcagaaagtgggcgatttc

SEQ ID NO: 126516 - DNA, 78 bp, Homo sapiens
atgtactaccttatatccttctgggaacatagcatctaattcctcatcagaaagtgggcgatttctctcatcaatttc

SEQ ID NO: 126517 - DNA, 77 bp, Homo sapiens
ccttatatccttctgggaacatagcatctaattcctcatcagaaagtgggcgatttctctcatcaatttctctttcc

SEQ ID NO: 126518 - DNA, 78 bp, Homo sapiens
ggaacatagcatctaattcctcatcagaaagtgggcgatttctctcatcaatttctctttcccaccgccaagcctgaa

SEQ ID NO: 126519 - DNA, 78 bp, Homo sapiens
atagcatctaattcctcatcagaaagtgggcgatttctctcatcaatttctctttcccaccgccaagcctgaagctgt

SEQ ID NO: 126520 - DNA, 80 bp, Homo sapiens
tcatcagaaagtgggcgatttctctcatcaatttctctttcccaccgccaagcctgaagctgttcaggagtcatactcat

SEQ ID NO: 126521 - DNA, 77 bp, Homo sapiens
agaaagtgggcgatttctctcatcaatttctctttcccaccgccaagcctgaagctgttcaggagtcatactcatta

SEQ ID NO: 126522 - DNA, 78 bp, Homo sapiens
atttctctcatcaatttctctttcccaccgccaagcctgaagctgttcaggagtcatactcattatgtgacctaccaa

SEQ ID NO: 126523 - DNA, 75 bp, Homo sapiens
aatttctctttcccaccgccaagcctgaagctgttcaggagtcatactcattatgtgacctaccaagaaaagcaa

SEQ ID NO: 126524 - DNA, 74 bp, Homo sapiens
tctttcccaccgccaagcctgaagctgttcaggagtcatactcattatgtgacctaccaagaaaagcaaatttt

SEQ ID NO: 126525 - DNA, 77 bp, Homo sapiens
caagcctgaagctgttcaggagtcatactcattatgtgacctaccaagaaaagcaaatttttatataatctatagta

SEQ ID NO: 126526 - DNA, 70 bp, Homo sapiens
aaataatttatggagaaaaaaacaattatgtccaatgagacagttctacctggagtaggggtagccatgt

SEQ ID NO: 126527 - DNA, 75 bp, Homo sapiens
agaaaaaaacaattatgtccaatgagacagttctacctggagtaggggtagccatgttcatggctggtgtgccaa

SEQ ID NO: 126528 - DNA, 76 bp, Homo sapiens
aaaacaattatgtccaatgagacagttctacctggagtaggggtagccatgttcatggctggtgtgccaattggtg

SEQ ID NO: 126529 - DNA, 77 bp, Homo sapiens
tgtccaatgagacagttctacctggagtaggggtagccatgttcatggctggtgtgccaattggtgtctttccaggg

SEQ ID NO: 126530 - DNA, 75 bp, Homo sapiens
agtaggggtagccatgttcatggctggtgtgccaattggtgtctttccaggggtcagaactggagtgcttccacc

SEQ ID NO: 126531 - DNA, 79 bp, Homo sapiens
ggtagccatgttcatggctggtgtgccaattggtgtctttccaggggtcagaactggagtgcttccacccatctgacta

SEQ ID NO: 126532 - DNA, 78 bp, Homo sapiens
ttcatggctggtgtgccaattggtgtctttccaggggtcagaactggagtgcttccacccatctgactagctggtgtt

SEQ ID NO: 126533 - DNA, 77 bp, Homo sapiens
gtgtgccaattggtgtctttccaggggtcagaactggagtgcttccacccatctgactagctggtgtttcatcccac

SEQ ID NO: 126534 - DNA, 75 bp, Homo sapiens
tgtctttccaggggtcagaactggagtgcttccacccatctgactagctggtgtttcatcccaccgtgattttct

SEQ ID NO: 126535 - DNA, 75 bp, Homo sapiens
gggtcagaactggagtgcttccacccatctgactagctggtgtttcatcccaccgtgattttcttttactggctc

SEQ ID NO: 126536 - DNA, 75 bp, Homo sapiens
agaactggagtgcttccacccatctgactagctggtgtttcatcccaccgtgattttcttttactggctccagga

SEQ ID NO: 126537 - DNA, 74 bp, Homo sapiens
ttccacccatctgactagctggtgtttcatcccaccgtgattttcttttactggctccaggagtcggtgtttca

SEQ ID NO: 126538 - DNA, 74 bp, Homo sapiens
atctgactagctggtgtttcatcccaccgtgattttcttttactggctccaggagtcggtgtttcaccaataga

SEQ ID NO: 126539 - DNA, 73 bp, Homo sapiens
tgtttcatcccaccgtgattttcttttactggctccaggagtcggtgtttcaccaatagaatctccacctcga

SEQ ID NO: 126540 - DNA, 72 bp, Homo sapiens
atcccaccgtgattttcttttactggctccaggagtcggtgtttcaccaatagaatctccacctcgatctgt

SEQ ID NO: 126541 - DNA, 74 bp, Homo sapiens
attttcttttactggctccaggagtcggtgtttcaccaatagaatctccacctcgatctgttcgaggagtctca

SEQ ID NO: 126542 - DNA, 77 bp, Homo sapiens
ttactggctccaggagtcggtgtttcaccaatagaatctccacctcgatctgttcgaggagtctcagcccatccact

SEQ ID NO: 126543 - DNA, 77 bp, Homo sapiens
aggagtcggtgtttcaccaatagaatctccacctcgatctgttcgaggagtctcagcccatccacttccatgcccag

SEQ ID NO: 126544 - DNA, 78 bp, Homo sapiens
ttcaccaatagaatctccacctcgatctgttcgaggagtctcagcccatccacttccatgcccaggagtatctttaaa

SEQ ID NO: 126545 - DNA, 76 bp, Homo sapiens
atagaatctccacctcgatctgttcgaggagtctcagcccatccacttccatgcccaggagtatctttaaaaagaa

SEQ ID NO: 126546 - DNA, 75 bp, Homo sapiens
tcgatctgttcgaggagtctcagcccatccacttccatgcccaggagtatctttaaaaagaaagagtgagtaaaa

SEQ ID NO: 126547 - DNA, 72 bp, Homo sapiens
gaggagtctcagcccatccacttccatgcccaggagtatctttaaaaagaaagagtgagtaaaaccacaatt

SEQ ID NO: 126548 - DNA, 71 bp, Homo sapiens
aaacatatcactcaacatttcacccacacacccatactccactagaagtacctctctctgttttgggggtt

SEQ ID NO: 126549 - DNA, 71 bp, Homo sapiens
aacatttcacccacacacccatactccactagaagtacctctctctgttttgggggtttcatcccatctgt

SEQ ID NO: 126550 - DNA, 71 bp, Homo sapiens
acacacccatactccactagaagtacctctctctgttttgggggtttcatcccatctgtttttacgagcac

SEQ ID NO: 126551 - DNA, 70 bp, Homo sapiens
atactccactagaagtacctctctctgttttgggggtttcatcccatctgtttttacgagcactggaagt

SEQ ID NO: 126552 - DNA, 71 bp, Homo sapiens
actagaagtacctctctctgttttgggggtttcatcccatctgtttttacgagcactggaagttgcgcctc

SEQ ID NO: 126553 - DNA, 76 bp, Homo sapiens
tctctgttttgggggtttcatcccatctgtttttacgagcactggaagttgcgcctccatggcctggtgtcgcatg

SEQ ID NO: 126554 - DNA, 78 bp, Homo sapiens
ggggtttcatcccatctgtttttacgagcactggaagttgcgcctccatggcctggtgtcgcatggcctggtgtatca

SEQ ID NO: 126555 - DNA, 79 bp, Homo sapiens
atcccatctgtttttacgagcactggaagttgcgcctccatggcctggtgtcgcatggcctggtgtatcacctcgtcca

SEQ ID NO: 126556 - DNA, 78 bp, Homo sapiens
ctgtttttacgagcactggaagttgcgcctccatggcctggtgtcgcatggcctggtgtatcacctcgtccaggagta

SEQ ID NO: 126557 - DNA, 80 bp, Homo sapiens
actggaagttgcgcctccatggcctggtgtcgcatggcctggtgtatcacctcgtccaggagtagcagctcccgctggtg

SEQ ID NO: 126558 - DNA, 82 bp, Homo sapiens
agttgcgcctccatggcctggtgtcgcatggcctggtgtatcacctcgtccaggagtagcagctcccgctggtgtgtggcta

SEQ ID NO: 126559 - DNA, 81 bp, Homo sapiens
atggcctggtgtcgcatggcctggtgtatcacctcgtccaggagtagcagctcccgctggtgtgtggctaggtgtaggatc

SEQ ID NO: 126560 - DNA, 79 bp, Homo sapiens
tcgcatggcctggtgtatcacctcgtccaggagtagcagctcccgctggtgtgtggctaggtgtaggatcccatatttt

SEQ ID NO: 126561 - DNA, 77 bp, Homo sapiens
cctggtgtatcacctcgtccaggagtagcagctcccgctggtgtgtggctaggtgtaggatcccatatttttgagcc

SEQ ID NO: 126562 - DNA, 75 bp, Homo sapiens
acctcgtccaggagtagcagctcccgctggtgtgtggctaggtgtaggatcccatatttttgagcctggggttgc

SEQ ID NO: 126563 - DNA, 76 bp, Homo sapiens
aggagtagcagctcccgctggtgtgtggctaggtgtaggatcccatatttttgagcctggggttgctccaggagtc

SEQ ID NO: 126564 - DNA, 73 bp, Homo sapiens
ccgctggtgtgtggctaggtgtaggatcccatatttttgagcctggggttgctccaggagtctcgcttccctt

SEQ ID NO: 126565 - DNA, 75 bp, Homo sapiens
tgtggctaggtgtaggatcccatatttttgagcctggggttgctccaggagtctcgcttccctttgcacgacctg

SEQ ID NO: 126566 - DNA, 74 bp, Homo sapiens
taggtgtaggatcccatatttttgagcctggggttgctccaggagtctcgcttccctttgcacgacctggtgtc

SEQ ID NO: 126567 - DNA, 74 bp, Homo sapiens
atatttttgagcctggggttgctccaggagtctcgcttccctttgcacgacctggtgtctcatcccatcttaag

SEQ ID NO: 126568 - DNA, 75 bp, Homo sapiens
tttgagcctggggttgctccaggagtctcgcttccctttgcacgacctggtgtctcatcccatcttaaggaagga

SEQ ID NO: 126569 - DNA, 75 bp, Homo sapiens
gttgctccaggagtctcgcttccctttgcacgacctggtgtctcatcccatcttaaggaaggagtatgcccaggg

SEQ ID NO: 126570 - DNA, 72 bp, Homo sapiens
tctcgcttccctttgcacgacctggtgtctcatcccatcttaaggaaggagtatgcccaggggtcttaaaaa

SEQ ID NO: 126571 - DNA, 67 bp, Homo sapiens
cctggtgtctcatcccatcttaaggaaggagtatgcccaggggtcttaaaaaagcaaaaaaatttta

SEQ ID NO: 126572 - DNA, 69 bp, Homo sapiens
tgtctcatcccatcttaaggaaggagtatgcccaggggtcttaaaaaagcaaaaaaattttatttcaca

SEQ ID NO: 126573 - DNA, 72 bp, Homo sapiens
aaacaaaaagaaattacctctgcctgatcccaacttgatagttttttgggagtggcaccaggagtctgatca

SEQ ID NO: 126574 - DNA, 75 bp, Homo sapiens
aaagaaattacctctgcctgatcccaacttgatagttttttgggagtggcaccaggagtctgatcagctgtttga

SEQ ID NO: 126575 - DNA, 75 bp, Homo sapiens
tgcctgatcccaacttgatagttttttgggagtggcaccaggagtctgatcagctgtttgatcccaacgccgttt

SEQ ID NO: 126576 - DNA, 70 bp, Homo sapiens
aacttgatagttttttgggagtggcaccaggagtctgatcagctgtttgatcccaacgccgttttcgttt

SEQ ID NO: 126577 - DNA, 72 bp, Homo sapiens
atagttttttgggagtggcaccaggagtctgatcagctgtttgatcccaacgccgttttcgttttgatggag

SEQ ID NO: 126578 - DNA, 79 bp, Homo sapiens
gtggcaccaggagtctgatcagctgtttgatcccaacgccgttttcgttttgatggaggctgggacgctgctgctccat

SEQ ID NO: 126579 - DNA, 78 bp, Homo sapiens
gagtctgatcagctgtttgatcccaacgccgttttcgttttgatggaggctgggacgctgctgctccattgacgactt

SEQ ID NO: 126580 - DNA, 73 bp, Homo sapiens
agctgtttgatcccaacgccgttttcgttttgatggaggctgggacgctgctgctccattgacgacttttagt

SEQ ID NO: 126581 - DNA, 74 bp, Homo sapiens
tttgatcccaacgccgttttcgttttgatggaggctgggacgctgctgctccattgacgacttttagttctcca

SEQ ID NO: 126582 - DNA, 72 bp, Homo sapiens
cgttttcgttttgatggaggctgggacgctgctgctccattgacgacttttagttctccagctttagctttt

SEQ ID NO: 126583 - DNA, 77 bp, Homo sapiens
gttttgatggaggctgggacgctgctgctccattgacgacttttagttctccagctttagctttttctgctagctgt

SEQ ID NO: 126584 - DNA, 76 bp, Homo sapiens
aggctgggacgctgctgctccattgacgacttttagttctccagctttagctttttctgctagctgttgcctaatt

SEQ ID NO: 126585 - DNA, 75 bp, Homo sapiens
ctgctccattgacgacttttagttctccagctttagctttttctgctagctgttgcctaatttctcgctgaaaaa

SEQ ID NO: 126586 - DNA, 72 bp, Homo sapiens
attgacgacttttagttctccagctttagctttttctgctagctgttgcctaatttctcgctgaaaaaaaca

SEQ ID NO: 126587 - DNA, 73 bp, Homo sapiens
tttagttctccagctttagctttttctgctagctgttgcctaatttctcgctgaaaaaaacagtgagtattta

SEQ ID NO: 126588 - DNA, 71 bp, Homo sapiens
cagctttagctttttctgctagctgttgcctaatttctcgctgaaaaaaacagtgagtatttacctttaaa

SEQ ID NO: 126589 - DNA, 71 bp, Homo sapiens
caatcacaactgtatttatattctttcacaaccattaaaacaggagacaggtttacatacttcttctttag

SEQ ID NO: 126590 - DNA, 70 bp, Homo sapiens
tttatattctttcacaaccattaaaacaggagacaggtttacatacttcttctttagtcaagtgttgttc

SEQ ID NO: 126591 - DNA, 73 bp, Homo sapiens
tttcacaaccattaaaacaggagacaggtttacatacttcttctttagtcaagtgttgttctcgcattacatc

SEQ ID NO: 126592 - DNA, 73 bp, Homo sapiens
attaaaacaggagacaggtttacatacttcttctttagtcaagtgttgttctcgcattacatccatgtaagtc

SEQ ID NO: 126593 - DNA, 75 bp, Homo sapiens
agacaggtttacatacttcttctttagtcaagtgttgttctcgcattacatccatgtaagtcctagcattcattt

SEQ ID NO: 126594 - DNA, 77 bp, Homo sapiens
tttacatacttcttctttagtcaagtgttgttctcgcattacatccatgtaagtcctagcattcattttaggatcag

SEQ ID NO: 126595 - DNA, 74 bp, Homo sapiens
ttcttctttagtcaagtgttgttctcgcattacatccatgtaagtcctagcattcattttaggatcaggggttt

SEQ ID NO: 126596 - DNA, 76 bp, Homo sapiens
agtcaagtgttgttctcgcattacatccatgtaagtcctagcattcattttaggatcaggggttttccctcctgca

SEQ ID NO: 126597 - DNA, 76 bp, Homo sapiens
tgttctcgcattacatccatgtaagtcctagcattcattttaggatcaggggttttccctcctgcagaaaagaaca

SEQ ID NO: 126598 - DNA, 75 bp, Homo sapiens
ttacatccatgtaagtcctagcattcattttaggatcaggggttttccctcctgcagaaaagaacagcaacagga

SEQ ID NO: 126599 - DNA, 71 bp, Homo sapiens
gtaagtcctagcattcattttaggatcaggggttttccctcctgcagaaaagaacagcaacaggaaaaaga

SEQ ID NO: 126600 - DNA, 69 bp, Homo sapiens
attcattttaggatcaggggttttccctcctgcagaaaagaacagcaacaggaaaaagagtacaataaa

SEQ ID NO: 126601 - DNA, 75 bp, Homo sapiens
ttgagtttgctgatcaatttaacctgtttgaacacaaacatctacagcagtttaaaacaaatattttaatgcata

SEQ ID NO: 126602 - DNA, 73 bp, Homo sapiens
tgatcaatttaacctgtttgaacacaaacatctacagcagtttaaaacaaatattttaatgcatataaaaaca

SEQ ID NO: 126603 - DNA, 74 bp, Homo sapiens
cctgtttgaacacaaacatctacagcagtttaaaacaaatattttaatgcatataaaaacaaaatgacagcaca

SEQ ID NO: 126604 - DNA, 74 bp, Homo sapiens
cacaaacatctacagcagtttaaaacaaatattttaatgcatataaaaacaaaatgacagcacagtttagagtc

SEQ ID NO: 126605 - DNA, 75 bp, Homo sapiens
cagcagtttaaaacaaatattttaatgcatataaaaacaaaatgacagcacagtttagagtcttcagaagtgatg

SEQ ID NO: 126606 - DNA, 73 bp, Homo sapiens
aacaaatattttaatgcatataaaaacaaaatgacagcacagtttagagtcttcagaagtgatgggttcctgg

SEQ ID NO: 126607 - DNA, 75 bp, Homo sapiens
tattttaatgcatataaaaacaaaatgacagcacagtttagagtcttcagaagtgatgggttcctgggttgctaa

SEQ ID NO: 126608 - DNA, 72 bp, Homo sapiens
taaaaacaaaatgacagcacagtttagagtcttcagaagtgatgggttcctgggttgctaatccggaatacg

SEQ ID NO: 126609 - DNA, 72 bp, Homo sapiens
aaaatgacagcacagtttagagtcttcagaagtgatgggttcctgggttgctaatccggaatacgtacactt

SEQ ID NO: 126610 - DNA, 70 bp, Homo sapiens
agtttagagtcttcagaagtgatgggttcctgggttgctaatccggaatacgtacactttcgtgcctttg

SEQ ID NO: 126611 - DNA, 74 bp, Homo sapiens
agagtcttcagaagtgatgggttcctgggttgctaatccggaatacgtacactttcgtgcctttgtctccatca

SEQ ID NO: 126612 - DNA, 74 bp, Homo sapiens
aagtgatgggttcctgggttgctaatccggaatacgtacactttcgtgcctttgtctccatcagcagttctgac

SEQ ID NO: 126613 - DNA, 79 bp, Homo sapiens
tgggttgctaatccggaatacgtacactttcgtgcctttgtctccatcagcagttctgacttcaagcagcagaatagaa

SEQ ID NO: 126614 - DNA, 79 bp, Homo sapiens
taatccggaatacgtacactttcgtgcctttgtctccatcagcagttctgacttcaagcagcagaatagaagcctagaa

SEQ ID NO: 126615 - DNA, 78 bp, Homo sapiens
aatacgtacactttcgtgcctttgtctccatcagcagttctgacttcaagcagcagaatagaagcctagaaaattatc

SEQ ID NO: 126616 - DNA, 78 bp, Homo sapiens
actttcgtgcctttgtctccatcagcagttctgacttcaagcagcagaatagaagcctagaaaattatctctttacca

SEQ ID NO: 126617 - DNA, 78 bp, Homo sapiens
ttgtctccatcagcagttctgacttcaagcagcagaatagaagcctagaaaattatctctttaccattagtaacactt

SEQ ID NO: 126618 - DNA, 74 bp, Homo sapiens
ctgacttcaagcagcagaatagaagcctagaaaattatctctttaccattagtaacactttggaaagatattta

SEQ ID NO: 126619 - DNA, 73 bp, Homo sapiens
gcagcagaatagaagcctagaaaattatctctttaccattagtaacactttggaaagatatttatattcaaaa

SEQ ID NO: 126620 - DNA, 69 bp, Homo sapiens
gcctagaaaattatctctttaccattagtaacactttggaaagatatttatattcaaaacattacctgt

SEQ ID NO: 126621 - DNA, 71 bp, Homo sapiens
accattagtaacactttggaaagatatttatattcaaaacattacctgttgcaagctgttaaaatcctgac

SEQ ID NO: 126622 - DNA, 71 bp, Homo sapiens
acactttggaaagatatttatattcaaaacattacctgttgcaagctgttaaaatcctgactacaaataac

SEQ ID NO: 126623 - DNA, 74 bp, Homo sapiens
ggaaagatatttatattcaaaacattacctgttgcaagctgttaaaatcctgactacaaataactatgactaga

SEQ ID NO: 126624 - DNA, 75 bp, Homo sapiens
aacattacctgttgcaagctgttaaaatcctgactacaaataactatgactagataagttcttcatacagtgttc

SEQ ID NO: 126625 - DNA, 75 bp, Homo sapiens
tgttgcaagctgttaaaatcctgactacaaataactatgactagataagttcttcatacagtgttctaaaacaat

SEQ ID NO: 126626 - DNA, 72 bp, Homo sapiens
aaaatcctgactacaaataactatgactagataagttcttcatacagtgttctaaaacaattgtagtttaga

SEQ ID NO: 126627 - DNA, 74 bp, Homo sapiens
ctgactacaaataactatgactagataagttcttcatacagtgttctaaaacaattgtagtttagaaaatctga

SEQ ID NO: 126628 - DNA, 69 bp, Homo sapiens
ctagataagttcttcatacagtgttctaaaacaattgtagtttagaaaatctgattttaaaaatatacc

SEQ ID NO: 126629 - DNA, 72 bp, Homo sapiens
tcatacagtgttctaaaacaattgtagtttagaaaatctgattttaaaaatatacctataatcttattctga

SEQ ID NO: 126630 - DNA, 71 bp, Homo sapiens
tgttctaaaacaattgtagtttagaaaatctgattttaaaaatatacctataatcttattctgatgtcacg

SEQ ID NO: 126631 - DNA, 69 bp, Homo sapiens
tgtagtttagaaaatctgattttaaaaatatacctataatcttattctgatgtcacgttactaaaaagg

SEQ ID NO: 126632 - DNA, 71 bp, Homo sapiens
gaaaatctgattttaaaaatatacctataatcttattctgatgtcacgttactaaaaagggcttcatgctt

SEQ ID NO: 126633 - DNA, 69 bp, Homo sapiens
tttaaaaatatacctataatcttattctgatgtcacgttactaaaaagggcttcatgctttaagttttg

SEQ ID NO: 126634 - DNA, 71 bp, Homo sapiens
tacctataatcttattctgatgtcacgttactaaaaagggcttcatgctttaagttttgttgacccagaaa

SEQ ID NO: 126635 - DNA, 70 bp, Homo sapiens
aatcttattctgatgtcacgttactaaaaagggcttcatgctttaagttttgttgacccagaaaacatat

SEQ ID NO: 126636 - DNA, 69 bp, Homo sapiens
tctgatgtcacgttactaaaaagggcttcatgctttaagttttgttgacccagaaaacatatttttatt

SEQ ID NO: 126637 - DNA, 66 bp, Homo sapiens
cgttactaaaaagggcttcatgctttaagttttgttgacccagaaaacatatttttatttcttaga

SEQ ID NO: 126638 - DNA, 68 bp, Homo sapiens
aagggcttcatgctttaagttttgttgacccagaaaacatatttttatttcttagaaagcataaatta

SEQ ID NO: 126639 - DNA, 66 bp, Homo sapiens
gctttaagttttgttgacccagaaaacatatttttatttcttagaaagcataaattaaaactggaa

SEQ ID NO: 126640 - DNA, 68 bp, Homo sapiens
tgttgacccagaaaacatatttttatttcttagaaagcataaattaaaactggaaacatattacttta

SEQ ID NO: 126641 - DNA, 67 bp, Homo sapiens
cagaaaacatatttttatttcttagaaagcataaattaaaactggaaacatattactttaaatatat

SEQ ID NO: 126642 - DNA, 68 bp, Homo sapiens
tatttcttagaaagcataaattaaaactggaaacatattactttaaatatattacttctaccagttat

SEQ ID NO: 126643 - DNA, 74 bp, Homo sapiens
gaaagcataaattaaaactggaaacatattactttaaatatattacttctaccagttattatgatgcacacaga

SEQ ID NO: 126644 - DNA, 78 bp, Homo sapiens
ctttaaatatattacttctaccagttattatgatgcacacagaagcaacgtggtgtacaaagagatgtgtcagtctct

SEQ ID NO: 126645 - DNA, 78 bp, Homo sapiens
atattacttctaccagttattatgatgcacacagaagcaacgtggtgtacaaagagatgtgtcagtctcttggttaaa

SEQ ID NO: 126646 - DNA, 78 bp, Homo sapiens
taccagttattatgatgcacacagaagcaacgtggtgtacaaagagatgtgtcagtctcttggttaaagtttcagtat

SEQ ID NO: 126647 - DNA, 78 bp, Homo sapiens
tattatgatgcacacagaagcaacgtggtgtacaaagagatgtgtcagtctcttggttaaagtttcagtatttgcttt

SEQ ID NO: 126648 - DNA, 71 bp, Homo sapiens
caacgtggtgtacaaagagatgtgtcagtctcttggttaaagtttcagtatttgcttttcaaacttcaaaa

SEQ ID NO: 126649 - DNA, 73 bp, Homo sapiens
agagatgtgtcagtctcttggttaaagtttcagtatttgcttttcaaacttcaaaatatcttacagaagccca

SEQ ID NO: 126650 - DNA, 69 bp, Homo sapiens
cttggttaaagtttcagtatttgcttttcaaacttcaaaatatcttacagaagcccaaacagtatataa

SEQ ID NO: 126651 - DNA, 76 bp, Homo sapiens
tcagtatttgcttttcaaacttcaaaatatcttacagaagcccaaacagtatataacaagattcacagaggcacac

SEQ ID NO: 126652 - DNA, 76 bp, Homo sapiens
gcttttcaaacttcaaaatatcttacagaagcccaaacagtatataacaagattcacagaggcacactatgcttta

SEQ ID NO: 126653 - DNA, 77 bp, Homo sapiens
ttcaaaatatcttacagaagcccaaacagtatataacaagattcacagaggcacactatgctttagaaatgtggtaa

SEQ ID NO: 126654 - DNA, 79 bp, Homo sapiens
tatcttacagaagcccaaacagtatataacaagattcacagaggcacactatgctttagaaatgtggtaactagctata

SEQ ID NO: 126655 - DNA, 77 bp, Homo sapiens
cccaaacagtatataacaagattcacagaggcacactatgctttagaaatgtggtaactagctatacaagtagtata

SEQ ID NO: 126656 - DNA, 80 bp, Homo sapiens
agtatataacaagattcacagaggcacactatgctttagaaatgtggtaactagctatacaagtagtatagcatcacaat

SEQ ID NO: 126657 - DNA, 77 bp, Homo sapiens
attcacagaggcacactatgctttagaaatgtggtaactagctatacaagtagtatagcatcacaatttaggaaaaa

SEQ ID NO: 126658 - DNA, 75 bp, Homo sapiens
agaggcacactatgctttagaaatgtggtaactagctatacaagtagtatagcatcacaatttaggaaaaaataa

SEQ ID NO: 126659 - DNA, 76 bp, Homo sapiens
gaaaaaataataaaattctaagacatttcctatgctgaagatcatgcccaattggtagtgtcattctttctgacac

SEQ ID NO: 126660 - DNA, 80 bp, Homo sapiens
aataaaattctaagacatttcctatgctgaagatcatgcccaattggtagtgtcattctttctgacactagctctgataa

SEQ ID NO: 126661 - DNA, 81 bp, Homo sapiens
taagacatttcctatgctgaagatcatgcccaattggtagtgtcattctttctgacactagctctgataagacttcctttg

SEQ ID NO: 126662 - DNA, 76 bp, Homo sapiens
aagatcatgcccaattggtagtgtcattctttctgacactagctctgataagacttcctttggaatactttttcac

SEQ ID NO: 126663 - DNA, 75 bp, Homo sapiens
aattggtagtgtcattctttctgacactagctctgataagacttcctttggaatactttttcaccataatctaga

SEQ ID NO: 126664 - DNA, 78 bp, Homo sapiens
tcattctttctgacactagctctgataagacttcctttggaatactttttcaccataatctagagaggatgtgttgaa

SEQ ID NO: 126665 - DNA, 78 bp, Homo sapiens
tttctgacactagctctgataagacttcctttggaatactttttcaccataatctagagaggatgtgttgaactgcac

SEQ ID NO: 126666 - DNA, 74 bp, Homo sapiens
ctctgataagacttcctttggaatactttttcaccataatctagagaggatgtgttgaactgcacccttaagaa

SEQ ID NO: 126667 - DNA, 76 bp, Homo sapiens
taagacttcctttggaatactttttcaccataatctagagaggatgtgttgaactgcacccttaagaatgcagaca

SEQ ID NO: 126668 - DNA, 80 bp, Homo sapiens
aatactttttcaccataatctagagaggatgtgttgaactgcacccttaagaatgcagacaggactggcatatagcagta

SEQ ID NO: 126669 - DNA, 83 bp, Homo sapiens
tttttcaccataatctagagaggatgtgttgaactgcacccttaagaatgcagacaggactggcatatagcagtactgctgta

SEQ ID NO: 126670 - DNA, 81 bp, Homo sapiens
aatctagagaggatgtgttgaactgcacccttaagaatgcagacaggactggcatatagcagtactgctgtaggaaagaaa

SEQ ID NO: 126671 - DNA, 79 bp, Homo sapiens
aggatgtgttgaactgcacccttaagaatgcagacaggactggcatatagcagtactgctgtaggaaagaaattaagga

SEQ ID NO: 126672 - DNA, 79 bp, Homo sapiens
taagaatgcagacaggactggcatatagcagtactgctgtaggaaagaaattaaggacagttagtatgggcctgtgaat

SEQ ID NO: 126673 - DNA, 79 bp, Homo sapiens
aggactggcatatagcagtactgctgtaggaaagaaattaaggacagttagtatgggcctgtgaattctggcatacatg

SEQ ID NO: 126674 - DNA, 76 bp, Homo sapiens
atatagcagtactgctgtaggaaagaaattaaggacagttagtatgggcctgtgaattctggcatacatgtttaaa

SEQ ID NO: 126675 - DNA, 75 bp, Homo sapiens
gaaagaaattaaggacagttagtatgggcctgtgaattctggcatacatgtttaaatcaattacaattatgcaag

SEQ ID NO: 126676 - DNA, 74 bp, Homo sapiens
aattaaggacagttagtatgggcctgtgaattctggcatacatgtttaaatcaattacaattatgcaagtaaaa

SEQ ID NO: 126677 - DNA, 77 bp, Homo sapiens
tacaattatgcaagtaaaaaaagaatatccctactaattcatgcaggctgaaaagtctagtatgtaaacctgcagca

SEQ ID NO: 126678 - DNA, 75 bp, Homo sapiens
caagtaaaaaaagaatatccctactaattcatgcaggctgaaaagtctagtatgtaaacctgcagcagaatctaa

SEQ ID NO: 126679 - DNA, 75 bp, Homo sapiens
aaaagaatatccctactaattcatgcaggctgaaaagtctagtatgtaaacctgcagcagaatctaattttaaga

SEQ ID NO: 126680 - DNA, 76 bp, Homo sapiens
ctactaattcatgcaggctgaaaagtctagtatgtaaacctgcagcagaatctaattttaagaaacaggcacctaa

SEQ ID NO: 126681 - DNA, 74 bp, Homo sapiens
ggctgaaaagtctagtatgtaaacctgcagcagaatctaattttaagaaacaggcacctaattttgattgtgaa

SEQ ID NO: 126682 - DNA, 76 bp, Homo sapiens
tagtatgtaaacctgcagcagaatctaattttaagaaacaggcacctaattttgattgtgaaactcactcacctga

SEQ ID NO: 126683 - DNA, 73 bp, Homo sapiens
aaacctgcagcagaatctaattttaagaaacaggcacctaattttgattgtgaaactcactcacctgaggaaa

SEQ ID NO: 126684 - DNA, 73 bp, Homo sapiens
agaatctaattttaagaaacaggcacctaattttgattgtgaaactcactcacctgaggaaagcttccatcag

SEQ ID NO: 126685 - DNA, 81 bp, Homo sapiens
ttgattgtgaaactcactcacctgaggaaagcttccatcaggctcactatgccccttgtgctgacttgcacactaaaatta

SEQ ID NO: 126686 - DNA, 78 bp, Homo sapiens
aaactcactcacctgaggaaagcttccatcaggctcactatgccccttgtgctgacttgcacactaaaattagcaaaa

SEQ ID NO: 126687 - DNA, 77 bp, Homo sapiens
ttccatcaggctcactatgccccttgtgctgacttgcacactaaaattagcaaaacagactccaactattaaaaata

SEQ ID NO: 126688 - DNA, 75 bp, Homo sapiens
aggctcactatgccccttgtgctgacttgcacactaaaattagcaaaacagactccaactattaaaaatatcaaa

SEQ ID NO: 126689 - DNA, 73 bp, Homo sapiens
cccttgtgctgacttgcacactaaaattagcaaaacagactccaactattaaaaatatcaaactcttcgtata

SEQ ID NO: 126690 - DNA, 74 bp, Homo sapiens
gtgctgacttgcacactaaaattagcaaaacagactccaactattaaaaatatcaaactcttcgtatacatact

SEQ ID NO: 126691 - DNA, 70 bp, Homo sapiens
gcacactaaaattagcaaaacagactccaactattaaaaatatcaaactcttcgtatacatacttttgtt

SEQ ID NO: 126692 - DNA, 67 bp, Homo sapiens
attagcaaaacagactccaactattaaaaatatcaaactcttcgtatacatacttttgttttaactt

SEQ ID NO: 126693 - DNA, 69 bp, Homo sapiens
aaaaatatcaaactcttcgtatacatacttttgttttaactttaagtatgcttagagcaaagtaggtgc

SEQ ID NO: 126694 - DNA, 69 bp, Homo sapiens
atcaaactcttcgtatacatacttttgttttaactttaagtatgcttagagcaaagtaggtgcctttac

SEQ ID NO: 126695 - DNA, 69 bp, Homo sapiens
cgtatacatacttttgttttaactttaagtatgcttagagcaaagtaggtgcctttactaagctatatt

SEQ ID NO: 126696 - DNA, 71 bp, Homo sapiens
tttgttttaactttaagtatgcttagagcaaagtaggtgcctttactaagctatatttagagcactatggg

SEQ ID NO: 126697 - DNA, 74 bp, Homo sapiens
taactttaagtatgcttagagcaaagtaggtgcctttactaagctatatttagagcactatggggggagctcta

SEQ ID NO: 126698 - DNA, 74 bp, Homo sapiens
cttagagcaaagtaggtgcctttactaagctatatttagagcactatggggggagctctagtgtgagaaacagt

SEQ ID NO: 126699 - DNA, 73 bp, Homo sapiens
aaagtaggtgcctttactaagctatatttagagcactatggggggagctctagtgtgagaaacagtttctcaa

SEQ ID NO: 126700 - DNA, 73 bp, Homo sapiens
tttactaagctatatttagagcactatggggggagctctagtgtgagaaacagtttctcaagggtaacaatcc

SEQ ID NO: 126701 - DNA, 70 bp, Homo sapiens
ctctagtgtgagaaacagtttctcaagggtaacaatcctaaaaatctaggatttggaatgaaaactttca

SEQ ID NO: 126702 - DNA, 68 bp, Homo sapiens
gaaacagtttctcaagggtaacaatcctaaaaatctaggatttggaatgaaaactttcaataatttga

SEQ ID NO: 126703 - DNA, 67 bp, Homo sapiens
tctcaagggtaacaatcctaaaaatctaggatttggaatgaaaactttcaataatttgaaagtattt

SEQ ID NO: 126704 - DNA, 68 bp, Homo sapiens
acaatcctaaaaatctaggatttggaatgaaaactttcaataatttgaaagtattttgagcagaaaaa

SEQ ID NO: 126705 - DNA, 72 bp, Homo sapiens
tctaggatttggaatgaaaactttcaataatttgaaagtattttgagcagaaaaatacatttgatccaagta

SEQ ID NO: 126706 - DNA, 72 bp, Homo sapiens
tggaatgaaaactttcaataatttgaaagtattttgagcagaaaaatacatttgatccaagtatagaaagcg

SEQ ID NO: 126707 - DNA, 71 bp, Homo sapiens
tttcaataatttgaaagtattttgagcagaaaaatacatttgatccaagtatagaaagcgtacccaaaaca

SEQ ID NO: 126708 - DNA, 69 bp, Homo sapiens
tttgaaagtattttgagcagaaaaatacatttgatccaagtatagaaagcgtacccaaaacaaaagtaa

SEQ ID NO: 126709 - DNA, 68 bp, Homo sapiens
agtattttgagcagaaaaatacatttgatccaagtatagaaagcgtacccaaaacaaaagtaaaagta

SEQ ID NO: 126710 - DNA, 65 bp, Homo sapiens
gcagaaaaatacatttgatccaagtatagaaagcgtacccaaaacaaaagtaaaagtaaaacctt

SEQ ID NO: 126711 - DNA, 63 bp, Homo sapiens
tgatccaagtatagaaagcgtacccaaaacaaaagtaaaagtaaaacctttaaccctttgcgt

SEQ ID NO: 126712 - DNA, 63 bp, Homo sapiens
atagaaagcgtacccaaaacaaaagtaaaagtaaaacctttaaccctttgcgtttctatggca

SEQ ID NO: 126713 - DNA, 63 bp, Homo sapiens
aagcgtacccaaaacaaaagtaaaagtaaaacctttaaccctttgcgtttctatggcattggc

SEQ ID NO: 126714 - DNA, 62 bp, Homo sapiens
aaaacaaaagtaaaagtaaaacctttaaccctttgcgtttctatggcattggctcatttttt

SEQ ID NO: 126715 - DNA, 65 bp, Homo sapiens
aaagtaaaacctttaaccctttgcgtttctatggcattggctcatttttttcttgtccttctacc

SEQ ID NO: 126716 - DNA, 67 bp, Homo sapiens
tttaaccctttgcgtttctatggcattggctcatttttttcttgtccttctacctggaaagaaaact

SEQ ID NO: 126717 - DNA, 71 bp, Homo sapiens
ctttgcgtttctatggcattggctcatttttttcttgtccttctacctggaaagaaaacttgcattataaa

SEQ ID NO: 126718 - DNA, 76 bp, Homo sapiens
tatggcattggctcatttttttcttgtccttctacctggaaagaaaacttgcattataaagatgaagaatatggca

SEQ ID NO: 126719 - DNA, 75 bp, Homo sapiens
catttttttcttgtccttctacctggaaagaaaacttgcattataaagatgaagaatatggcatctgtgacttca

SEQ ID NO: 126720 - DNA, 79 bp, Homo sapiens
ttgtccttctacctggaaagaaaacttgcattataaagatgaagaatatggcatctgtgacttcaaccacatctataca

SEQ ID NO: 126721 - DNA, 78 bp, Homo sapiens
acctggaaagaaaacttgcattataaagatgaagaatatggcatctgtgacttcaaccacatctatacaaatctatag

SEQ ID NO: 126722 - DNA, 77 bp, Homo sapiens
aagaaaacttgcattataaagatgaagaatatggcatctgtgacttcaaccacatctatacaaatctatagtaaggg

SEQ ID NO: 126723 - DNA, 77 bp, Homo sapiens
gcattataaagatgaagaatatggcatctgtgacttcaaccacatctatacaaatctatagtaagggggatttttaa

SEQ ID NO: 126724 - DNA, 74 bp, Homo sapiens
agatgaagaatatggcatctgtgacttcaaccacatctatacaaatctatagtaagggggatttttaaaaagaa

SEQ ID NO: 126725 - DNA, 69 bp, Homo sapiens
taaaaagaaaagcaaattcagaagcatgccaaaaaaaatcaaagggctaaagacaacttaatacaaata

SEQ ID NO: 126726 - DNA, 69 bp, Homo sapiens
gaaaagcaaattcagaagcatgccaaaaaaaatcaaagggctaaagacaacttaatacaaataaatttc

SEQ ID NO: 126727 - DNA, 66 bp, Homo sapiens
gccaaaaaaaatcaaagggctaaagacaacttaatacaaataaatttctgaatacttatagaaaag

SEQ ID NO: 126728 - DNA, 67 bp, Homo sapiens
aaatcaaagggctaaagacaacttaatacaaataaatttctgaatacttatagaaaagtgggaaaga

SEQ ID NO: 126729 - DNA, 71 bp, Homo sapiens
gctaaagacaacttaatacaaataaatttctgaatacttatagaaaagtgggaaagaattaccatctgcaa

SEQ ID NO: 126730 - DNA, 72 bp, Homo sapiens
atacaaataaatttctgaatacttatagaaaagtgggaaagaattaccatctgcaaaaggatcaagacgctc

SEQ ID NO: 126731 - DNA, 72 bp, Homo sapiens
aatacttatagaaaagtgggaaagaattaccatctgcaaaaggatcaagacgctctggggaaattatcatgg

SEQ ID NO: 126732 - DNA, 73 bp, Homo sapiens
aagtgggaaagaattaccatctgcaaaaggatcaagacgctctggggaaattatcatggtccgcctatgcttt

SEQ ID NO: 126733 - DNA, 75 bp, Homo sapiens
aaagaattaccatctgcaaaaggatcaagacgctctggggaaattatcatggtccgcctatgctttttgtattca

SEQ ID NO: 126734 - DNA, 75 bp, Homo sapiens
atctgcaaaaggatcaagacgctctggggaaattatcatggtccgcctatgctttttgtattcatcttcccggtc

SEQ ID NO: 126735 - DNA, 76 bp, Homo sapiens
atcaagacgctctggggaaattatcatggtccgcctatgctttttgtattcatcttcccggtctgcaatctttgga

SEQ ID NO: 126736 - DNA, 78 bp, Homo sapiens
tctggggaaattatcatggtccgcctatgctttttgtattcatcttcccggtctgcaatctttggaggtctgtgctca

SEQ ID NO: 126737 - DNA, 78 bp, Homo sapiens
aaattatcatggtccgcctatgctttttgtattcatcttcccggtctgcaatctttggaggtctgtgctcagcaaatg

SEQ ID NO: 126738 - DNA, 80 bp, Homo sapiens
tccgcctatgctttttgtattcatcttcccggtctgcaatctttggaggtctgtgctcagcaaatggatcatactgaaaa

SEQ ID NO: 126739 - DNA, 79 bp, Homo sapiens
tttttgtattcatcttcccggtctgcaatctttggaggtctgtgctcagcaaatggatcatactgaaaagaggtatgtc

SEQ ID NO: 126740 - DNA, 76 bp, Homo sapiens
cattcacttttctttagctgaataaactatgcttttaaaatgaaagatcacctgttctgttgactgtggtatatca

SEQ ID NO: 126741 - DNA, 78 bp, Homo sapiens
ctttagctgaataaactatgcttttaaaatgaaagatcacctgttctgttgactgtggtatatcattaagcaatgcca

SEQ ID NO: 126742 - DNA, 77 bp, Homo sapiens
aataaactatgcttttaaaatgaaagatcacctgttctgttgactgtggtatatcattaagcaatgccacaggggca

SEQ ID NO: 126743 - DNA, 80 bp, Homo sapiens
tttaaaatgaaagatcacctgttctgttgactgtggtatatcattaagcaatgccacaggggcatgatatcctggcttct

SEQ ID NO: 126744 - DNA, 83 bp, Homo sapiens
aaagatcacctgttctgttgactgtggtatatcattaagcaatgccacaggggcatgatatcctggcttcttctgaccaagca

SEQ ID NO: 126745 - DNA, 84 bp, Homo sapiens
ttctgttgactgtggtatatcattaagcaatgccacaggggcatgatatcctggcttcttctgaccaagcaaactcgtagatga

SEQ ID NO: 126746 - DNA, 86 bp, Homo sapiens
tgtggtatatcattaagcaatgccacaggggcatgatatcctggcttcttctgaccaagcaaactcgtagatgatgaatagtcatc

SEQ ID NO: 126747 - DNA, 86 bp, Homo sapiens
atatcattaagcaatgccacaggggcatgatatcctggcttcttctgaccaagcaaactcgtagatgatgaatagtcatcgtcatc

SEQ ID NO: 126748 - DNA, 85 bp, Homo sapiens
aatgccacaggggcatgatatcctggcttcttctgaccaagcaaactcgtagatgatgaatagtcatcgtcatcctgcaatgaaa

SEQ ID NO: 126749 - DNA, 81 bp, Homo sapiens
aggggcatgatatcctggcttcttctgaccaagcaaactcgtagatgatgaatagtcatcgtcatcctgcaatgaaaaccc

SEQ ID NO: 126750 - DNA, 78 bp, Homo sapiens
tatcctggcttcttctgaccaagcaaactcgtagatgatgaatagtcatcgtcatcctgcaatgaaaaccccccaaaa

SEQ ID NO: 126751 - DNA, 77 bp, Homo sapiens
tcttctgaccaagcaaactcgtagatgatgaatagtcatcgtcatcctgcaatgaaaaccccccaaaaagccataaa

SEQ ID NO: 126752 - DNA, 78 bp, Homo sapiens
ctctctcaaaaaaataactgcctcttgtacataatttgtaacttacatcttcaagttcagttgcagcaattgatgtca

SEQ ID NO: 126753 - DNA, 77 bp, Homo sapiens
aaaaataactgcctcttgtacataatttgtaacttacatcttcaagttcagttgcagcaattgatgtcacgtatcca

SEQ ID NO: 126754 - DNA, 81 bp, Homo sapiens
aactgcctcttgtacataatttgtaacttacatcttcaagttcagttgcagcaattgatgtcacgtatccagcaaatctgc

SEQ ID NO: 126755 - DNA, 82 bp, Homo sapiens
ataatttgtaacttacatcttcaagttcagttgcagcaattgatgtcacgtatccagcaaatctgctgtcacttccaccata

SEQ ID NO: 126756 - DNA, 81 bp, Homo sapiens
ttgtaacttacatcttcaagttcagttgcagcaattgatgtcacgtatccagcaaatctgctgtcacttccaccataaatt

SEQ ID NO: 126757 - DNA, 82 bp, Homo sapiens
ttcaagttcagttgcagcaattgatgtcacgtatccagcaaatctgctgtcacttccaccataaatttcctggtcataataa

SEQ ID NO: 126758 - DNA, 82 bp, Homo sapiens
ttcagttgcagcaattgatgtcacgtatccagcaaatctgctgtcacttccaccataaatttcctggtcataataacctgta

SEQ ID NO: 126759 - DNA, 78 bp, Homo sapiens
aattgatgtcacgtatccagcaaatctgctgtcacttccaccataaatttcctggtcataataacctgtagaatcgag

SEQ ID NO: 126760 - DNA, 78 bp, Homo sapiens
tatccagcaaatctgctgtcacttccaccataaatttcctggtcataataacctgtagaatcgaggcccactccttga

SEQ ID NO: 126761 - DNA, 76 bp, Homo sapiens
aaatctgctgtcacttccaccataaatttcctggtcataataacctgtagaatcgaggcccactccttgagcttca

SEQ ID NO: 126762 - DNA, 76 bp, Homo sapiens
acttccaccataaatttcctggtcataataacctgtagaatcgaggcccactccttgagcttcatcaagagctgcc

SEQ ID NO: 126763 - DNA, 76 bp, Homo sapiens
ataaatttcctggtcataataacctgtagaatcgaggcccactccttgagcttcatcaagagctgccttcttgcct

SEQ ID NO: 126764 - DNA, 78 bp, Homo sapiens
ttcctggtcataataacctgtagaatcgaggcccactccttgagcttcatcaagagctgccttcttgccttgaatttc

SEQ ID NO: 126765 - DNA, 80 bp, Homo sapiens
taataacctgtagaatcgaggcccactccttgagcttcatcaagagctgccttcttgccttgaatttctcgaatctgtgc

SEQ ID NO: 126766 - DNA, 81 bp, Homo sapiens
aatcgaggcccactccttgagcttcatcaagagctgccttcttgccttgaatttctcgaatctgtgcttcaatatctataa

SEQ ID NO: 126767 - DNA, 80 bp, Homo sapiens
actccttgagcttcatcaagagctgccttcttgccttgaatttctcgaatctgtgcttcaatatctataaaaagataaca

SEQ ID NO: 126768 - DNA, 79 bp, Homo sapiens
ttcatcaagagctgccttcttgccttgaatttctcgaatctgtgcttcaatatctataaaaagataacacagactttct

SEQ ID NO: 126769 - DNA, 76 bp, Homo sapiens
gagctgccttcttgccttgaatttctcgaatctgtgcttcaatatctataaaaagataacacagactttcttaatt

SEQ ID NO: 126770 - DNA, 74 bp, Homo sapiens
cttcttgccttgaatttctcgaatctgtgcttcaatatctataaaaagataacacagactttcttaatttcact

SEQ ID NO: 126771 - DNA, 67 bp, Homo sapiens
aaaaggcttttattaggctagcaacgaagaaaacacgtaagcagggaaagaccgcttaccttcgtga

SEQ ID NO: 126772 - DNA, 71 bp, Homo sapiens
ttattaggctagcaacgaagaaaacacgtaagcagggaaagaccgcttaccttcgtgagtcttggcgatct

SEQ ID NO: 126773 - DNA, 71 bp, Homo sapiens
tagcaacgaagaaaacacgtaagcagggaaagaccgcttaccttcgtgagtcttggcgatcttcgccattt

SEQ ID NO: 126774 - DNA, 70 bp, Homo sapiens
aagaaaacacgtaagcagggaaagaccgcttaccttcgtgagtcttggcgatcttcgccattttgtccac

SEQ ID NO: 126775 - DNA, 73 bp, Homo sapiens
cagggaaagaccgcttaccttcgtgagtcttggcgatcttcgccattttgtccactcgaacacacagacggaa

SEQ ID NO: 126776 - DNA, 73 bp, Homo sapiens
aaagaccgcttaccttcgtgagtcttggcgatcttcgccattttgtccactcgaacacacagacggaactggc

SEQ ID NO: 126777 - DNA, 75 bp, Homo sapiens
taccttcgtgagtcttggcgatcttcgccattttgtccactcgaacacacagacggaactggcgctcccaagaac

SEQ ID NO: 126778 - DNA, 74 bp, Homo sapiens
agtcttggcgatcttcgccattttgtccactcgaacacacagacggaactggcgctcccaagaacttccgctcg

SEQ ID NO: 126779 - DNA, 74 bp, Homo sapiens
atcttcgccattttgtccactcgaacacacagacggaactggcgctcccaagaacttccgctcgtcgccgccgc

SEQ ID NO: 126780 - DNA, 73 bp, Homo sapiens
tccactcgaacacacagacggaactggcgctcccaagaacttccgctcgtcgccgccgccacggagaaaaata

SEQ ID NO: 126781 - DNA, 73 bp, Homo sapiens
tcgaacacacagacggaactggcgctcccaagaacttccgctcgtcgccgccgccacggagaaaaatagctgg

SEQ ID NO: 126782 - DNA, 72 bp, Homo sapiens
agacggaactggcgctcccaagaacttccgctcgtcgccgccgccacggagaaaaatagctgggggctgcac

SEQ ID NO: 126783 - DNA, 73 bp, Homo sapiens
agcgtggtgcttggcatccaataaacagaaacgcagaagaatggtaattagcacttaattttaattaaaatca

SEQ ID NO: 126784 - DNA, 72 bp, Homo sapiens
ggcatccaataaacagaaacgcagaagaatggtaattagcacttaattttaattaaaatcaacagttcagga

SEQ ID NO: 126785 - DNA, 72 bp, Homo sapiens
cagaaacgcagaagaatggtaattagcacttaattttaattaaaatcaacagttcaggagaagataagatag

SEQ ID NO: 126786 - DNA, 71 bp, Homo sapiens
atggtaattagcacttaattttaattaaaatcaacagttcaggagaagataagatagtgtttaatatcaat

SEQ ID NO: 126787 - DNA, 74 bp, Homo sapiens
gcacttaattttaattaaaatcaacagttcaggagaagataagatagtgtttaatatcaatttctgagaaatca

SEQ ID NO: 126788 - DNA, 75 bp, Homo sapiens
ttaaaatcaacagttcaggagaagataagatagtgtttaatatcaatttctgagaaatcacatttatataaaaga

SEQ ID NO: 126789 - DNA, 74 bp, Homo sapiens
caacagttcaggagaagataagatagtgtttaatatcaatttctgagaaatcacatttatataaaagaaataaa

SEQ ID NO: 126790 - DNA, 75 bp, Homo sapiens
ggagaagataagatagtgtttaatatcaatttctgagaaatcacatttatataaaagaaataaaacaggccagca

SEQ ID NO: 126791 - DNA, 74 bp, Homo sapiens
gatagtgtttaatatcaatttctgagaaatcacatttatataaaagaaataaaacaggccagcagaagtccaaa

SEQ ID NO: 126792 - DNA, 74 bp, Homo sapiens
atatcaatttctgagaaatcacatttatataaaagaaataaaacaggccagcagaagtccaaaaaagattcagc

SEQ ID NO: 126793 - DNA, 75 bp, Homo sapiens
gagaaatcacatttatataaaagaaataaaacaggccagcagaagtccaaaaaagattcagcttacattattgca

SEQ ID NO: 126794 - DNA, 75 bp, Homo sapiens
catttatataaaagaaataaaacaggccagcagaagtccaaaaaagattcagcttacattattgcacttggatga

SEQ ID NO: 126795 - DNA, 75 bp, Homo sapiens
aagaaataaaacaggccagcagaagtccaaaaaagattcagcttacattattgcacttggatgaaatatgctatt

SEQ ID NO: 126796 - DNA, 79 bp, Homo sapiens
gcagaagtccaaaaaagattcagcttacattattgcacttggatgaaatatgctatttagagtagtataatattcaggc

SEQ ID NO: 126797 - DNA, 78 bp, Homo sapiens
aaaaagattcagcttacattattgcacttggatgaaatatgctatttagagtagtataatattcaggccaggccagga

SEQ ID NO: 126798 - DNA, 79 bp, Homo sapiens
attcagcttacattattgcacttggatgaaatatgctatttagagtagtataatattcaggccaggccaggaggagaaa

SEQ ID NO: 126799 - DNA, 76 bp, Homo sapiens
attattgcacttggatgaaatatgctatttagagtagtataatattcaggccaggccaggaggagaaagagaaaaa

SEQ ID NO: 126800 - DNA, 75 bp, Homo sapiens
atgaaatatgctatttagagtagtataatattcaggccaggccaggaggagaaagagaaaaatggagaggacaaa

SEQ ID NO: 126801 - DNA, 74 bp, Homo sapiens
atatgctatttagagtagtataatattcaggccaggccaggaggagaaagagaaaaatggagaggacaaacctc

SEQ ID NO: 126802 - DNA, 72 bp, Homo sapiens
tagtataatattcaggccaggccaggaggagaaagagaaaaatggagaggacaaacctccaggtagtattta

SEQ ID NO: 126803 - DNA, 71 bp, Homo sapiens
taatattcaggccaggccaggaggagaaagagaaaaatggagaggacaaacctccaggtagtatttattcc

SEQ ID NO: 126804 - DNA, 68 bp, Homo sapiens
aggccaggaggagaaagagaaaaatggagaggacaaacctccaggtagtatttattccggattccaaa

SEQ ID NO: 126805 - DNA, 69 bp, Homo sapiens
gaaagagaaaaatggagaggacaaacctccaggtagtatttattccggattccaaactctcctgcggcc

SEQ ID NO: 126806 - DNA, 69 bp, Homo sapiens
aatggagaggacaaacctccaggtagtatttattccggattccaaactctcctgcggcctaaacagtat

SEQ ID NO: 126807 - DNA, 68 bp, Homo sapiens
acaaacctccaggtagtatttattccggattccaaactctcctgcggcctaaacagtatttagtctat

SEQ ID NO: 126808 - DNA, 70 bp, Homo sapiens
aggtagtatttattccggattccaaactctcctgcggcctaaacagtatttagtctattggaaacattca

SEQ ID NO: 126809 - DNA, 72 bp, Homo sapiens
tatttattccggattccaaactctcctgcggcctaaacagtatttagtctattggaaacattcagcaaggtc

SEQ ID NO: 126810 - DNA, 77 bp, Homo sapiens
gaaacattcagcaaggtctttacaaaaatgactgcagtatcttcaacacatttgagttgcactcctacttcgttcca

SEQ ID NO: 126811 - DNA, 79 bp, Homo sapiens
agcaaggtctttacaaaaatgactgcagtatcttcaacacatttgagttgcactcctacttcgttccagtcatgtgcaa

SEQ ID NO: 126812 - DNA, 77 bp, Homo sapiens
ctttacaaaaatgactgcagtatcttcaacacatttgagttgcactcctacttcgttccagtcatgtgcaagtttaa

SEQ ID NO: 126813 - DNA, 82 bp, Homo sapiens
aaatgactgcagtatcttcaacacatttgagttgcactcctacttcgttccagtcatgtgcaagtttaatgcacagctctac

SEQ ID NO: 126814 - DNA, 79 bp, Homo sapiens
atcttcaacacatttgagttgcactcctacttcgttccagtcatgtgcaagtttaatgcacagctctacctcacaaaac

SEQ ID NO: 126815 - DNA, 78 bp, Homo sapiens
atttgagttgcactcctacttcgttccagtcatgtgcaagtttaatgcacagctctacctcacaaaacgggatatcta

SEQ ID NO: 126816 - DNA, 78 bp, Homo sapiens
actcctacttcgttccagtcatgtgcaagtttaatgcacagctctacctcacaaaacgggatatctatgacaccagaa

SEQ ID NO: 126817 - DNA, 78 bp, Homo sapiens
tacttcgttccagtcatgtgcaagtttaatgcacagctctacctcacaaaacgggatatctatgacaccagaacttcc

SEQ ID NO: 126818 - DNA, 78 bp, Homo sapiens
atgtgcaagtttaatgcacagctctacctcacaaaacgggatatctatgacaccagaacttccctgtgcccaaggtca

SEQ ID NO: 126819 - DNA, 76 bp, Homo sapiens
aagtttaatgcacagctctacctcacaaaacgggatatctatgacaccagaacttccctgtgcccaaggtcatgga

SEQ ID NO: 126820 - DNA, 77 bp, Homo sapiens
atatctatgacaccagaacttccctgtgcccaaggtcatggacaggaggggaaggcagtgaatttctactttatgca

SEQ ID NO: 126821 - DNA, 76 bp, Homo sapiens
tatgacaccagaacttccctgtgcccaaggtcatggacaggaggggaaggcagtgaatttctactttatgcatatt

SEQ ID NO: 126822 - DNA, 75 bp, Homo sapiens
ttccctgtgcccaaggtcatggacaggaggggaaggcagtgaatttctactttatgcatattttagggagcaata

SEQ ID NO: 126823 - DNA, 77 bp, Homo sapiens
caaggtcatggacaggaggggaaggcagtgaatttctactttatgcatattttagggagcaatactgtggctatcat

SEQ ID NO: 126824 - DNA, 75 bp, Homo sapiens
atggacaggaggggaaggcagtgaatttctactttatgcatattttagggagcaatactgtggctatcatttacc

SEQ ID NO: 126825 - DNA, 76 bp, Homo sapiens
gaaggcagtgaatttctactttatgcatattttagggagcaatactgtggctatcatttacccttttgagcaatct

SEQ ID NO: 126826 - DNA, 76 bp, Homo sapiens
cagtgaatttctactttatgcatattttagggagcaatactgtggctatcatttacccttttgagcaatcttgatt

SEQ ID NO: 126827 - DNA, 76 bp, Homo sapiens
ctttatgcatattttagggagcaatactgtggctatcatttacccttttgagcaatcttgattttggtcatttata

SEQ ID NO: 126828 - DNA, 76 bp, Homo sapiens
gtggctatcatttacccttttgagcaatcttgattttggtcatttataattagaacatgagaaaaagtgacagtga

SEQ ID NO: 126829 - DNA, 75 bp, Homo sapiens
tacccttttgagcaatcttgattttggtcatttataattagaacatgagaaaaagtgacagtgaatacaaatgag

SEQ ID NO: 126830 - DNA, 77 bp, Homo sapiens
tgagcaatcttgattttggtcatttataattagaacatgagaaaaagtgacagtgaatacaaatgagtactaaccga

SEQ ID NO: 126831 - DNA, 73 bp, Homo sapiens
tttggtcatttataattagaacatgagaaaaagtgacagtgaatacaaatgagtactaaccgaattcctaggc

SEQ ID NO: 126832 - DNA, 74 bp, Homo sapiens
tataattagaacatgagaaaaagtgacagtgaatacaaatgagtactaaccgaattcctaggctggtactagaa

SEQ ID NO: 126833 - DNA, 72 bp, Homo sapiens
gaacatgagaaaaagtgacagtgaatacaaatgagtactaaccgaattcctaggctggtactagaaaataaa

SEQ ID NO: 126834 - DNA, 69 bp, Homo sapiens
agaaaaagtgacagtgaatacaaatgagtactaaccgaattcctaggctggtactagaaaataaaataa

SEQ ID NO: 126835 - DNA, 69 bp, Homo sapiens
ataaaataaaaattgtaaaaaagtcccttgccatgttcacaaaggtggcaataactgtatatataagaa

SEQ ID NO: 126836 - DNA, 70 bp, Homo sapiens
aattgtaaaaaagtcccttgccatgttcacaaaggtggcaataactgtatatataagaaaaaggctgtaa

SEQ ID NO: 126837 - DNA, 71 bp, Homo sapiens
aaaagtcccttgccatgttcacaaaggtggcaataactgtatatataagaaaaaggctgtaaacttataga

SEQ ID NO: 126838 - DNA, 72 bp, Homo sapiens
ccttgccatgttcacaaaggtggcaataactgtatatataagaaaaaggctgtaaacttatagaaaagataa

SEQ ID NO: 126839 - DNA, 72 bp, Homo sapiens
tcacaaaggtggcaataactgtatatataagaaaaaggctgtaaacttatagaaaagataaactctggcttc

SEQ ID NO: 126840 - DNA, 71 bp, Homo sapiens
tggcaataactgtatatataagaaaaaggctgtaaacttatagaaaagataaactctggcttctaaacaaa

SEQ ID NO: 126841 - DNA, 68 bp, Homo sapiens
atataagaaaaaggctgtaaacttatagaaaagataaactctggcttctaaacaaattacaaaattga

SEQ ID NO: 126842 - DNA, 67 bp, Homo sapiens
aaaaggctgtaaacttatagaaaagataaactctggcttctaaacaaattacaaaattgattttgcc

SEQ ID NO: 126843 - DNA, 69 bp, Homo sapiens
acttatagaaaagataaactctggcttctaaacaaattacaaaattgattttgcctttatccttgagtg

SEQ ID NO: 126844 - DNA, 71 bp, Homo sapiens
gaaaagataaactctggcttctaaacaaattacaaaattgattttgcctttatccttgagtgtaacacaga

SEQ ID NO: 126845 - DNA, 69 bp, Homo sapiens
aaactctggcttctaaacaaattacaaaattgattttgcctttatccttgagtgtaacacagaaaaatg

SEQ ID NO: 126846 - DNA, 69 bp, Homo sapiens
caaaattgattttgcctttatccttgagtgtaacacagaaaaatgtaaacctgtagacctagttaccaa

SEQ ID NO: 126847 - DNA, 69 bp, Homo sapiens
gattttgcctttatccttgagtgtaacacagaaaaatgtaaacctgtagacctagttaccaaaagacaa

SEQ ID NO: 126848 - DNA, 70 bp, Homo sapiens
tccttgagtgtaacacagaaaaatgtaaacctgtagacctagttaccaaaagacaattatccttcttagc

SEQ ID NO: 126849 - DNA, 71 bp, Homo sapiens
gtaacacagaaaaatgtaaacctgtagacctagttaccaaaagacaattatccttcttagctcaggtatga

SEQ ID NO: 126850 - DNA, 68 bp, Homo sapiens
aaacctgtagacctagttaccaaaagacaattatccttcttagctcaggtatgaacttaaagtttggc

SEQ ID NO: 126851 - DNA, 72 bp, Homo sapiens
tagttaccaaaagacaattatccttcttagctcaggtatgaacttaaagtttggcctgagctagtttgatct

SEQ ID NO: 126852 - DNA, 71 bp, Homo sapiens
aaagacaattatccttcttagctcaggtatgaacttaaagtttggcctgagctagtttgatcttcaagttt

SEQ ID NO: 126853 - DNA, 72 bp, Homo sapiens
ttatccttcttagctcaggtatgaacttaaagtttggcctgagctagtttgatcttcaagttttctccaagt

SEQ ID NO: 126854 - DNA, 72 bp, Homo sapiens
gaacttaaagtttggcctgagctagtttgatcttcaagttttctccaagtttatccatgaactcaaatgtat

SEQ ID NO: 126855 - DNA, 76 bp, Homo sapiens
tagtttgatcttcaagttttctccaagtttatccatgaactcaaatgtattcaagtagtcagaacgttgcacacta

SEQ ID NO: 126856 - DNA, 72 bp, Homo sapiens
ttctccaagtttatccatgaactcaaatgtattcaagtagtcagaacgttgcacactaacgggaaggaaaaa

SEQ ID NO: 126857 - DNA, 69 bp, Homo sapiens
gtttatccatgaactcaaatgtattcaagtagtcagaacgttgcacactaacgggaaggaaaaaaaaaa

SEQ ID NO: 126858 - DNA, 71 bp, Homo sapiens
gtgaggataagtgttaatttgaccatagaaactagggcatcttatacttacttgggtaaacctttaatgca

SEQ ID NO: 126859 - DNA, 72 bp, Homo sapiens
tgttaatttgaccatagaaactagggcatcttatacttacttgggtaaacctttaatgcaagcagccaagtc

SEQ ID NO: 126860 - DNA, 73 bp, Homo sapiens
accatagaaactagggcatcttatacttacttgggtaaacctttaatgcaagcagccaagtccttggtcatga

SEQ ID NO: 126861 - DNA, 75 bp, Homo sapiens
tagggcatcttatacttacttgggtaaacctttaatgcaagcagccaagtccttggtcatgaagccagcctcaat

SEQ ID NO: 126862 - DNA, 76 bp, Homo sapiens
ttatacttacttgggtaaacctttaatgcaagcagccaagtccttggtcatgaagccagcctcaattgtctcaata

SEQ ID NO: 126863 - DNA, 77 bp, Homo sapiens
gtaaacctttaatgcaagcagccaagtccttggtcatgaagccagcctcaattgtctcaatagagacttcttccaaa

SEQ ID NO: 126864 - DNA, 81 bp, Homo sapiens
tttaatgcaagcagccaagtccttggtcatgaagccagcctcaattgtctcaatagagacttcttccaaagcatttgcaaa

SEQ ID NO: 126865 - DNA, 80 bp, Homo sapiens
aagcagccaagtccttggtcatgaagccagcctcaattgtctcaatagagacttcttccaaagcatttgcaaagaaggca

SEQ ID NO: 126866 - DNA, 80 bp, Homo sapiens
tggtcatgaagccagcctcaattgtctcaatagagacttcttccaaagcatttgcaaagaaggcaagctctttattgtta

SEQ ID NO: 126867 - DNA, 79 bp, Homo sapiens
atgaagccagcctcaattgtctcaatagagacttcttccaaagcatttgcaaagaaggcaagctctttattgttatcaa

SEQ ID NO: 126868 - DNA, 78 bp, Homo sapiens
aattgtctcaatagagacttcttccaaagcatttgcaaagaaggcaagctctttattgttatcaagctttgctctgtg

SEQ ID NO: 126869 - DNA, 76 bp, Homo sapiens
aatagagacttcttccaaagcatttgcaaagaaggcaagctctttattgttatcaagctttgctctgtgggctaac

SEQ ID NO: 126870 - DNA, 75 bp, Homo sapiens
acttcttccaaagcatttgcaaagaaggcaagctctttattgttatcaagctttgctctgtgggctaaccctctg

SEQ ID NO: 126871 - DNA, 74 bp, Homo sapiens
atttgcaaagaaggcaagctctttattgttatcaagctttgctctgtgggctaaccctctggtccaggcaaaaa

SEQ ID NO: 126872 - DNA, 73 bp, Homo sapiens
aaagaaggcaagctctttattgttatcaagctttgctctgtgggctaaccctctggtccaggcaaaaatggaa

SEQ ID NO: 126873 - DNA, 73 bp, Homo sapiens
agctctttattgttatcaagctttgctctgtgggctaaccctctggtccaggcaaaaatggaagctaaaagag

SEQ ID NO: 126874 - DNA, 71 bp, Homo sapiens
tgttatcaagctttgctctgtgggctaaccctctggtccaggcaaaaatggaagctaaaagaggggaaaaa

SEQ ID NO: 126875 - DNA, 68 bp, Homo sapiens
tttgctctgtgggctaaccctctggtccaggcaaaaatggaagctaaaagaggggaaaaaaaacacaa

SEQ ID NO: 126876 - DNA, 76 bp, Homo sapiens
tttggagagcactctctggtgagaaatcaatgtaaacaccatcttaccaatgggattggtggacgtctcctgtcct

SEQ ID NO: 126877 - DNA, 74 bp, Homo sapiens
actctctggtgagaaatcaatgtaaacaccatcttaccaatgggattggtggacgtctcctgtcctttctggta

SEQ ID NO: 126878 - DNA, 73 bp, Homo sapiens
agaaatcaatgtaaacaccatcttaccaatgggattggtggacgtctcctgtcctttctggtacatgcggtag

SEQ ID NO: 126879 - DNA, 72 bp, Homo sapiens
aatgtaaacaccatcttaccaatgggattggtggacgtctcctgtcctttctggtacatgcggtagtgacgg

SEQ ID NO: 126880 - DNA, 72 bp, Homo sapiens
accatcttaccaatgggattggtggacgtctcctgtcctttctggtacatgcggtagtgacgggttacagtc

SEQ ID NO: 126881 - DNA, 72 bp, Homo sapiens
aatgggattggtggacgtctcctgtcctttctggtacatgcggtagtgacgggttacagtcccgtgggcagc

SEQ ID NO: 126882 - DNA, 75 bp, Homo sapiens
tggtggacgtctcctgtcctttctggtacatgcggtagtgacgggttacagtcccgtgggcagcctctgcttcta

SEQ ID NO: 126883 - DNA, 78 bp, Homo sapiens
tgtcctttctggtacatgcggtagtgacgggttacagtcccgtgggcagcctctgcttctactgtcttgccatctgga

SEQ ID NO: 126884 - DNA, 77 bp, Homo sapiens
ttctggtacatgcggtagtgacgggttacagtcccgtgggcagcctctgcttctactgtcttgccatctggacaaac

SEQ ID NO: 126885 - DNA, 80 bp, Homo sapiens
gtagtgacgggttacagtcccgtgggcagcctctgcttctactgtcttgccatctggacaaaccagcacgctggtcatca

SEQ ID NO: 126886 - DNA, 85 bp, Homo sapiens
ttacagtcccgtgggcagcctctgcttctactgtcttgccatctggacaaaccagcacgctggtcatcatgccgagagagccata

SEQ ID NO: 126887 - DNA, 84 bp, Homo sapiens
gtgggcagcctctgcttctactgtcttgccatctggacaaaccagcacgctggtcatcatgccgagagagccataccctgtaag

SEQ ID NO: 126888 - DNA, 87 bp, Homo sapiens
tctgcttctactgtcttgccatctggacaaaccagcacgctggtcatcatgccgagagagccataccctgtaagtagtggagcatga

SEQ ID NO: 126889 - DNA, 84 bp, Homo sapiens
tactgtcttgccatctggacaaaccagcacgctggtcatcatgccgagagagccataccctgtaagtagtggagcatgaagcgt

SEQ ID NO: 126890 - DNA, 81 bp, Homo sapiens
atctggacaaaccagcacgctggtcatcatgccgagagagccataccctgtaagtagtggagcatgaagcgttgggtccaa

SEQ ID NO: 126891 - DNA, 74 bp, Homo sapiens
aactaccctggaatgaccctgttcctacaggccaggctccacctctgtaccttgggccacagagtccgactgca

SEQ ID NO: 126892 - DNA, 77 bp, Homo sapiens
atgaccctgttcctacaggccaggctccacctctgtaccttgggccacagagtccgactgcacgtcaccatcatagt

SEQ ID NO: 126893 - DNA, 77 bp, Homo sapiens
tgttcctacaggccaggctccacctctgtaccttgggccacagagtccgactgcacgtcaccatcatagtttttaca

SEQ ID NO: 126894 - DNA, 77 bp, Homo sapiens
aggctccacctctgtaccttgggccacagagtccgactgcacgtcaccatcatagtttttacaggcccagatgaagc

SEQ ID NO: 126895 - DNA, 78 bp, Homo sapiens
tctgtaccttgggccacagagtccgactgcacgtcaccatcatagtttttacaggcccagatgaagcctccctctgat

SEQ ID NO: 126896 - DNA, 79 bp, Homo sapiens
ttgggccacagagtccgactgcacgtcaccatcatagtttttacaggcccagatgaagcctccctctgatttcatagct

SEQ ID NO: 126897 - DNA, 78 bp, Homo sapiens
agagtccgactgcacgtcaccatcatagtttttacaggcccagatgaagcctccctctgatttcatagcttgggccac

SEQ ID NO: 126898 - DNA, 79 bp, Homo sapiens
acgtcaccatcatagtttttacaggcccagatgaagcctccctctgatttcatagcttgggccaccatgtcgtcgatga

SEQ ID NO: 126899 - DNA, 81 bp, Homo sapiens
atagtttttacaggcccagatgaagcctccctctgatttcatagcttgggccaccatgtcgtcgatgagcctatgctcata

SEQ ID NO: 126900 - DNA, 83 bp, Homo sapiens
tttacaggcccagatgaagcctccctctgatttcatagcttgggccaccatgtcgtcgatgagcctatgctcataccagatct

SEQ ID NO: 126901 - DNA, 83 bp, Homo sapiens
atgaagcctccctctgatttcatagcttgggccaccatgtcgtcgatgagcctatgctcataccagatcttttgagcttcaaa

SEQ ID NO: 126902 - DNA, 82 bp, Homo sapiens
ctctgatttcatagcttgggccaccatgtcgtcgatgagcctatgctcataccagatcttttgagcttcaaactgggacttg

SEQ ID NO: 126903 - DNA, 80 bp, Homo sapiens
atttcatagcttgggccaccatgtcgtcgatgagcctatgctcataccagatcttttgagcttcaaactgggacttgtac

SEQ ID NO: 126904 - DNA, 79 bp, Homo sapiens
ccaccatgtcgtcgatgagcctatgctcataccagatcttttgagcttcaaactgggacttgtactgcctgggaaacaa

SEQ ID NO: 126905 - DNA, 77 bp, Homo sapiens
atgtcgtcgatgagcctatgctcataccagatcttttgagcttcaaactgggacttgtactgcctgggaaacaaaag

SEQ ID NO: 126906 - DNA, 73 bp, Homo sapiens
ctatgctcataccagatcttttgagcttcaaactgggacttgtactgcctgggaaacaaaaggtaaaagagaa

SEQ ID NO: 126907 - DNA, 72 bp, Homo sapiens
tgtcagcttacttgagaataaagaaaaagttaaaaaagaactatagttacttgtcatatatctcctgaaaga

SEQ ID NO: 126908 - DNA, 70 bp, Homo sapiens
cttgagaataaagaaaaagttaaaaaagaactatagttacttgtcatatatctcctgaaagatgtcttta

SEQ ID NO: 126909 - DNA, 70 bp, Homo sapiens
aaaagttaaaaaagaactatagttacttgtcatatatctcctgaaagatgtctttaaaacgcccatcata

SEQ ID NO: 126910 - DNA, 74 bp, Homo sapiens
aaagaactatagttacttgtcatatatctcctgaaagatgtctttaaaacgcccatcatatttcttcagaatag

SEQ ID NO: 126911 - DNA, 73 bp, Homo sapiens
agttacttgtcatatatctcctgaaagatgtctttaaaacgcccatcatatttcttcagaatagtgtttttgg

SEQ ID NO: 126912 - DNA, 78 bp, Homo sapiens
tcatatatctcctgaaagatgtctttaaaacgcccatcatatttcttcagaatagtgtttttggtgctcagatacaaa

SEQ ID NO: 126913 - DNA, 75 bp, Homo sapiens
tcctgaaagatgtctttaaaacgcccatcatatttcttcagaatagtgtttttggtgctcagatacaaaggccaa

SEQ ID NO: 126914 - DNA, 72 bp, Homo sapiens
atgtctttaaaacgcccatcatatttcttcagaatagtgtttttggtgctcagatacaaaggccaaccctta

SEQ ID NO: 126915 - DNA, 74 bp, Homo sapiens
aaaacgcccatcatatttcttcagaatagtgtttttggtgctcagatacaaaggccaacccttagacagagcca

SEQ ID NO: 126916 - DNA, 73 bp, Homo sapiens
atatttcttcagaatagtgtttttggtgctcagatacaaaggccaacccttagacagagccatttggaaggaa

SEQ ID NO: 126917 - DNA, 73 bp, Homo sapiens
aatagtgtttttggtgctcagatacaaaggccaacccttagacagagccatttggaaggaactgtgtgcaaaa

SEQ ID NO: 126918 - DNA, 74 bp, Homo sapiens
tttttggtgctcagatacaaaggccaacccttagacagagccatttggaaggaactgtgtgcaaaatcttcaat

SEQ ID NO: 126919 - DNA, 74 bp, Homo sapiens
atacaaaggccaacccttagacagagccatttggaaggaactgtgtgcaaaatcttcaattgacttatcttgat

SEQ ID NO: 126920 - DNA, 75 bp, Homo sapiens
aaggccaacccttagacagagccatttggaaggaactgtgtgcaaaatcttcaattgacttatcttgattataca

SEQ ID NO: 126921 - DNA, 79 bp, Homo sapiens
cttagacagagccatttggaaggaactgtgtgcaaaatcttcaattgacttatcttgattatacatccccatggcaaca

SEQ ID NO: 126922 - DNA, 75 bp, Homo sapiens
atttggaaggaactgtgtgcaaaatcttcaattgacttatcttgattatacatccccatggcaacaccaccacct

SEQ ID NO: 126923 - DNA, 78 bp, Homo sapiens
aactgtgtgcaaaatcttcaattgacttatcttgattatacatccccatggcaacaccaccaccttctgtagaggaga

SEQ ID NO: 126924 - DNA, 77 bp, Homo sapiens
aaaatcttcaattgacttatcttgattatacatccccatggcaacaccaccaccttctgtagaggagaagccagtga

SEQ ID NO: 126925 - DNA, 76 bp, Homo sapiens
aattgacttatcttgattatacatccccatggcaacaccaccaccttctgtagaggagaagccagtgagaggaaaa

SEQ ID NO: 126926 - DNA, 76 bp, Homo sapiens
tatcttgattatacatccccatggcaacaccaccaccttctgtagaggagaagccagtgagaggaaaaaagggaga

SEQ ID NO: 126927 - DNA, 70 bp, Homo sapiens
aaaaaaaaaagaagcttatgctacagtcatacataccttcaaagttatgtaccaggtatgtcaccttttg

SEQ ID NO: 126928 - DNA, 71 bp, Homo sapiens
aaaaagaagcttatgctacagtcatacataccttcaaagttatgtaccaggtatgtcaccttttgggttcc

SEQ ID NO: 126929 - DNA, 75 bp, Homo sapiens
tatgctacagtcatacataccttcaaagttatgtaccaggtatgtcaccttttgggttccgtcacttggtgtgta

SEQ ID NO: 126930 - DNA, 70 bp, Homo sapiens
atacataccttcaaagttatgtaccaggtatgtcaccttttgggttccgtcacttggtgtgtaggttatc

SEQ ID NO: 126931 - DNA, 69 bp, Homo sapiens
ttcaaagttatgtaccaggtatgtcaccttttgggttccgtcacttggtgtgtaggttatctctacttt

SEQ ID NO: 126932 - DNA, 71 bp, Homo sapiens
tatgtaccaggtatgtcaccttttgggttccgtcacttggtgtgtaggttatctctacttttccaggccca

SEQ ID NO: 126933 - DNA, 68 bp, Homo sapiens
tcaccttttgggttccgtcacttggtgtgtaggttatctctacttttccaggcccaggaacaacaaaa

SEQ ID NO: 126934 - DNA, 68 bp, Homo sapiens
ttttgggttccgtcacttggtgtgtaggttatctctacttttccaggcccaggaacaacaaaatcagt

SEQ ID NO: 126935 - DNA, 73 bp, Homo sapiens
acttggtgtgtaggttatctctacttttccaggcccaggaacaacaaaatcagttgctctgtactgtgtagag

SEQ ID NO: 126936 - DNA, 71 bp, Homo sapiens
taggttatctctacttttccaggcccaggaacaacaaaatcagttgctctgtactgtgtagaggggaaaaa

SEQ ID NO: 126937 - DNA, 70 bp, Homo sapiens
tctacttttccaggcccaggaacaacaaaatcagttgctctgtactgtgtagaggggaaaaaggtataaa

SEQ ID NO: 126938 - DNA, 69 bp, Homo sapiens
ttccaggcccaggaacaacaaaatcagttgctctgtactgtgtagaggggaaaaaggtataaagaaaaa

SEQ ID NO: 126939 - DNA, 80 bp, Homo sapiens
tgaaaaaaaaaacatgcaaaatcacattattgccaacatgacttacttgatccccataagcatgacgacctatgatgata

SEQ ID NO: 126940 - DNA, 79 bp, Homo sapiens
aaaacatgcaaaatcacattattgccaacatgacttacttgatccccataagcatgacgacctatgatgataggtttta

SEQ ID NO: 126941 - DNA, 78 bp, Homo sapiens
aaaatcacattattgccaacatgacttacttgatccccataagcatgacgacctatgatgataggttttacccatcca

SEQ ID NO: 126942 - DNA, 79 bp, Homo sapiens
attattgccaacatgacttacttgatccccataagcatgacgacctatgatgataggttttacccatccactcacaagc

SEQ ID NO: 126943 - DNA, 74 bp, Homo sapiens
acttacttgatccccataagcatgacgacctatgatgataggttttacccatccactcacaagccgggggatat

SEQ ID NO: 126944 - DNA, 77 bp, Homo sapiens
ttgatccccataagcatgacgacctatgatgataggttttacccatccactcacaagccgggggatatttttgcaga

SEQ ID NO: 126945 - DNA, 76 bp, Homo sapiens
ataagcatgacgacctatgatgataggttttacccatccactcacaagccgggggatatttttgcagataatggct

SEQ ID NO: 126946 - DNA, 75 bp, Homo sapiens
acctatgatgataggttttacccatccactcacaagccgggggatatttttgcagataatggcttctctgaagac

SEQ ID NO: 126947 - DNA, 73 bp, Homo sapiens
ataggttttacccatccactcacaagccgggggatatttttgcagataatggcttctctgaagaccgtgccac

SEQ ID NO: 126948 - DNA, 75 bp, Homo sapiens
atccactcacaagccgggggatatttttgcagataatggcttctctgaagaccgtgccacccagaatatttcgta

SEQ ID NO: 126949 - DNA, 74 bp, Homo sapiens
aagccgggggatatttttgcagataatggcttctctgaagaccgtgccacccagaatatttcgtatggtgccat

SEQ ID NO: 126950 - DNA, 77 bp, Homo sapiens
atatttttgcagataatggcttctctgaagaccgtgccacccagaatatttcgtatggtgccatttggtgatttcca

SEQ ID NO: 126951 - DNA, 75 bp, Homo sapiens
atggcttctctgaagaccgtgccacccagaatatttcgtatggtgccatttggtgatttccacatttgtttcaac

SEQ ID NO: 126952 - DNA, 73 bp, Homo sapiens
accgtgccacccagaatatttcgtatggtgccatttggtgatttccacatttgtttcaacttgaactcctcaa

SEQ ID NO: 126953 - DNA, 71 bp, Homo sapiens
acccagaatatttcgtatggtgccatttggtgatttccacatttgtttcaacttgaactcctcaaccctct

SEQ ID NO: 126954 - DNA, 75 bp, Homo sapiens
atatttcgtatggtgccatttggtgatttccacatttgtttcaacttgaactcctcaaccctcttctcatcagga

SEQ ID NO: 126955 - DNA, 76 bp, Homo sapiens
ccatttggtgatttccacatttgtttcaacttgaactcctcaaccctcttctcatcaggagtgatagtggcacatt

SEQ ID NO: 126956 - DNA, 77 bp, Homo sapiens
atttccacatttgtttcaacttgaactcctcaaccctcttctcatcaggagtgatagtggcacatttgacgccaaca

SEQ ID NO: 126957 - DNA, 78 bp, Homo sapiens
ttgtttcaacttgaactcctcaaccctcttctcatcaggagtgatagtggcacatttgacgccaacattatgcttctt

SEQ ID NO: 126958 - DNA, 78 bp, Homo sapiens
aacttgaactcctcaaccctcttctcatcaggagtgatagtggcacatttgacgccaacattatgcttctttatagct

SEQ ID NO: 126959 - DNA, 85 bp, Homo sapiens
tcaaccctcttctcatcaggagtgatagtggcacatttgacgccaacattatgcttctttatagcttctgcagcatccttggtga

SEQ ID NO: 126960 - DNA, 80 bp, Homo sapiens
aggagtgatagtggcacatttgacgccaacattatgcttctttatagcttctgcagcatccttggtgacttggtcgttgg

SEQ ID NO: 126961 - DNA, 82 bp, Homo sapiens
cacatttgacgccaacattatgcttctttatagcttctgcagcatccttggtgacttggtcgttggtggcatcacgattctc

SEQ ID NO: 126962 - DNA, 83 bp, Homo sapiens
ttatgcttctttatagcttctgcagcatccttggtgacttggtcgttggtggcatcacgattctctatgcctaaatcatagct

SEQ ID NO: 126963 - DNA, 83 bp, Homo sapiens
tttatagcttctgcagcatccttggtgacttggtcgttggtggcatcacgattctctatgcctaaatcatagcttgaaagaga

SEQ ID NO: 126964 - DNA, 81 bp, Homo sapiens
tctgcagcatccttggtgacttggtcgttggtggcatcacgattctctatgcctaaatcatagcttgaaagagaaaaatta

SEQ ID NO: 126965 - DNA, 77 bp, Homo sapiens
ttggtgacttggtcgttggtggcatcacgattctctatgcctaaatcatagcttgaaagagaaaaattagaagcaaa

SEQ ID NO: 126966 - DNA, 77 bp, Homo sapiens
tcgttggtggcatcacgattctctatgcctaaatcatagcttgaaagagaaaaattagaagcaaagtttttcagaca

SEQ ID NO: 126967 - DNA, 71 bp, Homo sapiens
agattatcctttctgagtttgctacacggaggggtaactcatttacctatgtagatccaattccacgtagg

SEQ ID NO: 126968 - DNA, 71 bp, Homo sapiens
tttctgagtttgctacacggaggggtaactcatttacctatgtagatccaattccacgtagggaaaaatga

SEQ ID NO: 126969 - DNA, 68 bp, Homo sapiens
agtttgctacacggaggggtaactcatttacctatgtagatccaattccacgtagggaaaaatgagtt

SEQ ID NO: 126970 - DNA, 69 bp, Homo sapiens
gaggggtaactcatttacctatgtagatccaattccacgtagggaaaaatgagtttctctttaatcaat

SEQ ID NO: 126971 - DNA, 69 bp, Homo sapiens
aactcatttacctatgtagatccaattccacgtagggaaaaatgagtttctctttaatcaattcccaaa

SEQ ID NO: 126972 - DNA, 74 bp, Homo sapiens
tgtagatccaattccacgtagggaaaaatgagtttctctttaatcaattcccaaatgattcgtgtcatttcatc

SEQ ID NO: 126973 - DNA, 72 bp, Homo sapiens
tccaattccacgtagggaaaaatgagtttctctttaatcaattcccaaatgattcgtgtcatttcatctcct

SEQ ID NO: 126974 - DNA, 76 bp, Homo sapiens
ggaaaaatgagtttctctttaatcaattcccaaatgattcgtgtcatttcatctccttgcatctctaccacagaac

SEQ ID NO: 126975 - DNA, 77 bp, Homo sapiens
gtttctctttaatcaattcccaaatgattcgtgtcatttcatctccttgcatctctaccacagaaccgccactgatt

SEQ ID NO: 126976 - DNA, 76 bp, Homo sapiens
tctttaatcaattcccaaatgattcgtgtcatttcatctccttgcatctctaccacagaaccgccactgatttttt

SEQ ID NO: 126977 - DNA, 75 bp, Homo sapiens
attcccaaatgattcgtgtcatttcatctccttgcatctctaccacagaaccgccactgatttttttggacattt

SEQ ID NO: 126978 - DNA, 76 bp, Homo sapiens
attcgtgtcatttcatctccttgcatctctaccacagaaccgccactgatttttttggacattttgacttcaataa

SEQ ID NO: 126979 - DNA, 71 bp, Homo sapiens
atctccttgcatctctaccacagaaccgccactgatttttttggacattttgacttcaataaacctaaaaa

SEQ ID NO: 126980 - DNA, 70 bp, Homo sapiens
cttgcatctctaccacagaaccgccactgatttttttggacattttgacttcaataaacctaaaaagaaa

SEQ ID NO: 126981 - DNA, 72 bp, Homo sapiens
ttaaacactgtactgccacatcaaagaaagtacagaagaagggggaaaatttgctaattctcaccttgacag

SEQ ID NO: 126982 - DNA, 72 bp, Homo sapiens
ccacatcaaagaaagtacagaagaagggggaaaatttgctaattctcaccttgacagtgaatagatttctta

SEQ ID NO: 126983 - DNA, 70 bp, Homo sapiens
aaagaaagtacagaagaagggggaaaatttgctaattctcaccttgacagtgaatagatttcttatcacc

SEQ ID NO: 126984 - DNA, 70 bp, Homo sapiens
aagaagggggaaaatttgctaattctcaccttgacagtgaatagatttcttatcaccccagttcctccca

SEQ ID NO: 126985 - DNA, 75 bp, Homo sapiens
aaaatttgctaattctcaccttgacagtgaatagatttcttatcaccccagttcctcccagtcttgcagactcaa

SEQ ID NO: 126986 - DNA, 77 bp, Homo sapiens
taattctcaccttgacagtgaatagatttcttatcaccccagttcctcccagtcttgcagactcaactgaatgtagt

SEQ ID NO: 126987 - DNA, 77 bp, Homo sapiens
ttgacagtgaatagatttcttatcaccccagttcctcccagtcttgcagactcaactgaatgtagtttatcgcctaa

SEQ ID NO: 126988 - DNA, 73 bp, Homo sapiens
atagatttcttatcaccccagttcctcccagtcttgcagactcaactgaatgtagtttatcgcctaaaacaaa

SEQ ID NO: 126989 - DNA, 72 bp, Homo sapiens
tttcttatcaccccagttcctcccagtcttgcagactcaactgaatgtagtttatcgcctaaaacaaaacaa

SEQ ID NO: 126990 - DNA, 70 bp, Homo sapiens
agttcctcccagtcttgcagactcaactgaatgtagtttatcgcctaaaacaaaacaaggaataaaagtg

SEQ ID NO: 126991 - DNA, 71 bp, Homo sapiens
cccagtcttgcagactcaactgaatgtagtttatcgcctaaaacaaaacaaggaataaaagtgttaacata

SEQ ID NO: 126992 - DNA, 73 bp, Homo sapiens
gcagactcaactgaatgtagtttatcgcctaaaacaaaacaaggaataaaagtgttaacatacagaacactca

SEQ ID NO: 126993 - DNA, 70 bp, Homo sapiens
tttatcgcctaaaacaaaacaaggaataaaagtgttaacatacagaacactcacaggagaatttagctgt

SEQ ID NO: 126994 - DNA, 71 bp, Homo sapiens
caaaacaaggaataaaagtgttaacatacagaacactcacaggagaatttagctgtttttagtacctgcca

SEQ ID NO: 126995 - DNA, 73 bp, Homo sapiens
aaagtgttaacatacagaacactcacaggagaatttagctgtttttagtacctgccagacagcccagtttatc

SEQ ID NO: 126996 - DNA, 70 bp, Homo sapiens
agaacactcacaggagaatttagctgtttttagtacctgccagacagcccagtttatccggtttaaagta

SEQ ID NO: 126997 - DNA, 71 bp, Homo sapiens
acaggagaatttagctgtttttagtacctgccagacagcccagtttatccggtttaaagtacagtgctgag

SEQ ID NO: 126998 - DNA, 71 bp, Homo sapiens
aatttagctgtttttagtacctgccagacagcccagtttatccggtttaaagtacagtgctgagtgtactc

SEQ ID NO: 126999 - DNA, 71 bp, Homo sapiens
ttttagtacctgccagacagcccagtttatccggtttaaagtacagtgctgagtgtactcggtgggacaaa

SEQ ID NO: 127000 - DNA, 68 bp, Homo sapiens
agcccagtttatccggtttaaagtacagtgctgagtgtactcggtgggacaaaggccaattttaggcc

SEQ ID NO: 127001 - DNA, 70 bp, Homo sapiens
gtttaaagtacagtgctgagtgtactcggtgggacaaaggccaattttaggcccgcaggcactttccaaa

SEQ ID NO: 127002 - DNA, 70 bp, Homo sapiens
aagtacagtgctgagtgtactcggtgggacaaaggccaattttaggcccgcaggcactttccaaataaag

SEQ ID NO: 127003 - DNA, 71 bp, Homo sapiens
tgtactcggtgggacaaaggccaattttaggcccgcaggcactttccaaataaaggtcatgggagcacaat

SEQ ID NO: 127004 - DNA, 71 bp, Homo sapiens
tcggtgggacaaaggccaattttaggcccgcaggcactttccaaataaaggtcatgggagcacaatttatc

SEQ ID NO: 127005 - DNA, 74 bp, Homo sapiens
aaaggccaattttaggcccgcaggcactttccaaataaaggtcatgggagcacaatttatctctgcgtgtgcga

SEQ ID NO: 127006 - DNA, 75 bp, Homo sapiens
tttaggcccgcaggcactttccaaataaaggtcatgggagcacaatttatctctgcgtgtgcgagggcgtgcccc

SEQ ID NO: 127007 - DNA, 73 bp, Homo sapiens
actttccaaataaaggtcatgggagcacaatttatctctgcgtgtgcgagggcgtgcccccgcttcgccgccc

SEQ ID NO: 127008 - DNA, 74 bp, Homo sapiens
aaataaaggtcatgggagcacaatttatctctgcgtgtgcgagggcgtgcccccgcttcgccgcccgttagcag

SEQ ID NO: 127009 - DNA, 74 bp, Homo sapiens
acaatttatctctgcgtgtgcgagggcgtgcccccgcttcgccgcccgttagcaggtcttggggtttgcatgtc

SEQ ID NO: 127010 - DNA, 66 bp, Homo sapiens
tcccctcccctcgctggtgctgggaccttttaaactccaggcacccggaactggcgggggtgtttc

SEQ ID NO: 127011 - DNA, 66 bp, Homo sapiens
ccctcgctggtgctgggaccttttaaactccaggcacccggaactggcgggggtgtttcccccagc

SEQ ID NO: 127012 - DNA, 64 bp, Homo sapiens
ggtgctgggaccttttaaactccaggcacccggaactggcgggggtgtttcccccagccccctc

SEQ ID NO: 127013 - DNA, 64 bp, Homo sapiens
ttttaaactccaggcacccggaactggcgggggtgtttcccccagccccctctcgccccgtgtg

SEQ ID NO: 127014 - DNA, 67 bp, Homo sapiens
tccaggcacccggaactggcgggggtgtttcccccagccccctctcgccccgtgtggcctagcgacc

SEQ ID NO: 127015 - DNA, 66 bp, Homo sapiens
aactggcgggggtgtttcccccagccccctctcgccccgtgtggcctagcgacccctctgaaggcc

SEQ ID NO: 127016 - DNA, 70 bp, Homo sapiens
ggtgtttcccccagccccctctcgccccgtgtggcctagcgacccctctgaaggccgctggagctccgcc

SEQ ID NO: 127017 - DNA, 71 bp, Homo sapiens
cccagccccctctcgccccgtgtggcctagcgacccctctgaaggccgctggagctccgcccctccacgcc

SEQ ID NO: 127018 - DNA, 72 bp, Homo sapiens
ctctcgccccgtgtggcctagcgacccctctgaaggccgctggagctccgcccctccacgccccctggcgga

SEQ ID NO: 127019 - DNA, 73 bp, Homo sapiens
gtgtggcctagcgacccctctgaaggccgctggagctccgcccctccacgccccctggcggacgcgagggatc

SEQ ID NO: 127020 - DNA, 73 bp, Homo sapiens
cctccacagccagggaccggggccgccccttggagcctgaggttacctgccgggatgatatgctggcgaagag

SEQ ID NO: 127021 - DNA, 72 bp, Homo sapiens
acagccagggaccggggccgccccttggagcctgaggttacctgccgggatgatatgctggcgaagagttgg

SEQ ID NO: 127022 - DNA, 77 bp, Homo sapiens
ggccgccccttggagcctgaggttacctgccgggatgatatgctggcgaagagttggggcgccacagccgctcacaa

SEQ ID NO: 127023 - DNA, 82 bp, Homo sapiens
ttggagcctgaggttacctgccgggatgatatgctggcgaagagttggggcgccacagccgctcacaagctcagactcacaa

SEQ ID NO: 127024 - DNA, 81 bp, Homo sapiens
cctgaggttacctgccgggatgatatgctggcgaagagttggggcgccacagccgctcacaagctcagactcacaaccaca

SEQ ID NO: 127025 - DNA, 82 bp, Homo sapiens
cgggatgatatgctggcgaagagttggggcgccacagccgctcacaagctcagactcacaaccacagcctggcaatcccaaa

SEQ ID NO: 127026 - DNA, 80 bp, Homo sapiens
atatgctggcgaagagttggggcgccacagccgctcacaagctcagactcacaaccacagcctggcaatcccaaaccgga

SEQ ID NO: 127027 - DNA, 76 bp, Homo sapiens
aagagttggggcgccacagccgctcacaagctcagactcacaaccacagcctggcaatcccaaaccggactcccag

SEQ ID NO: 127028 - DNA, 80 bp, Homo sapiens
gccacagccgctcacaagctcagactcacaaccacagcctggcaatcccaaaccggactcccagtgcctccgcttctgaa

SEQ ID NO: 127029 - DNA, 78 bp, Homo sapiens
ctcacaagctcagactcacaaccacagcctggcaatcccaaaccggactcccagtgcctccgcttctgaagtagactc

SEQ ID NO: 127030 - DNA, 78 bp, Homo sapiens
ctcagactcacaaccacagcctggcaatcccaaaccggactcccagtgcctccgcttctgaagtagactctgcagaaa

SEQ ID NO: 127031 - DNA, 73 bp, Homo sapiens
acaaccacagcctggcaatcccaaaccggactcccagtgcctccgcttctgaagtagactctgcagaaacccg

SEQ ID NO: 127032 - DNA, 73 bp, Homo sapiens
agcctggcaatcccaaaccggactcccagtgcctccgcttctgaagtagactctgcagaaacccgggaccaca

SEQ ID NO: 127033 - DNA, 69 bp, Homo sapiens
aaaccggactcccagtgcctccgcttctgaagtagactctgcagaaacccgggaccacagggtaggtcc

SEQ ID NO: 127034 - DNA, 71 bp, Homo sapiens
ccagtgcctccgcttctgaagtagactctgcagaaacccgggaccacagggtaggtccgagcttttcctct

SEQ ID NO: 127035 - DNA, 69 bp, Homo sapiens
cctccgcttctgaagtagactctgcagaaacccgggaccacagggtaggtccgagcttttcctcttccc

SEQ ID NO: 127036 - DNA, 63 bp, Homo sapiens
accggcccgcagccggaaccggaaatgcccttagggaagtcggaggcggaaaactaagagggg

SEQ ID NO: 127037 - DNA, 66 bp, Homo sapiens
ccggaaccggaaatgcccttagggaagtcggaggcggaaaactaagaggggtgggcagctagcgtc

SEQ ID NO: 127038 - DNA, 68 bp, Homo sapiens
aaatgcccttagggaagtcggaggcggaaaactaagaggggtgggcagctagcgtcgtttctaggcaa

SEQ ID NO: 127039 - DNA, 70 bp, Homo sapiens
ttagggaagtcggaggcggaaaactaagaggggtgggcagctagcgtcgtttctaggcaaccgcagactc

SEQ ID NO: 127040 - DNA, 69 bp, Homo sapiens
aggcggaaaactaagaggggtgggcagctagcgtcgtttctaggcaaccgcagactccgggtccttagc

SEQ ID NO: 127041 - DNA, 68 bp, Homo sapiens
aaaactaagaggggtgggcagctagcgtcgtttctaggcaaccgcagactccgggtccttagccgggc

SEQ ID NO: 127042 - DNA, 75 bp, Homo sapiens
tgggcagctagcgtcgtttctaggcaaccgcagactccgggtccttagccgggcctgatggccctgaggcagttc

SEQ ID NO: 127043 - DNA, 74 bp, Homo sapiens
tagcgtcgtttctaggcaaccgcagactccgggtccttagccgggcctgatggccctgaggcagttcggatgtg

SEQ ID NO: 127044 - DNA, 74 bp, Homo sapiens
tttctaggcaaccgcagactccgggtccttagccgggcctgatggccctgaggcagttcggatgtgtcccagga

SEQ ID NO: 127045 - DNA, 73 bp, Homo sapiens
aaccgcagactccgggtccttagccgggcctgatggccctgaggcagttcggatgtgtcccaggaagtgccca

SEQ ID NO: 127046 - DNA, 76 bp, Homo sapiens
gtccttagccgggcctgatggccctgaggcagttcggatgtgtcccaggaagtgcccatgtgtggtccgccgtcca

SEQ ID NO: 127047 - DNA, 77 bp, Homo sapiens
gggcctgatggccctgaggcagttcggatgtgtcccaggaagtgcccatgtgtggtccgccgtccattccacacctc

SEQ ID NO: 127048 - DNA, 77 bp, Homo sapiens
gccctgaggcagttcggatgtgtcccaggaagtgcccatgtgtggtccgccgtccattccacacctctgagcgcctt

SEQ ID NO: 127049 - DNA, 77 bp, Homo sapiens
agttcggatgtgtcccaggaagtgcccatgtgtggtccgccgtccattccacacctctgagcgcctttgtcctctga

SEQ ID NO: 127050 - DNA, 78 bp, Homo sapiens
atgtgtcccaggaagtgcccatgtgtggtccgccgtccattccacacctctgagcgcctttgtcctctgaacttctca

SEQ ID NO: 127051 - DNA, 77 bp, Homo sapiens
aagtgcccatgtgtggtccgccgtccattccacacctctgagcgcctttgtcctctgaacttctcaccagttctagc

SEQ ID NO: 127052 - DNA, 75 bp, Homo sapiens
tgtggtccgccgtccattccacacctctgagcgcctttgtcctctgaacttctcaccagttctagcgagtaaaat

SEQ ID NO: 127053 - DNA, 74 bp, Homo sapiens
cgtccattccacacctctgagcgcctttgtcctctgaacttctcaccagttctagcgagtaaaattgtaagaaa

SEQ ID NO: 127054 - DNA, 73 bp, Homo sapiens
attccacacctctgagcgcctttgtcctctgaacttctcaccagttctagcgagtaaaattgtaagaaaggga

SEQ ID NO: 127055 - DNA, 74 bp, Homo sapiens
tctgagcgcctttgtcctctgaacttctcaccagttctagcgagtaaaattgtaagaaagggagccgaaagaga

SEQ ID NO: 127056 - DNA, 70 bp, Homo sapiens
tttgtcctctgaacttctcaccagttctagcgagtaaaattgtaagaaagggagccgaaagagaccggag

SEQ ID NO: 127057 - DNA, 67 bp, Homo sapiens
aaaaggcaaggtggctaacatttttcctttcccgtgccccaactaggcgtcccagatgttgtggaac

SEQ ID NO: 127058 - DNA, 71 bp, Homo sapiens
gtggctaacatttttcctttcccgtgccccaactaggcgtcccagatgttgtggaactgtccctggatcta

SEQ ID NO: 127059 - DNA, 72 bp, Homo sapiens
atttttcctttcccgtgccccaactaggcgtcccagatgttgtggaactgtccctggatctatagctcttca

SEQ ID NO: 127060 - DNA, 74 bp, Homo sapiens
tttcccgtgccccaactaggcgtcccagatgttgtggaactgtccctggatctatagctcttcaccgtctctac

SEQ ID NO: 127061 - DNA, 73 bp, Homo sapiens
cccaactaggcgtcccagatgttgtggaactgtccctggatctatagctcttcaccgtctctactttcttcct

SEQ ID NO: 127062 - DNA, 77 bp, Homo sapiens
tcccagatgttgtggaactgtccctggatctatagctcttcaccgtctctactttcttccttctaagagatcctgaa

SEQ ID NO: 127063 - DNA, 74 bp, Homo sapiens
atgttgtggaactgtccctggatctatagctcttcaccgtctctactttcttccttctaagagatcctgaaacc

SEQ ID NO: 127064 - DNA, 76 bp, Homo sapiens
tgtccctggatctatagctcttcaccgtctctactttcttccttctaagagatcctgaaacctctgtcatggaaaa

SEQ ID NO: 127065 - DNA, 74 bp, Homo sapiens
atctatagctcttcaccgtctctactttcttccttctaagagatcctgaaacctctgtcatggaaaagtaccac

SEQ ID NO: 127066 - DNA, 73 bp, Homo sapiens
accgtctctactttcttccttctaagagatcctgaaacctctgtcatggaaaagtaccacgtgttggagatga

SEQ ID NO: 127067 - DNA, 73 bp, Homo sapiens
actttcttccttctaagagatcctgaaacctctgtcatggaaaagtaccacgtgttggagatgattggagaag

SEQ ID NO: 127068 - DNA, 74 bp, Homo sapiens
ttccttctaagagatcctgaaacctctgtcatggaaaagtaccacgtgttggagatgattggagaaggctcttt

SEQ ID NO: 127069 - DNA, 73 bp, Homo sapiens
agatcctgaaacctctgtcatggaaaagtaccacgtgttggagatgattggagaaggctcttttgggagggtg

SEQ ID NO: 127070 - DNA, 73 bp, Homo sapiens
tctgtcatggaaaagtaccacgtgttggagatgattggagaaggctcttttgggagggtgtacaagggtcgaa

SEQ ID NO: 127071 - DNA, 69 bp, Homo sapiens
aaagtaccacgtgttggagatgattggagaaggctcttttgggagggtgtacaagggtcgaagaaaata

SEQ ID NO: 127072 - DNA, 73 bp, Homo sapiens
accacgtgttggagatgattggagaaggctcttttgggagggtgtacaagggtcgaagaaaatacagtgctca

SEQ ID NO: 127073 - DNA, 74 bp, Homo sapiens
atgattggagaaggctcttttgggagggtgtacaagggtcgaagaaaatacagtgctcaggtgttgcacaaaga

SEQ ID NO: 127074 - DNA, 72 bp, Homo sapiens
agaaggctcttttgggagggtgtacaagggtcgaagaaaatacagtgctcaggtgttgcacaaagagggata

SEQ ID NO: 127075 - DNA, 70 bp, Homo sapiens
tttgggagggtgtacaagggtcgaagaaaatacagtgctcaggtgttgcacaaagagggataccttttgg

SEQ ID NO: 127076 - DNA, 72 bp, Homo sapiens
atcttttcagtagtgtgattaggcgttaacttttcaccttaccactgacaggtcgtggccctgaagttcatc

SEQ ID NO: 127077 - DNA, 71 bp, Homo sapiens
tagtgtgattaggcgttaacttttcaccttaccactgacaggtcgtggccctgaagttcatcccaaaattg

SEQ ID NO: 127078 - DNA, 71 bp, Homo sapiens
ttaacttttcaccttaccactgacaggtcgtggccctgaagttcatcccaaaattggggcgctcagagaag

SEQ ID NO: 127079 - DNA, 74 bp, Homo sapiens
ttttcaccttaccactgacaggtcgtggccctgaagttcatcccaaaattggggcgctcagagaaggagctgag

SEQ ID NO: 127080 - DNA, 77 bp, Homo sapiens
tgacaggtcgtggccctgaagttcatcccaaaattggggcgctcagagaaggagctgaggaatttgcaacgagagat

SEQ ID NO: 127081 - DNA, 76 bp, Homo sapiens
gtggccctgaagttcatcccaaaattggggcgctcagagaaggagctgaggaatttgcaacgagagattgaaataa

SEQ ID NO: 127082 - DNA, 76 bp, Homo sapiens
ctgaagttcatcccaaaattggggcgctcagagaaggagctgaggaatttgcaacgagagattgaaataatgcggg

SEQ ID NO: 127083 - DNA, 77 bp, Homo sapiens
aaattggggcgctcagagaaggagctgaggaatttgcaacgagagattgaaataatgcggggtctgcggcatcccaa

SEQ ID NO: 127084 - DNA, 85 bp, Homo sapiens
gctcagagaaggagctgaggaatttgcaacgagagattgaaataatgcggggtctgcggcatcccaacattgtgcatatgcttga

SEQ ID NO: 127085 - DNA, 82 bp, Homo sapiens
aggagctgaggaatttgcaacgagagattgaaataatgcggggtctgcggcatcccaacattgtgcatatgcttgacagctt

SEQ ID NO: 127086 - DNA, 82 bp, Homo sapiens
aatttgcaacgagagattgaaataatgcggggtctgcggcatcccaacattgtgcatatgcttgacagctttgaaactgata

SEQ ID NO: 127087 - DNA, 80 bp, Homo sapiens
aacgagagattgaaataatgcggggtctgcggcatcccaacattgtgcatatgcttgacagctttgaaactgataaagag

SEQ ID NO: 127088 - DNA, 80 bp, Homo sapiens
attgaaataatgcggggtctgcggcatcccaacattgtgcatatgcttgacagctttgaaactgataaagaggtgtgctt

SEQ ID NO: 127089 - DNA, 80 bp, Homo sapiens
gggtctgcggcatcccaacattgtgcatatgcttgacagctttgaaactgataaagaggtgtgctttgacagttttgggc

SEQ ID NO: 127090 - DNA, 78 bp, Homo sapiens
atcccaacattgtgcatatgcttgacagctttgaaactgataaagaggtgtgctttgacagttttgggccctgtctcc

SEQ ID NO: 127091 - DNA, 77 bp, Homo sapiens
aacattgtgcatatgcttgacagctttgaaactgataaagaggtgtgctttgacagttttgggccctgtctccccaa

SEQ ID NO: 127092 - DNA, 82 bp, Homo sapiens
aatttcccaacctcagaatgcatgaatctggagccatcagtgccactgccttctctctgtaggtggtggtggtgacagacta

SEQ ID NO: 127093 - DNA, 86 bp, Homo sapiens
agaatgcatgaatctggagccatcagtgccactgccttctctctgtaggtggtggtggtgacagactatgctgagggagagctctt

SEQ ID NO: 127094 - DNA, 86 bp, Homo sapiens
atgaatctggagccatcagtgccactgccttctctctgtaggtggtggtggtgacagactatgctgagggagagctctttcagatc

SEQ ID NO: 127095 - DNA, 84 bp, Homo sapiens
atcagtgccactgccttctctctgtaggtggtggtggtgacagactatgctgagggagagctctttcagatcctagaagatgac

SEQ ID NO: 127096 - DNA, 80 bp, Homo sapiens
ctgccttctctctgtaggtggtggtggtgacagactatgctgagggagagctctttcagatcctagaagatgacggaaaa

SEQ ID NO: 127097 - DNA, 79 bp, Homo sapiens
tctgtaggtggtggtggtgacagactatgctgagggagagctctttcagatcctagaagatgacggaaaacttcctgaa

SEQ ID NO: 127098 - DNA, 78 bp, Homo sapiens
gtggtggtgacagactatgctgagggagagctctttcagatcctagaagatgacggaaaacttcctgaagaccaggta

SEQ ID NO: 127099 - DNA, 79 bp, Homo sapiens
gtgacagactatgctgagggagagctctttcagatcctagaagatgacggaaaacttcctgaagaccaggtatgctttc

SEQ ID NO: 127100 - DNA, 79 bp, Homo sapiens
tatgctgagggagagctctttcagatcctagaagatgacggaaaacttcctgaagaccaggtatgctttctgccttcaa

SEQ ID NO: 127101 - DNA, 75 bp, Homo sapiens
agagctctttcagatcctagaagatgacggaaaacttcctgaagaccaggtatgctttctgccttcaacttctcc

SEQ ID NO: 127102 - DNA, 72 bp, Homo sapiens
atcctagaagatgacggaaaacttcctgaagaccaggtatgctttctgccttcaacttctccccacctccga

SEQ ID NO: 127103 - DNA, 71 bp, Homo sapiens
aagatgacggaaaacttcctgaagaccaggtatgctttctgccttcaacttctccccacctccgacctctc

SEQ ID NO: 127104 - DNA, 72 bp, Homo sapiens
tttttctttcttccacctctttaatttctaggttcaggccattgctgcccagttggtgtcagccctgtacta

SEQ ID NO: 127105 - DNA, 76 bp, Homo sapiens
tttcttccacctctttaatttctaggttcaggccattgctgcccagttggtgtcagccctgtactatctgcattcc

SEQ ID NO: 127106 - DNA, 79 bp, Homo sapiens
tctttaatttctaggttcaggccattgctgcccagttggtgtcagccctgtactatctgcattcccaccgcatcctaca

SEQ ID NO: 127107 - DNA, 82 bp, Homo sapiens
tctaggttcaggccattgctgcccagttggtgtcagccctgtactatctgcattcccaccgcatcctacaccgagatatgaa

SEQ ID NO: 127108 - DNA, 82 bp, Homo sapiens
attgctgcccagttggtgtcagccctgtactatctgcattcccaccgcatcctacaccgagatatgaagcctcagaacatcc

SEQ ID NO: 127109 - DNA, 81 bp, Homo sapiens
agttggtgtcagccctgtactatctgcattcccaccgcatcctacaccgagatatgaagcctcagaacatcctcctcgcca

SEQ ID NO: 127110 - DNA, 81 bp, Homo sapiens
tgtcagccctgtactatctgcattcccaccgcatcctacaccgagatatgaagcctcagaacatcctcctcgccaagggtg

SEQ ID NO: 127111 - DNA, 82 bp, Homo sapiens
tgtactatctgcattcccaccgcatcctacaccgagatatgaagcctcagaacatcctcctcgccaagggtggtggcatcaa

SEQ ID NO: 127112 - DNA, 80 bp, Homo sapiens
attcccaccgcatcctacaccgagatatgaagcctcagaacatcctcctcgccaagggtggtggcatcaagctctgtgac

SEQ ID NO: 127113 - DNA, 78 bp, Homo sapiens
atcctacaccgagatatgaagcctcagaacatcctcctcgccaagggtggtggcatcaagctctgtgactttgggtaa

SEQ ID NO: 127114 - DNA, 81 bp, Homo sapiens
agatatgaagcctcagaacatcctcctcgccaagggtggtggcatcaagctctgtgactttgggtaaagattctgagcatc

SEQ ID NO: 127115 - DNA, 80 bp, Homo sapiens
aagcctcagaacatcctcctcgccaagggtggtggcatcaagctctgtgactttgggtaaagattctgagcatccatcta

SEQ ID NO: 127116 - DNA, 79 bp, Homo sapiens
aacatcctcctcgccaagggtggtggcatcaagctctgtgactttgggtaaagattctgagcatccatctaagcttcca

SEQ ID NO: 127117 - DNA, 76 bp, Homo sapiens
ttagaatatcttttccctttccatttccatcccattatcttctgcagatttgcccgggctatgagcaccaatacaa

SEQ ID NO: 127118 - DNA, 79 bp, Homo sapiens
ttttccctttccatttccatcccattatcttctgcagatttgcccgggctatgagcaccaatacaatggtgctgacatc

SEQ ID NO: 127119 - DNA, 83 bp, Homo sapiens
tttccatttccatcccattatcttctgcagatttgcccgggctatgagcaccaatacaatggtgctgacatccatcaaaggca

SEQ ID NO: 127120 - DNA, 84 bp, Homo sapiens
atcccattatcttctgcagatttgcccgggctatgagcaccaatacaatggtgctgacatccatcaaaggcacaccactctata

SEQ ID NO: 127121 - DNA, 86 bp, Homo sapiens
atcttctgcagatttgcccgggctatgagcaccaatacaatggtgctgacatccatcaaaggcacaccactctatatgtctccaga

SEQ ID NO: 127122 - DNA, 84 bp, Homo sapiens
atttgcccgggctatgagcaccaatacaatggtgctgacatccatcaaaggcacaccactctatatgtctccagagctggtgga

SEQ ID NO: 127123 - DNA, 84 bp, Homo sapiens
aatacaatggtgctgacatccatcaaaggcacaccactctatatgtctccagagctggtggaggagcgaccatacgaccacaca

SEQ ID NO: 127124 - DNA, 83 bp, Homo sapiens
ctgacatccatcaaaggcacaccactctatatgtctccagagctggtggaggagcgaccatacgaccacacagcggacctctg

SEQ ID NO: 127125 - DNA, 80 bp, Homo sapiens
atcaaaggcacaccactctatatgtctccagagctggtggaggagcgaccatacgaccacacagcggacctctggtctgt

SEQ ID NO: 127126 - DNA, 84 bp, Homo sapiens
ctgttggctgcatactatatgaactggcagtaggcacccctcccttctatgctacaagcatctttcagctggtcagcctcattc

SEQ ID NO: 127127 - DNA, 82 bp, Homo sapiens
catactatatgaactggcagtaggcacccctcccttctatgctacaagcatctttcagctggtcagcctcattctcaaggac

SEQ ID NO: 127128 - DNA, 81 bp, Homo sapiens
tatatgaactggcagtaggcacccctcccttctatgctacaagcatctttcagctggtcagcctcattctcaaggaccctg

SEQ ID NO: 127129 - DNA, 81 bp, Homo sapiens
taggcacccctcccttctatgctacaagcatctttcagctggtcagcctcattctcaaggaccctgtgcgctggccctcaa

SEQ ID NO: 127130 - DNA, 82 bp, Homo sapiens
tcccttctatgctacaagcatctttcagctggtcagcctcattctcaaggaccctgtgcgctggccctcaaccatcagtccc

SEQ ID NO: 127131 - DNA, 83 bp, Homo sapiens
tatgctacaagcatctttcagctggtcagcctcattctcaaggaccctgtgcgctggccctcaaccatcagtccctgctttaa

SEQ ID NO: 127132 - DNA, 79 bp, Homo sapiens
atctttcagctggtcagcctcattctcaaggaccctgtgcgctggccctcaaccatcagtccctgctttaaggtaatga

SEQ ID NO: 127133 - DNA, 76 bp, Homo sapiens
attctcaaggaccctgtgcgctggccctcaaccatcagtccctgctttaaggtaatgaatattgaaagggagatga

SEQ ID NO: 127134 - DNA, 74 bp, Homo sapiens
accctgtgcgctggccctcaaccatcagtccctgctttaaggtaatgaatattgaaagggagatgacttttaca

SEQ ID NO: 127135 - DNA, 74 bp, Homo sapiens
agacttaagggaagggaaagaatgactgatggaatattttttctctctgtagaacttcctgcagggactgctca

SEQ ID NO: 127136 - DNA, 74 bp, Homo sapiens
aagggaaagaatgactgatggaatattttttctctctgtagaacttcctgcagggactgctcaccaaagaccca

SEQ ID NO: 127137 - DNA, 77 bp, Homo sapiens
aatgactgatggaatattttttctctctgtagaacttcctgcagggactgctcaccaaagacccacggcagcgactg

SEQ ID NO: 127138 - DNA, 76 bp, Homo sapiens
aatattttttctctctgtagaacttcctgcagggactgctcaccaaagacccacggcagcgactgtcctggccaga

SEQ ID NO: 127139 - DNA, 80 bp, Homo sapiens
ttctctctgtagaacttcctgcagggactgctcaccaaagacccacggcagcgactgtcctggccagacctcttatatca

SEQ ID NO: 127140 - DNA, 75 bp, Homo sapiens
acttcctgcagggactgctcaccaaagacccacggcagcgactgtcctggccagacctcttatatcaccccttta

SEQ ID NO: 127141 - DNA, 76 bp, Homo sapiens
agggactgctcaccaaagacccacggcagcgactgtcctggccagacctcttatatcacccctttattgctggtca

SEQ ID NO: 127142 - DNA, 77 bp, Homo sapiens
accaaagacccacggcagcgactgtcctggccagacctcttatatcacccctttattgctggtcatgtcaccagtga

SEQ ID NO: 127143 - DNA, 80 bp, Homo sapiens
agacccacggcagcgactgtcctggccagacctcttatatcacccctttattgctggtcatgtcaccagtgagtcatcag

SEQ ID NO: 127144 - DNA, 78 bp, Homo sapiens
agcgactgtcctggccagacctcttatatcacccctttattgctggtcatgtcaccagtgagtcatcagggttcccag

SEQ ID NO: 127145 - DNA, 76 bp, Homo sapiens
ccagacctcttatatcacccctttattgctggtcatgtcaccagtgagtcatcagggttcccagggctcttggact

SEQ ID NO: 127146 - DNA, 76 bp, Homo sapiens
cctcttatatcacccctttattgctggtcatgtcaccagtgagtcatcagggttcccagggctcttggacttccca

SEQ ID NO: 127147 - DNA, 77 bp, Homo sapiens
agggactatggcccccatgatcatgtcttcctcctcttccctccctgcagtaataactgagccagcaggcccagatt

SEQ ID NO: 127148 - DNA, 78 bp, Homo sapiens
ccatgatcatgtcttcctcctcttccctccctgcagtaataactgagccagcaggcccagatttggggaccccattca

SEQ ID NO: 127149 - DNA, 76 bp, Homo sapiens
atcatgtcttcctcctcttccctccctgcagtaataactgagccagcaggcccagatttggggaccccattcacca

SEQ ID NO: 127150 - DNA, 73 bp, Homo sapiens
ctcttccctccctgcagtaataactgagccagcaggcccagatttggggaccccattcaccagccgcctaccc

SEQ ID NO: 127151 - DNA, 74 bp, Homo sapiens
cctgcagtaataactgagccagcaggcccagatttggggaccccattcaccagccgcctacccccagaacttca

SEQ ID NO: 127152 - DNA, 72 bp, Homo sapiens
gtaataactgagccagcaggcccagatttggggaccccattcaccagccgcctacccccagaacttcaggtc

SEQ ID NO: 127153 - DNA, 69 bp, Homo sapiens
gcaggcccagatttggggaccccattcaccagccgcctacccccagaacttcaggtcctaaaggacgaa

SEQ ID NO: 127154 - DNA, 67 bp, Homo sapiens
atttggggaccccattcaccagccgcctacccccagaacttcaggtcctaaaggacgaacaggccca

SEQ ID NO: 127155 - DNA, 68 bp, Homo sapiens
cccattcaccagccgcctacccccagaacttcaggtcctaaaggacgaacaggcccatcggttggccc

SEQ ID NO: 127156 - DNA, 66 bp, Homo sapiens
accagccgcctacccccagaacttcaggtcctaaaggacgaacaggcccatcggttggcccccaag

SEQ ID NO: 127157 - DNA, 69 bp, Homo sapiens
ccccagaacttcaggtcctaaaggacgaacaggcccatcggttggcccccaagggtaatcagtctcgca

SEQ ID NO: 127158 - DNA, 70 bp, Homo sapiens
aacttcaggtcctaaaggacgaacaggcccatcggttggcccccaagggtaatcagtctcgcatcttgac

SEQ ID NO: 127159 - DNA, 72 bp, Homo sapiens
ctaaaggacgaacaggcccatcggttggcccccaagggtaatcagtctcgcatcttgactcaggcctataaa

SEQ ID NO: 127160 - DNA, 76 bp, Homo sapiens
aacaggcccatcggttggcccccaagggtaatcagtctcgcatcttgactcaggcctataaacgcatggctgagga

SEQ ID NO: 127161 - DNA, 79 bp, Homo sapiens
atcggttggcccccaagggtaatcagtctcgcatcttgactcaggcctataaacgcatggctgaggaggccatgcagaa

SEQ ID NO: 127162 - DNA, 81 bp, Homo sapiens
aagggtaatcagtctcgcatcttgactcaggcctataaacgcatggctgaggaggccatgcagaaggtgtgtggggcagag

SEQ ID NO: 127163 - DNA, 83 bp, Homo sapiens
taatcagtctcgcatcttgactcaggcctataaacgcatggctgaggaggccatgcagaaggtgtgtggggcagaggaaaata

SEQ ID NO: 127164 - DNA, 81 bp, Homo sapiens
atcttgactcaggcctataaacgcatggctgaggaggccatgcagaaggtgtgtggggcagaggaaaatatgtgaaatgac

SEQ ID NO: 127165 - DNA, 79 bp, Homo sapiens
ctatagcaatcaaatagctctgattcagtgttgccccctacctcccacagaaacatcagaacacaggacctgcccttga

SEQ ID NO: 127166 - DNA, 77 bp, Homo sapiens
aaatagctctgattcagtgttgccccctacctcccacagaaacatcagaacacaggacctgcccttgagcaagagga

SEQ ID NO: 127167 - DNA, 77 bp, Homo sapiens
ctgattcagtgttgccccctacctcccacagaaacatcagaacacaggacctgcccttgagcaagaggacaagacca

SEQ ID NO: 127168 - DNA, 75 bp, Homo sapiens
cccctacctcccacagaaacatcagaacacaggacctgcccttgagcaagaggacaagaccagcaaggtggctcc

SEQ ID NO: 127169 - DNA, 79 bp, Homo sapiens
acctcccacagaaacatcagaacacaggacctgcccttgagcaagaggacaagaccagcaaggtggctcctggcacagc

SEQ ID NO: 127170 - DNA, 79 bp, Homo sapiens
aaacatcagaacacaggacctgcccttgagcaagaggacaagaccagcaaggtggctcctggcacagcccctctgccca

SEQ ID NO: 127171 - DNA, 77 bp, Homo sapiens
aacacaggacctgcccttgagcaagaggacaagaccagcaaggtggctcctggcacagcccctctgcccagactcgg

SEQ ID NO: 127172 - DNA, 78 bp, Homo sapiens
cttgagcaagaggacaagaccagcaaggtggctcctggcacagcccctctgcccagactcggggccactcctcaggaa

SEQ ID NO: 127173 - DNA, 77 bp, Homo sapiens
aagaggacaagaccagcaaggtggctcctggcacagcccctctgcccagactcggggccactcctcaggaatcaagc

SEQ ID NO: 127174 - DNA, 77 bp, Homo sapiens
aagaccagcaaggtggctcctggcacagcccctctgcccagactcggggccactcctcaggaatcaagcctcctggc

SEQ ID NO: 127175 - DNA, 78 bp, Homo sapiens
gctcctggcacagcccctctgcccagactcggggccactcctcaggaatcaagcctcctggccgggatcttagcctca

SEQ ID NO: 127176 - DNA, 76 bp, Homo sapiens
cagcccctctgcccagactcggggccactcctcaggaatcaagcctcctggccgggatcttagcctcagaattgaa

SEQ ID NO: 127177 - DNA, 79 bp, Homo sapiens
ctctgcccagactcggggccactcctcaggaatcaagcctcctggccgggatcttagcctcagaattgaagagcagctg

SEQ ID NO: 127178 - DNA, 76 bp, Homo sapiens
actcggggccactcctcaggaatcaagcctcctggccgggatcttagcctcagaattgaagagcagctgggctaaa

SEQ ID NO: 127179 - DNA, 78 bp, Homo sapiens
actcctcaggaatcaagcctcctggccgggatcttagcctcagaattgaagagcagctgggctaaatcagggactgga

SEQ ID NO: 127180 - DNA, 77 bp, Homo sapiens
aatcaagcctcctggccgggatcttagcctcagaattgaagagcagctgggctaaatcagggactggagaggtgccc

SEQ ID NO: 127181 - DNA, 80 bp, Homo sapiens
tggccgggatcttagcctcagaattgaagagcagctgggctaaatcagggactggagaggtgccctctgcacctcggtga

SEQ ID NO: 127182 - DNA, 79 bp, Homo sapiens
ttagcctcagaattgaagagcagctgggctaaatcagggactggagaggtgccctctgcacctcggtgagaagggtata

SEQ ID NO: 127183 - DNA, 76 bp, Homo sapiens
agaattgaagagcagctgggctaaatcagggactggagaggtgccctctgcacctcggtgagaagggtatagttag

SEQ ID NO: 127184 - DNA, 73 bp, Homo sapiens
agctgggctaaatcagggactggagaggtgccctctgcacctcggtgagaagggtatagttagggatttgtag

SEQ ID NO: 127185 - DNA, 65 bp, Homo sapiens
taagagtcataggtttggaacccgttctaccccttggcttcctccggcagggaaaaccggaccac

SEQ ID NO: 127186 - DNA, 65 bp, Homo sapiens
tttggaacccgttctaccccttggcttcctccggcagggaaaaccggaccaccccagattgtgaa

SEQ ID NO: 127187 - DNA, 69 bp, Homo sapiens
ttctaccccttggcttcctccggcagggaaaaccggaccaccccagattgtgaacgagcattcccagag

SEQ ID NO: 127188 - DNA, 71 bp, Homo sapiens
ccttggcttcctccggcagggaaaaccggaccaccccagattgtgaacgagcattcccagaggagaggcca

SEQ ID NO: 127189 - DNA, 73 bp, Homo sapiens
tcctccggcagggaaaaccggaccaccccagattgtgaacgagcattcccagaggagaggccagaggtgctgg

SEQ ID NO: 127190 - DNA, 78 bp, Homo sapiens
aaccggaccaccccagattgtgaacgagcattcccagaggagaggccagaggtgctgggccagcggagcactgatgta

SEQ ID NO: 127191 - DNA, 80 bp, Homo sapiens
ccccagattgtgaacgagcattcccagaggagaggccagaggtgctgggccagcggagcactgatgtagtggacctggaa

SEQ ID NO: 127192 - DNA, 80 bp, Homo sapiens
attgtgaacgagcattcccagaggagaggccagaggtgctgggccagcggagcactgatgtagtggacctggaaaatgag

SEQ ID NO: 127193 - DNA, 78 bp, Homo sapiens
attcccagaggagaggccagaggtgctgggccagcggagcactgatgtagtggacctggaaaatgaggtgagccctag

SEQ ID NO: 127194 - DNA, 77 bp, Homo sapiens
agaggccagaggtgctgggccagcggagcactgatgtagtggacctggaaaatgaggtgagccctagggtctcttac

SEQ ID NO: 127195 - DNA, 76 bp, Homo sapiens
agaggtgctgggccagcggagcactgatgtagtggacctggaaaatgaggtgagccctagggtctcttactgactt

SEQ ID NO: 127196 - DNA, 76 bp, Homo sapiens
tgggccagcggagcactgatgtagtggacctggaaaatgaggtgagccctagggtctcttactgactttgtctctt

SEQ ID NO: 127197 - DNA, 77 bp, Homo sapiens
accttagacttacacactactcctgacccctttcactcccctctgcctcaggagccagacagtgacaatgagtggca

SEQ ID NO: 127198 - DNA, 82 bp, Homo sapiens
tacacactactcctgacccctttcactcccctctgcctcaggagccagacagtgacaatgagtggcagcacctgctagagac

SEQ ID NO: 127199 - DNA, 83 bp, Homo sapiens
tcctgacccctttcactcccctctgcctcaggagccagacagtgacaatgagtggcagcacctgctagagaccactgagcctg

SEQ ID NO: 127200 - DNA, 85 bp, Homo sapiens
actcccctctgcctcaggagccagacagtgacaatgagtggcagcacctgctagagaccactgagcctgtgcctattcaactgaa

SEQ ID NO: 127201 - DNA, 86 bp, Homo sapiens
cctcaggagccagacagtgacaatgagtggcagcacctgctagagaccactgagcctgtgcctattcaactgaaggctcctctcac

SEQ ID NO: 127202 - DNA, 87 bp, Homo sapiens
cagacagtgacaatgagtggcagcacctgctagagaccactgagcctgtgcctattcaactgaaggctcctctcaccttgctgtgta

SEQ ID NO: 127203 - DNA, 85 bp, Homo sapiens
agtgacaatgagtggcagcacctgctagagaccactgagcctgtgcctattcaactgaaggctcctctcaccttgctgtgtaatc

SEQ ID NO: 127204 - DNA, 83 bp, Homo sapiens
agtggcagcacctgctagagaccactgagcctgtgcctattcaactgaaggctcctctcaccttgctgtgtaatcctgacttc

SEQ ID NO: 127205 - DNA, 85 bp, Homo sapiens
tagagaccactgagcctgtgcctattcaactgaaggctcctctcaccttgctgtgtaatcctgacttctgccagcgcatccagag

SEQ ID NO: 127206 - DNA, 89 bp, Homo sapiens
ctgagcctgtgcctattcaactgaaggctcctctcaccttgctgtgtaatcctgacttctgccagcgcatccagagtcagctgcatgaa

SEQ ID NO: 127207 - DNA, 89 bp, Homo sapiens
ctgtgcctattcaactgaaggctcctctcaccttgctgtgtaatcctgacttctgccagcgcatccagagtcagctgcatgaagctgga

SEQ ID NO: 127208 - DNA, 86 bp, Homo sapiens
actgaaggctcctctcaccttgctgtgtaatcctgacttctgccagcgcatccagagtcagctgcatgaagctggagggcaggtaa

SEQ ID NO: 127209 - DNA, 86 bp, Homo sapiens
tctcaccttgctgtgtaatcctgacttctgccagcgcatccagagtcagctgcatgaagctggagggcaggtaatggggagaaaga

SEQ ID NO: 127210 - DNA, 86 bp, Homo sapiens
ttgctgtgtaatcctgacttctgccagcgcatccagagtcagctgcatgaagctggagggcaggtaatggggagaaagacactgtg

SEQ ID NO: 127211 - DNA, 85 bp, Homo sapiens
taatcctgacttctgccagcgcatccagagtcagctgcatgaagctggagggcaggtaatggggagaaagacactgtggatggga

SEQ ID NO: 127212 - DNA, 74 bp, Homo sapiens
cttttacctctgaaaatatcaatcgttgcctctttccctcatgtcacccagatcctgaaaggcatcttggaggg

SEQ ID NO: 127213 - DNA, 76 bp, Homo sapiens
aaaatatcaatcgttgcctctttccctcatgtcacccagatcctgaaaggcatcttggagggtgcttcccacatcc

SEQ ID NO: 127214 - DNA, 79 bp, Homo sapiens
aatcgttgcctctttccctcatgtcacccagatcctgaaaggcatcttggagggtgcttcccacatcctgcctgcattc

SEQ ID NO: 127215 - DNA, 79 bp, Homo sapiens
tctttccctcatgtcacccagatcctgaaaggcatcttggagggtgcttcccacatcctgcctgcattccgggtcctga

SEQ ID NO: 127216 - DNA, 80 bp, Homo sapiens
atgtcacccagatcctgaaaggcatcttggagggtgcttcccacatcctgcctgcattccgggtcctgagcagtcttctc

SEQ ID NO: 127217 - DNA, 84 bp, Homo sapiens
tgaaaggcatcttggagggtgcttcccacatcctgcctgcattccgggtcctgagcagtcttctctccagctgcagtgattctg

SEQ ID NO: 127218 - DNA, 82 bp, Homo sapiens
atcttggagggtgcttcccacatcctgcctgcattccgggtcctgagcagtcttctctccagctgcagtgattctgttgcct

SEQ ID NO: 127219 - DNA, 83 bp, Homo sapiens
gtgcttcccacatcctgcctgcattccgggtcctgagcagtcttctctccagctgcagtgattctgttgccttgtattccttc

SEQ ID NO: 127220 - DNA, 82 bp, Homo sapiens
acatcctgcctgcattccgggtcctgagcagtcttctctccagctgcagtgattctgttgccttgtattccttctgccggga

SEQ ID NO: 127221 - DNA, 78 bp, Homo sapiens
attccgggtcctgagcagtcttctctccagctgcagtgattctgttgccttgtattccttctgccgggaggcagggct

SEQ ID NO: 127222 - DNA, 79 bp, Homo sapiens
gggtcctgagcagtcttctctccagctgcagtgattctgttgccttgtattccttctgccgggaggcagggcttcctgg

SEQ ID NO: 127223 - DNA, 84 bp, Homo sapiens
ttctctccagctgcagtgattctgttgccttgtattccttctgccgggaggcagggcttcctgggctgctgctgagtctactca

SEQ ID NO: 127224 - DNA, 84 bp, Homo sapiens
ctgcagtgattctgttgccttgtattccttctgccgggaggcagggcttcctgggctgctgctgagtctactcaggcacagtca

SEQ ID NO: 127225 - DNA, 81 bp, Homo sapiens
attctgttgccttgtattccttctgccgggaggcagggcttcctgggctgctgctgagtctactcaggcacagtcaggaga

SEQ ID NO: 127226 - DNA, 83 bp, Homo sapiens
ttgtattccttctgccgggaggcagggcttcctgggctgctgctgagtctactcaggcacagtcaggagagcaacagcctcca

SEQ ID NO: 127227 - DNA, 85 bp, Homo sapiens
ttctgccgggaggcagggcttcctgggctgctgctgagtctactcaggcacagtcaggagagcaacagcctccagcaggtaagca

SEQ ID NO: 127228 - DNA, 85 bp, Homo sapiens
ggcagggcttcctgggctgctgctgagtctactcaggcacagtcaggagagcaacagcctccagcaggtaagcaccaggccagaa

SEQ ID NO: 127229 - DNA, 86 bp, Homo sapiens
ttcctgggctgctgctgagtctactcaggcacagtcaggagagcaacagcctccagcaggtaagcaccaggccagaagcctctgaa

SEQ ID NO: 127230 - DNA, 85 bp, Homo sapiens
ctgctgagtctactcaggcacagtcaggagagcaacagcctccagcaggtaagcaccaggccagaagcctctgaagacttacaga

SEQ ID NO: 127231 - DNA, 74 bp, Homo sapiens
tttccatccttcacattgcccttactctcttctccttttcctgggcagcaatcttggtatgggaccttcttaca

SEQ ID NO: 127232 - DNA, 75 bp, Homo sapiens
ttcacattgcccttactctcttctccttttcctgggcagcaatcttggtatgggaccttcttacaggacctgatg

SEQ ID NO: 127233 - DNA, 77 bp, Homo sapiens
ttactctcttctccttttcctgggcagcaatcttggtatgggaccttcttacaggacctgatggctgtgattcaggc

SEQ ID NO: 127234 - DNA, 75 bp, Homo sapiens
ttctccttttcctgggcagcaatcttggtatgggaccttcttacaggacctgatggctgtgattcaggcctactt

SEQ ID NO: 127235 - DNA, 78 bp, Homo sapiens
tgggcagcaatcttggtatgggaccttcttacaggacctgatggctgtgattcaggcctactttgcctgtaccttcaa

SEQ ID NO: 127236 - DNA, 76 bp, Homo sapiens
aatcttggtatgggaccttcttacaggacctgatggctgtgattcaggcctactttgcctgtaccttcaatctgga

SEQ ID NO: 127237 - DNA, 78 bp, Homo sapiens
gtatgggaccttcttacaggacctgatggctgtgattcaggcctactttgcctgtaccttcaatctggagaggagcca

SEQ ID NO: 127238 - DNA, 80 bp, Homo sapiens
ttacaggacctgatggctgtgattcaggcctactttgcctgtaccttcaatctggagaggagccagacaagtgacaggta

SEQ ID NO: 127239 - DNA, 78 bp, Homo sapiens
atggctgtgattcaggcctactttgcctgtaccttcaatctggagaggagccagacaagtgacaggtaggataagaag

SEQ ID NO: 127240 - DNA, 75 bp, Homo sapiens
attcaggcctactttgcctgtaccttcaatctggagaggagccagacaagtgacaggtaggataagaagtgcttt

SEQ ID NO: 127241 - DNA, 77 bp, Homo sapiens
ctactttgcctgtaccttcaatctggagaggagccagacaagtgacaggtaggataagaagtgcttttgcattgttg

SEQ ID NO: 127242 - DNA, 77 bp, Homo sapiens
ctgtaccttcaatctggagaggagccagacaagtgacaggtaggataagaagtgcttttgcattgttggcaagtttg

SEQ ID NO: 127243 - DNA, 75 bp, Homo sapiens
ttttagtagagagataagaaatcatgggctcattttccacccccagcctgcaggtgtttcaggaggctgccaacc

SEQ ID NO: 127244 - DNA, 75 bp, Homo sapiens
tagagagataagaaatcatgggctcattttccacccccagcctgcaggtgtttcaggaggctgccaacctttttc

SEQ ID NO: 127245 - DNA, 72 bp, Homo sapiens
aagaaatcatgggctcattttccacccccagcctgcaggtgtttcaggaggctgccaacctttttctggacc

SEQ ID NO: 127246 - DNA, 70 bp, Homo sapiens
tcattttccacccccagcctgcaggtgtttcaggaggctgccaacctttttctggacctgttggggaaac

SEQ ID NO: 127247 - DNA, 71 bp, Homo sapiens
ccccagcctgcaggtgtttcaggaggctgccaacctttttctggacctgttggggaaactgctggcccaac

SEQ ID NO: 127248 - DNA, 74 bp, Homo sapiens
caggtgtttcaggaggctgccaacctttttctggacctgttggggaaactgctggcccaaccagatgactctga

SEQ ID NO: 127249 - DNA, 75 bp, Homo sapiens
ttcaggaggctgccaacctttttctggacctgttggggaaactgctggcccaaccagatgactctgagcagactt

SEQ ID NO: 127250 - DNA, 74 bp, Homo sapiens
caacctttttctggacctgttggggaaactgctggcccaaccagatgactctgagcagactttgcggagggaca

SEQ ID NO: 127251 - DNA, 75 bp, Homo sapiens
tttttctggacctgttggggaaactgctggcccaaccagatgactctgagcagactttgcggagggacagcctta

SEQ ID NO: 127252 - DNA, 79 bp, Homo sapiens
tgttggggaaactgctggcccaaccagatgactctgagcagactttgcggagggacagccttatggtaatctgctccca

SEQ ID NO: 127253 - DNA, 79 bp, Homo sapiens
aaactgctggcccaaccagatgactctgagcagactttgcggagggacagccttatggtaatctgctcccacttccaga

SEQ ID NO: 127254 - DNA, 79 bp, Homo sapiens
aaccagatgactctgagcagactttgcggagggacagccttatggtaatctgctcccacttccagatttctgtgtctcc

SEQ ID NO: 127255 - DNA, 83 bp, Homo sapiens
cagtcttctgatgccctgatgctacctctgcacttctctcctttagtgctttactgtcctgtgcgaagccatggatgggaaca

SEQ ID NO: 127256 - DNA, 82 bp, Homo sapiens
ttctgatgccctgatgctacctctgcacttctctcctttagtgctttactgtcctgtgcgaagccatggatgggaacagccg

SEQ ID NO: 127257 - DNA, 80 bp, Homo sapiens
tgctacctctgcacttctctcctttagtgctttactgtcctgtgcgaagccatggatgggaacagccgggccatctccaa

SEQ ID NO: 127258 - DNA, 75 bp, Homo sapiens
cacttctctcctttagtgctttactgtcctgtgcgaagccatggatgggaacagccgggccatctccaaagcctt

SEQ ID NO: 127259 - DNA, 75 bp, Homo sapiens
tcctttagtgctttactgtcctgtgcgaagccatggatgggaacagccgggccatctccaaagccttttactcca

SEQ ID NO: 127260 - DNA, 78 bp, Homo sapiens
tttactgtcctgtgcgaagccatggatgggaacagccgggccatctccaaagccttttactccagcttgctgacgaca

SEQ ID NO: 127261 - DNA, 80 bp, Homo sapiens
tgtgcgaagccatggatgggaacagccgggccatctccaaagccttttactccagcttgctgacgacacagcaggttgtc

SEQ ID NO: 127262 - DNA, 77 bp, Homo sapiens
atggatgggaacagccgggccatctccaaagccttttactccagcttgctgacgacacagcaggttgtcttggatgg

SEQ ID NO: 127263 - DNA, 77 bp, Homo sapiens
aacagccgggccatctccaaagccttttactccagcttgctgacgacacagcaggttgtcttggatgggctccttca

SEQ ID NO: 127264 - DNA, 80 bp, Homo sapiens
catctccaaagccttttactccagcttgctgacgacacagcaggttgtcttggatgggctccttcatggcttgacagttc

SEQ ID NO: 127265 - DNA, 79 bp, Homo sapiens
ccaaagccttttactccagcttgctgacgacacagcaggttgtcttggatgggctccttcatggcttgacagttccaca

SEQ ID NO: 127266 - DNA, 83 bp, Homo sapiens
ttactccagcttgctgacgacacagcaggttgtcttggatgggctccttcatggcttgacagttccacagctccctgtccaca

SEQ ID NO: 127267 - DNA, 81 bp, Homo sapiens
ttgctgacgacacagcaggttgtcttggatgggctccttcatggcttgacagttccacagctccctgtccacactccccaa

SEQ ID NO: 127268 - DNA, 76 bp, Homo sapiens
acagcaggttgtcttggatgggctccttcatggcttgacagttccacagctccctgtccacactccccaaggtaac

SEQ ID NO: 127269 - DNA, 77 bp, Homo sapiens
tcttggatgggctccttcatggcttgacagttccacagctccctgtccacactccccaaggtaaccagagtggagaa

SEQ ID NO: 127270 - DNA, 74 bp, Homo sapiens
tccttcatggcttgacagttccacagctccctgtccacactccccaaggtaaccagagtggagaagggaggttc

SEQ ID NO: 127271 - DNA, 73 bp, Homo sapiens
ttgacagttccacagctccctgtccacactccccaaggtaaccagagtggagaagggaggttctcttgactta

SEQ ID NO: 127272 - DNA, 75 bp, Homo sapiens
ctagggcaagagcctcaggcctttggagttactctttgcttttctccacaggagccccgcaagtgagccagccac

SEQ ID NO: 127273 - DNA, 80 bp, Homo sapiens
tcaggcctttggagttactctttgcttttctccacaggagccccgcaagtgagccagccactgcgagagcagagtgagga

SEQ ID NO: 127274 - DNA, 79 bp, Homo sapiens
tttggagttactctttgcttttctccacaggagccccgcaagtgagccagccactgcgagagcagagtgaggatatacc

SEQ ID NO: 127275 - DNA, 81 bp, Homo sapiens
tttgcttttctccacaggagccccgcaagtgagccagccactgcgagagcagagtgaggatatacctggagccatttcctc

SEQ ID NO: 127276 - DNA, 82 bp, Homo sapiens
tttctccacaggagccccgcaagtgagccagccactgcgagagcagagtgaggatatacctggagccatttcctctgccctg

SEQ ID NO: 127277 - DNA, 87 bp, Homo sapiens
cccgcaagtgagccagccactgcgagagcagagtgaggatatacctggagccatttcctctgccctggcagccatatgcactgctcc

SEQ ID NO: 127278 - DNA, 87 bp, Homo sapiens
aagtgagccagccactgcgagagcagagtgaggatatacctggagccatttcctctgccctggcagccatatgcactgctcctgtgg

SEQ ID NO: 127279 - DNA, 85 bp, Homo sapiens
actgcgagagcagagtgaggatatacctggagccatttcctctgccctggcagccatatgcactgctcctgtgggactgcccgac

SEQ ID NO: 127280 - DNA, 85 bp, Homo sapiens
agagtgaggatatacctggagccatttcctctgccctggcagccatatgcactgctcctgtgggactgcccgactgctgggatgc

SEQ ID NO: 127281 - DNA, 83 bp, Homo sapiens
aggatatacctggagccatttcctctgccctggcagccatatgcactgctcctgtgggactgcccgactgctgggatgccaag

SEQ ID NO: 127282 - DNA, 84 bp, Homo sapiens
ccatttcctctgccctggcagccatatgcactgctcctgtgggactgcccgactgctgggatgccaaggagcaggtccgagcta

SEQ ID NO: 127283 - DNA, 84 bp, Homo sapiens
tgccctggcagccatatgcactgctcctgtgggactgcccgactgctgggatgccaaggagcaggtccgagctacaattggttg

SEQ ID NO: 127284 - DNA, 81 bp, Homo sapiens
agccatatgcactgctcctgtgggactgcccgactgctgggatgccaaggagcaggtccgagctacaattggttgttcctc

SEQ ID NO: 127285 - DNA, 79 bp, Homo sapiens
actgctcctgtgggactgcccgactgctgggatgccaaggagcaggtccgagctacaattggttgttcctctcatccta

SEQ ID NO: 127286 - DNA, 83 bp, Homo sapiens
ttgtaatcatgtggataggattgagccttcaggtatgtctctataggtctgttggcatttggcaaatcagctaactgaagaca

SEQ ID NO: 127287 - DNA, 85 bp, Homo sapiens
atcatgtggataggattgagccttcaggtatgtctctataggtctgttggcatttggcaaatcagctaactgaagacagcagcca

SEQ ID NO: 127288 - DNA, 85 bp, Homo sapiens
taggattgagccttcaggtatgtctctataggtctgttggcatttggcaaatcagctaactgaagacagcagccagctcaggcca

SEQ ID NO: 127289 - DNA, 86 bp, Homo sapiens
ttcaggtatgtctctataggtctgttggcatttggcaaatcagctaactgaagacagcagccagctcaggccatccctcatctctg

SEQ ID NO: 127290 - DNA, 90 bp, Homo sapiens
tgtctctataggtctgttggcatttggcaaatcagctaactgaagacagcagccagctcaggccatccctcatctctggcctgcagcatc

SEQ ID NO: 127291 - DNA, 90 bp, Homo sapiens
tctgttggcatttggcaaatcagctaactgaagacagcagccagctcaggccatccctcatctctggcctgcagcatcccatcctgtgcc

SEQ ID NO: 127292 - DNA, 88 bp, Homo sapiens
atttggcaaatcagctaactgaagacagcagccagctcaggccatccctcatctctggcctgcagcatcccatcctgtgcctgcacct

SEQ ID NO: 127293 - DNA, 87 bp, Homo sapiens
ctaactgaagacagcagccagctcaggccatccctcatctctggcctgcagcatcccatcctgtgcctgcaccttctcaaggtaatc

SEQ ID NO: 127294 - DNA, 86 bp, Homo sapiens
agacagcagccagctcaggccatccctcatctctggcctgcagcatcccatcctgtgcctgcaccttctcaaggtaatcctcttaa

SEQ ID NO: 127295 - DNA, 83 bp, Homo sapiens
agccagctcaggccatccctcatctctggcctgcagcatcccatcctgtgcctgcaccttctcaaggtaatcctcttaactcc

SEQ ID NO: 127296 - DNA, 84 bp, Homo sapiens
tccctcatctctggcctgcagcatcccatcctgtgcctgcaccttctcaaggtaatcctcttaactcctggcatcacagcttta

SEQ ID NO: 127297 - DNA, 81 bp, Homo sapiens
atctctggcctgcagcatcccatcctgtgcctgcaccttctcaaggtaatcctcttaactcctggcatcacagctttattt

SEQ ID NO: 127298 - DNA, 77 bp, Homo sapiens
ccggggcctgccctgcctcactgccagactccttccttctccctcaggttctatactcctgctgccttgtcagtgag

SEQ ID NO: 127299 - DNA, 79 bp, Homo sapiens
cctgcctcactgccagactccttccttctccctcaggttctatactcctgctgccttgtcagtgagggcctgtgccgtc

SEQ ID NO: 127300 - DNA, 77 bp, Homo sapiens
actgccagactccttccttctccctcaggttctatactcctgctgccttgtcagtgagggcctgtgccgtcttctgg

SEQ ID NO: 127301 - DNA, 76 bp, Homo sapiens
cttccttctccctcaggttctatactcctgctgccttgtcagtgagggcctgtgccgtcttctggggcaggagccc

SEQ ID NO: 127302 - DNA, 77 bp, Homo sapiens
ttctccctcaggttctatactcctgctgccttgtcagtgagggcctgtgccgtcttctggggcaggagcccctggcc

SEQ ID NO: 127303 - DNA, 76 bp, Homo sapiens
tatactcctgctgccttgtcagtgagggcctgtgccgtcttctggggcaggagcccctggccttggaatccctgtt

SEQ ID NO: 127304 - DNA, 75 bp, Homo sapiens
ctgccttgtcagtgagggcctgtgccgtcttctggggcaggagcccctggccttggaatccctgtttatgttgat

SEQ ID NO: 127305 - DNA, 75 bp, Homo sapiens
ttgtcagtgagggcctgtgccgtcttctggggcaggagcccctggccttggaatccctgtttatgttgattcagg

SEQ ID NO: 127306 - DNA, 74 bp, Homo sapiens
ctgtgccgtcttctggggcaggagcccctggccttggaatccctgtttatgttgattcagggcaaggtaagcca

SEQ ID NO: 127307 - DNA, 73 bp, Homo sapiens
cgtcttctggggcaggagcccctggccttggaatccctgtttatgttgattcagggcaaggtaagccagcttc

SEQ ID NO: 127308 - DNA, 72 bp, Homo sapiens
aggagcccctggccttggaatccctgtttatgttgattcagggcaaggtaagccagcttcccctggcagccc

SEQ ID NO: 127309 - DNA, 75 bp, Homo sapiens
cctggccttggaatccctgtttatgttgattcagggcaaggtaagccagcttcccctggcagccccactgtctca

SEQ ID NO: 127310 - DNA, 79 bp, Homo sapiens
ttatgttgattcagggcaaggtaagccagcttcccctggcagccccactgtctcagccagaggttgttctgatatctta

SEQ ID NO: 127311 - DNA, 75 bp, Homo sapiens
gcaaggtaagccagcttcccctggcagccccactgtctcagccagaggttgttctgatatcttaggtttcctttg

SEQ ID NO: 127312 - DNA, 71 bp, Homo sapiens
agccccactgtctcagccagaggttgttctgatatcttaggtttcctttgtaggtaaaagtagtagattgg

SEQ ID NO: 127313 - DNA, 73 bp, Homo sapiens
tgtctcagccagaggttgttctgatatcttaggtttcctttgtaggtaaaagtagtagattgggaagagtcta

SEQ ID NO: 127314 - DNA, 70 bp, Homo sapiens
aggttgttctgatatcttaggtttcctttgtaggtaaaagtagtagattgggaagagtctactgaagtga

SEQ ID NO: 127315 - DNA, 70 bp, Homo sapiens
atatcttaggtttcctttgtaggtaaaagtagtagattgggaagagtctactgaagtgacactctacttc

SEQ ID NO: 127316 - DNA, 70 bp, Homo sapiens
ttaggtttcctttgtaggtaaaagtagtagattgggaagagtctactgaagtgacactctacttcctctc

SEQ ID NO: 127317 - DNA, 71 bp, Homo sapiens
tttgtaggtaaaagtagtagattgggaagagtctactgaagtgacactctacttcctctcccttcttgtct

SEQ ID NO: 127318 - DNA, 72 bp, Homo sapiens
agtagtagattgggaagagtctactgaagtgacactctacttcctctcccttcttgtctttcggctccaaaa

SEQ ID NO: 127319 - DNA, 71 bp, Homo sapiens
attgggaagagtctactgaagtgacactctacttcctctcccttcttgtctttcggctccaaaacctgcct

SEQ ID NO: 127320 - DNA, 73 bp, Homo sapiens
tactgaagtgacactctacttcctctcccttcttgtctttcggctccaaaacctgccttgtgggtaagtcata

SEQ ID NO: 127321 - DNA, 69 bp, Homo sapiens
acactctacttcctctcccttcttgtctttcggctccaaaacctgccttgtgggtaagtcataaagtag

SEQ ID NO: 127322 - DNA, 71 bp, Homo sapiens
ctctcccttcttgtctttcggctccaaaacctgccttgtgggtaagtcataaagtagggtgtctccacaga

SEQ ID NO: 127323 - DNA, 70 bp, Homo sapiens
cttcttgtctttcggctccaaaacctgccttgtgggtaagtcataaagtagggtgtctccacagaagtct

SEQ ID NO: 127324 - DNA, 74 bp, Homo sapiens
aggggaggccgcttaccaacctcctttaatactgctgcatcccttgatgtatctctttattccagaatggagaa

SEQ ID NO: 127325 - DNA, 77 bp, Homo sapiens
cttaccaacctcctttaatactgctgcatcccttgatgtatctctttattccagaatggagaagctaggcagtgacg

SEQ ID NO: 127326 - DNA, 80 bp, Homo sapiens
tcctttaatactgctgcatcccttgatgtatctctttattccagaatggagaagctaggcagtgacgttgctactctctt

SEQ ID NO: 127327 - DNA, 81 bp, Homo sapiens
taatactgctgcatcccttgatgtatctctttattccagaatggagaagctaggcagtgacgttgctactctctttaccca

SEQ ID NO: 127328 - DNA, 79 bp, Homo sapiens
atcccttgatgtatctctttattccagaatggagaagctaggcagtgacgttgctactctctttacccattcgcatgtc

SEQ ID NO: 127329 - DNA, 80 bp, Homo sapiens
tatctctttattccagaatggagaagctaggcagtgacgttgctactctctttacccattcgcatgtcgtctctcttgtg

SEQ ID NO: 127330 - DNA, 77 bp, Homo sapiens
tccagaatggagaagctaggcagtgacgttgctactctctttacccattcgcatgtcgtctctcttgtggtaagttt

SEQ ID NO: 127331 - DNA, 75 bp, Homo sapiens
atggagaagctaggcagtgacgttgctactctctttacccattcgcatgtcgtctctcttgtggtaagtttttaa

SEQ ID NO: 127332 - DNA, 71 bp, Homo sapiens
agtgacgttgctactctctttacccattcgcatgtcgtctctcttgtggtaagtttttaaccttcaccctc

SEQ ID NO: 127333 - DNA, 70 bp, Homo sapiens
cgttgctactctctttacccattcgcatgtcgtctctcttgtggtaagtttttaaccttcaccctcctcc

SEQ ID NO: 127334 - DNA, 68 bp, Homo sapiens
ctctttacccattcgcatgtcgtctctcttgtggtaagtttttaaccttcaccctcctccccttttca

SEQ ID NO: 127335 - DNA, 70 bp, Homo sapiens
attcgcatgtcgtctctcttgtggtaagtttttaaccttcaccctcctccccttttcaccctagcatcta

SEQ ID NO: 127336 - DNA, 78 bp, Homo sapiens
atgccatttagatttggacattctttctcctcttttacctctcccacagagtgcagcagcctgtctattgggacagct

SEQ ID NO: 127337 - DNA, 80 bp, Homo sapiens
tagatttggacattctttctcctcttttacctctcccacagagtgcagcagcctgtctattgggacagcttggtcagcaa

SEQ ID NO: 127338 - DNA, 76 bp, Homo sapiens
tttctcctcttttacctctcccacagagtgcagcagcctgtctattgggacagcttggtcagcaaggggtgacctt

SEQ ID NO: 127339 - DNA, 78 bp, Homo sapiens
tcttttacctctcccacagagtgcagcagcctgtctattgggacagcttggtcagcaaggggtgacctttgacctcca

SEQ ID NO: 127340 - DNA, 81 bp, Homo sapiens
tctcccacagagtgcagcagcctgtctattgggacagcttggtcagcaaggggtgacctttgacctccagcccatggaatg

SEQ ID NO: 127341 - DNA, 83 bp, Homo sapiens
agtgcagcagcctgtctattgggacagcttggtcagcaaggggtgacctttgacctccagcccatggaatggatggctgcagc

SEQ ID NO: 127342 - DNA, 82 bp, Homo sapiens
tgtctattgggacagcttggtcagcaaggggtgacctttgacctccagcccatggaatggatggctgcagccacacatgcct

SEQ ID NO: 127343 - DNA, 83 bp, Homo sapiens
tgggacagcttggtcagcaaggggtgacctttgacctccagcccatggaatggatggctgcagccacacatgccttgtctgcc

SEQ ID NO: 127344 - DNA, 84 bp, Homo sapiens
gtcagcaaggggtgacctttgacctccagcccatggaatggatggctgcagccacacatgccttgtctgcccctgcagaggtga

SEQ ID NO: 127345 - DNA, 81 bp, Homo sapiens
ggggtgacctttgacctccagcccatggaatggatggctgcagccacacatgccttgtctgcccctgcagaggtgaggccc

SEQ ID NO: 127346 - DNA, 81 bp, Homo sapiens
ttgacctccagcccatggaatggatggctgcagccacacatgccttgtctgcccctgcagaggtgaggccccccagggagg

SEQ ID NO: 127347 - DNA, 81 bp, Homo sapiens
atggaatggatggctgcagccacacatgccttgtctgcccctgcagaggtgaggccccccagggagggcacagacatgttt

SEQ ID NO: 127348 - DNA, 73 bp, Homo sapiens
cttggtttaacggacaccccattcctcttaggcacctgcattcttcatgtttctctctgacaggttcggttga

SEQ ID NO: 127349 - DNA, 74 bp, Homo sapiens
acaccccattcctcttaggcacctgcattcttcatgtttctctctgacaggttcggttgactccaccaggtagt

SEQ ID NO: 127350 - DNA, 77 bp, Homo sapiens
ttcctcttaggcacctgcattcttcatgtttctctctgacaggttcggttgactccaccaggtagttgtggattcta

SEQ ID NO: 127351 - DNA, 78 bp, Homo sapiens
cctgcattcttcatgtttctctctgacaggttcggttgactccaccaggtagttgtggattctatgatggcctcctta

SEQ ID NO: 127352 - DNA, 77 bp, Homo sapiens
tcatgtttctctctgacaggttcggttgactccaccaggtagttgtggattctatgatggcctccttatccttctgt

SEQ ID NO: 127353 - DNA, 78 bp, Homo sapiens
tttctctctgacaggttcggttgactccaccaggtagttgtggattctatgatggcctccttatccttctgttgcagc

SEQ ID NO: 127354 - DNA, 78 bp, Homo sapiens
acaggttcggttgactccaccaggtagttgtggattctatgatggcctccttatccttctgttgcagctcctcactga

SEQ ID NO: 127355 - DNA, 80 bp, Homo sapiens
actccaccaggtagttgtggattctatgatggcctccttatccttctgttgcagctcctcactgaggtacagatggatct

SEQ ID NO: 127356 - DNA, 81 bp, Homo sapiens
aggtagttgtggattctatgatggcctccttatccttctgttgcagctcctcactgaggtacagatggatcttgggatgga

SEQ ID NO: 127357 - DNA, 80 bp, Homo sapiens
attctatgatggcctccttatccttctgttgcagctcctcactgaggtacagatggatcttgggatggatgggaagtaaa

SEQ ID NO: 127358 - DNA, 78 bp, Homo sapiens
cctccttatccttctgttgcagctcctcactgaggtacagatggatcttgggatggatgggaagtaaagagagaggaa

SEQ ID NO: 127359 - DNA, 71 bp, Homo sapiens
attcctgacttctgtctttccccccgccctctttcacttttatctctagcaggggaaggctagcctaatca

SEQ ID NO: 127360 - DNA, 72 bp, Homo sapiens
ttctgtctttccccccgccctctttcacttttatctctagcaggggaaggctagcctaatcagggatatgtc

SEQ ID NO: 127361 - DNA, 75 bp, Homo sapiens
ccgccctctttcacttttatctctagcaggggaaggctagcctaatcagggatatgtccagttcagaaatgtgga

SEQ ID NO: 127362 - DNA, 73 bp, Homo sapiens
tttcacttttatctctagcaggggaaggctagcctaatcagggatatgtccagttcagaaatgtggaccgttt

SEQ ID NO: 127363 - DNA, 75 bp, Homo sapiens
tttatctctagcaggggaaggctagcctaatcagggatatgtccagttcagaaatgtggaccgttttgtggcacc

SEQ ID NO: 127364 - DNA, 75 bp, Homo sapiens
gggaaggctagcctaatcagggatatgtccagttcagaaatgtggaccgttttgtggcaccgcttctccatggtc

SEQ ID NO: 127365 - DNA, 77 bp, Homo sapiens
ctagcctaatcagggatatgtccagttcagaaatgtggaccgttttgtggcaccgcttctccatggtcctgaggctc

SEQ ID NO: 127366 - DNA, 74 bp, Homo sapiens
agggatatgtccagttcagaaatgtggaccgttttgtggcaccgcttctccatggtcctgaggctccccgagga

SEQ ID NO: 127367 - DNA, 77 bp, Homo sapiens
gttcagaaatgtggaccgttttgtggcaccgcttctccatggtcctgaggctccccgaggaggcatctgcacaggaa

SEQ ID NO: 127368 - DNA, 74 bp, Homo sapiens
aaatgtggaccgttttgtggcaccgcttctccatggtcctgaggctccccgaggaggcatctgcacaggaaggg

SEQ ID NO: 127369 - DNA, 78 bp, Homo sapiens
ttttgtggcaccgcttctccatggtcctgaggctccccgaggaggcatctgcacaggaaggggagctttcgctatcca

SEQ ID NO: 127370 - DNA, 77 bp, Homo sapiens
accgcttctccatggtcctgaggctccccgaggaggcatctgcacaggaaggggagctttcgctatccagtccacca

SEQ ID NO: 127371 - DNA, 78 bp, Homo sapiens
atggtcctgaggctccccgaggaggcatctgcacaggaaggggagctttcgctatccagtccaccaagccctgagcca

SEQ ID NO: 127372 - DNA, 79 bp, Homo sapiens
ctccccgaggaggcatctgcacaggaaggggagctttcgctatccagtccaccaagccctgagccagactggacactga

SEQ ID NO: 127373 - DNA, 79 bp, Homo sapiens
aggaggcatctgcacaggaaggggagctttcgctatccagtccaccaagccctgagccagactggacactgatttctcc

SEQ ID NO: 127374 - DNA, 74 bp, Homo sapiens
acaggaaggggagctttcgctatccagtccaccaagccctgagccagactggacactgatttctccccagggta

SEQ ID NO: 127375 - DNA, 78 bp, Homo sapiens
gagctttcgctatccagtccaccaagccctgagccagactggacactgatttctccccagggtatctttctatcagta

SEQ ID NO: 127376 - DNA, 75 bp, Homo sapiens
tatccagtccaccaagccctgagccagactggacactgatttctccccagggtatctttctatcagtatcctttt

SEQ ID NO: 127377 - DNA, 73 bp, Homo sapiens
agtccaccaagccctgagccagactggacactgatttctccccagggtatctttctatcagtatcctttttgg

SEQ ID NO: 127378 - DNA, 80 bp, Homo sapiens
tatctgggcgtcttgcctgttccattgggtctccatttttggtgttaccaggcatggcagccctgctgagcctggccatg

SEQ ID NO: 127379 - DNA, 78 bp, Homo sapiens
ttgcctgttccattgggtctccatttttggtgttaccaggcatggcagccctgctgagcctggccatggccaccttta

SEQ ID NO: 127380 - DNA, 77 bp, Homo sapiens
tccattgggtctccatttttggtgttaccaggcatggcagccctgctgagcctggccatggccacctttacccagga

SEQ ID NO: 127381 - DNA, 76 bp, Homo sapiens
atttttggtgttaccaggcatggcagccctgctgagcctggccatggccacctttacccaggagccccagttatgc

SEQ ID NO: 127382 - DNA, 82 bp, Homo sapiens
tgttaccaggcatggcagccctgctgagcctggccatggccacctttacccaggagccccagttatgcctgagctgcctgtc

SEQ ID NO: 127383 - DNA, 82 bp, Homo sapiens
atggcagccctgctgagcctggccatggccacctttacccaggagccccagttatgcctgagctgcctgtcccagcatggaa

SEQ ID NO: 127384 - DNA, 81 bp, Homo sapiens
ctgagcctggccatggccacctttacccaggagccccagttatgcctgagctgcctgtcccagcatggaagtatcctcatg

SEQ ID NO: 127385 - DNA, 81 bp, Homo sapiens
ccatggccacctttacccaggagccccagttatgcctgagctgcctgtcccagcatggaagtatcctcatgtccatcctga

SEQ ID NO: 127386 - DNA, 82 bp, Homo sapiens
ctttacccaggagccccagttatgcctgagctgcctgtcccagcatggaagtatcctcatgtccatcctgaagcatctgctt

SEQ ID NO: 127387 - DNA, 84 bp, Homo sapiens
aggagccccagttatgcctgagctgcctgtcccagcatggaagtatcctcatgtccatcctgaagcatctgctttgccccagct

SEQ ID NO: 127388 - DNA, 86 bp, Homo sapiens
agttatgcctgagctgcctgtcccagcatggaagtatcctcatgtccatcctgaagcatctgctttgccccagcttcctgaatcaa

SEQ ID NO: 127389 - DNA, 87 bp, Homo sapiens
ctgagctgcctgtcccagcatggaagtatcctcatgtccatcctgaagcatctgctttgccccagcttcctgaatcaactgcgccag

SEQ ID NO: 127390 - DNA, 85 bp, Homo sapiens
ccagcatggaagtatcctcatgtccatcctgaagcatctgctttgccccagcttcctgaatcaactgcgccaggcgtgagtttga

SEQ ID NO: 127391 - DNA, 83 bp, Homo sapiens
aagtatcctcatgtccatcctgaagcatctgctttgccccagcttcctgaatcaactgcgccaggcgtgagtttgagctagaa

SEQ ID NO: 127392 - DNA, 85 bp, Homo sapiens
atgtccatcctgaagcatctgctttgccccagcttcctgaatcaactgcgccaggcgtgagtttgagctagaagagagccacaga

SEQ ID NO: 127393 - DNA, 83 bp, Homo sapiens
aagcatctgctttgccccagcttcctgaatcaactgcgccaggcgtgagtttgagctagaagagagccacagagtcagcaacg

SEQ ID NO: 127394 - DNA, 72 bp, Homo sapiens
ataaaggttaagtgaacaagaccaagtctcttcgacattcctctccttaggcctcatgggtctgagtttctc

SEQ ID NO: 127395 - DNA, 73 bp, Homo sapiens
aagtgaacaagaccaagtctcttcgacattcctctccttaggcctcatgggtctgagtttctccctgtcgtgg

SEQ ID NO: 127396 - DNA, 78 bp, Homo sapiens
accaagtctcttcgacattcctctccttaggcctcatgggtctgagtttctccctgtcgtggtgctctctgtctgcca

SEQ ID NO: 127397 - DNA, 79 bp, Homo sapiens
ttcgacattcctctccttaggcctcatgggtctgagtttctccctgtcgtggtgctctctgtctgccagctcctttgct

SEQ ID NO: 127398 - DNA, 76 bp, Homo sapiens
ctctccttaggcctcatgggtctgagtttctccctgtcgtggtgctctctgtctgccagctcctttgcttcccctt

SEQ ID NO: 127399 - DNA, 84 bp, Homo sapiens
tcatgggtctgagtttctccctgtcgtggtgctctctgtctgccagctcctttgcttcccctttgcgctggacatggatgctga

SEQ ID NO: 127400 - DNA, 79 bp, Homo sapiens
agtttctccctgtcgtggtgctctctgtctgccagctcctttgcttcccctttgcgctggacatggatgctgacctcct

SEQ ID NO: 127401 - DNA, 82 bp, Homo sapiens
tgtcgtggtgctctctgtctgccagctcctttgcttcccctttgcgctggacatggatgctgacctccttataggtgtcttg

SEQ ID NO: 127402 - DNA, 82 bp, Homo sapiens
tggtgctctctgtctgccagctcctttgcttcccctttgcgctggacatggatgctgacctccttataggtgtcttggccga

SEQ ID NO: 127403 - DNA, 79 bp, Homo sapiens
tctgccagctcctttgcttcccctttgcgctggacatggatgctgacctccttataggtgtcttggccgacctcaggga

SEQ ID NO: 127404 - DNA, 76 bp, Homo sapiens
tttgcttcccctttgcgctggacatggatgctgacctccttataggtgtcttggccgacctcagggactcagaagt

SEQ ID NO: 127405 - DNA, 79 bp, Homo sapiens
ccctttgcgctggacatggatgctgacctccttataggtgtcttggccgacctcagggactcagaagttgcagcccatc

SEQ ID NO: 127406 - DNA, 81 bp, Homo sapiens
acatggatgctgacctccttataggtgtcttggccgacctcagggactcagaagttgcagcccatctgctgcaggtacttg

SEQ ID NO: 127407 - DNA, 82 bp, Homo sapiens
tgacctccttataggtgtcttggccgacctcagggactcagaagttgcagcccatctgctgcaggtacttgggcagctagca

SEQ ID NO: 127408 - DNA, 82 bp, Homo sapiens
tccttataggtgtcttggccgacctcagggactcagaagttgcagcccatctgctgcaggtacttgggcagctagcatgaag

SEQ ID NO: 127409 - DNA, 82 bp, Homo sapiens
tcttggccgacctcagggactcagaagttgcagcccatctgctgcaggtacttgggcagctagcatgaaggtgggagaggaa

SEQ ID NO: 127410 - DNA, 79 bp, Homo sapiens
atatactctctctctccctgaatccttttacctcctgttctctcaggtctgctgctaccatcttccgttgatgcaagtg

SEQ ID NO: 127411 - DNA, 82 bp, Homo sapiens
tctctccctgaatccttttacctcctgttctctcaggtctgctgctaccatcttccgttgatgcaagtggagctgcccatca

SEQ ID NO: 127412 - DNA, 81 bp, Homo sapiens
aatccttttacctcctgttctctcaggtctgctgctaccatcttccgttgatgcaagtggagctgcccatcagccttctca

SEQ ID NO: 127413 - DNA, 82 bp, Homo sapiens
ttttacctcctgttctctcaggtctgctgctaccatcttccgttgatgcaagtggagctgcccatcagccttctcacacgcc

SEQ ID NO: 127414 - DNA, 87 bp, Homo sapiens
tgttctctcaggtctgctgctaccatcttccgttgatgcaagtggagctgcccatcagccttctcacacgcctggccctcatggatc

SEQ ID NO: 127415 - DNA, 86 bp, Homo sapiens
tgctgctaccatcttccgttgatgcaagtggagctgcccatcagccttctcacacgcctggccctcatggatcccacctctctcaa

SEQ ID NO: 127416 - DNA, 83 bp, Homo sapiens
taccatcttccgttgatgcaagtggagctgcccatcagccttctcacacgcctggccctcatggatcccacctctctcaacca

SEQ ID NO: 127417 - DNA, 84 bp, Homo sapiens
ttgatgcaagtggagctgcccatcagccttctcacacgcctggccctcatggatcccacctctctcaaccagtttgtgaacaca

SEQ ID NO: 127418 - DNA, 81 bp, Homo sapiens
agtggagctgcccatcagccttctcacacgcctggccctcatggatcccacctctctcaaccagtttgtgaacacagtgtc

SEQ ID NO: 127419 - DNA, 79 bp, Homo sapiens
cccatcagccttctcacacgcctggccctcatggatcccacctctctcaaccagtttgtgaacacagtgtctgcctccc

SEQ ID NO: 127420 - DNA, 78 bp, Homo sapiens
ttctcacacgcctggccctcatggatcccacctctctcaaccagtttgtgaacacagtgtctgcctcccctagaacca

SEQ ID NO: 127421 - DNA, 75 bp, Homo sapiens
ccctcatggatcccacctctctcaaccagtttgtgaacacagtgtctgcctcccctagaaccatcgtctcgtttc

SEQ ID NO: 127422 - DNA, 76 bp, Homo sapiens
atcccacctctctcaaccagtttgtgaacacagtgtctgcctcccctagaaccatcgtctcgtttctctcagttgc

SEQ ID NO: 127423 - DNA, 77 bp, Homo sapiens
agtttgtgaacacagtgtctgcctcccctagaaccatcgtctcgtttctctcagttgccctcctgagtgaccagcca

SEQ ID NO: 127424 - DNA, 76 bp, Homo sapiens
agtgtctgcctcccctagaaccatcgtctcgtttctctcagttgccctcctgagtgaccagccactgttgacctcc

SEQ ID NO: 127425 - DNA, 75 bp, Homo sapiens
tcccctagaaccatcgtctcgtttctctcagttgccctcctgagtgaccagccactgttgacctccgaccttctc

SEQ ID NO: 127426 - DNA, 79 bp, Homo sapiens
tagaaccatcgtctcgtttctctcagttgccctcctgagtgaccagccactgttgacctccgaccttctctctctgctg

SEQ ID NO: 127427 - DNA, 81 bp, Homo sapiens
tctcgtttctctcagttgccctcctgagtgaccagccactgttgacctccgaccttctctctctgctggcccatactgcca

SEQ ID NO: 127428 - DNA, 78 bp, Homo sapiens
agttgccctcctgagtgaccagccactgttgacctccgaccttctctctctgctggcccatactgccagggtcctgtc

SEQ ID NO: 127429 - DNA, 80 bp, Homo sapiens
tgagtgaccagccactgttgacctccgaccttctctctctgctggcccatactgccagggtcctgtctcccagccacttg

SEQ ID NO: 127430 - DNA, 77 bp, Homo sapiens
gccactgttgacctccgaccttctctctctgctggcccatactgccagggtcctgtctcccagccacttgtccttta

SEQ ID NO: 127431 - DNA, 77 bp, Homo sapiens
tgttgacctccgaccttctctctctgctggcccatactgccagggtcctgtctcccagccacttgtcctttatccaa

SEQ ID NO: 127432 - DNA, 82 bp, Homo sapiens
ttctctctctgctggcccatactgccagggtcctgtctcccagccacttgtcctttatccaagagcttctggctggctctga

SEQ ID NO: 127433 - DNA, 82 bp, Homo sapiens
tgctggcccatactgccagggtcctgtctcccagccacttgtcctttatccaagagcttctggctggctctgatgaatccta

SEQ ID NO: 127434 - DNA, 79 bp, Homo sapiens
atactgccagggtcctgtctcccagccacttgtcctttatccaagagcttctggctggctctgatgaatcctatcggcc

SEQ ID NO: 127435 - DNA, 79 bp, Homo sapiens
agggtcctgtctcccagccacttgtcctttatccaagagcttctggctggctctgatgaatcctatcggcccctgcgca

SEQ ID NO: 127436 - DNA, 81 bp, Homo sapiens
tctcccagccacttgtcctttatccaagagcttctggctggctctgatgaatcctatcggcccctgcgcagcctcctgggc

SEQ ID NO: 127437 - DNA, 82 bp, Homo sapiens
tatccaagagcttctggctggctctgatgaatcctatcggcccctgcgcagcctcctgggccacccagagaattctgtgcgg

SEQ ID NO: 127438 - DNA, 83 bp, Homo sapiens
tctggctggctctgatgaatcctatcggcccctgcgcagcctcctgggccacccagagaattctgtgcgggcacacacttata

SEQ ID NO: 127439 - DNA, 81 bp, Homo sapiens
tctgatgaatcctatcggcccctgcgcagcctcctgggccacccagagaattctgtgcgggcacacacttataggctcctg

SEQ ID NO: 127440 - DNA, 83 bp, Homo sapiens
tgcgcagcctcctgggccacccagagaattctgtgcgggcacacacttataggctcctgggacacttgctccaacacagcatg

SEQ ID NO: 127441 - DNA, 79 bp, Homo sapiens
ctcctgggccacccagagaattctgtgcgggcacacacttataggctcctgggacacttgctccaacacagcatggccc

SEQ ID NO: 127442 - DNA, 79 bp, Homo sapiens
ccacccagagaattctgtgcgggcacacacttataggctcctgggacacttgctccaacacagcatggccctgcgtggg

SEQ ID NO: 127443 - DNA, 83 bp, Homo sapiens
aattctgtgcgggcacacacttataggctcctgggacacttgctccaacacagcatggccctgcgtggggcactgcagagcca

SEQ ID NO: 127444 - DNA, 85 bp, Homo sapiens
acacacttataggctcctgggacacttgctccaacacagcatggccctgcgtggggcactgcagagccagtctggactgctcagc

SEQ ID NO: 127445 - DNA, 86 bp, Homo sapiens
ttataggctcctgggacacttgctccaacacagcatggccctgcgtggggcactgcagagccagtctggactgctcagccttctgc

SEQ ID NO: 127446 - DNA, 87 bp, Homo sapiens
acacttgctccaacacagcatggccctgcgtggggcactgcagagccagtctggactgctcagccttctgctgcttgggcttggaga

SEQ ID NO: 127447 - DNA, 87 bp, Homo sapiens
tccaacacagcatggccctgcgtggggcactgcagagccagtctggactgctcagccttctgctgcttgggcttggagacaaggatc

SEQ ID NO: 127448 - DNA, 85 bp, Homo sapiens
atggccctgcgtggggcactgcagagccagtctggactgctcagccttctgctgcttgggcttggagacaaggatcctgttgtgc

SEQ ID NO: 127449 - DNA, 87 bp, Homo sapiens
gtggggcactgcagagccagtctggactgctcagccttctgctgcttgggcttggagacaaggatcctgttgtgcggtgcagtgcca

SEQ ID NO: 127450 - DNA, 87 bp, Homo sapiens
actgcagagccagtctggactgctcagccttctgctgcttgggcttggagacaaggatcctgttgtgcggtgcagtgccagctttgc

SEQ ID NO: 127451 - DNA, 86 bp, Homo sapiens
tcagccttctgctgcttgggcttggagacaaggatcctgttgtgcggtgcagtgccagctttgctgtgggcaatgcagcctaccag

SEQ ID NO: 127452 - DNA, 85 bp, Homo sapiens
ttctgctgcttgggcttggagacaaggatcctgttgtgcggtgcagtgccagctttgctgtgggcaatgcagcctaccaggctgg

SEQ ID NO: 127453 - DNA, 82 bp, Homo sapiens
ttggagacaaggatcctgttgtgcggtgcagtgccagctttgctgtgggcaatgcagcctaccaggctggtcctctgggacc

SEQ ID NO: 127454 - DNA, 81 bp, Homo sapiens
acaaggatcctgttgtgcggtgcagtgccagctttgctgtgggcaatgcagcctaccaggctggtcctctgggacctgccc

SEQ ID NO: 127455 - DNA, 87 bp, Homo sapiens
ctgttgtgcggtgcagtgccagctttgctgtgggcaatgcagcctaccaggctggtcctctgggacctgccctggcagctgcagtgc

SEQ ID NO: 127456 - DNA, 84 bp, Homo sapiens
agtgccagctttgctgtgggcaatgcagcctaccaggctggtcctctgggacctgccctggcagctgcagtgcccagtatgacc

SEQ ID NO: 127457 - DNA, 85 bp, Homo sapiens
tttgctgtgggcaatgcagcctaccaggctggtcctctgggacctgccctggcagctgcagtgcccagtatgacccagctgcttg

SEQ ID NO: 127458 - DNA, 84 bp, Homo sapiens
taccaggctggtcctctgggacctgccctggcagctgcagtgcccagtatgacccagctgcttggagatcctcaggctggtatc

SEQ ID NO: 127459 - DNA, 84 bp, Homo sapiens
tcctctgggacctgccctggcagctgcagtgcccagtatgacccagctgcttggagatcctcaggctggtatccggcgcaatgt

SEQ ID NO: 127460 - DNA, 88 bp, Homo sapiens
acctgccctggcagctgcagtgcccagtatgacccagctgcttggagatcctcaggctggtatccggcgcaatgttgcatcagctctg

SEQ ID NO: 127461 - DNA, 87 bp, Homo sapiens
cagctgcagtgcccagtatgacccagctgcttggagatcctcaggctggtatccggcgcaatgttgcatcagctctgggcaacttgg

SEQ ID NO: 127462 - DNA, 83 bp, Homo sapiens
agtgcccagtatgacccagctgcttggagatcctcaggctggtatccggcgcaatgttgcatcagctctgggcaacttgggac

SEQ ID NO: 127463 - DNA, 82 bp, Homo sapiens
tatgacccagctgcttggagatcctcaggctggtatccggcgcaatgttgcatcagctctgggcaacttgggacctgaaggt

SEQ ID NO: 127464 - DNA, 79 bp, Homo sapiens
tatccggcgcaatgttgcatcagctctgggcaacttgggacctgaaggtttgggagaggagctgttacagtgcgaagta

SEQ ID NO: 127465 - DNA, 76 bp, Homo sapiens
aatgttgcatcagctctgggcaacttgggacctgaaggtttgggagaggagctgttacagtgcgaagtaccccagc

SEQ ID NO: 127466 - DNA, 72 bp, Homo sapiens
aacttgggacctgaaggtttgggagaggagctgttacagtgcgaagtaccccagcggctcctagaaatggca

SEQ ID NO: 127467 - DNA, 74 bp, Homo sapiens
acctgaaggtttgggagaggagctgttacagtgcgaagtaccccagcggctcctagaaatggcatgtggagacc

SEQ ID NO: 127468 - DNA, 76 bp, Homo sapiens
aggagctgttacagtgcgaagtaccccagcggctcctagaaatggcatgtggagacccccagccaaatgtgaagga

SEQ ID NO: 127469 - DNA, 76 bp, Homo sapiens
agtgcgaagtaccccagcggctcctagaaatggcatgtggagacccccagccaaatgtgaaggaggctgccctcat

SEQ ID NO: 127470 - DNA, 77 bp, Homo sapiens
cccagcggctcctagaaatggcatgtggagacccccagccaaatgtgaaggaggctgccctcattgccctccggagc

SEQ ID NO: 127471 - DNA, 80 bp, Homo sapiens
aatggcatgtggagacccccagccaaatgtgaaggaggctgccctcattgccctccggagcctgcaacaggagcctggca

SEQ ID NO: 127472 - DNA, 79 bp, Homo sapiens
acccccagccaaatgtgaaggaggctgccctcattgccctccggagcctgcaacaggagcctggcatccatcaggtata

SEQ ID NO: 127473 - DNA, 82 bp, Homo sapiens
aggctgccctcattgccctccggagcctgcaacaggagcctggcatccatcaggtataccctacagcacttatgaaccatga

SEQ ID NO: 127474 - DNA, 83 bp, Homo sapiens
ccctcattgccctccggagcctgcaacaggagcctggcatccatcaggtataccctacagcacttatgaaccatgatgatcag

SEQ ID NO: 127475 - DNA, 80 bp, Homo sapiens
tttctgagcctcatgttctgttctatcatctgttctctatcctacaggtactggtgtccctgggtgccagtgagaaacta

SEQ ID NO: 127476 - DNA, 81 bp, Homo sapiens
tcatgttctgttctatcatctgttctctatcctacaggtactggtgtccctgggtgccagtgagaaactatccttgctctc

SEQ ID NO: 127477 - DNA, 80 bp, Homo sapiens
tctgttctatcatctgttctctatcctacaggtactggtgtccctgggtgccagtgagaaactatccttgctctctctgg

SEQ ID NO: 127478 - DNA, 77 bp, Homo sapiens
atctgttctctatcctacaggtactggtgtccctgggtgccagtgagaaactatccttgctctctctggggaatcag

SEQ ID NO: 127479 - DNA, 80 bp, Homo sapiens
tatcctacaggtactggtgtccctgggtgccagtgagaaactatccttgctctctctggggaatcagtcactgccacaca

SEQ ID NO: 127480 - DNA, 80 bp, Homo sapiens
ggtactggtgtccctgggtgccagtgagaaactatccttgctctctctggggaatcagtcactgccacacagcagtccta

SEQ ID NO: 127481 - DNA, 83 bp, Homo sapiens
tgggtgccagtgagaaactatccttgctctctctggggaatcagtcactgccacacagcagtcctaggcctgcctctgccaaa

SEQ ID NO: 127482 - DNA, 84 bp, Homo sapiens
tgagaaactatccttgctctctctggggaatcagtcactgccacacagcagtcctaggcctgcctctgccaaacactgcaggaa

SEQ ID NO: 127483 - DNA, 85 bp, Homo sapiens
tatccttgctctctctggggaatcagtcactgccacacagcagtcctaggcctgcctctgccaaacactgcaggaaactcattca

SEQ ID NO: 127484 - DNA, 84 bp, Homo sapiens
tctctctggggaatcagtcactgccacacagcagtcctaggcctgcctctgccaaacactgcaggaaactcattcacctcctga

SEQ ID NO: 127485 - DNA, 84 bp, Homo sapiens
atcagtcactgccacacagcagtcctaggcctgcctctgccaaacactgcaggaaactcattcacctcctgaggccagcccata

SEQ ID NO: 127486 - DNA, 85 bp, Homo sapiens
cacacagcagtcctaggcctgcctctgccaaacactgcaggaaactcattcacctcctgaggccagcccatagcatgtgattcca

SEQ ID NO: 127487 - DNA, 82 bp, Homo sapiens
agtcctaggcctgcctctgccaaacactgcaggaaactcattcacctcctgaggccagcccatagcatgtgattccagattc

SEQ ID NO: 127488 - DNA, 83 bp, Homo sapiens
cctgcctctgccaaacactgcaggaaactcattcacctcctgaggccagcccatagcatgtgattccagattcctgcggtcca

SEQ ID NO: 127489 - DNA, 80 bp, Homo sapiens
aacactgcaggaaactcattcacctcctgaggccagcccatagcatgtgattccagattcctgcggtccagcctccaact

SEQ ID NO: 127490 - DNA, 77 bp, Homo sapiens
aggaaactcattcacctcctgaggccagcccatagcatgtgattccagattcctgcggtccagcctccaactttggt

SEQ ID NO: 127491 - DNA, 79 bp, Homo sapiens
attcacctcctgaggccagcccatagcatgtgattccagattcctgcggtccagcctccaactttggttgccagctctt

SEQ ID NO: 127492 - DNA, 78 bp, Homo sapiens
aggccagcccatagcatgtgattccagattcctgcggtccagcctccaactttggttgccagctctttcttattctac

SEQ ID NO: 127493 - DNA, 78 bp, Homo sapiens
atagcatgtgattccagattcctgcggtccagcctccaactttggttgccagctctttcttattctactacacaagcc

SEQ ID NO: 127494 - DNA, 74 bp, Homo sapiens
attccagattcctgcggtccagcctccaactttggttgccagctctttcttattctactacacaagccgccaac

SEQ ID NO: 127495 - DNA, 75 bp, Homo sapiens
attcctgcggtccagcctccaactttggttgccagctctttcttattctactacacaagccgccaactcaactga

SEQ ID NO: 127496 - DNA, 76 bp, Homo sapiens
gcctccaactttggttgccagctctttcttattctactacacaagccgccaactcaactgagagctaaagagacta

SEQ ID NO: 127497 - DNA, 74 bp, Homo sapiens
aactttggttgccagctctttcttattctactacacaagccgccaactcaactgagagctaaagagactagaaa

SEQ ID NO: 127498 - DNA, 77 bp, Homo sapiens
agctctttcttattctactacacaagccgccaactcaactgagagctaaagagactagaaaagagataagctgccaa

SEQ ID NO: 127499 - DNA, 77 bp, Homo sapiens
ttcttattctactacacaagccgccaactcaactgagagctaaagagactagaaaagagataagctgccaactcaac

SEQ ID NO: 127500 - DNA, 78 bp, Homo sapiens
tacacaagccgccaactcaactgagagctaaagagactagaaaagagataagctgccaactcaactgagaacaagaaa

SEQ ID NO: 127501 - DNA, 77 bp, Homo sapiens
gagagctaaagagactagaaaagagataagctgccaactcaactgagaacaagaaactagaagagatttatatataa

SEQ ID NO: 127502 - DNA, 76 bp, Homo sapiens
gagactagaaaagagataagctgccaactcaactgagaacaagaaactagaagagatttatatataaagcttcttc

SEQ ID NO: 127503 - DNA, 77 bp, Homo sapiens
tgccaactcaactgagaacaagaaactagaagagatttatatataaagcttcttccttctcccagatgcaggatgtt

SEQ ID NO: 127504 - DNA, 74 bp, Homo sapiens
aactgagaacaagaaactagaagagatttatatataaagcttcttccttctcccagatgcaggatgttttcaac

SEQ ID NO: 127505 - DNA, 74 bp, Homo sapiens
gaacaagaaactagaagagatttatatataaagcttcttccttctcccagatgcaggatgttttcaaccagtaa

SEQ ID NO: 127506 - DNA, 75 bp, Homo sapiens
tttatatataaagcttcttccttctcccagatgcaggatgttttcaaccagtaaattttattgctgttggtgcca

SEQ ID NO: 127507 - DNA, 74 bp, Homo sapiens
ttcttccttctcccagatgcaggatgttttcaaccagtaaattttattgctgttggtgccagagaagagtcctt

SEQ ID NO: 127508 - DNA, 76 bp, Homo sapiens
ttctcccagatgcaggatgttttcaaccagtaaattttattgctgttggtgccagagaagagtcctttcttctcta

SEQ ID NO: 127509 - DNA, 72 bp, Homo sapiens
aggatgttttcaaccagtaaattttattgctgttggtgccagagaagagtcctttcttctctacatccaggg

SEQ ID NO: 127510 - DNA, 71 bp, Homo sapiens
tttcaaccagtaaattttattgctgttggtgccagagaagagtcctttcttctctacatccaggggccttt

SEQ ID NO: 127511 - DNA, 73 bp, Homo sapiens
taaattttattgctgttggtgccagagaagagtcctttcttctctacatccaggggccttttctccaataatg

SEQ ID NO: 127512 - DNA, 74 bp, Homo sapiens
tgttggtgccagagaagagtcctttcttctctacatccaggggccttttctccaataatgtgcctttaactcta

SEQ ID NO: 127513 - DNA, 70 bp, Homo sapiens
agagaagagtcctttcttctctacatccaggggccttttctccaataatgtgcctttaactctagggacc

SEQ ID NO: 127514 - DNA, 71 bp, Homo sapiens
agtcctttcttctctacatccaggggccttttctccaataatgtgcctttaactctagggacctgcctcac

SEQ ID NO: 127515 - DNA, 70 bp, Homo sapiens
tacatccaggggccttttctccaataatgtgcctttaactctagggacctgcctcacggaccttagggaa

SEQ ID NO: 127516 - DNA, 68 bp, Homo sapiens
ggccttttctccaataatgtgcctttaactctagggacctgcctcacggaccttagggaaaaacctca

SEQ ID NO: 127517 - DNA, 69 bp, Homo sapiens
ttctccaataatgtgcctttaactctagggacctgcctcacggaccttagggaaaaacctcaacctgaa

SEQ ID NO: 127518 - DNA, 69 bp, Homo sapiens
taactctagggacctgcctcacggaccttagggaaaaacctcaacctgaaagatctcttcctttctgga

SEQ ID NO: 127519 - DNA, 69 bp, Homo sapiens
ctgcctcacggaccttagggaaaaacctcaacctgaaagatctcttcctttctggagctcctttaatct

SEQ ID NO: 127520 - DNA, 67 bp, Homo sapiens
acggaccttagggaaaaacctcaacctgaaagatctcttcctttctggagctcctttaatcttccca

SEQ ID NO: 127521 - DNA, 69 bp, Homo sapiens
aaaacctcaacctgaaagatctcttcctttctggagctcctttaatcttcccagcaggtttttgcctta

SEQ ID NO: 127522 - DNA, 75 bp, Homo sapiens
tcttcctttctggagctcctttaatcttcccagcaggtttttgccttagacgtgctggccccaggacagtgatga

SEQ ID NO: 127523 - DNA, 79 bp, Homo sapiens
tttaatcttcccagcaggtttttgccttagacgtgctggccccaggacagtgatgaagacagagcctgtctcagctcta

SEQ ID NO: 127524 - DNA, 84 bp, Homo sapiens
tttttgccttagacgtgctggccccaggacagtgatgaagacagagcctgtctcagctctaggctgtggggatcaatgccatca

SEQ ID NO: 127525 - DNA, 83 bp, Homo sapiens
acgtgctggccccaggacagtgatgaagacagagcctgtctcagctctaggctgtggggatcaatgccatcagtccctgttat

SEQ ID NO: 127526 - DNA, 84 bp, Homo sapiens
ccaggacagtgatgaagacagagcctgtctcagctctaggctgtggggatcaatgccatcagtccctgttattgagggattatc

SEQ ID NO: 127527 - DNA, 82 bp, Homo sapiens
agtgatgaagacagagcctgtctcagctctaggctgtggggatcaatgccatcagtccctgttattgagggattatccctta

SEQ ID NO: 127528 - DNA, 80 bp, Homo sapiens
agagcctgtctcagctctaggctgtggggatcaatgccatcagtccctgttattgagggattatcccttagccaacattc

SEQ ID NO: 127529 - DNA, 81 bp, Homo sapiens
tctcagctctaggctgtggggatcaatgccatcagtccctgttattgagggattatcccttagccaacattcctatctgtg

SEQ ID NO: 127530 - DNA, 77 bp, Homo sapiens
taggctgtggggatcaatgccatcagtccctgttattgagggattatcccttagccaacattcctatctgtgggtgg

SEQ ID NO: 127531 - DNA, 78 bp, Homo sapiens
tcaatgccatcagtccctgttattgagggattatcccttagccaacattcctatctgtgggtgggcgtggagagtgta

SEQ ID NO: 127532 - DNA, 72 bp, Homo sapiens
agtccctgttattgagggattatcccttagccaacattcctatctgtgggtgggcgtggagagtgtatcttt

SEQ ID NO: 127533 - DNA, 72 bp, Homo sapiens
ctgttattgagggattatcccttagccaacattcctatctgtgggtgggcgtggagagtgtatctttttttg

SEQ ID NO: 127534 - DNA, 71 bp, Homo sapiens
gggattatcccttagccaacattcctatctgtgggtgggcgtggagagtgtatctttttttggggtgtgtg

SEQ ID NO: 127535 - DNA, 71 bp, Homo sapiens
tgtgtgtttaatagttctgtttgtaaactcttttaataaaagttgtgcctcaccatacttgaagctcccag

SEQ ID NO: 127536 - DNA, 71 bp, Homo sapiens
tctgtttgtaaactcttttaataaaagttgtgcctcaccatacttgaagctcccaggacaagggttgagag

SEQ ID NO: 127537 - DNA, 70 bp, Homo sapiens
aactcttttaataaaagttgtgcctcaccatacttgaagctcccaggacaagggttgagaggctcaaccc

SEQ ID NO: 127538 - DNA, 75 bp, Homo sapiens
ctcaccatacttgaagctcccaggacaagggttgagaggctcaacccctctttcagcttctatgtggtgttggag

SEQ ID NO: 127539 - DNA, 76 bp, Homo sapiens
ttgaagctcccaggacaagggttgagaggctcaacccctctttcagcttctatgtggtgttggaggtgctggtatc

SEQ ID NO: 127540 - DNA, 76 bp, Homo sapiens
ggacaagggttgagaggctcaacccctctttcagcttctatgtggtgttggaggtgctggtatcgtgttcacacaa

SEQ ID NO: 127541 - DNA, 79 bp, Homo sapiens
ttgagaggctcaacccctctttcagcttctatgtggtgttggaggtgctggtatcgtgttcacacaagatcctggtctg

SEQ ID NO: 127542 - DNA, 77 bp, Homo sapiens
aacccctctttcagcttctatgtggtgttggaggtgctggtatcgtgttcacacaagatcctggtctggcagcttat

SEQ ID NO: 127543 - DNA, 81 bp, Homo sapiens
tctttcagcttctatgtggtgttggaggtgctggtatcgtgttcacacaagatcctggtctggcagcttatttatatcatt

SEQ ID NO: 127544 - DNA, 80 bp, Homo sapiens
tatgtggtgttggaggtgctggtatcgtgttcacacaagatcctggtctggcagcttatttatatcatttcttgccttta

SEQ ID NO: 127545 - DNA, 71 bp, Homo sapiens
ggcggcggcggcgcggaggggccgctcaccccgcagcccggcctcggcctccgccgcttgtcgtcgcgccc

SEQ ID NO: 127546 - DNA, 71 bp, Homo sapiens
ggcgcggaggggccgctcaccccgcagcccggcctcggcctccgccgcttgtcgtcgcgccccgcccgcga

SEQ ID NO: 127547 - DNA, 70 bp, Homo sapiens
gggccgctcaccccgcagcccggcctcggcctccgccgcttgtcgtcgcgccccgcccgcgagcccgccc

SEQ ID NO: 127548 - DNA, 69 bp, Homo sapiens
cccgcagcccggcctcggcctccgccgcttgtcgtcgcgccccgcccgcgagcccgccccgcacgtccc

SEQ ID NO: 127549 - DNA, 69 bp, Homo sapiens
ctcggcctccgccgcttgtcgtcgcgccccgcccgcgagcccgccccgcacgtcccccgccggcggcca

SEQ ID NO: 127550 - DNA, 73 bp, Homo sapiens
tccgccgcttgtcgtcgcgccccgcccgcgagcccgccccgcacgtcccccgccggcggccaccatgagcaca

SEQ ID NO: 127551 - DNA, 73 bp, Homo sapiens
ttgtcgtcgcgccccgcccgcgagcccgccccgcacgtcccccgccggcggccaccatgagcacaggcctgcg

SEQ ID NO: 127552 - DNA, 75 bp, Homo sapiens
cgcccgcgagcccgccccgcacgtcccccgccggcggccaccatgagcacaggcctgcggtacaagagcaagctg

SEQ ID NO: 127553 - DNA, 74 bp, Homo sapiens
agcccgccccgcacgtcccccgccggcggccaccatgagcacaggcctgcggtacaagagcaagctggcgaccc

SEQ ID NO: 127554 - DNA, 76 bp, Homo sapiens
ccgcacgtcccccgccggcggccaccatgagcacaggcctgcggtacaagagcaagctggcgaccccaggtgagcc

SEQ ID NO: 127555 - DNA, 80 bp, Homo sapiens
ccggcggccaccatgagcacaggcctgcggtacaagagcaagctggcgaccccaggtgagcccagcgcctgcccgcgtgc

SEQ ID NO: 127556 - DNA, 81 bp, Homo sapiens
catgagcacaggcctgcggtacaagagcaagctggcgaccccaggtgagcccagcgcctgcccgcgtgcccgcgcgcgcct

SEQ ID NO: 127557 - DNA, 66 bp, Homo sapiens
ctctcaccgtgtctctccgtctctcccccgcccgccggcccggacccgctcggaaccggacccgga

SEQ ID NO: 127558 - DNA, 64 bp, Homo sapiens
accgtgtctctccgtctctcccccgcccgccggcccggacccgctcggaaccggacccggactc

SEQ ID NO: 127559 - DNA, 63 bp, Homo sapiens
tccgtctctcccccgcccgccggcccggacccgctcggaaccggacccggactcgaccccgac

SEQ ID NO: 127560 - DNA, 60 bp, Homo sapiens
cccgcccgccggcccggacccgctcggaaccggacccggactcgaccccgaccccgaccc

SEQ ID NO: 127561 - DNA, 65 bp, Homo sapiens
cggacccgctcggaaccggacccggactcgaccccgaccccgaccccgcagaggacaagcaggta

SEQ ID NO: 127562 - DNA, 68 bp, Homo sapiens
ccgctcggaaccggacccggactcgaccccgaccccgaccccgcagaggacaagcaggtacgtgcgca

SEQ ID NO: 127563 - DNA, 69 bp, Homo sapiens
ccggacccggactcgaccccgaccccgaccccgcagaggacaagcaggtacgtgcgcagcgccgctccc

SEQ ID NO: 127564 - DNA, 70 bp, Homo sapiens
actcgaccccgaccccgaccccgcagaggacaagcaggtacgtgcgcagcgccgctcccccgccgggaga

SEQ ID NO: 127565 - DNA, 72 bp, Homo sapiens
ccgaccccgcagaggacaagcaggtacgtgcgcagcgccgctcccccgccgggagacccggccggctgtcac

SEQ ID NO: 127566 - DNA, 75 bp, Homo sapiens
gaggacaagcaggtacgtgcgcagcgccgctcccccgccgggagacccggccggctgtcacccattgtgacacta

SEQ ID NO: 127567 - DNA, 73 bp, Homo sapiens
aggtacgtgcgcagcgccgctcccccgccgggagacccggccggctgtcacccattgtgacactagcgccttg

SEQ ID NO: 127568 - DNA, 75 bp, Homo sapiens
gtgcgcagcgccgctcccccgccgggagacccggccggctgtcacccattgtgacactagcgccttgggcgccca

SEQ ID NO: 127569 - DNA, 70 bp, Homo sapiens
acggcgggcggggccgtctctgccgccccccgccgcgcgctccgcgggcgcctgcgacgccccgcctctg

SEQ ID NO: 127570 - DNA, 72 bp, Homo sapiens
gggccgtctctgccgccccccgccgcgcgctccgcgggcgcctgcgacgccccgcctctggctcgggtgcgg

SEQ ID NO: 127571 - DNA, 73 bp, Homo sapiens
gtctctgccgccccccgccgcgcgctccgcgggcgcctgcgacgccccgcctctggctcgggtgcgggagcgg

SEQ ID NO: 127572 - DNA, 74 bp, Homo sapiens
tccgcgggcgcctgcgacgccccgcctctggctcgggtgcgggagcggggcctgcccggactgcgacgccgcca

SEQ ID NO: 127573 - DNA, 73 bp, Homo sapiens
cctgcgacgccccgcctctggctcgggtgcgggagcggggcctgcccggactgcgacgccgccacagcttggg

SEQ ID NO: 127574 - DNA, 73 bp, Homo sapiens
cccgcctctggctcgggtgcgggagcggggcctgcccggactgcgacgccgccacagcttggggccagttcgc

SEQ ID NO: 127575 - DNA, 75 bp, Homo sapiens
tctggctcgggtgcgggagcggggcctgcccggactgcgacgccgccacagcttggggccagttcgcccagtcag

SEQ ID NO: 127576 - DNA, 73 bp, Homo sapiens
gggagcggggcctgcccggactgcgacgccgccacagcttggggccagttcgcccagtcagggggatggctcg

SEQ ID NO: 127577 - DNA, 73 bp, Homo sapiens
cctgcccggactgcgacgccgccacagcttggggccagttcgcccagtcagggggatggctcggtcggcctcg

SEQ ID NO: 127578 - DNA, 71 bp, Homo sapiens
ccggactgcgacgccgccacagcttggggccagttcgcccagtcagggggatggctcggtcggcctcgggg

SEQ ID NO: 127579 - DNA, 71 bp, Homo sapiens
acgccgccacagcttggggccagttcgcccagtcagggggatggctcggtcggcctcgggggtcgacgatc

SEQ ID NO: 127580 - DNA, 67 bp, Homo sapiens
ttggggccagttcgcccagtcagggggatggctcggtcggcctcgggggtcgacgatcccccgggta

SEQ ID NO: 127581 - DNA, 66 bp, Homo sapiens
agttcgcccagtcagggggatggctcggtcggcctcgggggtcgacgatcccccgggtaggcgacg

SEQ ID NO: 127582 - DNA, 68 bp, Homo sapiens
agtcagggggatggctcggtcggcctcgggggtcgacgatcccccgggtaggcgacgtgccctgtcca

SEQ ID NO: 127583 - DNA, 69 bp, Homo sapiens
atggctcggtcggcctcgggggtcgacgatcccccgggtaggcgacgtgccctgtccaggcctcacttc

SEQ ID NO: 127584 - DNA, 68 bp, Homo sapiens
tcgggggtcgacgatcccccgggtaggcgacgtgccctgtccaggcctcacttcccgcgtccgcaaaa

SEQ ID NO: 127585 - DNA, 67 bp, Homo sapiens
ggtcgacgatcccccgggtaggcgacgtgccctgtccaggcctcacttcccgcgtccgcaaaacggg

SEQ ID NO: 127586 - DNA, 70 bp, Homo sapiens
gggtaggcgacgtgccctgtccaggcctcacttcccgcgtccgcaaaacggggtggacaacgcagcctaa

SEQ ID NO: 127587 - DNA, 72 bp, Homo sapiens
acgtgccctgtccaggcctcacttcccgcgtccgcaaaacggggtggacaacgcagcctaaggcagagccgc

SEQ ID NO: 127588 - DNA, 73 bp, Homo sapiens
tgtccaggcctcacttcccgcgtccgcaaaacggggtggacaacgcagcctaaggcagagccgcgccaaggtc

SEQ ID NO: 127589 - DNA, 73 bp, Homo sapiens
tcacttcccgcgtccgcaaaacggggtggacaacgcagcctaaggcagagccgcgccaaggtccctcgctgtc

SEQ ID NO: 127590 - DNA, 73 bp, Homo sapiens
gtccgcaaaacggggtggacaacgcagcctaaggcagagccgcgccaaggtccctcgctgtcgccgggctctg

SEQ ID NO: 127591 - DNA, 74 bp, Homo sapiens
gggtggacaacgcagcctaaggcagagccgcgccaaggtccctcgctgtcgccgggctctggcggcctgaccgg

SEQ ID NO: 127592 - DNA, 74 bp, Homo sapiens
acaacgcagcctaaggcagagccgcgccaaggtccctcgctgtcgccgggctctggcggcctgaccgggcctgg

SEQ ID NO: 127593 - DNA, 72 bp, Homo sapiens
cctaaggcagagccgcgccaaggtccctcgctgtcgccgggctctggcggcctgaccgggcctggggtccga

SEQ ID NO: 127594 - DNA, 71 bp, Homo sapiens
agccgcgccaaggtccctcgctgtcgccgggctctggcggcctgaccgggcctggggtccgagcgtgcccc

SEQ ID NO: 127595 - DNA, 69 bp, Homo sapiens
aggtccctcgctgtcgccgggctctggcggcctgaccgggcctggggtccgagcgtgcccccgggcctg

SEQ ID NO: 127596 - DNA, 67 bp, Homo sapiens
ctgtcgccgggctctggcggcctgaccgggcctggggtccgagcgtgcccccgggcctgggggggtc

SEQ ID NO: 127597 - DNA, 69 bp, Homo sapiens
tctggcggcctgaccgggcctggggtccgagcgtgcccccgggcctgggggggtcgccgcgatggactc

SEQ ID NO: 127598 - DNA, 70 bp, Homo sapiens
cctgaccgggcctggggtccgagcgtgcccccgggcctgggggggtcgccgcgatggactcgctggcagc

SEQ ID NO: 127599 - DNA, 71 bp, Homo sapiens
ggtccgagcgtgcccccgggcctgggggggtcgccgcgatggactcgctggcagcgccccaggaccgcctg

SEQ ID NO: 127600 - DNA, 77 bp, Homo sapiens
cctgggggggtcgccgcgatggactcgctggcagcgccccaggaccgcctggtggagcagctgctgtcgccgcggac

SEQ ID NO: 127601 - DNA, 80 bp, Homo sapiens
atggactcgctggcagcgccccaggaccgcctggtggagcagctgctgtcgccgcggacccaggcccagaggcggctcaa

SEQ ID NO: 127602 - DNA, 78 bp, Homo sapiens
ccaggaccgcctggtggagcagctgctgtcgccgcggacccaggcccagaggcggctcaaggtgcgtgtgtggagagg

SEQ ID NO: 127603 - DNA, 78 bp, Homo sapiens
tggtggagcagctgctgtcgccgcggacccaggcccagaggcggctcaaggtgcgtgtgtggagagggcggaacgtgg

SEQ ID NO: 127604 - DNA, 77 bp, Homo sapiens
agctgctgtcgccgcggacccaggcccagaggcggctcaaggtgcgtgtgtggagagggcggaacgtgggtctgtga

SEQ ID NO: 127605 - DNA, 73 bp, Homo sapiens
gtcgccgcggacccaggcccagaggcggctcaaggtgcgtgtgtggagagggcggaacgtgggtctgtgaccc

SEQ ID NO: 127606 - DNA, 71 bp, Homo sapiens
aggcccagaggcggctcaaggtgcgtgtgtggagagggcggaacgtgggtctgtgaccccgcgggctccgg

SEQ ID NO: 127607 - DNA, 71 bp, Homo sapiens
agaggcggctcaaggtgcgtgtgtggagagggcggaacgtgggtctgtgaccccgcgggctccgggactcg

SEQ ID NO: 127608 - DNA, 70 bp, Homo sapiens
aaggtgcgtgtgtggagagggcggaacgtgggtctgtgaccccgcgggctccgggactcggcatggggtc

SEQ ID NO: 127609 - DNA, 68 bp, Homo sapiens
gtgtggagagggcggaacgtgggtctgtgaccccgcgggctccgggactcggcatggggtccccgtcc

SEQ ID NO: 127610 - DNA, 67 bp, Homo sapiens
ggaacgtgggtctgtgaccccgcgggctccgggactcggcatggggtccccgtccccgcgcgccacg

SEQ ID NO: 127611 - DNA, 70 bp, Homo sapiens
cgggctccgggactcggcatggggtccccgtccccgcgcgccacggcccgccagcgcctaggctcagccc

SEQ ID NO: 127612 - DNA, 71 bp, Homo sapiens
atggggtccccgtccccgcgcgccacggcccgccagcgcctaggctcagcccttccctccgcagcggcctc

SEQ ID NO: 127613 - DNA, 72 bp, Homo sapiens
ccacggcccgccagcgcctaggctcagcccttccctccgcagcggcctcgcaggtccgcggccccacggtgg

SEQ ID NO: 127614 - DNA, 73 bp, Homo sapiens
ccagcgcctaggctcagcccttccctccgcagcggcctcgcaggtccgcggccccacggtggggcgacgtgcc

SEQ ID NO: 127615 - DNA, 73 bp, Homo sapiens
taggctcagcccttccctccgcagcggcctcgcaggtccgcggccccacggtggggcgacgtgccctgtccag

SEQ ID NO: 127616 - DNA, 72 bp, Homo sapiens
agcccttccctccgcagcggcctcgcaggtccgcggccccacggtggggcgacgtgccctgtccaggcctca

SEQ ID NO: 127617 - DNA, 73 bp, Homo sapiens
agcggcctcgcaggtccgcggccccacggtggggcgacgtgccctgtccaggcctcacctcacgcgactccaa

SEQ ID NO: 127618 - DNA, 71 bp, Homo sapiens
cctcgcaggtccgcggccccacggtggggcgacgtgccctgtccaggcctcacctcacgcgactccaaaac

SEQ ID NO: 127619 - DNA, 72 bp, Homo sapiens
ggccccacggtggggcgacgtgccctgtccaggcctcacctcacgcgactccaaaacgcggcggagaatgcg

SEQ ID NO: 127620 - DNA, 72 bp, Homo sapiens
acggtggggcgacgtgccctgtccaggcctcacctcacgcgactccaaaacgcggcggagaatgcggccgtg

SEQ ID NO: 127621 - DNA, 72 bp, Homo sapiens
acgtgccctgtccaggcctcacctcacgcgactccaaaacgcggcggagaatgcggccgtgggacccctcca

SEQ ID NO: 127622 - DNA, 70 bp, Homo sapiens
gtccaggcctcacctcacgcgactccaaaacgcggcggagaatgcggccgtgggacccctccaggggccc

SEQ ID NO: 127623 - DNA, 67 bp, Homo sapiens
acctcacgcgactccaaaacgcggcggagaatgcggccgtgggacccctccaggggccccaagggtc

SEQ ID NO: 127624 - DNA, 66 bp, Homo sapiens
actccaaaacgcggcggagaatgcggccgtgggacccctccaggggccccaagggtctgcgggggc

SEQ ID NO: 127625 - DNA, 68 bp, Homo sapiens
cgcggcggagaatgcggccgtgggacccctccaggggccccaagggtctgcgggggctgggcgcctgg

SEQ ID NO: 127626 - DNA, 68 bp, Homo sapiens
aatgcggccgtgggacccctccaggggccccaagggtctgcgggggctgggcgcctgggcgcgcgggc

SEQ ID NO: 127627 - DNA, 70 bp, Homo sapiens
ggccccaagggtctgcgggggctgggcgcctgggcgcgcgggcgggggaggctcggcgccgcggtctata

SEQ ID NO: 127628 - DNA, 74 bp, Homo sapiens
gctgggcgcctgggcgcgcgggcgggggaggctcggcgccgcggtctataaataggcgctgctccgccaccgcc

SEQ ID NO: 127629 - DNA, 74 bp, Homo sapiens
cgcctgggcgcgcgggcgggggaggctcggcgccgcggtctataaataggcgctgctccgccaccgccgctgcc

SEQ ID NO: 127630 - DNA, 72 bp, Homo sapiens
cgcgggcgggggaggctcggcgccgcggtctataaataggcgctgctccgccaccgccgctgccgccgcccc

SEQ ID NO: 127631 - DNA, 74 bp, Homo sapiens
aggctcggcgccgcggtctataaataggcgctgctccgccaccgccgctgccgccgcccccgcggctggatccg

SEQ ID NO: 127632 - DNA, 73 bp, Homo sapiens
ctataaataggcgctgctccgccaccgccgctgccgccgcccccgcggctggatccgggccaggtggggcctc

SEQ ID NO: 127633 - DNA, 70 bp, Homo sapiens
cgccgctgccgccgcccccgcggctggatccgggccaggtggggcctcccgccccctggcactctccgga

SEQ ID NO: 127634 - DNA, 68 bp, Homo sapiens
ctgccgccgcccccgcggctggatccgggccaggtggggcctcccgccccctggcactctccggaggg

SEQ ID NO: 127635 - DNA, 69 bp, Homo sapiens
cggctggatccgggccaggtggggcctcccgccccctggcactctccggaggggtgagtgtcgaggccc

SEQ ID NO: 127636 - DNA, 68 bp, Homo sapiens
atccgggccaggtggggcctcccgccccctggcactctccggaggggtgagtgtcgaggcccccagct

SEQ ID NO: 127637 - DNA, 71 bp, Homo sapiens
tggggcctcccgccccctggcactctccggaggggtgagtgtcgaggcccccagcttctccggcttatgga

SEQ ID NO: 127638 - DNA, 70 bp, Homo sapiens
tcccgccccctggcactctccggaggggtgagtgtcgaggcccccagcttctccggcttatggagggcct

SEQ ID NO: 127639 - DNA, 74 bp, Homo sapiens
ctggcactctccggaggggtgagtgtcgaggcccccagcttctccggcttatggagggccttgagtgtgtccca

SEQ ID NO: 127640 - DNA, 70 bp, Homo sapiens
aggggtgagtgtcgaggcccccagcttctccggcttatggagggccttgagtgtgtcccaggggtcccaa

SEQ ID NO: 127641 - DNA, 73 bp, Homo sapiens
agtgtcgaggcccccagcttctccggcttatggagggccttgagtgtgtcccaggggtcccaatcctgctgcc

SEQ ID NO: 127642 - DNA, 74 bp, Homo sapiens
cccagcttctccggcttatggagggccttgagtgtgtcccaggggtcccaatcctgctgccctctgcccgagga

SEQ ID NO: 127643 - DNA, 74 bp, Homo sapiens
tctccggcttatggagggccttgagtgtgtcccaggggtcccaatcctgctgccctctgcccgaggagggagga

SEQ ID NO: 127644 - DNA, 76 bp, Homo sapiens
atggagggccttgagtgtgtcccaggggtcccaatcctgctgccctctgcccgaggagggaggacatcgcctgtgc

SEQ ID NO: 127645 - DNA, 81 bp, Homo sapiens
tgtgtcccaggggtcccaatcctgctgccctctgcccgaggagggaggacatcgcctgtgcctgctgcggcctgacatctc

SEQ ID NO: 127646 - DNA, 79 bp, Homo sapiens
gggtcccaatcctgctgccctctgcccgaggagggaggacatcgcctgtgcctgctgcggcctgacatctccccacgga

SEQ ID NO: 127647 - DNA, 78 bp, Homo sapiens
tctgcccgaggagggaggacatcgcctgtgcctgctgcggcctgacatctccccacggaataaatacagtgtcggtcc

SEQ ID NO: 127648 - DNA, 79 bp, Homo sapiens
aggagggaggacatcgcctgtgcctgctgcggcctgacatctccccacggaataaatacagtgtcggtccctgcagagc

SEQ ID NO: 127649 - DNA, 70 bp, Homo sapiens
atctccccacggaataaatacagtgtcggtccctgcagagccctccctgggattggggccaggggtgcct

SEQ ID NO: 127650 - DNA, 74 bp, Homo sapiens
acagtgtcggtccctgcagagccctccctgggattggggccaggggtgccttctcctgccaccacctcgcctgc

SEQ ID NO: 127651 - DNA, 75 bp, Homo sapiens
ctgcagagccctccctgggattggggccaggggtgccttctcctgccaccacctcgcctgccttcttatctccag

SEQ ID NO: 127652 - DNA, 71 bp, Homo sapiens
cctccctgggattggggccaggggtgccttctcctgccaccacctcgcctgccttcttatctccaggcttt

SEQ ID NO: 127653 - DNA, 72 bp, Homo sapiens
attggggccaggggtgccttctcctgccaccacctcgcctgccttcttatctccaggcttttgcccacgggc

SEQ ID NO: 127654 - DNA, 71 bp, Homo sapiens
gtgccttctcctgccaccacctcgcctgccttcttatctccaggcttttgcccacgggccctccccttatt

SEQ ID NO: 127655 - DNA, 71 bp, Homo sapiens
tcctgccaccacctcgcctgccttcttatctccaggcttttgcccacgggccctccccttatttttgccaa

SEQ ID NO: 127656 - DNA, 69 bp, Homo sapiens
acctcgcctgccttcttatctccaggcttttgcccacgggccctccccttatttttgccaacgaaatgc

SEQ ID NO: 127657 - DNA, 67 bp, Homo sapiens
cttcttatctccaggcttttgcccacgggccctccccttatttttgccaacgaaatgccccaccctg

SEQ ID NO: 127658 - DNA, 65 bp, Homo sapiens
caggcttttgcccacgggccctccccttatttttgccaacgaaatgccccaccctgggaaccgta

SEQ ID NO: 127659 - DNA, 63 bp, Homo sapiens
ttttgcccacgggccctccccttatttttgccaacgaaatgccccaccctgggaaccgtaccc

SEQ ID NO: 127660 - DNA, 71 bp, Homo sapiens
tatttttgccaacgaaatgccccaccctgggaaccgtaccctctgctgtctcctcataccgcatttggtaa

SEQ ID NO: 127661 - DNA, 71 bp, Homo sapiens
acgaaatgccccaccctgggaaccgtaccctctgctgtctcctcataccgcatttggtaagagacagggta

SEQ ID NO: 127662 - DNA, 72 bp, Homo sapiens
accctgggaaccgtaccctctgctgtctcctcataccgcatttggtaagagacagggtattgggcttctgga

SEQ ID NO: 127663 - DNA, 71 bp, Homo sapiens
aaccgtaccctctgctgtctcctcataccgcatttggtaagagacagggtattgggcttctggagaaacct

SEQ ID NO: 127664 - DNA, 74 bp, Homo sapiens
ctctgctgtctcctcataccgcatttggtaagagacagggtattgggcttctggagaaacctttgtgtccctac

SEQ ID NO: 127665 - DNA, 72 bp, Homo sapiens
tcataccgcatttggtaagagacagggtattgggcttctggagaaacctttgtgtccctaccctgttccatc

SEQ ID NO: 127666 - DNA, 69 bp, Homo sapiens
atttggtaagagacagggtattgggcttctggagaaacctttgtgtccctaccctgttccatcctgtcc

SEQ ID NO: 127667 - DNA, 71 bp, Homo sapiens
agacagggtattgggcttctggagaaacctttgtgtccctaccctgttccatcctgtccccaggacattga

SEQ ID NO: 127668 - DNA, 73 bp, Homo sapiens
tattgggcttctggagaaacctttgtgtccctaccctgttccatcctgtccccaggacattgacaagcagtac

SEQ ID NO: 127669 - DNA, 72 bp, Homo sapiens
ttctggagaaacctttgtgtccctaccctgttccatcctgtccccaggacattgacaagcagtacgtgggct

SEQ ID NO: 127670 - DNA, 75 bp, Homo sapiens
ttgtgtccctaccctgttccatcctgtccccaggacattgacaagcagtacgtgggcttcgccacactgcccaac

SEQ ID NO: 127671 - DNA, 77 bp, Homo sapiens
tcctgtccccaggacattgacaagcagtacgtgggcttcgccacactgcccaaccaggtgcaccgcaagtcggtgaa

SEQ ID NO: 127672 - DNA, 75 bp, Homo sapiens
aggacattgacaagcagtacgtgggcttcgccacactgcccaaccaggtgcaccgcaagtcggtgaagaaaggct

SEQ ID NO: 127673 - DNA, 75 bp, Homo sapiens
attgacaagcagtacgtgggcttcgccacactgcccaaccaggtgcaccgcaagtcggtgaagaaaggctttgac

SEQ ID NO: 127674 - DNA, 75 bp, Homo sapiens
agtacgtgggcttcgccacactgcccaaccaggtgcaccgcaagtcggtgaagaaaggctttgacttcacactca

SEQ ID NO: 127675 - DNA, 77 bp, Homo sapiens
ctgcccaaccaggtgcaccgcaagtcggtgaagaaaggctttgacttcacactcatggtggctggtgagtgggccag

SEQ ID NO: 127676 - DNA, 76 bp, Homo sapiens
aggtgcaccgcaagtcggtgaagaaaggctttgacttcacactcatggtggctggtgagtgggccaggctcctcgg

SEQ ID NO: 127677 - DNA, 77 bp, Homo sapiens
aagctctgtcgttggagccccagacctaacgcagctccttctctgtacctgtgtgcaggtgagtcaggcctggggaa

SEQ ID NO: 127678 - DNA, 77 bp, Homo sapiens
agccccagacctaacgcagctccttctctgtacctgtgtgcaggtgagtcaggcctggggaagtccacactggtcca

SEQ ID NO: 127679 - DNA, 77 bp, Homo sapiens
acctaacgcagctccttctctgtacctgtgtgcaggtgagtcaggcctggggaagtccacactggtccacagcctct

SEQ ID NO: 127680 - DNA, 79 bp, Homo sapiens
tccttctctgtacctgtgtgcaggtgagtcaggcctggggaagtccacactggtccacagcctcttcctgacagacttg

SEQ ID NO: 127681 - DNA, 79 bp, Homo sapiens
tctgtacctgtgtgcaggtgagtcaggcctggggaagtccacactggtccacagcctcttcctgacagacttgtacaag

SEQ ID NO: 127682 - DNA, 77 bp, Homo sapiens
tgtgcaggtgagtcaggcctggggaagtccacactggtccacagcctcttcctgacagacttgtacaaggaccggaa

SEQ ID NO: 127683 - DNA, 78 bp, Homo sapiens
aggcctggggaagtccacactggtccacagcctcttcctgacagacttgtacaaggaccggaagctgctcagtgctga

SEQ ID NO: 127684 - DNA, 79 bp, Homo sapiens
ggaagtccacactggtccacagcctcttcctgacagacttgtacaaggaccggaagctgctcagtgctgagggtgagtg

SEQ ID NO: 127685 - DNA, 78 bp, Homo sapiens
acactggtccacagcctcttcctgacagacttgtacaaggaccggaagctgctcagtgctgagggtgagtggccccca

SEQ ID NO: 127686 - DNA, 76 bp, Homo sapiens
acagcctcttcctgacagacttgtacaaggaccggaagctgctcagtgctgagggtgagtggcccccaggaggccc

SEQ ID NO: 127687 - DNA, 79 bp, Homo sapiens
tcctgacagacttgtacaaggaccggaagctgctcagtgctgagggtgagtggcccccaggaggccctggcactgatcc

SEQ ID NO: 127688 - DNA, 76 bp, Homo sapiens
cttgtacaaggaccggaagctgctcagtgctgagggtgagtggcccccaggaggccctggcactgatccccagtcc

SEQ ID NO: 127689 - DNA, 72 bp, Homo sapiens
aggggctgagggttggagaggcccttccagtggccccttccccgtagagcgcatcagccagacggtagagat

SEQ ID NO: 127690 - DNA, 71 bp, Homo sapiens
agggttggagaggcccttccagtggccccttccccgtagagcgcatcagccagacggtagagattctaaaa

SEQ ID NO: 127691 - DNA, 74 bp, Homo sapiens
agtggccccttccccgtagagcgcatcagccagacggtagagattctaaaacacacggtggacattgaggagaa

SEQ ID NO: 127692 - DNA, 77 bp, Homo sapiens
cccgtagagcgcatcagccagacggtagagattctaaaacacacggtggacattgaggagaagggagtcaagctgaa

SEQ ID NO: 127693 - DNA, 79 bp, Homo sapiens
catcagccagacggtagagattctaaaacacacggtggacattgaggagaagggagtcaagctgaagctcaccatcgtg

SEQ ID NO: 127694 - DNA, 76 bp, Homo sapiens
agacggtagagattctaaaacacacggtggacattgaggagaagggagtcaagctgaagctcaccatcgtggacac

SEQ ID NO: 127695 - DNA, 75 bp, Homo sapiens
attctaaaacacacggtggacattgaggagaagggagtcaagctgaagctcaccatcgtggacacgccgggattc

SEQ ID NO: 127696 - DNA, 74 bp, Homo sapiens
aaacacacggtggacattgaggagaagggagtcaagctgaagctcaccatcgtggacacgccgggattcgggga

SEQ ID NO: 127697 - DNA, 75 bp, Homo sapiens
attgaggagaagggagtcaagctgaagctcaccatcgtggacacgccgggattcggggacgctgtcaacaacacc

SEQ ID NO: 127698 - DNA, 75 bp, Homo sapiens
aagggagtcaagctgaagctcaccatcgtggacacgccgggattcggggacgctgtcaacaacaccgagtggtga

SEQ ID NO: 127699 - DNA, 77 bp, Homo sapiens
gtcaagctgaagctcaccatcgtggacacgccgggattcggggacgctgtcaacaacaccgagtggtgagtgaggcc

SEQ ID NO: 127700 - DNA, 77 bp, Homo sapiens
agctcaccatcgtggacacgccgggattcggggacgctgtcaacaacaccgagtggtgagtgaggcctgctgagaaa

SEQ ID NO: 127701 - DNA, 76 bp, Homo sapiens
tggacacgccgggattcggggacgctgtcaacaacaccgagtggtgagtgaggcctgctgagaaaggccttgccta

SEQ ID NO: 127702 - DNA, 79 bp, Homo sapiens
agtggtgagtgaggcctgctgagaaaggccttgcctaggcggccacagcactcgaggcctggcctcacctccctcctgc

SEQ ID NO: 127703 - DNA, 80 bp, Homo sapiens
taggcggccacagcactcgaggcctggcctcacctccctcctgcccacagctggaagcccatcaccgactatgtggacca

SEQ ID NO: 127704 - DNA, 80 bp, Homo sapiens
acagcactcgaggcctggcctcacctccctcctgcccacagctggaagcccatcaccgactatgtggaccagcagtttga

SEQ ID NO: 127705 - DNA, 80 bp, Homo sapiens
tggcctcacctccctcctgcccacagctggaagcccatcaccgactatgtggaccagcagtttgagcagtacttccgtga

SEQ ID NO: 127706 - DNA, 81 bp, Homo sapiens
tccctcctgcccacagctggaagcccatcaccgactatgtggaccagcagtttgagcagtacttccgtgatgagagcggcc

SEQ ID NO: 127707 - DNA, 80 bp, Homo sapiens
ccacagctggaagcccatcaccgactatgtggaccagcagtttgagcagtacttccgtgatgagagcggcctcaaccgaa

SEQ ID NO: 127708 - DNA, 78 bp, Homo sapiens
aagcccatcaccgactatgtggaccagcagtttgagcagtacttccgtgatgagagcggcctcaaccgaaagaacatc

SEQ ID NO: 127709 - DNA, 77 bp, Homo sapiens
accgactatgtggaccagcagtttgagcagtacttccgtgatgagagcggcctcaaccgaaagaacatccaagacaa

SEQ ID NO: 127710 - DNA, 80 bp, Homo sapiens
tatgtggaccagcagtttgagcagtacttccgtgatgagagcggcctcaaccgaaagaacatccaagacaaccgagtgca

SEQ ID NO: 127711 - DNA, 79 bp, Homo sapiens
tttgagcagtacttccgtgatgagagcggcctcaaccgaaagaacatccaagacaaccgagtgcactgctgcctatact

SEQ ID NO: 127712 - DNA, 79 bp, Homo sapiens
agtacttccgtgatgagagcggcctcaaccgaaagaacatccaagacaaccgagtgcactgctgcctatacttcatctc

SEQ ID NO: 127713 - DNA, 76 bp, Homo sapiens
atgagagcggcctcaaccgaaagaacatccaagacaaccgagtgcactgctgcctatacttcatctcccccttcgg

SEQ ID NO: 127714 - DNA, 76 bp, Homo sapiens
ctcaaccgaaagaacatccaagacaaccgagtgcactgctgcctatacttcatctcccccttcgggcatgggtgtg

SEQ ID NO: 127715 - DNA, 77 bp, Homo sapiens
aaagaacatccaagacaaccgagtgcactgctgcctatacttcatctcccccttcgggcatgggtgtgtggctgtcc

SEQ ID NO: 127716 - DNA, 78 bp, Homo sapiens
atccaagacaaccgagtgcactgctgcctatacttcatctcccccttcgggcatgggtgtgtggctgtcctggggcca

SEQ ID NO: 127717 - DNA, 80 bp, Homo sapiens
aatatggccccctggctgtgcctatgcccacccttggctgctctcggcaggctgcggccagtggatgtgggtttcatgaa

SEQ ID NO: 127718 - DNA, 86 bp, Homo sapiens
gctgtgcctatgcccacccttggctgctctcggcaggctgcggccagtggatgtgggtttcatgaaggcattgcatgagaaggtca

SEQ ID NO: 127719 - DNA, 84 bp, Homo sapiens
tatgcccacccttggctgctctcggcaggctgcggccagtggatgtgggtttcatgaaggcattgcatgagaaggtcaacatcg

SEQ ID NO: 127720 - DNA, 88 bp, Homo sapiens
tggctgctctcggcaggctgcggccagtggatgtgggtttcatgaaggcattgcatgagaaggtcaacatcgtgcctctcatcgccaa

SEQ ID NO: 127721 - DNA, 87 bp, Homo sapiens
tctcggcaggctgcggccagtggatgtgggtttcatgaaggcattgcatgagaaggtcaacatcgtgcctctcatcgccaaagctga

SEQ ID NO: 127722 - DNA, 84 bp, Homo sapiens
cggccagtggatgtgggtttcatgaaggcattgcatgagaaggtcaacatcgtgcctctcatcgccaaagctgactgtcttgtc

SEQ ID NO: 127723 - DNA, 83 bp, Homo sapiens
agtggatgtgggtttcatgaaggcattgcatgagaaggtcaacatcgtgcctctcatcgccaaagctgactgtcttgtcccca

SEQ ID NO: 127724 - DNA, 84 bp, Homo sapiens
tttcatgaaggcattgcatgagaaggtcaacatcgtgcctctcatcgccaaagctgactgtcttgtccccagtgagatccggaa

SEQ ID NO: 127725 - DNA, 83 bp, Homo sapiens
aggcattgcatgagaaggtcaacatcgtgcctctcatcgccaaagctgactgtcttgtccccagtgagatccggaagctgaag

SEQ ID NO: 127726 - DNA, 79 bp, Homo sapiens
aaggtcaacatcgtgcctctcatcgccaaagctgactgtcttgtccccagtgagatccggaagctgaaggagcgggtga

SEQ ID NO: 127727 - DNA, 80 bp, Homo sapiens
aacatcgtgcctctcatcgccaaagctgactgtcttgtccccagtgagatccggaagctgaaggagcgggtgagcctgcc

SEQ ID NO: 127728 - DNA, 80 bp, Homo sapiens
ctctcatcgccaaagctgactgtcttgtccccagtgagatccggaagctgaaggagcgggtgagcctgccgtcgcacagg

SEQ ID NO: 127729 - DNA, 77 bp, Homo sapiens
aaagctgactgtcttgtccccagtgagatccggaagctgaaggagcgggtgagcctgccgtcgcacaggggcctggc

SEQ ID NO: 127730 - DNA, 76 bp, Homo sapiens
tgtcttgtccccagtgagatccggaagctgaaggagcgggtgagcctgccgtcgcacaggggcctggccagggccc

SEQ ID NO: 127731 - DNA, 74 bp, Homo sapiens
ggggacttgtctggcctcaaatctgatggtccttgccccaccacagatccgggaggagattgacaagtttggga

SEQ ID NO: 127732 - DNA, 78 bp, Homo sapiens
ttgtctggcctcaaatctgatggtccttgccccaccacagatccgggaggagattgacaagtttgggatccatgtata

SEQ ID NO: 127733 - DNA, 74 bp, Homo sapiens
aaatctgatggtccttgccccaccacagatccgggaggagattgacaagtttgggatccatgtataccagttcc

SEQ ID NO: 127734 - DNA, 74 bp, Homo sapiens
atggtccttgccccaccacagatccgggaggagattgacaagtttgggatccatgtataccagttccctgagtg

SEQ ID NO: 127735 - DNA, 75 bp, Homo sapiens
accacagatccgggaggagattgacaagtttgggatccatgtataccagttccctgagtgtgactcggacgagga

SEQ ID NO: 127736 - DNA, 76 bp, Homo sapiens
gggaggagattgacaagtttgggatccatgtataccagttccctgagtgtgactcggacgaggatgaggacttcaa

SEQ ID NO: 127737 - DNA, 79 bp, Homo sapiens
agattgacaagtttgggatccatgtataccagttccctgagtgtgactcggacgaggatgaggacttcaagcagcagga

SEQ ID NO: 127738 - DNA, 76 bp, Homo sapiens
gtttgggatccatgtataccagttccctgagtgtgactcggacgaggatgaggacttcaagcagcaggaccgggaa

SEQ ID NO: 127739 - DNA, 76 bp, Homo sapiens
atgtataccagttccctgagtgtgactcggacgaggatgaggacttcaagcagcaggaccgggaactgaaggtgaa

SEQ ID NO: 127740 - DNA, 78 bp, Homo sapiens
agttccctgagtgtgactcggacgaggatgaggacttcaagcagcaggaccgggaactgaaggtgaacatgcagactg

SEQ ID NO: 127741 - DNA, 78 bp, Homo sapiens
agtgtgactcggacgaggatgaggacttcaagcagcaggaccgggaactgaaggtgaacatgcagactggtggggcag

SEQ ID NO: 127742 - DNA, 76 bp, Homo sapiens
acgaggatgaggacttcaagcagcaggaccgggaactgaaggtgaacatgcagactggtggggcaggggggatgga

SEQ ID NO: 127743 - DNA, 72 bp, Homo sapiens
gtgcaattacgctcaccgggtgtgagcctttctccctccttcccccaggagagcgcgcccttcgccgttata

SEQ ID NO: 127744 - DNA, 71 bp, Homo sapiens
attacgctcaccgggtgtgagcctttctccctccttcccccaggagagcgcgcccttcgccgttataggca

SEQ ID NO: 127745 - DNA, 73 bp, Homo sapiens
tgtgagcctttctccctccttcccccaggagagcgcgcccttcgccgttataggcagcaacacggtggtggag

SEQ ID NO: 127746 - DNA, 71 bp, Homo sapiens
tttctccctccttcccccaggagagcgcgcccttcgccgttataggcagcaacacggtggtggaggccaag

SEQ ID NO: 127747 - DNA, 72 bp, Homo sapiens
ttcccccaggagagcgcgcccttcgccgttataggcagcaacacggtggtggaggccaaggggcagcgggtc

SEQ ID NO: 127748 - DNA, 71 bp, Homo sapiens
aggagagcgcgcccttcgccgttataggcagcaacacggtggtggaggccaaggggcagcgggtccggggc

SEQ ID NO: 127749 - DNA, 69 bp, Homo sapiens
cccttcgccgttataggcagcaacacggtggtggaggccaaggggcagcgggtccggggccgactgtac

SEQ ID NO: 127750 - DNA, 68 bp, Homo sapiens
cgttataggcagcaacacggtggtggaggccaaggggcagcgggtccggggccgactgtacccctggg

SEQ ID NO: 127751 - DNA, 68 bp, Homo sapiens
agcaacacggtggtggaggccaaggggcagcgggtccggggccgactgtacccctgggggatcgtgga

SEQ ID NO: 127752 - DNA, 68 bp, Homo sapiens
gaggccaaggggcagcgggtccggggccgactgtacccctgggggatcgtggagggtgagtagagtct

SEQ ID NO: 127753 - DNA, 68 bp, Homo sapiens
ggcagcgggtccggggccgactgtacccctgggggatcgtggagggtgagtagagtcttggggtacca

SEQ ID NO: 127754 - DNA, 68 bp, Homo sapiens
tccggggccgactgtacccctgggggatcgtggagggtgagtagagtcttggggtaccaggtctggtg

SEQ ID NO: 127755 - DNA, 71 bp, Homo sapiens
gtgagtagagtcttggggtaccaggtctggtgggggaaggctgtcctgggccggcgccagcccactaccca

SEQ ID NO: 127756 - DNA, 72 bp, Homo sapiens
aggctgtcctgggccggcgccagcccactacccacccccaccccgcagtggagaaccaggcgcattgcgact

SEQ ID NO: 127757 - DNA, 76 bp, Homo sapiens
gccggcgccagcccactacccacccccaccccgcagtggagaaccaggcgcattgcgacttcgtgaagctgcgcaa

SEQ ID NO: 127758 - DNA, 78 bp, Homo sapiens
agcccactacccacccccaccccgcagtggagaaccaggcgcattgcgacttcgtgaagctgcgcaacatgctcatcc

SEQ ID NO: 127759 - DNA, 84 bp, Homo sapiens
cacccccaccccgcagtggagaaccaggcgcattgcgacttcgtgaagctgcgcaacatgctcatccgcacgcatatgcacgac

SEQ ID NO: 127760 - DNA, 87 bp, Homo sapiens
ccgcagtggagaaccaggcgcattgcgacttcgtgaagctgcgcaacatgctcatccgcacgcatatgcacgacctcaaggacgtga

SEQ ID NO: 127761 - DNA, 86 bp, Homo sapiens
agaaccaggcgcattgcgacttcgtgaagctgcgcaacatgctcatccgcacgcatatgcacgacctcaaggacgtgacgtgcgac

SEQ ID NO: 127762 - DNA, 88 bp, Homo sapiens
cattgcgacttcgtgaagctgcgcaacatgctcatccgcacgcatatgcacgacctcaaggacgtgacgtgcgacgtgcactacgaga

SEQ ID NO: 127763 - DNA, 85 bp, Homo sapiens
acttcgtgaagctgcgcaacatgctcatccgcacgcatatgcacgacctcaaggacgtgacgtgcgacgtgcactacgagaacta

SEQ ID NO: 127764 - DNA, 86 bp, Homo sapiens
aagctgcgcaacatgctcatccgcacgcatatgcacgacctcaaggacgtgacgtgcgacgtgcactacgagaactaccgcgcgca

SEQ ID NO: 127765 - DNA, 88 bp, Homo sapiens
acatgctcatccgcacgcatatgcacgacctcaaggacgtgacgtgcgacgtgcactacgagaactaccgcgcgcactgcatccagca

SEQ ID NO: 127766 - DNA, 84 bp, Homo sapiens
acgcatatgcacgacctcaaggacgtgacgtgcgacgtgcactacgagaactaccgcgcgcactgcatccagcagatgaccagg

SEQ ID NO: 127767 - DNA, 85 bp, Homo sapiens
atgcacgacctcaaggacgtgacgtgcgacgtgcactacgagaactaccgcgcgcactgcatccagcagatgaccaggtgcgcgc

SEQ ID NO: 127768 - DNA, 84 bp, Homo sapiens
tcaaggacgtgacgtgcgacgtgcactacgagaactaccgcgcgcactgcatccagcagatgaccaggtgcgcgccccagccgc

SEQ ID NO: 127769 - DNA, 83 bp, Homo sapiens
acgtgcgacgtgcactacgagaactaccgcgcgcactgcatccagcagatgaccaggtgcgcgccccagccgcgagccagacc

SEQ ID NO: 127770 - DNA, 81 bp, Homo sapiens
actacgagaactaccgcgcgcactgcatccagcagatgaccaggtgcgcgccccagccgcgagccagacctcgcccctctg

SEQ ID NO: 127771 - DNA, 71 bp, Homo sapiens
ctcccggtggcgccgccccgcccatcctcccccccgccccgcgcagcaaactgacccaggacagccgcatg

SEQ ID NO: 127772 - DNA, 73 bp, Homo sapiens
ggtggcgccgccccgcccatcctcccccccgccccgcgcagcaaactgacccaggacagccgcatggagagcc

SEQ ID NO: 127773 - DNA, 74 bp, Homo sapiens
cccatcctcccccccgccccgcgcagcaaactgacccaggacagccgcatggagagccccatcccgatcctgcc

SEQ ID NO: 127774 - DNA, 75 bp, Homo sapiens
cccccgccccgcgcagcaaactgacccaggacagccgcatggagagccccatcccgatcctgccgctgcccaccc

SEQ ID NO: 127775 - DNA, 78 bp, Homo sapiens
cgcgcagcaaactgacccaggacagccgcatggagagccccatcccgatcctgccgctgcccaccccggacgccgaga

SEQ ID NO: 127776 - DNA, 76 bp, Homo sapiens
aactgacccaggacagccgcatggagagccccatcccgatcctgccgctgcccaccccggacgccgagactgagaa

SEQ ID NO: 127777 - DNA, 79 bp, Homo sapiens
acagccgcatggagagccccatcccgatcctgccgctgcccaccccggacgccgagactgagaagcttatcaggatgaa

SEQ ID NO: 127778 - DNA, 78 bp, Homo sapiens
atggagagccccatcccgatcctgccgctgcccaccccggacgccgagactgagaagcttatcaggatgaaggatgag

SEQ ID NO: 127779 - DNA, 77 bp, Homo sapiens
atcccgatcctgccgctgcccaccccggacgccgagactgagaagcttatcaggatgaaggatgaggaagtatgtgg

SEQ ID NO: 127780 - DNA, 77 bp, Homo sapiens
atcctgccgctgcccaccccggacgccgagactgagaagcttatcaggatgaaggatgaggaagtatgtggggcggc

SEQ ID NO: 127781 - DNA, 74 bp, Homo sapiens
ctgcccaccccggacgccgagactgagaagcttatcaggatgaaggatgaggaagtatgtggggcggcgggggc

SEQ ID NO: 127782 - DNA, 74 bp, Homo sapiens
cggacgccgagactgagaagcttatcaggatgaaggatgaggaagtatgtggggcggcgggggcggcggaggcg

SEQ ID NO: 127783 - DNA, 86 bp, Homo sapiens
gggatgctcctccgcggtgctgctcacccgccgggttgtctccgcccgcagctgaggcgcatgcaggagatgctgcagaggatgaa

SEQ ID NO: 127784 - DNA, 90 bp, Homo sapiens
cggtgctgctcacccgccgggttgtctccgcccgcagctgaggcgcatgcaggagatgctgcagaggatgaagcagcagatgcaggacca

SEQ ID NO: 127785 - DNA, 88 bp, Homo sapiens
acccgccgggttgtctccgcccgcagctgaggcgcatgcaggagatgctgcagaggatgaagcagcagatgcaggaccagtgacgctc

SEQ ID NO: 127786 - DNA, 92 bp, Homo sapiens
gttgtctccgcccgcagctgaggcgcatgcaggagatgctgcagaggatgaagcagcagatgcaggaccagtgacgctcgccgcggacacac

SEQ ID NO: 127787 - DNA, 91 bp, Homo sapiens
ccgcagctgaggcgcatgcaggagatgctgcagaggatgaagcagcagatgcaggaccagtgacgctcgccgcggacacaccgtccgtctc

SEQ ID NO: 127788 - DNA, 89 bp, Homo sapiens
tgaggcgcatgcaggagatgctgcagaggatgaagcagcagatgcaggaccagtgacgctcgccgcggacacaccgtccgtctccggga

SEQ ID NO: 127789 - DNA, 85 bp, Homo sapiens
atgcaggagatgctgcagaggatgaagcagcagatgcaggaccagtgacgctcgccgcggacacaccgtccgtctccgggacgcc

SEQ ID NO: 127790 - DNA, 79 bp, Homo sapiens
cagaggatgaagcagcagatgcaggaccagtgacgctcgccgcggacacaccgtccgtctccgggacgccctcgcaccc

SEQ ID NO: 127791 - DNA, 77 bp, Homo sapiens
aagcagcagatgcaggaccagtgacgctcgccgcggacacaccgtccgtctccgggacgccctcgcacccctggaca

SEQ ID NO: 127792 - DNA, 72 bp, Homo sapiens
tgacgctcgccgcggacacaccgtccgtctccgggacgccctcgcacccctggacaccagaccggactgttc

SEQ ID NO: 127793 - DNA, 70 bp, Homo sapiens
tcgccgcggacacaccgtccgtctccgggacgccctcgcacccctggacaccagaccggactgttcccga

SEQ ID NO: 127794 - DNA, 67 bp, Homo sapiens
acacaccgtccgtctccgggacgccctcgcacccctggacaccagaccggactgttcccgacccgga

SEQ ID NO: 127795 - DNA, 69 bp, Homo sapiens
tctccgggacgccctcgcacccctggacaccagaccggactgttcccgacccggagacgcggggccaca

SEQ ID NO: 127796 - DNA, 68 bp, Homo sapiens
acgccctcgcacccctggacaccagaccggactgttcccgacccggagacgcggggccacagccccca

SEQ ID NO: 127797 - DNA, 69 bp, Homo sapiens
tggacaccagaccggactgttcccgacccggagacgcggggccacagcccccagctgaccctaatttat

SEQ ID NO: 127798 - DNA, 69 bp, Homo sapiens
actgttcccgacccggagacgcggggccacagcccccagctgaccctaatttattctcagcaccacccc

SEQ ID NO: 127799 - DNA, 74 bp, Homo sapiens
gagacgcggggccacagcccccagctgaccctaatttattctcagcaccaccccctcccaggtcattgtgtctg

SEQ ID NO: 127800 - DNA, 73 bp, Homo sapiens
gccacagcccccagctgaccctaatttattctcagcaccaccccctcccaggtcattgtgtctgtttccgagg

SEQ ID NO: 127801 - DNA, 72 bp, Homo sapiens
ccagctgaccctaatttattctcagcaccaccccctcccaggtcattgtgtctgtttccgaggggcctggac

SEQ ID NO: 127802 - DNA, 69 bp, Homo sapiens
accctaatttattctcagcaccaccccctcccaggtcattgtgtctgtttccgaggggcctggaccgta

SEQ ID NO: 127803 - DNA, 70 bp, Homo sapiens
attctcagcaccaccccctcccaggtcattgtgtctgtttccgaggggcctggaccgtagcccccgccca

SEQ ID NO: 127804 - DNA, 68 bp, Homo sapiens
accccctcccaggtcattgtgtctgtttccgaggggcctggaccgtagcccccgcccagctggccctc

SEQ ID NO: 127805 - DNA, 72 bp, Homo sapiens
tcccaggtcattgtgtctgtttccgaggggcctggaccgtagcccccgcccagctggccctctctgaccttg

SEQ ID NO: 127806 - DNA, 71 bp, Homo sapiens
ttgtgtctgtttccgaggggcctggaccgtagcccccgcccagctggccctctctgaccttgggggatcag

SEQ ID NO: 127807 - DNA, 70 bp, Homo sapiens
ttccgaggggcctggaccgtagcccccgcccagctggccctctctgaccttgggggatcaggagcgaagt

SEQ ID NO: 127808 - DNA, 73 bp, Homo sapiens
ccgcccagctggccctctctgaccttgggggatcaggagcgaagttgggcgggacttcagagatccgcctccc

SEQ ID NO: 127809 - DNA, 71 bp, Homo sapiens
tctctgaccttgggggatcaggagcgaagttgggcgggacttcagagatccgcctcccttgcccttccccc

SEQ ID NO: 127810 - DNA, 69 bp, Homo sapiens
agcgaagttgggcgggacttcagagatccgcctcccttgcccttcccccgcccccggacggtcacagca

SEQ ID NO: 127811 - DNA, 70 bp, Homo sapiens
ttcagagatccgcctcccttgcccttcccccgcccccggacggtcacagcacccaaaccgcaggccctgc

SEQ ID NO: 127812 - DNA, 74 bp, Homo sapiens
ttcccccgcccccggacggtcacagcacccaaaccgcaggccctgctctggcaggcaggcaaagctaggcagaa

SEQ ID NO: 127813 - DNA, 77 bp, Homo sapiens
ccggacggtcacagcacccaaaccgcaggccctgctctggcaggcaggcaaagctaggcagaagaggattcccagga

SEQ ID NO: 127814 - DNA, 78 bp, Homo sapiens
acagcacccaaaccgcaggccctgctctggcaggcaggcaaagctaggcagaagaggattcccaggatcctgggtctg

SEQ ID NO: 127815 - DNA, 76 bp, Homo sapiens
acccaaaccgcaggccctgctctggcaggcaggcaaagctaggcagaagaggattcccaggatcctgggtctgttc

SEQ ID NO: 127816 - DNA, 81 bp, Homo sapiens
cctgctctggcaggcaggcaaagctaggcagaagaggattcccaggatcctgggtctgttccctgccccagtgctgcagaa

SEQ ID NO: 127817 - DNA, 77 bp, Homo sapiens
caggcaggcaaagctaggcagaagaggattcccaggatcctgggtctgttccctgccccagtgctgcagaacggact

SEQ ID NO: 127818 - DNA, 75 bp, Homo sapiens
aaagctaggcagaagaggattcccaggatcctgggtctgttccctgccccagtgctgcagaacggacttgggagc

SEQ ID NO: 127819 - DNA, 72 bp, Homo sapiens
agaagaggattcccaggatcctgggtctgttccctgccccagtgctgcagaacggacttgggagccctcctt

SEQ ID NO: 127820 - DNA, 74 bp, Homo sapiens
attcccaggatcctgggtctgttccctgccccagtgctgcagaacggacttgggagccctcctttgcctgctcc

SEQ ID NO: 127821 - DNA, 75 bp, Homo sapiens
agtgctgcagaacggacttgggagccctcctttgcctgctcccgcgggtcacccagcgagtgctgagaccccatt

SEQ ID NO: 127822 - DNA, 73 bp, Homo sapiens
cttgggagccctcctttgcctgctcccgcgggtcacccagcgagtgctgagaccccattttctgtcgaggcgg

SEQ ID NO: 127823 - DNA, 74 bp, Homo sapiens
ttgcctgctcccgcgggtcacccagcgagtgctgagaccccattttctgtcgaggcgggccgagtcttccctta

SEQ ID NO: 127824 - DNA, 71 bp, Homo sapiens
ctcccgcgggtcacccagcgagtgctgagaccccattttctgtcgaggcgggccgagtcttcccttatccc

SEQ ID NO: 127825 - DNA, 72 bp, Homo sapiens
tgctgagaccccattttctgtcgaggcgggccgagtcttcccttatccccagacgcctagcgggcagggttg

SEQ ID NO: 127826 - DNA, 72 bp, Homo sapiens
cattttctgtcgaggcgggccgagtcttcccttatccccagacgcctagcgggcagggttgggctgaatcaa

SEQ ID NO: 127827 - DNA, 73 bp, Homo sapiens
tctgtcgaggcgggccgagtcttcccttatccccagacgcctagcgggcagggttgggctgaatcaaatggga

SEQ ID NO: 127828 - DNA, 73 bp, Homo sapiens
cgagtcttcccttatccccagacgcctagcgggcagggttgggctgaatcaaatgggagccctccagacataa

SEQ ID NO: 127829 - DNA, 72 bp, Homo sapiens
cttcccttatccccagacgcctagcgggcagggttgggctgaatcaaatgggagccctccagacataaggag

SEQ ID NO: 127830 - DNA, 77 bp, Homo sapiens
ccagacgcctagcgggcagggttgggctgaatcaaatgggagccctccagacataaggaggccagaggctgcaagga

SEQ ID NO: 127831 - DNA, 76 bp, Homo sapiens
gggcagggttgggctgaatcaaatgggagccctccagacataaggaggccagaggctgcaaggagcggggtcgtga

SEQ ID NO: 127832 - DNA, 77 bp, Homo sapiens
ttgggctgaatcaaatgggagccctccagacataaggaggccagaggctgcaaggagcggggtcgtgaccgcttaca

SEQ ID NO: 127833 - DNA, 73 bp, Homo sapiens
atcaaatgggagccctccagacataaggaggccagaggctgcaaggagcggggtcgtgaccgcttacacccct

SEQ ID NO: 127834 - DNA, 74 bp, Homo sapiens
agccctccagacataaggaggccagaggctgcaaggagcggggtcgtgaccgcttacaccccttctccacagcc

SEQ ID NO: 127835 - DNA, 72 bp, Homo sapiens
acataaggaggccagaggctgcaaggagcggggtcgtgaccgcttacaccccttctccacagcccggcccga

SEQ ID NO: 127836 - DNA, 70 bp, Homo sapiens
agaggctgcaaggagcggggtcgtgaccgcttacaccccttctccacagcccggcccgacctggagggcc

SEQ ID NO: 127837 - DNA, 66 bp, Homo sapiens
gggtcgtgaccgcttacaccccttctccacagcccggcccgacctggagggcccccggggcactgg

SEQ ID NO: 127838 - DNA, 68 bp, Homo sapiens
ttacaccccttctccacagcccggcccgacctggagggcccccggggcactgggcggtgagccacctc

SEQ ID NO: 127839 - DNA, 71 bp, Homo sapiens
ttctccacagcccggcccgacctggagggcccccggggcactgggcggtgagccacctcctggcaactctc

SEQ ID NO: 127840 - DNA, 69 bp, Homo sapiens
acctggagggcccccggggcactgggcggtgagccacctcctggcaactctcggtgccgtcccctgccc

SEQ ID NO: 127841 - DNA, 72 bp, Homo sapiens
cccggggcactgggcggtgagccacctcctggcaactctcggtgccgtcccctgccctcgctcgaggcctct

SEQ ID NO: 127842 - DNA, 75 bp, Homo sapiens
ggcactgggcggtgagccacctcctggcaactctcggtgccgtcccctgccctcgctcgaggcctcttctcccca

SEQ ID NO: 127843 - DNA, 75 bp, Homo sapiens
agccacctcctggcaactctcggtgccgtcccctgccctcgctcgaggcctcttctccccagcaccgctgtggtg

SEQ ID NO: 127844 - DNA, 76 bp, Homo sapiens
tcctggcaactctcggtgccgtcccctgccctcgctcgaggcctcttctccccagcaccgctgtggtgtgccggga

SEQ ID NO: 127845 - DNA, 77 bp, Homo sapiens
tctcggtgccgtcccctgccctcgctcgaggcctcttctccccagcaccgctgtggtgtgccgggatcctgagccta

SEQ ID NO: 127846 - DNA, 76 bp, Homo sapiens
cctgccctcgctcgaggcctcttctccccagcaccgctgtggtgtgccgggatcctgagcctaggcctcccgatgt

SEQ ID NO: 127847 - DNA, 76 bp, Homo sapiens
ctcgctcgaggcctcttctccccagcaccgctgtggtgtgccgggatcctgagcctaggcctcccgatgttcccac

SEQ ID NO: 127848 - DNA, 76 bp, Homo sapiens
tcttctccccagcaccgctgtggtgtgccgggatcctgagcctaggcctcccgatgttcccacccgcatgatccct

SEQ ID NO: 127849 - DNA, 76 bp, Homo sapiens
agcaccgctgtggtgtgccgggatcctgagcctaggcctcccgatgttcccacccgcatgatcccttcccgccaca

SEQ ID NO: 127850 - DNA, 77 bp, Homo sapiens
ctgtggtgtgccgggatcctgagcctaggcctcccgatgttcccacccgcatgatcccttcccgccacacgatgctc

SEQ ID NO: 127851 - DNA, 74 bp, Homo sapiens
ggatcctgagcctaggcctcccgatgttcccacccgcatgatcccttcccgccacacgatgctccgttttcttc

SEQ ID NO: 127852 - DNA, 72 bp, Homo sapiens
ctaggcctcccgatgttcccacccgcatgatcccttcccgccacacgatgctccgttttcttccgttgtgaa

SEQ ID NO: 127853 - DNA, 74 bp, Homo sapiens
cgatgttcccacccgcatgatcccttcccgccacacgatgctccgttttcttccgttgtgaatgccgcgtcctg

SEQ ID NO: 127854 - DNA, 74 bp, Homo sapiens
ttcccacccgcatgatcccttcccgccacacgatgctccgttttcttccgttgtgaatgccgcgtcctgtcctg

SEQ ID NO: 127855 - DNA, 75 bp, Homo sapiens
atgatcccttcccgccacacgatgctccgttttcttccgttgtgaatgccgcgtcctgtcctggtgacaggagaa

SEQ ID NO: 127856 - DNA, 75 bp, Homo sapiens
ccacacgatgctccgttttcttccgttgtgaatgccgcgtcctgtcctggtgacaggagaacaatgttggtgaac

SEQ ID NO: 127857 - DNA, 76 bp, Homo sapiens
atgctccgttttcttccgttgtgaatgccgcgtcctgtcctggtgacaggagaacaatgttggtgaacgtcgcagc

SEQ ID NO: 127858 - DNA, 75 bp, Homo sapiens
ttttcttccgttgtgaatgccgcgtcctgtcctggtgacaggagaacaatgttggtgaacgtcgcagcgggtgtc

SEQ ID NO: 127859 - DNA, 78 bp, Homo sapiens
ttgtgaatgccgcgtcctgtcctggtgacaggagaacaatgttggtgaacgtcgcagcgggtgtccgagtgctccgtg

SEQ ID NO: 127860 - DNA, 77 bp, Homo sapiens
cgtcctgtcctggtgacaggagaacaatgttggtgaacgtcgcagcgggtgtccgagtgctccgtgtgcccctgaga

SEQ ID NO: 127861 - DNA, 77 bp, Homo sapiens
tggtgacaggagaacaatgttggtgaacgtcgcagcgggtgtccgagtgctccgtgtgcccctgagagcgggtggga

SEQ ID NO: 127862 - DNA, 76 bp, Homo sapiens
acaatgttggtgaacgtcgcagcgggtgtccgagtgctccgtgtgcccctgagagcgggtgggagcggaagcctga

SEQ ID NO: 127863 - DNA, 79 bp, Homo sapiens
tccgagtgctccgtgtgcccctgagagcgggtgggagcggaagcctgagcggcctgcggcctccggcgatagtgtgcta

SEQ ID NO: 127864 - DNA, 82 bp, Homo sapiens
ccctgagagcgggtgggagcggaagcctgagcggcctgcggcctccggcgatagtgtgctatctgccgctgcagcgcgcgtc

SEQ ID NO: 127865 - DNA, 83 bp, Homo sapiens
gtgggagcggaagcctgagcggcctgcggcctccggcgatagtgtgctatctgccgctgcagcgcgcgtccgcgcggcctctg

SEQ ID NO: 127866 - DNA, 82 bp, Homo sapiens
aagcctgagcggcctgcggcctccggcgatagtgtgctatctgccgctgcagcgcgcgtccgcgcggcctctgggctatttc

SEQ ID NO: 127867 - DNA, 82 bp, Homo sapiens
agcggcctgcggcctccggcgatagtgtgctatctgccgctgcagcgcgcgtccgcgcggcctctgggctatttctggccag

SEQ ID NO: 127868 - DNA, 85 bp, Homo sapiens
tccggcgatagtgtgctatctgccgctgcagcgcgcgtccgcgcggcctctgggctatttctggccaggccgcagcactgtggtc

SEQ ID NO: 127869 - DNA, 84 bp, Homo sapiens
atagtgtgctatctgccgctgcagcgcgcgtccgcgcggcctctgggctatttctggccaggccgcagcactgtggtcggtgcg

SEQ ID NO: 127870 - DNA, 84 bp, Homo sapiens
tatctgccgctgcagcgcgcgtccgcgcggcctctgggctatttctggccaggccgcagcactgtggtcggtgcgggcgtggca

SEQ ID NO: 127871 - DNA, 80 bp, Homo sapiens
tgcagcgcgcgtccgcgcggcctctgggctatttctggccaggccgcagcactgtggtcggtgcgggcgtggcaggggcg

SEQ ID NO: 127872 - DNA, 75 bp, Homo sapiens
gtccgcgcggcctctgggctatttctggccaggccgcagcactgtggtcggtgcgggcgtggcaggggcggggcg

SEQ ID NO: 127873 - DNA, 76 bp, Homo sapiens
tctgggctatttctggccaggccgcagcactgtggtcggtgcgggcgtggcaggggcggggcggccttatcgctcg

SEQ ID NO: 127874 - DNA, 75 bp, Homo sapiens
atttctggccaggccgcagcactgtggtcggtgcgggcgtggcaggggcggggcggccttatcgctcggctctcc

SEQ ID NO: 127875 - DNA, 75 bp, Homo sapiens
tgtggtcggtgcgggcgtggcaggggcggggcggccttatcgctcggctctcccgcctacgcctcccgctgcaga

SEQ ID NO: 127876 - DNA, 73 bp, Homo sapiens
gggcggggcggccttatcgctcggctctcccgcctacgcctcccgctgcagagtaagccgggctgccgtcttc

SEQ ID NO: 127877 - DNA, 77 bp, Homo sapiens
ggccttatcgctcggctctcccgcctacgcctcccgctgcagagtaagccgggctgccgtcttctcgccatgggctc

SEQ ID NO: 127878 - DNA, 77 bp, Homo sapiens
tcggctctcccgcctacgcctcccgctgcagagtaagccgggctgccgtcttctcgccatgggctccggtgagtctg

SEQ ID NO: 127879 - DNA, 77 bp, Homo sapiens
tctcccgcctacgcctcccgctgcagagtaagccgggctgccgtcttctcgccatgggctccggtgagtctggagtc

SEQ ID NO: 127880 - DNA, 72 bp, Homo sapiens
caggcattttagtgacacctcacaacaaaatttagtgaaataaagcagcatttaaaaagacttgctatttac

SEQ ID NO: 127881 - DNA, 73 bp, Homo sapiens
agtgacacctcacaacaaaatttagtgaaataaagcagcatttaaaaagacttgctatttactgagtacttgc

SEQ ID NO: 127882 - DNA, 73 bp, Homo sapiens
caaaatttagtgaaataaagcagcatttaaaaagacttgctatttactgagtacttgctttgaagtactatgc

SEQ ID NO: 127883 - DNA, 76 bp, Homo sapiens
gtgaaataaagcagcatttaaaaagacttgctatttactgagtacttgctttgaagtactatgctgaacagttgaa

SEQ ID NO: 127884 - DNA, 75 bp, Homo sapiens
gcagcatttaaaaagacttgctatttactgagtacttgctttgaagtactatgctgaacagttgaaatgtatttt

SEQ ID NO: 127885 - DNA, 73 bp, Homo sapiens
tttaaaaagacttgctatttactgagtacttgctttgaagtactatgctgaacagttgaaatgtatttttata

SEQ ID NO: 127886 - DNA, 76 bp, Homo sapiens
gctatttactgagtacttgctttgaagtactatgctgaacagttgaaatgtatttttataatctttaccatataca

SEQ ID NO: 127887 - DNA, 75 bp, Homo sapiens
ctgagtacttgctttgaagtactatgctgaacagttgaaatgtatttttataatctttaccatatacaaggcaag

SEQ ID NO: 127888 - DNA, 76 bp, Homo sapiens
tgaagtactatgctgaacagttgaaatgtatttttataatctttaccatatacaaggcaagtaatattgcttccac

SEQ ID NO: 127889 - DNA, 77 bp, Homo sapiens
tgctgaacagttgaaatgtatttttataatctttaccatatacaaggcaagtaatattgcttccactttacagctga

SEQ ID NO: 127890 - DNA, 76 bp, Homo sapiens
gttgaaatgtatttttataatctttaccatatacaaggcaagtaatattgcttccactttacagctgacagtctga

SEQ ID NO: 127891 - DNA, 76 bp, Homo sapiens
atttttataatctttaccatatacaaggcaagtaatattgcttccactttacagctgacagtctgaagcagaggaa

SEQ ID NO: 127892 - DNA, 79 bp, Homo sapiens
ataatctttaccatatacaaggcaagtaatattgcttccactttacagctgacagtctgaagcagaggaagaaagcaga

SEQ ID NO: 127893 - DNA, 82 bp, Homo sapiens
atatacaaggcaagtaatattgcttccactttacagctgacagtctgaagcagaggaagaaagcagagacgcagaatgactg

SEQ ID NO: 127894 - DNA, 83 bp, Homo sapiens
ttccactttacagctgacagtctgaagcagaggaagaaagcagagacgcagaatgactggcccacagccagccgcagttataa

SEQ ID NO: 127895 - DNA, 83 bp, Homo sapiens
tttacagctgacagtctgaagcagaggaagaaagcagagacgcagaatgactggcccacagccagccgcagttataagcaggg

SEQ ID NO: 127896 - DNA, 81 bp, Homo sapiens
tctgaagcagaggaagaaagcagagacgcagaatgactggcccacagccagccgcagttataagcagggggtagttctgaa

SEQ ID NO: 127897 - DNA, 77 bp, Homo sapiens
aggaagaaagcagagacgcagaatgactggcccacagccagccgcagttataagcagggggtagttctgaacccagc

SEQ ID NO: 127898 - DNA, 78 bp, Homo sapiens
aaagcagagacgcagaatgactggcccacagccagccgcagttataagcagggggtagttctgaacccagctggatgg

SEQ ID NO: 127899 - DNA, 76 bp, Homo sapiens
acgcagaatgactggcccacagccagccgcagttataagcagggggtagttctgaacccagctggatgggtccaag

SEQ ID NO: 127900 - DNA, 75 bp, Homo sapiens
cccacagccagccgcagttataagcagggggtagttctgaacccagctggatgggtccaaggcctgtgctctttc

SEQ ID NO: 127901 - DNA, 74 bp, Homo sapiens
agccgcagttataagcagggggtagttctgaacccagctggatgggtccaaggcctgtgctctttccataacac

SEQ ID NO: 127902 - DNA, 75 bp, Homo sapiens
ttataagcagggggtagttctgaacccagctggatgggtccaaggcctgtgctctttccataacaccacatccaa

SEQ ID NO: 127903 - DNA, 73 bp, Homo sapiens
gggtagttctgaacccagctggatgggtccaaggcctgtgctctttccataacaccacatccaaaacattttc

SEQ ID NO: 127904 - DNA, 73 bp, Homo sapiens
aacccagctggatgggtccaaggcctgtgctctttccataacaccacatccaaaacattttccagtatctttg

SEQ ID NO: 127905 - DNA, 71 bp, Homo sapiens
atgggtccaaggcctgtgctctttccataacaccacatccaaaacattttccagtatctttgttttgtaaa

SEQ ID NO: 127906 - DNA, 71 bp, Homo sapiens
aaggcctgtgctctttccataacaccacatccaaaacattttccagtatctttgttttgtaaataagtcat

SEQ ID NO: 127907 - DNA, 73 bp, Homo sapiens
gctctttccataacaccacatccaaaacattttccagtatctttgttttgtaaataagtcattacataatgcc

SEQ ID NO: 127908 - DNA, 74 bp, Homo sapiens
caccacatccaaaacattttccagtatctttgttttgtaaataagtcattacataatgcccaatattgataaga

SEQ ID NO: 127909 - DNA, 73 bp, Homo sapiens
catccaaaacattttccagtatctttgttttgtaaataagtcattacataatgcccaatattgataagaacca

SEQ ID NO: 127910 - DNA, 74 bp, Homo sapiens
tccagtatctttgttttgtaaataagtcattacataatgcccaatattgataagaaccaaatgtccaagaaatc

SEQ ID NO: 127911 - DNA, 75 bp, Homo sapiens
tgttttgtaaataagtcattacataatgcccaatattgataagaaccaaatgtccaagaaatcctatctttatga

SEQ ID NO: 127912 - DNA, 78 bp, Homo sapiens
ataagtcattacataatgcccaatattgataagaaccaaatgtccaagaaatcctatctttatgacttcttgctctga

SEQ ID NO: 127913 - DNA, 76 bp, Homo sapiens
cattacataatgcccaatattgataagaaccaaatgtccaagaaatcctatctttatgacttcttgctctgaaaaa

SEQ ID NO: 127914 - DNA, 70 bp, Homo sapiens
cccaatattgataagaaccaaatgtccaagaaatcctatctttatgacttcttgctctgaaaaaaggggt

SEQ ID NO: 127915 - DNA, 71 bp, Homo sapiens
ataagaaccaaatgtccaagaaatcctatctttatgacttcttgctctgaaaaaaggggttgcccaggatg

SEQ ID NO: 127916 - DNA, 74 bp, Homo sapiens
aaatgtccaagaaatcctatctttatgacttcttgctctgaaaaaaggggttgcccaggatgtctgcccagcag

SEQ ID NO: 127917 - DNA, 72 bp, Homo sapiens
aagaaatcctatctttatgacttcttgctctgaaaaaaggggttgcccaggatgtctgcccagcagtggggt

SEQ ID NO: 127918 - DNA, 75 bp, Homo sapiens
atctttatgacttcttgctctgaaaaaaggggttgcccaggatgtctgcccagcagtggggttgcagaagttcag

SEQ ID NO: 127919 - DNA, 76 bp, Homo sapiens
cttcttgctctgaaaaaaggggttgcccaggatgtctgcccagcagtggggttgcagaagttcaggaggatgagga

SEQ ID NO: 127920 - DNA, 74 bp, Homo sapiens
aaaaaggggttgcccaggatgtctgcccagcagtggggttgcagaagttcaggaggatgaggagatgggcgtgg

SEQ ID NO: 127921 - DNA, 78 bp, Homo sapiens
ttgcccaggatgtctgcccagcagtggggttgcagaagttcaggaggatgaggagatgggcgtgggcaccgcctaccc

SEQ ID NO: 127922 - DNA, 71 bp, Homo sapiens
gtggggttgcagaagttcaggaggatgaggagatgggcgtgggcaccgcctacccccccccccacaggtga

SEQ ID NO: 127923 - DNA, 70 bp, Homo sapiens
agaagttcaggaggatgaggagatgggcgtgggcaccgcctacccccccccccacaggtgaaggtctgaa

SEQ ID NO: 127924 - DNA, 70 bp, Homo sapiens
gaggatgaggagatgggcgtgggcaccgcctacccccccccccacaggtgaaggtctgaagaaccacctg

SEQ ID NO: 127925 - DNA, 68 bp, Homo sapiens
aggagatgggcgtgggcaccgcctacccccccccccacaggtgaaggtctgaagaaccacctggagaa

SEQ ID NO: 127926 - DNA, 68 bp, Homo sapiens
cctacccccccccccacaggtgaaggtctgaagaaccacctggagaaccctaggagcactgacatccc

SEQ ID NO: 127927 - DNA, 74 bp, Homo sapiens
cccacaggtgaaggtctgaagaaccacctggagaaccctaggagcactgacatccccattcaactcgaggaaca

SEQ ID NO: 127928 - DNA, 76 bp, Homo sapiens
aggtgaaggtctgaagaaccacctggagaaccctaggagcactgacatccccattcaactcgaggaacagctcaca

SEQ ID NO: 127929 - DNA, 75 bp, Homo sapiens
acctggagaaccctaggagcactgacatccccattcaactcgaggaacagctcacagccctaacacaagttacca

SEQ ID NO: 127930 - DNA, 82 bp, Homo sapiens
taggagcactgacatccccattcaactcgaggaacagctcacagccctaacacaagttaccacatgcagagcaaatctggaa

SEQ ID NO: 127931 - DNA, 80 bp, Homo sapiens
attcaactcgaggaacagctcacagccctaacacaagttaccacatgcagagcaaatctggaagacatctggggaacata

SEQ ID NO: 127932 - DNA, 78 bp, Homo sapiens
aacagctcacagccctaacacaagttaccacatgcagagcaaatctggaagacatctggggaacataacgaaggacta

SEQ ID NO: 127933 - DNA, 75 bp, Homo sapiens
agccctaacacaagttaccacatgcagagcaaatctggaagacatctggggaacataacgaaggactagacaatt

SEQ ID NO: 127934 - DNA, 74 bp, Homo sapiens
acaagttaccacatgcagagcaaatctggaagacatctggggaacataacgaaggactagacaatttcacgttt

SEQ ID NO: 127935 - DNA, 79 bp, Homo sapiens
taccacatgcagagcaaatctggaagacatctggggaacataacgaaggactagacaatttcacgttttcacagatgaa

SEQ ID NO: 127936 - DNA, 74 bp, Homo sapiens
aaatctggaagacatctggggaacataacgaaggactagacaatttcacgttttcacagatgaaactgcaatta

SEQ ID NO: 127937 - DNA, 73 bp, Homo sapiens
aagacatctggggaacataacgaaggactagacaatttcacgttttcacagatgaaactgcaattaaactata

SEQ ID NO: 127938 - DNA, 77 bp, Homo sapiens
gaacataacgaaggactagacaatttcacgttttcacagatgaaactgcaattaaactatacatgcacggtgctgtg

SEQ ID NO: 127939 - DNA, 75 bp, Homo sapiens
aaggactagacaatttcacgttttcacagatgaaactgcaattaaactatacatgcacggtgctgtgttattttg

SEQ ID NO: 127940 - DNA, 76 bp, Homo sapiens
ctagacaatttcacgttttcacagatgaaactgcaattaaactatacatgcacggtgctgtgttattttggtaata

SEQ ID NO: 127941 - DNA, 76 bp, Homo sapiens
ttttcacagatgaaactgcaattaaactatacatgcacggtgctgtgttattttggtaatacagggacacaattta

SEQ ID NO: 127942 - DNA, 76 bp, Homo sapiens
acagatgaaactgcaattaaactatacatgcacggtgctgtgttattttggtaatacagggacacaatttaatgat

SEQ ID NO: 127943 - DNA, 72 bp, Homo sapiens
actatacatgcacggtgctgtgttattttggtaatacagggacacaatttaatgattctaaggatttttttg

SEQ ID NO: 127944 - DNA, 68 bp, Homo sapiens
cacggtgctgtgttattttggtaatacagggacacaatttaatgattctaaggatttttttgtagttt

SEQ ID NO: 127945 - DNA, 64 bp, Homo sapiens
tgttattttggtaatacagggacacaatttaatgattctaaggatttttttgtagttttttttt

SEQ ID NO: 127946 - DNA, 69 bp, Homo sapiens
tttttttacaagtcaggtgccataaacattcaaataatccatcttttaaaaagtacgtttacaacatca

SEQ ID NO: 127947 - DNA, 70 bp, Homo sapiens
ggtgccataaacattcaaataatccatcttttaaaaagtacgtttacaacatcaaaagaattaagatgaa

SEQ ID NO: 127948 - DNA, 68 bp, Homo sapiens
cattcaaataatccatcttttaaaaagtacgtttacaacatcaaaagaattaagatgaaatataaacc

SEQ ID NO: 127949 - DNA, 67 bp, Homo sapiens
taatccatcttttaaaaagtacgtttacaacatcaaaagaattaagatgaaatataaacctttctac

SEQ ID NO: 127950 - DNA, 67 bp, Homo sapiens
catcttttaaaaagtacgtttacaacatcaaaagaattaagatgaaatataaacctttctacttaca

SEQ ID NO: 127951 - DNA, 65 bp, Homo sapiens
cttttaaaaagtacgtttacaacatcaaaagaattaagatgaaatataaacctttctacttacaa

SEQ ID NO: 127952 - DNA, 65 bp, Homo sapiens
ttaaaaagtacgtttacaacatcaaaagaattaagatgaaatataaacctttctacttacaattt

SEQ ID NO: 127953 - DNA, 69 bp, Homo sapiens
tacaacatcaaaagaattaagatgaaatataaacctttctacttacaatttttatacagattaaccaaa

SEQ ID NO: 127954 - DNA, 70 bp, Homo sapiens
catcaaaagaattaagatgaaatataaacctttctacttacaatttttatacagattaaccaaatcacaa

SEQ ID NO: 127955 - DNA, 68 bp, Homo sapiens
aagaattaagatgaaatataaacctttctacttacaatttttatacagattaaccaaatcacaaatac

SEQ ID NO: 127956 - DNA, 67 bp, Homo sapiens
aatataaacctttctacttacaatttttatacagattaaccaaatcacaaataccacaaataaatgt

SEQ ID NO: 127957 - DNA, 72 bp, Homo sapiens
tacagattaaccaaatcacaaataccacaaataaatgttaatgttaaattgtaacaatataatgaataaaca

SEQ ID NO: 127958 - DNA, 71 bp, Homo sapiens
ataccacaaataaatgttaatgttaaattgtaacaatataatgaataaacattcagattcttaataaaatc

SEQ ID NO: 127959 - DNA, 70 bp, Homo sapiens
caaataaatgttaatgttaaattgtaacaatataatgaataaacattcagattcttaataaaatcttcct

SEQ ID NO: 127960 - DNA, 69 bp, Homo sapiens
ttaatgttaaattgtaacaatataatgaataaacattcagattcttaataaaatcttcctttaacattt

SEQ ID NO: 127961 - DNA, 69 bp, Homo sapiens
tgtaacaatataatgaataaacattcagattcttaataaaatcttcctttaacattttttaacttacca

SEQ ID NO: 127962 - DNA, 68 bp, Homo sapiens
tgaataaacattcagattcttaataaaatcttcctttaacattttttaacttaccattatactaaata

SEQ ID NO: 127963 - DNA, 71 bp, Homo sapiens
cattcagattcttaataaaatcttcctttaacattttttaacttaccattatactaaataatctatgcaga

SEQ ID NO: 127964 - DNA, 67 bp, Homo sapiens
taataaaatcttcctttaacattttttaacttaccattatactaaataatctatgcagaattttggg

SEQ ID NO: 127965 - DNA, 70 bp, Homo sapiens
cattttttaacttaccattatactaaataatctatgcagaattttggggtacaataccaagaaggcacca

SEQ ID NO: 127966 - DNA, 74 bp, Homo sapiens
ttaccattatactaaataatctatgcagaattttggggtacaataccaagaaggcaccaacagtacaaagcaga

SEQ ID NO: 127967 - DNA, 74 bp, Homo sapiens
ttatactaaataatctatgcagaattttggggtacaataccaagaaggcaccaacagtacaaagcagatacaaa

SEQ ID NO: 127968 - DNA, 76 bp, Homo sapiens
ataatctatgcagaattttggggtacaataccaagaaggcaccaacagtacaaagcagatacaaagcagtttcaga

SEQ ID NO: 127969 - DNA, 70 bp, Homo sapiens
aattttggggtacaataccaagaaggcaccaacagtacaaagcagatacaaagcagtttcagaactttct

SEQ ID NO: 127970 - DNA, 79 bp, Homo sapiens
tacaataccaagaaggcaccaacagtacaaagcagatacaaagcagtttcagaactttcttgagtgctctacacgcata

SEQ ID NO: 127971 - DNA, 79 bp, Homo sapiens
agaaggcaccaacagtacaaagcagatacaaagcagtttcagaactttcttgagtgctctacacgcataaacagcacaa

SEQ ID NO: 127972 - DNA, 77 bp, Homo sapiens
accaacagtacaaagcagatacaaagcagtttcagaactttcttgagtgctctacacgcataaacagcacaagaaaa

SEQ ID NO: 127973 - DNA, 74 bp, Homo sapiens
aagcagtttcagaactttcttgagtgctctacacgcataaacagcacaagaaaaggcaacaagctttaggtaaa

SEQ ID NO: 127974 - DNA, 74 bp, Homo sapiens
agaactttcttgagtgctctacacgcataaacagcacaagaaaaggcaacaagctttaggtaaacctggtgcaa

SEQ ID NO: 127975 - DNA, 75 bp, Homo sapiens
tcttgagtgctctacacgcataaacagcacaagaaaaggcaacaagctttaggtaaacctggtgcaaccctggag

SEQ ID NO: 127976 - DNA, 74 bp, Homo sapiens
tctacacgcataaacagcacaagaaaaggcaacaagctttaggtaaacctggtgcaaccctggaggacttgctc

SEQ ID NO: 127977 - DNA, 72 bp, Homo sapiens
aacaagctttaggtaaacctggtgcaaccctggaggacttgctctggatttccatttgtttctgacccatca

SEQ ID NO: 127978 - DNA, 74 bp, Homo sapiens
aaccctggaggacttgctctggatttccatttgtttctgacccatcatgtcaaggtggatgacgtaagagaaac

SEQ ID NO: 127979 - DNA, 78 bp, Homo sapiens
gacttgctctggatttccatttgtttctgacccatcatgtcaaggtggatgacgtaagagaaaccacatattcactgt

SEQ ID NO: 127980 - DNA, 78 bp, Homo sapiens
tggatttccatttgtttctgacccatcatgtcaaggtggatgacgtaagagaaaccacatattcactgttatagcttc

SEQ ID NO: 127981 - DNA, 81 bp, Homo sapiens
atttgtttctgacccatcatgtcaaggtggatgacgtaagagaaaccacatattcactgttatagcttctcatctgcacca

SEQ ID NO: 127982 - DNA, 83 bp, Homo sapiens
acccatcatgtcaaggtggatgacgtaagagaaaccacatattcactgttatagcttctcatctgcaccacaggagtatcatg

SEQ ID NO: 127983 - DNA, 82 bp, Homo sapiens
atgtcaaggtggatgacgtaagagaaaccacatattcactgttatagcttctcatctgcaccacaggagtatcatgtttcaa

SEQ ID NO: 127984 - DNA, 79 bp, Homo sapiens
aaaccacatattcactgttatagcttctcatctgcaccacaggagtatcatgtttcaaacaccagcataacaattttaa

SEQ ID NO: 127985 - DNA, 80 bp, Homo sapiens
atattcactgttatagcttctcatctgcaccacaggagtatcatgtttcaaacaccagcataacaattttaaagcacaaa

SEQ ID NO: 127986 - DNA, 79 bp, Homo sapiens
ttatagcttctcatctgcaccacaggagtatcatgtttcaaacaccagcataacaattttaaagcacaaatgctttaaa

SEQ ID NO: 127987 - DNA, 78 bp, Homo sapiens
ctcatctgcaccacaggagtatcatgtttcaaacaccagcataacaattttaaagcacaaatgctttaaaaatgtata

SEQ ID NO: 127988 - DNA, 74 bp, Homo sapiens
accacaggagtatcatgtttcaaacaccagcataacaattttaaagcacaaatgctttaaaaatgtataagcaa

SEQ ID NO: 127989 - DNA, 71 bp, Homo sapiens
caattttaaagcacaaatgctttaaaaatgtataagcaaaaggattgctcagattttcaaaaccattacat

SEQ ID NO: 127990 - DNA, 72 bp, Homo sapiens
ttaaagcacaaatgctttaaaaatgtataagcaaaaggattgctcagattttcaaaaccattacatttacaa

SEQ ID NO: 127991 - DNA, 69 bp, Homo sapiens
tgtataagcaaaaggattgctcagattttcaaaaccattacatttacaaaaatatttcccttaaacttg

SEQ ID NO: 127992 - DNA, 69 bp, Homo sapiens
aggattgctcagattttcaaaaccattacatttacaaaaatatttcccttaaacttgggattgctccaa

SEQ ID NO: 127993 - DNA, 69 bp, Homo sapiens
tgctcagattttcaaaaccattacatttacaaaaatatttcccttaaacttgggattgctccaaaacat

SEQ ID NO: 127994 - DNA, 67 bp, Homo sapiens
caaaaccattacatttacaaaaatatttcccttaaacttgggattgctccaaaacattgatttacaa

SEQ ID NO: 127995 - DNA, 66 bp, Homo sapiens
acatttacaaaaatatttcccttaaacttgggattgctccaaaacattgatttacaaatataaaag

SEQ ID NO: 127996 - DNA, 72 bp, Homo sapiens
aaacttgggattgctccaaaacattgatttacaaatataaaagtattatggaaggacccaaagcatgtgtgc

SEQ ID NO: 127997 - DNA, 76 bp, Homo sapiens
attgctccaaaacattgatttacaaatataaaagtattatggaaggacccaaagcatgtgtgcgtatgtatgtgtg

SEQ ID NO: 127998 - DNA, 76 bp, Homo sapiens
acattgatttacaaatataaaagtattatggaaggacccaaagcatgtgtgcgtatgtatgtgtgtattaacatac

SEQ ID NO: 127999 - DNA, 76 bp, Homo sapiens
acaaatataaaagtattatggaaggacccaaagcatgtgtgcgtatgtatgtgtgtattaacatactgttaccata

SEQ ID NO: 128000 - DNA, 76 bp, Homo sapiens
aagtattatggaaggacccaaagcatgtgtgcgtatgtatgtgtgtattaacatactgttaccatactatataaaa

SEQ ID NO: 128001 - DNA, 76 bp, Homo sapiens
ttatggaaggacccaaagcatgtgtgcgtatgtatgtgtgtattaacatactgttaccatactatataaaagttac

SEQ ID NO: 128002 - DNA, 74 bp, Homo sapiens
acccaaagcatgtgtgcgtatgtatgtgtgtattaacatactgttaccatactatataaaagttaccaatttaa

SEQ ID NO: 128003 - DNA, 72 bp, Homo sapiens
gtgtgcgtatgtatgtgtgtattaacatactgttaccatactatataaaagttaccaatttaaaaaccatat

SEQ ID NO: 128004 - DNA, 71 bp, Homo sapiens
gtgtgtattaacatactgttaccatactatataaaagttaccaatttaaaaaccatattaacatataagca

SEQ ID NO: 128005 - DNA, 69 bp, Homo sapiens
acatactgttaccatactatataaaagttaccaatttaaaaaccatattaacatataagcaaataaaga

SEQ ID NO: 128006 - DNA, 68 bp, Homo sapiens
ctgttaccatactatataaaagttaccaatttaaaaaccatattaacatataagcaaataaagagaaa

SEQ ID NO: 128007 - DNA, 68 bp, Homo sapiens
tataaaagttaccaatttaaaaaccatattaacatataagcaaataaagagaaaacagtttcctctga

SEQ ID NO: 128008 - DNA, 70 bp, Homo sapiens
gttaccaatttaaaaaccatattaacatataagcaaataaagagaaaacagtttcctctgaatggctgaa

SEQ ID NO: 128009 - DNA, 74 bp, Homo sapiens
ttaacatataagcaaataaagagaaaacagtttcctctgaatggctgaaatattacgtggcatgtggttgggta

SEQ ID NO: 128010 - DNA, 70 bp, Homo sapiens
aaaacagtttcctctgaatggctgaaatattacgtggcatgtggttgggtagtttacttttgtgattcct

SEQ ID NO: 128011 - DNA, 72 bp, Homo sapiens
tttcctctgaatggctgaaatattacgtggcatgtggttgggtagtttacttttgtgattccttagagaaaa

SEQ ID NO: 128012 - DNA, 70 bp, Homo sapiens
aatggctgaaatattacgtggcatgtggttgggtagtttacttttgtgattccttagagaaaaccactgg

SEQ ID NO: 128013 - DNA, 74 bp, Homo sapiens
tgtggttgggtagtttacttttgtgattccttagagaaaaccactggtgagctacatgtagcttctcaaagcta

SEQ ID NO: 128014 - DNA, 73 bp, Homo sapiens
tagtttacttttgtgattccttagagaaaaccactggtgagctacatgtagcttctcaaagctactggttacc

SEQ ID NO: 128015 - DNA, 74 bp, Homo sapiens
acttttgtgattccttagagaaaaccactggtgagctacatgtagcttctcaaagctactggttacctctacac

SEQ ID NO: 128016 - DNA, 77 bp, Homo sapiens
ttccttagagaaaaccactggtgagctacatgtagcttctcaaagctactggttacctctacacccactgcctgtgc

SEQ ID NO: 128017 - DNA, 78 bp, Homo sapiens
aaaaccactggtgagctacatgtagcttctcaaagctactggttacctctacacccactgcctgtgcccaagagcaga

SEQ ID NO: 128018 - DNA, 82 bp, Homo sapiens
agctacatgtagcttctcaaagctactggttacctctacacccactgcctgtgcccaagagcagaaggaatgagtgtgcaca

SEQ ID NO: 128019 - DNA, 82 bp, Homo sapiens
tgtagcttctcaaagctactggttacctctacacccactgcctgtgcccaagagcagaaggaatgagtgtgcacacaccaca

SEQ ID NO: 128020 - DNA, 87 bp, Homo sapiens
tacctctacacccactgcctgtgcccaagagcagaaggaatgagtgtgcacacaccacacactgtgcactgcacacacaatacagta

SEQ ID NO: 128021 - DNA, 86 bp, Homo sapiens
acccactgcctgtgcccaagagcagaaggaatgagtgtgcacacaccacacactgtgcactgcacacacaatacagtattcttcta

SEQ ID NO: 128022 - DNA, 88 bp, Homo sapiens
tgcccaagagcagaaggaatgagtgtgcacacaccacacactgtgcactgcacacacaatacagtattcttctacccagatgccacaa

SEQ ID NO: 128023 - DNA, 87 bp, Homo sapiens
agaaggaatgagtgtgcacacaccacacactgtgcactgcacacacaatacagtattcttctacccagatgccacaatgtctgcgta

SEQ ID NO: 128024 - DNA, 87 bp, Homo sapiens
acacaccacacactgtgcactgcacacacaatacagtattcttctacccagatgccacaatgtctgcgtatctctgctagctttgag

SEQ ID NO: 128025 - DNA, 83 bp, Homo sapiens
acacacaatacagtattcttctacccagatgccacaatgtctgcgtatctctgctagctttgaggacctgtgtcaggacagag

SEQ ID NO: 128026 - DNA, 83 bp, Homo sapiens
aatacagtattcttctacccagatgccacaatgtctgcgtatctctgctagctttgaggacctgtgtcaggacagagtcctca

SEQ ID NO: 128027 - DNA, 83 bp, Homo sapiens
ttctacccagatgccacaatgtctgcgtatctctgctagctttgaggacctgtgtcaggacagagtcctcatgattagttctt

SEQ ID NO: 128028 - DNA, 84 bp, Homo sapiens
agatgccacaatgtctgcgtatctctgctagctttgaggacctgtgtcaggacagagtcctcatgattagttctttcaattcca

SEQ ID NO: 128029 - DNA, 81 bp, Homo sapiens
aatgtctgcgtatctctgctagctttgaggacctgtgtcaggacagagtcctcatgattagttctttcaattccatcccac

SEQ ID NO: 128030 - DNA, 80 bp, Homo sapiens
ctgctagctttgaggacctgtgtcaggacagagtcctcatgattagttctttcaattccatcccactggcttgttcagta

SEQ ID NO: 128031 - DNA, 77 bp, Homo sapiens
tttgaggacctgtgtcaggacagagtcctcatgattagttctttcaattccatcccactggcttgttcagtatttct

SEQ ID NO: 128032 - DNA, 76 bp, Homo sapiens
tgtcaggacagagtcctcatgattagttctttcaattccatcccactggcttgttcagtatttcttttatactaaa

SEQ ID NO: 128033 - DNA, 75 bp, Homo sapiens
gacagagtcctcatgattagttctttcaattccatcccactggcttgttcagtatttcttttatactaaatgaaa

SEQ ID NO: 128034 - DNA, 74 bp, Homo sapiens
ctcatgattagttctttcaattccatcccactggcttgttcagtatttcttttatactaaatgaaaggactgga

SEQ ID NO: 128035 - DNA, 74 bp, Homo sapiens
ttctttcaattccatcccactggcttgttcagtatttcttttatactaaatgaaaggactggaatgtttcagca

SEQ ID NO: 128036 - DNA, 72 bp, Homo sapiens
ctggcttgttcagtatttcttttatactaaatgaaaggactggaatgtttcagcaggaattttttgcttaca

SEQ ID NO: 128037 - DNA, 70 bp, Homo sapiens
tttcttttatactaaatgaaaggactggaatgtttcagcaggaattttttgcttacattttagacaccaa

SEQ ID NO: 128038 - DNA, 69 bp, Homo sapiens
actaaatgaaaggactggaatgtttcagcaggaattttttgcttacattttagacaccaaaaaagctat

SEQ ID NO: 128039 - DNA, 71 bp, Homo sapiens
aggactggaatgtttcagcaggaattttttgcttacattttagacaccaaaaaagctattagtctgaaagc

SEQ ID NO: 128040 - DNA, 71 bp, Homo sapiens
tggaatgtttcagcaggaattttttgcttacattttagacaccaaaaaagctattagtctgaaagcttatt

SEQ ID NO: 128041 - DNA, 72 bp, Homo sapiens
cagcaggaattttttgcttacattttagacaccaaaaaagctattagtctgaaagcttatttgaacatacaa

SEQ ID NO: 128042 - DNA, 71 bp, Homo sapiens
attttagacaccaaaaaagctattagtctgaaagcttatttgaacatacaaatagtggaggtgctgttccg

SEQ ID NO: 128043 - DNA, 74 bp, Homo sapiens
aaaaagctattagtctgaaagcttatttgaacatacaaatagtggaggtgctgttccgtgtcactaatatgaat

SEQ ID NO: 128044 - DNA, 77 bp, Homo sapiens
ctattagtctgaaagcttatttgaacatacaaatagtggaggtgctgttccgtgtcactaatatgaattaagatgac

SEQ ID NO: 128045 - DNA, 76 bp, Homo sapiens
cttatttgaacatacaaatagtggaggtgctgttccgtgtcactaatatgaattaagatgacctaatctgtacatt

SEQ ID NO: 128046 - DNA, 77 bp, Homo sapiens
ttgaacatacaaatagtggaggtgctgttccgtgtcactaatatgaattaagatgacctaatctgtacatttttaca

SEQ ID NO: 128047 - DNA, 76 bp, Homo sapiens
tagtggaggtgctgttccgtgtcactaatatgaattaagatgacctaatctgtacatttttacaaatgtaagaaga

SEQ ID NO: 128048 - DNA, 75 bp, Homo sapiens
ggtgctgttccgtgtcactaatatgaattaagatgacctaatctgtacatttttacaaatgtaagaagagccaaa

SEQ ID NO: 128049 - DNA, 78 bp, Homo sapiens
cgtgtcactaatatgaattaagatgacctaatctgtacatttttacaaatgtaagaagagccaaaatgatgcatctac

SEQ ID NO: 128050 - DNA, 82 bp, Homo sapiens
tgaattaagatgacctaatctgtacatttttacaaatgtaagaagagccaaaatgatgcatctactacacatgatagctagc

SEQ ID NO: 128051 - DNA, 80 bp, Homo sapiens
acctaatctgtacatttttacaaatgtaagaagagccaaaatgatgcatctactacacatgatagctagcgcttttcata

SEQ ID NO: 128052 - DNA, 79 bp, Homo sapiens
tacatttttacaaatgtaagaagagccaaaatgatgcatctactacacatgatagctagcgcttttcataggtaccttg

SEQ ID NO: 128053 - DNA, 78 bp, Homo sapiens
ttttacaaatgtaagaagagccaaaatgatgcatctactacacatgatagctagcgcttttcataggtaccttggtta

SEQ ID NO: 128054 - DNA, 79 bp, Homo sapiens
gtaagaagagccaaaatgatgcatctactacacatgatagctagcgcttttcataggtaccttggttaggaccattctc

SEQ ID NO: 128055 - DNA, 80 bp, Homo sapiens
aatgatgcatctactacacatgatagctagcgcttttcataggtaccttggttaggaccattctctgcccagttacatta

SEQ ID NO: 128056 - DNA, 72 bp, Homo sapiens
cgcttttcataggtaccttggttaggaccattctctgcccagttacattatgtttggcatgattaataaaaa

SEQ ID NO: 128057 - DNA, 73 bp, Homo sapiens
ataggtaccttggttaggaccattctctgcccagttacattatgtttggcatgattaataaaaagcacacaac

SEQ ID NO: 128058 - DNA, 78 bp, Homo sapiens
ttaggaccattctctgcccagttacattatgtttggcatgattaataaaaagcacacaacttatggctacaatgattc

SEQ ID NO: 128059 - DNA, 78 bp, Homo sapiens
attaataaaaagcacacaacttatggctacaatgattctagaatgaagttagtggtttcatgccaatctgactccaca

SEQ ID NO: 128060 - DNA, 79 bp, Homo sapiens
taaaaagcacacaacttatggctacaatgattctagaatgaagttagtggtttcatgccaatctgactccacagtacca

SEQ ID NO: 128061 - DNA, 76 bp, Homo sapiens
acaacttatggctacaatgattctagaatgaagttagtggtttcatgccaatctgactccacagtaccaggaaggg

SEQ ID NO: 128062 - DNA, 75 bp, Homo sapiens
ctacaatgattctagaatgaagttagtggtttcatgccaatctgactccacagtaccaggaaggggaatgggaag

SEQ ID NO: 128063 - DNA, 76 bp, Homo sapiens
ttctagaatgaagttagtggtttcatgccaatctgactccacagtaccaggaaggggaatgggaaggagctcacag

SEQ ID NO: 128064 - DNA, 78 bp, Homo sapiens
tagtggtttcatgccaatctgactccacagtaccaggaaggggaatgggaaggagctcacagtctccagatgttagta

SEQ ID NO: 128065 - DNA, 78 bp, Homo sapiens
atgccaatctgactccacagtaccaggaaggggaatgggaaggagctcacagtctccagatgttagtagccaaggata

SEQ ID NO: 128066 - DNA, 73 bp, Homo sapiens
actccacagtaccaggaaggggaatgggaaggagctcacagtctccagatgttagtagccaaggatatggttt

SEQ ID NO: 128067 - DNA, 74 bp, Homo sapiens
taccaggaaggggaatgggaaggagctcacagtctccagatgttagtagccaaggatatggttttctatttaga

SEQ ID NO: 128068 - DNA, 75 bp, Homo sapiens
ggaatgggaaggagctcacagtctccagatgttagtagccaaggatatggttttctatttagaagaggactccaa

SEQ ID NO: 128069 - DNA, 73 bp, Homo sapiens
ggagctcacagtctccagatgttagtagccaaggatatggttttctatttagaagaggactccaaattaacct

SEQ ID NO: 128070 - DNA, 70 bp, Homo sapiens
cagatgttagtagccaaggatatggttttctatttagaagaggactccaaattaaccttataatagtaac

SEQ ID NO: 128071 - DNA, 65 bp, Homo sapiens
atggttttctatttagaagaggactccaaattaaccttataatagtaactttccatttaaaaaga

SEQ ID NO: 128072 - DNA, 66 bp, Homo sapiens
tatttagaagaggactccaaattaaccttataatagtaactttccatttaaaaagaaacaagagta

SEQ ID NO: 128073 - DNA, 65 bp, Homo sapiens
ttaaccttataatagtaactttccatttaaaaagaaacaagagtaataaaactgtcaatgctttt

SEQ ID NO: 128074 - DNA, 67 bp, Homo sapiens
taatagtaactttccatttaaaaagaaacaagagtaataaaactgtcaatgcttttttataaatgaa

SEQ ID NO: 128075 - DNA, 70 bp, Homo sapiens
gaaacaagagtaataaaactgtcaatgcttttttataaatgaaaactgactaatcagtgttatccggtaa

SEQ ID NO: 128076 - DNA, 72 bp, Homo sapiens
gagtaataaaactgtcaatgcttttttataaatgaaaactgactaatcagtgttatccggtaacagtcacat

SEQ ID NO: 128077 - DNA, 74 bp, Homo sapiens
tcaatgcttttttataaatgaaaactgactaatcagtgttatccggtaacagtcacatttctgtgtcccgtcaa

SEQ ID NO: 128078 - DNA, 76 bp, Homo sapiens
tttataaatgaaaactgactaatcagtgttatccggtaacagtcacatttctgtgtcccgtcaatgctgtgtggac

SEQ ID NO: 128079 - DNA, 75 bp, Homo sapiens
aaaactgactaatcagtgttatccggtaacagtcacatttctgtgtcccgtcaatgctgtgtggaccttcagacg

SEQ ID NO: 128080 - DNA, 81 bp, Homo sapiens
actaatcagtgttatccggtaacagtcacatttctgtgtcccgtcaatgctgtgtggaccttcagacggcagctctgagca

SEQ ID NO: 128081 - DNA, 81 bp, Homo sapiens
ttatccggtaacagtcacatttctgtgtcccgtcaatgctgtgtggaccttcagacggcagctctgagcacgcaagtgaaa

SEQ ID NO: 128082 - DNA, 81 bp, Homo sapiens
atttctgtgtcccgtcaatgctgtgtggaccttcagacggcagctctgagcacgcaagtgaaaagcgcgtatttcagggca

SEQ ID NO: 128083 - DNA, 82 bp, Homo sapiens
tcccgtcaatgctgtgtggaccttcagacggcagctctgagcacgcaagtgaaaagcgcgtatttcagggcaagaatagaga

SEQ ID NO: 128084 - DNA, 80 bp, Homo sapiens
tgtggaccttcagacggcagctctgagcacgcaagtgaaaagcgcgtatttcagggcaagaatagagatgtgggtctgtt

SEQ ID NO: 128085 - DNA, 81 bp, Homo sapiens
tctgagcacgcaagtgaaaagcgcgtatttcagggcaagaatagagatgtgggtctgttttccgaggatgagccagctatc

SEQ ID NO: 128086 - DNA, 76 bp, Homo sapiens
acgcaagtgaaaagcgcgtatttcagggcaagaatagagatgtgggtctgttttccgaggatgagccagctatcct

SEQ ID NO: 128087 - DNA, 77 bp, Homo sapiens
aaaagcgcgtatttcagggcaagaatagagatgtgggtctgttttccgaggatgagccagctatccttcctcagcca

SEQ ID NO: 128088 - DNA, 80 bp, Homo sapiens
tatttcagggcaagaatagagatgtgggtctgttttccgaggatgagccagctatccttcctcagccacaggagtggtga

SEQ ID NO: 128089 - DNA, 80 bp, Homo sapiens
aagaatagagatgtgggtctgttttccgaggatgagccagctatccttcctcagccacaggagtggtgagcgtgagcacc

SEQ ID NO: 128090 - DNA, 79 bp, Homo sapiens
atgtgggtctgttttccgaggatgagccagctatccttcctcagccacaggagtggtgagcgtgagcaccctgggctgg

SEQ ID NO: 128091 - DNA, 80 bp, Homo sapiens
tgttttccgaggatgagccagctatccttcctcagccacaggagtggtgagcgtgagcaccctgggctgggtggtgagga

SEQ ID NO: 128092 - DNA, 75 bp, Homo sapiens
agccacaggagtggtgagcgtgagcaccctgggctgggtggtgaggactgcgtactgtggggcggcccttcccaa

SEQ ID NO: 128093 - DNA, 76 bp, Homo sapiens
cgtgagcaccctgggctgggtggtgaggactgcgtactgtggggcggcccttcccaactcttggctgtgcccagca

SEQ ID NO: 128094 - DNA, 76 bp, Homo sapiens
tgggctgggtggtgaggactgcgtactgtggggcggcccttcccaactcttggctgtgcccagcagcacctctggg

SEQ ID NO: 128095 - DNA, 76 bp, Homo sapiens
gtggtgaggactgcgtactgtggggcggcccttcccaactcttggctgtgcccagcagcacctctggggcacaagg

SEQ ID NO: 128096 - DNA, 75 bp, Homo sapiens
tactgtggggcggcccttcccaactcttggctgtgcccagcagcacctctggggcacaagggcaggccctcttta

SEQ ID NO: 128097 - DNA, 75 bp, Homo sapiens
cggcccttcccaactcttggctgtgcccagcagcacctctggggcacaagggcaggccctctttagagagaacca

SEQ ID NO: 128098 - DNA, 76 bp, Homo sapiens
ttcccaactcttggctgtgcccagcagcacctctggggcacaagggcaggccctctttagagagaaccagggaatc

SEQ ID NO: 128099 - DNA, 77 bp, Homo sapiens
ctgtgcccagcagcacctctggggcacaagggcaggccctctttagagagaaccagggaatccaacctgagatgtcg

SEQ ID NO: 128100 - DNA, 74 bp, Homo sapiens
cccagcagcacctctggggcacaagggcaggccctctttagagagaaccagggaatccaacctgagatgtcggg

SEQ ID NO: 128101 - DNA, 72 bp, Homo sapiens
tggggcacaagggcaggccctctttagagagaaccagggaatccaacctgagatgtcggggcttctttgtta

SEQ ID NO: 128102 - DNA, 70 bp, Homo sapiens
ctctttagagagaaccagggaatccaacctgagatgtcggggcttctttgttagggtttgacagaatatt

SEQ ID NO: 128103 - DNA, 72 bp, Homo sapiens
aatccaacctgagatgtcggggcttctttgttagggtttgacagaatatttgagacctaagattgtgaataa

SEQ ID NO: 128104 - DNA, 73 bp, Homo sapiens
agatgtcggggcttctttgttagggtttgacagaatatttgagacctaagattgtgaataaaggaacatgaca

SEQ ID NO: 128105 - DNA, 80 bp, Homo sapiens
ttgttagggtttgacagaatatttgagacctaagattgtgaataaaggaacatgacagcatcgattctctgccgagcaga

SEQ ID NO: 128106 - DNA, 77 bp, Homo sapiens
agaatatttgagacctaagattgtgaataaaggaacatgacagcatcgattctctgccgagcagaggtaaaaaggac

SEQ ID NO: 128107 - DNA, 76 bp, Homo sapiens
atttgagacctaagattgtgaataaaggaacatgacagcatcgattctctgccgagcagaggtaaaaaggacccta

SEQ ID NO: 128108 - DNA, 73 bp, Homo sapiens
aataaaggaacatgacagcatcgattctctgccgagcagaggtaaaaaggaccctacagaagtacctttctaa

SEQ ID NO: 128109 - DNA, 74 bp, Homo sapiens
acagcatcgattctctgccgagcagaggtaaaaaggaccctacagaagtacctttctaactcatcttatgtaaa

SEQ ID NO: 128110 - DNA, 71 bp, Homo sapiens
attctctgccgagcagaggtaaaaaggaccctacagaagtacctttctaactcatcttatgtaaatccaag

SEQ ID NO: 128111 - DNA, 71 bp, Homo sapiens
agcagaggtaaaaaggaccctacagaagtacctttctaactcatcttatgtaaatccaagtgctgggccag

SEQ ID NO: 128112 - DNA, 71 bp, Homo sapiens
ggtaaaaaggaccctacagaagtacctttctaactcatcttatgtaaatccaagtgctgggccagtgcctg

SEQ ID NO: 128113 - DNA, 74 bp, Homo sapiens
accctacagaagtacctttctaactcatcttatgtaaatccaagtgctgggccagtgcctgggcggcaaagtga

SEQ ID NO: 128114 - DNA, 78 bp, Homo sapiens
tacctttctaactcatcttatgtaaatccaagtgctgggccagtgcctgggcggcaaagtgaggcctgtgagcatttc

SEQ ID NO: 128115 - DNA, 83 bp, Homo sapiens
taactcatcttatgtaaatccaagtgctgggccagtgcctgggcggcaaagtgaggcctgtgagcatttctgtgttcagcaca

SEQ ID NO: 128116 - DNA, 81 bp, Homo sapiens
tatgtaaatccaagtgctgggccagtgcctgggcggcaaagtgaggcctgtgagcatttctgtgttcagcacaacctgaac

SEQ ID NO: 128117 - DNA, 83 bp, Homo sapiens
agtgcctgggcggcaaagtgaggcctgtgagcatttctgtgttcagcacaacctgaacctgactgtccattcagacacgctga

SEQ ID NO: 128118 - DNA, 83 bp, Homo sapiens
ggcaaagtgaggcctgtgagcatttctgtgttcagcacaacctgaacctgactgtccattcagacacgctgatccagaggaaa

SEQ ID NO: 128119 - DNA, 84 bp, Homo sapiens
aggcctgtgagcatttctgtgttcagcacaacctgaacctgactgtccattcagacacgctgatccagaggaaagcaacactga

SEQ ID NO: 128120 - DNA, 84 bp, Homo sapiens
tgttcagcacaacctgaacctgactgtccattcagacacgctgatccagaggaaagcaacactgaatcttaacatgaatgtgaa

SEQ ID NO: 128121 - DNA, 81 bp, Homo sapiens
aacctgaacctgactgtccattcagacacgctgatccagaggaaagcaacactgaatcttaacatgaatgtgaagatagaa

SEQ ID NO: 128122 - DNA, 82 bp, Homo sapiens
actgtccattcagacacgctgatccagaggaaagcaacactgaatcttaacatgaatgtgaagatagaagatgtacatttat

SEQ ID NO: 128123 - DNA, 83 bp, Homo sapiens
attcagacacgctgatccagaggaaagcaacactgaatcttaacatgaatgtgaagatagaagatgtacatttattttcatga

SEQ ID NO: 128124 - DNA, 82 bp, Homo sapiens
acatgaatgtgaagatagaagatgtacatttattttcatgaattacaaatgcatttctgttcatattagcaggcagtcttta

SEQ ID NO: 128125 - DNA, 80 bp, Homo sapiens
tgaagatagaagatgtacatttattttcatgaattacaaatgcatttctgttcatattagcaggcagtctttatataacc

SEQ ID NO: 128126 - DNA, 80 bp, Homo sapiens
tgtacatttattttcatgaattacaaatgcatttctgttcatattagcaggcagtctttatataacccattctccattgc

SEQ ID NO: 128127 - DNA, 79 bp, Homo sapiens
ttttcatgaattacaaatgcatttctgttcatattagcaggcagtctttatataacccattctccattgctgtcaaaaa

SEQ ID NO: 128128 - DNA, 79 bp, Homo sapiens
gaattacaaatgcatttctgttcatattagcaggcagtctttatataacccattctccattgctgtcaaaaatcaaaca

SEQ ID NO: 128129 - DNA, 77 bp, Homo sapiens
aatgcatttctgttcatattagcaggcagtctttatataacccattctccattgctgtcaaaaatcaaacaagaaaa

SEQ ID NO: 128130 - DNA, 77 bp, Homo sapiens
ttcatattagcaggcagtctttatataacccattctccattgctgtcaaaaatcaaacaagaaaaaaggacagctga

SEQ ID NO: 128131 - DNA, 74 bp, Homo sapiens
aggcagtctttatataacccattctccattgctgtcaaaaatcaaacaagaaaaaaggacagctgagaaatgaa

SEQ ID NO: 128132 - DNA, 73 bp, Homo sapiens
ctttatataacccattctccattgctgtcaaaaatcaaacaagaaaaaaggacagctgagaaatgaaaagcta

SEQ ID NO: 128133 - DNA, 72 bp, Homo sapiens
cccattctccattgctgtcaaaaatcaaacaagaaaaaaggacagctgagaaatgaaaagctaaaaatagaa

SEQ ID NO: 128134 - DNA, 69 bp, Homo sapiens
gctgtcaaaaatcaaacaagaaaaaaggacagctgagaaatgaaaagctaaaaatagaattatttttcc

SEQ ID NO: 128135 - DNA, 73 bp, Homo sapiens
aaaaggacagctgagaaatgaaaagctaaaaatagaattatttttcctaaatgatctgctggatagcattttc

SEQ ID NO: 128136 - DNA, 75 bp, Homo sapiens
gctgagaaatgaaaagctaaaaatagaattatttttcctaaatgatctgctggatagcattttccgtggaacaca

SEQ ID NO: 128137 - DNA, 73 bp, Homo sapiens
gaaaagctaaaaatagaattatttttcctaaatgatctgctggatagcattttccgtggaacacaactcagag

SEQ ID NO: 128138 - DNA, 74 bp, Homo sapiens
aatagaattatttttcctaaatgatctgctggatagcattttccgtggaacacaactcagaggtaacaatagag

SEQ ID NO: 128139 - DNA, 73 bp, Homo sapiens
atttttcctaaatgatctgctggatagcattttccgtggaacacaactcagaggtaacaatagagttttcatt

SEQ ID NO: 128140 - DNA, 77 bp, Homo sapiens
tggatagcattttccgtggaacacaactcagaggtaacaatagagttttcatttcaatcgtaggcatgtggcacttg

SEQ ID NO: 128141 - DNA, 80 bp, Homo sapiens
aacacaactcagaggtaacaatagagttttcatttcaatcgtaggcatgtggcacttggacagtcatctctgcacagaaa

SEQ ID NO: 128142 - DNA, 81 bp, Homo sapiens
aggtaacaatagagttttcatttcaatcgtaggcatgtggcacttggacagtcatctctgcacagaaagctgtaacagtca

SEQ ID NO: 128143 - DNA, 83 bp, Homo sapiens
atagagttttcatttcaatcgtaggcatgtggcacttggacagtcatctctgcacagaaagctgtaacagtcatgcgagggta

SEQ ID NO: 128144 - DNA, 82 bp, Homo sapiens
atttcaatcgtaggcatgtggcacttggacagtcatctctgcacagaaagctgtaacagtcatgcgagggtacagtaattat

SEQ ID NO: 128145 - DNA, 83 bp, Homo sapiens
atcgtaggcatgtggcacttggacagtcatctctgcacagaaagctgtaacagtcatgcgagggtacagtaattattgaacaa

SEQ ID NO: 128146 - DNA, 81 bp, Homo sapiens
cacttggacagtcatctctgcacagaaagctgtaacagtcatgcgagggtacagtaattattgaacaaggcaaatttctca

SEQ ID NO: 128147 - DNA, 81 bp, Homo sapiens
acagtcatctctgcacagaaagctgtaacagtcatgcgagggtacagtaattattgaacaaggcaaatttctcaccacaga

SEQ ID NO: 128148 - DNA, 78 bp, Homo sapiens
cacagaaagctgtaacagtcatgcgagggtacagtaattattgaacaaggcaaatttctcaccacagagagcagtggg

SEQ ID NO: 128149 - DNA, 76 bp, Homo sapiens
aaagctgtaacagtcatgcgagggtacagtaattattgaacaaggcaaatttctcaccacagagagcagtggggaa

SEQ ID NO: 128150 - DNA, 76 bp, Homo sapiens
agtcatgcgagggtacagtaattattgaacaaggcaaatttctcaccacagagagcagtggggaagtcaagaggag

SEQ ID NO: 128151 - DNA, 76 bp, Homo sapiens
aattattgaacaaggcaaatttctcaccacagagagcagtggggaagtcaagaggaggcaccgcactgggacagaa

SEQ ID NO: 128152 - DNA, 77 bp, Homo sapiens
caaatttctcaccacagagagcagtggggaagtcaagaggaggcaccgcactgggacagaacaccgagtcaactcca

SEQ ID NO: 128153 - DNA, 79 bp, Homo sapiens
ttctcaccacagagagcagtggggaagtcaagaggaggcaccgcactgggacagaacaccgagtcaactccacagtaca

SEQ ID NO: 128154 - DNA, 75 bp, Homo sapiens
agaggaggcaccgcactgggacagaacaccgagtcaactccacagtacacagtggcaggaacaaatacttaaaga

SEQ ID NO: 128155 - DNA, 74 bp, Homo sapiens
actgggacagaacaccgagtcaactccacagtacacagtggcaggaacaaatacttaaagagatcagtaaaata

SEQ ID NO: 128156 - DNA, 76 bp, Homo sapiens
acagaacaccgagtcaactccacagtacacagtggcaggaacaaatacttaaagagatcagtaaaatatggataga

SEQ ID NO: 128157 - DNA, 76 bp, Homo sapiens
agtacacagtggcaggaacaaatacttaaagagatcagtaaaatatggatagagctccaaacacgagttagtgcta

SEQ ID NO: 128158 - DNA, 75 bp, Homo sapiens
caggaacaaatacttaaagagatcagtaaaatatggatagagctccaaacacgagttagtgctagctttttctga

SEQ ID NO: 128159 - DNA, 76 bp, Homo sapiens
aaatacttaaagagatcagtaaaatatggatagagctccaaacacgagttagtgctagctttttctgacagtctga

SEQ ID NO: 128160 - DNA, 82 bp, Homo sapiens
gatcagtaaaatatggatagagctccaaacacgagttagtgctagctttttctgacagtctgactcagcagtatcagaaata

SEQ ID NO: 128161 - DNA, 79 bp, Homo sapiens
gtaaaatatggatagagctccaaacacgagttagtgctagctttttctgacagtctgactcagcagtatcagaaatatt

SEQ ID NO: 128162 - DNA, 80 bp, Homo sapiens
atagagctccaaacacgagttagtgctagctttttctgacagtctgactcagcagtatcagaaatatttgagtacttgag

SEQ ID NO: 128163 - DNA, 79 bp, Homo sapiens
aaacacgagttagtgctagctttttctgacagtctgactcagcagtatcagaaatatttgagtacttgaggacagaaca

SEQ ID NO: 128164 - DNA, 83 bp, Homo sapiens
ttagtgctagctttttctgacagtctgactcagcagtatcagaaatatttgagtacttgaggacagaacagtgcttcacgtca

SEQ ID NO: 128165 - DNA, 84 bp, Homo sapiens
tttttctgacagtctgactcagcagtatcagaaatatttgagtacttgaggacagaacagtgcttcacgtcatgagctcctgga

SEQ ID NO: 128166 - DNA, 78 bp, Homo sapiens
agtatcagaaatatttgagtacttgaggacagaacagtgcttcacgtcatgagctcctggaggctttattacaaattg

SEQ ID NO: 128167 - DNA, 78 bp, Homo sapiens
cttcacgtcatgagctcctggaggctttattacaaattgttatactgtaggttgaaaaatgaacttgagatgctgaca

SEQ ID NO: 128168 - DNA, 77 bp, Homo sapiens
agctcctggaggctttattacaaattgttatactgtaggttgaaaaatgaacttgagatgctgacatgctgtagaag

SEQ ID NO: 128169 - DNA, 76 bp, Homo sapiens
tggaggctttattacaaattgttatactgtaggttgaaaaatgaacttgagatgctgacatgctgtagaaggaaaa

SEQ ID NO: 128170 - DNA, 75 bp, Homo sapiens
acaaattgttatactgtaggttgaaaaatgaacttgagatgctgacatgctgtagaaggaaaaagaattgtatac

SEQ ID NO: 128171 - DNA, 76 bp, Homo sapiens
gttatactgtaggttgaaaaatgaacttgagatgctgacatgctgtagaaggaaaaagaattgtatactttctcat

SEQ ID NO: 128172 - DNA, 77 bp, Homo sapiens
tgaaaaatgaacttgagatgctgacatgctgtagaaggaaaaagaattgtatactttctcatttaaagacgcagtgt

SEQ ID NO: 128173 - DNA, 77 bp, Homo sapiens
aatgaacttgagatgctgacatgctgtagaaggaaaaagaattgtatactttctcatttaaagacgcagtgttcctc

SEQ ID NO: 128174 - DNA, 78 bp, Homo sapiens
agatgctgacatgctgtagaaggaaaaagaattgtatactttctcatttaaagacgcagtgttcctctctgctaaatc

SEQ ID NO: 128175 - DNA, 76 bp, Homo sapiens
tgtagaaggaaaaagaattgtatactttctcatttaaagacgcagtgttcctctctgctaaatcctcaggcatgga

SEQ ID NO: 128176 - DNA, 74 bp, Homo sapiens
aaagaattgtatactttctcatttaaagacgcagtgttcctctctgctaaatcctcaggcatggaacgtggtta

SEQ ID NO: 128177 - DNA, 75 bp, Homo sapiens
attgtatactttctcatttaaagacgcagtgttcctctctgctaaatcctcaggcatggaacgtggttactgaaa

SEQ ID NO: 128178 - DNA, 75 bp, Homo sapiens
ttctcatttaaagacgcagtgttcctctctgctaaatcctcaggcatggaacgtggttactgaaacacccacatt

SEQ ID NO: 128179 - DNA, 77 bp, Homo sapiens
aagacgcagtgttcctctctgctaaatcctcaggcatggaacgtggttactgaaacacccacatttgaagtagctca

SEQ ID NO: 128180 - DNA, 79 bp, Homo sapiens
tctctgctaaatcctcaggcatggaacgtggttactgaaacacccacatttgaagtagctcaagggcgtatatgcacca

SEQ ID NO: 128181 - DNA, 76 bp, Homo sapiens
atggaacgtggttactgaaacacccacatttgaagtagctcaagggcgtatatgcaccagcatgtggagttccacc

SEQ ID NO: 128182 - DNA, 75 bp, Homo sapiens
acgtggttactgaaacacccacatttgaagtagctcaagggcgtatatgcaccagcatgtggagttccaccctgg

SEQ ID NO: 128183 - DNA, 76 bp, Homo sapiens
aacacccacatttgaagtagctcaagggcgtatatgcaccagcatgtggagttccaccctgggacatccccagaaa

SEQ ID NO: 128184 - DNA, 82 bp, Homo sapiens
tagctcaagggcgtatatgcaccagcatgtggagttccaccctgggacatccccagaaaccgcccacagctcagcactgcaa

SEQ ID NO: 128185 - DNA, 79 bp, Homo sapiens
tatatgcaccagcatgtggagttccaccctgggacatccccagaaaccgcccacagctcagcactgcaacctttgtact

SEQ ID NO: 128186 - DNA, 77 bp, Homo sapiens
agcatgtggagttccaccctgggacatccccagaaaccgcccacagctcagcactgcaacctttgtacttctctcac

SEQ ID NO: 128187 - DNA, 79 bp, Homo sapiens
gacatccccagaaaccgcccacagctcagcactgcaacctttgtacttctctcaccaaatgtcgagtgaagctgccact

SEQ ID NO: 128188 - DNA, 77 bp, Homo sapiens
agaaaccgcccacagctcagcactgcaacctttgtacttctctcaccaaatgtcgagtgaagctgccactttaaatc

SEQ ID NO: 128189 - DNA, 76 bp, Homo sapiens
cgcccacagctcagcactgcaacctttgtacttctctcaccaaatgtcgagtgaagctgccactttaaatcttttt

SEQ ID NO: 128190 - DNA, 70 bp, Homo sapiens
acctttgtacttctctcaccaaatgtcgagtgaagctgccactttaaatctttttttgtaagtcttacaa

SEQ ID NO: 128191 - DNA, 74 bp, Homo sapiens
tctcaccaaatgtcgagtgaagctgccactttaaatctttttttgtaagtcttacaaacattaagtactgcaca

SEQ ID NO: 128192 - DNA, 72 bp, Homo sapiens
aatgtcgagtgaagctgccactttaaatctttttttgtaagtcttacaaacattaagtactgcacataacgc

SEQ ID NO: 128193 - DNA, 72 bp, Homo sapiens
gctgccactttaaatctttttttgtaagtcttacaaacattaagtactgcacataacgcttcttgacaagtg

SEQ ID NO: 128194 - DNA, 71 bp, Homo sapiens
taaatctttttttgtaagtcttacaaacattaagtactgcacataacgcttcttgacaagtgttacacctc

SEQ ID NO: 128195 - DNA, 74 bp, Homo sapiens
tttgtaagtcttacaaacattaagtactgcacataacgcttcttgacaagtgttacacctctatatggtacaag

SEQ ID NO: 128196 - DNA, 76 bp, Homo sapiens
ttacaaacattaagtactgcacataacgcttcttgacaagtgttacacctctatatggtacaagtgaccacagtaa

SEQ ID NO: 128197 - DNA, 80 bp, Homo sapiens
actgcacataacgcttcttgacaagtgttacacctctatatggtacaagtgaccacagtaactacagagtgacactgctg

SEQ ID NO: 128198 - DNA, 79 bp, Homo sapiens
ttcttgacaagtgttacacctctatatggtacaagtgaccacagtaactacagagtgacactgctgggtgcagtacttc

SEQ ID NO: 128199 - DNA, 76 bp, Homo sapiens
tgttacacctctatatggtacaagtgaccacagtaactacagagtgacactgctgggtgcagtacttcctttttat

SEQ ID NO: 128200 - DNA, 75 bp, Homo sapiens
ctctatatggtacaagtgaccacagtaactacagagtgacactgctgggtgcagtacttcctttttatttagaaa

SEQ ID NO: 128201 - DNA, 76 bp, Homo sapiens
tacaagtgaccacagtaactacagagtgacactgctgggtgcagtacttcctttttatttagaaaaatgactgcat

SEQ ID NO: 128202 - DNA, 73 bp, Homo sapiens
actacagagtgacactgctgggtgcagtacttcctttttatttagaaaaatgactgcattttctaaaagctgg

SEQ ID NO: 128203 - DNA, 74 bp, Homo sapiens
actgctgggtgcagtacttcctttttatttagaaaaatgactgcattttctaaaagctgggccaatagcacata

SEQ ID NO: 128204 - DNA, 73 bp, Homo sapiens
gtgcagtacttcctttttatttagaaaaatgactgcattttctaaaagctgggccaatagcacataccttata

SEQ ID NO: 128205 - DNA, 74 bp, Homo sapiens
ttttatttagaaaaatgactgcattttctaaaagctgggccaatagcacataccttatatatgttagtgactac

SEQ ID NO: 128206 - DNA, 78 bp, Homo sapiens
aaaaatgactgcattttctaaaagctgggccaatagcacataccttatatatgttagtgactaccatgatatgagaaa

SEQ ID NO: 128207 - DNA, 79 bp, Homo sapiens
ttctaaaagctgggccaatagcacataccttatatatgttagtgactaccatgatatgagaaaagacgtggacaagtgc

SEQ ID NO: 128208 - DNA, 78 bp, Homo sapiens
ccaatagcacataccttatatatgttagtgactaccatgatatgagaaaagacgtggacaagtgctccccaaggattc

SEQ ID NO: 128209 - DNA, 75 bp, Homo sapiens
ataccttatatatgttagtgactaccatgatatgagaaaagacgtggacaagtgctccccaaggattccggagac

SEQ ID NO: 128210 - DNA, 77 bp, Homo sapiens
tatatatgttagtgactaccatgatatgagaaaagacgtggacaagtgctccccaaggattccggagacggaagcac

SEQ ID NO: 128211 - DNA, 78 bp, Homo sapiens
agtgactaccatgatatgagaaaagacgtggacaagtgctccccaaggattccggagacggaagcacttgctgcaggc

SEQ ID NO: 128212 - DNA, 80 bp, Homo sapiens
atatgagaaaagacgtggacaagtgctccccaaggattccggagacggaagcacttgctgcaggctgcaacatcagccaa

SEQ ID NO: 128213 - DNA, 77 bp, Homo sapiens
aaaagacgtggacaagtgctccccaaggattccggagacggaagcacttgctgcaggctgcaacatcagccaaggta

SEQ ID NO: 128214 - DNA, 79 bp, Homo sapiens
acaagtgctccccaaggattccggagacggaagcacttgctgcaggctgcaacatcagccaaggtatttccacaagctc

SEQ ID NO: 128215 - DNA, 79 bp, Homo sapiens
cccaaggattccggagacggaagcacttgctgcaggctgcaacatcagccaaggtatttccacaagctcctgctctggg

SEQ ID NO: 128216 - DNA, 81 bp, Homo sapiens
agacggaagcacttgctgcaggctgcaacatcagccaaggtatttccacaagctcctgctctggggaaacagttatggtca

SEQ ID NO: 128217 - DNA, 79 bp, Homo sapiens
acttgctgcaggctgcaacatcagccaaggtatttccacaagctcctgctctggggaaacagttatggtcaaaaggtga

SEQ ID NO: 128218 - DNA, 74 bp, Homo sapiens
aacatcagccaaggtatttccacaagctcctgctctggggaaacagttatggtcaaaaggtgaagtgcaaataa

SEQ ID NO: 128219 - DNA, 71 bp, Homo sapiens
aaggtatttccacaagctcctgctctggggaaacagttatggtcaaaaggtgaagtgcaaataaggggctg

SEQ ID NO: 128220 - DNA, 73 bp, Homo sapiens
acaagctcctgctctggggaaacagttatggtcaaaaggtgaagtgcaaataaggggctgtcactgacttaaa

SEQ ID NO: 128221 - DNA, 71 bp, Homo sapiens
aaacagttatggtcaaaaggtgaagtgcaaataaggggctgtcactgacttaaagtgccctaggtagtagc

SEQ ID NO: 128222 - DNA, 71 bp, Homo sapiens
aaaaggtgaagtgcaaataaggggctgtcactgacttaaagtgccctaggtagtagccttccctatcataa

SEQ ID NO: 128223 - DNA, 75 bp, Homo sapiens
aagtgcaaataaggggctgtcactgacttaaagtgccctaggtagtagccttccctatcataaagtgagatgcca

SEQ ID NO: 128224 - DNA, 75 bp, Homo sapiens
aataaggggctgtcactgacttaaagtgccctaggtagtagccttccctatcataaagtgagatgccagtgacta

SEQ ID NO: 128225 - DNA, 77 bp, Homo sapiens
tgtcactgacttaaagtgccctaggtagtagccttccctatcataaagtgagatgccagtgactagagccaattggg

SEQ ID NO: 128226 - DNA, 75 bp, Homo sapiens
ttaaagtgccctaggtagtagccttccctatcataaagtgagatgccagtgactagagccaattggggaagaatc

SEQ ID NO: 128227 - DNA, 78 bp, Homo sapiens
ctaggtagtagccttccctatcataaagtgagatgccagtgactagagccaattggggaagaatctctctctggtgcg

SEQ ID NO: 128228 - DNA, 83 bp, Homo sapiens
ccttccctatcataaagtgagatgccagtgactagagccaattggggaagaatctctctctggtgcggctgcatggtcagcag

SEQ ID NO: 128229 - DNA, 84 bp, Homo sapiens
agatgccagtgactagagccaattggggaagaatctctctctggtgcggctgcatggtcagcagggcatcatgtagaaaaggat

SEQ ID NO: 128230 - DNA, 82 bp, Homo sapiens
actagagccaattggggaagaatctctctctggtgcggctgcatggtcagcagggcatcatgtagaaaaggattcaggagag

SEQ ID NO: 128231 - DNA, 83 bp, Homo sapiens
gggaagaatctctctctggtgcggctgcatggtcagcagggcatcatgtagaaaaggattcaggagagggaggaaccactgca

SEQ ID NO: 128232 - DNA, 81 bp, Homo sapiens
gtgcggctgcatggtcagcagggcatcatgtagaaaaggattcaggagagggaggaaccactgcatctttcaaaccagaaa

SEQ ID NO: 128233 - DNA, 78 bp, Homo sapiens
atggtcagcagggcatcatgtagaaaaggattcaggagagggaggaaccactgcatctttcaaaccagaaagcaatta

SEQ ID NO: 128234 - DNA, 74 bp, Homo sapiens
atgtagaaaaggattcaggagagggaggaaccactgcatctttcaaaccagaaagcaattagtgactaaagcaa

SEQ ID NO: 128235 - DNA, 77 bp, Homo sapiens
aggaaccactgcatctttcaaaccagaaagcaattagtgactaaagcaacagtaagcagtaggtgcactgaagtaca

SEQ ID NO: 128236 - DNA, 80 bp, Homo sapiens
actgcatctttcaaaccagaaagcaattagtgactaaagcaacagtaagcagtaggtgcactgaagtacatactgccgca

SEQ ID NO: 128237 - DNA, 77 bp, Homo sapiens
aaaccagaaagcaattagtgactaaagcaacagtaagcagtaggtgcactgaagtacatactgccgcaggtcaccaa

SEQ ID NO: 128238 - DNA, 80 bp, Homo sapiens
agtgactaaagcaacagtaagcagtaggtgcactgaagtacatactgccgcaggtcaccaatgggtgacacacacagggc

SEQ ID NO: 128239 - DNA, 80 bp, Homo sapiens
aacagtaagcagtaggtgcactgaagtacatactgccgcaggtcaccaatgggtgacacacacagggctgccaggaggaa

SEQ ID NO: 128240 - DNA, 82 bp, Homo sapiens
taggtgcactgaagtacatactgccgcaggtcaccaatgggtgacacacacagggctgccaggaggaattctctggactgaa

SEQ ID NO: 128241 - DNA, 78 bp, Homo sapiens
atactgccgcaggtcaccaatgggtgacacacacagggctgccaggaggaattctctggactgaagaaattctttgaa

SEQ ID NO: 128242 - DNA, 76 bp, Homo sapiens
aggtcaccaatgggtgacacacacagggctgccaggaggaattctctggactgaagaaattctttgaaagcataaa

SEQ ID NO: 128243 - DNA, 78 bp, Homo sapiens
tgacacacacagggctgccaggaggaattctctggactgaagaaattctttgaaagcataaaagccacaactaccaga

SEQ ID NO: 128244 - DNA, 74 bp, Homo sapiens
acacagggctgccaggaggaattctctggactgaagaaattctttgaaagcataaaagccacaactaccagaaa

SEQ ID NO: 128245 - DNA, 70 bp, Homo sapiens
aggaggaattctctggactgaagaaattctttgaaagcataaaagccacaactaccagaaaccgcccctc

SEQ ID NO: 128246 - DNA, 69 bp, Homo sapiens
aattctctggactgaagaaattctttgaaagcataaaagccacaactaccagaaaccgcccctccaaac

SEQ ID NO: 128247 - DNA, 69 bp, Homo sapiens
agaaattctttgaaagcataaaagccacaactaccagaaaccgcccctccaaacggctcaaaggagtca

SEQ ID NO: 128248 - DNA, 70 bp, Homo sapiens
ttgaaagcataaaagccacaactaccagaaaccgcccctccaaacggctcaaaggagtcaaagtggataa

SEQ ID NO: 128249 - DNA, 70 bp, Homo sapiens
aaacggctcaaaggagtcaaagtggataagccaagacgggctggagacaggaccaggggtcaagaactgg

SEQ ID NO: 128250 - DNA, 70 bp, Homo sapiens
aaaggagtcaaagtggataagccaagacgggctggagacaggaccaggggtcaagaactgggaagaagaa

SEQ ID NO: 128251 - DNA, 74 bp, Homo sapiens
ataagccaagacgggctggagacaggaccaggggtcaagaactgggaagaagaacaccgatgtctgagcacgtc

SEQ ID NO: 128252 - DNA, 75 bp, Homo sapiens
acgggctggagacaggaccaggggtcaagaactgggaagaagaacaccgatgtctgagcacgtccagtcctctga

SEQ ID NO: 128253 - DNA, 76 bp, Homo sapiens
gtcaagaactgggaagaagaacaccgatgtctgagcacgtccagtcctctgagcccttgtcctatagaaacacaaa

SEQ ID NO: 128254 - DNA, 77 bp, Homo sapiens
gaagaagaacaccgatgtctgagcacgtccagtcctctgagcccttgtcctatagaaacacaaacagaccactgagt

SEQ ID NO: 128255 - DNA, 77 bp, Homo sapiens
agaacaccgatgtctgagcacgtccagtcctctgagcccttgtcctatagaaacacaaacagaccactgagttaaga

SEQ ID NO: 128256 - DNA, 69 bp, Homo sapiens
aaaggaggtacttggagtttctaataaacgagagagagattcctaggagaatatatgtaactttctaaa

SEQ ID NO: 128257 - DNA, 69 bp, Homo sapiens
cttggagtttctaataaacgagagagagattcctaggagaatatatgtaactttctaaataatttttaa

SEQ ID NO: 128258 - DNA, 68 bp, Homo sapiens
ctaataaacgagagagagattcctaggagaatatatgtaactttctaaataatttttaattctaaatt

SEQ ID NO: 128259 - DNA, 66 bp, Homo sapiens
agagagagattcctaggagaatatatgtaactttctaaataatttttaattctaaatttaaaaaaa

SEQ ID NO: 128260 - DNA, 66 bp, Homo sapiens
atttaaaaaaataccttccaataaggagcttggaaaagaatacaaaataatggaccttgaggaaca

SEQ ID NO: 128261 - DNA, 70 bp, Homo sapiens
aaataccttccaataaggagcttggaaaagaatacaaaataatggaccttgaggaacataatattctaga

SEQ ID NO: 128262 - DNA, 71 bp, Homo sapiens
ataaggagcttggaaaagaatacaaaataatggaccttgaggaacataatattctagaaacaaaaggcagc

SEQ ID NO: 128263 - DNA, 70 bp, Homo sapiens
ttggaaaagaatacaaaataatggaccttgaggaacataatattctagaaacaaaaggcagcgcctccct

SEQ ID NO: 128264 - DNA, 76 bp, Homo sapiens
tacaaaataatggaccttgaggaacataatattctagaaacaaaaggcagcgcctcccttgctagagctcactgta

SEQ ID NO: 128265 - DNA, 75 bp, Homo sapiens
aataatggaccttgaggaacataatattctagaaacaaaaggcagcgcctcccttgctagagctcactgtattaa

SEQ ID NO: 128266 - DNA, 75 bp, Homo sapiens
ttgaggaacataatattctagaaacaaaaggcagcgcctcccttgctagagctcactgtattaaactccaggtac

SEQ ID NO: 128267 - DNA, 73 bp, Homo sapiens
attctagaaacaaaaggcagcgcctcccttgctagagctcactgtattaaactccaggtacctgacaaattta

SEQ ID NO: 128268 - DNA, 73 bp, Homo sapiens
aaacaaaaggcagcgcctcccttgctagagctcactgtattaaactccaggtacctgacaaatttaagatctg

SEQ ID NO: 128269 - DNA, 76 bp, Homo sapiens
agcgcctcccttgctagagctcactgtattaaactccaggtacctgacaaatttaagatctgtatcctggctggaa

SEQ ID NO: 128270 - DNA, 79 bp, Homo sapiens
ttgctagagctcactgtattaaactccaggtacctgacaaatttaagatctgtatcctggctggaatctagcagtctct

SEQ ID NO: 128271 - DNA, 74 bp, Homo sapiens
actgtattaaactccaggtacctgacaaatttaagatctgtatcctggctggaatctagcagtctcttcaaaaa

SEQ ID NO: 128272 - DNA, 73 bp, Homo sapiens
attaaactccaggtacctgacaaatttaagatctgtatcctggctggaatctagcagtctcttcaaaaattag

SEQ ID NO: 128273 - DNA, 74 bp, Homo sapiens
gtacctgacaaatttaagatctgtatcctggctggaatctagcagtctcttcaaaaattagttctttgagcttt

SEQ ID NO: 128274 - DNA, 72 bp, Homo sapiens
aaatttaagatctgtatcctggctggaatctagcagtctcttcaaaaattagttctttgagcttttccttag

SEQ ID NO: 128275 - DNA, 76 bp, Homo sapiens
tatcctggctggaatctagcagtctcttcaaaaattagttctttgagcttttccttaggcaagtcatccaattcca

SEQ ID NO: 128276 - DNA, 75 bp, Homo sapiens
tggaatctagcagtctcttcaaaaattagttctttgagcttttccttaggcaagtcatccaattccatgtcgaac

SEQ ID NO: 128277 - DNA, 72 bp, Homo sapiens
agtctcttcaaaaattagttctttgagcttttccttaggcaagtcatccaattccatgtcgaacttgaatgg

SEQ ID NO: 128278 - DNA, 73 bp, Homo sapiens
ttcaaaaattagttctttgagcttttccttaggcaagtcatccaattccatgtcgaacttgaatggtgcttcg

SEQ ID NO: 128279 - DNA, 75 bp, Homo sapiens
tctttgagcttttccttaggcaagtcatccaattccatgtcgaacttgaatggtgcttcggcgatgggctttaaa

SEQ ID NO: 128280 - DNA, 72 bp, Homo sapiens
ttttccttaggcaagtcatccaattccatgtcgaacttgaatggtgcttcggcgatgggctttaaaagaaaa

SEQ ID NO: 128281 - DNA, 71 bp, Homo sapiens
aagtcatccaattccatgtcgaacttgaatggtgcttcggcgatgggctttaaaagaaaacaaaacattta

SEQ ID NO: 128282 - DNA, 84 bp, Homo sapiens
ctggctgatctatgtccctgaagcagcagccaggaacatgagctcttacctcgtcactcgggtcgtaatactgctccagatatg

SEQ ID NO: 128283 - DNA, 81 bp, Homo sapiens
tctatgtccctgaagcagcagccaggaacatgagctcttacctcgtcactcgggtcgtaatactgctccagatatgggtgg

SEQ ID NO: 128284 - DNA, 80 bp, Homo sapiens
cagcagccaggaacatgagctcttacctcgtcactcgggtcgtaatactgctccagatatgggtgggccagagcctgttc

SEQ ID NO: 128285 - DNA, 78 bp, Homo sapiens
gaacatgagctcttacctcgtcactcgggtcgtaatactgctccagatatgggtgggccagagcctgttctacttcaa

SEQ ID NO: 128286 - DNA, 76 bp, Homo sapiens
tcttacctcgtcactcgggtcgtaatactgctccagatatgggtgggccagagcctgttctacttcaatcctcttg

SEQ ID NO: 128287 - DNA, 77 bp, Homo sapiens
tcactcgggtcgtaatactgctccagatatgggtgggccagagcctgttctacttcaatcctcttgtgtgggttgaa

SEQ ID NO: 128288 - DNA, 78 bp, Homo sapiens
tcgtaatactgctccagatatgggtgggccagagcctgttctacttcaatcctcttgtgtgggttgaatgtcaacatt

SEQ ID NO: 128289 - DNA, 77 bp, Homo sapiens
ctccagatatgggtgggccagagcctgttctacttcaatcctcttgtgtgggttgaatgtcaacattttgtccaata

SEQ ID NO: 128290 - DNA, 75 bp, Homo sapiens
atatgggtgggccagagcctgttctacttcaatcctcttgtgtgggttgaatgtcaacattttgtccaataagtc

SEQ ID NO: 128291 - DNA, 76 bp, Homo sapiens
agagcctgttctacttcaatcctcttgtgtgggttgaatgtcaacattttgtccaataagtccagagctataaaga

SEQ ID NO: 128292 - DNA, 73 bp, Homo sapiens
tacttcaatcctcttgtgtgggttgaatgtcaacattttgtccaataagtccagagctataaagagaaaggtt

SEQ ID NO: 128293 - DNA, 74 bp, Homo sapiens
atcctcttgtgtgggttgaatgtcaacattttgtccaataagtccagagctataaagagaaaggttttgcagta

SEQ ID NO: 128294 - DNA, 68 bp, Homo sapiens
aacgcgaagctaagcctaagaaaaaactaatcaacgaaataacatttacctttggagtcagcatttgg

SEQ ID NO: 128295 - DNA, 68 bp, Homo sapiens
aagcctaagaaaaaactaatcaacgaaataacatttacctttggagtcagcatttgggaacagcctgt

SEQ ID NO: 128296 - DNA, 71 bp, Homo sapiens
aaaactaatcaacgaaataacatttacctttggagtcagcatttgggaacagcctgttccatggcacctta

SEQ ID NO: 128297 - DNA, 71 bp, Homo sapiens
aatcaacgaaataacatttacctttggagtcagcatttgggaacagcctgttccatggcaccttatttttg

SEQ ID NO: 128298 - DNA, 73 bp, Homo sapiens
ataacatttacctttggagtcagcatttgggaacagcctgttccatggcaccttatttttgtgtggaagagaa

SEQ ID NO: 128299 - DNA, 75 bp, Homo sapiens
ttggagtcagcatttgggaacagcctgttccatggcaccttatttttgtgtggaagagaaagcaaatagttccta

SEQ ID NO: 128300 - DNA, 71 bp, Homo sapiens
tttgggaacagcctgttccatggcaccttatttttgtgtggaagagaaagcaaatagttcctagcttttaa

SEQ ID NO: 128301 - DNA, 70 bp, Homo sapiens
aacagcctgttccatggcaccttatttttgtgtggaagagaaagcaaatagttcctagcttttaaattta

SEQ ID NO: 128302 - DNA, 71 bp, Homo sapiens
ccatggcaccttatttttgtgtggaagagaaagcaaatagttcctagcttttaaatttattatacaattca

SEQ ID NO: 128303 - DNA, 71 bp, Homo sapiens
tttttgtgtggaagagaaagcaaatagttcctagcttttaaatttattatacaattcaggtcttcttgtga

SEQ ID NO: 128304 - DNA, 72 bp, Homo sapiens
ggaagagaaagcaaatagttcctagcttttaaatttattatacaattcaggtcttcttgtgatggggatcca

SEQ ID NO: 128305 - DNA, 71 bp, Homo sapiens
agcaaatagttcctagcttttaaatttattatacaattcaggtcttcttgtgatggggatccaagaatacc

SEQ ID NO: 128306 - DNA, 73 bp, Homo sapiens
agttcctagcttttaaatttattatacaattcaggtcttcttgtgatggggatccaagaatacctatcagata

SEQ ID NO: 128307 - DNA, 72 bp, Homo sapiens
ttaaatttattatacaattcaggtcttcttgtgatggggatccaagaatacctatcagataaaaaaattagc

SEQ ID NO: 128308 - DNA, 75 bp, Homo sapiens
tacaattcaggtcttcttgtgatggggatccaagaatacctatcagataaaaaaattagctattagttatcagga

SEQ ID NO: 128309 - DNA, 72 bp, Homo sapiens
tgtacaaacttgagtaaatctagctcctgaagggctcgggaaccttacccaaaatgtggttcagctggtcaa

SEQ ID NO: 128310 - DNA, 74 bp, Homo sapiens
ttgagtaaatctagctcctgaagggctcgggaaccttacccaaaatgtggttcagctggtcaagataatgcttc

SEQ ID NO: 128311 - DNA, 73 bp, Homo sapiens
atctagctcctgaagggctcgggaaccttacccaaaatgtggttcagctggtcaagataatgcttccctggaa

SEQ ID NO: 128312 - DNA, 72 bp, Homo sapiens
ggctcgggaaccttacccaaaatgtggttcagctggtcaagataatgcttccctggaaagatgggcctgtta

SEQ ID NO: 128313 - DNA, 72 bp, Homo sapiens
aaccttacccaaaatgtggttcagctggtcaagataatgcttccctggaaagatgggcctgttagaaagcat

SEQ ID NO: 128314 - DNA, 79 bp, Homo sapiens
aaaatgtggttcagctggtcaagataatgcttccctggaaagatgggcctgttagaaagcatttctgccagaatgcagc

SEQ ID NO: 128315 - DNA, 79 bp, Homo sapiens
agctggtcaagataatgcttccctggaaagatgggcctgttagaaagcatttctgccagaatgcagcctacagaccaaa

SEQ ID NO: 128316 - DNA, 79 bp, Homo sapiens
aagataatgcttccctggaaagatgggcctgttagaaagcatttctgccagaatgcagcctacagaccaaatatcaatg

SEQ ID NO: 128317 - DNA, 79 bp, Homo sapiens
tccctggaaagatgggcctgttagaaagcatttctgccagaatgcagcctacagaccaaatatcaatggacttggtgta

SEQ ID NO: 128318 - DNA, 80 bp, Homo sapiens
aaagatgggcctgttagaaagcatttctgccagaatgcagcctacagaccaaatatcaatggacttggtgtagccctgca

SEQ ID NO: 128319 - DNA, 80 bp, Homo sapiens
cctgttagaaagcatttctgccagaatgcagcctacagaccaaatatcaatggacttggtgtagccctgcaggagaaaga

SEQ ID NO: 128320 - DNA, 80 bp, Homo sapiens
atttctgccagaatgcagcctacagaccaaatatcaatggacttggtgtagccctgcaggagaaagagagaaaagactga

SEQ ID NO: 128321 - DNA, 77 bp, Homo sapiens
aatgcagcctacagaccaaatatcaatggacttggtgtagccctgcaggagaaagagagaaaagactgaaaatggta

SEQ ID NO: 128322 - DNA, 71 bp, Homo sapiens
gttctcttacttactggatttctttttatgcaaacttcatccttaccttggaattcaacataatttctgga

SEQ ID NO: 128323 - DNA, 70 bp, Homo sapiens
cttacttactggatttctttttatgcaaacttcatccttaccttggaattcaacataatttctggagccc

SEQ ID NO: 128324 - DNA, 70 bp, Homo sapiens
atttctttttatgcaaacttcatccttaccttggaattcaacataatttctggagccctgtaccaacgtg

SEQ ID NO: 128325 - DNA, 75 bp, Homo sapiens
ttatgcaaacttcatccttaccttggaattcaacataatttctggagccctgtaccaacgtgtggccacatattc

SEQ ID NO: 128326 - DNA, 75 bp, Homo sapiens
ttcatccttaccttggaattcaacataatttctggagccctgtaccaacgtgtggccacatattctgtcaggaac

SEQ ID NO: 128327 - DNA, 78 bp, Homo sapiens
cttggaattcaacataatttctggagccctgtaccaacgtgtggccacatattctgtcaggaaccctgtgtgatcatg

SEQ ID NO: 128328 - DNA, 81 bp, Homo sapiens
ataatttctggagccctgtaccaacgtgtggccacatattctgtcaggaaccctgtgtgatcatggtctggatctgcaaca

SEQ ID NO: 128329 - DNA, 82 bp, Homo sapiens
tctggagccctgtaccaacgtgtggccacatattctgtcaggaaccctgtgtgatcatggtctggatctgcaacacgggcca

SEQ ID NO: 128330 - DNA, 80 bp, Homo sapiens
tgtaccaacgtgtggccacatattctgtcaggaaccctgtgtgatcatggtctggatctgcaacacgggccaggccaaag

SEQ ID NO: 128331 - DNA, 83 bp, Homo sapiens
ccacatattctgtcaggaaccctgtgtgatcatggtctggatctgcaacacgggccaggccaaagtcacagatctaagagaga

SEQ ID NO: 128332 - DNA, 81 bp, Homo sapiens
tattctgtcaggaaccctgtgtgatcatggtctggatctgcaacacgggccaggccaaagtcacagatctaagagagaaaa

SEQ ID NO: 128333 - DNA, 76 bp, Homo sapiens
aaccctgtgtgatcatggtctggatctgcaacacgggccaggccaaagtcacagatctaagagagaaaaaaaacag

SEQ ID NO: 128334 - DNA, 76 bp, Homo sapiens
tcatggtctggatctgcaacacgggccaggccaaagtcacagatctaagagagaaaaaaaacaggataacttctta

SEQ ID NO: 128335 - DNA, 72 bp, Homo sapiens
aaagggtttttcaatatatatcaccttaatagtaaataacctggctgaccttgagatcacaggtggtgttga

SEQ ID NO: 128336 - DNA, 78 bp, Homo sapiens
tttcaatatatatcaccttaatagtaaataacctggctgaccttgagatcacaggtggtgttgagcagcaggttggaa

SEQ ID NO: 128337 - DNA, 77 bp, Homo sapiens
tatcaccttaatagtaaataacctggctgaccttgagatcacaggtggtgttgagcagcaggttggaaggcttgagg

SEQ ID NO: 128338 - DNA, 79 bp, Homo sapiens
tagtaaataacctggctgaccttgagatcacaggtggtgttgagcagcaggttggaaggcttgaggtcacggtgcagaa

SEQ ID NO: 128339 - DNA, 82 bp, Homo sapiens
gctgaccttgagatcacaggtggtgttgagcagcaggttggaaggcttgaggtcacggtgcagaacgttagctgaatggata

SEQ ID NO: 128340 - DNA, 79 bp, Homo sapiens
agatcacaggtggtgttgagcagcaggttggaaggcttgaggtcacggtgcagaacgttagctgaatggatatatttta

SEQ ID NO: 128341 - DNA, 76 bp, Homo sapiens
acaggtggtgttgagcagcaggttggaaggcttgaggtcacggtgcagaacgttagctgaatggatatattttaac

SEQ ID NO: 128342 - DNA, 78 bp, Homo sapiens
ttgagcagcaggttggaaggcttgaggtcacggtgcagaacgttagctgaatggatatattttaaccctctgaggatc

SEQ ID NO: 128343 - DNA, 75 bp, Homo sapiens
gaaggcttgaggtcacggtgcagaacgttagctgaatggatatattttaaccctctgaggatctggtagagaaaa

SEQ ID NO: 128344 - DNA, 78 bp, Homo sapiens
ttgaggtcacggtgcagaacgttagctgaatggatatattttaaccctctgaggatctggtagagaaaatagcagata

SEQ ID NO: 128345 - DNA, 79 bp, Homo sapiens
cagaacgttagctgaatggatatattttaaccctctgaggatctggtagagaaaatagcagatatggtcattgctgagg

SEQ ID NO: 128346 - DNA, 81 bp, Homo sapiens
tagctgaatggatatattttaaccctctgaggatctggtagagaaaatagcagatatggtcattgctgaggtgttgtgtct

SEQ ID NO: 128347 - DNA, 79 bp, Homo sapiens
atatattttaaccctctgaggatctggtagagaaaatagcagatatggtcattgctgaggtgttgtgtcttcaagagct

SEQ ID NO: 128348 - DNA, 79 bp, Homo sapiens
tttaaccctctgaggatctggtagagaaaatagcagatatggtcattgctgaggtgttgtgtcttcaagagcttgtaaa

SEQ ID NO: 128349 - DNA, 82 bp, Homo sapiens
aggatctggtagagaaaatagcagatatggtcattgctgaggtgttgtgtcttcaagagcttgtaaagatctgtttccatga

SEQ ID NO: 128350 - DNA, 81 bp, Homo sapiens
gaaaatagcagatatggtcattgctgaggtgttgtgtcttcaagagcttgtaaagatctgtttccatgaggtcctgtacta

SEQ ID NO: 128351 - DNA, 81 bp, Homo sapiens
agatatggtcattgctgaggtgttgtgtcttcaagagcttgtaaagatctgtttccatgaggtcctgtactatatatctgt

SEQ ID NO: 128352 - DNA, 80 bp, Homo sapiens
attgctgaggtgttgtgtcttcaagagcttgtaaagatctgtttccatgaggtcctgtactatatatctgtttgcacagg

SEQ ID NO: 128353 - DNA, 77 bp, Homo sapiens
gttgtgtcttcaagagcttgtaaagatctgtttccatgaggtcctgtactatatatctgtttgcacaggttaaggta

SEQ ID NO: 128354 - DNA, 76 bp, Homo sapiens
tcttcaagagcttgtaaagatctgtttccatgaggtcctgtactatatatctgtttgcacaggttaaggtaaaaca

SEQ ID NO: 128355 - DNA, 73 bp, Homo sapiens
cttgtaaagatctgtttccatgaggtcctgtactatatatctgtttgcacaggttaaggtaaaacaccaatta

SEQ ID NO: 128356 - DNA, 73 bp, Homo sapiens
aacaaggttaccaagcagtggaattggccagttgcctaaaaaggatacacatctttcatttgctcgatggttg

SEQ ID NO: 128357 - DNA, 78 bp, Homo sapiens
aagcagtggaattggccagttgcctaaaaaggatacacatctttcatttgctcgatggttggtgctcgaataatgtca

SEQ ID NO: 128358 - DNA, 78 bp, Homo sapiens
aattggccagttgcctaaaaaggatacacatctttcatttgctcgatggttggtgctcgaataatgtcattgattcca

SEQ ID NO: 128359 - DNA, 79 bp, Homo sapiens
agttgcctaaaaaggatacacatctttcatttgctcgatggttggtgctcgaataatgtcattgattccaatgatgttc

SEQ ID NO: 128360 - DNA, 82 bp, Homo sapiens
aaaaaggatacacatctttcatttgctcgatggttggtgctcgaataatgtcattgattccaatgatgttctcatgtctgaa

SEQ ID NO: 128361 - DNA, 83 bp, Homo sapiens
tctttcatttgctcgatggttggtgctcgaataatgtcattgattccaatgatgttctcatgtctgaagcgcagtaagatttt

SEQ ID NO: 128362 - DNA, 83 bp, Homo sapiens
atttgctcgatggttggtgctcgaataatgtcattgattccaatgatgttctcatgtctgaagcgcagtaagatttttatctc

SEQ ID NO: 128363 - DNA, 81 bp, Homo sapiens
ttggtgctcgaataatgtcattgattccaatgatgttctcatgtctgaagcgcagtaagatttttatctccctcagggttc

SEQ ID NO: 128364 - DNA, 81 bp, Homo sapiens
aataatgtcattgattccaatgatgttctcatgtctgaagcgcagtaagatttttatctccctcagggttctctggcagta

SEQ ID NO: 128365 - DNA, 79 bp, Homo sapiens
attgattccaatgatgttctcatgtctgaagcgcagtaagatttttatctccctcagggttctctggcagtaggtctgg

SEQ ID NO: 128366 - DNA, 79 bp, Homo sapiens
aatgatgttctcatgtctgaagcgcagtaagatttttatctccctcagggttctctggcagtaggtctggtgctcaaag

SEQ ID NO: 128367 - DNA, 76 bp, Homo sapiens
atgtctgaagcgcagtaagatttttatctccctcagggttctctggcagtaggtctggtgctcaaaggggctgatt

SEQ ID NO: 128368 - DNA, 73 bp, Homo sapiens
aagcgcagtaagatttttatctccctcagggttctctggcagtaggtctggtgctcaaaggggctgattttct

SEQ ID NO: 128369 - DNA, 75 bp, Homo sapiens
tttttatctccctcagggttctctggcagtaggtctggtgctcaaaggggctgattttcttgatagctactcgaa

SEQ ID NO: 128370 - DNA, 77 bp, Homo sapiens
tcagggttctctggcagtaggtctggtgctcaaaggggctgattttcttgatagctactcgaactttgttgacatta

SEQ ID NO: 128371 - DNA, 78 bp, Homo sapiens
gttctctggcagtaggtctggtgctcaaaggggctgattttcttgatagctactcgaactttgttgacattatcataa

SEQ ID NO: 128372 - DNA, 77 bp, Homo sapiens
gtctggtgctcaaaggggctgattttcttgatagctactcgaactttgttgacattatcataagcagagcttaaaaa

SEQ ID NO: 128373 - DNA, 77 bp, Homo sapiens
gtgctcaaaggggctgattttcttgatagctactcgaactttgttgacattatcataagcagagcttaaaaaagaga

SEQ ID NO: 128374 - DNA, 67 bp, Homo sapiens
ccccgggcggtgggggggccgggcgtggccggtcgcggacactcaccacaccatgccgtaggcgccc

SEQ ID NO: 128375 - DNA, 73 bp, Homo sapiens
tgggggggccgggcgtggccggtcgcggacactcaccacaccatgccgtaggcgccctcgccgatgtacgaga

SEQ ID NO: 128376 - DNA, 74 bp, Homo sapiens
cgggcgtggccggtcgcggacactcaccacaccatgccgtaggcgccctcgccgatgtacgagaggttggtgta

SEQ ID NO: 128377 - DNA, 74 bp, Homo sapiens
ccggtcgcggacactcaccacaccatgccgtaggcgccctcgccgatgtacgagaggttggtgtagcgcggccc

SEQ ID NO: 128378 - DNA, 74 bp, Homo sapiens
actcaccacaccatgccgtaggcgccctcgccgatgtacgagaggttggtgtagcgcggccccacgtcgaacac

SEQ ID NO: 128379 - DNA, 73 bp, Homo sapiens
acaccatgccgtaggcgccctcgccgatgtacgagaggttggtgtagcgcggccccacgtcgaacacctgccc

SEQ ID NO: 128380 - DNA, 70 bp, Homo sapiens
gtacgagaggttggtgtagcgcggccccacgtcgaacacctgcccgcggaccatctccgggcccgcgccc

SEQ ID NO: 128381 - DNA, 71 bp, Homo sapiens
ttggtgtagcgcggccccacgtcgaacacctgcccgcggaccatctccgggcccgcgcccgccgccgccgc

SEQ ID NO: 128382 - DNA, 78 bp, Homo sapiens
cgccgccgccgccatgttggctgccgggccgccgccgcctccgccgcgctgagctcgacgctcggcggccgccgctca

SEQ ID NO: 128383 - DNA, 79 bp, Homo sapiens
ccgccatgttggctgccgggccgccgccgcctccgccgcgctgagctcgacgctcggcggccgccgctcagctcttgtc

SEQ ID NO: 128384 - DNA, 78 bp, Homo sapiens
ttggctgccgggccgccgccgcctccgccgcgctgagctcgacgctcggcggccgccgctcagctcttgtcgcccctc

SEQ ID NO: 128385 - DNA, 79 bp, Homo sapiens
gccgccgcctccgccgcgctgagctcgacgctcggcggccgccgctcagctcttgtcgcccctcccgcagggactgcgc

SEQ ID NO: 128386 - DNA, 78 bp, Homo sapiens
cctccgccgcgctgagctcgacgctcggcggccgccgctcagctcttgtcgcccctcccgcagggactgcgccgccgc

SEQ ID NO: 128387 - DNA, 79 bp, Homo sapiens
cgctgagctcgacgctcggcggccgccgctcagctcttgtcgcccctcccgcagggactgcgccgccgccggtgcagcc

SEQ ID NO: 128388 - DNA, 77 bp, Homo sapiens
ctcggcggccgccgctcagctcttgtcgcccctcccgcagggactgcgccgccgccggtgcagccgccgacgctgac

SEQ ID NO: 128389 - DNA, 76 bp, Homo sapiens
cgccgctcagctcttgtcgcccctcccgcagggactgcgccgccgccggtgcagccgccgacgctgaccgggagga

SEQ ID NO: 128390 - DNA, 75 bp, Homo sapiens
tcagctcttgtcgcccctcccgcagggactgcgccgccgccggtgcagccgccgacgctgaccgggaggaggaag

SEQ ID NO: 128391 - DNA, 72 bp, Homo sapiens
ccctcccgcagggactgcgccgccgccggtgcagccgccgacgctgaccgggaggaggaaggaagacgccga

SEQ ID NO: 128392 - DNA, 75 bp, Homo sapiens
ggactgcgccgccgccggtgcagccgccgacgctgaccgggaggaggaaggaagacgccgagcgggagagctgaa

SEQ ID NO: 128393 - DNA, 75 bp, Homo sapiens
cgccgccggtgcagccgccgacgctgaccgggaggaggaaggaagacgccgagcgggagagctgaagagccgaca

SEQ ID NO: 128394 - DNA, 77 bp, Homo sapiens
gtgcagccgccgacgctgaccgggaggaggaaggaagacgccgagcgggagagctgaagagccgacagccactcgga

SEQ ID NO: 128395 - DNA, 74 bp, Homo sapiens
acgctgaccgggaggaggaaggaagacgccgagcgggagagctgaagagccgacagccactcggaccgattgcc

SEQ ID NO: 128396 - DNA, 75 bp, Homo sapiens
accgggaggaggaaggaagacgccgagcgggagagctgaagagccgacagccactcggaccgattgcctgcctgc

SEQ ID NO: 128397 - DNA, 78 bp, Homo sapiens
aaggaagacgccgagcgggagagctgaagagccgacagccactcggaccgattgcctgcctgcctgccagactgacgg

SEQ ID NO: 128398 - DNA, 77 bp, Homo sapiens
agcgggagagctgaagagccgacagccactcggaccgattgcctgcctgcctgccagactgacgggcgggccggcgg

SEQ ID NO: 128399 - DNA, 77 bp, Homo sapiens
agagctgaagagccgacagccactcggaccgattgcctgcctgcctgccagactgacgggcgggccggcgggcgggc

SEQ ID NO: 128400 - DNA, 74 bp, Homo sapiens
agccgacagccactcggaccgattgcctgcctgcctgccagactgacgggcgggccggcgggcgggcggaggga

SEQ ID NO: 128401 - DNA, 70 bp, Homo sapiens
tgcctgccagactgacgggcgggccggcgggcgggcggagggaggggcgcgcgccgaggagggtgccggg

SEQ ID NO: 128402 - DNA, 66 bp, Homo sapiens
agactgacgggcgggccggcgggcgggcggagggaggggcgcgcgccgaggagggtgccggggcgg

SEQ ID NO: 128403 - DNA, 70 bp, Homo sapiens
taaccttttgatgcttgaatatttttaagttttatacatagtttctaatttttttcccagcagatccaga

SEQ ID NO: 128404 - DNA, 72 bp, Homo sapiens
tgatgcttgaatatttttaagttttatacatagtttctaatttttttcccagcagatccagatacctaataa

SEQ ID NO: 128405 - DNA, 71 bp, Homo sapiens
tttttaagttttatacatagtttctaatttttttcccagcagatccagatacctaataagatgctggaatg

SEQ ID NO: 128406 - DNA, 75 bp, Homo sapiens
ttatacatagtttctaatttttttcccagcagatccagatacctaataagatgctggaatgtaatccctggacaa

SEQ ID NO: 128407 - DNA, 74 bp, Homo sapiens
tttctaatttttttcccagcagatccagatacctaataagatgctggaatgtaatccctggacaatccgtgtcc

SEQ ID NO: 128408 - DNA, 78 bp, Homo sapiens
tttttcccagcagatccagatacctaataagatgctggaatgtaatccctggacaatccgtgtcctggcagcatttgg

SEQ ID NO: 128409 - DNA, 78 bp, Homo sapiens
agatccagatacctaataagatgctggaatgtaatccctggacaatccgtgtcctggcagcatttggtcttcctctaa

SEQ ID NO: 128410 - DNA, 77 bp, Homo sapiens
atacctaataagatgctggaatgtaatccctggacaatccgtgtcctggcagcatttggtcttcctctaagcgcctg

SEQ ID NO: 128411 - DNA, 79 bp, Homo sapiens
taagatgctggaatgtaatccctggacaatccgtgtcctggcagcatttggtcttcctctaagcgcctggctccgctgt

SEQ ID NO: 128412 - DNA, 78 bp, Homo sapiens
ggaatgtaatccctggacaatccgtgtcctggcagcatttggtcttcctctaagcgcctggctccgctgttctcagga

SEQ ID NO: 128413 - DNA, 78 bp, Homo sapiens
ctggacaatccgtgtcctggcagcatttggtcttcctctaagcgcctggctccgctgttctcaggagtgggttctgaa

SEQ ID NO: 128414 - DNA, 80 bp, Homo sapiens
tgtcctggcagcatttggtcttcctctaagcgcctggctccgctgttctcaggagtgggttctgaagtctctggagaaca

SEQ ID NO: 128415 - DNA, 77 bp, Homo sapiens
agcatttggtcttcctctaagcgcctggctccgctgttctcaggagtgggttctgaagtctctggagaacaggatac

SEQ ID NO: 128416 - DNA, 76 bp, Homo sapiens
tcctctaagcgcctggctccgctgttctcaggagtgggttctgaagtctctggagaacaggatacgtggagggtta

SEQ ID NO: 128417 - DNA, 75 bp, Homo sapiens
taagcgcctggctccgctgttctcaggagtgggttctgaagtctctggagaacaggatacgtggagggttaggaa

SEQ ID NO: 128418 - DNA, 72 bp, Homo sapiens
ctccgctgttctcaggagtgggttctgaagtctctggagaacaggatacgtggagggttaggaaggggccag

SEQ ID NO: 128419 - DNA, 70 bp, Homo sapiens
aggagtgggttctgaagtctctggagaacaggatacgtggagggttaggaaggggccaggcctagagacg

SEQ ID NO: 128420 - DNA, 71 bp, Homo sapiens
ttctgaagtctctggagaacaggatacgtggagggttaggaaggggccaggcctagagacgggagactccc

SEQ ID NO: 128421 - DNA, 70 bp, Homo sapiens
tctctggagaacaggatacgtggagggttaggaaggggccaggcctagagacgggagactccctcccgga

SEQ ID NO: 128422 - DNA, 68 bp, Homo sapiens
aacaggatacgtggagggttaggaaggggccaggcctagagacgggagactccctcccggagcaggtg

SEQ ID NO: 128423 - DNA, 69 bp, Homo sapiens
agggttaggaaggggccaggcctagagacgggagactccctcccggagcaggtggaggcacaggaccat

SEQ ID NO: 128424 - DNA, 71 bp, Homo sapiens
aggaaggggccaggcctagagacgggagactccctcccggagcaggtggaggcacaggaccattcgctacc

SEQ ID NO: 128425 - DNA, 75 bp, Homo sapiens
aggcctagagacgggagactccctcccggagcaggtggaggcacaggaccattcgctaccccatctgccgacagc

SEQ ID NO: 128426 - DNA, 74 bp, Homo sapiens
acgggagactccctcccggagcaggtggaggcacaggaccattcgctaccccatctgccgacagctgcggggga

SEQ ID NO: 128427 - DNA, 77 bp, Homo sapiens
tcccggagcaggtggaggcacaggaccattcgctaccccatctgccgacagctgcgggggagcccaggcattctttg

SEQ ID NO: 128428 - DNA, 76 bp, Homo sapiens
gtggaggcacaggaccattcgctaccccatctgccgacagctgcgggggagcccaggcattctttgtaagccctcc

SEQ ID NO: 128429 - DNA, 75 bp, Homo sapiens
acaggaccattcgctaccccatctgccgacagctgcgggggagcccaggcattctttgtaagccctcctgactac

SEQ ID NO: 128430 - DNA, 75 bp, Homo sapiens
atctgccgacagctgcgggggagcccaggcattctttgtaagccctcctgactacctgactcaaagaaaacagaa

SEQ ID NO: 128431 - DNA, 75 bp, Homo sapiens
acagctgcgggggagcccaggcattctttgtaagccctcctgactacctgactcaaagaaaacagaagcatggag

SEQ ID NO: 128432 - DNA, 74 bp, Homo sapiens
gcccaggcattctttgtaagccctcctgactacctgactcaaagaaaacagaagcatggaggccgccaagtatt

SEQ ID NO: 128433 - DNA, 73 bp, Homo sapiens
attctttgtaagccctcctgactacctgactcaaagaaaacagaagcatggaggccgccaagtattttcaaga

SEQ ID NO: 128434 - DNA, 72 bp, Homo sapiens
gtaagccctcctgactacctgactcaaagaaaacagaagcatggaggccgccaagtattttcaagaaataac

SEQ ID NO: 128435 - DNA, 72 bp, Homo sapiens
actacctgactcaaagaaaacagaagcatggaggccgccaagtattttcaagaaataaccccatgaatattc

SEQ ID NO: 128436 - DNA, 70 bp, Homo sapiens
aaagaaaacagaagcatggaggccgccaagtattttcaagaaataaccccatgaatattccatcactttt

SEQ ID NO: 128437 - DNA, 71 bp, Homo sapiens
agaagcatggaggccgccaagtattttcaagaaataaccccatgaatattccatcacttttttagaaagag

SEQ ID NO: 128438 - DNA, 68 bp, Homo sapiens
aggccgccaagtattttcaagaaataaccccatgaatattccatcacttttttagaaagaggggcttg

SEQ ID NO: 128439 - DNA, 69 bp, Homo sapiens
aagtattttcaagaaataaccccatgaatattccatcacttttttagaaagaggggcttggggcaggca

SEQ ID NO: 128440 - DNA, 70 bp, Homo sapiens
aagaaataaccccatgaatattccatcacttttttagaaagaggggcttggggcaggcagaggagagaag

SEQ ID NO: 128441 - DNA, 75 bp, Homo sapiens
atgaatattccatcacttttttagaaagaggggcttggggcaggcagaggagagaagggagagcaaactgagagc

SEQ ID NO: 128442 - DNA, 74 bp, Homo sapiens
tattccatcacttttttagaaagaggggcttggggcaggcagaggagagaagggagagcaaactgagagccaag

SEQ ID NO: 128443 - DNA, 73 bp, Homo sapiens
tttttagaaagaggggcttggggcaggcagaggagagaagggagagcaaactgagagccaagtttccagacag

SEQ ID NO: 128444 - DNA, 78 bp, Homo sapiens
gggcttggggcaggcagaggagagaagggagagcaaactgagagccaagtttccagacagtcctgcaggaggagagga

SEQ ID NO: 128445 - DNA, 81 bp, Homo sapiens
gggcaggcagaggagagaagggagagcaaactgagagccaagtttccagacagtcctgcaggaggagaggatgcagctccc

SEQ ID NO: 128446 - DNA, 80 bp, Homo sapiens
agagaagggagagcaaactgagagccaagtttccagacagtcctgcaggaggagaggatgcagctccccagagggaagca

SEQ ID NO: 128447 - DNA, 82 bp, Homo sapiens
gagcaaactgagagccaagtttccagacagtcctgcaggaggagaggatgcagctccccagagggaagcaggatcacattta

SEQ ID NO: 128448 - DNA, 79 bp, Homo sapiens
aactgagagccaagtttccagacagtcctgcaggaggagaggatgcagctccccagagggaagcaggatcacatttaag

SEQ ID NO: 128449 - DNA, 78 bp, Homo sapiens
aagtttccagacagtcctgcaggaggagaggatgcagctccccagagggaagcaggatcacatttaaggaagtgtgtg

SEQ ID NO: 128450 - DNA, 77 bp, Homo sapiens
acagtcctgcaggaggagaggatgcagctccccagagggaagcaggatcacatttaaggaagtgtgtggggtccctg

SEQ ID NO: 128451 - DNA, 77 bp, Homo sapiens
aggaggagaggatgcagctccccagagggaagcaggatcacatttaaggaagtgtgtggggtccctggatgacacca

SEQ ID NO: 128452 - DNA, 78 bp, Homo sapiens
atgcagctccccagagggaagcaggatcacatttaaggaagtgtgtggggtccctggatgacaccagcacccagtgcg

SEQ ID NO: 128453 - DNA, 79 bp, Homo sapiens
gagggaagcaggatcacatttaaggaagtgtgtggggtccctggatgacaccagcacccagtgcggctctgtctggcaa

SEQ ID NO: 128454 - DNA, 78 bp, Homo sapiens
aagcaggatcacatttaaggaagtgtgtggggtccctggatgacaccagcacccagtgcggctctgtctggcaaccgc

SEQ ID NO: 128455 - DNA, 75 bp, Homo sapiens
acatttaaggaagtgtgtggggtccctggatgacaccagcacccagtgcggctctgtctggcaaccgctcccaag

SEQ ID NO: 128456 - DNA, 77 bp, Homo sapiens
aagtgtgtggggtccctggatgacaccagcacccagtgcggctctgtctggcaaccgctcccaaggtggcaggagtg

SEQ ID NO: 128457 - DNA, 80 bp, Homo sapiens
ctggatgacaccagcacccagtgcggctctgtctggcaaccgctcccaaggtggcaggagtgggtgtcccctgtgtgtca

SEQ ID NO: 128458 - DNA, 77 bp, Homo sapiens
acaccagcacccagtgcggctctgtctggcaaccgctcccaaggtggcaggagtgggtgtcccctgtgtgtcagtgg

SEQ ID NO: 128459 - DNA, 80 bp, Homo sapiens
agtgcggctctgtctggcaaccgctcccaaggtggcaggagtgggtgtcccctgtgtgtcagtgggcagctcctgctgaa

SEQ ID NO: 128460 - DNA, 81 bp, Homo sapiens
tgtctggcaaccgctcccaaggtggcaggagtgggtgtcccctgtgtgtcagtgggcagctcctgctgaacccgcagctca

SEQ ID NO: 128461 - DNA, 77 bp, Homo sapiens
aaccgctcccaaggtggcaggagtgggtgtcccctgtgtgtcagtgggcagctcctgctgaacccgcagctcactgg

SEQ ID NO: 128462 - DNA, 80 bp, Homo sapiens
aggtggcaggagtgggtgtcccctgtgtgtcagtgggcagctcctgctgaacccgcagctcactggggagcctgacagtg

SEQ ID NO: 128463 - DNA, 79 bp, Homo sapiens
aggagtgggtgtcccctgtgtgtcagtgggcagctcctgctgaacccgcagctcactggggagcctgacagtggggcca

SEQ ID NO: 128464 - DNA, 84 bp, Homo sapiens
cctgtgtgtcagtgggcagctcctgctgaacccgcagctcactggggagcctgacagtggggccatgcgcctgacactcctctc

SEQ ID NO: 128465 - DNA, 84 bp, Homo sapiens
agtgggcagctcctgctgaacccgcagctcactggggagcctgacagtggggccatgcgcctgacactcctctctgcttgtgga

SEQ ID NO: 128466 - DNA, 83 bp, Homo sapiens
ctcctgctgaacccgcagctcactggggagcctgacagtggggccatgcgcctgacactcctctctgcttgtggacctggcaa

SEQ ID NO: 128467 - DNA, 80 bp, Homo sapiens
aacccgcagctcactggggagcctgacagtggggccatgcgcctgacactcctctctgcttgtggacctggcaaggcagg

SEQ ID NO: 128468 - DNA, 80 bp, Homo sapiens
actggggagcctgacagtggggccatgcgcctgacactcctctctgcttgtggacctggcaaggcagggagcagaaaaca

SEQ ID NO: 128469 - DNA, 81 bp, Homo sapiens
tgacagtggggccatgcgcctgacactcctctctgcttgtggacctggcaaggcagggagcagaaaacagagccccttgaa

SEQ ID NO: 128470 - DNA, 80 bp, Homo sapiens
gccatgcgcctgacactcctctctgcttgtggacctggcaaggcagggagcagaaaacagagccccttgaaggcttcctg

SEQ ID NO: 128471 - DNA, 80 bp, Homo sapiens
tgacactcctctctgcttgtggacctggcaaggcagggagcagaaaacagagccccttgaaggcttcctgtctgcgtctg

SEQ ID NO: 128472 - DNA, 82 bp, Homo sapiens
tctctgcttgtggacctggcaaggcagggagcagaaaacagagccccttgaaggcttcctgtctgcgtctgtgtgcagtgtg

SEQ ID NO: 128473 - DNA, 80 bp, Homo sapiens
tgtggacctggcaaggcagggagcagaaaacagagccccttgaaggcttcctgtctgcgtctgtgtgcagtgtggattta

SEQ ID NO: 128474 - DNA, 80 bp, Homo sapiens
tggcaaggcagggagcagaaaacagagccccttgaaggcttcctgtctgcgtctgtgtgcagtgtggatttagttgtgct

SEQ ID NO: 128475 - DNA, 77 bp, Homo sapiens
agcagaaaacagagccccttgaaggcttcctgtctgcgtctgtgtgcagtgtggatttagttgtgctttttacttgc

SEQ ID NO: 128476 - DNA, 77 bp, Homo sapiens
aacagagccccttgaaggcttcctgtctgcgtctgtgtgcagtgtggatttagttgtgctttttacttgctgggaga

SEQ ID NO: 128477 - DNA, 79 bp, Homo sapiens
aaggcttcctgtctgcgtctgtgtgcagtgtggatttagttgtgctttttacttgctgggagagcacagccaccattta

SEQ ID NO: 128478 - DNA, 83 bp, Homo sapiens
ctgtctgcgtctgtgtgcagtgtggatttagttgtgctttttacttgctgggagagcacagccaccatttacaagcagtgtca

SEQ ID NO: 128479 - DNA, 79 bp, Homo sapiens
tgtgcagtgtggatttagttgtgctttttacttgctgggagagcacagccaccatttacaagcagtgtcaccctcgtgg

SEQ ID NO: 128480 - DNA, 75 bp, Homo sapiens
agtgtggatttagttgtgctttttacttgctgggagagcacagccaccatttacaagcagtgtcaccctcgtggg

SEQ ID NO: 128481 - DNA, 78 bp, Homo sapiens
ttgtgctttttacttgctgggagagcacagccaccatttacaagcagtgtcaccctcgtgggtggcgaggacagaaca

SEQ ID NO: 128482 - DNA, 77 bp, Homo sapiens
ttttacttgctgggagagcacagccaccatttacaagcagtgtcaccctcgtgggtggcgaggacagaacaggagcc

SEQ ID NO: 128483 - DNA, 80 bp, Homo sapiens
agagcacagccaccatttacaagcagtgtcaccctcgtgggtggcgaggacagaacaggagcctctgctctctgtaccta

SEQ ID NO: 128484 - DNA, 78 bp, Homo sapiens
agccaccatttacaagcagtgtcaccctcgtgggtggcgaggacagaacaggagcctctgctctctgtacctatctgg

SEQ ID NO: 128485 - DNA, 77 bp, Homo sapiens
ttacaagcagtgtcaccctcgtgggtggcgaggacagaacaggagcctctgctctctgtacctatctgggcccggtg

SEQ ID NO: 128486 - DNA, 75 bp, Homo sapiens
tgtcaccctcgtgggtggcgaggacagaacaggagcctctgctctctgtacctatctgggcccggtgggctccct

SEQ ID NO: 128487 - DNA, 78 bp, Homo sapiens
tggcgaggacagaacaggagcctctgctctctgtacctatctgggcccggtgggctcccttgtcctggcttccatctc

SEQ ID NO: 128488 - DNA, 77 bp, Homo sapiens
aggacagaacaggagcctctgctctctgtacctatctgggcccggtgggctcccttgtcctggcttccatctctgtc

SEQ ID NO: 128489 - DNA, 80 bp, Homo sapiens
agcctctgctctctgtacctatctgggcccggtgggctcccttgtcctggcttccatctctgtctcagcgaccattcagc

SEQ ID NO: 128490 - DNA, 80 bp, Homo sapiens
tctgtacctatctgggcccggtgggctcccttgtcctggcttccatctctgtctcagcgaccattcagccctgcgcagga

SEQ ID NO: 128491 - DNA, 80 bp, Homo sapiens
tatctgggcccggtgggctcccttgtcctggcttccatctctgtctcagcgaccattcagccctgcgcaggaacacatgt

SEQ ID NO: 128492 - DNA, 80 bp, Homo sapiens
ggtgggctcccttgtcctggcttccatctctgtctcagcgaccattcagccctgcgcaggaacacatgttgcttagaaaa

SEQ ID NO: 128493 - DNA, 81 bp, Homo sapiens
tcccttgtcctggcttccatctctgtctcagcgaccattcagccctgcgcaggaacacatgttgcttagaaaagccaaatc

SEQ ID NO: 128494 - DNA, 83 bp, Homo sapiens
tggcttccatctctgtctcagcgaccattcagccctgcgcaggaacacatgttgcttagaaaagccaaatccagccttgtctc

SEQ ID NO: 128495 - DNA, 82 bp, Homo sapiens
ctctgtctcagcgaccattcagccctgcgcaggaacacatgttgcttagaaaagccaaatccagccttgtctctgcctcctc

SEQ ID NO: 128496 - DNA, 82 bp, Homo sapiens
accattcagccctgcgcaggaacacatgttgcttagaaaagccaaatccagccttgtctctgcctcctctggtctcatgatg

SEQ ID NO: 128497 - DNA, 84 bp, Homo sapiens
tgcgcaggaacacatgttgcttagaaaagccaaatccagccttgtctctgcctcctctggtctcatgatgtgcatctgttacct

SEQ ID NO: 128498 - DNA, 81 bp, Homo sapiens
aacacatgttgcttagaaaagccaaatccagccttgtctctgcctcctctggtctcatgatgtgcatctgttaccttgaaa

SEQ ID NO: 128499 - DNA, 80 bp, Homo sapiens
ttgcttagaaaagccaaatccagccttgtctctgcctcctctggtctcatgatgtgcatctgttaccttgaaactggaaa

SEQ ID NO: 128500 - DNA, 82 bp, Homo sapiens
caaatccagccttgtctctgcctcctctggtctcatgatgtgcatctgttaccttgaaactggaaaccagtctatcaatgtc

SEQ ID NO: 128501 - DNA, 82 bp, Homo sapiens
cttgtctctgcctcctctggtctcatgatgtgcatctgttaccttgaaactggaaaccagtctatcaatgtctgtgccaatt

SEQ ID NO: 128502 - DNA, 80 bp, Homo sapiens
ctctgcctcctctggtctcatgatgtgcatctgttaccttgaaactggaaaccagtctatcaatgtctgtgccaattttt

SEQ ID NO: 128503 - DNA, 79 bp, Homo sapiens
tctggtctcatgatgtgcatctgttaccttgaaactggaaaccagtctatcaatgtctgtgccaattttttattccctc

SEQ ID NO: 128504 - DNA, 73 bp, Homo sapiens
atgtgcatctgttaccttgaaactggaaaccagtctatcaatgtctgtgccaattttttattccctccccaac

SEQ ID NO: 128505 - DNA, 69 bp, Homo sapiens
tgttaccttgaaactggaaaccagtctatcaatgtctgtgccaattttttattccctccccaacctcct

SEQ ID NO: 128506 - DNA, 68 bp, Homo sapiens
aaactggaaaccagtctatcaatgtctgtgccaattttttattccctccccaacctccttccccatac

SEQ ID NO: 128507 - DNA, 69 bp, Homo sapiens
tctatcaatgtctgtgccaattttttattccctccccaacctccttccccatacgactttttatttatg

SEQ ID NO: 128508 - DNA, 66 bp, Homo sapiens
aatgtctgtgccaattttttattccctccccaacctccttccccatacgactttttatttatgtag

SEQ ID NO: 128509 - DNA, 74 bp, Homo sapiens
tattccctccccaacctccttccccatacgactttttatttatgtaggatgtgtgctgtctaatgatgggatga

SEQ ID NO: 128510 - DNA, 76 bp, Homo sapiens
atacgactttttatttatgtaggatgtgtgctgtctaatgatgggatgaccacacttttccatgttctaaaagtgc

SEQ ID NO: 128511 - DNA, 76 bp, Homo sapiens
actttttatttatgtaggatgtgtgctgtctaatgatgggatgaccacacttttccatgttctaaaagtgctcctc

SEQ ID NO: 128512 - DNA, 79 bp, Homo sapiens
tatgtaggatgtgtgctgtctaatgatgggatgaccacacttttccatgttctaaaagtgctcctctcccgcagggtcc

SEQ ID NO: 128513 - DNA, 72 bp, Homo sapiens
atgggatgaccacacttttccatgttctaaaagtgctcctctcccgcagggtcccagggctggtggttgctt

SEQ ID NO: 128514 - DNA, 72 bp, Homo sapiens
cacacttttccatgttctaaaagtgctcctctcccgcagggtcccagggctggtggttgctttgggtctaca

SEQ ID NO: 128515 - DNA, 73 bp, Homo sapiens
catgttctaaaagtgctcctctcccgcagggtcccagggctggtggttgctttgggtctacagctacgtctta

SEQ ID NO: 128516 - DNA, 72 bp, Homo sapiens
ctctcccgcagggtcccagggctggtggttgctttgggtctacagctacgtcttacccgcctcctgcctcaa

SEQ ID NO: 128517 - DNA, 74 bp, Homo sapiens
gtcccagggctggtggttgctttgggtctacagctacgtcttacccgcctcctgcctcaacagcctgtgtggtg

SEQ ID NO: 128518 - DNA, 74 bp, Homo sapiens
agggctggtggttgctttgggtctacagctacgtcttacccgcctcctgcctcaacagcctgtgtggtggcaaa

SEQ ID NO: 128519 - DNA, 74 bp, Homo sapiens
ttgctttgggtctacagctacgtcttacccgcctcctgcctcaacagcctgtgtggtggcaaagccggtgtggg

SEQ ID NO: 128520 - DNA, 74 bp, Homo sapiens
gtctacagctacgtcttacccgcctcctgcctcaacagcctgtgtggtggcaaagccggtgtggggctggggaa

SEQ ID NO: 128521 - DNA, 75 bp, Homo sapiens
tcttacccgcctcctgcctcaacagcctgtgtggtggcaaagccggtgtggggctggggaacgcagcgttctcca

SEQ ID NO: 128522 - DNA, 74 bp, Homo sapiens
cgcctcctgcctcaacagcctgtgtggtggcaaagccggtgtggggctggggaacgcagcgttctccaggaggg

SEQ ID NO: 128523 - DNA, 71 bp, Homo sapiens
ctcaacagcctgtgtggtggcaaagccggtgtggggctggggaacgcagcgttctccaggagggggacccg

SEQ ID NO: 128524 - DNA, 73 bp, Homo sapiens
tgtggtggcaaagccggtgtggggctggggaacgcagcgttctccaggagggggacccggctctccttctgca

SEQ ID NO: 128525 - DNA, 73 bp, Homo sapiens
aaagccggtgtggggctggggaacgcagcgttctccaggagggggacccggctctccttctgcagtgcaggca

SEQ ID NO: 128526 - DNA, 77 bp, Homo sapiens
gctggggaacgcagcgttctccaggagggggacccggctctccttctgcagtgcaggcaaaggcctagatgccagtg

SEQ ID NO: 128527 - DNA, 77 bp, Homo sapiens
aacgcagcgttctccaggagggggacccggctctccttctgcagtgcaggcaaaggcctagatgccagtgtgacctc

SEQ ID NO: 128528 - DNA, 76 bp, Homo sapiens
gttctccaggagggggacccggctctccttctgcagtgcaggcaaaggcctagatgccagtgtgacctcccacaag

SEQ ID NO: 128529 - DNA, 79 bp, Homo sapiens
ggacccggctctccttctgcagtgcaggcaaaggcctagatgccagtgtgacctcccacaaggcgtggcttccagactc

SEQ ID NO: 128530 - DNA, 78 bp, Homo sapiens
tccttctgcagtgcaggcaaaggcctagatgccagtgtgacctcccacaaggcgtggcttccagactccccggccgga

SEQ ID NO: 128531 - DNA, 76 bp, Homo sapiens
agtgcaggcaaaggcctagatgccagtgtgacctcccacaaggcgtggcttccagactccccggccggaagtgatc

SEQ ID NO: 128532 - DNA, 71 bp, Homo sapiens
aaaggcctagatgccagtgtgacctcccacaaggcgtggcttccagactccccggccggaagtgatccttt

SEQ ID NO: 128533 - DNA, 73 bp, Homo sapiens
tagatgccagtgtgacctcccacaaggcgtggcttccagactccccggccggaagtgatccttttttgccgcg

SEQ ID NO: 128534 - DNA, 68 bp, Homo sapiens
cctcccacaaggcgtggcttccagactccccggccggaagtgatccttttttgccgcgggccctgagt

SEQ ID NO: 128535 - DNA, 70 bp, Homo sapiens
aaggcgtggcttccagactccccggccggaagtgatccttttttgccgcgggccctgagtttgaagcagc

SEQ ID NO: 128536 - DNA, 70 bp, Homo sapiens
cttccagactccccggccggaagtgatccttttttgccgcgggccctgagtttgaagcagcctggctttc

SEQ ID NO: 128537 - DNA, 70 bp, Homo sapiens
ccggccggaagtgatccttttttgccgcgggccctgagtttgaagcagcctggctttctcttggtaagtg

SEQ ID NO: 128538 - DNA, 73 bp, Homo sapiens
agtgatccttttttgccgcgggccctgagtttgaagcagcctggctttctcttggtaagtggctggtgtctta

SEQ ID NO: 128539 - DNA, 79 bp, Homo sapiens
tttttgccgcgggccctgagtttgaagcagcctggctttctcttggtaagtggctggtgtcttagcagctgcaatctga

SEQ ID NO: 128540 - DNA, 83 bp, Homo sapiens
ccctgagtttgaagcagcctggctttctcttggtaagtggctggtgtcttagcagctgcaatctgagctcagccacctacaca

SEQ ID NO: 128541 - DNA, 82 bp, Homo sapiens
agtttgaagcagcctggctttctcttggtaagtggctggtgtcttagcagctgcaatctgagctcagccacctacacaccac

SEQ ID NO: 128542 - DNA, 81 bp, Homo sapiens
tggctttctcttggtaagtggctggtgtcttagcagctgcaatctgagctcagccacctacacaccaccgtggccgacact

SEQ ID NO: 128543 - DNA, 80 bp, Homo sapiens
ttggtaagtggctggtgtcttagcagctgcaatctgagctcagccacctacacaccaccgtggccgacactttcattaaa

SEQ ID NO: 128544 - DNA, 78 bp, Homo sapiens
agtggctggtgtcttagcagctgcaatctgagctcagccacctacacaccaccgtggccgacactttcattaaaaagt

SEQ ID NO: 128545 - DNA, 79 bp, Homo sapiens
tcttagcagctgcaatctgagctcagccacctacacaccaccgtggccgacactttcattaaaaagtttcctgagacga

SEQ ID NO: 128546 - DNA, 76 bp, Homo sapiens
aatctgagctcagccacctacacaccaccgtggccgacactttcattaaaaagtttcctgagacgacttgcgtgca

SEQ ID NO: 128547 - DNA, 73 bp, Homo sapiens
agccacctacacaccaccgtggccgacactttcattaaaaagtttcctgagacgacttgcgtgcatgttgact

SEQ ID NO: 128548 - DNA, 77 bp, Homo sapiens
cctacacaccaccgtggccgacactttcattaaaaagtttcctgagacgacttgcgtgcatgttgacttcatgatca

SEQ ID NO: 128549 - DNA, 67 bp, Homo sapiens
agtccaattcgctgttgttagggcctcagtttcccaaaaggcacagggacggggggagggtggcggc

SEQ ID NO: 128550 - DNA, 67 bp, Homo sapiens
cgctgttgttagggcctcagtttcccaaaaggcacagggacggggggagggtggcggctcgatgggg

SEQ ID NO: 128551 - DNA, 67 bp, Homo sapiens
ctcagtttcccaaaaggcacagggacggggggagggtggcggctcgatgggggagccgcctccaggg

SEQ ID NO: 128552 - DNA, 66 bp, Homo sapiens
tttcccaaaaggcacagggacggggggagggtggcggctcgatgggggagccgcctccagggggcc

SEQ ID NO: 128553 - DNA, 64 bp, Homo sapiens
acagggacggggggagggtggcggctcgatgggggagccgcctccagggggcccccccgccctg

SEQ ID NO: 128554 - DNA, 68 bp, Homo sapiens
ggagggtggcggctcgatgggggagccgcctccagggggcccccccgccctgtgcccacggcgcggcc

SEQ ID NO: 128555 - DNA, 66 bp, Homo sapiens
cggctcgatgggggagccgcctccagggggcccccccgccctgtgcccacggcgcggcccctttaa

SEQ ID NO: 128556 - DNA, 65 bp, Homo sapiens
gggagccgcctccagggggcccccccgccctgtgcccacggcgcggcccctttaagaggcccgcc

SEQ ID NO: 128557 - DNA, 68 bp, Homo sapiens
tccagggggcccccccgccctgtgcccacggcgcggcccctttaagaggcccgcctggctccgtcatc

SEQ ID NO: 128558 - DNA, 69 bp, Homo sapiens
ccccccgccctgtgcccacggcgcggcccctttaagaggcccgcctggctccgtcatccgcgccgcggc

SEQ ID NO: 128559 - DNA, 70 bp, Homo sapiens
ccctgtgcccacggcgcggcccctttaagaggcccgcctggctccgtcatccgcgccgcggccacctccc

SEQ ID NO: 128560 - DNA, 68 bp, Homo sapiens
ccacggcgcggcccctttaagaggcccgcctggctccgtcatccgcgccgcggccacctccccccggc

SEQ ID NO: 128561 - DNA, 66 bp, Homo sapiens
ccctttaagaggcccgcctggctccgtcatccgcgccgcggccacctccccccggccctccccttc

SEQ ID NO: 128562 - DNA, 70 bp, Homo sapiens
aggcccgcctggctccgtcatccgcgccgcggccacctccccccggccctccccttcctgcggcgcagag

SEQ ID NO: 128563 - DNA, 71 bp, Homo sapiens
tggctccgtcatccgcgccgcggccacctccccccggccctccccttcctgcggcgcagagtgcgggccgg

SEQ ID NO: 128564 - DNA, 68 bp, Homo sapiens
atccgcgccgcggccacctccccccggccctccccttcctgcggcgcagagtgcgggccgggcgggag

SEQ ID NO: 128565 - DNA, 69 bp, Homo sapiens
acctccccccggccctccccttcctgcggcgcagagtgcgggccgggcgggagtgcggcgagagccggc

SEQ ID NO: 128566 - DNA, 76 bp, Homo sapiens
ggccctccccttcctgcggcgcagagtgcgggccgggcgggagtgcggcgagagccggctggctgagcttagcgtc

SEQ ID NO: 128567 - DNA, 76 bp, Homo sapiens
cccttcctgcggcgcagagtgcgggccgggcgggagtgcggcgagagccggctggctgagcttagcgtccgaggag

SEQ ID NO: 128568 - DNA, 76 bp, Homo sapiens
cggcgcagagtgcgggccgggcgggagtgcggcgagagccggctggctgagcttagcgtccgaggaggcggcggcg

SEQ ID NO: 128569 - DNA, 72 bp, Homo sapiens
cggcggcggcggcacggcggcggcggggctgtggggcggtgcggaagcgagaggcgaggagcgcgcgggccg

SEQ ID NO: 128570 - DNA, 75 bp, Homo sapiens
ggcacggcggcggcggggctgtggggcggtgcggaagcgagaggcgaggagcgcgcgggccgtggccagagtctg

SEQ ID NO: 128571 - DNA, 74 bp, Homo sapiens
cggcggggctgtggggcggtgcggaagcgagaggcgaggagcgcgcgggccgtggccagagtctggcggcggcc

SEQ ID NO: 128572 - DNA, 77 bp, Homo sapiens
tgtggggcggtgcggaagcgagaggcgaggagcgcgcgggccgtggccagagtctggcggcggcctggcggagcgga

SEQ ID NO: 128573 - DNA, 79 bp, Homo sapiens
cggtgcggaagcgagaggcgaggagcgcgcgggccgtggccagagtctggcggcggcctggcggagcggagagcagcgc

SEQ ID NO: 128574 - DNA, 79 bp, Homo sapiens
agcgagaggcgaggagcgcgcgggccgtggccagagtctggcggcggcctggcggagcggagagcagcgcccgcgcctc

SEQ ID NO: 128575 - DNA, 76 bp, Homo sapiens
cgggccgtggccagagtctggcggcggcctggcggagcggagagcagcgcccgcgcctcgccgtgcggaggagccc

SEQ ID NO: 128576 - DNA, 78 bp, Homo sapiens
agagtctggcggcggcctggcggagcggagagcagcgcccgcgcctcgccgtgcggaggagccccgcacacaatagcg

SEQ ID NO: 128577 - DNA, 79 bp, Homo sapiens
cggcctggcggagcggagagcagcgcccgcgcctcgccgtgcggaggagccccgcacacaatagcggcgcgcgcagccc

SEQ ID NO: 128578 - DNA, 78 bp, Homo sapiens
agcggagagcagcgcccgcgcctcgccgtgcggaggagccccgcacacaatagcggcgcgcgcagcccgcgcccttcc

SEQ ID NO: 128579 - DNA, 73 bp, Homo sapiens
cgcctcgccgtgcggaggagccccgcacacaatagcggcgcgcgcagcccgcgcccttccccccggcgcgccc

SEQ ID NO: 128580 - DNA, 71 bp, Homo sapiens
ccgtgcggaggagccccgcacacaatagcggcgcgcgcagcccgcgcccttccccccggcgcgccccgccc

SEQ ID NO: 128581 - DNA, 72 bp, Homo sapiens
cccgcacacaatagcggcgcgcgcagcccgcgcccttccccccggcgcgccccgccccgcgcgccgagcgcc

SEQ ID NO: 128582 - DNA, 71 bp, Homo sapiens
acaatagcggcgcgcgcagcccgcgcccttccccccggcgcgccccgccccgcgcgccgagcgccccgctc

SEQ ID NO: 128583 - DNA, 71 bp, Homo sapiens
cgcagcccgcgcccttccccccggcgcgccccgccccgcgcgccgagcgccccgctccgcctcacctgcca

SEQ ID NO: 128584 - DNA, 69 bp, Homo sapiens
cccgcgcccttccccccggcgcgccccgccccgcgcgccgagcgccccgctccgcctcacctgccacca

SEQ ID NO: 128585 - DNA, 72 bp, Homo sapiens
ccggcgcgccccgccccgcgcgccgagcgccccgctccgcctcacctgccaccagggagtgggcgggcattg

SEQ ID NO: 128586 - DNA, 73 bp, Homo sapiens
ccgccccgcgcgccgagcgccccgctccgcctcacctgccaccagggagtgggcgggcattgttcgccgccgc

SEQ ID NO: 128587 - DNA, 74 bp, Homo sapiens
ccgcgcgccgagcgccccgctccgcctcacctgccaccagggagtgggcgggcattgttcgccgccgccgccgc

SEQ ID NO: 128588 - DNA, 69 bp, Homo sapiens
cgccgccgccgcgcgggccatgggggccgcccggcgcccggggccgggctggcgaggcgccgcgccgcc

SEQ ID NO: 128589 - DNA, 70 bp, Homo sapiens
cgcgcgggccatgggggccgcccggcgcccggggccgggctggcgaggcgccgcgccgccgctgagacgg

SEQ ID NO: 128590 - DNA, 69 bp, Homo sapiens
atgggggccgcccggcgcccggggccgggctggcgaggcgccgcgccgccgctgagacgggccccgcgc

SEQ ID NO: 128591 - DNA, 70 bp, Homo sapiens
ccgcccggcgcccggggccgggctggcgaggcgccgcgccgccgctgagacgggccccgcgcgcagcccg

SEQ ID NO: 128592 - DNA, 73 bp, Homo sapiens
gggccgggctggcgaggcgccgcgccgccgctgagacgggccccgcgcgcagcccggcggcgcaggtaaggcc

SEQ ID NO: 128593 - DNA, 76 bp, Homo sapiens
tggcgaggcgccgcgccgccgctgagacgggccccgcgcgcagcccggcggcgcaggtaaggccggccgcgccatg

SEQ ID NO: 128594 - DNA, 73 bp, Homo sapiens
cgcgccgccgctgagacgggccccgcgcgcagcccggcggcgcaggtaaggccggccgcgccatggtggaccc

SEQ ID NO: 128595 - DNA, 71 bp, Homo sapiens
ctgagacgggccccgcgcgcagcccggcggcgcaggtaaggccggccgcgccatggtggacccggtgggct

SEQ ID NO: 128596 - DNA, 71 bp, Homo sapiens
ccccgcgcgcagcccggcggcgcaggtaaggccggccgcgccatggtggacccggtgggcttcgcggaggc

SEQ ID NO: 128597 - DNA, 70 bp, Homo sapiens
agcccggcggcgcaggtaaggccggccgcgccatggtggacccggtgggcttcgcggaggcgtggaaggc

SEQ ID NO: 128598 - DNA, 72 bp, Homo sapiens
taaggccggccgcgccatggtggacccggtgggcttcgcggaggcgtggaaggcgcagttcccggactcaga

SEQ ID NO: 128599 - DNA, 73 bp, Homo sapiens
ccatggtggacccggtgggcttcgcggaggcgtggaaggcgcagttcccggactcagagcccccgcgcatgga

SEQ ID NO: 128600 - DNA, 82 bp, Homo sapiens
aggcgtggaaggcgcagttcccggactcagagcccccgcgcatggagctgcgctcagtgggcgacatcgagcaggagctgga

SEQ ID NO: 128601 - DNA, 84 bp, Homo sapiens
aaggcgcagttcccggactcagagcccccgcgcatggagctgcgctcagtgggcgacatcgagcaggagctggagcgctgcaag

SEQ ID NO: 128602 - DNA, 85 bp, Homo sapiens
tcccggactcagagcccccgcgcatggagctgcgctcagtgggcgacatcgagcaggagctggagcgctgcaaggcctccattcg

SEQ ID NO: 128603 - DNA, 86 bp, Homo sapiens
ccccgcgcatggagctgcgctcagtgggcgacatcgagcaggagctggagcgctgcaaggcctccattcggcgcctggagcaggag

SEQ ID NO: 128604 - DNA, 86 bp, Homo sapiens
atggagctgcgctcagtgggcgacatcgagcaggagctggagcgctgcaaggcctccattcggcgcctggagcaggaggtgaacca

SEQ ID NO: 128605 - DNA, 84 bp, Homo sapiens
tcagtgggcgacatcgagcaggagctggagcgctgcaaggcctccattcggcgcctggagcaggaggtgaaccaggagcgcttc

SEQ ID NO: 128606 - DNA, 85 bp, Homo sapiens
acatcgagcaggagctggagcgctgcaaggcctccattcggcgcctggagcaggaggtgaaccaggagcgcttccgcatgatcta

SEQ ID NO: 128607 - DNA, 84 bp, Homo sapiens
aggagctggagcgctgcaaggcctccattcggcgcctggagcaggaggtgaaccaggagcgcttccgcatgatctacctgcaga

SEQ ID NO: 128608 - DNA, 79 bp, Homo sapiens
attcggcgcctggagcaggaggtgaaccaggagcgcttccgcatgatctacctgcagacgttgctggccaaggaaaaga

SEQ ID NO: 128609 - DNA, 79 bp, Homo sapiens
agcaggaggtgaaccaggagcgcttccgcatgatctacctgcagacgttgctggccaaggaaaagaagagctatgaccg

SEQ ID NO: 128610 - DNA, 79 bp, Homo sapiens
aaccaggagcgcttccgcatgatctacctgcagacgttgctggccaaggaaaagaagagctatgaccggcagcgatggg

SEQ ID NO: 128611 - DNA, 79 bp, Homo sapiens
agcgcttccgcatgatctacctgcagacgttgctggccaaggaaaagaagagctatgaccggcagcgatggggcttccg

SEQ ID NO: 128612 - DNA, 77 bp, Homo sapiens
cctgcagacgttgctggccaaggaaaagaagagctatgaccggcagcgatggggcttccggcgcgcggcgcaggccc

SEQ ID NO: 128613 - DNA, 75 bp, Homo sapiens
ttgctggccaaggaaaagaagagctatgaccggcagcgatggggcttccggcgcgcggcgcaggcccccgacggc

SEQ ID NO: 128614 - DNA, 73 bp, Homo sapiens
aaaagaagagctatgaccggcagcgatggggcttccggcgcgcggcgcaggcccccgacggcgcctccgagcc

SEQ ID NO: 128615 - DNA, 74 bp, Homo sapiens
agctatgaccggcagcgatggggcttccggcgcgcggcgcaggcccccgacggcgcctccgagccccgagcgtc

SEQ ID NO: 128616 - DNA, 72 bp, Homo sapiens
cggcgcaggcccccgacggcgcctccgagccccgagcgtccgcgtcgcgcccgcagccagcgcccgccgacg

SEQ ID NO: 128617 - DNA, 72 bp, Homo sapiens
acggcgcctccgagccccgagcgtccgcgtcgcgcccgcagccagcgcccgccgacggagccgacccgccgc

SEQ ID NO: 128618 - DNA, 71 bp, Homo sapiens
cccgagcgtccgcgtcgcgcccgcagccagcgcccgccgacggagccgacccgccgcccgccgaggagccc

SEQ ID NO: 128619 - DNA, 71 bp, Homo sapiens
cgtccgcgtcgcgcccgcagccagcgcccgccgacggagccgacccgccgcccgccgaggagcccgaggcc

SEQ ID NO: 128620 - DNA, 65 bp, Homo sapiens
cgcccgccgacggagccgacccgccgcccgccgaggagcccgaggcccggcccgacggcgagggt

SEQ ID NO: 128621 - DNA, 65 bp, Homo sapiens
cggagccgacccgccgcccgccgaggagcccgaggcccggcccgacggcgagggttctccgggta

SEQ ID NO: 128622 - DNA, 64 bp, Homo sapiens
cccgccgaggagcccgaggcccggcccgacggcgagggttctccgggtaaggccaggcccggga

SEQ ID NO: 128623 - DNA, 64 bp, Homo sapiens
cgaggcccggcccgacggcgagggttctccgggtaaggccaggcccgggaccgcccgcaggccc

SEQ ID NO: 128624 - DNA, 62 bp, Homo sapiens
cccggcccgacggcgagggttctccgggtaaggccaggcccgggaccgcccgcaggcccggg

SEQ ID NO: 128625 - DNA, 65 bp, Homo sapiens
cggcgagggttctccgggtaaggccaggcccgggaccgcccgcaggcccggggcagccgcgtcgg

SEQ ID NO: 128626 - DNA, 65 bp, Homo sapiens
tctccgggtaaggccaggcccgggaccgcccgcaggcccggggcagccgcgtcgggggaacggga

SEQ ID NO: 128627 - DNA, 63 bp, Homo sapiens
aggccaggcccgggaccgcccgcaggcccggggcagccgcgtcgggggaacgggacgaccggg

SEQ ID NO: 128628 - DNA, 63 bp, Homo sapiens
ggaccgcccgcaggcccggggcagccgcgtcgggggaacgggacgaccggggaccccccgcca

SEQ ID NO: 128629 - DNA, 66 bp, Homo sapiens
gcccggggcagccgcgtcgggggaacgggacgaccggggaccccccgccagcgtggcggcgctcag

SEQ ID NO: 128630 - DNA, 65 bp, Homo sapiens
agccgcgtcgggggaacgggacgaccggggaccccccgccagcgtggcggcgctcaggtccaact

SEQ ID NO: 128631 - DNA, 71 bp, Homo sapiens
ggacgaccggggaccccccgccagcgtggcggcgctcaggtccaacttcgagcggatccgcaagggccatg

SEQ ID NO: 128632 - DNA, 74 bp, Homo sapiens
agcgtggcggcgctcaggtccaacttcgagcggatccgcaagggccatggccagcccggggcggacgccgagaa

SEQ ID NO: 128633 - DNA, 73 bp, Homo sapiens
cgctcaggtccaacttcgagcggatccgcaagggccatggccagcccggggcggacgccgagaagcccttcta

SEQ ID NO: 128634 - DNA, 72 bp, Homo sapiens
gtccaacttcgagcggatccgcaagggccatggccagcccggggcggacgccgagaagcccttctacgtgaa

SEQ ID NO: 128635 - DNA, 70 bp, Homo sapiens
aagggccatggccagcccggggcggacgccgagaagcccttctacgtgaacgtcgagtttcaccacgagc

SEQ ID NO: 128636 - DNA, 72 bp, Homo sapiens
cggacgccgagaagcccttctacgtgaacgtcgagtttcaccacgagcgcggcctggtgaaggtcaacgaca

SEQ ID NO: 128637 - DNA, 71 bp, Homo sapiens
agaagcccttctacgtgaacgtcgagtttcaccacgagcgcggcctggtgaaggtcaacgacaaagaggtg

SEQ ID NO: 128638 - DNA, 71 bp, Homo sapiens
ccttctacgtgaacgtcgagtttcaccacgagcgcggcctggtgaaggtcaacgacaaagaggtgtcggac

SEQ ID NO: 128639 - DNA, 73 bp, Homo sapiens
aacgtcgagtttcaccacgagcgcggcctggtgaaggtcaacgacaaagaggtgtcggaccgcatcagctccc

SEQ ID NO: 128640 - DNA, 77 bp, Homo sapiens
tttcaccacgagcgcggcctggtgaaggtcaacgacaaagaggtgtcggaccgcatcagctccctgggcagccaggc

SEQ ID NO: 128641 - DNA, 81 bp, Homo sapiens
ggcctggtgaaggtcaacgacaaagaggtgtcggaccgcatcagctccctgggcagccaggccatgcagatggagcgcaaa

SEQ ID NO: 128642 - DNA, 80 bp, Homo sapiens
gtgaaggtcaacgacaaagaggtgtcggaccgcatcagctccctgggcagccaggccatgcagatggagcgcaaaaagtc

SEQ ID NO: 128643 - DNA, 79 bp, Homo sapiens
aacgacaaagaggtgtcggaccgcatcagctccctgggcagccaggccatgcagatggagcgcaaaaagtcccagcacg

SEQ ID NO: 128644 - DNA, 81 bp, Homo sapiens
aggtgtcggaccgcatcagctccctgggcagccaggccatgcagatggagcgcaaaaagtcccagcacggcgcgggctcga

SEQ ID NO: 128645 - DNA, 83 bp, Homo sapiens
atcagctccctgggcagccaggccatgcagatggagcgcaaaaagtcccagcacggcgcgggctcgagcgtgggggatgcatc

SEQ ID NO: 128646 - DNA, 72 bp, Homo sapiens
agatggagcgcaaaaagtcccagcacggcgcgggctcgagcgtgggggatgcatccaggcccccttaccggg

SEQ ID NO: 128647 - DNA, 69 bp, Homo sapiens
aaaaagtcccagcacggcgcgggctcgagcgtgggggatgcatccaggcccccttaccggggacgctcc

SEQ ID NO: 128648 - DNA, 75 bp, Homo sapiens
agcacggcgcgggctcgagcgtgggggatgcatccaggcccccttaccggggacgctcctcggagagcagctgcg

SEQ ID NO: 128649 - DNA, 76 bp, Homo sapiens
gctcgagcgtgggggatgcatccaggcccccttaccggggacgctcctcggagagcagctgcggcgtcgacggcga

SEQ ID NO: 128650 - DNA, 74 bp, Homo sapiens
tgggggatgcatccaggcccccttaccggggacgctcctcggagagcagctgcggcgtcgacggcgactacgag

SEQ ID NO: 128651 - DNA, 72 bp, Homo sapiens
atccaggcccccttaccggggacgctcctcggagagcagctgcggcgtcgacggcgactacgaggacgccga

SEQ ID NO: 128652 - DNA, 73 bp, Homo sapiens
cctcggagagcagctgcggcgtcgacggcgactacgaggacgccgagttgaacccccgcttcctgaaggacaa

SEQ ID NO: 128653 - DNA, 72 bp, Homo sapiens
agctgcggcgtcgacggcgactacgaggacgccgagttgaacccccgcttcctgaaggacaacctgatcgac

SEQ ID NO: 128654 - DNA, 71 bp, Homo sapiens
cggcgactacgaggacgccgagttgaacccccgcttcctgaaggacaacctgatcgacgccaatggcggta

SEQ ID NO: 128655 - DNA, 72 bp, Homo sapiens
actacgaggacgccgagttgaacccccgcttcctgaaggacaacctgatcgacgccaatggcggtagcaggc

SEQ ID NO: 128656 - DNA, 70 bp, Homo sapiens
ccgagttgaacccccgcttcctgaaggacaacctgatcgacgccaatggcggtagcaggcccccttggcc

SEQ ID NO: 128657 - DNA, 72 bp, Homo sapiens
ccgcttcctgaaggacaacctgatcgacgccaatggcggtagcaggcccccttggccgcccctggagtacca

SEQ ID NO: 128658 - DNA, 74 bp, Homo sapiens
aacctgatcgacgccaatggcggtagcaggcccccttggccgcccctggagtaccagccctaccagagcatcta

SEQ ID NO: 128659 - DNA, 71 bp, Homo sapiens
acgccaatggcggtagcaggcccccttggccgcccctggagtaccagccctaccagagcatctacgtcggg

SEQ ID NO: 128660 - DNA, 73 bp, Homo sapiens
cggtagcaggcccccttggccgcccctggagtaccagccctaccagagcatctacgtcgggggcatgatggaa

SEQ ID NO: 128661 - DNA, 76 bp, Homo sapiens
agtaccagccctaccagagcatctacgtcgggggcatgatggaaggggagggcaagggcccgctcctgcgcagcca

SEQ ID NO: 128662 - DNA, 81 bp, Homo sapiens
ctaccagagcatctacgtcgggggcatgatggaaggggagggcaagggcccgctcctgcgcagccagagcacctctgagca

SEQ ID NO: 128663 - DNA, 79 bp, Homo sapiens
atctacgtcgggggcatgatggaaggggagggcaagggcccgctcctgcgcagccagagcacctctgagcaggagaagc

SEQ ID NO: 128664 - DNA, 78 bp, Homo sapiens
atgatggaaggggagggcaagggcccgctcctgcgcagccagagcacctctgagcaggagaagcgccttacctggccc

SEQ ID NO: 128665 - DNA, 77 bp, Homo sapiens
gggagggcaagggcccgctcctgcgcagccagagcacctctgagcaggagaagcgccttacctggccccgcaggtcc

SEQ ID NO: 128666 - DNA, 76 bp, Homo sapiens
aagggcccgctcctgcgcagccagagcacctctgagcaggagaagcgccttacctggccccgcaggtcctactccc

SEQ ID NO: 128667 - DNA, 74 bp, Homo sapiens
ctgcgcagccagagcacctctgagcaggagaagcgccttacctggccccgcaggtcctactccccccggagttt

SEQ ID NO: 128668 - DNA, 71 bp, Homo sapiens
tgagcaggagaagcgccttacctggccccgcaggtcctactccccccggagttttgaggattgcggaggcg

SEQ ID NO: 128669 - DNA, 69 bp, Homo sapiens
agaagcgccttacctggccccgcaggtcctactccccccggagttttgaggattgcggaggcggctata

SEQ ID NO: 128670 - DNA, 67 bp, Homo sapiens
ttacctggccccgcaggtcctactccccccggagttttgaggattgcggaggcggctataccccgga

SEQ ID NO: 128671 - DNA, 72 bp, Homo sapiens
caggtcctactccccccggagttttgaggattgcggaggcggctataccccggactgcagctccaatgagaa

SEQ ID NO: 128672 - DNA, 72 bp, Homo sapiens
cctactccccccggagttttgaggattgcggaggcggctataccccggactgcagctccaatgagaacctca

SEQ ID NO: 128673 - DNA, 75 bp, Homo sapiens
gttttgaggattgcggaggcggctataccccggactgcagctccaatgagaacctcacctccagcgaggaggact

SEQ ID NO: 128674 - DNA, 76 bp, Homo sapiens
aggattgcggaggcggctataccccggactgcagctccaatgagaacctcacctccagcgaggaggacttctcctc

SEQ ID NO: 128675 - DNA, 77 bp, Homo sapiens
aggcggctataccccggactgcagctccaatgagaacctcacctccagcgaggaggacttctcctctggccagtcca

SEQ ID NO: 128676 - DNA, 77 bp, Homo sapiens
cccggactgcagctccaatgagaacctcacctccagcgaggaggacttctcctctggccagtccagccgcgtgtccc

SEQ ID NO: 128677 - DNA, 76 bp, Homo sapiens
agctccaatgagaacctcacctccagcgaggaggacttctcctctggccagtccagccgcgtgtccccaagcccca

SEQ ID NO: 128678 - DNA, 75 bp, Homo sapiens
tgagaacctcacctccagcgaggaggacttctcctctggccagtccagccgcgtgtccccaagccccaccaccta

SEQ ID NO: 128679 - DNA, 73 bp, Homo sapiens
acctccagcgaggaggacttctcctctggccagtccagccgcgtgtccccaagccccaccacctaccgcatgt

SEQ ID NO: 128680 - DNA, 71 bp, Homo sapiens
ggacttctcctctggccagtccagccgcgtgtccccaagccccaccacctaccgcatgttccgggacaaaa

SEQ ID NO: 128681 - DNA, 72 bp, Homo sapiens
tctggccagtccagccgcgtgtccccaagccccaccacctaccgcatgttccgggacaaaagccgctctccc

SEQ ID NO: 128682 - DNA, 72 bp, Homo sapiens
gtccagccgcgtgtccccaagccccaccacctaccgcatgttccgggacaaaagccgctctccctcgcagaa

SEQ ID NO: 128683 - DNA, 72 bp, Homo sapiens
gtccccaagccccaccacctaccgcatgttccgggacaaaagccgctctccctcgcagaactcgcaacagtc

SEQ ID NO: 128684 - DNA, 76 bp, Homo sapiens
cccaccacctaccgcatgttccgggacaaaagccgctctccctcgcagaactcgcaacagtccttcgacagcagca

SEQ ID NO: 128685 - DNA, 75 bp, Homo sapiens
acctaccgcatgttccgggacaaaagccgctctccctcgcagaactcgcaacagtccttcgacagcagcagtccc

SEQ ID NO: 128686 - DNA, 74 bp, Homo sapiens
atgttccgggacaaaagccgctctccctcgcagaactcgcaacagtccttcgacagcagcagtccccccacgcc

SEQ ID NO: 128687 - DNA, 78 bp, Homo sapiens
acaaaagccgctctccctcgcagaactcgcaacagtccttcgacagcagcagtccccccacgccgcagtgccataagc

SEQ ID NO: 128688 - DNA, 76 bp, Homo sapiens
aactcgcaacagtccttcgacagcagcagtccccccacgccgcagtgccataagcggcaccggcactgcccggttg

SEQ ID NO: 128689 - DNA, 76 bp, Homo sapiens
aacagtccttcgacagcagcagtccccccacgccgcagtgccataagcggcaccggcactgcccggttgtcgtgtc

SEQ ID NO: 128690 - DNA, 76 bp, Homo sapiens
agcagcagtccccccacgccgcagtgccataagcggcaccggcactgcccggttgtcgtgtccgaggccaccatcg

SEQ ID NO: 128691 - DNA, 74 bp, Homo sapiens
ataagcggcaccggcactgcccggttgtcgtgtccgaggccaccatcgtgggcgtccgcaagaccgggcagatc

SEQ ID NO: 128692 - DNA, 73 bp, Homo sapiens
accggcactgcccggttgtcgtgtccgaggccaccatcgtgggcgtccgcaagaccgggcagatctggcccaa

SEQ ID NO: 128693 - DNA, 73 bp, Homo sapiens
cccggttgtcgtgtccgaggccaccatcgtgggcgtccgcaagaccgggcagatctggcccaacgatggcgag

SEQ ID NO: 128694 - DNA, 77 bp, Homo sapiens
tccgaggccaccatcgtgggcgtccgcaagaccgggcagatctggcccaacgatggcgagggcgccttccatggaga

SEQ ID NO: 128695 - DNA, 78 bp, Homo sapiens
tgggcgtccgcaagaccgggcagatctggcccaacgatggcgagggcgccttccatggagacgcaggtgagttcctca

SEQ ID NO: 128696 - DNA, 77 bp, Homo sapiens
aagaccgggcagatctggcccaacgatggcgagggcgccttccatggagacgcaggtgagttcctcacgccacgtgc

SEQ ID NO: 128697 - DNA, 72 bp, Homo sapiens
attcagtttgtggtttgactgccgctggcatccgaggtggcctaaccgttgtagctaaggacttggtaggga

SEQ ID NO: 128698 - DNA, 71 bp, Homo sapiens
tggtttgactgccgctggcatccgaggtggcctaaccgttgtagctaaggacttggtagggacaccggaag

SEQ ID NO: 128699 - DNA, 70 bp, Homo sapiens
tccgaggtggcctaaccgttgtagctaaggacttggtagggacaccggaaggctgagacctctctctcct

SEQ ID NO: 128700 - DNA, 71 bp, Homo sapiens
taaccgttgtagctaaggacttggtagggacaccggaaggctgagacctctctctccttgtggtccgtcat

SEQ ID NO: 128701 - DNA, 76 bp, Homo sapiens
tagctaaggacttggtagggacaccggaaggctgagacctctctctccttgtggtccgtcattgttctgcagtgaa

SEQ ID NO: 128702 - DNA, 75 bp, Homo sapiens
acttggtagggacaccggaaggctgagacctctctctccttgtggtccgtcattgttctgcagtgaagcctgagt

SEQ ID NO: 128703 - DNA, 80 bp, Homo sapiens
accggaaggctgagacctctctctccttgtggtccgtcattgttctgcagtgaagcctgagttgcttctcatggaggcta

SEQ ID NO: 128704 - DNA, 81 bp, Homo sapiens
agacctctctctccttgtggtccgtcattgttctgcagtgaagcctgagttgcttctcatggaggctaggttccaagagca

SEQ ID NO: 128705 - DNA, 80 bp, Homo sapiens
tctctccttgtggtccgtcattgttctgcagtgaagcctgagttgcttctcatggaggctaggttccaagagcaaaggtg

SEQ ID NO: 128706 - DNA, 83 bp, Homo sapiens
tgtggtccgtcattgttctgcagtgaagcctgagttgcttctcatggaggctaggttccaagagcaaaggtggatgctgcagg

SEQ ID NO: 128707 - DNA, 80 bp, Homo sapiens
aagcctgagttgcttctcatggaggctaggttccaagagcaaaggtggatgctgcagggcttcctgaggcctgggctatg

SEQ ID NO: 128708 - DNA, 81 bp, Homo sapiens
ttgcttctcatggaggctaggttccaagagcaaaggtggatgctgcagggcttcctgaggcctgggctatggaacttctca

SEQ ID NO: 128709 - DNA, 79 bp, Homo sapiens
atggaggctaggttccaagagcaaaggtggatgctgcagggcttcctgaggcctgggctatggaacttctcagctgaac

SEQ ID NO: 128710 - DNA, 78 bp, Homo sapiens
ttccaagagcaaaggtggatgctgcagggcttcctgaggcctgggctatggaacttctcagctgaacttccaccggat

SEQ ID NO: 128711 - DNA, 76 bp, Homo sapiens
aaaggtggatgctgcagggcttcctgaggcctgggctatggaacttctcagctgaacttccaccggattctgttgg

SEQ ID NO: 128712 - DNA, 79 bp, Homo sapiens
atgctgcagggcttcctgaggcctgggctatggaacttctcagctgaacttccaccggattctgttggtacagtgtgtc

SEQ ID NO: 128713 - DNA, 78 bp, Homo sapiens
ttcctgaggcctgggctatggaacttctcagctgaacttccaccggattctgttggtacagtgtgtcgcaagtcttgc

SEQ ID NO: 128714 - DNA, 78 bp, Homo sapiens
ctgggctatggaacttctcagctgaacttccaccggattctgttggtacagtgtgtcgcaagtcttgcccagatctaa

SEQ ID NO: 128715 - DNA, 77 bp, Homo sapiens
tatggaacttctcagctgaacttccaccggattctgttggtacagtgtgtcgcaagtcttgcccagatctaagcggg

SEQ ID NO: 128716 - DNA, 74 bp, Homo sapiens
agctgaacttccaccggattctgttggtacagtgtgtcgcaagtcttgcccagatctaagcgggggtagaaagc

SEQ ID NO: 128717 - DNA, 75 bp, Homo sapiens
ttccaccggattctgttggtacagtgtgtcgcaagtcttgcccagatctaagcgggggtagaaagctggactcta

SEQ ID NO: 128718 - DNA, 76 bp, Homo sapiens
attctgttggtacagtgtgtcgcaagtcttgcccagatctaagcgggggtagaaagctggactctacctcttgatg

SEQ ID NO: 128719 - DNA, 79 bp, Homo sapiens
gtacagtgtgtcgcaagtcttgcccagatctaagcgggggtagaaagctggactctacctcttgatgggaggagcagca

SEQ ID NO: 128720 - DNA, 79 bp, Homo sapiens
aagtcttgcccagatctaagcgggggtagaaagctggactctacctcttgatgggaggagcagcagtgtcatgtggaca

SEQ ID NO: 128721 - DNA, 79 bp, Homo sapiens
agatctaagcgggggtagaaagctggactctacctcttgatgggaggagcagcagtgtcatgtggacacacggcgtgga

SEQ ID NO: 128722 - DNA, 79 bp, Homo sapiens
taagcgggggtagaaagctggactctacctcttgatgggaggagcagcagtgtcatgtggacacacggcgtggacacaa

SEQ ID NO: 128723 - DNA, 84 bp, Homo sapiens
tagaaagctggactctacctcttgatgggaggagcagcagtgtcatgtggacacacggcgtggacacaaggcatgattctcagg

SEQ ID NO: 128724 - DNA, 86 bp, Homo sapiens
tacctcttgatgggaggagcagcagtgtcatgtggacacacggcgtggacacaaggcatgattctcaggggctctggtgattgctc

SEQ ID NO: 128725 - DNA, 81 bp, Homo sapiens
tggatgctcccttctctgtctctaacacaggatgcttctttgcacacacagatggctcgttcggaacaccacctggatacg

SEQ ID NO: 128726 - DNA, 84 bp, Homo sapiens
ttctctgtctctaacacaggatgcttctttgcacacacagatggctcgttcggaacaccacctggatacggctgcgctgcagac

SEQ ID NO: 128727 - DNA, 83 bp, Homo sapiens
tctaacacaggatgcttctttgcacacacagatggctcgttcggaacaccacctggatacggctgcgctgcagaccgggcaga

SEQ ID NO: 128728 - DNA, 83 bp, Homo sapiens
atgcttctttgcacacacagatggctcgttcggaacaccacctggatacggctgcgctgcagaccgggcagaggagcagcgcc

SEQ ID NO: 128729 - DNA, 81 bp, Homo sapiens
acacagatggctcgttcggaacaccacctggatacggctgcgctgcagaccgggcagaggagcagcgccggcaccaagatg

SEQ ID NO: 128730 - DNA, 81 bp, Homo sapiens
atggctcgttcggaacaccacctggatacggctgcgctgcagaccgggcagaggagcagcgccggcaccaagatgggctgc

SEQ ID NO: 128731 - DNA, 82 bp, Homo sapiens
aacaccacctggatacggctgcgctgcagaccgggcagaggagcagcgccggcaccaagatgggctgccctacattgatgac

SEQ ID NO: 128732 - DNA, 85 bp, Homo sapiens
tggatacggctgcgctgcagaccgggcagaggagcagcgccggcaccaagatgggctgccctacattgatgactcgccctcctca

SEQ ID NO: 128733 - DNA, 84 bp, Homo sapiens
ggctgcgctgcagaccgggcagaggagcagcgccggcaccaagatgggctgccctacattgatgactcgccctcctcatcgccc

SEQ ID NO: 128734 - DNA, 80 bp, Homo sapiens
agaccgggcagaggagcagcgccggcaccaagatgggctgccctacattgatgactcgccctcctcatcgccccacctca

SEQ ID NO: 128735 - DNA, 83 bp, Homo sapiens
agaggagcagcgccggcaccaagatgggctgccctacattgatgactcgccctcctcatcgccccacctcagcagcaagggca

SEQ ID NO: 128736 - DNA, 81 bp, Homo sapiens
cgccggcaccaagatgggctgccctacattgatgactcgccctcctcatcgccccacctcagcagcaagggcaggggcagc

SEQ ID NO: 128737 - DNA, 81 bp, Homo sapiens
aagatgggctgccctacattgatgactcgccctcctcatcgccccacctcagcagcaagggcaggggcagccgggatgcgc

SEQ ID NO: 128738 - DNA, 80 bp, Homo sapiens
cctacattgatgactcgccctcctcatcgccccacctcagcagcaagggcaggggcagccgggatgcgctggtctcggga

SEQ ID NO: 128739 - DNA, 79 bp, Homo sapiens
atgactcgccctcctcatcgccccacctcagcagcaagggcaggggcagccgggatgcgctggtctcgggagccctgga

SEQ ID NO: 128740 - DNA, 78 bp, Homo sapiens
tcctcatcgccccacctcagcagcaagggcaggggcagccgggatgcgctggtctcgggagccctggagtccactaaa

SEQ ID NO: 128741 - DNA, 76 bp, Homo sapiens
acctcagcagcaagggcaggggcagccgggatgcgctggtctcgggagccctggagtccactaaagcggtgagtcc

SEQ ID NO: 128742 - DNA, 74 bp, Homo sapiens
caagggcaggggcagccgggatgcgctggtctcgggagccctggagtccactaaagcggtgagtccccatggtg

SEQ ID NO: 128743 - DNA, 76 bp, Homo sapiens
gggcagccgggatgcgctggtctcgggagccctggagtccactaaagcggtgagtccccatggtgtacgtgtggca

SEQ ID NO: 128744 - DNA, 74 bp, Homo sapiens
ccgggatgcgctggtctcgggagccctggagtccactaaagcggtgagtccccatggtgtacgtgtggcaggag

SEQ ID NO: 128745 - DNA, 73 bp, Homo sapiens
agaatccccctaccacccttccaggctgacttctgtctatttctcctgcagagtgagctggacttggaaaagg

SEQ ID NO: 128746 - DNA, 76 bp, Homo sapiens
acccttccaggctgacttctgtctatttctcctgcagagtgagctggacttggaaaagggcttggagatgagaaaa

SEQ ID NO: 128747 - DNA, 77 bp, Homo sapiens
ctgacttctgtctatttctcctgcagagtgagctggacttggaaaagggcttggagatgagaaaatgggtcctgtcg

SEQ ID NO: 128748 - DNA, 76 bp, Homo sapiens
ttctgtctatttctcctgcagagtgagctggacttggaaaagggcttggagatgagaaaatgggtcctgtcgggaa

SEQ ID NO: 128749 - DNA, 77 bp, Homo sapiens
ttctcctgcagagtgagctggacttggaaaagggcttggagatgagaaaatgggtcctgtcgggaatcctggctagc

SEQ ID NO: 128750 - DNA, 73 bp, Homo sapiens
agctggacttggaaaagggcttggagatgagaaaatgggtcctgtcgggaatcctggctagcgaggagactta

SEQ ID NO: 128751 - DNA, 72 bp, Homo sapiens
acttggaaaagggcttggagatgagaaaatgggtcctgtcgggaatcctggctagcgaggagacttacctga

SEQ ID NO: 128752 - DNA, 74 bp, Homo sapiens
agggcttggagatgagaaaatgggtcctgtcgggaatcctggctagcgaggagacttacctgagccacctggag

SEQ ID NO: 128753 - DNA, 79 bp, Homo sapiens
atgagaaaatgggtcctgtcgggaatcctggctagcgaggagacttacctgagccacctggaggcactgctgctggtga

SEQ ID NO: 128754 - DNA, 78 bp, Homo sapiens
ggtcctgtcgggaatcctggctagcgaggagacttacctgagccacctggaggcactgctgctggtgaggaggattta

SEQ ID NO: 128755 - DNA, 79 bp, Homo sapiens
cgggaatcctggctagcgaggagacttacctgagccacctggaggcactgctgctggtgaggaggatttagggagctga

SEQ ID NO: 128756 - DNA, 80 bp, Homo sapiens
ctagcgaggagacttacctgagccacctggaggcactgctgctggtgaggaggatttagggagctgagcagggcgggatg

SEQ ID NO: 128757 - DNA, 79 bp, Homo sapiens
atggcagcccctctcacctgtgctacctcacttgtgccctcttccagcccatgaagcctttgaaagccgctgccaccac

SEQ ID NO: 128758 - DNA, 79 bp, Homo sapiens
tctcacctgtgctacctcacttgtgccctcttccagcccatgaagcctttgaaagccgctgccaccacctctcagccgg

SEQ ID NO: 128759 - DNA, 81 bp, Homo sapiens
tgtgctacctcacttgtgccctcttccagcccatgaagcctttgaaagccgctgccaccacctctcagccggtgctgacga

SEQ ID NO: 128760 - DNA, 81 bp, Homo sapiens
acttgtgccctcttccagcccatgaagcctttgaaagccgctgccaccacctctcagccggtgctgacgagtcagcagatc

SEQ ID NO: 128761 - DNA, 81 bp, Homo sapiens
ccctcttccagcccatgaagcctttgaaagccgctgccaccacctctcagccggtgctgacgagtcagcagatcgagacca

SEQ ID NO: 128762 - DNA, 81 bp, Homo sapiens
gatcgagaccatcttcttcaaagtgcctgagctctacgagatccacaaggagttctatgatgggctcttcccccgcgtgca

SEQ ID NO: 128763 - DNA, 81 bp, Homo sapiens
atcttcttcaaagtgcctgagctctacgagatccacaaggagttctatgatgggctcttcccccgcgtgcagcagtggagc

SEQ ID NO: 128764 - DNA, 81 bp, Homo sapiens
cttcaaagtgcctgagctctacgagatccacaaggagttctatgatgggctcttcccccgcgtgcagcagtggagccacca

SEQ ID NO: 128765 - DNA, 81 bp, Homo sapiens
ctgagctctacgagatccacaaggagttctatgatgggctcttcccccgcgtgcagcagtggagccaccagcagcgggtgg

SEQ ID NO: 128766 - DNA, 78 bp, Homo sapiens
atccacaaggagttctatgatgggctcttcccccgcgtgcagcagtggagccaccagcagcgggtgggcgacctcttc

SEQ ID NO: 128767 - DNA, 77 bp, Homo sapiens
aaggagttctatgatgggctcttcccccgcgtgcagcagtggagccaccagcagcgggtgggcgacctcttccagaa

SEQ ID NO: 128768 - DNA, 80 bp, Homo sapiens
tatgatgggctcttcccccgcgtgcagcagtggagccaccagcagcgggtgggcgacctcttccagaagctggtgagtaa

SEQ ID NO: 128769 - DNA, 75 bp, Homo sapiens
ccccgcgtgcagcagtggagccaccagcagcgggtgggcgacctcttccagaagctggtgagtaacccagggccg

SEQ ID NO: 128770 - DNA, 75 bp, Homo sapiens
agcagtggagccaccagcagcgggtgggcgacctcttccagaagctggtgagtaacccagggccggtgctgggac

SEQ ID NO: 128771 - DNA, 75 bp, Homo sapiens
tggagccaccagcagcgggtgggcgacctcttccagaagctggtgagtaacccagggccggtgctgggactacag

SEQ ID NO: 128772 - DNA, 76 bp, Homo sapiens
ggagcagcagcacctgtcccactctctcttccttcctccccctcaggccagccagctgggtgtgtaccgggccttc

SEQ ID NO: 128773 - DNA, 73 bp, Homo sapiens
cacctgtcccactctctcttccttcctccccctcaggccagccagctgggtgtgtaccgggccttcgtggaca

SEQ ID NO: 128774 - DNA, 71 bp, Homo sapiens
actctctcttccttcctccccctcaggccagccagctgggtgtgtaccgggccttcgtggacaactacgga

SEQ ID NO: 128775 - DNA, 72 bp, Homo sapiens
ccttcctccccctcaggccagccagctgggtgtgtaccgggccttcgtggacaactacggagttgccatgga

SEQ ID NO: 128776 - DNA, 75 bp, Homo sapiens
cctcaggccagccagctgggtgtgtaccgggccttcgtggacaactacggagttgccatggaaatggctgagaag

SEQ ID NO: 128777 - DNA, 77 bp, Homo sapiens
agccagctgggtgtgtaccgggccttcgtggacaactacggagttgccatggaaatggctgagaagtgctgtcaggc

SEQ ID NO: 128778 - DNA, 78 bp, Homo sapiens
tgtgtaccgggccttcgtggacaactacggagttgccatggaaatggctgagaagtgctgtcaggccaatgctcagtt

SEQ ID NO: 128779 - DNA, 81 bp, Homo sapiens
ggccttcgtggacaactacggagttgccatggaaatggctgagaagtgctgtcaggccaatgctcagtttgcagaaatctc

SEQ ID NO: 128780 - DNA, 81 bp, Homo sapiens
acaactacggagttgccatggaaatggctgagaagtgctgtcaggccaatgctcagtttgcagaaatctccgaggtaatgc

SEQ ID NO: 128781 - DNA, 82 bp, Homo sapiens
agttgccatggaaatggctgagaagtgctgtcaggccaatgctcagtttgcagaaatctccgaggtaatgccttgatgccgt

SEQ ID NO: 128782 - DNA, 83 bp, Homo sapiens
atggaaatggctgagaagtgctgtcaggccaatgctcagtttgcagaaatctccgaggtaatgccttgatgccgttcagacag

SEQ ID NO: 128783 - DNA, 83 bp, Homo sapiens
agaagtgctgtcaggccaatgctcagtttgcagaaatctccgaggtaatgccttgatgccgttcagacaggtgcaccgctgac

SEQ ID NO: 128784 - DNA, 89 bp, Homo sapiens
gggaactgtctgcatcatcaaagctgcttctgtcatctgtgtgaacatgcgcttttctctctgcagaacctgagagccagaagcaacaa

SEQ ID NO: 128785 - DNA, 92 bp, Homo sapiens
tgtctgcatcatcaaagctgcttctgtcatctgtgtgaacatgcgcttttctctctgcagaacctgagagccagaagcaacaaagatgccaa

SEQ ID NO: 128786 - DNA, 87 bp, Homo sapiens
atcaaagctgcttctgtcatctgtgtgaacatgcgcttttctctctgcagaacctgagagccagaagcaacaaagatgccaaggatc

SEQ ID NO: 128787 - DNA, 85 bp, Homo sapiens
tgtcatctgtgtgaacatgcgcttttctctctgcagaacctgagagccagaagcaacaaagatgccaaggatccaacgaccaaga

SEQ ID NO: 128788 - DNA, 82 bp, Homo sapiens
tgtgaacatgcgcttttctctctgcagaacctgagagccagaagcaacaaagatgccaaggatccaacgaccaagaactctc

SEQ ID NO: 128789 - DNA, 78 bp, Homo sapiens
cgcttttctctctgcagaacctgagagccagaagcaacaaagatgccaaggatccaacgaccaagaactctctggaaa

SEQ ID NO: 128790 - DNA, 80 bp, Homo sapiens
tctctctgcagaacctgagagccagaagcaacaaagatgccaaggatccaacgaccaagaactctctggaaagtgagttc

SEQ ID NO: 128791 - DNA, 80 bp, Homo sapiens
aacctgagagccagaagcaacaaagatgccaaggatccaacgaccaagaactctctggaaagtgagttctgcatgctgag

SEQ ID NO: 128792 - DNA, 80 bp, Homo sapiens
aagcaacaaagatgccaaggatccaacgaccaagaactctctggaaagtgagttctgcatgctgaggtctctgtgtgccc

SEQ ID NO: 128793 - DNA, 80 bp, Homo sapiens
aaagatgccaaggatccaacgaccaagaactctctggaaagtgagttctgcatgctgaggtctctgtgtgccctcgtcag

SEQ ID NO: 128794 - DNA, 80 bp, Homo sapiens
aaggatccaacgaccaagaactctctggaaagtgagttctgcatgctgaggtctctgtgtgccctcgtcagggaggctgc

SEQ ID NO: 128795 - DNA, 83 bp, Homo sapiens
acgaccaagaactctctggaaagtgagttctgcatgctgaggtctctgtgtgccctcgtcagggaggctgctgctggcagagg

SEQ ID NO: 128796 - DNA, 85 bp, Homo sapiens
ttgcaccgagggtggtcaggcagctggtgtgcttctccatgtgcaacctctctcacctcccctctctctccacagctctgctcta

SEQ ID NO: 128797 - DNA, 86 bp, Homo sapiens
tggtcaggcagctggtgtgcttctccatgtgcaacctctctcacctcccctctctctccacagctctgctctacaagcctgtggac

SEQ ID NO: 128798 - DNA, 84 bp, Homo sapiens
tggtgtgcttctccatgtgcaacctctctcacctcccctctctctccacagctctgctctacaagcctgtggaccgtgtgacga

SEQ ID NO: 128799 - DNA, 83 bp, Homo sapiens
ttctccatgtgcaacctctctcacctcccctctctctccacagctctgctctacaagcctgtggaccgtgtgacgaggagcac

SEQ ID NO: 128800 - DNA, 79 bp, Homo sapiens
aacctctctcacctcccctctctctccacagctctgctctacaagcctgtggaccgtgtgacgaggagcacgctggtcc

SEQ ID NO: 128801 - DNA, 81 bp, Homo sapiens
cctcccctctctctccacagctctgctctacaagcctgtggaccgtgtgacgaggagcacgctggtcctccatgtaagtca

SEQ ID NO: 128802 - DNA, 83 bp, Homo sapiens
ctctctctccacagctctgctctacaagcctgtggaccgtgtgacgaggagcacgctggtcctccatgtaagtcacagcgccc

SEQ ID NO: 128803 - DNA, 79 bp, Homo sapiens
ctctgctctacaagcctgtggaccgtgtgacgaggagcacgctggtcctccatgtaagtcacagcgcccctctggaccg

SEQ ID NO: 128804 - DNA, 77 bp, Homo sapiens
tacaagcctgtggaccgtgtgacgaggagcacgctggtcctccatgtaagtcacagcgcccctctggaccgggacca

SEQ ID NO: 128805 - DNA, 74 bp, Homo sapiens
ctgtggaccgtgtgacgaggagcacgctggtcctccatgtaagtcacagcgcccctctggaccgggaccaaaac

SEQ ID NO: 128806 - DNA, 74 bp, Homo sapiens
tgtgacgaggagcacgctggtcctccatgtaagtcacagcgcccctctggaccgggaccaaaactgccccctcg

SEQ ID NO: 128807 - DNA, 74 bp, Homo sapiens
agcacgctggtcctccatgtaagtcacagcgcccctctggaccgggaccaaaactgccccctcgggcacacaca

SEQ ID NO: 128808 - DNA, 80 bp, Homo sapiens
aggtgccagtgctcctctgtgtctaactcaagtctttcttcctggggcaggacttgctgaagcacactcctgccagccac

SEQ ID NO: 128809 - DNA, 78 bp, Homo sapiens
ctcctctgtgtctaactcaagtctttcttcctggggcaggacttgctgaagcacactcctgccagccaccctgaccac

SEQ ID NO: 128810 - DNA, 77 bp, Homo sapiens
tgtctaactcaagtctttcttcctggggcaggacttgctgaagcacactcctgccagccaccctgaccaccccttgc

SEQ ID NO: 128811 - DNA, 77 bp, Homo sapiens
aagtctttcttcctggggcaggacttgctgaagcacactcctgccagccaccctgaccaccccttgctgcaggacgc

SEQ ID NO: 128812 - DNA, 81 bp, Homo sapiens
gggcaggacttgctgaagcacactcctgccagccaccctgaccaccccttgctgcaggacgccctccgcatctcacagaac

SEQ ID NO: 128813 - DNA, 80 bp, Homo sapiens
acttgctgaagcacactcctgccagccaccctgaccaccccttgctgcaggacgccctccgcatctcacagaacttcctg

SEQ ID NO: 128814 - DNA, 82 bp, Homo sapiens
acactcctgccagccaccctgaccaccccttgctgcaggacgccctccgcatctcacagaacttcctgtccagcatcaatga

SEQ ID NO: 128815 - DNA, 82 bp, Homo sapiens
agccaccctgaccaccccttgctgcaggacgccctccgcatctcacagaacttcctgtccagcatcaatgaggagatcacac

SEQ ID NO: 128816 - DNA, 79 bp, Homo sapiens
accaccccttgctgcaggacgccctccgcatctcacagaacttcctgtccagcatcaatgaggagatcacaccccgacg

SEQ ID NO: 128817 - DNA, 84 bp, Homo sapiens
ttgctgcaggacgccctccgcatctcacagaacttcctgtccagcatcaatgaggagatcacaccccgacggcagtccatgacg

SEQ ID NO: 128818 - DNA, 81 bp, Homo sapiens
acgccctccgcatctcacagaacttcctgtccagcatcaatgaggagatcacaccccgacggcagtccatgacggtgaaga

SEQ ID NO: 128819 - DNA, 79 bp, Homo sapiens
atctcacagaacttcctgtccagcatcaatgaggagatcacaccccgacggcagtccatgacggtgaagaagggagagg

SEQ ID NO: 128820 - DNA, 78 bp, Homo sapiens
agaacttcctgtccagcatcaatgaggagatcacaccccgacggcagtccatgacggtgaagaagggagaggtgagtg

SEQ ID NO: 128821 - DNA, 81 bp, Homo sapiens
tgtccagcatcaatgaggagatcacaccccgacggcagtccatgacggtgaagaagggagaggtgagtgtggcaggggatg

SEQ ID NO: 128822 - DNA, 76 bp, Homo sapiens
aatgaggagatcacaccccgacggcagtccatgacggtgaagaagggagaggtgagtgtggcaggggatggcttgg

SEQ ID NO: 128823 - DNA, 74 bp, Homo sapiens
atcacaccccgacggcagtccatgacggtgaagaagggagaggtgagtgtggcaggggatggcttgggtccacc

SEQ ID NO: 128824 - DNA, 80 bp, Homo sapiens
acatgcccattcagcagccccttgagcaagaaggaccgacccttgcctttcagatgcagaccaagatgcagaaaggcacc

SEQ ID NO: 128825 - DNA, 79 bp, Homo sapiens
ttcagcagccccttgagcaagaaggaccgacccttgcctttcagatgcagaccaagatgcagaaaggcacccttctcag

SEQ ID NO: 128826 - DNA, 79 bp, Homo sapiens
ttgagcaagaaggaccgacccttgcctttcagatgcagaccaagatgcagaaaggcacccttctcaggccgcaggtgtc

SEQ ID NO: 128827 - DNA, 77 bp, Homo sapiens
aaggaccgacccttgcctttcagatgcagaccaagatgcagaaaggcacccttctcaggccgcaggtgtccaggcag

SEQ ID NO: 128828 - DNA, 85 bp, Homo sapiens
tcagatgcagaccaagatgcagaaaggcacccttctcaggccgcaggtgtccaggcaggtgtcagaggtgcagcccgtgcacacc

SEQ ID NO: 128829 - DNA, 78 bp, Homo sapiens
accaagatgcagaaaggcacccttctcaggccgcaggtgtccaggcaggtgtcagaggtgcagcccgtgcacaccggg

SEQ ID NO: 128830 - DNA, 75 bp, Homo sapiens
aaaggcacccttctcaggccgcaggtgtccaggcaggtgtcagaggtgcagcccgtgcacaccggggaccctatc

SEQ ID NO: 128831 - DNA, 78 bp, Homo sapiens
ttctcaggccgcaggtgtccaggcaggtgtcagaggtgcagcccgtgcacaccggggaccctatccatcctgtctagt

SEQ ID NO: 128832 - DNA, 76 bp, Homo sapiens
ggtgtccaggcaggtgtcagaggtgcagcccgtgcacaccggggaccctatccatcctgtctagttgggaggacta

SEQ ID NO: 128833 - DNA, 75 bp, Homo sapiens
caggtgtcagaggtgcagcccgtgcacaccggggaccctatccatcctgtctagttgggaggactaggagttcca

SEQ ID NO: 128834 - DNA, 74 bp, Homo sapiens
agaggtgcagcccgtgcacaccggggaccctatccatcctgtctagttgggaggactaggagttccacatgtgg

SEQ ID NO: 128835 - DNA, 72 bp, Homo sapiens
cgtgcacaccggggaccctatccatcctgtctagttgggaggactaggagttccacatgtgggaccctcagt

SEQ ID NO: 128836 - DNA, 70 bp, Homo sapiens
acaccggggaccctatccatcctgtctagttgggaggactaggagttccacatgtgggaccctcagttcc

SEQ ID NO: 128837 - DNA, 76 bp, Homo sapiens
cctatccatcctgtctagttgggaggactaggagttccacatgtgggaccctcagttcctgctgccttcagaacca

SEQ ID NO: 128838 - DNA, 74 bp, Homo sapiens
tgtctagttgggaggactaggagttccacatgtgggaccctcagttcctgctgccttcagaaccaggcccaacc

SEQ ID NO: 128839 - DNA, 74 bp, Homo sapiens
aggactaggagttccacatgtgggaccctcagttcctgctgccttcagaaccaggcccaacccttgctgtgacc

SEQ ID NO: 128840 - DNA, 74 bp, Homo sapiens
aggagttccacatgtgggaccctcagttcctgctgccttcagaaccaggcccaacccttgctgtgacctcgagg

SEQ ID NO: 128841 - DNA, 74 bp, Homo sapiens
atgtgggaccctcagttcctgctgccttcagaaccaggcccaacccttgctgtgacctcgagggctgccacttt

SEQ ID NO: 128842 - DNA, 76 bp, Homo sapiens
ccttcagaaccaggcccaacccttgctgtgacctcgagggctgccacttttcagagtgcactgggcctgtctccac

SEQ ID NO: 128843 - DNA, 78 bp, Homo sapiens
caggcccaacccttgctgtgacctcgagggctgccacttttcagagtgcactgggcctgtctccacccatagaccata

SEQ ID NO: 128844 - DNA, 82 bp, Homo sapiens
ccttgctgtgacctcgagggctgccacttttcagagtgcactgggcctgtctccacccatagaccatactgccacatctgta

SEQ ID NO: 128845 - DNA, 81 bp, Homo sapiens
tgtgacctcgagggctgccacttttcagagtgcactgggcctgtctccacccatagaccatactgccacatctgtacctcg

SEQ ID NO: 128846 - DNA, 81 bp, Homo sapiens
ctgccacttttcagagtgcactgggcctgtctccacccatagaccatactgccacatctgtacctcgggcaccaatctctc

SEQ ID NO: 128847 - DNA, 78 bp, Homo sapiens
gtgcactgggcctgtctccacccatagaccatactgccacatctgtacctcgggcaccaatctctccccaccacaggg

SEQ ID NO: 128848 - DNA, 80 bp, Homo sapiens
tgtctccacccatagaccatactgccacatctgtacctcgggcaccaatctctccccaccacaggggcctgtgcctgaga

SEQ ID NO: 128849 - DNA, 79 bp, Homo sapiens
tagaccatactgccacatctgtacctcgggcaccaatctctccccaccacaggggcctgtgcctgagatggtccctcta

SEQ ID NO: 128850 - DNA, 78 bp, Homo sapiens
tactgccacatctgtacctcgggcaccaatctctccccaccacaggggcctgtgcctgagatggtccctctacagaaa

SEQ ID NO: 128851 - DNA, 76 bp, Homo sapiens
atctgtacctcgggcaccaatctctccccaccacaggggcctgtgcctgagatggtccctctacagaaatacctgc

SEQ ID NO: 128852 - DNA, 78 bp, Homo sapiens
accaatctctccccaccacaggggcctgtgcctgagatggtccctctacagaaatacctgctcctggcatggctggct

SEQ ID NO: 128853 - DNA, 79 bp, Homo sapiens
tccccaccacaggggcctgtgcctgagatggtccctctacagaaatacctgctcctggcatggctggcttcttgccaat

SEQ ID NO: 128854 - DNA, 81 bp, Homo sapiens
aggggcctgtgcctgagatggtccctctacagaaatacctgctcctggcatggctggcttcttgccaattctggatctcca

SEQ ID NO: 128855 - DNA, 84 bp, Homo sapiens
ctgtgcctgagatggtccctctacagaaatacctgctcctggcatggctggcttcttgccaattctggatctccagctgccacc

SEQ ID NO: 128856 - DNA, 83 bp, Homo sapiens
ctacagaaatacctgctcctggcatggctggcttcttgccaattctggatctccagctgccaccccagagaggcactggcttc

SEQ ID NO: 128857 - DNA, 80 bp, Homo sapiens
ctcctggcatggctggcttcttgccaattctggatctccagctgccaccccagagaggcactggcttccctgtttaaaga

SEQ ID NO: 128858 - DNA, 77 bp, Homo sapiens
atggctggcttcttgccaattctggatctccagctgccaccccagagaggcactggcttccctgtttaaagagggtc

SEQ ID NO: 128859 - DNA, 73 bp, Homo sapiens
cttcttgccaattctggatctccagctgccaccccagagaggcactggcttccctgtttaaagagggtccccc

SEQ ID NO: 128860 - DNA, 73 bp, Homo sapiens
aattctggatctccagctgccaccccagagaggcactggcttccctgtttaaagagggtccccccatcaccca

SEQ ID NO: 128861 - DNA, 75 bp, Homo sapiens
gctgccaccccagagaggcactggcttccctgtttaaagagggtccccccatcacccatcttcacagcagactgt

SEQ ID NO: 128862 - DNA, 76 bp, Homo sapiens
cagagaggcactggcttccctgtttaaagagggtccccccatcacccatcttcacagcagactgtttgcttggctg

SEQ ID NO: 128863 - DNA, 74 bp, Homo sapiens
actggcttccctgtttaaagagggtccccccatcacccatcttcacagcagactgtttgcttggctgtgtgccc

SEQ ID NO: 128864 - DNA, 75 bp, Homo sapiens
ttccctgtttaaagagggtccccccatcacccatcttcacagcagactgtttgcttggctgtgtgccccttcaga

SEQ ID NO: 128865 - DNA, 76 bp, Homo sapiens
agagggtccccccatcacccatcttcacagcagactgtttgcttggctgtgtgccccttcagacccacacccatta

SEQ ID NO: 128866 - DNA, 73 bp, Homo sapiens
agcagactgtttgcttggctgtgtgccccttcagacccacacccattacctccccctctcccccatcctccca

SEQ ID NO: 128867 - DNA, 67 bp, Homo sapiens
ccccttcagacccacacccattacctccccctctcccccatcctcccaccctcttccaaaggctgaa

SEQ ID NO: 128868 - DNA, 71 bp, Homo sapiens
tcagacccacacccattacctccccctctcccccatcctcccaccctcttccaaaggctgaacacacagga

SEQ ID NO: 128869 - DNA, 68 bp, Homo sapiens
attacctccccctctcccccatcctcccaccctcttccaaaggctgaacacacaggagggattgggaa

SEQ ID NO: 128870 - DNA, 70 bp, Homo sapiens
ctctcccccatcctcccaccctcttccaaaggctgaacacacaggagggattgggaaatttgttgaacaa

SEQ ID NO: 128871 - DNA, 69 bp, Homo sapiens
atcctcccaccctcttccaaaggctgaacacacaggagggattgggaaatttgttgaacaaagaagtta

SEQ ID NO: 128872 - DNA, 70 bp, Homo sapiens
accctcttccaaaggctgaacacacaggagggattgggaaatttgttgaacaaagaagttacacataagc

SEQ ID NO: 128873 - DNA, 72 bp, Homo sapiens
aaaggctgaacacacaggagggattgggaaatttgttgaacaaagaagttacacataagccctgatgtgtta

SEQ ID NO: 128874 - DNA, 73 bp, Homo sapiens
aacacacaggagggattgggaaatttgttgaacaaagaagttacacataagccctgatgtgttagcaggacag

SEQ ID NO: 128875 - DNA, 74 bp, Homo sapiens
attgggaaatttgttgaacaaagaagttacacataagccctgatgtgttagcaggacagtgagatgaacaaaac

SEQ ID NO: 128876 - DNA, 74 bp, Homo sapiens
aaatttgttgaacaaagaagttacacataagccctgatgtgttagcaggacagtgagatgaacaaaacgttctg

SEQ ID NO: 128877 - DNA, 73 bp, Homo sapiens
aacaaagaagttacacataagccctgatgtgttagcaggacagtgagatgaacaaaacgttctggaaagtggg

SEQ ID NO: 128878 - DNA, 78 bp, Homo sapiens
ttacacataagccctgatgtgttagcaggacagtgagatgaacaaaacgttctggaaagtgggtgtgagggtcagatg

SEQ ID NO: 128879 - DNA, 78 bp, Homo sapiens
tgatgtgttagcaggacagtgagatgaacaaaacgttctggaaagtgggtgtgagggtcagatgtggagggagtgaaa

SEQ ID NO: 128880 - DNA, 76 bp, Homo sapiens
ttagcaggacagtgagatgaacaaaacgttctggaaagtgggtgtgagggtcagatgtggagggagtgaaatcttc

SEQ ID NO: 128881 - DNA, 73 bp, Homo sapiens
agtgagatgaacaaaacgttctggaaagtgggtgtgagggtcagatgtggagggagtgaaatcttcccaggga

SEQ ID NO: 128882 - DNA, 71 bp, Homo sapiens
aacaaaacgttctggaaagtgggtgtgagggtcagatgtggagggagtgaaatcttcccagggagagaatg

SEQ ID NO: 128883 - DNA, 75 bp, Homo sapiens
aaagtgggtgtgagggtcagatgtggagggagtgaaatcttcccagggagagaatgtctctgggtcaacctgctc

SEQ ID NO: 128884 - DNA, 77 bp, Homo sapiens
gggtgtgagggtcagatgtggagggagtgaaatcttcccagggagagaatgtctctgggtcaacctgctcctgctgg

SEQ ID NO: 128885 - DNA, 76 bp, Homo sapiens
agatgtggagggagtgaaatcttcccagggagagaatgtctctgggtcaacctgctcctgctgggctgggagggcc

SEQ ID NO: 128886 - DNA, 74 bp, Homo sapiens
agggagtgaaatcttcccagggagagaatgtctctgggtcaacctgctcctgctgggctgggagggccgaacac

SEQ ID NO: 128887 - DNA, 72 bp, Homo sapiens
aatcttcccagggagagaatgtctctgggtcaacctgctcctgctgggctgggagggccgaacaccccccac

SEQ ID NO: 128888 - DNA, 73 bp, Homo sapiens
gggagagaatgtctctgggtcaacctgctcctgctgggctgggagggccgaacaccccccacccatcacccca

SEQ ID NO: 128889 - DNA, 72 bp, Homo sapiens
gtctctgggtcaacctgctcctgctgggctgggagggccgaacaccccccacccatcaccccaggctggccc

SEQ ID NO: 128890 - DNA, 71 bp, Homo sapiens
aacctgctcctgctgggctgggagggccgaacaccccccacccatcaccccaggctggccctgaccccagc

SEQ ID NO: 128891 - DNA, 70 bp, Homo sapiens
tgggctgggagggccgaacaccccccacccatcaccccaggctggccctgaccccagccttccctgtgcc

SEQ ID NO: 128892 - DNA, 71 bp, Homo sapiens
agggccgaacaccccccacccatcaccccaggctggccctgaccccagccttccctgtgcctgcagcaccg

SEQ ID NO: 128893 - DNA, 78 bp, Homo sapiens
cccccacccatcaccccaggctggccctgaccccagccttccctgtgcctgcagcaccggcagctgctgaaggacagc

SEQ ID NO: 128894 - DNA, 82 bp, Homo sapiens
atcaccccaggctggccctgaccccagccttccctgtgcctgcagcaccggcagctgctgaaggacagcttcatggtggagc

SEQ ID NO: 128895 - DNA, 82 bp, Homo sapiens
aggctggccctgaccccagccttccctgtgcctgcagcaccggcagctgctgaaggacagcttcatggtggagctggtggag

SEQ ID NO: 128896 - DNA, 80 bp, Homo sapiens
ccccagccttccctgtgcctgcagcaccggcagctgctgaaggacagcttcatggtggagctggtggagggggcccgcaa

SEQ ID NO: 128897 - DNA, 83 bp, Homo sapiens
ttccctgtgcctgcagcaccggcagctgctgaaggacagcttcatggtggagctggtggagggggcccgcaagctgcgccacg

SEQ ID NO: 128898 - DNA, 84 bp, Homo sapiens
tgcagcaccggcagctgctgaaggacagcttcatggtggagctggtggagggggcccgcaagctgcgccacgtcttcctgttca

SEQ ID NO: 128899 - DNA, 79 bp, Homo sapiens
cagctgctgaaggacagcttcatggtggagctggtggagggggcccgcaagctgcgccacgtcttcctgttcaccgacc

SEQ ID NO: 128900 - DNA, 76 bp, Homo sapiens
aaggacagcttcatggtggagctggtggagggggcccgcaagctgcgccacgtcttcctgttcaccgacctgcttc

SEQ ID NO: 128901 - DNA, 78 bp, Homo sapiens
cttcatggtggagctggtggagggggcccgcaagctgcgccacgtcttcctgttcaccgacctgcttctctgcaccaa

SEQ ID NO: 128902 - DNA, 79 bp, Homo sapiens
ctggtggagggggcccgcaagctgcgccacgtcttcctgttcaccgacctgcttctctgcaccaagctcaagaagcaga

SEQ ID NO: 128903 - DNA, 80 bp, Homo sapiens
gggcccgcaagctgcgccacgtcttcctgttcaccgacctgcttctctgcaccaagctcaagaagcagagcggagggtga

SEQ ID NO: 128904 - DNA, 81 bp, Homo sapiens
aagctgcgccacgtcttcctgttcaccgacctgcttctctgcaccaagctcaagaagcagagcggagggtgagtgacgatg

SEQ ID NO: 128905 - DNA, 79 bp, Homo sapiens
ccacgtcttcctgttcaccgacctgcttctctgcaccaagctcaagaagcagagcggagggtgagtgacgatgtggccc

SEQ ID NO: 128906 - DNA, 83 bp, Homo sapiens
tgttcaccgacctgcttctctgcaccaagctcaagaagcagagcggagggtgagtgacgatgtggcccctgtcccagcagtga

SEQ ID NO: 128907 - DNA, 80 bp, Homo sapiens
atagaaggcagtcggtgcatgtgaacgttcttctctccccatccccagcaaaacgcagcagtatgactgcaaatggtaca

SEQ ID NO: 128908 - DNA, 80 bp, Homo sapiens
agtcggtgcatgtgaacgttcttctctccccatccccagcaaaacgcagcagtatgactgcaaatggtacattccgctca

SEQ ID NO: 128909 - DNA, 80 bp, Homo sapiens
atgtgaacgttcttctctccccatccccagcaaaacgcagcagtatgactgcaaatggtacattccgctcacggatctca

SEQ ID NO: 128910 - DNA, 82 bp, Homo sapiens
ttcttctctccccatccccagcaaaacgcagcagtatgactgcaaatggtacattccgctcacggatctcagcttccagatg

SEQ ID NO: 128911 - DNA, 83 bp, Homo sapiens
atccccagcaaaacgcagcagtatgactgcaaatggtacattccgctcacggatctcagcttccagatggtggatgaactgga

SEQ ID NO: 128912 - DNA, 83 bp, Homo sapiens
aaaacgcagcagtatgactgcaaatggtacattccgctcacggatctcagcttccagatggtggatgaactggaggcagtgcc

SEQ ID NO: 128913 - DNA, 82 bp, Homo sapiens
agtatgactgcaaatggtacattccgctcacggatctcagcttccagatggtggatgaactggaggcagtgcccaacatccc

SEQ ID NO: 128914 - DNA, 79 bp, Homo sapiens
aaatggtacattccgctcacggatctcagcttccagatggtggatgaactggaggcagtgcccaacatccccctggtgc

SEQ ID NO: 128915 - DNA, 80 bp, Homo sapiens
acattccgctcacggatctcagcttccagatggtggatgaactggaggcagtgcccaacatccccctggtgcccgatgag

SEQ ID NO: 128916 - DNA, 81 bp, Homo sapiens
atctcagcttccagatggtggatgaactggaggcagtgcccaacatccccctggtgcccgatgaggagctggacgctttga

SEQ ID NO: 128917 - DNA, 80 bp, Homo sapiens
ttccagatggtggatgaactggaggcagtgcccaacatccccctggtgcccgatgaggagctggacgctttgaagatcaa

SEQ ID NO: 128918 - DNA, 82 bp, Homo sapiens
gatgaactggaggcagtgcccaacatccccctggtgcccgatgaggagctggacgctttgaagatcaagatctcccagatca

SEQ ID NO: 128919 - DNA, 81 bp, Homo sapiens
aggcagtgcccaacatccccctggtgcccgatgaggagctggacgctttgaagatcaagatctcccagatcaagaatgaca

SEQ ID NO: 128920 - DNA, 83 bp, Homo sapiens
caacatccccctggtgcccgatgaggagctggacgctttgaagatcaagatctcccagatcaagaatgacatccagagagaga

SEQ ID NO: 128921 - DNA, 85 bp, Homo sapiens
ctggtgcccgatgaggagctggacgctttgaagatcaagatctcccagatcaagaatgacatccagagagagaaggtgcacacca

SEQ ID NO: 128922 - DNA, 82 bp, Homo sapiens
cccgatgaggagctggacgctttgaagatcaagatctcccagatcaagaatgacatccagagagagaaggtgcacaccaggg

SEQ ID NO: 128923 - DNA, 82 bp, Homo sapiens
agctggacgctttgaagatcaagatctcccagatcaagaatgacatccagagagagaaggtgcacaccaggggagcaagggc

SEQ ID NO: 128924 - DNA, 78 bp, Homo sapiens
tttgaagatcaagatctcccagatcaagaatgacatccagagagagaaggtgcacaccaggggagcaagggccgggtt

SEQ ID NO: 128925 - DNA, 76 bp, Homo sapiens
aagatctcccagatcaagaatgacatccagagagagaaggtgcacaccaggggagcaagggccgggtttggtgtgg

SEQ ID NO: 128926 - DNA, 79 bp, Homo sapiens
ttgtgtggagcgctggaatgggaaggtgaggctgtggcatctccccacagagggcgaacaagggcagcaaggctacgga

SEQ ID NO: 128927 - DNA, 78 bp, Homo sapiens
tggaatgggaaggtgaggctgtggcatctccccacagagggcgaacaagggcagcaaggctacggagaggctgaagaa

SEQ ID NO: 128928 - DNA, 78 bp, Homo sapiens
aaggtgaggctgtggcatctccccacagagggcgaacaagggcagcaaggctacggagaggctgaagaagaagctgtc

SEQ ID NO: 128929 - DNA, 80 bp, Homo sapiens
tggcatctccccacagagggcgaacaagggcagcaaggctacggagaggctgaagaagaagctgtcggagcaggagtcac

SEQ ID NO: 128930 - DNA, 82 bp, Homo sapiens
ccacagagggcgaacaagggcagcaaggctacggagaggctgaagaagaagctgtcggagcaggagtcactgctgctgctta

SEQ ID NO: 128931 - DNA, 82 bp, Homo sapiens
agggcgaacaagggcagcaaggctacggagaggctgaagaagaagctgtcggagcaggagtcactgctgctgcttatgtctc

SEQ ID NO: 128932 - DNA, 85 bp, Homo sapiens
cagcaaggctacggagaggctgaagaagaagctgtcggagcaggagtcactgctgctgcttatgtctcccagcatggccttcagg

SEQ ID NO: 128933 - DNA, 85 bp, Homo sapiens
aggctacggagaggctgaagaagaagctgtcggagcaggagtcactgctgctgcttatgtctcccagcatggccttcagggtgca

SEQ ID NO: 128934 - DNA, 86 bp, Homo sapiens
tgaagaagaagctgtcggagcaggagtcactgctgctgcttatgtctcccagcatggccttcagggtgcacagccgcaacggcaag

SEQ ID NO: 128935 - DNA, 85 bp, Homo sapiens
aagaagctgtcggagcaggagtcactgctgctgcttatgtctcccagcatggccttcagggtgcacagccgcaacggcaaggtga

SEQ ID NO: 128936 - DNA, 86 bp, Homo sapiens
agcaggagtcactgctgctgcttatgtctcccagcatggccttcagggtgcacagccgcaacggcaaggtgagcgcctgctgttcc

SEQ ID NO: 128937 - DNA, 84 bp, Homo sapiens
gtcactgctgctgcttatgtctcccagcatggccttcagggtgcacagccgcaacggcaaggtgagcgcctgctgttccggccc

SEQ ID NO: 128938 - DNA, 81 bp, Homo sapiens
ctgcttatgtctcccagcatggccttcagggtgcacagccgcaacggcaaggtgagcgcctgctgttccggcccctcctgc

SEQ ID NO: 128939 - DNA, 80 bp, Homo sapiens
ctcccagcatggccttcagggtgcacagccgcaacggcaaggtgagcgcctgctgttccggcccctcctgctctcctggc

SEQ ID NO: 128940 - DNA, 73 bp, Homo sapiens
taccaggcatttgcgtagccagggcggagataactgggtgtgttcttcttgcccaccctagagttacacgttc

SEQ ID NO: 128941 - DNA, 73 bp, Homo sapiens
atttgcgtagccagggcggagataactgggtgtgttcttcttgcccaccctagagttacacgttcctgatctc

SEQ ID NO: 128942 - DNA, 75 bp, Homo sapiens
ccagggcggagataactgggtgtgttcttcttgcccaccctagagttacacgttcctgatctcctctgactatga

SEQ ID NO: 128943 - DNA, 78 bp, Homo sapiens
ataactgggtgtgttcttcttgcccaccctagagttacacgttcctgatctcctctgactatgagcgtgcagagtgga

SEQ ID NO: 128944 - DNA, 78 bp, Homo sapiens
ttcttcttgcccaccctagagttacacgttcctgatctcctctgactatgagcgtgcagagtggagggagaacatccg

SEQ ID NO: 128945 - DNA, 80 bp, Homo sapiens
ccaccctagagttacacgttcctgatctcctctgactatgagcgtgcagagtggagggagaacatccgggagcagcagaa

SEQ ID NO: 128946 - DNA, 83 bp, Homo sapiens
tagagttacacgttcctgatctcctctgactatgagcgtgcagagtggagggagaacatccgggagcagcagaagaagtgtga

SEQ ID NO: 128947 - DNA, 84 bp, Homo sapiens
ttcctgatctcctctgactatgagcgtgcagagtggagggagaacatccgggagcagcagaagaagtgtgagtatcctctgtcc

SEQ ID NO: 128948 - DNA, 83 bp, Homo sapiens
ctcctctgactatgagcgtgcagagtggagggagaacatccgggagcagcagaagaagtgtgagtatcctctgtcctgagagg

SEQ ID NO: 128949 - DNA, 82 bp, Homo sapiens
tatgagcgtgcagagtggagggagaacatccgggagcagcagaagaagtgtgagtatcctctgtcctgagaggggctgggct

SEQ ID NO: 128950 - DNA, 78 bp, Homo sapiens
tggagggagaacatccgggagcagcagaagaagtgtgagtatcctctgtcctgagaggggctgggcttcaaaccatta

SEQ ID NO: 128951 - DNA, 77 bp, Homo sapiens
agaacatccgggagcagcagaagaagtgtgagtatcctctgtcctgagaggggctgggcttcaaaccattagggcca

SEQ ID NO: 128952 - DNA, 73 bp, Homo sapiens
aaggagcagattgaccaattggtgcacctcttttccaacctcccaggtttcagaagcttctccctgacatccg

SEQ ID NO: 128953 - DNA, 76 bp, Homo sapiens
agattgaccaattggtgcacctcttttccaacctcccaggtttcagaagcttctccctgacatccgtggagctgca

SEQ ID NO: 128954 - DNA, 78 bp, Homo sapiens
aattggtgcacctcttttccaacctcccaggtttcagaagcttctccctgacatccgtggagctgcagatgctgacca

SEQ ID NO: 128955 - DNA, 78 bp, Homo sapiens
ttttccaacctcccaggtttcagaagcttctccctgacatccgtggagctgcagatgctgaccaactcgtgtgtgaaa

SEQ ID NO: 128956 - DNA, 84 bp, Homo sapiens
tttcagaagcttctccctgacatccgtggagctgcagatgctgaccaactcgtgtgtgaaactccagactgtccacagcattcc

SEQ ID NO: 128957 - DNA, 86 bp, Homo sapiens
tccctgacatccgtggagctgcagatgctgaccaactcgtgtgtgaaactccagactgtccacagcattccgctgaccatcaataa

SEQ ID NO: 128958 - DNA, 84 bp, Homo sapiens
acatccgtggagctgcagatgctgaccaactcgtgtgtgaaactccagactgtccacagcattccgctgaccatcaataaggaa

SEQ ID NO: 128959 - DNA, 82 bp, Homo sapiens
agctgcagatgctgaccaactcgtgtgtgaaactccagactgtccacagcattccgctgaccatcaataaggaaggtgggcc

SEQ ID NO: 128960 - DNA, 75 bp, Homo sapiens
ctgaccaactcgtgtgtgaaactccagactgtccacagcattccgctgaccatcaataaggaaggtgggcccccc

SEQ ID NO: 128961 - DNA, 73 bp, Homo sapiens
tgtgtgaaactccagactgtccacagcattccgctgaccatcaataaggaaggtgggcccccccgtttccgtg

SEQ ID NO: 128962 - DNA, 71 bp, Homo sapiens
aaactccagactgtccacagcattccgctgaccatcaataaggaaggtgggcccccccgtttccgtgtaca

SEQ ID NO: 128963 - DNA, 73 bp, Homo sapiens
ctgtccacagcattccgctgaccatcaataaggaaggtgggcccccccgtttccgtgtacagggcacctgcag

SEQ ID NO: 128964 - DNA, 70 bp, Homo sapiens
attccgctgaccatcaataaggaaggtgggcccccccgtttccgtgtacagggcacctgcagggagggca

SEQ ID NO: 128965 - DNA, 72 bp, Homo sapiens
atcaataaggaaggtgggcccccccgtttccgtgtacagggcacctgcagggagggcaggcagctagcctga

SEQ ID NO: 128966 - DNA, 72 bp, Homo sapiens
aggaaggtgggcccccccgtttccgtgtacagggcacctgcagggagggcaggcagctagcctgaaggctga

SEQ ID NO: 128967 - DNA, 73 bp, Homo sapiens
cccgtttccgtgtacagggcacctgcagggagggcaggcagctagcctgaaggctgatccccccttcctgtta

SEQ ID NO: 128968 - DNA, 78 bp, Homo sapiens
tgtacagggcacctgcagggagggcaggcagctagcctgaaggctgatccccccttcctgttagcacttttgatggga

SEQ ID NO: 128969 - DNA, 76 bp, Homo sapiens
acctgcagggagggcaggcagctagcctgaaggctgatccccccttcctgttagcacttttgatgggactagtgga

SEQ ID NO: 128970 - DNA, 73 bp, Homo sapiens
agggcaggcagctagcctgaaggctgatccccccttcctgttagcacttttgatgggactagtggactttggt

SEQ ID NO: 128971 - DNA, 73 bp, Homo sapiens
agctagcctgaaggctgatccccccttcctgttagcacttttgatgggactagtggactttggttcagaagga

SEQ ID NO: 128972 - DNA, 73 bp, Homo sapiens
ctgaaggctgatccccccttcctgttagcacttttgatgggactagtggactttggttcagaaggaagagcta

SEQ ID NO: 128973 - DNA, 72 bp, Homo sapiens
ccccttcctgttagcacttttgatgggactagtggactttggttcagaaggaagagctatgcttgttagggc

SEQ ID NO: 128974 - DNA, 73 bp, Homo sapiens
actagtggactttggttcagaaggaagagctatgcttgttagggcctcttgtctcctcccaggagtggacaag

SEQ ID NO: 128975 - DNA, 72 bp, Homo sapiens
tttggttcagaaggaagagctatgcttgttagggcctcttgtctcctcccaggagtggacaaggtgggttag

SEQ ID NO: 128976 - DNA, 72 bp, Homo sapiens
aaggaagagctatgcttgttagggcctcttgtctcctcccaggagtggacaaggtgggttaggagcagtttc

SEQ ID NO: 128977 - DNA, 75 bp, Homo sapiens
ttagggcctcttgtctcctcccaggagtggacaaggtgggttaggagcagtttctccctgagtggctgctgctgg

SEQ ID NO: 128978 - DNA, 76 bp, Homo sapiens
ttgtctcctcccaggagtggacaaggtgggttaggagcagtttctccctgagtggctgctgctgggtggttgagga

SEQ ID NO: 128979 - DNA, 77 bp, Homo sapiens
acaaggtgggttaggagcagtttctccctgagtggctgctgctgggtggttgaggagatgcacggcttctgttccta

SEQ ID NO: 128980 - DNA, 84 bp, Homo sapiens
ttaggagcagtttctccctgagtggctgctgctgggtggttgaggagatgcacggcttctgttcctagtcacaaggctgcagca

SEQ ID NO: 128981 - DNA, 88 bp, Homo sapiens
ctgctgctgggtggttgaggagatgcacggcttctgttcctagtcacaaggctgcagcagacgctcctcagatgctctgtgccttgga

SEQ ID NO: 128982 - DNA, 86 bp, Homo sapiens
ctgggtggttgaggagatgcacggcttctgttcctagtcacaaggctgcagcagacgctcctcagatgctctgtgccttggatctg

SEQ ID NO: 128983 - DNA, 87 bp, Homo sapiens
tgaggagatgcacggcttctgttcctagtcacaaggctgcagcagacgctcctcagatgctctgtgccttggatctggccccactcc

SEQ ID NO: 128984 - DNA, 82 bp, Homo sapiens
cttctgttcctagtcacaaggctgcagcagacgctcctcagatgctctgtgccttggatctggccccactcccgtcctccca

SEQ ID NO: 128985 - DNA, 82 bp, Homo sapiens
ttcctagtcacaaggctgcagcagacgctcctcagatgctctgtgccttggatctggccccactcccgtcctcccagccctc

SEQ ID NO: 128986 - DNA, 81 bp, Homo sapiens
acaaggctgcagcagacgctcctcagatgctctgtgccttggatctggccccactcccgtcctcccagccctcctctcctc

SEQ ID NO: 128987 - DNA, 79 bp, Homo sapiens
agcagacgctcctcagatgctctgtgccttggatctggccccactcccgtcctcccagccctcctctcctccagctacc

SEQ ID NO: 128988 - DNA, 78 bp, Homo sapiens
gatgctctgtgccttggatctggccccactcccgtcctcccagccctcctctcctccagctacctgccagccggcact

SEQ ID NO: 128989 - DNA, 75 bp, Homo sapiens
tgtgccttggatctggccccactcccgtcctcccagccctcctctcctccagctacctgccagccggcacttttg

SEQ ID NO: 128990 - DNA, 73 bp, Homo sapiens
tggccccactcccgtcctcccagccctcctctcctccagctacctgccagccggcacttttggtcaagctgtt

SEQ ID NO: 128991 - DNA, 90 bp, Homo sapiens
agccggcacttttggtcaagctgttttgcattcactgttgcacatatgctcagtcacacacacagcatacgctatgcacatgtgtccaca

SEQ ID NO: 128992 - DNA, 90 bp, Homo sapiens
aagctgttttgcattcactgttgcacatatgctcagtcacacacacagcatacgctatgcacatgtgtccacacacaccccacccacatc

SEQ ID NO: 128993 - DNA, 89 bp, Homo sapiens
attcactgttgcacatatgctcagtcacacacacagcatacgctatgcacatgtgtccacacacaccccacccacatcccacatcaccc

SEQ ID NO: 128994 - DNA, 82 bp, Homo sapiens
agtcacacacacagcatacgctatgcacatgtgtccacacacaccccacccacatcccacatcaccccgaccccctctgctg

SEQ ID NO: 128995 - DNA, 80 bp, Homo sapiens
acacacagcatacgctatgcacatgtgtccacacacaccccacccacatcccacatcaccccgaccccctctgctgtcct

SEQ ID NO: 128996 - DNA, 76 bp, Homo sapiens
tatgcacatgtgtccacacacaccccacccacatcccacatcaccccgaccccctctgctgtccttggaaccttat

SEQ ID NO: 128997 - DNA, 73 bp, Homo sapiens
atgtgtccacacacaccccacccacatcccacatcaccccgaccccctctgctgtccttggaaccttattaca

SEQ ID NO: 128998 - DNA, 71 bp, Homo sapiens
acaccccacccacatcccacatcaccccgaccccctctgctgtccttggaaccttattacacttcgagtca

SEQ ID NO: 128999 - DNA, 72 bp, Homo sapiens
acatcccacatcaccccgaccccctctgctgtccttggaaccttattacacttcgagtcactggtttgcctg

SEQ ID NO: 129000 - DNA, 72 bp, Homo sapiens
atcaccccgaccccctctgctgtccttggaaccttattacacttcgagtcactggtttgcctgtattgtgaa

SEQ ID NO: 129001 - DNA, 74 bp, Homo sapiens
cccctctgctgtccttggaaccttattacacttcgagtcactggtttgcctgtattgtgaaaccagctggatcc

SEQ ID NO: 129002 - DNA, 75 bp, Homo sapiens
ctgtccttggaaccttattacacttcgagtcactggtttgcctgtattgtgaaaccagctggatcctgagatccc

SEQ ID NO: 129003 - DNA, 75 bp, Homo sapiens
aaccttattacacttcgagtcactggtttgcctgtattgtgaaaccagctggatcctgagatccccaagacagaa

SEQ ID NO: 129004 - DNA, 81 bp, Homo sapiens
ttacacttcgagtcactggtttgcctgtattgtgaaaccagctggatcctgagatccccaagacagaaatcatgatgagta

SEQ ID NO: 129005 - DNA, 79 bp, Homo sapiens
agtcactggtttgcctgtattgtgaaaccagctggatcctgagatccccaagacagaaatcatgatgagtatgtttttg

SEQ ID NO: 129006 - DNA, 82 bp, Homo sapiens
tgtattgtgaaaccagctggatcctgagatccccaagacagaaatcatgatgagtatgtttttggcccatgacactggctta

SEQ ID NO: 129007 - DNA, 78 bp, Homo sapiens
aaaccagctggatcctgagatccccaagacagaaatcatgatgagtatgtttttggcccatgacactggcttaccttg

SEQ ID NO: 129008 - DNA, 83 bp, Homo sapiens
agatccccaagacagaaatcatgatgagtatgtttttggcccatgacactggcttaccttgtgccaggcagatggcagccaca

SEQ ID NO: 129009 - DNA, 81 bp, Homo sapiens
tgagtatgtttttggcccatgacactggcttaccttgtgccaggcagatggcagccacacagtgtccaccggatggttgat

SEQ ID NO: 129010 - DNA, 79 bp, Homo sapiens
tttttggcccatgacactggcttaccttgtgccaggcagatggcagccacacagtgtccaccggatggttgattttgaa

SEQ ID NO: 129011 - DNA, 81 bp, Homo sapiens
ttaccttgtgccaggcagatggcagccacacagtgtccaccggatggttgattttgaagcagagttagcttgtcacctgcc

SEQ ID NO: 129012 - DNA, 79 bp, Homo sapiens
ccaggcagatggcagccacacagtgtccaccggatggttgattttgaagcagagttagcttgtcacctgcctccctttc

SEQ ID NO: 129013 - DNA, 76 bp, Homo sapiens
agatggcagccacacagtgtccaccggatggttgattttgaagcagagttagcttgtcacctgcctccctttcccg

SEQ ID NO: 129014 - DNA, 72 bp, Homo sapiens
agtgtccaccggatggttgattttgaagcagagttagcttgtcacctgcctccctttcccgggacaacagaa

SEQ ID NO: 129015 - DNA, 73 bp, Homo sapiens
ggatggttgattttgaagcagagttagcttgtcacctgcctccctttcccgggacaacagaagctgacctctt

SEQ ID NO: 129016 - DNA, 80 bp, Homo sapiens
aagcagagttagcttgtcacctgcctccctttcccgggacaacagaagctgacctctttgatctcttgcgcagatgatga

SEQ ID NO: 129017 - DNA, 76 bp, Homo sapiens
tccctttcccgggacaacagaagctgacctctttgatctcttgcgcagatgatgagtctccggggctctatgggtt

SEQ ID NO: 129018 - DNA, 79 bp, Homo sapiens
ttcccgggacaacagaagctgacctctttgatctcttgcgcagatgatgagtctccggggctctatgggtttctgaatg

SEQ ID NO: 129019 - DNA, 83 bp, Homo sapiens
aacagaagctgacctctttgatctcttgcgcagatgatgagtctccggggctctatgggtttctgaatgtcatcgtccactca

SEQ ID NO: 129020 - DNA, 83 bp, Homo sapiens
tctttgatctcttgcgcagatgatgagtctccggggctctatgggtttctgaatgtcatcgtccactcagccactggatttaa

SEQ ID NO: 129021 - DNA, 83 bp, Homo sapiens
ttgcgcagatgatgagtctccggggctctatgggtttctgaatgtcatcgtccactcagccactggatttaagcagagttcaa

SEQ ID NO: 129022 - DNA, 79 bp, Homo sapiens
atgatgagtctccggggctctatgggtttctgaatgtcatcgtccactcagccactggatttaagcagagttcaagtaa

SEQ ID NO: 129023 - DNA, 75 bp, Homo sapiens
cggggctctatgggtttctgaatgtcatcgtccactcagccactggatttaagcagagttcaagtaagtactggt

SEQ ID NO: 129024 - DNA, 75 bp, Homo sapiens
ctctatgggtttctgaatgtcatcgtccactcagccactggatttaagcagagttcaagtaagtactggtttggg

SEQ ID NO: 129025 - DNA, 74 bp, Homo sapiens
ttctgaatgtcatcgtccactcagccactggatttaagcagagttcaagtaagtactggtttggggaggagggt

SEQ ID NO: 129026 - DNA, 73 bp, Homo sapiens
atcgtccactcagccactggatttaagcagagttcaagtaagtactggtttggggaggagggttgcagcggcc

SEQ ID NO: 129027 - DNA, 72 bp, Homo sapiens
cactggatttaagcagagttcaagtaagtactggtttggggaggagggttgcagcggccgagccagggtctc

SEQ ID NO: 129028 - DNA, 69 bp, Homo sapiens
agttcaagtaagtactggtttggggaggagggttgcagcggccgagccagggtctccacccaggaagga

SEQ ID NO: 129029 - DNA, 71 bp, Homo sapiens
aagtactggtttggggaggagggttgcagcggccgagccagggtctccacccaggaaggactcatcgggca

SEQ ID NO: 129030 - DNA, 72 bp, Homo sapiens
ggaggagggttgcagcggccgagccagggtctccacccaggaaggactcatcgggcagggtgtggggaaaca

SEQ ID NO: 129031 - DNA, 72 bp, Homo sapiens
ttgcagcggccgagccagggtctccacccaggaaggactcatcgggcagggtgtggggaaacagggaggttg

SEQ ID NO: 129032 - DNA, 72 bp, Homo sapiens
agccagggtctccacccaggaaggactcatcgggcagggtgtggggaaacagggaggttgttcagatgacca

SEQ ID NO: 129033 - DNA, 72 bp, Homo sapiens
tctccacccaggaaggactcatcgggcagggtgtggggaaacagggaggttgttcagatgaccacgggacac

SEQ ID NO: 129034 - DNA, 70 bp, Homo sapiens
aggaaggactcatcgggcagggtgtggggaaacagggaggttgttcagatgaccacgggacacctttgac

SEQ ID NO: 129035 - DNA, 72 bp, Homo sapiens
tcatcgggcagggtgtggggaaacagggaggttgttcagatgaccacgggacacctttgaccctggccgctg

SEQ ID NO: 129036 - DNA, 73 bp, Homo sapiens
tgtggggaaacagggaggttgttcagatgaccacgggacacctttgaccctggccgctgtggagtgtttgtgc

SEQ ID NO: 129037 - DNA, 73 bp, Homo sapiens
aaacagggaggttgttcagatgaccacgggacacctttgaccctggccgctgtggagtgtttgtgctggttga

SEQ ID NO: 129038 - DNA, 77 bp, Homo sapiens
ttgttcagatgaccacgggacacctttgaccctggccgctgtggagtgtttgtgctggttgatgccttctgggtgtg

SEQ ID NO: 129039 - DNA, 73 bp, Homo sapiens
cacgggacacctttgaccctggccgctgtggagtgtttgtgctggttgatgccttctgggtgtggaattgttt

SEQ ID NO: 129040 - DNA, 72 bp, Homo sapiens
accctggccgctgtggagtgtttgtgctggttgatgccttctgggtgtggaattgtttttcccggagtggcc

SEQ ID NO: 129041 - DNA, 74 bp, Homo sapiens
ctgtggagtgtttgtgctggttgatgccttctgggtgtggaattgtttttcccggagtggcctctgccctctcc

SEQ ID NO: 129042 - DNA, 73 bp, Homo sapiens
tttgtgctggttgatgccttctgggtgtggaattgtttttcccggagtggcctctgccctctcccctagcctg

SEQ ID NO: 129043 - DNA, 75 bp, Homo sapiens
tgggtgtggaattgtttttcccggagtggcctctgccctctcccctagcctgtctcagatcctgggagctggtga

SEQ ID NO: 129044 - DNA, 74 bp, Homo sapiens
aattgtttttcccggagtggcctctgccctctcccctagcctgtctcagatcctgggagctggtgagctgcccc

SEQ ID NO: 129045 - DNA, 79 bp, Homo sapiens
agtggcctctgccctctcccctagcctgtctcagatcctgggagctggtgagctgccccctgcaggtggatcgagtaat

SEQ ID NO: 129046 - DNA, 80 bp, Homo sapiens
ctctgccctctcccctagcctgtctcagatcctgggagctggtgagctgccccctgcaggtggatcgagtaattgcaggg

SEQ ID NO: 129047 - DNA, 79 bp, Homo sapiens
ctagcctgtctcagatcctgggagctggtgagctgccccctgcaggtggatcgagtaattgcaggggtttggcaaggac

SEQ ID NO: 129048 - DNA, 80 bp, Homo sapiens
tcagatcctgggagctggtgagctgccccctgcaggtggatcgagtaattgcaggggtttggcaaggactttgacagaca

SEQ ID NO: 129049 - DNA, 77 bp, Homo sapiens
ctgggagctggtgagctgccccctgcaggtggatcgagtaattgcaggggtttggcaaggactttgacagacatccc

SEQ ID NO: 129050 - DNA, 75 bp, Homo sapiens
tggtgagctgccccctgcaggtggatcgagtaattgcaggggtttggcaaggactttgacagacatccccagggg

SEQ ID NO: 129051 - DNA, 74 bp, Homo sapiens
tgcaggtggatcgagtaattgcaggggtttggcaaggactttgacagacatccccaggggtgcccgggagtgtg

SEQ ID NO: 129052 - DNA, 71 bp, Homo sapiens
gtggatcgagtaattgcaggggtttggcaaggactttgacagacatccccaggggtgcccgggagtgtggg

SEQ ID NO: 129053 - DNA, 71 bp, Homo sapiens
taattgcaggggtttggcaaggactttgacagacatccccaggggtgcccgggagtgtggggtccaagcca

SEQ ID NO: 129054 - DNA, 72 bp, Homo sapiens
gtttggcaaggactttgacagacatccccaggggtgcccgggagtgtggggtccaagccaggagggctgtca

SEQ ID NO: 129055 - DNA, 75 bp, Homo sapiens
actttgacagacatccccaggggtgcccgggagtgtggggtccaagccaggagggctgtcagcagtgcaccttca

SEQ ID NO: 129056 - DNA, 74 bp, Homo sapiens
agacatccccaggggtgcccgggagtgtggggtccaagccaggagggctgtcagcagtgcaccttcaccccaca

SEQ ID NO: 129057 - DNA, 82 bp, Homo sapiens
tgcccgggagtgtggggtccaagccaggagggctgtcagcagtgcaccttcaccccacagcagagcagatttggctgctctg

SEQ ID NO: 129058 - DNA, 86 bp, Homo sapiens
tgtggggtccaagccaggagggctgtcagcagtgcaccttcaccccacagcagagcagatttggctgctctgtcgagctggatgga

SEQ ID NO: 129059 - DNA, 82 bp, Homo sapiens
aggagggctgtcagcagtgcaccttcaccccacagcagagcagatttggctgctctgtcgagctggatggatactacttttt

SEQ ID NO: 129060 - DNA, 78 bp, Homo sapiens
agcagtgcaccttcaccccacagcagagcagatttggctgctctgtcgagctggatggatactactttttttttcctt

SEQ ID NO: 129061 - DNA, 70 bp, Homo sapiens
ttttttcctttccctctaagtgggggtctcccccagctactggagctgtcagaacagtgaaggctggtaa

SEQ ID NO: 129062 - DNA, 76 bp, Homo sapiens
tttccctctaagtgggggtctcccccagctactggagctgtcagaacagtgaaggctggtaacacatgagttgcac

SEQ ID NO: 129063 - DNA, 77 bp, Homo sapiens
taagtgggggtctcccccagctactggagctgtcagaacagtgaaggctggtaacacatgagttgcactgtgtaagt

SEQ ID NO: 129064 - DNA, 78 bp, Homo sapiens
ccccagctactggagctgtcagaacagtgaaggctggtaacacatgagttgcactgtgtaagtttctcgaggccgggc

SEQ ID NO: 129065 - DNA, 76 bp, Homo sapiens
atgtggaaaagacctgtgaccttctccatgtccacttctccccacagatctgtactgcaccctggaggtggattcc

SEQ ID NO: 129066 - DNA, 74 bp, Homo sapiens
aaaagacctgtgaccttctccatgtccacttctccccacagatctgtactgcaccctggaggtggattcctttg

SEQ ID NO: 129067 - DNA, 75 bp, Homo sapiens
cttctccatgtccacttctccccacagatctgtactgcaccctggaggtggattcctttgggtattttgtgaata

SEQ ID NO: 129068 - DNA, 74 bp, Homo sapiens
atgtccacttctccccacagatctgtactgcaccctggaggtggattcctttgggtattttgtgaataaagcaa

SEQ ID NO: 129069 - DNA, 74 bp, Homo sapiens
cccacagatctgtactgcaccctggaggtggattcctttgggtattttgtgaataaagcaaagacgcgcgtcta

SEQ ID NO: 129070 - DNA, 73 bp, Homo sapiens
atctgtactgcaccctggaggtggattcctttgggtattttgtgaataaagcaaagacgcgcgtctacaggga

SEQ ID NO: 129071 - DNA, 74 bp, Homo sapiens
cctggaggtggattcctttgggtattttgtgaataaagcaaagacgcgcgtctacagggacacagctgagccaa

SEQ ID NO: 129072 - DNA, 74 bp, Homo sapiens
gattcctttgggtattttgtgaataaagcaaagacgcgcgtctacagggacacagctgagccaaactggaacga

SEQ ID NO: 129073 - DNA, 74 bp, Homo sapiens
tttgggtattttgtgaataaagcaaagacgcgcgtctacagggacacagctgagccaaactggaacgaggtgag

SEQ ID NO: 129074 - DNA, 76 bp, Homo sapiens
gaataaagcaaagacgcgcgtctacagggacacagctgagccaaactggaacgaggtgaggaactgattccacaag

SEQ ID NO: 129075 - DNA, 75 bp, Homo sapiens
aagcaaagacgcgcgtctacagggacacagctgagccaaactggaacgaggtgaggaactgattccacaagggcc

SEQ ID NO: 129076 - DNA, 76 bp, Homo sapiens
cgtctacagggacacagctgagccaaactggaacgaggtgaggaactgattccacaagggcccagcctgccaggtg

SEQ ID NO: 129077 - DNA, 73 bp, Homo sapiens
acattgacccgtttgttcacactggacttcccttctcccttggggctgcaggaatttgagatagagctggagg

SEQ ID NO: 129078 - DNA, 74 bp, Homo sapiens
gtttgttcacactggacttcccttctcccttggggctgcaggaatttgagatagagctggagggctcccagacc

SEQ ID NO: 129079 - DNA, 76 bp, Homo sapiens
acttcccttctcccttggggctgcaggaatttgagatagagctggagggctcccagaccctgaggatactgtgcta

SEQ ID NO: 129080 - DNA, 78 bp, Homo sapiens
tcccttggggctgcaggaatttgagatagagctggagggctcccagaccctgaggatactgtgctatgaaaagtgtta

SEQ ID NO: 129081 - DNA, 79 bp, Homo sapiens
ctgcaggaatttgagatagagctggagggctcccagaccctgaggatactgtgctatgaaaagtgttacaacaagacga

SEQ ID NO: 129082 - DNA, 77 bp, Homo sapiens
aatttgagatagagctggagggctcccagaccctgaggatactgtgctatgaaaagtgttacaacaagacgaagatc

SEQ ID NO: 129083 - DNA, 75 bp, Homo sapiens
atagagctggagggctcccagaccctgaggatactgtgctatgaaaagtgttacaacaagacgaagatccccaag

SEQ ID NO: 129084 - DNA, 74 bp, Homo sapiens
ctcccagaccctgaggatactgtgctatgaaaagtgttacaacaagacgaagatccccaaggaggacggcgaga

SEQ ID NO: 129085 - DNA, 78 bp, Homo sapiens
tgaggatactgtgctatgaaaagtgttacaacaagacgaagatccccaaggaggacggcgagagcacggacagactca

SEQ ID NO: 129086 - DNA, 76 bp, Homo sapiens
atactgtgctatgaaaagtgttacaacaagacgaagatccccaaggaggacggcgagagcacggacagactcatgg

SEQ ID NO: 129087 - DNA, 72 bp, Homo sapiens
atgaaaagtgttacaacaagacgaagatccccaaggaggacggcgagagcacggacagactcatggggaagg

SEQ ID NO: 129088 - DNA, 73 bp, Homo sapiens
ttacaacaagacgaagatccccaaggaggacggcgagagcacggacagactcatggggaagggccaggtccag

SEQ ID NO: 129089 - DNA, 75 bp, Homo sapiens
acgaagatccccaaggaggacggcgagagcacggacagactcatggggaagggccaggtccaggtgaggcagcca

SEQ ID NO: 129090 - DNA, 74 bp, Homo sapiens
aaggaggacggcgagagcacggacagactcatggggaagggccaggtccaggtgaggcagccatccctaccctc

SEQ ID NO: 129091 - DNA, 77 bp, Homo sapiens
ctgctgccccgtggggcctctgaacagaccccagggcctctgccaatcatgactccttcctttcagctggacccgca

SEQ ID NO: 129092 - DNA, 77 bp, Homo sapiens
cgtggggcctctgaacagaccccagggcctctgccaatcatgactccttcctttcagctggacccgcaggccctgca

SEQ ID NO: 129093 - DNA, 80 bp, Homo sapiens
tctgaacagaccccagggcctctgccaatcatgactccttcctttcagctggacccgcaggccctgcaggacagagactg

SEQ ID NO: 129094 - DNA, 82 bp, Homo sapiens
ccagggcctctgccaatcatgactccttcctttcagctggacccgcaggccctgcaggacagagactggcagcgcaccgtca

SEQ ID NO: 129095 - DNA, 86 bp, Homo sapiens
tctgccaatcatgactccttcctttcagctggacccgcaggccctgcaggacagagactggcagcgcaccgtcatcgccatgaatg

SEQ ID NO: 129096 - DNA, 81 bp, Homo sapiens
atgactccttcctttcagctggacccgcaggccctgcaggacagagactggcagcgcaccgtcatcgccatgaatggggta

SEQ ID NO: 129097 - DNA, 80 bp, Homo sapiens
ttcctttcagctggacccgcaggccctgcaggacagagactggcagcgcaccgtcatcgccatgaatggggtacgtgtcc

SEQ ID NO: 129098 - DNA, 78 bp, Homo sapiens
acccgcaggccctgcaggacagagactggcagcgcaccgtcatcgccatgaatggggtacgtgtccgtgggactctcc

SEQ ID NO: 129099 - DNA, 79 bp, Homo sapiens
cctgcaggacagagactggcagcgcaccgtcatcgccatgaatggggtacgtgtccgtgggactctcctggtgcccact

SEQ ID NO: 129100 - DNA, 77 bp, Homo sapiens
aggacagagactggcagcgcaccgtcatcgccatgaatggggtacgtgtccgtgggactctcctggtgcccacttcc

SEQ ID NO: 129101 - DNA, 74 bp, Homo sapiens
agcgcaccgtcatcgccatgaatggggtacgtgtccgtgggactctcctggtgcccacttcccccagaaggata

SEQ ID NO: 129102 - DNA, 71 bp, Homo sapiens
accgtcatcgccatgaatggggtacgtgtccgtgggactctcctggtgcccacttcccccagaaggatagg

SEQ ID NO: 129103 - DNA, 74 bp, Homo sapiens
tatgaggaccagaaggattagaggactgtgccccttctccctactgtagatcgaagtaaagctctcggtcaagt

SEQ ID NO: 129104 - DNA, 74 bp, Homo sapiens
agaaggattagaggactgtgccccttctccctactgtagatcgaagtaaagctctcggtcaagttcaacagcag

SEQ ID NO: 129105 - DNA, 76 bp, Homo sapiens
gactgtgccccttctccctactgtagatcgaagtaaagctctcggtcaagttcaacagcagggagttcagcttgaa

SEQ ID NO: 129106 - DNA, 76 bp, Homo sapiens
cttctccctactgtagatcgaagtaaagctctcggtcaagttcaacagcagggagttcagcttgaagaggatgccg

SEQ ID NO: 129107 - DNA, 76 bp, Homo sapiens
tactgtagatcgaagtaaagctctcggtcaagttcaacagcagggagttcagcttgaagaggatgccgtcccgaaa

SEQ ID NO: 129108 - DNA, 75 bp, Homo sapiens
atcgaagtaaagctctcggtcaagttcaacagcagggagttcagcttgaagaggatgccgtcccgaaaacagaca

SEQ ID NO: 129109 - DNA, 73 bp, Homo sapiens
aagctctcggtcaagttcaacagcagggagttcagcttgaagaggatgccgtcccgaaaacagacaggggtct

SEQ ID NO: 129110 - DNA, 73 bp, Homo sapiens
agttcaacagcagggagttcagcttgaagaggatgccgtcccgaaaacagacaggggtcttcggagtcaagat

SEQ ID NO: 129111 - DNA, 74 bp, Homo sapiens
agggagttcagcttgaagaggatgccgtcccgaaaacagacaggggtcttcggagtcaagattgctgtggtcac

SEQ ID NO: 129112 - DNA, 76 bp, Homo sapiens
ttcagcttgaagaggatgccgtcccgaaaacagacaggggtcttcggagtcaagattgctgtggtcaccaagtgag

SEQ ID NO: 129113 - DNA, 73 bp, Homo sapiens
agaggatgccgtcccgaaaacagacaggggtcttcggagtcaagattgctgtggtcaccaagtgagtggggag

SEQ ID NO: 129114 - DNA, 71 bp, Homo sapiens
gtcccgaaaacagacaggggtcttcggagtcaagattgctgtggtcaccaagtgagtggggaggggcttgg

SEQ ID NO: 129115 - DNA, 75 bp, Homo sapiens
agacaggggtcttcggagtcaagattgctgtggtcaccaagtgagtggggaggggcttgggctcacgcactgagg

SEQ ID NO: 129116 - DNA, 78 bp, Homo sapiens
agcgccgaggcatggaggaggtgggcatctaccgcgtgtccggtgtggccacggacatccaggcactgaaggcagcct

SEQ ID NO: 129117 - DNA, 77 bp, Homo sapiens
atggaggaggtgggcatctaccgcgtgtccggtgtggccacggacatccaggcactgaaggcagccttcgacgtcag

SEQ ID NO: 129118 - DNA, 78 bp, Homo sapiens
ggaggtgggcatctaccgcgtgtccggtgtggccacggacatccaggcactgaaggcagccttcgacgtcagtgagtg

SEQ ID NO: 129119 - DNA, 80 bp, Homo sapiens
atctaccgcgtgtccggtgtggccacggacatccaggcactgaaggcagccttcgacgtcagtgagtgttggcctgcgca

SEQ ID NO: 129120 - DNA, 80 bp, Homo sapiens
tccggtgtggccacggacatccaggcactgaaggcagccttcgacgtcagtgagtgttggcctgcgcaggacgggatgga

SEQ ID NO: 129121 - DNA, 72 bp, Homo sapiens
aggtctctggctcgttgtgaccccaaggagtaacccaccgccttctgcagctctttcagacccggttgcaaa

SEQ ID NO: 129122 - DNA, 77 bp, Homo sapiens
gttgtgaccccaaggagtaacccaccgccttctgcagctctttcagacccggttgcaaaggagagctgcatgctcaa

SEQ ID NO: 129123 - DNA, 79 bp, Homo sapiens
aaggagtaacccaccgccttctgcagctctttcagacccggttgcaaaggagagctgcatgctcaacctgctgctgtcc

SEQ ID NO: 129124 - DNA, 81 bp, Homo sapiens
taacccaccgccttctgcagctctttcagacccggttgcaaaggagagctgcatgctcaacctgctgctgtccctgccgga

SEQ ID NO: 129125 - DNA, 74 bp, Homo sapiens
tgccggaggccaacctgctcaccttccttttccttctggaccacctgaaaaggtagcccagctctcccatggca

SEQ ID NO: 129126 - DNA, 73 bp, Homo sapiens
aggccaacctgctcaccttccttttccttctggaccacctgaaaaggtagcccagctctcccatggcagccca

SEQ ID NO: 129127 - DNA, 75 bp, Homo sapiens
ctctcctgggggtggcgttgaaacagcacccgctgctttggtcctctacagggtggcagagaaggaggcagtcaa

SEQ ID NO: 129128 - DNA, 74 bp, Homo sapiens
agaaggaggcagtcaataagatgtccctgcacaacctcgccacggtctttggccccacgctgctccggccctcc

SEQ ID NO: 129129 - DNA, 74 bp, Homo sapiens
aggcagtcaataagatgtccctgcacaacctcgccacggtctttggccccacgctgctccggccctccgagaag

SEQ ID NO: 129130 - DNA, 82 bp, Homo sapiens
tgtgagccccgctctgagccactcttctcttccctactctgcccgggcaggtccaggtgctgctgtacttcctgcagctgga

SEQ ID NO: 129131 - DNA, 80 bp, Homo sapiens
ctctgagccactcttctcttccctactctgcccgggcaggtccaggtgctgctgtacttcctgcagctggaggccatccc

SEQ ID NO: 129132 - DNA, 77 bp, Homo sapiens
actcttctcttccctactctgcccgggcaggtccaggtgctgctgtacttcctgcagctggaggccatccctgcccc

SEQ ID NO: 129133 - DNA, 79 bp, Homo sapiens
ttccctactctgcccgggcaggtccaggtgctgctgtacttcctgcagctggaggccatccctgccccggacagcaaga

SEQ ID NO: 129134 - DNA, 82 bp, Homo sapiens
cgggcaggtccaggtgctgctgtacttcctgcagctggaggccatccctgccccggacagcaagagacagagcatcctgttc

SEQ ID NO: 129135 - DNA, 81 bp, Homo sapiens
aggtgctgctgtacttcctgcagctggaggccatccctgccccggacagcaagagacagagcatcctgttctccaccgaag

SEQ ID NO: 129136 - DNA, 79 bp, Homo sapiens
tgtacttcctgcagctggaggccatccctgccccggacagcaagagacagagcatcctgttctccaccgaagtctaaag

SEQ ID NO: 129137 - DNA, 73 bp, Homo sapiens
ggaggcggacagatggcctggaaacctctggctaatcgggccatccgtagagcgggaaccttcctgaggtgtc

SEQ ID NO: 129138 - DNA, 72 bp, Homo sapiens
agatggcctggaaacctctggctaatcgggccatccgtagagcgggaaccttcctgaggtgtccttgggcca

SEQ ID NO: 129139 - DNA, 69 bp, Homo sapiens
cctggaaacctctggctaatcgggccatccgtagagcgggaaccttcctgaggtgtccttgggccaccc

SEQ ID NO: 129140 - DNA, 70 bp, Homo sapiens
ctctggctaatcgggccatccgtagagcgggaaccttcctgaggtgtccttgggccacccccaagtgttg

SEQ ID NO: 129141 - DNA, 72 bp, Homo sapiens
ccatccgtagagcgggaaccttcctgaggtgtccttgggccacccccaagtgttgggccatctgccaagaga

SEQ ID NO: 129142 - DNA, 72 bp, Homo sapiens
atccgtagagcgggaaccttcctgaggtgtccttgggccacccccaagtgttgggccatctgccaagagaca

SEQ ID NO: 129143 - DNA, 73 bp, Homo sapiens
cgtagagcgggaaccttcctgaggtgtccttgggccacccccaagtgttgggccatctgccaagagacagcga

SEQ ID NO: 129144 - DNA, 71 bp, Homo sapiens
gggaaccttcctgaggtgtccttgggccacccccaagtgttgggccatctgccaagagacagcgacccaaa

SEQ ID NO: 129145 - DNA, 73 bp, Homo sapiens
ttcctgaggtgtccttgggccacccccaagtgttgggccatctgccaagagacagcgacccaaagccgaagga

SEQ ID NO: 129146 - DNA, 71 bp, Homo sapiens
aggtgtccttgggccacccccaagtgttgggccatctgccaagagacagcgacccaaagccgaaggacagg

SEQ ID NO: 129147 - DNA, 73 bp, Homo sapiens
ttgggccacccccaagtgttgggccatctgccaagagacagcgacccaaagccgaaggacaggtggcctggaa

SEQ ID NO: 129148 - DNA, 73 bp, Homo sapiens
cacccccaagtgttgggccatctgccaagagacagcgacccaaagccgaaggacaggtggcctggaaagatcc

SEQ ID NO: 129149 - DNA, 74 bp, Homo sapiens
ccaagtgttgggccatctgccaagagacagcgacccaaagccgaaggacaggtggcctggaaagatcccgccca

SEQ ID NO: 129150 - DNA, 73 bp, Homo sapiens
aagtgttgggccatctgccaagagacagcgacccaaagccgaaggacaggtggcctggaaagatcccgcccag

SEQ ID NO: 129151 - DNA, 75 bp, Homo sapiens
tgttgggccatctgccaagagacagcgacccaaagccgaaggacaggtggcctggaaagatcccgcccaggtctg

SEQ ID NO: 129152 - DNA, 74 bp, Homo sapiens
tctgccaagagacagcgacccaaagccgaaggacaggtggcctggaaagatcccgcccaggtctgggagcccca

SEQ ID NO: 129153 - DNA, 72 bp, Homo sapiens
gggcctcttccatttccctgacttagaaaccacactccacttctaacagggtttgagaggcttagtcagcac

SEQ ID NO: 129154 - DNA, 73 bp, Homo sapiens
tcttccatttccctgacttagaaaccacactccacttctaacagggtttgagaggcttagtcagcactgggta

SEQ ID NO: 129155 - DNA, 74 bp, Homo sapiens
ttttgttgccatgttagtcctccttggaaggcagctcagaaggcctgtgaaatgtcaggggacaggacccccag

SEQ ID NO: 129156 - DNA, 72 bp, Homo sapiens
atgttagtcctccttggaaggcagctcagaaggcctgtgaaatgtcaggggacaggacccccagggagggaa

SEQ ID NO: 129157 - DNA, 72 bp, Homo sapiens
tccttggaaggcagctcagaaggcctgtgaaatgtcaggggacaggacccccagggagggaaccccaggcta

SEQ ID NO: 129158 - DNA, 71 bp, Homo sapiens
agaagcatggagaccgccaagtattttcaagaaataaccccatgaatattccatcacttttttagaaagag

SEQ ID NO: 129159 - DNA, 68 bp, Homo sapiens
agaccgccaagtattttcaagaaataaccccatgaatattccatcacttttttagaaagaggggcttg

SEQ ID NO: 129160 - DNA, 69 bp, Homo sapiens; identical to SEQ ID NO: 128439

SEQ ID NO: 129161 - DNA, 84 bp, Homo sapiens
gctcctgctgaacccgcagctcactagggagcctgacagtggggccatgcgcctgacactcctctctgcttgtggacctggcaa

SEQ ID NO: 129162 - DNA, 65 bp, Homo sapiens
aaaccgggcctgcgcgccgacgttccgctgcgccccgcgcaaaaccggaagtacccgggcccaag

SEQ ID NO: 129163 - DNA, 66 bp, Homo sapiens
gccgacgttccgctgcgccccgcgcaaaaccggaagtacccgggcccaaggctgagggacccggtg

SEQ ID NO: 129164 - DNA, 67 bp, Homo sapiens
ttccgctgcgccccgcgcaaaaccggaagtacccgggcccaaggctgagggacccggtggagcggaa

SEQ ID NO: 129165 - DNA, 67 bp, Homo sapiens
ccgcgcaaaaccggaagtacccgggcccaaggctgagggacccggtggagcggaagtcactccctga

SEQ ID NO: 129166 - DNA, 66 bp, Homo sapiens
aaaaccggaagtacccgggcccaaggctgagggacccggtggagcggaagtcactccctgaggcag

SEQ ID NO: 129167 - DNA, 73 bp, Homo sapiens
tacccgggcccaaggctgagggacccggtggagcggaagtcactccctgaggcagtggcgacagcggcggcga

SEQ ID NO: 129168 - DNA, 76 bp, Homo sapiens
gctgagggacccggtggagcggaagtcactccctgaggcagtggcgacagcggcggcgagaggatgaacaacaagt

SEQ ID NO: 129169 - DNA, 75 bp, Homo sapiens
acccggtggagcggaagtcactccctgaggcagtggcgacagcggcggcgagaggatgaacaacaagttcgacgc

SEQ ID NO: 129170 - DNA, 77 bp, Homo sapiens
actccctgaggcagtggcgacagcggcggcgagaggatgaacaacaagttcgacgcgtgagtggctcgtggccgccc

SEQ ID NO: 129171 - DNA, 74 bp, Homo sapiens
aggcagtggcgacagcggcggcgagaggatgaacaacaagttcgacgcgtgagtggctcgtggccgcccccggg

SEQ ID NO: 129172 - DNA, 71 bp, Homo sapiens
acagcggcggcgagaggatgaacaacaagttcgacgcgtgagtggctcgtggccgcccccggggccccttc

SEQ ID NO: 129173 - DNA, 67 bp, Homo sapiens
aggatgaacaacaagttcgacgcgtgagtggctcgtggccgcccccggggccccttccccgaacagt

SEQ ID NO: 129174 - DNA, 65 bp, Homo sapiens
aacaacaagttcgacgcgtgagtggctcgtggccgcccccggggccccttccccgaacagttccc

SEQ ID NO: 129175 - DNA, 66 bp, Homo sapiens
ttcgacgcgtgagtggctcgtggccgcccccggggccccttccccgaacagttcccccgcgcccgc

SEQ ID NO: 129176 - DNA, 63 bp, Homo sapiens
agtggctcgtggccgcccccggggccccttccccgaacagttcccccgcgcccgcccccgctg

SEQ ID NO: 129177 - DNA, 62 bp, Homo sapiens
tggccgcccccggggccccttccccgaacagttcccccgcgcccgcccccgctggggctggg

SEQ ID NO: 129178 - DNA, 64 bp, Homo sapiens
ccccttccccgaacagttcccccgcgcccgcccccgctggggctggggcggcgcaaaccctgcg

SEQ ID NO: 129179 - DNA, 67 bp, Homo sapiens
ccgaacagttcccccgcgcccgcccccgctggggctggggcggcgcaaaccctgcggcaccggcttc

SEQ ID NO: 129180 - DNA, 69 bp, Homo sapiens
cccgcgcccgcccccgctggggctggggcggcgcaaaccctgcggcaccggcttccctgctgggatccg

SEQ ID NO: 129181 - DNA, 71 bp, Homo sapiens
cccccgctggggctggggcggcgcaaaccctgcggcaccggcttccctgctgggatccggctgcggccgga

SEQ ID NO: 129182 - DNA, 73 bp, Homo sapiens
ggctggggcggcgcaaaccctgcggcaccggcttccctgctgggatccggctgcggccggacctggcctggac

SEQ ID NO: 129183 - DNA, 72 bp, Homo sapiens
cggcgcaaaccctgcggcaccggcttccctgctgggatccggctgcggccggacctggcctggactggcggg

SEQ ID NO: 129184 - DNA, 71 bp, Homo sapiens
aaccctgcggcaccggcttccctgctgggatccggctgcggccggacctggcctggactggcggggaggag

SEQ ID NO: 129185 - DNA, 69 bp, Homo sapiens
accggcttccctgctgggatccggctgcggccggacctggcctggactggcggggaggagggggctggg

SEQ ID NO: 129186 - DNA, 72 bp, Homo sapiens
tgggatccggctgcggccggacctggcctggactggcggggaggagggggctggggagcaatggataccgga

SEQ ID NO: 129187 - DNA, 70 bp, Homo sapiens
ctgcggccggacctggcctggactggcggggaggagggggctggggagcaatggataccggagtcccgga

SEQ ID NO: 129188 - DNA, 68 bp, Homo sapiens
cggacctggcctggactggcggggaggagggggctggggagcaatggataccggagtcccggagaccc

SEQ ID NO: 129189 - DNA, 68 bp, Homo sapiens
gactggcggggaggagggggctggggagcaatggataccggagtcccggagaccccagggccgtccga

SEQ ID NO: 129190 - DNA, 69 bp, Homo sapiens
ctggggagcaatggataccggagtcccggagaccccagggccgtccgaaccgagggcgaagagctgggc

SEQ ID NO: 129191 - DNA, 66 bp, Homo sapiens
agaccccagggccgtccgaaccgagggcgaagagctgggcccgggggaggggtggctgtgccgccc

SEQ ID NO: 129192 - DNA, 65 bp, Homo sapiens
agggccgtccgaaccgagggcgaagagctgggcccgggggaggggtggctgtgccgcccggtagg

SEQ ID NO: 129193 - DNA, 65 bp, Homo sapiens
aagagctgggcccgggggaggggtggctgtgccgcccggtagggggagattttcggacgccccgc

SEQ ID NO: 129194 - DNA, 66 bp, Homo sapiens
cgggggaggggtggctgtgccgcccggtagggggagattttcggacgccccgccctggtggatgcg

SEQ ID NO: 129195 - DNA, 72 bp, Homo sapiens
gtggctgtgccgcccggtagggggagattttcggacgccccgccctggtggatgcggattgcctgcgacgtg

SEQ ID NO: 129196 - DNA, 71 bp, Homo sapiens
tgtgccgcccggtagggggagattttcggacgccccgccctggtggatgcggattgcctgcgacgtggagg

SEQ ID NO: 129197 - DNA, 69 bp, Homo sapiens
ggggagattttcggacgccccgccctggtggatgcggattgcctgcgacgtggaggggtggggacctcg

SEQ ID NO: 129198 - DNA, 68 bp, Homo sapiens
attttcggacgccccgccctggtggatgcggattgcctgcgacgtggaggggtggggacctcggcggt

SEQ ID NO: 129199 - DNA, 70 bp, Homo sapiens
ccgccctggtggatgcggattgcctgcgacgtggaggggtggggacctcggcggtttgggtgtttccgca

SEQ ID NO: 129200 - DNA, 74 bp, Homo sapiens
tggtggatgcggattgcctgcgacgtggaggggtggggacctcggcggtttgggtgtttccgcagtctggcagc

SEQ ID NO: 129201 - DNA, 74 bp, Homo sapiens
attgcctgcgacgtggaggggtggggacctcggcggtttgggtgtttccgcagtctggcagcgctgcctctgaa

SEQ ID NO: 129202 - DNA, 73 bp, Homo sapiens
tggaggggtggggacctcggcggtttgggtgtttccgcagtctggcagcgctgcctctgaatccagctttccc

SEQ ID NO: 129203 - DNA, 74 bp, Homo sapiens
gggacctcggcggtttgggtgtttccgcagtctggcagcgctgcctctgaatccagctttccccacacactccc

SEQ ID NO: 129204 - DNA, 75 bp, Homo sapiens
ctcggcggtttgggtgtttccgcagtctggcagcgctgcctctgaatccagctttccccacacactccctctccc

SEQ ID NO: 129205 - DNA, 79 bp, Homo sapiens
tgggtgtttccgcagtctggcagcgctgcctctgaatccagctttccccacacactccctctcccctctgagcctcagt

SEQ ID NO: 129206 - DNA, 75 bp, Homo sapiens
cagttttctcatctgcagagtggggacggtaacaccctttgtcgtagagtttggaggatgcaatgaggtaatgtg

SEQ ID NO: 129207 - DNA, 75 bp, Homo sapiens
atctgcagagtggggacggtaacaccctttgtcgtagagtttggaggatgcaatgaggtaatgtggttgctgccc

SEQ ID NO: 129208 - DNA, 73 bp, Homo sapiens
agagtggggacggtaacaccctttgtcgtagagtttggaggatgcaatgaggtaatgtggttgctgccctcga

SEQ ID NO: 129209 - DNA, 73 bp, Homo sapiens
acggtaacaccctttgtcgtagagtttggaggatgcaatgaggtaatgtggttgctgccctcgacgcggtgga

SEQ ID NO: 129210 - DNA, 77 bp, Homo sapiens
tgtcgtagagtttggaggatgcaatgaggtaatgtggttgctgccctcgacgcggtggaaggctggcttaggaatta

SEQ ID NO: 129211 - DNA, 78 bp, Homo sapiens
tttggaggatgcaatgaggtaatgtggttgctgccctcgacgcggtggaaggctggcttaggaattatcttcctgaga

SEQ ID NO: 129212 - DNA, 76 bp, Homo sapiens
caatgaggtaatgtggttgctgccctcgacgcggtggaaggctggcttaggaattatcttcctgagactcttccta

SEQ ID NO: 129213 - DNA, 74 bp, Homo sapiens
taatgtggttgctgccctcgacgcggtggaaggctggcttaggaattatcttcctgagactcttcctactttct

SEQ ID NO: 129214 - DNA, 71 bp, Homo sapiens
tcgacgcggtggaaggctggcttaggaattatcttcctgagactcttcctactttctttctcctccccttc

SEQ ID NO: 129215 - DNA, 67 bp, Homo sapiens
aaggctggcttaggaattatcttcctgagactcttcctactttctttctcctccccttcccgttccc

SEQ ID NO: 129216 - DNA, 67 bp, Homo sapiens
ttcctactttctttctcctccccttcccgttcccgtcttccaacacactcgccaagacctaagtata

SEQ ID NO: 129217 - DNA, 67 bp, Homo sapiens
ctttctcctccccttcccgttcccgtcttccaacacactcgccaagacctaagtatacttgttgccc

SEQ ID NO: 129218 - DNA, 69 bp, Homo sapiens
cccttcccgttcccgtcttccaacacactcgccaagacctaagtatacttgttgccctctcctgcccgc

SEQ ID NO: 129219 - DNA, 71 bp, Homo sapiens
ttcccgtcttccaacacactcgccaagacctaagtatacttgttgccctctcctgcccgctccggtttcta

SEQ ID NO: 129220 - DNA, 74 bp, Homo sapiens
caacacactcgccaagacctaagtatacttgttgccctctcctgcccgctccggtttctagtttcagcatcaaa

SEQ ID NO: 129221 - DNA, 73 bp, Homo sapiens
tcgccaagacctaagtatacttgttgccctctcctgcccgctccggtttctagtttcagcatcaaacagtttg

SEQ ID NO: 129222 - DNA, 71 bp, Homo sapiens
acctaagtatacttgttgccctctcctgcccgctccggtttctagtttcagcatcaaacagtttggaggta

SEQ ID NO: 129223 - DNA, 73 bp, Homo sapiens
tacttgttgccctctcctgcccgctccggtttctagtttcagcatcaaacagtttggaggtacagagagaaaa

SEQ ID NO: 129224 - DNA, 75 bp, Homo sapiens
tcctgcccgctccggtttctagtttcagcatcaaacagtttggaggtacagagagaaaatgcagaagtatcttta

SEQ ID NO: 129225 - DNA, 73 bp, Homo sapiens
ctccggtttctagtttcagcatcaaacagtttggaggtacagagagaaaatgcagaagtatctttacttatcc

SEQ ID NO: 129226 - DNA, 74 bp, Homo sapiens
ttctagtttcagcatcaaacagtttggaggtacagagagaaaatgcagaagtatctttacttatccccctccaa

SEQ ID NO: 129227 - DNA, 72 bp, Homo sapiens
atcaaacagtttggaggtacagagagaaaatgcagaagtatctttacttatccccctccaaggattgtatct

SEQ ID NO: 129228 - DNA, 74 bp, Homo sapiens
ttggaggtacagagagaaaatgcagaagtatctttacttatccccctccaaggattgtatcttgaggtagaata

SEQ ID NO: 129229 - DNA, 72 bp, Homo sapiens
agagaaaatgcagaagtatctttacttatccccctccaaggattgtatcttgaggtagaatatgttccttcc

SEQ ID NO: 129230 - DNA, 72 bp, Homo sapiens
aaatgcagaagtatctttacttatccccctccaaggattgtatcttgaggtagaatatgttccttcctctct

SEQ ID NO: 129231 - DNA, 73 bp, Homo sapiens
tatctttacttatccccctccaaggattgtatcttgaggtagaatatgttccttcctctcttctagtagtcta

SEQ ID NO: 129232 - DNA, 73 bp, Homo sapiens
cccctccaaggattgtatcttgaggtagaatatgttccttcctctcttctagtagtctagtaaatcgactgtc

SEQ ID NO: 129233 - DNA, 76 bp, Homo sapiens
gattgtatcttgaggtagaatatgttccttcctctcttctagtagtctagtaaatcgactgtctcttcatccgaaa

SEQ ID NO: 129234 - DNA, 74 bp, Homo sapiens
tatcttgaggtagaatatgttccttcctctcttctagtagtctagtaaatcgactgtctcttcatccgaaaacc

SEQ ID NO: 129235 - DNA, 74 bp, Homo sapiens
tagaatatgttccttcctctcttctagtagtctagtaaatcgactgtctcttcatccgaaaacctggatttcta

SEQ ID NO: 129236 - DNA, 73 bp, Homo sapiens
cttctagtagtctagtaaatcgactgtctcttcatccgaaaacctggatttctagtcccagattcaccactta

SEQ ID NO: 129237 - DNA, 75 bp, Homo sapiens
tctagtaaatcgactgtctcttcatccgaaaacctggatttctagtcccagattcaccacttaccatctgtttga

SEQ ID NO: 129238 - DNA, 71 bp, Homo sapiens
ttcatccgaaaacctggatttctagtcccagattcaccacttaccatctgtttgactgtagaaaagttacc

SEQ ID NO: 129239 - DNA, 71 bp, Homo sapiens
aacctggatttctagtcccagattcaccacttaccatctgtttgactgtagaaaagttacccagcctctaa

SEQ ID NO: 129240 - DNA, 75 bp, Homo sapiens
tagtcccagattcaccacttaccatctgtttgactgtagaaaagttacccagcctctaagccattgttgctcaaa

SEQ ID NO: 129241 - DNA, 74 bp, Homo sapiens
attcaccacttaccatctgtttgactgtagaaaagttacccagcctctaagccattgttgctcaaaccacatta

SEQ ID NO: 129242 - DNA, 75 bp, Homo sapiens
ttaccatctgtttgactgtagaaaagttacccagcctctaagccattgttgctcaaaccacattagtggctagga

SEQ ID NO: 129243 - DNA, 76 bp, Homo sapiens
tttgactgtagaaaagttacccagcctctaagccattgttgctcaaaccacattagtggctaggaccctgctgcca

SEQ ID NO: 129244 - DNA, 78 bp, Homo sapiens
ctctaagccattgttgctcaaaccacattagtggctaggaccctgctgccacgccggggtgtgataagggtcagatca

SEQ ID NO: 129245 - DNA, 79 bp, Homo sapiens
attgttgctcaaaccacattagtggctaggaccctgctgccacgccggggtgtgataagggtcagatcacactcagcga

SEQ ID NO: 129246 - DNA, 77 bp, Homo sapiens
aaaccacattagtggctaggaccctgctgccacgccggggtgtgataagggtcagatcacactcagcgatgcttaaa

SEQ ID NO: 129247 - DNA, 81 bp, Homo sapiens
attagtggctaggaccctgctgccacgccggggtgtgataagggtcagatcacactcagcgatgcttaaagatgcttgtga

SEQ ID NO: 129248 - DNA, 81 bp, Homo sapiens
acgccggggtgtgataagggtcagatcacactcagcgatgcttaaagatgcttgtgaacattgctaactattgcgatataa

SEQ ID NO: 129249 - DNA, 81 bp, Homo sapiens
tcagatcacactcagcgatgcttaaagatgcttgtgaacattgctaactattgcgatataaacgtaaagtggaattactat

SEQ ID NO: 129250 - DNA, 76 bp, Homo sapiens
actcagcgatgcttaaagatgcttgtgaacattgctaactattgcgatataaacgtaaagtggaattactattagt

SEQ ID NO: 129251 - DNA, 74 bp, Homo sapiens
cgatgcttaaagatgcttgtgaacattgctaactattgcgatataaacgtaaagtggaattactattagtttag

SEQ ID NO: 129252 - DNA, 71 bp, Homo sapiens
cttgtgaacattgctaactattgcgatataaacgtaaagtggaattactattagtttaggttgtgacctgg

SEQ ID NO: 129253 - DNA, 71 bp, Homo sapiens
gaacattgctaactattgcgatataaacgtaaagtggaattactattagtttaggttgtgacctggtgctt

SEQ ID NO: 129254 - DNA, 70 bp, Homo sapiens
aactattgcgatataaacgtaaagtggaattactattagtttaggttgtgacctggtgcttttgatggga

SEQ ID NO: 129255 - DNA, 67 bp, Homo sapiens
atataaacgtaaagtggaattactattagtttaggttgtgacctggtgcttttgatgggaaattggg

SEQ ID NO: 129256 - DNA, 68 bp, Homo sapiens
aagtggaattactattagtttaggttgtgacctggtgcttttgatgggaaattggggtgtttccaata

SEQ ID NO: 129257 - DNA, 71 bp, Homo sapiens
tactattagtttaggttgtgacctggtgcttttgatgggaaattggggtgtttccaatacagagagtactg

SEQ ID NO: 129258 - DNA, 74 bp, Homo sapiens
gtgcttttgatgggaaattggggtgtttccaatacagagagtactgtgcaaattcagggaatactggatttcca

SEQ ID NO: 129259 - DNA, 73 bp, Homo sapiens
tttgatgggaaattggggtgtttccaatacagagagtactgtgcaaattcagggaatactggatttccaacac

SEQ ID NO: 129260 - DNA, 74 bp, Homo sapiens
gggtgtttccaatacagagagtactgtgcaaattcagggaatactggatttccaacactccaggcaggtaggtc

SEQ ID NO: 129261 - DNA, 75 bp, Homo sapiens
aatacagagagtactgtgcaaattcagggaatactggatttccaacactccaggcaggtaggtcctcaggaatgt

SEQ ID NO: 129262 - DNA, 74 bp, Homo sapiens
agagagtactgtgcaaattcagggaatactggatttccaacactccaggcaggtaggtcctcaggaatgttttc

SEQ ID NO: 129263 - DNA, 73 bp, Homo sapiens
aaattcagggaatactggatttccaacactccaggcaggtaggtcctcaggaatgttttctggttgctgagag

SEQ ID NO: 129264 - DNA, 75 bp, Homo sapiens
aatactggatttccaacactccaggcaggtaggtcctcaggaatgttttctggttgctgagaggtctctgctact

SEQ ID NO: 129265 - DNA, 75 bp, Homo sapiens
atttccaacactccaggcaggtaggtcctcaggaatgttttctggttgctgagaggtctctgctacttgagaaag

SEQ ID NO: 129266 - DNA, 75 bp, Homo sapiens
actccaggcaggtaggtcctcaggaatgttttctggttgctgagaggtctctgctacttgagaaagtctttgccc

SEQ ID NO: 129267 - DNA, 76 bp, Homo sapiens
taggtcctcaggaatgttttctggttgctgagaggtctctgctacttgagaaagtctttgcccgacctcttctcta

SEQ ID NO: 129268 - DNA, 76 bp, Homo sapiens
aatgttttctggttgctgagaggtctctgctacttgagaaagtctttgcccgacctcttctctatcctgctgttta

SEQ ID NO: 129269 - DNA, 78 bp, Homo sapiens
tttctggttgctgagaggtctctgctacttgagaaagtctttgcccgacctcttctctatcctgctgtttaactgagc

SEQ ID NO: 129270 - DNA, 76 bp, Homo sapiens
agaggtctctgctacttgagaaagtctttgcccgacctcttctctatcctgctgtttaactgagcctgtccctcta

SEQ ID NO: 129271 - DNA, 74 bp, Homo sapiens
tacttgagaaagtctttgcccgacctcttctctatcctgctgtttaactgagcctgtccctctacgaacctctc

SEQ ID NO: 129272 - DNA, 71 bp, Homo sapiens
agaaagtctttgcccgacctcttctctatcctgctgtttaactgagcctgtccctctacgaacctctcccc

SEQ ID NO: 129273 - DNA, 75 bp, Homo sapiens
ttctctatcctgctgtttaactgagcctgtccctctacgaacctctcccccgctgccgccccatttcatctctat

SEQ ID NO: 129274 - DNA, 75 bp, Homo sapiens
tctacgaacctctcccccgctgccgccccatttcatctctattgtaaaccctgcaacaactagctccagatccaa

SEQ ID NO: 129275 - DNA, 73 bp, Homo sapiens
aacctctcccccgctgccgccccatttcatctctattgtaaaccctgcaacaactagctccagatccaaatcc

SEQ ID NO: 129276 - DNA, 78 bp, Homo sapiens
ctgccgccccatttcatctctattgtaaaccctgcaacaactagctccagatccaaatcctgcctcagtggagctttc

SEQ ID NO: 129277 - DNA, 76 bp, Homo sapiens
tttcatctctattgtaaaccctgcaacaactagctccagatccaaatcctgcctcagtggagctttctggaaccct

SEQ ID NO: 129278 - DNA, 76 bp, Homo sapiens
tctctattgtaaaccctgcaacaactagctccagatccaaatcctgcctcagtggagctttctggaacccttatac

SEQ ID NO: 129279 - DNA, 72 bp, Homo sapiens
aaaccctgcaacaactagctccagatccaaatcctgcctcagtggagctttctggaacccttataccccttc

SEQ ID NO: 129280 - DNA, 75 bp, Homo sapiens
tagctccagatccaaatcctgcctcagtggagctttctggaacccttataccccttcctccactgatttgaacaa

SEQ ID NO: 129281 - DNA, 72 bp, Homo sapiens
atccaaatcctgcctcagtggagctttctggaacccttataccccttcctccactgatttgaacaaatcaaa

SEQ ID NO: 129282 - DNA, 75 bp, Homo sapiens
tgcctcagtggagctttctggaacccttataccccttcctccactgatttgaacaaatcaaatgtcatcctaaga

SEQ ID NO: 129283 - DNA, 72 bp, Homo sapiens
agctttctggaacccttataccccttcctccactgatttgaacaaatcaaatgtcatcctaagaagacatct

SEQ ID NO: 129284 - DNA, 73 bp, Homo sapiens
aacccttataccccttcctccactgatttgaacaaatcaaatgtcatcctaagaagacatcttatgggtcatc

SEQ ID NO: 129285 - DNA, 78 bp, Homo sapiens
ttataccccttcctccactgatttgaacaaatcaaatgtcatcctaagaagacatcttatgggtcatctagctcaagc

SEQ ID NO: 129286 - DNA, 79 bp, Homo sapiens
cactgatttgaacaaatcaaatgtcatcctaagaagacatcttatgggtcatctagctcaagcctacccaaatcatttg

SEQ ID NO: 129287 - DNA, 77 bp, Homo sapiens
atttgaacaaatcaaatgtcatcctaagaagacatcttatgggtcatctagctcaagcctacccaaatcatttggga

SEQ ID NO: 129288 - DNA, 78 bp, Homo sapiens
aaatgtcatcctaagaagacatcttatgggtcatctagctcaagcctacccaaatcatttgggagtctgcagtaagaa

SEQ ID NO: 129289 - DNA, 77 bp, Homo sapiens
ctaagaagacatcttatgggtcatctagctcaagcctacccaaatcatttgggagtctgcagtaagaatggtaataa

SEQ ID NO: 129290 - DNA, 77 bp, Homo sapiens
acatcttatgggtcatctagctcaagcctacccaaatcatttgggagtctgcagtaagaatggtaataatggacttc

SEQ ID NO: 129291 - DNA, 77 bp, Homo sapiens
gtcatctagctcaagcctacccaaatcatttgggagtctgcagtaagaatggtaataatggacttccacagggatct

SEQ ID NO: 129292 - DNA, 75 bp, Homo sapiens
aaatcatttgggagtctgcagtaagaatggtaataatggacttccacagggatcttgctaggtatttttcatata

SEQ ID NO: 129293 - DNA, 73 bp, Homo sapiens
gagccaccacccccagcctcatatgttatttctactctaacaattctgtgaaggggatcttgttgtctccttt

SEQ ID NO: 129294 - DNA, 72 bp, Homo sapiens
accacccccagcctcatatgttatttctactctaacaattctgtgaaggggatcttgttgtctccttttaca

SEQ ID NO: 129295 - DNA, 71 bp, Homo sapiens
cagatgaggaaagtgagactctgaggttaactaattcccgacacaaaggaagggctatcccaggtttgttg

SEQ ID NO: 129296 - DNA, 68 bp, Homo sapiens
aaagtgagactctgaggttaactaattcccgacacaaaggaagggctatcccaggtttgttgtgtaac

SEQ ID NO: 129297 - DNA, 68 bp, Homo sapiens
tctgaggttaactaattcccgacacaaaggaagggctatcccaggtttgttgtgtaaccttggttcaa

SEQ ID NO: 129298 - DNA, 68 bp, Homo sapiens
ttaactaattcccgacacaaaggaagggctatcccaggtttgttgtgtaaccttggttcaagcacctc

SEQ ID NO: 129299 - DNA, 70 bp, Homo sapiens
taattcccgacacaaaggaagggctatcccaggtttgttgtgtaaccttggttcaagcacctcttgagaa

SEQ ID NO: 129300 - DNA, 68 bp, Homo sapiens
acacaaaggaagggctatcccaggtttgttgtgtaaccttggttcaagcacctcttgagaaaaattaa

SEQ ID NO: 129301 - DNA, 66 bp, Homo sapiens
aaggaagggctatcccaggtttgttgtgtaaccttggttcaagcacctcttgagaaaaattaaact

SEQ ID NO: 129302 - DNA, 67 bp, Homo sapiens
tatcccaggtttgttgtgtaaccttggttcaagcacctcttgagaaaaattaaacttgccctctttt

SEQ ID NO: 129303 - DNA, 65 bp, Homo sapiens
caggtttgttgtgtaaccttggttcaagcacctcttgagaaaaattaaacttgccctcttttttt

SEQ ID NO: 129304 - DNA, 65 bp, Homo sapiens
gtgtaaccttggttcaagcacctcttgagaaaaattaaacttgccctctttttttttcttacctc

SEQ ID NO: 129305 - DNA, 65 bp, Homo sapiens
ccttggttcaagcacctcttgagaaaaattaaacttgccctctttttttttcttacctcttctac

SEQ ID NO: 129306 - DNA, 67 bp, Homo sapiens
ggttcaagcacctcttgagaaaaattaaacttgccctctttttttttcttacctcttctacgattga

SEQ ID NO: 129307 - DNA, 65 bp, Homo sapiens
taaacttgccctctttttttttcttacctcttctacgattgaagaacctgggtcattttaattac

SEQ ID NO: 129308 - DNA, 70 bp, Homo sapiens
ttcttacctcttctacgattgaagaacctgggtcattttaattactttgaattattaactattgtattga

SEQ ID NO: 129309 - DNA, 72 bp, Homo sapiens
gaagaacctgggtcattttaattactttgaattattaactattgtattgagccagaatcttttaacatctgc

SEQ ID NO: 129310 - DNA, 74 bp, Homo sapiens
ctgggtcattttaattactttgaattattaactattgtattgagccagaatcttttaacatctgccctctagca

SEQ ID NO: 129311 - DNA, 74 bp, Homo sapiens
aattactttgaattattaactattgtattgagccagaatcttttaacatctgccctctagcattgcaggaaaaa

SEQ ID NO: 129312 - DNA, 74 bp, Homo sapiens
tttgaattattaactattgtattgagccagaatcttttaacatctgccctctagcattgcaggaaaaaaaaaga

SEQ ID NO: 129313 - DNA, 68 bp, Homo sapiens
aagaaaaacaagctttctttcatttgaaattagcagttgaaaacagcactcctgcccctagttttatt

SEQ ID NO: 129314 - DNA, 67 bp, Homo sapiens
aaacaagctttctttcatttgaaattagcagttgaaaacagcactcctgcccctagttttatttttt

SEQ ID NO: 129315 - DNA, 71 bp, Homo sapiens
tcatttgaaattagcagttgaaaacagcactcctgcccctagttttatttttttatgttgtttttcattca

SEQ ID NO: 129316 - DNA, 71 bp, Homo sapiens
tagcagttgaaaacagcactcctgcccctagttttatttttttatgttgtttttcattcagaaattctgcg

SEQ ID NO: 129317 - DNA, 69 bp, Homo sapiens
gttgaaaacagcactcctgcccctagttttatttttttatgttgtttttcattcagaaattctgcggtg

SEQ ID NO: 129318 - DNA, 68 bp, Homo sapiens
cactcctgcccctagttttatttttttatgttgtttttcattcagaaattctgcggtgtttaggccat

SEQ ID NO: 129319 - DNA, 74 bp, Homo sapiens
tttttatgttgtttttcattcagaaattctgcggtgtttaggccattgctgcatatttggagtctttaccacat

SEQ ID NO: 129320 - DNA, 78 bp, Homo sapiens
agaaattctgcggtgtttaggccattgctgcatatttggagtctttaccacattgctctctctagtaatctgcacttt

SEQ ID NO: 129321 - DNA, 77 bp, Homo sapiens
cggtgtttaggccattgctgcatatttggagtctttaccacattgctctctctagtaatctgcactttttaccacat

SEQ ID NO: 129322 - DNA, 80 bp, Homo sapiens
ttaggccattgctgcatatttggagtctttaccacattgctctctctagtaatctgcactttttaccacattgctcttaa

SEQ ID NO: 129323 - DNA, 79 bp, Homo sapiens
tctctctagtaatctgcactttttaccacattgctcttaaggacatgttccagtttgccagaatccttccagatgtcca

SEQ ID NO: 129324 - DNA, 78 bp, Homo sapiens
aatctgcactttttaccacattgctcttaaggacatgttccagtttgccagaatccttccagatgtccagtggctgga

SEQ ID NO: 129325 - DNA, 80 bp, Homo sapiens
tttaccacattgctcttaaggacatgttccagtttgccagaatccttccagatgtccagtggctggagctgagtacagta

SEQ ID NO: 129326 - DNA, 80 bp, Homo sapiens
tcttaaggacatgttccagtttgccagaatccttccagatgtccagtggctggagctgagtacagtagtatataatctaa

SEQ ID NO: 129327 - DNA, 81 bp, Homo sapiens
cagtttgccagaatccttccagatgtccagtggctggagctgagtacagtagtatataatctaatgggctcatattaaaga

SEQ ID NO: 129328 - DNA, 81 bp, Homo sapiens
tttgccagaatccttccagatgtccagtggctggagctgagtacagtagtatataatctaatgggctcatattaaagatta

SEQ ID NO: 129329 - DNA, 81 bp, Homo sapiens
gaatccttccagatgtccagtggctggagctgagtacagtagtatataatctaatgggctcatattaaagattagctctaa

SEQ ID NO: 129330 - DNA, 80 bp, Homo sapiens
agatgtccagtggctggagctgagtacagtagtatataatctaatgggctcatattaaagattagctctaatctccgtta

SEQ ID NO: 129331 - DNA, 80 bp, Homo sapiens
tccagtggctggagctgagtacagtagtatataatctaatgggctcatattaaagattagctctaatctccgttactgta

SEQ ID NO: 129332 - DNA, 80 bp, Homo sapiens
tggctggagctgagtacagtagtatataatctaatgggctcatattaaagattagctctaatctccgttactgtatggac

SEQ ID NO: 129333 - DNA, 78 bp, Homo sapiens
tgagtacagtagtatataatctaatgggctcatattaaagattagctctaatctccgttactgtatggactcaacttc

SEQ ID NO: 129334 - DNA, 78 bp, Homo sapiens
acagtagtatataatctaatgggctcatattaaagattagctctaatctccgttactgtatggactcaacttctctga

SEQ ID NO: 129335 - DNA, 76 bp, Homo sapiens
taatctaatgggctcatattaaagattagctctaatctccgttactgtatggactcaacttctctgaatgaaacct

SEQ ID NO: 129336 - DNA, 76 bp, Homo sapiens
gctcatattaaagattagctctaatctccgttactgtatggactcaacttctctgaatgaaacctttgattgtaat

SEQ ID NO: 129337 - DNA, 73 bp, Homo sapiens
ttactgtatggactcaacttctctgaatgaaacctttgattgtaattgcttttgtggagaaggggtagaccta

SEQ ID NO: 129338 - DNA, 73 bp, Homo sapiens
tcaacttctctgaatgaaacctttgattgtaattgcttttgtggagaaggggtagacctatcaagtccttaga

SEQ ID NO: 129339 - DNA, 74 bp, Homo sapiens
ttctctgaatgaaacctttgattgtaattgcttttgtggagaaggggtagacctatcaagtccttagatctcat

SEQ ID NO: 129340 - DNA, 77 bp, Homo sapiens
ctttgattgtaattgcttttgtggagaaggggtagacctatcaagtccttagatctcattgccattgatcctattga

SEQ ID NO: 129341 - DNA, 76 bp, Homo sapiens
taattgcttttgtggagaaggggtagacctatcaagtccttagatctcattgccattgatcctattgataacgtaa

SEQ ID NO: 129342 - DNA, 74 bp, Homo sapiens
tgtggagaaggggtagacctatcaagtccttagatctcattgccattgatcctattgataacgtaaaaccgtaa

SEQ ID NO: 129343 - DNA, 76 bp, Homo sapiens
ggtagacctatcaagtccttagatctcattgccattgatcctattgataacgtaaaaccgtaagatgctttcacaa

SEQ ID NO: 129344 - DNA, 74 bp, Homo sapiens
acctatcaagtccttagatctcattgccattgatcctattgataacgtaaaaccgtaagatgctttcacaaaaa

SEQ ID NO: 129345 - DNA, 77 bp, Homo sapiens
tagatctcattgccattgatcctattgataacgtaaaaccgtaagatgctttcacaaaaactgcagtcctgacttaa

SEQ ID NO: 129346 - DNA, 74 bp, Homo sapiens
attgccattgatcctattgataacgtaaaaccgtaagatgctttcacaaaaactgcagtcctgacttaaacata

SEQ ID NO: 129347 - DNA, 72 bp, Homo sapiens
gatcctattgataacgtaaaaccgtaagatgctttcacaaaaactgcagtcctgacttaaacatagttttca

SEQ ID NO: 129348 - DNA, 72 bp, Homo sapiens
ataacgtaaaaccgtaagatgctttcacaaaaactgcagtcctgacttaaacatagttttcagatctacaca

SEQ ID NO: 129349 - DNA, 75 bp, Homo sapiens
tcacaaaaactgcagtcctgacttaaacatagttttcagatctacacaactgtacttgattttgtccgtattcta

SEQ ID NO: 129350 - DNA, 75 bp, Homo sapiens
aaactgcagtcctgacttaaacatagttttcagatctacacaactgtacttgattttgtccgtattctacatcat

SEQ ID NO: 129351 - DNA, 73 bp, Homo sapiens
cctgacttaaacatagttttcagatctacacaactgtacttgattttgtccgtattctacatcatttgctttt

SEQ ID NO: 129352 - DNA, 75 bp, Homo sapiens
catagttttcagatctacacaactgtacttgattttgtccgtattctacatcatttgctttttattctatatcgt

SEQ ID NO: 129353 - DNA, 71 bp, Homo sapiens
ctgtacttgattttgtccgtattctacatcatttgctttttattctatatcgttaactttgggcccattcc

SEQ ID NO: 129354 - DNA, 70 bp, Homo sapiens
ttctacatcatttgctttttattctatatcgttaactttgggcccattcctaactattgtctaaaccact

SEQ ID NO: 129355 - DNA, 69 bp, Homo sapiens
tttgctttttattctatatcgttaactttgggcccattcctaactattgtctaaaccacttatttggca

SEQ ID NO: 129356 - DNA, 71 bp, Homo sapiens
ttttattctatatcgttaactttgggcccattcctaactattgtctaaaccacttatttggcactcattgc

SEQ ID NO: 129357 - DNA, 72 bp, Homo sapiens
atatcgttaactttgggcccattcctaactattgtctaaaccacttatttggcactcattgctttgattcta

SEQ ID NO: 129358 - DNA, 74 bp, Homo sapiens
ggcccattcctaactattgtctaaaccacttatttggcactcattgctttgattctatagacccattcattaaa

SEQ ID NO: 129359 - DNA, 71 bp, Homo sapiens
attgtctaaaccacttatttggcactcattgctttgattctatagacccattcattaaacggagatttttt

SEQ ID NO: 129360 - DNA, 76 bp, Homo sapiens
ttatttggcactcattgctttgattctatagacccattcattaaacggagatttttttttatgccactgtctgatg

SEQ ID NO: 129361 - DNA, 75 bp, Homo sapiens
ttgattctatagacccattcattaaacggagatttttttttatgccactgtctgatggtgagggtataaagatga

SEQ ID NO: 129362 - DNA, 73 bp, Homo sapiens
atagacccattcattaaacggagatttttttttatgccactgtctgatggtgagggtataaagatgaattgaa

SEQ ID NO: 129363 - DNA, 72 bp, Homo sapiens
ttcattaaacggagatttttttttatgccactgtctgatggtgagggtataaagatgaattgaaccaaggtc

SEQ ID NO: 129364 - DNA, 72 bp, Homo sapiens
tttttttttatgccactgtctgatggtgagggtataaagatgaattgaaccaaggtcctgcccacaaggtat

SEQ ID NO: 129365 - DNA, 75 bp, Homo sapiens
tttatgccactgtctgatggtgagggtataaagatgaattgaaccaaggtcctgcccacaaggtattggtctagt

SEQ ID NO: 129366 - DNA, 76 bp, Homo sapiens
tgtctgatggtgagggtataaagatgaattgaaccaaggtcctgcccacaaggtattggtctagttcagagggtga

SEQ ID NO: 129367 - DNA, 71 bp, Homo sapiens
agggtataaagatgaattgaaccaaggtcctgcccacaaggtattggtctagttcagagggtgaggaaata

SEQ ID NO: 129368 - DNA, 72 bp, Homo sapiens
aaagatgaattgaaccaaggtcctgcccacaaggtattggtctagttcagagggtgaggaaatacgtgggca

SEQ ID NO: 129369 - DNA, 74 bp, Homo sapiens
aaggtattggtctagttcagagggtgaggaaatacgtgggcagaagcttagcaagctaactaaagtgcctctca

SEQ ID NO: 129370 - DNA, 79 bp, Homo sapiens
tagttcagagggtgaggaaatacgtgggcagaagcttagcaagctaactaaagtgcctctcagtctggacagtctcaga

SEQ ID NO: 129371 - DNA, 79 bp, Homo sapiens
aatacgtgggcagaagcttagcaagctaactaaagtgcctctcagtctggacagtctcagagttgctaactgcctgagt

SEQ ID NO: 129372 - DNA, 80 bp, Homo sapiens
aagcttagcaagctaactaaagtgcctctcagtctggacagtctcagagttgctaactgcctgagtttagggagcactga

SEQ ID NO: 129373 - DNA, 83 bp, Homo sapiens
tgcctctcagtctggacagtctcagagttgctaactgcctgagtttagggagcactgatttttcagtctgagttgtatcttga

SEQ ID NO: 129374 - DNA, 81 bp, Homo sapiens
tctcagagttgctaactgcctgagtttagggagcactgatttttcagtctgagttgtatcttgactcaaatccagcttgaa

SEQ ID NO: 129375 - DNA, 79 bp, Homo sapiens
agttgctaactgcctgagtttagggagcactgatttttcagtctgagttgtatcttgactcaaatccagcttgaagctg

SEQ ID NO: 129376 - DNA, 79 bp, Homo sapiens
tgagtttagggagcactgatttttcagtctgagttgtatcttgactcaaatccagcttgaagctgggaagagtagcttg

SEQ ID NO: 129377 - DNA, 79 bp, Homo sapiens
agcactgatttttcagtctgagttgtatcttgactcaaatccagcttgaagctgggaagagtagcttgtaagatttgcc

SEQ ID NO: 129378 - DNA, 76 bp, Homo sapiens
atttttcagtctgagttgtatcttgactcaaatccagcttgaagctgggaagagtagcttgtaagatttgccttaa

SEQ ID NO: 129379 - DNA, 76 bp, Homo sapiens
agttgtatcttgactcaaatccagcttgaagctgggaagagtagcttgtaagatttgccttaaatgtaggcttaga

SEQ ID NO: 129380 - DNA, 78 bp, Homo sapiens
tatcttgactcaaatccagcttgaagctgggaagagtagcttgtaagatttgccttaaatgtaggcttagagggcaga

SEQ ID NO: 129381 - DNA, 74 bp, Homo sapiens
aaatccagcttgaagctgggaagagtagcttgtaagatttgccttaaatgtaggcttagagggcagagtggttg

SEQ ID NO: 129382 - DNA, 72 bp, Homo sapiens
aagctgggaagagtagcttgtaagatttgccttaaatgtaggcttagagggcagagtggttggttagttcca

SEQ ID NO: 129383 - DNA, 73 bp, Homo sapiens
gtagcttgtaagatttgccttaaatgtaggcttagagggcagagtggttggttagttccactctcaggtaata

SEQ ID NO: 129384 - DNA, 71 bp, Homo sapiens
ttgtaagatttgccttaaatgtaggcttagagggcagagtggttggttagttccactctcaggtaataaaa

SEQ ID NO: 129385 - DNA, 73 bp, Homo sapiens
ttaaatgtaggcttagagggcagagtggttggttagttccactctcaggtaataaaagcaccagatataggtc

SEQ ID NO: 129386 - DNA, 70 bp, Homo sapiens
agagtggttggttagttccactctcaggtaataaaagcaccagatataggtccattagggttcccattta

SEQ ID NO: 129387 - DNA, 71 bp, Homo sapiens
ttggttagttccactctcaggtaataaaagcaccagatataggtccattagggttcccatttactgtctta

SEQ ID NO: 129388 - DNA, 72 bp, Homo sapiens
ttccactctcaggtaataaaagcaccagatataggtccattagggttcccatttactgtcttagaaaggagc

SEQ ID NO: 129389 - DNA, 68 bp, Homo sapiens
aggtaataaaagcaccagatataggtccattagggttcccatttactgtcttagaaaggagccctaag

SEQ ID NO: 129390 - DNA, 72 bp, Homo sapiens
agcaccagatataggtccattagggttcccatttactgtcttagaaaggagccctaagtggtccagggatca

SEQ ID NO: 129391 - DNA, 72 bp, Homo sapiens
tagggttcccatttactgtcttagaaaggagccctaagtggtccagggatcacaggagcattgtttcttctc

SEQ ID NO: 129392 - DNA, 73 bp, Homo sapiens
atttactgtcttagaaaggagccctaagtggtccagggatcacaggagcattgtttcttctctgacaattatt

SEQ ID NO: 129393 - DNA, 72 bp, Homo sapiens
ttagaaaggagccctaagtggtccagggatcacaggagcattgtttcttctctgacaattatttttgtttcc

SEQ ID NO: 129394 - DNA, 78 bp, Homo sapiens
taagtggtccagggatcacaggagcattgtttcttctctgacaattatttttgtttcctggtagtgatcagcagcaaa

SEQ ID NO: 129395 - DNA, 76 bp, Homo sapiens
agggatcacaggagcattgtttcttctctgacaattatttttgtttcctggtagtgatcagcagcaaaccactaaa

SEQ ID NO: 129396 - DNA, 73 bp, Homo sapiens
aggagcattgtttcttctctgacaattatttttgtttcctggtagtgatcagcagcaaaccactaaaaagaaa

SEQ ID NO: 129397 - DNA, 70 bp, Homo sapiens
ctgacaattatttttgtttcctggtagtgatcagcagcaaaccactaaaaagaaaggaaggtatatactt

SEQ ID NO: 129398 - DNA, 68 bp, Homo sapiens
tttttgtttcctggtagtgatcagcagcaaaccactaaaaagaaaggaaggtatatacttttcttggg

SEQ ID NO: 129399 - DNA, 71 bp, Homo sapiens
tggtagtgatcagcagcaaaccactaaaaagaaaggaaggtatatacttttcttgggtctagcaaaaacaa

SEQ ID NO: 129400 - DNA, 71 bp, Homo sapiens
atcagcagcaaaccactaaaaagaaaggaaggtatatacttttcttgggtctagcaaaaacaagatgctgg

SEQ ID NO: 129401 - DNA, 73 bp, Homo sapiens
gtatatacttttcttgggtctagcaaaaacaagatgctgggatgactgtacccctcttcaaccaagatctaaa

SEQ ID NO: 129402 - DNA, 74 bp, Homo sapiens
tttcttgggtctagcaaaaacaagatgctgggatgactgtacccctcttcaaccaagatctaaatgcaagggac

SEQ ID NO: 129403 - DNA, 73 bp, Homo sapiens
aaaaacaagatgctgggatgactgtacccctcttcaaccaagatctaaatgcaagggaccccagaggctatag

SEQ ID NO: 129404 - DNA, 74 bp, Homo sapiens
aagatgctgggatgactgtacccctcttcaaccaagatctaaatgcaagggaccccagaggctatagtgggagt

SEQ ID NO: 129405 - DNA, 73 bp, Homo sapiens
atgactgtacccctcttcaaccaagatctaaatgcaagggaccccagaggctatagtgggagttggaagctaa

SEQ ID NO: 129406 - DNA, 72 bp, Homo sapiens
tcttcaaccaagatctaaatgcaagggaccccagaggctatagtgggagttggaagctaagaagggaggaaa

SEQ ID NO: 129407 - DNA, 69 bp, Homo sapiens
aaccaagatctaaatgcaagggaccccagaggctatagtgggagttggaagctaagaagggaggaaaag

SEQ ID NO: 129408 - DNA, 71 bp, Homo sapiens
ccagaggctatagtgggagttggaagctaagaagggaggaaaagggtttgcatcccaagggtgtgccctga

SEQ ID NO: 129409 - DNA, 70 bp, Homo sapiens
ctatagtgggagttggaagctaagaagggaggaaaagggtttgcatcccaagggtgtgccctgaagaaga

SEQ ID NO: 129410 - DNA, 69 bp, Homo sapiens
agttggaagctaagaagggaggaaaagggtttgcatcccaagggtgtgccctgaagaagagagttgtcc

SEQ ID NO: 129411 - DNA, 69 bp, Homo sapiens
ctaagaagggaggaaaagggtttgcatcccaagggtgtgccctgaagaagagagttgtcctgggcctaa

SEQ ID NO: 129412 - DNA, 69 bp, Homo sapiens
aaaagggtttgcatcccaagggtgtgccctgaagaagagagttgtcctgggcctaagcagaagaacctt

SEQ ID NO: 129413 - DNA, 73 bp, Homo sapiens
tttgcatcccaagggtgtgccctgaagaagagagttgtcctgggcctaagcagaagaacctttgagatgtttt

SEQ ID NO: 129414 - DNA, 74 bp, Homo sapiens
aagggtgtgccctgaagaagagagttgtcctgggcctaagcagaagaacctttgagatgtttttgatcaggaga

SEQ ID NO: 129415 - DNA, 77 bp, Homo sapiens
aagaagagagttgtcctgggcctaagcagaagaacctttgagatgtttttgatcaggagacagaactggccatgaga

SEQ ID NO: 129416 - DNA, 79 bp, Homo sapiens
ttgtcctgggcctaagcagaagaacctttgagatgtttttgatcaggagacagaactggccatgagagtatagctggaa

SEQ ID NO: 129417 - DNA, 78 bp, Homo sapiens
cctaagcagaagaacctttgagatgtttttgatcaggagacagaactggccatgagagtatagctggaacaagtacaa

SEQ ID NO: 129418 - DNA, 79 bp, Homo sapiens
agatgtttttgatcaggagacagaactggccatgagagtatagctggaacaagtacaaacatttatatgggcaagttca

SEQ ID NO: 129419 - DNA, 74 bp, Homo sapiens
tatagctggaacaagtacaaacatttatatgggcaagttcagaagaggagaccccaactcagcctaggttggaa

SEQ ID NO: 129420 - DNA, 71 bp, Homo sapiens
acaagtacaaacatttatatgggcaagttcagaagaggagaccccaactcagcctaggttggaagaggtta

SEQ ID NO: 129421 - DNA, 70 bp, Homo sapiens
aagaggagaccccaactcagcctaggttggaagaggttaggaaatgttgccaagagaaagtggccctcaa

SEQ ID NO: 129422 - DNA, 73 bp, Homo sapiens
cccaactcagcctaggttggaagaggttaggaaatgttgccaagagaaagtggccctcaatctgagtcctgta

SEQ ID NO: 129423 - DNA, 71 bp, Homo sapiens
cctaggttggaagaggttaggaaatgttgccaagagaaagtggccctcaatctgagtcctgtaggacaagt

SEQ ID NO: 129424 - DNA, 72 bp, Homo sapiens
aagaggttaggaaatgttgccaagagaaagtggccctcaatctgagtcctgtaggacaagttaactaggcaa

SEQ ID NO: 129425 - DNA, 73 bp, Homo sapiens
ttaggaaatgttgccaagagaaagtggccctcaatctgagtcctgtaggacaagttaactaggcaaagaagga

SEQ ID NO: 129426 - DNA, 74 bp, Homo sapiens
caagagaaagtggccctcaatctgagtcctgtaggacaagttaactaggcaaagaaggacttcttgaggagaga

SEQ ID NO: 129427 - DNA, 73 bp, Homo sapiens
aaagtggccctcaatctgagtcctgtaggacaagttaactaggcaaagaaggacttcttgaggagagaccaca

SEQ ID NO: 129428 - DNA, 78 bp, Homo sapiens
aatctgagtcctgtaggacaagttaactaggcaaagaaggacttcttgaggagagaccacatgatgagcataacagaa

SEQ ID NO: 129429 - DNA, 76 bp, Homo sapiens
ctgtaggacaagttaactaggcaaagaaggacttcttgaggagagaccacatgatgagcataacagaaggataaaa

SEQ ID NO: 129430 - DNA, 73 bp, Homo sapiens
aaagaaggacttcttgaggagagaccacatgatgagcataacagaaggataaaatgggggcaccaaaattagg

SEQ ID NO: 129431 - DNA, 75 bp, Homo sapiens
acttcttgaggagagaccacatgatgagcataacagaaggataaaatgggggcaccaaaattagggtgatacaac

SEQ ID NO: 129432 - DNA, 75 bp, Homo sapiens
agagaccacatgatgagcataacagaaggataaaatgggggcaccaaaattagggtgatacaactggagtgaaaa

SEQ ID NO: 129433 - DNA, 73 bp, Homo sapiens
acatgatgagcataacagaaggataaaatgggggcaccaaaattagggtgatacaactggagtgaaaagagtt

SEQ ID NO: 129434 - DNA, 67 bp, Homo sapiens
ataaaatgggggcaccaaaattagggtgatacaactggagtgaaaagagtttgttgggaccaggaag

SEQ ID NO: 129435 - DNA, 72 bp, Homo sapiens
caccaaaattagggtgatacaactggagtgaaaagagtttgttgggaccaggaaggagatgatattgggaca

SEQ ID NO: 129436 - DNA, 75 bp, Homo sapiens
aaattagggtgatacaactggagtgaaaagagtttgttgggaccaggaaggagatgatattgggacatgtgagca

SEQ ID NO: 129437 - DNA, 80 bp, Homo sapiens
agtgaaaagagtttgttgggaccaggaaggagatgatattgggacatgtgagcagagcaggggcctttgcaccatgctga

SEQ ID NO: 129438 - DNA, 81 bp, Homo sapiens
ggaaggagatgatattgggacatgtgagcagagcaggggcctttgcaccatgctgaggcgtgggtatatctgtgtaccttt

SEQ ID NO: 129439 - DNA, 83 bp, Homo sapiens
agatgatattgggacatgtgagcagagcaggggcctttgcaccatgctgaggcgtgggtatatctgtgtaccttttctcctca

SEQ ID NO: 129440 - DNA, 80 bp, Homo sapiens
acatgtgagcagagcaggggcctttgcaccatgctgaggcgtgggtatatctgtgtaccttttctcctcagctaggttct

SEQ ID NO: 129441 - DNA, 77 bp, Homo sapiens
agcagagcaggggcctttgcaccatgctgaggcgtgggtatatctgtgtaccttttctcctcagctaggttcttggg

SEQ ID NO: 129442 - DNA, 77 bp, Homo sapiens
ctttgcaccatgctgaggcgtgggtatatctgtgtaccttttctcctcagctaggttcttggggacaagcactctgg

SEQ ID NO: 129443 - DNA, 79 bp, Homo sapiens
atgctgaggcgtgggtatatctgtgtaccttttctcctcagctaggttcttggggacaagcactctggtagctcataca

SEQ ID NO: 129444 - DNA, 77 bp, Homo sapiens
cgtgggtatatctgtgtaccttttctcctcagctaggttcttggggacaagcactctggtagctcatacacaccata

SEQ ID NO: 129445 - DNA, 80 bp, Homo sapiens
tatctgtgtaccttttctcctcagctaggttcttggggacaagcactctggtagctcatacacaccatagatgcttggta

SEQ ID NO: 129446 - DNA, 79 bp, Homo sapiens
tttctcctcagctaggttcttggggacaagcactctggtagctcatacacaccatagatgcttggtagatgttggtaat

SEQ ID NO: 129447 - DNA, 78 bp, Homo sapiens
ctcagctaggttcttggggacaagcactctggtagctcatacacaccatagatgcttggtagatgttggtaattttta

SEQ ID NO: 129448 - DNA, 82 bp, Homo sapiens
aagcactctggtagctcatacacaccatagatgcttggtagatgttggtaatttttaatctgtagatcttgtgtgctagaca

SEQ ID NO: 129449 - DNA, 80 bp, Homo sapiens
tagctcatacacaccatagatgcttggtagatgttggtaatttttaatctgtagatcttgtgtgctagacaggctccttt

SEQ ID NO: 129450 - DNA, 76 bp, Homo sapiens
acaccatagatgcttggtagatgttggtaatttttaatctgtagatcttgtgtgctagacaggctccttttgaaaa

SEQ ID NO: 129451 - DNA, 72 bp, Homo sapiens
ttggtagatgttggtaatttttaatctgtagatcttgtgtgctagacaggctccttttgaaaaggaaaccaa

SEQ ID NO: 129452 - DNA, 70 bp, Homo sapiens
ttggtaatttttaatctgtagatcttgtgtgctagacaggctccttttgaaaaggaaaccaaatgtttaa

SEQ ID NO: 129453 - DNA, 69 bp, Homo sapiens
ttttaatctgtagatcttgtgtgctagacaggctccttttgaaaaggaaaccaaatgtttaataaaggg

SEQ ID NO: 129454 - DNA, 64 bp, Homo sapiens
gtgctagacaggctccttttgaaaaggaaaccaaatgtttaataaaggggaagtttaataaagg

SEQ ID NO: 129455 - DNA, 60 bp, Homo sapiens
ggctccttttgaaaaggaaaccaaatgtttaataaaggggaagtttaataaaggggaagg

SEQ ID NO: 129456 - DNA, 68 bp, Homo sapiens
caaatgtttaataaaggggaagtttaataaaggggaagggaatatcataagtacagatgatggtctcc

SEQ ID NO: 129457 - DNA, 68 bp, Homo sapiens
tttaataaaggggaagtttaataaaggggaagggaatatcataagtacagatgatggtctcctggaag

SEQ ID NO: 129458 - DNA, 72 bp, Homo sapiens
gtttaataaaggggaagggaatatcataagtacagatgatggtctcctggaagtccagggaggctgaataaa

SEQ ID NO: 129459 - DNA, 73 bp, Homo sapiens
ataaaggggaagggaatatcataagtacagatgatggtctcctggaagtccagggaggctgaataaaaccaga

SEQ ID NO: 129460 - DNA, 80 bp, Homo sapiens
atatcataagtacagatgatggtctcctggaagtccagggaggctgaataaaaccagagagatgttagcattagcaacaa

SEQ ID NO: 129461 - DNA, 77 bp, Homo sapiens
ataagtacagatgatggtctcctggaagtccagggaggctgaataaaaccagagagatgttagcattagcaacaaaa

SEQ ID NO: 129462 - DNA, 76 bp, Homo sapiens
atgatggtctcctggaagtccagggaggctgaataaaaccagagagatgttagcattagcaacaaaatgaaactcc

SEQ ID NO: 129463 - DNA, 72 bp, Homo sapiens
aagtccagggaggctgaataaaaccagagagatgttagcattagcaacaaaatgaaactcccctccattttc

SEQ ID NO: 129464 - DNA, 79 bp, Homo sapiens
taaaaccagagagatgttagcattagcaacaaaatgaaactcccctccattttctctgctcatctgctccattctctta

SEQ ID NO: 129465 - DNA, 80 bp, Homo sapiens
attagcaacaaaatgaaactcccctccattttctctgctcatctgctccattctcttatctcatactggctttctctgct

SEQ ID NO: 129466 - DNA, 80 bp, Homo sapiens
aaaatgaaactcccctccattttctctgctcatctgctccattctcttatctcatactggctttctctgcttttgctcat

SEQ ID NO: 129467 - DNA, 84 bp, Homo sapiens
ccctccattttctctgctcatctgctccattctcttatctcatactggctttctctgcttttgctcattgtcttaattctctca

SEQ ID NO: 129468 - DNA, 82 bp, Homo sapiens
atctgctccattctcttatctcatactggctttctctgcttttgctcattgtcttaattctctcagggcttttcttgcatgg

SEQ ID NO: 129469 - DNA, 80 bp, Homo sapiens
ttctcttatctcatactggctttctctgcttttgctcattgtcttaattctctcagggcttttcttgcatggggcccata

SEQ ID NO: 129470 - DNA, 82 bp, Homo sapiens
tatctcatactggctttctctgcttttgctcattgtcttaattctctcagggcttttcttgcatggggcccatatggctgcc

SEQ ID NO: 129471 - DNA, 80 bp, Homo sapiens
tttctctgcttttgctcattgtcttaattctctcagggcttttcttgcatggggcccatatggctgccccagctcctgag

SEQ ID NO: 129472 - DNA, 81 bp, Homo sapiens
tttgctcattgtcttaattctctcagggcttttcttgcatggggcccatatggctgccccagctcctgagtctatgatctt

SEQ ID NO: 129473 - DNA, 81 bp, Homo sapiens
attgtcttaattctctcagggcttttcttgcatggggcccatatggctgccccagctcctgagtctatgatctttcatctc

SEQ ID NO: 129474 - DNA, 83 bp, Homo sapiens
ttttcttgcatggggcccatatggctgccccagctcctgagtctatgatctttcatctcctggatgaaatgctgaggggagga

SEQ ID NO: 129475 - DNA, 84 bp, Homo sapiens
gggcccatatggctgccccagctcctgagtctatgatctttcatctcctggatgaaatgctgaggggaggaatctgctcatatt

SEQ ID NO: 129476 - DNA, 86 bp, Homo sapiens
atatggctgccccagctcctgagtctatgatctttcatctcctggatgaaatgctgaggggaggaatctgctcatatttttgagca

SEQ ID NO: 129477 - DNA, 83 bp, Homo sapiens
agctcctgagtctatgatctttcatctcctggatgaaatgctgaggggaggaatctgctcatatttttgagcaaggctctggg

SEQ ID NO: 129478 - DNA, 83 bp, Homo sapiens
tctatgatctttcatctcctggatgaaatgctgaggggaggaatctgctcatatttttgagcaaggctctggggcataggtta

SEQ ID NO: 129479 - DNA, 70 bp, Homo sapiens
cccaggctggactaccctttggtcaggtgcacttcctagttgtgtcttgaccagggtagggatgggaagg

SEQ ID NO: 129480 - DNA, 72 bp, Homo sapiens
actaccctttggtcaggtgcacttcctagttgtgtcttgaccagggtagggatgggaaggttcatggcacag

SEQ ID NO: 129481 - DNA, 74 bp, Homo sapiens
tttggtcaggtgcacttcctagttgtgtcttgaccagggtagggatgggaaggttcatggcacagggcataacc

SEQ ID NO: 129482 - DNA, 74 bp, Homo sapiens
ctagttgtgtcttgaccagggtagggatgggaaggttcatggcacagggcataacctcctgggtatatcctaca

SEQ ID NO: 129483 - DNA, 74 bp, Homo sapiens
accagggtagggatgggaaggttcatggcacagggcataacctcctgggtatatcctacagctagggctgtgaa

SEQ ID NO: 129484 - DNA, 77 bp, Homo sapiens
gtagggatgggaaggttcatggcacagggcataacctcctgggtatatcctacagctagggctgtgaaatgggcaga

SEQ ID NO: 129485 - DNA, 82 bp, Homo sapiens
ttcatggcacagggcataacctcctgggtatatcctacagctagggctgtgaaatgggcagagcaggcaccccaacatgtga

SEQ ID NO: 129486 - DNA, 80 bp, Homo sapiens
agggcataacctcctgggtatatcctacagctagggctgtgaaatgggcagagcaggcaccccaacatgtgactagctca

SEQ ID NO: 129487 - DNA, 81 bp, Homo sapiens
ggtatatcctacagctagggctgtgaaatgggcagagcaggcaccccaacatgtgactagctcattcattctaatatttat

SEQ ID NO: 129488 - DNA, 80 bp, Homo sapiens
tgtgaaatgggcagagcaggcaccccaacatgtgactagctcattcattctaatatttattggatacttttaatgtacta

SEQ ID NO: 129489 - DNA, 77 bp, Homo sapiens
aaatgggcagagcaggcaccccaacatgtgactagctcattcattctaatatttattggatacttttaatgtactag

SEQ ID NO: 129490 - DNA, 75 bp, Homo sapiens
aggcaccccaacatgtgactagctcattcattctaatatttattggatacttttaatgtactaggcactggggat

SEQ ID NO: 129491 - DNA, 76 bp, Homo sapiens
catgtgactagctcattcattctaatatttattggatacttttaatgtactaggcactggggattcgtgggcaaaa

SEQ ID NO: 129492 - DNA, 72 bp, Homo sapiens
actagctcattcattctaatatttattggatacttttaatgtactaggcactggggattcgtgggcaaaaaa

SEQ ID NO: 129493 - DNA, 69 bp, Homo sapiens
ttctaatatttattggatacttttaatgtactaggcactggggattcgtgggcaaaaaaaaccagacca

SEQ ID NO: 129494 - DNA, 68 bp, Homo sapiens
atttattggatacttttaatgtactaggcactggggattcgtgggcaaaaaaaaccagaccacaaata

SEQ ID NO: 129495 - DNA, 67 bp, Homo sapiens
atacttttaatgtactaggcactggggattcgtgggcaaaaaaaaccagaccacaaatacaaagtac

SEQ ID NO: 129496 - DNA, 72 bp, Homo sapiens
gggattcgtgggcaaaaaaaaccagaccacaaatacaaagtaccctgcaacatgtttatgtgtcagcatagg

SEQ ID NO: 129497 - DNA, 74 bp, Homo sapiens
gcaaaaaaaaccagaccacaaatacaaagtaccctgcaacatgtttatgtgtcagcatagggtagtatctgaat

SEQ ID NO: 129498 - DNA, 77 bp, Homo sapiens
aaatacaaagtaccctgcaacatgtttatgtgtcagcatagggtagtatctgaattataactggagcatttctagta

SEQ ID NO: 129499 - DNA, 77 bp, Homo sapiens
aaagtaccctgcaacatgtttatgtgtcagcatagggtagtatctgaattataactggagcatttctagtaccattc

SEQ ID NO: 129500 - DNA, 78 bp, Homo sapiens
tgtcagcatagggtagtatctgaattataactggagcatttctagtaccattcttgagaactgcctaatttcgtttga

SEQ ID NO: 129501 - DNA, 74 bp, Homo sapiens
atagggtagtatctgaattataactggagcatttctagtaccattcttgagaactgcctaatttcgtttgacca

SEQ ID NO: 129502 - DNA, 76 bp, Homo sapiens
atctgaattataactggagcatttctagtaccattcttgagaactgcctaatttcgtttgaccacacatatagtta

SEQ ID NO: 129503 - DNA, 74 bp, Homo sapiens
tttctagtaccattcttgagaactgcctaatttcgtttgaccacacatatagttattggggcgagaaagatgat

SEQ ID NO: 129504 - DNA, 76 bp, Homo sapiens
attcttgagaactgcctaatttcgtttgaccacacatatagttattggggcgagaaagatgattggagagaagatc

SEQ ID NO: 129505 - DNA, 78 bp, Homo sapiens
actgcctaatttcgtttgaccacacatatagttattggggcgagaaagatgattggagagaagatctgtgatgaatta

SEQ ID NO: 129506 - DNA, 77 bp, Homo sapiens
aatttcgtttgaccacacatatagttattggggcgagaaagatgattggagagaagatctgtgatgaattaatggtc

SEQ ID NO: 129507 - DNA, 76 bp, Homo sapiens
attggagagaagatctgtgatgaattaatggtccagccctaaaataaatggctttcttattgtctttgcaaactca

SEQ ID NO: 129508 - DNA, 74 bp, Homo sapiens
aagatctgtgatgaattaatggtccagccctaaaataaatggctttcttattgtctttgcaaactcaccttcca

SEQ ID NO: 129509 - DNA, 72 bp, Homo sapiens
gatgaattaatggtccagccctaaaataaatggctttcttattgtctttgcaaactcaccttccatttatct

SEQ ID NO: 129510 - DNA, 70 bp, Homo sapiens
atggtccagccctaaaataaatggctttcttattgtctttgcaaactcaccttccatttatctttttgtc

SEQ ID NO: 129511 - DNA, 71 bp, Homo sapiens
ctaaaataaatggctttcttattgtctttgcaaactcaccttccatttatctttttgtctggatccggtga

SEQ ID NO: 129512 - DNA, 68 bp, Homo sapiens
aactcaccttccatttatctttttgtctggatccggtgattttaggtgtacctgaaagccttggggta

SEQ ID NO: 129513 - DNA, 73 bp, Homo sapiens
catttatctttttgtctggatccggtgattttaggtgtacctgaaagccttggggtagtttcactgctcatga

SEQ ID NO: 129514 - DNA, 71 bp, Homo sapiens
atctttttgtctggatccggtgattttaggtgtacctgaaagccttggggtagtttcactgctcatgaaag

SEQ ID NO: 129515 - DNA, 69 bp, Homo sapiens
atccggtgattttaggtgtacctgaaagccttggggtagtttcactgctcatgaaagggtaatccctaa

SEQ ID NO: 129516 - DNA, 67 bp, Homo sapiens
tttaggtgtacctgaaagccttggggtagtttcactgctcatgaaagggtaatccctaaagttcgtt

SEQ ID NO: 129517 - DNA, 73 bp, Homo sapiens
ctgaaagccttggggtagtttcactgctcatgaaagggtaatccctaaagttcgtttgactctgtgcttatga

SEQ ID NO: 129518 - DNA, 73 bp, Homo sapiens
cttggggtagtttcactgctcatgaaagggtaatccctaaagttcgtttgactctgtgcttatgaagcaagaa

SEQ ID NO: 129519 - DNA, 75 bp, Homo sapiens
tagtttcactgctcatgaaagggtaatccctaaagttcgtttgactctgtgcttatgaagcaagaacacatttat

SEQ ID NO: 129520 - DNA, 72 bp, Homo sapiens
ctcatgaaagggtaatccctaaagttcgtttgactctgtgcttatgaagcaagaacacatttattctttctt

SEQ ID NO: 129521 - DNA, 72 bp, Homo sapiens
gggtaatccctaaagttcgtttgactctgtgcttatgaagcaagaacacatttattctttctttcagtcatt

SEQ ID NO: 129522 - DNA, 74 bp, Homo sapiens
tctttcagtcatttatttttccttttggtttaccatttattcagcatcttctagtgccgcatgttaaggcaaca

SEQ ID NO: 129523 - DNA, 73 bp, Homo sapiens
tttatttttccttttggtttaccatttattcagcatcttctagtgccgcatgttaaggcaacatcttgccctg

SEQ ID NO: 129524 - DNA, 76 bp, Homo sapiens
tttccttttggtttaccatttattcagcatcttctagtgccgcatgttaaggcaacatcttgccctgggtgctgga

SEQ ID NO: 129525 - DNA, 81 bp, Homo sapiens
taccatttattcagcatcttctagtgccgcatgttaaggcaacatcttgccctgggtgctggagataccgagatgaaataa

SEQ ID NO: 129526 - DNA, 83 bp, Homo sapiens
ttattcagcatcttctagtgccgcatgttaaggcaacatcttgccctgggtgctggagataccgagatgaaataagacactgc

SEQ ID NO: 129527 - DNA, 80 bp, Homo sapiens
tcttctagtgccgcatgttaaggcaacatcttgccctgggtgctggagataccgagatgaaataagacactgctctaagg

SEQ ID NO: 129528 - DNA, 78 bp, Homo sapiens
ctgggtgctggagataccgagatgaaataagacactgctctaagggaactctctctctagtagggaaagcagacatgg

SEQ ID NO: 129529 - DNA, 79 bp, Homo sapiens
tgctggagataccgagatgaaataagacactgctctaagggaactctctctctagtagggaaagcagacatgggaggaa

SEQ ID NO: 129530 - DNA, 78 bp, Homo sapiens
tggagataccgagatgaaataagacactgctctaagggaactctctctctagtagggaaagcagacatgggaggaatg

SEQ ID NO: 129531 - DNA, 76 bp, Homo sapiens
agataccgagatgaaataagacactgctctaagggaactctctctctagtagggaaagcagacatgggaggaatgg

SEQ ID NO: 129532 - DNA, 78 bp, Homo sapiens
agatgaaataagacactgctctaagggaactctctctctagtagggaaagcagacatgggaggaatggtgtgacagac

SEQ ID NO: 129533 - DNA, 76 bp, Homo sapiens
aataagacactgctctaagggaactctctctctagtagggaaagcagacatgggaggaatggtgtgacagaccgaa

SEQ ID NO: 129534 - DNA, 72 bp, Homo sapiens
taagggaactctctctctagtagggaaagcagacatgggaggaatggtgtgacagaccgaaggggtggtgtt

SEQ ID NO: 129535 - DNA, 76 bp, Homo sapiens
tctctagtagggaaagcagacatgggaggaatggtgtgacagaccgaaggggtggtgtttgcaaatggcaccgata

SEQ ID NO: 129536 - DNA, 76 bp, Homo sapiens
aaagcagacatgggaggaatggtgtgacagaccgaaggggtggtgtttgcaaatggcaccgatacggcaacataga

SEQ ID NO: 129537 - DNA, 76 bp, Homo sapiens
atgggaggaatggtgtgacagaccgaaggggtggtgtttgcaaatggcaccgatacggcaacatagattgctagag

SEQ ID NO: 129538 - DNA, 76 bp, Homo sapiens
acagaccgaaggggtggtgtttgcaaatggcaccgatacggcaacatagattgctagaggaggaggatcctggctg

SEQ ID NO: 129539 - DNA, 82 bp, Homo sapiens
tggtgtttgcaaatggcaccgatacggcaacatagattgctagaggaggaggatcctggctggcaggagtcagattctagag

SEQ ID NO: 129540 - DNA, 81 bp, Homo sapiens
aaatggcaccgatacggcaacatagattgctagaggaggaggatcctggctggcaggagtcagattctagaggatcttaca

SEQ ID NO: 129541 - DNA, 82 bp, Homo sapiens
cgatacggcaacatagattgctagaggaggaggatcctggctggcaggagtcagattctagaggatcttacattttgctgta

SEQ ID NO: 129542 - DNA, 81 bp, Homo sapiens
catagattgctagaggaggaggatcctggctggcaggagtcagattctagaggatcttacattttgctgtactttatctta

SEQ ID NO: 129543 - DNA, 79 bp, Homo sapiens
attgctagaggaggaggatcctggctggcaggagtcagattctagaggatcttacattttgctgtactttatcttagag

SEQ ID NO: 129544 - DNA, 78 bp, Homo sapiens
ggatcctggctggcaggagtcagattctagaggatcttacattttgctgtactttatcttagagggtaggcatcaaaa

SEQ ID NO: 129545 - DNA, 77 bp, Homo sapiens
tggcaggagtcagattctagaggatcttacattttgctgtactttatcttagagggtaggcatcaaaaagcgaggga

SEQ ID NO: 129546 - DNA, 71 bp, Homo sapiens
aggatcttacattttgctgtactttatcttagagggtaggcatcaaaaagcgagggacagttgaaagttta

SEQ ID NO: 129547 - DNA, 71 bp, Homo sapiens
cttacattttgctgtactttatcttagagggtaggcatcaaaaagcgagggacagttgaaagtttaaagca

SEQ ID NO: 129548 - DNA, 72 bp, Homo sapiens
tgtactttatcttagagggtaggcatcaaaaagcgagggacagttgaaagtttaaagcatgcaagttaaatg

SEQ ID NO: 129549 - DNA, 75 bp, Homo sapiens
atcttagagggtaggcatcaaaaagcgagggacagttgaaagtttaaagcatgcaagttaaatgtcagatttgca

SEQ ID NO: 129550 - DNA, 73 bp, Homo sapiens
gtaggcatcaaaaagcgagggacagttgaaagtttaaagcatgcaagttaaatgtcagatttgcacttaaaaa

SEQ ID NO: 129551 - DNA, 75 bp, Homo sapiens
aagcgagggacagttgaaagtttaaagcatgcaagttaaatgtcagatttgcacttaaaaagataatgctagtga

SEQ ID NO: 129552 - DNA, 76 bp, Homo sapiens
gacagttgaaagtttaaagcatgcaagttaaatgtcagatttgcacttaaaaagataatgctagtgaaaggatgga

SEQ ID NO: 129553 - DNA, 78 bp, Homo sapiens
agttaaatgtcagatttgcacttaaaaagataatgctagtgaaaggatggatagagagtgagagatttgtgtcaggaa

SEQ ID NO: 129554 - DNA, 79 bp, Homo sapiens
aatgtcagatttgcacttaaaaagataatgctagtgaaaggatggatagagagtgagagatttgtgtcaggaagaccag

SEQ ID NO: 129555 - DNA, 76 bp, Homo sapiens
cttaaaaagataatgctagtgaaaggatggatagagagtgagagatttgtgtcaggaagaccaggaatttattata

SEQ ID NO: 129556 - DNA, 79 bp, Homo sapiens
aaagataatgctagtgaaaggatggatagagagtgagagatttgtgtcaggaagaccaggaatttattatatgattgac

SEQ ID NO: 129557 - DNA, 80 bp, Homo sapiens
tagtgaaaggatggatagagagtgagagatttgtgtcaggaagaccaggaatttattatatgattgacgtgtcaggagaa

SEQ ID NO: 129558 - DNA, 77 bp, Homo sapiens
atagagagtgagagatttgtgtcaggaagaccaggaatttattatatgattgacgtgtcaggagaagagggcctaaa

SEQ ID NO: 129559 - DNA, 73 bp, Homo sapiens
agagatttgtgtcaggaagaccaggaatttattatatgattgacgtgtcaggagaagagggcctaaactaaag

SEQ ID NO: 129560 - DNA, 74 bp, Homo sapiens
tttgtgtcaggaagaccaggaatttattatatgattgacgtgtcaggagaagagggcctaaactaaagtagtga

SEQ ID NO: 129561 - DNA, 74 bp, Homo sapiens
atgattgacgtgtcaggagaagagggcctaaactaaagtagtgacagtgagtgtagaagaggtggtaaggagaa

SEQ ID NO: 129562 - DNA, 74 bp, Homo sapiens
ggagaagagggcctaaactaaagtagtgacagtgagtgtagaagaggtggtaaggagaagtggcaaagcagata

SEQ ID NO: 129563 - DNA, 72 bp, Homo sapiens
gcctaaactaaagtagtgacagtgagtgtagaagaggtggtaaggagaagtggcaaagcagatagtacgttt

SEQ ID NO: 129564 - DNA, 71 bp, Homo sapiens
aactaaagtagtgacagtgagtgtagaagaggtggtaaggagaagtggcaaagcagatagtacgtttttaa

SEQ ID NO: 129565 - DNA, 71 bp, Homo sapiens
acagtgagtgtagaagaggtggtaaggagaagtggcaaagcagatagtacgtttttaaccttcatttgaaa

SEQ ID NO: 129566 - DNA, 74 bp, Homo sapiens
tagaagaggtggtaaggagaagtggcaaagcagatagtacgtttttaaccttcatttgaaatgccatagcatta

SEQ ID NO: 129567 - DNA, 76 bp, Homo sapiens
taaggagaagtggcaaagcagatagtacgtttttaaccttcatttgaaatgccatagcattagagactcttctcat

SEQ ID NO: 129568 - DNA, 74 bp, Homo sapiens
agaagtggcaaagcagatagtacgtttttaaccttcatttgaaatgccatagcattagagactcttctcatttt

SEQ ID NO: 129569 - DNA, 73 bp, Homo sapiens
aagcagatagtacgtttttaaccttcatttgaaatgccatagcattagagactcttctcattttttactccat

SEQ ID NO: 129570 - DNA, 71 bp, Homo sapiens
cgtttttaaccttcatttgaaatgccatagcattagagactcttctcattttttactccatttttggcagg

SEQ ID NO: 129571 - DNA, 70 bp, Homo sapiens
aaatgccatagcattagagactcttctcattttttactccatttttggcagggaaaacaatcccttaaac

SEQ ID NO: 129572 - DNA, 66 bp, Homo sapiens
tctcattttttactccatttttggcagggaaaacaatcccttaaactgtataccttaaacattccc

SEQ ID NO: 129573 - DNA, 65 bp, Homo sapiens
tactccatttttggcagggaaaacaatcccttaaactgtataccttaaacattccctttaactgg

SEQ ID NO: 129574 - DNA, 65 bp, Homo sapiens
tttggcagggaaaacaatcccttaaactgtataccttaaacattccctttaactggttctttgtg

SEQ ID NO: 129575 - DNA, 64 bp, Homo sapiens
agggaaaacaatcccttaaactgtataccttaaacattccctttaactggttctttgtgtggct

SEQ ID NO: 129576 - DNA, 63 bp, Homo sapiens
cccttaaactgtataccttaaacattccctttaactggttctttgtgtggctttttagaaaac

SEQ ID NO: 129577 - DNA, 68 bp, Homo sapiens
ctgtataccttaaacattccctttaactggttctttgtgtggctttttagaaaactgaaagacagtgc

SEQ ID NO: 129578 - DNA, 68 bp, Homo sapiens
taaacattccctttaactggttctttgtgtggctttttagaaaactgaaagacagtgctttgtggagt

SEQ ID NO: 129579 - DNA, 72 bp, Homo sapiens
tttaactggttctttgtgtggctttttagaaaactgaaagacagtgctttgtggagttcacaagttagctga

SEQ ID NO: 129580 - DNA, 72 bp, Homo sapiens
tgtgtggctttttagaaaactgaaagacagtgctttgtggagttcacaagttagctgatgggtgtttcgttt

SEQ ID NO: 129581 - DNA, 70 bp, Homo sapiens
tttagaaaactgaaagacagtgctttgtggagttcacaagttagctgatgggtgtttcgtttttgtttaa

SEQ ID NO: 129582 - DNA, 70 bp, Homo sapiens
aaaactgaaagacagtgctttgtggagttcacaagttagctgatgggtgtttcgtttttgtttaatccta

SEQ ID NO: 129583 - DNA, 72 bp, Homo sapiens
acagtgctttgtggagttcacaagttagctgatgggtgtttcgtttttgtttaatcctaatttgcctgtctg

SEQ ID NO: 129584 - DNA, 71 bp, Homo sapiens
tgtggagttcacaagttagctgatgggtgtttcgtttttgtttaatcctaatttgcctgtctgtgttattt

SEQ ID NO: 129585 - DNA, 68 bp, Homo sapiens
aagttagctgatgggtgtttcgtttttgtttaatcctaatttgcctgtctgtgttattttgcccttct

SEQ ID NO: 129586 - DNA, 69 bp, Homo sapiens
atgggtgtttcgtttttgtttaatcctaatttgcctgtctgtgttattttgcccttcttacatctcagg

SEQ ID NO: 129587 - DNA, 70 bp, Homo sapiens
ttcgtttttgtttaatcctaatttgcctgtctgtgttattttgcccttcttacatctcagggcctgaatt

SEQ ID NO: 129588 - DNA, 73 bp, Homo sapiens
tttaatcctaatttgcctgtctgtgttattttgcccttcttacatctcagggcctgaatttgagtgactttgg

SEQ ID NO: 129589 - DNA, 73 bp, Homo sapiens
cctgtctgtgttattttgcccttcttacatctcagggcctgaatttgagtgactttgggttggttacatagta

SEQ ID NO: 129590 - DNA, 73 bp, Homo sapiens
ttattttgcccttcttacatctcagggcctgaatttgagtgactttgggttggttacatagtagttcgtatga

SEQ ID NO: 129591 - DNA, 73 bp, Homo sapiens
cttcttacatctcagggcctgaatttgagtgactttgggttggttacatagtagttcgtatgacctggtggct

SEQ ID NO: 129592 - DNA, 72 bp, Homo sapiens
tgaatttgagtgactttgggttggttacatagtagttcgtatgacctggtggctttgttaggtaagcaagaa

SEQ ID NO: 129593 - DNA, 70 bp, Homo sapiens
agtgactttgggttggttacatagtagttcgtatgacctggtggctttgttaggtaagcaagaattgact

SEQ ID NO: 129594 - DNA, 74 bp, Homo sapiens
acatagtagttcgtatgacctggtggctttgttaggtaagcaagaattgacttcgtcacagaattgtattgtgt

SEQ ID NO: 129595 - DNA, 74 bp, Homo sapiens
gtggctttgttaggtaagcaagaattgacttcgtcacagaattgtattgtgttgcctttccattcagtttgaaa

SEQ ID NO: 129596 - DNA, 77 bp, Homo sapiens
gttaggtaagcaagaattgacttcgtcacagaattgtattgtgttgcctttccattcagtttgaaagatgatgacag

SEQ ID NO: 129597 - DNA, 78 bp, Homo sapiens
aagaattgacttcgtcacagaattgtattgtgttgcctttccattcagtttgaaagatgatgacagtggggaccatga

SEQ ID NO: 129598 - DNA, 81 bp, Homo sapiens
ttcgtcacagaattgtattgtgttgcctttccattcagtttgaaagatgatgacagtggggaccatgatcagaatgaagaa

SEQ ID NO: 129599 - DNA, 80 bp, Homo sapiens
aattgtattgtgttgcctttccattcagtttgaaagatgatgacagtggggaccatgatcagaatgaagaaaacagcaca

SEQ ID NO: 129600 - DNA, 81 bp, Homo sapiens
gtgttgcctttccattcagtttgaaagatgatgacagtggggaccatgatcagaatgaagaaaacagcacacagaaagatg

SEQ ID NO: 129601 - DNA, 80 bp, Homo sapiens
attcagtttgaaagatgatgacagtggggaccatgatcagaatgaagaaaacagcacacagaaagatggtgagaaggaaa

SEQ ID NO: 129602 - DNA, 77 bp, Homo sapiens
aagatgatgacagtggggaccatgatcagaatgaagaaaacagcacacagaaagatggtgagaaggaaaaaacggaa

SEQ ID NO: 129603 - DNA, 74 bp, Homo sapiens
agtggggaccatgatcagaatgaagaaaacagcacacagaaagatggtgagaaggaaaaaacggaacgagacaa

SEQ ID NO: 129604 - DNA, 78 bp, Homo sapiens
atgatcagaatgaagaaaacagcacacagaaagatggtgagaaggaaaaaacggaacgagacaagaatcagagcagta

SEQ ID NO: 129605 - DNA, 74 bp, Homo sapiens
aaaacagcacacagaaagatggtgagaaggaaaaaacggaacgagacaagaatcagagcagtagcaagagaaag

SEQ ID NO: 129606 - DNA, 74 bp, Homo sapiens
acagaaagatggtgagaaggaaaaaacggaacgagacaagaatcagagcagtagcaagagaaaggtgagtgttg

SEQ ID NO: 129607 - DNA, 76 bp, Homo sapiens
agaaggaaaaaacggaacgagacaagaatcagagcagtagcaagagaaaggtgagtgttggctgcacagatgtagt

SEQ ID NO: 129608 - DNA, 78 bp, Homo sapiens
aaaaacggaacgagacaagaatcagagcagtagcaagagaaaggtgagtgttggctgcacagatgtagttgcctttga

SEQ ID NO: 129609 - DNA, 79 bp, Homo sapiens
aatcagagcagtagcaagagaaaggtgagtgttggctgcacagatgtagttgcctttgaacttgagacttttattatct

SEQ ID NO: 129610 - DNA, 78 bp, Homo sapiens
ctgcacagatgtagttgcctttgaacttgagacttttattatcttgtggaatctgtttatctggaagataccagatta

SEQ ID NO: 129611 - DNA, 77 bp, Homo sapiens
ttgaacttgagacttttattatcttgtggaatctgtttatctggaagataccagattaacttgatggcatcctgtgt

SEQ ID NO: 129612 - DNA, 77 bp, Homo sapiens
agacttttattatcttgtggaatctgtttatctggaagataccagattaacttgatggcatcctgtgttggaatatc

SEQ ID NO: 129613 - DNA, 79 bp, Homo sapiens
ttattatcttgtggaatctgtttatctggaagataccagattaacttgatggcatcctgtgttggaatatctgactttg

SEQ ID NO: 129614 - DNA, 77 bp, Homo sapiens
aatctgtttatctggaagataccagattaacttgatggcatcctgtgttggaatatctgactttgttctcagaaaaa

SEQ ID NO: 129615 - DNA, 80 bp, Homo sapiens
tttatctggaagataccagattaacttgatggcatcctgtgttggaatatctgactttgttctcagaaaaacattgtgca

SEQ ID NO: 129616 - DNA, 82 bp, Homo sapiens
ataccagattaacttgatggcatcctgtgttggaatatctgactttgttctcagaaaaacattgtgcaatcattgatgttca

SEQ ID NO: 129617 - DNA, 82 bp, Homo sapiens
ttaacttgatggcatcctgtgttggaatatctgactttgttctcagaaaaacattgtgcaatcattgatgttcattttcaga

SEQ ID NO: 129618 - DNA, 78 bp, Homo sapiens
atcctgtgttggaatatctgactttgttctcagaaaaacattgtgcaatcattgatgttcattttcagacctagaact

SEQ ID NO: 129619 - DNA, 77 bp, Homo sapiens
gttggaatatctgactttgttctcagaaaaacattgtgcaatcattgatgttcattttcagacctagaacttttctc

SEQ ID NO: 129620 - DNA, 79 bp, Homo sapiens
tttgttctcagaaaaacattgtgcaatcattgatgttcattttcagacctagaacttttctcttgccacagaatcttga

SEQ ID NO: 129621 - DNA, 80 bp, Homo sapiens
agaaaaacattgtgcaatcattgatgttcattttcagacctagaacttttctcttgccacagaatcttgagatgctgcct

SEQ ID NO: 129622 - DNA, 79 bp, Homo sapiens
ttgatgttcattttcagacctagaacttttctcttgccacagaatcttgagatgctgccttgctttcaacgttctccta

SEQ ID NO: 129623 - DNA, 79 bp, Homo sapiens
ttcattttcagacctagaacttttctcttgccacagaatcttgagatgctgccttgctttcaacgttctcctagcctga

SEQ ID NO: 129624 - DNA, 79 bp, Homo sapiens
acctagaacttttctcttgccacagaatcttgagatgctgccttgctttcaacgttctcctagcctgagatggagatta

SEQ ID NO: 129625 - DNA, 82 bp, Homo sapiens
tcttgccacagaatcttgagatgctgccttgctttcaacgttctcctagcctgagatggagattagtcctggagcttaacaa

SEQ ID NO: 129626 - DNA, 79 bp, Homo sapiens
cttgctttcaacgttctcctagcctgagatggagattagtcctggagcttaacaaggctgttagctgcttcataagcca

SEQ ID NO: 129627 - DNA, 82 bp, Homo sapiens
ctgagatggagattagtcctggagcttaacaaggctgttagctgcttcataagccactgctgagtgtttcaaatcctacata

SEQ ID NO: 129628 - DNA, 79 bp, Homo sapiens
atggagattagtcctggagcttaacaaggctgttagctgcttcataagccactgctgagtgtttcaaatcctacatacc

SEQ ID NO: 129629 - DNA, 78 bp, Homo sapiens
tggagcttaacaaggctgttagctgcttcataagccactgctgagtgtttcaaatcctacataccccttgaaattgta

SEQ ID NO: 129630 - DNA, 76 bp, Homo sapiens
aaggctgttagctgcttcataagccactgctgagtgtttcaaatcctacataccccttgaaattgtagacagttta

SEQ ID NO: 129631 - DNA, 79 bp, Homo sapiens
ttagctgcttcataagccactgctgagtgtttcaaatcctacataccccttgaaattgtagacagtttagtcagcaata

SEQ ID NO: 129632 - DNA, 77 bp, Homo sapiens
ttcataagccactgctgagtgtttcaaatcctacataccccttgaaattgtagacagtttagtcagcaatagtctaa

SEQ ID NO: 129633 - DNA, 74 bp, Homo sapiens
tgagtgtttcaaatcctacataccccttgaaattgtagacagtttagtcagcaatagtctaaggtgaaagtgac

SEQ ID NO: 129634 - DNA, 72 bp, Homo sapiens
gtttcaaatcctacataccccttgaaattgtagacagtttagtcagcaatagtctaaggtgaaagtgacttg

SEQ ID NO: 129635 - DNA, 69 bp, Homo sapiens
ataccccttgaaattgtagacagtttagtcagcaatagtctaaggtgaaagtgacttggaaaagggaaa

SEQ ID NO: 129636 - DNA, 69 bp, Homo sapiens
cttgaaattgtagacagtttagtcagcaatagtctaaggtgaaagtgacttggaaaagggaaaacttag

SEQ ID NO: 129637 - DNA, 72 bp, Homo sapiens
tagacagtttagtcagcaatagtctaaggtgaaagtgacttggaaaagggaaaacttagggaatgagagaga

SEQ ID NO: 129638 - DNA, 70 bp, Homo sapiens
aaaaacaaacaaagaaatatcaaagcaatcactaattcatttattctacaatattgagtaaccctccaag

SEQ ID NO: 129639 - DNA, 70 bp, Homo sapiens
aaaacaaacaaagaaatatcaaagcaatcactaattcatttattctacaatattgagtaaccctccaagg

SEQ ID NO: 129640 - DNA, 73 bp, Homo sapiens
caaagaaatatcaaagcaatcactaattcatttattctacaatattgagtaaccctccaagggttactagcat

SEQ ID NO: 129641 - DNA, 76 bp, Homo sapiens
caaagcaatcactaattcatttattctacaatattgagtaaccctccaagggttactagcattttatgctagatgc

SEQ ID NO: 129642 - DNA, 75 bp, Homo sapiens
ctaattcatttattctacaatattgagtaaccctccaagggttactagcattttatgctagatgctaagaggaca

SEQ ID NO: 129643 - DNA, 73 bp, Homo sapiens
atttattctacaatattgagtaaccctccaagggttactagcattttatgctagatgctaagaggacacaaag

SEQ ID NO: 129644 - DNA, 76 bp, Homo sapiens
tacaatattgagtaaccctccaagggttactagcattttatgctagatgctaagaggacacaaaggtgaatgagac

SEQ ID NO: 129645 - DNA, 74 bp, Homo sapiens
agtaaccctccaagggttactagcattttatgctagatgctaagaggacacaaaggtgaatgagactgtggaag

SEQ ID NO: 129646 - DNA, 75 bp, Homo sapiens
gttactagcattttatgctagatgctaagaggacacaaaggtgaatgagactgtggaaggggcttacgtttaata

SEQ ID NO: 129647 - DNA, 74 bp, Homo sapiens
ttttatgctagatgctaagaggacacaaaggtgaatgagactgtggaaggggcttacgtttaatagtaccaata

SEQ ID NO: 129648 - DNA, 73 bp, Homo sapiens
ctagatgctaagaggacacaaaggtgaatgagactgtggaaggggcttacgtttaatagtaccaataataata

SEQ ID NO: 129649 - DNA, 72 bp, Homo sapiens
aggacacaaaggtgaatgagactgtggaaggggcttacgtttaatagtaccaataataatactgacatctgt

SEQ ID NO: 129650 - DNA, 74 bp, Homo sapiens
aaggtgaatgagactgtggaaggggcttacgtttaatagtaccaataataatactgacatctgttgtgcacgta

SEQ ID NO: 129651 - DNA, 75 bp, Homo sapiens
agactgtggaaggggcttacgtttaatagtaccaataataatactgacatctgttgtgcacgtactctgtgccag

SEQ ID NO: 129652 - DNA, 86 bp, Homo sapiens
gtgccaggcactgtgctcagcattgtatatccactgattcatttgatcctctcagcagtattgtgagatggttgttacaattttcc

SEQ ID NO: 129653 - DNA, 83 bp, Homo sapiens
actgtgctcagcattgtatatccactgattcatttgatcctctcagcagtattgtgagatggttgttacaattttcctcattt

SEQ ID NO: 129654 - DNA, 81 bp, Homo sapiens
cattgtatatccactgattcatttgatcctctcagcagtattgtgagatggttgttacaattttcctcattttgcaggtaa

SEQ ID NO: 129655 - DNA, 81 bp, Homo sapiens
tatatccactgattcatttgatcctctcagcagtattgtgagatggttgttacaattttcctcattttgcaggtaagaaga

SEQ ID NO: 129656 - DNA, 79 bp, Homo sapiens
atttgatcctctcagcagtattgtgagatggttgttacaattttcctcattttgcaggtaagaagatgaggcacaaaca

SEQ ID NO: 129657 - DNA, 77 bp, Homo sapiens
ctctcagcagtattgtgagatggttgttacaattttcctcattttgcaggtaagaagatgaggcacaaacaggttaa

SEQ ID NO: 129658 - DNA, 73 bp, Homo sapiens
agtattgtgagatggttgttacaattttcctcattttgcaggtaagaagatgaggcacaaacaggttaagtaa

SEQ ID NO: 129659 - DNA, 74 bp, Homo sapiens
gttgttacaattttcctcattttgcaggtaagaagatgaggcacaaacaggttaagtaacttgacagtgatgaa

SEQ ID NO: 129660 - DNA, 78 bp, Homo sapiens
tacaattttcctcattttgcaggtaagaagatgaggcacaaacaggttaagtaacttgacagtgatgaatctcataga

SEQ ID NO: 129661 - DNA, 79 bp, Homo sapiens
attttgcaggtaagaagatgaggcacaaacaggttaagtaacttgacagtgatgaatctcatagaggaggcagtgcttg

SEQ ID NO: 129662 - DNA, 81 bp, Homo sapiens
gtaagaagatgaggcacaaacaggttaagtaacttgacagtgatgaatctcatagaggaggcagtgcttggactgggcata

SEQ ID NO: 129663 - DNA, 85 bp, Homo sapiens
gcacaaacaggttaagtaacttgacagtgatgaatctcatagaggaggcagtgcttggactgggcatatgctgagataagataca

SEQ ID NO: 129664 - DNA, 84 bp, Homo sapiens
ggttaagtaacttgacagtgatgaatctcatagaggaggcagtgcttggactgggcatatgctgagataagatacaaagatgaa

SEQ ID NO: 129665 - DNA, 86 bp, Homo sapiens
taacttgacagtgatgaatctcatagaggaggcagtgcttggactgggcatatgctgagataagatacaaagatgaatacctatta

SEQ ID NO: 129666 - DNA, 85 bp, Homo sapiens
atgaatctcatagaggaggcagtgcttggactgggcatatgctgagataagatacaaagatgaatacctattatatgagggagaa

SEQ ID NO: 129667 - DNA, 81 bp, Homo sapiens
atagaggaggcagtgcttggactgggcatatgctgagataagatacaaagatgaatacctattatatgagggagaaagtta

SEQ ID NO: 129668 - DNA, 80 bp, Homo sapiens
gtgcttggactgggcatatgctgagataagatacaaagatgaatacctattatatgagggagaaagttacaaaggccata

SEQ ID NO: 129669 - DNA, 78 bp, Homo sapiens
actgggcatatgctgagataagatacaaagatgaatacctattatatgagggagaaagttacaaaggccataagaaca

SEQ ID NO: 129670 - DNA, 76 bp, Homo sapiens
atgctgagataagatacaaagatgaatacctattatatgagggagaaagttacaaaggccataagaacacaggtaa

SEQ ID NO: 129671 - DNA, 72 bp, Homo sapiens
atacaaagatgaatacctattatatgagggagaaagttacaaaggccataagaacacaggtaaagtgtttca

SEQ ID NO: 129672 - DNA, 71 bp, Homo sapiens
aagatgaatacctattatatgagggagaaagttacaaaggccataagaacacaggtaaagtgtttcaggaa

SEQ ID NO: 129673 - DNA, 71 bp, Homo sapiens
cctattatatgagggagaaagttacaaaggccataagaacacaggtaaagtgtttcaggaatttagaatca

SEQ ID NO: 129674 - DNA, 71 bp, Homo sapiens
ttacaaaggccataagaacacaggtaaagtgtttcaggaatttagaatcagttaaccactgaggaaatgta

SEQ ID NO: 129675 - DNA, 73 bp, Homo sapiens
taagaacacaggtaaagtgtttcaggaatttagaatcagttaaccactgaggaaatgtactgtgtaagcagaa

SEQ ID NO: 129676 - DNA, 72 bp, Homo sapiens
acaggtaaagtgtttcaggaatttagaatcagttaaccactgaggaaatgtactgtgtaagcagaatctttg

SEQ ID NO: 129677 - DNA, 79 bp, Homo sapiens
tttcaggaatttagaatcagttaaccactgaggaaatgtactgtgtaagcagaatctttggcacattgcagatagttga

SEQ ID NO: 129678 - DNA, 79 bp, Homo sapiens
tttagaatcagttaaccactgaggaaatgtactgtgtaagcagaatctttggcacattgcagatagttgaggttgtata

SEQ ID NO: 129679 - DNA, 76 bp, Homo sapiens
ttaaccactgaggaaatgtactgtgtaagcagaatctttggcacattgcagatagttgaggttgtatatccttttt

SEQ ID NO: 129680 - DNA, 76 bp, Homo sapiens
aggaaatgtactgtgtaagcagaatctttggcacattgcagatagttgaggttgtatatccttttttaattgtgga

SEQ ID NO: 129681 - DNA, 74 bp, Homo sapiens
agaatctttggcacattgcagatagttgaggttgtatatccttttttaattgtggaggtggtaaggattgacac

SEQ ID NO: 129682 - DNA, 74 bp, Homo sapiens
acattgcagatagttgaggttgtatatccttttttaattgtggaggtggtaaggattgacactgcaaaatgttc

SEQ ID NO: 129683 - DNA, 73 bp, Homo sapiens
agatagttgaggttgtatatccttttttaattgtggaggtggtaaggattgacactgcaaaatgttctctcag

SEQ ID NO: 129684 - DNA, 74 bp, Homo sapiens
aggttgtatatccttttttaattgtggaggtggtaaggattgacactgcaaaatgttctctcagtctcagacca

SEQ ID NO: 129685 - DNA, 76 bp, Homo sapiens
tttttaattgtggaggtggtaaggattgacactgcaaaatgttctctcagtctcagaccacgtgacaaatgcccag

SEQ ID NO: 129686 - DNA, 78 bp, Homo sapiens
attgtggaggtggtaaggattgacactgcaaaatgttctctcagtctcagaccacgtgacaaatgcccaggactaaca

SEQ ID NO: 129687 - DNA, 77 bp, Homo sapiens
gtaaggattgacactgcaaaatgttctctcagtctcagaccacgtgacaaatgcccaggactaacacaccttcttta

SEQ ID NO: 129688 - DNA, 75 bp, Homo sapiens
acactgcaaaatgttctctcagtctcagaccacgtgacaaatgcccaggactaacacaccttctttacttcccag

SEQ ID NO: 129689 - DNA, 74 bp, Homo sapiens
aaatgttctctcagtctcagaccacgtgacaaatgcccaggactaacacaccttctttacttcccaggctgttg

SEQ ID NO: 129690 - DNA, 72 bp, Homo sapiens
agtctcagaccacgtgacaaatgcccaggactaacacaccttctttacttcccaggctgttgtccctggacc

SEQ ID NO: 129691 - DNA, 73 bp, Homo sapiens
acgtgacaaatgcccaggactaacacaccttctttacttcccaggctgttgtccctggaccggcagagcatcc

SEQ ID NO: 129692 - DNA, 73 bp, Homo sapiens
aaatgcccaggactaacacaccttctttacttcccaggctgttgtccctggaccggcagagcatcccctgcag

SEQ ID NO: 129693 - DNA, 73 bp, Homo sapiens
taacacaccttctttacttcccaggctgttgtccctggaccggcagagcatcccctgcagtacaactacactt

SEQ ID NO: 129694 - DNA, 72 bp, Homo sapiens
aggctgttgtccctggaccggcagagcatcccctgcagtacaactacactttttggtactccaggagaaccc

SEQ ID NO: 129695 - DNA, 74 bp, Homo sapiens
gcagagcatcccctgcagtacaactacactttttggtactccaggagaacccccggccgtcccacgagctcaca

SEQ ID NO: 129696 - DNA, 73 bp, Homo sapiens
ccctgcagtacaactacactttttggtactccaggagaacccccggccgtcccacgagctcacagagctatga

SEQ ID NO: 129697 - DNA, 73 bp, Homo sapiens
tacaactacactttttggtactccaggagaacccccggccgtcccacgagctcacagagctatgaacagaata

SEQ ID NO: 129698 - DNA, 75 bp, Homo sapiens
gtactccaggagaacccccggccgtcccacgagctcacagagctatgaacagaatatcaaacagattggcacctt

SEQ ID NO: 129699 - DNA, 78 bp, Homo sapiens
ccccggccgtcccacgagctcacagagctatgaacagaatatcaaacagattggcacctttgcctctgtgagttcttg

SEQ ID NO: 129700 - DNA, 82 bp, Homo sapiens
tcccacgagctcacagagctatgaacagaatatcaaacagattggcacctttgcctctgtgagttcttggtgaattaatgga

SEQ ID NO: 129701 - DNA, 83 bp, Homo sapiens
tcacagagctatgaacagaatatcaaacagattggcacctttgcctctgtgagttcttggtgaattaatggagtgtgccttga

SEQ ID NO: 129702 - DNA, 71 bp, Homo sapiens
aaagtaaaagacacatgttttttactctggggtcttctctctgcaggtggagcagttctggaggttttata

SEQ ID NO: 129703 - DNA, 74 bp, Homo sapiens
aaaagacacatgttttttactctggggtcttctctctgcaggtggagcagttctggaggttttatagccacatg

SEQ ID NO: 129704 - DNA, 73 bp, Homo sapiens
tttttactctggggtcttctctctgcaggtggagcagttctggaggttttatagccacatggtacgtcctggg

SEQ ID NO: 129705 - DNA, 77 bp, Homo sapiens
ggtcttctctctgcaggtggagcagttctggaggttttatagccacatggtacgtcctggggacctgacaggccaca

SEQ ID NO: 129706 - DNA, 78 bp, Homo sapiens
tctctctgcaggtggagcagttctggaggttttatagccacatggtacgtcctggggacctgacaggccacagtgact

SEQ ID NO: 129707 - DNA, 76 bp, Homo sapiens
agcagttctggaggttttatagccacatggtacgtcctggggacctgacaggccacagtgacttccatctcttcaa

SEQ ID NO: 129708 - DNA, 75 bp, Homo sapiens
ttctggaggttttatagccacatggtacgtcctggggacctgacaggccacagtgacttccatctcttcaaagaa

SEQ ID NO: 129709 - DNA, 74 bp, Homo sapiens
tttatagccacatggtacgtcctggggacctgacaggccacagtgacttccatctcttcaaagaaggaattaaa

SEQ ID NO: 129710 - DNA, 72 bp, Homo sapiens
atggtacgtcctggggacctgacaggccacagtgacttccatctcttcaaagaaggaattaaacccatgtgg

SEQ ID NO: 129711 - DNA, 72 bp, Homo sapiens
ggacctgacaggccacagtgacttccatctcttcaaagaaggaattaaacccatgtgggaggtaaggactaa

SEQ ID NO: 129712 - DNA, 73 bp, Homo sapiens
aggccacagtgacttccatctcttcaaagaaggaattaaacccatgtgggaggtaaggactaatggcttctga

SEQ ID NO: 129713 - DNA, 70 bp, Homo sapiens
acttccatctcttcaaagaaggaattaaacccatgtgggaggtaaggactaatggcttctgactgctttt

SEQ ID NO: 129714 - DNA, 74 bp, Homo sapiens
aaggctgtgaaaccatattttaacttcagtgctttctgtctttttacaggatgatgcaaataaaaatggtggca

SEQ ID NO: 129715 - DNA, 74 bp, Homo sapiens
catattttaacttcagtgctttctgtctttttacaggatgatgcaaataaaaatggtggcaagtggattattcg

SEQ ID NO: 129716 - DNA, 75 bp, Homo sapiens
tttaacttcagtgctttctgtctttttacaggatgatgcaaataaaaatggtggcaagtggattattcggctgcg

SEQ ID NO: 129717 - DNA, 74 bp, Homo sapiens
tttctgtctttttacaggatgatgcaaataaaaatggtggcaagtggattattcggctgcggaagggcttggcc

SEQ ID NO: 129718 - DNA, 72 bp, Homo sapiens
tttttacaggatgatgcaaataaaaatggtggcaagtggattattcggctgcggaagggcttggcctcccgt

SEQ ID NO: 129719 - DNA, 75 bp, Homo sapiens
atgcaaataaaaatggtggcaagtggattattcggctgcggaagggcttggcctcccgttgctgggagaatctca

SEQ ID NO: 129720 - DNA, 72 bp, Homo sapiens
ataaaaatggtggcaagtggattattcggctgcggaagggcttggcctcccgttgctgggagaatctcattt

SEQ ID NO: 129721 - DNA, 76 bp, Homo sapiens
gtggcaagtggattattcggctgcggaagggcttggcctcccgttgctgggagaatctcattttggccatgctggg

SEQ ID NO: 129722 - DNA, 73 bp, Homo sapiens
attattcggctgcggaagggcttggcctcccgttgctgggagaatctcattttggccatgctgggggaacagt

SEQ ID NO: 129723 - DNA, 72 bp, Homo sapiens
cggaagggcttggcctcccgttgctgggagaatctcattttggccatgctgggggaacagttcatggttggg

SEQ ID NO: 129724 - DNA, 76 bp, Homo sapiens
ttggcctcccgttgctgggagaatctcattttggccatgctgggggaacagttcatggttggggaggagatctgtg

SEQ ID NO: 129725 - DNA, 78 bp, Homo sapiens
ttgctgggagaatctcattttggccatgctgggggaacagttcatggttggggaggagatctgtggggctgtggtgtc

SEQ ID NO: 129726 - DNA, 78 bp, Homo sapiens
tctcattttggccatgctgggggaacagttcatggttggggaggagatctgtggggctgtggtgtctgtccgctttca

SEQ ID NO: 129727 - DNA, 76 bp, Homo sapiens
ttggccatgctgggggaacagttcatggttggggaggagatctgtggggctgtggtgtctgtccgctttcaggtaa

SEQ ID NO: 129728 - DNA, 76 bp, Homo sapiens
gggaacagttcatggttggggaggagatctgtggggctgtggtgtctgtccgctttcaggtaagccacccatgagc

SEQ ID NO: 129729 - DNA, 77 bp, Homo sapiens
agttcatggttggggaggagatctgtggggctgtggtgtctgtccgctttcaggtaagccacccatgagccaggctg

SEQ ID NO: 129730 - DNA, 76 bp, Homo sapiens
gggaggagatctgtggggctgtggtgtctgtccgctttcaggtaagccacccatgagccaggctggtttcttgtgt

SEQ ID NO: 129731 - DNA, 78 bp, Homo sapiens
tcctcgctgcccctgatttgctttgatgattccttctgttcctctggtaggaagacattatttcaatatggaataaga

SEQ ID NO: 129732 - DNA, 79 bp, Homo sapiens
ctgatttgctttgatgattccttctgttcctctggtaggaagacattatttcaatatggaataagactgccagtgacca

SEQ ID NO: 129733 - DNA, 78 bp, Homo sapiens
tttgatgattccttctgttcctctggtaggaagacattatttcaatatggaataagactgccagtgaccaagcaacca

SEQ ID NO: 129734 - DNA, 77 bp, Homo sapiens
ttctgttcctctggtaggaagacattatttcaatatggaataagactgccagtgaccaagcaaccacagcccgaatc

SEQ ID NO: 129735 - DNA, 77 bp, Homo sapiens
tctggtaggaagacattatttcaatatggaataagactgccagtgaccaagcaaccacagcccgaatccgggacaca

SEQ ID NO: 129736 - DNA, 75 bp, Homo sapiens
acattatttcaatatggaataagactgccagtgaccaagcaaccacagcccgaatccgggacacacttcggcgag

SEQ ID NO: 129737 - DNA, 74 bp, Homo sapiens
aatatggaataagactgccagtgaccaagcaaccacagcccgaatccgggacacacttcggcgagtgcttaacc

SEQ ID NO: 129738 - DNA, 73 bp, Homo sapiens
aataagactgccagtgaccaagcaaccacagcccgaatccgggacacacttcggcgagtgcttaacctacctc

SEQ ID NO: 129739 - DNA, 71 bp, Homo sapiens
agtgaccaagcaaccacagcccgaatccgggacacacttcggcgagtgcttaacctacctcccaacaccat

SEQ ID NO: 129740 - DNA, 71 bp, Homo sapiens
aaccacagcccgaatccgggacacacttcggcgagtgcttaacctacctcccaacaccattatggaataca

SEQ ID NO: 129741 - DNA, 69 bp, Homo sapiens
agcccgaatccgggacacacttcggcgagtgcttaacctacctcccaacaccattatggaatacaaaac

SEQ ID NO: 129742 - DNA, 74 bp, Homo sapiens
acacacttcggcgagtgcttaacctacctcccaacaccattatggaatacaaaactcacaccgacagcatcaag

SEQ ID NO: 129743 - DNA, 70 bp, Homo sapiens
cttaacctacctcccaacaccattatggaatacaaaactcacaccgacagcatcaagtacgtgttggggg

SEQ ID NO: 129744 - DNA, 71 bp, Homo sapiens
ccaacaccattatggaatacaaaactcacaccgacagcatcaagtacgtgttggggggttatgggaggacg

SEQ ID NO: 129745 - DNA, 71 bp, Homo sapiens
ttatggaatacaaaactcacaccgacagcatcaagtacgtgttggggggttatgggaggacgtgtccctaa

SEQ ID NO: 129746 - DNA, 70 bp, Homo sapiens
aaaactcacaccgacagcatcaagtacgtgttggggggttatgggaggacgtgtccctaagcttagtata

SEQ ID NO: 129747 - DNA, 71 bp, Homo sapiens
acaccgacagcatcaagtacgtgttggggggttatgggaggacgtgtccctaagcttagtataagtagatc

SEQ ID NO: 129748 - DNA, 69 bp, Homo sapiens
atcaagtacgtgttggggggttatgggaggacgtgtccctaagcttagtataagtagatctgtagttgg

SEQ ID NO: 129749 - DNA, 70 bp, Homo sapiens
ttggggggttatgggaggacgtgtccctaagcttagtataagtagatctgtagttgggcccagaggaata

SEQ ID NO: 129750 - DNA, 73 bp, Homo sapiens
gttatgggaggacgtgtccctaagcttagtataagtagatctgtagttgggcccagaggaatatggccggaca

SEQ ID NO: 129751 - DNA, 72 bp, Homo sapiens
acgtgtccctaagcttagtataagtagatctgtagttgggcccagaggaatatggccggacaggagacttac

SEQ ID NO: 129752 - DNA, 74 bp, Homo sapiens
ctaagcttagtataagtagatctgtagttgggcccagaggaatatggccggacaggagacttacttgtggagaa

SEQ ID NO: 129753 - DNA, 75 bp, Homo sapiens
tataagtagatctgtagttgggcccagaggaatatggccggacaggagacttacttgtggagaagggacagacca

SEQ ID NO: 129754 - DNA, 73 bp, Homo sapiens
atctgtagttgggcccagaggaatatggccggacaggagacttacttgtggagaagggacagaccaggccttc

SEQ ID NO: 129755 - DNA, 73 bp, Homo sapiens
cagaggaatatggccggacaggagacttacttgtggagaagggacagaccaggccttccctctagggcttctg

SEQ ID NO: 129756 - DNA, 72 bp, Homo sapiens
aatatggccggacaggagacttacttgtggagaagggacagaccaggccttccctctagggcttctggctac

SEQ ID NO: 129757 - DNA, 76 bp, Homo sapiens
ttacttgtggagaagggacagaccaggccttccctctagggcttctggctacttgctgcagttctttgtcagcgag

SEQ ID NO: 129758 - DNA, 77 bp, Homo sapiens
agaagggacagaccaggccttccctctagggcttctggctacttgctgcagttctttgtcagcgaggctccctgcca

SEQ ID NO: 129759 - DNA, 76 bp, Homo sapiens
aggccttccctctagggcttctggctacttgctgcagttctttgtcagcgaggctccctgccacctatactaccag

SEQ ID NO: 129760 - DNA, 81 bp, Homo sapiens
tctagggcttctggctacttgctgcagttctttgtcagcgaggctccctgccacctatactaccaggtgctttgtagcaga

SEQ ID NO: 129761 - DNA, 82 bp, Homo sapiens
ttctggctacttgctgcagttctttgtcagcgaggctccctgccacctatactaccaggtgctttgtagcagagagagccca

SEQ ID NO: 129762 - DNA, 84 bp, Homo sapiens
tacttgctgcagttctttgtcagcgaggctccctgccacctatactaccaggtgctttgtagcagagagagcccatctgcagaa

SEQ ID NO: 129763 - DNA, 79 bp, Homo sapiens
agttctttgtcagcgaggctccctgccacctatactaccaggtgctttgtagcagagagagcccatctgcagaaaccca

SEQ ID NO: 129764 - DNA, 77 bp, Homo sapiens
aggctccctgccacctatactaccaggtgctttgtagcagagagagcccatctgcagaaacccagttgtactacctg

SEQ ID NO: 129765 - DNA, 77 bp, Homo sapiens
ccacctatactaccaggtgctttgtagcagagagagcccatctgcagaaacccagttgtactacctgggcttgctta

SEQ ID NO: 129766 - DNA, 77 bp, Homo sapiens
tatactaccaggtgctttgtagcagagagagcccatctgcagaaacccagttgtactacctgggcttgcttaatttc

SEQ ID NO: 129767 - DNA, 78 bp, Homo sapiens
tttgtagcagagagagcccatctgcagaaacccagttgtactacctgggcttgcttaatttctacaggctgtcttgtc

SEQ ID NO: 129768 - DNA, 77 bp, Homo sapiens
agagagagcccatctgcagaaacccagttgtactacctgggcttgcttaatttctacaggctgtcttgtctttcata

SEQ ID NO: 129769 - DNA, 77 bp, Homo sapiens
tctgcagaaacccagttgtactacctgggcttgcttaatttctacaggctgtcttgtctttcatatgctaaccacta

SEQ ID NO: 129770 - DNA, 74 bp, Homo sapiens
aacccagttgtactacctgggcttgcttaatttctacaggctgtcttgtctttcatatgctaaccactatctta

SEQ ID NO: 129771 - DNA, 75 bp, Homo sapiens
ttgtactacctgggcttgcttaatttctacaggctgtcttgtctttcatatgctaaccactatcttaaaatgaaa

SEQ ID NO: 129772 - DNA, 75 bp, Homo sapiens
cttgcttaatttctacaggctgtcttgtctttcatatgctaaccactatcttaaaatgaaagacaagtgcttttc

SEQ ID NO: 129773 - DNA, 73 bp, Homo sapiens
atttctacaggctgtcttgtctttcatatgctaaccactatcttaaaatgaaagacaagtgcttttctttttc

SEQ ID NO: 129774 - DNA, 73 bp, Homo sapiens
aggctgtcttgtctttcatatgctaaccactatcttaaaatgaaagacaagtgcttttctttttcttgctgtt

SEQ ID NO: 129775 - DNA, 71 bp, Homo sapiens
gtctttcatatgctaaccactatcttaaaatgaaagacaagtgcttttctttttcttgctgttttttaaga

SEQ ID NO: 129776 - DNA, 69 bp, Homo sapiens
gctaaccactatcttaaaatgaaagacaagtgcttttctttttcttgctgttttttaagataatttcac

SEQ ID NO: 129777 - DNA, 69 bp, Homo sapiens
taaaatgaaagacaagtgcttttctttttcttgctgttttttaagataatttcaccctgcccaccctca

SEQ ID NO: 129778 - DNA, 69 bp, Homo sapiens
tgaaagacaagtgcttttctttttcttgctgttttttaagataatttcaccctgcccaccctcacccca

SEQ ID NO: 129779 - DNA, 70 bp, Homo sapiens
ttgctgttttttaagataatttcaccctgcccaccctcaccccacttctgcatgtctttttaacttgtta

SEQ ID NO: 129780 - DNA, 71 bp, Homo sapiens
ataatttcaccctgcccaccctcaccccacttctgcatgtctttttaacttgttagcttcagtctattttc

SEQ ID NO: 129781 - DNA, 74 bp, Homo sapiens
cccacttctgcatgtctttttaacttgttagcttcagtctattttctttgtcctgggatactgactacttatca

SEQ ID NO: 129782 - DNA, 74 bp, Homo sapiens
catgtctttttaacttgttagcttcagtctattttctttgtcctgggatactgactacttatcaggaatgactc

SEQ ID NO: 129783 - DNA, 73 bp, Homo sapiens
cctctctttcctctcccaatgagccaaccttttgcacttccactagaatgccaggcaggctgggcccccaaag

SEQ ID NO: 129784 - DNA, 72 bp, Homo sapiens
ctctcccaatgagccaaccttttgcacttccactagaatgccaggcaggctgggcccccaaaggctcctttt

SEQ ID NO: 129785 - DNA, 71 bp, Homo sapiens
aatgagccaaccttttgcacttccactagaatgccaggcaggctgggcccccaaaggctcctttttcaaaa

SEQ ID NO: 129786 - DNA, 69 bp, Homo sapiens
aaccttttgcacttccactagaatgccaggcaggctgggcccccaaaggctcctttttcaaaacctctg

SEQ ID NO: 129787 - DNA, 71 bp, Homo sapiens
cactagaatgccaggcaggctgggcccccaaaggctcctttttcaaaacctctggaagccgcggttgaatg

SEQ ID NO: 129788 - DNA, 73 bp, Homo sapiens
aatgccaggcaggctgggcccccaaaggctcctttttcaaaacctctggaagccgcggttgaatgtgccatga

SEQ ID NO: 129789 - DNA, 70 bp, Homo sapiens
tgggcccccaaaggctcctttttcaaaacctctggaagccgcggttgaatgtgccatgaccctctccctc

SEQ ID NO: 129790 - DNA, 73 bp, Homo sapiens
aaaggctcctttttcaaaacctctggaagccgcggttgaatgtgccatgaccctctccctctctggatggcac

SEQ ID NO: 129791 - DNA, 77 bp, Homo sapiens
tcctttttcaaaacctctggaagccgcggttgaatgtgccatgaccctctccctctctggatggcaccatcattgaa

SEQ ID NO: 129792 - DNA, 80 bp, Homo sapiens
aaacctctggaagccgcggttgaatgtgccatgaccctctccctctctggatggcaccatcattgaagctggcgtcatcg

SEQ ID NO: 129793 - DNA, 83 bp, Homo sapiens
gcggttgaatgtgccatgaccctctccctctctggatggcaccatcattgaagctggcgtcatcggagtctcttgttctgttg

SEQ ID NO: 129794 - DNA, 84 bp, Homo sapiens
aatgtgccatgaccctctccctctctggatggcaccatcattgaagctggcgtcatcggagtctcttgttctgttggcgtgcta

SEQ ID NO: 129795 - DNA, 82 bp, Homo sapiens
cctctccctctctggatggcaccatcattgaagctggcgtcatcggagtctcttgttctgttggcgtgctacctggaagatc

SEQ ID NO: 129796 - DNA, 83 bp, Homo sapiens
tctggatggcaccatcattgaagctggcgtcatcggagtctcttgttctgttggcgtgctacctggaagatccttctgtcctg

SEQ ID NO: 129797 - DNA, 80 bp, Homo sapiens
accatcattgaagctggcgtcatcggagtctcttgttctgttggcgtgctacctggaagatccttctgtcctggacaaga

SEQ ID NO: 129798 - DNA, 78 bp, Homo sapiens
attgaagctggcgtcatcggagtctcttgttctgttggcgtgctacctggaagatccttctgtcctggacaagaggaa

SEQ ID NO: 129799 - DNA, 78 bp, Homo sapiens
tcatcggagtctcttgttctgttggcgtgctacctggaagatccttctgtcctggacaagaggaattggaagagcatt

SEQ ID NO: 129800 - DNA, 75 bp, Homo sapiens
tcttgttctgttggcgtgctacctggaagatccttctgtcctggacaagaggaattggaagagcattttatgttt

SEQ ID NO: 129801 - DNA, 75 bp, Homo sapiens
ttctgttggcgtgctacctggaagatccttctgtcctggacaagaggaattggaagagcattttatgttttaaga

SEQ ID NO: 129802 - DNA, 78 bp, Homo sapiens
agatccttctgtcctggacaagaggaattggaagagcattttatgttttaagaacaggctgacacgcagcagctacaa

SEQ ID NO: 129803 - DNA, 82 bp, Homo sapiens
tcctggacaagaggaattggaagagcattttatgttttaagaacaggctgacacgcagcagctacaacaacagctgagatca

SEQ ID NO: 129804 - DNA, 79 bp, Homo sapiens
ggaattggaagagcattttatgttttaagaacaggctgacacgcagcagctacaacaacagctgagatcacttaataaa

SEQ ID NO: 129805 - DNA, 73 bp, Homo sapiens
tctcccatttttttctttcagggacaattcaagctttcgaaatacaaaaatcacattgtgagagtacacaagc

SEQ ID NO: 129806 - DNA, 75 bp, Homo sapiens
tttttctttcagggacaattcaagctttcgaaatacaaaaatcacattgtgagagtacacaagctggcaataatc

SEQ ID NO: 129807 - DNA, 75 bp, Homo sapiens
tttcagggacaattcaagctttcgaaatacaaaaatcacattgtgagagtacacaagctggcaataatccttttc

SEQ ID NO: 129808 - DNA, 77 bp, Homo sapiens
aattcaagctttcgaaatacaaaaatcacattgtgagagtacacaagctggcaataatccttttctgtatgtgtgtg

SEQ ID NO: 129809 - DNA, 76 bp, Homo sapiens
aaatacaaaaatcacattgtgagagtacacaagctggcaataatccttttctgtatgtgtgtgtttgtccgaaatg

SEQ ID NO: 129810 - DNA, 77 bp, Homo sapiens
aaaaatcacattgtgagagtacacaagctggcaataatccttttctgtatgtgtgtgtttgtccgaaatggatggga

SEQ ID NO: 129811 - DNA, 79 bp, Homo sapiens
ttgtgagagtacacaagctggcaataatccttttctgtatgtgtgtgtttgtccgaaatggatgggaggcctccagcca

SEQ ID NO: 129812 - DNA, 75 bp, Homo sapiens
aagctggcaataatccttttctgtatgtgtgtgtttgtccgaaatggatgggaggcctccagccagtccttccat

SEQ ID NO: 129813 - DNA, 77 bp, Homo sapiens
ataatccttttctgtatgtgtgtgtttgtccgaaatggatgggaggcctccagccagtccttccattgctcactgaa

SEQ ID NO: 129814 - DNA, 76 bp, Homo sapiens
ttttctgtatgtgtgtgtttgtccgaaatggatgggaggcctccagccagtccttccattgctcactgaagggacg

SEQ ID NO: 129815 - DNA, 76 bp, Homo sapiens
tgtgtgtttgtccgaaatggatgggaggcctccagccagtccttccattgctcactgaagggacgtccctgagccg

SEQ ID NO: 129816 - DNA, 75 bp, Homo sapiens
aaatggatgggaggcctccagccagtccttccattgctcactgaagggacgtccctgagccgtgcgctctccttt

SEQ ID NO: 129817 - DNA, 78 bp, Homo sapiens
atgggaggcctccagccagtccttccattgctcactgaagggacgtccctgagccgtgcgctctccttttgcactcat

SEQ ID NO: 129818 - DNA, 77 bp, Homo sapiens
agccagtccttccattgctcactgaagggacgtccctgagccgtgcgctctccttttgcactcattcctggaggacg

SEQ ID NO: 129819 - DNA, 78 bp, Homo sapiens
ttccattgctcactgaagggacgtccctgagccgtgcgctctccttttgcactcattcctggaggacggattccgcta

SEQ ID NO: 129820 - DNA, 74 bp, Homo sapiens
actgaagggacgtccctgagccgtgcgctctccttttgcactcattcctggaggacggattccgctagacaccc

SEQ ID NO: 129821 - DNA, 79 bp, Homo sapiens
acgtccctgagccgtgcgctctccttttgcactcattcctggaggacggattccgctagacaccctccagcatcgctga

SEQ ID NO: 129822 - DNA, 77 bp, Homo sapiens
ccgtgcgctctccttttgcactcattcctggaggacggattccgctagacaccctccagcatcgctgactttataaa

SEQ ID NO: 129823 - DNA, 77 bp, Homo sapiens
gctctccttttgcactcattcctggaggacggattccgctagacaccctccagcatcgctgactttataaagcggaa

SEQ ID NO: 129824 - DNA, 75 bp, Homo sapiens
tccttttgcactcattcctggaggacggattccgctagacaccctccagcatcgctgactttataaagcggaaaa

SEQ ID NO: 129825 - DNA, 74 bp, Homo sapiens
ttttgcactcattcctggaggacggattccgctagacaccctccagcatcgctgactttataaagcggaaaaac

SEQ ID NO: 129826 - DNA, 72 bp, Homo sapiens
tcattcctggaggacggattccgctagacaccctccagcatcgctgactttataaagcggaaaaacggaaaa

SEQ ID NO: 129827 - DNA, 70 bp, Homo sapiens
attcctggaggacggattccgctagacaccctccagcatcgctgactttataaagcggaaaaacggaaaa

SEQ ID NO: 129828 - DNA, 69 bp, Homo sapiens
aggacggattccgctagacaccctccagcatcgctgactttataaagcggaaaaacggaaaacgtgact

SEQ ID NO: 129829 - DNA, 70 bp, Homo sapiens
ggattccgctagacaccctccagcatcgctgactttataaagcggaaaaacggaaaacgtgactttgtaa

SEQ ID NO: 129830 - DNA, 70 bp, Homo sapiens
ctagacaccctccagcatcgctgactttataaagcggaaaaacggaaaacgtgactttgtaatagacaaa

SEQ ID NO: 129831 - DNA, 69 bp, Homo sapiens
tccagcatcgctgactttataaagcggaaaaacggaaaacgtgactttgtaatagacaaacattgtttt

SEQ ID NO: 129832 - DNA, 66 bp, Homo sapiens
tcgctgactttataaagcggaaaaacggaaaacgtgactttgtaatagacaaacattgttttttaa

SEQ ID NO: 129833 - DNA, 64 bp, Homo sapiens
agcggaaaaacggaaaacgtgactttgtaatagacaaacattgttttttaatggggttccatgg

SEQ ID NO: 129834 - DNA, 62 bp, Homo sapiens
aaaaacggaaaacgtgactttgtaatagacaaacattgttttttaatggggttccatggggg

SEQ ID NO: 129835 - DNA, 67 bp, Homo sapiens
tgactttgtaatagacaaacattgttttttaatggggttccatgggggggcgttcagcctttctgtt

SEQ ID NO: 129836 - DNA, 71 bp, Homo sapiens
tgtaatagacaaacattgttttttaatggggttccatgggggggcgttcagcctttctgtttgctgtgtgc

SEQ ID NO: 129837 - DNA, 72 bp, Homo sapiens
attgttttttaatggggttccatgggggggcgttcagcctttctgtttgctgtgtgctgtccagatgcctct

SEQ ID NO: 129838 - DNA, 74 bp, Homo sapiens
ttttaatggggttccatgggggggcgttcagcctttctgtttgctgtgtgctgtccagatgcctcttgggcgtc

SEQ ID NO: 129839 - DNA, 77 bp, Homo sapiens
ttccatgggggggcgttcagcctttctgtttgctgtgtgctgtccagatgcctcttgggcgtcctgttgttctcttc

SEQ ID NO: 129840 - DNA, 75 bp, Homo sapiens
tttctgtttgctgtgtgctgtccagatgcctcttgggcgtcctgttgttctcttcccgtgttgtacgaagggtac

SEQ ID NO: 129841 - DNA, 76 bp, Homo sapiens
ttgctgtgtgctgtccagatgcctcttgggcgtcctgttgttctcttcccgtgttgtacgaagggtaccgtggcca

SEQ ID NO: 129842 - DNA, 74 bp, Homo sapiens
cagatgcctcttgggcgtcctgttgttctcttcccgtgttgtacgaagggtaccgtggccacgtgtacatgcca

SEQ ID NO: 129843 - DNA, 74 bp, Homo sapiens
ttgggcgtcctgttgttctcttcccgtgttgtacgaagggtaccgtggccacgtgtacatgccagagctgttga

SEQ ID NO: 129844 - DNA, 76 bp, Homo sapiens
tgttgttctcttcccgtgttgtacgaagggtaccgtggccacgtgtacatgccagagctgttgatgagagttacca

SEQ ID NO: 129845 - DNA, 76 bp, Homo sapiens
ttcccgtgttgtacgaagggtaccgtggccacgtgtacatgccagagctgttgatgagagttaccagtattatgaa

SEQ ID NO: 129846 - DNA, 80 bp, Homo sapiens
aagggtaccgtggccacgtgtacatgccagagctgttgatgagagttaccagtattatgaatgtctgtgcatccaggaaa

SEQ ID NO: 129847 - DNA, 81 bp, Homo sapiens
atgccagagctgttgatgagagttaccagtattatgaatgtctgtgcatccaggaaaagtgttctgttggagagtcccaaa

SEQ ID NO: 129848 - DNA, 77 bp, Homo sapiens
agagttaccagtattatgaatgtctgtgcatccaggaaaagtgttctgttggagagtcccaaaatagctgtaaatgc

SEQ ID NO: 129849 - DNA, 79 bp, Homo sapiens
agtattatgaatgtctgtgcatccaggaaaagtgttctgttggagagtcccaaaatagctgtaaatgctctcttctagc

SEQ ID NO: 129850 - DNA, 79 bp, Homo sapiens
tgtgcatccaggaaaagtgttctgttggagagtcccaaaatagctgtaaatgctctcttctagctctgccattaaatta

SEQ ID NO: 129851 - DNA, 75 bp, Homo sapiens
ttctgttggagagtcccaaaatagctgtaaatgctctcttctagctctgccattaaattattgggacattttgtt

SEQ ID NO: 129852 - DNA, 75 bp, Homo sapiens
tggagagtcccaaaatagctgtaaatgctctcttctagctctgccattaaattattgggacattttgtttctttc

SEQ ID NO: 129853 - DNA, 74 bp, Homo sapiens
taaatgctctcttctagctctgccattaaattattgggacattttgtttctttctctcccctcctccaagccca

SEQ ID NO: 129854 - DNA, 72 bp, Homo sapiens
tagctctgccattaaattattgggacattttgtttctttctctcccctcctccaagcccaccactttctgaa

SEQ ID NO: 129855 - DNA, 69 bp, Homo sapiens
attaaattattgggacattttgtttctttctctcccctcctccaagcccaccactttctgaagctgtgt

SEQ ID NO: 129856 - DNA, 72 bp, Homo sapiens
attattgggacattttgtttctttctctcccctcctccaagcccaccactttctgaagctgtgttactgatg

SEQ ID NO: 129857 - DNA, 76 bp, Homo sapiens
tgtttctttctctcccctcctccaagcccaccactttctgaagctgtgttactgatgtgatgactgtccaggattt

SEQ ID NO: 129858 - DNA, 79 bp, Homo sapiens
tttctctcccctcctccaagcccaccactttctgaagctgtgttactgatgtgatgactgtccaggattttgtatcatc

SEQ ID NO: 129859 - DNA, 79 bp, Homo sapiens
ctcctccaagcccaccactttctgaagctgtgttactgatgtgatgactgtccaggattttgtatcatcccctgcctta

SEQ ID NO: 129860 - DNA, 78 bp, Homo sapiens
accactttctgaagctgtgttactgatgtgatgactgtccaggattttgtatcatcccctgccttatgccctccggtc

SEQ ID NO: 129861 - DNA, 80 bp, Homo sapiens
ttctgaagctgtgttactgatgtgatgactgtccaggattttgtatcatcccctgccttatgccctccggtctcctctcc

SEQ ID NO: 129862 - DNA, 79 bp, Homo sapiens
tgttactgatgtgatgactgtccaggattttgtatcatcccctgccttatgccctccggtctcctctcctgtgggactc

SEQ ID NO: 129863 - DNA, 76 bp, Homo sapiens
tgactgtccaggattttgtatcatcccctgccttatgccctccggtctcctctcctgtgggactctctccttctta

SEQ ID NO: 129864 - DNA, 76 bp, Homo sapiens
tccaggattttgtatcatcccctgccttatgccctccggtctcctctcctgtgggactctctccttcttaggcaca

SEQ ID NO: 129865 - DNA, 79 bp, Homo sapiens
ctccggtctcctctcctgtgggactctctccttcttaggcacagctgcacttagaattgtaatccagtggctctcactg

SEQ ID NO: 129866 - DNA, 81 bp, Homo sapiens
tcctctcctgtgggactctctccttcttaggcacagctgcacttagaattgtaatccagtggctctcactggtttcactga

SEQ ID NO: 129867 - DNA, 78 bp, Homo sapiens
acagctgcacttagaattgtaatccagtggctctcactggtttcactgaggcagcttagagggaatgccttagtaaac

SEQ ID NO: 129868 - DNA, 75 bp, Homo sapiens
acttagaattgtaatccagtggctctcactggtttcactgaggcagcttagagggaatgccttagtaaactgaac

SEQ ID NO: 129869 - DNA, 78 bp, Homo sapiens
tctcactggtttcactgaggcagcttagagggaatgccttagtaaactgaactggagcagaatctagtttgattagga

SEQ ID NO: 129870 - DNA, 77 bp, Homo sapiens
aggcagcttagagggaatgccttagtaaactgaactggagcagaatctagtttgattaggagctagattataatcta

SEQ ID NO: 129871 - DNA, 75 bp, Homo sapiens
ggaatgccttagtaaactgaactggagcagaatctagtttgattaggagctagattataatctaggttccaagta

SEQ ID NO: 129872 - DNA, 74 bp, Homo sapiens
cttagtaaactgaactggagcagaatctagtttgattaggagctagattataatctaggttccaagtacagaat

SEQ ID NO: 129873 - DNA, 76 bp, Homo sapiens
actgaactggagcagaatctagtttgattaggagctagattataatctaggttccaagtacagaatttggagctaa

SEQ ID NO: 129874 - DNA, 75 bp, Homo sapiens
aatctagtttgattaggagctagattataatctaggttccaagtacagaatttggagctaaggactgtgactgaa

SEQ ID NO: 129875 - DNA, 75 bp, Homo sapiens
tttgattaggagctagattataatctaggttccaagtacagaatttggagctaaggactgtgactgaaatcattt

SEQ ID NO: 129876 - DNA, 78 bp, Homo sapiens
tagattataatctaggttccaagtacagaatttggagctaaggactgtgactgaaatcattttcccatatgagcagac

SEQ ID NO: 129877 - DNA, 77 bp, Homo sapiens
aagtacagaatttggagctaaggactgtgactgaaatcattttcccatatgagcagaccctgtgtgtcaggcctgtt

SEQ ID NO: 129878 - DNA, 79 bp, Homo sapiens
aatttggagctaaggactgtgactgaaatcattttcccatatgagcagaccctgtgtgtcaggcctgtttcccatatga

SEQ ID NO: 129879 - DNA, 82 bp, Homo sapiens
agctaaggactgtgactgaaatcattttcccatatgagcagaccctgtgtgtcaggcctgtttcccatatgagcagagcctg

SEQ ID NO: 129880 - DNA, 81 bp, Homo sapiens
gtcaggcctgtttcccatatgagcagagcctgtgtgcaagtctgtttctggcatgtccctcattgaggaagggaagcaaaa

SEQ ID NO: 129881 - DNA, 80 bp, Homo sapiens
tttcccatatgagcagagcctgtgtgcaagtctgtttctggcatgtccctcattgaggaagggaagcaaaagctggttat

SEQ ID NO: 129882 - DNA, 77 bp, Homo sapiens
tgcaagtctgtttctggcatgtccctcattgaggaagggaagcaaaagctggttattgccaggcctattaacactta

SEQ ID NO: 129883 - DNA, 75 bp, Homo sapiens
attgaggaagggaagcaaaagctggttattgccaggcctattaacacttaatatgcaaattctatcatcctgaaa

SEQ ID NO: 129884 - DNA, 78 bp, Homo sapiens
gcaaaagctggttattgccaggcctattaacacttaatatgcaaattctatcatcctgaaactggggcatctgaggaa

SEQ ID NO: 129885 - DNA, 76 bp, Homo sapiens
agctggttattgccaggcctattaacacttaatatgcaaattctatcatcctgaaactggggcatctgaggaaaag

SEQ ID NO: 129886 - DNA, 76 bp, Homo sapiens
aggcctattaacacttaatatgcaaattctatcatcctgaaactggggcatctgaggaaaaggtgaccttgctgga

SEQ ID NO: 129887 - DNA, 77 bp, Homo sapiens
taacacttaatatgcaaattctatcatcctgaaactggggcatctgaggaaaaggtgaccttgctggatggctttat

SEQ ID NO: 129888 - DNA, 80 bp, Homo sapiens
aatatgcaaattctatcatcctgaaactggggcatctgaggaaaaggtgaccttgctggatggctttatttgcatggctc

SEQ ID NO: 129889 - DNA, 83 bp, Homo sapiens
ttctatcatcctgaaactggggcatctgaggaaaaggtgaccttgctggatggctttatttgcatggctctgcctgtctgcag

SEQ ID NO: 129890 - DNA, 80 bp, Homo sapiens
aaactggggcatctgaggaaaaggtgaccttgctggatggctttatttgcatggctctgcctgtctgcagtggttgagtc

SEQ ID NO: 129891 - DNA, 83 bp, Homo sapiens
tctgaggaaaaggtgaccttgctggatggctttatttgcatggctctgcctgtctgcagtggttgagtcctcatcacctggta

SEQ ID NO: 129892 - DNA, 90 bp, Homo sapiens
ttgctggatggctttatttgcatggctctgcctgtctgcagtggttgagtcctcatcacctggtatgtgtatgagcaaatgtgtgctgat

SEQ ID NO: 129893 - DNA, 89 bp, Homo sapiens
atggctctgcctgtctgcagtggttgagtcctcatcacctggtatgtgtatgagcaaatgtgtgctgattgtgatgcccaggcagaaac

SEQ ID NO: 129894 - DNA, 88 bp, Homo sapiens
tgtctgcagtggttgagtcctcatcacctggtatgtgtatgagcaaatgtgtgctgattgtgatgcccaggcagaaacctcttgaaga

SEQ ID NO: 129895 - DNA, 85 bp, Homo sapiens
agtggttgagtcctcatcacctggtatgtgtatgagcaaatgtgtgctgattgtgatgcccaggcagaaacctcttgaagactgc

SEQ ID NO: 129896 - DNA, 85 bp, Homo sapiens
cctggtatgtgtatgagcaaatgtgtgctgattgtgatgcccaggcagaaacctcttgaagactgctgcaggcatgctttaaaaa

SEQ ID NO: 129897 - DNA, 88 bp, Homo sapiens
tatgagcaaatgtgtgctgattgtgatgcccaggcagaaacctcttgaagactgctgcaggcatgctttaaaaatgaccagtcactca

SEQ ID NO: 129898 - DNA, 87 bp, Homo sapiens
atgtgtgctgattgtgatgcccaggcagaaacctcttgaagactgctgcaggcatgctttaaaaatgaccagtcactcatcagagaa

SEQ ID NO: 129899 - DNA, 83 bp, Homo sapiens
attgtgatgcccaggcagaaacctcttgaagactgctgcaggcatgctttaaaaatgaccagtcactcatcagagaagctggg

SEQ ID NO: 129900 - DNA, 84 bp, Homo sapiens
cagaaacctcttgaagactgctgcaggcatgctttaaaaatgaccagtcactcatcagagaagctgggtgatctgactccagaa

SEQ ID NO: 129901 - DNA, 86 bp, Homo sapiens
ttgaagactgctgcaggcatgctttaaaaatgaccagtcactcatcagagaagctgggtgatctgactccagaaggactgaagtca

SEQ ID NO: 129902 - DNA, 85 bp, Homo sapiens
actgctgcaggcatgctttaaaaatgaccagtcactcatcagagaagctgggtgatctgactccagaaggactgaagtcagagaa

SEQ ID NO: 129903 - DNA, 82 bp, Homo sapiens
atgctttaaaaatgaccagtcactcatcagagaagctgggtgatctgactccagaaggactgaagtcagagaagtcacaaga

SEQ ID NO: 129904 - DNA, 82 bp, Homo sapiens
aaaaatgaccagtcactcatcagagaagctgggtgatctgactccagaaggactgaagtcagagaagtcacaagagcaccta

SEQ ID NO: 129905 - DNA, 81 bp, Homo sapiens
actcatcagagaagctgggtgatctgactccagaaggactgaagtcagagaagtcacaagagcacctaggattcaaataaa

SEQ ID NO: 129906 - DNA, 80 bp, Homo sapiens
aagctgggtgatctgactccagaaggactgaagtcagagaagtcacaagagcacctaggattcaaataaatagcgtcaga

SEQ ID NO: 129907 - DNA, 81 bp, Homo sapiens
atctgactccagaaggactgaagtcagagaagtcacaagagcacctaggattcaaataaatagcgtcagagtcctatagca

SEQ ID NO: 129908 - DNA, 78 bp, Homo sapiens
agaaggactgaagtcagagaagtcacaagagcacctaggattcaaataaatagcgtcagagtcctatagcaacctcca

SEQ ID NO: 129909 - DNA, 77 bp, Homo sapiens
aagtcagagaagtcacaagagcacctaggattcaaataaatagcgtcagagtcctatagcaacctccaagtagcacc

SEQ ID NO: 129910 - DNA, 76 bp, Homo sapiens
attcaaataaatagcgtcagagtcctatagcaacctccaagtagcaccgtcttacttggctcttgtgagcaaagac

SEQ ID NO: 129911 - DNA, 78 bp, Homo sapiens
ataaatagcgtcagagtcctatagcaacctccaagtagcaccgtcttacttggctcttgtgagcaaagactgcagtac

SEQ ID NO: 129912 - DNA, 74 bp, Homo sapiens
agtcctatagcaacctccaagtagcaccgtcttacttggctcttgtgagcaaagactgcagtaccttaaattaa

SEQ ID NO: 129913 - DNA, 72 bp, Homo sapiens
aacctccaagtagcaccgtcttacttggctcttgtgagcaaagactgcagtaccttaaattaaggcctctct

SEQ ID NO: 129914 - DNA, 73 bp, Homo sapiens
tcttgtgagcaaagactgcagtaccttaaattaaggcctctctttaaaacatatgtggaagactaggggatcc

SEQ ID NO: 129915 - DNA, 70 bp, Homo sapiens
aaagactgcagtaccttaaattaaggcctctctttaaaacatatgtggaagactaggggatccttggcca

SEQ ID NO: 129916 - DNA, 68 bp, Homo sapiens
agtaccttaaattaaggcctctctttaaaacatatgtggaagactaggggatccttggccacctggtc

SEQ ID NO: 129917 - DNA, 73 bp, Homo sapiens
taaattaaggcctctctttaaaacatatgtggaagactaggggatccttggccacctggtctcagagaaatca

SEQ ID NO: 129918 - DNA, 76 bp, Homo sapiens
ctttaaaacatatgtggaagactaggggatccttggccacctggtctcagagaaatcatatgagagtaacaggcat

SEQ ID NO: 129919 - DNA, 77 bp, Homo sapiens
aacatatgtggaagactaggggatccttggccacctggtctcagagaaatcatatgagagtaacaggcatttcctta

SEQ ID NO: 129920 - DNA, 77 bp, Homo sapiens
atccttggccacctggtctcagagaaatcatatgagagtaacaggcatttccttattgtatttgtactacactcttc

SEQ ID NO: 129921 - DNA, 74 bp, Homo sapiens
acctggtctcagagaaatcatatgagagtaacaggcatttccttattgtatttgtactacactcttcctacttt

SEQ ID NO: 129922 - DNA, 75 bp, Homo sapiens
agagaaatcatatgagagtaacaggcatttccttattgtatttgtactacactcttcctacttttccattcctga

SEQ ID NO: 129923 - DNA, 70 bp, Homo sapiens
aacaggcatttccttattgtatttgtactacactcttcctacttttccattcctgaacaccctctaatta

SEQ ID NO: 129924 - DNA, 67 bp, Homo sapiens
tacttttccattcctgaacaccctctaattaccactgttttggggatgctttttttctgaaagaacg

SEQ ID NO: 129925 - DNA, 67 bp, Homo sapiens
attcctgaacaccctctaattaccactgttttggggatgctttttttctgaaagaacggggagtaca

SEQ ID NO: 129926 - DNA, 65 bp, Homo sapiens
cctctaattaccactgttttggggatgctttttttctgaaagaacggggagtacaggggccaaaa

SEQ ID NO: 129927 - DNA, 66 bp, Homo sapiens
ctgttttggggatgctttttttctgaaagaacggggagtacaggggccaaaagggaggtgcttcta

SEQ ID NO: 129928 - DNA, 75 bp, Homo sapiens
tacaggggccaaaagggaggtgcttctattacagggcaagttagatcagataagaagatctagcagtgatttaaa

SEQ ID NO: 129929 - DNA, 75 bp, Homo sapiens
aaagggaggtgcttctattacagggcaagttagatcagataagaagatctagcagtgatttaaactccaggaata

SEQ ID NO: 129930 - DNA, 80 bp, Homo sapiens
cttctattacagggcaagttagatcagataagaagatctagcagtgatttaaactccaggaatatgaagagtgcattctg

SEQ ID NO: 129931 - DNA, 80 bp, Homo sapiens
attacagggcaagttagatcagataagaagatctagcagtgatttaaactccaggaatatgaagagtgcattctggtgtc

SEQ ID NO: 129932 - DNA, 80 bp, Homo sapiens
aagttagatcagataagaagatctagcagtgatttaaactccaggaatatgaagagtgcattctggtgtccagacagttg

SEQ ID NO: 129933 - DNA, 80 bp, Homo sapiens
agataagaagatctagcagtgatttaaactccaggaatatgaagagtgcattctggtgtccagacagttgtgaagggctc

SEQ ID NO: 129934 - DNA, 80 bp, Homo sapiens
tagcagtgatttaaactccaggaatatgaagagtgcattctggtgtccagacagttgtgaagggctcggcaaatataaga

SEQ ID NO: 129935 - DNA, 78 bp, Homo sapiens
tttaaactccaggaatatgaagagtgcattctggtgtccagacagttgtgaagggctcggcaaatataagagcaccat

SEQ ID NO: 129936 - DNA, 83 bp, Homo sapiens
aatatgaagagtgcattctggtgtccagacagttgtgaagggctcggcaaatataagagcaccattggctacatggagagcaa

SEQ ID NO: 129937 - DNA, 81 bp, Homo sapiens
ttctggtgtccagacagttgtgaagggctcggcaaatataagagcaccattggctacatggagagcaaaggctgtctttga

SEQ ID NO: 129938 - DNA, 78 bp, Homo sapiens
agacagttgtgaagggctcggcaaatataagagcaccattggctacatggagagcaaaggctgtctttgaagacccca

SEQ ID NO: 129939 - DNA, 75 bp, Homo sapiens
aagggctcggcaaatataagagcaccattggctacatggagagcaaaggctgtctttgaagaccccagggaggtc

SEQ ID NO: 129940 - DNA, 74 bp, Homo sapiens
accattggctacatggagagcaaaggctgtctttgaagaccccagggaggtcttcacttttgcctaaattcaga

SEQ ID NO: 129941 - DNA, 75 bp, Homo sapiens
tacatggagagcaaaggctgtctttgaagaccccagggaggtcttcacttttgcctaaattcagatttgccgtga

SEQ ID NO: 129942 - DNA, 73 bp, Homo sapiens
tcttcacttttgcctaaattcagatttgccgtgaaaattccaaagagagcagatatttggatttgccctcctt

SEQ ID NO: 129943 - DNA, 74 bp, Homo sapiens
aaattcagatttgccgtgaaaattccaaagagagcagatatttggatttgccctcctttgggcatctacctgac

SEQ ID NO: 129944 - DNA, 77 bp, Homo sapiens
ttgccgtgaaaattccaaagagagcagatatttggatttgccctcctttgggcatctacctgactgttgtgtgtgtg

SEQ ID NO: 129945 - DNA, 76 bp, Homo sapiens
aattccaaagagagcagatatttggatttgccctcctttgggcatctacctgactgttgtgtgtgtgggaaagtca

SEQ ID NO: 129946 - DNA, 77 bp, Homo sapiens
agatatttggatttgccctcctttgggcatctacctgactgttgtgtgtgtgggaaagtcagtgtgtatgtgtagag

SEQ ID NO: 129947 - DNA, 79 bp, Homo sapiens
ttggatttgccctcctttgggcatctacctgactgttgtgtgtgtgggaaagtcagtgtgtatgtgtagagtgtgctta

SEQ ID NO: 129948 - DNA, 80 bp, Homo sapiens
cctcctttgggcatctacctgactgttgtgtgtgtgggaaagtcagtgtgtatgtgtagagtgtgcttaggagtgagtga

SEQ ID NO: 129949 - DNA, 81 bp, Homo sapiens
atctacctgactgttgtgtgtgtgggaaagtcagtgtgtatgtgtagagtgtgcttaggagtgagtgagtggtcaggcctc

SEQ ID NO: 129950 - DNA, 80 bp, Homo sapiens
actgttgtgtgtgtgggaaagtcagtgtgtatgtgtagagtgtgcttaggagtgagtgagtggtcaggcctcctggctag

SEQ ID NO: 129951 - DNA, 81 bp, Homo sapiens
tgggaaagtcagtgtgtatgtgtagagtgtgcttaggagtgagtgagtggtcaggcctcctggctaggtgtgttgtccata

SEQ ID NO: 129952 - DNA, 78 bp, Homo sapiens
agtgtgtatgtgtagagtgtgcttaggagtgagtgagtggtcaggcctcctggctaggtgtgttgtccatagttttgt

SEQ ID NO: 129953 - DNA, 78 bp, Homo sapiens
gtatgtgtagagtgtgcttaggagtgagtgagtggtcaggcctcctggctaggtgtgttgtccatagttttgttgttg

SEQ ID NO: 129954 - DNA, 70 bp, Homo sapiens
ttcagagttttgaatcttacgttttctagagctgctcatgttttcccttcctttttgtcgttgtagtatt

SEQ ID NO: 129955 - DNA, 70 bp, Homo sapiens
agttttgaatcttacgttttctagagctgctcatgttttcccttcctttttgtcgttgtagtatttgaca

SEQ ID NO: 129956 - DNA, 73 bp, Homo sapiens
tagagctgctcatgttttcccttcctttttgtcgttgtagtatttgacagttgtcttttccatcaaaaacata

SEQ ID NO: 129957 - DNA, 71 bp, Homo sapiens
ctgctcatgttttcccttcctttttgtcgttgtagtatttgacagttgtcttttccatcaaaaacatactg

SEQ ID NO: 129958 - DNA, 68 bp, Homo sapiens
ttttcccttcctttttgtcgttgtagtatttgacagttgtcttttccatcaaaaacatactggcccta

SEQ ID NO: 129959 - DNA, 70 bp, Homo sapiens
ttcctttttgtcgttgtagtatttgacagttgtcttttccatcaaaaacatactggccctaggctggtta

SEQ ID NO: 129960 - DNA, 72 bp, Homo sapiens
tttttgtcgttgtagtatttgacagttgtcttttccatcaaaaacatactggccctaggctggttagagcaa

SEQ ID NO: 129961 - DNA, 71 bp, Homo sapiens
gttgtagtatttgacagttgtcttttccatcaaaaacatactggccctaggctggttagagcaaggggtta

SEQ ID NO: 129962 - DNA, 73 bp, Homo sapiens
ttgtagtatttgacagttgtcttttccatcaaaaacatactggccctaggctggttagagcaaggggttatgc

SEQ ID NO: 129963 - DNA, 73 bp, Homo sapiens
tatttgacagttgtcttttccatcaaaaacatactggccctaggctggttagagcaaggggttatgcctgtta

SEQ ID NO: 129964 - DNA, 74 bp, Homo sapiens
gttgtcttttccatcaaaaacatactggccctaggctggttagagcaaggggttatgcctgttaggcagcatct

SEQ ID NO: 129965 - DNA, 75 bp, Homo sapiens
ttgtcttttccatcaaaaacatactggccctaggctggttagagcaaggggttatgcctgttaggcagcatctta

SEQ ID NO: 129966 - DNA, 74 bp, Homo sapiens
ttttccatcaaaaacatactggccctaggctggttagagcaaggggttatgcctgttaggcagcatcttacgcc

SEQ ID NO: 129967 - DNA, 74 bp, Homo sapiens
aaaacatactggccctaggctggttagagcaaggggttatgcctgttaggcagcatcttacgcccagtgttctc

SEQ ID NO: 129968 - DNA, 78 bp, Homo sapiens
tggccctaggctggttagagcaaggggttatgcctgttaggcagcatcttacgcccagtgttctcccagatattctgc

SEQ ID NO: 129969 - DNA, 75 bp, Homo sapiens
ggttatgcctgttaggcagcatcttacgcccagtgttctcccagatattctgcctaacaggtttaagtaggagat

SEQ ID NO: 129970 - DNA, 76 bp, Homo sapiens
tgttaggcagcatcttacgcccagtgttctcccagatattctgcctaacaggtttaagtaggagattaaatagtca

SEQ ID NO: 129971 - DNA, 72 bp, Homo sapiens
atcttacgcccagtgttctcccagatattctgcctaacaggtttaagtaggagattaaatagtcagtttatc

SEQ ID NO: 129972 - DNA, 71 bp, Homo sapiens
cagtgttctcccagatattctgcctaacaggtttaagtaggagattaaatagtcagtttatctaaaccctc

SEQ ID NO: 129973 - DNA, 68 bp, Homo sapiens
tgcctaacaggtttaagtaggagattaaatagtcagtttatctaaaccctctatttttccaaactagc

SEQ ID NO: 129974 - DNA, 67 bp, Homo sapiens
ggtttaagtaggagattaaatagtcagtttatctaaaccctctatttttccaaactagcttgagagg

SEQ ID NO: 129975 - DNA, 70 bp, Homo sapiens
gtaggagattaaatagtcagtttatctaaaccctctatttttccaaactagcttgagaggtcttttcatc

SEQ ID NO: 129976 - DNA, 69 bp, Homo sapiens
agtcagtttatctaaaccctctatttttccaaactagcttgagaggtcttttcatctatttttactcca

SEQ ID NO: 129977 - DNA, 69 bp, Homo sapiens
gtttatctaaaccctctatttttccaaactagcttgagaggtcttttcatctatttttactccatgggc

SEQ ID NO: 129978 - DNA, 75 bp, Homo sapiens
accctctatttttccaaactagcttgagaggtcttttcatctatttttactccatgggcctctgatatgctgaga

SEQ ID NO: 129979 - DNA, 79 bp, Homo sapiens
aaactagcttgagaggtcttttcatctatttttactccatgggcctctgatatgctgagatgtggcacggttatgatta

SEQ ID NO: 129980 - DNA, 82 bp, Homo sapiens
agcttgagaggtcttttcatctatttttactccatgggcctctgatatgctgagatgtggcacggttatgattatggtatca

SEQ ID NO: 129981 - DNA, 82 bp, Homo sapiens
ttcatctatttttactccatgggcctctgatatgctgagatgtggcacggttatgattatggtatcaccgttacagaggcaa

SEQ ID NO: 129982 - DNA, 78 bp, Homo sapiens
atttttactccatgggcctctgatatgctgagatgtggcacggttatgattatggtatcaccgttacagaggcaaagg

SEQ ID NO: 129983 - DNA, 79 bp, Homo sapiens
atgggcctctgatatgctgagatgtggcacggttatgattatggtatcaccgttacagaggcaaagggataaaggtcta

SEQ ID NO: 129984 - DNA, 77 bp, Homo sapiens
tatgctgagatgtggcacggttatgattatggtatcaccgttacagaggcaaagggataaaggtctaccagggccaa

SEQ ID NO: 129985 - DNA, 72 bp, Homo sapiens
tgtggcacggttatgattatggtatcaccgttacagaggcaaagggataaaggtctaccagggccaacgtaa

SEQ ID NO: 129986 - DNA, 71 bp, Homo sapiens
attatggtatcaccgttacagaggcaaagggataaaggtctaccagggccaacgtaaccagaatgtgagga

SEQ ID NO: 129987 - DNA, 69 bp, Homo sapiens
aaagggataaaggtctaccagggccaacgtaaccagaatgtgaggagagtgaagagtcggtctccgctt

SEQ ID NO: 129988 - DNA, 73 bp, Homo sapiens
ataaaggtctaccagggccaacgtaaccagaatgtgaggagagtgaagagtcggtctccgctttgcacagtac

SEQ ID NO: 129989 - DNA, 76 bp, Homo sapiens
taccagggccaacgtaaccagaatgtgaggagagtgaagagtcggtctccgctttgcacagtaccagaatgtgagg

SEQ ID NO: 129990 - DNA, 77 bp, Homo sapiens
aacgtaaccagaatgtgaggagagtgaagagtcggtctccgctttgcacagtaccagaatgtgaggttgccactgga

SEQ ID NO: 129991 - DNA, 79 bp, Homo sapiens
aatgtgaggagagtgaagagtcggtctccgctttgcacagtaccagaatgtgaggttgccactggagagtggagagtcg

SEQ ID NO: 129992 - DNA, 80 bp, Homo sapiens
tgaagagtcggtctccgctttgcacagtaccagaatgtgaggttgccactggagagtggagagtcggtctccactttgca

SEQ ID NO: 129993 - DNA, 79 bp, Homo sapiens
tcggtctccgctttgcacagtaccagaatgtgaggttgccactggagagtggagagtcggtctccactttgcacagttg

SEQ ID NO: 129994 - DNA, 80 bp, Homo sapiens
tttgcacagtaccagaatgtgaggttgccactggagagtggagagtcggtctccactttgcacagttggagctgttctcc

SEQ ID NO: 129995 - DNA, 77 bp, Homo sapiens
agaatgtgaggttgccactggagagtggagagtcggtctccactttgcacagttggagctgttctcctctaactcct

SEQ ID NO: 129996 - DNA, 76 bp, Homo sapiens
aggttgccactggagagtggagagtcggtctccactttgcacagttggagctgttctcctctaactcctttgctgg

SEQ ID NO: 129997 - DNA, 74 bp, Homo sapiens
gagagtggagagtcggtctccactttgcacagttggagctgttctcctctaactcctttgctgggttttctgtt

SEQ ID NO: 129998 - DNA, 72 bp, Homo sapiens
agagtcggtctccactttgcacagttggagctgttctcctctaactcctttgctgggttttctgtttgaaat

SEQ ID NO: 129999 - DNA, 73 bp, Homo sapiens
tctccactttgcacagttggagctgttctcctctaactcctttgctgggttttctgtttgaaattggccccta

SEQ ID NO: 130000 - DNA, 71 bp, Homo sapiens
acagttggagctgttctcctctaactcctttgctgggttttctgtttgaaattggcccctactcctctcca

SEQ ID NO: 130001 - DNA, 69 bp, Homo sapiens
ctgttctcctctaactcctttgctgggttttctgtttgaaattggcccctactcctctccagcccttta

SEQ ID NO: 130002 - DNA, 66 bp, Homo sapiens
taactcctttgctgggttttctgtttgaaattggcccctactcctctccagccctttactgggttt

SEQ ID NO: 130003 - DNA, 66 bp, Homo sapiens
ctgggttttctgtttgaaattggcccctactcctctccagccctttactgggttttctgtttgaaa

SEQ ID NO: 130004 - DNA, 67 bp, Homo sapiens
ttttctgtttgaaattggcccctactcctctccagccctttactgggttttctgtttgaaattggcc

SEQ ID NO: 130005 - DNA, 66 bp, Homo sapiens
aaattggcccctactcctctccagccctttactgggttttctgtttgaaattggcccctactcctc

SEQ ID NO: 130006 - DNA, 68 bp, Homo sapiens
ccctttactgggttttctgtttgaaattggcccctactcctctccagtgtctgctttttgaatccttc

SEQ ID NO: 130007 - DNA, 72 bp, Homo sapiens
ggttttctgtttgaaattggcccctactcctctccagtgtctgctttttgaatccttctgttcgtgtgtgtg

SEQ ID NO: 130008 - DNA, 80 bp, Homo sapiens
tgtgtgtgttccctatgatactggcagtggcaataattttccacccagagagaagcttgtggtccacaatgctcgaagaa

SEQ ID NO: 130009 - DNA, 78 bp, Homo sapiens
ttccctatgatactggcagtggcaataattttccacccagagagaagcttgtggtccacaatgctcgaagaatgaatt

SEQ ID NO: 130010 - DNA, 77 bp, Homo sapiens
atactggcagtggcaataattttccacccagagagaagcttgtggtccacaatgctcgaagaatgaatttccaagta

SEQ ID NO: 130011 - DNA, 76 bp, Homo sapiens
caataattttccacccagagagaagcttgtggtccacaatgctcgaagaatgaatttccaagtatttgccagtgga

SEQ ID NO: 130012 - DNA, 74 bp, Homo sapiens
attttccacccagagagaagcttgtggtccacaatgctcgaagaatgaatttccaagtatttgccagtggaaac

SEQ ID NO: 130013 - DNA, 78 bp, Homo sapiens
agaagcttgtggtccacaatgctcgaagaatgaatttccaagtatttgccagtggaaacggagcagaggctatgacaa

SEQ ID NO: 130014 - DNA, 79 bp, Homo sapiens
tggtccacaatgctcgaagaatgaatttccaagtatttgccagtggaaacggagcagaggctatgacaagagtgattta

SEQ ID NO: 130015 - DNA, 77 bp, Homo sapiens
acaatgctcgaagaatgaatttccaagtatttgccagtggaaacggagcagaggctatgacaagagtgatttagtgt

SEQ ID NO: 130016 - DNA, 77 bp, Homo sapiens
aagaatgaatttccaagtatttgccagtggaaacggagcagaggctatgacaagagtgatttagtgttgcactttca

SEQ ID NO: 130017 - DNA, 79 bp, Homo sapiens
agtggaaacggagcagaggctatgacaagagtgatttagtgttgcactttcagagcaattatctactgcagtaataaat

SEQ ID NO: 130018 - DNA, 79 bp, Homo sapiens
aaacggagcagaggctatgacaagagtgatttagtgttgcactttcagagcaattatctactgcagtaataaattgaaa

SEQ ID NO: 130019 - DNA, 81 bp, Homo sapiens
aggctatgacaagagtgatttagtgttgcactttcagagcaattatctactgcagtaataaattgaaaatatcagcaagaa

SEQ ID NO: 130020 - DNA, 78 bp, Homo sapiens
aagagtgatttagtgttgcactttcagagcaattatctactgcagtaataaattgaaaatatcagcaagaaccaggtc

SEQ ID NO: 130021 - DNA, 80 bp, Homo sapiens
tgttgcactttcagagcaattatctactgcagtaataaattgaaaatatcagcaagaaccaggtcgtggacttgtcaata

SEQ ID NO: 130022 - DNA, 77 bp, Homo sapiens
actttcagagcaattatctactgcagtaataaattgaaaatatcagcaagaaccaggtcgtggacttgtcaatacaa

SEQ ID NO: 130023 - DNA, 74 bp, Homo sapiens
tgtatttttaataatttttttgcctcatttaccagataaatcatctaaataaatagatgctatacagtctctta

SEQ ID NO: 130024 - DNA, 76 bp, Homo sapiens
ataatttttttgcctcatttaccagataaatcatctaaataaatagatgctatacagtctcttaccaatgtcagta

SEQ ID NO: 130025 - DNA, 77 bp, Homo sapiens
tttgcctcatttaccagataaatcatctaaataaatagatgctatacagtctcttaccaatgtcagtacaaaaataa

SEQ ID NO: 130026 - DNA, 75 bp, Homo sapiens
accagataaatcatctaaataaatagatgctatacagtctcttaccaatgtcagtacaaaaataaaaccgcgctc

SEQ ID NO: 130027 - DNA, 76 bp, Homo sapiens
aatcatctaaataaatagatgctatacagtctcttaccaatgtcagtacaaaaataaaaccgcgctctacatccac

SEQ ID NO: 130028 - DNA, 76 bp, Homo sapiens
aaataaatagatgctatacagtctcttaccaatgtcagtacaaaaataaaaccgcgctctacatccactctgactc

SEQ ID NO: 130029 - DNA, 80 bp, Homo sapiens
atgctatacagtctcttaccaatgtcagtacaaaaataaaaccgcgctctacatccactctgactctcccagcacacaca

SEQ ID NO: 130030 - DNA, 80 bp, Homo sapiens
tctcttaccaatgtcagtacaaaaataaaaccgcgctctacatccactctgactctcccagcacacacacactcagcaaa

SEQ ID NO: 130031 - DNA, 81 bp, Homo sapiens
aatgtcagtacaaaaataaaaccgcgctctacatccactctgactctcccagcacacacacactcagcaaaggcatgtgct

SEQ ID NO: 130032 - DNA, 81 bp, Homo sapiens
acaaaaataaaaccgcgctctacatccactctgactctcccagcacacacacactcagcaaaggcatgtgcttggaatcaa

SEQ ID NO: 130033 - DNA, 82 bp, Homo sapiens
aaccgcgctctacatccactctgactctcccagcacacacacactcagcaaaggcatgtgcttggaatcaactcgtgccccc

SEQ ID NO: 130034 - DNA, 81 bp, Homo sapiens
tacatccactctgactctcccagcacacacacactcagcaaaggcatgtgcttggaatcaactcgtgcccccgacccctcc

SEQ ID NO: 130035 - DNA, 80 bp, Homo sapiens
tctcccagcacacacacactcagcaaaggcatgtgcttggaatcaactcgtgcccccgacccctcccagatacattcatt

SEQ ID NO: 130036 - DNA, 79 bp, Homo sapiens
cacacacactcagcaaaggcatgtgcttggaatcaactcgtgcccccgacccctcccagatacattcatttagtctgaa

SEQ ID NO: 130037 - DNA, 76 bp, Homo sapiens
actcagcaaaggcatgtgcttggaatcaactcgtgcccccgacccctcccagatacattcatttagtctgaacaaa

SEQ ID NO: 130038 - DNA, 76 bp, Homo sapiens
atgtgcttggaatcaactcgtgcccccgacccctcccagatacattcatttagtctgaacaaagctcgaagctcat

SEQ ID NO: 130039 - DNA, 76 bp, Homo sapiens
aatcaactcgtgcccccgacccctcccagatacattcatttagtctgaacaaagctcgaagctcattctgtgcaaa

SEQ ID NO: 130040 - DNA, 75 bp, Homo sapiens
actcgtgcccccgacccctcccagatacattcatttagtctgaacaaagctcgaagctcattctgtgcaaaggaa

SEQ ID NO: 130041 - DNA, 83 bp, Homo sapiens
agatacattcatttagtctgaacaaagctcgaagctcattctgtgcaaaggaagcgctcttgtgctgagacctggtggccgca

SEQ ID NO: 130042 - DNA, 82 bp, Homo sapiens
tttagtctgaacaaagctcgaagctcattctgtgcaaaggaagcgctcttgtgctgagacctggtggccgcagctggccact

SEQ ID NO: 130043 - DNA, 80 bp, Homo sapiens
aagctcattctgtgcaaaggaagcgctcttgtgctgagacctggtggccgcagctggccacttcgaaagcaaaagctaaa

SEQ ID NO: 130044 - DNA, 80 bp, Homo sapiens
tgtgcaaaggaagcgctcttgtgctgagacctggtggccgcagctggccacttcgaaagcaaaagctaaaccacctcaca

SEQ ID NO: 130045 - DNA, 79 bp, Homo sapiens
aggaagcgctcttgtgctgagacctggtggccgcagctggccacttcgaaagcaaaagctaaaccacctcacagaagca

SEQ ID NO: 130046 - DNA, 80 bp, Homo sapiens
ttgtgctgagacctggtggccgcagctggccacttcgaaagcaaaagctaaaccacctcacagaagcacagcgcctgccc

SEQ ID NO: 130047 - DNA, 77 bp, Homo sapiens
tggtggccgcagctggccacttcgaaagcaaaagctaaaccacctcacagaagcacagcgcctgcccccagaacaag

SEQ ID NO: 130048 - DNA, 74 bp, Homo sapiens
agctggccacttcgaaagcaaaagctaaaccacctcacagaagcacagcgcctgcccccagaacaaggggacag

SEQ ID NO: 130049 - DNA, 73 bp, Homo sapiens
aaaagctaaaccacctcacagaagcacagcgcctgcccccagaacaaggggacaggaggagcttggcaacgag

SEQ ID NO: 130050 - DNA, 76 bp, Homo sapiens
acctcacagaagcacagcgcctgcccccagaacaaggggacaggaggagcttggcaacgaggtcatcacccgaaca

SEQ ID NO: 130051 - DNA, 78 bp, Homo sapiens
acagaagcacagcgcctgcccccagaacaaggggacaggaggagcttggcaacgaggtcatcacccgaacagcagtga

SEQ ID NO: 130052 - DNA, 78 bp, Homo sapiens
ctgcccccagaacaaggggacaggaggagcttggcaacgaggtcatcacccgaacagcagtgacagtcctgcattcca

SEQ ID NO: 130053 - DNA, 78 bp, Homo sapiens
agaacaaggggacaggaggagcttggcaacgaggtcatcacccgaacagcagtgacagtcctgcattccaggcggctg

SEQ ID NO: 130054 - DNA, 79 bp, Homo sapiens
acaggaggagcttggcaacgaggtcatcacccgaacagcagtgacagtcctgcattccaggcggctgtgccaggggtgg

SEQ ID NO: 130055 - DNA, 77 bp, Homo sapiens
agcttggcaacgaggtcatcacccgaacagcagtgacagtcctgcattccaggcggctgtgccaggggtgggggtac

SEQ ID NO: 130056 - DNA, 75 bp, Homo sapiens
aacgaggtcatcacccgaacagcagtgacagtcctgcattccaggcggctgtgccaggggtgggggtacctcctc

SEQ ID NO: 130057 - DNA, 74 bp, Homo sapiens
tcacccgaacagcagtgacagtcctgcattccaggcggctgtgccaggggtgggggtacctcctccgcaccccc

SEQ ID NO: 130058 - DNA, 71 bp, Homo sapiens
agtgacagtcctgcattccaggcggctgtgccaggggtgggggtacctcctccgcaccccccaccacaaaa

SEQ ID NO: 130059 - DNA, 69 bp, Homo sapiens
tcctgcattccaggcggctgtgccaggggtgggggtacctcctccgcaccccccaccacaaaaggaaaa

SEQ ID NO: 130060 - DNA, 64 bp, Homo sapiens
aggggtgggggtacctcctccgcaccccccaccacaaaaggaaaagtgcccacgggtctctaca

SEQ ID NO: 130061 - DNA, 67 bp, Homo sapiens
tcctccgcaccccccaccacaaaaggaaaagtgcccacgggtctctacattcaaagcgggtgggggc

SEQ ID NO: 130062 - DNA, 65 bp, Homo sapiens
accacaaaaggaaaagtgcccacgggtctctacattcaaagcgggtgggggctgggggaaagaaa

SEQ ID NO: 130063 - DNA, 66 bp, Homo sapiens
aaaaggaaaagtgcccacgggtctctacattcaaagcgggtgggggctgggggaaagaaaggcaga

SEQ ID NO: 130064 - DNA, 70 bp, Homo sapiens
cacgggtctctacattcaaagcgggtgggggctgggggaaagaaaggcagatgggcaaatgctttctaaa

SEQ ID NO: 130065 - DNA, 70 bp, Homo sapiens
tctctacattcaaagcgggtgggggctgggggaaagaaaggcagatgggcaaatgctttctaaaccctcc

SEQ ID NO: 130066 - DNA, 70 bp, Homo sapiens
cccccacccccaagagtactggccttttaagagggctgcgggggtggaggtcactgtctgccttgctcta

SEQ ID NO: 130067 - DNA, 74 bp, Homo sapiens
ccaagagtactggccttttaagagggctgcgggggtggaggtcactgtctgccttgctctactgggccactctg

SEQ ID NO: 130068 - DNA, 75 bp, Homo sapiens
tactggccttttaagagggctgcgggggtggaggtcactgtctgccttgctctactgggccactctgggctggaa

SEQ ID NO: 130069 - DNA, 77 bp, Homo sapiens
tttaagagggctgcgggggtggaggtcactgtctgccttgctctactgggccactctgggctggaaggaggcctgca

SEQ ID NO: 130070 - DNA, 77 bp, Homo sapiens
gggggtggaggtcactgtctgccttgctctactgggccactctgggctggaaggaggcctgcacggccacagccgta

SEQ ID NO: 130071 - DNA, 77 bp, Homo sapiens
ggggtggaggtcactgtctgccttgctctactgggccactctgggctggaaggaggcctgcacggccacagccgtag

SEQ ID NO: 130072 - DNA, 81 bp, Homo sapiens
tcactgtctgccttgctctactgggccactctgggctggaaggaggcctgcacggccacagccgtaggtgacctcatagag

SEQ ID NO: 130073 - DNA, 78 bp, Homo sapiens
tctactgggccactctgggctggaaggaggcctgcacggccacagccgtaggtgacctcatagaggtcacctgtcctg

SEQ ID NO: 130074 - DNA, 78 bp, Homo sapiens
tctgggctggaaggaggcctgcacggccacagccgtaggtgacctcatagaggtcacctgtcctggaggatggtccta

SEQ ID NO: 130075 - DNA, 74 bp, Homo sapiens
aaggaggcctgcacggccacagccgtaggtgacctcatagaggtcacctgtcctggaggatggtcctaacggcc

SEQ ID NO: 130076 - DNA, 73 bp, Homo sapiens
cacggccacagccgtaggtgacctcatagaggtcacctgtcctggaggatggtcctaacggcccacagccttt

SEQ ID NO: 130077 - DNA, 72 bp, Homo sapiens
ccacagccgtaggtgacctcatagaggtcacctgtcctggaggatggtcctaacggcccacagccttttccc

SEQ ID NO: 130078 - DNA, 75 bp, Homo sapiens
tcctggaggatggtcctaacggcccacagccttttcccccagggagctggctcactacagcccatgagccacctg

SEQ ID NO: 130079 - DNA, 76 bp, Homo sapiens
atggtcctaacggcccacagccttttcccccagggagctggctcactacagcccatgagccacctggctgccctga

SEQ ID NO: 130080 - DNA, 78 bp, Homo sapiens
taacggcccacagccttttcccccagggagctggctcactacagcccatgagccacctggctgccctgagctgggcac

SEQ ID NO: 130081 - DNA, 78 bp, Homo sapiens
agccttttcccccagggagctggctcactacagcccatgagccacctggctgccctgagctgggcacctcaggcccac

SEQ ID NO: 130082 - DNA, 80 bp, Homo sapiens
agggagctggctcactacagcccatgagccacctggctgccctgagctgggcacctcaggcccacccgtcccaggtcaca

SEQ ID NO: 130083 - DNA, 78 bp, Homo sapiens
tcactacagcccatgagccacctggctgccctgagctgggcacctcaggcccacccgtcccaggtcacacccctggag

SEQ ID NO: 130084 - DNA, 78 bp, Homo sapiens
tacagcccatgagccacctggctgccctgagctgggcacctcaggcccacccgtcccaggtcacacccctggagttca

SEQ ID NO: 130085 - DNA, 77 bp, Homo sapiens
acagcccatgagccacctggctgccctgagctgggcacctcaggcccacccgtcccaggtcacacccctggagttca

SEQ ID NO: 130086 - DNA, 76 bp, Homo sapiens
ctgccctgagctgggcacctcaggcccacccgtcccaggtcacacccctggagttcagctctccctgagccacgga

SEQ ID NO: 130087 - DNA, 75 bp, Homo sapiens
ctgagctgggcacctcaggcccacccgtcccaggtcacacccctggagttcagctctccctgagccacggagttc

SEQ ID NO: 130088 - DNA, 73 bp, Homo sapiens
agctgggcacctcaggcccacccgtcccaggtcacacccctggagttcagctctccctgagccacggagttcc

SEQ ID NO: 130089 - DNA, 74 bp, Homo sapiens
tcaggcccacccgtcccaggtcacacccctggagttcagctctccctgagccacggagttccccatgggccata

SEQ ID NO: 130090 - DNA, 70 bp, Homo sapiens
acccgtcccaggtcacacccctggagttcagctctccctgagccacggagttccccatgggccataaagg

SEQ ID NO: 130091 - DNA, 74 bp, Homo sapiens
tcacacccctggagttcagctctccctgagccacggagttccccatgggccataaagggctgagtaagaggaaa

SEQ ID NO: 130092 - DNA, 75 bp, Homo sapiens
cctggagttcagctctccctgagccacggagttccccatgggccataaagggctgagtaagaggaaagatgtgtc

SEQ ID NO: 130093 - DNA, 77 bp, Homo sapiens
agccacggagttccccatgggccataaagggctgagtaagaggaaagatgtgtcctgctgctgcagacaaaagcaac

SEQ ID NO: 130094 - DNA, 81 bp, Homo sapiens
gggccataaagggctgagtaagaggaaagatgtgtcctgctgctgcagacaaaagcaactgcagcacccacacagaaagcc

SEQ ID NO: 130095 - DNA, 83 bp, Homo sapiens
tgagtaagaggaaagatgtgtcctgctgctgcagacaaaagcaactgcagcacccacacagaaagccccgtgaatccacagac

SEQ ID NO: 130096 - DNA, 83 bp, Homo sapiens
aaagatgtgtcctgctgctgcagacaaaagcaactgcagcacccacacagaaagccccgtgaatccacagacccacagattgc

SEQ ID NO: 130097 - DNA, 83 bp, Homo sapiens
tcctgctgctgcagacaaaagcaactgcagcacccacacagaaagccccgtgaatccacagacccacagattgcgcaaatagt

SEQ ID NO: 130098 - DNA, 79 bp, Homo sapiens
cagacaaaagcaactgcagcacccacacagaaagccccgtgaatccacagacccacagattgcgcaaatagttctttga

SEQ ID NO: 130099 - DNA, 75 bp, Homo sapiens
agcacccacacagaaagccccgtgaatccacagacccacagattgcgcaaatagttctttgaaagtgaccaggaa

SEQ ID NO: 130100 - DNA, 72 bp, Homo sapiens
aaagccccgtgaatccacagacccacagattgcgcaaatagttctttgaaagtgaccaggaagcaggaaaaa

SEQ ID NO: 130101 - DNA, 75 bp, Homo sapiens
gtgaatccacagacccacagattgcgcaaatagttctttgaaagtgaccaggaagcaggaaaaaggtcctatgtc

SEQ ID NO: 130102 - DNA, 72 bp, Homo sapiens
acagacccacagattgcgcaaatagttctttgaaagtgaccaggaagcaggaaaaaggtcctatgtcccctg

SEQ ID NO: 130103 - DNA, 70 bp, Homo sapiens
agattgcgcaaatagttctttgaaagtgaccaggaagcaggaaaaaggtcctatgtcccctgggggatgg

SEQ ID NO: 130104 - DNA, 67 bp, Homo sapiens
aaatagttctttgaaagtgaccaggaagcaggaaaaaggtcctatgtcccctgggggatggggagcg

SEQ ID NO: 130105 - DNA, 72 bp, Homo sapiens
ttgaaagtgaccaggaagcaggaaaaaggtcctatgtcccctgggggatggggagcgtgacttctgctggaa

SEQ ID NO: 130106 - DNA, 75 bp, Homo sapiens
aagcaggaaaaaggtcctatgtcccctgggggatggggagcgtgacttctgctggaagctgccagccatgttcca

SEQ ID NO: 130107 - DNA, 77 bp, Homo sapiens
tatgtcccctgggggatggggagcgtgacttctgctggaagctgccagccatgttccaaagtcatgggccaaaacat

SEQ ID NO: 130108 - DNA, 78 bp, Homo sapiens
ggatggggagcgtgacttctgctggaagctgccagccatgttccaaagtcatgggccaaaacattcaactagagaccc

SEQ ID NO: 130109 - DNA, 77 bp, Homo sapiens
agcgtgacttctgctggaagctgccagccatgttccaaagtcatgggccaaaacattcaactagagaccccccacaa

SEQ ID NO: 130110 - DNA, 78 bp, Homo sapiens
tgctggaagctgccagccatgttccaaagtcatgggccaaaacattcaactagagaccccccacaaccctctatcatc

SEQ ID NO: 130111 - DNA, 75 bp, Homo sapiens
agctgccagccatgttccaaagtcatgggccaaaacattcaactagagaccccccacaaccctctatcatcttta

SEQ ID NO: 130112 - DNA, 71 bp, Homo sapiens
atgttccaaagtcatgggccaaaacattcaactagagaccccccacaaccctctatcatctttacctccgc

SEQ ID NO: 130113 - DNA, 70 bp, Homo sapiens
aaaacattcaactagagaccccccacaaccctctatcatctttacctccgctgggcacccctctcctgga

SEQ ID NO: 130114 - DNA, 69 bp, Homo sapiens
aactagagaccccccacaaccctctatcatctttacctccgctgggcacccctctcctggaagagtccc

SEQ ID NO: 130115 - DNA, 71 bp, Homo sapiens
cacaaccctctatcatctttacctccgctgggcacccctctcctggaagagtcccctctgaaccccaagct

SEQ ID NO: 130116 - DNA, 70 bp, Homo sapiens
tgggcacccctctcctggaagagtcccctctgaaccccaagcttccccttcccctccacagggctccaca

SEQ ID NO: 130117 - DNA, 72 bp, Homo sapiens
cctctcctggaagagtcccctctgaaccccaagcttccccttcccctccacagggctccacagctggagatg

SEQ ID NO: 130118 - DNA, 71 bp, Homo sapiens
aagagtcccctctgaaccccaagcttccccttcccctccacagggctccacagctggagatgggtggtgat

SEQ ID NO: 130119 - DNA, 72 bp, Homo sapiens
aaccccaagcttccccttcccctccacagggctccacagctggagatgggtggtgattcctgccgctccttg

SEQ ID NO: 130120 - DNA, 74 bp, Homo sapiens
ttccccttcccctccacagggctccacagctggagatgggtggtgattcctgccgctccttgtccagacccacc

SEQ ID NO: 130121 - DNA, 77 bp, Homo sapiens
gctccacagctggagatgggtggtgattcctgccgctccttgtccagacccaccccacgtattcctctagattccat

SEQ ID NO: 130122 - DNA, 73 bp, Homo sapiens
atgggtggtgattcctgccgctccttgtccagacccaccccacgtattcctctagattccattccctgggctg

SEQ ID NO: 130123 - DNA, 74 bp, Homo sapiens
attcctgccgctccttgtccagacccaccccacgtattcctctagattccattccctgggctggaggtgaatca

SEQ ID NO: 130124 - DNA, 71 bp, Homo sapiens
agacccaccccacgtattcctctagattccattccctgggctggaggtgaatcaggtcatcccggagggga

SEQ ID NO: 130125 - DNA, 73 bp, Homo sapiens
tattcctctagattccattccctgggctggaggtgaatcaggtcatcccggaggggactgtcccccaatggaa

SEQ ID NO: 130126 - DNA, 74 bp, Homo sapiens
tagattccattccctgggctggaggtgaatcaggtcatcccggaggggactgtcccccaatggaagcactgaat

SEQ ID NO: 130127 - DNA, 72 bp, Homo sapiens
aggtgaatcaggtcatcccggaggggactgtcccccaatggaagcactgaattgaccgtggacaactaaaga

SEQ ID NO: 130128 - DNA, 73 bp, Homo sapiens
atcaggtcatcccggaggggactgtcccccaatggaagcactgaattgaccgtggacaactaaagatcgagga

SEQ ID NO: 130129 - DNA, 74 bp, Homo sapiens
aatggaagcactgaattgaccgtggacaactaaagatcgaggaggaaggaaagagagactcagggatctgggaa

SEQ ID NO: 130130 - DNA, 74 bp, Homo sapiens
aattgaccgtggacaactaaagatcgaggaggaaggaaagagagactcagggatctgggaagcctgtcaacaga

SEQ ID NO: 130131 - DNA, 77 bp, Homo sapiens
acaactaaagatcgaggaggaaggaaagagagactcagggatctgggaagcctgtcaacagagcaccccatgcagaa

SEQ ID NO: 130132 - DNA, 77 bp, Homo sapiens
taaagatcgaggaggaaggaaagagagactcagggatctgggaagcctgtcaacagagcaccccatgcagaaagggc

SEQ ID NO: 130133 - DNA, 78 bp, Homo sapiens
aaggaaagagagactcagggatctgggaagcctgtcaacagagcaccccatgcagaaagggctgcaggctgtctttgg

SEQ ID NO: 130134 - DNA, 78 bp, Homo sapiens
aagagagactcagggatctgggaagcctgtcaacagagcaccccatgcagaaagggctgcaggctgtctttggtttgg

SEQ ID NO: 130135 - DNA, 76 bp, Homo sapiens
atctgggaagcctgtcaacagagcaccccatgcagaaagggctgcaggctgtctttggtttgggaaccagggaaga

SEQ ID NO: 130136 - DNA, 73 bp, Homo sapiens
cctgtcaacagagcaccccatgcagaaagggctgcaggctgtctttggtttgggaaccagggaagaagggatt

SEQ ID NO: 130137 - DNA, 71 bp, Homo sapiens
aacagagcaccccatgcagaaagggctgcaggctgtctttggtttgggaaccagggaagaagggatttggg

SEQ ID NO: 130138 - DNA, 69 bp, Homo sapiens
tgtctttggtttgggaaccagggaagaagggatttggggaaagaatcaccctctccttgcctcagtaga

SEQ ID NO: 130139 - DNA, 73 bp, Homo sapiens
agggaagaagggatttggggaaagaatcaccctctccttgcctcagtagactctgtgacttcctgaggacaca

SEQ ID NO: 130140 - DNA, 79 bp, Homo sapiens
atttggggaaagaatcaccctctccttgcctcagtagactctgtgacttcctgaggacacagagcagagctgcgaggag

SEQ ID NO: 130141 - DNA, 80 bp, Homo sapiens
aaagaatcaccctctccttgcctcagtagactctgtgacttcctgaggacacagagcagagctgcgaggagggcgggcag

SEQ ID NO: 130142 - DNA, 80 bp, Homo sapiens
accctctccttgcctcagtagactctgtgacttcctgaggacacagagcagagctgcgaggagggcgggcaggtctcaaa

SEQ ID NO: 130143 - DNA, 84 bp, Homo sapiens
tcagtagactctgtgacttcctgaggacacagagcagagctgcgaggagggcgggcaggtctcaaacttgctggccgcactcca

SEQ ID NO: 130144 - DNA, 81 bp, Homo sapiens
actctgtgacttcctgaggacacagagcagagctgcgaggagggcgggcaggtctcaaacttgctggccgcactccactct

SEQ ID NO: 130145 - DNA, 82 bp, Homo sapiens
tcctgaggacacagagcagagctgcgaggagggcgggcaggtctcaaacttgctggccgcactccactcttggtgtgtgtta

SEQ ID NO: 130146 - DNA, 79 bp, Homo sapiens
agagcagagctgcgaggagggcgggcaggtctcaaacttgctggccgcactccactcttggtgtgtgttaccctgactc

SEQ ID NO: 130147 - DNA, 79 bp, Homo sapiens
agagctgcgaggagggcgggcaggtctcaaacttgctggccgcactccactcttggtgtgtgttaccctgactctgaca

SEQ ID NO: 130148 - DNA, 78 bp, Homo sapiens
gcgggcaggtctcaaacttgctggccgcactccactcttggtgtgtgttaccctgactctgacagccaaggaaagaca

SEQ ID NO: 130149 - DNA, 75 bp, Homo sapiens
aggtctcaaacttgctggccgcactccactcttggtgtgtgttaccctgactctgacagccaaggaaagacaggg

SEQ ID NO: 130150 - DNA, 74 bp, Homo sapiens
actccactcttggtgtgtgttaccctgactctgacagccaaggaaagacaggggagccggccttttccatgctc

SEQ ID NO: 130151 - DNA, 70 bp, Homo sapiens
tgttaccctgactctgacagccaaggaaagacaggggagccggccttttccatgctccccttgggccccc

SEQ ID NO: 130152 - DNA, 69 bp, Homo sapiens
tgacagccaaggaaagacaggggagccggccttttccatgctccccttgggccccccaatctggttttg

SEQ ID NO: 130153 - DNA, 66 bp, Homo sapiens
aaggaaagacaggggagccggccttttccatgctccccttgggccccccaatctggttttgtctcc

SEQ ID NO: 130154 - DNA, 68 bp, Homo sapiens
ggagccggccttttccatgctccccttgggccccccaatctggttttgtctcccctacaggactggaa

SEQ ID NO: 130155 - DNA, 68 bp, Homo sapiens
ccttttccatgctccccttgggccccccaatctggttttgtctcccctacaggactggaagagaggga

SEQ ID NO: 130156 - DNA, 70 bp, Homo sapiens
tccccttgggccccccaatctggttttgtctcccctacaggactggaagagagggagaagtcactcctca

SEQ ID NO: 130157 - DNA, 71 bp, Homo sapiens
ccccccaatctggttttgtctcccctacaggactggaagagagggagaagtcactcctcactggcagggaa

SEQ ID NO: 130158 - DNA, 72 bp, Homo sapiens
aatctggttttgtctcccctacaggactggaagagagggagaagtcactcctcactggcagggaagccacgg

SEQ ID NO: 130159 - DNA, 73 bp, Homo sapiens
ttgtctcccctacaggactggaagagagggagaagtcactcctcactggcagggaagccacgggcccccagga

SEQ ID NO: 130160 - DNA, 72 bp, Homo sapiens
gactggaagagagggagaagtcactcctcactggcagggaagccacgggcccccaggacaccttgtacaaac

SEQ ID NO: 130161 - DNA, 70 bp, Homo sapiens
agagggagaagtcactcctcactggcagggaagccacgggcccccaggacaccttgtacaaaccagaaaa

SEQ ID NO: 130162 - DNA, 72 bp, Homo sapiens
agaagtcactcctcactggcagggaagccacgggcccccaggacaccttgtacaaaccagaaaacaagtgca

SEQ ID NO: 130163 - DNA, 67 bp, Homo sapiens
agggaagccacgggcccccaggacaccttgtacaaaccagaaaacaagtgcaccttgccaggggtgg

SEQ ID NO: 130164 - DNA, 70 bp, Homo sapiens
ccccaggacaccttgtacaaaccagaaaacaagtgcaccttgccaggggtgggctggggcaaagcctgcc

SEQ ID NO: 130165 - DNA, 75 bp, Homo sapiens
acaccttgtacaaaccagaaaacaagtgcaccttgccaggggtgggctggggcaaagcctgcccatcacacagca

SEQ ID NO: 130166 - DNA, 77 bp, Homo sapiens
aaaccagaaaacaagtgcaccttgccaggggtgggctggggcaaagcctgcccatcacacagcacagcctgacctca

SEQ ID NO: 130167 - DNA, 79 bp, Homo sapiens
aaaacaagtgcaccttgccaggggtgggctggggcaaagcctgcccatcacacagcacagcctgacctcagagaggcac

SEQ ID NO: 130168 - DNA, 81 bp, Homo sapiens
ttgccaggggtgggctggggcaaagcctgcccatcacacagcacagcctgacctcagagaggcacggcagaggtccctcca

SEQ ID NO: 130169 - DNA, 82 bp, Homo sapiens
gtgggctggggcaaagcctgcccatcacacagcacagcctgacctcagagaggcacggcagaggtccctccacaggaataca

SEQ ID NO: 130170 - DNA, 83 bp, Homo sapiens
gggcaaagcctgcccatcacacagcacagcctgacctcagagaggcacggcagaggtccctccacaggaatacagctcagccc

SEQ ID NO: 130171 - DNA, 85 bp, Homo sapiens
ccatcacacagcacagcctgacctcagagaggcacggcagaggtccctccacaggaatacagctcagccccagctgtggcattta

SEQ ID NO: 130172 - DNA, 79 bp, Homo sapiens
ctgacctcagagaggcacggcagaggtccctccacaggaatacagctcagccccagctgtggcatttaggttggatggg

SEQ ID NO: 130173 - DNA, 76 bp, Homo sapiens
agaggcacggcagaggtccctccacaggaatacagctcagccccagctgtggcatttaggttggatggggagggga

SEQ ID NO: 130174 - DNA, 77 bp, Homo sapiens
agaggtccctccacaggaatacagctcagccccagctgtggcatttaggttggatggggaggggatgcagaatggaa

SEQ ID NO: 130175 - DNA, 75 bp, Homo sapiens
atacagctcagccccagctgtggcatttaggttggatggggaggggatgcagaatggaaggaggaaggggcttag

SEQ ID NO: 130176 - DNA, 72 bp, Homo sapiens
atggggaggggatgcagaatggaaggaggaaggggcttaggagtcaagggctgccctgagaacgtggtggga

SEQ ID NO: 130177 - DNA, 73 bp, Homo sapiens
ggatgcagaatggaaggaggaaggggcttaggagtcaagggctgccctgagaacgtggtgggacactccctcc

SEQ ID NO: 130178 - DNA, 70 bp, Homo sapiens
agaatggaaggaggaaggggcttaggagtcaagggctgccctgagaacgtggtgggacactccctccctc

SEQ ID NO: 130179 - DNA, 71 bp, Homo sapiens
aggaaggggcttaggagtcaagggctgccctgagaacgtggtgggacactccctccctccctgactgccca

SEQ ID NO: 130180 - DNA, 72 bp, Homo sapiens
ttaggagtcaagggctgccctgagaacgtggtgggacactccctccctccctgactgcccacacctgggttg

SEQ ID NO: 130181 - DNA, 72 bp, Homo sapiens
aagggctgccctgagaacgtggtgggacactccctccctccctgactgcccacacctgggttggctgagttg

SEQ ID NO: 130182 - DNA, 71 bp, Homo sapiens
ctgagaacgtggtgggacactccctccctccctgactgcccacacctgggttggctgagttggaggggagg

SEQ ID NO: 130183 - DNA, 71 bp, Homo sapiens
gtgggacactccctccctccctgactgcccacacctgggttggctgagttggaggggagggcagaaaaaga

SEQ ID NO: 130184 - DNA, 70 bp, Homo sapiens
tccctccctgactgcccacacctgggttggctgagttggaggggagggcagaaaaagaggggaattggaa

SEQ ID NO: 130185 - DNA, 69 bp, Homo sapiens
ctgcccacacctgggttggctgagttggaggggagggcagaaaaagaggggaattggaagggctgaaaa

SEQ ID NO: 130186 - DNA, 71 bp, Homo sapiens
tgagttggaggggagggcagaaaaagaggggaattggaagggctgaaaagtcacctgagtcagaaagaaca

SEQ ID NO: 130187 - DNA, 67 bp, Homo sapiens
aaaaagaggggaattggaagggctgaaaagtcacctgagtcagaaagaacaagaacccctcacggga

SEQ ID NO: 130188 - DNA, 69 bp, Homo sapiens
gggaattggaagggctgaaaagtcacctgagtcagaaagaacaagaacccctcacgggaggaaggacag

SEQ ID NO: 130189 - DNA, 69 bp, Homo sapiens
aagggctgaaaagtcacctgagtcagaaagaacaagaacccctcacgggaggaaggacagggtccagac

SEQ ID NO: 130190 - DNA, 69 bp, Homo sapiens
aaaagtcacctgagtcagaaagaacaagaacccctcacgggaggaaggacagggtccagacgtctcaaa

SEQ ID NO: 130191 - DNA, 76 bp, Homo sapiens
cagaaagaacaagaacccctcacgggaggaaggacagggtccagacgtctcaaagcctgtgctgatacatcacaca

SEQ ID NO: 130192 - DNA, 74 bp, Homo sapiens
aacaagaacccctcacgggaggaaggacagggtccagacgtctcaaagcctgtgctgatacatcacacaactta

SEQ ID NO: 130193 - DNA, 82 bp, Homo sapiens
agggtccagacgtctcaaagcctgtgctgatacatcacacaacttagcagacgcctgcacacccgcagcctggcccggtgca

SEQ ID NO: 130194 - DNA, 84 bp, Homo sapiens
tcaaagcctgtgctgatacatcacacaacttagcagacgcctgcacacccgcagcctggcccggtgcagccgagaaaccacatc

SEQ ID NO: 130195 - DNA, 86 bp, Homo sapiens
tgtgctgatacatcacacaacttagcagacgcctgcacacccgcagcctggcccggtgcagccgagaaaccacatctgtatgcctg

SEQ ID NO: 130196 - DNA, 85 bp, Homo sapiens
tacatcacacaacttagcagacgcctgcacacccgcagcctggcccggtgcagccgagaaaccacatctgtatgcctggagcatg

SEQ ID NO: 130197 - DNA, 81 bp, Homo sapiens
aacttagcagacgcctgcacacccgcagcctggcccggtgcagccgagaaaccacatctgtatgcctggagcatggggtgc

SEQ ID NO: 130198 - DNA, 85 bp, Homo sapiens
tgcacacccgcagcctggcccggtgcagccgagaaaccacatctgtatgcctggagcatggggtgccatcgcacctgtgccagac

SEQ ID NO: 130199 - DNA, 81 bp, Homo sapiens
acccgcagcctggcccggtgcagccgagaaaccacatctgtatgcctggagcatggggtgccatcgcacctgtgccagacc

SEQ ID NO: 130200 - DNA, 82 bp, Homo sapiens
cggtgcagccgagaaaccacatctgtatgcctggagcatggggtgccatcgcacctgtgccagacccctgccctccactgaa

SEQ ID NO: 130201 - DNA, 81 bp, Homo sapiens
cgagaaaccacatctgtatgcctggagcatggggtgccatcgcacctgtgccagacccctgccctccactgaaagccgcaa

SEQ ID NO: 130202 - DNA, 83 bp, Homo sapiens
ctggagcatggggtgccatcgcacctgtgccagacccctgccctccactgaaagccgcaagcaggtagcaaggtgcatgcaag

SEQ ID NO: 130203 - DNA, 80 bp, Homo sapiens
atggggtgccatcgcacctgtgccagacccctgccctccactgaaagccgcaagcaggtagcaaggtgcatgcaaggtgg

SEQ ID NO: 130204 - DNA, 81 bp, Homo sapiens
atcgcacctgtgccagacccctgccctccactgaaagccgcaagcaggtagcaaggtgcatgcaaggtggggtgagtgcag

SEQ ID NO: 130205 - DNA, 81 bp, Homo sapiens
tgtgccagacccctgccctccactgaaagccgcaagcaggtagcaaggtgcatgcaaggtggggtgagtgcaggtgtggtg

SEQ ID NO: 130206 - DNA, 77 bp, Homo sapiens
ccctccactgaaagccgcaagcaggtagcaaggtgcatgcaaggtggggtgagtgcaggtgtggtggtgaggtcttt

SEQ ID NO: 130207 - DNA, 79 bp, Homo sapiens
aagcaggtagcaaggtgcatgcaaggtggggtgagtgcaggtgtggtggtgaggtcttttgtgctgtgaatcaccccac

SEQ ID NO: 130208 - DNA, 77 bp, Homo sapiens
aaggtgcatgcaaggtggggtgagtgcaggtgtggtggtgaggtcttttgtgctgtgaatcaccccacgttcgcctg

SEQ ID NO: 130209 - DNA, 76 bp, Homo sapiens
atgcaaggtggggtgagtgcaggtgtggtggtgaggtcttttgtgctgtgaatcaccccacgttcgcctggccagg

SEQ ID NO: 130210 - DNA, 75 bp, Homo sapiens
tgagtgcaggtgtggtggtgaggtcttttgtgctgtgaatcaccccacgttcgcctggccagggtttctaaccca

SEQ ID NO: 130211 - DNA, 73 bp, Homo sapiens
tgtggtggtgaggtcttttgtgctgtgaatcaccccacgttcgcctggccagggtttctaacccaggttcgca

SEQ ID NO: 130212 - DNA, 73 bp, Homo sapiens
aatcaccccacgttcgcctggccagggtttctaacccaggttcgcaaggcccatgtggacacgtctgcagcca

SEQ ID NO: 130213 - DNA, 76 bp, Homo sapiens
gggtttctaacccaggttcgcaaggcccatgtggacacgtctgcagccacacatgctttcacggggcacatgggaa

SEQ ID NO: 130214 - DNA, 78 bp, Homo sapiens
tctaacccaggttcgcaaggcccatgtggacacgtctgcagccacacatgctttcacggggcacatgggaacgtacac

SEQ ID NO: 130215 - DNA, 80 bp, Homo sapiens
atgtggacacgtctgcagccacacatgctttcacggggcacatgggaacgtacacgcgaagggtaatgcgtgcacacctg

SEQ ID NO: 130216 - DNA, 81 bp, Homo sapiens
acgtctgcagccacacatgctttcacggggcacatgggaacgtacacgcgaagggtaatgcgtgcacacctgtgcagccag

SEQ ID NO: 130217 - DNA, 81 bp, Homo sapiens
acatgctttcacggggcacatgggaacgtacacgcgaagggtaatgcgtgcacacctgtgcagccaggtgtgcatgagcgt

SEQ ID NO: 130218 - DNA, 82 bp, Homo sapiens
tttcacggggcacatgggaacgtacacgcgaagggtaatgcgtgcacacctgtgcagccaggtgtgcatgagcgtttctgca

SEQ ID NO: 130219 - DNA, 84 bp, Homo sapiens
atgggaacgtacacgcgaagggtaatgcgtgcacacctgtgcagccaggtgtgcatgagcgtttctgcacaggccaggtgatga

SEQ ID NO: 130220 - DNA, 83 bp, Homo sapiens
acgtacacgcgaagggtaatgcgtgcacacctgtgcagccaggtgtgcatgagcgtttctgcacaggccaggtgatgagggga

SEQ ID NO: 130221 - DNA, 89 bp, Homo sapiens
gtgcacacctgtgcagccaggtgtgcatgagcgtttctgcacaggccaggtgatgaggggagggcagagctctcagcagaagggtctca

SEQ ID NO: 130222 - DNA, 86 bp, Homo sapiens
cagccaggtgtgcatgagcgtttctgcacaggccaggtgatgaggggagggcagagctctcagcagaagggtctcagcggcgcctc

SEQ ID NO: 130223 - DNA, 78 bp, Homo sapiens
acaggccaggtgatgaggggagggcagagctctcagcagaagggtctcagcggcgcctcctccctgggaaggatagaa

SEQ ID NO: 130224 - DNA, 77 bp, Homo sapiens
gcagagctctcagcagaagggtctcagcggcgcctcctccctgggaaggatagaagcctctctgaaggggaagggac

SEQ ID NO: 130225 - DNA, 75 bp, Homo sapiens
tctcagcagaagggtctcagcggcgcctcctccctgggaaggatagaagcctctctgaaggggaagggactcgcc

SEQ ID NO: 130226 - DNA, 71 bp, Homo sapiens
gtctcagcggcgcctcctccctgggaaggatagaagcctctctgaaggggaagggactcgccccaagtaac

SEQ ID NO: 130227 - DNA, 68 bp, Homo sapiens
cgcctcctccctgggaaggatagaagcctctctgaaggggaagggactcgccccaagtaacctcaacc

SEQ ID NO: 130228 - DNA, 68 bp, Homo sapiens
tccctgggaaggatagaagcctctctgaaggggaagggactcgccccaagtaacctcaacccttcctc

SEQ ID NO: 130229 - DNA, 67 bp, Homo sapiens
aaggatagaagcctctctgaaggggaagggactcgccccaagtaacctcaacccttcctcctgcccc

SEQ ID NO: 130230 - DNA, 64 bp, Homo sapiens
aagggactcgccccaagtaacctcaacccttcctcctgccccttcctcccgccccactcacttt

SEQ ID NO: 130231 - DNA, 64 bp, Homo sapiens
ccccaagtaacctcaacccttcctcctgccccttcctcccgccccactcacttttggtcaaaac

SEQ ID NO: 130232 - DNA, 72 bp, Homo sapiens
gccccactcacttttggtcaaaaccagcctccacagcccaccgcaaagccagagaggagagttcaaggtaaa

SEQ ID NO: 130233 - DNA, 70 bp, Homo sapiens
cttttggtcaaaaccagcctccacagcccaccgcaaagccagagaggagagttcaaggtaaagacccaat

SEQ ID NO: 130234 - DNA, 71 bp, Homo sapiens
aaaaccagcctccacagcccaccgcaaagccagagaggagagttcaaggtaaagacccaattgaaacaaga

SEQ ID NO: 130235 - DNA, 71 bp, Homo sapiens
agcctccacagcccaccgcaaagccagagaggagagttcaaggtaaagacccaattgaaacaagagaaaag

SEQ ID NO: 130236 - DNA, 67 bp, Homo sapiens
accgcaaagccagagaggagagttcaaggtaaagacccaattgaaacaagagaaaaggggaaaacca

SEQ ID NO: 130237 - DNA, 67 bp, Homo sapiens
aagccagagaggagagttcaaggtaaagacccaattgaaacaagagaaaaggggaaaaccagccaac

SEQ ID NO: 130238 - DNA, 66 bp, Homo sapiens
ggagagttcaaggtaaagacccaattgaaacaagagaaaaggggaaaaccagccaaccaggctggg

SEQ ID NO: 130239 - DNA, 67 bp, Homo sapiens
gtaaagacccaattgaaacaagagaaaaggggaaaaccagccaaccaggctggggtggccactcaag

SEQ ID NO: 130240 - DNA, 66 bp, Homo sapiens
gaaaaggggaaaaccagccaaccaggctggggtggccactcaagggagagggtttgggccttccaa

SEQ ID NO: 130241 - DNA, 68 bp, Homo sapiens
aaaaccagccaaccaggctggggtggccactcaagggagagggtttgggccttccaatgctcctttaa

SEQ ID NO: 130242 - DNA, 68 bp, Homo sapiens
aaccaggctggggtggccactcaagggagagggtttgggccttccaatgctcctttaactcccagaac

SEQ ID NO: 130243 - DNA, 74 bp, Homo sapiens
ggtggccactcaagggagagggtttgggccttccaatgctcctttaactcccagaaccagctgctgcgtcacta

SEQ ID NO: 130244 - DNA, 76 bp, Homo sapiens
tcaagggagagggtttgggccttccaatgctcctttaactcccagaaccagctgctgcgtcactagaggagaatga

SEQ ID NO: 130245 - DNA, 75 bp, Homo sapiens
agagggtttgggccttccaatgctcctttaactcccagaaccagctgctgcgtcactagaggagaatgataatgg

SEQ ID NO: 130246 - DNA, 77 bp, Homo sapiens
ccttccaatgctcctttaactcccagaaccagctgctgcgtcactagaggagaatgataatggtggtgtcccgggca

SEQ ID NO: 130247 - DNA, 78 bp, Homo sapiens
tcctttaactcccagaaccagctgctgcgtcactagaggagaatgataatggtggtgtcccgggcaggtgatcctgtc

SEQ ID NO: 130248 - DNA, 78 bp, Homo sapiens
accagctgctgcgtcactagaggagaatgataatggtggtgtcccgggcaggtgatcctgtccccatcctgccctggg

SEQ ID NO: 130249 - DNA, 72 bp, Homo sapiens
actagaggagaatgataatggtggtgtcccgggcaggtgatcctgtccccatcctgccctgggggtggtacc

SEQ ID NO: 130250 - DNA, 71 bp, Homo sapiens
agaatgataatggtggtgtcccgggcaggtgatcctgtccccatcctgccctgggggtggtaccccaactc

SEQ ID NO: 130251 - DNA, 72 bp, Homo sapiens
taatggtggtgtcccgggcaggtgatcctgtccccatcctgccctgggggtggtaccccaactcccagagca

SEQ ID NO: 130252 - DNA, 73 bp, Homo sapiens
tcccgggcaggtgatcctgtccccatcctgccctgggggtggtaccccaactcccagagcaactctctccatc

SEQ ID NO: 130253 - DNA, 74 bp, Homo sapiens
ggtgatcctgtccccatcctgccctgggggtggtaccccaactcccagagcaactctctccatccccagcctga

SEQ ID NO: 130254 - DNA, 73 bp, Homo sapiens
tggtaccccaactcccagagcaactctctccatccccagcctgaggcctcgtggtaaacgtccctcagagaaa

SEQ ID NO: 130255 - DNA, 73 bp, Homo sapiens
actcccagagcaactctctccatccccagcctgaggcctcgtggtaaacgtccctcagagaaagggcaggtgg

SEQ ID NO: 130256 - DNA, 72 bp, Homo sapiens
aactctctccatccccagcctgaggcctcgtggtaaacgtccctcagagaaagggcaggtggtgggagagta

SEQ ID NO: 130257 - DNA, 72 bp, Homo sapiens
ccagcctgaggcctcgtggtaaacgtccctcagagaaagggcaggtggtgggagagtagtgggatcttctcc

SEQ ID NO: 130258 - DNA, 71 bp, Homo sapiens
taaacgtccctcagagaaagggcaggtggtgggagagtagtgggatcttctccccttttgctgctcggtat

SEQ ID NO: 130259 - DNA, 70 bp, Homo sapiens
tccctcagagaaagggcaggtggtgggagagtagtgggatcttctccccttttgctgctcggtatttttt

SEQ ID NO: 130260 - DNA, 67 bp, Homo sapiens
aaagggcaggtggtgggagagtagtgggatcttctccccttttgctgctcggtatttttttaaataa

SEQ ID NO: 130261 - DNA, 63 bp, Homo sapiens
ttttttaaataaaataattaccccgcccccaacccatccctatctctggaagtcccaccccaa

SEQ ID NO: 130262 - DNA, 64 bp, Homo sapiens
aataaaataattaccccgcccccaacccatccctatctctggaagtcccaccccaagcccaaaa

SEQ ID NO: 130263 - DNA, 64 bp, Homo sapiens
aattaccccgcccccaacccatccctatctctggaagtcccaccccaagcccaaaagaaaacag

SEQ ID NO: 130264 - DNA, 65 bp, Homo sapiens
aacccatccctatctctggaagtcccaccccaagcccaaaagaaaacagtttaagaagagtaaaa

SEQ ID NO: 130265 - DNA, 68 bp, Homo sapiens
tatctctggaagtcccaccccaagcccaaaagaaaacagtttaagaagagtaaaaacggtgattcaga

SEQ ID NO: 130266 - DNA, 64 bp, Homo sapiens
aagtcccaccccaagcccaaaagaaaacagtttaagaagagtaaaaacggtgattcagaacttc

SEQ ID NO: 130267 - DNA, 67 bp, Homo sapiens
caagcccaaaagaaaacagtttaagaagagtaaaaacggtgattcagaacttcccactgcggtctcg

SEQ ID NO: 130268 - DNA, 66 bp, Homo sapiens
aaaagaaaacagtttaagaagagtaaaaacggtgattcagaacttcccactgcggtctcggaagaa

SEQ ID NO: 130269 - DNA, 71 bp, Homo sapiens
acagtttaagaagagtaaaaacggtgattcagaacttcccactgcggtctcggaagaagccctcagctgcc

SEQ ID NO: 130270 - DNA, 72 bp, Homo sapiens
aagagtaaaaacggtgattcagaacttcccactgcggtctcggaagaagccctcagctgcctgggcctcgcg

SEQ ID NO: 130271 - DNA, 77 bp, Homo sapiens
gtgattcagaacttcccactgcggtctcggaagaagccctcagctgcctgggcctcgcggaaggtgacggtgatgga

SEQ ID NO: 130272 - DNA, 74 bp, Homo sapiens
agaacttcccactgcggtctcggaagaagccctcagctgcctgggcctcgcggaaggtgacggtgatggagttg

SEQ ID NO: 130273 - DNA, 76 bp, Homo sapiens
actgcggtctcggaagaagccctcagctgcctgggcctcgcggaaggtgacggtgatggagttggcggtgatgtcg

SEQ ID NO: 130274 - DNA, 77 bp, Homo sapiens
agaagccctcagctgcctgggcctcgcggaaggtgacggtgatggagttggcggtgatgtcggtcacggtcacctca

SEQ ID NO: 130275 - DNA, 75 bp, Homo sapiens
agctgcctgggcctcgcggaaggtgacggtgatggagttggcggtgatgtcggtcacggtcacctcacttgaggg

SEQ ID NO: 130276 - DNA, 75 bp, Homo sapiens
aaggtgacggtgatggagttggcggtgatgtcggtcacggtcacctcacttgaggggagcgcaggtgtccaggga

SEQ ID NO: 130277 - DNA, 74 bp, Homo sapiens
cggtgatggagttggcggtgatgtcggtcacggtcacctcacttgaggggagcgcaggtgtccagggagggggc

SEQ ID NO: 130278 - DNA, 73 bp, Homo sapiens
ttggcggtgatgtcggtcacggtcacctcacttgaggggagcgcaggtgtccagggagggggcccctcggcca

SEQ ID NO: 130279 - DNA, 72 bp, Homo sapiens
atgtcggtcacggtcacctcacttgaggggagcgcaggtgtccagggagggggcccctcggccaggtcggca

SEQ ID NO: 130280 - DNA, 79 bp, Homo sapiens
acttgaggggagcgcaggtgtccagggagggggcccctcggccaggtcggcatctgctgcagcgtcagacacacagatg

SEQ ID NO: 130281 - DNA, 79 bp, Homo sapiens
aggtgtccagggagggggcccctcggccaggtcggcatctgctgcagcgtcagacacacagatgggggcagcgttgaca

SEQ ID NO: 130282 - DNA, 74 bp, Homo sapiens
atagggccctttccagctctgagggtctctgggctggggccgccttaccctcctcttcagggggctgcgcagca

SEQ ID NO: 130283 - DNA, 76 bp, Homo sapiens
tttccagctctgagggtctctgggctggggccgccttaccctcctcttcagggggctgcgcagcaggctcccactc

SEQ ID NO: 130284 - DNA, 77 bp, Homo sapiens
tctgagggtctctgggctggggccgccttaccctcctcttcagggggctgcgcagcaggctcccactcgccagccgc

SEQ ID NO: 130285 - DNA, 75 bp, Homo sapiens
ccttaccctcctcttcagggggctgcgcagcaggctcccactcgccagccgcctgcaggacgtctggggccggtg

SEQ ID NO: 130286 - DNA, 80 bp, Homo sapiens
tcctcttcagggggctgcgcagcaggctcccactcgccagccgcctgcaggacgtctggggccggtggctcctgcaggaa

SEQ ID NO: 130287 - DNA, 81 bp, Homo sapiens
ggctgcgcagcaggctcccactcgccagccgcctgcaggacgtctggggccggtggctcctgcaggaagagctcccgtcga

SEQ ID NO: 130288 - DNA, 79 bp, Homo sapiens
caggctcccactcgccagccgcctgcaggacgtctggggccggtggctcctgcaggaagagctcccgtcgatggctgtg

SEQ ID NO: 130289 - DNA, 80 bp, Homo sapiens
tcccactcgccagccgcctgcaggacgtctggggccggtggctcctgcaggaagagctcccgtcgatggctgtggctctc

SEQ ID NO: 130290 - DNA, 77 bp, Homo sapiens
agccgcctgcaggacgtctggggccggtggctcctgcaggaagagctcccgtcgatggctgtggctctccaggttgg

SEQ ID NO: 130291 - DNA, 74 bp, Homo sapiens
aggacgtctggggccggtggctcctgcaggaagagctcccgtcgatggctgtggctctccaggttgggcccgcg

SEQ ID NO: 130292 - DNA, 73 bp, Homo sapiens
cggtggctcctgcaggaagagctcccgtcgatggctgtggctctccaggttgggcccgcggggcgggaacttc

SEQ ID NO: 130293 - DNA, 76 bp, Homo sapiens
tgcaggaagagctcccgtcgatggctgtggctctccaggttgggcccgcggggcgggaacttcttgcgcgagagcc

SEQ ID NO: 130294 - DNA, 74 bp, Homo sapiens
aagagctcccgtcgatggctgtggctctccaggttgggcccgcggggcgggaacttcttgcgcgagagccgcag

SEQ ID NO: 130295 - DNA, 74 bp, Homo sapiens
cgtcgatggctgtggctctccaggttgggcccgcggggcgggaacttcttgcgcgagagccgcaggtacttgtg

SEQ ID NO: 130296 - DNA, 69 bp, Homo sapiens
ctctccaggttgggcccgcggggcgggaacttcttgcgcgagagccgcaggtacttgtgggcctttcgg

SEQ ID NO: 130297 - DNA, 67 bp, Homo sapiens
aggttgggcccgcggggcgggaacttcttgcgcgagagccgcaggtacttgtgggcctttcggggct

SEQ ID NO: 130298 - DNA, 71 bp, Homo sapiens
gggcgggaacttcttgcgcgagagccgcaggtacttgtgggcctttcggggcttgcggagcgggaagggca

SEQ ID NO: 130299 - DNA, 71 bp, Homo sapiens
ggaacttcttgcgcgagagccgcaggtacttgtgggcctttcggggcttgcggagcgggaagggcagggtg

SEQ ID NO: 130300 - DNA, 69 bp, Homo sapiens
cgagagccgcaggtacttgtgggcctttcggggcttgcggagcgggaagggcagggtgggcaccaaggg

SEQ ID NO: 130301 - DNA, 68 bp, Homo sapiens
gtacttgtgggcctttcggggcttgcggagcgggaagggcagggtgggcaccaaggggcccttgtcca

SEQ ID NO: 130302 - DNA, 71 bp, Homo sapiens
tgtgggcctttcggggcttgcggagcgggaagggcagggtgggcaccaaggggcccttgtccaccagctca

SEQ ID NO: 130303 - DNA, 72 bp, Homo sapiens
gcttgcggagcgggaagggcagggtgggcaccaaggggcccttgtccaccagctcaggtgcccccgccttga

SEQ ID NO: 130304 - DNA, 69 bp, Homo sapiens
agcgggaagggcagggtgggcaccaaggggcccttgtccaccagctcaggtgcccccgccttgaccacc

SEQ ID NO: 130305 - DNA, 69 bp, Homo sapiens
agggtgggcaccaaggggcccttgtccaccagctcaggtgcccccgccttgaccaccccctcagggctc

SEQ ID NO: 130306 - DNA, 73 bp, Homo sapiens
cttgtccaccagctcaggtgcccccgccttgaccaccccctcagggctcccgctgccgagtgggcacgtcagg

SEQ ID NO: 130307 - DNA, 74 bp, Homo sapiens
accagctcaggtgcccccgccttgaccaccccctcagggctcccgctgccgagtgggcacgtcagggagaagca

SEQ ID NO: 130308 - DNA, 74 bp, Homo sapiens
tgcccccgccttgaccaccccctcagggctcccgctgccgagtgggcacgtcagggagaagcagagcttctcct

SEQ ID NO: 130309 - DNA, 74 bp, Homo sapiens
ccttgaccaccccctcagggctcccgctgccgagtgggcacgtcagggagaagcagagcttctccttgcccttg

SEQ ID NO: 130310 - DNA, 79 bp, Homo sapiens
tcagggctcccgctgccgagtgggcacgtcagggagaagcagagcttctccttgcccttggccttgtgggagctccgca

SEQ ID NO: 130311 - DNA, 80 bp, Homo sapiens
cgctgccgagtgggcacgtcagggagaagcagagcttctccttgcccttggccttgtgggagctccgcaggtccatgctg

SEQ ID NO: 130312 - DNA, 79 bp, Homo sapiens
ccgagtgggcacgtcagggagaagcagagcttctccttgcccttggccttgtgggagctccgcaggtccatgctgtaca

SEQ ID NO: 130313 - DNA, 79 bp, Homo sapiens
acgtcagggagaagcagagcttctccttgcccttggccttgtgggagctccgcaggtccatgctgtacagccgctgcgg

SEQ ID NO: 130314 - DNA, 79 bp, Homo sapiens
cttgcccttggccttgtgggagctccgcaggtccatgctgtacagccgctgcgggggcaagccagggcagcgcgggtca

SEQ ID NO: 130315 - DNA, 78 bp, Homo sapiens
ccttggccttgtgggagctccgcaggtccatgctgtacagccgctgcgggggcaagccagggcagcgcgggtcagccc

SEQ ID NO: 130316 - DNA, 67 bp, Homo sapiens
accaaggggcagagggggacttggggttgggcagggggagaaaggaggcacaaaggcaggctggtta

SEQ ID NO: 130317 - DNA, 72 bp, Homo sapiens
gggacttggggttgggcagggggagaaaggaggcacaaaggcaggctggttacctgcagcagaagccgcttg

SEQ ID NO: 130318 - DNA, 72 bp, Homo sapiens
gttgggcagggggagaaaggaggcacaaaggcaggctggttacctgcagcagaagccgcttgggtttcggac

SEQ ID NO: 130319 - DNA, 73 bp, Homo sapiens
gggagaaaggaggcacaaaggcaggctggttacctgcagcagaagccgcttgggtttcggacctctcttccta

SEQ ID NO: 130320 - DNA, 72 bp, Homo sapiens
aaaggaggcacaaaggcaggctggttacctgcagcagaagccgcttgggtttcggacctctcttcctatacc

SEQ ID NO: 130321 - DNA, 72 bp, Homo sapiens
aaaggcaggctggttacctgcagcagaagccgcttgggtttcggacctctcttcctataccccgatgctcgg

SEQ ID NO: 130322 - DNA, 74 bp, Homo sapiens
tggttacctgcagcagaagccgcttgggtttcggacctctcttcctataccccgatgctcggtctctctcctcc

SEQ ID NO: 130323 - DNA, 71 bp, Homo sapiens
agaagccgcttgggtttcggacctctcttcctataccccgatgctcggtctctctcctccctggggtgtga

SEQ ID NO: 130324 - DNA, 71 bp, Homo sapiens
cttgggtttcggacctctcttcctataccccgatgctcggtctctctcctccctggggtgtgaagcaggtg

SEQ ID NO: 130325 - DNA, 74 bp, Homo sapiens
ttcggacctctcttcctataccccgatgctcggtctctctcctccctggggtgtgaagcaggtggcagaagaaa

SEQ ID NO: 130326 - DNA, 73 bp, Homo sapiens
tcttcctataccccgatgctcggtctctctcctccctggggtgtgaagcaggtggcagaagaaaaggaaacac

SEQ ID NO: 130327 - DNA, 69 bp, Homo sapiens
aggctcctgggaagcctctgagccggccctaagccccacccggcggtgccgaggacaccgtacttctcc

SEQ ID NO: 130328 - DNA, 72 bp, Homo sapiens
gaagcctctgagccggccctaagccccacccggcggtgccgaggacaccgtacttctcctcgtaggccatga

SEQ ID NO: 130329 - DNA, 71 bp, Homo sapiens
ctctgagccggccctaagccccacccggcggtgccgaggacaccgtacttctcctcgtaggccatgacgag

SEQ ID NO: 130330 - DNA, 69 bp, Homo sapiens
taagccccacccggcggtgccgaggacaccgtacttctcctcgtaggccatgacgaggcgggggtccaa

SEQ ID NO: 130331 - DNA, 71 bp, Homo sapiens
acccggcggtgccgaggacaccgtacttctcctcgtaggccatgacgaggcgggggtccaagatgtgctct

SEQ ID NO: 130332 - DNA, 73 bp, Homo sapiens
ccgaggacaccgtacttctcctcgtaggccatgacgaggcgggggtccaagatgtgctcttctggctcccacg

SEQ ID NO: 130333 - DNA, 74 bp, Homo sapiens
accgtacttctcctcgtaggccatgacgaggcgggggtccaagatgtgctcttctggctcccacgtgctgtacc

SEQ ID NO: 130334 - DNA, 77 bp, Homo sapiens
tcgtaggccatgacgaggcgggggtccaagatgtgctcttctggctcccacgtgctgtacctggggagaggaatgaa

SEQ ID NO: 130335 - DNA, 76 bp, Homo sapiens
atgacgaggcgggggtccaagatgtgctcttctggctcccacgtgctgtacctggggagaggaatgaaaggtcaga

SEQ ID NO: 130336 - DNA, 75 bp, Homo sapiens
gggtccaagatgtgctcttctggctcccacgtgctgtacctggggagaggaatgaaaggtcagagttggggctgg

SEQ ID NO: 130337 - DNA, 75 bp, Homo sapiens
aagatgtgctcttctggctcccacgtgctgtacctggggagaggaatgaaaggtcagagttggggctgggcgcgg

SEQ ID NO: 130338 - DNA, 74 bp, Homo sapiens
acacacacacatgaaggagcttactttgggggccatcctttccacttcaccagatactcgactttaccctgaga

SEQ ID NO: 130339 - DNA, 73 bp, Homo sapiens
acacatgaaggagcttactttgggggccatcctttccacttcaccagatactcgactttaccctgagaagaga

SEQ ID NO: 130340 - DNA, 74 bp, Homo sapiens
agcttactttgggggccatcctttccacttcaccagatactcgactttaccctgagaagagagagaagcagaca

SEQ ID NO: 130341 - DNA, 77 bp, Homo sapiens
ggccatcctttccacttcaccagatactcgactttaccctgagaagagagagaagcagacacagtgagtctcgtggt

SEQ ID NO: 130342 - DNA, 77 bp, Homo sapiens
tcctttccacttcaccagatactcgactttaccctgagaagagagagaagcagacacagtgagtctcgtggttgccc

SEQ ID NO: 130343 - DNA, 79 bp, Homo sapiens
ttcaccagatactcgactttaccctgagaagagagagaagcagacacagtgagtctcgtggttgcccctacagccactc

SEQ ID NO: 130344 - DNA, 69 bp, Homo sapiens
gagggaccccactggggtcctgggagccgcccccgggcagcctcaccttccgcacgcgcttcttccgga

SEQ ID NO: 130345 - DNA, 72 bp, Homo sapiens
actggggtcctgggagccgcccccgggcagcctcaccttccgcacgcgcttcttccggatgctctccacggc

SEQ ID NO: 130346 - DNA, 75 bp, Homo sapiens
ctgggagccgcccccgggcagcctcaccttccgcacgcgcttcttccggatgctctccacggcgaacacctgctc

SEQ ID NO: 130347 - DNA, 78 bp, Homo sapiens
ccccgggcagcctcaccttccgcacgcgcttcttccggatgctctccacggcgaacacctgctcgccgatggctgaca

SEQ ID NO: 130348 - DNA, 81 bp, Homo sapiens
agcctcaccttccgcacgcgcttcttccggatgctctccacggcgaacacctgctcgccgatggctgacagctccatgcgg

SEQ ID NO: 130349 - DNA, 80 bp, Homo sapiens
ccttccgcacgcgcttcttccggatgctctccacggcgaacacctgctcgccgatggctgacagctccatgcggggcggc

SEQ ID NO: 130350 - DNA, 79 bp, Homo sapiens
cgcttcttccggatgctctccacggcgaacacctgctcgccgatggctgacagctccatgcggggcggcgggcgagcgg

SEQ ID NO: 130351 - DNA, 77 bp, Homo sapiens
cggatgctctccacggcgaacacctgctcgccgatggctgacagctccatgcggggcggcgggcgagcgggcccggg

SEQ ID NO: 130352 - DNA, 73 bp, Homo sapiens
acggcgaacacctgctcgccgatggctgacagctccatgcggggcggcgggcgagcgggcccggggccgggcc

SEQ ID NO: 130353 - DNA, 71 bp, Homo sapiens
acctgctcgccgatggctgacagctccatgcggggcggcgggcgagcgggcccggggccgggccgggccgg

SEQ ID NO: 130354 - DNA, 71 bp, Homo sapiens
atggctgacagctccatgcggggcggcgggcgagcgggcccggggccgggccgggccgggggcggagctgc

SEQ ID NO: 130355 - DNA, 67 bp, Homo sapiens
acagctccatgcggggcggcgggcgagcgggcccggggccgggccgggccgggggcggagctgcggg

SEQ ID NO: 130356 - DNA, 66 bp, Homo sapiens
gggcggcgggcgagcgggcccggggccgggccgggccgggggcggagctgcggggccgcggctgcg

SEQ ID NO: 130357 - DNA, 69 bp, Homo sapiens
agcgggcccggggccgggccgggccgggggcggagctgcggggccgcggctgcggcgcgcgatgctggg

SEQ ID NO: 130358 - DNA, 71 bp, Homo sapiens
gggccgggccgggccgggggcggagctgcggggccgcggctgcggcgcgcgatgctggggctggcggggtc

SEQ ID NO: 130359 - DNA, 71 bp, Homo sapiens
gggccgggggcggagctgcggggccgcggctgcggcgcgcgatgctggggctggcggggtccccgtcaccc

SEQ ID NO: 130360 - DNA, 72 bp, Homo sapiens
gggcggagctgcggggccgcggctgcggcgcgcgatgctggggctggcggggtccccgtcaccctcgtccgg

SEQ ID NO: 130361 - DNA, 71 bp, Homo sapiens
tgtgctacccaccccttccatggactgaataagatggactaacaggcctgtgtttttgtgtttattttaaa

SEQ ID NO: 130362 - DNA, 68 bp, Homo sapiens
tacccaccccttccatggactgaataagatggactaacaggcctgtgtttttgtgtttattttaaaaa

SEQ ID NO: 130363 - DNA, 70 bp, Homo sapiens
ttccatggactgaataagatggactaacaggcctgtgtttttgtgtttattttaaaaagttcacacacct

SEQ ID NO: 130364 - DNA, 69 bp, Homo sapiens
tgaataagatggactaacaggcctgtgtttttgtgtttattttaaaaagttcacacaccttccccatct

SEQ ID NO: 130365 - DNA, 68 bp, Homo sapiens
actaacaggcctgtgtttttgtgtttattttaaaaagttcacacaccttccccatctttgtcccagca

SEQ ID NO: 130366 - DNA, 68 bp, Homo sapiens
tgtttttgtgtttattttaaaaagttcacacaccttccccatctttgtcccagcactggttttggtga

SEQ ID NO: 130367 - DNA, 67 bp, Homo sapiens
gtttattttaaaaagttcacacaccttccccatctttgtcccagcactggttttggtgactccaccc

SEQ ID NO: 130368 - DNA, 68 bp, Homo sapiens
tttaaaaagttcacacaccttccccatctttgtcccagcactggttttggtgactccacccctactcc

SEQ ID NO: 130369 - DNA, 72 bp, Homo sapiens
caccttccccatctttgtcccagcactggttttggtgactccacccctactcccctatgagtcagcccagaa

SEQ ID NO: 130370 - DNA, 75 bp, Homo sapiens
atctttgtcccagcactggttttggtgactccacccctactcccctatgagtcagcccagaatgtgaagccagtg

SEQ ID NO: 130371 - DNA, 76 bp, Homo sapiens
tgtcccagcactggttttggtgactccacccctactcccctatgagtcagcccagaatgtgaagccagtggcccca

SEQ ID NO: 130372 - DNA, 74 bp, Homo sapiens
ctggttttggtgactccacccctactcccctatgagtcagcccagaatgtgaagccagtggccccagggcagga

SEQ ID NO: 130373 - DNA, 74 bp, Homo sapiens
actccacccctactcccctatgagtcagcccagaatgtgaagccagtggccccagggcaggagatggccacccc

SEQ ID NO: 130374 - DNA, 76 bp, Homo sapiens
cctactcccctatgagtcagcccagaatgtgaagccagtggccccagggcaggagatggccacccctcagccccac

SEQ ID NO: 130375 - DNA, 79 bp, Homo sapiens
tatgagtcagcccagaatgtgaagccagtggccccagggcaggagatggccacccctcagccccaccgcagggtgaagc

SEQ ID NO: 130376 - DNA, 74 bp, Homo sapiens
aatgtgaagccagtggccccagggcaggagatggccacccctcagccccaccgcagggtgaagctgggcccgaa

SEQ ID NO: 130377 - DNA, 73 bp, Homo sapiens
aagccagtggccccagggcaggagatggccacccctcagccccaccgcagggtgaagctgggcccgaagctcc

SEQ ID NO: 130378 - DNA, 73 bp, Homo sapiens
agggcaggagatggccacccctcagccccaccgcagggtgaagctgggcccgaagctcctcctgtcctagggc

SEQ ID NO: 130379 - DNA, 73 bp, Homo sapiens
aggagatggccacccctcagccccaccgcagggtgaagctgggcccgaagctcctcctgtcctagggccacgc

SEQ ID NO: 130380 - DNA, 76 bp, Homo sapiens
ccctcagccccaccgcagggtgaagctgggcccgaagctcctcctgtcctagggccacgctggctgcagtgaggcg

SEQ ID NO: 130381 - DNA, 74 bp, Homo sapiens
accgcagggtgaagctgggcccgaagctcctcctgtcctagggccacgctggctgcagtgaggcggcggggacg

SEQ ID NO: 130382 - DNA, 77 bp, Homo sapiens
gtgaagctgggcccgaagctcctcctgtcctagggccacgctggctgcagtgaggcggcggggacggaatgtgagtg

SEQ ID NO: 130383 - DNA, 77 bp, Homo sapiens
ccgaagctcctcctgtcctagggccacgctggctgcagtgaggcggcggggacggaatgtgagtgggtggagagctc

SEQ ID NO: 130384 - DNA, 78 bp, Homo sapiens
tagggccacgctggctgcagtgaggcggcggggacggaatgtgagtgggtggagagctcctggcaggaaggccaggta

SEQ ID NO: 130385 - DNA, 80 bp, Homo sapiens
gctgcagtgaggcggcggggacggaatgtgagtgggtggagagctcctggcaggaaggccaggtagcacctctgccctca

SEQ ID NO: 130386 - DNA, 77 bp, Homo sapiens
agtgaggcggcggggacggaatgtgagtgggtggagagctcctggcaggaaggccaggtagcacctctgccctcatg

SEQ ID NO: 130387 - DNA, 80 bp, Homo sapiens
acggaatgtgagtgggtggagagctcctggcaggaaggccaggtagcacctctgccctcatggcactgataaggagccag

SEQ ID NO: 130388 - DNA, 82 bp, Homo sapiens
atgtgagtgggtggagagctcctggcaggaaggccaggtagcacctctgccctcatggcactgataaggagccaggaagcag

SEQ ID NO: 130389 - DNA, 79 bp, Homo sapiens
caggaaggccaggtagcacctctgccctcatggcactgataaggagccaggaagcagggcaggtggggcataggccgtg

SEQ ID NO: 130390 - DNA, 78 bp, Homo sapiens
aggtagcacctctgccctcatggcactgataaggagccaggaagcagggcaggtggggcataggccgtggcagggtac

SEQ ID NO: 130391 - DNA, 82 bp, Homo sapiens
tctgccctcatggcactgataaggagccaggaagcagggcaggtggggcataggccgtggcagggtacctacatgtcaatca

SEQ ID NO: 130392 - DNA, 80 bp, Homo sapiens
atggcactgataaggagccaggaagcagggcaggtggggcataggccgtggcagggtacctacatgtcaatcacacgtga

SEQ ID NO: 130393 - DNA, 76 bp, Homo sapiens
ggaagcagggcaggtggggcataggccgtggcagggtacctacatgtcaatcacacgtgatgggtgggcctgggta

SEQ ID NO: 130394 - DNA, 79 bp, Homo sapiens
aggtggggcataggccgtggcagggtacctacatgtcaatcacacgtgatgggtgggcctgggtagctgcatgccagac

SEQ ID NO: 130395 - DNA, 81 bp, Homo sapiens
ataggccgtggcagggtacctacatgtcaatcacacgtgatgggtgggcctgggtagctgcatgccagactgggcaccaga

SEQ ID NO: 130396 - DNA, 85 bp, Homo sapiens
tggcagggtacctacatgtcaatcacacgtgatgggtgggcctgggtagctgcatgccagactgggcaccagactgtggcacaca

SEQ ID NO: 130397 - DNA, 85 bp, Homo sapiens
tacatgtcaatcacacgtgatgggtgggcctgggtagctgcatgccagactgggcaccagactgtggcacacagctcaagggtaa

SEQ ID NO: 130398 - DNA, 80 bp, Homo sapiens
aatcacacgtgatgggtgggcctgggtagctgcatgccagactgggcaccagactgtggcacacagctcaagggtaacct

SEQ ID NO: 130399 - DNA, 81 bp, Homo sapiens
atgggtgggcctgggtagctgcatgccagactgggcaccagactgtggcacacagctcaagggtaaccttgcatccaggcc

SEQ ID NO: 130400 - DNA, 84 bp, Homo sapiens
tgggtagctgcatgccagactgggcaccagactgtggcacacagctcaagggtaaccttgcatccaggcccttctgtgagagta

SEQ ID NO: 130401 - DNA, 81 bp, Homo sapiens
atgccagactgggcaccagactgtggcacacagctcaagggtaaccttgcatccaggcccttctgtgagagtaggatggga

SEQ ID NO: 130402 - DNA, 78 bp, Homo sapiens
agactgggcaccagactgtggcacacagctcaagggtaaccttgcatccaggcccttctgtgagagtaggatgggagg

SEQ ID NO: 130403 - DNA, 78 bp, Homo sapiens
actgtggcacacagctcaagggtaaccttgcatccaggcccttctgtgagagtaggatgggagggagttgcacccatc

SEQ ID NO: 130404 - DNA, 70 bp, Homo sapiens
atccaggcccttctgtgagagtaggatgggagggagttgcacccatctcctgtccgcccccccccaaaaa

SEQ ID NO: 130405 - DNA, 71 bp, Homo sapiens
cccttctgtgagagtaggatgggagggagttgcacccatctcctgtccgcccccccccaaaaatatatatg

SEQ ID NO: 130406 - DNA, 73 bp, Homo sapiens
gtaggatgggagggagttgcacccatctcctgtccgcccccccccaaaaatatatatgtatgtcgatatataa

SEQ ID NO: 130407 - DNA, 73 bp, Homo sapiens
agggagttgcacccatctcctgtccgcccccccccaaaaatatatatgtatgtcgatatataatatagaggta

SEQ ID NO: 130408 - DNA, 75 bp, Homo sapiens
cccccaaaaatatatatgtatgtcgatatataatatagaggtatatacacctgtacataaaattgttgccaccaa

SEQ ID NO: 130409 - DNA, 77 bp, Homo sapiens
tatatatgtatgtcgatatataatatagaggtatatacacctgtacataaaattgttgccaccaaccactaaatggt

SEQ ID NO: 130410 - DNA, 75 bp, Homo sapiens
gtatgtcgatatataatatagaggtatatacacctgtacataaaattgttgccaccaaccactaaatggttacac

SEQ ID NO: 130411 - DNA, 74 bp, Homo sapiens
taatatagaggtatatacacctgtacataaaattgttgccaccaaccactaaatggttacactacaccaagaca

SEQ ID NO: 130412 - DNA, 71 bp, Homo sapiens
aggtatatacacctgtacataaaattgttgccaccaaccactaaatggttacactacaccaagacactaaa

SEQ ID NO: 130413 - DNA, 72 bp, Homo sapiens
tacacctgtacataaaattgttgccaccaaccactaaatggttacactacaccaagacactaaaatggcagg

SEQ ID NO: 130414 - DNA, 70 bp, Homo sapiens
ataaaattgttgccaccaaccactaaatggttacactacaccaagacactaaaatggcagggagccctgg

SEQ ID NO: 130415 - DNA, 69 bp, Homo sapiens
accaaccactaaatggttacactacaccaagacactaaaatggcagggagccctgggatcctggggttg

SEQ ID NO: 130416 - DNA, 72 bp, Homo sapiens
actaaatggttacactacaccaagacactaaaatggcagggagccctgggatcctggggttggcagacacag

SEQ ID NO: 130417 - DNA, 70 bp, Homo sapiens
accaagacactaaaatggcagggagccctgggatcctggggttggcagacacagggaatagggggtagag

SEQ ID NO: 130418 - DNA, 71 bp, Homo sapiens
taaaatggcagggagccctgggatcctggggttggcagacacagggaatagggggtagaggcccaggctaa

SEQ ID NO: 130419 - DNA, 70 bp, Homo sapiens
ccctgggatcctggggttggcagacacagggaatagggggtagaggcccaggctaatttctcccttcaca

SEQ ID NO: 130420 - DNA, 72 bp, Homo sapiens
atcctggggttggcagacacagggaatagggggtagaggcccaggctaatttctcccttcacagcaaagcag

SEQ ID NO: 130421 - DNA, 73 bp, Homo sapiens
gttggcagacacagggaatagggggtagaggcccaggctaatttctcccttcacagcaaagcagggagagaaa

SEQ ID NO: 130422 - DNA, 70 bp, Homo sapiens
acagggaatagggggtagaggcccaggctaatttctcccttcacagcaaagcagggagagaaaggaagga

SEQ ID NO: 130423 - DNA, 71 bp, Homo sapiens
tagaggcccaggctaatttctcccttcacagcaaagcagggagagaaaggaaggagattcaccccttaacc

SEQ ID NO: 130424 - DNA, 72 bp, Homo sapiens
cccaggctaatttctcccttcacagcaaagcagggagagaaaggaaggagattcaccccttaacctgtctca

SEQ ID NO: 130425 - DNA, 71 bp, Homo sapiens
atttctcccttcacagcaaagcagggagagaaaggaaggagattcaccccttaacctgtctcagccctggg

SEQ ID NO: 130426 - DNA, 73 bp, Homo sapiens
agcaaagcagggagagaaaggaaggagattcaccccttaacctgtctcagccctgggtcagaagagaagcctc

SEQ ID NO: 130427 - DNA, 73 bp, Homo sapiens
gagagaaaggaaggagattcaccccttaacctgtctcagccctgggtcagaagagaagcctcccgcctggcca

SEQ ID NO: 130428 - DNA, 72 bp, Homo sapiens
ttcaccccttaacctgtctcagccctgggtcagaagagaagcctcccgcctggccaggcttcacctacctta

SEQ ID NO: 130429 - DNA, 74 bp, Homo sapiens
taacctgtctcagccctgggtcagaagagaagcctcccgcctggccaggcttcacctaccttagccaaattgta

SEQ ID NO: 130430 - DNA, 74 bp, Homo sapiens
ccctgggtcagaagagaagcctcccgcctggccaggcttcacctaccttagccaaattgtagccagacagacag

SEQ ID NO: 130431 - DNA, 73 bp, Homo sapiens
ctcccgcctggccaggcttcacctaccttagccaaattgtagccagacagacagtgccccctgacctcaaaaa

SEQ ID NO: 130432 - DNA, 72 bp, Homo sapiens
ccaggcttcacctaccttagccaaattgtagccagacagacagtgccccctgacctcaaaaaaggaggtcaa

SEQ ID NO: 130433 - DNA, 73 bp, Homo sapiens
ttcacctaccttagccaaattgtagccagacagacagtgccccctgacctcaaaaaaggaggtcaagctgaaa

SEQ ID NO: 130434 - DNA, 74 bp, Homo sapiens
ttagccaaattgtagccagacagacagtgccccctgacctcaaaaaaggaggtcaagctgaaatggccctgacc

SEQ ID NO: 130435 - DNA, 74 bp, Homo sapiens
ttgtagccagacagacagtgccccctgacctcaaaaaaggaggtcaagctgaaatggccctgaccctgaccgtg

SEQ ID NO: 130436 - DNA, 71 bp, Homo sapiens
agacagtgccccctgacctcaaaaaaggaggtcaagctgaaatggccctgaccctgaccgtgtgtccaaaa

SEQ ID NO: 130437 - DNA, 76 bp, Homo sapiens
aggtcaagctgaaatggccctgaccctgaccgtgtgtccaaaaccccagcgtgagagccagggctgcttcttgaca

SEQ ID NO: 130438 - DNA, 77 bp, Homo sapiens
aaatggccctgaccctgaccgtgtgtccaaaaccccagcgtgagagccagggctgcttcttgacagctgctctcctc

SEQ ID NO: 130439 - DNA, 82 bp, Homo sapiens
ctgaccgtgtgtccaaaaccccagcgtgagagccagggctgcttcttgacagctgctctcctctgccctgcgtggcactgaa

SEQ ID NO: 130440 - DNA, 82 bp, Homo sapiens
tgtccaaaaccccagcgtgagagccagggctgcttcttgacagctgctctcctctgccctgcgtggcactgaaccaggagta

SEQ ID NO: 130441 - DNA, 83 bp, Homo sapiens
ccagcgtgagagccagggctgcttcttgacagctgctctcctctgccctgcgtggcactgaaccaggagtaagggcttctctg

SEQ ID NO: 130442 - DNA, 82 bp, Homo sapiens
agagccagggctgcttcttgacagctgctctcctctgccctgcgtggcactgaaccaggagtaagggcttctctgttctagc

SEQ ID NO: 130443 - DNA, 78 bp, Homo sapiens
ttgacagctgctctcctctgccctgcgtggcactgaaccaggagtaagggcttctctgttctagcctcccagggaagg

SEQ ID NO: 130444 - DNA, 70 bp, Homo sapiens
ccctgcgtggcactgaaccaggagtaagggcttctctgttctagcctcccagggaagggaaaaagcaggg

SEQ ID NO: 130445 - DNA, 71 bp, Homo sapiens
aaccaggagtaagggcttctctgttctagcctcccagggaagggaaaaagcaggggctgtgattgtcaaga

SEQ ID NO: 130446 - DNA, 72 bp, Homo sapiens
agtaagggcttctctgttctagcctcccagggaagggaaaaagcaggggctgtgattgtcaagactcacaac

SEQ ID NO: 130447 - DNA, 75 bp, Homo sapiens
cttctctgttctagcctcccagggaagggaaaaagcaggggctgtgattgtcaagactcacaaccatgtggagag

SEQ ID NO: 130448 - DNA, 76 bp, Homo sapiens
ctcccagggaagggaaaaagcaggggctgtgattgtcaagactcacaaccatgtggagaggccgaatcacgcagga

SEQ ID NO: 130449 - DNA, 78 bp, Homo sapiens
aagggaaaaagcaggggctgtgattgtcaagactcacaaccatgtggagaggccgaatcacgcaggagagccacgcat

SEQ ID NO: 130450 - DNA, 80 bp, Homo sapiens
aaaagcaggggctgtgattgtcaagactcacaaccatgtggagaggccgaatcacgcaggagagccacgcattggagtac

SEQ ID NO: 130451 - DNA, 82 bp, Homo sapiens
ctgtgattgtcaagactcacaaccatgtggagaggccgaatcacgcaggagagccacgcattggagtaccctggctcccagc

SEQ ID NO: 130452 - DNA, 77 bp, Homo sapiens
aagactcacaaccatgtggagaggccgaatcacgcaggagagccacgcattggagtaccctggctcccagccccttc

SEQ ID NO: 130453 - DNA, 74 bp, Homo sapiens
aaccatgtggagaggccgaatcacgcaggagagccacgcattggagtaccctggctcccagccccttccccacc

SEQ ID NO: 130454 - DNA, 76 bp, Homo sapiens
atcacgcaggagagccacgcattggagtaccctggctcccagccccttccccaccccgtcttgagccagagagcta

SEQ ID NO: 130455 - DNA, 74 bp, Homo sapiens
agccacgcattggagtaccctggctcccagccccttccccaccccgtcttgagccagagagctacaagcaggaa

SEQ ID NO: 130456 - DNA, 80 bp, Homo sapiens
ctcccagccccttccccaccccgtcttgagccagagagctacaagcaggaatcccagtgcagctgcaaatcatggccatc

SEQ ID NO: 130457 - DNA, 81 bp, Homo sapiens
cttccccaccccgtcttgagccagagagctacaagcaggaatcccagtgcagctgcaaatcatggccatcgaggaagtctg

SEQ ID NO: 130458 - DNA, 84 bp, Homo sapiens
cccgtcttgagccagagagctacaagcaggaatcccagtgcagctgcaaatcatggccatcgaggaagtctgtggagaagaggc

SEQ ID NO: 130459 - DNA, 85 bp, Homo sapiens
ttgagccagagagctacaagcaggaatcccagtgcagctgcaaatcatggccatcgaggaagtctgtggagaagaggctgggggc

SEQ ID NO: 130460 - DNA, 80 bp, Homo sapiens
aggaatcccagtgcagctgcaaatcatggccatcgaggaagtctgtggagaagaggctgggggctgtggtgctgaggggg

SEQ ID NO: 130461 - DNA, 84 bp, Homo sapiens
agtgcagctgcaaatcatggccatcgaggaagtctgtggagaagaggctgggggctgtggtgctgaggggggctaggctcagca

SEQ ID NO: 130462 - DNA, 76 bp, Homo sapiens
atcgaggaagtctgtggagaagaggctgggggctgtggtgctgaggggggctaggctcagcacgggaccacctgac

SEQ ID NO: 130463 - DNA, 78 bp, Homo sapiens
agtctgtggagaagaggctgggggctgtggtgctgaggggggctaggctcagcacgggaccacctgacgacagctcca

SEQ ID NO: 130464 - DNA, 83 bp, Homo sapiens
ctgtggtgctgaggggggctaggctcagcacgggaccacctgacgacagctccagccagtccatgctgtccaggtggccatca

SEQ ID NO: 130465 - DNA, 82 bp, Homo sapiens
tgaggggggctaggctcagcacgggaccacctgacgacagctccagccagtccatgctgtccaggtggccatcagccaggtc

SEQ ID NO: 130466 - DNA, 83 bp, Homo sapiens
ctaggctcagcacgggaccacctgacgacagctccagccagtccatgctgtccaggtggccatcagccaggtccaggcccatg

SEQ ID NO: 130467 - DNA, 85 bp, Homo sapiens
ctgacgacagctccagccagtccatgctgtccaggtggccatcagccaggtccaggcccatggtgctgctgggctcaggaacaaa

SEQ ID NO: 130468 - DNA, 84 bp, Homo sapiens
ctccagccagtccatgctgtccaggtggccatcagccaggtccaggcccatggtgctgctgggctcaggaacaaagtgcaattc

SEQ ID NO: 130469 - DNA, 83 bp, Homo sapiens
catgctgtccaggtggccatcagccaggtccaggcccatggtgctgctgggctcaggaacaaagtgcaattccgaggtgtcca

SEQ ID NO: 130470 - DNA, 80 bp, Homo sapiens
aggtggccatcagccaggtccaggcccatggtgctgctgggctcaggaacaaagtgcaattccgaggtgtccatgggtga

SEQ ID NO: 130471 - DNA, 78 bp, Homo sapiens
ccatcagccaggtccaggcccatggtgctgctgggctcaggaacaaagtgcaattccgaggtgtccatgggtgacggg

SEQ ID NO: 130472 - DNA, 80 bp, Homo sapiens
tgggctcaggaacaaagtgcaattccgaggtgtccatgggtgacggggggtggtccaggatggcagtgctgctcagcatc

SEQ ID NO: 130473 - DNA, 79 bp, Homo sapiens
aattccgaggtgtccatgggtgacggggggtggtccaggatggcagtgctgctcagcatctggctatggaggtcgtcaa

SEQ ID NO: 130474 - DNA, 80 bp, Homo sapiens
ggtgtccatgggtgacggggggtggtccaggatggcagtgctgctcagcatctggctatggaggtcgtcaatgagggaaa

SEQ ID NO: 130475 - DNA, 85 bp, Homo sapiens
tccaggatggcagtgctgctcagcatctggctatggaggtcgtcaatgagggaaaggggctctggcccgtcatgcccactggtca

SEQ ID NO: 130476 - DNA, 84 bp, Homo sapiens
atggcagtgctgctcagcatctggctatggaggtcgtcaatgagggaaaggggctctggcccgtcatgcccactggtcagcagg

SEQ ID NO: 130477 - DNA, 80 bp, Homo sapiens
ctcagcatctggctatggaggtcgtcaatgagggaaaggggctctggcccgtcatgcccactggtcagcaggggcagccc

SEQ ID NO: 130478 - DNA, 78 bp, Homo sapiens
tctggctatggaggtcgtcaatgagggaaaggggctctggcccgtcatgcccactggtcagcaggggcagccccgtgc

SEQ ID NO: 130479 - DNA, 77 bp, Homo sapiens
aggtcgtcaatgagggaaaggggctctggcccgtcatgcccactggtcagcaggggcagccccgtgctgctctccag

SEQ ID NO: 130480 - DNA, 77 bp, Homo sapiens
atgagggaaaggggctctggcccgtcatgcccactggtcagcaggggcagccccgtgctgctctccaggaagtcctc

SEQ ID NO: 130481 - DNA, 78 bp, Homo sapiens
ctctggcccgtcatgcccactggtcagcaggggcagccccgtgctgctctccaggaagtcctccaggcgtccagggag

SEQ ID NO: 130482 - DNA, 76 bp, Homo sapiens
cccgtcatgcccactggtcagcaggggcagccccgtgctgctctccaggaagtcctccaggcgtccagggagggag

SEQ ID NO: 130483 - DNA, 76 bp, Homo sapiens
actggtcagcaggggcagccccgtgctgctctccaggaagtcctccaggcgtccagggagggagggtgagcctgga

SEQ ID NO: 130484 - DNA, 73 bp, Homo sapiens
gggcagccccgtgctgctctccaggaagtcctccaggcgtccagggagggagggtgagcctggaggaggtggg

SEQ ID NO: 130485 - DNA, 75 bp, Homo sapiens
caggaagtcctccaggcgtccagggagggagggtgagcctggaggaggtggggcagcctgggggagctcagcaga

SEQ ID NO: 130486 - DNA, 76 bp, Homo sapiens
tcctccaggcgtccagggagggagggtgagcctggaggaggtggggcagcctgggggagctcagcagaaggtgatg

SEQ ID NO: 130487 - DNA, 79 bp, Homo sapiens
tccagggagggagggtgagcctggaggaggtggggcagcctgggggagctcagcagaaggtgatggctgtgctgccagg

SEQ ID NO: 130488 - DNA, 77 bp, Homo sapiens
agggtgagcctggaggaggtggggcagcctgggggagctcagcagaaggtgatggctgtgctgccaggggggaccca

SEQ ID NO: 130489 - DNA, 78 bp, Homo sapiens
gggcagcctgggggagctcagcagaaggtgatggctgtgctgccaggggggacccacagactgtcttcggggatggct

SEQ ID NO: 130490 - DNA, 76 bp, Homo sapiens
aggtgatggctgtgctgccaggggggacccacagactgtcttcggggatggcttctccttccctggcagggatggc

SEQ ID NO: 130491 - DNA, 73 bp, Homo sapiens
tgccaggggggacccacagactgtcttcggggatggcttctccttccctggcagggatggcggctccttgaaa

SEQ ID NO: 130492 - DNA, 75 bp, Homo sapiens
gacccacagactgtcttcggggatggcttctccttccctggcagggatggcggctccttgaaatctgctgaaatt

SEQ ID NO: 130493 - DNA, 77 bp, Homo sapiens
actgtcttcggggatggcttctccttccctggcagggatggcggctccttgaaatctgctgaaatttctgccaatca

SEQ ID NO: 130494 - DNA, 79 bp, Homo sapiens
ggatggcttctccttccctggcagggatggcggctccttgaaatctgctgaaatttctgccaatcaatcaagagagtaa

SEQ ID NO: 130495 - DNA, 81 bp, Homo sapiens
tccttccctggcagggatggcggctccttgaaatctgctgaaatttctgccaatcaatcaagagagtaaatggatatcaga

SEQ ID NO: 130496 - DNA, 81 bp, Homo sapiens
cctggcagggatggcggctccttgaaatctgctgaaatttctgccaatcaatcaagagagtaaatggatatcagaagccaa

SEQ ID NO: 130497 - DNA, 82 bp, Homo sapiens
cggctccttgaaatctgctgaaatttctgccaatcaatcaagagagtaaatggatatcagaagccaagcctgtatatctaca

SEQ ID NO: 130498 - DNA, 83 bp, Homo sapiens
ccttgaaatctgctgaaatttctgccaatcaatcaagagagtaaatggatatcagaagccaagcctgtatatctacatgcaaa

SEQ ID NO: 130499 - DNA, 83 bp, Homo sapiens
tgctgaaatttctgccaatcaatcaagagagtaaatggatatcagaagccaagcctgtatatctacatgcaaaagaatgaagg

SEQ ID NO: 130500 - DNA, 65 bp, Homo sapiens
aaaagaatgaaggtggaccccccaacgtcacaccatttacaaaaataaaacggatcaaagactta

SEQ ID NO: 130501 - DNA, 65 bp, Homo sapiens
atgaaggtggaccccccaacgtcacaccatttacaaaaataaaacggatcaaagacttacttaaa

SEQ ID NO: 130502 - DNA, 68 bp, Homo sapiens
cccaacgtcacaccatttacaaaaataaaacggatcaaagacttacttaaatgtaagagctaagacta

SEQ ID NO: 130503 - DNA, 68 bp, Homo sapiens
cgtcacaccatttacaaaaataaaacggatcaaagacttacttaaatgtaagagctaagactataaaa

SEQ ID NO: 130504 - DNA, 65 bp, Homo sapiens
acaaaaataaaacggatcaaagacttacttaaatgtaagagctaagactataaaactctttaaaa

SEQ ID NO: 130505 - DNA, 68 bp, Homo sapiens
taaaacggatcaaagacttacttaaatgtaagagctaagactataaaactctttaaaaatatttgcaa

SEQ ID NO: 130506 - DNA, 74 bp, Homo sapiens
atttgcaaatcacatatttgataaagaagtgatatccggaatacacagagaacttctaaaactcaacaacaaaa

SEQ ID NO: 130507 - DNA, 72 bp, Homo sapiens
caaatcacatatttgataaagaagtgatatccggaatacacagagaacttctaaaactcaacaacaaaaaac

SEQ ID NO: 130508 - DNA, 82 bp, Homo sapiens
caaatggccaacagcacatgaaaagagctcaatatcactagtcatgagggagaccacagtgagatacacctcaaacccactg

SEQ ID NO: 130509 - DNA, 82 bp, Homo sapiens
aacagcacatgaaaagagctcaatatcactagtcatgagggagaccacagtgagatacacctcaaacccactggagtggcta

SEQ ID NO: 130510 - DNA, 78 bp, Homo sapiens
aaaagagctcaatatcactagtcatgagggagaccacagtgagatacacctcaaacccactggagtggctactgtaaa

SEQ ID NO: 130511 - DNA, 75 bp, Homo sapiens
aatatcactagtcatgagggagaccacagtgagatacacctcaaacccactggagtggctactgtaaaattaaat

SEQ ID NO: 130512 - DNA, 72 bp, Homo sapiens
actagtcatgagggagaccacagtgagatacacctcaaacccactggagtggctactgtaaaattaaatttt

SEQ ID NO: 130513 - DNA, 69 bp, Homo sapiens
agggagaccacagtgagatacacctcaaacccactggagtggctactgtaaaattaaatttttaagaaa

SEQ ID NO: 130514 - DNA, 70 bp, Homo sapiens
acagtgagatacacctcaaacccactggagtggctactgtaaaattaaatttttaagaaagtattggtga

SEQ ID NO: 130515 - DNA, 69 bp, Homo sapiens
acacctcaaacccactggagtggctactgtaaaattaaatttttaagaaagtattggtgaggatacaga

SEQ ID NO: 130516 - DNA, 70 bp, Homo sapiens
tggagtggctactgtaaaattaaatttttaagaaagtattggtgaggatacagagaaactggagcccttg

SEQ ID NO: 130517 - DNA, 70 bp, Homo sapiens
tactgtaaaattaaatttttaagaaagtattggtgaggatacagagaaactggagcccttgtgccctgtg

SEQ ID NO: 130518 - DNA, 69 bp, Homo sapiens
aattaaatttttaagaaagtattggtgaggatacagagaaactggagcccttgtgccctgtggtagaaa

SEQ ID NO: 130519 - DNA, 75 bp, Homo sapiens
ttttaagaaagtattggtgaggatacagagaaactggagcccttgtgccctgtggtagaaatgcaaaatggtgca

SEQ ID NO: 130520 - DNA, 76 bp, Homo sapiens
atatacccaaaagaattggaagcagggtctcaggtatttgtacacaggtgttgataagtgcattcacaacagtaga

SEQ ID NO: 130521 - DNA, 76 bp, Homo sapiens
aaaagaattggaagcagggtctcaggtatttgtacacaggtgttgataagtgcattcacaacagtagaatgtggaa

SEQ ID NO: 130522 - DNA, 79 bp, Homo sapiens
aagcagggtctcaggtatttgtacacaggtgttgataagtgcattcacaacagtagaatgtggaagcaacctatgtcca

SEQ ID NO: 130523 - DNA, 81 bp, Homo sapiens
ggtctcaggtatttgtacacaggtgttgataagtgcattcacaacagtagaatgtggaagcaacctatgtccatcaatgga

SEQ ID NO: 130524 - DNA, 80 bp, Homo sapiens
atttgtacacaggtgttgataagtgcattcacaacagtagaatgtggaagcaacctatgtccatcaatggatgaaggaag

SEQ ID NO: 130525 - DNA, 85 bp, Homo sapiens
ttgataagtgcattcacaacagtagaatgtggaagcaacctatgtccatcaatggatgaaggaagtgatactatgcttagtgcaa

SEQ ID NO: 130526 - DNA, 84 bp, Homo sapiens
aagtgcattcacaacagtagaatgtggaagcaacctatgtccatcaatggatgaaggaagtgatactatgcttagtgcaacagc

SEQ ID NO: 130527 - DNA, 82 bp, Homo sapiens
acagtagaatgtggaagcaacctatgtccatcaatggatgaaggaagtgatactatgcttagtgcaacagcctgtcacaaaa

SEQ ID NO: 130528 - DNA, 84 bp, Homo sapiens
tggaagcaacctatgtccatcaatggatgaaggaagtgatactatgcttagtgcaacagcctgtcacaaaagacaattcatgat

SEQ ID NO: 130529 - DNA, 86 bp, Homo sapiens
tatgtccatcaatggatgaaggaagtgatactatgcttagtgcaacagcctgtcacaaaagacaattcatgattgcacttagtcaa

SEQ ID NO: 130530 - DNA, 83 bp, Homo sapiens
aatggatgaaggaagtgatactatgcttagtgcaacagcctgtcacaaaagacaattcatgattgcacttagtcaaaatcata

SEQ ID NO: 130531 - DNA, 84 bp, Homo sapiens
atgaaggaagtgatactatgcttagtgcaacagcctgtcacaaaagacaattcatgattgcacttagtcaaaatcatagagaca

SEQ ID NO: 130532 - DNA, 73 bp, Homo sapiens
gacagaaagtagaatggcagttgctacaggctggcggaagggccaaatgggaagttactgtttaatggggata

SEQ ID NO: 130533 - DNA, 72 bp, Homo sapiens
tagaatggcagttgctacaggctggcggaagggccaaatgggaagttactgtttaatggggatagtttcagt

SEQ ID NO: 130534 - DNA, 68 bp, Homo sapiens
agttgctacaggctggcggaagggccaaatgggaagttactgtttaatggggatagtttcagttttac

SEQ ID NO: 130535 - DNA, 68 bp, Homo sapiens
ctggcggaagggccaaatgggaagttactgtttaatggggatagtttcagttttacgagatcaaaaga

SEQ ID NO: 130536 - DNA, 65 bp, Homo sapiens
aagggccaaatgggaagttactgtttaatggggatagtttcagttttacgagatcaaaagaaagg

SEQ ID NO: 130537 - DNA, 70 bp, Homo sapiens
aatgggaagttactgtttaatggggatagtttcagttttacgagatcaaaagaaagggagatggatggca

SEQ ID NO: 130538 - DNA, 77 bp, Homo sapiens
tttaatggggatagtttcagttttacgagatcaaaagaaagggagatggatggcagtgatggctgtacacattatga

SEQ ID NO: 130539 - DNA, 77 bp, Homo sapiens
atagtttcagttttacgagatcaaaagaaagggagatggatggcagtgatggctgtacacattatgaatgtatttaa

SEQ ID NO: 130540 - DNA, 78 bp, Homo sapiens
ttcagttttacgagatcaaaagaaagggagatggatggcagtgatggctgtacacattatgaatgtatttaataccac

SEQ ID NO: 130541 - DNA, 79 bp, Homo sapiens
agatcaaaagaaagggagatggatggcagtgatggctgtacacattatgaatgtatttaataccactgaaccatacact

SEQ ID NO: 130542 - DNA, 71 bp, Homo sapiens
aacaaaccaacccagggctagagacacctatgaacagagaaggccgtcagggaggcagcaggggacctggg

SEQ ID NO: 130543 - DNA, 76 bp, Homo sapiens
ggctagagacacctatgaacagagaaggccgtcagggaggcagcaggggacctggggttacctccgctctgaatga

SEQ ID NO: 130544 - DNA, 75 bp, Homo sapiens
acctatgaacagagaaggccgtcagggaggcagcaggggacctggggttacctccgctctgaatgagaatgtcaa

SEQ ID NO: 130545 - DNA, 73 bp, Homo sapiens
aacagagaaggccgtcagggaggcagcaggggacctggggttacctccgctctgaatgagaatgtcaaacagg

SEQ ID NO: 130546 - DNA, 77 bp, Homo sapiens
gtcagggaggcagcaggggacctggggttacctccgctctgaatgagaatgtcaaacaggtcgtccatctgctggct

SEQ ID NO: 130547 - DNA, 77 bp, Homo sapiens
cagcaggggacctggggttacctccgctctgaatgagaatgtcaaacaggtcgtccatctgctggcttgaggaacca

SEQ ID NO: 130548 - DNA, 74 bp, Homo sapiens
acctggggttacctccgctctgaatgagaatgtcaaacaggtcgtccatctgctggcttgaggaaccattttcc

SEQ ID NO: 130549 - DNA, 77 bp, Homo sapiens
ttacctccgctctgaatgagaatgtcaaacaggtcgtccatctgctggcttgaggaaccattttcctgtgggacaaa

SEQ ID NO: 130550 - DNA, 75 bp, Homo sapiens
ctctgaatgagaatgtcaaacaggtcgtccatctgctggcttgaggaaccattttcctgtgggacaaaggaaaaa

SEQ ID NO: 130551 - DNA, 70 bp, Homo sapiens
agaatgtcaaacaggtcgtccatctgctggcttgaggaaccattttcctgtgggacaaaggaaaaaaaaa

SEQ ID NO: 130552 - DNA, 82 bp, Homo sapiens
ctagggcagctgccaacactagccaggcctagcccgccttcctcacctgctgtttgggctgctggctcatggcttcctcata

SEQ ID NO: 130553 - DNA, 81 bp, Homo sapiens
agctgccaacactagccaggcctagcccgccttcctcacctgctgtttgggctgctggctcatggcttcctcatagccagg

SEQ ID NO: 130554 - DNA, 79 bp, Homo sapiens
acactagccaggcctagcccgccttcctcacctgctgtttgggctgctggctcatggcttcctcatagccaggtggttc

SEQ ID NO: 130555 - DNA, 81 bp, Homo sapiens
tagcccgccttcctcacctgctgtttgggctgctggctcatggcttcctcatagccaggtggttccttcttcagcagagaa

SEQ ID NO: 130556 - DNA, 79 bp, Homo sapiens
ccttcctcacctgctgtttgggctgctggctcatggcttcctcatagccaggtggttccttcttcagcagagaagtggg

SEQ ID NO: 130557 - DNA, 77 bp, Homo sapiens
tgtttgggctgctggctcatggcttcctcatagccaggtggttccttcttcagcagagaagtgggggtcccaaagag

SEQ ID NO: 130558 - DNA, 79 bp, Homo sapiens
tgctggctcatggcttcctcatagccaggtggttccttcttcagcagagaagtgggggtcccaaagaggggctgcagtg

SEQ ID NO: 130559 - DNA, 75 bp, Homo sapiens
ctcatggcttcctcatagccaggtggttccttcttcagcagagaagtgggggtcccaaagaggggctgcagtggg

SEQ ID NO: 130560 - DNA, 74 bp, Homo sapiens
atagccaggtggttccttcttcagcagagaagtgggggtcccaaagaggggctgcagtgggtgctccaggtcca

SEQ ID NO: 130561 - DNA, 73 bp, Homo sapiens
aggtggttccttcttcagcagagaagtgggggtcccaaagaggggctgcagtgggtgctccaggtccatctgg

SEQ ID NO: 130562 - DNA, 76 bp, Homo sapiens
ttcttcagcagagaagtgggggtcccaaagaggggctgcagtgggtgctccaggtccatctgggcagagggggcag

SEQ ID NO: 130563 - DNA, 75 bp, Homo sapiens
agaagtgggggtcccaaagaggggctgcagtgggtgctccaggtccatctgggcagagggggcaggcgctggaga

SEQ ID NO: 130564 - DNA, 79 bp, Homo sapiens
tcccaaagaggggctgcagtgggtgctccaggtccatctgggcagagggggcaggcgctggagagccaggctgggacga

SEQ ID NO: 130565 - DNA, 81 bp, Homo sapiens
ctgcagtgggtgctccaggtccatctgggcagagggggcaggcgctggagagccaggctgggacgagggctggacaggaga

SEQ ID NO: 130566 - DNA, 80 bp, Homo sapiens
gtgggtgctccaggtccatctgggcagagggggcaggcgctggagagccaggctgggacgagggctggacaggagagcag

SEQ ID NO: 130567 - DNA, 78 bp, Homo sapiens
aggtccatctgggcagagggggcaggcgctggagagccaggctgggacgagggctggacaggagagcagggagaggac

SEQ ID NO: 130568 - DNA, 76 bp, Homo sapiens
agagggggcaggcgctggagagccaggctgggacgagggctggacaggagagcagggagaggaccagtggccaggg

SEQ ID NO: 130569 - DNA, 69 bp, Homo sapiens
ttcccaccctcctctgggccctgcccggttcctcccatacccaggtacctgctgggggctcccactgga

SEQ ID NO: 130570 - DNA, 72 bp, Homo sapiens
tctgggccctgcccggttcctcccatacccaggtacctgctgggggctcccactggacaggccagggctgtc

SEQ ID NO: 130571 - DNA, 74 bp, Homo sapiens
tgcccggttcctcccatacccaggtacctgctgggggctcccactggacaggccagggctgtctgcattcttat

SEQ ID NO: 130572 - DNA, 75 bp, Homo sapiens
ttcctcccatacccaggtacctgctgggggctcccactggacaggccagggctgtctgcattcttattggtcacg

SEQ ID NO: 130573 - DNA, 76 bp, Homo sapiens
tacccaggtacctgctgggggctcccactggacaggccagggctgtctgcattcttattggtcacggtgaggacaa

SEQ ID NO: 130574 - DNA, 75 bp, Homo sapiens
tgggggctcccactggacaggccagggctgtctgcattcttattggtcacggtgaggacaaggtgggtccctgtg

SEQ ID NO: 130575 - DNA, 78 bp, Homo sapiens
cactggacaggccagggctgtctgcattcttattggtcacggtgaggacaaggtgggtccctgtggagtcggtgatga

SEQ ID NO: 130576 - DNA, 75 bp, Homo sapiens
aggccagggctgtctgcattcttattggtcacggtgaggacaaggtgggtccctgtggagtcggtgatgagggtg

SEQ ID NO: 130577 - DNA, 76 bp, Homo sapiens
tgtctgcattcttattggtcacggtgaggacaaggtgggtccctgtggagtcggtgatgagggtgggaggtgcaac

SEQ ID NO: 130578 - DNA, 71 bp, Homo sapiens
attcttattggtcacggtgaggacaaggtgggtccctgtggagtcggtgatgagggtgggaggtgcaaccc

SEQ ID NO: 130579 - DNA, 74 bp, Homo sapiens
tcacggtgaggacaaggtgggtccctgtggagtcggtgatgagggtgggaggtgcaacccccttgatgaggctg

SEQ ID NO: 130580 - DNA, 72 bp, Homo sapiens
acaaggtgggtccctgtggagtcggtgatgagggtgggaggtgcaacccccttgatgaggctggggccctga

SEQ ID NO: 130581 - DNA, 73 bp, Homo sapiens
gtccctgtggagtcggtgatgagggtgggaggtgcaacccccttgatgaggctggggccctgaggccccagaa

SEQ ID NO: 130582 - DNA, 72 bp, Homo sapiens
agtcggtgatgagggtgggaggtgcaacccccttgatgaggctggggccctgaggccccagaagcaactggg

SEQ ID NO: 130583 - DNA, 68 bp, Homo sapiens
agggtgggaggtgcaacccccttgatgaggctggggccctgaggccccagaagcaactggggggcggg

SEQ ID NO: 130584 - DNA, 69 bp, Homo sapiens
aggtgcaacccccttgatgaggctggggccctgaggccccagaagcaactggggggcggggaccggctc

SEQ ID NO: 130585 - DNA, 73 bp, Homo sapiens
ccttgatgaggctggggccctgaggccccagaagcaactggggggcggggaccggctcgggctcaggctgcaa

SEQ ID NO: 130586 - DNA, 73 bp, Homo sapiens
gggccctgaggccccagaagcaactggggggcggggaccggctcgggctcaggctgcaaggcttcctgcttca

SEQ ID NO: 130587 - DNA, 72 bp, Homo sapiens
aggccccagaagcaactggggggcggggaccggctcgggctcaggctgcaaggcttcctgcttcaccaccac

SEQ ID NO: 130588 - DNA, 71 bp, Homo sapiens
agaagcaactggggggcggggaccggctcgggctcaggctgcaaggcttcctgcttcaccaccacggacgg

SEQ ID NO: 130589 - DNA, 68 bp, Homo sapiens
gggcggggaccggctcgggctcaggctgcaaggcttcctgcttcaccaccacggacgggggccccggg

SEQ ID NO: 130590 - DNA, 72 bp, Homo sapiens
accggctcgggctcaggctgcaaggcttcctgcttcaccaccacggacgggggccccggggccacagcacaa

SEQ ID NO: 130591 - DNA, 71 bp, Homo sapiens
aggctgcaaggcttcctgcttcaccaccacggacgggggccccggggccacagcacaagggtctatgtggt

SEQ ID NO: 130592 - DNA, 69 bp, Homo sapiens
aaggcttcctgcttcaccaccacggacgggggccccggggccacagcacaagggtctatgtggttggtg

SEQ ID NO: 130593 - DNA, 70 bp, Homo sapiens
ctgcttcaccaccacggacgggggccccggggccacagcacaagggtctatgtggttggtggctggggcc

SEQ ID NO: 130594 - DNA, 69 bp, Homo sapiens
accacggacgggggccccggggccacagcacaagggtctatgtggttggtggctggggccgccaggctg

SEQ ID NO: 130595 - DNA, 72 bp, Homo sapiens
cccggggccacagcacaagggtctatgtggttggtggctggggccgccaggctggggttgaatgggtgagcg

SEQ ID NO: 130596 - DNA, 72 bp, Homo sapiens
acagcacaagggtctatgtggttggtggctggggccgccaggctggggttgaatgggtgagcggggcccagg

SEQ ID NO: 130597 - DNA, 71 bp, Homo sapiens
aagggtctatgtggttggtggctggggccgccaggctggggttgaatgggtgagcggggcccaggggctgc

SEQ ID NO: 130598 - DNA, 79 bp, Homo sapiens
gggccgccaggctggggttgaatgggtgagcggggcccaggggctgctggctcagctggcagctggagaagctgttctc

SEQ ID NO: 130599 - DNA, 80 bp, Homo sapiens
aggctggggttgaatgggtgagcggggcccaggggctgctggctcagctggcagctggagaagctgttctcctgcttcac

SEQ ID NO: 130600 - DNA, 80 bp, Homo sapiens
ttgaatgggtgagcggggcccaggggctgctggctcagctggcagctggagaagctgttctcctgcttcacgggggtgcc

SEQ ID NO: 130601 - DNA, 78 bp, Homo sapiens
gtgagcggggcccaggggctgctggctcagctggcagctggagaagctgttctcctgcttcacgggggtgccgagggg

SEQ ID NO: 130602 - DNA, 75 bp, Homo sapiens
gggctgctggctcagctggcagctggagaagctgttctcctgcttcacgggggtgccgaggggggcgggggcggg

SEQ ID NO: 130603 - DNA, 72 bp, Homo sapiens
tggcagctggagaagctgttctcctgcttcacgggggtgccgaggggggcgggggcgggggcgggctgctgg

SEQ ID NO: 130604 - DNA, 72 bp, Homo sapiens
tctcctgcttcacgggggtgccgaggggggcgggggcgggggcgggctgctgggctcgcttctcctgctcca

SEQ ID NO: 130605 - DNA, 76 bp, Homo sapiens
gggtgccgaggggggcgggggcgggggcgggctgctgggctcgcttctcctgctccagctgcagcttgagccgctc

SEQ ID NO: 130606 - DNA, 80 bp, Homo sapiens
gggggcgggggcgggggcgggctgctgggctcgcttctcctgctccagctgcagcttgagccgctccaccagctgctgct

SEQ ID NO: 130607 - DNA, 95 bp, Homo sapiens
gctgctgggctcgcttctcctgctccagctgcagcttgagccgctccaccagctgctgcttctgccggagcatgcgcgtcagcgcctcgatctgc

SEQ ID NO: 130608 - DNA, 92 bp, Homo sapiens
tcgcttctcctgctccagctgcagcttgagccgctccaccagctgctgcttctgccggagcatgcgcgtcagcgcctcgatctgcttgtctt

SEQ ID NO: 130609 - DNA, 96 bp, Homo sapiens
tgctccagctgcagcttgagccgctccaccagctgctgcttctgccggagcatgcgcgtcagcgcctcgatctgcttgtctttctcctgcagcatc

SEQ ID NO: 130610 - DNA, 93 bp, Homo sapiens
agctgcagcttgagccgctccaccagctgctgcttctgccggagcatgcgcgtcagcgcctcgatctgcttgtctttctcctgcagcatctgg

SEQ ID NO: 130611 - DNA, 90 bp, Homo sapiens
ttgagccgctccaccagctgctgcttctgccggagcatgcgcgtcagcgcctcgatctgcttgtctttctcctgcagcatctggtccttg

SEQ ID NO: 130612 - DNA, 88 bp, Homo sapiens
ccaccagctgctgcttctgccggagcatgcgcgtcagcgcctcgatctgcttgtctttctcctgcagcatctggtccttgtcgcgccc

SEQ ID NO: 130613 - DNA, 87 bp, Homo sapiens
tgcttctgccggagcatgcgcgtcagcgcctcgatctgcttgtctttctcctgcagcatctggtccttgtcgcgcccctctagctcc

SEQ ID NO: 130614 - DNA, 83 bp, Homo sapiens
agcatgcgcgtcagcgcctcgatctgcttgtctttctcctgcagcatctggtccttgtcgcgcccctctagctccgcccgccc

SEQ ID NO: 130615 - DNA, 79 bp, Homo sapiens
cgtcagcgcctcgatctgcttgtctttctcctgcagcatctggtccttgtcgcgcccctctagctccgcccgcccccca

SEQ ID NO: 130616 - DNA, 77 bp, Homo sapiens
ttgtctttctcctgcagcatctggtccttgtcgcgcccctctagctccgcccgccccccagggctcaggcaacagga

SEQ ID NO: 130617 - DNA, 71 bp, Homo sapiens
agcatctggtccttgtcgcgcccctctagctccgcccgccccccagggctcaggcaacaggacccggcccg

SEQ ID NO: 130618 - DNA, 68 bp, Homo sapiens
ctggtccttgtcgcgcccctctagctccgcccgccccccagggctcaggcaacaggacccggcccggg

SEQ ID NO: 130619 - DNA, 65 bp, Homo sapiens
cccctctagctccgcccgccccccagggctcaggcaacaggacccggcccgggggccctcctcct

SEQ ID NO: 130620 - DNA, 70 bp, Homo sapiens
tccgcccgccccccagggctcaggcaacaggacccggcccgggggccctcctccttcacgaggatctgca

SEQ ID NO: 130621 - DNA, 71 bp, Homo sapiens
ccccagggctcaggcaacaggacccggcccgggggccctcctccttcacgaggatctgcagtggcgaggcc

SEQ ID NO: 130622 - DNA, 75 bp, Homo sapiens
ggctcaggcaacaggacccggcccgggggccctcctccttcacgaggatctgcagtggcgaggcctgcagggtca

SEQ ID NO: 130623 - DNA, 83 bp, Homo sapiens
gggggccctcctccttcacgaggatctgcagtggcgaggcctgcagggtcagctgcgtcagaggtgatgtcaccatctcacca

SEQ ID NO: 130624 - DNA, 84 bp, Homo sapiens
tcctccttcacgaggatctgcagtggcgaggcctgcagggtcagctgcgtcagaggtgatgtcaccatctcaccaaaggtgtcc

SEQ ID NO: 130625 - DNA, 80 bp, Homo sapiens
acgaggatctgcagtggcgaggcctgcagggtcagctgcgtcagaggtgatgtcaccatctcaccaaaggtgtccccggg

SEQ ID NO: 130626 - DNA, 76 bp, Homo sapiens
agtggcgaggcctgcagggtcagctgcgtcagaggtgatgtcaccatctcaccaaaggtgtccccgggggtggagt

SEQ ID NO: 130627 - DNA, 76 bp, Homo sapiens
ctgcagggtcagctgcgtcagaggtgatgtcaccatctcaccaaaggtgtccccgggggtggagttttcatcgccc

SEQ ID NO: 130628 - DNA, 77 bp, Homo sapiens
agctgcgtcagaggtgatgtcaccatctcaccaaaggtgtccccgggggtggagttttcatcgcccgtgctgagcag

SEQ ID NO: 130629 - DNA, 77 bp, Homo sapiens
agaggtgatgtcaccatctcaccaaaggtgtccccgggggtggagttttcatcgcccgtgctgagcagtgagcgctc

SEQ ID NO: 130630 - DNA, 75 bp, Homo sapiens
atgtcaccatctcaccaaaggtgtccccgggggtggagttttcatcgcccgtgctgagcagtgagcgctccgagg

SEQ ID NO: 130631 - DNA, 70 bp, Homo sapiens
accaaaggtgtccccgggggtggagttttcatcgcccgtgctgagcagtgagcgctccgagggggtggga

SEQ ID NO: 130632 - DNA, 71 bp, Homo sapiens
ggtgtccccgggggtggagttttcatcgcccgtgctgagcagtgagcgctccgagggggtgggagacacgg

SEQ ID NO: 130633 - DNA, 75 bp, Homo sapiens
tggagttttcatcgcccgtgctgagcagtgagcgctccgagggggtgggagacacggggggcgtggagcccgtgc

SEQ ID NO: 130634 - DNA, 76 bp, Homo sapiens
tttcatcgcccgtgctgagcagtgagcgctccgagggggtgggagacacggggggcgtggagcccgtgctgccaaa

SEQ ID NO: 130635 - DNA, 73 bp, Homo sapiens
ctgagcagtgagcgctccgagggggtgggagacacggggggcgtggagcccgtgctgccaaacttcaccaccc

SEQ ID NO: 130636 - DNA, 70 bp, Homo sapiens
agtgagcgctccgagggggtgggagacacggggggcgtggagcccgtgctgccaaacttcaccaccccac

SEQ ID NO: 130637 - DNA, 71 bp, Homo sapiens
ggggtgggagacacggggggcgtggagcccgtgctgccaaacttcaccaccccactgctggccaccgtggc

SEQ ID NO: 130638 - DNA, 72 bp, Homo sapiens
agacacggggggcgtggagcccgtgctgccaaacttcaccaccccactgctggccaccgtggccaccaccac

SEQ ID NO: 130639 - DNA, 77 bp, Homo sapiens
gggcgtggagcccgtgctgccaaacttcaccaccccactgctggccaccgtggccaccaccacctcagctggagcca

SEQ ID NO: 130640 - DNA, 77 bp, Homo sapiens
aaacttcaccaccccactgctggccaccgtggccaccaccacctcagctggagccaggcctgctgccaccagggctg

SEQ ID NO: 130641 - DNA, 80 bp, Homo sapiens
cccactgctggccaccgtggccaccaccacctcagctggagccaggcctgctgccaccagggctggccccgtgctcagcc

SEQ ID NO: 130642 - DNA, 80 bp, Homo sapiens
tgctggccaccgtggccaccaccacctcagctggagccaggcctgctgccaccagggctggccccgtgctcagccgggcc

SEQ ID NO: 130643 - DNA, 78 bp, Homo sapiens
ccaccaccacctcagctggagccaggcctgctgccaccagggctggccccgtgctcagccgggccgctgggaaggcta

SEQ ID NO: 130644 - DNA, 77 bp, Homo sapiens
acctcagctggagccaggcctgctgccaccagggctggccccgtgctcagccgggccgctgggaaggctaccaccac

SEQ ID NO: 130645 - DNA, 76 bp, Homo sapiens
gccaggcctgctgccaccagggctggccccgtgctcagccgggccgctgggaaggctaccaccacctcgccagcct

SEQ ID NO: 130646 - DNA, 77 bp, Homo sapiens
ctgccaccagggctggccccgtgctcagccgggccgctgggaaggctaccaccacctcgccagccttgtgcaggata

SEQ ID NO: 130647 - DNA, 75 bp, Homo sapiens
cccgtgctcagccgggccgctgggaaggctaccaccacctcgccagccttgtgcaggatagaggtggcggcaggg

SEQ ID NO: 130648 - DNA, 73 bp, Homo sapiens
agccgggccgctgggaaggctaccaccacctcgccagccttgtgcaggatagaggtggcggcaggggccttgg

SEQ ID NO: 130649 - DNA, 76 bp, Homo sapiens
tgggaaggctaccaccacctcgccagccttgtgcaggatagaggtggcggcaggggccttgggggctcctggcaca

SEQ ID NO: 130650 - DNA, 76 bp, Homo sapiens
taccaccacctcgccagccttgtgcaggatagaggtggcggcaggggccttgggggctcctggcacagggctgatt

SEQ ID NO: 130651 - DNA, 78 bp, Homo sapiens
cagccttgtgcaggatagaggtggcggcaggggccttgggggctcctggcacagggctgatttggtcttgataggctc

SEQ ID NO: 130652 - DNA, 77 bp, Homo sapiens
ttgtgcaggatagaggtggcggcaggggccttgggggctcctggcacagggctgatttggtcttgataggctcgaag

SEQ ID NO: 130653 - DNA, 78 bp, Homo sapiens
tagaggtggcggcaggggccttgggggctcctggcacagggctgatttggtcttgataggctcgaaggcgctcaatca

SEQ ID NO: 130654 - DNA, 78 bp, Homo sapiens
gggccttgggggctcctggcacagggctgatttggtcttgataggctcgaaggcgctcaatcagctcagttttggtgc

SEQ ID NO: 130655 - DNA, 81 bp, Homo sapiens
ggctcctggcacagggctgatttggtcttgataggctcgaaggcgctcaatcagctcagttttggtgcccgagacaggcag

SEQ ID NO: 130656 - DNA, 81 bp, Homo sapiens
acagggctgatttggtcttgataggctcgaaggcgctcaatcagctcagttttggtgcccgagacaggcagtgatcgcaac

SEQ ID NO: 130657 - DNA, 81 bp, Homo sapiens
atttggtcttgataggctcgaaggcgctcaatcagctcagttttggtgcccgagacaggcagtgatcgcaacttcagctcc

SEQ ID NO: 130658 - DNA, 86 bp, Homo sapiens
tcttgataggctcgaaggcgctcaatcagctcagttttggtgcccgagacaggcagtgatcgcaacttcagctcctgcttcagctc

SEQ ID NO: 130659 - DNA, 87 bp, Homo sapiens
tcgaaggcgctcaatcagctcagttttggtgcccgagacaggcagtgatcgcaacttcagctcctgcttcagctctgccacctgcaa

SEQ ID NO: 130660 - DNA, 86 bp, Homo sapiens
aatcagctcagttttggtgcccgagacaggcagtgatcgcaacttcagctcctgcttcagctctgccacctgcaaggcagtcaaga

SEQ ID NO: 130661 - DNA, 77 bp, Homo sapiens
tgtgggaagggccaggctggcagtggctcaagttttccagtggccatgtaccttcatgtcgtccaggttggccggca

SEQ ID NO: 130662 - DNA, 77 bp, Homo sapiens
gctggcagtggctcaagttttccagtggccatgtaccttcatgtcgtccaggttggccggcagggctcccggcttgc

SEQ ID NO: 130663 - DNA, 77 bp, Homo sapiens
gctcaagttttccagtggccatgtaccttcatgtcgtccaggttggccggcagggctcccggcttgccagtcagtga

SEQ ID NO: 130664 - DNA, 74 bp, Homo sapiens
agttttccagtggccatgtaccttcatgtcgtccaggttggccggcagggctcccggcttgccagtcagtgagg

SEQ ID NO: 130665 - DNA, 79 bp, Homo sapiens
atgtaccttcatgtcgtccaggttggccggcagggctcccggcttgccagtcagtgaggtgctgttctgacgtgccagc

SEQ ID NO: 130666 - DNA, 79 bp, Homo sapiens
ccttcatgtcgtccaggttggccggcagggctcccggcttgccagtcagtgaggtgctgttctgacgtgccagcccaca

SEQ ID NO: 130667 - DNA, 77 bp, Homo sapiens
gtccaggttggccggcagggctcccggcttgccagtcagtgaggtgctgttctgacgtgccagcccacagggcccag

SEQ ID NO: 130668 - DNA, 78 bp, Homo sapiens
cagggctcccggcttgccagtcagtgaggtgctgttctgacgtgccagcccacagggcccaggggcgcccgagctgga

SEQ ID NO: 130669 - DNA, 81 bp, Homo sapiens
ggcttgccagtcagtgaggtgctgttctgacgtgccagcccacagggcccaggggcgcccgagctggagctgctattggta

SEQ ID NO: 130670 - DNA, 80 bp, Homo sapiens
agtcagtgaggtgctgttctgacgtgccagcccacagggcccaggggcgcccgagctggagctgctattggtagtggaga

SEQ ID NO: 130671 - DNA, 81 bp, Homo sapiens
tgctgttctgacgtgccagcccacagggcccaggggcgcccgagctggagctgctattggtagtggagaggctgcgtactg

SEQ ID NO: 130672 - DNA, 78 bp, Homo sapiens
tctgacgtgccagcccacagggcccaggggcgcccgagctggagctgctattggtagtggagaggctgcgtactgggg

SEQ ID NO: 130673 - DNA, 75 bp, Homo sapiens
cacagggcccaggggcgcccgagctggagctgctattggtagtggagaggctgcgtactgggggggtcccgctgc

SEQ ID NO: 130674 - DNA, 74 bp, Homo sapiens
cccaggggcgcccgagctggagctgctattggtagtggagaggctgcgtactgggggggtcccgctgcttccca

SEQ ID NO: 130675 - DNA, 78 bp, Homo sapiens
gagctggagctgctattggtagtggagaggctgcgtactgggggggtcccgctgcttcccagggcctcgcctgctgac

SEQ ID NO: 130676 - DNA, 75 bp, Homo sapiens
tgctattggtagtggagaggctgcgtactgggggggtcccgctgcttcccagggcctcgcctgctgacctgggaa

SEQ ID NO: 130677 - DNA, 72 bp, Homo sapiens
gtagtggagaggctgcgtactgggggggtcccgctgcttcccagggcctcgcctgctgacctgggaagaaaa

SEQ ID NO: 130678 - DNA, 71 bp, Homo sapiens
ctgcgtactgggggggtcccgctgcttcccagggcctcgcctgctgacctgggaagaaaaggcagaaatta

SEQ ID NO: 130679 - DNA, 70 bp, Homo sapiens
tactgggggggtcccgctgcttcccagggcctcgcctgctgacctgggaagaaaaggcagaaattagccc

SEQ ID NO: 130680 - DNA, 75 bp, Homo sapiens
gtggctcggggagggcaggggcaggcagtgaggagcgggtgcctactttggcggggcaggcaggatggcctggta

SEQ ID NO: 130681 - DNA, 78 bp, Homo sapiens
gagggcaggggcaggcagtgaggagcgggtgcctactttggcggggcaggcaggatggcctggtagttgtggtgctgc

SEQ ID NO: 130682 - DNA, 81 bp, Homo sapiens
aggggcaggcagtgaggagcgggtgcctactttggcggggcaggcaggatggcctggtagttgtggtgctgctgctgctgc

SEQ ID NO: 130683 - DNA, 91 bp, Homo sapiens
tgctgctgctgctggttgaggatctgcagctggaggaagagctgctgctgctgcaggatcttggcgtaggatgagtccatggggggtgccc

SEQ ID NO: 130684 - DNA, 87 bp, Homo sapiens
ctgctgctggttgaggatctgcagctggaggaagagctgctgctgctgcaggatcttggcgtaggatgagtccatggggggtgcccc

SEQ ID NO: 130685 - DNA, 84 bp, Homo sapiens
ttgaggatctgcagctggaggaagagctgctgctgctgcaggatcttggcgtaggatgagtccatggggggtgcccccctgtcc

SEQ ID NO: 130686 - DNA, 81 bp, Homo sapiens
tggaggaagagctgctgctgctgcaggatcttggcgtaggatgagtccatggggggtgcccccctgtcctgcttctggtcc

SEQ ID NO: 130687 - DNA, 78 bp, Homo sapiens
aagagctgctgctgctgcaggatcttggcgtaggatgagtccatggggggtgcccccctgtcctgcttctggtccggg

SEQ ID NO: 130688 - DNA, 73 bp, Homo sapiens
ctgcaggatcttggcgtaggatgagtccatggggggtgcccccctgtcctgcttctggtccggggggatgtac

SEQ ID NO: 130689 - DNA, 71 bp, Homo sapiens
atcttggcgtaggatgagtccatggggggtgcccccctgtcctgcttctggtccggggggatgtactggtg

SEQ ID NO: 130690 - DNA, 71 bp, Homo sapiens
atgagtccatggggggtgcccccctgtcctgcttctggtccggggggatgtactggtggtacttgagcttc

SEQ ID NO: 130691 - DNA, 69 bp, Homo sapiens
atggggggtgcccccctgtcctgcttctggtccggggggatgtactggtggtacttgagcttcttcacc

SEQ ID NO: 130692 - DNA, 72 bp, Homo sapiens
cccctgtcctgcttctggtccggggggatgtactggtggtacttgagcttcttcacctttggcttcagctcc

SEQ ID NO: 130693 - DNA, 73 bp, Homo sapiens
tgcttctggtccggggggatgtactggtggtacttgagcttcttcacctttggcttcagctccttggccttct

SEQ ID NO: 130694 - DNA, 77 bp, Homo sapiens
tccggggggatgtactggtggtacttgagcttcttcacctttggcttcagctccttggccttcttgctgcgctgtga

SEQ ID NO: 130695 - DNA, 81 bp, Homo sapiens
atgtactggtggtacttgagcttcttcacctttggcttcagctccttggccttcttgctgcgctgtgacttctcactggca

SEQ ID NO: 130696 - DNA, 80 bp, Homo sapiens
tacttgagcttcttcacctttggcttcagctccttggccttcttgctgcgctgtgacttctcactggcagacttgggttg

SEQ ID NO: 130697 - DNA, 81 bp, Homo sapiens
ttcttcacctttggcttcagctccttggccttcttgctgcgctgtgacttctcactggcagacttgggttggctttgctga

SEQ ID NO: 130698 - DNA, 82 bp, Homo sapiens
tttggcttcagctccttggccttcttgctgcgctgtgacttctcactggcagacttgggttggctttgctgagggcacagga

SEQ ID NO: 130699 - DNA, 82 bp, Homo sapiens
tccttggccttcttgctgcgctgtgacttctcactggcagacttgggttggctttgctgagggcacaggagacagggtgcca

SEQ ID NO: 130700 - DNA, 81 bp, Homo sapiens
cttcttgctgcgctgtgacttctcactggcagacttgggttggctttgctgagggcacaggagacagggtgccattcaggg

SEQ ID NO: 130701 - DNA, 69 bp, Homo sapiens
aaagggcacagggaaggggagggtacaatcactggcagaaatgtaccttaatgagtgtgggggtggact

SEQ ID NO: 130702 - DNA, 70 bp, Homo sapiens
agggaaggggagggtacaatcactggcagaaatgtaccttaatgagtgtgggggtggacttggcagtggg

SEQ ID NO: 130703 - DNA, 73 bp, Homo sapiens
agggtacaatcactggcagaaatgtaccttaatgagtgtgggggtggacttggcagtggggatagtggttcca

SEQ ID NO: 130704 - DNA, 74 bp, Homo sapiens
aatcactggcagaaatgtaccttaatgagtgtgggggtggacttggcagtggggatagtggttccattggtgag

SEQ ID NO: 130705 - DNA, 72 bp, Homo sapiens
agaaatgtaccttaatgagtgtgggggtggacttggcagtggggatagtggttccattggtgaggctgggag

SEQ ID NO: 130706 - DNA, 75 bp, Homo sapiens
ccttaatgagtgtgggggtggacttggcagtggggatagtggttccattggtgaggctgggaggcagcagaggtg

SEQ ID NO: 130707 - DNA, 75 bp, Homo sapiens
gggtggacttggcagtggggatagtggttccattggtgaggctgggaggcagcagaggtgggggaggcagaggag

SEQ ID NO: 130708 - DNA, 79 bp, Homo sapiens
acttggcagtggggatagtggttccattggtgaggctgggaggcagcagaggtgggggaggcagaggaggctgctctgc

SEQ ID NO: 130709 - DNA, 78 bp, Homo sapiens
atagtggttccattggtgaggctgggaggcagcagaggtgggggaggcagaggaggctgctctgccaggaaaagcatt

SEQ ID NO: 130710 - DNA, 80 bp, Homo sapiens
ttccattggtgaggctgggaggcagcagaggtgggggaggcagaggaggctgctctgccaggaaaagcatttctctggaa

SEQ ID NO: 130711 - DNA, 79 bp, Homo sapiens
gctgggaggcagcagaggtgggggaggcagaggaggctgctctgccaggaaaagcatttctctggaatcccggcccatc

SEQ ID NO: 130712 - DNA, 75 bp, Homo sapiens
agcagaggtgggggaggcagaggaggctgctctgccaggaaaagcatttctctggaatcccggcccatcggaagt

SEQ ID NO: 130713 - DNA, 76 bp, Homo sapiens
ggggaggcagaggaggctgctctgccaggaaaagcatttctctggaatcccggcccatcggaagttgagacacaac

SEQ ID NO: 130714 - DNA, 76 bp, Homo sapiens
aggaggctgctctgccaggaaaagcatttctctggaatcccggcccatcggaagttgagacacaacctgagaggga

SEQ ID NO: 130715 - DNA, 72 bp, Homo sapiens
ctctgccaggaaaagcatttctctggaatcccggcccatcggaagttgagacacaacctgagagggaaaaag

SEQ ID NO: 130716 - DNA, 69 bp, Homo sapiens
aggaaaagcatttctctggaatcccggcccatcggaagttgagacacaacctgagagggaaaaagggaa

SEQ ID NO: 130717 - DNA, 71 bp, Homo sapiens
atttctctggaatcccggcccatcggaagttgagacacaacctgagagggaaaaagggaagtgaggacatg

SEQ ID NO: 130718 - DNA, 81 bp, Homo sapiens
agccctagcaccttggagctggggaagcatctggaagcacacactcacctgggtgggggatgcagaggtggcactgagcag

SEQ ID NO: 130719 - DNA, 83 bp, Homo sapiens
ttggagctggggaagcatctggaagcacacactcacctgggtgggggatgcagaggtggcactgagcagtggttcgctgactc

SEQ ID NO: 130720 - DNA, 82 bp, Homo sapiens
ggaagcatctggaagcacacactcacctgggtgggggatgcagaggtggcactgagcagtggttcgctgactcgggcctcca

SEQ ID NO: 130721 - DNA, 79 bp, Homo sapiens
atctggaagcacacactcacctgggtgggggatgcagaggtggcactgagcagtggttcgctgactcgggcctccaggg

SEQ ID NO: 130722 - DNA, 78 bp, Homo sapiens
actcacctgggtgggggatgcagaggtggcactgagcagtggttcgctgactcgggcctccaggggtgacggcacaga

SEQ ID NO: 130723 - DNA, 77 bp, Homo sapiens
gtgggggatgcagaggtggcactgagcagtggttcgctgactcgggcctccaggggtgacggcacagaaccctggga

SEQ ID NO: 130724 - DNA, 80 bp, Homo sapiens
atgcagaggtggcactgagcagtggttcgctgactcgggcctccaggggtgacggcacagaaccctgggactcatggctg

SEQ ID NO: 130725 - DNA, 79 bp, Homo sapiens
actgagcagtggttcgctgactcgggcctccaggggtgacggcacagaaccctgggactcatggctggcaggctgctcg

SEQ ID NO: 130726 - DNA, 75 bp, Homo sapiens
agtggttcgctgactcgggcctccaggggtgacggcacagaaccctgggactcatggctggcaggctgctcgggg

SEQ ID NO: 130727 - DNA, 77 bp, Homo sapiens
ctgactcgggcctccaggggtgacggcacagaaccctgggactcatggctggcaggctgctcgggggataaggcatc

SEQ ID NO: 130728 - DNA, 81 bp, Homo sapiens
caggggtgacggcacagaaccctgggactcatggctggcaggctgctcgggggataaggcatcgctgctgtcctcatcgaa

SEQ ID NO: 130729 - DNA, 82 bp, Homo sapiens
gtgacggcacagaaccctgggactcatggctggcaggctgctcgggggataaggcatcgctgctgtcctcatcgaaggaaga

SEQ ID NO: 130730 - DNA, 83 bp, Homo sapiens
cctgggactcatggctggcaggctgctcgggggataaggcatcgctgctgtcctcatcgaaggaagagctgtctgctactttg

SEQ ID NO: 130731 - DNA, 83 bp, Homo sapiens
atggctggcaggctgctcgggggataaggcatcgctgctgtcctcatcgaaggaagagctgtctgctactttgggatagttca

SEQ ID NO: 130732 - DNA, 80 bp, Homo sapiens
aggctgctcgggggataaggcatcgctgctgtcctcatcgaaggaagagctgtctgctactttgggatagttcacctggc

SEQ ID NO: 130733 - DNA, 79 bp, Homo sapiens
gggataaggcatcgctgctgtcctcatcgaaggaagagctgtctgctactttgggatagttcacctggcccactgaaac

SEQ ID NO: 130734 - DNA, 78 bp, Homo sapiens
aaggcatcgctgctgtcctcatcgaaggaagagctgtctgctactttgggatagttcacctggcccactgaaacccaa

SEQ ID NO: 130735 - DNA, 77 bp, Homo sapiens
tcctcatcgaaggaagagctgtctgctactttgggatagttcacctggcccactgaaacccaaagctggtgtgagat

SEQ ID NO: 130736 - DNA, 74 bp, Homo sapiens
aaggaagagctgtctgctactttgggatagttcacctggcccactgaaacccaaagctggtgtgagattccact

SEQ ID NO: 130737 - DNA, 83 bp, Homo sapiens
ctgcatctcagctgcctctcacacagggtggctgggtcctcctcaccaatgatggcttccttcaggctggactcaacaggaag

SEQ ID NO: 130738 - DNA, 79 bp, Homo sapiens
agctgcctctcacacagggtggctgggtcctcctcaccaatgatggcttccttcaggctggactcaacaggaaggatgt

SEQ ID NO: 130739 - DNA, 77 bp, Homo sapiens
acacagggtggctgggtcctcctcaccaatgatggcttccttcaggctggactcaacaggaaggatgttcttctcca

SEQ ID NO: 130740 - DNA, 80 bp, Homo sapiens
tggctgggtcctcctcaccaatgatggcttccttcaggctggactcaacaggaaggatgttcttctccaccagctccatg

SEQ ID NO: 130741 - DNA, 79 bp, Homo sapiens
gtcctcctcaccaatgatggcttccttcaggctggactcaacaggaaggatgttcttctccaccagctccatggggcca

SEQ ID NO: 130742 - DNA, 80 bp, Homo sapiens
aatgatggcttccttcaggctggactcaacaggaaggatgttcttctccaccagctccatggggccaggcctctgtgcaa

SEQ ID NO: 130743 - DNA, 80 bp, Homo sapiens
ttccttcaggctggactcaacaggaaggatgttcttctccaccagctccatggggccaggcctctgtgcaatcttctcat

SEQ ID NO: 130744 - DNA, 81 bp, Homo sapiens
actcaacaggaaggatgttcttctccaccagctccatggggccaggcctctgtgcaatcttctcattgaggtcatcggcta

SEQ ID NO: 130745 - DNA, 81 bp, Homo sapiens
acaggaaggatgttcttctccaccagctccatggggccaggcctctgtgcaatcttctcattgaggtcatcggctagtctg

SEQ ID NO: 130746 - DNA, 85 bp, Homo sapiens
ttcttctccaccagctccatggggccaggcctctgtgcaatcttctcattgaggtcatcggctagtctggctctcttcagcttca

SEQ ID NO: 130747 - DNA, 86 bp, Homo sapiens
agctccatggggccaggcctctgtgcaatcttctcattgaggtcatcggctagtctggctctcttcagcttcagctgcttggcctg

SEQ ID NO: 130748 - DNA, 88 bp, Homo sapiens
gccaggcctctgtgcaatcttctcattgaggtcatcggctagtctggctctcttcagcttcagctgcttggcctggagggatggctca

SEQ ID NO: 130749 - DNA, 87 bp, Homo sapiens
tgtgcaatcttctcattgaggtcatcggctagtctggctctcttcagcttcagctgcttggcctggagggatggctcagccgaggtc

SEQ ID NO: 130750 - DNA, 84 bp, Homo sapiens
aatcttctcattgaggtcatcggctagtctggctctcttcagcttcagctgcttggcctggagggatggctcagccgaggtctc

SEQ ID NO: 130751 - DNA, 85 bp, Homo sapiens
ttgaggtcatcggctagtctggctctcttcagcttcagctgcttggcctggagggatggctcagccgaggtctctgcccatggga

SEQ ID NO: 130752 - DNA, 81 bp, Homo sapiens
ctagtctggctctcttcagcttcagctgcttggcctggagggatggctcagccgaggtctctgcccatgggagagaaaggg

SEQ ID NO: 130753 - DNA, 82 bp, Homo sapiens
tcttcagcttcagctgcttggcctggagggatggctcagccgaggtctctgcccatgggagagaaaggggtgcaggaagata

SEQ ID NO: 130754 - DNA, 82 bp, Homo sapiens
agcttcagctgcttggcctggagggatggctcagccgaggtctctgcccatgggagagaaaggggtgcaggaagatatatga

SEQ ID NO: 130755 - DNA, 79 bp, Homo sapiens
agtagtgagtacacacagtgagaactggatctagatggaaaagcaattccaatctccacaccttccaaaatgtgcatcc

SEQ ID NO: 130756 - DNA, 81 bp, Homo sapiens
tacacacagtgagaactggatctagatggaaaagcaattccaatctccacaccttccaaaatgtgcatcctgaccagctcc

SEQ ID NO: 130757 - DNA, 79 bp, Homo sapiens
agaactggatctagatggaaaagcaattccaatctccacaccttccaaaatgtgcatcctgaccagctccgatctctcc

SEQ ID NO: 130758 - DNA, 77 bp, Homo sapiens
tagatggaaaagcaattccaatctccacaccttccaaaatgtgcatcctgaccagctccgatctctccggccgggaa

SEQ ID NO: 130759 - DNA, 75 bp, Homo sapiens
aagcaattccaatctccacaccttccaaaatgtgcatcctgaccagctccgatctctccggccgggaacgaatct

SEQ ID NO: 130760 - DNA, 74 bp, Homo sapiens
aatctccacaccttccaaaatgtgcatcctgaccagctccgatctctccggccgggaacgaatcttccgtttga

SEQ ID NO: 130761 - DNA, 77 bp, Homo sapiens
tccaaaatgtgcatcctgaccagctccgatctctccggccgggaacgaatcttccgtttgagatagtcctctgtcta

SEQ ID NO: 130762 - DNA, 77 bp, Homo sapiens
aatgtgcatcctgaccagctccgatctctccggccgggaacgaatcttccgtttgagatagtcctctgtctacagaa

SEQ ID NO: 130763 - DNA, 73 bp, Homo sapiens
ctgaccagctccgatctctccggccgggaacgaatcttccgtttgagatagtcctctgtctacagaaaaaaca

SEQ ID NO: 130764 - DNA, 70 bp, Homo sapiens
atctctccggccgggaacgaatcttccgtttgagatagtcctctgtctacagaaaaaacacaccaagaaa

SEQ ID NO: 130765 - DNA, 71 bp, Homo sapiens
cgggaacgaatcttccgtttgagatagtcctctgtctacagaaaaaacacaccaagaaactctcaaatcca

SEQ ID NO: 130766 - DNA, 73 bp, Homo sapiens
cgaatcttccgtttgagatagtcctctgtctacagaaaaaacacaccaagaaactctcaaatccaggtcacag

SEQ ID NO: 130767 - DNA, 67 bp, Homo sapiens
tgaaaatgctctttgggagttctgagggggaaaaaaggtaccttaccctggcccgctccaagctcct

SEQ ID NO: 130768 - DNA, 70 bp, Homo sapiens
tttgggagttctgagggggaaaaaaggtaccttaccctggcccgctccaagctccttctctgctcatgaa

SEQ ID NO: 130769 - DNA, 73 bp, Homo sapiens
ttctgagggggaaaaaaggtaccttaccctggcccgctccaagctccttctctgctcatgaaatgcggctgga

SEQ ID NO: 130770 - DNA, 72 bp, Homo sapiens
aaaaaggtaccttaccctggcccgctccaagctccttctctgctcatgaaatgcggctggacttttcaaagc

SEQ ID NO: 130771 - DNA, 78 bp, Homo sapiens
taccttaccctggcccgctccaagctccttctctgctcatgaaatgcggctggacttttcaaagctgttgagagaaga

SEQ ID NO: 130772 - DNA, 76 bp, Homo sapiens
cccgctccaagctccttctctgctcatgaaatgcggctggacttttcaaagctgttgagagaagaaccgtaaagat

SEQ ID NO: 130773 - DNA, 76 bp, Homo sapiens
agctccttctctgctcatgaaatgcggctggacttttcaaagctgttgagagaagaaccgtaaagattaccttcaa

SEQ ID NO: 130774 - DNA, 80 bp, Homo sapiens
tgctcatgaaatgcggctggacttttcaaagctgttgagagaagaaccgtaaagattaccttcaagcgaagcatcatgtc

SEQ ID NO: 130775 - DNA, 77 bp, Homo sapiens
atgaaatgcggctggacttttcaaagctgttgagagaagaaccgtaaagattaccttcaagcgaagcatcatgtcta

SEQ ID NO: 130776 - DNA, 77 bp, Homo sapiens
acttttcaaagctgttgagagaagaaccgtaaagattaccttcaagcgaagcatcatgtctagtgctacgatattca

SEQ ID NO: 130777 - DNA, 78 bp, Homo sapiens
aaagctgttgagagaagaaccgtaaagattaccttcaagcgaagcatcatgtctagtgctacgatattcagtggagaa

SEQ ID NO: 130778 - DNA, 77 bp, Homo sapiens
agaagaaccgtaaagattaccttcaagcgaagcatcatgtctagtgctacgatattcagtggagaaggcatcttaaa

SEQ ID NO: 130779 - DNA, 78 bp, Homo sapiens
accgtaaagattaccttcaagcgaagcatcatgtctagtgctacgatattcagtggagaaggcatcttaaattcatgt

SEQ ID NO: 130780 - DNA, 81 bp, Homo sapiens
ttaccttcaagcgaagcatcatgtctagtgctacgatattcagtggagaaggcatcttaaattcatgttactggctgggcg

SEQ ID NO: 130781 - DNA, 77 bp, Homo sapiens
aaaaaatcacattactgttagtagtactataaatatcagttgaagtgaaggcaatgacacctgagtaagcatgtatc

SEQ ID NO: 130782 - DNA, 79 bp, Homo sapiens
atcacattactgttagtagtactataaatatcagttgaagtgaaggcaatgacacctgagtaagcatgtatctttatgg

SEQ ID NO: 130783 - DNA, 78 bp, Homo sapiens
tgttagtagtactataaatatcagttgaagtgaaggcaatgacacctgagtaagcatgtatctttatggtttagctac

SEQ ID NO: 130784 - DNA, 78 bp, Homo sapiens
tataaatatcagttgaagtgaaggcaatgacacctgagtaagcatgtatctttatggtttagctaccccattcaaaca

SEQ ID NO: 130785 - DNA, 75 bp, Homo sapiens
ttgaagtgaaggcaatgacacctgagtaagcatgtatctttatggtttagctaccccattcaaacagttttggta

SEQ ID NO: 130786 - DNA, 73 bp, Homo sapiens
gcaatgacacctgagtaagcatgtatctttatggtttagctaccccattcaaacagttttggtagaaaccaaa

SEQ ID NO: 130787 - DNA, 70 bp, Homo sapiens
acacctgagtaagcatgtatctttatggtttagctaccccattcaaacagttttggtagaaaccaaaata

SEQ ID NO: 130788 - DNA, 69 bp, Homo sapiens
atgtatctttatggtttagctaccccattcaaacagttttggtagaaaccaaaatatgactcctaatgg

SEQ ID NO: 130789 - DNA, 68 bp, Homo sapiens
tttatggtttagctaccccattcaaacagttttggtagaaaccaaaatatgactcctaatgggaactg

SEQ ID NO: 130790 - DNA, 71 bp, Homo sapiens
ttagctaccccattcaaacagttttggtagaaaccaaaatatgactcctaatgggaactgtcactgcctaa

SEQ ID NO: 130791 - DNA, 71 bp, Homo sapiens
aaacagttttggtagaaaccaaaatatgactcctaatgggaactgtcactgcctaagcttgggctatataa

SEQ ID NO: 130792 - DNA, 71 bp, Homo sapiens
aacagttttggtagaaaccaaaatatgactcctaatgggaactgtcactgcctaagcttgggctatataaa

SEQ ID NO: 130793 - DNA, 73 bp, Homo sapiens
ttttggtagaaaccaaaatatgactcctaatgggaactgtcactgcctaagcttgggctatataaagtgcacc

SEQ ID NO: 130794 - DNA, 75 bp, Homo sapiens
aaaccaaaatatgactcctaatgggaactgtcactgcctaagcttgggctatataaagtgcacccatggaatgta

SEQ ID NO: 130795 - DNA, 74 bp, Homo sapiens
aaaatatgactcctaatgggaactgtcactgcctaagcttgggctatataaagtgcacccatggaatgtaactt

SEQ ID NO: 130796 - DNA, 75 bp, Homo sapiens
aatatgactcctaatgggaactgtcactgcctaagcttgggctatataaagtgcacccatggaatgtaactttaa

SEQ ID NO: 130797 - DNA, 73 bp, Homo sapiens
actcctaatgggaactgtcactgcctaagcttgggctatataaagtgcacccatggaatgtaactttaacaaa

SEQ ID NO: 130798 - DNA, 73 bp, Homo sapiens
atgggaactgtcactgcctaagcttgggctatataaagtgcacccatggaatgtaactttaacaaacaccctg

SEQ ID NO: 130799 - DNA, 73 bp, Homo sapiens
aactgtcactgcctaagcttgggctatataaagtgcacccatggaatgtaactttaacaaacaccctggccca

SEQ ID NO: 130800 - DNA, 74 bp, Homo sapiens
taagcttgggctatataaagtgcacccatggaatgtaactttaacaaacaccctggcccatgactggaccgtca

SEQ ID NO: 130801 - DNA, 71 bp, Homo sapiens
agtgcacccatggaatgtaactttaacaaacaccctggcccatgactggaccgtcagccgcaaatccccct

SEQ ID NO: 130802 - DNA, 71 bp, Homo sapiens
aatgtaactttaacaaacaccctggcccatgactggaccgtcagccgcaaatcccccttcagctaggactc

SEQ ID NO: 130803 - DNA, 71 bp, Homo sapiens
actttaacaaacaccctggcccatgactggaccgtcagccgcaaatcccccttcagctaggactccaagaa

SEQ ID NO: 130804 - DNA, 77 bp, Homo sapiens
ctggcccatgactggaccgtcagccgcaaatcccccttcagctaggactccaagaacgcctgctaggcctcacatta

SEQ ID NO: 130805 - DNA, 77 bp, Homo sapiens
atgactggaccgtcagccgcaaatcccccttcagctaggactccaagaacgcctgctaggcctcacattattctcag

SEQ ID NO: 130806 - DNA, 76 bp, Homo sapiens
aaatcccccttcagctaggactccaagaacgcctgctaggcctcacattattctcaggacacctgcacacaggaag

SEQ ID NO: 130807 - DNA, 81 bp, Homo sapiens
actccaagaacgcctgctaggcctcacattattctcaggacacctgcacacaggaaggggcacagatgcatgccaaattaa

SEQ ID NO: 130808 - DNA, 80 bp, Homo sapiens
tcacattattctcaggacacctgcacacaggaaggggcacagatgcatgccaaattaaccttacttcctcaacctcacga

SEQ ID NO: 130809 - DNA, 79 bp, Homo sapiens
tcaggacacctgcacacaggaaggggcacagatgcatgccaaattaaccttacttcctcaacctcacgaggaatcataa

SEQ ID NO: 130810 - DNA, 76 bp, Homo sapiens
acctgcacacaggaaggggcacagatgcatgccaaattaaccttacttcctcaacctcacgaggaatcataaagtg

SEQ ID NO: 130811 - DNA, 73 bp, Homo sapiens
aaggggcacagatgcatgccaaattaaccttacttcctcaacctcacgaggaatcataaagtggccaaactgt

SEQ ID NO: 130812 - DNA, 74 bp, Homo sapiens
agatgcatgccaaattaaccttacttcctcaacctcacgaggaatcataaagtggccaaactgtttcaatggga

SEQ ID NO: 130813 - DNA, 69 bp, Homo sapiens
aaattaaccttacttcctcaacctcacgaggaatcataaagtggccaaactgtttcaatgggacagtta

SEQ ID NO: 130814 - DNA, 69 bp, Homo sapiens
ttacttcctcaacctcacgaggaatcataaagtggccaaactgtttcaatgggacagttaaaaccaaaa

SEQ ID NO: 130815 - DNA, 70 bp, Homo sapiens
cctcaacctcacgaggaatcataaagtggccaaactgtttcaatgggacagttaaaaccaaaaagatata

SEQ ID NO: 130816 - DNA, 70 bp, Homo sapiens
ataaagtggccaaactgtttcaatgggacagttaaaaccaaaaagatatatgtccactcggcactatttc

SEQ ID NO: 130817 - DNA, 73 bp, Homo sapiens
tgggacagttaaaaccaaaaagatatatgtccactcggcactatttccttcttcactgcacctgttatttata

SEQ ID NO: 130818 - DNA, 74 bp, Homo sapiens
aaccaaaaagatatatgtccactcggcactatttccttcttcactgcacctgttatttatagtgctgctaaaat

SEQ ID NO: 130819 - DNA, 74 bp, Homo sapiens
aaaagatatatgtccactcggcactatttccttcttcactgcacctgttatttatagtgctgctaaaattaact

SEQ ID NO: 130820 - DNA, 75 bp, Homo sapiens
actcggcactatttccttcttcactgcacctgttatttatagtgctgctaaaattaacttgaatttcatctctaa

SEQ ID NO: 130821 - DNA, 76 bp, Homo sapiens
gcactatttccttcttcactgcacctgttatttatagtgctgctaaaattaacttgaatttcatctctaaggacta

SEQ ID NO: 130822 - DNA, 72 bp, Homo sapiens
cttcactgcacctgttatttatagtgctgctaaaattaacttgaatttcatctctaaggactaaaagaaccc

SEQ ID NO: 130823 - DNA, 75 bp, Homo sapiens
tatagtgctgctaaaattaacttgaatttcatctctaaggactaaaagaaccccatggcaattgtatgtgaagga

SEQ ID NO: 130824 - DNA, 72 bp, Homo sapiens
aaattaacttgaatttcatctctaaggactaaaagaaccccatggcaattgtatgtgaaggaacacacacaa

SEQ ID NO: 130825 - DNA, 74 bp, Homo sapiens
atctctaaggactaaaagaaccccatggcaattgtatgtgaaggaacacacacaaccgacagctgagacgaagg

SEQ ID NO: 130826 - DNA, 76 bp, Homo sapiens
actaaaagaaccccatggcaattgtatgtgaaggaacacacacaaccgacagctgagacgaagggctcagctctat

SEQ ID NO: 130827 - DNA, 81 bp, Homo sapiens
catggcaattgtatgtgaaggaacacacacaaccgacagctgagacgaagggctcagctctattctggggataccacacaa

SEQ ID NO: 130828 - DNA, 78 bp, Homo sapiens
aattgtatgtgaaggaacacacacaaccgacagctgagacgaagggctcagctctattctggggataccacacaaaga

SEQ ID NO: 130829 - DNA, 76 bp, Homo sapiens
aaggaacacacacaaccgacagctgagacgaagggctcagctctattctggggataccacacaaagaccacaagtc

SEQ ID NO: 130830 - DNA, 77 bp, Homo sapiens
aaccgacagctgagacgaagggctcagctctattctggggataccacacaaagaccacaagtctcgacttctgcaaa

SEQ ID NO: 130831 - DNA, 79 bp, Homo sapiens
agctgagacgaagggctcagctctattctggggataccacacaaagaccacaagtctcgacttctgcaaacaacactca

SEQ ID NO: 130832 - DNA, 77 bp, Homo sapiens
aagggctcagctctattctggggataccacacaaagaccacaagtctcgacttctgcaaacaacactcaggtggcaa

SEQ ID NO: 130833 - DNA, 75 bp, Homo sapiens
tattctggggataccacacaaagaccacaagtctcgacttctgcaaacaacactcaggtggcaagaccaaaccaa

SEQ ID NO: 130834 - DNA, 76 bp, Homo sapiens
ataccacacaaagaccacaagtctcgacttctgcaaacaacactcaggtggcaagaccaaaccaagagcctccaga

SEQ ID NO: 130835 - DNA, 74 bp, Homo sapiens
acacaaagaccacaagtctcgacttctgcaaacaacactcaggtggcaagaccaaaccaagagcctccagaaag

SEQ ID NO: 130836 - DNA, 78 bp, Homo sapiens
acaagtctcgacttctgcaaacaacactcaggtggcaagaccaaaccaagagcctccagaaaggctgcaccatgaatg

SEQ ID NO: 130837 - DNA, 78 bp, Homo sapiens
acttctgcaaacaacactcaggtggcaagaccaaaccaagagcctccagaaaggctgcaccatgaatggaaggtctga

SEQ ID NO: 130838 - DNA, 75 bp, Homo sapiens
aacaacactcaggtggcaagaccaaaccaagagcctccagaaaggctgcaccatgaatggaaggtctgactcctt

SEQ ID NO: 130839 - DNA, 74 bp, Homo sapiens
tggcaagaccaaaccaagagcctccagaaaggctgcaccatgaatggaaggtctgactccttttgtcaaaaact

SEQ ID NO: 130840 - DNA, 73 bp, Homo sapiens
aaaccaagagcctccagaaaggctgcaccatgaatggaaggtctgactccttttgtcaaaaacttggctgtaa

SEQ ID NO: 130841 - DNA, 75 bp, Homo sapiens
tccagaaaggctgcaccatgaatggaaggtctgactccttttgtcaaaaacttggctgtaaggacaaatagcaac

SEQ ID NO: 130842 - DNA, 73 bp, Homo sapiens
ttttgtcaaaaacttggctgtaaggacaaatagcaacttaagacactctgaggatgagagggaaaggcctgac

SEQ ID NO: 130843 - DNA, 74 bp, Homo sapiens
aaaaacttggctgtaaggacaaatagcaacttaagacactctgaggatgagagggaaaggcctgactcacttca

SEQ ID NO: 130844 - DNA, 75 bp, Homo sapiens
ttaagacactctgaggatgagagggaaaggcctgactcacttcaagtagggaacagaggcaataagagagaaatt

SEQ ID NO: 130845 - DNA, 74 bp, Homo sapiens
aggatgagagggaaaggcctgactcacttcaagtagggaacagaggcaataagagagaaatttataagactgtg

SEQ ID NO: 130846 - DNA, 73 bp, Homo sapiens
aaaggcctgactcacttcaagtagggaacagaggcaataagagagaaatttataagactgtggtcagtttcac

SEQ ID NO: 130847 - DNA, 74 bp, Homo sapiens
cctgactcacttcaagtagggaacagaggcaataagagagaaatttataagactgtggtcagtttcacttctcc

SEQ ID NO: 130848 - DNA, 72 bp, Homo sapiens
agtagggaacagaggcaataagagagaaatttataagactgtggtcagtttcacttctcctgccctagaatt

SEQ ID NO: 130849 - DNA, 73 bp, Homo sapiens
aacagaggcaataagagagaaatttataagactgtggtcagtttcacttctcctgccctagaatttccaaaga

SEQ ID NO: 130850 - DNA, 73 bp, Homo sapiens
aataagagagaaatttataagactgtggtcagtttcacttctcctgccctagaatttccaaagagctgtgaaa

SEQ ID NO: 130851 - DNA, 77 bp, Homo sapiens
atttataagactgtggtcagtttcacttctcctgccctagaatttccaaagagctgtgaaactgcgagcagagataa

SEQ ID NO: 130852 - DNA, 78 bp, Homo sapiens
agtttcacttctcctgccctagaatttccaaagagctgtgaaactgcgagcagagataacttttgctaggctgctggc

SEQ ID NO: 130853 - DNA, 82 bp, Homo sapiens
tcctgccctagaatttccaaagagctgtgaaactgcgagcagagataacttttgctaggctgctggctgcggtaggagtgca

SEQ ID NO: 130854 - DNA, 78 bp, Homo sapiens
aatttccaaagagctgtgaaactgcgagcagagataacttttgctaggctgctggctgcggtaggagtgcagggttaa

SEQ ID NO: 130855 - DNA, 80 bp, Homo sapiens
agctgtgaaactgcgagcagagataacttttgctaggctgctggctgcggtaggagtgcagggttaaggagctgctaaaa

SEQ ID NO: 130856 - DNA, 79 bp, Homo sapiens
aaactgcgagcagagataacttttgctaggctgctggctgcggtaggagtgcagggttaaggagctgctaaaagtagca

SEQ ID NO: 130857 - DNA, 80 bp, Homo sapiens
agataacttttgctaggctgctggctgcggtaggagtgcagggttaaggagctgctaaaagtagcaagagagcatagata

SEQ ID NO: 130858 - DNA, 80 bp, Homo sapiens
tttgctaggctgctggctgcggtaggagtgcagggttaaggagctgctaaaagtagcaagagagcatagataggacccta

SEQ ID NO: 130859 - DNA, 80 bp, Homo sapiens
ctgctggctgcggtaggagtgcagggttaaggagctgctaaaagtagcaagagagcatagataggaccctatcctgcctg

SEQ ID NO: 130860 - DNA, 76 bp, Homo sapiens
gtaggagtgcagggttaaggagctgctaaaagtagcaagagagcatagataggaccctatcctgcctgggccgttg

SEQ ID NO: 130861 - DNA, 75 bp, Homo sapiens
agggttaaggagctgctaaaagtagcaagagagcatagataggaccctatcctgcctgggccgttgtgcttcttc

SEQ ID NO: 130862 - DNA, 77 bp, Homo sapiens
ggagctgctaaaagtagcaagagagcatagataggaccctatcctgcctgggccgttgtgcttcttcctccttcctc

SEQ ID NO: 130863 - DNA, 74 bp, Homo sapiens
aaagtagcaagagagcatagataggaccctatcctgcctgggccgttgtgcttcttcctccttcctctccaccc

SEQ ID NO: 130864 - DNA, 72 bp, Homo sapiens
agagcatagataggaccctatcctgcctgggccgttgtgcttcttcctccttcctctccacccccagcgggg

SEQ ID NO: 130865 - DNA, 69 bp, Homo sapiens
ataggaccctatcctgcctgggccgttgtgcttcttcctccttcctctccacccccagcggggggctgg

SEQ ID NO: 130866 - DNA, 74 bp, Homo sapiens
atcctgcctgggccgttgtgcttcttcctccttcctctccacccccagcggggggctgggcctcagcaacagca

SEQ ID NO: 130867 - DNA, 73 bp, Homo sapiens
gttgtgcttcttcctccttcctctccacccccagcggggggctgggcctcagcaacagcagtcccagaagaaa

SEQ ID NO: 130868 - DNA, 74 bp, Homo sapiens
tcctccttcctctccacccccagcggggggctgggcctcagcaacagcagtcccagaagaaagcttcaattgtc

SEQ ID NO: 130869 - DNA, 74 bp, Homo sapiens
tctccacccccagcggggggctgggcctcagcaacagcagtcccagaagaaagcttcaattgtcccagtggtat

SEQ ID NO: 130870 - DNA, 71 bp, Homo sapiens
ggggctgggcctcagcaacagcagtcccagaagaaagcttcaattgtcccagtggtatttatttttaaaaa

SEQ ID NO: 130871 - DNA, 66 bp, Homo sapiens
ttaaaaattttttgtgaatcttaagataaaaaagaaactacagtcttaaaagtactactgagatcc

SEQ ID NO: 130872 - DNA, 71 bp, Homo sapiens
tttgtgaatcttaagataaaaaagaaactacagtcttaaaagtactactgagatcccatcttctaacagaa

SEQ ID NO: 130873 - DNA, 69 bp, Homo sapiens
gaatcttaagataaaaaagaaactacagtcttaaaagtactactgagatcccatcttctaacagaaggg

SEQ ID NO: 130874 - DNA, 70 bp, Homo sapiens
aaagaaactacagtcttaaaagtactactgagatcccatcttctaacagaagggggagctctagatttaa

SEQ ID NO: 130875 - DNA, 71 bp, Homo sapiens
aactacagtcttaaaagtactactgagatcccatcttctaacagaagggggagctctagatttaacaaata

SEQ ID NO: 130876 - DNA, 72 bp, Homo sapiens
ttaaaagtactactgagatcccatcttctaacagaagggggagctctagatttaacaaataacatcaaagaa

SEQ ID NO: 130877 - DNA, 70 bp, Homo sapiens
agatcccatcttctaacagaagggggagctctagatttaacaaataacatcaaagaaaaaccagtacaag

SEQ ID NO: 130878 - DNA, 69 bp, Homo sapiens
tcttctaacagaagggggagctctagatttaacaaataacatcaaagaaaaaccagtacaagttacctc

SEQ ID NO: 130879 - DNA, 67 bp, Homo sapiens
acagaagggggagctctagatttaacaaataacatcaaagaaaaaccagtacaagttacctccccaa

SEQ ID NO: 130880 - DNA, 67 bp, Homo sapiens
tttaacaaataacatcaaagaaaaaccagtacaagttacctccccaacctacctgggcactatccag

SEQ ID NO: 130881 - DNA, 67 bp, Homo sapiens
tcaaagaaaaaccagtacaagttacctccccaacctacctgggcactatccaggattccccacttct

SEQ ID NO: 130882 - DNA, 67 bp, Homo sapiens
aaaaaccagtacaagttacctccccaacctacctgggcactatccaggattccccacttcttacatg

SEQ ID NO: 130883 - DNA, 72 bp, Homo sapiens
ttacctccccaacctacctgggcactatccaggattccccacttcttacatgggcaggtcgtgggcatttca

SEQ ID NO: 130884 - DNA, 71 bp, Homo sapiens
aacctacctgggcactatccaggattccccacttcttacatgggcaggtcgtgggcatttcagtgggtaaa

SEQ ID NO: 130885 - DNA, 73 bp, Homo sapiens
acctgggcactatccaggattccccacttcttacatgggcaggtcgtgggcatttcagtgggtaaatagacac

SEQ ID NO: 130886 - DNA, 73 bp, Homo sapiens
tatccaggattccccacttcttacatgggcaggtcgtgggcatttcagtgggtaaatagacaccccctgcacc

SEQ ID NO: 130887 - DNA, 74 bp, Homo sapiens
acttcttacatgggcaggtcgtgggcatttcagtgggtaaatagacaccccctgcacctgcttctactgtgtaa

SEQ ID NO: 130888 - DNA, 76 bp, Homo sapiens
atgggcaggtcgtgggcatttcagtgggtaaatagacaccccctgcacctgcttctactgtgtaacgctagctcaa

SEQ ID NO: 130889 - DNA, 75 bp, Homo sapiens
gtcgtgggcatttcagtgggtaaatagacaccccctgcacctgcttctactgtgtaacgctagctcaactccaaa

SEQ ID NO: 130890 - DNA, 74 bp, Homo sapiens
atttcagtgggtaaatagacaccccctgcacctgcttctactgtgtaacgctagctcaactccaaacgtcctgc

SEQ ID NO: 130891 - DNA, 76 bp, Homo sapiens
ggtaaatagacaccccctgcacctgcttctactgtgtaacgctagctcaactccaaacgtcctgctctgcaggaac

SEQ ID NO: 130892 - DNA, 81 bp, Homo sapiens
cctgcacctgcttctactgtgtaacgctagctcaactccaaacgtcctgctctgcaggaacccgggtgtgatgcatcacac

SEQ ID NO: 130893 - DNA, 77 bp, Homo sapiens
cttctactgtgtaacgctagctcaactccaaacgtcctgctctgcaggaacccgggtgtgatgcatcacacgtaacc

SEQ ID NO: 130894 - DNA, 78 bp, Homo sapiens
tgtgtaacgctagctcaactccaaacgtcctgctctgcaggaacccgggtgtgatgcatcacacgtaaccttggctct

SEQ ID NO: 130895 - DNA, 76 bp, Homo sapiens
ctcaactccaaacgtcctgctctgcaggaacccgggtgtgatgcatcacacgtaaccttggctcttggaaagctta

SEQ ID NO: 130896 - DNA, 81 bp, Homo sapiens
aaacgtcctgctctgcaggaacccgggtgtgatgcatcacacgtaaccttggctcttggaaagcttagcacatgcatgaga

SEQ ID NO: 130897 - DNA, 82 bp, Homo sapiens
tctgcaggaacccgggtgtgatgcatcacacgtaaccttggctcttggaaagcttagcacatgcatgagacagtaagtacaa

SEQ ID NO: 130898 - DNA, 78 bp, Homo sapiens
aacccgggtgtgatgcatcacacgtaaccttggctcttggaaagcttagcacatgcatgagacagtaagtacaaagaa

SEQ ID NO: 130899 - DNA, 76 bp, Homo sapiens
acacgtaaccttggctcttggaaagcttagcacatgcatgagacagtaagtacaaagaatcaagagaaaacggaca

SEQ ID NO: 130900 - DNA, 77 bp, Homo sapiens
cttggctcttggaaagcttagcacatgcatgagacagtaagtacaaagaatcaagagaaaacggacactgtccaccc

SEQ ID NO: 130901 - DNA, 73 bp, Homo sapiens
acatgcatgagacagtaagtacaaagaatcaagagaaaacggacactgtccaccccaccccagcttccttttc

SEQ ID NO: 130902 - DNA, 70 bp, Homo sapiens
acagtaagtacaaagaatcaagagaaaacggacactgtccaccccaccccagcttccttttctgcctcat

SEQ ID NO: 130903 - DNA, 69 bp, Homo sapiens
agtacaaagaatcaagagaaaacggacactgtccaccccaccccagcttccttttctgcctcatttttc

SEQ ID NO: 130904 - DNA, 75 bp, Homo sapiens
atcaagagaaaacggacactgtccaccccaccccagcttccttttctgcctcatttttctccgcagcactcatca

SEQ ID NO: 130905 - DNA, 76 bp, Homo sapiens
acactgtccaccccaccccagcttccttttctgcctcatttttctccgcagcactcatcactgtcttgacagtctt

SEQ ID NO: 130906 - DNA, 76 bp, Homo sapiens
ccccaccccagcttccttttctgcctcatttttctccgcagcactcatcactgtcttgacagtctttatataaata

SEQ ID NO: 130907 - DNA, 78 bp, Homo sapiens
agcttccttttctgcctcatttttctccgcagcactcatcactgtcttgacagtctttatataaatactacgtatctg

SEQ ID NO: 130908 - DNA, 80 bp, Homo sapiens
cttttctgcctcatttttctccgcagcactcatcactgtcttgacagtctttatataaatactacgtatctggctgggca

SEQ ID NO: 130909 - DNA, 65 bp, Homo sapiens
aaaaaaaaaaggcggaatactacatacttttcttgtttactctcagtctcccacgtttacattta

SEQ ID NO: 130910 - DNA, 69 bp, Homo sapiens
aaaaaggcggaatactacatacttttcttgtttactctcagtctcccacgtttacatttacaacatgtc

SEQ ID NO: 130911 - DNA, 76 bp, Homo sapiens
atactacatacttttcttgtttactctcagtctcccacgtttacatttacaacatgtccccatcagagcacagcaa

SEQ ID NO: 130912 - DNA, 75 bp, Homo sapiens
tcttgtttactctcagtctcccacgtttacatttacaacatgtccccatcagagcacagcaagggttttgtctat

SEQ ID NO: 130913 - DNA, 73 bp, Homo sapiens
tttactctcagtctcccacgtttacatttacaacatgtccccatcagagcacagcaagggttttgtctatttt

SEQ ID NO: 130914 - DNA, 74 bp, Homo sapiens
tctcccacgtttacatttacaacatgtccccatcagagcacagcaagggttttgtctatttttttagtcactca

SEQ ID NO: 130915 - DNA, 75 bp, Homo sapiens
tttacatttacaacatgtccccatcagagcacagcaagggttttgtctatttttttagtcactcacagcattccc

SEQ ID NO: 130916 - DNA, 76 bp, Homo sapiens
atgtccccatcagagcacagcaagggttttgtctatttttttagtcactcacagcattccccaagtgcctagaata

SEQ ID NO: 130917 - DNA, 77 bp, Homo sapiens
atcagagcacagcaagggttttgtctatttttttagtcactcacagcattccccaagtgcctagaataccaggcaca

SEQ ID NO: 130918 - DNA, 74 bp, Homo sapiens
acagcaagggttttgtctatttttttagtcactcacagcattccccaagtgcctagaataccaggcacacagta

SEQ ID NO: 130919 - DNA, 72 bp, Homo sapiens
aagggttttgtctatttttttagtcactcacagcattccccaagtgcctagaataccaggcacacagtatac

SEQ ID NO: 130920 - DNA, 76 bp, Homo sapiens
ttttttagtcactcacagcattccccaagtgcctagaataccaggcacacagtataccctcaataattattcactc

SEQ ID NO: 130921 - DNA, 80 bp, Homo sapiens
tagtcactcacagcattccccaagtgcctagaataccaggcacacagtataccctcaataattattcactcgatgaatta

SEQ ID NO: 130922 - DNA, 78 bp, Homo sapiens
acagcattccccaagtgcctagaataccaggcacacagtataccctcaataattattcactcgatgaattagtgagta

SEQ ID NO: 130923 - DNA, 76 bp, Homo sapiens
attccccaagtgcctagaataccaggcacacagtataccctcaataattattcactcgatgaattagtgagtattc

SEQ ID NO: 130924 - DNA, 78 bp, Homo sapiens
ccaagtgcctagaataccaggcacacagtataccctcaataattattcactcgatgaattagtgagtattctgtaaga

SEQ ID NO: 130925 - DNA, 77 bp, Homo sapiens
aagtgcctagaataccaggcacacagtataccctcaataattattcactcgatgaattagtgagtattctgtaagaa

SEQ ID NO: 130926 - DNA, 76 bp, Homo sapiens
ataccaggcacacagtataccctcaataattattcactcgatgaattagtgagtattctgtaagaaacggacacaa

SEQ ID NO: 130927 - DNA, 75 bp, Homo sapiens
acacagtataccctcaataattattcactcgatgaattagtgagtattctgtaagaaacggacacaaggtgacta

SEQ ID NO: 130928 - DNA, 76 bp, Homo sapiens
attattcactcgatgaattagtgagtattctgtaagaaacggacacaaggtgactagtgacaggaggacaggagga

SEQ ID NO: 130929 - DNA, 77 bp, Homo sapiens
tattctgtaagaaacggacacaaggtgactagtgacaggaggacaggaggattctgcggcagagctctaaactttca

SEQ ID NO: 130930 - DNA, 78 bp, Homo sapiens
acacaaggtgactagtgacaggaggacaggaggattctgcggcagagctctaaactttcatctaaacagccagaattc

SEQ ID NO: 130931 - DNA, 78 bp, Homo sapiens
actagtgacaggaggacaggaggattctgcggcagagctctaaactttcatctaaacagccagaattctggttctcaa

SEQ ID NO: 130932 - DNA, 74 bp, Homo sapiens
aggacaggaggattctgcggcagagctctaaactttcatctaaacagccagaattctggttctcaaccgggttc

SEQ ID NO: 130933 - DNA, 74 bp, Homo sapiens
attctgcggcagagctctaaactttcatctaaacagccagaattctggttctcaaccgggttcgaaacctcaca

SEQ ID NO: 130934 - DNA, 71 bp, Homo sapiens
agagctctaaactttcatctaaacagccagaattctggttctcaaccgggttcgaaacctcacagaagttc

SEQ ID NO: 130935 - DNA, 72 bp, Homo sapiens
taaactttcatctaaacagccagaattctggttctcaaccgggttcgaaacctcacagaagttctggataga

SEQ ID NO: 130936 - DNA, 72 bp, Homo sapiens
atctaaacagccagaattctggttctcaaccgggttcgaaacctcacagaagttctggatagacagtcaagg

SEQ ID NO: 130937 - DNA, 73 bp, Homo sapiens
agaattctggttctcaaccgggttcgaaacctcacagaagttctggatagacagtcaagggatctgtgttcta

SEQ ID NO: 130938 - DNA, 76 bp, Homo sapiens
ttctcaaccgggttcgaaacctcacagaagttctggatagacagtcaagggatctgtgttctagtactgagtgcta

SEQ ID NO: 130939 - DNA, 75 bp, Homo sapiens
cgggttcgaaacctcacagaagttctggatagacagtcaagggatctgtgttctagtactgagtgctaccaatta

SEQ ID NO: 130940 - DNA, 79 bp, Homo sapiens
aacctcacagaagttctggatagacagtcaagggatctgtgttctagtactgagtgctaccaattactgctgggtgaca

SEQ ID NO: 130941 - DNA, 76 bp, Homo sapiens
aagttctggatagacagtcaagggatctgtgttctagtactgagtgctaccaattactgctgggtgacatgggttt

SEQ ID NO: 130942 - DNA, 79 bp, Homo sapiens
tagacagtcaagggatctgtgttctagtactgagtgctaccaattactgctgggtgacatgggttttgactgctttctg

SEQ ID NO: 130943 - DNA, 75 bp, Homo sapiens
atctgtgttctagtactgagtgctaccaattactgctgggtgacatgggttttgactgctttctgggtctaattt

SEQ ID NO: 130944 - DNA, 74 bp, Homo sapiens
gttctagtactgagtgctaccaattactgctgggtgacatgggttttgactgctttctgggtctaattttcttc

SEQ ID NO: 130945 - DNA, 75 bp, Homo sapiens
agtgctaccaattactgctgggtgacatgggttttgactgctttctgggtctaattttcttccagagtgagaatc

SEQ ID NO: 130946 - DNA, 74 bp, Homo sapiens
aattactgctgggtgacatgggttttgactgctttctgggtctaattttcttccagagtgagaatctgcccacc

SEQ ID NO: 130947 - DNA, 73 bp, Homo sapiens
ttttgactgctttctgggtctaattttcttccagagtgagaatctgcccacctctcagaacccttgtaaggaa

SEQ ID NO: 130948 - DNA, 72 bp, Homo sapiens
tttctgggtctaattttcttccagagtgagaatctgcccacctctcagaacccttgtaaggaagaaacacca

SEQ ID NO: 130949 - DNA, 75 bp, Homo sapiens
tctaattttcttccagagtgagaatctgcccacctctcagaacccttgtaaggaagaaacaccagtgagagtgcc

SEQ ID NO: 130950 - DNA, 74 bp, Homo sapiens
agagtgagaatctgcccacctctcagaacccttgtaaggaagaaacaccagtgagagtgccctgaaccaaatgg

SEQ ID NO: 130951 - DNA, 75 bp, Homo sapiens
atctgcccacctctcagaacccttgtaaggaagaaacaccagtgagagtgccctgaaccaaatggtatatgtgtc

SEQ ID NO: 130952 - DNA, 80 bp, Homo sapiens
agaaacaccagtgagagtgccctgaaccaaatggtatatgtgtcgatatattcaggtgttgctgtcaccaaatgctgtaa

SEQ ID NO: 130953 - DNA, 80 bp, Homo sapiens
agtgagagtgccctgaaccaaatggtatatgtgtcgatatattcaggtgttgctgtcaccaaatgctgtaatttggttga

SEQ ID NO: 130954 - DNA, 79 bp, Homo sapiens
agtgccctgaaccaaatggtatatgtgtcgatatattcaggtgttgctgtcaccaaatgctgtaatttggttgaatcac

SEQ ID NO: 130955 - DNA, 81 bp, Homo sapiens
aatggtatatgtgtcgatatattcaggtgttgctgtcaccaaatgctgtaatttggttgaatcactggcttgattcactta

SEQ ID NO: 130956 - DNA, 82 bp, Homo sapiens
atatgtgtcgatatattcaggtgttgctgtcaccaaatgctgtaatttggttgaatcactggcttgattcacttacaggcca

SEQ ID NO: 130957 - DNA, 79 bp, Homo sapiens
atatattcaggtgttgctgtcaccaaatgctgtaatttggttgaatcactggcttgattcacttacaggccagctagtt

SEQ ID NO: 130958 - DNA, 80 bp, Homo sapiens
gtgttgctgtcaccaaatgctgtaatttggttgaatcactggcttgattcacttacaggccagctagtttctgtaccaca

SEQ ID NO: 130959 - DNA, 79 bp, Homo sapiens
aaatgctgtaatttggttgaatcactggcttgattcacttacaggccagctagtttctgtaccacagccagagattctc

SEQ ID NO: 130960 - DNA, 79 bp, Homo sapiens
taatttggttgaatcactggcttgattcacttacaggccagctagtttctgtaccacagccagagattctctgtctaaa

SEQ ID NO: 130961 - DNA, 81 bp, Homo sapiens
tgattcacttacaggccagctagtttctgtaccacagccagagattctctgtctaaaaccctggctgacttgctgcctcaa

SEQ ID NO: 130962 - DNA, 78 bp, Homo sapiens
acttacaggccagctagtttctgtaccacagccagagattctctgtctaaaaccctggctgacttgctgcctcaacaa

SEQ ID NO: 130963 - DNA, 73 bp, Homo sapiens
agagattctctgtctaaaaccctggctgacttgctgcctcaacaacccacactggctatccccaaagggtaag

SEQ ID NO: 130964 - DNA, 73 bp, Homo sapiens
tctgtctaaaaccctggctgacttgctgcctcaacaacccacactggctatccccaaagggtaaggcacaaac

SEQ ID NO: 130965 - DNA, 70 bp, Homo sapiens
acttgctgcctcaacaacccacactggctatccccaaagggtaaggcacaaacccaaaggcacaaaccca

SEQ ID NO: 130966 - DNA, 70 bp, Homo sapiens
caaagggtaaggcacaaacccaaaggcacaaacccaacttctagaagaacaattcaccagaacatcttga

SEQ ID NO: 130967 - DNA, 74 bp, Homo sapiens
taaggcacaaacccaaaggcacaaacccaacttctagaagaacaattcaccagaacatcttgaggacatcatct

SEQ ID NO: 130968 - DNA, 75 bp, Homo sapiens
aacccaaaggcacaaacccaacttctagaagaacaattcaccagaacatcttgaggacatcatcttcatgtacaa

SEQ ID NO: 130969 - DNA, 76 bp, Homo sapiens
aaacccaacttctagaagaacaattcaccagaacatcttgaggacatcatcttcatgtacaaagggtggtgcacca

SEQ ID NO: 130970 - DNA, 78 bp, Homo sapiens
aacttctagaagaacaattcaccagaacatcttgaggacatcatcttcatgtacaaagggtggtgcaccactagtgga

SEQ ID NO: 130971 - DNA, 80 bp, Homo sapiens
agaacaattcaccagaacatcttgaggacatcatcttcatgtacaaagggtggtgcaccactagtggaggacaggtgata

SEQ ID NO: 130972 - DNA, 80 bp, Homo sapiens
aacatcttgaggacatcatcttcatgtacaaagggtggtgcaccactagtggaggacaggtgataggtgaaatggctaca

SEQ ID NO: 130973 - DNA, 83 bp, Homo sapiens
ttgaggacatcatcttcatgtacaaagggtggtgcaccactagtggaggacaggtgataggtgaaatggctacagcatacata

SEQ ID NO: 130974 - DNA, 78 bp, Homo sapiens
aaagggtggtgcaccactagtggaggacaggtgataggtgaaatggctacagcatacatagtccccctcatctgcagt

SEQ ID NO: 130975 - DNA, 80 bp, Homo sapiens
caccactagtggaggacaggtgataggtgaaatggctacagcatacatagtccccctcatctgcagtttcgctttccatg

SEQ ID NO: 130976 - DNA, 78 bp, Homo sapiens
aggtgataggtgaaatggctacagcatacatagtccccctcatctgcagtttcgctttccatggtttcagttattcta

SEQ ID NO: 130977 - DNA, 76 bp, Homo sapiens
aaatggctacagcatacatagtccccctcatctgcagtttcgctttccatggtttcagttattctaggccaaccaa

SEQ ID NO: 130978 - DNA, 74 bp, Homo sapiens
agcatacatagtccccctcatctgcagtttcgctttccatggtttcagttattctaggccaaccaaggtccaaa

SEQ ID NO: 130979 - DNA, 71 bp, Homo sapiens
atagtccccctcatctgcagtttcgctttccatggtttcagttattctaggccaaccaaggtccaaaaatg

SEQ ID NO: 130980 - DNA, 70 bp, Homo sapiens
atctgcagtttcgctttccatggtttcagttattctaggccaaccaaggtccaaaaatgttacagtattt

SEQ ID NO: 130981 - DNA, 69 bp, Homo sapiens
tttcgctttccatggtttcagttattctaggccaaccaaggtccaaaaatgttacagtattttgagtgg

SEQ ID NO: 130982 - DNA, 71 bp, Homo sapiens
gtttcagttattctaggccaaccaaggtccaaaaatgttacagtattttgagtgggcccatattcacataa

SEQ ID NO: 130983 - DNA, 69 bp, Homo sapiens
agttattctaggccaaccaaggtccaaaaatgttacagtattttgagtgggcccatattcacataactt

SEQ ID NO: 130984 - DNA, 70 bp, Homo sapiens
ccaaccaaggtccaaaaatgttacagtattttgagtgggcccatattcacataacttttattacagtgta

SEQ ID NO: 130985 - DNA, 70 bp, Homo sapiens
ggtccaaaaatgttacagtattttgagtgggcccatattcacataacttttattacagtgtattgttaaa

SEQ ID NO: 130986 - DNA, 71 bp, Homo sapiens
gttacagtattttgagtgggcccatattcacataacttttattacagtgtattgttaaaattgctctaatt

SEQ ID NO: 130987 - DNA, 75 bp, Homo sapiens
ttgagtgggcccatattcacataacttttattacagtgtattgttaaaattgctctaatttcttactatgtcaga

SEQ ID NO: 130988 - DNA, 76 bp, Homo sapiens
catattcacataacttttattacagtgtattgttaaaattgctctaatttcttactatgtcagatttacacatcga

SEQ ID NO: 130989 - DNA, 73 bp, Homo sapiens
acttttattacagtgtattgttaaaattgctctaatttcttactatgtcagatttacacatcgaattttgtca

SEQ ID NO: 130990 - DNA, 77 bp, Homo sapiens
acagtgtattgttaaaattgctctaatttcttactatgtcagatttacacatcgaattttgtcataggtcacatgta

SEQ ID NO: 130991 - DNA, 74 bp, Homo sapiens
attgctctaatttcttactatgtcagatttacacatcgaattttgtcataggtcacatgtatagaaaaaaaaaa

SEQ ID NO: 130992 - DNA, 75 bp, Homo sapiens
tactatgtcagatttacacatcgaattttgtcataggtcacatgtatagaaaaaaaaaacacagtacgtatagga

SEQ ID NO: 130993 - DNA, 72 bp, Homo sapiens
cagatttacacatcgaattttgtcataggtcacatgtatagaaaaaaaaaacacagtacgtataggatttgg

SEQ ID NO: 130994 - DNA, 75 bp, Homo sapiens
cacatcgaattttgtcataggtcacatgtatagaaaaaaaaaacacagtacgtataggatttggtaccatctgca

SEQ ID NO: 130995 - DNA, 76 bp, Homo sapiens
ttgtcataggtcacatgtatagaaaaaaaaaacacagtacgtataggatttggtaccatctgcagtttcagatatc

SEQ ID NO: 130996 - DNA, 73 bp, Homo sapiens
aaaacacagtacgtataggatttggtaccatctgcagtttcagatatccactagggggtcttggcacgtgttc

SEQ ID NO: 130997 - DNA, 74 bp, Homo sapiens
acgtataggatttggtaccatctgcagtttcagatatccactagggggtcttggcacgtgttcctcaggaataa

SEQ ID NO: 130998 - DNA, 76 bp, Homo sapiens
taccatctgcagtttcagatatccactagggggtcttggcacgtgttcctcaggaataaggaaggattactctata

SEQ ID NO: 130999 - DNA, 73 bp, Homo sapiens
agtttcagatatccactagggggtcttggcacgtgttcctcaggaataaggaaggattactctatatgaattc

SEQ ID NO: 131000 - DNA, 72 bp, Homo sapiens
agatatccactagggggtcttggcacgtgttcctcaggaataaggaaggattactctatatgaattcctatt

SEQ ID NO: 131001 - DNA, 71 bp, Homo sapiens
gggtcttggcacgtgttcctcaggaataaggaaggattactctatatgaattcctatttggtcctattaag

SEQ ID NO: 131002 - DNA, 71 bp, Homo sapiens
acgtgttcctcaggaataaggaaggattactctatatgaattcctatttggtcctattaaggacattttca

SEQ ID NO: 131003 - DNA, 75 bp, Homo sapiens
tcctcaggaataaggaaggattactctatatgaattcctatttggtcctattaaggacattttcatgtaatggca

SEQ ID NO: 131004 - DNA, 72 bp, Homo sapiens
aggaaggattactctatatgaattcctatttggtcctattaaggacattttcatgtaatggcaagaaaggga

SEQ ID NO: 131005 - DNA, 74 bp, Homo sapiens
ctctatatgaattcctatttggtcctattaaggacattttcatgtaatggcaagaaagggattaatatctgttg

SEQ ID NO: 131006 - DNA, 75 bp, Homo sapiens
tgaattcctatttggtcctattaaggacattttcatgtaatggcaagaaagggattaatatctgttggatgcttg

SEQ ID NO: 131007 - DNA, 74 bp, Homo sapiens
atttggtcctattaaggacattttcatgtaatggcaagaaagggattaatatctgttggatgcttgtatggaaa

SEQ ID NO: 131008 - DNA, 78 bp, Homo sapiens
taaggacattttcatgtaatggcaagaaagggattaatatctgttggatgcttgtatggaaagcactgttctagatat

SEQ ID NO: 131009 - DNA, 76 bp, Homo sapiens
ttcatgtaatggcaagaaagggattaatatctgttggatgcttgtatggaaagcactgttctagatattttaaacc

SEQ ID NO: 131010 - DNA, 75 bp, Homo sapiens
atctgttggatgcttgtatggaaagcactgttctagatattttaaacctgttagctaatttaatattcctaatca

SEQ ID NO: 131011 - DNA, 75 bp, Homo sapiens
tgcttgtatggaaagcactgttctagatattttaaacctgttagctaatttaatattcctaatcattctacatgg

SEQ ID NO: 131012 - DNA, 72 bp, Homo sapiens
acctgttagctaatttaatattcctaatcattctacatggtaggtaatatcccattttatagataaggacag

SEQ ID NO: 131013 - DNA, 72 bp, Homo sapiens
gctaatttaatattcctaatcattctacatggtaggtaatatcccattttatagataaggacagggccaaaa

SEQ ID NO: 131014 - DNA, 72 bp, Homo sapiens
tattcctaatcattctacatggtaggtaatatcccattttatagataaggacagggccaaaaaggaaaggca

SEQ ID NO: 131015 - DNA, 71 bp, Homo sapiens
taggtaatatcccattttatagataaggacagggccaaaaaggaaaggcaagcaaatagcagggataagat

SEQ ID NO: 131016 - DNA, 70 bp, Homo sapiens
cccattttatagataaggacagggccaaaaaggaaaggcaagcaaatagcagggataagattataaccta

SEQ ID NO: 131017 - DNA, 69 bp, Homo sapiens
tatagataaggacagggccaaaaaggaaaggcaagcaaatagcagggataagattataacctaattttt

SEQ ID NO: 131018 - DNA, 66 bp, Homo sapiens
aggacagggccaaaaaggaaaggcaagcaaatagcagggataagattataacctaatttttttaag

SEQ ID NO: 131019 - DNA, 69 bp, Homo sapiens
aaggaaaggcaagcaaatagcagggataagattataacctaatttttttaagtgtcctgaattggaaga

SEQ ID NO: 131020 - DNA, 70 bp, Homo sapiens
aggcaagcaaatagcagggataagattataacctaatttttttaagtgtcctgaattggaagatataacc

SEQ ID NO: 131021 - DNA, 70 bp, Homo sapiens
gcagggataagattataacctaatttttttaagtgtcctgaattggaagatataacctaattctgtaaca

SEQ ID NO: 131022 - DNA, 67 bp, Homo sapiens
ttataacctaatttttttaagtgtcctgaattggaagatataacctaattctgtaacaccctcaacc

SEQ ID NO: 131023 - DNA, 67 bp, Homo sapiens
atttttttaagtgtcctgaattggaagatataacctaattctgtaacaccctcaacctagagttctt

SEQ ID NO: 131024 - DNA, 70 bp, Homo sapiens
tttaagtgtcctgaattggaagatataacctaattctgtaacaccctcaacctagagttctttccactcc

SEQ ID NO: 131025 - DNA, 71 bp, Homo sapiens
aattggaagatataacctaattctgtaacaccctcaacctagagttctttccactcctctgtgttgatttc

SEQ ID NO: 131026 - DNA, 70 bp, Homo sapiens
agatataacctaattctgtaacaccctcaacctagagttctttccactcctctgtgttgatttcttaact

SEQ ID NO: 131027 - DNA, 70 bp, Homo sapiens
taattctgtaacaccctcaacctagagttctttccactcctctgtgttgatttcttaacttcttcaaaag

SEQ ID NO: 131028 - DNA, 70 bp, Homo sapiens
acaccctcaacctagagttctttccactcctctgtgttgatttcttaacttcttcaaaagttagagaaga

SEQ ID NO: 131029 - DNA, 73 bp, Homo sapiens
cctagagttctttccactcctctgtgttgatttcttaacttcttcaaaagttagagaagagaggctgggcatg

SEQ ID NO: 131030 - DNA, 69 bp, Homo sapiens
aaaaaaagagacagaagaaaagaaactgttgggtagggggacaaggtagcttcaatgttcaatgacaca

SEQ ID NO: 131031 - DNA, 74 bp, Homo sapiens
acagaagaaaagaaactgttgggtagggggacaaggtagcttcaatgttcaatgacacacactgtttagatgca

SEQ ID NO: 131032 - DNA, 75 bp, Homo sapiens
aaaagaaactgttgggtagggggacaaggtagcttcaatgttcaatgacacacactgtttagatgcatatctgag

SEQ ID NO: 131033 - DNA, 80 bp, Homo sapiens
ttgggtagggggacaaggtagcttcaatgttcaatgacacacactgtttagatgcatatctgagtccaggcaacatacaa

SEQ ID NO: 131034 - DNA, 83 bp, Homo sapiens
acaaggtagcttcaatgttcaatgacacacactgtttagatgcatatctgagtccaggcaacatacaagagtcaacttggcca

SEQ ID NO: 131035 - DNA, 85 bp, Homo sapiens
ttcaatgttcaatgacacacactgtttagatgcatatctgagtccaggcaacatacaagagtcaacttggccacagcactaggta

SEQ ID NO: 131036 - DNA, 84 bp, Homo sapiens
tgttcaatgacacacactgtttagatgcatatctgagtccaggcaacatacaagagtcaacttggccacagcactaggtaaaga

SEQ ID NO: 131037 - DNA, 79 bp, Homo sapiens
actgtttagatgcatatctgagtccaggcaacatacaagagtcaacttggccacagcactaggtaaagaccaaggcaaa

SEQ ID NO: 131038 - DNA, 81 bp, Homo sapiens
agatgcatatctgagtccaggcaacatacaagagtcaacttggccacagcactaggtaaagaccaaggcaaagaaggctca

SEQ ID NO: 131039 - DNA, 78 bp, Homo sapiens
atctgagtccaggcaacatacaagagtcaacttggccacagcactaggtaaagaccaaggcaaagaaggctcagaaga

SEQ ID NO: 131040 - DNA, 74 bp, Homo sapiens
aacatacaagagtcaacttggccacagcactaggtaaagaccaaggcaaagaaggctcagaagaggggttcaga

SEQ ID NO: 131041 - DNA, 73 bp, Homo sapiens
aagagtcaacttggccacagcactaggtaaagaccaaggcaaagaaggctcagaagaggggttcagagacctg

SEQ ID NO: 131042 - DNA, 74 bp, Homo sapiens
ttggccacagcactaggtaaagaccaaggcaaagaaggctcagaagaggggttcagagacctgtctgaggggcc

SEQ ID NO: 131043 - DNA, 70 bp, Homo sapiens
actaggtaaagaccaaggcaaagaaggctcagaagaggggttcagagacctgtctgaggggccccagggc

SEQ ID NO: 131044 - DNA, 78 bp, Homo sapiens
caaggcaaagaaggctcagaagaggggttcagagacctgtctgaggggccccagggctctcaagcattgagaatcatc

SEQ ID NO: 131045 - DNA, 76 bp, Homo sapiens
aaggctcagaagaggggttcagagacctgtctgaggggccccagggctctcaagcattgagaatcatcgttcaaaa

SEQ ID NO: 131046 - DNA, 75 bp, Homo sapiens
agaagaggggttcagagacctgtctgaggggccccagggctctcaagcattgagaatcatcgttcaaaacctgga

SEQ ID NO: 131047 - DNA, 77 bp, Homo sapiens
agagacctgtctgaggggccccagggctctcaagcattgagaatcatcgttcaaaacctggagctcaccacgtaaca

SEQ ID NO: 131048 - DNA, 77 bp, Homo sapiens
tgtctgaggggccccagggctctcaagcattgagaatcatcgttcaaaacctggagctcaccacgtaacagcctttg

SEQ ID NO: 131049 - DNA, 79 bp, Homo sapiens
ccagggctctcaagcattgagaatcatcgttcaaaacctggagctcaccacgtaacagcctttggcactgatactagaa

SEQ ID NO: 131050 - DNA, 79 bp, Homo sapiens
tctcaagcattgagaatcatcgttcaaaacctggagctcaccacgtaacagcctttggcactgatactagaagacaagt

SEQ ID NO: 131051 - DNA, 77 bp, Homo sapiens
attgagaatcatcgttcaaaacctggagctcaccacgtaacagcctttggcactgatactagaagacaagttggaga

SEQ ID NO: 131052 - DNA, 77 bp, Homo sapiens
atcgttcaaaacctggagctcaccacgtaacagcctttggcactgatactagaagacaagttggagaagctgagaca

SEQ ID NO: 131053 - DNA, 81 bp, Homo sapiens
gagctcaccacgtaacagcctttggcactgatactagaagacaagttggagaagctgagacacaatagctggtcagaagaa

SEQ ID NO: 131054 - DNA, 78 bp, Homo sapiens
acgtaacagcctttggcactgatactagaagacaagttggagaagctgagacacaatagctggtcagaagaaccagaa

SEQ ID NO: 131055 - DNA, 78 bp, Homo sapiens
tttggcactgatactagaagacaagttggagaagctgagacacaatagctggtcagaagaaccagaaacgaagaccaa

SEQ ID NO: 131056 - DNA, 75 bp, Homo sapiens
atactagaagacaagttggagaagctgagacacaatagctggtcagaagaaccagaaacgaagaccaagaaaaga

SEQ ID NO: 131057 - DNA, 74 bp, Homo sapiens
aagacaagttggagaagctgagacacaatagctggtcagaagaaccagaaacgaagaccaagaaaagaattcaa

SEQ ID NO: 131058 - DNA, 76 bp, Homo sapiens
ttggagaagctgagacacaatagctggtcagaagaaccagaaacgaagaccaagaaaagaattcaagatagggcca

SEQ ID NO: 131059 - DNA, 69 bp, Homo sapiens
aaaaaaaagaattcaagatcataatgaccaatcccaaaagactgtttcattttatagtaataataacat

SEQ ID NO: 131060 - DNA, 76 bp, Homo sapiens
attcaagatcataatgaccaatcccaaaagactgtttcattttatagtaataataacattataatctcactggatc

SEQ ID NO: 131061 - DNA, 77 bp, Homo sapiens
gatcataatgaccaatcccaaaagactgtttcattttatagtaataataacattataatctcactggatcctcttca

SEQ ID NO: 131062 - DNA, 77 bp, Homo sapiens
atcccaaaagactgtttcattttatagtaataataacattataatctcactggatcctcttcatagcccatgaggca

SEQ ID NO: 131063 - DNA, 76 bp, Homo sapiens
aaaagactgtttcattttatagtaataataacattataatctcactggatcctcttcatagcccatgaggcaggga

SEQ ID NO: 131064 - DNA, 76 bp, Homo sapiens
attttatagtaataataacattataatctcactggatcctcttcatagcccatgaggcagggaccgttatttcatg

SEQ ID NO: 131065 - DNA, 80 bp, Homo sapiens
aataataacattataatctcactggatcctcttcatagcccatgaggcagggaccgttatttcatgtgtgatgaaactga

SEQ ID NO: 131066 - DNA, 83 bp, Homo sapiens
acattataatctcactggatcctcttcatagcccatgaggcagggaccgttatttcatgtgtgatgaaactgacactggctga

SEQ ID NO: 131067 - DNA, 82 bp, Homo sapiens
actggatcctcttcatagcccatgaggcagggaccgttatttcatgtgtgatgaaactgacactggctgagatgcagtaacc

SEQ ID NO: 131068 - DNA, 86 bp, Homo sapiens
ttcatagcccatgaggcagggaccgttatttcatgtgtgatgaaactgacactggctgagatgcagtaacctgccagatcattcat

SEQ ID NO: 131069 - DNA, 86 bp, Homo sapiens
atgaggcagggaccgttatttcatgtgtgatgaaactgacactggctgagatgcagtaacctgccagatcattcattcatcgagtg

SEQ ID NO: 131070 - DNA, 84 bp, Homo sapiens
agggaccgttatttcatgtgtgatgaaactgacactggctgagatgcagtaacctgccagatcattcattcatcgagtggtgga

SEQ ID NO: 131071 - DNA, 85 bp, Homo sapiens
tatttcatgtgtgatgaaactgacactggctgagatgcagtaacctgccagatcattcattcatcgagtggtggaccccaaccca

SEQ ID NO: 131072 - DNA, 80 bp, Homo sapiens
atgaaactgacactggctgagatgcagtaacctgccagatcattcattcatcgagtggtggaccccaacccaggtctagt

SEQ ID NO: 131073 - DNA, 76 bp, Homo sapiens
agatgcagtaacctgccagatcattcattcatcgagtggtggaccccaacccaggtctagttctgcctttcctttc

SEQ ID NO: 131074 - DNA, 73 bp, Homo sapiens
taacctgccagatcattcattcatcgagtggtggaccccaacccaggtctagttctgcctttcctttcttccc

SEQ ID NO: 131075 - DNA, 71 bp, Homo sapiens
atcattcattcatcgagtggtggaccccaacccaggtctagttctgcctttcctttcttcccttgtctaaa

SEQ ID NO: 131076 - DNA, 68 bp, Homo sapiens
atcgagtggtggaccccaacccaggtctagttctgcctttcctttcttcccttgtctaaaccttctga

SEQ ID NO: 131077 - DNA, 68 bp, Homo sapiens
ccccaacccaggtctagttctgcctttcctttcttcccttgtctaaaccttctgacaaatgtgtcagt

SEQ ID NO: 131078 - DNA, 71 bp, Homo sapiens
acccaggtctagttctgcctttcctttcttcccttgtctaaaccttctgacaaatgtgtcagtttctctca

SEQ ID NO: 131079 - DNA, 72 bp, Homo sapiens
agttctgcctttcctttcttcccttgtctaaaccttctgacaaatgtgtcagtttctctcagtccctgagta

SEQ ID NO: 131080 - DNA, 74 bp, Homo sapiens
ctttcttcccttgtctaaaccttctgacaaatgtgtcagtttctctcagtccctgagtaggccagcttagtctg

SEQ ID NO: 131081 - DNA, 76 bp, Homo sapiens
aaccttctgacaaatgtgtcagtttctctcagtccctgagtaggccagcttagtctgtgctcctctttcctcattt

SEQ ID NO: 131082 - DNA, 75 bp, Homo sapiens
aaatgtgtcagtttctctcagtccctgagtaggccagcttagtctgtgctcctctttcctcatttttaattcttc

SEQ ID NO: 131083 - DNA, 79 bp, Homo sapiens
tttctctcagtccctgagtaggccagcttagtctgtgctcctctttcctcatttttaattcttctctctgatagcagat

SEQ ID NO: 131084 - DNA, 81 bp, Homo sapiens
ctgagtaggccagcttagtctgtgctcctctttcctcatttttaattcttctctctgatagcagattcagcaatttcaaca

SEQ ID NO: 131085 - DNA, 81 bp, Homo sapiens
tgtgctcctctttcctcatttttaattcttctctctgatagcagattcagcaatttcaacagctacttctgccaggtgaaa

SEQ ID NO: 131086 - DNA, 78 bp, Homo sapiens
tttcctcatttttaattcttctctctgatagcagattcagcaatttcaacagctacttctgccaggtgaaaggaggag

SEQ ID NO: 131087 - DNA, 80 bp, Homo sapiens
ttcttctctctgatagcagattcagcaatttcaacagctacttctgccaggtgaaaggaggagggagcactggcccctct

SEQ ID NO: 131088 - DNA, 77 bp, Homo sapiens
atagcagattcagcaatttcaacagctacttctgccaggtgaaaggaggagggagcactggcccctcttccttcagg

SEQ ID NO: 131089 - DNA, 75 bp, Homo sapiens
agcaatttcaacagctacttctgccaggtgaaaggaggagggagcactggcccctcttccttcaggtttgtgtca

SEQ ID NO: 131090 - DNA, 74 bp, Homo sapiens
ttctgccaggtgaaaggaggagggagcactggcccctcttccttcaggtttgtgtcaggacttcctgctgggtg

SEQ ID NO: 131091 - DNA, 74 bp, Homo sapiens
aaaggaggagggagcactggcccctcttccttcaggtttgtgtcaggacttcctgctgggtgtctctcagttca

SEQ ID NO: 131092 - DNA, 78 bp, Homo sapiens
cctcttccttcaggtttgtgtcaggacttcctgctgggtgtctctcagttcatctggggagaggctggagtagccaca

SEQ ID NO: 131093 - DNA, 81 bp, Homo sapiens
ttcaggtttgtgtcaggacttcctgctgggtgtctctcagttcatctggggagaggctggagtagccacagcaagtgctct

SEQ ID NO: 131094 - DNA, 84 bp, Homo sapiens
ttgtgtcaggacttcctgctgggtgtctctcagttcatctggggagaggctggagtagccacagcaagtgctcttggtgcactg

SEQ ID NO: 131095 - DNA, 81 bp, Homo sapiens
ttcctgctgggtgtctctcagttcatctggggagaggctggagtagccacagcaagtgctcttggtgcactggggtttgag

SEQ ID NO: 131096 - DNA, 78 bp, Homo sapiens
agttcatctggggagaggctggagtagccacagcaagtgctcttggtgcactggggtttgaggtggagagggcaactc

SEQ ID NO: 131097 - DNA, 78 bp, Homo sapiens
agaggctggagtagccacagcaagtgctcttggtgcactggggtttgaggtggagagggcaactcctgtgtgtgtccc

SEQ ID NO: 131098 - DNA, 78 bp, Homo sapiens
tagccacagcaagtgctcttggtgcactggggtttgaggtggagagggcaactcctgtgtgtgtcccgccagctttgt

SEQ ID NO: 131099 - DNA, 73 bp, Homo sapiens
aagtgctcttggtgcactggggtttgaggtggagagggcaactcctgtgtgtgtcccgccagctttgttaaaa

SEQ ID NO: 131100 - DNA, 74 bp, Homo sapiens
tcttggtgcactggggtttgaggtggagagggcaactcctgtgtgtgtcccgccagctttgttaaaagccacca

SEQ ID NO: 131101 - DNA, 72 bp, Homo sapiens
gggtttgaggtggagagggcaactcctgtgtgtgtcccgccagctttgttaaaagccaccatgtggagggta

SEQ ID NO: 131102 - DNA, 74 bp, Homo sapiens
tggagagggcaactcctgtgtgtgtcccgccagctttgttaaaagccaccatgtggagggtagcctagtgaagg

SEQ ID NO: 131103 - DNA, 73 bp, Homo sapiens
aactcctgtgtgtgtcccgccagctttgttaaaagccaccatgtggagggtagcctagtgaagggatgtaaga

SEQ ID NO: 131104 - DNA, 74 bp, Homo sapiens
tgtgtcccgccagctttgttaaaagccaccatgtggagggtagcctagtgaagggatgtaagagtgctacaggt

SEQ ID NO: 131105 - DNA, 72 bp, Homo sapiens
agctttgttaaaagccaccatgtggagggtagcctagtgaagggatgtaagagtgctacaggttaagccctg

SEQ ID NO: 131106 - DNA, 73 bp, Homo sapiens
accatgtggagggtagcctagtgaagggatgtaagagtgctacaggttaagccctgggctttcttgactgtag

SEQ ID NO: 131107 - DNA, 75 bp, Homo sapiens
aagggatgtaagagtgctacaggttaagccctgggctttcttgactgtaggagcaaatgacaatggggagtcaga

SEQ ID NO: 131108 - DNA, 78 bp, Homo sapiens
tgtaagagtgctacaggttaagccctgggctttcttgactgtaggagcaaatgacaatggggagtcagatcacctcaa

SEQ ID NO: 131109 - DNA, 76 bp, Homo sapiens
aggttaagccctgggctttcttgactgtaggagcaaatgacaatggggagtcagatcacctcaagttccatgccaa

SEQ ID NO: 131110 - DNA, 78 bp, Homo sapiens
ctgggctttcttgactgtaggagcaaatgacaatggggagtcagatcacctcaagttccatgccaaggaggtaagaca

SEQ ID NO: 131111 - DNA, 78 bp, Homo sapiens
ttcttgactgtaggagcaaatgacaatggggagtcagatcacctcaagttccatgccaaggaggtaagacacgaggaa

SEQ ID NO: 131112 - DNA, 73 bp, Homo sapiens
aatggggagtcagatcacctcaagttccatgccaaggaggtaagacacgaggaagcagaaaataggtttccaa

SEQ ID NO: 131113 - DNA, 71 bp, Homo sapiens
atgccaaggaggtaagacacgaggaagcagaaaataggtttccaagtttaggcctctgccaattgaagaaa

SEQ ID NO: 131114 - DNA, 67 bp, Homo sapiens
aggtaagacacgaggaagcagaaaataggtttccaagtttaggcctctgccaattgaagaaaaaaag

SEQ ID NO: 131115 - DNA, 66 bp, Homo sapiens
ggaagcagaaaataggtttccaagtttaggcctctgccaattgaagaaaaaaaggacttaaagtta

SEQ ID NO: 131116 - DNA, 64 bp, Homo sapiens
cagaaaataggtttccaagtttaggcctctgccaattgaagaaaaaaaggacttaaagttaccc

SEQ ID NO: 131117 - DNA, 67 bp, Homo sapiens
tttccaagtttaggcctctgccaattgaagaaaaaaaggacttaaagttaccccataaatgtgtgtc

SEQ ID NO: 131118 - DNA, 68 bp, Homo sapiens
ttaggcctctgccaattgaagaaaaaaaggacttaaagttaccccataaatgtgtgtccaactacgag

SEQ ID NO: 131119 - DNA, 70 bp, Homo sapiens
attgaagaaaaaaaggacttaaagttaccccataaatgtgtgtccaactacgagggctgcattcatctta

SEQ ID NO: 131120 - DNA, 73 bp, Homo sapiens
acttaaagttaccccataaatgtgtgtccaactacgagggctgcattcatcttagactccatctcccctctcc

SEQ ID NO: 131121 - DNA, 76 bp, Homo sapiens
ataaatgtgtgtccaactacgagggctgcattcatcttagactccatctcccctctccctgctaccttaatagctt

SEQ ID NO: 131122 - DNA, 79 bp, Homo sapiens
tgtgtgtccaactacgagggctgcattcatcttagactccatctcccctctccctgctaccttaatagctttgctagga

SEQ ID NO: 131123 - DNA, 80 bp, Homo sapiens
tacgagggctgcattcatcttagactccatctcccctctccctgctaccttaatagctttgctaggaggagccagcatat

SEQ ID NO: 131124 - DNA, 77 bp, Homo sapiens
attcatcttagactccatctcccctctccctgctaccttaatagctttgctaggaggagccagcatattactcaaaa

SEQ ID NO: 131125 - DNA, 76 bp, Homo sapiens
ccctctccctgctaccttaatagctttgctaggaggagccagcatattactcaaaactgcattttcccagacactc

SEQ ID NO: 131126 - DNA, 76 bp, Homo sapiens
cctgctaccttaatagctttgctaggaggagccagcatattactcaaaactgcattttcccagacactccaagaaa

SEQ ID NO: 131127 - DNA, 79 bp, Homo sapiens
ttaatagctttgctaggaggagccagcatattactcaaaactgcattttcccagacactccaagaaagcagtctctaga

SEQ ID NO: 131128 - DNA, 74 bp, Homo sapiens
agcatattactcaaaactgcattttcccagacactccaagaaagcagtctctagaaagagaagcccccaaagac

SEQ ID NO: 131129 - DNA, 74 bp, Homo sapiens
attttcccagacactccaagaaagcagtctctagaaagagaagcccccaaagaccaatgcaaagacaagagtca

SEQ ID NO: 131130 - DNA, 76 bp, Homo sapiens
acactccaagaaagcagtctctagaaagagaagcccccaaagaccaatgcaaagacaagagtcatgtgtgtttata

SEQ ID NO: 131131 - DNA, 76 bp, Homo sapiens
aaagcagtctctagaaagagaagcccccaaagaccaatgcaaagacaagagtcatgtgtgtttataagaatatata

SEQ ID NO: 131132 - DNA, 77 bp, Homo sapiens
agtctctagaaagagaagcccccaaagaccaatgcaaagacaagagtcatgtgtgtttataagaatatatatattca

SEQ ID NO: 131133 - DNA, 77 bp, Homo sapiens
agaagcccccaaagaccaatgcaaagacaagagtcatgtgtgtttataagaatatatatattcaatatcagagggta

SEQ ID NO: 131134 - DNA, 78 bp, Homo sapiens
aagaccaatgcaaagacaagagtcatgtgtgtttataagaatatatatattcaatatcagagggtagttctcgatcct

SEQ ID NO: 131135 - DNA, 79 bp, Homo sapiens
aatgcaaagacaagagtcatgtgtgtttataagaatatatatattcaatatcagagggtagttctcgatcctttcctgc

SEQ ID NO: 131136 - DNA, 78 bp, Homo sapiens
aagagtcatgtgtgtttataagaatatatatattcaatatcagagggtagttctcgatcctttcctgctgccccagga

SEQ ID NO: 131137 - DNA, 77 bp, Homo sapiens
tttataagaatatatatattcaatatcagagggtagttctcgatcctttcctgctgccccaggagctggttccattg

SEQ ID NO: 131138 - DNA, 80 bp, Homo sapiens
tatatatattcaatatcagagggtagttctcgatcctttcctgctgccccaggagctggttccattggagctcttgtgtg

SEQ ID NO: 131139 - DNA, 76 bp, Homo sapiens
agggtagttctcgatcctttcctgctgccccaggagctggttccattggagctcttgtgtggctttgtgtgaacaa

SEQ ID NO: 131140 - DNA, 77 bp, Homo sapiens
ttctcgatcctttcctgctgccccaggagctggttccattggagctcttgtgtggctttgtgtgaacaaaggaagtg

SEQ ID NO: 131141 - DNA, 75 bp, Homo sapiens
aggagctggttccattggagctcttgtgtggctttgtgtgaacaaaggaagtgtgcagaaaatcctgaaaggaaa

SEQ ID NO: 131142 - DNA, 75 bp, Homo sapiens
tggagctcttgtgtggctttgtgtgaacaaaggaagtgtgcagaaaatcctgaaaggaaaaataagcaagctccc

SEQ ID NO: 131143 - DNA, 72 bp, Homo sapiens
gctttgtgtgaacaaaggaagtgtgcagaaaatcctgaaaggaaaaataagcaagctccccagagaaaacaa

SEQ ID NO: 131144 - DNA, 72 bp, Homo sapiens
aagtgtgcagaaaatcctgaaaggaaaaataagcaagctccccagagaaaacaaatgaacagaagtggccaa

SEQ ID NO: 131145 - DNA, 70 bp, Homo sapiens
agaaaatcctgaaaggaaaaataagcaagctccccagagaaaacaaatgaacagaagtggccaagaggtg

SEQ ID NO: 131146 - DNA, 71 bp, Homo sapiens
aaaggaaaaataagcaagctccccagagaaaacaaatgaacagaagtggccaagaggtgtgccattcttaa

SEQ ID NO: 131147 - DNA, 75 bp, Homo sapiens
aataagcaagctccccagagaaaacaaatgaacagaagtggccaagaggtgtgccattcttaatcacagtttcag

SEQ ID NO: 131148 - DNA, 76 bp, Homo sapiens
cagagaaaacaaatgaacagaagtggccaagaggtgtgccattcttaatcacagtttcagttctagatgtggaccc

SEQ ID NO: 131149 - DNA, 74 bp, Homo sapiens
aaaacaaatgaacagaagtggccaagaggtgtgccattcttaatcacagtttcagttctagatgtggaccccgc

SEQ ID NO: 131150 - DNA, 75 bp, Homo sapiens
aagtggccaagaggtgtgccattcttaatcacagtttcagttctagatgtggaccccgcccctggctggctacaa

SEQ ID NO: 131151 - DNA, 75 bp, Homo sapiens
gaggtgtgccattcttaatcacagtttcagttctagatgtggaccccgcccctggctggctacaactaccaatta

SEQ ID NO: 131152 - DNA, 71 bp, Homo sapiens
attcttaatcacagtttcagttctagatgtggaccccgcccctggctggctacaactaccaattaatattt

SEQ ID NO: 131153 - DNA, 72 bp, Homo sapiens
taatcacagtttcagttctagatgtggaccccgcccctggctggctacaactaccaattaatattttgttcc

SEQ ID NO: 131154 - DNA, 71 bp, Homo sapiens
ttcagttctagatgtggaccccgcccctggctggctacaactaccaattaatattttgttccctctttcca

SEQ ID NO: 131155 - DNA, 69 bp, Homo sapiens
atgtggaccccgcccctggctggctacaactaccaattaatattttgttccctctttccagcacccatt

SEQ ID NO: 131156 - DNA, 70 bp, Homo sapiens
cctggctggctacaactaccaattaatattttgttccctctttccagcacccattttctttctctcctaa

SEQ ID NO: 131157 - DNA, 69 bp, Homo sapiens
caattaatattttgttccctctttccagcacccattttctttctctcctaacttgtttgctgcctaaat

SEQ ID NO: 131158 - DNA, 73 bp, Homo sapiens
tctttccagcacccattttctttctctcctaacttgtttgctgcctaaattaaatgaggtcatttgtcaatta

SEQ ID NO: 131159 - DNA, 73 bp, Homo sapiens
gcacccattttctttctctcctaacttgtttgctgcctaaattaaatgaggtcatttgtcaattaaagatata

SEQ ID NO: 131160 - DNA, 71 bp, Homo sapiens
ctttctctcctaacttgtttgctgcctaaattaaatgaggtcatttgtcaattaaagatataaaaggtgaa

SEQ ID NO: 131161 - DNA, 69 bp, Homo sapiens
gctgcctaaattaaatgaggtcatttgtcaattaaagatataaaaggtgaaaaactgtttccacttaat

SEQ ID NO: 131162 - DNA, 66 bp, Homo sapiens
ttaaatgaggtcatttgtcaattaaagatataaaaggtgaaaaactgtttccacttaatttttaaa

SEQ ID NO: 131163 - DNA, 69 bp, Homo sapiens
tttgtcaattaaagatataaaaggtgaaaaactgtttccacttaatttttaaatacatactggcatcca

SEQ ID NO: 131164 - DNA, 70 bp, Homo sapiens
aaagatataaaaggtgaaaaactgtttccacttaatttttaaatacatactggcatccaggctgggcgca

SEQ ID NO: 131165 - DNA, 91 bp, Homo sapiens
acacacacacactttcacacaggcatccaatatatagcaaaggaggagctcagtgctgtgctcagtgtgtcgacacagatgtgtgatgaca

SEQ ID NO: 131166 - DNA, 90 bp, Homo sapiens
acactttcacacaggcatccaatatatagcaaaggaggagctcagtgctgtgctcagtgtgtcgacacagatgtgtgatgacagcgcagg

SEQ ID NO: 131167 - DNA, 89 bp, Homo sapiens
acacaggcatccaatatatagcaaaggaggagctcagtgctgtgctcagtgtgtcgacacagatgtgtgatgacagcgcaggggcccca

SEQ ID NO: 131168 - DNA, 86 bp, Homo sapiens
aatatatagcaaaggaggagctcagtgctgtgctcagtgtgtcgacacagatgtgtgatgacagcgcaggggccccagggccagaa

SEQ ID NO: 131169 - DNA, 85 bp, Homo sapiens
agcaaaggaggagctcagtgctgtgctcagtgtgtcgacacagatgtgtgatgacagcgcaggggccccagggccagaatggtct

SEQ ID NO: 131170 - DNA, 86 bp, Homo sapiens
agctcagtgctgtgctcagtgtgtcgacacagatgtgtgatgacagcgcaggggccccagggccagaatggtcttgatttaatctg

SEQ ID NO: 131171 - DNA, 83 bp, Homo sapiens
tcgacacagatgtgtgatgacagcgcaggggccccagggccagaatggtcttgatttaatctggcactgaagagtaagtatga

SEQ ID NO: 131172 - DNA, 74 bp, Homo sapiens
agcgcaggggccccagggccagaatggtcttgatttaatctggcactgaagagtaagtatgaagactcttaaaa

SEQ ID NO: 131173 - DNA, 71 bp, Homo sapiens
ccccagggccagaatggtcttgatttaatctggcactgaagagtaagtatgaagactcttaaaaaccaacc

SEQ ID NO: 131174 - DNA, 71 bp, Homo sapiens
agaatggtcttgatttaatctggcactgaagagtaagtatgaagactcttaaaaaccaacctaccttggta

SEQ ID NO: 131175 - DNA, 71 bp, Homo sapiens
tgatttaatctggcactgaagagtaagtatgaagactcttaaaaaccaacctaccttggtaatttaggaca

SEQ ID NO: 131176 - DNA, 72 bp, Homo sapiens
taatctggcactgaagagtaagtatgaagactcttaaaaaccaacctaccttggtaatttaggacatcaagc

SEQ ID NO: 131177 - DNA, 69 bp, Homo sapiens
tgaagagtaagtatgaagactcttaaaaaccaacctaccttggtaatttaggacatcaagccaacactt

SEQ ID NO: 131178 - DNA, 69 bp, Homo sapiens
taaaaaccaacctaccttggtaatttaggacatcaagccaacacttttcccttgccagctccagattta

SEQ ID NO: 131179 - DNA, 69 bp, Homo sapiens
aacctaccttggtaatttaggacatcaagccaacacttttcccttgccagctccagatttacttaaaca

SEQ ID NO: 131180 - DNA, 70 bp, Homo sapiens
ttggtaatttaggacatcaagccaacacttttcccttgccagctccagatttacttaaacaagtaggtaa

SEQ ID NO: 131181 - DNA, 71 bp, Homo sapiens
atcaagccaacacttttcccttgccagctccagatttacttaaacaagtaggtaaatgagtcttctaggat

SEQ ID NO: 131182 - DNA, 72 bp, Homo sapiens
aacacttttcccttgccagctccagatttacttaaacaagtaggtaaatgagtcttctaggattcacaagca

SEQ ID NO: 131183 - DNA, 74 bp, Homo sapiens
ttcccttgccagctccagatttacttaaacaagtaggtaaatgagtcttctaggattcacaagcagttctagaa

SEQ ID NO: 131184 - DNA, 76 bp, Homo sapiens
cagatttacttaaacaagtaggtaaatgagtcttctaggattcacaagcagttctagaaatgcctctgagcaagga

SEQ ID NO: 131185 - DNA, 77 bp, Homo sapiens
tacttaaacaagtaggtaaatgagtcttctaggattcacaagcagttctagaaatgcctctgagcaaggaatgacaa

SEQ ID NO: 131186 - DNA, 80 bp, Homo sapiens
taggtaaatgagtcttctaggattcacaagcagttctagaaatgcctctgagcaaggaatgacaacaattcattatgaaa

SEQ ID NO: 131187 - DNA, 80 bp, Homo sapiens
atgagtcttctaggattcacaagcagttctagaaatgcctctgagcaaggaatgacaacaattcattatgaaacctcatt

SEQ ID NO: 131188 - DNA, 84 bp, Homo sapiens
attcacaagcagttctagaaatgcctctgagcaaggaatgacaacaattcattatgaaacctcatttcctcatcactatcatga

SEQ ID NO: 131189 - DNA, 81 bp, Homo sapiens
aaatgcctctgagcaaggaatgacaacaattcattatgaaacctcatttcctcatcactatcatgaaggaatatgtattaa

SEQ ID NO: 131190 - DNA, 79 bp, Homo sapiens
caaggaatgacaacaattcattatgaaacctcatttcctcatcactatcatgaaggaatatgtattaagtgtctaggtc

SEQ ID NO: 131191 - DNA, 80 bp, Homo sapiens
caacaattcattatgaaacctcatttcctcatcactatcatgaaggaatatgtattaagtgtctaggtctgaatgttgct

SEQ ID NO: 131192 - DNA, 78 bp, Homo sapiens
ttatgaaacctcatttcctcatcactatcatgaaggaatatgtattaagtgtctaggtctgaatgttgctttattagg

SEQ ID NO: 131193 - DNA, 79 bp, Homo sapiens
tcatttcctcatcactatcatgaaggaatatgtattaagtgtctaggtctgaatgttgctttattaggtgttatcgtaa

SEQ ID NO: 131194 - DNA, 77 bp, Homo sapiens
cctcatcactatcatgaaggaatatgtattaagtgtctaggtctgaatgttgctttattaggtgttatcgtaataaa

SEQ ID NO: 131195 - DNA, 76 bp, Homo sapiens
tgtattaagtgtctaggtctgaatgttgctttattaggtgttatcgtaataaaaatgatggttcctatctctgata

SEQ ID NO: 131196 - DNA, 75 bp, Homo sapiens
agtgtctaggtctgaatgttgctttattaggtgttatcgtaataaaaatgatggttcctatctctgataatacgc

SEQ ID NO: 131197 - DNA, 77 bp, Homo sapiens
tgaatgttgctttattaggtgttatcgtaataaaaatgatggttcctatctctgataatacgccagaagctcaccaa

SEQ ID NO: 131198 - DNA, 76 bp, Homo sapiens
ttattaggtgttatcgtaataaaaatgatggttcctatctctgataatacgccagaagctcaccaacaattctgta

SEQ ID NO: 131199 - DNA, 75 bp, Homo sapiens
aggtgttatcgtaataaaaatgatggttcctatctctgataatacgccagaagctcaccaacaattctgtaacca

SEQ ID NO: 131200 - DNA, 78 bp, Homo sapiens
gttcctatctctgataatacgccagaagctcaccaacaattctgtaaccagaggaactcaaaggctatgaacataata

SEQ ID NO: 131201 - DNA, 78 bp, Homo sapiens
tctgataatacgccagaagctcaccaacaattctgtaaccagaggaactcaaaggctatgaacataatacacttaata

SEQ ID NO: 131202 - DNA, 75 bp, Homo sapiens
aatacgccagaagctcaccaacaattctgtaaccagaggaactcaaaggctatgaacataatacacttaatagag

SEQ ID NO: 131203 - DNA, 75 bp, Homo sapiens
aagctcaccaacaattctgtaaccagaggaactcaaaggctatgaacataatacacttaatagaggtcactggag

SEQ ID NO: 131204 - DNA, 76 bp, Homo sapiens
aattctgtaaccagaggaactcaaaggctatgaacataatacacttaatagaggtcactggagtgccacagtccaa

SEQ ID NO: 131205 - DNA, 76 bp, Homo sapiens
agaggaactcaaaggctatgaacataatacacttaatagaggtcactggagtgccacagtccaagcagcccttctt

SEQ ID NO: 131206 - DNA, 78 bp, Homo sapiens
actcaaaggctatgaacataatacacttaatagaggtcactggagtgccacagtccaagcagcccttctttcaggcaa

SEQ ID NO: 131207 - DNA, 75 bp, Homo sapiens
atacacttaatagaggtcactggagtgccacagtccaagcagcccttctttcaggcaagcctgctgggtttcttt

SEQ ID NO: 131208 - DNA, 79 bp, Homo sapiens
tgccacagtccaagcagcccttctttcaggcaagcctgctgggtttctttttccagtgtggaagcagggagcatataca

SEQ ID NO: 131209 - DNA, 79 bp, Homo sapiens
caagcagcccttctttcaggcaagcctgctgggtttctttttccagtgtggaagcagggagcatatacacagaacatca

SEQ ID NO: 131210 - DNA, 79 bp, Homo sapiens
ttctttcaggcaagcctgctgggtttctttttccagtgtggaagcagggagcatatacacagaacatcaatgagggcta

SEQ ID NO: 131211 - DNA, 81 bp, Homo sapiens
caagcctgctgggtttctttttccagtgtggaagcagggagcatatacacagaacatcaatgagggctacatgtgtgtata

SEQ ID NO: 131212 - DNA, 79 bp, Homo sapiens
tgggtttctttttccagtgtggaagcagggagcatatacacagaacatcaatgagggctacatgtgtgtataggaataa

SEQ ID NO: 131213 - DNA, 79 bp, Homo sapiens
ttttccagtgtggaagcagggagcatatacacagaacatcaatgagggctacatgtgtgtataggaataaacccattta

SEQ ID NO: 131214 - DNA, 77 bp, Homo sapiens
gaagcagggagcatatacacagaacatcaatgagggctacatgtgtgtataggaataaacccatttaacaaacgagg

SEQ ID NO: 131215 - DNA, 76 bp, Homo sapiens
gcatatacacagaacatcaatgagggctacatgtgtgtataggaataaacccatttaacaaacgaggtagaaacta

SEQ ID NO: 131216 - DNA, 72 bp, Homo sapiens
acagaacatcaatgagggctacatgtgtgtataggaataaacccatttaacaaacgaggtagaaactagaaa

SEQ ID NO: 131217 - DNA, 71 bp, Homo sapiens
caatgagggctacatgtgtgtataggaataaacccatttaacaaacgaggtagaaactagaaatatttcca

SEQ ID NO: 131218 - DNA, 72 bp, Homo sapiens
ctacatgtgtgtataggaataaacccatttaacaaacgaggtagaaactagaaatatttccatccatccatc

SEQ ID NO: 131219 - DNA, 80 bp, Homo sapiens
acccatccatccatgtatccaataagcagcccttaagtaagcactatgccagtcactgaggataagaatatacagatggg

SEQ ID NO: 131220 - DNA, 79 bp, Homo sapiens
atccatgtatccaataagcagcccttaagtaagcactatgccagtcactgaggataagaatatacagatggggtcccag

SEQ ID NO: 131221 - DNA, 76 bp, Homo sapiens
ataagcagcccttaagtaagcactatgccagtcactgaggataagaatatacagatggggtcccagtcctcaaaaa

SEQ ID NO: 131222 - DNA, 78 bp, Homo sapiens
cttaagtaagcactatgccagtcactgaggataagaatatacagatggggtcccagtcctcaaaaagatgatggtcta

SEQ ID NO: 131223 - DNA, 78 bp, Homo sapiens
gtaagcactatgccagtcactgaggataagaatatacagatggggtcccagtcctcaaaaagatgatggtctagtggg

SEQ ID NO: 131224 - DNA, 75 bp, Homo sapiens
agtcactgaggataagaatatacagatggggtcccagtcctcaaaaagatgatggtctagtggggaaaagagaca

SEQ ID NO: 131225 - DNA, 73 bp, Homo sapiens
ataagaatatacagatggggtcccagtcctcaaaaagatgatggtctagtggggaaaagagacaaatataaga

SEQ ID NO: 131226 - DNA, 73 bp, Homo sapiens
aatatacagatggggtcccagtcctcaaaaagatgatggtctagtggggaaaagagacaaatataagatggaa

SEQ ID NO: 131227 - DNA, 72 bp, Homo sapiens
tcccagtcctcaaaaagatgatggtctagtggggaaaagagacaaatataagatggaagtaaaacagtagtg

SEQ ID NO: 131228 - DNA, 70 bp, Homo sapiens
cctcaaaaagatgatggtctagtggggaaaagagacaaatataagatggaagtaaaacagtagtggtaat

SEQ ID NO: 131229 - DNA, 70 bp, Homo sapiens
atggtctagtggggaaaagagacaaatataagatggaagtaaaacagtagtggtaatttaaggtgctgta

SEQ ID NO: 131230 - DNA, 69 bp, Homo sapiens
gtggggaaaagagacaaatataagatggaagtaaaacagtagtggtaatttaaggtgctgtaaaggaca

SEQ ID NO: 131231 - DNA, 70 bp, Homo sapiens
gagacaaatataagatggaagtaaaacagtagtggtaatttaaggtgctgtaaaggacaaaagaggcaaa

SEQ ID NO: 131232 - DNA, 66 bp, Homo sapiens
agatggaagtaaaacagtagtggtaatttaaggtgctgtaaaggacaaaagaggcaaaatttaacc

SEQ ID NO: 131233 - DNA, 65 bp, Homo sapiens
gaagtaaaacagtagtggtaatttaaggtgctgtaaaggacaaaagaggcaaaatttaacctggg

SEQ ID NO: 131234 - DNA, 67 bp, Homo sapiens
tagtggtaatttaaggtgctgtaaaggacaaaagaggcaaaatttaacctgggggaacagtgtgtaa

SEQ ID NO: 131235 - DNA, 68 bp, Homo sapiens
atttaaggtgctgtaaaggacaaaagaggcaaaatttaacctgggggaacagtgtgtaaatgaattga

SEQ ID NO: 131236 - DNA, 67 bp, Homo sapiens
aaggacaaaagaggcaaaatttaacctgggggaacagtgtgtaaatgaattgaataggaacaccaaa

SEQ ID NO: 131237 - DNA, 69 bp, Homo sapiens
aaaagaggcaaaatttaacctgggggaacagtgtgtaaatgaattgaataggaacaccaaagccagaca

SEQ ID NO: 131238 - DNA, 68 bp, Homo sapiens
aaaatttaacctgggggaacagtgtgtaaatgaattgaataggaacaccaaagccagacaaggaagag

SEQ ID NO: 131239 - DNA, 75 bp, Homo sapiens
gggaacagtgtgtaaatgaattgaataggaacaccaaagccagacaaggaagagtggggagatagctgaggctaa

SEQ ID NO: 131240 - DNA, 75 bp, Homo sapiens
tgtaaatgaattgaataggaacaccaaagccagacaaggaagagtggggagatagctgaggctaaggaagaacta

SEQ ID NO: 131241 - DNA, 73 bp, Homo sapiens
agacaaggaagagtggggagatagctgaggctaaggaagaactagaacacaaacatgaaggtataaaagaaca

SEQ ID NO: 131242 - DNA, 73 bp, Homo sapiens
aagagtggggagatagctgaggctaaggaagaactagaacacaaacatgaaggtataaaagaacaaggcaagc

SEQ ID NO: 131243 - DNA, 74 bp, Homo sapiens
agatagctgaggctaaggaagaactagaacacaaacatgaaggtataaaagaacaaggcaagctcaaagaacta

SEQ ID NO: 131244 - DNA, 72 bp, Homo sapiens
gaactagaacacaaacatgaaggtataaaagaacaaggcaagctcaaagaactacaagtagtttgatatggt

SEQ ID NO: 131245 - DNA, 71 bp, Homo sapiens
acaaacatgaaggtataaaagaacaaggcaagctcaaagaactacaagtagtttgatatggttgaaccaag

SEQ ID NO: 131246 - DNA, 70 bp, Homo sapiens
aggtataaaagaacaaggcaagctcaaagaactacaagtagtttgatatggttgaaccaaggaattcaag

SEQ ID NO: 131247 - DNA, 72 bp, Homo sapiens
aaagaacaaggcaagctcaaagaactacaagtagtttgatatggttgaaccaaggaattcaagtgaggataa

SEQ ID NO: 131248 - DNA, 74 bp, Homo sapiens
ctcaaagaactacaagtagtttgatatggttgaaccaaggaattcaagtgaggataatgtggctagaagaataa

SEQ ID NO: 131249 - DNA, 74 bp, Homo sapiens
agaactacaagtagtttgatatggttgaaccaaggaattcaagtgaggataatgtggctagaagaataagctgg

SEQ ID NO: 131250 - DNA, 76 bp, Homo sapiens
ttgatatggttgaaccaaggaattcaagtgaggataatgtggctagaagaataagctgggcccactccattaagaa

SEQ ID NO: 131251 - DNA, 73 bp, Homo sapiens
ttgaaccaaggaattcaagtgaggataatgtggctagaagaataagctgggcccactccattaagaactttaa

SEQ ID NO: 131252 - DNA, 73 bp, Homo sapiens
aaggaattcaagtgaggataatgtggctagaagaataagctgggcccactccattaagaactttaatgggcta

SEQ ID NO: 131253 - DNA, 75 bp, Homo sapiens
aagtgaggataatgtggctagaagaataagctgggcccactccattaagaactttaatgggctaggcacagtggc

SEQ ID NO: 131254 - DNA, 69 bp, Homo sapiens
aacaaaaaaaacttaatgtactactgtagaggcttctgcttcagatggggtagacatttttctgtattt

SEQ ID NO: 131255 - DNA, 72 bp, Homo sapiens
aaaaacttaatgtactactgtagaggcttctgcttcagatggggtagacatttttctgtatttttgtcacta

SEQ ID NO: 131256 - DNA, 73 bp, Homo sapiens
tactactgtagaggcttctgcttcagatggggtagacatttttctgtatttttgtcactaagtactagttaaa

SEQ ID NO: 131257 - DNA, 73 bp, Homo sapiens
gcttctgcttcagatggggtagacatttttctgtatttttgtcactaagtactagttaaaactctgaacattc

SEQ ID NO: 131258 - DNA, 74 bp, Homo sapiens
gcttcagatggggtagacatttttctgtatttttgtcactaagtactagttaaaactctgaacattctatatga

SEQ ID NO: 131259 - DNA, 72 bp, Homo sapiens
gggtagacatttttctgtatttttgtcactaagtactagttaaaactctgaacattctatatgaaacaagca

SEQ ID NO: 131260 - DNA, 75 bp, Homo sapiens
tgtcactaagtactagttaaaactctgaacattctatatgaaacaagcaaaagtagatactgtaaggtggagaga

SEQ ID NO: 131261 - DNA, 73 bp, Homo sapiens
agtactagttaaaactctgaacattctatatgaaacaagcaaaagtagatactgtaaggtggagagaactagc

SEQ ID NO: 131262 - DNA, 74 bp, Homo sapiens
ttaaaactctgaacattctatatgaaacaagcaaaagtagatactgtaaggtggagagaactagctagggacca

SEQ ID NO: 131263 - DNA, 72 bp, Homo sapiens
ttctatatgaaacaagcaaaagtagatactgtaaggtggagagaactagctagggaccatgggacccaaaaa

SEQ ID NO: 131264 - DNA, 69 bp, Homo sapiens
aaacaagcaaaagtagatactgtaaggtggagagaactagctagggaccatgggacccaaaaaaagaga

SEQ ID NO: 131265 - DNA, 70 bp, Homo sapiens
aagtagatactgtaaggtggagagaactagctagggaccatgggacccaaaaaaagagacatggtggtaa

SEQ ID NO: 131266 - DNA, 69 bp, Homo sapiens
atactgtaaggtggagagaactagctagggaccatgggacccaaaaaaagagacatggtggtaagttcc

SEQ ID NO: 131267 - DNA, 68 bp, Homo sapiens
tggagagaactagctagggaccatgggacccaaaaaaagagacatggtggtaagttccccaccccctc

SEQ ID NO: 131268 - DNA, 62 bp, Homo sapiens
ctagggaccatgggacccaaaaaaagagacatggtggtaagttccccaccccctcccttttt

SEQ ID NO: 131269 - DNA, 61 bp, Homo sapiens
accatgggacccaaaaaaagagacatggtggtaagttccccaccccctccctttttttttc

SEQ ID NO: 131270 - DNA, 67 bp, Homo sapiens
aaaagagacatggtggtaagttccccaccccctccctttttttttctgcttcatatatccaggctta

SEQ ID NO: 131271 - DNA, 68 bp, Homo sapiens
acatggtggtaagttccccaccccctccctttttttttctgcttcatatatccaggcttaaagctgaa

SEQ ID NO: 131272 - DNA, 70 bp, Homo sapiens
taagttccccaccccctccctttttttttctgcttcatatatccaggcttaaagctgaagatgttggcaa

SEQ ID NO: 131273 - DNA, 72 bp, Homo sapiens
cctccctttttttttctgcttcatatatccaggcttaaagctgaagatgttggcaacccaaaaatgccaatg

SEQ ID NO: 131274 - DNA, 75 bp, Homo sapiens
tttttctgcttcatatatccaggcttaaagctgaagatgttggcaacccaaaaatgccaatgggtacagacaaaa

SEQ ID NO: 131275 - DNA, 74 bp, Homo sapiens
ctgcttcatatatccaggcttaaagctgaagatgttggcaacccaaaaatgccaatgggtacagacaaaaaaaa

SEQ ID NO: 131276 - DNA, 70 bp, Homo sapiens
aggcttaaagctgaagatgttggcaacccaaaaatgccaatgggtacagacaaaaaaaagccctagcaaa

SEQ ID NO: 131277 - DNA, 71 bp, Homo sapiens
ttggcaacccaaaaatgccaatgggtacagacaaaaaaaagccctagcaaaatatgttctctctagccaaa

SEQ ID NO: 131278 - DNA, 70 bp, Homo sapiens
aaaatgccaatgggtacagacaaaaaaaagccctagcaaaatatgttctctctagccaaaggattaggaa

SEQ ID NO: 131279 - DNA, 70 bp, Homo sapiens
ccaatgggtacagacaaaaaaaagccctagcaaaatatgttctctctagccaaaggattaggaaagggca

SEQ ID NO: 131280 - DNA, 72 bp, Homo sapiens
caaaaaaaagccctagcaaaatatgttctctctagccaaaggattaggaaagggcagcccagcacaacagaa

SEQ ID NO: 131281 - DNA, 71 bp, Homo sapiens
aaaagccctagcaaaatatgttctctctagccaaaggattaggaaagggcagcccagcacaacagaaaact

SEQ ID NO: 131282 - DNA, 70 bp, Homo sapiens
aaaggattaggaaagggcagcccagcacaacagaaaacttttagatacttgttctactccaaataccaca

SEQ ID NO: 131283 - DNA, 69 bp, Homo sapiens
aggaaagggcagcccagcacaacagaaaacttttagatacttgttctactccaaataccacagaaaaaa

SEQ ID NO: 131284 - DNA, 68 bp, Homo sapiens
agaaaacttttagatacttgttctactccaaataccacagaaaaaaatggtggtctcattcccacctc

SEQ ID NO: 131285 - DNA, 68 bp, Homo sapiens
tttagatacttgttctactccaaataccacagaaaaaaatggtggtctcattcccacctccccctaaa

SEQ ID NO: 131286 - DNA, 68 bp, Homo sapiens
tgttctactccaaataccacagaaaaaaatggtggtctcattcccacctccccctaaaggccaagtta

SEQ ID NO: 131287 - DNA, 67 bp, Homo sapiens
aaataccacagaaaaaaatggtggtctcattcccacctccccctaaaggccaagttaggaatctaga

SEQ ID NO: 131288 - DNA, 69 bp, Homo sapiens
aaaaatggtggtctcattcccacctccccctaaaggccaagttaggaatctagacttccatccttgcaa

SEQ ID NO: 131289 - DNA, 72 bp, Homo sapiens
gtctcattcccacctccccctaaaggccaagttaggaatctagacttccatccttgcaagggtgtaatgaga

SEQ ID NO: 131290 - DNA, 71 bp, Homo sapiens
attcccacctccccctaaaggccaagttaggaatctagacttccatccttgcaagggtgtaatgagatgcc

SEQ ID NO: 131291 - DNA, 71 bp, Homo sapiens
ccctaaaggccaagttaggaatctagacttccatccttgcaagggtgtaatgagatgccccaatacccttg

SEQ ID NO: 131292 - DNA, 72 bp, Homo sapiens
aagttaggaatctagacttccatccttgcaagggtgtaatgagatgccccaatacccttggctggggtggtg

SEQ ID NO: 131293 - DNA, 73 bp, Homo sapiens
aatctagacttccatccttgcaagggtgtaatgagatgccccaatacccttggctggggtggtgtcagaaagg

SEQ ID NO: 131294 - DNA, 72 bp, Homo sapiens
atccttgcaagggtgtaatgagatgccccaatacccttggctggggtggtgtcagaaagggccaagtaggaa

SEQ ID NO: 131295 - DNA, 71 bp, Homo sapiens
aagggtgtaatgagatgccccaatacccttggctggggtggtgtcagaaagggccaagtaggaagctgctt

SEQ ID NO: 131296 - DNA, 73 bp, Homo sapiens
aatgagatgccccaatacccttggctggggtggtgtcagaaagggccaagtaggaagctgctttcattcccac

SEQ ID NO: 131297 - DNA, 72 bp, Homo sapiens
atacccttggctggggtggtgtcagaaagggccaagtaggaagctgctttcattcccaccagccagtaacaa

SEQ ID NO: 131298 - DNA, 72 bp, Homo sapiens
ttggctggggtggtgtcagaaagggccaagtaggaagctgctttcattcccaccagccagtaacaaacaccc

SEQ ID NO: 131299 - DNA, 73 bp, Homo sapiens
aagggccaagtaggaagctgctttcattcccaccagccagtaacaaacacccctccctatctggcattcataa

SEQ ID NO: 131300 - DNA, 76 bp, Homo sapiens
taggaagctgctttcattcccaccagccagtaacaaacacccctccctatctggcattcataaggcacctctccca

SEQ ID NO: 131301 - DNA, 76 bp, Homo sapiens
attcccaccagccagtaacaaacacccctccctatctggcattcataaggcacctctcccagtccctgctggatga

SEQ ID NO: 131302 - DNA, 78 bp, Homo sapiens
taacaaacacccctccctatctggcattcataaggcacctctcccagtccctgctggatgatgtcagaggagggctgg

SEQ ID NO: 131303 - DNA, 83 bp, Homo sapiens
tccctatctggcattcataaggcacctctcccagtccctgctggatgatgtcagaggagggctggtggagagccatgactttc

SEQ ID NO: 131304 - DNA, 82 bp, Homo sapiens
attcataaggcacctctcccagtccctgctggatgatgtcagaggagggctggtggagagccatgactttcgccactgccca

SEQ ID NO: 131305 - DNA, 81 bp, Homo sapiens
cacctctcccagtccctgctggatgatgtcagaggagggctggtggagagccatgactttcgccactgcccagtggtaaca

SEQ ID NO: 131306 - DNA, 83 bp, Homo sapiens
ccagtccctgctggatgatgtcagaggagggctggtggagagccatgactttcgccactgcccagtggtaacagcatgcaccc

SEQ ID NO: 131307 - DNA, 83 bp, Homo sapiens
tggatgatgtcagaggagggctggtggagagccatgactttcgccactgcccagtggtaacagcatgcacccccaccatggtg

SEQ ID NO: 131308 - DNA, 83 bp, Homo sapiens
tggtggagagccatgactttcgccactgcccagtggtaacagcatgcacccccaccatggtgtgcatacagactacattggga

SEQ ID NO: 131309 - DNA, 80 bp, Homo sapiens
actttcgccactgcccagtggtaacagcatgcacccccaccatggtgtgcatacagactacattgggagctggaactctc

SEQ ID NO: 131310 - DNA, 80 bp, Homo sapiens
cagtggtaacagcatgcacccccaccatggtgtgcatacagactacattgggagctggaactctcgccccgaatgagaag

SEQ ID NO: 131311 - DNA, 77 bp, Homo sapiens
cccaccatggtgtgcatacagactacattgggagctggaactctcgccccgaatgagaagtccctctcctaccacca

SEQ ID NO: 131312 - DNA, 78 bp, Homo sapiens
atggtgtgcatacagactacattgggagctggaactctcgccccgaatgagaagtccctctcctaccaccaactcaga

SEQ ID NO: 131313 - DNA, 77 bp, Homo sapiens
atacagactacattgggagctggaactctcgccccgaatgagaagtccctctcctaccaccaactcagatgtcagtg

SEQ ID NO: 131314 - DNA, 78 bp, Homo sapiens
attgggagctggaactctcgccccgaatgagaagtccctctcctaccaccaactcagatgtcagtggctgccaaatga

SEQ ID NO: 131315 - DNA, 77 bp, Homo sapiens
cgaatgagaagtccctctcctaccaccaactcagatgtcagtggctgccaaatgaggaacctgaacttctatttcca

SEQ ID NO: 131316 - DNA, 77 bp, Homo sapiens
tccctctcctaccaccaactcagatgtcagtggctgccaaatgaggaacctgaacttctatttccacctggtcataa

SEQ ID NO: 131317 - DNA, 78 bp, Homo sapiens
aactcagatgtcagtggctgccaaatgaggaacctgaacttctatttccacctggtcataacgagatggcaccatccc

SEQ ID NO: 131318 - DNA, 76 bp, Homo sapiens
gtcagtggctgccaaatgaggaacctgaacttctatttccacctggtcataacgagatggcaccatccccaccttc

SEQ ID NO: 131319 - DNA, 72 bp, Homo sapiens
aaatgaggaacctgaacttctatttccacctggtcataacgagatggcaccatccccaccttccctactgaa

SEQ ID NO: 131320 - DNA, 73 bp, Homo sapiens
tgaacttctatttccacctggtcataacgagatggcaccatccccaccttccctactgaaccagattcaaagg

SEQ ID NO: 131321 - DNA, 74 bp, Homo sapiens
tatttccacctggtcataacgagatggcaccatccccaccttccctactgaaccagattcaaagggtcagctaa

SEQ ID NO: 131322 - DNA, 73 bp, Homo sapiens
tggtcataacgagatggcaccatccccaccttccctactgaaccagattcaaagggtcagctaaaacaggaaa

SEQ ID NO: 131323 - DNA, 72 bp, Homo sapiens
acgagatggcaccatccccaccttccctactgaaccagattcaaagggtcagctaaaacaggaaagaacata

SEQ ID NO: 131324 - DNA, 71 bp, Homo sapiens
tccccaccttccctactgaaccagattcaaagggtcagctaaaacaggaaagaacatacagagactcctaa

SEQ ID NO: 131325 - DNA, 75 bp, Homo sapiens
tgaaccagattcaaagggtcagctaaaacaggaaagaacatacagagactcctaacatattacaaacatattaca

SEQ ID NO: 131326 - DNA, 75 bp, Homo sapiens
ttcaaagggtcagctaaaacaggaaagaacatacagagactcctaacatattacaaacatattacagcagaataa

SEQ ID NO: 131327 - DNA, 74 bp, Homo sapiens
gctaaaacaggaaagaacatacagagactcctaacatattacaaacatattacagcagaataaaggagacaaag

SEQ ID NO: 131328 - DNA, 74 bp, Homo sapiens
gagactcctaacatattacaaacatattacagcagaataaaggagacaaaggaaagattcggtgaaccagaata

SEQ ID NO: 131329 - DNA, 72 bp, Homo sapiens
acaaacatattacagcagaataaaggagacaaaggaaagattcggtgaaccagaatacagaatagaaatacc

SEQ ID NO: 131330 - DNA, 74 bp, Homo sapiens
tacagcagaataaaggagacaaaggaaagattcggtgaaccagaatacagaatagaaatacctaatctgaacaa

SEQ ID NO: 131331 - DNA, 71 bp, Homo sapiens
caaaggaaagattcggtgaaccagaatacagaatagaaatacctaatctgaacaacagaaagaaaagagac

SEQ ID NO: 131332 - DNA, 72 bp, Homo sapiens
ggtgaaccagaatacagaatagaaatacctaatctgaacaacagaaagaaaagagactggagaagggaaata

SEQ ID NO: 131333 - DNA, 70 bp, Homo sapiens
agaatagaaatacctaatctgaacaacagaaagaaaagagactggagaagggaaataaaagaacagagcc

SEQ ID NO: 131334 - DNA, 71 bp, Homo sapiens
tacctaatctgaacaacagaaagaaaagagactggagaagggaaataaaagaacagagccccaggagcctg

SEQ ID NO: 131335 - DNA, 70 bp, Homo sapiens
acagaaagaaaagagactggagaagggaaataaaagaacagagccccaggagcctgtgagactttaataa

SEQ ID NO: 131336 - DNA, 68 bp, Homo sapiens
aagaaaagagactggagaagggaaataaaagaacagagccccaggagcctgtgagactttaataaaaa

SEQ ID NO: 131337 - DNA, 71 bp, Homo sapiens
agaagggaaataaaagaacagagccccaggagcctgtgagactttaataaaaaatctaacattgtgtcaca

SEQ ID NO: 131338 - DNA, 74 bp, Homo sapiens
agagccccaggagcctgtgagactttaataaaaaatctaacattgtgtcacagaagtgatgaaagagaggaaaa

SEQ ID NO: 131339 - DNA, 70 bp, Homo sapiens
actttaataaaaaatctaacattgtgtcacagaagtgatgaaagagaggaaaaagagggtggggctgaaa

SEQ ID NO: 131340 - DNA, 72 bp, Homo sapiens
aaaatctaacattgtgtcacagaagtgatgaaagagaggaaaaagagggtggggctgaaacagttcttacat

SEQ ID NO: 131341 - DNA, 74 bp, Homo sapiens
taacattgtgtcacagaagtgatgaaagagaggaaaaagagggtggggctgaaacagttcttacattaattgcc

SEQ ID NO: 131342 - DNA, 69 bp, Homo sapiens
agaagtgatgaaagagaggaaaaagagggtggggctgaaacagttcttacattaattgccgaaaacttc

SEQ ID NO: 131343 - DNA, 65 bp, Homo sapiens
aaagagaggaaaaagagggtggggctgaaacagttcttacattaattgccgaaaacttcccaaat

SEQ ID NO: 131344 - DNA, 72 bp, Homo sapiens
aacagttcttacattaattgccgaaaacttcccaaatttggcaagatatgtaagtctacagattcaacaagc

SEQ ID NO: 131345 - DNA, 72 bp, Homo sapiens
cttacattaattgccgaaaacttcccaaatttggcaagatatgtaagtctacagattcaacaagccaagtta

SEQ ID NO: 131346 - DNA, 69 bp, Homo sapiens
cgaaaacttcccaaatttggcaagatatgtaagtctacagattcaacaagccaagttaaaccccaaata

SEQ ID NO: 131347 - DNA, 71 bp, Homo sapiens
ccaaatttggcaagatatgtaagtctacagattcaacaagccaagttaaaccccaaataagataactggaa

SEQ ID NO: 131348 - DNA, 68 bp, Homo sapiens
cagattcaacaagccaagttaaaccccaaataagataactggaaaaaaatttatagtaacataagcca

SEQ ID NO: 131349 - DNA, 66 bp, Homo sapiens
caagccaagttaaaccccaaataagataactggaaaaaaatttatagtaacataagccataattaa

SEQ ID NO: 131350 - DNA, 65 bp, Homo sapiens
cccaaataagataactggaaaaaaatttatagtaacataagccataattaaactttggaaaacta

SEQ ID NO: 131351 - DNA, 65 bp, Homo sapiens
ataagataactggaaaaaaatttatagtaacataagccataattaaactttggaaaactaaaaga

SEQ ID NO: 131352 - DNA, 63 bp, Homo sapiens
aaaaatttatagtaacataagccataattaaactttggaaaactaaaagaaaaaatctttaca

SEQ ID NO: 131353 - DNA, 67 bp, Homo sapiens
ttatagtaacataagccataattaaactttggaaaactaaaagaaaaaatctttacagtcagagaaa

SEQ ID NO: 131354 - DNA, 66 bp, Homo sapiens
aactttggaaaactaaaagaaaaaatctttacagtcagagaaaaacaatttgaatgacagcgtatt

SEQ ID NO: 131355 - DNA, 71 bp, Homo sapiens
ggaaaactaaaagaaaaaatctttacagtcagagaaaaacaatttgaatgacagcgtatttctcatcagaa

SEQ ID NO: 131356 - DNA, 73 bp, Homo sapiens
aaaaatctttacagtcagagaaaaacaatttgaatgacagcgtatttctcatcagaaaccatggagcccaaag

SEQ ID NO: 131357 - DNA, 77 bp, Homo sapiens
tctttacagtcagagaaaaacaatttgaatgacagcgtatttctcatcagaaaccatggagcccaaaggaaatggca

SEQ ID NO: 131358 - DNA, 75 bp, Homo sapiens
aaaaacaatttgaatgacagcgtatttctcatcagaaaccatggagcccaaaggaaatggcacgatatttctcac

SEQ ID NO: 131359 - DNA, 78 bp, Homo sapiens
atttgaatgacagcgtatttctcatcagaaaccatggagcccaaaggaaatggcacgatatttctcacgtgctattaa

SEQ ID NO: 131360 - DNA, 79 bp, Homo sapiens
acagcgtatttctcatcagaaaccatggagcccaaaggaaatggcacgatatttctcacgtgctattaaggattgcatc

SEQ ID NO: 131361 - DNA, 78 bp, Homo sapiens
aaaccatggagcccaaaggaaatggcacgatatttctcacgtgctattaaggattgcatcctgagatcgacgtgtagc

SEQ ID NO: 131362 - DNA, 82 bp, Homo sapiens
aaaggaaatggcacgatatttctcacgtgctattaaggattgcatcctgagatcgacgtgtagccaccacattcatcagaga

SEQ ID NO: 131363 - DNA, 83 bp, Homo sapiens
aatggcacgatatttctcacgtgctattaaggattgcatcctgagatcgacgtgtagccaccacattcatcagagaagggata

SEQ ID NO: 131364 - DNA, 83 bp, Homo sapiens
tatttctcacgtgctattaaggattgcatcctgagatcgacgtgtagccaccacattcatcagagaagggatatgtggcaagg

SEQ ID NO: 131365 - DNA, 83 bp, Homo sapiens
tattaaggattgcatcctgagatcgacgtgtagccaccacattcatcagagaagggatatgtggcaagggaaggatataatca

SEQ ID NO: 131366 - DNA, 85 bp, Homo sapiens
attgcatcctgagatcgacgtgtagccaccacattcatcagagaagggatatgtggcaagggaaggatataatcagaactgcatg

SEQ ID NO: 131367 - DNA, 81 bp, Homo sapiens
agatcgacgtgtagccaccacattcatcagagaagggatatgtggcaagggaaggatataatcagaactgcatggaggtgg

SEQ ID NO: 131368 - DNA, 80 bp, Homo sapiens
cgtgtagccaccacattcatcagagaagggatatgtggcaagggaaggatataatcagaactgcatggaggtgggcaggg

SEQ ID NO: 131369 - DNA, 81 bp, Homo sapiens
acattcatcagagaagggatatgtggcaagggaaggatataatcagaactgcatggaggtgggcaggggagttgcttctga

SEQ ID NO: 131370 - DNA, 77 bp, Homo sapiens
aagggatatgtggcaagggaaggatataatcagaactgcatggaggtgggcaggggagttgcttctgacttgatgtt

SEQ ID NO: 131371 - DNA, 78 bp, Homo sapiens
atatgtggcaagggaaggatataatcagaactgcatggaggtgggcaggggagttgcttctgacttgatgttttatgt

SEQ ID NO: 131372 - DNA, 74 bp, Homo sapiens
agggaaggatataatcagaactgcatggaggtgggcaggggagttgcttctgacttgatgttttatgttttaaa

SEQ ID NO: 131373 - DNA, 71 bp, Homo sapiens
ataatcagaactgcatggaggtgggcaggggagttgcttctgacttgatgttttatgttttaaaaaaaaaa

SEQ ID NO: 131374 - DNA, 75 bp, Homo sapiens
taaataaaaattatcaagaatacacctggtgactgccatatattaatttcattacccccaacatacacactctca

SEQ ID NO: 131375 - DNA, 74 bp, Homo sapiens
aaaaattatcaagaatacacctggtgactgccatatattaatttcattacccccaacatacacactctcacaac

SEQ ID NO: 131376 - DNA, 73 bp, Homo sapiens
aagaatacacctggtgactgccatatattaatttcattacccccaacatacacactctcacaactcccttccc

SEQ ID NO: 131377 - DNA, 70 bp, Homo sapiens
atatattaatttcattacccccaacatacacactctcacaactcccttccctccctcaattttgcacttt

SEQ ID NO: 131378 - DNA, 70 bp, Homo sapiens
tttcattacccccaacatacacactctcacaactcccttccctccctcaattttgcacttttcaaaccta

SEQ ID NO: 131379 - DNA, 71 bp, Homo sapiens
aacatacacactctcacaactcccttccctccctcaattttgcacttttcaaacctacagaaacactgaaa

SEQ ID NO: 131380 - DNA, 70 bp, Homo sapiens
tctcacaactcccttccctccctcaattttgcacttttcaaacctacagaaacactgaaagaacaaataa

SEQ ID NO: 131381 - DNA, 69 bp, Homo sapiens
cccttccctccctcaattttgcacttttcaaacctacagaaacactgaaagaacaaataatgaacagct

SEQ ID NO: 131382 - DNA, 70 bp, Homo sapiens
cctccctcaattttgcacttttcaaacctacagaaacactgaaagaacaaataatgaacagctttataac

SEQ ID NO: 131383 - DNA, 75 bp, Homo sapiens
tgcacttttcaaacctacagaaacactgaaagaacaaataatgaacagctttataactctgacctagattgacca

SEQ ID NO: 131384 - DNA, 73 bp, Homo sapiens
caaacctacagaaacactgaaagaacaaataatgaacagctttataactctgacctagattgaccagttatct

SEQ ID NO: 131385 - DNA, 75 bp, Homo sapiens
cagaaacactgaaagaacaaataatgaacagctttataactctgacctagattgaccagttatcttttagccata

SEQ ID NO: 131386 - DNA, 74 bp, Homo sapiens
gaaagaacaaataatgaacagctttataactctgacctagattgaccagttatcttttagccatatttattctc

SEQ ID NO: 131387 - DNA, 76 bp, Homo sapiens
tgaacagctttataactctgacctagattgaccagttatcttttagccatatttattctctttctctcatataccg

SEQ ID NO: 131388 - DNA, 74 bp, Homo sapiens
gctttataactctgacctagattgaccagttatcttttagccatatttattctctttctctcatataccgtaat

SEQ ID NO: 131389 - DNA, 74 bp, Homo sapiens
ctctgacctagattgaccagttatcttttagccatatttattctctttctctcatataccgtaattttcttcac

SEQ ID NO: 131390 - DNA, 75 bp, Homo sapiens
gattgaccagttatcttttagccatatttattctctttctctcatataccgtaattttcttcacttatggaatca

SEQ ID NO: 131391 - DNA, 75 bp, Homo sapiens
ttttagccatatttattctctttctctcatataccgtaattttcttcacttatggaatcacttgaaagttgcaga

SEQ ID NO: 131392 - DNA, 77 bp, Homo sapiens
gccatatttattctctttctctcatataccgtaattttcttcacttatggaatcacttgaaagttgcagatatcagt

SEQ ID NO: 131393 - DNA, 76 bp, Homo sapiens
ctttctctcatataccgtaattttcttcacttatggaatcacttgaaagttgcagatatcagttatgacattttac

SEQ ID NO: 131394 - DNA, 75 bp, Homo sapiens
ctcatataccgtaattttcttcacttatggaatcacttgaaagttgcagatatcagttatgacattttaccccta

SEQ ID NO: 131395 - DNA, 77 bp, Homo sapiens
tttcttcacttatggaatcacttgaaagttgcagatatcagttatgacattttacccctaaattcttcagtgtgcat

SEQ ID NO: 131396 - DNA, 76 bp, Homo sapiens
acttatggaatcacttgaaagttgcagatatcagttatgacattttacccctaaattcttcagtgtgcatttccta

SEQ ID NO: 131397 - DNA, 76 bp, Homo sapiens
tcacttgaaagttgcagatatcagttatgacattttacccctaaattcttcagtgtgcatttcctaagaataagga

SEQ ID NO: 131398 - DNA, 74 bp, Homo sapiens
agttgcagatatcagttatgacattttacccctaaattcttcagtgtgcatttcctaagaataaggacattttc

SEQ ID NO: 131399 - DNA, 71 bp, Homo sapiens
gacattttacccctaaattcttcagtgtgcatttcctaagaataaggacattttcttacataactaagata

SEQ ID NO: 131400 - DNA, 73 bp, Homo sapiens
aattcttcagtgtgcatttcctaagaataaggacattttcttacataactaagatacttttatcgcacctgaa

SEQ ID NO: 131401 - DNA, 69 bp, Homo sapiens
tttcctaagaataaggacattttcttacataactaagatacttttatcgcacctgaaaaaattaattca

SEQ ID NO: 131402 - DNA, 70 bp, Homo sapiens
ggacattttcttacataactaagatacttttatcgcacctgaaaaaattaattcaatataacctacagtc

SEQ ID NO: 131403 - DNA, 72 bp, Homo sapiens
cttacataactaagatacttttatcgcacctgaaaaaattaattcaatataacctacagtccatatctgaat

SEQ ID NO: 131404 - DNA, 74 bp, Homo sapiens
taagatacttttatcgcacctgaaaaaattaattcaatataacctacagtccatatctgaatttcctcaattgc

SEQ ID NO: 131405 - DNA, 72 bp, Homo sapiens
cacctgaaaaaattaattcaatataacctacagtccatatctgaatttcctcaattgcctccaaaatgttct

SEQ ID NO: 131406 - DNA, 75 bp, Homo sapiens
taattcaatataacctacagtccatatctgaatttcctcaattgcctccaaaatgttcttttatagctgtttaga

SEQ ID NO: 131407 - DNA, 71 bp, Homo sapiens
acctacagtccatatctgaatttcctcaattgcctccaaaatgttcttttatagctgtttagatttttccc

SEQ ID NO: 131408 - DNA, 72 bp, Homo sapiens
tccatatctgaatttcctcaattgcctccaaaatgttcttttatagctgtttagatttttcccccaagccaa

SEQ ID NO: 131409 - DNA, 68 bp, Homo sapiens
ctgaatttcctcaattgcctccaaaatgttcttttatagctgtttagatttttcccccaagccaaggg

SEQ ID NO: 131410 - DNA, 64 bp, Homo sapiens
caattgcctccaaaatgttcttttatagctgtttagatttttcccccaagccaaggggtttttt

SEQ ID NO: 131411 - DNA, 61 bp, Homo sapiens
ccaaaatgttcttttatagctgtttagatttttcccccaagccaaggggtttttttttgtt

SEQ ID NO: 131412 - DNA, 79 bp, Homo sapiens
caccacacctggtcccaagatttaatcaagaatcatgcactgcatttggttgttgtcaatttggtcacaatctagaaca

SEQ ID NO: 131413 - DNA, 77 bp, Homo sapiens
acctggtcccaagatttaatcaagaatcatgcactgcatttggttgttgtcaatttggtcacaatctagaacagtac

SEQ ID NO: 131414 - DNA, 74 bp, Homo sapiens
tttaatcaagaatcatgcactgcatttggttgttgtcaatttggtcacaatctagaacagtacccctacctttt

SEQ ID NO: 131415 - DNA, 73 bp, Homo sapiens
aagaatcatgcactgcatttggttgttgtcaatttggtcacaatctagaacagtacccctacctttttcattt

SEQ ID NO: 131416 - DNA, 74 bp, Homo sapiens
actgcatttggttgttgtcaatttggtcacaatctagaacagtacccctacctttttcattttcatgacactga

SEQ ID NO: 131417 - DNA, 74 bp, Homo sapiens
tgttgtcaatttggtcacaatctagaacagtacccctacctttttcattttcatgacactgacttaagtatcta

SEQ ID NO: 131418 - DNA, 72 bp, Homo sapiens
tttggtcacaatctagaacagtacccctacctttttcattttcatgacactgacttaagtatctaagctgtt

SEQ ID NO: 131419 - DNA, 74 bp, Homo sapiens
atctagaacagtacccctacctttttcattttcatgacactgacttaagtatctaagctgtttgtcttgcacaa

SEQ ID NO: 131420 - DNA, 76 bp, Homo sapiens
cctttttcattttcatgacactgacttaagtatctaagctgtttgtcttgcacaatgttctgtattctaaatttgc

SEQ ID NO: 131421 - DNA, 79 bp, Homo sapiens
attttcatgacactgacttaagtatctaagctgtttgtcttgcacaatgttctgtattctaaatttgcttcctcatgat

SEQ ID NO: 131422 - DNA, 78 bp, Homo sapiens
cactgacttaagtatctaagctgtttgtcttgcacaatgttctgtattctaaatttgcttcctcatgattagatttag

SEQ ID NO: 131423 - DNA, 76 bp, Homo sapiens
agtatctaagctgtttgtcttgcacaatgttctgtattctaaatttgcttcctcatgattagatttaggttaaaca

SEQ ID NO: 131424 - DNA, 76 bp, Homo sapiens
gctgtttgtcttgcacaatgttctgtattctaaatttgcttcctcatgattagatttaggttaaacatttttggca

SEQ ID NO: 131425 - DNA, 71 bp, Homo sapiens
atttgcttcctcatgattagatttaggttaaacatttttggcaagaagaaaacataggtatatgtacttct

SEQ ID NO: 131426 - DNA, 71 bp, Homo sapiens
catgattagatttaggttaaacatttttggcaagaagaaaacataggtatatgtacttcttaacatcaagg

SEQ ID NO: 131427 - DNA, 75 bp, Homo sapiens
catttttggcaagaagaaaacataggtatatgtacttcttaacatcaaggggcatatgttatcaggctgtataac

SEQ ID NO: 131428 - DNA, 77 bp, Homo sapiens
aagaagaaaacataggtatatgtacttcttaacatcaaggggcatatgttatcaggctgtataaccagtgatggtgc

SEQ ID NO: 131429 - DNA, 76 bp, Homo sapiens
aaaacataggtatatgtacttcttaacatcaaggggcatatgttatcaggctgtataaccagtgatggtgctaaaa

SEQ ID NO: 131430 - DNA, 76 bp, Homo sapiens
gtatatgtacttcttaacatcaaggggcatatgttatcaggctgtataaccagtgatggtgctaaaagtttgaaag

SEQ ID NO: 131431 - DNA, 77 bp, Homo sapiens
ttcttaacatcaaggggcatatgttatcaggctgtataaccagtgatggtgctaaaagtttgaaaggtgacaccaga

SEQ ID NO: 131432 - DNA, 78 bp, Homo sapiens
ggcatatgttatcaggctgtataaccagtgatggtgctaaaagtttgaaaggtgacaccagatctgtctttgtaatta

SEQ ID NO: 131433 - DNA, 76 bp, Homo sapiens
atgttatcaggctgtataaccagtgatggtgctaaaagtttgaaaggtgacaccagatctgtctttgtaattaaca

SEQ ID NO: 131434 - DNA, 76 bp, Homo sapiens
ctgtataaccagtgatggtgctaaaagtttgaaaggtgacaccagatctgtctttgtaattaacacataatctatg

SEQ ID NO: 131435 - DNA, 75 bp, Homo sapiens
tgatggtgctaaaagtttgaaaggtgacaccagatctgtctttgtaattaacacataatctatggggtatcattt

SEQ ID NO: 131436 - DNA, 75 bp, Homo sapiens
taaaagtttgaaaggtgacaccagatctgtctttgtaattaacacataatctatggggtatcattttgatgccac

SEQ ID NO: 131437 - DNA, 75 bp, Homo sapiens
aaaggtgacaccagatctgtctttgtaattaacacataatctatggggtatcattttgatgccacgtgaaaatcc

SEQ ID NO: 131438 - DNA, 74 bp, Homo sapiens
accagatctgtctttgtaattaacacataatctatggggtatcattttgatgccacgtgaaaatcctgttttcc

SEQ ID NO: 131439 - DNA, 72 bp, Homo sapiens
tttgtaattaacacataatctatggggtatcattttgatgccacgtgaaaatcctgttttcccacaactaac

SEQ ID NO: 131440 - DNA, 77 bp, Homo sapiens
tatcattttgatgccacgtgaaaatcctgttttcccacaactaactgcctaataacagttttagcatctactgatga

SEQ ID NO: 131441 - DNA, 74 bp, Homo sapiens
cctgttttcccacaactaactgcctaataacagttttagcatctactgatgatccttgtctgaactgattttta

SEQ ID NO: 131442 - DNA, 74 bp, Homo sapiens
tttcccacaactaactgcctaataacagttttagcatctactgatgatccttgtctgaactgatttttacaaaa

SEQ ID NO: 131443 - DNA, 73 bp, Homo sapiens
ctaactgcctaataacagttttagcatctactgatgatccttgtctgaactgatttttacaaaattgattttt

SEQ ID NO: 131444 - DNA, 74 bp, Homo sapiens
aacagttttagcatctactgatgatccttgtctgaactgatttttacaaaattgattttttcaataaaattgca

SEQ ID NO: 131445 - DNA, 76 bp, Homo sapiens
gcatctactgatgatccttgtctgaactgatttttacaaaattgattttttcaataaaattgcaaaatagcaagga

SEQ ID NO: 131446 - DNA, 75 bp, Homo sapiens
ctgatgatccttgtctgaactgatttttacaaaattgattttttcaataaaattgcaaaatagcaaggactgcat

SEQ ID NO: 131447 - DNA, 75 bp, Homo sapiens
tgtctgaactgatttttacaaaattgattttttcaataaaattgcaaaatagcaaggactgcatttttatgatca

SEQ ID NO: 131448 - DNA, 76 bp, Homo sapiens
tgattttttcaataaaattgcaaaatagcaaggactgcatttttatgatcactctagtaatgttcaagaggccact

SEQ ID NO: 131449 - DNA, 75 bp, Homo sapiens
caataaaattgcaaaatagcaaggactgcatttttatgatcactctagtaatgttcaagaggccacttaaaagaa

SEQ ID NO: 131450 - DNA, 74 bp, Homo sapiens
aattgcaaaatagcaaggactgcatttttatgatcactctagtaatgttcaagaggccacttaaaagaacaaat

SEQ ID NO: 131451 - DNA, 73 bp, Homo sapiens
aaggactgcatttttatgatcactctagtaatgttcaagaggccacttaaaagaacaaattggagtgactggg

SEQ ID NO: 131452 - DNA, 72 bp, Homo sapiens
atttttatgatcactctagtaatgttcaagaggccacttaaaagaacaaattggagtgactgggtgaatggt

SEQ ID NO: 131453 - DNA, 72 bp, Homo sapiens
agtaatgttcaagaggccacttaaaagaacaaattggagtgactgggtgaatggttgtgctattaacactcc

SEQ ID NO: 131454 - DNA, 74 bp, Homo sapiens
aagaacaaattggagtgactgggtgaatggttgtgctattaacactcctggacaggtgatccagggcgagtaaa

SEQ ID NO: 131455 - DNA, 71 bp, Homo sapiens
actgggtgaatggttgtgctattaacactcctggacaggtgatccagggcgagtaaacttagggaagtggg

SEQ ID NO: 131456 - DNA, 71 bp, Homo sapiens
ttgtgctattaacactcctggacaggtgatccagggcgagtaaacttagggaagtgggggagaaactgtgt

SEQ ID NO: 131457 - DNA, 71 bp, Homo sapiens
tattaacactcctggacaggtgatccagggcgagtaaacttagggaagtgggggagaaactgtgttctgtc

SEQ ID NO: 131458 - DNA, 71 bp, Homo sapiens
atccagggcgagtaaacttagggaagtgggggagaaactgtgttctgtcttggagaatcacagaactcaag

SEQ ID NO: 131459 - DNA, 73 bp, Homo sapiens
agtaaacttagggaagtgggggagaaactgtgttctgtcttggagaatcacagaactcaaggacaggcatgaa

SEQ ID NO: 131460 - DNA, 78 bp, Homo sapiens
aagtgggggagaaactgtgttctgtcttggagaatcacagaactcaaggacaggcatgaagagagcccacccagcaca

SEQ ID NO: 131461 - DNA, 81 bp, Homo sapiens
agaaactgtgttctgtcttggagaatcacagaactcaaggacaggcatgaagagagcccacccagcacaggaatctgagga

SEQ ID NO: 131462 - DNA, 83 bp, Homo sapiens
tgtgttctgtcttggagaatcacagaactcaaggacaggcatgaagagagcccacccagcacaggaatctgaggagggccaca

SEQ ID NO: 131463 - DNA, 82 bp, Homo sapiens
cttggagaatcacagaactcaaggacaggcatgaagagagcccacccagcacaggaatctgaggagggccacagaggcagga

SEQ ID NO: 131464 - DNA, 79 bp, Homo sapiens
acagaactcaaggacaggcatgaagagagcccacccagcacaggaatctgaggagggccacagaggcaggaggggagga

SEQ ID NO: 131465 - DNA, 79 bp, Homo sapiens
acaggcatgaagagagcccacccagcacaggaatctgaggagggccacagaggcaggaggggaggaggcaaagctatta

SEQ ID NO: 131466 - DNA, 76 bp, Homo sapiens
atgaagagagcccacccagcacaggaatctgaggagggccacagaggcaggaggggaggaggcaaagctattaccc

SEQ ID NO: 131467 - DNA, 71 bp, Homo sapiens
agggccacagaggcaggaggggaggaggcaaagctattaccccaagtaagcttcaagaaaaagcctgtaga

SEQ ID NO: 131468 - DNA, 71 bp, Homo sapiens
aggcaggaggggaggaggcaaagctattaccccaagtaagcttcaagaaaaagcctgtagacagaaagaca

SEQ ID NO: 131469 - DNA, 74 bp, Homo sapiens
gaggaggcaaagctattaccccaagtaagcttcaagaaaaagcctgtagacagaaagacagagagacactaaca

SEQ ID NO: 131470 - DNA, 71 bp, Homo sapiens
aaagctattaccccaagtaagcttcaagaaaaagcctgtagacagaaagacagagagacactaacagtggg

SEQ ID NO: 131471 - DNA, 73 bp, Homo sapiens
ccaagtaagcttcaagaaaaagcctgtagacagaaagacagagagacactaacagtggggaagtcaggcaaaa

SEQ ID NO: 131472 - DNA, 71 bp, Homo sapiens
aaaaagcctgtagacagaaagacagagagacactaacagtggggaagtcaggcaaaataaggcttataaag

SEQ ID NO: 131473 - DNA, 73 bp, Homo sapiens
cagaaagacagagagacactaacagtggggaagtcaggcaaaataaggcttataaagtttccagagaatcact

SEQ ID NO: 131474 - DNA, 74 bp, Homo sapiens
acagagagacactaacagtggggaagtcaggcaaaataaggcttataaagtttccagagaatcacttatgctta

SEQ ID NO: 131475 - DNA, 73 bp, Homo sapiens
acactaacagtggggaagtcaggcaaaataaggcttataaagtttccagagaatcacttatgcttaggacata

SEQ ID NO: 131476 - DNA, 78 bp, Homo sapiens
aaataaggcttataaagtttccagagaatcacttatgcttaggacatagccagtggtctcagagctatgccagtggat

SEQ ID NO: 131477 - DNA, 82 bp, Homo sapiens
tataaagtttccagagaatcacttatgcttaggacatagccagtggtctcagagctatgccagtggattggtggaagcacaa

SEQ ID NO: 131478 - DNA, 81 bp, Homo sapiens
tttccagagaatcacttatgcttaggacatagccagtggtctcagagctatgccagtggattggtggaagcacaaacttac

SEQ ID NO: 131479 - DNA, 81 bp, Homo sapiens
acttatgcttaggacatagccagtggtctcagagctatgccagtggattggtggaagcacaaacttactgcaacagattaa

SEQ ID NO: 131480 - DNA, 82 bp, Homo sapiens
taggacatagccagtggtctcagagctatgccagtggattggtggaagcacaaacttactgcaacagattaaagagtgaata

SEQ ID NO: 131481 - DNA, 80 bp, Homo sapiens
atagccagtggtctcagagctatgccagtggattggtggaagcacaaacttactgcaacagattaaagagtgaataagaa

SEQ ID NO: 131482 - DNA, 79 bp, Homo sapiens
gtctcagagctatgccagtggattggtggaagcacaaacttactgcaacagattaaagagtgaataagaagtgagaaag

SEQ ID NO: 131483 - DNA, 79 bp, Homo sapiens
tatgccagtggattggtggaagcacaaacttactgcaacagattaaagagtgaataagaagtgagaaagtggagtcaga

SEQ ID NO: 131484 - DNA, 76 bp, Homo sapiens
attggtggaagcacaaacttactgcaacagattaaagagtgaataagaagtgagaaagtggagtcagaggtatgtg

SEQ ID NO: 131485 - DNA, 73 bp, Homo sapiens
caacagattaaagagtgaataagaagtgagaaagtggagtcagaggtatgtgtcccctaagaggttacttaca

SEQ ID NO: 131486 - DNA, 75 bp, Homo sapiens
ataagaagtgagaaagtggagtcagaggtatgtgtcccctaagaggttacttacagatgtgctaacagttcatta

SEQ ID NO: 131487 - DNA, 75 bp, Homo sapiens
aaagtggagtcagaggtatgtgtcccctaagaggttacttacagatgtgctaacagttcattactcattcattct

SEQ ID NO: 131488 - DNA, 77 bp, Homo sapiens
tcagaggtatgtgtcccctaagaggttacttacagatgtgctaacagttcattactcattcattcttccaataaata

SEQ ID NO: 131489 - DNA, 80 bp, Homo sapiens
tacagatgtgctaacagttcattactcattcattcttccaataaatatctgcgagcctacatgtgtcggaccctgtttta

SEQ ID NO: 131490 - DNA, 76 bp, Homo sapiens
ctaacagttcattactcattcattcttccaataaatatctgcgagcctacatgtgtcggaccctgttttagtgttg

SEQ ID NO: 131491 - DNA, 75 bp, Homo sapiens
attactcattcattcttccaataaatatctgcgagcctacatgtgtcggaccctgttttagtgttgggttattca

SEQ ID NO: 131492 - DNA, 73 bp, Homo sapiens
attcattcttccaataaatatctgcgagcctacatgtgtcggaccctgttttagtgttgggttattcatgttt

SEQ ID NO: 131493 - DNA, 74 bp, Homo sapiens
ataaatatctgcgagcctacatgtgtcggaccctgttttagtgttgggttattcatgttttcgtggagcttata

SEQ ID NO: 131494 - DNA, 72 bp, Homo sapiens
cgagcctacatgtgtcggaccctgttttagtgttgggttattcatgttttcgtggagcttatacttaattga

SEQ ID NO: 131495 - DNA, 71 bp, Homo sapiens
tacatgtgtcggaccctgttttagtgttgggttattcatgttttcgtggagcttatacttaattgaagaaa

SEQ ID NO: 131496 - DNA, 70 bp, Homo sapiens
cggaccctgttttagtgttgggttattcatgttttcgtggagcttatacttaattgaagaaagatataca

SEQ ID NO: 131497 - DNA, 72 bp, Homo sapiens
ttagtgttgggttattcatgttttcgtggagcttatacttaattgaagaaagatatacataaaacaaacatg

SEQ ID NO: 131498 - DNA, 75 bp, Homo sapiens
ttcatgttttcgtggagcttatacttaattgaagaaagatatacataaaacaaacatgtaacacagtaggaggca

SEQ ID NO: 131499 - DNA, 78 bp, Homo sapiens
cgtggagcttatacttaattgaagaaagatatacataaaacaaacatgtaacacagtaggaggcagtatatgctatga

SEQ ID NO: 131500 - DNA, 77 bp, Homo sapiens
gcttatacttaattgaagaaagatatacataaaacaaacatgtaacacagtaggaggcagtatatgctatgaagaac

SEQ ID NO: 131501 - DNA, 77 bp, Homo sapiens
gaagaaagatatacataaaacaaacatgtaacacagtaggaggcagtatatgctatgaagaactataaagcaagtta

SEQ ID NO: 131502 - DNA, 77 bp, Homo sapiens
atacataaaacaaacatgtaacacagtaggaggcagtatatgctatgaagaactataaagcaagttataagtgacag

SEQ ID NO: 131503 - DNA, 77 bp, Homo sapiens
aaaacaaacatgtaacacagtaggaggcagtatatgctatgaagaactataaagcaagttataagtgacagtgatgg

SEQ ID NO: 131504 - DNA, 78 bp, Homo sapiens
taacacagtaggaggcagtatatgctatgaagaactataaagcaagttataagtgacagtgatggggtgaggtcattt

SEQ ID NO: 131505 - DNA, 79 bp, Homo sapiens
gtaggaggcagtatatgctatgaagaactataaagcaagttataagtgacagtgatggggtgaggtcattttatatgga

SEQ ID NO: 131506 - DNA, 78 bp, Homo sapiens
gtatatgctatgaagaactataaagcaagttataagtgacagtgatggggtgaggtcattttatatggagtggtcagg

SEQ ID NO: 131507 - DNA, 72 bp, Homo sapiens
aactataaagcaagttataagtgacagtgatggggtgaggtcattttatatggagtggtcagggaaagactt

SEQ ID NO: 131508 - DNA, 75 bp, Homo sapiens
taaagcaagttataagtgacagtgatggggtgaggtcattttatatggagtggtcagggaaagactttctgataa

SEQ ID NO: 131509 - DNA, 76 bp, Homo sapiens
tataagtgacagtgatggggtgaggtcattttatatggagtggtcagggaaagactttctgataaggtgacatttg

SEQ ID NO: 131510 - DNA, 73 bp, Homo sapiens
agtgatggggtgaggtcattttatatggagtggtcagggaaagactttctgataaggtgacatttggctgggg

SEQ ID NO: 131511 - DNA, 76 bp, Homo sapiens
aggtcattttatatggagtggtcagggaaagactttctgataaggtgacatttggctgggggtggcagctcatgcc

SEQ ID NO: 131512 - DNA, 71 bp, Homo sapiens
aaaaaaaaagtgacattggaggagagatgtaaaaaaagggagtgagccctgcagtcctctgggagacagcc

SEQ ID NO: 131513 - DNA, 75 bp, Homo sapiens
aaaagtgacattggaggagagatgtaaaaaaagggagtgagccctgcagtcctctgggagacagccctccaagca

SEQ ID NO: 131514 - DNA, 79 bp, Homo sapiens
ttggaggagagatgtaaaaaaagggagtgagccctgcagtcctctgggagacagccctccaagcagagaacagcatgtg

SEQ ID NO: 131515 - DNA, 77 bp, Homo sapiens
atgtaaaaaaagggagtgagccctgcagtcctctgggagacagccctccaagcagagaacagcatgtggaaaggctc

SEQ ID NO: 131516 - DNA, 80 bp, Homo sapiens
aagggagtgagccctgcagtcctctgggagacagccctccaagcagagaacagcatgtggaaaggctctcagtgggatcc

SEQ ID NO: 131517 - DNA, 87 bp, Homo sapiens
tgcagtcctctgggagacagccctccaagcagagaacagcatgtggaaaggctctcagtgggatcctgcctgcatggcatcaaggag

SEQ ID NO: 131518 - DNA, 85 bp, Homo sapiens
tctgggagacagccctccaagcagagaacagcatgtggaaaggctctcagtgggatcctgcctgcatggcatcaaggaggccagg

SEQ ID NO: 131519 - DNA, 83 bp, Homo sapiens
cctccaagcagagaacagcatgtggaaaggctctcagtgggatcctgcctgcatggcatcaaggaggccagggtggcagaaaa

SEQ ID NO: 131520 - DNA, 82 bp, Homo sapiens
agagaacagcatgtggaaaggctctcagtgggatcctgcctgcatggcatcaaggaggccagggtggcagaaaacaagaaga

SEQ ID NO: 131521 - DNA, 81 bp, Homo sapiens
aacagcatgtggaaaggctctcagtgggatcctgcctgcatggcatcaaggaggccagggtggcagaaaacaagaagagtg

SEQ ID NO: 131522 - DNA, 79 bp, Homo sapiens
atgtggaaaggctctcagtgggatcctgcctgcatggcatcaaggaggccagggtggcagaaaacaagaagagtgggtg

SEQ ID NO: 131523 - DNA, 77 bp, Homo sapiens
aaaggctctcagtgggatcctgcctgcatggcatcaaggaggccagggtggcagaaaacaagaagagtgggtggaaa

SEQ ID NO: 131524 - DNA, 79 bp, Homo sapiens
tctcagtgggatcctgcctgcatggcatcaaggaggccagggtggcagaaaacaagaagagtgggtggaaacacaggga

SEQ ID NO: 131525 - DNA, 77 bp, Homo sapiens
atcctgcctgcatggcatcaaggaggccagggtggcagaaaacaagaagagtgggtggaaacacagggagacaaagc

SEQ ID NO: 131526 - DNA, 78 bp, Homo sapiens
tgcatggcatcaaggaggccagggtggcagaaaacaagaagagtgggtggaaacacagggagacaaagccacacagga

SEQ ID NO: 131527 - DNA, 75 bp, Homo sapiens
atggcatcaaggaggccagggtggcagaaaacaagaagagtgggtggaaacacagggagacaaagccacacagga

SEQ ID NO: 131528 - DNA, 72 bp, Homo sapiens
atcaaggaggccagggtggcagaaaacaagaagagtgggtggaaacacagggagacaaagccacacaggacc

SEQ ID NO: 131529 - DNA, 71 bp, Homo sapiens
ggccagggtggcagaaaacaagaagagtgggtggaaacacagggagacaaagccacacaggaccctgtaaa

SEQ ID NO: 131530 - DNA, 72 bp, Homo sapiens
gcagaaaacaagaagagtgggtggaaacacagggagacaaagccacacaggaccctgtaaaactgtgaacta

SEQ ID NO: 131531 - DNA, 70 bp, Homo sapiens
aaacaagaagagtgggtggaaacacagggagacaaagccacacaggaccctgtaaaactgtgaactataa

SEQ ID NO: 131532 - DNA, 74 bp, Homo sapiens
gaccctgtaaaactgtgaactataatgagaagaaataaagtagaatggtgcctgcgaaccttgacactgacaaa

SEQ ID NO: 131533 - DNA, 71 bp, Homo sapiens
aagaaataaagtagaatggtgcctgcgaaccttgacactgacaaaaaggcttctgaggtaacataaataaa

SEQ ID NO: 131534 - DNA, 70 bp, Homo sapiens
aaagtagaatggtgcctgcgaaccttgacactgacaaaaaggcttctgaggtaacataaataaacaggtt

SEQ ID NO: 131535 - DNA, 72 bp, Homo sapiens
cctgcgaaccttgacactgacaaaaaggcttctgaggtaacataaataaacaggtttgctgaaaatggtctc

SEQ ID NO: 131536 - DNA, 71 bp, Homo sapiens
ttgacactgacaaaaaggcttctgaggtaacataaataaacaggtttgctgaaaatggtctccttgttttc

SEQ ID NO: 131537 - DNA, 68 bp, Homo sapiens
actgacaaaaaggcttctgaggtaacataaataaacaggtttgctgaaaatggtctccttgttttccc

SEQ ID NO: 131538 - DNA, 69 bp, Homo sapiens
ttctgaggtaacataaataaacaggtttgctgaaaatggtctccttgttttccccaataacctccacaa

SEQ ID NO: 131539 - DNA, 69 bp, Homo sapiens
cataaataaacaggtttgctgaaaatggtctccttgttttccccaataacctccacaatgtgttagaaa

SEQ ID NO: 131540 - DNA, 68 bp, Homo sapiens
ataaacaggtttgctgaaaatggtctccttgttttccccaataacctccacaatgtgttagaaattac

SEQ ID NO: 131541 - DNA, 72 bp, Homo sapiens
ttgctgaaaatggtctccttgttttccccaataacctccacaatgtgttagaaattacctcacttcagcttc

SEQ ID NO: 131542 - DNA, 71 bp, Homo sapiens
tccttgttttccccaataacctccacaatgtgttagaaattacctcacttcagcttctcagtacttactat

SEQ ID NO: 131543 - DNA, 70 bp, Homo sapiens
gttttccccaataacctccacaatgtgttagaaattacctcacttcagcttctcagtacttactattttc

SEQ ID NO: 131544 - DNA, 71 bp, Homo sapiens
aaattacctcacttcagcttctcagtacttactattttccacattttacagttgggaaatgactttcctga

SEQ ID NO: 131545 - DNA, 76 bp, Homo sapiens
ttcagcttctcagtacttactattttccacattttacagttgggaaatgactttcctgagatcacatcctaatcaa

SEQ ID NO: 131546 - DNA, 75 bp, Homo sapiens
gtacttactattttccacattttacagttgggaaatgactttcctgagatcacatcctaatcaactacagaatga

SEQ ID NO: 131547 - DNA, 75 bp, Homo sapiens
tttacagttgggaaatgactttcctgagatcacatcctaatcaactacagaatgaacactagactctggttcttt

SEQ ID NO: 131548 - DNA, 76 bp, Homo sapiens
agttgggaaatgactttcctgagatcacatcctaatcaactacagaatgaacactagactctggttcttttgattc

SEQ ID NO: 131549 - DNA, 74 bp, Homo sapiens
actttcctgagatcacatcctaatcaactacagaatgaacactagactctggttcttttgattccaaatctttt

SEQ ID NO: 131550 - DNA, 76 bp, Homo sapiens
gagatcacatcctaatcaactacagaatgaacactagactctggttcttttgattccaaatctttttatttacata

SEQ ID NO: 131551 - DNA, 75 bp, Homo sapiens
tcaactacagaatgaacactagactctggttcttttgattccaaatctttttatttacatatatttcatcaagag

SEQ ID NO: 131552 - DNA, 76 bp, Homo sapiens
cagaatgaacactagactctggttcttttgattccaaatctttttatttacatatatttcatcaagaggtggcaga

SEQ ID NO: 131553 - DNA, 73 bp, Homo sapiens
acactagactctggttcttttgattccaaatctttttatttacatatatttcatcaagaggtggcagaaggta

SEQ ID NO: 131554 - DNA, 71 bp, Homo sapiens
ctggttcttttgattccaaatctttttatttacatatatttcatcaagaggtggcagaaggtaaaggagta

SEQ ID NO: 131555 - DNA, 70 bp, Homo sapiens
ccaaatctttttatttacatatatttcatcaagaggtggcagaaggtaaaggagtatagaaaacgaagtg

SEQ ID NO: 131556 - DNA, 74 bp, Homo sapiens
ttttatttacatatatttcatcaagaggtggcagaaggtaaaggagtatagaaaacgaagtgtgtgatatgccc

SEQ ID NO: 131557 - DNA, 75 bp, Homo sapiens
tatatttcatcaagaggtggcagaaggtaaaggagtatagaaaacgaagtgtgtgatatgcccggtgtggttgta

SEQ ID NO: 131558 - DNA, 71 bp, Homo sapiens
aagaggtggcagaaggtaaaggagtatagaaaacgaagtgtgtgatatgcccggtgtggttgtaattccaa

SEQ ID NO: 131559 - DNA, 71 bp, Homo sapiens
gtggcagaaggtaaaggagtatagaaaacgaagtgtgtgatatgcccggtgtggttgtaattccaacactt

SEQ ID NO: 131560 - DNA, 72 bp, Homo sapiens
taggcaacagaactagacctgtctctaaataaaaaaccccaagatgaaacaaaatgcatgatgggttaccaa

SEQ ID NO: 131561 - DNA, 71 bp, Homo sapiens
caacagaactagacctgtctctaaataaaaaaccccaagatgaaacaaaatgcatgatgggttaccaaata

SEQ ID NO: 131562 - DNA, 70 bp, Homo sapiens
acagaactagacctgtctctaaataaaaaaccccaagatgaaacaaaatgcatgatgggttaccaaataa

SEQ ID NO: 131563 - DNA, 71 bp, Homo sapiens
gacctgtctctaaataaaaaaccccaagatgaaacaaaatgcatgatgggttaccaaataaataacagaca

SEQ ID NO: 131564 - DNA, 72 bp, Homo sapiens
tctctaaataaaaaaccccaagatgaaacaaaatgcatgatgggttaccaaataaataacagacaacagtga

SEQ ID NO: 131565 - DNA, 72 bp, Homo sapiens
aaccccaagatgaaacaaaatgcatgatgggttaccaaataaataacagacaacagtgattttaatctagtc

SEQ ID NO: 131566 - DNA, 74 bp, Homo sapiens
cccaagatgaaacaaaatgcatgatgggttaccaaataaataacagacaacagtgattttaatctagtctttca

SEQ ID NO: 131567 - DNA, 74 bp, Homo sapiens
gaaacaaaatgcatgatgggttaccaaataaataacagacaacagtgattttaatctagtctttcacatttggc

SEQ ID NO: 131568 - DNA, 75 bp, Homo sapiens
caaaatgcatgatgggttaccaaataaataacagacaacagtgattttaatctagtctttcacatttggccatct

SEQ ID NO: 131569 - DNA, 75 bp, Homo sapiens
tgcatgatgggttaccaaataaataacagacaacagtgattttaatctagtctttcacatttggccatcttttcc

SEQ ID NO: 131570 - DNA, 71 bp, Homo sapiens
gggttaccaaataaataacagacaacagtgattttaatctagtctttcacatttggccatcttttcctagc

SEQ ID NO: 131571 - DNA, 72 bp, Homo sapiens
aataacagacaacagtgattttaatctagtctttcacatttggccatcttttcctagctattcctttggaaa

SEQ ID NO: 131572 - DNA, 74 bp, Homo sapiens
gattttaatctagtctttcacatttggccatcttttcctagctattcctttggaaataaatgctgccttgtcat

SEQ ID NO: 131573 - DNA, 75 bp, Homo sapiens
tagtctttcacatttggccatcttttcctagctattcctttggaaataaatgctgccttgtcattttctctaata

SEQ ID NO: 131574 - DNA, 76 bp, Homo sapiens
atttggccatcttttcctagctattcctttggaaataaatgctgccttgtcattttctctaatattggcaatgaga

SEQ ID NO: 131575 - DNA, 77 bp, Homo sapiens
tcttttcctagctattcctttggaaataaatgctgccttgtcattttctctaatattggcaatgagacagcagggaa

SEQ ID NO: 131576 - DNA, 79 bp, Homo sapiens
tattcctttggaaataaatgctgccttgtcattttctctaatattggcaatgagacagcagggaaggcttcagatctaa

SEQ ID NO: 131577 - DNA, 78 bp, Homo sapiens
aaataaatgctgccttgtcattttctctaatattggcaatgagacagcagggaaggcttcagatctaacctcagaaaa

SEQ ID NO: 131578 - DNA, 76 bp, Homo sapiens
ccttgtcattttctctaatattggcaatgagacagcagggaaggcttcagatctaacctcagaaaatgtcaaaggg

SEQ ID NO: 131579 - DNA, 76 bp, Homo sapiens
ttttctctaatattggcaatgagacagcagggaaggcttcagatctaacctcagaaaatgtcaaaggggcacaaat

SEQ ID NO: 131580 - DNA, 77 bp, Homo sapiens
taatattggcaatgagacagcagggaaggcttcagatctaacctcagaaaatgtcaaaggggcacaaattctcctat

SEQ ID NO: 131581 - DNA, 73 bp, Homo sapiens
aatgagacagcagggaaggcttcagatctaacctcagaaaatgtcaaaggggcacaaattctcctatttcttt

SEQ ID NO: 131582 - DNA, 70 bp, Homo sapiens
agggaaggcttcagatctaacctcagaaaatgtcaaaggggcacaaattctcctatttcttttcccttca

SEQ ID NO: 131583 - DNA, 74 bp, Homo sapiens
ttcagatctaacctcagaaaatgtcaaaggggcacaaattctcctatttcttttcccttcagcacagcagaaaa

SEQ ID NO: 131584 - DNA, 74 bp, Homo sapiens
agaaaatgtcaaaggggcacaaattctcctatttcttttcccttcagcacagcagaaaagagagtcactgtata

SEQ ID NO: 131585 - DNA, 75 bp, Homo sapiens
atgtcaaaggggcacaaattctcctatttcttttcccttcagcacagcagaaaagagagtcactgtataatcaaa

SEQ ID NO: 131586 - DNA, 73 bp, Homo sapiens
aaattctcctatttcttttcccttcagcacagcagaaaagagagtcactgtataatcaaactccatccaaagt

SEQ ID NO: 131587 - DNA, 74 bp, Homo sapiens
atttcttttcccttcagcacagcagaaaagagagtcactgtataatcaaactccatccaaagttaactgagtct

SEQ ID NO: 131588 - DNA, 74 bp, Homo sapiens
actgtataatcaaactccatccaaagttaactgagtcttttgccacatcctttggccctagcattagtttctca

SEQ ID NO: 131589 - DNA, 73 bp, Homo sapiens
aaactccatccaaagttaactgagtcttttgccacatcctttggccctagcattagtttctcatacagcttta

SEQ ID NO: 131590 - DNA, 76 bp, Homo sapiens
acatcctttggccctagcattagtttctcatacagctttaggcagttaactgacttgccaaaaatgaccagcgata

SEQ ID NO: 131591 - DNA, 77 bp, Homo sapiens
tggccctagcattagtttctcatacagctttaggcagttaactgacttgccaaaaatgaccagcgatatggtacaaa

SEQ ID NO: 131592 - DNA, 78 bp, Homo sapiens
attagtttctcatacagctttaggcagttaactgacttgccaaaaatgaccagcgatatggtacaaagctatgagaga

SEQ ID NO: 131593 - DNA, 78 bp, Homo sapiens
tttaggcagttaactgacttgccaaaaatgaccagcgatatggtacaaagctatgagagaggcaggcaagccaggctt

SEQ ID NO: 131594 - DNA, 79 bp, Homo sapiens
ttaactgacttgccaaaaatgaccagcgatatggtacaaagctatgagagaggcaggcaagccaggcttttccgagcat

SEQ ID NO: 131595 - DNA, 81 bp, Homo sapiens
aaaaatgaccagcgatatggtacaaagctatgagagaggcaggcaagccaggcttttccgagcattggagatgaacgctca

SEQ ID NO: 131596 - DNA, 80 bp, Homo sapiens
agcgatatggtacaaagctatgagagaggcaggcaagccaggcttttccgagcattggagatgaacgctcagaatttttc

SEQ ID NO: 131597 - DNA, 79 bp, Homo sapiens
atggtacaaagctatgagagaggcaggcaagccaggcttttccgagcattggagatgaacgctcagaatttttctgtac

SEQ ID NO: 131598 - DNA, 81 bp, Homo sapiens
tatgagagaggcaggcaagccaggcttttccgagcattggagatgaacgctcagaatttttctgtacccagtcatcttata

SEQ ID NO: 131599 - DNA, 78 bp, Homo sapiens
aggcaagccaggcttttccgagcattggagatgaacgctcagaatttttctgtacccagtcatcttatatgcaaaagc

SEQ ID NO: 131600 - DNA, 80 bp, Homo sapiens
gcttttccgagcattggagatgaacgctcagaatttttctgtacccagtcatcttatatgcaaaagcgtcagctgtctta

SEQ ID NO: 131601 - DNA, 81 bp, Homo sapiens
tccgagcattggagatgaacgctcagaatttttctgtacccagtcatcttatatgcaaaagcgtcagctgtcttagaaatc

SEQ ID NO: 131602 - DNA, 79 bp, Homo sapiens
agatgaacgctcagaatttttctgtacccagtcatcttatatgcaaaagcgtcagctgtcttagaaatctgccattaac

SEQ ID NO: 131603 - DNA, 77 bp, Homo sapiens
agaatttttctgtacccagtcatcttatatgcaaaagcgtcagctgtcttagaaatctgccattaactctcagccgg

SEQ ID NO: 131604 - DNA, 70 bp, Homo sapiens
aaaagaaaagaacggaaatttgccattaactcttgaatcatggggacagggcaatcttctacttcagaac

SEQ ID NO: 131605 - DNA, 72 bp, Homo sapiens
aaagaacggaaatttgccattaactcttgaatcatggggacagggcaatcttctacttcagaactcttggga

SEQ ID NO: 131606 - DNA, 74 bp, Homo sapiens
aatttgccattaactcttgaatcatggggacagggcaatcttctacttcagaactcttgggaagaagagaataa

SEQ ID NO: 131607 - DNA, 74 bp, Homo sapiens
taactcttgaatcatggggacagggcaatcttctacttcagaactcttgggaagaagagaataaaaatattctg

SEQ ID NO: 131608 - DNA, 73 bp, Homo sapiens
tggggacagggcaatcttctacttcagaactcttgggaagaagagaataaaaatattctgtgccacactaaaa

SEQ ID NO: 131609 - DNA, 72 bp, Homo sapiens
agggcaatcttctacttcagaactcttgggaagaagagaataaaaatattctgtgccacactaaaaatgaaa

SEQ ID NO: 131610 - DNA, 69 bp, Homo sapiens
cttcagaactcttgggaagaagagaataaaaatattctgtgccacactaaaaatgaaaaggggaaagag

SEQ ID NO: 131611 - DNA, 70 bp, Homo sapiens
aactcttgggaagaagagaataaaaatattctgtgccacactaaaaatgaaaaggggaaagaggccagca

SEQ ID NO: 131612 - DNA, 72 bp, Homo sapiens
aagaagagaataaaaatattctgtgccacactaaaaatgaaaaggggaaagaggccagcagtccacagccca

SEQ ID NO: 131613 - DNA, 70 bp, Homo sapiens
ataaaaatattctgtgccacactaaaaatgaaaaggggaaagaggccagcagtccacagcccagggtttc

SEQ ID NO: 131614 - DNA, 72 bp, Homo sapiens
tgccacactaaaaatgaaaaggggaaagaggccagcagtccacagcccagggtttctccaagtgtagttcaa

SEQ ID NO: 131615 - DNA, 71 bp, Homo sapiens
taaaaatgaaaaggggaaagaggccagcagtccacagcccagggtttctccaagtgtagttcaagaatcat

SEQ ID NO: 131616 - DNA, 77 bp, Homo sapiens
gggaaagaggccagcagtccacagcccagggtttctccaagtgtagttcaagaatcatttgcatgaaaatgtctgtg

SEQ ID NO: 131617 - DNA, 80 bp, Homo sapiens
ccagcagtccacagcccagggtttctccaagtgtagttcaagaatcatttgcatgaaaatgtctgtggtgtgcaagaatc

SEQ ID NO: 131618 - DNA, 78 bp, Homo sapiens
acagcccagggtttctccaagtgtagttcaagaatcatttgcatgaaaatgtctgtggtgtgcaagaatctcttggaa

SEQ ID NO: 131619 - DNA, 81 bp, Homo sapiens
ggtttctccaagtgtagttcaagaatcatttgcatgaaaatgtctgtggtgtgcaagaatctcttggaatgcagattccta

SEQ ID NO: 131620 - DNA, 80 bp, Homo sapiens
aagtgtagttcaagaatcatttgcatgaaaatgtctgtggtgtgcaagaatctcttggaatgcagattcctaggccttaa

SEQ ID NO: 131621 - DNA, 80 bp, Homo sapiens
agaatcatttgcatgaaaatgtctgtggtgtgcaagaatctcttggaatgcagattcctaggccttaagaataatcttta

SEQ ID NO: 131622 - DNA, 78 bp, Homo sapiens
atttgcatgaaaatgtctgtggtgtgcaagaatctcttggaatgcagattcctaggccttaagaataatctttagtaa

SEQ ID NO: 131623 - DNA, 75 bp, Homo sapiens
aaaatgtctgtggtgtgcaagaatctcttggaatgcagattcctaggccttaagaataatctttagtaagctctt

SEQ ID NO: 131624 - DNA, 70 bp, Homo sapiens
cagattcctaggccttaagaataatctttagtaagctctttgggtaatgctaaagccactaaattcggaa

SEQ ID NO: 131625 - DNA, 70 bp, Homo sapiens
taggccttaagaataatctttagtaagctctttgggtaatgctaaagccactaaattcggaaaacattgc

SEQ ID NO: 131626 - DNA, 70 bp, Homo sapiens
gaataatctttagtaagctctttgggtaatgctaaagccactaaattcggaaaacattgcttccctaatc

SEQ ID NO: 131627 - DNA, 69 bp, Homo sapiens
ttagtaagctctttgggtaatgctaaagccactaaattcggaaaacattgcttccctaatctaacaaag

SEQ ID NO: 131628 - DNA, 69 bp, Homo sapiens
ctctttgggtaatgctaaagccactaaattcggaaaacattgcttccctaatctaacaaaggcaaagaa

SEQ ID NO: 131629 - DNA, 69 bp, Homo sapiens
taaagccactaaattcggaaaacattgcttccctaatctaacaaaggcaaagaagaggtgagaaagtaa

SEQ ID NO: 131630 - DNA, 68 bp, Homo sapiens
ccactaaattcggaaaacattgcttccctaatctaacaaaggcaaagaagaggtgagaaagtaagaat

SEQ ID NO: 131631 - DNA, 68 bp, Homo sapiens
cggaaaacattgcttccctaatctaacaaaggcaaagaagaggtgagaaagtaagaattttatttgct

SEQ ID NO: 131632 - DNA, 69 bp, Homo sapiens
ccctaatctaacaaaggcaaagaagaggtgagaaagtaagaattttatttgcttattctctaataccag

SEQ ID NO: 131633 - DNA, 72 bp, Homo sapiens
ctaacaaaggcaaagaagaggtgagaaagtaagaattttatttgcttattctctaataccaggtgctgatta

SEQ ID NO: 131634 - DNA, 72 bp, Homo sapiens
gcaaagaagaggtgagaaagtaagaattttatttgcttattctctaataccaggtgctgattaaaactacac

SEQ ID NO: 131635 - DNA, 71 bp, Homo sapiens
gtgagaaagtaagaattttatttgcttattctctaataccaggtgctgattaaaactacacttagtaaaga

SEQ ID NO: 131636 - DNA, 75 bp, Homo sapiens
tgcttattctctaataccaggtgctgattaaaactacacttagtaaagaaggacttgctgaattttctcaatagc

SEQ ID NO: 131637 - DNA, 76 bp, Homo sapiens
tctctaataccaggtgctgattaaaactacacttagtaaagaaggacttgctgaattttctcaatagcttgattca

SEQ ID NO: 131638 - DNA, 75 bp, Homo sapiens
ccaggtgctgattaaaactacacttagtaaagaaggacttgctgaattttctcaatagcttgattcaaaatgtca

SEQ ID NO: 131639 - DNA, 75 bp, Homo sapiens
aactacacttagtaaagaaggacttgctgaattttctcaatagcttgattcaaaatgtcaattctgttggctgtg

SEQ ID NO: 131640 - DNA, 75 bp, Homo sapiens
ttagtaaagaaggacttgctgaattttctcaatagcttgattcaaaatgtcaattctgttggctgtgtgggtaaa

SEQ ID NO: 131641 - DNA, 74 bp, Homo sapiens
aggacttgctgaattttctcaatagcttgattcaaaatgtcaattctgttggctgtgtgggtaaagagttttaa

SEQ ID NO: 131642 - DNA, 72 bp, Homo sapiens
aatagcttgattcaaaatgtcaattctgttggctgtgtgggtaaagagttttaatttcctggactcctttca

SEQ ID NO: 131643 - DNA, 74 bp, Homo sapiens
ttcaaaatgtcaattctgttggctgtgtgggtaaagagttttaatttcctggactcctttcaggatcattgcaa

SEQ ID NO: 131644 - DNA, 73 bp, Homo sapiens
aattctgttggctgtgtgggtaaagagttttaatttcctggactcctttcaggatcattgcaatgcatatttt

SEQ ID NO: 131645 - DNA, 74 bp, Homo sapiens
gttggctgtgtgggtaaagagttttaatttcctggactcctttcaggatcattgcaatgcatatttttctggga

SEQ ID NO: 131646 - DNA, 74 bp, Homo sapiens
gttttaatttcctggactcctttcaggatcattgcaatgcatatttttctgggagtcagagaatctgggctttt

SEQ ID NO: 131647 - DNA, 78 bp, Homo sapiens
actcctttcaggatcattgcaatgcatatttttctgggagtcagagaatctgggctttttgccatcttcctcacaccc

SEQ ID NO: 131648 - DNA, 76 bp, Homo sapiens
aatgcatatttttctgggagtcagagaatctgggctttttgccatcttcctcacaccctggctagggcttaattca

SEQ ID NO: 131649 - DNA, 75 bp, Homo sapiens
atatttttctgggagtcagagaatctgggctttttgccatcttcctcacaccctggctagggcttaattcagatg

SEQ ID NO: 131650 - DNA, 76 bp, Homo sapiens
tttttgccatcttcctcacaccctggctagggcttaattcagatgggatggattccacaccctgatatttttatca

SEQ ID NO: 131651 - DNA, 76 bp, Homo sapiens
gctagggcttaattcagatgggatggattccacaccctgatatttttatcaggggcatggtagtcacccaatggaa

SEQ ID NO: 131652 - DNA, 78 bp, Homo sapiens
ttaattcagatgggatggattccacaccctgatatttttatcaggggcatggtagtcacccaatggaaagcagctaca

SEQ ID NO: 131653 - DNA, 77 bp, Homo sapiens
atgggatggattccacaccctgatatttttatcaggggcatggtagtcacccaatggaaagcagctacagaaatgta

SEQ ID NO: 131654 - DNA, 75 bp, Homo sapiens
tatttttatcaggggcatggtagtcacccaatggaaagcagctacagaaatgtagtccttggtcttagcacccaa

SEQ ID NO: 131655 - DNA, 76 bp, Homo sapiens
atggtagtcacccaatggaaagcagctacagaaatgtagtccttggtcttagcacccaaaaggtgaggagcacaga

SEQ ID NO: 131656 - DNA, 75 bp, Homo sapiens
aatggaaagcagctacagaaatgtagtccttggtcttagcacccaaaaggtgaggagcacagaggttcactggta

SEQ ID NO: 131657 - DNA, 75 bp, Homo sapiens
agctacagaaatgtagtccttggtcttagcacccaaaaggtgaggagcacagaggttcactggtagtgcagggaa

SEQ ID NO: 131658 - DNA, 75 bp, Homo sapiens
agaaatgtagtccttggtcttagcacccaaaaggtgaggagcacagaggttcactggtagtgcagggaatggaga

SEQ ID NO: 131659 - DNA, 76 bp, Homo sapiens
ttggtcttagcacccaaaaggtgaggagcacagaggttcactggtagtgcagggaatggagagggtccctcacaca

SEQ ID NO: 131660 - DNA, 77 bp, Homo sapiens
aaggtgaggagcacagaggttcactggtagtgcagggaatggagagggtccctcacacactgagtgacagaagaggt

SEQ ID NO: 131661 - DNA, 79 bp, Homo sapiens
acagaggttcactggtagtgcagggaatggagagggtccctcacacactgagtgacagaagaggttggctgtgtcactg

SEQ ID NO: 131662 - DNA, 78 bp, Homo sapiens
actggtagtgcagggaatggagagggtccctcacacactgagtgacagaagaggttggctgtgtcactggtatgtaag

SEQ ID NO: 131663 - DNA, 77 bp, Homo sapiens
gggaatggagagggtccctcacacactgagtgacagaagaggttggctgtgtcactggtatgtaagggttgacacta

SEQ ID NO: 131664 - DNA, 77 bp, Homo sapiens
acacactgagtgacagaagaggttggctgtgtcactggtatgtaagggttgacactagcattagataggatttttct

SEQ ID NO: 131665 - DNA, 75 bp, Homo sapiens
agtgacagaagaggttggctgtgtcactggtatgtaagggttgacactagcattagataggatttttcttaggat

SEQ ID NO: 131666 - DNA, 75 bp, Homo sapiens
aagaggttggctgtgtcactggtatgtaagggttgacactagcattagataggatttttcttaggattccatatc

SEQ ID NO: 131667 - DNA, 76 bp, Homo sapiens
tcactggtatgtaagggttgacactagcattagataggatttttcttaggattccatatccgggtagatcagaatc

SEQ ID NO: 131668 - DNA, 75 bp, Homo sapiens
tatgtaagggttgacactagcattagataggatttttcttaggattccatatccgggtagatcagaatctcttaa

SEQ ID NO: 131669 - DNA, 77 bp, Homo sapiens
ttgacactagcattagataggatttttcttaggattccatatccgggtagatcagaatctcttaacctagagcacac

SEQ ID NO: 131670 - DNA, 74 bp, Homo sapiens
attagataggatttttcttaggattccatatccgggtagatcagaatctcttaacctagagcacactgtaccca

SEQ ID NO: 131671 - DNA, 74 bp, Homo sapiens
atttttcttaggattccatatccgggtagatcagaatctcttaacctagagcacactgtacccactttagagca

SEQ ID NO: 131672 - DNA, 78 bp, Homo sapiens
ttaggattccatatccgggtagatcagaatctcttaacctagagcacactgtacccactttagagcagctatagatcc

SEQ ID NO: 131673 - DNA, 77 bp, Homo sapiens
atatccgggtagatcagaatctcttaacctagagcacactgtacccactttagagcagctatagatccctggaacta

SEQ ID NO: 131674 - DNA, 77 bp, Homo sapiens
ttaacctagagcacactgtacccactttagagcagctatagatccctggaactatgtgaattttaggtgcttgctta

SEQ ID NO: 131675 - DNA, 78 bp, Homo sapiens
acactgtacccactttagagcagctatagatccctggaactatgtgaattttaggtgcttgcttagacaactctgaga

SEQ ID NO: 131676 - DNA, 79 bp, Homo sapiens
tacccactttagagcagctatagatccctggaactatgtgaattttaggtgcttgcttagacaactctgagaggatgtg

SEQ ID NO: 131677 - DNA, 80 bp, Homo sapiens
cagctatagatccctggaactatgtgaattttaggtgcttgcttagacaactctgagaggatgtggaagattccctatga

SEQ ID NO: 131678 - DNA, 76 bp, Homo sapiens
aattttaggtgcttgcttagacaactctgagaggatgtggaagattccctatgaagaatatatggcacaaaagaaa

SEQ ID NO: 131679 - DNA, 81 bp, Homo sapiens
tgcttagacaactctgagaggatgtggaagattccctatgaagaatatatggcacaaaagaaatcaagaacctctgatgta

SEQ ID NO: 131680 - DNA, 77 bp, Homo sapiens
aactctgagaggatgtggaagattccctatgaagaatatatggcacaaaagaaatcaagaacctctgatgtaccaaa

SEQ ID NO: 131681 - DNA, 74 bp, Homo sapiens
atgtggaagattccctatgaagaatatatggcacaaaagaaatcaagaacctctgatgtaccaaagggttatta

SEQ ID NO: 131682 - DNA, 75 bp, Homo sapiens
aagattccctatgaagaatatatggcacaaaagaaatcaagaacctctgatgtaccaaagggttattatgacaga

SEQ ID NO: 131683 - DNA, 75 bp, Homo sapiens
aagaatatatggcacaaaagaaatcaagaacctctgatgtaccaaagggttattatgacagaagaagaaagatgc

SEQ ID NO: 131684 - DNA, 76 bp, Homo sapiens
atatggcacaaaagaaatcaagaacctctgatgtaccaaagggttattatgacagaagaagaaagatgcccatggc

SEQ ID NO: 131685 - DNA, 73 bp, Homo sapiens
aaagaaatcaagaacctctgatgtaccaaagggttattatgacagaagaagaaagatgcccatggccttcaaa

SEQ ID NO: 131686 - DNA, 76 bp, Homo sapiens
aacctctgatgtaccaaagggttattatgacagaagaagaaagatgcccatggccttcaaatgaacagcaacctga

SEQ ID NO: 131687 - DNA, 76 bp, Homo sapiens
taccaaagggttattatgacagaagaagaaagatgcccatggccttcaaatgaacagcaacctgaaagcacttgta

SEQ ID NO: 131688 - DNA, 80 bp, Homo sapiens
tattatgacagaagaagaaagatgcccatggccttcaaatgaacagcaacctgaaagcacttgtactgaagcgcttacaa

SEQ ID NO: 131689 - DNA, 77 bp, Homo sapiens
aagaagaaagatgcccatggccttcaaatgaacagcaacctgaaagcacttgtactgaagcgcttacaaatgacact

SEQ ID NO: 131690 - DNA, 78 bp, Homo sapiens
aaagatgcccatggccttcaaatgaacagcaacctgaaagcacttgtactgaagcgcttacaaatgacacttccacca

SEQ ID NO: 131691 - DNA, 78 bp, Homo sapiens
ccttcaaatgaacagcaacctgaaagcacttgtactgaagcgcttacaaatgacacttccaccacctgatctcaccaa

SEQ ID NO: 131692 - DNA, 78 bp, Homo sapiens
aaatgaacagcaacctgaaagcacttgtactgaagcgcttacaaatgacacttccaccacctgatctcaccaactatg

SEQ ID NO: 131693 - DNA, 77 bp, Homo sapiens
aacctgaaagcacttgtactgaagcgcttacaaatgacacttccaccacctgatctcaccaactatggatcctgctt

SEQ ID NO: 131694 - DNA, 80 bp, Homo sapiens
ttgtactgaagcgcttacaaatgacacttccaccacctgatctcaccaactatggatcctgctttgatgctgttttcaat

SEQ ID NO: 131695 - DNA, 74 bp, Homo sapiens
acaaatgacacttccaccacctgatctcaccaactatggatcctgctttgatgctgttttcaattttctttttt

SEQ ID NO: 131696 - DNA, 73 bp, Homo sapiens
acacccagcctcctcaattttcaaagattttttaaagttgaaattttggcgaaagcatagcaggctgtcatca

SEQ ID NO: 131697 - DNA, 72 bp, Homo sapiens
agcctcctcaattttcaaagattttttaaagttgaaattttggcgaaagcatagcaggctgtcatcacaaaa

SEQ ID NO: 131698 - DNA, 73 bp, Homo sapiens
caaagattttttaaagttgaaattttggcgaaagcatagcaggctgtcatcacaaaaattccaatgtggacaa

SEQ ID NO: 131699 - DNA, 75 bp, Homo sapiens
ttaaagttgaaattttggcgaaagcatagcaggctgtcatcacaaaaattccaatgtggacaagaaccagtataa

SEQ ID NO: 131700 - DNA, 75 bp, Homo sapiens
aaattttggcgaaagcatagcaggctgtcatcacaaaaattccaatgtggacaagaaccagtataaactgtgact

SEQ ID NO: 131701 - DNA, 77 bp, Homo sapiens
cgaaagcatagcaggctgtcatcacaaaaattccaatgtggacaagaaccagtataaactgtgactttcaggaatta

SEQ ID NO: 131702 - DNA, 74 bp, Homo sapiens
aggctgtcatcacaaaaattccaatgtggacaagaaccagtataaactgtgactttcaggaattagcacagggt

SEQ ID NO: 131703 - DNA, 73 bp, Homo sapiens
atcacaaaaattccaatgtggacaagaaccagtataaactgtgactttcaggaattagcacagggtttgtagc

SEQ ID NO: 131704 - DNA, 72 bp, Homo sapiens
aaattccaatgtggacaagaaccagtataaactgtgactttcaggaattagcacagggtttgtagccagaaa

SEQ ID NO: 131705 - DNA, 69 bp, Homo sapiens
acaagaaccagtataaactgtgactttcaggaattagcacagggtttgtagccagaaaacccggattgg

SEQ ID NO: 131706 - DNA, 71 bp, Homo sapiens
tataaactgtgactttcaggaattagcacagggtttgtagccagaaaacccggattgggtctgcctatctt

SEQ ID NO: 131707 - DNA, 73 bp, Homo sapiens
actgtgactttcaggaattagcacagggtttgtagccagaaaacccggattgggtctgcctatctttcagtgc

SEQ ID NO: 131708 - DNA, 72 bp, Homo sapiens
ttcaggaattagcacagggtttgtagccagaaaacccggattgggtctgcctatctttcagtgcccgtgtaa

SEQ ID NO: 131709 - DNA, 70 bp, Homo sapiens
aattagcacagggtttgtagccagaaaacccggattgggtctgcctatctttcagtgcccgtgtaaccta

SEQ ID NO: 131710 - DNA, 70 bp, Homo sapiens
agggtttgtagccagaaaacccggattgggtctgcctatctttcagtgcccgtgtaacctacagcaagtc

SEQ ID NO: 131711 - DNA, 73 bp, Homo sapiens
gtttgtagccagaaaacccggattgggtctgcctatctttcagtgcccgtgtaacctacagcaagtcccatga

SEQ ID NO: 131712 - DNA, 73 bp, Homo sapiens
tgtagccagaaaacccggattgggtctgcctatctttcagtgcccgtgtaacctacagcaagtcccatgaccc

SEQ ID NO: 131713 - DNA, 72 bp, Homo sapiens
aaacccggattgggtctgcctatctttcagtgcccgtgtaacctacagcaagtcccatgacccctctgaggc

SEQ ID NO: 131714 - DNA, 78 bp, Homo sapiens
attgggtctgcctatctttcagtgcccgtgtaacctacagcaagtcccatgacccctctgaggctcagtagcctcatc

SEQ ID NO: 131715 - DNA, 80 bp, Homo sapiens
ctgcctatctttcagtgcccgtgtaacctacagcaagtcccatgacccctctgaggctcagtagcctcatctgcaaaatg

SEQ ID NO: 131716 - DNA, 83 bp, Homo sapiens
tgtaacctacagcaagtcccatgacccctctgaggctcagtagcctcatctgcaaaatggcaattatactaactgctgcactg

SEQ ID NO: 131717 - DNA, 82 bp, Homo sapiens
ctcatctgcaaaatggcaattatactaactgctgcactgggtaattattagcattaaaatgaaagtgctttgccatctgcta

SEQ ID NO: 131718 - DNA, 78 bp, Homo sapiens
aattatactaactgctgcactgggtaattattagcattaaaatgaaagtgctttgccatctgctagaagctatgttaa

SEQ ID NO: 131719 - DNA, 77 bp, Homo sapiens
taactgctgcactgggtaattattagcattaaaatgaaagtgctttgccatctgctagaagctatgttaagtttaag

SEQ ID NO: 131720 - DNA, 76 bp, Homo sapiens
gtaattattagcattaaaatgaaagtgctttgccatctgctagaagctatgttaagtttaagggctgttactgatg

SEQ ID NO: 131721 - DNA, 75 bp, Homo sapiens
gcattaaaatgaaagtgctttgccatctgctagaagctatgttaagtttaagggctgttactgatgtagcttttt

SEQ ID NO: 131722 - DNA, 73 bp, Homo sapiens
aatgaaagtgctttgccatctgctagaagctatgttaagtttaagggctgttactgatgtagcttttttcctt

SEQ ID NO: 131723 - DNA, 73 bp, Homo sapiens
tttgccatctgctagaagctatgttaagtttaagggctgttactgatgtagcttttttcctttattaccattc

SEQ ID NO: 131724 - DNA, 71 bp, Homo sapiens
gctagaagctatgttaagtttaagggctgttactgatgtagcttttttcctttattaccattctggaagaa

SEQ ID NO: 131725 - DNA, 70 bp, Homo sapiens
ctatgttaagtttaagggctgttactgatgtagcttttttcctttattaccattctggaagaaacagcag

SEQ ID NO: 131726 - DNA, 73 bp, Homo sapiens
taagggctgttactgatgtagcttttttcctttattaccattctggaagaaacagcaggtatatggagtcaaa

SEQ ID NO: 131727 - DNA, 77 bp, Homo sapiens
tactgatgtagcttttttcctttattaccattctggaagaaacagcaggtatatggagtcaaatgctgagagctaat

SEQ ID NO: 131728 - DNA, 73 bp, Homo sapiens
ttttttcctttattaccattctggaagaaacagcaggtatatggagtcaaatgctgagagctaattggaccgg

SEQ ID NO: 131729 - DNA, 77 bp, Homo sapiens
tattaccattctggaagaaacagcaggtatatggagtcaaatgctgagagctaattggaccgggcttgacttccatt

SEQ ID NO: 131730 - DNA, 75 bp, Homo sapiens
agaaacagcaggtatatggagtcaaatgctgagagctaattggaccgggcttgacttccattttttgtctttctg

SEQ ID NO: 131731 - DNA, 76 bp, Homo sapiens
tatatggagtcaaatgctgagagctaattggaccgggcttgacttccattttttgtctttctgtttttagctgaca

SEQ ID NO: 131732 - DNA, 68 bp, Homo sapiens
accgggcttgacttccattttttgtctttctgtttttagctgacacactaaaaatgcctacaaaaatc

SEQ ID NO: 131733 - DNA, 68 bp, Homo sapiens
gacttccattttttgtctttctgtttttagctgacacactaaaaatgcctacaaaaatcctttaacaa

SEQ ID NO: 131734 - DNA, 70 bp, Homo sapiens
tgtctttctgtttttagctgacacactaaaaatgcctacaaaaatcctttaacaaagaccatcaaccaaa

SEQ ID NO: 131735 - DNA, 70 bp, Homo sapiens
acacactaaaaatgcctacaaaaatcctttaacaaagaccatcaaccaaagagttgtcaacagttcgaga

SEQ ID NO: 131736 - DNA, 71 bp, Homo sapiens
taaaaatgcctacaaaaatcctttaacaaagaccatcaaccaaagagttgtcaacagttcgagagactgac

SEQ ID NO: 131737 - DNA, 74 bp, Homo sapiens
ctacaaaaatcctttaacaaagaccatcaaccaaagagttgtcaacagttcgagagactgaccatgataaatga

SEQ ID NO: 131738 - DNA, 80 bp, Homo sapiens
atcaaccaaagagttgtcaacagttcgagagactgaccatgataaatgagcaccaaaattaagttcatgtgaatcaatga

SEQ ID NO: 131739 - DNA, 78 bp, Homo sapiens
aacagttcgagagactgaccatgataaatgagcaccaaaattaagttcatgtgaatcaatgaaagcatttgggtggcg

SEQ ID NO: 131740 - DNA, 78 bp, Homo sapiens
agagactgaccatgataaatgagcaccaaaattaagttcatgtgaatcaatgaaagcatttgggtggcggggtgtgga

SEQ ID NO: 131741 - DNA, 75 bp, Homo sapiens
accatgataaatgagcaccaaaattaagttcatgtgaatcaatgaaagcatttgggtggcggggtgtggagaagg

SEQ ID NO: 131742 - DNA, 77 bp, Homo sapiens
atgagcaccaaaattaagttcatgtgaatcaatgaaagcatttgggtggcggggtgtggagaagggactgcatattc

SEQ ID NO: 131743 - DNA, 75 bp, Homo sapiens
aaattaagttcatgtgaatcaatgaaagcatttgggtggcggggtgtggagaagggactgcatattctggggcaa

SEQ ID NO: 131744 - DNA, 77 bp, Homo sapiens
tgaatcaatgaaagcatttgggtggcggggtgtggagaagggactgcatattctggggcaagcaacgatccaaacta

SEQ ID NO: 131745 - DNA, 76 bp, Homo sapiens
aagcatttgggtggcggggtgtggagaagggactgcatattctggggcaagcaacgatccaaactagcagtcataa

SEQ ID NO: 131746 - DNA, 74 bp, Homo sapiens
gtggcggggtgtggagaagggactgcatattctggggcaagcaacgatccaaactagcagtcataaagggttct

SEQ ID NO: 131747 - DNA, 79 bp, Homo sapiens
tgtggagaagggactgcatattctggggcaagcaacgatccaaactagcagtcataaagggttcttcatacacatcctg

SEQ ID NO: 131748 - DNA, 75 bp, Homo sapiens
aagggactgcatattctggggcaagcaacgatccaaactagcagtcataaagggttcttcatacacatcctgttt

SEQ ID NO: 131749 - DNA, 77 bp, Homo sapiens
tattctggggcaagcaacgatccaaactagcagtcataaagggttcttcatacacatcctgttttggtatgcacgct

SEQ ID NO: 131750 - DNA, 76 bp, Homo sapiens
aagcaacgatccaaactagcagtcataaagggttcttcatacacatcctgttttggtatgcacgcttgccaccacc

SEQ ID NO: 131751 - DNA, 73 bp, Homo sapiens
atccaaactagcagtcataaagggttcttcatacacatcctgttttggtatgcacgcttgccaccacccgttt

SEQ ID NO: 131752 - DNA, 73 bp, Homo sapiens
agtcataaagggttcttcatacacatcctgttttggtatgcacgcttgccaccacccgttttggcaccggcta

SEQ ID NO: 131753 - DNA, 71 bp, Homo sapiens
atacacatcctgttttggtatgcacgcttgccaccacccgttttggcaccggctatcacccccacccaaac

SEQ ID NO: 131754 - DNA, 71 bp, Homo sapiens
ctgttttggtatgcacgcttgccaccacccgttttggcaccggctatcacccccacccaaaccagcaggaa

SEQ ID NO: 131755 - DNA, 71 bp, Homo sapiens
atgcacgcttgccaccacccgttttggcaccggctatcacccccacccaaaccagcaggaagaccaactcc

SEQ ID NO: 131756 - DNA, 70 bp, Homo sapiens
cacccgttttggcaccggctatcacccccacccaaaccagcaggaagaccaactcccaagaatgaatgta

SEQ ID NO: 131757 - DNA, 71 bp, Homo sapiens
ttttggcaccggctatcacccccacccaaaccagcaggaagaccaactcccaagaatgaatgtaagaagtg

SEQ ID NO: 131758 - DNA, 74 bp, Homo sapiens
cccaaaccagcaggaagaccaactcccaagaatgaatgtaagaagtggagacgcaggatgctcaatcttttcct

SEQ ID NO: 131759 - DNA, 75 bp, Homo sapiens
accagcaggaagaccaactcccaagaatgaatgtaagaagtggagacgcaggatgctcaatcttttccttcccaa

SEQ ID NO: 131760 - DNA, 75 bp, Homo sapiens
aactcccaagaatgaatgtaagaagtggagacgcaggatgctcaatcttttccttcccaagagtgcaaactgttc

SEQ ID NO: 131761 - DNA, 77 bp, Homo sapiens
aagaatgaatgtaagaagtggagacgcaggatgctcaatcttttccttcccaagagtgcaaactgttccagcgtctc

SEQ ID NO: 131762 - DNA, 79 bp, Homo sapiens
atgtaagaagtggagacgcaggatgctcaatcttttccttcccaagagtgcaaactgttccagcgtctcctgctcttga

SEQ ID NO: 131763 - DNA, 79 bp, Homo sapiens
acgcaggatgctcaatcttttccttcccaagagtgcaaactgttccagcgtctcctgctcttgacccactgatggtcaa

SEQ ID NO: 131764 - DNA, 78 bp, Homo sapiens
ctcaatcttttccttcccaagagtgcaaactgttccagcgtctcctgctcttgacccactgatggtcaaagaggctca

SEQ ID NO: 131765 - DNA, 78 bp, Homo sapiens
ttttccttcccaagagtgcaaactgttccagcgtctcctgctcttgacccactgatggtcaaagaggctcaagactga

SEQ ID NO: 131766 - DNA, 86 bp, Homo sapiens
tctcctgctcttgacccactgatggtcaaagaggctcaagactgagacaggtgagcacacaatctcatttagcacgagtatcgaca

SEQ ID NO: 131767 - DNA, 83 bp, Homo sapiens
ttgacccactgatggtcaaagaggctcaagactgagacaggtgagcacacaatctcatttagcacgagtatcgacacagggaa

SEQ ID NO: 131768 - DNA, 82 bp, Homo sapiens
tgatggtcaaagaggctcaagactgagacaggtgagcacacaatctcatttagcacgagtatcgacacagggaattccaaaa

SEQ ID NO: 131769 - DNA, 77 bp, Homo sapiens
aaagaggctcaagactgagacaggtgagcacacaatctcatttagcacgagtatcgacacagggaattccaaaaggt

SEQ ID NO: 131770 - DNA, 77 bp, Homo sapiens
aagactgagacaggtgagcacacaatctcatttagcacgagtatcgacacagggaattccaaaaggttaacatacca

SEQ ID NO: 131771 - DNA, 76 bp, Homo sapiens
gtgagcacacaatctcatttagcacgagtatcgacacagggaattccaaaaggttaacataccagtggtcaaatat

SEQ ID NO: 131772 - DNA, 72 bp, Homo sapiens
aatctcatttagcacgagtatcgacacagggaattccaaaaggttaacataccagtggtcaaatattttgaa

SEQ ID NO: 131773 - DNA, 72 bp, Homo sapiens
atttagcacgagtatcgacacagggaattccaaaaggttaacataccagtggtcaaatattttgaatctgac

SEQ ID NO: 131774 - DNA, 72 bp, Homo sapiens
tatcgacacagggaattccaaaaggttaacataccagtggtcaaatattttgaatctgaccttctaggcttc

SEQ ID NO: 131775 - DNA, 70 bp, Homo sapiens
agggaattccaaaaggttaacataccagtggtcaaatattttgaatctgaccttctaggcttctctttga

SEQ ID NO: 131776 - DNA, 73 bp, Homo sapiens
aaaaggttaacataccagtggtcaaatattttgaatctgaccttctaggcttctctttgacataggccaggca

SEQ ID NO: 131777 - DNA, 77 bp, Homo sapiens
aacataccagtggtcaaatattttgaatctgaccttctaggcttctctttgacataggccaggcatgtttatatcta

SEQ ID NO: 131778 - DNA, 78 bp, Homo sapiens
aaatattttgaatctgaccttctaggcttctctttgacataggccaggcatgtttatatctagctttcataccacagc

SEQ ID NO: 131779 - DNA, 80 bp, Homo sapiens
ttctaggcttctctttgacataggccaggcatgtttatatctagctttcataccacagcccagtctaagaccctggatca

SEQ ID NO: 131780 - DNA, 80 bp, Homo sapiens
tctttgacataggccaggcatgtttatatctagctttcataccacagcccagtctaagaccctggatcagtctattttca

SEQ ID NO: 131781 - DNA, 78 bp, Homo sapiens
aggccaggcatgtttatatctagctttcataccacagcccagtctaagaccctggatcagtctattttcactccagta

SEQ ID NO: 131782 - DNA, 75 bp, Homo sapiens
atgtttatatctagctttcataccacagcccagtctaagaccctggatcagtctattttcactccagtatacttt

SEQ ID NO: 131783 - DNA, 76 bp, Homo sapiens
atatctagctttcataccacagcccagtctaagaccctggatcagtctattttcactccagtatactttttggcaa

SEQ ID NO: 131784 - DNA, 75 bp, Homo sapiens
ttcataccacagcccagtctaagaccctggatcagtctattttcactccagtatactttttggcaaagtgcaaac

SEQ ID NO: 131785 - DNA, 70 bp, Homo sapiens
ccagtctaagaccctggatcagtctattttcactccagtatactttttggcaaagtgcaaaccaattttt

SEQ ID NO: 131786 - DNA, 68 bp, Homo sapiens
aagaccctggatcagtctattttcactccagtatactttttggcaaagtgcaaaccaatttttttaaa

SEQ ID NO: 131787 - DNA, 72 bp, Homo sapiens
tttttaaaaaagctactgcctctttctgaagtccccataatcaatacgtctaagtgatctgtttagaataca

SEQ ID NO: 131788 - DNA, 73 bp, Homo sapiens
aaaaagctactgcctctttctgaagtccccataatcaatacgtctaagtgatctgtttagaatacaaattcca

SEQ ID NO: 131789 - DNA, 75 bp, Homo sapiens
tactgcctctttctgaagtccccataatcaatacgtctaagtgatctgtttagaatacaaattccaggtcacctg

SEQ ID NO: 131790 - DNA, 75 bp, Homo sapiens
tctttctgaagtccccataatcaatacgtctaagtgatctgtttagaatacaaattccaggtcacctgtgccctc

SEQ ID NO: 131791 - DNA, 75 bp, Homo sapiens
agtccccataatcaatacgtctaagtgatctgtttagaatacaaattccaggtcacctgtgccctcctgcaaata

SEQ ID NO: 131792 - DNA, 77 bp, Homo sapiens
cataatcaatacgtctaagtgatctgtttagaatacaaattccaggtcacctgtgccctcctgcaaataacatccca

SEQ ID NO: 131793 - DNA, 76 bp, Homo sapiens
ataatcaatacgtctaagtgatctgtttagaatacaaattccaggtcacctgtgccctcctgcaaataacatccca

SEQ ID NO: 131794 - DNA, 74 bp, Homo sapiens
aatacgtctaagtgatctgtttagaatacaaattccaggtcacctgtgccctcctgcaaataacatcccacctg

SEQ ID NO: 131795 - DNA, 75 bp, Homo sapiens
taagtgatctgtttagaatacaaattccaggtcacctgtgccctcctgcaaataacatcccacctggctgaagtt

SEQ ID NO: 131796 - DNA, 74 bp, Homo sapiens
tgatctgtttagaatacaaattccaggtcacctgtgccctcctgcaaataacatcccacctggctgaagttttt

SEQ ID NO: 131797 - DNA, 72 bp, Homo sapiens
atctgtttagaatacaaattccaggtcacctgtgccctcctgcaaataacatcccacctggctgaagttttt

SEQ ID NO: 131798 - DNA, 70 bp, Homo sapiens
gtttagaatacaaattccaggtcacctgtgccctcctgcaaataacatcccacctggctgaagttttttt

SEQ ID NO: 131799 - DNA, 79 bp, Homo sapiens
ggattactggcataagctatcgcgcctggcctgaagacttttaaatcaccaccatcatcagttatctatcaggactccc

SEQ ID NO: 131800 - DNA, 78 bp, Homo sapiens
ataagctatcgcgcctggcctgaagacttttaaatcaccaccatcatcagttatctatcaggactccccttgggcatg

SEQ ID NO: 131801 - DNA, 79 bp, Homo sapiens
tatcgcgcctggcctgaagacttttaaatcaccaccatcatcagttatctatcaggactccccttgggcatgtgattaa

SEQ ID NO: 131802 - DNA, 80 bp, Homo sapiens
tgaagacttttaaatcaccaccatcatcagttatctatcaggactccccttgggcatgtgattaagatgtgtattgttca

SEQ ID NO: 131803 - DNA, 79 bp, Homo sapiens
taaatcaccaccatcatcagttatctatcaggactccccttgggcatgtgattaagatgtgtattgttcaggtaaaata

SEQ ID NO: 131804 - DNA, 78 bp, Homo sapiens
accatcatcagttatctatcaggactccccttgggcatgtgattaagatgtgtattgttcaggtaaaatagttgagta

SEQ ID NO: 131805 - DNA, 76 bp, Homo sapiens
ttatctatcaggactccccttgggcatgtgattaagatgtgtattgttcaggtaaaatagttgagtagtacctaca

SEQ ID NO: 131806 - DNA, 76 bp, Homo sapiens
tatcaggactccccttgggcatgtgattaagatgtgtattgttcaggtaaaatagttgagtagtacctacaagtga

SEQ ID NO: 131807 - DNA, 70 bp, Homo sapiens
gtgattaagatgtgtattgttcaggtaaaatagttgagtagtacctacaagtgacgttataaccttcttt

SEQ ID NO: 131808 - DNA, 71 bp, Homo sapiens
gatgtgtattgttcaggtaaaatagttgagtagtacctacaagtgacgttataaccttcttttactcttga

SEQ ID NO: 131809 - DNA, 68 bp, Homo sapiens
gttcaggtaaaatagttgagtagtacctacaagtgacgttataaccttcttttactcttgataagaag

SEQ ID NO: 131810 - DNA, 70 bp, Homo sapiens
agttgagtagtacctacaagtgacgttataaccttcttttactcttgataagaagttagccttggatatc

SEQ ID NO: 131811 - DNA, 71 bp, Homo sapiens
agtacctacaagtgacgttataaccttcttttactcttgataagaagttagccttggatatctcagattct

SEQ ID NO: 131812 - DNA, 72 bp, Homo sapiens
aagtgacgttataaccttcttttactcttgataagaagttagccttggatatctcagattcttcaataacca

SEQ ID NO: 131813 - DNA, 72 bp, Homo sapiens
ccttcttttactcttgataagaagttagccttggatatctcagattcttcaataaccaattattaatgaaac

SEQ ID NO: 131814 - DNA, 75 bp, Homo sapiens
ctcttgataagaagttagccttggatatctcagattcttcaataaccaattattaatgaaacttaacacctgctg

SEQ ID NO: 131815 - DNA, 72 bp, Homo sapiens
aagaagttagccttggatatctcagattcttcaataaccaattattaatgaaacttaacacctgctgtactt

SEQ ID NO: 131816 - DNA, 75 bp, Homo sapiens
agccttggatatctcagattcttcaataaccaattattaatgaaacttaacacctgctgtactttttagacatca

SEQ ID NO: 131817 - DNA, 73 bp, Homo sapiens
ctcagattcttcaataaccaattattaatgaaacttaacacctgctgtactttttagacatcaaactgtaaca

SEQ ID NO: 131818 - DNA, 73 bp, Homo sapiens
ataaccaattattaatgaaacttaacacctgctgtactttttagacatcaaactgtaacaagaactcatatca

SEQ ID NO: 131819 - DNA, 72 bp, Homo sapiens
attaatgaaacttaacacctgctgtactttttagacatcaaactgtaacaagaactcatatcaaaaagacta

SEQ ID NO: 131820 - DNA, 73 bp, Homo sapiens
cttaacacctgctgtactttttagacatcaaactgtaacaagaactcatatcaaaaagactactttcagccag

SEQ ID NO: 131821 - DNA, 75 bp, Homo sapiens
acctgctgtactttttagacatcaaactgtaacaagaactcatatcaaaaagactactttcagccaggcacaatg

SEQ ID NO: 131822 - DNA, 72 bp, Homo sapiens
aaaaaaaatgatgacgactactttttatggcctattcaacacagctcatggttggattcttcttcggaccga

SEQ ID NO: 131823 - DNA, 76 bp, Homo sapiens
aatgatgacgactactttttatggcctattcaacacagctcatggttggattcttcttcggaccgaaccatgaata

SEQ ID NO: 131824 - DNA, 75 bp, Homo sapiens
actactttttatggcctattcaacacagctcatggttggattcttcttcggaccgaaccatgaatacactcagaa

SEQ ID NO: 131825 - DNA, 80 bp, Homo sapiens
tatggcctattcaacacagctcatggttggattcttcttcggaccgaaccatgaatacactcagaacatgaacacaccac

SEQ ID NO: 131826 - DNA, 79 bp, Homo sapiens
cctattcaacacagctcatggttggattcttcttcggaccgaaccatgaatacactcagaacatgaacacaccactcac

SEQ ID NO: 131827 - DNA, 81 bp, Homo sapiens
acagctcatggttggattcttcttcggaccgaaccatgaatacactcagaacatgaacacaccactcactgcagagtatta

SEQ ID NO: 131828 - DNA, 80 bp, Homo sapiens
tcatggttggattcttcttcggaccgaaccatgaatacactcagaacatgaacacaccactcactgcagagtattattta

SEQ ID NO: 131829 - DNA, 78 bp, Homo sapiens
atggttggattcttcttcggaccgaaccatgaatacactcagaacatgaacacaccactcactgcagagtattattta

SEQ ID NO: 131830 - DNA, 76 bp, Homo sapiens
attcttcttcggaccgaaccatgaatacactcagaacatgaacacaccactcactgcagagtattatttaaggatt

SEQ ID NO: 131831 - DNA, 80 bp, Homo sapiens
gaaccatgaatacactcagaacatgaacacaccactcactgcagagtattatttaaggatttgttggcaactggccaaga

SEQ ID NO: 131832 - DNA, 79 bp, Homo sapiens
aaccatgaatacactcagaacatgaacacaccactcactgcagagtattatttaaggatttgttggcaactggccaaga

SEQ ID NO: 131833 - DNA, 79 bp, Homo sapiens
atgaatacactcagaacatgaacacaccactcactgcagagtattatttaaggatttgttggcaactggccaagaagga

SEQ ID NO: 131834 - DNA, 77 bp, Homo sapiens
ctcagaacatgaacacaccactcactgcagagtattatttaaggatttgttggcaactggccaagaaggaggttcta

SEQ ID NO: 131835 - DNA, 78 bp, Homo sapiens
atgaacacaccactcactgcagagtattatttaaggatttgttggcaactggccaagaaggaggttctatgctagtca

SEQ ID NO: 131836 - DNA, 77 bp, Homo sapiens
tttaaggatttgttggcaactggccaagaaggaggttctatgctagtcactgatcactgaggtagaaacacactcta

SEQ ID NO: 131837 - DNA, 81 bp, Homo sapiens
ttgttggcaactggccaagaaggaggttctatgctagtcactgatcactgaggtagaaacacactctacaacagcagaagc

SEQ ID NO: 131838 - DNA, 82 bp, Homo sapiens
caagaaggaggttctatgctagtcactgatcactgaggtagaaacacactctacaacagcagaagcgagacaaggatgttga

SEQ ID NO: 131839 - DNA, 84 bp, Homo sapiens
aggttctatgctagtcactgatcactgaggtagaaacacactctacaacagcagaagcgagacaaggatgttgacacaaatgca

SEQ ID NO: 131840 - DNA, 79 bp, Homo sapiens
atcactgaggtagaaacacactctacaacagcagaagcgagacaaggatgttgacacaaatgcaacgtaaaatgcctgg

SEQ ID NO: 131841 - DNA, 78 bp, Homo sapiens
aggtagaaacacactctacaacagcagaagcgagacaaggatgttgacacaaatgcaacgtaaaatgcctgggactga

SEQ ID NO: 131842 - DNA, 79 bp, Homo sapiens
agaagcgagacaaggatgttgacacaaatgcaacgtaaaatgcctgggactgatgtgccttctcctgtgataaaagaga

SEQ ID NO: 131843 - DNA, 78 bp, Homo sapiens
agacaaggatgttgacacaaatgcaacgtaaaatgcctgggactgatgtgccttctcctgtgataaaagagaagattc

SEQ ID NO: 131844 - DNA, 80 bp, Homo sapiens
ttgacacaaatgcaacgtaaaatgcctgggactgatgtgccttctcctgtgataaaagagaagattcctgaagccacata

SEQ ID NO: 131845 - DNA, 77 bp, Homo sapiens
aaatgcaacgtaaaatgcctgggactgatgtgccttctcctgtgataaaagagaagattcctgaagccacataccta

SEQ ID NO: 131846 - DNA, 76 bp, Homo sapiens
taaaatgcctgggactgatgtgccttctcctgtgataaaagagaagattcctgaagccacatacctaacacaattt

SEQ ID NO: 131847 - DNA, 80 bp, Homo sapiens
tgatgtgccttctcctgtgataaaagagaagattcctgaagccacatacctaacacaattttctctcagcttcaactcta

SEQ ID NO: 131848 - DNA, 78 bp, Homo sapiens
ttctcctgtgataaaagagaagattcctgaagccacatacctaacacaattttctctcagcttcaactctagggatca

SEQ ID NO: 131849 - DNA, 76 bp, Homo sapiens
ataaaagagaagattcctgaagccacatacctaacacaattttctctcagcttcaactctagggatcaggtcagcc

SEQ ID NO: 131850 - DNA, 78 bp, Homo sapiens
taacacaattttctctcagcttcaactctagggatcaggtcagcctcacttctggaaaacatgtttcactgtgatgtt

SEQ ID NO: 131851 - DNA, 77 bp, Homo sapiens
cttcaactctagggatcaggtcagcctcacttctggaaaacatgtttcactgtgatgtttatcaaatgcaacttaaa

SEQ ID NO: 131852 - DNA, 76 bp, Homo sapiens
tagggatcaggtcagcctcacttctggaaaacatgtttcactgtgatgtttatcaaatgcaacttaaactagggat

SEQ ID NO: 131853 - DNA, 76 bp, Homo sapiens
atgtttcactgtgatgtttatcaaatgcaacttaaactagggattcaactacaattacacagtcacattcctgtag

SEQ ID NO: 131854 - DNA, 77 bp, Homo sapiens
actgtgatgtttatcaaatgcaacttaaactagggattcaactacaattacacagtcacattcctgtagtgaggaca

SEQ ID NO: 131855 - DNA, 75 bp, Homo sapiens
aacttaaactagggattcaactacaattacacagtcacattcctgtagtgaggacacatcatctcactaggtagg

SEQ ID NO: 131856 - DNA, 79 bp, Homo sapiens
ggattcaactacaattacacagtcacattcctgtagtgaggacacatcatctcactaggtagggttctctgcctcttaa

SEQ ID NO: 131857 - DNA, 77 bp, Homo sapiens
aactacaattacacagtcacattcctgtagtgaggacacatcatctcactaggtagggttctctgcctcttaaagaa

SEQ ID NO: 131858 - DNA, 79 bp, Homo sapiens
tacacagtcacattcctgtagtgaggacacatcatctcactaggtagggttctctgcctcttaaagaatgaaaagataa

SEQ ID NO: 131859 - DNA, 74 bp, Homo sapiens
attcctgtagtgaggacacatcatctcactaggtagggttctctgcctcttaaagaatgaaaagataaggaaac

SEQ ID NO: 131860 - DNA, 74 bp, Homo sapiens
aggacacatcatctcactaggtagggttctctgcctcttaaagaatgaaaagataaggaaacgatcaccaaatg

SEQ ID NO: 131861 - DNA, 72 bp, Homo sapiens
atcatctcactaggtagggttctctgcctcttaaagaatgaaaagataaggaaacgatcaccaaatgggtta

SEQ ID NO: 131862 - DNA, 71 bp, Homo sapiens
gtagggttctctgcctcttaaagaatgaaaagataaggaaacgatcaccaaatgggttacaccaccatatc

SEQ ID NO: 131863 - DNA, 77 bp, Homo sapiens
tgcctcttaaagaatgaaaagataaggaaacgatcaccaaatgggttacaccaccatatcctgcaactgagctctga

SEQ ID NO: 131864 - DNA, 76 bp, Homo sapiens
accaccatatcctgcaactgagctctgacggaagcgggagtccgagggcactgaccggactggggcagagggccaa

SEQ ID NO: 131865 - DNA, 76 bp, Homo sapiens
tgcaactgagctctgacggaagcgggagtccgagggcactgaccggactggggcagagggccaactgcaaggtttg

SEQ ID NO: 131866 - DNA, 73 bp, Homo sapiens
ctgagctctgacggaagcgggagtccgagggcactgaccggactggggcagagggccaactgcaaggtttggg

SEQ ID NO: 131867 - DNA, 68 bp, Homo sapiens
aagcgggagtccgagggcactgaccggactggggcagagggccaactgcaaggtttggggaaagcctt

SEQ ID NO: 131868 - DNA, 69 bp, Homo sapiens
agtccgagggcactgaccggactggggcagagggccaactgcaaggtttggggaaagccttttctgggc

SEQ ID NO: 131869 - DNA, 69 bp, Homo sapiens
actgaccggactggggcagagggccaactgcaaggtttggggaaagccttttctgggctcctattggaa

SEQ ID NO: 131870 - DNA, 71 bp, Homo sapiens
ccaactgcaaggtttggggaaagccttttctgggctcctattggaaaggggcactgggtggatcatagcca

SEQ ID NO: 131871 - DNA, 67 bp, Homo sapiens
aaggtttggggaaagccttttctgggctcctattggaaaggggcactgggtggatcatagccaaact

SEQ ID NO: 131872 - DNA, 71 bp, Homo sapiens
aaagccttttctgggctcctattggaaaggggcactgggtggatcatagccaaacttctttgacacacagg

SEQ ID NO: 131873 - DNA, 74 bp, Homo sapiens
ttttctgggctcctattggaaaggggcactgggtggatcatagccaaacttctttgacacacaggggcagcagt

SEQ ID NO: 131874 - DNA, 81 bp, Homo sapiens
tcctattggaaaggggcactgggtggatcatagccaaacttctttgacacacaggggcagcagttgagagatgatcacaca

SEQ ID NO: 131875 - DNA, 83 bp, Homo sapiens
ggcactgggtggatcatagccaaacttctttgacacacaggggcagcagttgagagatgatcacacagagctttcagtaactc

SEQ ID NO: 131876 - DNA, 81 bp, Homo sapiens
tagccaaacttctttgacacacaggggcagcagttgagagatgatcacacagagctttcagtaactcccaaatggactaga

SEQ ID NO: 131877 - DNA, 86 bp, Homo sapiens
tttgacacacaggggcagcagttgagagatgatcacacagagctttcagtaactcccaaatggactagagcgtatgagagatgata

SEQ ID NO: 131878 - DNA, 83 bp, Homo sapiens
agttgagagatgatcacacagagctttcagtaactcccaaatggactagagcgtatgagagatgataaaggcccagagagaga

SEQ ID NO: 131879 - DNA, 77 bp, Homo sapiens
tttcagtaactcccaaatggactagagcgtatgagagatgataaaggcccagagagagaggatttgcccttgcctta

SEQ ID NO: 131880 - DNA, 76 bp, Homo sapiens
gtaactcccaaatggactagagcgtatgagagatgataaaggcccagagagagaggatttgcccttgccttagtcc

SEQ ID NO: 131881 - DNA, 75 bp, Homo sapiens
aatggactagagcgtatgagagatgataaaggcccagagagagaggatttgcccttgccttagtccccacccaaa

SEQ ID NO: 131882 - DNA, 78 bp, Homo sapiens
gtatgagagatgataaaggcccagagagagaggatttgcccttgccttagtccccacccaaactcactcactgatgaa

SEQ ID NO: 131883 - DNA, 76 bp, Homo sapiens
atgataaaggcccagagagagaggatttgcccttgccttagtccccacccaaactcactcactgatgaagtatcca

SEQ ID NO: 131884 - DNA, 76 bp, Homo sapiens
agagagagaggatttgcccttgccttagtccccacccaaactcactcactgatgaagtatccactgagacttaatg

SEQ ID NO: 131885 - DNA, 77 bp, Homo sapiens
ttgccttagtccccacccaaactcactcactgatgaagtatccactgagacttaatgtctttgatagtgtaacactc

SEQ ID NO: 131886 - DNA, 75 bp, Homo sapiens
cccacccaaactcactcactgatgaagtatccactgagacttaatgtctttgatagtgtaacactccacttaaaa

SEQ ID NO: 131887 - DNA, 76 bp, Homo sapiens
aaactcactcactgatgaagtatccactgagacttaatgtctttgatagtgtaacactccacttaaaagcaaacaa

SEQ ID NO: 131888 - DNA, 76 bp, Homo sapiens
tgatgaagtatccactgagacttaatgtctttgatagtgtaacactccacttaaaagcaaacaagtgctattttct

SEQ ID NO: 131889 - DNA, 74 bp, Homo sapiens
agtatccactgagacttaatgtctttgatagtgtaacactccacttaaaagcaaacaagtgctattttcttgaa

SEQ ID NO: 131890 - DNA, 72 bp, Homo sapiens
gagacttaatgtctttgatagtgtaacactccacttaaaagcaaacaagtgctattttcttgaaacctacaa

SEQ ID NO: 131891 - DNA, 69 bp, Homo sapiens
gtctttgatagtgtaacactccacttaaaagcaaacaagtgctattttcttgaaacctacaattttagt

SEQ ID NO: 131892 - DNA, 66 bp, Homo sapiens
gtgtaacactccacttaaaagcaaacaagtgctattttcttgaaacctacaattttagttaaaaaa

SEQ ID NO: 131893 - DNA, 70 bp, Homo sapiens
aaaaaattgttaaaaaaaataggagtggggatggaggacagatcactctcaaaccagaccctcatctgcc

SEQ ID NO: 131894 - DNA, 74 bp, Homo sapiens
ttaaaaaaaataggagtggggatggaggacagatcactctcaaaccagaccctcatctgccctggaatcactac

SEQ ID NO: 131895 - DNA, 78 bp, Homo sapiens
aaaataggagtggggatggaggacagatcactctcaaaccagaccctcatctgccctggaatcactactgcattccca

SEQ ID NO: 131896 - DNA, 79 bp, Homo sapiens
atggaggacagatcactctcaaaccagaccctcatctgccctggaatcactactgcattcccactggtaaacatttctg

SEQ ID NO: 131897 - DNA, 76 bp, Homo sapiens
ctcatctgccctggaatcactactgcattcccactggtaaacatttctgtctcttggtaagttgcccagaaattta

SEQ ID NO: 131898 - DNA, 71 bp, Homo sapiens
cctggaatcactactgcattcccactggtaaacatttctgtctcttggtaagttgcccagaaatttaaaaa

SEQ ID NO: 131899 - DNA, 71 bp, Homo sapiens
atcactactgcattcccactggtaaacatttctgtctcttggtaagttgcccagaaatttaaaaacatttc

SEQ ID NO: 131900 - DNA, 69 bp, Homo sapiens
attcccactggtaaacatttctgtctcttggtaagttgcccagaaatttaaaaacatttctaacacagc

SEQ ID NO: 131901 - DNA, 69 bp, Homo sapiens
ggtaagttgcccagaaatttaaaaacatttctaacacagccacttgtttgtttgctttcaagagaaaga

SEQ ID NO: 131902 - DNA, 67 bp, Homo sapiens
ccagaaatttaaaaacatttctaacacagccacttgtttgtttgctttcaagagaaagaggttaaaa

SEQ ID NO: 131903 - DNA, 70 bp, Homo sapiens
acatttctaacacagccacttgtttgtttgctttcaagagaaagaggttaaaaagaaacatctactccca

SEQ ID NO: 131904 - DNA, 70 bp, Homo sapiens
taacacagccacttgtttgtttgctttcaagagaaagaggttaaaaagaaacatctactcccaggaagag

SEQ ID NO: 131905 - DNA, 70 bp, Homo sapiens
gtttgtttgctttcaagagaaagaggttaaaaagaaacatctactcccaggaagagggcaagctcataaa

SEQ ID NO: 131906 - DNA, 72 bp, Homo sapiens
tttgctttcaagagaaagaggttaaaaagaaacatctactcccaggaagagggcaagctcataaaatgatag

SEQ ID NO: 131907 - DNA, 78 bp, Homo sapiens
aacatctactcccaggaagagggcaagctcataaaatgatagtcctgctaatatatgaccaaaaggagaatgatctta

SEQ ID NO: 131908 - DNA, 77 bp, Homo sapiens
aggaagagggcaagctcataaaatgatagtcctgctaatatatgaccaaaaggagaatgatcttaacagagtagtac

SEQ ID NO: 131909 - DNA, 80 bp, Homo sapiens
aagctcataaaatgatagtcctgctaatatatgaccaaaaggagaatgatcttaacagagtagtaccatgctgactagtg

SEQ ID NO: 131910 - DNA, 78 bp, Homo sapiens
taaaatgatagtcctgctaatatatgaccaaaaggagaatgatcttaacagagtagtaccatgctgactagtggttct

SEQ ID NO: 131911 - DNA, 78 bp, Homo sapiens
tgctaatatatgaccaaaaggagaatgatcttaacagagtagtaccatgctgactagtggttctttgatttctaacaa

SEQ ID NO: 131912 - DNA, 75 bp, Homo sapiens
atatatgaccaaaaggagaatgatcttaacagagtagtaccatgctgactagtggttctttgatttctaacaatt

SEQ ID NO: 131913 - DNA, 76 bp, Homo sapiens
aggagaatgatcttaacagagtagtaccatgctgactagtggttctttgatttctaacaatttatagcaattgtct

SEQ ID NO: 131914 - DNA, 74 bp, Homo sapiens
catgctgactagtggttctttgatttctaacaatttatagcaattgtcttttaatccactgataggaaagaaag

SEQ ID NO: 131915 - DNA, 69 bp, Homo sapiens
agtggttctttgatttctaacaatttatagcaattgtcttttaatccactgataggaaagaaagtaaaa

SEQ ID NO: 131916 - DNA, 70 bp, Homo sapiens
gatttctaacaatttatagcaattgtcttttaatccactgataggaaagaaagtaaaattaagaactgta

SEQ ID NO: 131917 - DNA, 70 bp, Homo sapiens
caatttatagcaattgtcttttaatccactgataggaaagaaagtaaaattaagaactgtatttattgga

SEQ ID NO: 131918 - DNA, 67 bp, Homo sapiens
gtcttttaatccactgataggaaagaaagtaaaattaagaactgtatttattggaaaacagttccta

SEQ ID NO: 131919 - DNA, 67 bp, Homo sapiens
tccactgataggaaagaaagtaaaattaagaactgtatttattggaaaacagttcctattccttttg

SEQ ID NO: 131920 - DNA, 63 bp, Homo sapiens
ggaaagaaagtaaaattaagaactgtatttattggaaaacagttcctattccttttgggtggg

SEQ ID NO: 131921 - DNA, 64 bp, Homo sapiens
agtaaaattaagaactgtatttattggaaaacagttcctattccttttgggtgggggtgtgagg

SEQ ID NO: 131922 - DNA, 67 bp, Homo sapiens
taagaactgtatttattggaaaacagttcctattccttttgggtgggggtgtgagggaggcagggtc

SEQ ID NO: 131923 - DNA, 82 bp, Homo sapiens
tgtgtgtatattaaagctgctttcatagtcacaacatcaagatggtggatccaagctcctccattcttaaatgagaatatta

SEQ ID NO: 131924 - DNA, 80 bp, Homo sapiens
tatattaaagctgctttcatagtcacaacatcaagatggtggatccaagctcctccattcttaaatgagaatattacttc

SEQ ID NO: 131925 - DNA, 78 bp, Homo sapiens
tttcatagtcacaacatcaagatggtggatccaagctcctccattcttaaatgagaatattacttcctacatttcaaa

SEQ ID NO: 131926 - DNA, 78 bp, Homo sapiens
tcacaacatcaagatggtggatccaagctcctccattcttaaatgagaatattacttcctacatttcaaaagcacgaa

SEQ ID NO: 131927 - DNA, 76 bp, Homo sapiens
acaacatcaagatggtggatccaagctcctccattcttaaatgagaatattacttcctacatttcaaaagcacgaa

SEQ ID NO: 131928 - DNA, 75 bp, Homo sapiens
aagatggtggatccaagctcctccattcttaaatgagaatattacttcctacatttcaaaagcacgaacaataca

SEQ ID NO: 131929 - DNA, 78 bp, Homo sapiens
tggatccaagctcctccattcttaaatgagaatattacttcctacatttcaaaagcacgaacaatacatcatctcatt

SEQ ID NO: 131930 - DNA, 78 bp, Homo sapiens
ctcctccattcttaaatgagaatattacttcctacatttcaaaagcacgaacaatacatcatctcatttgatctccaa

SEQ ID NO: 131931 - DNA, 78 bp, Homo sapiens
cttaaatgagaatattacttcctacatttcaaaagcacgaacaatacatcatctcatttgatctccaaactcactctg

SEQ ID NO: 131932 - DNA, 77 bp, Homo sapiens
tattacttcctacatttcaaaagcacgaacaatacatcatctcatttgatctccaaactcactctgtgggtaagtta

SEQ ID NO: 131933 - DNA, 78 bp, Homo sapiens
atttcaaaagcacgaacaatacatcatctcatttgatctccaaactcactctgtgggtaagttatcactccatgggta

SEQ ID NO: 131934 - DNA, 77 bp, Homo sapiens
aaagcacgaacaatacatcatctcatttgatctccaaactcactctgtgggtaagttatcactccatgggtaactaa

SEQ ID NO: 131935 - DNA, 78 bp, Homo sapiens
aatacatcatctcatttgatctccaaactcactctgtgggtaagttatcactccatgggtaactaattctgtgagtaa

SEQ ID NO: 131936 - DNA, 72 bp, Homo sapiens
atttgatctccaaactcactctgtgggtaagttatcactccatgggtaactaattctgtgagtaacctttaa

SEQ ID NO: 131937 - DNA, 71 bp, Homo sapiens
tctgtgggtaagttatcactccatgggtaactaattctgtgagtaacctttaagatgggttattatcccaa

SEQ ID NO: 131938 - DNA, 70 bp, Homo sapiens
ggtaagttatcactccatgggtaactaattctgtgagtaacctttaagatgggttattatcccaactata

SEQ ID NO: 131939 - DNA, 70 bp, Homo sapiens
actccatgggtaactaattctgtgagtaacctttaagatgggttattatcccaactatatgaaactggga

SEQ ID NO: 131940 - DNA, 69 bp, Homo sapiens
actaattctgtgagtaacctttaagatgggttattatcccaactatatgaaactgggagttcagaaaag

SEQ ID NO: 131941 - DNA, 70 bp, Homo sapiens
tgtgagtaacctttaagatgggttattatcccaactatatgaaactgggagttcagaaaagttactgagt

SEQ ID NO: 131942 - DNA, 69 bp, Homo sapiens
agtaacctttaagatgggttattatcccaactatatgaaactgggagttcagaaaagttactgagttgc

SEQ ID NO: 131943 - DNA, 69 bp, Homo sapiens
cctttaagatgggttattatcccaactatatgaaactgggagttcagaaaagttactgagttgcccaaa

SEQ ID NO: 131944 - DNA, 70 bp, Homo sapiens
atgggttattatcccaactatatgaaactgggagttcagaaaagttactgagttgcccaaagtcttctaa

SEQ ID NO: 131945 - DNA, 71 bp, Homo sapiens
ttattatcccaactatatgaaactgggagttcagaaaagttactgagttgcccaaagtcttctaactccta

SEQ ID NO: 131946 - DNA, 70 bp, Homo sapiens
aactatatgaaactgggagttcagaaaagttactgagttgcccaaagtcttctaactcctaagtaacaga

SEQ ID NO: 131947 - DNA, 72 bp, Homo sapiens
ctatatgaaactgggagttcagaaaagttactgagttgcccaaagtcttctaactcctaagtaacagagcaa

SEQ ID NO: 131948 - DNA, 70 bp, Homo sapiens
actgggagttcagaaaagttactgagttgcccaaagtcttctaactcctaagtaacagagcaaggtctaa

SEQ ID NO: 131949 - DNA, 71 bp, Homo sapiens
agttcagaaaagttactgagttgcccaaagtcttctaactcctaagtaacagagcaaggtctaagactctc

SEQ ID NO: 131950 - DNA, 71 bp, Homo sapiens
ttcagaaaagttactgagttgcccaaagtcttctaactcctaagtaacagagcaaggtctaagactctctt

SEQ ID NO: 131951 - DNA, 69 bp, Homo sapiens
aaagttactgagttgcccaaagtcttctaactcctaagtaacagagcaaggtctaagactctctttctt

SEQ ID NO: 131952 - DNA, 74 bp, Homo sapiens
ttgcccaaagtcttctaactcctaagtaacagagcaaggtctaagactctctttcttttgttcgtatgcatgta

SEQ ID NO: 131953 - DNA, 74 bp, Homo sapiens
aaagtcttctaactcctaagtaacagagcaaggtctaagactctctttcttttgttcgtatgcatgtatgtata

SEQ ID NO: 131954 - DNA, 75 bp, Homo sapiens
aactcctaagtaacagagcaaggtctaagactctctttcttttgttcgtatgcatgtatgtatatatttgtgtat

SEQ ID NO: 131955 - DNA, 76 bp, Homo sapiens
tgtgcctggcctaaaactccactttctaatacagtagcaactagccaaatgtgactatttaattagaatagccaca

SEQ ID NO: 131956 - DNA, 75 bp, Homo sapiens
cctaaaactccactttctaatacagtagcaactagccaaatgtgactatttaattagaatagccacatgtgccta

SEQ ID NO: 131957 - DNA, 75 bp, Homo sapiens
ctaaaactccactttctaatacagtagcaactagccaaatgtgactatttaattagaatagccacatgtgcctat

SEQ ID NO: 131958 - DNA, 76 bp, Homo sapiens
ctccactttctaatacagtagcaactagccaaatgtgactatttaattagaatagccacatgtgcctatttaaatc

SEQ ID NO: 131959 - DNA, 75 bp, Homo sapiens
ctaatacagtagcaactagccaaatgtgactatttaattagaatagccacatgtgcctatttaaatctaaattaa

SEQ ID NO: 131960 - DNA, 72 bp, Homo sapiens
agcaactagccaaatgtgactatttaattagaatagccacatgtgcctatttaaatctaaattaattaaaat

SEQ ID NO: 131961 - DNA, 73 bp, Homo sapiens
ataaaaattaaaattcagtttttcaactcaagtatgttcaacagcacatgcggctaatggttagtcttataga

SEQ ID NO: 131962 - DNA, 75 bp, Homo sapiens
aaattcagtttttcaactcaagtatgttcaacagcacatgcggctaatggttagtcttatagaaatagttctatc

SEQ ID NO: 131963 - DNA, 76 bp, Homo sapiens
gtttttcaactcaagtatgttcaacagcacatgcggctaatggttagtcttatagaaatagttctatcttcactta

SEQ ID NO: 131964 - DNA, 77 bp, Homo sapiens
actcaagtatgttcaacagcacatgcggctaatggttagtcttatagaaatagttctatcttcacttaacatactat

SEQ ID NO: 131965 - DNA, 78 bp, Homo sapiens
ttcaacagcacatgcggctaatggttagtcttatagaaatagttctatcttcacttaacatactattggacagggctg

SEQ ID NO: 131966 - DNA, 77 bp, Homo sapiens
acatgcggctaatggttagtcttatagaaatagttctatcttcacttaacatactattggacagggctggtctagca

SEQ ID NO: 131967 - DNA, 74 bp, Homo sapiens
taatggttagtcttatagaaatagttctatcttcacttaacatactattggacagggctggtctagcacctagt

SEQ ID NO: 131968 - DNA, 73 bp, Homo sapiens
ttagtcttatagaaatagttctatcttcacttaacatactattggacagggctggtctagcacctagttcttt

SEQ ID NO: 131969 - DNA, 74 bp, Homo sapiens
tcttatagaaatagttctatcttcacttaacatactattggacagggctggtctagcacctagttcttttgaat

SEQ ID NO: 131970 - DNA, 75 bp, Homo sapiens
ttatagaaatagttctatcttcacttaacatactattggacagggctggtctagcacctagttcttttgaattca

SEQ ID NO: 131971 - DNA, 74 bp, Homo sapiens
agaaatagttctatcttcacttaacatactattggacagggctggtctagcacctagttcttttgaattcataa

SEQ ID NO: 131972 - DNA, 75 bp, Homo sapiens
tagttctatcttcacttaacatactattggacagggctggtctagcacctagttcttttgaattcataacttgga

SEQ ID NO: 131973 - DNA, 74 bp, Homo sapiens
tatcttcacttaacatactattggacagggctggtctagcacctagttcttttgaattcataacttggagaaaa

SEQ ID NO: 131974 - DNA, 72 bp, Homo sapiens
acttaacatactattggacagggctggtctagcacctagttcttttgaattcataacttggagaaaagatcc

SEQ ID NO: 131975 - DNA, 74 bp, Homo sapiens
ttaacatactattggacagggctggtctagcacctagttcttttgaattcataacttggagaaaagatcccatg

SEQ ID NO: 131976 - DNA, 74 bp, Homo sapiens
atactattggacagggctggtctagcacctagttcttttgaattcataacttggagaaaagatcccatggcggc

SEQ ID NO: 131977 - DNA, 72 bp, Homo sapiens
attggacagggctggtctagcacctagttcttttgaattcataacttggagaaaagatcccatggcggccgg

SEQ ID NO: 131978 - DNA, 70 bp, Homo sapiens
aaaaaaaaaaacatatggagtggagggtgaggagtggggttagtgggagtcagcaggatgacagggtgtc

SEQ ID NO: 131979 - DNA, 73 bp, Homo sapiens
aaaaacatatggagtggagggtgaggagtggggttagtgggagtcagcaggatgacagggtgtcggggtggca

SEQ ID NO: 131980 - DNA, 76 bp, Homo sapiens
tggagggtgaggagtggggttagtgggagtcagcaggatgacagggtgtcggggtggcagaggatgttggagatta

SEQ ID NO: 131981 - DNA, 75 bp, Homo sapiens
aggagtggggttagtgggagtcagcaggatgacagggtgtcggggtggcagaggatgttggagattacaacagga

SEQ ID NO: 131982 - DNA, 74 bp, Homo sapiens
gggttagtgggagtcagcaggatgacagggtgtcggggtggcagaggatgttggagattacaacaggagttggg

SEQ ID NO: 131983 - DNA, 76 bp, Homo sapiens
agtcagcaggatgacagggtgtcggggtggcagaggatgttggagattacaacaggagttgggggacacaacaaca

SEQ ID NO: 131984 - DNA, 78 bp, Homo sapiens
aggcataagccaccaggctcagcccatccaagtatttaataaagatagcctgatagtgacaatgtcaaatcataaccc

SEQ ID NO: 131985 - DNA, 75 bp, Homo sapiens
caggctcagcccatccaagtatttaataaagatagcctgatagtgacaatgtcaaatcataaccccttccggtct

SEQ ID NO: 131986 - DNA, 73 bp, Homo sapiens
ccatccaagtatttaataaagatagcctgatagtgacaatgtcaaatcataaccccttccggtcttattacga

SEQ ID NO: 131987 - DNA, 73 bp, Homo sapiens
atttaataaagatagcctgatagtgacaatgtcaaatcataaccccttccggtcttattacgagaaacactga

SEQ ID NO: 131988 - DNA, 73 bp, Homo sapiens
ataaagatagcctgatagtgacaatgtcaaatcataaccccttccggtcttattacgagaaacactgaagatt

SEQ ID NO: 131989 - DNA, 70 bp, Homo sapiens
tagtgacaatgtcaaatcataaccccttccggtcttattacgagaaacactgaagatttaggaagttggt

SEQ ID NO: 131990 - DNA, 68 bp, Homo sapiens
atgtcaaatcataaccccttccggtcttattacgagaaacactgaagatttaggaagttggtttatct

SEQ ID NO: 131991 - DNA, 67 bp, Homo sapiens
atcataaccccttccggtcttattacgagaaacactgaagatttaggaagttggtttatctttccag

SEQ ID NO: 131992 - DNA, 67 bp, Homo sapiens
ttccggtcttattacgagaaacactgaagatttaggaagttggtttatctttccaggggctataaaa

SEQ ID NO: 131993 - DNA, 66 bp, Homo sapiens
tattacgagaaacactgaagatttaggaagttggtttatctttccaggggctataaaaactaaaaa

SEQ ID NO: 131994 - DNA, 64 bp, Homo sapiens
aacactgaagatttaggaagttggtttatctttccaggggctataaaaactaaaaaatgaaaaa

SEQ ID NO: 131995 - DNA, 63 bp, Homo sapiens
atttaggaagttggtttatctttccaggggctataaaaactaaaaaatgaaaaattacttata

SEQ ID NO: 131996 - DNA, 64 bp, Homo sapiens
tggtttatctttccaggggctataaaaactaaaaaatgaaaaattacttataatttttagcagg

SEQ ID NO: 131997 - DNA, 65 bp, Homo sapiens
tccaggggctataaaaactaaaaaatgaaaaattacttataatttttagcaggggggtatatgaa

SEQ ID NO: 131998 - DNA, 65 bp, Homo sapiens
aaaactaaaaaatgaaaaattacttataatttttagcaggggggtatatgaaaaatctccatatc

SEQ ID NO: 131999 - DNA, 71 bp, Homo sapiens
aatgaaaaattacttataatttttagcaggggggtatatgaaaaatctccatatcttctgctcaactttgc

SEQ ID NO: 132000 - DNA, 74 bp, Homo sapiens
tacttataatttttagcaggggggtatatgaaaaatctccatatcttctgctcaactttgctgtgaaactgaaa

SEQ ID NO: 132001 - DNA, 73 bp, Homo sapiens
ataatttttagcaggggggtatatgaaaaatctccatatcttctgctcaactttgctgtgaaactgaaacttc

SEQ ID NO: 132002 - DNA, 71 bp, Homo sapiens
aggggggtatatgaaaaatctccatatcttctgctcaactttgctgtgaaactgaaacttctgtaaaaaaa

SEQ ID NO: 132003 - DNA, 68 bp, Homo sapiens
aaaaaaaatactattttaaaagattcaggggagcctctctgcacctattctggttcggggattgttca

SEQ ID NO: 132004 - DNA, 69 bp, Homo sapiens
actattttaaaagattcaggggagcctctctgcacctattctggttcggggattgttcaataaataaaa

SEQ ID NO: 132005 - DNA, 69 bp, Homo sapiens
ttaaaagattcaggggagcctctctgcacctattctggttcggggattgttcaataaataaaattaaac

SEQ ID NO: 132006 - DNA, 72 bp, Homo sapiens
ggagcctctctgcacctattctggttcggggattgttcaataaataaaattaaacttaggccagttgcagtg

SEQ ID NO: 132007 - DNA, 68 bp, Homo sapiens
aattttaaaaagttttcttttggctcattttatatctttattatcaccattactgttactgtatcggc

SEQ ID NO: 132008 - DNA, 74 bp, Homo sapiens
agttttcttttggctcattttatatctttattatcaccattactgttactgtatcggctcagcctatcataaaa

SEQ ID NO: 132009 - DNA, 78 bp, Homo sapiens
tggctcattttatatctttattatcaccattactgttactgtatcggctcagcctatcataaaataagttgaagtctc

SEQ ID NO: 132010 - DNA, 77 bp, Homo sapiens
tatatctttattatcaccattactgttactgtatcggctcagcctatcataaaataagttgaagtctctgtatcctt

SEQ ID NO: 132011 - DNA, 76 bp, Homo sapiens
attatcaccattactgttactgtatcggctcagcctatcataaaataagttgaagtctctgtatcctttgatttct

SEQ ID NO: 132012 - DNA, 74 bp, Homo sapiens
accattactgttactgtatcggctcagcctatcataaaataagttgaagtctctgtatcctttgatttcttttg

SEQ ID NO: 132013 - DNA, 79 bp, Homo sapiens
ttactgtatcggctcagcctatcataaaataagttgaagtctctgtatcctttgatttcttttgtcatctctgcacaaa

SEQ ID NO: 132014 - DNA, 77 bp, Homo sapiens
agcctatcataaaataagttgaagtctctgtatcctttgatttcttttgtcatctctgcacaaactgggctagccta

SEQ ID NO: 132015 - DNA, 74 bp, Homo sapiens
ataaaataagttgaagtctctgtatcctttgatttcttttgtcatctctgcacaaactgggctagcctaaggtc

SEQ ID NO: 132016 - DNA, 75 bp, Homo sapiens
aagttgaagtctctgtatcctttgatttcttttgtcatctctgcacaaactgggctagcctaaggtcctagattc

SEQ ID NO: 132017 - DNA, 76 bp, Homo sapiens
tatcctttgatttcttttgtcatctctgcacaaactgggctagcctaaggtcctagattctgtctactggttacta

SEQ ID NO: 132018 - DNA, 75 bp, Homo sapiens
tttcttttgtcatctctgcacaaactgggctagcctaaggtcctagattctgtctactggttactaaatcctgaa

SEQ ID NO: 132019 - DNA, 79 bp, Homo sapiens
ttgtcatctctgcacaaactgggctagcctaaggtcctagattctgtctactggttactaaatcctgaacatctcatta

SEQ ID NO: 132020 - DNA, 76 bp, Homo sapiens
caaactgggctagcctaaggtcctagattctgtctactggttactaaatcctgaacatctcattagtgagtcacaa

SEQ ID NO: 132021 - DNA, 77 bp, Homo sapiens
tagcctaaggtcctagattctgtctactggttactaaatcctgaacatctcattagtgagtcacaatctaatccatt

SEQ ID NO: 132022 - DNA, 75 bp, Homo sapiens
taaggtcctagattctgtctactggttactaaatcctgaacatctcattagtgagtcacaatctaatccattttt

SEQ ID NO: 132023 - DNA, 73 bp, Homo sapiens
gattctgtctactggttactaaatcctgaacatctcattagtgagtcacaatctaatccatttttttaaaaaa

SEQ ID NO: 132024 - DNA, 67 bp, Homo sapiens
ttaaaaaatttagttttaaaagagctttaccaaaatgtatttgattcacatgtactcaggaaaaaga

SEQ ID NO: 132025 - DNA, 69 bp, Homo sapiens
ttagttttaaaagagctttaccaaaatgtatttgattcacatgtactcaggaaaaagaatgttgaaacc

SEQ ID NO: 132026 - DNA, 73 bp, Homo sapiens
agagctttaccaaaatgtatttgattcacatgtactcaggaaaaagaatgttgaaacctaggttgcatatttg

SEQ ID NO: 132027 - DNA, 73 bp, Homo sapiens
accaaaatgtatttgattcacatgtactcaggaaaaagaatgttgaaacctaggttgcatatttggtgaagaa

SEQ ID NO: 132028 - DNA, 74 bp, Homo sapiens
gtatttgattcacatgtactcaggaaaaagaatgttgaaacctaggttgcatatttggtgaagaataatgtaag

SEQ ID NO: 132029 - DNA, 71 bp, Homo sapiens
tgtactcaggaaaaagaatgttgaaacctaggttgcatatttggtgaagaataatgtaagttaacgattcc

SEQ ID NO: 132030 - DNA, 69 bp, Homo sapiens
caggaaaaagaatgttgaaacctaggttgcatatttggtgaagaataatgtaagttaacgattcccaag

SEQ ID NO: 132031 - DNA, 70 bp, Homo sapiens
gaatgttgaaacctaggttgcatatttggtgaagaataatgtaagttaacgattcccaagttacaaataa

SEQ ID NO: 132032 - DNA, 68 bp, Homo sapiens
acctaggttgcatatttggtgaagaataatgtaagttaacgattcccaagttacaaataacaaaaaca

SEQ ID NO: 132033 - DNA, 71 bp, Homo sapiens
ttggtgaagaataatgtaagttaacgattcccaagttacaaataacaaaaacatcattaagaattgcagga

SEQ ID NO: 132034 - DNA, 71 bp, Homo sapiens
ataatgtaagttaacgattcccaagttacaaataacaaaaacatcattaagaattgcaggaccaggcatag

SEQ ID NO: 132035 - DNA, 75 bp, Homo sapiens
aaaagagagagagatatgcaacttcagacagagagagaccgtagtaatcaatcctggcacttttaagaagaaatt

SEQ ID NO: 132036 - DNA, 75 bp, Homo sapiens
agagagagatatgcaacttcagacagagagagaccgtagtaatcaatcctggcacttttaagaagaaattttaac

SEQ ID NO: 132037 - DNA, 72 bp, Homo sapiens
aacttcagacagagagagaccgtagtaatcaatcctggcacttttaagaagaaattttaactctgctatggg

SEQ ID NO: 132038 - DNA, 74 bp, Homo sapiens
agagagagaccgtagtaatcaatcctggcacttttaagaagaaattttaactctgctatgggtgcacaggaaca

SEQ ID NO: 132039 - DNA, 76 bp, Homo sapiens
gtagtaatcaatcctggcacttttaagaagaaattttaactctgctatgggtgcacaggaacatcattagaaatga

SEQ ID NO: 132040 - DNA, 74 bp, Homo sapiens
aatcaatcctggcacttttaagaagaaattttaactctgctatgggtgcacaggaacatcattagaaatgaaaa

SEQ ID NO: 132041 - DNA, 72 bp, Homo sapiens
ggcacttttaagaagaaattttaactctgctatgggtgcacaggaacatcattagaaatgaaaaaaacaagc

SEQ ID NO: 132042 - DNA, 75 bp, Homo sapiens
aagaaattttaactctgctatgggtgcacaggaacatcattagaaatgaaaaaaacaagctctgtcaagaagaca

SEQ ID NO: 132043 - DNA, 78 bp, Homo sapiens
ttaactctgctatgggtgcacaggaacatcattagaaatgaaaaaaacaagctctgtcaagaagacagagcaaggtct

SEQ ID NO: 132044 - DNA, 75 bp, Homo sapiens
acatcattagaaatgaaaaaaacaagctctgtcaagaagacagagcaaggtcttcgaagatctatacgacaaaaa

SEQ ID NO: 132045 - DNA, 73 bp, Homo sapiens
gaaatgaaaaaaacaagctctgtcaagaagacagagcaaggtcttcgaagatctatacgacaaaaataattat

SEQ ID NO: 132046 - DNA, 73 bp, Homo sapiens
aaaaacaagctctgtcaagaagacagagcaaggtcttcgaagatctatacgacaaaaataattatttcctcac

SEQ ID NO: 132047 - DNA, 75 bp, Homo sapiens
tctgtcaagaagacagagcaaggtcttcgaagatctatacgacaaaaataattatttcctcacgtgttattcaag

SEQ ID NO: 132048 - DNA, 71 bp, Homo sapiens
gacagagcaaggtcttcgaagatctatacgacaaaaataattatttcctcacgtgttattcaaggtttttc

SEQ ID NO: 132049 - DNA, 71 bp, Homo sapiens
gtcttcgaagatctatacgacaaaaataattatttcctcacgtgttattcaaggtttttctactactggca

SEQ ID NO: 132050 - DNA, 72 bp, Homo sapiens
gaagatctatacgacaaaaataattatttcctcacgtgttattcaaggtttttctactactggcacatggga

SEQ ID NO: 132051 - DNA, 69 bp, Homo sapiens
cgacaaaaataattatttcctcacgtgttattcaaggtttttctactactggcacatgggaaaatagta

SEQ ID NO: 132052 - DNA, 69 bp, Homo sapiens
tatttcctcacgtgttattcaaggtttttctactactggcacatgggaaaatagtaagttgagggttaa

SEQ ID NO: 132053 - DNA, 70 bp, Homo sapiens
attcaaggtttttctactactggcacatgggaaaatagtaagttgagggttaactgtagcattagaaaca

SEQ ID NO: 132054 - DNA, 74 bp, Homo sapiens
gcacatgggaaaatagtaagttgagggttaactgtagcattagaaacatggtactatatgctttatttcaagga

SEQ ID NO: 132055 - DNA, 73 bp, Homo sapiens
gaaaatagtaagttgagggttaactgtagcattagaaacatggtactatatgctttatttcaaggattctcaa

SEQ ID NO: 132056 - DNA, 75 bp, Homo sapiens
gagggttaactgtagcattagaaacatggtactatatgctttatttcaaggattctcaattataaaagactgaca

SEQ ID NO: 132057 - DNA, 77 bp, Homo sapiens
ctgtagcattagaaacatggtactatatgctttatttcaaggattctcaattataaaagactgacaagagacaaaca

SEQ ID NO: 132058 - DNA, 77 bp, Homo sapiens
gaaacatggtactatatgctttatttcaaggattctcaattataaaagactgacaagagacaaacaagcttctctca

SEQ ID NO: 132059 - DNA, 78 bp, Homo sapiens
ctatatgctttatttcaaggattctcaattataaaagactgacaagagacaaacaagcttctctcacatccagaaaga

SEQ ID NO: 132060 - DNA, 78 bp, Homo sapiens
tgctttatttcaaggattctcaattataaaagactgacaagagacaaacaagcttctctcacatccagaaagaataca

SEQ ID NO: 132061 - DNA, 76 bp, Homo sapiens
aaggattctcaattataaaagactgacaagagacaaacaagcttctctcacatccagaaagaatacaggaggagac

SEQ ID NO: 132062 - DNA, 73 bp, Homo sapiens
aattataaaagactgacaagagacaaacaagcttctctcacatccagaaagaatacaggaggagacccttttc

SEQ ID NO: 132063 - DNA, 76 bp, Homo sapiens
agactgacaagagacaaacaagcttctctcacatccagaaagaatacaggaggagacccttttctgatttgtctag

SEQ ID NO: 132064 - DNA, 73 bp, Homo sapiens
acaaacaagcttctctcacatccagaaagaatacaggaggagacccttttctgatttgtctaggtcagaaaaa

SEQ ID NO: 132065 - DNA, 73 bp, Homo sapiens
ttctctcacatccagaaagaatacaggaggagacccttttctgatttgtctaggtcagaaaaacttccatgtt

SEQ ID NO: 132066 - DNA, 69 bp, Homo sapiens
atccagaaagaatacaggaggagacccttttctgatttgtctaggtcagaaaaacttccatgttttcct

SEQ ID NO: 132067 - DNA, 68 bp, Homo sapiens
agaatacaggaggagacccttttctgatttgtctaggtcagaaaaacttccatgttttcctttgaaag

SEQ ID NO: 132068 - DNA, 69 bp, Homo sapiens
acccttttctgatttgtctaggtcagaaaaacttccatgttttcctttgaaaggttatcctctgcaaca

SEQ ID NO: 132069 - DNA, 76 bp, Homo sapiens
tttctgatttgtctaggtcagaaaaacttccatgttttcctttgaaaggttatcctctgcaacagctctcatgcca

SEQ ID NO: 132070 - DNA, 70 bp, Homo sapiens
aacttccatgttttcctttgaaaggttatcctctgcaacagctctcatgccagaacgtttttcttaaatt

SEQ ID NO: 132071 - DNA, 70 bp, Homo sapiens
ttttcctttgaaaggttatcctctgcaacagctctcatgccagaacgtttttcttaaattttcaccttaa

SEQ ID NO: 132072 - DNA, 72 bp, Homo sapiens
tttgaaaggttatcctctgcaacagctctcatgccagaacgtttttcttaaattttcaccttaaccttatga

SEQ ID NO: 132073 - DNA, 66 bp, Homo sapiens
gccagaacgtttttcttaaattttcaccttaaccttatgaccttgtacacctttaaacatcaaaga

SEQ ID NO: 132074 - DNA, 69 bp, Homo sapiens
ttaaccttatgaccttgtacacctttaaacatcaaagagaaaggcttcaggggaagctttgagaacaaa

SEQ ID NO: 132075 - DNA, 71 bp, Homo sapiens
ttgtacacctttaaacatcaaagagaaaggcttcaggggaagctttgagaacaaagtgtaccaaatatgac

SEQ ID NO: 132076 - DNA, 70 bp, Homo sapiens
tttaaacatcaaagagaaaggcttcaggggaagctttgagaacaaagtgtaccaaatatgaccagtttct

SEQ ID NO: 132077 - DNA, 71 bp, Homo sapiens
aaagagaaaggcttcaggggaagctttgagaacaaagtgtaccaaatatgaccagtttcttctgtgagtct

SEQ ID NO: 132078 - DNA, 76 bp, Homo sapiens
ttcaggggaagctttgagaacaaagtgtaccaaatatgaccagtttcttctgtgagtcttcatcctggatacagtg

SEQ ID NO: 132079 - DNA, 77 bp, Homo sapiens
aagctttgagaacaaagtgtaccaaatatgaccagtttcttctgtgagtcttcatcctggatacagtggcattcctg

SEQ ID NO: 132080 - DNA, 76 bp, Homo sapiens
agaacaaagtgtaccaaatatgaccagtttcttctgtgagtcttcatcctggatacagtggcattcctggtcttaa

SEQ ID NO: 132081 - DNA, 77 bp, Homo sapiens
tgtaccaaatatgaccagtttcttctgtgagtcttcatcctggatacagtggcattcctggtcttaatctttggatt

SEQ ID NO: 132082 - DNA, 78 bp, Homo sapiens
atgaccagtttcttctgtgagtcttcatcctggatacagtggcattcctggtcttaatctttggatttcaagaccagc

SEQ ID NO: 132083 - DNA, 81 bp, Homo sapiens
ttctgtgagtcttcatcctggatacagtggcattcctggtcttaatctttggatttcaagaccagctccctatctctgcca

SEQ ID NO: 132084 - DNA, 81 bp, Homo sapiens
ttcatcctggatacagtggcattcctggtcttaatctttggatttcaagaccagctccctatctctgccatctgtcctatc

SEQ ID NO: 132085 - DNA, 80 bp, Homo sapiens
tacagtggcattcctggtcttaatctttggatttcaagaccagctccctatctctgccatctgtcctatccctcaagata

SEQ ID NO: 132086 - DNA, 80 bp, Homo sapiens
attcctggtcttaatctttggatttcaagaccagctccctatctctgccatctgtcctatccctcaagatatgtgcgaga

SEQ ID NO: 132087 - DNA, 80 bp, Homo sapiens
atttcaagaccagctccctatctctgccatctgtcctatccctcaagatatgtgcgagacatcattagtgaaaatttagg

SEQ ID NO: 132088 - DNA, 81 bp, Homo sapiens
agctccctatctctgccatctgtcctatccctcaagatatgtgcgagacatcattagtgaaaatttagggcctagaccata

SEQ ID NO: 132089 - DNA, 82 bp, Homo sapiens
tatctctgccatctgtcctatccctcaagatatgtgcgagacatcattagtgaaaatttagggcctagaccatacaagcctc

SEQ ID NO: 132090 - DNA, 81 bp, Homo sapiens
atctgtcctatccctcaagatatgtgcgagacatcattagtgaaaatttagggcctagaccatacaagcctctgctatctg

SEQ ID NO: 132091 - DNA, 82 bp, Homo sapiens
ctcaagatatgtgcgagacatcattagtgaaaatttagggcctagaccatacaagcctctgctatctggcactctgtatttg

SEQ ID NO: 132092 - DNA, 77 bp, Homo sapiens
atcattagtgaaaatttagggcctagaccatacaagcctctgctatctggcactctgtatttggtagagttaagtga

SEQ ID NO: 132093 - DNA, 73 bp, Homo sapiens
aaatttagggcctagaccatacaagcctctgctatctggcactctgtatttggtagagttaagtgacgttaaa

SEQ ID NO: 132094 - DNA, 77 bp, Homo sapiens
ctctgctatctggcactctgtatttggtagagttaagtgacgttaaatttgaaacttatgtttacatgatgagaata

SEQ ID NO: 132095 - DNA, 73 bp, Homo sapiens
ctggcactctgtatttggtagagttaagtgacgttaaatttgaaacttatgtttacatgatgagaataaagaa

SEQ ID NO: 132096 - DNA, 74 bp, Homo sapiens
tggtagagttaagtgacgttaaatttgaaacttatgtttacatgatgagaataaagaatactgcaaaatgattc

SEQ ID NO: 132097 - DNA, 73 bp, Homo sapiens
gagttaagtgacgttaaatttgaaacttatgtttacatgatgagaataaagaatactgcaaaatgattctgtt

SEQ ID NO: 132098 - DNA, 77 bp, Homo sapiens
cgttaaatttgaaacttatgtttacatgatgagaataaagaatactgcaaaatgattctgtttaatagcacatcaga

SEQ ID NO: 132099 - DNA, 79 bp, Homo sapiens
cttatgtttacatgatgagaataaagaatactgcaaaatgattctgtttaatagcacatcagaaaccaacttctgtatc

SEQ ID NO: 132100 - DNA, 83 bp, Homo sapiens
tacatgatgagaataaagaatactgcaaaatgattctgtttaatagcacatcagaaaccaacttctgtatctcacagttgaga

SEQ ID NO: 132101 - DNA, 83 bp, Homo sapiens
aataaagaatactgcaaaatgattctgtttaatagcacatcagaaaccaacttctgtatctcacagttgagatgctatgatca

SEQ ID NO: 132102 - DNA, 88 bp, Homo sapiens
gtttaatagcacatcagaaaccaacttctgtatctcacagttgagatgctatgatcagagcatatcaagcagtacagagaggtatata

SEQ ID NO: 132103 - DNA, 85 bp, Homo sapiens
ttctgtatctcacagttgagatgctatgatcagagcatatcaagcagtacagagaggtatataggaattaggggattctttaatc

SEQ ID NO: 132104 - DNA, 83 bp, Homo sapiens
tatctcacagttgagatgctatgatcagagcatatcaagcagtacagagaggtatataggaattaggggattctttaatccct

SEQ ID NO: 132105 - DNA, 79 bp, Homo sapiens
agatgctatgatcagagcatatcaagcagtacagagaggtatataggaattaggggattctttaatcccttcaacttta

SEQ ID NO: 132106 - DNA, 75 bp, Homo sapiens
atcagagcatatcaagcagtacagagaggtatataggaattaggggattctttaatcccttcaactttatggaaa

SEQ ID NO: 132107 - DNA, 72 bp, Homo sapiens
atatcaagcagtacagagaggtatataggaattaggggattctttaatcccttcaactttatggaaaggtca

SEQ ID NO: 132108 - DNA, 68 bp, Homo sapiens
agtacagagaggtatataggaattaggggattctttaatcccttcaactttatggaaaggtcagaccc

SEQ ID NO: 132109 - DNA, 71 bp, Homo sapiens
tatataggaattaggggattctttaatcccttcaactttatggaaaggtcagaccccaacactgaatgaca

SEQ ID NO: 132110 - DNA, 70 bp, Homo sapiens
aattaggggattctttaatcccttcaactttatggaaaggtcagaccccaacactgaatgacatatagaa

SEQ ID NO: 132111 - DNA, 71 bp, Homo sapiens
ttctttaatcccttcaactttatggaaaggtcagaccccaacactgaatgacatatagaaacagaacaacc

SEQ ID NO: 132112 - DNA, 71 bp, Homo sapiens
ccttcaactttatggaaaggtcagaccccaacactgaatgacatatagaaacagaacaaccctgaagggaa

SEQ ID NO: 132113 - DNA, 73 bp, Homo sapiens
tatggaaaggtcagaccccaacactgaatgacatatagaaacagaacaaccctgaagggaagggaaccactga

SEQ ID NO: 132114 - DNA, 74 bp, Homo sapiens
ccccaacactgaatgacatatagaaacagaacaaccctgaagggaagggaaccactgaagcacactgtgtccta

SEQ ID NO: 132115 - DNA, 78 bp, Homo sapiens
acactgaatgacatatagaaacagaacaaccctgaagggaagggaaccactgaagcacactgtgtcctacagatatga

SEQ ID NO: 132116 - DNA, 79 bp, Homo sapiens
acagaacaaccctgaagggaagggaaccactgaagcacactgtgtcctacagatatgacgatgtcaggactgacagcca

SEQ ID NO: 132117 - DNA, 78 bp, Homo sapiens
agggaagggaaccactgaagcacactgtgtcctacagatatgacgatgtcaggactgacagccagtcctacgtggtaa

SEQ ID NO: 132118 - DNA, 82 bp, Homo sapiens
accactgaagcacactgtgtcctacagatatgacgatgtcaggactgacagccagtcctacgtggtaactatgtgcaagtgt

SEQ ID NO: 132119 - DNA, 82 bp, Homo sapiens
aagcacactgtgtcctacagatatgacgatgtcaggactgacagccagtcctacgtggtaactatgtgcaagtgttctggaa

SEQ ID NO: 132120 - DNA, 79 bp, Homo sapiens
atatgacgatgtcaggactgacagccagtcctacgtggtaactatgtgcaagtgttctggaagatgaggtagatgggtt

SEQ ID NO: 132121 - DNA, 72 bp, Homo sapiens
acagccagtcctacgtggtaactatgtgcaagtgttctggaagatgaggtagatgggtttttttccttcctg

SEQ ID NO: 132122 - DNA, 73 bp, Homo sapiens
tacgtggtaactatgtgcaagtgttctggaagatgaggtagatgggtttttttccttcctggaggcagcaaaa

SEQ ID NO: 132123 - DNA, 73 bp, Homo sapiens
taactatgtgcaagtgttctggaagatgaggtagatgggtttttttccttcctggaggcagcaaaattcaaag

SEQ ID NO: 132124 - DNA, 72 bp, Homo sapiens
tgttctggaagatgaggtagatgggtttttttccttcctggaggcagcaaaattcaaaggagaagaatttga

SEQ ID NO: 132125 - DNA, 70 bp, Homo sapiens
tgggtttttttccttcctggaggcagcaaaattcaaaggagaagaatttgataaaagatatcaaccagaa

SEQ ID NO: 132126 - DNA, 76 bp, Homo sapiens
tccttcctggaggcagcaaaattcaaaggagaagaatttgataaaagatatcaaccagaaatgatgagacaaaata

SEQ ID NO: 132127 - DNA, 78 bp, Homo sapiens
tggaggcagcaaaattcaaaggagaagaatttgataaaagatatcaaccagaaatgatgagacaaaatacagccataa

SEQ ID NO: 132128 - DNA, 75 bp, Homo sapiens
attcaaaggagaagaatttgataaaagatatcaaccagaaatgatgagacaaaatacagccataactaacgtgcc

SEQ ID NO: 132129 - DNA, 75 bp, Homo sapiens
aaggagaagaatttgataaaagatatcaaccagaaatgatgagacaaaatacagccataactaacgtgcccattc

SEQ ID NO: 132130 - DNA, 76 bp, Homo sapiens
atttgataaaagatatcaaccagaaatgatgagacaaaatacagccataactaacgtgcccattccctcggcttga

SEQ ID NO: 132131 - DNA, 78 bp, Homo sapiens
agatatcaaccagaaatgatgagacaaaatacagccataactaacgtgcccattccctcggcttgagggctctgccta

SEQ ID NO: 132132 - DNA, 74 bp, Homo sapiens
aatgatgagacaaaatacagccataactaacgtgcccattccctcggcttgagggctctgcctacctcctaagt

SEQ ID NO: 132133 - DNA, 72 bp, Homo sapiens
aaaatacagccataactaacgtgcccattccctcggcttgagggctctgcctacctcctaagttgtacaaca

SEQ ID NO: 132134 - DNA, 70 bp, Homo sapiens
cataactaacgtgcccattccctcggcttgagggctctgcctacctcctaagttgtacaacaaacttaaa

SEQ ID NO: 132135 - DNA, 72 bp, Homo sapiens
ctaacgtgcccattccctcggcttgagggctctgcctacctcctaagttgtacaacaaacttaaatctgaga

SEQ ID NO: 132136 - DNA, 73 bp, Homo sapiens
attccctcggcttgagggctctgcctacctcctaagttgtacaacaaacttaaatctgagagctgttttcaga

SEQ ID NO: 132137 - DNA, 73 bp, Homo sapiens
cttgagggctctgcctacctcctaagttgtacaacaaacttaaatctgagagctgttttcagaaacacctcag

SEQ ID NO: 132138 - DNA, 73 bp, Homo sapiens
tctgcctacctcctaagttgtacaacaaacttaaatctgagagctgttttcagaaacacctcaggctggccgg

SEQ ID NO: 132139 - DNA, 73 bp, Homo sapiens
tcctaagttgtacaacaaacttaaatctgagagctgttttcagaaacacctcaggctggccgggcgtggaggc

SEQ ID NO: 132140 - DNA, 70 bp, Homo sapiens
aaaaaaaagacatggagtggagggtgaggagtgggattagtgggagtcagcaggatgacggggtgttggg

SEQ ID NO: 132141 - DNA, 75 bp, Homo sapiens
atggagtggagggtgaggagtgggattagtgggagtcagcaggatgacggggtgttggggcggcagaggatgttg

SEQ ID NO: 132142 - DNA, 75 bp, Homo sapiens
gggtgaggagtgggattagtgggagtcagcaggatgacggggtgttggggcggcagaggatgttggagattacaa

SEQ ID NO: 132143 - DNA, 73 bp, Homo sapiens
aggagtgggattagtgggagtcagcaggatgacggggtgttggggcggcagaggatgttggagattacaaaag

SEQ ID NO: 132144 - DNA, 72 bp, Homo sapiens
ttagtgggagtcagcaggatgacggggtgttggggcggcagaggatgttggagattacaaaaggagtcgggg

SEQ ID NO: 132145 - DNA, 71 bp, Homo sapiens
agcaggatgacggggtgttggggcggcagaggatgttggagattacaaaaggagtcgggggacacagggta

SEQ ID NO: 132146 - DNA, 70 bp, Homo sapiens
gggtgttggggcggcagaggatgttggagattacaaaaggagtcgggggacacagggtagtggtgaggga

SEQ ID NO: 132147 - DNA, 70 bp, Homo sapiens
cggcagaggatgttggagattacaaaaggagtcgggggacacagggtagtggtgagggagggttactcac

SEQ ID NO: 132148 - DNA, 68 bp, Homo sapiens
atgttggagattacaaaaggagtcgggggacacagggtagtggtgagggagggttactcactaggtag

SEQ ID NO: 132149 - DNA, 66 bp, Homo sapiens
attacaaaaggagtcgggggacacagggtagtggtgagggagggttactcactaggtaggggtctg

SEQ ID NO: 132150 - DNA, 66 bp, Homo sapiens
aaggagtcgggggacacagggtagtggtgagggagggttactcactaggtaggggtctggcaaaaa

SEQ ID NO: 132151 - DNA, 64 bp, Homo sapiens
aaaaaaaaaagagcctcgtttttgggaacaccagaccctatccatgtaccaacagggacgtaaa

SEQ ID NO: 132152 - DNA, 68 bp, Homo sapiens
aaaaagagcctcgtttttgggaacaccagaccctatccatgtaccaacagggacgtaaatgaggagga

SEQ ID NO: 132153 - DNA, 70 bp, Homo sapiens
tttttgggaacaccagaccctatccatgtaccaacagggacgtaaatgaggaggaaattcacacctgaaa

SEQ ID NO: 132154 - DNA, 71 bp, Homo sapiens
aacaccagaccctatccatgtaccaacagggacgtaaatgaggaggaaattcacacctgaaactattccca

SEQ ID NO: 132155 - DNA, 74 bp, Homo sapiens
tatccatgtaccaacagggacgtaaatgaggaggaaattcacacctgaaactattcccagtcctcaacattctc

SEQ ID NO: 132156 - DNA, 74 bp, Homo sapiens
aacagggacgtaaatgaggaggaaattcacacctgaaactattcccagtcctcaacattctctctcataatcta

SEQ ID NO: 132157 - DNA, 76 bp, Homo sapiens
taaatgaggaggaaattcacacctgaaactattcccagtcctcaacattctctctcataatctaagcatttcttac

SEQ ID NO: 132158 - DNA, 74 bp, Homo sapiens
aggaaattcacacctgaaactattcccagtcctcaacattctctctcataatctaagcatttcttacctacttc

SEQ ID NO: 132159 - DNA, 74 bp, Homo sapiens
acctgaaactattcccagtcctcaacattctctctcataatctaagcatttcttacctacttccttctctagaa

SEQ ID NO: 132160 - DNA, 73 bp, Homo sapiens
aaactattcccagtcctcaacattctctctcataatctaagcatttcttacctacttccttctctagaaaagc

SEQ ID NO: 132161 - DNA, 76 bp, Homo sapiens
agtcctcaacattctctctcataatctaagcatttcttacctacttccttctctagaaaagctgataacaagacta

SEQ ID NO: 132162 - DNA, 79 bp, Homo sapiens
ttctctctcataatctaagcatttcttacctacttccttctctagaaaagctgataacaagactatgtccatagctgaa

SEQ ID NO: 132163 - DNA, 76 bp, Homo sapiens
ataatctaagcatttcttacctacttccttctctagaaaagctgataacaagactatgtccatagctgaaggtgga

SEQ ID NO: 132164 - DNA, 75 bp, Homo sapiens
atttcttacctacttccttctctagaaaagctgataacaagactatgtccatagctgaaggtggatcttggtata

SEQ ID NO: 132165 - DNA, 78 bp, Homo sapiens
ttccttctctagaaaagctgataacaagactatgtccatagctgaaggtggatcttggtatatgggaaaatgcaatat

SEQ ID NO: 132166 - DNA, 81 bp, Homo sapiens
tctagaaaagctgataacaagactatgtccatagctgaaggtggatcttggtatatgggaaaatgcaatattctcatagaa

SEQ ID NO: 132167 - DNA, 80 bp, Homo sapiens
ataacaagactatgtccatagctgaaggtggatcttggtatatgggaaaatgcaatattctcatagaagcaggtcatttc

SEQ ID NO: 132168 - DNA, 80 bp, Homo sapiens
aagactatgtccatagctgaaggtggatcttggtatatgggaaaatgcaatattctcatagaagcaggtcatttctattc

SEQ ID NO: 132169 - DNA, 78 bp, Homo sapiens
atagctgaaggtggatcttggtatatgggaaaatgcaatattctcatagaagcaggtcatttctattcccacaggaaa

SEQ ID NO: 132170 - DNA, 78 bp, Homo sapiens
tggatcttggtatatgggaaaatgcaatattctcatagaagcaggtcatttctattcccacaggaaaggcaattattc

SEQ ID NO: 132171 - DNA, 80 bp, Homo sapiens
tatatgggaaaatgcaatattctcatagaagcaggtcatttctattcccacaggaaaggcaattattctcacttcacaga

SEQ ID NO: 132172 - DNA, 80 bp, Homo sapiens
aaaatgcaatattctcatagaagcaggtcatttctattcccacaggaaaggcaattattctcacttcacagacacagaga

SEQ ID NO: 132173 - DNA, 78 bp, Homo sapiens
tctcatagaagcaggtcatttctattcccacaggaaaggcaattattctcacttcacagacacagagaacaacccaaa

SEQ ID NO: 132174 - DNA, 74 bp, Homo sapiens
aggtcatttctattcccacaggaaaggcaattattctcacttcacagacacagagaacaacccaaagtatacaa

SEQ ID NO: 132175 - DNA, 75 bp, Homo sapiens
ttctattcccacaggaaaggcaattattctcacttcacagacacagagaacaacccaaagtatacaattagatat

SEQ ID NO: 132176 - DNA, 74 bp, Homo sapiens
ggaaaggcaattattctcacttcacagacacagagaacaacccaaagtatacaattagatattcaggacaattt

SEQ ID NO: 132177 - DNA, 73 bp, Homo sapiens
acagagaacaacccaaagtatacaattagatattcaggacaattttagaatccgggctcctgacagaatggga

SEQ ID NO: 132178 - DNA, 71 bp, Homo sapiens
acccaaagtatacaattagatattcaggacaattttagaatccgggctcctgacagaatgggagtgttgtt

SEQ ID NO: 132179 - DNA, 73 bp, Homo sapiens
agtatacaattagatattcaggacaattttagaatccgggctcctgacagaatgggagtgttgtttcaaactc

SEQ ID NO: 132180 - DNA, 75 bp, Homo sapiens
tagatattcaggacaattttagaatccgggctcctgacagaatgggagtgttgtttcaaactccatgcccagaat

SEQ ID NO: 132181 - DNA, 73 bp, Homo sapiens
agaatccgggctcctgacagaatgggagtgttgtttcaaactccatgcccagaattccaacaggttttcaata

SEQ ID NO: 132182 - DNA, 72 bp, Homo sapiens
aatgggagtgttgtttcaaactccatgcccagaattccaacaggttttcaatagagcggtatctatttcagt

SEQ ID NO: 132183 - DNA, 75 bp, Homo sapiens
ttgtttcaaactccatgcccagaattccaacaggttttcaatagagcggtatctatttcagtttgtcagactctc

SEQ ID NO: 132184 - DNA, 80 bp, Homo sapiens
ctccatgcccagaattccaacaggttttcaatagagcggtatctatttcagtttgtcagactctctctctcatatacaca

SEQ ID NO: 132185 - DNA, 81 bp, Homo sapiens
aattccaacaggttttcaatagagcggtatctatttcagtttgtcagactctctctctcatatacacatgcacacactgta

SEQ ID NO: 132186 - DNA, 80 bp, Homo sapiens
aggttttcaatagagcggtatctatttcagtttgtcagactctctctctcatatacacatgcacacactgtactttacaa

SEQ ID NO: 132187 - DNA, 84 bp, Homo sapiens
atagagcggtatctatttcagtttgtcagactctctctctcatatacacatgcacacactgtactttacaactggctgtcttca

SEQ ID NO: 132188 - DNA, 83 bp, Homo sapiens
atctatttcagtttgtcagactctctctctcatatacacatgcacacactgtactttacaactggctgtcttcattcattcct

SEQ ID NO: 132189 - DNA, 81 bp, Homo sapiens
acacatgcacacactgtactttacaactggctgtcttcattcattccttcattcagtgccaggcactggggacgggactga

SEQ ID NO: 132190 - DNA, 76 bp, Homo sapiens
acactgtactttacaactggctgtcttcattcattccttcattcagtgccaggcactggggacgggactgataaaa

SEQ ID NO: 132191 - DNA, 78 bp, Homo sapiens
tactttacaactggctgtcttcattcattccttcattcagtgccaggcactggggacgggactgataaaatatacaca

SEQ ID NO: 132192 - DNA, 85 bp, Homo sapiens
atatacacacatgaatgatactttctcaaggagatcatagtctagcaggagatacaagcatataagcagataaccgcaataacca

SEQ ID NO: 132193 - DNA, 84 bp, Homo sapiens
atgaatgatactttctcaaggagatcatagtctagcaggagatacaagcatataagcagataaccgcaataaccaaagcatcat

SEQ ID NO: 132194 - DNA, 82 bp, Homo sapiens
tactttctcaaggagatcatagtctagcaggagatacaagcatataagcagataaccgcaataaccaaagcatcatttgtct

SEQ ID NO: 132195 - DNA, 81 bp, Homo sapiens
aaggagatcatagtctagcaggagatacaagcatataagcagataaccgcaataaccaaagcatcatttgtctttttgaga

SEQ ID NO: 132196 - DNA, 77 bp, Homo sapiens
atagtctagcaggagatacaagcatataagcagataaccgcaataaccaaagcatcatttgtctttttgagacgggg

SEQ ID NO: 132197 - DNA, 74 bp, Homo sapiens
cgcgcctggcccatttgtcttaacaacatagaatattacaagaaatgctaagtaaggagactaatagataaatc

SEQ ID NO: 132198 - DNA, 73 bp, Homo sapiens
ctggcccatttgtcttaacaacatagaatattacaagaaatgctaagtaaggagactaatagataaatcctat

SEQ ID NO: 132199 - DNA, 75 bp, Homo sapiens
taacaacatagaatattacaagaaatgctaagtaaggagactaatagataaatcctattaaacaatgatctccag

SEQ ID NO: 132200 - DNA, 75 bp, Homo sapiens
catagaatattacaagaaatgctaagtaaggagactaatagataaatcctattaaacaatgatctccagtagccc

SEQ ID NO: 132201 - DNA, 74 bp, Homo sapiens
aagaaatgctaagtaaggagactaatagataaatcctattaaacaatgatctccagtagcccctgctactacag

SEQ ID NO: 132202 - DNA, 74 bp, Homo sapiens
ctaagtaaggagactaatagataaatcctattaaacaatgatctccagtagcccctgctactacaggaaagaca

SEQ ID NO: 132203 - DNA, 72 bp, Homo sapiens
actaatagataaatcctattaaacaatgatctccagtagcccctgctactacaggaaagacaggaaaaagaa

SEQ ID NO: 132204 - DNA, 72 bp, Homo sapiens
agataaatcctattaaacaatgatctccagtagcccctgctactacaggaaagacaggaaaaagaaagcagg

SEQ ID NO: 132205 - DNA, 78 bp, Homo sapiens
tattaaacaatgatctccagtagcccctgctactacaggaaagacaggaaaaagaaagcagggcactcaatctgtgca

SEQ ID NO: 132206 - DNA, 77 bp, Homo sapiens
atctccagtagcccctgctactacaggaaagacaggaaaaagaaagcagggcactcaatctgtgcactgcttttaga

SEQ ID NO: 132207 - DNA, 76 bp, Homo sapiens
cctgctactacaggaaagacaggaaaaagaaagcagggcactcaatctgtgcactgcttttagaccctgaacatac

SEQ ID NO: 132208 - DNA, 76 bp, Homo sapiens
tactacaggaaagacaggaaaaagaaagcagggcactcaatctgtgcactgcttttagaccctgaacatactacag

SEQ ID NO: 132209 - DNA, 77 bp, Homo sapiens
aggaaaaagaaagcagggcactcaatctgtgcactgcttttagaccctgaacatactacaggtcctgagaagtagca

SEQ ID NO: 132210 - DNA, 80 bp, Homo sapiens
aaagaaagcagggcactcaatctgtgcactgcttttagaccctgaacatactacaggtcctgagaagtagcattatgctc

SEQ ID NO: 132211 - DNA, 83 bp, Homo sapiens
actcaatctgtgcactgcttttagaccctgaacatactacaggtcctgagaagtagcattatgctctcagaattagtgctgta

SEQ ID NO: 132212 - DNA, 78 bp, Homo sapiens
ttttagaccctgaacatactacaggtcctgagaagtagcattatgctctcagaattagtgctgtaattacagttagta

SEQ ID NO: 132213 - DNA, 81 bp, Homo sapiens
agaagtagcattatgctctcagaattagtgctgtaattacagttagtagcccatgtgtcagcactgaattgctctttattt

SEQ ID NO: 132214 - DNA, 81 bp, Homo sapiens
attatgctctcagaattagtgctgtaattacagttagtagcccatgtgtcagcactgaattgctctttattttgtgtatgg

SEQ ID NO: 132215 - DNA, 75 bp, Homo sapiens
attagtgctgtaattacagttagtagcccatgtgtcagcactgaattgctctttattttgtgtatgggtacgttt

SEQ ID NO: 132216 - DNA, 76 bp, Homo sapiens
taattacagttagtagcccatgtgtcagcactgaattgctctttattttgtgtatgggtacgttttggcagcccaa

SEQ ID NO: 132217 - DNA, 73 bp, Homo sapiens
agttagtagcccatgtgtcagcactgaattgctctttattttgtgtatgggtacgttttggcagcccaaattt

SEQ ID NO: 132218 - DNA, 76 bp, Homo sapiens
tgtgtcagcactgaattgctctttattttgtgtatgggtacgttttggcagcccaaattttggctgttcaatgcct

SEQ ID NO: 132219 - DNA, 72 bp, Homo sapiens
actgaattgctctttattttgtgtatgggtacgttttggcagcccaaattttggctgttcaatgccttgagg

SEQ ID NO: 132220 - DNA, 73 bp, Homo sapiens
ctctttattttgtgtatgggtacgttttggcagcccaaattttggctgttcaatgccttgagggcagatacca

SEQ ID NO: 132221 - DNA, 74 bp, Homo sapiens
tacgttttggcagcccaaattttggctgttcaatgccttgagggcagataccatgcctcttacttctttaatct

SEQ ID NO: 132222 - DNA, 76 bp, Homo sapiens
agcccaaattttggctgttcaatgccttgagggcagataccatgcctcttacttctttaatcttggtagcatctag

SEQ ID NO: 132223 - DNA, 76 bp, Homo sapiens
aattttggctgttcaatgccttgagggcagataccatgcctcttacttctttaatcttggtagcatctaggactac

SEQ ID NO: 132224 - DNA, 75 bp, Homo sapiens
gggcagataccatgcctcttacttctttaatcttggtagcatctaggactaccctaggcacaaagtagacactaa

SEQ ID NO: 132225 - DNA, 75 bp, Homo sapiens
cttctttaatcttggtagcatctaggactaccctaggcacaaagtagacactaagtatatgatgtccttggtgaa

SEQ ID NO: 132226 - DNA, 75 bp, Homo sapiens
atctaggactaccctaggcacaaagtagacactaagtatatgatgtccttggtgaaagggacaagtagatgagaa

SEQ ID NO: 132227 - DNA, 73 bp, Homo sapiens
actaccctaggcacaaagtagacactaagtatatgatgtccttggtgaaagggacaagtagatgagaaactgg

SEQ ID NO: 132228 - DNA, 75 bp, Homo sapiens
actaagtatatgatgtccttggtgaaagggacaagtagatgagaaactgggtagctatcttgtttctccacagta

SEQ ID NO: 132229 - DNA, 77 bp, Homo sapiens
tatatgatgtccttggtgaaagggacaagtagatgagaaactgggtagctatcttgtttctccacagtatggactgg

SEQ ID NO: 132230 - DNA, 73 bp, Homo sapiens
ttggtgaaagggacaagtagatgagaaactgggtagctatcttgtttctccacagtatggactgggaggtttg

SEQ ID NO: 132231 - DNA, 74 bp, Homo sapiens
caagtagatgagaaactgggtagctatcttgtttctccacagtatggactgggaggtttggagtgtattgtaaa

SEQ ID NO: 132232 - DNA, 76 bp, Homo sapiens
atgagaaactgggtagctatcttgtttctccacagtatggactgggaggtttggagtgtattgtaaagcacagcat

SEQ ID NO: 132233 - DNA, 80 bp, Homo sapiens
tagctatcttgtttctccacagtatggactgggaggtttggagtgtattgtaaagcacagcattgccctacctgatcaca

SEQ ID NO: 132234 - DNA, 81 bp, Homo sapiens
ttgtttctccacagtatggactgggaggtttggagtgtattgtaaagcacagcattgccctacctgatcacattgctgata

SEQ ID NO: 132235 - DNA, 81 bp, Homo sapiens
acagtatggactgggaggtttggagtgtattgtaaagcacagcattgccctacctgatcacattgctgatacaatgaacaa

SEQ ID NO: 132236 - DNA, 80 bp, Homo sapiens
tttggagtgtattgtaaagcacagcattgccctacctgatcacattgctgatacaatgaacaagccacctaacactttaa

SEQ ID NO: 132237 - DNA, 79 bp, Homo sapiens
tattgtaaagcacagcattgccctacctgatcacattgctgatacaatgaacaagccacctaacactttaagaactggg

SEQ ID NO: 132238 - DNA, 77 bp, Homo sapiens
acagcattgccctacctgatcacattgctgatacaatgaacaagccacctaacactttaagaactgggggtagagag

SEQ ID NO: 132239 - DNA, 77 bp, Homo sapiens
tacctgatcacattgctgatacaatgaacaagccacctaacactttaagaactgggggtagagagtccttcactgga

SEQ ID NO: 132240 - DNA, 74 bp, Homo sapiens
attgctgatacaatgaacaagccacctaacactttaagaactgggggtagagagtccttcactggagggccaca

SEQ ID NO: 132241 - DNA, 72 bp, Homo sapiens
atacaatgaacaagccacctaacactttaagaactgggggtagagagtccttcactggagggccacagaaga

SEQ ID NO: 132242 - DNA, 73 bp, Homo sapiens
aagccacctaacactttaagaactgggggtagagagtccttcactggagggccacagaagacagcataatgta

SEQ ID NO: 132243 - DNA, 76 bp, Homo sapiens
agaactgggggtagagagtccttcactggagggccacagaagacagcataatgtaggtaaatagtctggcagtgaa

SEQ ID NO: 132244 - DNA, 77 bp, Homo sapiens
agagtccttcactggagggccacagaagacagcataatgtaggtaaatagtctggcagtgaactgcagtaaacaaaa

SEQ ID NO: 132245 - DNA, 74 bp, Homo sapiens
acagaagacagcataatgtaggtaaatagtctggcagtgaactgcagtaaacaaaaagattaatttgggactta

SEQ ID NO: 132246 - DNA, 74 bp, Homo sapiens
agacagcataatgtaggtaaatagtctggcagtgaactgcagtaaacaaaaagattaatttgggacttaagctc

SEQ ID NO: 132247 - DNA, 71 bp, Homo sapiens
atgtaggtaaatagtctggcagtgaactgcagtaaacaaaaagattaatttgggacttaagctccctgggc

SEQ ID NO: 132248 - DNA, 74 bp, Homo sapiens
tagtctggcagtgaactgcagtaaacaaaaagattaatttgggacttaagctccctgggctgatgtttaggata

SEQ ID NO: 132249 - DNA, 71 bp, Homo sapiens
agtgaactgcagtaaacaaaaagattaatttgggacttaagctccctgggctgatgtttaggatagaaata

SEQ ID NO: 132250 - DNA, 68 bp, Homo sapiens
gtaaacaaaaagattaatttgggacttaagctccctgggctgatgtttaggatagaaatagaccccaa

SEQ ID NO: 132251 - DNA, 69 bp, Homo sapiens
aagattaatttgggacttaagctccctgggctgatgtttaggatagaaatagaccccaagccgggcaag

SEQ ID NO: 132252 - DNA, 63 bp, Homo sapiens
aaaaaaaagttaaaagaaatagaccccaggcttcttacacttgttataaggttctcttagaaa

SEQ ID NO: 132253 - DNA, 69 bp, Homo sapiens
taaaagaaatagaccccaggcttcttacacttgttataaggttctcttagaaatggaccctatcactat

SEQ ID NO: 132254 - DNA, 70 bp, Homo sapiens
aaatagaccccaggcttcttacacttgttataaggttctcttagaaatggaccctatcactattgtggta

SEQ ID NO: 132255 - DNA, 73 bp, Homo sapiens
cttcttacacttgttataaggttctcttagaaatggaccctatcactattgtggtaggtccattctgacttgc

SEQ ID NO: 132256 - DNA, 71 bp, Homo sapiens
acttgttataaggttctcttagaaatggaccctatcactattgtggtaggtccattctgacttgcttaaaa

SEQ ID NO: 132257 - DNA, 72 bp, Homo sapiens
ataaggttctcttagaaatggaccctatcactattgtggtaggtccattctgacttgcttaaaagccttcaa

SEQ ID NO: 132258 - DNA, 73 bp, Homo sapiens
cttagaaatggaccctatcactattgtggtaggtccattctgacttgcttaaaagccttcaatggcttcccat

SEQ ID NO: 132259 - DNA, 74 bp, Homo sapiens
tatcactattgtggtaggtccattctgacttgcttaaaagccttcaatggcttcccattgcacttaaaaccaaa

SEQ ID NO: 132260 - DNA, 73 bp, Homo sapiens
ctattgtggtaggtccattctgacttgcttaaaagccttcaatggcttcccattgcacttaaaaccaaatcca

SEQ ID NO: 132261 - DNA, 74 bp, Homo sapiens
aggtccattctgacttgcttaaaagccttcaatggcttcccattgcacttaaaaccaaatccagctgggcatgg

SEQ ID NO: 132262 - DNA, 72 bp, Homo sapiens
attaaaattaaaagccaaatccacctcctccatgtgggtgataatgccctggctctagccctgcccacctta

SEQ ID NO: 132263 - DNA, 73 bp, Homo sapiens
attaaaagccaaatccacctcctccatgtgggtgataatgccctggctctagccctgcccaccttacccatct

SEQ ID NO: 132264 - DNA, 74 bp, Homo sapiens
aatccacctcctccatgtgggtgataatgccctggctctagccctgcccaccttacccatcttcacttgcccct

SEQ ID NO: 132265 - DNA, 78 bp, Homo sapiens
tcctccatgtgggtgataatgccctggctctagccctgcccaccttacccatcttcacttgccccttctctctctcca

SEQ ID NO: 132266 - DNA, 76 bp, Homo sapiens
gggtgataatgccctggctctagccctgcccaccttacccatcttcacttgccccttctctctctccaccatgccc

SEQ ID NO: 132267 - DNA, 77 bp, Homo sapiens
ataatgccctggctctagccctgcccaccttacccatcttcacttgccccttctctctctccaccatgccccagcca

SEQ ID NO: 132268 - DNA, 78 bp, Homo sapiens
tggctctagccctgcccaccttacccatcttcacttgccccttctctctctccaccatgccccagccacactggctta

SEQ ID NO: 132269 - DNA, 77 bp, Homo sapiens
tagccctgcccaccttacccatcttcacttgccccttctctctctccaccatgccccagccacactggcttacttga

SEQ ID NO: 132270 - DNA, 79 bp, Homo sapiens
ctgcccaccttacccatcttcacttgccccttctctctctccaccatgccccagccacactggcttacttgatgatctc

SEQ ID NO: 132271 - DNA, 78 bp, Homo sapiens
caccttacccatcttcacttgccccttctctctctccaccatgccccagccacactggcttacttgatgatctccaaa

SEQ ID NO: 132272 - DNA, 77 bp, Homo sapiens
accttacccatcttcacttgccccttctctctctccaccatgccccagccacactggcttacttgatgatctccaaa

SEQ ID NO: 132273 - DNA, 78 bp, Homo sapiens
atcttcacttgccccttctctctctccaccatgccccagccacactggcttacttgatgatctccaaacacaccaact

SEQ ID NO: 132274 - DNA, 80 bp, Homo sapiens
ccttctctctctccaccatgccccagccacactggcttacttgatgatctccaaacacaccaacttctggcctgcaccag

SEQ ID NO: 132275 - DNA, 82 bp, Homo sapiens
tctctccaccatgccccagccacactggcttacttgatgatctccaaacacaccaacttctggcctgcaccaggcccagaca

SEQ ID NO: 132276 - DNA, 79 bp, Homo sapiens
atgccccagccacactggcttacttgatgatctccaaacacaccaacttctggcctgcaccaggcccagacacttgctt

SEQ ID NO: 132277 - DNA, 77 bp, Homo sapiens
agccacactggcttacttgatgatctccaaacacaccaacttctggcctgcaccaggcccagacacttgctttttct

SEQ ID NO: 132278 - DNA, 78 bp, Homo sapiens
cttacttgatgatctccaaacacaccaacttctggcctgcaccaggcccagacacttgctttttcttctctctgagcc

SEQ ID NO: 132279 - DNA, 75 bp, Homo sapiens
aaacacaccaacttctggcctgcaccaggcccagacacttgctttttcttctctctgagccctcttcctgctttc

SEQ ID NO: 132280 - DNA, 82 bp, Homo sapiens
acacttgctttttcttctctctgagccctcttcctgctttctgaatggccagcttcatctgatcctttagatctcagctcaa

SEQ ID NO: 132281 - DNA, 81 bp, Homo sapiens
tttttcttctctctgagccctcttcctgctttctgaatggccagcttcatctgatcctttagatctcagctcaaatctttc

SEQ ID NO: 132282 - DNA, 84 bp, Homo sapiens
tctctgagccctcttcctgctttctgaatggccagcttcatctgatcctttagatctcagctcaaatctttcctcttcagtgag

SEQ ID NO: 132283 - DNA, 82 bp, Homo sapiens
tcctgctttctgaatggccagcttcatctgatcctttagatctcagctcaaatctttcctcttcagtgaggcctttcttgaa

SEQ ID NO: 132284 - DNA, 82 bp, Homo sapiens
ttctgaatggccagcttcatctgatcctttagatctcagctcaaatctttcctcttcagtgaggcctttcttgaacatctta

SEQ ID NO: 132285 - DNA, 80 bp, Homo sapiens
agcttcatctgatcctttagatctcagctcaaatctttcctcttcagtgaggcctttcttgaacatcttattcgaagtga

SEQ ID NO: 132286 - DNA, 78 bp, Homo sapiens
tctcagctcaaatctttcctcttcagtgaggcctttcttgaacatcttattcgaagtgactccatcttattcctatta

SEQ ID NO: 132287 - DNA, 73 bp, Homo sapiens
aatctttcctcttcagtgaggcctttcttgaacatcttattcgaagtgactccatcttattcctattacttat

SEQ ID NO: 132288 - DNA, 74 bp, Homo sapiens
cttcagtgaggcctttcttgaacatcttattcgaagtgactccatcttattcctattacttattaacacaccaa

SEQ ID NO: 132289 - DNA, 75 bp, Homo sapiens
tgaggcctttcttgaacatcttattcgaagtgactccatcttattcctattacttattaacacaccaatcagtta

SEQ ID NO: 132290 - DNA, 72 bp, Homo sapiens
cttgaacatcttattcgaagtgactccatcttattcctattacttattaacacaccaatcagttaatttact

SEQ ID NO: 132291 - DNA, 73 bp, Homo sapiens
tcgaagtgactccatcttattcctattacttattaacacaccaatcagttaatttacttgatagtacttacca

SEQ ID NO: 132292 - DNA, 71 bp, Homo sapiens
tcctattacttattaacacaccaatcagttaatttacttgatagtacttaccaggctctgaacttaccaac

SEQ ID NO: 132293 - DNA, 73 bp, Homo sapiens
acttattaacacaccaatcagttaatttacttgatagtacttaccaggctctgaacttaccaactgcatttca

SEQ ID NO: 132294 - DNA, 74 bp, Homo sapiens
acacaccaatcagttaatttacttgatagtacttaccaggctctgaacttaccaactgcatttcaaggtgatcc

SEQ ID NO: 132295 - DNA, 74 bp, Homo sapiens
ttaatttacttgatagtacttaccaggctctgaacttaccaactgcatttcaaggtgatccctgctctgaaatt

SEQ ID NO: 132296 - DNA, 77 bp, Homo sapiens
ttgatagtacttaccaggctctgaacttaccaactgcatttcaaggtgatccctgctctgaaatttcttgtctacta

SEQ ID NO: 132297 - DNA, 75 bp, Homo sapiens
cttaccaggctctgaacttaccaactgcatttcaaggtgatccctgctctgaaatttcttgtctactactagtct

SEQ ID NO: 132298 - DNA, 73 bp, Homo sapiens
aacttaccaactgcatttcaaggtgatccctgctctgaaatttcttgtctactactagtcttgcccttctaaa

SEQ ID NO: 132299 - DNA, 77 bp, Homo sapiens
tttcaaggtgatccctgctctgaaatttcttgtctactactagtcttgcccttctaaatataaatcacctgagagca

SEQ ID NO: 132300 - DNA, 78 bp, Homo sapiens
tgctctgaaatttcttgtctactactagtcttgcccttctaaatataaatcacctgagagcaagagctggatttatct

SEQ ID NO: 132301 - DNA, 78 bp, Homo sapiens
aaatttcttgtctactactagtcttgcccttctaaatataaatcacctgagagcaagagctggatttatcttgctgca

SEQ ID NO: 132302 - DNA, 83 bp, Homo sapiens
tactactagtcttgcccttctaaatataaatcacctgagagcaagagctggatttatcttgctgcatcaactatcacatatta

SEQ ID NO: 132303 - DNA, 82 bp, Homo sapiens
ttgcccttctaaatataaatcacctgagagcaagagctggatttatcttgctgcatcaactatcacatattaggtactcaaa

SEQ ID NO: 132304 - DNA, 82 bp, Homo sapiens
taaatataaatcacctgagagcaagagctggatttatcttgctgcatcaactatcacatattaggtactcaaagattttgaa

SEQ ID NO: 132305 - DNA, 84 bp, Homo sapiens
taaatcacctgagagcaagagctggatttatcttgctgcatcaactatcacatattaggtactcaaagattttgaatgaatgaa

SEQ ID NO: 132306 - DNA, 81 bp, Homo sapiens
gaatgaatgaatgagagctaggaaaatatggtagcagtcagccagcagacaatgagttaaagtgaaaaacatcagttctcc

SEQ ID NO: 132307 - DNA, 79 bp, Homo sapiens
aatgaatgagagctaggaaaatatggtagcagtcagccagcagacaatgagttaaagtgaaaaacatcagttctcccac

SEQ ID NO: 132308 - DNA, 81 bp, Homo sapiens
atatggtagcagtcagccagcagacaatgagttaaagtgaaaaacatcagttctcccaccatgaagccagaagttgtatga

SEQ ID NO: 132309 - DNA, 75 bp, Homo sapiens
agccagcagacaatgagttaaagtgaaaaacatcagttctcccaccatgaagccagaagttgtatgattgttttt

SEQ ID NO: 132310 - DNA, 73 bp, Homo sapiens
agacaatgagttaaagtgaaaaacatcagttctcccaccatgaagccagaagttgtatgattgttttttgact

SEQ ID NO: 132311 - DNA, 74 bp, Homo sapiens
ttaaagtgaaaaacatcagttctcccaccatgaagccagaagttgtatgattgttttttgacttacagtgtatc

SEQ ID NO: 132312 - DNA, 77 bp, Homo sapiens
atcagttctcccaccatgaagccagaagttgtatgattgttttttgacttacagtgtatccaagtagtgataacata

SEQ ID NO: 132313 - DNA, 76 bp, Homo sapiens
ttctcccaccatgaagccagaagttgtatgattgttttttgacttacagtgtatccaagtagtgataacatacaaa

SEQ ID NO: 132314 - DNA, 75 bp, Homo sapiens
gaagccagaagttgtatgattgttttttgacttacagtgtatccaagtagtgataacatacaaacagaaaagaga

SEQ ID NO: 132315 - DNA, 78 bp, Homo sapiens
tgtatgattgttttttgacttacagtgtatccaagtagtgataacatacaaacagaaaagagagcctatgttctctgc

SEQ ID NO: 132316 - DNA, 78 bp, Homo sapiens
tttttgacttacagtgtatccaagtagtgataacatacaaacagaaaagagagcctatgttctctgctgatgatttaa

SEQ ID NO: 132317 - DNA, 77 bp, Homo sapiens
gacttacagtgtatccaagtagtgataacatacaaacagaaaagagagcctatgttctctgctgatgatttaaaaaa

SEQ ID NO: 132318 - DNA, 75 bp, Homo sapiens
gtatccaagtagtgataacatacaaacagaaaagagagcctatgttctctgctgatgatttaaaaaagaaaggtc

SEQ ID NO: 132319 - DNA, 75 bp, Homo sapiens
gtgataacatacaaacagaaaagagagcctatgttctctgctgatgatttaaaaaagaaaggtccgaaagatcaa

SEQ ID NO: 132320 - DNA, 74 bp, Homo sapiens
agagcctatgttctctgctgatgatttaaaaaagaaaggtccgaaagatcaaaacctcaccagctccagtttca

SEQ ID NO: 132321 - DNA, 70 bp, Homo sapiens
atgatttaaaaaagaaaggtccgaaagatcaaaacctcaccagctccagtttcagctccgtttataatgc

SEQ ID NO: 132322 - DNA, 72 bp, Homo sapiens
tccgaaagatcaaaacctcaccagctccagtttcagctccgtttataatgctgttggtattaaaggcaaatt

SEQ ID NO: 132323 - DNA, 69 bp, Homo sapiens
aaaacctcaccagctccagtttcagctccgtttataatgctgttggtattaaaggcaaatttccttact

SEQ ID NO: 132324 - DNA, 72 bp, Homo sapiens
agctccagtttcagctccgtttataatgctgttggtattaaaggcaaatttccttacttctaacagattcca

SEQ ID NO: 132325 - DNA, 66 bp, Homo sapiens
ccgtttataatgctgttggtattaaaggcaaatttccttacttctaacagattccaaggtttggtt

SEQ ID NO: 132326 - DNA, 66 bp, Homo sapiens
gctgttggtattaaaggcaaatttccttacttctaacagattccaaggtttggtttcatttttccc

SEQ ID NO: 132327 - DNA, 64 bp, Homo sapiens
aaaggcaaatttccttacttctaacagattccaaggtttggtttcatttttcccctaagggatg

SEQ ID NO: 132328 - DNA, 69 bp, Homo sapiens
acttctaacagattccaaggtttggtttcatttttcccctaagggatggacttctgcacccactgagcc

SEQ ID NO: 132329 - DNA, 70 bp, Homo sapiens
ttccaaggtttggtttcatttttcccctaagggatggacttctgcacccactgagcccggtgccgtgata

SEQ ID NO: 132330 - DNA, 75 bp, Homo sapiens
tttcatttttcccctaagggatggacttctgcacccactgagcccggtgccgtgatagcgccatcaacgactcta

SEQ ID NO: 132331 - DNA, 76 bp, Homo sapiens
tttttcccctaagggatggacttctgcacccactgagcccggtgccgtgatagcgccatcaacgactctactcagc

SEQ ID NO: 132332 - DNA, 81 bp, Homo sapiens
aagggatggacttctgcacccactgagcccggtgccgtgatagcgccatcaacgactctactcagccatgctcacgcccag

SEQ ID NO: 132333 - DNA, 84 bp, Homo sapiens
tgcacccactgagcccggtgccgtgatagcgccatcaacgactctactcagccatgctcacgcccaggccagccttagagtatc

SEQ ID NO: 132334 - DNA, 84 bp, Homo sapiens
agcccggtgccgtgatagcgccatcaacgactctactcagccatgctcacgcccaggccagccttagagtatctcaggatctca

SEQ ID NO: 132335 - DNA, 85 bp, Homo sapiens
cgtgatagcgccatcaacgactctactcagccatgctcacgcccaggccagccttagagtatctcaggatctcactctacataaa

SEQ ID NO: 132336 - DNA, 84 bp, Homo sapiens
tagcgccatcaacgactctactcagccatgctcacgcccaggccagccttagagtatctcaggatctcactctacataaaactg

SEQ ID NO: 132337 - DNA, 82 bp, Homo sapiens
ctctactcagccatgctcacgcccaggccagccttagagtatctcaggatctcactctacataaaactgtggttgattcaaa

SEQ ID NO: 132338 - DNA, 80 bp, Homo sapiens
agccatgctcacgcccaggccagccttagagtatctcaggatctcactctacataaaactgtggttgattcaaaatacca

SEQ ID NO: 132339 - DNA, 75 bp, Homo sapiens
acgcccaggccagccttagagtatctcaggatctcactctacataaaactgtggttgattcaaaataccagaaaa

SEQ ID NO: 132340 - DNA, 71 bp, Homo sapiens
atctcactctacataaaactgtggttgattcaaaataccagaaaagaggtttctcttcctaagaaccagaa

SEQ ID NO: 132341 - DNA, 70 bp, Homo sapiens
ctacataaaactgtggttgattcaaaataccagaaaagaggtttctcttcctaagaaccagaacatgaag

SEQ ID NO: 132342 - DNA, 73 bp, Homo sapiens
actgtggttgattcaaaataccagaaaagaggtttctcttcctaagaaccagaacatgaaggcaaagcatatg

SEQ ID NO: 132343 - DNA, 70 bp, Homo sapiens
aaaataccagaaaagaggtttctcttcctaagaaccagaacatgaaggcaaagcatatgggagaagtggt

SEQ ID NO: 132344 - DNA, 77 bp, Homo sapiens
ttctcttcctaagaaccagaacatgaaggcaaagcatatgggagaagtggttcttcctcacaatacaccaggctcaa

SEQ ID NO: 132345 - DNA, 78 bp, Homo sapiens
ctaagaaccagaacatgaaggcaaagcatatgggagaagtggttcttcctcacaatacaccaggctcaagatctgccc

SEQ ID NO: 132346 - DNA, 77 bp, Homo sapiens
aacatgaaggcaaagcatatgggagaagtggttcttcctcacaatacaccaggctcaagatctgcccctcctataaa

SEQ ID NO: 132347 - DNA, 74 bp, Homo sapiens
agaagtggttcttcctcacaatacaccaggctcaagatctgcccctcctataaagggaagtataacagagtgaa

SEQ ID NO: 132348 - DNA, 73 bp, Homo sapiens
tcttcctcacaatacaccaggctcaagatctgcccctcctataaagggaagtataacagagtgaaaactcttt

SEQ ID NO: 132349 - DNA, 70 bp, Homo sapiens
acaatacaccaggctcaagatctgcccctcctataaagggaagtataacagagtgaaaactcttttaaag

SEQ ID NO: 132350 - DNA, 70 bp, Homo sapiens
ctcaagatctgcccctcctataaagggaagtataacagagtgaaaactcttttaaaggtgcaattccaaa

SEQ ID NO: 132351 - DNA, 68 bp, Homo sapiens
atctgcccctcctataaagggaagtataacagagtgaaaactcttttaaaggtgcaattccaaagtaa

SEQ ID NO: 132352 - DNA, 66 bp, Homo sapiens
tcctataaagggaagtataacagagtgaaaactcttttaaaggtgcaattccaaagtaaaggaaaa

SEQ ID NO: 132353 - DNA, 68 bp, Homo sapiens
gaagtataacagagtgaaaactcttttaaaggtgcaattccaaagtaaaggaaaattcagtggcaccc

SEQ ID NO: 132354 - DNA, 65 bp, Homo sapiens
tttaaaggtgcaattccaaagtaaaggaaaattcagtggcaccctttacacctaatttaaaccag

SEQ ID NO: 132355 - DNA, 66 bp, Homo sapiens
aggtgcaattccaaagtaaaggaaaattcagtggcaccctttacacctaatttaaaccaggtttga

SEQ ID NO: 132356 - DNA, 64 bp, Homo sapiens
gtaaaggaaaattcagtggcaccctttacacctaatttaaaccaggtttgaccctttaaacaca

SEQ ID NO: 132357 - DNA, 65 bp, Homo sapiens
tggcaccctttacacctaatttaaaccaggtttgaccctttaaacacagtttgtttcactgaact

SEQ ID NO: 132358 - DNA, 66 bp, Homo sapiens
acacctaatttaaaccaggtttgaccctttaaacacagtttgtttcactgaacttgatcaattagt

SEQ ID NO: 132359 - DNA, 67 bp, Homo sapiens
aaaccaggtttgaccctttaaacacagtttgtttcactgaacttgatcaattagttatcttaactat

SEQ ID NO: 132360 - DNA, 73 bp, Homo sapiens
gaccctttaaacacagtttgtttcactgaacttgatcaattagttatcttaactatttagtgattgagctcta

SEQ ID NO: 132361 - DNA, 73 bp, Homo sapiens
cacagtttgtttcactgaacttgatcaattagttatcttaactatttagtgattgagctctaaacttggaaag

SEQ ID NO: 132362 - DNA, 75 bp, Homo sapiens
gtttcactgaacttgatcaattagttatcttaactatttagtgattgagctctaaacttggaaagtcatgagaaa

SEQ ID NO: 132363 - DNA, 75 bp, Homo sapiens
gaacttgatcaattagttatcttaactatttagtgattgagctctaaacttggaaagtcatgagaaagaagagag

SEQ ID NO: 132364 - DNA, 73 bp, Homo sapiens
caattagttatcttaactatttagtgattgagctctaaacttggaaagtcatgagaaagaagagagtggaaaa

SEQ ID NO: 132365 - DNA, 74 bp, Homo sapiens
ttagtgattgagctctaaacttggaaagtcatgagaaagaagagagtggaaaataaaacgcatcatccttgttt

SEQ ID NO: 132366 - DNA, 74 bp, Homo sapiens
ctctaaacttggaaagtcatgagaaagaagagagtggaaaataaaacgcatcatccttgttttatgttagatgc

SEQ ID NO: 132367 - DNA, 76 bp, Homo sapiens
aaagtcatgagaaagaagagagtggaaaataaaacgcatcatccttgttttatgttagatgcttcccatggcatac

SEQ ID NO: 132368 - DNA, 75 bp, Homo sapiens
aaagaagagagtggaaaataaaacgcatcatccttgttttatgttagatgcttcccatggcatactcggtgaaca

SEQ ID NO: 132369 - DNA, 78 bp, Homo sapiens
gtggaaaataaaacgcatcatccttgttttatgttagatgcttcccatggcatactcggtgaacacagccatgtccta

SEQ ID NO: 132370 - DNA, 76 bp, Homo sapiens
aaataaaacgcatcatccttgttttatgttagatgcttcccatggcatactcggtgaacacagccatgtcctaaaa

SEQ ID NO: 132371 - DNA, 78 bp, Homo sapiens
atcatccttgttttatgttagatgcttcccatggcatactcggtgaacacagccatgtcctaaaagcaatctaccaaa

SEQ ID NO: 132372 - DNA, 81 bp, Homo sapiens
gttttatgttagatgcttcccatggcatactcggtgaacacagccatgtcctaaaagcaatctaccaaatgctgagagaga

SEQ ID NO: 132373 - DNA, 82 bp, Homo sapiens
agatgcttcccatggcatactcggtgaacacagccatgtcctaaaagcaatctaccaaatgctgagagagagaggcacttac

SEQ ID NO: 132374 - DNA, 81 bp, Homo sapiens
catactcggtgaacacagccatgtcctaaaagcaatctaccaaatgctgagagagagaggcacttacgcggcatgatccct

SEQ ID NO: 132375 - DNA, 83 bp, Homo sapiens
tgaacacagccatgtcctaaaagcaatctaccaaatgctgagagagagaggcacttacgcggcatgatcccttggctcaccag

SEQ ID NO: 132376 - DNA, 77 bp, Homo sapiens
taaaagcaatctaccaaatgctgagagagagaggcacttacgcggcatgatcccttggctcaccagttcttcccggg

SEQ ID NO: 132377 - DNA, 79 bp, Homo sapiens
taccaaatgctgagagagagaggcacttacgcggcatgatcccttggctcaccagttcttcccgggtccggcgctgctg

SEQ ID NO: 132378 - DNA, 75 bp, Homo sapiens
agaggcacttacgcggcatgatcccttggctcaccagttcttcccgggtccggcgctgctggagtttcaactgta

SEQ ID NO: 132379 - DNA, 78 bp, Homo sapiens
acgcggcatgatcccttggctcaccagttcttcccgggtccggcgctgctggagtttcaactgtagcactgcagggca

SEQ ID NO: 132380 - DNA, 79 bp, Homo sapiens
atcccttggctcaccagttcttcccgggtccggcgctgctggagtttcaactgtagcactgcagggcagcagagagaga

SEQ ID NO: 132381 - DNA, 77 bp, Homo sapiens
agatcctggttcaaatcagggaatgcaataattctgtatctactcaccattcttccgctcactaagtggaggcaaat

SEQ ID NO: 132382 - DNA, 77 bp, Homo sapiens
ttcaaatcagggaatgcaataattctgtatctactcaccattcttccgctcactaagtggaggcaaattgggattcc

SEQ ID NO: 132383 - DNA, 77 bp, Homo sapiens
aatgcaataattctgtatctactcaccattcttccgctcactaagtggaggcaaattgggattcctgccagggtgga

SEQ ID NO: 132384 - DNA, 75 bp, Homo sapiens
aataattctgtatctactcaccattcttccgctcactaagtggaggcaaattgggattcctgccagggtggaggc

SEQ ID NO: 132385 - DNA, 76 bp, Homo sapiens
tatctactcaccattcttccgctcactaagtggaggcaaattgggattcctgccagggtggaggcctagggtcagc

SEQ ID NO: 132386 - DNA, 75 bp, Homo sapiens
attcttccgctcactaagtggaggcaaattgggattcctgccagggtggaggcctagggtcagctcgggctgcaa

SEQ ID NO: 132387 - DNA, 77 bp, Homo sapiens
actaagtggaggcaaattgggattcctgccagggtggaggcctagggtcagctcgggctgcaaggagagctcctgca

SEQ ID NO: 132388 - DNA, 80 bp, Homo sapiens
gcaaattgggattcctgccagggtggaggcctagggtcagctcgggctgcaaggagagctcctgcagttcattggcaaca

SEQ ID NO: 132389 - DNA, 81 bp, Homo sapiens
attcctgccagggtggaggcctagggtcagctcgggctgcaaggagagctcctgcagttcattggcaacagcttcactctg

SEQ ID NO: 132390 - DNA, 79 bp, Homo sapiens
agggtggaggcctagggtcagctcgggctgcaaggagagctcctgcagttcattggcaacagcttcactctggggactg

SEQ ID NO: 132391 - DNA, 82 bp, Homo sapiens
ctagggtcagctcgggctgcaaggagagctcctgcagttcattggcaacagcttcactctggggactgggtgccgcagataa

SEQ ID NO: 132392 - DNA, 82 bp, Homo sapiens
agctcgggctgcaaggagagctcctgcagttcattggcaacagcttcactctggggactgggtgccgcagataaggacacga

SEQ ID NO: 132393 - DNA, 81 bp, Homo sapiens
aaggagagctcctgcagttcattggcaacagcttcactctggggactgggtgccgcagataaggacacgagcactggttca

SEQ ID NO: 132394 - DNA, 82 bp, Homo sapiens
ctcctgcagttcattggcaacagcttcactctggggactgggtgccgcagataaggacacgagcactggttcatcatcattt

SEQ ID NO: 132395 - DNA, 80 bp, Homo sapiens
agttcattggcaacagcttcactctggggactgggtgccgcagataaggacacgagcactggttcatcatcattttcgcc

SEQ ID NO: 132396 - DNA, 77 bp, Homo sapiens
aacagcttcactctggggactgggtgccgcagataaggacacgagcactggttcatcatcattttcgccggcccctc

SEQ ID NO: 132397 - DNA, 75 bp, Homo sapiens
actctggggactgggtgccgcagataaggacacgagcactggttcatcatcattttcgccggcccctcctccgtc

SEQ ID NO: 132398 - DNA, 81 bp, Homo sapiens
gtgccgcagataaggacacgagcactggttcatcatcattttcgccggcccctcctccgtccagcccattcacagcaatga

SEQ ID NO: 132399 - DNA, 77 bp, Homo sapiens
ataaggacacgagcactggttcatcatcattttcgccggcccctcctccgtccagcccattcacagcaatgacggaa

SEQ ID NO: 132400 - DNA, 76 bp, Homo sapiens
acgagcactggttcatcatcattttcgccggcccctcctccgtccagcccattcacagcaatgacggaagggggca

SEQ ID NO: 132401 - DNA, 76 bp, Homo sapiens
atcatcattttcgccggcccctcctccgtccagcccattcacagcaatgacggaagggggcaggcacaccacactg

SEQ ID NO: 132402 - DNA, 74 bp, Homo sapiens
attttcgccggcccctcctccgtccagcccattcacagcaatgacggaagggggcaggcacaccacactggaga

SEQ ID NO: 132403 - DNA, 75 bp, Homo sapiens
ctcctccgtccagcccattcacagcaatgacggaagggggcaggcacaccacactggagaaatccactttggctt

SEQ ID NO: 132404 - DNA, 79 bp, Homo sapiens
cagcccattcacagcaatgacggaagggggcaggcacaccacactggagaaatccactttggctttcgtgatggcaatc

SEQ ID NO: 132405 - DNA, 78 bp, Homo sapiens
attcacagcaatgacggaagggggcaggcacaccacactggagaaatccactttggctttcgtgatggcaatctggaa

SEQ ID NO: 132406 - DNA, 74 bp, Homo sapiens
caggcacaccacactggagaaatccactttggctttcgtgatggcaatctggaaatggaagaaaaaatggaaag

SEQ ID NO: 132407 - DNA, 72 bp, Homo sapiens
acactggagaaatccactttggctttcgtgatggcaatctggaaatggaagaaaaaatggaaagtttagatg

SEQ ID NO: 132408 - DNA, 70 bp, Homo sapiens
ggaaaggagggagggaagagtaaataaatctgggacctaccttgcttacaattcccacagacagatgaaa

SEQ ID NO: 132409 - DNA, 71 bp, Homo sapiens
agggagggaagagtaaataaatctgggacctaccttgcttacaattcccacagacagatgaaattcaattc

SEQ ID NO: 132410 - DNA, 74 bp, Homo sapiens
agtaaataaatctgggacctaccttgcttacaattcccacagacagatgaaattcaattccatgccaaccatac

SEQ ID NO: 132411 - DNA, 74 bp, Homo sapiens
aaatctgggacctaccttgcttacaattcccacagacagatgaaattcaattccatgccaaccataccctccga

SEQ ID NO: 132412 - DNA, 77 bp, Homo sapiens
taccttgcttacaattcccacagacagatgaaattcaattccatgccaaccataccctccgatcactacaacacaaa

SEQ ID NO: 132413 - DNA, 76 bp, Homo sapiens
ttacaattcccacagacagatgaaattcaattccatgccaaccataccctccgatcactacaacacaaacagaaaa

SEQ ID NO: 132414 - DNA, 73 bp, Homo sapiens
acagacagatgaaattcaattccatgccaaccataccctccgatcactacaacacaaacagaaaaataaaagt

SEQ ID NO: 132415 - DNA, 76 bp, Homo sapiens
tgaaattcaattccatgccaaccataccctccgatcactacaacacaaacagaaaaataaaagttcatgcaatata

SEQ ID NO: 132416 - DNA, 73 bp, Homo sapiens
atgccaaccataccctccgatcactacaacacaaacagaaaaataaaagttcatgcaatataaacagttcttc

SEQ ID NO: 132417 - DNA, 71 bp, Homo sapiens
accataccctccgatcactacaacacaaacagaaaaataaaagttcatgcaatataaacagttcttcccat

SEQ ID NO: 132418 - DNA, 67 bp, Homo sapiens
gggcgaggccgcggtgggggaggggtccccaacccggactctcactcaccgcctcgcgcggctcccg

SEQ ID NO: 132419 - DNA, 65 bp, Homo sapiens
ggtgggggaggggtccccaacccggactctcactcaccgcctcgcgcggctcccggccgggttcc

SEQ ID NO: 132420 - DNA, 68 bp, Homo sapiens
ggtccccaacccggactctcactcaccgcctcgcgcggctcccggccgggttccgcggctcgccccac

SEQ ID NO: 132421 - DNA, 70 bp, Homo sapiens
acccggactctcactcaccgcctcgcgcggctcccggccgggttccgcggctcgccccactccggctcta

SEQ ID NO: 132422 - DNA, 72 bp, Homo sapiens
tcactcaccgcctcgcgcggctcccggccgggttccgcggctcgccccactccggctctagccgcccgcgtc

SEQ ID NO: 132423 - DNA, 71 bp, Homo sapiens
ctcgcgcggctcccggccgggttccgcggctcgccccactccggctctagccgcccgcgtctcctctcgag

SEQ ID NO: 132424 - DNA, 73 bp, Homo sapiens
tcccggccgggttccgcggctcgccccactccggctctagccgcccgcgtctcctctcgaggctcactgtcca

SEQ ID NO: 132425 - DNA, 72 bp, Homo sapiens
ccgggttccgcggctcgccccactccggctctagccgcccgcgtctcctctcgaggctcactgtccagcccg

SEQ ID NO: 132426 - DNA, 77 bp, Homo sapiens
ctcgccccactccggctctagccgcccgcgtctcctctcgaggctcactgtccagcccgggcgcacggagctgagaa

SEQ ID NO: 132427 - DNA, 77 bp, Homo sapiens
actccggctctagccgcccgcgtctcctctcgaggctcactgtccagcccgggcgcacggagctgagaagtcgccgc

SEQ ID NO: 132428 - DNA, 77 bp, Homo sapiens
ctagccgcccgcgtctcctctcgaggctcactgtccagcccgggcgcacggagctgagaagtcgccgccagcggagg

SEQ ID NO: 132429 - DNA, 80 bp, Homo sapiens
tcctctcgaggctcactgtccagcccgggcgcacggagctgagaagtcgccgccagcggagggcgtgtggccagcggcaa

SEQ ID NO: 132430 - DNA, 78 bp, Homo sapiens
aggctcactgtccagcccgggcgcacggagctgagaagtcgccgccagcggagggcgtgtggccagcggcaaccaaga

SEQ ID NO: 132431 - DNA, 76 bp, Homo sapiens
tgtccagcccgggcgcacggagctgagaagtcgccgccagcggagggcgtgtggccagcggcaaccaagagggtgg

SEQ ID NO: 132432 - DNA, 75 bp, Homo sapiens
cgggcgcacggagctgagaagtcgccgccagcggagggcgtgtggccagcggcaaccaagagggtgggaaagatg

SEQ ID NO: 132433 - DNA, 75 bp, Homo sapiens
tgagaagtcgccgccagcggagggcgtgtggccagcggcaaccaagagggtgggaaagatgggaccgtcgctctc

SEQ ID NO: 132434 - DNA, 74 bp, Homo sapiens
gtcgccgccagcggagggcgtgtggccagcggcaaccaagagggtgggaaagatgggaccgtcgctctcgccgc

SEQ ID NO: 132435 - DNA, 73 bp, Homo sapiens
agggcgtgtggccagcggcaaccaagagggtgggaaagatgggaccgtcgctctcgccgccgcggccaccaca

SEQ ID NO: 132436 - DNA, 76 bp, Homo sapiens
tgtggccagcggcaaccaagagggtgggaaagatgggaccgtcgctctcgccgccgcggccaccacagacactgcc

SEQ ID NO: 132437 - DNA, 72 bp, Homo sapiens
aaccaagagggtgggaaagatgggaccgtcgctctcgccgccgcggccaccacagacactgccgccgccggc

SEQ ID NO: 132438 - DNA, 77 bp, Homo sapiens
tgggaaagatgggaccgtcgctctcgccgccgcggccaccacagacactgccgccgccggctcctctcagccacgga

SEQ ID NO: 132439 - DNA, 78 bp, Homo sapiens
agatgggaccgtcgctctcgccgccgcggccaccacagacactgccgccgccggctcctctcagccacggaagctgcg

SEQ ID NO: 132440 - DNA, 68 bp, Homo sapiens
gggcctcataaaagaacacacaaaaggcgacttagacaggaaagcaccagtacgttttgtatgttttt

SEQ ID NO: 132441 - DNA, 68 bp, Homo sapiens
aaagaacacacaaaaggcgacttagacaggaaagcaccagtacgttttgtatgtttttttatttgctc

SEQ ID NO: 132442 - DNA, 67 bp, Homo sapiens
acaaaaggcgacttagacaggaaagcaccagtacgttttgtatgtttttttatttgctccaggtggg

SEQ ID NO: 132443 - DNA, 67 bp, Homo sapiens
acttagacaggaaagcaccagtacgttttgtatgtttttttatttgctccaggtggggttttgactg

SEQ ID NO: 132444 - DNA, 67 bp, Homo sapiens
aaagcaccagtacgttttgtatgtttttttatttgctccaggtggggttttgactgtcactttccca

SEQ ID NO: 132445 - DNA, 69 bp, Homo sapiens
ttttgtatgtttttttatttgctccaggtggggttttgactgtcactttcccacactctggattagttc

SEQ ID NO: 132446 - DNA, 72 bp, Homo sapiens
ttttttatttgctccaggtggggttttgactgtcactttcccacactctggattagttctgatcccaccaca

SEQ ID NO: 132447 - DNA, 74 bp, Homo sapiens
tatttgctccaggtggggttttgactgtcactttcccacactctggattagttctgatcccaccacaaggagcc

SEQ ID NO: 132448 - DNA, 73 bp, Homo sapiens
gggttttgactgtcactttcccacactctggattagttctgatcccaccacaaggagccctcgaattggctaa

SEQ ID NO: 132449 - DNA, 74 bp, Homo sapiens
actgtcactttcccacactctggattagttctgatcccaccacaaggagccctcgaattggctaaagtgagaaa

SEQ ID NO: 132450 - DNA, 75 bp, Homo sapiens
ccacactctggattagttctgatcccaccacaaggagccctcgaattggctaaagtgagaaactgggcctgaaga

SEQ ID NO: 132451 - DNA, 74 bp, Homo sapiens
tggattagttctgatcccaccacaaggagccctcgaattggctaaagtgagaaactgggcctgaagactccgta

SEQ ID NO: 132452 - DNA, 72 bp, Homo sapiens
gttctgatcccaccacaaggagccctcgaattggctaaagtgagaaactgggcctgaagactccgtaccctc

SEQ ID NO: 132453 - DNA, 73 bp, Homo sapiens
acaaggagccctcgaattggctaaagtgagaaactgggcctgaagactccgtaccctctgccatcttgccgag

SEQ ID NO: 132454 - DNA, 73 bp, Homo sapiens
tcgaattggctaaagtgagaaactgggcctgaagactccgtaccctctgccatcttgccgagggagtctcctt

SEQ ID NO: 132455 - DNA, 71 bp, Homo sapiens
taaagtgagaaactgggcctgaagactccgtaccctctgccatcttgccgagggagtctccttttagaaaa

SEQ ID NO: 132456 - DNA, 70 bp, Homo sapiens
aaactgggcctgaagactccgtaccctctgccatcttgccgagggagtctccttttagaaaacaatcaaa

SEQ ID NO: 132457 - DNA, 74 bp, Homo sapiens
tgaagactccgtaccctctgccatcttgccgagggagtctccttttagaaaacaatcaaagggttattgcatga

SEQ ID NO: 132458 - DNA, 76 bp, Homo sapiens
taccctctgccatcttgccgagggagtctccttttagaaaacaatcaaagggttattgcatgagtctggatgaatc

SEQ ID NO: 132459 - DNA, 76 bp, Homo sapiens
ccatcttgccgagggagtctccttttagaaaacaatcaaagggttattgcatgagtctggatgaatcccactctca

SEQ ID NO: 132460 - DNA, 75 bp, Homo sapiens
agggagtctccttttagaaaacaatcaaagggttattgcatgagtctggatgaatcccactctcagctgtccacg

SEQ ID NO: 132461 - DNA, 75 bp, Homo sapiens
cttttagaaaacaatcaaagggttattgcatgagtctggatgaatcccactctcagctgtccacgggcccgacca

SEQ ID NO: 132462 - DNA, 77 bp, Homo sapiens
aaaacaatcaaagggttattgcatgagtctggatgaatcccactctcagctgtccacgggcccgaccacctcatcta

SEQ ID NO: 132463 - DNA, 76 bp, Homo sapiens
ggttattgcatgagtctggatgaatcccactctcagctgtccacgggcccgaccacctcatctagccccctttttg

SEQ ID NO: 132464 - DNA, 76 bp, Homo sapiens
atgagtctggatgaatcccactctcagctgtccacgggcccgaccacctcatctagccccctttttggcagggaga

SEQ ID NO: 132465 - DNA, 74 bp, Homo sapiens
tggatgaatcccactctcagctgtccacgggcccgaccacctcatctagccccctttttggcagggagaacctg

SEQ ID NO: 132466 - DNA, 70 bp, Homo sapiens
tgtccacgggcccgaccacctcatctagccccctttttggcagggagaacctggctcccaagttctcctc

SEQ ID NO: 132467 - DNA, 70 bp, Homo sapiens
gaccacctcatctagccccctttttggcagggagaacctggctcccaagttctcctccttcacttcgtta

SEQ ID NO: 132468 - DNA, 68 bp, Homo sapiens
tctagccccctttttggcagggagaacctggctcccaagttctcctccttcacttcgttacaaaccaa

SEQ ID NO: 132469 - DNA, 67 bp, Homo sapiens
ctttttggcagggagaacctggctcccaagttctcctccttcacttcgttacaaaccaaggggaaga

SEQ ID NO: 132470 - DNA, 69 bp, Homo sapiens
ggagaacctggctcccaagttctcctccttcacttcgttacaaaccaaggggaagagcccaccgtgaga

SEQ ID NO: 132471 - DNA, 73 bp, Homo sapiens
gctcccaagttctcctccttcacttcgttacaaaccaaggggaagagcccaccgtgagaacgcgccatctgca

SEQ ID NO: 132472 - DNA, 72 bp, Homo sapiens
aagttctcctccttcacttcgttacaaaccaaggggaagagcccaccgtgagaacgcgccatctgcaagctg

SEQ ID NO: 132473 - DNA, 73 bp, Homo sapiens
tccttcacttcgttacaaaccaaggggaagagcccaccgtgagaacgcgccatctgcaagctgtctccctttc

SEQ ID NO: 132474 - DNA, 77 bp, Homo sapiens
ggaagagcccaccgtgagaacgcgccatctgcaagctgtctccctttctccatccttggtgaaaccctttgcgcaga

SEQ ID NO: 132475 - DNA, 75 bp, Homo sapiens
accgtgagaacgcgccatctgcaagctgtctccctttctccatccttggtgaaaccctttgcgcagaaggcaacg

SEQ ID NO: 132476 - DNA, 77 bp, Homo sapiens
aacgcgccatctgcaagctgtctccctttctccatccttggtgaaaccctttgcgcagaaggcaacgtggaagctga

SEQ ID NO: 132477 - DNA, 75 bp, Homo sapiens
atctgcaagctgtctccctttctccatccttggtgaaaccctttgcgcagaaggcaacgtggaagctgatgtttt

SEQ ID NO: 132478 - DNA, 75 bp, Homo sapiens
tccctttctccatccttggtgaaaccctttgcgcagaaggcaacgtggaagctgatgtttttactcatctcgctg

SEQ ID NO: 132479 - DNA, 76 bp, Homo sapiens
tctccatccttggtgaaaccctttgcgcagaaggcaacgtggaagctgatgtttttactcatctcgctgtttgaaa

SEQ ID NO: 132480 - DNA, 77 bp, Homo sapiens
gtgaaaccctttgcgcagaaggcaacgtggaagctgatgtttttactcatctcgctgtttgaaagcaccattatgaa

SEQ ID NO: 132481 - DNA, 78 bp, Homo sapiens
ttgcgcagaaggcaacgtggaagctgatgtttttactcatctcgctgtttgaaagcaccattatgaagtcgggttgta

SEQ ID NO: 132482 - DNA, 75 bp, Homo sapiens
caacgtggaagctgatgtttttactcatctcgctgtttgaaagcaccattatgaagtcgggttgtacagtagtta

SEQ ID NO: 132483 - DNA, 71 bp, Homo sapiens
tttttactcatctcgctgtttgaaagcaccattatgaagtcgggttgtacagtagttaacagtacctttta

SEQ ID NO: 132484 - DNA, 75 bp, Homo sapiens
atctcgctgtttgaaagcaccattatgaagtcgggttgtacagtagttaacagtaccttttatatatatatctca

SEQ ID NO: 132485 - DNA, 72 bp, Homo sapiens
tatatatataaactgtaaacaagaggtaacagcggcttctagaaactgattttcttcaaggtttcctgtgtg

SEQ ID NO: 132486 - DNA, 70 bp, Homo sapiens
atataaactgtaaacaagaggtaacagcggcttctagaaactgattttcttcaaggtttcctgtgtggta

SEQ ID NO: 132487 - DNA, 71 bp, Homo sapiens
aacaagaggtaacagcggcttctagaaactgattttcttcaaggtttcctgtgtggtaggcacctgaaata

SEQ ID NO: 132488 - DNA, 72 bp, Homo sapiens
taacagcggcttctagaaactgattttcttcaaggtttcctgtgtggtaggcacctgaaatactgtagaaaa

SEQ ID NO: 132489 - DNA, 72 bp, Homo sapiens
ttctagaaactgattttcttcaaggtttcctgtgtggtaggcacctgaaatactgtagaaaaatgtcttgtg

SEQ ID NO: 132490 - DNA, 71 bp, Homo sapiens
attttcttcaaggtttcctgtgtggtaggcacctgaaatactgtagaaaaatgtcttgtgtggtgttctcg

SEQ ID NO: 132491 - DNA, 75 bp, Homo sapiens
aggtttcctgtgtggtaggcacctgaaatactgtagaaaaatgtcttgtgtggtgttctcgtctccctgctgcta

SEQ ID NO: 132492 - DNA, 75 bp, Homo sapiens
tggtaggcacctgaaatactgtagaaaaatgtcttgtgtggtgttctcgtctccctgctgctaactgggttctgt

SEQ ID NO: 132493 - DNA, 73 bp, Homo sapiens
acctgaaatactgtagaaaaatgtcttgtgtggtgttctcgtctccctgctgctaactgggttctgttttgcg

SEQ ID NO: 132494 - DNA, 75 bp, Homo sapiens
tactgtagaaaaatgtcttgtgtggtgttctcgtctccctgctgctaactgggttctgttttgcgtgaccaggaa

SEQ ID NO: 132495 - DNA, 77 bp, Homo sapiens
aaaatgtcttgtgtggtgttctcgtctccctgctgctaactgggttctgttttgcgtgaccaggaatggtgctggca

SEQ ID NO: 132496 - DNA, 80 bp, Homo sapiens
gtgtggtgttctcgtctccctgctgctaactgggttctgttttgcgtgaccaggaatggtgctggcacgacagctcagtg

SEQ ID NO: 132497 - DNA, 79 bp, Homo sapiens
gtctccctgctgctaactgggttctgttttgcgtgaccaggaatggtgctggcacgacagctcagtggctgggagggaa

SEQ ID NO: 132498 - DNA, 80 bp, Homo sapiens
ctaactgggttctgttttgcgtgaccaggaatggtgctggcacgacagctcagtggctgggagggaatgctgccgcctga

SEQ ID NO: 132499 - DNA, 83 bp, Homo sapiens
ttctgttttgcgtgaccaggaatggtgctggcacgacagctcagtggctgggagggaatgctgccgcctgagtgtctctctct

SEQ ID NO: 132500 - DNA, 82 bp, Homo sapiens
tttgcgtgaccaggaatggtgctggcacgacagctcagtggctgggagggaatgctgccgcctgagtgtctctctctttccg

SEQ ID NO: 132501 - DNA, 82 bp, Homo sapiens
aatggtgctggcacgacagctcagtggctgggagggaatgctgccgcctgagtgtctctctctttccgtcccctgcttgtgc

SEQ ID NO: 132502 - DNA, 81 bp, Homo sapiens
gagggaatgctgccgcctgagtgtctctctctttccgtcccctgcttgtgctcctatctgatcaggctagagacaacaaaa

SEQ ID NO: 132503 - DNA, 77 bp, Homo sapiens
agtgtctctctctttccgtcccctgcttgtgctcctatctgatcaggctagagacaacaaaaaaaagatatatagta

SEQ ID NO: 132504 - DNA, 75 bp, Homo sapiens
tctctctttccgtcccctgcttgtgctcctatctgatcaggctagagacaacaaaaaaaagatatatagtaaaaa

SEQ ID NO: 132505 - DNA, 68 bp, Homo sapiens
aaaaacaacccaatatatagatttctatagaatttccttttttcctctctcccacctttcctctgcaa

SEQ ID NO: 132506 - DNA, 70 bp, Homo sapiens
ccaatatatagatttctatagaatttccttttttcctctctcccacctttcctctgcaaggtattgttac

SEQ ID NO: 132507 - DNA, 69 bp, Homo sapiens
tatagatttctatagaatttccttttttcctctctcccacctttcctctgcaaggtattgttactattt

SEQ ID NO: 132508 - DNA, 67 bp, Homo sapiens
gaatttccttttttcctctctcccacctttcctctgcaaggtattgttactattttttgttactgat

SEQ ID NO: 132509 - DNA, 71 bp, Homo sapiens
ttttcctctctcccacctttcctctgcaaggtattgttactattttttgttactgatttttgctgcaataa

SEQ ID NO: 132510 - DNA, 70 bp, Homo sapiens
tcccacctttcctctgcaaggtattgttactattttttgttactgatttttgctgcaataaccttcttgt

SEQ ID NO: 132511 - DNA, 72 bp, Homo sapiens
caaggtattgttactattttttgttactgatttttgctgcaataaccttcttgtttcagtcacagcaagaaa

SEQ ID NO: 132512 - DNA, 70 bp, Homo sapiens
actattttttgttactgatttttgctgcaataaccttcttgtttcagtcacagcaagaaacaaaacccaa

SEQ ID NO: 132513 - DNA, 71 bp, Homo sapiens
gttactgatttttgctgcaataaccttcttgtttcagtcacagcaagaaacaaaacccaaacaaacagaaa

SEQ ID NO: 132514 - DNA, 68 bp, Homo sapiens
tttttgctgcaataaccttcttgtttcagtcacagcaagaaacaaaacccaaacaaacagaaaacccc

SEQ ID NO: 132515 - DNA, 67 bp, Homo sapiens
ataaccttcttgtttcagtcacagcaagaaacaaaacccaaacaaacagaaaacccctctgaaaaga

SEQ ID NO: 132516 - DNA, 68 bp, Homo sapiens
ttgtttcagtcacagcaagaaacaaaacccaaacaaacagaaaacccctctgaaaagagtagaaaata

SEQ ID NO: 132517 - DNA, 65 bp, Homo sapiens
gtcacagcaagaaacaaaacccaaacaaacagaaaacccctctgaaaagagtagaaaataaaagg

SEQ ID NO: 132518 - DNA, 65 bp, Homo sapiens
gcaagaaacaaaacccaaacaaacagaaaacccctctgaaaagagtagaaaataaaaggtctgac

SEQ ID NO: 132519 - DNA, 64 bp, Homo sapiens
gaaacaaaacccaaacaaacagaaaacccctctgaaaagagtagaaaataaaaggtctgaccga

SEQ ID NO: 132520 - DNA, 63 bp, Homo sapiens
caaaacccaaacaaacagaaaacccctctgaaaagagtagaaaataaaaggtctgaccgaaaa

SEQ ID NO: 132521 - DNA, 61 bp, Homo sapiens
acagaaaacccctctgaaaagagtagaaaataaaaggtctgaccgaaaaaaaagggaaggg

SEQ ID NO: 132522 - DNA, 61 bp, Homo sapiens
ccctctgaaaagagtagaaaataaaaggtctgaccgaaaaaaaagggaagggggaggaagg

SEQ ID NO: 132523 - DNA, 59 bp, Homo sapiens
aaaagagtagaaaataaaaggtctgaccgaaaaaaaagggaagggggaggaagggaagg

SEQ ID NO: 132524 - DNA, 61 bp, Homo sapiens
tagaaaataaaaggtctgaccgaaaaaaaagggaagggggaggaagggaagggagcttggt

SEQ ID NO: 132525 - DNA, 60 bp, Homo sapiens
ataaaaggtctgaccgaaaaaaaagggaagggggaggaagggaagggagcttggttttgt

SEQ ID NO: 132526 - DNA, 69 bp, Homo sapiens
ggaagggaagggagcttggttttgtttttaaataggactgaagaataacattgaaaaatcaggagatga

SEQ ID NO: 132527 - DNA, 70 bp, Homo sapiens
ggagcttggttttgtttttaaataggactgaagaataacattgaaaaatcaggagatgatgtccaaccct

SEQ ID NO: 132528 - DNA, 72 bp, Homo sapiens
tttgtttttaaataggactgaagaataacattgaaaaatcaggagatgatgtccaacccttttcgcaaggca

SEQ ID NO: 132529 - DNA, 72 bp, Homo sapiens
ttttaaataggactgaagaataacattgaaaaatcaggagatgatgtccaacccttttcgcaaggcaaagcc

SEQ ID NO: 132530 - DNA, 71 bp, Homo sapiens
ttgaaaaatcaggagatgatgtccaacccttttcgcaaggcaaagccctccggtatttccgcctctgtggt

SEQ ID NO: 132531 - DNA, 69 bp, Homo sapiens
aaatcaggagatgatgtccaacccttttcgcaaggcaaagccctccggtatttccgcctctgtggtttt

SEQ ID NO: 132532 - DNA, 63 bp, Homo sapiens
cttttcgcaaggcaaagccctccggtatttccgcctctgtggtttttgttttaaattcctttt

SEQ ID NO: 132533 - DNA, 64 bp, Homo sapiens
aaggcaaagccctccggtatttccgcctctgtggtttttgttttaaattcctttttctcttctg

SEQ ID NO: 132534 - DNA, 68 bp, Homo sapiens
tccggtatttccgcctctgtggtttttgttttaaattcctttttctcttctgggtgctgatacttctc

SEQ ID NO: 132535 - DNA, 72 bp, Homo sapiens
gcctctgtggtttttgttttaaattcctttttctcttctgggtgctgatacttctctccatcctcatgttct

SEQ ID NO: 132536 - DNA, 70 bp, Homo sapiens
tttttgttttaaattcctttttctcttctgggtgctgatacttctctccatcctcatgttcttggtgttt

SEQ ID NO: 132537 - DNA, 72 bp, Homo sapiens
ttaaattcctttttctcttctgggtgctgatacttctctccatcctcatgttcttggtgttttattatgttt

SEQ ID NO: 132538 - DNA, 72 bp, Homo sapiens
ctttttctcttctgggtgctgatacttctctccatcctcatgttcttggtgttttattatgttttgtgtttt

SEQ ID NO: 132539 - DNA, 70 bp, Homo sapiens
gtttgtttgtttaactttgtgtcgctacctcagtttgcccccatgtcccttacacacacgcaaaatactc

SEQ ID NO: 132540 - DNA, 72 bp, Homo sapiens
tttgtttaactttgtgtcgctacctcagtttgcccccatgtcccttacacacacgcaaaatactccttcagc

SEQ ID NO: 132541 - DNA, 74 bp, Homo sapiens
tttgtgtcgctacctcagtttgcccccatgtcccttacacacacgcaaaatactccttcagcggagcgaagagg

SEQ ID NO: 132542 - DNA, 75 bp, Homo sapiens
tacctcagtttgcccccatgtcccttacacacacgcaaaatactccttcagcggagcgaagaggtggcggatgac

SEQ ID NO: 132543 - DNA, 78 bp, Homo sapiens
ccatgtcccttacacacacgcaaaatactccttcagcggagcgaagaggtggcggatgactggcacgctccatgaccg

SEQ ID NO: 132544 - DNA, 78 bp, Homo sapiens
tcccttacacacacgcaaaatactccttcagcggagcgaagaggtggcggatgactggcacgctccatgaccggccca

SEQ ID NO: 132545 - DNA, 80 bp, Homo sapiens
acacgcaaaatactccttcagcggagcgaagaggtggcggatgactggcacgctccatgaccggcccagcagtctctgcc

SEQ ID NO: 132546 - DNA, 83 bp, Homo sapiens
cttcagcggagcgaagaggtggcggatgactggcacgctccatgaccggcccagcagtctctgcctcgccaagcggctcatgt

SEQ ID NO: 132547 - DNA, 84 bp, Homo sapiens
gcgaagaggtggcggatgactggcacgctccatgaccggcccagcagtctctgcctcgccaagcggctcatgttggagacgtca

SEQ ID NO: 132548 - DNA, 85 bp, Homo sapiens
tggcggatgactggcacgctccatgaccggcccagcagtctctgcctcgccaagcggctcatgttggagacgtcagtatagtgga

SEQ ID NO: 132549 - DNA, 83 bp, Homo sapiens
atgactggcacgctccatgaccggcccagcagtctctgcctcgccaagcggctcatgttggagacgtcagtatagtggactgg

SEQ ID NO: 132550 - DNA, 79 bp, Homo sapiens
tccatgaccggcccagcagtctctgcctcgccaagcggctcatgttggagacgtcagtatagtggactgggaaaccaaa

SEQ ID NO: 132551 - DNA, 76 bp, Homo sapiens
ccagcagtctctgcctcgccaagcggctcatgttggagacgtcagtatagtggactgggaaaccaaataccctggg

SEQ ID NO: 132552 - DNA, 74 bp, Homo sapiens
tctgcctcgccaagcggctcatgttggagacgtcagtatagtggactgggaaaccaaataccctgggggagaaa

SEQ ID NO: 132553 - DNA, 73 bp, Homo sapiens
tcgccaagcggctcatgttggagacgtcagtatagtggactgggaaaccaaataccctgggggagaaaaggca

SEQ ID NO: 132554 - DNA, 72 bp, Homo sapiens
ctcatgttggagacgtcagtatagtggactgggaaaccaaataccctgggggagaaaaggcagagagggcag

SEQ ID NO: 132555 - DNA, 79 bp, Homo sapiens
atcagaacagccacaccgcagccagatgccagcacaacccgggtacctttccatttcagtgcaccataagatgtcctct

SEQ ID NO: 132556 - DNA, 77 bp, Homo sapiens
aacagccacaccgcagccagatgccagcacaacccgggtacctttccatttcagtgcaccataagatgtcctctttc

SEQ ID NO: 132557 - DNA, 79 bp, Homo sapiens
agccagatgccagcacaacccgggtacctttccatttcagtgcaccataagatgtcctctttctcattcatgaagacag

SEQ ID NO: 132558 - DNA, 77 bp, Homo sapiens
atgccagcacaacccgggtacctttccatttcagtgcaccataagatgtcctctttctcattcatgaagacaggaaa

SEQ ID NO: 132559 - DNA, 75 bp, Homo sapiens
ccgggtacctttccatttcagtgcaccataagatgtcctctttctcattcatgaagacaggaaaatgctggtctt

SEQ ID NO: 132560 - DNA, 80 bp, Homo sapiens
tttccatttcagtgcaccataagatgtcctctttctcattcatgaagacaggaaaatgctggtctttgccctgctttatg

SEQ ID NO: 132561 - DNA, 79 bp, Homo sapiens
agtgcaccataagatgtcctctttctcattcatgaagacaggaaaatgctggtctttgccctgctttatggagtttgac

SEQ ID NO: 132562 - DNA, 77 bp, Homo sapiens
ataagatgtcctctttctcattcatgaagacaggaaaatgctggtctttgccctgctttatggagtttgacctcgta

SEQ ID NO: 132563 - DNA, 77 bp, Homo sapiens
tttctcattcatgaagacaggaaaatgctggtctttgccctgctttatggagtttgacctcgtagtaatggtcctca

SEQ ID NO: 132564 - DNA, 76 bp, Homo sapiens
tgaagacaggaaaatgctggtctttgccctgctttatggagtttgacctcgtagtaatggtcctcactttgctgaa

SEQ ID NO: 132565 - DNA, 75 bp, Homo sapiens
aaaatgctggtctttgccctgctttatggagtttgacctcgtagtaatggtcctcactttgctgaactagatgaa

SEQ ID NO: 132566 - DNA, 74 bp, Homo sapiens
ctttgccctgctttatggagtttgacctcgtagtaatggtcctcactttgctgaactagatgaagaggagaaaa

SEQ ID NO: 132567 - DNA, 73 bp, Homo sapiens
ctttatggagtttgacctcgtagtaatggtcctcactttgctgaactagatgaagaggagaaaagaggaataa

SEQ ID NO: 132568 - DNA, 77 bp, Homo sapiens
acctcatcctgcccttccttctccctgccccccagcagaggttctagacgctggagctgaccttggctatcctgcca

SEQ ID NO: 132569 - DNA, 80 bp, Homo sapiens
tgcccttccttctccctgccccccagcagaggttctagacgctggagctgaccttggctatcctgccatgctccagacac

SEQ ID NO: 132570 - DNA, 84 bp, Homo sapiens
ttctccctgccccccagcagaggttctagacgctggagctgaccttggctatcctgccatgctccagacactcctgcagctcca

SEQ ID NO: 132571 - DNA, 87 bp, Homo sapiens
cccagcagaggttctagacgctggagctgaccttggctatcctgccatgctccagacactcctgcagctccagcttatcattcacag

SEQ ID NO: 132572 - DNA, 88 bp, Homo sapiens
agaggttctagacgctggagctgaccttggctatcctgccatgctccagacactcctgcagctccagcttatcattcacagtggatgc

SEQ ID NO: 132573 - DNA, 87 bp, Homo sapiens
ctggagctgaccttggctatcctgccatgctccagacactcctgcagctccagcttatcattcacagtggatgccaacggcctagga

SEQ ID NO: 132574 - DNA, 85 bp, Homo sapiens
accttggctatcctgccatgctccagacactcctgcagctccagcttatcattcacagtggatgccaacggcctaggaggcagaa

SEQ ID NO: 132575 - DNA, 88 bp, Homo sapiens
tatcctgccatgctccagacactcctgcagctccagcttatcattcacagtggatgccaacggcctaggaggcagaagagagactgta

SEQ ID NO: 132576 - DNA, 84 bp, Homo sapiens
tccagacactcctgcagctccagcttatcattcacagtggatgccaacggcctaggaggcagaagagagactgtaacaacagaa

SEQ ID NO: 132577 - DNA, 81 bp, Homo sapiens
acactcctgcagctccagcttatcattcacagtggatgccaacggcctaggaggcagaagagagactgtaacaacagaaac

SEQ ID NO: 132578 - DNA, 79 bp, Homo sapiens
agctccagcttatcattcacagtggatgccaacggcctaggaggcagaagagagactgtaacaacagaaacctggataa

SEQ ID NO: 132579 - DNA, 78 bp, Homo sapiens
tatcattcacagtggatgccaacggcctaggaggcagaagagagactgtaacaacagaaacctggataacagcgggaa

SEQ ID NO: 132580 - DNA, 70 bp, Homo sapiens
cctgcagtcccagcccacagccccccaggcccaggagctttcaccaacctgttcataccgggaaggttac

SEQ ID NO: 132581 - DNA, 67 bp, Homo sapiens
agtcccagcccacagccccccaggcccaggagctttcaccaacctgttcataccgggaaggttaccc

SEQ ID NO: 132582 - DNA, 67 bp, Homo sapiens
acagccccccaggcccaggagctttcaccaacctgttcataccgggaaggttaccccagaagtagcg

SEQ ID NO: 132583 - DNA, 70 bp, Homo sapiens
aggcccaggagctttcaccaacctgttcataccgggaaggttaccccagaagtagcgggccctgtgtgca

SEQ ID NO: 132584 - DNA, 71 bp, Homo sapiens
tttcaccaacctgttcataccgggaaggttaccccagaagtagcgggccctgtgtgcagctgacacttctt

SEQ ID NO: 132585 - DNA, 73 bp, Homo sapiens
aacctgttcataccgggaaggttaccccagaagtagcgggccctgtgtgcagctgacacttctttggcatcaa

SEQ ID NO: 132586 - DNA, 77 bp, Homo sapiens
ggaaggttaccccagaagtagcgggccctgtgtgcagctgacacttctttggcatcaatcatcacagggttggacta

SEQ ID NO: 132587 - DNA, 79 bp, Homo sapiens
cccagaagtagcgggccctgtgtgcagctgacacttctttggcatcaatcatcacagggttggactacaaaacaggaga

SEQ ID NO: 132588 - DNA, 79 bp, Homo sapiens
tagcgggccctgtgtgcagctgacacttctttggcatcaatcatcacagggttggactacaaaacaggagacggtttga

SEQ ID NO: 132589 - DNA, 81 bp, Homo sapiens
ctgtgtgcagctgacacttctttggcatcaatcatcacagggttggactacaaaacaggagacggtttgaagatgagccaa

SEQ ID NO: 132590 - DNA, 77 bp, Homo sapiens
agctgacacttctttggcatcaatcatcacagggttggactacaaaacaggagacggtttgaagatgagccaaggag

SEQ ID NO: 132591 - DNA, 79 bp, Homo sapiens
agcgccggcatgctgctggggtcgagccttaaagcctcaaagcctcttacttctctctcaggagccacacactgggcta

SEQ ID NO: 132592 - DNA, 80 bp, Homo sapiens
atgctgctggggtcgagccttaaagcctcaaagcctcttacttctctctcaggagccacacactgggctagcctgcagcc

SEQ ID NO: 132593 - DNA, 79 bp, Homo sapiens
gtcgagccttaaagcctcaaagcctcttacttctctctcaggagccacacactgggctagcctgcagcctccaggagaa

SEQ ID NO: 132594 - DNA, 80 bp, Homo sapiens
taaagcctcaaagcctcttacttctctctcaggagccacacactgggctagcctgcagcctccaggagaagctggaatta

SEQ ID NO: 132595 - DNA, 82 bp, Homo sapiens
tcttacttctctctcaggagccacacactgggctagcctgcagcctccaggagaagctggaattacacctagccacattcca

SEQ ID NO: 132596 - DNA, 85 bp, Homo sapiens
tctctctcaggagccacacactgggctagcctgcagcctccaggagaagctggaattacacctagccacattccacaagctgtca

SEQ ID NO: 132597 - DNA, 81 bp, Homo sapiens
agccacacactgggctagcctgcagcctccaggagaagctggaattacacctagccacattccacaagctgtcactggaac

SEQ ID NO: 132598 - DNA, 82 bp, Homo sapiens
tgggctagcctgcagcctccaggagaagctggaattacacctagccacattccacaagctgtcactggaacgttctagatca

SEQ ID NO: 132599 - DNA, 81 bp, Homo sapiens
cagcctccaggagaagctggaattacacctagccacattccacaagctgtcactggaacgttctagatcagcattgtccaa

SEQ ID NO: 132600 - DNA, 80 bp, Homo sapiens
gagaagctggaattacacctagccacattccacaagctgtcactggaacgttctagatcagcattgtccaaatgaacttc

SEQ ID NO: 132601 - DNA, 79 bp, Homo sapiens
acctagccacattccacaagctgtcactggaacgttctagatcagcattgtccaaatgaacttctgcgatggtgggttg

SEQ ID NO: 132602 - DNA, 79 bp, Homo sapiens
attccacaagctgtcactggaacgttctagatcagcattgtccaaatgaacttctgcgatggtgggttgtcctctacac

SEQ ID NO: 132603 - DNA, 80 bp, Homo sapiens
ctgtcactggaacgttctagatcagcattgtccaaatgaacttctgcgatggtgggttgtcctctacactgttcaattca

SEQ ID NO: 132604 - DNA, 78 bp, Homo sapiens
aacgttctagatcagcattgtccaaatgaacttctgcgatggtgggttgtcctctacactgttcaattcagtggccac

SEQ ID NO: 132605 - DNA, 78 bp, Homo sapiens
agcattgtccaaatgaacttctgcgatggtgggttgtcctctacactgttcaattcagtggccactagcccactagta

SEQ ID NO: 132606 - DNA, 77 bp, Homo sapiens
aatgaacttctgcgatggtgggttgtcctctacactgttcaattcagtggccactagcccactagtacaggtggcta

SEQ ID NO: 132607 - DNA, 77 bp, Homo sapiens
ttctgcgatggtgggttgtcctctacactgttcaattcagtggccactagcccactagtacaggtggctattttgta

SEQ ID NO: 132608 - DNA, 73 bp, Homo sapiens
tgggttgtcctctacactgttcaattcagtggccactagcccactagtacaggtggctattttgtacctaaaa

SEQ ID NO: 132609 - DNA, 76 bp, Homo sapiens
tacactgttcaattcagtggccactagcccactagtacaggtggctattttgtacctaaaatgaggccaatgtgat

SEQ ID NO: 132610 - DNA, 76 bp, Homo sapiens
gttcaattcagtggccactagcccactagtacaggtggctattttgtacctaaaatgaggccaatgtgattgagga

SEQ ID NO: 132611 - DNA, 75 bp, Homo sapiens
aaggtagaagccattagtgagctggccaaaccaaggttgctggctatacctcgagaaatcgcgagatgtccctct

SEQ ID NO: 132612 - DNA, 76 bp, Homo sapiens
attagtgagctggccaaaccaaggttgctggctatacctcgagaaatcgcgagatgtccctcttgtcactaacgcc

SEQ ID NO: 132613 - DNA, 77 bp, Homo sapiens
tggccaaaccaaggttgctggctatacctcgagaaatcgcgagatgtccctcttgtcactaacgcccatggccacca

SEQ ID NO: 132614 - DNA, 76 bp, Homo sapiens
aaccaaggttgctggctatacctcgagaaatcgcgagatgtccctcttgtcactaacgcccatggccaccacattc

SEQ ID NO: 132615 - DNA, 78 bp, Homo sapiens
ctatacctcgagaaatcgcgagatgtccctcttgtcactaacgcccatggccaccacattctcaaagagccagaagaa

SEQ ID NO: 132616 - DNA, 76 bp, Homo sapiens
cctcgagaaatcgcgagatgtccctcttgtcactaacgcccatggccaccacattctcaaagagccagaagaaggg

SEQ ID NO: 132617 - DNA, 77 bp, Homo sapiens
agatgtccctcttgtcactaacgcccatggccaccacattctcaaagagccagaagaaggggcgatcatctccctcc

SEQ ID NO: 132618 - DNA, 76 bp, Homo sapiens
tccctcttgtcactaacgcccatggccaccacattctcaaagagccagaagaaggggcgatcatctccctccttgg

SEQ ID NO: 132619 - DNA, 80 bp, Homo sapiens
actaacgcccatggccaccacattctcaaagagccagaagaaggggcgatcatctccctccttgggccgcgcatcatgca

SEQ ID NO: 132620 - DNA, 79 bp, Homo sapiens
ccaccacattctcaaagagccagaagaaggggcgatcatctccctccttgggccgcgcatcatgcaggaggcggtagaa

SEQ ID NO: 132621 - DNA, 78 bp, Homo sapiens
attctcaaagagccagaagaaggggcgatcatctccctccttgggccgcgcatcatgcaggaggcggtagaactcaaa

SEQ ID NO: 132622 - DNA, 78 bp, Homo sapiens
agagccagaagaaggggcgatcatctccctccttgggccgcgcatcatgcaggaggcggtagaactcaaagaagagcc

SEQ ID NO: 132623 - DNA, 81 bp, Homo sapiens
ggcgatcatctccctccttgggccgcgcatcatgcaggaggcggtagaactcaaagaagagccggccagtgccctctgaga

SEQ ID NO: 132624 - DNA, 78 bp, Homo sapiens
tccctccttgggccgcgcatcatgcaggaggcggtagaactcaaagaagagccggccagtgccctctgagaggtcgga

SEQ ID NO: 132625 - DNA, 78 bp, Homo sapiens
ttgggccgcgcatcatgcaggaggcggtagaactcaaagaagagccggccagtgccctctgagaggtcggaagagaaa

SEQ ID NO: 132626 - DNA, 79 bp, Homo sapiens
atcatgcaggaggcggtagaactcaaagaagagccggccagtgccctctgagaggtcggaagagaaagccatcagctgg

SEQ ID NO: 132627 - DNA, 75 bp, Homo sapiens
aggaggcggtagaactcaaagaagagccggccagtgccctctgagaggtcggaagagaaagccatcagctggggc

SEQ ID NO: 132628 - DNA, 76 bp, Homo sapiens
aagcctatgtgcggaagcaccagctgagaaggtggaggggacaggatggtacctaccgtagaggcccttgcgagca

SEQ ID NO: 132629 - DNA, 74 bp, Homo sapiens
aagcaccagctgagaaggtggaggggacaggatggtacctaccgtagaggcccttgcgagcagggttgacgatg

SEQ ID NO: 132630 - DNA, 74 bp, Homo sapiens
tgagaaggtggaggggacaggatggtacctaccgtagaggcccttgcgagcagggttgacgatggagaggtcat

SEQ ID NO: 132631 - DNA, 75 bp, Homo sapiens
aggggacaggatggtacctaccgtagaggcccttgcgagcagggttgacgatggagaggtcattgcagggactgc

SEQ ID NO: 132632 - DNA, 75 bp, Homo sapiens
atggtacctaccgtagaggcccttgcgagcagggttgacgatggagaggtcattgcagggactgcccccaatcac

SEQ ID NO: 132633 - DNA, 78 bp, Homo sapiens
taccgtagaggcccttgcgagcagggttgacgatggagaggtcattgcagggactgcccccaatcaccagatcgaatg

SEQ ID NO: 132634 - DNA, 77 bp, Homo sapiens
aggcccttgcgagcagggttgacgatggagaggtcattgcagggactgcccccaatcaccagatcgaatgggcccca

SEQ ID NO: 132635 - DNA, 78 bp, Homo sapiens
agcagggttgacgatggagaggtcattgcagggactgcccccaatcaccagatcgaatgggccccactcctggatctg

SEQ ID NO: 132636 - DNA, 76 bp, Homo sapiens
atggagaggtcattgcagggactgcccccaatcaccagatcgaatgggccccactcctggatctgggaggataaag

SEQ ID NO: 132637 - DNA, 78 bp, Homo sapiens
tcattgcagggactgcccccaatcaccagatcgaatgggccccactcctggatctgggaggataaaggcaacgtgatg

SEQ ID NO: 132638 - DNA, 74 bp, Homo sapiens
agggactgcccccaatcaccagatcgaatgggccccactcctggatctgggaggataaaggcaacgtgatgggc

SEQ ID NO: 132639 - DNA, 80 bp, Homo sapiens
agtgtgcagggaggggaagacgggctgcgccccacagcatggacatacatgcttctgtgtgacgctgcggacgtccccga

SEQ ID NO: 132640 - DNA, 80 bp, Homo sapiens
ggggaagacgggctgcgccccacagcatggacatacatgcttctgtgtgacgctgcggacgtccccgacgtacatgatct

SEQ ID NO: 132641 - DNA, 80 bp, Homo sapiens
agacgggctgcgccccacagcatggacatacatgcttctgtgtgacgctgcggacgtccccgacgtacatgatcttcccc

SEQ ID NO: 132642 - DNA, 84 bp, Homo sapiens
cacagcatggacatacatgcttctgtgtgacgctgcggacgtccccgacgtacatgatcttcccctggtgccgcaccatgccca

SEQ ID NO: 132643 - DNA, 80 bp, Homo sapiens
atggacatacatgcttctgtgtgacgctgcggacgtccccgacgtacatgatcttcccctggtgccgcaccatgcccacc

SEQ ID NO: 132644 - DNA, 79 bp, Homo sapiens
atgcttctgtgtgacgctgcggacgtccccgacgtacatgatcttcccctggtgccgcaccatgcccaccgtgatggag

SEQ ID NO: 132645 - DNA, 80 bp, Homo sapiens
tgtgacgctgcggacgtccccgacgtacatgatcttcccctggtgccgcaccatgcccaccgtgatggagtcctcacaca

SEQ ID NO: 132646 - DNA, 75 bp, Homo sapiens
acgtccccgacgtacatgatcttcccctggtgccgcaccatgcccaccgtgatggagtcctcacacacctccgag

SEQ ID NO: 132647 - DNA, 78 bp, Homo sapiens
acgtacatgatcttcccctggtgccgcaccatgcccaccgtgatggagtcctcacacacctccgaggcaatgtagcgg

SEQ ID NO: 132648 - DNA, 78 bp, Homo sapiens
tcttcccctggtgccgcaccatgcccaccgtgatggagtcctcacacacctccgaggcaatgtagcggtccacctgaa

SEQ ID NO: 132649 - DNA, 77 bp, Homo sapiens
ccgcaccatgcccaccgtgatggagtcctcacacacctccgaggcaatgtagcggtccacctgaatgcccaagtcct

SEQ ID NO: 132650 - DNA, 79 bp, Homo sapiens
atgcccaccgtgatggagtcctcacacacctccgaggcaatgtagcggtccacctgaatgcccaagtccttcagcacca

SEQ ID NO: 132651 - DNA, 78 bp, Homo sapiens
cgtgatggagtcctcacacacctccgaggcaatgtagcggtccacctgaatgcccaagtccttcagcaccaggagccc

SEQ ID NO: 132652 - DNA, 81 bp, Homo sapiens
acacacctccgaggcaatgtagcggtccacctgaatgcccaagtccttcagcaccaggagccctgcaccagccagcagaca

SEQ ID NO: 132653 - DNA, 81 bp, Homo sapiens
cgaggcaatgtagcggtccacctgaatgcccaagtccttcagcaccaggagccctgcaccagccagcagacagcaccgtta

SEQ ID NO: 132654 - DNA, 79 bp, Homo sapiens
aatgtagcggtccacctgaatgcccaagtccttcagcaccaggagccctgcaccagccagcagacagcaccgttacttg

SEQ ID NO: 132655 - DNA, 77 bp, Homo sapiens
gctcccccatcctgggacaaggcggccagcacctcttgggcctgcacccctcacctgtagcgattccatcaaagaga

SEQ ID NO: 132656 - DNA, 78 bp, Homo sapiens
atcctgggacaaggcggccagcacctcttgggcctgcacccctcacctgtagcgattccatcaaagagagacagcacc

SEQ ID NO: 132657 - DNA, 77 bp, Homo sapiens
acaaggcggccagcacctcttgggcctgcacccctcacctgtagcgattccatcaaagagagacagcacccggatgg

SEQ ID NO: 132658 - DNA, 77 bp, Homo sapiens
acctcttgggcctgcacccctcacctgtagcgattccatcaaagagagacagcacccggatgggcttcctcttctca

SEQ ID NO: 132659 - DNA, 79 bp, Homo sapiens
ttgggcctgcacccctcacctgtagcgattccatcaaagagagacagcacccggatgggcttcctcttctcagctggga

SEQ ID NO: 132660 - DNA, 77 bp, Homo sapiens
ctcacctgtagcgattccatcaaagagagacagcacccggatgggcttcctcttctcagctgggacaggtgggtaaa

SEQ ID NO: 132661 - DNA, 75 bp, Homo sapiens
tgtagcgattccatcaaagagagacagcacccggatgggcttcctcttctcagctgggacaggtgggtaaacctt

SEQ ID NO: 132662 - DNA, 72 bp, Homo sapiens
atcaaagagagacagcacccggatgggcttcctcttctcagctgggacaggtgggtaaacctttggagggtc

SEQ ID NO: 132663 - DNA, 72 bp, Homo sapiens
acagcacccggatgggcttcctcttctcagctgggacaggtgggtaaacctttggagggtcctaagcagtga

SEQ ID NO: 132664 - DNA, 74 bp, Homo sapiens
atgggcttcctcttctcagctgggacaggtgggtaaacctttggagggtcctaagcagtgagcacaacaggtca

SEQ ID NO: 132665 - DNA, 77 bp, Homo sapiens
ttcctcttctcagctgggacaggtgggtaaacctttggagggtcctaagcagtgagcacaacaggtcagatgcaggc

SEQ ID NO: 132666 - DNA, 75 bp, Homo sapiens
tgggacaggtgggtaaacctttggagggtcctaagcagtgagcacaacaggtcagatgcaggcccagcggtgtcc

SEQ ID NO: 132667 - DNA, 76 bp, Homo sapiens
gctcagccaagggagctcgagaccgcgccccaggcccagcactcacaaattcctggtcgtggttattagcgaagaa

SEQ ID NO: 132668 - DNA, 74 bp, Homo sapiens
aagggagctcgagaccgcgccccaggcccagcactcacaaattcctggtcgtggttattagcgaagaacatctg

SEQ ID NO: 132669 - DNA, 73 bp, Homo sapiens
agaccgcgccccaggcccagcactcacaaattcctggtcgtggttattagcgaagaacatctggagccgggag

SEQ ID NO: 132670 - DNA, 75 bp, Homo sapiens
caggcccagcactcacaaattcctggtcgtggttattagcgaagaacatctggagccgggagggccagtcctctc

SEQ ID NO: 132671 - DNA, 74 bp, Homo sapiens
actcacaaattcctggtcgtggttattagcgaagaacatctggagccgggagggccagtcctctcgccgccgca

SEQ ID NO: 132672 - DNA, 74 bp, Homo sapiens
aaattcctggtcgtggttattagcgaagaacatctggagccgggagggccagtcctctcgccgccgcagcagcc

SEQ ID NO: 132673 - DNA, 73 bp, Homo sapiens
tggttattagcgaagaacatctggagccgggagggccagtcctctcgccgccgcagcagcccgtaggtaccct

SEQ ID NO: 132674 - DNA, 74 bp, Homo sapiens
ttagcgaagaacatctggagccgggagggccagtcctctcgccgccgcagcagcccgtaggtacccttgtgccc

SEQ ID NO: 132675 - DNA, 76 bp, Homo sapiens
atctggagccgggagggccagtcctctcgccgccgcagcagcccgtaggtacccttgtgcccgcacatgtagcagt

SEQ ID NO: 132676 - DNA, 74 bp, Homo sapiens
ccgggagggccagtcctctcgccgccgcagcagcccgtaggtacccttgtgcccgcacatgtagcagttccagg

SEQ ID NO: 132677 - DNA, 75 bp, Homo sapiens
tcctctcgccgccgcagcagcccgtaggtacccttgtgcccgcacatgtagcagttccaggggtcttccttaatg

SEQ ID NO: 132678 - DNA, 75 bp, Homo sapiens
ccgccgcagcagcccgtaggtacccttgtgcccgcacatgtagcagttccaggggtcttccttaatggctgcctg

SEQ ID NO: 132679 - DNA, 73 bp, Homo sapiens
agcccgtaggtacccttgtgcccgcacatgtagcagttccaggggtcttccttaatggctgcctgggcagccc

SEQ ID NO: 132680 - DNA, 73 bp, Homo sapiens
gtacccttgtgcccgcacatgtagcagttccaggggtcttccttaatggctgcctgggcagcccccggcccca

SEQ ID NO: 132681 - DNA, 74 bp, Homo sapiens
cacatgtagcagttccaggggtcttccttaatggctgcctgggcagcccccggccccaccaagaggtccacaca

SEQ ID NO: 132682 - DNA, 73 bp, Homo sapiens
gtcttccttaatggctgcctgggcagcccccggccccaccaagaggtccacacactccacgcaaaagcacctg

SEQ ID NO: 132683 - DNA, 74 bp, Homo sapiens
ttaatggctgcctgggcagcccccggccccaccaagaggtccacacactccacgcaaaagcacctggaaggaga

SEQ ID NO: 132684 - DNA, 75 bp, Homo sapiens
tgggcagcccccggccccaccaagaggtccacacactccacgcaaaagcacctggaaggagacccagtgagcaga

SEQ ID NO: 132685 - DNA, 76 bp, Homo sapiens
ccggccccaccaagaggtccacacactccacgcaaaagcacctggaaggagacccagtgagcagaggagactctca

SEQ ID NO: 132686 - DNA, 79 bp, Homo sapiens
cctggggcccagctaaggagaccactggaggccacaacagcctcacctgcagcagttgttgtttccgcacatgagcacc

SEQ ID NO: 132687 - DNA, 80 bp, Homo sapiens
ccagctaaggagaccactggaggccacaacagcctcacctgcagcagttgttgtttccgcacatgagcacctcacggccc

SEQ ID NO: 132688 - DNA, 82 bp, Homo sapiens
agaccactggaggccacaacagcctcacctgcagcagttgttgtttccgcacatgagcacctcacggcccccacagcagatg

SEQ ID NO: 132689 - DNA, 83 bp, Homo sapiens
aggccacaacagcctcacctgcagcagttgttgtttccgcacatgagcacctcacggcccccacagcagatggtgcagtagga

SEQ ID NO: 132690 - DNA, 82 bp, Homo sapiens
aacagcctcacctgcagcagttgttgtttccgcacatgagcacctcacggcccccacagcagatggtgcagtaggactggta

SEQ ID NO: 132691 - DNA, 79 bp, Homo sapiens
agcagttgttgtttccgcacatgagcacctcacggcccccacagcagatggtgcagtaggactggtagccgtcgtcgtc

SEQ ID NO: 132692 - DNA, 78 bp, Homo sapiens
ttgttgtttccgcacatgagcacctcacggcccccacagcagatggtgcagtaggactggtagccgtcgtcgtcgtac

SEQ ID NO: 132693 - DNA, 79 bp, Homo sapiens
atgagcacctcacggcccccacagcagatggtgcagtaggactggtagccgtcgtcgtcgtactggtacgcacactcca

SEQ ID NO: 132694 - DNA, 76 bp, Homo sapiens
acctcacggcccccacagcagatggtgcagtaggactggtagccgtcgtcgtcgtactggtacgcacactccagaa

SEQ ID NO: 132695 - DNA, 81 bp, Homo sapiens
acagcagatggtgcagtaggactggtagccgtcgtcgtcgtactggtacgcacactccagaaagcagttctagacagcagc

SEQ ID NO: 132696 - DNA, 78 bp, Homo sapiens
atggtgcagtaggactggtagccgtcgtcgtcgtactggtacgcacactccagaaagcagttctagacagcagcggga

SEQ ID NO: 132697 - DNA, 75 bp, Homo sapiens
actggtagccgtcgtcgtcgtactggtacgcacactccagaaagcagttctagacagcagcgggaagggtcagaa

SEQ ID NO: 132698 - DNA, 75 bp, Homo sapiens
tagccgtcgtcgtcgtactggtacgcacactccagaaagcagttctagacagcagcgggaagggtcagaaaccac

SEQ ID NO: 132699 - DNA, 73 bp, Homo sapiens
tcagccagaaggccgaagggccggcctcaacggcacctctcctgggtgggtgtgctcctaccttgcagttttg

SEQ ID NO: 132700 - DNA, 72 bp, Homo sapiens
aagggccggcctcaacggcacctctcctgggtgggtgtgctcctaccttgcagttttggcacattcctccaa

SEQ ID NO: 132701 - DNA, 72 bp, Homo sapiens
cctcaacggcacctctcctgggtgggtgtgctcctaccttgcagttttggcacattcctccaacgaagaggg

SEQ ID NO: 132702 - DNA, 71 bp, Homo sapiens
acctctcctgggtgggtgtgctcctaccttgcagttttggcacattcctccaacgaagagggggtgttcca

SEQ ID NO: 132703 - DNA, 72 bp, Homo sapiens
gtgggtgtgctcctaccttgcagttttggcacattcctccaacgaagagggggtgttccagggtaacattga

SEQ ID NO: 132704 - DNA, 72 bp, Homo sapiens
tcctaccttgcagttttggcacattcctccaacgaagagggggtgttccagggtaacattgaggctcccaca

SEQ ID NO: 132705 - DNA, 72 bp, Homo sapiens
ccttgcagttttggcacattcctccaacgaagagggggtgttccagggtaacattgaggctcccacaggaga

SEQ ID NO: 132706 - DNA, 76 bp, Homo sapiens
acattcctccaacgaagagggggtgttccagggtaacattgaggctcccacaggagatgcagatgtctggaaagca

SEQ ID NO: 132707 - DNA, 75 bp, Homo sapiens
cctccaacgaagagggggtgttccagggtaacattgaggctcccacaggagatgcagatgtctggaaagcagagg

SEQ ID NO: 132708 - DNA, 76 bp, Homo sapiens
gggtgttccagggtaacattgaggctcccacaggagatgcagatgtctggaaagcagagggaggggatggggtgag

SEQ ID NO: 132709 - DNA, 77 bp, Homo sapiens
ttccagggtaacattgaggctcccacaggagatgcagatgtctggaaagcagagggaggggatggggtgagtaccac

SEQ ID NO: 132710 - DNA, 76 bp, Homo sapiens
attgaggctcccacaggagatgcagatgtctggaaagcagagggaggggatggggtgagtaccaccgaagggcctc

SEQ ID NO: 132711 - DNA, 75 bp, Homo sapiens
aaaccttcctaagtgcctctgctactctgccccatgccacactaggagtgccagagttcccaggcaacaaactta

SEQ ID NO: 132712 - DNA, 78 bp, Homo sapiens
taagtgcctctgctactctgccccatgccacactaggagtgccagagttcccaggcaacaaacttaccctcaatgttc

SEQ ID NO: 132713 - DNA, 75 bp, Homo sapiens
ctactctgccccatgccacactaggagtgccagagttcccaggcaacaaacttaccctcaatgttccggcacttc

SEQ ID NO: 132714 - DNA, 76 bp, Homo sapiens
catgccacactaggagtgccagagttcccaggcaacaaacttaccctcaatgttccggcacttctgccgcacctcg

SEQ ID NO: 132715 - DNA, 74 bp, Homo sapiens
acactaggagtgccagagttcccaggcaacaaacttaccctcaatgttccggcacttctgccgcacctcgtaca

SEQ ID NO: 132716 - DNA, 75 bp, Homo sapiens
agagttcccaggcaacaaacttaccctcaatgttccggcacttctgccgcacctcgtacaccagccgctctgcaa

SEQ ID NO: 132717 - DNA, 74 bp, Homo sapiens
aggcaacaaacttaccctcaatgttccggcacttctgccgcacctcgtacaccagccgctctgcaaggggagga

SEQ ID NO: 132718 - DNA, 75 bp, Homo sapiens
aaacttaccctcaatgttccggcacttctgccgcacctcgtacaccagccgctctgcaaggggaggagagctggc

SEQ ID NO: 132719 - DNA, 79 bp, Homo sapiens
ctcaatgttccggcacttctgccgcacctcgtacaccagccgctctgcaaggggaggagagctggcgtcagaggaggcc

SEQ ID NO: 132720 - DNA, 79 bp, Homo sapiens
acttctgccgcacctcgtacaccagccgctctgcaaggggaggagagctggcgtcagaggaggccgcgcctgctcctcg

SEQ ID NO: 132721 - DNA, 80 bp, Homo sapiens
acctcgtacaccagccgctctgcaaggggaggagagctggcgtcagaggaggccgcgcctgctcctcggatgcaggcctc

SEQ ID NO: 132722 - DNA, 81 bp, Homo sapiens
aggagagctggcgtcagaggaggccgcgcctgctcctcggatgcaggcctcctggtgccaccctctccagaagcaggccaa

SEQ ID NO: 132723 - DNA, 78 bp, Homo sapiens
cgtcagaggaggccgcgcctgctcctcggatgcaggcctcctggtgccaccctctccagaagcaggccaactacctct

SEQ ID NO: 132724 - DNA, 79 bp, Homo sapiens
aggaggccgcgcctgctcctcggatgcaggcctcctggtgccaccctctccagaagcaggccaactacctcttgtgcgc

SEQ ID NO: 132725 - DNA, 81 bp, Homo sapiens
gatgcaggcctcctggtgccaccctctccagaagcaggccaactacctcttgtgcgctcatcaataatctccttgaccttg

SEQ ID NO: 132726 - DNA, 79 bp, Homo sapiens
accctctccagaagcaggccaactacctcttgtgcgctcatcaataatctccttgaccttgggcttctccgctgtgctc

SEQ ID NO: 132727 - DNA, 77 bp, Homo sapiens
agaagcaggccaactacctcttgtgcgctcatcaataatctccttgaccttgggcttctccgctgtgctcttccggg

SEQ ID NO: 132728 - DNA, 74 bp, Homo sapiens
aactacctcttgtgcgctcatcaataatctccttgaccttgggcttctccgctgtgctcttccggggctttttg

SEQ ID NO: 132729 - DNA, 77 bp, Homo sapiens
ctcttgtgcgctcatcaataatctccttgaccttgggcttctccgctgtgctcttccggggctttttggctggtgga

SEQ ID NO: 132730 - DNA, 74 bp, Homo sapiens
tcaataatctccttgaccttgggcttctccgctgtgctcttccggggctttttggctggtggaggtggtgcgta

SEQ ID NO: 132731 - DNA, 73 bp, Homo sapiens
aatctccttgaccttgggcttctccgctgtgctcttccggggctttttggctggtggaggtggtgcgtaggca

SEQ ID NO: 132732 - DNA, 76 bp, Homo sapiens
ttgggcttctccgctgtgctcttccggggctttttggctggtggaggtggtgcgtaggcagctgcctcaggttcca

SEQ ID NO: 132733 - DNA, 77 bp, Homo sapiens
tctccgctgtgctcttccggggctttttggctggtggaggtggtgcgtaggcagctgcctcaggttccacccacatg

SEQ ID NO: 132734 - DNA, 75 bp, Homo sapiens
tcttccggggctttttggctggtggaggtggtgcgtaggcagctgcctcaggttccacccacatgtccgtgtaca

SEQ ID NO: 132735 - DNA, 75 bp, Homo sapiens
tttttggctggtggaggtggtgcgtaggcagctgcctcaggttccacccacatgtccgtgtacacttctttgtag

SEQ ID NO: 132736 - DNA, 76 bp, Homo sapiens
tggaggtggtgcgtaggcagctgcctcaggttccacccacatgtccgtgtacacttctttgtagggattcttctct

SEQ ID NO: 132737 - DNA, 77 bp, Homo sapiens
tggtgcgtaggcagctgcctcaggttccacccacatgtccgtgtacacttctttgtagggattcttctcttctggag

SEQ ID NO: 132738 - DNA, 75 bp, Homo sapiens
agctgcctcaggttccacccacatgtccgtgtacacttctttgtagggattcttctcttctggaggaggaaagca

SEQ ID NO: 132739 - DNA, 73 bp, Homo sapiens
aggttccacccacatgtccgtgtacacttctttgtagggattcttctcttctggaggaggaaagcaggtgcca

SEQ ID NO: 132740 - DNA, 74 bp, Homo sapiens
acatgtccgtgtacacttctttgtagggattcttctcttctggaggaggaaagcaggtgccaaggtcagttaca

SEQ ID NO: 132741 - DNA, 74 bp, Homo sapiens
tggatctgcctggcgggcaggggtcccagaaagctgggtgccctcatttaccttctggtggctccaggccctta

SEQ ID NO: 132742 - DNA, 70 bp, Homo sapiens
gggcaggggtcccagaaagctgggtgccctcatttaccttctggtggctccaggcccttagggccagaag

SEQ ID NO: 132743 - DNA, 71 bp, Homo sapiens
gggtcccagaaagctgggtgccctcatttaccttctggtggctccaggcccttagggccagaaggctggaa

SEQ ID NO: 132744 - DNA, 70 bp, Homo sapiens
aagctgggtgccctcatttaccttctggtggctccaggcccttagggccagaaggctggaagccccccag

SEQ ID NO: 132745 - DNA, 71 bp, Homo sapiens
atttaccttctggtggctccaggcccttagggccagaaggctggaagccccccagggcccattcaatcatg

SEQ ID NO: 132746 - DNA, 75 bp, Homo sapiens
tggtggctccaggcccttagggccagaaggctggaagccccccagggcccattcaatcatgggcttgttctgcac

SEQ ID NO: 132747 - DNA, 72 bp, Homo sapiens
aggcccttagggccagaaggctggaagccccccagggcccattcaatcatgggcttgttctgcacctccacg

SEQ ID NO: 132748 - DNA, 75 bp, Homo sapiens
ttagggccagaaggctggaagccccccagggcccattcaatcatgggcttgttctgcacctccacggccttggca

SEQ ID NO: 132749 - DNA, 77 bp, Homo sapiens
aaggctggaagccccccagggcccattcaatcatgggcttgttctgcacctccacggccttggcagtgtcactctca

SEQ ID NO: 132750 - DNA, 81 bp, Homo sapiens
cccagggcccattcaatcatgggcttgttctgcacctccacggccttggcagtgtcactctcatcgctgtcgtggcacacc

SEQ ID NO: 132751 - DNA, 81 bp, Homo sapiens
attcaatcatgggcttgttctgcacctccacggccttggcagtgtcactctcatcgctgtcgtggcacaccgggaacagct

SEQ ID NO: 132752 - DNA, 80 bp, Homo sapiens
atcatgggcttgttctgcacctccacggccttggcagtgtcactctcatcgctgtcgtggcacaccgggaacagcttccc

SEQ ID NO: 132753 - DNA, 81 bp, Homo sapiens
ttctgcacctccacggccttggcagtgtcactctcatcgctgtcgtggcacaccgggaacagcttccccgcgcggctgctg

SEQ ID NO: 132754 - DNA, 79 bp, Homo sapiens
ctccacggccttggcagtgtcactctcatcgctgtcgtggcacaccgggaacagcttccccgcgcggctgctggccacc

SEQ ID NO: 132755 - DNA, 81 bp, Homo sapiens
ttggcagtgtcactctcatcgctgtcgtggcacaccgggaacagcttccccgcgcggctgctggccacctggagggtgaca

SEQ ID NO: 132756 - DNA, 77 bp, Homo sapiens
actctcatcgctgtcgtggcacaccgggaacagcttccccgcgcggctgctggccacctggagggtgacacgccagg

SEQ ID NO: 132757 - DNA, 73 bp, Homo sapiens
ctgtcgtggcacaccgggaacagcttccccgcgcggctgctggccacctggagggtgacacgccagggttggg

SEQ ID NO: 132758 - DNA, 71 bp, Homo sapiens
acaccgggaacagcttccccgcgcggctgctggccacctggagggtgacacgccagggttggggttgtcag

SEQ ID NO: 132759 - DNA, 80 bp, Homo sapiens
ctagtgctctaggctcctcctccgagctcccagcagggacactcacctgcaggacctcgtagatggctttgcggtacatg

SEQ ID NO: 132760 - DNA, 80 bp, Homo sapiens
taggctcctcctccgagctcccagcagggacactcacctgcaggacctcgtagatggctttgcggtacatgggctgcttg

SEQ ID NO: 132761 - DNA, 79 bp, Homo sapiens
ctccgagctcccagcagggacactcacctgcaggacctcgtagatggctttgcggtacatgggctgcttgttgtacgtg

SEQ ID NO: 132762 - DNA, 79 bp, Homo sapiens
cagcagggacactcacctgcaggacctcgtagatggctttgcggtacatgggctgcttgttgtacgtggcctggtggaa

SEQ ID NO: 132763 - DNA, 79 bp, Homo sapiens
actcacctgcaggacctcgtagatggctttgcggtacatgggctgcttgttgtacgtggcctggtggaacgcactgcaa

SEQ ID NO: 132764 - DNA, 76 bp, Homo sapiens
aggacctcgtagatggctttgcggtacatgggctgcttgttgtacgtggcctggtggaacgcactgcaaaacgagc

SEQ ID NO: 132765 - DNA, 82 bp, Homo sapiens
tcgtagatggctttgcggtacatgggctgcttgttgtacgtggcctggtggaacgcactgcaaaacgagctcagcggcatca

SEQ ID NO: 132766 - DNA, 81 bp, Homo sapiens
ctttgcggtacatgggctgcttgttgtacgtggcctggtggaacgcactgcaaaacgagctcagcggcatcagcttctcaa

SEQ ID NO: 132767 - DNA, 82 bp, Homo sapiens
acatgggctgcttgttgtacgtggcctggtggaacgcactgcaaaacgagctcagcggcatcagcttctcaacacacacctg

SEQ ID NO: 132768 - DNA, 79 bp, Homo sapiens
ttgttgtacgtggcctggtggaacgcactgcaaaacgagctcagcggcatcagcttctcaacacacacctggggggaca

SEQ ID NO: 132769 - DNA, 78 bp, Homo sapiens
ctggtggaacgcactgcaaaacgagctcagcggcatcagcttctcaacacacacctggggggacaagccaggccttgt

SEQ ID NO: 132770 - DNA, 78 bp, Homo sapiens
aacgcactgcaaaacgagctcagcggcatcagcttctcaacacacacctggggggacaagccaggccttgtttgccga

SEQ ID NO: 132771 - DNA, 69 bp, Homo sapiens
atcaagaaccttcccccaccccaggctactgccaaaccccacaacttaccactgagaatttgccgtctc

SEQ ID NO: 132772 - DNA, 70 bp, Homo sapiens
ccccaccccaggctactgccaaaccccacaacttaccactgagaatttgccgtctccgaaccacatgacc

SEQ ID NO: 132773 - DNA, 72 bp, Homo sapiens
ggctactgccaaaccccacaacttaccactgagaatttgccgtctccgaaccacatgacccagcgggtgcct

SEQ ID NO: 132774 - DNA, 73 bp, Homo sapiens
aaaccccacaacttaccactgagaatttgccgtctccgaaccacatgacccagcgggtgccttcagctgctcg

SEQ ID NO: 132775 - DNA, 75 bp, Homo sapiens
acaacttaccactgagaatttgccgtctccgaaccacatgacccagcgggtgccttcagctgctcggctccggcc

SEQ ID NO: 132776 - DNA, 78 bp, Homo sapiens
tgagaatttgccgtctccgaaccacatgacccagcgggtgccttcagctgctcggctccggcccgtcatccaccaaga

SEQ ID NO: 132777 - DNA, 77 bp, Homo sapiens
tttgccgtctccgaaccacatgacccagcgggtgccttcagctgctcggctccggcccgtcatccaccaagacacaa

SEQ ID NO: 132778 - DNA, 79 bp, Homo sapiens
ccacatgacccagcgggtgccttcagctgctcggctccggcccgtcatccaccaagacacaatgcggcctggccaccag

SEQ ID NO: 132779 - DNA, 79 bp, Homo sapiens
tgacccagcgggtgccttcagctgctcggctccggcccgtcatccaccaagacacaatgcggcctggccaccaggagaa

SEQ ID NO: 132780 - DNA, 77 bp, Homo sapiens
cttcagctgctcggctccggcccgtcatccaccaagacacaatgcggcctggccaccaggagaagccccgcagtttc

SEQ ID NO: 132781 - DNA, 74 bp, Homo sapiens
ctgctcggctccggcccgtcatccaccaagacacaatgcggcctggccaccaggagaagccccgcagtttcccc

SEQ ID NO: 132782 - DNA, 74 bp, Homo sapiens
tccggcccgtcatccaccaagacacaatgcggcctggccaccaggagaagccccgcagtttcccccacaccagc

SEQ ID NO: 132783 - DNA, 73 bp, Homo sapiens
accaagacacaatgcggcctggccaccaggagaagccccgcagtttcccccacaccagctccccaatgccaaa

SEQ ID NO: 132784 - DNA, 72 bp, Homo sapiens
acacaatgcggcctggccaccaggagaagccccgcagtttcccccacaccagctccccaatgccaaagcccc

SEQ ID NO: 132785 - DNA, 71 bp, Homo sapiens
tggccaccaggagaagccccgcagtttcccccacaccagctccccaatgccaaagccccggccgtcctgga

SEQ ID NO: 132786 - DNA, 69 bp, Homo sapiens
ccaggagaagccccgcagtttcccccacaccagctccccaatgccaaagccccggccgtcctggagccc

SEQ ID NO: 132787 - DNA, 71 bp, Homo sapiens
cagtttcccccacaccagctccccaatgccaaagccccggccgtcctggagccccaaggagcagaaatcat

SEQ ID NO: 132788 - DNA, 75 bp, Homo sapiens
aggcccccggaaagagctggccacggctggtgaagaagccgctcacctcgtactctggctcgtcatcgcctgctt

SEQ ID NO: 132789 - DNA, 79 bp, Homo sapiens
aaagagctggccacggctggtgaagaagccgctcacctcgtactctggctcgtcatcgcctgctttggtggcattcttg

SEQ ID NO: 132790 - DNA, 79 bp, Homo sapiens
ctggccacggctggtgaagaagccgctcacctcgtactctggctcgtcatcgcctgctttggtggcattcttgtcccca

SEQ ID NO: 132791 - DNA, 79 bp, Homo sapiens
tggtgaagaagccgctcacctcgtactctggctcgtcatcgcctgctttggtggcattcttgtccccagcatcggaccc

SEQ ID NO: 132792 - DNA, 76 bp, Homo sapiens
aagccgctcacctcgtactctggctcgtcatcgcctgctttggtggcattcttgtccccagcatcggaccccacgg

SEQ ID NO: 132793 - DNA, 78 bp, Homo sapiens
tcgtactctggctcgtcatcgcctgctttggtggcattcttgtccccagcatcggaccccacgggctcaggcgtggta

SEQ ID NO: 132794 - DNA, 79 bp, Homo sapiens
tggctcgtcatcgcctgctttggtggcattcttgtccccagcatcggaccccacgggctcaggcgtggtagccacagtg

SEQ ID NO: 132795 - DNA, 75 bp, Homo sapiens
tgctttggtggcattcttgtccccagcatcggaccccacgggctcaggcgtggtagccacagtgggggatgcggg

SEQ ID NO: 132796 - DNA, 75 bp, Homo sapiens
tggtggcattcttgtccccagcatcggaccccacgggctcaggcgtggtagccacagtgggggatgcggggtcag

SEQ ID NO: 132797 - DNA, 78 bp, Homo sapiens
ttgtccccagcatcggaccccacgggctcaggcgtggtagccacagtgggggatgcggggtcagtgggctgctgcaca

SEQ ID NO: 132798 - DNA, 77 bp, Homo sapiens
atcggaccccacgggctcaggcgtggtagccacagtgggggatgcggggtcagtgggctgctgcacagcaggagggc

SEQ ID NO: 132799 - DNA, 79 bp, Homo sapiens
acgggctcaggcgtggtagccacagtgggggatgcggggtcagtgggctgctgcacagcaggagggctggcctcctcca

SEQ ID NO: 132800 - DNA, 79 bp, Homo sapiens
aggcgtggtagccacagtgggggatgcggggtcagtgggctgctgcacagcaggagggctggcctcctccaccttctga

SEQ ID NO: 132801 - DNA, 76 bp, Homo sapiens
acagtgggggatgcggggtcagtgggctgctgcacagcaggagggctggcctcctccaccttctgagactccccgg

SEQ ID NO: 132802 - DNA, 75 bp, Homo sapiens
tgcggggtcagtgggctgctgcacagcaggagggctggcctcctccaccttctgagactccccgggcccctggtt

SEQ ID NO: 132803 - DNA, 76 bp, Homo sapiens
tcagtgggctgctgcacagcaggagggctggcctcctccaccttctgagactccccgggcccctggttttcttcca

SEQ ID NO: 132804 - DNA, 74 bp, Homo sapiens
cacagcaggagggctggcctcctccaccttctgagactccccgggcccctggttttcttccacagcattcattc

SEQ ID NO: 132805 - DNA, 74 bp, Homo sapiens
agggctggcctcctccaccttctgagactccccgggcccctggttttcttccacagcattcattcctgcaatga

SEQ ID NO: 132806 - DNA, 73 bp, Homo sapiens
tcctccaccttctgagactccccgggcccctggttttcttccacagcattcattcctgcaatgaccttggctt

SEQ ID NO: 132807 - DNA, 72 bp, Homo sapiens
accttctgagactccccgggcccctggttttcttccacagcattcattcctgcaatgaccttggctttcttc

SEQ ID NO: 132808 - DNA, 73 bp, Homo sapiens
ccgggcccctggttttcttccacagcattcattcctgcaatgaccttggctttcttctcagcctggggaaaca

SEQ ID NO: 132809 - DNA, 73 bp, Homo sapiens
ctggttttcttccacagcattcattcctgcaatgaccttggctttcttctcagcctggggaaacaaaaaacaa

SEQ ID NO: 132810 - DNA, 72 bp, Homo sapiens
accaacaaattaataagccaaaccccagttattctcccattgcacagcctccatcctttcaccgtatcacac

SEQ ID NO: 132811 - DNA, 72 bp, Homo sapiens
aattaataagccaaaccccagttattctcccattgcacagcctccatcctttcaccgtatcacactcgtctt

SEQ ID NO: 132812 - DNA, 75 bp, Homo sapiens
aaaccccagttattctcccattgcacagcctccatcctttcaccgtatcacactcgtctttcaggctacgatcca

SEQ ID NO: 132813 - DNA, 78 bp, Homo sapiens
tattctcccattgcacagcctccatcctttcaccgtatcacactcgtctttcaggctacgatccacgcgcccattcct

SEQ ID NO: 132814 - DNA, 78 bp, Homo sapiens
attgcacagcctccatcctttcaccgtatcacactcgtctttcaggctacgatccacgcgcccattccttctcacaac

SEQ ID NO: 132815 - DNA, 76 bp, Homo sapiens
tccatcctttcaccgtatcacactcgtctttcaggctacgatccacgcgcccattccttctcacaacccgctccag

SEQ ID NO: 132816 - DNA, 76 bp, Homo sapiens
ttcaccgtatcacactcgtctttcaggctacgatccacgcgcccattccttctcacaacccgctccaggatcccta

SEQ ID NO: 132817 - DNA, 75 bp, Homo sapiens
atcacactcgtctttcaggctacgatccacgcgcccattccttctcacaacccgctccaggatccctacaaagga

SEQ ID NO: 132818 - DNA, 75 bp, Homo sapiens
tctttcaggctacgatccacgcgcccattccttctcacaacccgctccaggatccctacaaaggagaatgaaatc

SEQ ID NO: 132819 - DNA, 74 bp, Homo sapiens
tacgatccacgcgcccattccttctcacaacccgctccaggatccctacaaaggagaatgaaatccttgatact

SEQ ID NO: 132820 - DNA, 75 bp, Homo sapiens
cattccttctcacaacccgctccaggatccctacaaaggagaatgaaatccttgatacttagctctgagaaccat

SEQ ID NO: 132821 - DNA, 74 bp, Homo sapiens
tcacaacccgctccaggatccctacaaaggagaatgaaatccttgatacttagctctgagaaccattagccttt

SEQ ID NO: 132822 - DNA, 64 bp, Homo sapiens
cctgccgcctccccgcccccggtctccccggggctccgtccaggaacctacccataaggccagg

SEQ ID NO: 132823 - DNA, 69 bp, Homo sapiens
cccccggtctccccggggctccgtccaggaacctacccataaggccaggtgcagcccctctgcagtcgc

SEQ ID NO: 132824 - DNA, 75 bp, Homo sapiens
gtctccccggggctccgtccaggaacctacccataaggccaggtgcagcccctctgcagtcgcgctcaggtgtga

SEQ ID NO: 132825 - DNA, 77 bp, Homo sapiens
ctccgtccaggaacctacccataaggccaggtgcagcccctctgcagtcgcgctcaggtgtgagccgcggccctgaa

SEQ ID NO: 132826 - DNA, 78 bp, Homo sapiens
aacctacccataaggccaggtgcagcccctctgcagtcgcgctcaggtgtgagccgcggccctgaagctctggaagta

SEQ ID NO: 132827 - DNA, 80 bp, Homo sapiens
aaggccaggtgcagcccctctgcagtcgcgctcaggtgtgagccgcggccctgaagctctggaagtagctgcccgtcttg

SEQ ID NO: 132828 - DNA, 79 bp, Homo sapiens
aggtgcagcccctctgcagtcgcgctcaggtgtgagccgcggccctgaagctctggaagtagctgcccgtcttggggga

SEQ ID NO: 132829 - DNA, 76 bp, Homo sapiens
ccctctgcagtcgcgctcaggtgtgagccgcggccctgaagctctggaagtagctgcccgtcttgggggaggggaa

SEQ ID NO: 132830 - DNA, 72 bp, Homo sapiens
ctcaggtgtgagccgcggccctgaagctctggaagtagctgcccgtcttgggggaggggaagggggcgatgg

SEQ ID NO: 132831 - DNA, 72 bp, Homo sapiens
gtgtgagccgcggccctgaagctctggaagtagctgcccgtcttgggggaggggaagggggcgatggggctg

SEQ ID NO: 132832 - DNA, 68 bp, Homo sapiens
ccctgaagctctggaagtagctgcccgtcttgggggaggggaagggggcgatggggctgggggcggag

SEQ ID NO: 132833 - DNA, 67 bp, Homo sapiens
tggaagtagctgcccgtcttgggggaggggaagggggcgatggggctgggggcggagggggccactg

SEQ ID NO: 132834 - DNA, 66 bp, Homo sapiens
tagctgcccgtcttgggggaggggaagggggcgatggggctgggggcggagggggccactgggagg

SEQ ID NO: 132835 - DNA, 63 bp, Homo sapiens
tcttgggggaggggaagggggcgatggggctgggggcggagggggccactgggaggggagggg

SEQ ID NO: 132836 - DNA, 74 bp, Homo sapiens
ttttccagttctgcaggacgggctggggcccaggccagaaggcgcctcacctcccttttccagcgtgccagcca

SEQ ID NO: 132837 - DNA, 71 bp, Homo sapiens
aggacgggctggggcccaggccagaaggcgcctcacctcccttttccagcgtgccagccactcgtcccgct

SEQ ID NO: 132838 - DNA, 78 bp, Homo sapiens
tggggcccaggccagaaggcgcctcacctcccttttccagcgtgccagccactcgtcccgcttgcgcttgctgatgta

SEQ ID NO: 132839 - DNA, 76 bp, Homo sapiens
aggccagaaggcgcctcacctcccttttccagcgtgccagccactcgtcccgcttgcgcttgctgatgtagtaggg

SEQ ID NO: 132840 - DNA, 74 bp, Homo sapiens
aggcgcctcacctcccttttccagcgtgccagccactcgtcccgcttgcgcttgctgatgtagtaggggtcccc

SEQ ID NO: 132841 - DNA, 74 bp, Homo sapiens
ccttttccagcgtgccagccactcgtcccgcttgcgcttgctgatgtagtaggggtcccccgcctggaaggtga

SEQ ID NO: 132842 - DNA, 77 bp, Homo sapiens
agcgtgccagccactcgtcccgcttgcgcttgctgatgtagtaggggtcccccgcctggaaggtgagcctcggcatg

SEQ ID NO: 132843 - DNA, 75 bp, Homo sapiens
actcgtcccgcttgcgcttgctgatgtagtaggggtcccccgcctggaaggtgagcctcggcatgggccgctgac

SEQ ID NO: 132844 - DNA, 77 bp, Homo sapiens
ttgcgcttgctgatgtagtaggggtcccccgcctggaaggtgagcctcggcatgggccgctgacggaggctggactc

SEQ ID NO: 132845 - DNA, 75 bp, Homo sapiens
cttgctgatgtagtaggggtcccccgcctggaaggtgagcctcggcatgggccgctgacggaggctggactccca

SEQ ID NO: 132846 - DNA, 73 bp, Homo sapiens
tagtaggggtcccccgcctggaaggtgagcctcggcatgggccgctgacggaggctggactcccagcccaagc

SEQ ID NO: 132847 - DNA, 74 bp, Homo sapiens
cccgcctggaaggtgagcctcggcatgggccgctgacggaggctggactcccagcccaagccaccccgcagccg

SEQ ID NO: 132848 - DNA, 72 bp, Homo sapiens
aaggtgagcctcggcatgggccgctgacggaggctggactcccagcccaagccaccccgcagccggccccgg

SEQ ID NO: 132849 - DNA, 73 bp, Homo sapiens
catgggccgctgacggaggctggactcccagcccaagccaccccgcagccggccccgggagccctaggacaga

SEQ ID NO: 132850 - DNA, 73 bp, Homo sapiens
ccgctgacggaggctggactcccagcccaagccaccccgcagccggccccgggagccctaggacagagagaca

SEQ ID NO: 132851 - DNA, 74 bp, Homo sapiens
tggactcccagcccaagccaccccgcagccggccccgggagccctaggacagagagacagacattagggcatta

SEQ ID NO: 132852 - DNA, 75 bp, Homo sapiens
cctcacacacactcgccacccgtgtccttcttctagaatcaggatccacagagcccctgggggtggaacacttgc

SEQ ID NO: 132853 - DNA, 72 bp, Homo sapiens
actcgccacccgtgtccttcttctagaatcaggatccacagagcccctgggggtggaacacttgcctccatt

SEQ ID NO: 132854 - DNA, 76 bp, Homo sapiens
gtgtccttcttctagaatcaggatccacagagcccctgggggtggaacacttgcctccattttcatggattcgatg

SEQ ID NO: 132855 - DNA, 76 bp, Homo sapiens
ttcttctagaatcaggatccacagagcccctgggggtggaacacttgcctccattttcatggattcgatgttggtc

SEQ ID NO: 132856 - DNA, 75 bp, Homo sapiens
aatcaggatccacagagcccctgggggtggaacacttgcctccattttcatggattcgatgttggtctccttctg

SEQ ID NO: 132857 - DNA, 73 bp, Homo sapiens
agcccctgggggtggaacacttgcctccattttcatggattcgatgttggtctccttctgttctttgcctgtg

SEQ ID NO: 132858 - DNA, 75 bp, Homo sapiens
ggtggaacacttgcctccattttcatggattcgatgttggtctccttctgttctttgcctgtggagagggaagaa

SEQ ID NO: 132859 - DNA, 74 bp, Homo sapiens
aacacttgcctccattttcatggattcgatgttggtctccttctgttctttgcctgtggagagggaagaacaaa

SEQ ID NO: 132860 - DNA, 72 bp, Homo sapiens
attttcatggattcgatgttggtctccttctgttctttgcctgtggagagggaagaacaaagggaccagttc

SEQ ID NO: 132861 - DNA, 70 bp, Homo sapiens
attcgatgttggtctccttctgttctttgcctgtggagagggaagaacaaagggaccagttcgttggtcg

SEQ ID NO: 132862 - DNA, 71 bp, Homo sapiens
ttggtctccttctgttctttgcctgtggagagggaagaacaaagggaccagttcgttggtcggcagaatta

SEQ ID NO: 132863 - DNA, 74 bp, Homo sapiens
tctgttctttgcctgtggagagggaagaacaaagggaccagttcgttggtcggcagaattactggagtggctca

SEQ ID NO: 132864 - DNA, 74 bp, Homo sapiens
tgggagcatcatacatatttgtcgaataataaatgaataaaagcttcttaataagtttggaaatttgtattctg

SEQ ID NO: 132865 - DNA, 74 bp, Homo sapiens
gaataataaatgaataaaagcttcttaataagtttggaaatttgtattctggaaatgttctctatcctgcatga

SEQ ID NO: 132866 - DNA, 72 bp, Homo sapiens
gaataaaagcttcttaataagtttggaaatttgtattctggaaatgttctctatcctgcatgaacattaggt

SEQ ID NO: 132867 - DNA, 76 bp, Homo sapiens
cttcttaataagtttggaaatttgtattctggaaatgttctctatcctgcatgaacattaggttggatccatgcaa

SEQ ID NO: 132868 - DNA, 75 bp, Homo sapiens
gtttggaaatttgtattctggaaatgttctctatcctgcatgaacattaggttggatccatgcaaaataagttac

SEQ ID NO: 132869 - DNA, 78 bp, Homo sapiens
tgtattctggaaatgttctctatcctgcatgaacattaggttggatccatgcaaaataagttacgccaattaatcaat

SEQ ID NO: 132870 - DNA, 76 bp, Homo sapiens
aaatgttctctatcctgcatgaacattaggttggatccatgcaaaataagttacgccaattaatcaatttactcat

SEQ ID NO: 132871 - DNA, 81 bp, Homo sapiens
tctctatcctgcatgaacattaggttggatccatgcaaaataagttacgccaattaatcaatttactcatttcatcataca

SEQ ID NO: 132872 - DNA, 76 bp, Homo sapiens
gaacattaggttggatccatgcaaaataagttacgccaattaatcaatttactcatttcatcatacacgcttggaa

SEQ ID NO: 132873 - DNA, 75 bp, Homo sapiens
ttaggttggatccatgcaaaataagttacgccaattaatcaatttactcatttcatcatacacgcttggaaggaa

SEQ ID NO: 132874 - DNA, 74 bp, Homo sapiens
ccatgcaaaataagttacgccaattaatcaatttactcatttcatcatacacgcttggaaggaagactttttga

SEQ ID NO: 132875 - DNA, 71 bp, Homo sapiens
ataagttacgccaattaatcaatttactcatttcatcatacacgcttggaaggaagactttttgaaattaa

SEQ ID NO: 132876 - DNA, 76 bp, Homo sapiens
ccaattaatcaatttactcatttcatcatacacgcttggaaggaagactttttgaaattaaaatgcacatatgcaa

SEQ ID NO: 132877 - DNA, 76 bp, Homo sapiens
tttactcatttcatcatacacgcttggaaggaagactttttgaaattaaaatgcacatatgcaaaacaacctggca

SEQ ID NO: 132878 - DNA, 74 bp, Homo sapiens
tttcatcatacacgcttggaaggaagactttttgaaattaaaatgcacatatgcaaaacaacctggcagggccc

SEQ ID NO: 132879 - DNA, 72 bp, Homo sapiens
ttggaaggaagactttttgaaattaaaatgcacatatgcaaaacaacctggcagggccctgggaggatcaaa

SEQ ID NO: 132880 - DNA, 75 bp, Homo sapiens
agactttttgaaattaaaatgcacatatgcaaaacaacctggcagggccctgggaggatcaaatgtgataatgta

SEQ ID NO: 132881 - DNA, 77 bp, Homo sapiens
aattaaaatgcacatatgcaaaacaacctggcagggccctgggaggatcaaatgtgataatgtatgagaaagcgctt

SEQ ID NO: 132882 - DNA, 78 bp, Homo sapiens
aaatgcacatatgcaaaacaacctggcagggccctgggaggatcaaatgtgataatgtatgagaaagcgctttgtaaa

SEQ ID NO: 132883 - DNA, 74 bp, Homo sapiens
aaaacaacctggcagggccctgggaggatcaaatgtgataatgtatgagaaagcgctttgtaaactgtgaagcc

SEQ ID NO: 132884 - DNA, 78 bp, Homo sapiens
gcagggccctgggaggatcaaatgtgataatgtatgagaaagcgctttgtaaactgtgaagccctgtacaaatgctag

SEQ ID NO: 132885 - DNA, 79 bp, Homo sapiens
tgggaggatcaaatgtgataatgtatgagaaagcgctttgtaaactgtgaagccctgtacaaatgctagttgtcctcat

SEQ ID NO: 132886 - DNA, 77 bp, Homo sapiens
aaatgtgataatgtatgagaaagcgctttgtaaactgtgaagccctgtacaaatgctagttgtcctcattactaaca

SEQ ID NO: 132887 - DNA, 76 bp, Homo sapiens
ataatgtatgagaaagcgctttgtaaactgtgaagccctgtacaaatgctagttgtcctcattactaacatgttta

SEQ ID NO: 132888 - DNA, 73 bp, Homo sapiens
aaagcgctttgtaaactgtgaagccctgtacaaatgctagttgtcctcattactaacatgtttacagctcggt

SEQ ID NO: 132889 - DNA, 74 bp, Homo sapiens
taaactgtgaagccctgtacaaatgctagttgtcctcattactaacatgtttacagctcggttggccctgaaat

SEQ ID NO: 132890 - DNA, 73 bp, Homo sapiens
tagttgtcctcattactaacatgtttacagctcggttggccctgaaattgctggcttaacctgaaagagaaaa

SEQ ID NO: 132891 - DNA, 69 bp, Homo sapiens
gttggccctgaaattgctggcttaacctgaaagagaaaagtgggcaactttccaggcttccagggttag

SEQ ID NO: 132892 - DNA, 67 bp, Homo sapiens
aaattgctggcttaacctgaaagagaaaagtgggcaactttccaggcttccagggttaggccaaaaa

SEQ ID NO: 132893 - DNA, 66 bp, Homo sapiens
ctggcttaacctgaaagagaaaagtgggcaactttccaggcttccagggttaggccaaaaagtccc

SEQ ID NO: 132894 - DNA, 67 bp, Homo sapiens
aaagagaaaagtgggcaactttccaggcttccagggttaggccaaaaagtccccagatgaagaggcc

SEQ ID NO: 132895 - DNA, 73 bp, Homo sapiens
ttccaggcttccagggttaggccaaaaagtccccagatgaagaggcctgggctgggcagtacacagaatacaa

SEQ ID NO: 132896 - DNA, 73 bp, Homo sapiens
cttccagggttaggccaaaaagtccccagatgaagaggcctgggctgggcagtacacagaatacaatcaccca

SEQ ID NO: 132897 - DNA, 75 bp, Homo sapiens
taggccaaaaagtccccagatgaagaggcctgggctgggcagtacacagaatacaatcacccagccctctcccca

SEQ ID NO: 132898 - DNA, 78 bp, Homo sapiens
ccagatgaagaggcctgggctgggcagtacacagaatacaatcacccagccctctccccacgccactgtcacaaccaa

SEQ ID NO: 132899 - DNA, 75 bp, Homo sapiens
aggcctgggctgggcagtacacagaatacaatcacccagccctctccccacgccactgtcacaaccaaatttcca

SEQ ID NO: 132900 - DNA, 76 bp, Homo sapiens
tacacagaatacaatcacccagccctctccccacgccactgtcacaaccaaatttccagttgagtcagcccaacta

SEQ ID NO: 132901 - DNA, 73 bp, Homo sapiens
atacaatcacccagccctctccccacgccactgtcacaaccaaatttccagttgagtcagcccaactagggtg

SEQ ID NO: 132902 - DNA, 75 bp, Homo sapiens
acgccactgtcacaaccaaatttccagttgagtcagcccaactagggtgggctcaggacctctgcactcagggag

SEQ ID NO: 132903 - DNA, 76 bp, Homo sapiens
ctgtcacaaccaaatttccagttgagtcagcccaactagggtgggctcaggacctctgcactcagggaggcaaaca

SEQ ID NO: 132904 - DNA, 75 bp, Homo sapiens
aaatttccagttgagtcagcccaactagggtgggctcaggacctctgcactcagggaggcaaacagggtatctgc

SEQ ID NO: 132905 - DNA, 79 bp, Homo sapiens
gttgagtcagcccaactagggtgggctcaggacctctgcactcagggaggcaaacagggtatctgctgcccttgagtgc

SEQ ID NO: 132906 - DNA, 80 bp, Homo sapiens
ctcaggacctctgcactcagggaggcaaacagggtatctgctgcccttgagtgcccaggccaggggctacaaatacagca

SEQ ID NO: 132907 - DNA, 73 bp, Homo sapiens
agggaggcaaacagggtatctgctgcccttgagtgcccaggccaggggctacaaatacagcaacccccaggaa

SEQ ID NO: 132908 - DNA, 76 bp, Homo sapiens
aaacagggtatctgctgcccttgagtgcccaggccaggggctacaaatacagcaacccccaggaactgcatggcac

SEQ ID NO: 132909 - DNA, 78 bp, Homo sapiens
tctgctgcccttgagtgcccaggccaggggctacaaatacagcaacccccaggaactgcatggcacgtgggagagtaa

SEQ ID NO: 132910 - DNA, 76 bp, Homo sapiens
gtgcccaggccaggggctacaaatacagcaacccccaggaactgcatggcacgtgggagagtaagcaggccaggta

SEQ ID NO: 132911 - DNA, 78 bp, Homo sapiens
caggggctacaaatacagcaacccccaggaactgcatggcacgtgggagagtaagcaggccaggtagagctgcagaaa

SEQ ID NO: 132912 - DNA, 77 bp, Homo sapiens
tacaaatacagcaacccccaggaactgcatggcacgtgggagagtaagcaggccaggtagagctgcagaaaactaag

SEQ ID NO: 132913 - DNA, 74 bp, Homo sapiens
aacccccaggaactgcatggcacgtgggagagtaagcaggccaggtagagctgcagaaaactaaggcccacaac

SEQ ID NO: 132914 - DNA, 78 bp, Homo sapiens
aggaactgcatggcacgtgggagagtaagcaggccaggtagagctgcagaaaactaaggcccacaaccagccacagaa

SEQ ID NO: 132915 - DNA, 78 bp, Homo sapiens
atggcacgtgggagagtaagcaggccaggtagagctgcagaaaactaaggcccacaaccagccacagaaggcgatgga

SEQ ID NO: 132916 - DNA, 76 bp, Homo sapiens
gtaagcaggccaggtagagctgcagaaaactaaggcccacaaccagccacagaaggcgatggagggaccgccatta

SEQ ID NO: 132917 - DNA, 76 bp, Homo sapiens
caggtagagctgcagaaaactaaggcccacaaccagccacagaaggcgatggagggaccgccattatcccagtcta

SEQ ID NO: 132918 - DNA, 76 bp, Homo sapiens
tgcagaaaactaaggcccacaaccagccacagaaggcgatggagggaccgccattatcccagtctagcaatcgttg

SEQ ID NO: 132919 - DNA, 76 bp, Homo sapiens
taaggcccacaaccagccacagaaggcgatggagggaccgccattatcccagtctagcaatcgttggcgttatgaa

SEQ ID NO: 132920 - DNA, 75 bp, Homo sapiens
aaccagccacagaaggcgatggagggaccgccattatcccagtctagcaatcgttggcgttatgaaagcccgctg

SEQ ID NO: 132921 - DNA, 77 bp, Homo sapiens
agaaggcgatggagggaccgccattatcccagtctagcaatcgttggcgttatgaaagcccgctgttgccagatcta

SEQ ID NO: 132922 - DNA, 75 bp, Homo sapiens
atggagggaccgccattatcccagtctagcaatcgttggcgttatgaaagcccgctgttgccagatctagctttt

SEQ ID NO: 132923 - DNA, 72 bp, Homo sapiens
accgccattatcccagtctagcaatcgttggcgttatgaaagcccgctgttgccagatctagcttttttttt

SEQ ID NO: 132924 - DNA, 69 bp, Homo sapiens
ttttttcatgagaagccaaaactccagatttttatgtgaaattttttgatttttaaatactggcaacta

SEQ ID NO: 132925 - DNA, 69 bp, Homo sapiens
tcatgagaagccaaaactccagatttttatgtgaaattttttgatttttaaatactggcaactaatttt

SEQ ID NO: 132926 - DNA, 73 bp, Homo sapiens
aactaattttttaaatgtttaaaacactctatgggccaaataaaacatatgcgcaggctgcatccagccagta

SEQ ID NO: 132927 - DNA, 79 bp, Homo sapiens
ttaaatgtttaaaacactctatgggccaaataaaacatatgcgcaggctgcatccagccagtagcctccaggccatagc

SEQ ID NO: 132928 - DNA, 80 bp, Homo sapiens
tttaaaacactctatgggccaaataaaacatatgcgcaggctgcatccagccagtagcctccaggccatagccttggcaa

SEQ ID NO: 132929 - DNA, 82 bp, Homo sapiens
ctctatgggccaaataaaacatatgcgcaggctgcatccagccagtagcctccaggccatagccttggcaagcagaccttta

SEQ ID NO: 132930 - DNA, 81 bp, Homo sapiens
aataaaacatatgcgcaggctgcatccagccagtagcctccaggccatagccttggcaagcagacctttagccacgaccca

SEQ ID NO: 132931 - DNA, 82 bp, Homo sapiens
atatgcgcaggctgcatccagccagtagcctccaggccatagccttggcaagcagacctttagccacgacccagaccatcct

SEQ ID NO: 132932 - DNA, 76 bp, Homo sapiens
atccagccagtagcctccaggccatagccttggcaagcagacctttagccacgacccagaccatccttcctgggac

SEQ ID NO: 132933 - DNA, 76 bp, Homo sapiens
agtagcctccaggccatagccttggcaagcagacctttagccacgacccagaccatccttcctgggacctgctgga

SEQ ID NO: 132934 - DNA, 76 bp, Homo sapiens
aggccatagccttggcaagcagacctttagccacgacccagaccatccttcctgggacctgctggagagccaagtc

SEQ ID NO: 132935 - DNA, 77 bp, Homo sapiens
cttggcaagcagacctttagccacgacccagaccatccttcctgggacctgctggagagccaagtccctgactctca

SEQ ID NO: 132936 - DNA, 75 bp, Homo sapiens
agcagacctttagccacgacccagaccatccttcctgggacctgctggagagccaagtccctgactctcagggta

SEQ ID NO: 132937 - DNA, 76 bp, Homo sapiens
acgacccagaccatccttcctgggacctgctggagagccaagtccctgactctcagggtatgctggtgggcccaga

SEQ ID NO: 132938 - DNA, 78 bp, Homo sapiens
agaccatccttcctgggacctgctggagagccaagtccctgactctcagggtatgctggtgggcccagaagaggctgc

SEQ ID NO: 132939 - DNA, 76 bp, Homo sapiens
cttcctgggacctgctggagagccaagtccctgactctcagggtatgctggtgggcccagaagaggctgcccctgg

SEQ ID NO: 132940 - DNA, 80 bp, Homo sapiens
tgctggagagccaagtccctgactctcagggtatgctggtgggcccagaagaggctgcccctggtgctgaggactcaccc

SEQ ID NO: 132941 - DNA, 78 bp, Homo sapiens
aagtccctgactctcagggtatgctggtgggcccagaagaggctgcccctggtgctgaggactcacccgcttctgcag

SEQ ID NO: 132942 - DNA, 80 bp, Homo sapiens
tgactctcagggtatgctggtgggcccagaagaggctgcccctggtgctgaggactcacccgcttctgcaggggctcctc

SEQ ID NO: 132943 - DNA, 77 bp, Homo sapiens
tatgctggtgggcccagaagaggctgcccctggtgctgaggactcacccgcttctgcaggggctcctcggccctcct

SEQ ID NO: 132944 - DNA, 74 bp, Homo sapiens
gtgggcccagaagaggctgcccctggtgctgaggactcacccgcttctgcaggggctcctcggccctccttggg

SEQ ID NO: 132945 - DNA, 77 bp, Homo sapiens
gctgcccctggtgctgaggactcacccgcttctgcaggggctcctcggccctccttgggggtgcagcagccattttc

SEQ ID NO: 132946 - DNA, 79 bp, Homo sapiens
gtgctgaggactcacccgcttctgcaggggctcctcggccctccttgggggtgcagcagccattttccactgctcttga

SEQ ID NO: 132947 - DNA, 77 bp, Homo sapiens
actcacccgcttctgcaggggctcctcggccctccttgggggtgcagcagccattttccactgctcttgaggcttca

SEQ ID NO: 132948 - DNA, 79 bp, Homo sapiens
ttctgcaggggctcctcggccctccttgggggtgcagcagccattttccactgctcttgaggcttcaggcagggtctca

SEQ ID NO: 132949 - DNA, 79 bp, Homo sapiens
ctcctcggccctccttgggggtgcagcagccattttccactgctcttgaggcttcaggcagggtctcagctgcaccctc

SEQ ID NO: 132950 - DNA, 81 bp, Homo sapiens
ggtgcagcagccattttccactgctcttgaggcttcaggcagggtctcagctgcaccctctccctctgctggggccccgcc

SEQ ID NO: 132951 - DNA, 77 bp, Homo sapiens
agccattttccactgctcttgaggcttcaggcagggtctcagctgcaccctctccctctgctggggccccgcccttc

SEQ ID NO: 132952 - DNA, 78 bp, Homo sapiens
tccactgctcttgaggcttcaggcagggtctcagctgcaccctctccctctgctggggccccgcccttctgcccccca

SEQ ID NO: 132953 - DNA, 77 bp, Homo sapiens
ttgaggcttcaggcagggtctcagctgcaccctctccctctgctggggccccgcccttctgccccccagcagggctc

SEQ ID NO: 132954 - DNA, 73 bp, Homo sapiens
agggtctcagctgcaccctctccctctgctggggccccgcccttctgccccccagcagggctcccctcctctg

SEQ ID NO: 132955 - DNA, 74 bp, Homo sapiens
tgcaccctctccctctgctggggccccgcccttctgccccccagcagggctcccctcctctggctggggctcac

SEQ ID NO: 132956 - DNA, 73 bp, Homo sapiens
tccctctgctggggccccgcccttctgccccccagcagggctcccctcctctggctggggctcactccgcttc

SEQ ID NO: 132957 - DNA, 71 bp, Homo sapiens
gggccccgcccttctgccccccagcagggctcccctcctctggctggggctcactccgcttctccaagtcc

SEQ ID NO: 132958 - DNA, 72 bp, Homo sapiens
cttctgccccccagcagggctcccctcctctggctggggctcactccgcttctccaagtccccattgggtaa

SEQ ID NO: 132959 - DNA, 75 bp, Homo sapiens
cccagcagggctcccctcctctggctggggctcactccgcttctccaagtccccattgggtaatagctctgaggc

SEQ ID NO: 132960 - DNA, 76 bp, Homo sapiens
tcccctcctctggctggggctcactccgcttctccaagtccccattgggtaatagctctgaggcgcctgagtcctg

SEQ ID NO: 132961 - DNA, 78 bp, Homo sapiens
tctccaagtccccattgggtaatagctctgaggcgcctgagtcctgggccatggatggggacttggagatcaccgcag

SEQ ID NO: 132962 - DNA, 75 bp, Homo sapiens
cccattgggtaatagctctgaggcgcctgagtcctgggccatggatggggacttggagatcaccgcagggtcctt

SEQ ID NO: 132963 - DNA, 78 bp, Homo sapiens
taatagctctgaggcgcctgagtcctgggccatggatggggacttggagatcaccgcagggtcctttggcgtgtcacc

SEQ ID NO: 132964 - DNA, 74 bp, Homo sapiens
agtcctgggccatggatggggacttggagatcaccgcagggtcctttggcgtgtcaccgctttccacctgcaaa

SEQ ID NO: 132965 - DNA, 73 bp, Homo sapiens
tcaccgcagggtcctttggcgtgtcaccgctttccacctgcaaatgtaagaaagatacacaagaggagggtta

SEQ ID NO: 132966 - DNA, 78 bp, Homo sapiens
tgtgttgtgtgtgtgcacaggagggtgtgtaggatgtgacactcaccggggggtgcttgcgcttcctcccaggccgcc

SEQ ID NO: 132967 - DNA, 75 bp, Homo sapiens
tgtgtgcacaggagggtgtgtaggatgtgacactcaccggggggtgcttgcgcttcctcccaggccgccccacct

SEQ ID NO: 132968 - DNA, 71 bp, Homo sapiens
acaggagggtgtgtaggatgtgacactcaccggggggtgcttgcgcttcctcccaggccgccccaccttcc

SEQ ID NO: 132969 - DNA, 74 bp, Homo sapiens
tgtaggatgtgacactcaccggggggtgcttgcgcttcctcccaggccgccccaccttccgtgccgtggtgctg

SEQ ID NO: 132970 - DNA, 73 bp, Homo sapiens
tgacactcaccggggggtgcttgcgcttcctcccaggccgccccaccttccgtgccgtggtgctgggctcttg

SEQ ID NO: 132971 - DNA, 75 bp, Homo sapiens
gggtgcttgcgcttcctcccaggccgccccaccttccgtgccgtggtgctgggctcttggcgctcctccttgcca

SEQ ID NO: 132972 - DNA, 74 bp, Homo sapiens
cttgcgcttcctcccaggccgccccaccttccgtgccgtggtgctgggctcttggcgctcctccttgccacgcg

SEQ ID NO: 132973 - DNA, 76 bp, Homo sapiens
tcccaggccgccccaccttccgtgccgtggtgctgggctcttggcgctcctccttgccacgcggctcctcctgctc

SEQ ID NO: 132974 - DNA, 77 bp, Homo sapiens
accttccgtgccgtggtgctgggctcttggcgctcctccttgccacgcggctcctcctgctcctctccgtcctgcag

SEQ ID NO: 132975 - DNA, 81 bp, Homo sapiens
ccgtgccgtggtgctgggctcttggcgctcctccttgccacgcggctcctcctgctcctctccgtcctgcaggcacagaca

SEQ ID NO: 132976 - DNA, 84 bp, Homo sapiens
tgggctcttggcgctcctccttgccacgcggctcctcctgctcctctccgtcctgcaggcacagacacagcctgtgaggccaga

SEQ ID NO: 132977 - DNA, 83 bp, Homo sapiens
ttggcgctcctccttgccacgcggctcctcctgctcctctccgtcctgcaggcacagacacagcctgtgaggccagaggtgga

SEQ ID NO: 132978 - DNA, 77 bp, Homo sapiens
tctccctctcccaggccagagggtccccagcagagcccgctgctcacctttcggtcctcctcccgctccgcagcaga

SEQ ID NO: 132979 - DNA, 79 bp, Homo sapiens
ccaggccagagggtccccagcagagcccgctgctcacctttcggtcctcctcccgctccgcagcagagctgctggtgtc

SEQ ID NO: 132980 - DNA, 76 bp, Homo sapiens
agagggtccccagcagagcccgctgctcacctttcggtcctcctcccgctccgcagcagagctgctggtgtccccg

SEQ ID NO: 132981 - DNA, 77 bp, Homo sapiens
agcagagcccgctgctcacctttcggtcctcctcccgctccgcagcagagctgctggtgtccccggggccgctggag

SEQ ID NO: 132982 - DNA, 78 bp, Homo sapiens
tgctcacctttcggtcctcctcccgctccgcagcagagctgctggtgtccccggggccgctggagggcatggcgggca

SEQ ID NO: 132983 - DNA, 76 bp, Homo sapiens
cctttcggtcctcctcccgctccgcagcagagctgctggtgtccccggggccgctggagggcatggcgggcatctg

SEQ ID NO: 132984 - DNA, 79 bp, Homo sapiens
tcctcccgctccgcagcagagctgctggtgtccccggggccgctggagggcatggcgggcatctgggcgccgggaggca

SEQ ID NO: 132985 - DNA, 79 bp, Homo sapiens
tccgcagcagagctgctggtgtccccggggccgctggagggcatggcgggcatctgggcgccgggaggcaggctggggc

SEQ ID NO: 132986 - DNA, 76 bp, Homo sapiens
agctgctggtgtccccggggccgctggagggcatggcgggcatctgggcgccgggaggcaggctggggctgcgcgg

SEQ ID NO: 132987 - DNA, 73 bp, Homo sapiens
gtccccggggccgctggagggcatggcgggcatctgggcgccgggaggcaggctggggctgcgcggggctggg

SEQ ID NO: 132988 - DNA, 76 bp, Homo sapiens
ctggagggcatggcgggcatctgggcgccgggaggcaggctggggctgcgcggggctggggggctgctgggctttg

SEQ ID NO: 132989 - DNA, 73 bp, Homo sapiens
atggcgggcatctgggcgccgggaggcaggctggggctgcgcggggctggggggctgctgggctttggggaag

SEQ ID NO: 132990 - DNA, 72 bp, Homo sapiens
atctgggcgccgggaggcaggctggggctgcgcggggctggggggctgctgggctttggggaaggaattatc

SEQ ID NO: 132991 - DNA, 71 bp, Homo sapiens
aggcaggctggggctgcgcggggctggggggctgctgggctttggggaaggaattatcgtggtctttggag

SEQ ID NO: 132992 - DNA, 71 bp, Homo sapiens
gggctgcgcggggctggggggctgctgggctttggggaaggaattatcgtggtctttggaggcgagagtta

SEQ ID NO: 132993 - DNA, 68 bp, Homo sapiens
gggctggggggctgctgggctttggggaaggaattatcgtggtctttggaggcgagagttaaaactta

SEQ ID NO: 132994 - DNA, 70 bp, Homo sapiens
gctgctgggctttggggaaggaattatcgtggtctttggaggcgagagttaaaacttaaacatagatccc

SEQ ID NO: 132995 - DNA, 68 bp, Homo sapiens
tttggggaaggaattatcgtggtctttggaggcgagagttaaaacttaaacatagatcccggtgttga

SEQ ID NO: 132996 - DNA, 69 bp, Homo sapiens
aaggaattatcgtggtctttggaggcgagagttaaaacttaaacatagatcccggtgttgagccctctg

SEQ ID NO: 132997 - DNA, 69 bp, Homo sapiens
atcgtggtctttggaggcgagagttaaaacttaaacatagatcccggtgttgagccctctggtgaacgg

SEQ ID NO: 132998 - DNA, 73 bp, Homo sapiens
ttggaggcgagagttaaaacttaaacatagatcccggtgttgagccctctggtgaacggtgcctctgtcagcc

SEQ ID NO: 132999 - DNA, 71 bp, Homo sapiens
agttaaaacttaaacatagatcccggtgttgagccctctggtgaacggtgcctctgtcagcctgtgggtgg

SEQ ID NO: 133000 - DNA, 75 bp, Homo sapiens
ttaaacatagatcccggtgttgagccctctggtgaacggtgcctctgtcagcctgtgggtgggggcttcgatggc

SEQ ID NO: 133001 - DNA, 75 bp, Homo sapiens
atcccggtgttgagccctctggtgaacggtgcctctgtcagcctgtgggtgggggcttcgatggctccacctgtg

SEQ ID NO: 133002 - DNA, 75 bp, Homo sapiens
agccctctggtgaacggtgcctctgtcagcctgtgggtgggggcttcgatggctccacctgtgggggagagaaga

SEQ ID NO: 133003 - DNA, 76 bp, Homo sapiens
ggtgaacggtgcctctgtcagcctgtgggtgggggcttcgatggctccacctgtgggggagagaagaggatcagtg

SEQ ID NO: 133004 - DNA, 70 bp, Homo sapiens
ggctccccgccgcctccgggccggccttccgggccgccagcagcggcgctcattaccgtatggccggtgg

SEQ ID NO: 133005 - DNA, 69 bp, Homo sapiens
ccgcctccgggccggccttccgggccgccagcagcggcgctcattaccgtatggccggtggggtcgggc

SEQ ID NO: 133006 - DNA, 68 bp, Homo sapiens
cgggccggccttccgggccgccagcagcggcgctcattaccgtatggccggtggggtcgggccggccc

SEQ ID NO: 133007 - DNA, 72 bp, Homo sapiens
ttccgggccgccagcagcggcgctcattaccgtatggccggtggggtcgggccggcccggctgcgcgccctg

SEQ ID NO: 133008 - DNA, 73 bp, Homo sapiens
agcagcggcgctcattaccgtatggccggtggggtcgggccggcccggctgcgcgccctggtgccgcggcgcc

SEQ ID NO: 133009 - DNA, 70 bp, Homo sapiens
ctcattaccgtatggccggtggggtcgggccggcccggctgcgcgccctggtgccgcggcgccgcgtccc

SEQ ID NO: 133010 - DNA, 71 bp, Homo sapiens
tatggccggtggggtcgggccggcccggctgcgcgccctggtgccgcggcgccgcgtcccggctcgtcctc

SEQ ID NO: 133011 - DNA, 73 bp, Homo sapiens
gggtcgggccggcccggctgcgcgccctggtgccgcggcgccgcgtcccggctcgtcctctgctctcgccgcc

SEQ ID NO: 133012 - DNA, 75 bp, Homo sapiens
ggccggcccggctgcgcgccctggtgccgcggcgccgcgtcccggctcgtcctctgctctcgccgccgccgccgc

SEQ ID NO: 133013 - DNA, 75 bp, Homo sapiens
ccgagctccgggcctcgccgcagccctccccacgctgggcgccccgctacctggcgctgcttctgcgctgggtcc

SEQ ID NO: 133014 - DNA, 78 bp, Homo sapiens
cctcgccgcagccctccccacgctgggcgccccgctacctggcgctgcttctgcgctgggtccccgcatccagcactg

SEQ ID NO: 133015 - DNA, 78 bp, Homo sapiens
cctccccacgctgggcgccccgctacctggcgctgcttctgcgctgggtccccgcatccagcactggccgcagggaca

SEQ ID NO: 133016 - DNA, 78 bp, Homo sapiens
acgctgggcgccccgctacctggcgctgcttctgcgctgggtccccgcatccagcactggccgcagggacagcggccc

SEQ ID NO: 133017 - DNA, 77 bp, Homo sapiens
cccgctacctggcgctgcttctgcgctgggtccccgcatccagcactggccgcagggacagcggcccctcctctccc

SEQ ID NO: 133018 - DNA, 75 bp, Homo sapiens
cgctgcttctgcgctgggtccccgcatccagcactggccgcagggacagcggcccctcctctccccgggccggtg

SEQ ID NO: 133019 - DNA, 74 bp, Homo sapiens
ttctgcgctgggtccccgcatccagcactggccgcagggacagcggcccctcctctccccgggccggtgtcaag

SEQ ID NO: 133020 - DNA, 72 bp, Homo sapiens
gggtccccgcatccagcactggccgcagggacagcggcccctcctctccccgggccggtgtcaagtgcctcc

SEQ ID NO: 133021 - DNA, 72 bp, Homo sapiens
atccagcactggccgcagggacagcggcccctcctctccccgggccggtgtcaagtgcctccccccgcagcc

SEQ ID NO: 133022 - DNA, 69 bp, Homo sapiens
ccgcagggacagcggcccctcctctccccgggccggtgtcaagtgcctccccccgcagcccgcggagcc

SEQ ID NO: 133023 - DNA, 67 bp, Homo sapiens
acagcggcccctcctctccccgggccggtgtcaagtgcctccccccgcagcccgcggagcccccggc

SEQ ID NO: 133024 - DNA, 69 bp, Homo sapiens
tctccccgggccggtgtcaagtgcctccccccgcagcccgcggagcccccggcggccttcgccctgcag

SEQ ID NO: 133025 - DNA, 69 bp, Homo sapiens
ccggtgtcaagtgcctccccccgcagcccgcggagcccccggcggccttcgccctgcagttctcccgac

SEQ ID NO: 133026 - DNA, 71 bp, Homo sapiens
tcaagtgcctccccccgcagcccgcggagcccccggcggccttcgccctgcagttctcccgacctccgcca

SEQ ID NO: 133027 - DNA, 75 bp, Homo sapiens
ccgcagcccgcggagcccccggcggccttcgccctgcagttctcccgacctccgccagagcccactgcgctctgc

SEQ ID NO: 133028 - DNA, 74 bp, Homo sapiens
cccgcggagcccccggcggccttcgccctgcagttctcccgacctccgccagagcccactgcgctctgcctgcc

SEQ ID NO: 133029 - DNA, 69 bp, Homo sapiens
ttttttaatttttctgttcagcttttaagatgaatggctttccacttgaaacctctgtgttgaaaccaa

SEQ ID NO: 133030 - DNA, 73 bp, Homo sapiens
ttttctgttcagcttttaagatgaatggctttccacttgaaacctctgtgttgaaaccaactgataaatagac

SEQ ID NO: 133031 - DNA, 73 bp, Homo sapiens
agcttttaagatgaatggctttccacttgaaacctctgtgttgaaaccaactgataaatagactggtattcaa

SEQ ID NO: 133032 - DNA, 74 bp, Homo sapiens
taagatgaatggctttccacttgaaacctctgtgttgaaaccaactgataaatagactggtattcaagttacta

SEQ ID NO: 133033 - DNA, 72 bp, Homo sapiens
tttccacttgaaacctctgtgttgaaaccaactgataaatagactggtattcaagttactacccaactgaga

SEQ ID NO: 133034 - DNA, 70 bp, Homo sapiens
aaacctctgtgttgaaaccaactgataaatagactggtattcaagttactacccaactgagagaacttaa

SEQ ID NO: 133035 - DNA, 72 bp, Homo sapiens
tgtgttgaaaccaactgataaatagactggtattcaagttactacccaactgagagaacttaactgttctct

SEQ ID NO: 133036 - DNA, 73 bp, Homo sapiens
actgataaatagactggtattcaagttactacccaactgagagaacttaactgttctcttgtctggtcaagat

SEQ ID NO: 133037 - DNA, 74 bp, Homo sapiens
aatagactggtattcaagttactacccaactgagagaacttaactgttctcttgtctggtcaagattgaggcag

SEQ ID NO: 133038 - DNA, 77 bp, Homo sapiens
tacccaactgagagaacttaactgttctcttgtctggtcaagattgaggcagtgtatctagttggcaatatctgttt

SEQ ID NO: 133039 - DNA, 76 bp, Homo sapiens
agagaacttaactgttctcttgtctggtcaagattgaggcagtgtatctagttggcaatatctgttttaggagtat

SEQ ID NO: 133040 - DNA, 78 bp, Homo sapiens
gttctcttgtctggtcaagattgaggcagtgtatctagttggcaatatctgttttaggagtattcctaaatgcaaata

SEQ ID NO: 133041 - DNA, 77 bp, Homo sapiens
cttgtctggtcaagattgaggcagtgtatctagttggcaatatctgttttaggagtattcctaaatgcaaatattta

SEQ ID NO: 133042 - DNA, 78 bp, Homo sapiens
caagattgaggcagtgtatctagttggcaatatctgttttaggagtattcctaaatgcaaatatttagctgagtatta

SEQ ID NO: 133043 - DNA, 76 bp, Homo sapiens
gcagtgtatctagttggcaatatctgttttaggagtattcctaaatgcaaatatttagctgagtattatttgttaa

SEQ ID NO: 133044 - DNA, 75 bp, Homo sapiens
ggcaatatctgttttaggagtattcctaaatgcaaatatttagctgagtattatttgttaagataatctagtgaa

SEQ ID NO: 133045 - DNA, 76 bp, Homo sapiens
tctgttttaggagtattcctaaatgcaaatatttagctgagtattatttgttaagataatctagtgaacagcaatg

SEQ ID NO: 133046 - DNA, 75 bp, Homo sapiens
gagtattcctaaatgcaaatatttagctgagtattatttgttaagataatctagtgaacagcaatgtttaggacc

SEQ ID NO: 133047 - DNA, 78 bp, Homo sapiens
tgcaaatatttagctgagtattatttgttaagataatctagtgaacagcaatgtttaggacctatctataagagcctg

SEQ ID NO: 133048 - DNA, 76 bp, Homo sapiens
tttagctgagtattatttgttaagataatctagtgaacagcaatgtttaggacctatctataagagcctgggtcaa

SEQ ID NO: 133049 - DNA, 76 bp, Homo sapiens
agtattatttgttaagataatctagtgaacagcaatgtttaggacctatctataagagcctgggtcaagatgaaga

SEQ ID NO: 133050 - DNA, 78 bp, Homo sapiens
taagataatctagtgaacagcaatgtttaggacctatctataagagcctgggtcaagatgaagaggcacaatatggtt

SEQ ID NO: 133051 - DNA, 79 bp, Homo sapiens
tagtgaacagcaatgtttaggacctatctataagagcctgggtcaagatgaagaggcacaatatggtttgctctctaaa

SEQ ID NO: 133052 - DNA, 74 bp, Homo sapiens
taggacctatctataagagcctgggtcaagatgaagaggcacaatatggtttgctctctaaacggacttaaaaa

SEQ ID NO: 133053 - DNA, 74 bp, Homo sapiens
ctataagagcctgggtcaagatgaagaggcacaatatggtttgctctctaaacggacttaaaaatccctgatac

SEQ ID NO: 133054 - DNA, 71 bp, Homo sapiens
gtcaagatgaagaggcacaatatggtttgctctctaaacggacttaaaaatccctgatacctttcctcctt

SEQ ID NO: 133055 - DNA, 70 bp, Homo sapiens
atgaagaggcacaatatggtttgctctctaaacggacttaaaaatccctgatacctttcctcctttccta

SEQ ID NO: 133056 - DNA, 66 bp, Homo sapiens
aacggacttaaaaatccctgatacctttcctcctttcctagttatagtctgttcatccctaagtta

SEQ ID NO: 133057 - DNA, 69 bp, Homo sapiens
tttcctcctttcctagttatagtctgttcatccctaagttaagggtagcacagaggaaaacctttctga

SEQ ID NO: 133058 - DNA, 68 bp, Homo sapiens
ttatagtctgttcatccctaagttaagggtagcacagaggaaaacctttctgacaggaaaaaggtaaa

SEQ ID NO: 133059 - DNA, 67 bp, Homo sapiens
ttcatccctaagttaagggtagcacagaggaaaacctttctgacaggaaaaaggtaaagcagaaaaa

SEQ ID NO: 133060 - DNA, 67 bp, Homo sapiens
aagttaagggtagcacagaggaaaacctttctgacaggaaaaaggtaaagcagaaaaatcactttca

SEQ ID NO: 133061 - DNA, 70 bp, Homo sapiens
gaaaacctttctgacaggaaaaaggtaaagcagaaaaatcactttcatcaatccaaactggtaactgaca

SEQ ID NO: 133062 - DNA, 75 bp, Homo sapiens
tgacaggaaaaaggtaaagcagaaaaatcactttcatcaatccaaactggtaactgacatttagcatggaatcaa

SEQ ID NO: 133063 - DNA, 76 bp, Homo sapiens
gtaaagcagaaaaatcactttcatcaatccaaactggtaactgacatttagcatggaatcaattccaaaactctca

SEQ ID NO: 133064 - DNA, 78 bp, Homo sapiens
atccaaactggtaactgacatttagcatggaatcaattccaaaactctcaacctcttccagcatgcagaccagccctc

SEQ ID NO: 133065 - DNA, 80 bp, Homo sapiens
taactgacatttagcatggaatcaattccaaaactctcaacctcttccagcatgcagaccagccctcggccctggcacta

SEQ ID NO: 133066 - DNA, 74 bp, Homo sapiens
aatcaattccaaaactctcaacctcttccagcatgcagaccagccctcggccctggcactaaggtggagttaag

SEQ ID NO: 133067 - DNA, 71 bp, Homo sapiens
aaaactctcaacctcttccagcatgcagaccagccctcggccctggcactaaggtggagttaaggggtagg

SEQ ID NO: 133068 - DNA, 77 bp, Homo sapiens
tcttccagcatgcagaccagccctcggccctggcactaaggtggagttaaggggtagggcagggagagttctatgca

SEQ ID NO: 133069 - DNA, 72 bp, Homo sapiens
ctcggccctggcactaaggtggagttaaggggtagggcagggagagttctatgcagcaacaggtctctttaa

SEQ ID NO: 133070 - DNA, 69 bp, Homo sapiens
aaggtggagttaaggggtagggcagggagagttctatgcagcaacaggtctctttaaacccttcctgga

SEQ ID NO: 133071 - DNA, 73 bp, Homo sapiens
ggtagggcagggagagttctatgcagcaacaggtctctttaaacccttcctggattgcccaaggtactgaata

SEQ ID NO: 133072 - DNA, 74 bp, Homo sapiens
tctatgcagcaacaggtctctttaaacccttcctggattgcccaaggtactgaatatttgggagcaccattatt

SEQ ID NO: 133073 - DNA, 68 bp, Homo sapiens
aggtctctttaaacccttcctggattgcccaaggtactgaatatttgggagcaccattatttctgttt

SEQ ID NO: 133074 - DNA, 70 bp, Homo sapiens
tctttaaacccttcctggattgcccaaggtactgaatatttgggagcaccattatttctgttttctactg

SEQ ID NO: 133075 - DNA, 73 bp, Homo sapiens
tggattgcccaaggtactgaatatttgggagcaccattatttctgttttctactggttcttggcttgaaaata

SEQ ID NO: 133076 - DNA, 70 bp, Homo sapiens
aaggtactgaatatttgggagcaccattatttctgttttctactggttcttggcttgaaaatatactcct

SEQ ID NO: 133077 - DNA, 71 bp, Homo sapiens
actgaatatttgggagcaccattatttctgttttctactggttcttggcttgaaaatatactccttatccc

SEQ ID NO: 133078 - DNA, 73 bp, Homo sapiens
ttctgttttctactggttcttggcttgaaaatatactccttatccccaatccttgcagccttcttatctctta

SEQ ID NO: 133079 - DNA, 77 bp, Homo sapiens
ttcttggcttgaaaatatactccttatccccaatccttgcagccttcttatctcttagctgtgtgtgctggaagaaa

SEQ ID NO: 133080 - DNA, 79 bp, Homo sapiens
ttatccccaatccttgcagccttcttatctcttagctgtgtgtgctggaagaaaggagaaagatggacagacatatcgt

SEQ ID NO: 133081 - DNA, 82 bp, Homo sapiens
atctcttagctgtgtgtgctggaagaaaggagaaagatggacagacatatcgttctggctgaagctggaacacagatattaa

SEQ ID NO: 133082 - DNA, 82 bp, Homo sapiens
tgtgtgtgctggaagaaaggagaaagatggacagacatatcgttctggctgaagctggaacacagatattaatcctatattg

SEQ ID NO: 133083 - DNA, 78 bp, Homo sapiens
aaaggagaaagatggacagacatatcgttctggctgaagctggaacacagatattaatcctatattggccttgggcca

SEQ ID NO: 133084 - DNA, 77 bp, Homo sapiens
aaagatggacagacatatcgttctggctgaagctggaacacagatattaatcctatattggccttgggccacaaaaa

SEQ ID NO: 133085 - DNA, 77 bp, Homo sapiens
acagacatatcgttctggctgaagctggaacacagatattaatcctatattggccttgggccacaaaaaagccagaa

SEQ ID NO: 133086 - DNA, 75 bp, Homo sapiens
tggctgaagctggaacacagatattaatcctatattggccttgggccacaaaaaagccagaagtgaaaagtgaaa

SEQ ID NO: 133087 - DNA, 71 bp, Homo sapiens
aagctggaacacagatattaatcctatattggccttgggccacaaaaaagccagaagtgaaaagtgaaaaa

SEQ ID NO: 133088 - DNA, 70 bp, Homo sapiens
atattaatcctatattggccttgggccacaaaaaagccagaagtgaaaagtgaaaaacagtgaagtgagt

SEQ ID NO: 133089 - DNA, 69 bp, Homo sapiens
aatcctatattggccttgggccacaaaaaagccagaagtgaaaagtgaaaaacagtgaagtgagtttct

SEQ ID NO: 133090 - DNA, 70 bp, Homo sapiens
ttgggccacaaaaaagccagaagtgaaaagtgaaaaacagtgaagtgagtttcttacggagaggagcgga

SEQ ID NO: 133091 - DNA, 69 bp, Homo sapiens
acaaaaaagccagaagtgaaaagtgaaaaacagtgaagtgagtttcttacggagaggagcggagcaggg

SEQ ID NO: 133092 - DNA, 76 bp, Homo sapiens
aacagtgaagtgagtttcttacggagaggagcggagcaggggctgtgggaaagcatcgaagagtgtgtgatgtggg

SEQ ID NO: 133093 - DNA, 73 bp, Homo sapiens
agtttcttacggagaggagcggagcaggggctgtgggaaagcatcgaagagtgtgtgatgtgggggtggggtg

SEQ ID NO: 133094 - DNA, 74 bp, Homo sapiens
agcaggggctgtgggaaagcatcgaagagtgtgtgatgtgggggtggggtgggcagtggtgggtagtagaatgg

SEQ ID NO: 133095 - DNA, 73 bp, Homo sapiens
tgtgggaaagcatcgaagagtgtgtgatgtgggggtggggtgggcagtggtgggtagtagaatgggggcaaaa

SEQ ID NO: 133096 - DNA, 74 bp, Homo sapiens
atcgaagagtgtgtgatgtgggggtggggtgggcagtggtgggtagtagaatgggggcaaaacagagatgatta

SEQ ID NO: 133097 - DNA, 73 bp, Homo sapiens
tgtgatgtgggggtggggtgggcagtggtgggtagtagaatgggggcaaaacagagatgattattgcccattt

SEQ ID NO: 133098 - DNA, 75 bp, Homo sapiens
ggcagtggtgggtagtagaatgggggcaaaacagagatgattattgcccattttctcctaatctggaatgtgact

SEQ ID NO: 133099 - DNA, 73 bp, Homo sapiens
ggtagtagaatgggggcaaaacagagatgattattgcccattttctcctaatctggaatgtgacttaacaagt

SEQ ID NO: 133100 - DNA, 73 bp, Homo sapiens
tagaatgggggcaaaacagagatgattattgcccattttctcctaatctggaatgtgacttaacaagtttaaa

SEQ ID NO: 133101 - DNA, 75 bp, Homo sapiens
gcaaaacagagatgattattgcccattttctcctaatctggaatgtgacttaacaagtttaaactgttctgcatt

SEQ ID NO: 133102 - DNA, 74 bp, Homo sapiens
gatgattattgcccattttctcctaatctggaatgtgacttaacaagtttaaactgttctgcattttgtaaata

SEQ ID NO: 133103 - DNA, 75 bp, Homo sapiens
gcccattttctcctaatctggaatgtgacttaacaagtttaaactgttctgcattttgtaaatatcacatcctga

SEQ ID NO: 133104 - DNA, 76 bp, Homo sapiens
cctaatctggaatgtgacttaacaagtttaaactgttctgcattttgtaaatatcacatcctgaatatgaaggaca

SEQ ID NO: 133105 - DNA, 75 bp, Homo sapiens
gaatgtgacttaacaagtttaaactgttctgcattttgtaaatatcacatcctgaatatgaaggacaaatacaac

SEQ ID NO: 133106 - DNA, 77 bp, Homo sapiens
acaagtttaaactgttctgcattttgtaaatatcacatcctgaatatgaaggacaaatacaactgtactatgttgca

SEQ ID NO: 133107 - DNA, 79 bp, Homo sapiens
ctgttctgcattttgtaaatatcacatcctgaatatgaaggacaaatacaactgtactatgttgcattaacatttgtac

SEQ ID NO: 133108 - DNA, 75 bp, Homo sapiens
cacatcctgaatatgaaggacaaatacaactgtactatgttgcattaacatttgtactttacccattccaaatta

SEQ ID NO: 133109 - DNA, 78 bp, Homo sapiens
actgtactatgttgcattaacatttgtactttacccattccaaattaggagacttgaaatcaatatgcaaatgatgca

SEQ ID NO: 133110 - DNA, 75 bp, Homo sapiens
taacatttgtactttacccattccaaattaggagacttgaaatcaatatgcaaatgatgcaaattgacactcccc

SEQ ID NO: 133111 - DNA, 75 bp, Homo sapiens
ctttacccattccaaattaggagacttgaaatcaatatgcaaatgatgcaaattgacactcccccatttaataca

SEQ ID NO: 133112 - DNA, 75 bp, Homo sapiens
ttccaaattaggagacttgaaatcaatatgcaaatgatgcaaattgacactcccccatttaatacaaaattctgt

SEQ ID NO: 133113 - DNA, 76 bp, Homo sapiens
gagacttgaaatcaatatgcaaatgatgcaaattgacactcccccatttaatacaaaattctgttaaactgcaggt

SEQ ID NO: 133114 - DNA, 71 bp, Homo sapiens
caaatgatgcaaattgacactcccccatttaatacaaaattctgttaaactgcaggtttattttaatgttc

SEQ ID NO: 133115 - DNA, 69 bp, Homo sapiens
tgacactcccccatttaatacaaaattctgttaaactgcaggtttattttaatgttccttaaccatgac

SEQ ID NO: 133116 - DNA, 70 bp, Homo sapiens
acaaaattctgttaaactgcaggtttattttaatgttccttaaccatgacctaaatattatgtactcaca

SEQ ID NO: 133117 - DNA, 72 bp, Homo sapiens
taaactgcaggtttattttaatgttccttaaccatgacctaaatattatgtactcacaatttcttcagtcac

SEQ ID NO: 133118 - DNA, 73 bp, Homo sapiens
gcaggtttattttaatgttccttaaccatgacctaaatattatgtactcacaatttcttcagtcactagagaa

SEQ ID NO: 133119 - DNA, 72 bp, Homo sapiens
ttttaatgttccttaaccatgacctaaatattatgtactcacaatttcttcagtcactagagaaggatttaa

SEQ ID NO: 133120 - DNA, 70 bp, Homo sapiens
ccttaaccatgacctaaatattatgtactcacaatttcttcagtcactagagaaggatttaaaaacaaaa

SEQ ID NO: 133121 - DNA, 64 bp, Homo sapiens
gaaacaaaaacaagcaaccaaaaaacctttagggctcattttccttcctttccagatgttccct

SEQ ID NO: 133122 - DNA, 68 bp, Homo sapiens
aaaaacctttagggctcattttccttcctttccagatgttcccttagccattcagaggcctctttcca

SEQ ID NO: 133123 - DNA, 70 bp, Homo sapiens
tttagggctcattttccttcctttccagatgttcccttagccattcagaggcctctttccattagaaatt

SEQ ID NO: 133124 - DNA, 73 bp, Homo sapiens
attttccttcctttccagatgttcccttagccattcagaggcctctttccattagaaatttctagtgctcaga

SEQ ID NO: 133125 - DNA, 77 bp, Homo sapiens
tttccagatgttcccttagccattcagaggcctctttccattagaaatttctagtgctcagacagcagtaatccaaa

SEQ ID NO: 133126 - DNA, 75 bp, Homo sapiens
atgttcccttagccattcagaggcctctttccattagaaatttctagtgctcagacagcagtaatccaaacaagg

SEQ ID NO: 133127 - DNA, 75 bp, Homo sapiens
attcagaggcctctttccattagaaatttctagtgctcagacagcagtaatccaaacaagggctatattttctaa

SEQ ID NO: 133128 - DNA, 73 bp, Homo sapiens
ctctttccattagaaatttctagtgctcagacagcagtaatccaaacaagggctatattttctaaaacaggaa

SEQ ID NO: 133129 - DNA, 72 bp, Homo sapiens
ctttccattagaaatttctagtgctcagacagcagtaatccaaacaagggctatattttctaaaacaggaaa

SEQ ID NO: 133130 - DNA, 72 bp, Homo sapiens
ccattagaaatttctagtgctcagacagcagtaatccaaacaagggctatattttctaaaacaggaaaaatg

SEQ ID NO: 133131 - DNA, 74 bp, Homo sapiens
tttctagtgctcagacagcagtaatccaaacaagggctatattttctaaaacaggaaaaatgtcttgtattgtg

SEQ ID NO: 133132 - DNA, 75 bp, Homo sapiens
agtgctcagacagcagtaatccaaacaagggctatattttctaaaacaggaaaaatgtcttgtattgtgtgtgtg

SEQ ID NO: 133133 - DNA, 81 bp, Homo sapiens
gtgtgtgtgtacatacacgtatgtgtaaagtaagatataataagatgatgtcatcctgttcagatgcctgggaggtcaaaa

SEQ ID NO: 133134 - DNA, 80 bp, Homo sapiens
tacatacacgtatgtgtaaagtaagatataataagatgatgtcatcctgttcagatgcctgggaggtcaaaacaggttga

SEQ ID NO: 133135 - DNA, 80 bp, Homo sapiens
tatgtgtaaagtaagatataataagatgatgtcatcctgttcagatgcctgggaggtcaaaacaggttgaacagaatgaa

SEQ ID NO: 133136 - DNA, 78 bp, Homo sapiens
taaagtaagatataataagatgatgtcatcctgttcagatgcctgggaggtcaaaacaggttgaacagaatgaacaaa

SEQ ID NO: 133137 - DNA, 82 bp, Homo sapiens
tataataagatgatgtcatcctgttcagatgcctgggaggtcaaaacaggttgaacagaatgaacaaatgtggcattggtga

SEQ ID NO: 133138 - DNA, 79 bp, Homo sapiens
atgtcatcctgttcagatgcctgggaggtcaaaacaggttgaacagaatgaacaaatgtggcattggtgagcttttcta

SEQ ID NO: 133139 - DNA, 80 bp, Homo sapiens
aaaacaggttgaacagaatgaacaaatgtggcattggtgagcttttctacctgcaacagcagctgactatctagcactag

SEQ ID NO: 133140 - DNA, 79 bp, Homo sapiens
aacagaatgaacaaatgtggcattggtgagcttttctacctgcaacagcagctgactatctagcactaggttaacaggt

SEQ ID NO: 133141 - DNA, 79 bp, Homo sapiens
aacaaatgtggcattggtgagcttttctacctgcaacagcagctgactatctagcactaggttaacaggttgggagaga

SEQ ID NO: 133142 - DNA, 76 bp, Homo sapiens
attggtgagcttttctacctgcaacagcagctgactatctagcactaggttaacaggttgggagagaagaggaaaa

SEQ ID NO: 133143 - DNA, 77 bp, Homo sapiens
ttggtgagcttttctacctgcaacagcagctgactatctagcactaggttaacaggttgggagagaagaggaaaaga

SEQ ID NO: 133144 - DNA, 76 bp, Homo sapiens
agcttttctacctgcaacagcagctgactatctagcactaggttaacaggttgggagagaagaggaaaagagaagc

SEQ ID NO: 133145 - DNA, 76 bp, Homo sapiens
tacctgcaacagcagctgactatctagcactaggttaacaggttgggagagaagaggaaaagagaagcgaccttgt

SEQ ID NO: 133146 - DNA, 75 bp, Homo sapiens
caacagcagctgactatctagcactaggttaacaggttgggagagaagaggaaaagagaagcgaccttgttctag

SEQ ID NO: 133147 - DNA, 73 bp, Homo sapiens
tgactatctagcactaggttaacaggttgggagagaagaggaaaagagaagcgaccttgttctagtgtcaaaa

SEQ ID NO: 133148 - DNA, 71 bp, Homo sapiens
actatctagcactaggttaacaggttgggagagaagaggaaaagagaagcgaccttgttctagtgtcaaaa

SEQ ID NO: 133149 - DNA, 70 bp, Homo sapiens
tagcactaggttaacaggttgggagagaagaggaaaagagaagcgaccttgttctagtgtcaaaactgtt

SEQ ID NO: 133150 - DNA, 67 bp, Homo sapiens
actaggttaacaggttgggagagaagaggaaaagagaagcgaccttgttctagtgtcaaaactgttt

SEQ ID NO: 133151 - DNA, 68 bp, Homo sapiens
aggttaacaggttgggagagaagaggaaaagagaagcgaccttgttctagtgtcaaaactgttttcca

SEQ ID NO: 133152 - DNA, 67 bp, Homo sapiens
gaggaaaagagaagcgaccttgttctagtgtcaaaactgttttccaaagttatttacgttcaattta

SEQ ID NO: 133153 - DNA, 68 bp, Homo sapiens
tcaaaactgttttccaaagttatttacgttcaatttaacagtttctgtggtttcactccccttgctca

SEQ ID NO: 133154 - DNA, 72 bp, Homo sapiens
tccaaagttatttacgttcaatttaacagtttctgtggtttcactccccttgctcaacaagatgtagctcaa

SEQ ID NO: 133155 - DNA, 73 bp, Homo sapiens
atttaacagtttctgtggtttcactccccttgctcaacaagatgtagctcaaatcacccaatcactaacactt

SEQ ID NO: 133156 - DNA, 76 bp, Homo sapiens
ccttgctcaacaagatgtagctcaaatcacccaatcactaacactttcctgttcattttatatgagtatttcaaaa

SEQ ID NO: 133157 - DNA, 74 bp, Homo sapiens
acaagatgtagctcaaatcacccaatcactaacactttcctgttcattttatatgagtatttcaaaattgttag

SEQ ID NO: 133158 - DNA, 72 bp, Homo sapiens
tcactaacactttcctgttcattttatatgagtatttcaaaattgttagttaccacgaatgactaagtgcgg

SEQ ID NO: 133159 - DNA, 70 bp, Homo sapiens
tttcctgttcattttatatgagtatttcaaaattgttagttaccacgaatgactaagtgcggggataggg

SEQ ID NO: 133160 - DNA, 70 bp, Homo sapiens
cctgttcattttatatgagtatttcaaaattgttagttaccacgaatgactaagtgcggggatagggtat

SEQ ID NO: 133161 - DNA, 70 bp, Homo sapiens
cattttatatgagtatttcaaaattgttagttaccacgaatgactaagtgcggggatagggtatttttgc

SEQ ID NO: 133162 - DNA, 70 bp, Homo sapiens
atatgagtatttcaaaattgttagttaccacgaatgactaagtgcggggatagggtatttttgctggaat

SEQ ID NO: 133163 - DNA, 68 bp, Homo sapiens
agtatttcaaaattgttagttaccacgaatgactaagtgcggggatagggtatttttgctggaattgt

SEQ ID NO: 133164 - DNA, 75 bp, Homo sapiens
attgttagttaccacgaatgactaagtgcggggatagggtatttttgctggaattgttgcactgcacagcctgta

SEQ ID NO: 133165 - DNA, 75 bp, Homo sapiens
ttagttaccacgaatgactaagtgcggggatagggtatttttgctggaattgttgcactgcacagcctgtaacaa

SEQ ID NO: 133166 - DNA, 76 bp, Homo sapiens
taccacgaatgactaagtgcggggatagggtatttttgctggaattgttgcactgcacagcctgtaacaacacagg

SEQ ID NO: 133167 - DNA, 74 bp, Homo sapiens
aatgactaagtgcggggatagggtatttttgctggaattgttgcactgcacagcctgtaacaacacagggggtc

SEQ ID NO: 133168 - DNA, 73 bp, Homo sapiens
actaagtgcggggatagggtatttttgctggaattgttgcactgcacagcctgtaacaacacagggggtccca

SEQ ID NO: 133169 - DNA, 74 bp, Homo sapiens
atagggtatttttgctggaattgttgcactgcacagcctgtaacaacacagggggtcccagagaggcactccct

SEQ ID NO: 133170 - DNA, 76 bp, Homo sapiens
tttttgctggaattgttgcactgcacagcctgtaacaacacagggggtcccagagaggcactcccttcacggacta

SEQ ID NO: 133171 - DNA, 77 bp, Homo sapiens
aattgttgcactgcacagcctgtaacaacacagggggtcccagagaggcactcccttcacggactacattcactgtc

SEQ ID NO: 133172 - DNA, 73 bp, Homo sapiens
ctgtaacaacacagggggtcccagagaggcactcccttcacggactacattcactgtctcagggcagggggtg

SEQ ID NO: 133173 - DNA, 75 bp, Homo sapiens
agaggcactcccttcacggactacattcactgtctcagggcagggggtgggattagggaacagcagggatccaca

SEQ ID NO: 133174 - DNA, 73 bp, Homo sapiens
ccttcacggactacattcactgtctcagggcagggggtgggattagggaacagcagggatccacaaattccaa

SEQ ID NO: 133175 - DNA, 74 bp, Homo sapiens
acggactacattcactgtctcagggcagggggtgggattagggaacagcagggatccacaaattccaagcagat

SEQ ID NO: 133176 - DNA, 76 bp, Homo sapiens
actgtctcagggcagggggtgggattagggaacagcagggatccacaaattccaagcagattgcttggcaacagta

SEQ ID NO: 133177 - DNA, 76 bp, Homo sapiens
gattagggaacagcagggatccacaaattccaagcagattgcttggcaacagtaccagtaactagtaactagtaca

SEQ ID NO: 133178 - DNA, 75 bp, Homo sapiens
tccacaaattccaagcagattgcttggcaacagtaccagtaactagtaactagtacagtagaagccaagaaccaa

SEQ ID NO: 133179 - DNA, 74 bp, Homo sapiens
aattccaagcagattgcttggcaacagtaccagtaactagtaactagtacagtagaagccaagaaccaagtcag

SEQ ID NO: 133180 - DNA, 74 bp, Homo sapiens
agattgcttggcaacagtaccagtaactagtaactagtacagtagaagccaagaaccaagtcagggctttcaga

SEQ ID NO: 133181 - DNA, 72 bp, Homo sapiens
aacagtaccagtaactagtaactagtacagtagaagccaagaaccaagtcagggctttcagagtctgaaaca

SEQ ID NO: 133182 - DNA, 73 bp, Homo sapiens
taactagtaactagtacagtagaagccaagaaccaagtcagggctttcagagtctgaaacactacctgtgaaa

SEQ ID NO: 133183 - DNA, 74 bp, Homo sapiens
taactagtacagtagaagccaagaaccaagtcagggctttcagagtctgaaacactacctgtgaaatgaattcc

SEQ ID NO: 133184 - DNA, 70 bp, Homo sapiens
aagccaagaaccaagtcagggctttcagagtctgaaacactacctgtgaaatgaattccttaccaaaaat

SEQ ID NO: 133185 - DNA, 69 bp, Homo sapiens
aaccaagtcagggctttcagagtctgaaacactacctgtgaaatgaattccttaccaaaaatttcaatt

SEQ ID NO: 133186 - DNA, 69 bp, Homo sapiens
gagtctgaaacactacctgtgaaatgaattccttaccaaaaatttcaatttaagaagattccacctaag

SEQ ID NO: 133187 - DNA, 66 bp, Homo sapiens
tacctgtgaaatgaattccttaccaaaaatttcaatttaagaagattccacctaaggtaaagggac

SEQ ID NO: 133188 - DNA, 67 bp, Homo sapiens
gtgaaatgaattccttaccaaaaatttcaatttaagaagattccacctaaggtaaagggactgagta

SEQ ID NO: 133189 - DNA, 65 bp, Homo sapiens
aaatttcaatttaagaagattccacctaaggtaaagggactgagtaaaaccctgaatccaagtcc

SEQ ID NO: 133190 - DNA, 70 bp, Homo sapiens
ttaagaagattccacctaaggtaaagggactgagtaaaaccctgaatccaagtcctgcaaaggctgaata

SEQ ID NO: 133191 - DNA, 77 bp, Homo sapiens
taaaaccctgaatccaagtcctgcaaaggctgaataatctatgaataacctgcggccagactgtccagacaaaatca

SEQ ID NO: 133192 - DNA, 80 bp, Homo sapiens
aatccaagtcctgcaaaggctgaataatctatgaataacctgcggccagactgtccagacaaaatcagtgtgaatggtca

SEQ ID NO: 133193 - DNA, 80 bp, Homo sapiens
ctgcaaaggctgaataatctatgaataacctgcggccagactgtccagacaaaatcagtgtgaatggtcatttctttaga

SEQ ID NO: 133194 - DNA, 78 bp, Homo sapiens
tgaataatctatgaataacctgcggccagactgtccagacaaaatcagtgtgaatggtcatttctttagaccattcct

SEQ ID NO: 133195 - DNA, 77 bp, Homo sapiens
aatctatgaataacctgcggccagactgtccagacaaaatcagtgtgaatggtcatttctttagaccattccttcac

SEQ ID NO: 133196 - DNA, 74 bp, Homo sapiens
taacctgcggccagactgtccagacaaaatcagtgtgaatggtcatttctttagaccattccttcactttcctt

SEQ ID NO: 133197 - DNA, 73 bp, Homo sapiens
agactgtccagacaaaatcagtgtgaatggtcatttctttagaccattccttcactttccttttcctagcttc

SEQ ID NO: 133198 - DNA, 71 bp, Homo sapiens
agtgtgaatggtcatttctttagaccattccttcactttccttttcctagcttcctaggaaatgtcagaag

SEQ ID NO: 133199 - DNA, 70 bp, Homo sapiens
atttctttagaccattccttcactttccttttcctagcttcctaggaaatgtcagaagggagacagcttc

SEQ ID NO: 133200 - DNA, 70 bp, Homo sapiens
ttagaccattccttcactttccttttcctagcttcctaggaaatgtcagaagggagacagcttcctttta

SEQ ID NO: 133201 - DNA, 70 bp, Homo sapiens
actttccttttcctagcttcctaggaaatgtcagaagggagacagcttccttttaccatgccggcattaa

SEQ ID NO: 133202 - DNA, 70 bp, Homo sapiens
ttttcctagcttcctaggaaatgtcagaagggagacagcttccttttaccatgccggcattaaacttttc

SEQ ID NO: 133203 - DNA, 73 bp, Homo sapiens
ctaggaaatgtcagaagggagacagcttccttttaccatgccggcattaaacttttctcagtcacaagtagta

SEQ ID NO: 133204 - DNA, 74 bp, Homo sapiens
tcagaagggagacagcttccttttaccatgccggcattaaacttttctcagtcacaagtagtagaacattaatc

SEQ ID NO: 133205 - DNA, 74 bp, Homo sapiens
agacagcttccttttaccatgccggcattaaacttttctcagtcacaagtagtagaacattaatctgaattcaa

SEQ ID NO: 133206 - DNA, 72 bp, Homo sapiens
cttccttttaccatgccggcattaaacttttctcagtcacaagtagtagaacattaatctgaattcaaagta

SEQ ID NO: 133207 - DNA, 74 bp, Homo sapiens
ccatgccggcattaaacttttctcagtcacaagtagtagaacattaatctgaattcaaagtaatacattattac

SEQ ID NO: 133208 - DNA, 72 bp, Homo sapiens
ctcagtcacaagtagtagaacattaatctgaattcaaagtaatacattattacctaaacacttggaaaaata

SEQ ID NO: 133209 - DNA, 69 bp, Homo sapiens
aagtagtagaacattaatctgaattcaaagtaatacattattacctaaacacttggaaaaataatgtta

SEQ ID NO: 133210 - DNA, 70 bp, Homo sapiens
cattaatctgaattcaaagtaatacattattacctaaacacttggaaaaataatgttaaacaaaatgtga

SEQ ID NO: 133211 - DNA, 72 bp, Homo sapiens
cattattacctaaacacttggaaaaataatgttaaacaaaatgtgacatatttacatgattttgtaagtgca

SEQ ID NO: 133212 - DNA, 72 bp, Homo sapiens
ctaaacacttggaaaaataatgttaaacaaaatgtgacatatttacatgattttgtaagtgcaaacttgtca

SEQ ID NO: 133213 - DNA, 73 bp, Homo sapiens
ggaaaaataatgttaaacaaaatgtgacatatttacatgattttgtaagtgcaaacttgtcacaaattcacaa

SEQ ID NO: 133214 - DNA, 74 bp, Homo sapiens
aatgttaaacaaaatgtgacatatttacatgattttgtaagtgcaaacttgtcacaaattcacaaagtcttgct

SEQ ID NO: 133215 - DNA, 74 bp, Homo sapiens
tttacatgattttgtaagtgcaaacttgtcacaaattcacaaagtcttgcttgacttagacttactatacaagg

SEQ ID NO: 133216 - DNA, 74 bp, Homo sapiens
attttgtaagtgcaaacttgtcacaaattcacaaagtcttgcttgacttagacttactatacaaggtgctcttc

SEQ ID NO: 133217 - DNA, 74 bp, Homo sapiens
caaacttgtcacaaattcacaaagtcttgcttgacttagacttactatacaaggtgctcttcctctaaaatgta

SEQ ID NO: 133218 - DNA, 72 bp, Homo sapiens
ttcacaaagtcttgcttgacttagacttactatacaaggtgctcttcctctaaaatgtaaaaaatctgtact

SEQ ID NO: 133219 - DNA, 71 bp, Homo sapiens
gacttactatacaaggtgctcttcctctaaaatgtaaaaaatctgtactttgtattcctgattaagtaaca

SEQ ID NO: 133220 - DNA, 72 bp, Homo sapiens
acaaggtgctcttcctctaaaatgtaaaaaatctgtactttgtattcctgattaagtaacatttgtctctga

SEQ ID NO: 133221 - DNA, 72 bp, Homo sapiens
gctcttcctctaaaatgtaaaaaatctgtactttgtattcctgattaagtaacatttgtctctgaagacaac

SEQ ID NO: 133222 - DNA, 71 bp, Homo sapiens
tgtaaaaaatctgtactttgtattcctgattaagtaacatttgtctctgaagacaactgaaacctacttgt

SEQ ID NO: 133223 - DNA, 73 bp, Homo sapiens
ctgtactttgtattcctgattaagtaacatttgtctctgaagacaactgaaacctacttgtttatttctgtga

SEQ ID NO: 133224 - DNA, 73 bp, Homo sapiens
ctttgtattcctgattaagtaacatttgtctctgaagacaactgaaacctacttgtttatttctgtgattcca

SEQ ID NO: 133225 - DNA, 72 bp, Homo sapiens
gattaagtaacatttgtctctgaagacaactgaaacctacttgtttatttctgtgattccaaaaggacgcaa

SEQ ID NO: 133226 - DNA, 67 bp, Homo sapiens
aagacaactgaaacctacttgtttatttctgtgattccaaaaggacgcaaaaaacccaactggtcaa

SEQ ID NO: 133227 - DNA, 65 bp, Homo sapiens
actgaaacctacttgtttatttctgtgattccaaaaggacgcaaaaaacccaactggtcaaccct

SEQ ID NO: 133228 - DNA, 64 bp, Homo sapiens
acttgtttatttctgtgattccaaaaggacgcaaaaaacccaactggtcaacccttcccttccc

SEQ ID NO: 133229 - DNA, 65 bp, Homo sapiens
tgattccaaaaggacgcaaaaaacccaactggtcaacccttcccttccccctcctttacagtgta

SEQ ID NO: 133230 - DNA, 63 bp, Homo sapiens
aaaaggacgcaaaaaacccaactggtcaacccttcccttccccctcctttacagtgtatctct

SEQ ID NO: 133231 - DNA, 66 bp, Homo sapiens
aaaaacccaactggtcaacccttcccttccccctcctttacagtgtatctctttctagtctcatta

SEQ ID NO: 133232 - DNA, 68 bp, Homo sapiens
actggtcaacccttcccttccccctcctttacagtgtatctctttctagtctcattaccgaacgacaa

SEQ ID NO: 133233 - DNA, 72 bp, Homo sapiens
tcccttccccctcctttacagtgtatctctttctagtctcattaccgaacgacaaggcaggagacgcacagt

SEQ ID NO: 133234 - DNA, 72 bp, Homo sapiens
ccctcctttacagtgtatctctttctagtctcattaccgaacgacaaggcaggagacgcacagtttggaggg

SEQ ID NO: 133235 - DNA, 79 bp, Homo sapiens
agtgtatctctttctagtctcattaccgaacgacaaggcaggagacgcacagtttggaggggccgatgcaatcatcatg

SEQ ID NO: 133236 - DNA, 79 bp, Homo sapiens
ctctttctagtctcattaccgaacgacaaggcaggagacgcacagtttggaggggccgatgcaatcatcatggcagaaa

SEQ ID NO: 133237 - DNA, 80 bp, Homo sapiens
tcattaccgaacgacaaggcaggagacgcacagtttggaggggccgatgcaatcatcatggcagaaagcgccacagcctt

SEQ ID NO: 133238 - DNA, 85 bp, Homo sapiens
aacgacaaggcaggagacgcacagtttggaggggccgatgcaatcatcatggcagaaagcgccacagcctttgcacatgatcatg

SEQ ID NO: 133239 - DNA, 85 bp, Homo sapiens
aggagacgcacagtttggaggggccgatgcaatcatcatggcagaaagcgccacagcctttgcacatgatcatggctttcaagcg

SEQ ID NO: 133240 - DNA, 85 bp, Homo sapiens
gggccgatgcaatcatcatggcagaaagcgccacagcctttgcacatgatcatggctttcaagcggcagtaacatttcgaaggcg

SEQ ID NO: 133241 - DNA, 84 bp, Homo sapiens
aatcatcatggcagaaagcgccacagcctttgcacatgatcatggctttcaagcggcagtaacatttcgaaggcgtgccctcta

SEQ ID NO: 133242 - DNA, 81 bp, Homo sapiens
acagcctttgcacatgatcatggctttcaagcggcagtaacatttcgaaggcgtgccctctatgctgttctcttcggagaa

SEQ ID NO: 133243 - DNA, 82 bp, Homo sapiens
ttgcacatgatcatggctttcaagcggcagtaacatttcgaaggcgtgccctctatgctgttctcttcggagaacgcctgaa

SEQ ID NO: 133244 - DNA, 76 bp, Homo sapiens
atggctttcaagcggcagtaacatttcgaaggcgtgccctctatgctgttctcttcggagaacgcctgaacaggaa

SEQ ID NO: 133245 - DNA, 77 bp, Homo sapiens
ttcaagcggcagtaacatttcgaaggcgtgccctctatgctgttctcttcggagaacgcctgaacaggaatggtctg

SEQ ID NO: 133246 - DNA, 78 bp, Homo sapiens
agtaacatttcgaaggcgtgccctctatgctgttctcttcggagaacgcctgaacaggaatggtctggccatggctgc

SEQ ID NO: 133247 - DNA, 80 bp, Homo sapiens
aaggcgtgccctctatgctgttctcttcggagaacgcctgaacaggaatggtctggccatggctgctgggattcatagct

SEQ ID NO: 133248 - DNA, 84 bp, Homo sapiens
tctatgctgttctcttcggagaacgcctgaacaggaatggtctggccatggctgctgggattcatagcttggctagcagggatg

SEQ ID NO: 133249 - DNA, 82 bp, Homo sapiens
ttctcttcggagaacgcctgaacaggaatggtctggccatggctgctgggattcatagcttggctagcagggatggtagtga

SEQ ID NO: 133250 - DNA, 82 bp, Homo sapiens
aacgcctgaacaggaatggtctggccatggctgctgggattcatagcttggctagcagggatggtagtgacagtcactgaaa

SEQ ID NO: 133251 - DNA, 85 bp, Homo sapiens
aacaggaatggtctggccatggctgctgggattcatagcttggctagcagggatggtagtgacagtcactgaaaatgacatgaca

SEQ ID NO: 133252 - DNA, 89 bp, Homo sapiens
tggccatggctgctgggattcatagcttggctagcagggatggtagtgacagtcactgaaaatgacatgacatcacctacattgctaga

SEQ ID NO: 133253 - DNA, 86 bp, Homo sapiens
ctgctgggattcatagcttggctagcagggatggtagtgacagtcactgaaaatgacatgacatcacctacattgctagatacctg

SEQ ID NO: 133254 - DNA, 83 bp, Homo sapiens
atggtagtgacagtcactgaaaatgacatgacatcacctacattgctagatacctggctacctggtacagcagagttatggtc

SEQ ID NO: 133255 - DNA, 85 bp, Homo sapiens
agtcactgaaaatgacatgacatcacctacattgctagatacctggctacctggtacagcagagttatggtccatgtcagatgag

SEQ ID NO: 133256 - DNA, 84 bp, Homo sapiens
aaaatgacatgacatcacctacattgctagatacctggctacctggtacagcagagttatggtccatgtcagatgaggtggaga

SEQ ID NO: 133257 - DNA, 87 bp, Homo sapiens
tacattgctagatacctggctacctggtacagcagagttatggtccatgtcagatgaggtggagacattgatcatgcctctatagct

SEQ ID NO: 133258 - DNA, 83 bp, Homo sapiens
agagttatggtccatgtcagatgaggtggagacattgatcatgcctctatagcttggccctatctgggtggggcttccataca

SEQ ID NO: 133259 - DNA, 83 bp, Homo sapiens
tatggtccatgtcagatgaggtggagacattgatcatgcctctatagcttggccctatctgggtggggcttccatacaacttc

SEQ ID NO: 133260 - DNA, 78 bp, Homo sapiens
atgaggtggagacattgatcatgcctctatagcttggccctatctgggtggggcttccatacaacttcggggtttgca

SEQ ID NO: 133261 - DNA, 76 bp, Homo sapiens
gtggagacattgatcatgcctctatagcttggccctatctgggtggggcttccatacaacttcggggtttgcaggg

SEQ ID NO: 133262 - DNA, 73 bp, Homo sapiens
atcatgcctctatagcttggccctatctgggtggggcttccatacaacttcggggtttgcaggggtggaagga

SEQ ID NO: 133263 - DNA, 70 bp, Homo sapiens
tctatagcttggccctatctgggtggggcttccatacaacttcggggtttgcaggggtggaaggagtagg

SEQ ID NO: 133264 - DNA, 67 bp, Homo sapiens
ccctatctgggtggggcttccatacaacttcggggtttgcaggggtggaaggagtaggggctggtgg

SEQ ID NO: 133265 - DNA, 70 bp, Homo sapiens
gggcttccatacaacttcggggtttgcaggggtggaaggagtaggggctggtgggtggggctgtctgcag

SEQ ID NO: 133266 - DNA, 71 bp, Homo sapiens
atacaacttcggggtttgcaggggtggaaggagtaggggctggtgggtggggctgtctgcaggcagaggaa

SEQ ID NO: 133267 - DNA, 74 bp, Homo sapiens
ggtttgcaggggtggaaggagtaggggctggtgggtggggctgtctgcaggcagaggaagaacagtagaactga

SEQ ID NO: 133268 - DNA, 73 bp, Homo sapiens
ggtggaaggagtaggggctggtgggtggggctgtctgcaggcagaggaagaacagtagaactgaaaagctcgg

SEQ ID NO: 133269 - DNA, 75 bp, Homo sapiens
aggagtaggggctggtgggtggggctgtctgcaggcagaggaagaacagtagaactgaaaagctcggggctgcta

SEQ ID NO: 133270 - DNA, 75 bp, Homo sapiens
gtgggtggggctgtctgcaggcagaggaagaacagtagaactgaaaagctcggggctgctacggattgccttacc

SEQ ID NO: 133271 - DNA, 82 bp, Homo sapiens
aagaacagtagaactgaaaagctcggggctgctacggattgccttacctctcactgcatgagccatctgcttctgtgctgcc

SEQ ID NO: 133272 - DNA, 83 bp, Homo sapiens
tagaactgaaaagctcggggctgctacggattgccttacctctcactgcatgagccatctgcttctgtgctgcctgaattaaa

SEQ ID NO: 133273 - DNA, 84 bp, Homo sapiens
tacggattgccttacctctcactgcatgagccatctgcttctgtgctgcctgaattaaatctctggctagggtcttttcatcaa

SEQ ID NO: 133274 - DNA, 83 bp, Homo sapiens
ttgccttacctctcactgcatgagccatctgcttctgtgctgcctgaattaaatctctggctagggtcttttcatcaaatgtt

SEQ ID NO: 133275 - DNA, 83 bp, Homo sapiens
actgcatgagccatctgcttctgtgctgcctgaattaaatctctggctagggtcttttcatcaaatgtttggcctctagtgaa

SEQ ID NO: 133276 - DNA, 79 bp, Homo sapiens
catctgcttctgtgctgcctgaattaaatctctggctagggtcttttcatcaaatgtttggcctctagtgaacaggtaa

SEQ ID NO: 133277 - DNA, 77 bp, Homo sapiens
ttctgtgctgcctgaattaaatctctggctagggtcttttcatcaaatgtttggcctctagtgaacaggtaattctc

SEQ ID NO: 133278 - DNA, 73 bp, Homo sapiens
tgaattaaatctctggctagggtcttttcatcaaatgtttggcctctagtgaacaggtaattctccttactta

SEQ ID NO: 133279 - DNA, 70 bp, Homo sapiens
aaatctctggctagggtcttttcatcaaatgtttggcctctagtgaacaggtaattctccttacttaaag

SEQ ID NO: 133280 - DNA, 76 bp, Homo sapiens
ttcatcaaatgtttggcctctagtgaacaggtaattctccttacttaaagtggtttgctcattcaatggtatctca

SEQ ID NO: 133281 - DNA, 75 bp, Homo sapiens
tttggcctctagtgaacaggtaattctccttacttaaagtggtttgctcattcaatggtatctcagccttcacat

SEQ ID NO: 133282 - DNA, 78 bp, Homo sapiens
tagtgaacaggtaattctccttacttaaagtggtttgctcattcaatggtatctcagccttcacattcttgctagcta

SEQ ID NO: 133283 - DNA, 79 bp, Homo sapiens
attctccttacttaaagtggtttgctcattcaatggtatctcagccttcacattcttgctagctaagcaatcactggta

SEQ ID NO: 133284 - DNA, 80 bp, Homo sapiens
tacttaaagtggtttgctcattcaatggtatctcagccttcacattcttgctagctaagcaatcactggtagatagagtt

SEQ ID NO: 133285 - DNA, 84 bp, Homo sapiens
tggtttgctcattcaatggtatctcagccttcacattcttgctagctaagcaatcactggtagatagagtttccctgctgtgag

SEQ ID NO: 133286 - DNA, 81 bp, Homo sapiens
acattcttgctagctaagcaatcactggtagatagagtttccctgctgtgaggtcctgaacttgtgtcacccttgccagca

SEQ ID NO: 133287 - DNA, 80 bp, Homo sapiens
ctagctaagcaatcactggtagatagagtttccctgctgtgaggtcctgaacttgtgtcacccttgccagcactctggga

SEQ ID NO: 133288 - DNA, 79 bp, Homo sapiens
tgctgtgaggtcctgaacttgtgtcacccttgccagcactctgggaaacctggggctcctctttcactgtgacagattc

SEQ ID NO: 133289 - DNA, 80 bp, Homo sapiens
gtcctgaacttgtgtcacccttgccagcactctgggaaacctggggctcctctttcactgtgacagattcctgctcatca

SEQ ID NO: 133290 - DNA, 81 bp, Homo sapiens
ttgccagcactctgggaaacctggggctcctctttcactgtgacagattcctgctcatcaccagtactttcctcatcagtg

SEQ ID NO: 133291 - DNA, 80 bp, Homo sapiens
tctgggaaacctggggctcctctttcactgtgacagattcctgctcatcaccagtactttcctcatcagtgtcatcttct

SEQ ID NO: 133292 - DNA, 81 bp, Homo sapiens
aaacctggggctcctctttcactgtgacagattcctgctcatcaccagtactttcctcatcagtgtcatcttctttgctgc

SEQ ID NO: 133293 - DNA, 88 bp, Homo sapiens
tctttcactgtgacagattcctgctcatcaccagtactttcctcatcagtgtcatcttctttgctgctgctactctctcctgttgcat

SEQ ID NO: 133294 - DNA, 86 bp, Homo sapiens
ctgtgacagattcctgctcatcaccagtactttcctcatcagtgtcatcttctttgctgctgctactctctcctgttgcattttta

SEQ ID NO: 133295 - DNA, 86 bp, Homo sapiens
tgctcatcaccagtactttcctcatcagtgtcatcttctttgctgctgctactctctcctgttgcatttttacagtctgtatatcc

SEQ ID NO: 133296 - DNA, 81 bp, Homo sapiens
cagtactttcctcatcagtgtcatcttctttgctgctgctactctctcctgttgcatttttacagtctgtatatcccattt

SEQ ID NO: 133297 - DNA, 81 bp, Homo sapiens
ctttcctcatcagtgtcatcttctttgctgctgctactctctcctgttgcatttttacagtctgtatatcccattttcaag

SEQ ID NO: 133298 - DNA, 80 bp, Homo sapiens
ttctttgctgctgctactctctcctgttgcatttttacagtctgtatatcccattttcaaggcttcagtggggctgctta

SEQ ID NO: 133299 - DNA, 75 bp, Homo sapiens
tactctctcctgttgcatttttacagtctgtatatcccattttcaaggcttcagtggggctgcttagacaaaaac

SEQ ID NO: 133300 - DNA, 72 bp, Homo sapiens
ttttacagtctgtatatcccattttcaaggcttcagtggggctgcttagacaaaaacgatcttcagggttta

SEQ ID NO: 133301 - DNA, 73 bp, Homo sapiens
tctgtatatcccattttcaaggcttcagtggggctgcttagacaaaaacgatcttcagggtttacagaatggg

SEQ ID NO: 133302 - DNA, 70 bp, Homo sapiens
ttttcaaggcttcagtggggctgcttagacaaaaacgatcttcagggtttacagaatgggtcctcctaaa

SEQ ID NO: 133303 - DNA, 73 bp, Homo sapiens
cttcagtggggctgcttagacaaaaacgatcttcagggtttacagaatgggtcctcctaaagctctctgagcc

SEQ ID NO: 133304 - DNA, 71 bp, Homo sapiens
tgcttagacaaaaacgatcttcagggtttacagaatgggtcctcctaaagctctctgagccccggccgtag

SEQ ID NO: 133305 - DNA, 69 bp, Homo sapiens
aaacgatcttcagggtttacagaatgggtcctcctaaagctctctgagccccggccgtaggtagaaata

SEQ ID NO: 133306 - DNA, 71 bp, Homo sapiens
atcttcagggtttacagaatgggtcctcctaaagctctctgagccccggccgtaggtagaaatattcagta

SEQ ID NO: 133307 - DNA, 71 bp, Homo sapiens
tttacagaatgggtcctcctaaagctctctgagccccggccgtaggtagaaatattcagtaagtagtgccc

SEQ ID NO: 133308 - DNA, 74 bp, Homo sapiens
ctcctaaagctctctgagccccggccgtaggtagaaatattcagtaagtagtgccctgccattgcaggtttgga

SEQ ID NO: 133309 - DNA, 74 bp, Homo sapiens
aagctctctgagccccggccgtaggtagaaatattcagtaagtagtgccctgccattgcaggtttggatgtcct

SEQ ID NO: 133310 - DNA, 74 bp, Homo sapiens
cccggccgtaggtagaaatattcagtaagtagtgccctgccattgcaggtttggatgtccttctgccagcaaaa

SEQ ID NO: 133311 - DNA, 78 bp, Homo sapiens
taggtagaaatattcagtaagtagtgccctgccattgcaggtttggatgtccttctgccagcaaaacccagcatgaac

SEQ ID NO: 133312 - DNA, 78 bp, Homo sapiens
aatattcagtaagtagtgccctgccattgcaggtttggatgtccttctgccagcaaaacccagcatgaacctctggct

SEQ ID NO: 133313 - DNA, 80 bp, Homo sapiens
aagtagtgccctgccattgcaggtttggatgtccttctgccagcaaaacccagcatgaacctctggcttgtggagatgtc

SEQ ID NO: 133314 - DNA, 79 bp, Homo sapiens
attgcaggtttggatgtccttctgccagcaaaacccagcatgaacctctggcttgtggagatgtcttccagctggaaac

SEQ ID NO: 133315 - DNA, 78 bp, Homo sapiens
aggtttggatgtccttctgccagcaaaacccagcatgaacctctggcttgtggagatgtcttccagctggaaacctga

SEQ ID NO: 133316 - DNA, 80 bp, Homo sapiens
ttctgccagcaaaacccagcatgaacctctggcttgtggagatgtcttccagctggaaacctgagtgagcgaagttgaac

SEQ ID NO: 133317 - DNA, 77 bp, Homo sapiens
aaaacccagcatgaacctctggcttgtggagatgtcttccagctggaaacctgagtgagcgaagttgaactgtgagg

SEQ ID NO: 133318 - DNA, 80 bp, Homo sapiens
atgaacctctggcttgtggagatgtcttccagctggaaacctgagtgagcgaagttgaactgtgagggcggcacaactga

SEQ ID NO: 133319 - DNA, 81 bp, Homo sapiens
tctggcttgtggagatgtcttccagctggaaacctgagtgagcgaagttgaactgtgagggcggcacaactgagagaagat

SEQ ID NO: 133320 - DNA, 78 bp, Homo sapiens
gctggaaacctgagtgagcgaagttgaactgtgagggcggcacaactgagagaagattctgcctccgaaccctctgaa

SEQ ID NO: 133321 - DNA, 75 bp, Homo sapiens
agaagattctgcctccgaaccctctgaatgagagtctgaaggatctgatcttgggttgctttacttagtccttcg

SEQ ID NO: 133322 - DNA, 75 bp, Homo sapiens
ttctgcctccgaaccctctgaatgagagtctgaaggatctgatcttgggttgctttacttagtccttcgtggtat

SEQ ID NO: 133323 - DNA, 76 bp, Homo sapiens
accctctgaatgagagtctgaaggatctgatcttgggttgctttacttagtccttcgtggtattggtgtgtgtcaa

SEQ ID NO: 133324 - DNA, 78 bp, Homo sapiens
aatgagagtctgaaggatctgatcttgggttgctttacttagtccttcgtggtattggtgtgtgtcaatgctggagtc

SEQ ID NO: 133325 - DNA, 77 bp, Homo sapiens
ggatctgatcttgggttgctttacttagtccttcgtggtattggtgtgtgtcaatgctggagtccctcagctcctta

SEQ ID NO: 133326 - DNA, 75 bp, Homo sapiens
ttgggttgctttacttagtccttcgtggtattggtgtgtgtcaatgctggagtccctcagctccttagctgaaaa

SEQ ID NO: 133327 - DNA, 78 bp, Homo sapiens
ttgctttacttagtccttcgtggtattggtgtgtgtcaatgctggagtccctcagctccttagctgaaaagagctgaa

SEQ ID NO: 133328 - DNA, 77 bp, Homo sapiens
tagtccttcgtggtattggtgtgtgtcaatgctggagtccctcagctccttagctgaaaagagctgaaggggccttg

SEQ ID NO: 133329 - DNA, 76 bp, Homo sapiens
tggtattggtgtgtgtcaatgctggagtccctcagctccttagctgaaaagagctgaaggggccttggaacctggg

SEQ ID NO: 133330 - DNA, 72 bp, Homo sapiens
agtccctcagctccttagctgaaaagagctgaaggggccttggaacctgggggagctgcttactttgcaagg

SEQ ID NO: 133331 - DNA, 71 bp, Homo sapiens
ctccttagctgaaaagagctgaaggggccttggaacctgggggagctgcttactttgcaaggttttgccca

SEQ ID NO: 133332 - DNA, 76 bp, Homo sapiens
tgaaaagagctgaaggggccttggaacctgggggagctgcttactttgcaaggttttgcccagctgctgctgcgta

SEQ ID NO: 133333 - DNA, 77 bp, Homo sapiens
tgaaggggccttggaacctgggggagctgcttactttgcaaggttttgcccagctgctgctgcgtagctggatggga

SEQ ID NO: 133334 - DNA, 80 bp, Homo sapiens
ttggaacctgggggagctgcttactttgcaaggttttgcccagctgctgctgcgtagctggatgggactgtctctcatta

SEQ ID NO: 133335 - DNA, 81 bp, Homo sapiens
gggagctgcttactttgcaaggttttgcccagctgctgctgcgtagctggatgggactgtctctcattaacttcctctctg

SEQ ID NO: 133336 - DNA, 80 bp, Homo sapiens
tactttgcaaggttttgcccagctgctgctgcgtagctggatgggactgtctctcattaacttcctctctggtgctattt

SEQ ID NO: 133337 - DNA, 79 bp, Homo sapiens
aaggttttgcccagctgctgctgcgtagctggatgggactgtctctcattaacttcctctctggtgctattttctgttg

SEQ ID NO: 133338 - DNA, 84 bp, Homo sapiens
agctgctgctgcgtagctggatgggactgtctctcattaacttcctctctggtgctattttctgttgtgttggtagctatgagc

SEQ ID NO: 133339 - DNA, 79 bp, Homo sapiens
ctggatgggactgtctctcattaacttcctctctggtgctattttctgttgtgttggtagctatgagcgctcccatccc

SEQ ID NO: 133340 - DNA, 76 bp, Homo sapiens
actgtctctcattaacttcctctctggtgctattttctgttgtgttggtagctatgagcgctcccatccccctttc

SEQ ID NO: 133341 - DNA, 72 bp, Homo sapiens
attaacttcctctctggtgctattttctgttgtgttggtagctatgagcgctcccatccccctttcctcttt

SEQ ID NO: 133342 - DNA, 77 bp, Homo sapiens
tctctggtgctattttctgttgtgttggtagctatgagcgctcccatccccctttcctcttttgcagtcagtggaac

SEQ ID NO: 133343 - DNA, 73 bp, Homo sapiens
ttctgttgtgttggtagctatgagcgctcccatccccctttcctcttttgcagtcagtggaaccgttttcatt

SEQ ID NO: 133344 - DNA, 73 bp, Homo sapiens
tgtgttggtagctatgagcgctcccatccccctttcctcttttgcagtcagtggaaccgttttcatttcaact

SEQ ID NO: 133345 - DNA, 76 bp, Homo sapiens
actttggtgagaggtttaggcagaatttgctccatgggaacatctttgccttgaagcagctgagtcactaaaggat

SEQ ID NO: 133346 - DNA, 77 bp, Homo sapiens
agaggtttaggcagaatttgctccatgggaacatctttgccttgaagcagctgagtcactaaaggattattagcagg

SEQ ID NO: 133347 - DNA, 80 bp, Homo sapiens
ttaggcagaatttgctccatgggaacatctttgccttgaagcagctgagtcactaaaggattattagcagggatactaga

SEQ ID NO: 133348 - DNA, 74 bp, Homo sapiens
aacatctttgccttgaagcagctgagtcactaaaggattattagcagggatactagaggttggtcttaaagtgg

SEQ ID NO: 133349 - DNA, 75 bp, Homo sapiens
ttgaagcagctgagtcactaaaggattattagcagggatactagaggttggtcttaaagtgggtccattcatgtt

SEQ ID NO: 133350 - DNA, 72 bp, Homo sapiens
tgagtcactaaaggattattagcagggatactagaggttggtcttaaagtgggtccattcatgtttaaagaa

SEQ ID NO: 133351 - DNA, 68 bp, Homo sapiens
tattagcagggatactagaggttggtcttaaagtgggtccattcatgtttaaagaagttcctggggtt

SEQ ID NO: 133352 - DNA, 71 bp, Homo sapiens
aaagtgggtccattcatgtttaaagaagttcctggggttttaaggctagaagctgctggcaaagtgctcga

SEQ ID NO: 133353 - DNA, 74 bp, Homo sapiens
attcatgtttaaagaagttcctggggttttaaggctagaagctgctggcaaagtgctcgagggtggagctgatc

SEQ ID NO: 133354 - DNA, 75 bp, Homo sapiens
atgtttaaagaagttcctggggttttaaggctagaagctgctggcaaagtgctcgagggtggagctgatccagca

SEQ ID NO: 133355 - DNA, 77 bp, Homo sapiens
aagaagttcctggggttttaaggctagaagctgctggcaaagtgctcgagggtggagctgatccagcaggtgctgta

SEQ ID NO: 133356 - DNA, 76 bp, Homo sapiens
aagttcctggggttttaaggctagaagctgctggcaaagtgctcgagggtggagctgatccagcaggtgctgtagt

SEQ ID NO: 133357 - DNA, 80 bp, Homo sapiens
gggttttaaggctagaagctgctggcaaagtgctcgagggtggagctgatccagcaggtgctgtagttgcactgacctgg

SEQ ID NO: 133358 - DNA, 80 bp, Homo sapiens
ggttttaaggctagaagctgctggcaaagtgctcgagggtggagctgatccagcaggtgctgtagttgcactgacctggg

SEQ ID NO: 133359 - DNA, 80 bp, Homo sapiens
aagctgctggcaaagtgctcgagggtggagctgatccagcaggtgctgtagttgcactgacctggggtacaggaagcttt

SEQ ID NO: 133360 - DNA, 79 bp, Homo sapiens
ctggcaaagtgctcgagggtggagctgatccagcaggtgctgtagttgcactgacctggggtacaggaagcttttctaa

SEQ ID NO: 133361 - DNA, 76 bp, Homo sapiens
aaagtgctcgagggtggagctgatccagcaggtgctgtagttgcactgacctggggtacaggaagcttttctaaag

SEQ ID NO: 133362 - DNA, 78 bp, Homo sapiens
agggtggagctgatccagcaggtgctgtagttgcactgacctggggtacaggaagcttttctaaagtggctgtggtca

SEQ ID NO: 133363 - DNA, 73 bp, Homo sapiens
aggtgctgtagttgcactgacctggggtacaggaagcttttctaaagtggctgtggtcaataaagatgttaaa

SEQ ID NO: 133364 - DNA, 72 bp, Homo sapiens
tgtagttgcactgacctggggtacaggaagcttttctaaagtggctgtggtcaataaagatgttaaagggga

SEQ ID NO: 133365 - DNA, 73 bp, Homo sapiens
tacaggaagcttttctaaagtggctgtggtcaataaagatgttaaaggggagggagttacagccactggcaca

SEQ ID NO: 133366 - DNA, 78 bp, Homo sapiens
ctgtggtcaataaagatgttaaaggggagggagttacagccactggcacactagcatctgtctttgatgaggctgaag

SEQ ID NO: 133367 - DNA, 75 bp, Homo sapiens
aataaagatgttaaaggggagggagttacagccactggcacactagcatctgtctttgatgaggctgaagggtta

SEQ ID NO: 133368 - DNA, 75 bp, Homo sapiens
ttaaaggggagggagttacagccactggcacactagcatctgtctttgatgaggctgaagggttaggtatattct

SEQ ID NO: 133369 - DNA, 79 bp, Homo sapiens
actggcacactagcatctgtctttgatgaggctgaagggttaggtatattcttactaggacctgctttgagctcaactg

SEQ ID NO: 133370 - DNA, 81 bp, Homo sapiens
acactagcatctgtctttgatgaggctgaagggttaggtatattcttactaggacctgctttgagctcaactgtgccatca

SEQ ID NO: 133371 - DNA, 83 bp, Homo sapiens
tctttgatgaggctgaagggttaggtatattcttactaggacctgctttgagctcaactgtgccatcagctgcacaatgaaca

SEQ ID NO: 133372 - DNA, 82 bp, Homo sapiens
atgaggctgaagggttaggtatattcttactaggacctgctttgagctcaactgtgccatcagctgcacaatgaacaggtga

SEQ ID NO: 133373 - DNA, 84 bp, Homo sapiens
ttaggtatattcttactaggacctgctttgagctcaactgtgccatcagctgcacaatgaacaggtgaggcacctgagattaga

SEQ ID NO: 133374 - DNA, 85 bp, Homo sapiens
atattcttactaggacctgctttgagctcaactgtgccatcagctgcacaatgaacaggtgaggcacctgagattagagcaggac

SEQ ID NO: 133375 - DNA, 86 bp, Homo sapiens
tgccatcagctgcacaatgaacaggtgaggcacctgagattagagcaggacctgttggagaaggtgctttctcctgtctgcaacta

SEQ ID NO: 133376 - DNA, 76 bp, Homo sapiens
aacaggtgaggcacctgagattagagcaggacctgttggagaaggtgctttctcctgtctgcaactactgggccct

SEQ ID NO: 133377 - DNA, 79 bp, Homo sapiens
acctgagattagagcaggacctgttggagaaggtgctttctcctgtctgcaactactgggcccttgtggatggctgaca

SEQ ID NO: 133378 - DNA, 79 bp, Homo sapiens
agattagagcaggacctgttggagaaggtgctttctcctgtctgcaactactgggcccttgtggatggctgacagaggc

SEQ ID NO: 133379 - DNA, 80 bp, Homo sapiens
agaaggtgctttctcctgtctgcaactactgggcccttgtggatggctgacagaggccactgtggctgttgctctggtgg

SEQ ID NO: 133380 - DNA, 78 bp, Homo sapiens
tcctgtctgcaactactgggcccttgtggatggctgacagaggccactgtggctgttgctctggtggggttcagtttt

SEQ ID NO: 133381 - DNA, 79 bp, Homo sapiens
tctgcaactactgggcccttgtggatggctgacagaggccactgtggctgttgctctggtggggttcagtttttcatta

SEQ ID NO: 133382 - DNA, 77 bp, Homo sapiens
cccttgtggatggctgacagaggccactgtggctgttgctctggtggggttcagtttttcattatccaatttctcta

SEQ ID NO: 133383 - DNA, 78 bp, Homo sapiens
atggctgacagaggccactgtggctgttgctctggtggggttcagtttttcattatccaatttctctatgtgggctgg

SEQ ID NO: 133384 - DNA, 77 bp, Homo sapiens
aggccactgtggctgttgctctggtggggttcagtttttcattatccaatttctctatgtgggctggtgatgggaca

SEQ ID NO: 133385 - DNA, 76 bp, Homo sapiens
actgtggctgttgctctggtggggttcagtttttcattatccaatttctctatgtgggctggtgatgggacacttg

SEQ ID NO: 133386 - DNA, 81 bp, Homo sapiens
ttgctctggtggggttcagtttttcattatccaatttctctatgtgggctggtgatgggacacttgtgcatgctccactga

SEQ ID NO: 133387 - DNA, 81 bp, Homo sapiens
ttcagtttttcattatccaatttctctatgtgggctggtgatgggacacttgtgcatgctccactgacggcaggtgttgga

SEQ ID NO: 133388 - DNA, 82 bp, Homo sapiens
ttttcattatccaatttctctatgtgggctggtgatgggacacttgtgcatgctccactgacggcaggtgttggaggcactg

SEQ ID NO: 133389 - DNA, 77 bp, Homo sapiens
atttctctatgtgggctggtgatgggacacttgtgcatgctccactgacggcaggtgttggaggcactgggggggtt

SEQ ID NO: 133390 - DNA, 79 bp, Homo sapiens
tatgtgggctggtgatgggacacttgtgcatgctccactgacggcaggtgttggaggcactgggggggtttgctgtagt

SEQ ID NO: 133391 - DNA, 80 bp, Homo sapiens
atgggacacttgtgcatgctccactgacggcaggtgttggaggcactgggggggtttgctgtagttgtgctccagagaca

SEQ ID NO: 133392 - DNA, 80 bp, Homo sapiens
acttgtgcatgctccactgacggcaggtgttggaggcactgggggggtttgctgtagttgtgctccagagacactatgag

SEQ ID NO: 133393 - DNA, 79 bp, Homo sapiens
ctccactgacggcaggtgttggaggcactgggggggtttgctgtagttgtgctccagagacactatgaggctgtgcctg

SEQ ID NO: 133394 - DNA, 77 bp, Homo sapiens
acggcaggtgttggaggcactgggggggtttgctgtagttgtgctccagagacactatgaggctgtgcctggcttgg

SEQ ID NO: 133395 - DNA, 77 bp, Homo sapiens
ttggaggcactgggggggtttgctgtagttgtgctccagagacactatgaggctgtgcctggcttggggtggtcttg

SEQ ID NO: 133396 - DNA, 82 bp, Homo sapiens
ctgtagttgtgctccagagacactatgaggctgtgcctggcttggggtggtcttggtctcagactggggctgagtctctgga

SEQ ID NO: 133397 - DNA, 80 bp, Homo sapiens
tccagagacactatgaggctgtgcctggcttggggtggtcttggtctcagactggggctgagtctctggaccacagggta

SEQ ID NO: 133398 - DNA, 76 bp, Homo sapiens
tgtgcctggcttggggtggtcttggtctcagactggggctgagtctctggaccacagggtaaaagctctctcgtac

SEQ ID NO: 133399 - DNA, 74 bp, Homo sapiens
gtcttggtctcagactggggctgagtctctggaccacagggtaaaagctctctcgtacctcccctgcttccagt

SEQ ID NO: 133400 - DNA, 73 bp, Homo sapiens
actggggctgagtctctggaccacagggtaaaagctctctcgtacctcccctgcttccagttcctgccagttc

SEQ ID NO: 133401 - DNA, 72 bp, Homo sapiens
agtctctggaccacagggtaaaagctctctcgtacctcccctgcttccagttcctgccagttccagtgtggg

SEQ ID NO: 133402 - DNA, 69 bp, Homo sapiens
accacagggtaaaagctctctcgtacctcccctgcttccagttcctgccagttccagtgtggggccctt

SEQ ID NO: 133403 - DNA, 71 bp, Homo sapiens
gtaaaagctctctcgtacctcccctgcttccagttcctgccagttccagtgtggggccctttccagtttca

SEQ ID NO: 133404 - DNA, 75 bp, Homo sapiens
tctcgtacctcccctgcttccagttcctgccagttccagtgtggggccctttccagtttcactgactctgtctga

SEQ ID NO: 133405 - DNA, 78 bp, Homo sapiens
tgcttccagttcctgccagttccagtgtggggccctttccagtttcactgactctgtctgagcctggactgcctcctc

SEQ ID NO: 133406 - DNA, 77 bp, Homo sapiens
agttcctgccagttccagtgtggggccctttccagtttcactgactctgtctgagcctggactgcctcctctagcag

SEQ ID NO: 133407 - DNA, 78 bp, Homo sapiens
agttccagtgtggggccctttccagtttcactgactctgtctgagcctggactgcctcctctagcagtctgcccttca

SEQ ID NO: 133408 - DNA, 78 bp, Homo sapiens
ggccctttccagtttcactgactctgtctgagcctggactgcctcctctagcagtctgcccttcaccaccctctcctg

SEQ ID NO: 133409 - DNA, 78 bp, Homo sapiens
tttccagtttcactgactctgtctgagcctggactgcctcctctagcagtctgcccttcaccaccctctcctggacct

SEQ ID NO: 133410 - DNA, 77 bp, Homo sapiens
actgactctgtctgagcctggactgcctcctctagcagtctgcccttcaccaccctctcctggaccttgtccacccc

SEQ ID NO: 133411 - DNA, 76 bp, Homo sapiens
gtctgagcctggactgcctcctctagcagtctgcccttcaccaccctctcctggaccttgtccaccccctgggcca

SEQ ID NO: 133412 - DNA, 74 bp, Homo sapiens
tgcctcctctagcagtctgcccttcaccaccctctcctggaccttgtccaccccctgggccaggtcctggaatg

SEQ ID NO: 133413 - DNA, 72 bp, Homo sapiens
tctagcagtctgcccttcaccaccctctcctggaccttgtccaccccctgggccaggtcctggaatggtccc

SEQ ID NO: 133414 - DNA, 73 bp, Homo sapiens
accctctcctggaccttgtccaccccctgggccaggtcctggaatggtccctccaactgaggcggctgcagca

SEQ ID NO: 133415 - DNA, 77 bp, Homo sapiens
ctggaccttgtccaccccctgggccaggtcctggaatggtccctccaactgaggcggctgcagcagctgcggcggca

SEQ ID NO: 133416 - DNA, 82 bp, Homo sapiens
cccctgggccaggtcctggaatggtccctccaactgaggcggctgcagcagctgcggcggcagcggcagctgctgccctctg

SEQ ID NO: 133417 - DNA, 84 bp, Homo sapiens
aggtcctggaatggtccctccaactgaggcggctgcagcagctgcggcggcagcggcagctgctgccctctgtgctttgaccag

SEQ ID NO: 133418 - DNA, 83 bp, Homo sapiens
aatggtccctccaactgaggcggctgcagcagctgcggcggcagcggcagctgctgccctctgtgctttgaccagttgggctt

SEQ ID NO: 133419 - DNA, 87 bp, Homo sapiens
tccaactgaggcggctgcagcagctgcggcggcagcggcagctgctgccctctgtgctttgaccagttgggcttttgctttgatgtc

SEQ ID NO: 133420 - DNA, 88 bp, Homo sapiens
ggctgcagcagctgcggcggcagcggcagctgctgccctctgtgctttgaccagttgggcttttgctttgatgtctgcaagagttctg

SEQ ID NO: 133421 - DNA, 86 bp, Homo sapiens
agcagctgcggcggcagcggcagctgctgccctctgtgctttgaccagttgggcttttgctttgatgtctgcaagagttctggctc

SEQ ID NO: 133422 - DNA, 83 bp, Homo sapiens
cagcggcagctgctgccctctgtgctttgaccagttgggcttttgctttgatgtctgcaagagttctggctcctgttctgtta

SEQ ID NO: 133423 - DNA, 80 bp, Homo sapiens
tgctgccctctgtgctttgaccagttgggcttttgctttgatgtctgcaagagttctggctcctgttctgttaggactag

SEQ ID NO: 133424 - DNA, 81 bp, Homo sapiens
tctgtgctttgaccagttgggcttttgctttgatgtctgcaagagttctggctcctgttctgttaggactagtgatggaga

SEQ ID NO: 133425 - DNA, 77 bp, Homo sapiens
ttttgctttgatgtctgcaagagttctggctcctgttctgttaggactagtgatggagactggaaaacgagccctgg

SEQ ID NO: 133426 - DNA, 78 bp, Homo sapiens
ctttgatgtctgcaagagttctggctcctgttctgttaggactagtgatggagactggaaaacgagccctgggagaga

SEQ ID NO: 133427 - DNA, 78 bp, Homo sapiens
gagttctggctcctgttctgttaggactagtgatggagactggaaaacgagccctgggagagacctgcgatggatgaa

SEQ ID NO: 133428 - DNA, 76 bp, Homo sapiens
ttctgttaggactagtgatggagactggaaaacgagccctgggagagacctgcgatggatgaaacggcatggggga

SEQ ID NO: 133429 - DNA, 75 bp, Homo sapiens
tggaaaacgagccctgggagagacctgcgatggatgaaacggcatgggggagattctggagaccgggatctgaaa

SEQ ID NO: 133430 - DNA, 75 bp, Homo sapiens
acgagccctgggagagacctgcgatggatgaaacggcatgggggagattctggagaccgggatctgaaagaagta

SEQ ID NO: 133431 - DNA, 70 bp, Homo sapiens
cgatggatgaaacggcatgggggagattctggagaccgggatctgaaagaagtagaggggaaaaaaacaa

SEQ ID NO: 133432 - DNA, 74 bp, Homo sapiens
aacatagggttcagacgatctctgcttttctaattctctccattctcttaccttgagaggtggtacttttcgca

SEQ ID NO: 133433 - DNA, 75 bp, Homo sapiens
agacgatctctgcttttctaattctctccattctcttaccttgagaggtggtacttttcgcacctggattctgtc

SEQ ID NO: 133434 - DNA, 73 bp, Homo sapiens
ttttctaattctctccattctcttaccttgagaggtggtacttttcgcacctggattctgtcccctctattga

SEQ ID NO: 133435 - DNA, 73 bp, Homo sapiens
taattctctccattctcttaccttgagaggtggtacttttcgcacctggattctgtcccctctattgagaaag

SEQ ID NO: 133436 - DNA, 73 bp, Homo sapiens
attctcttaccttgagaggtggtacttttcgcacctggattctgtcccctctattgagaaagggctgtggtga

SEQ ID NO: 133437 - DNA, 74 bp, Homo sapiens
cttgagaggtggtacttttcgcacctggattctgtcccctctattgagaaagggctgtggtgagacctgaaatg

SEQ ID NO: 133438 - DNA, 78 bp, Homo sapiens
tggtacttttcgcacctggattctgtcccctctattgagaaagggctgtggtgagacctgaaatggctgctggtgctg

SEQ ID NO: 133439 - DNA, 81 bp, Homo sapiens
acctggattctgtcccctctattgagaaagggctgtggtgagacctgaaatggctgctggtgctggcgattctcagtgaca

SEQ ID NO: 133440 - DNA, 81 bp, Homo sapiens
tgtcccctctattgagaaagggctgtggtgagacctgaaatggctgctggtgctggcgattctcagtgacacgtggcctct

SEQ ID NO: 133441 - DNA, 83 bp, Homo sapiens
tctattgagaaagggctgtggtgagacctgaaatggctgctggtgctggcgattctcagtgacacgtggcctcttctcccagc

SEQ ID NO: 133442 - DNA, 81 bp, Homo sapiens
aagggctgtggtgagacctgaaatggctgctggtgctggcgattctcagtgacacgtggcctcttctcccagctcacaggg

SEQ ID NO: 133443 - DNA, 80 bp, Homo sapiens
agacctgaaatggctgctggtgctggcgattctcagtgacacgtggcctcttctcccagctcacaggggcctcttcttgg

SEQ ID NO: 133444 - DNA, 79 bp, Homo sapiens
aaatggctgctggtgctggcgattctcagtgacacgtggcctcttctcccagctcacaggggcctcttcttgggtgagg

SEQ ID NO: 133445 - DNA, 78 bp, Homo sapiens
tggtgctggcgattctcagtgacacgtggcctcttctcccagctcacaggggcctcttcttgggtgagggaagacttc

SEQ ID NO: 133446 - DNA, 75 bp, Homo sapiens
attctcagtgacacgtggcctcttctcccagctcacaggggcctcttcttgggtgagggaagacttcctcttgag

SEQ ID NO: 133447 - DNA, 73 bp, Homo sapiens
acacgtggcctcttctcccagctcacaggggcctcttcttgggtgagggaagacttcctcttgaggctttctg

SEQ ID NO: 133448 - DNA, 76 bp, Homo sapiens
ttctcccagctcacaggggcctcttcttgggtgagggaagacttcctcttgaggctttctgggctctgatcaacaa

SEQ ID NO: 133449 - DNA, 75 bp, Homo sapiens
acaggggcctcttcttgggtgagggaagacttcctcttgaggctttctgggctctgatcaacaagagttgctaga

SEQ ID NO: 133450 - DNA, 76 bp, Homo sapiens
tcttcttgggtgagggaagacttcctcttgaggctttctgggctctgatcaacaagagttgctagaggttctttca

SEQ ID NO: 133451 - DNA, 77 bp, Homo sapiens
tgagggaagacttcctcttgaggctttctgggctctgatcaacaagagttgctagaggttctttcatattagtctcc

SEQ ID NO: 133452 - DNA, 77 bp, Homo sapiens
aagacttcctcttgaggctttctgggctctgatcaacaagagttgctagaggttctttcatattagtctcctgtgga

SEQ ID NO: 133453 - DNA, 79 bp, Homo sapiens
ttgaggctttctgggctctgatcaacaagagttgctagaggttctttcatattagtctcctgtggacccgctcctgctg

SEQ ID NO: 133454 - DNA, 74 bp, Homo sapiens
aacaagagttgctagaggttctttcatattagtctcctgtggacccgctcctgctgtgggcttcactattggtt

SEQ ID NO: 133455 - DNA, 74 bp, Homo sapiens
agttgctagaggttctttcatattagtctcctgtggacccgctcctgctgtgggcttcactattggtttttcaa

SEQ ID NO: 133456 - DNA, 73 bp, Homo sapiens
tttcatattagtctcctgtggacccgctcctgctgtgggcttcactattggtttttcaaccccaggactcttg

SEQ ID NO: 133457 - DNA, 71 bp, Homo sapiens
tattagtctcctgtggacccgctcctgctgtgggcttcactattggtttttcaaccccaggactcttgggt

SEQ ID NO: 133458 - DNA, 72 bp, Homo sapiens
gacccgctcctgctgtgggcttcactattggtttttcaaccccaggactcttgggtttgcttggcgatgtaa

SEQ ID NO: 133459 - DNA, 72 bp, Homo sapiens
tgctgtgggcttcactattggtttttcaaccccaggactcttgggtttgcttggcgatgtaactaaagattc

SEQ ID NO: 133460 - DNA, 69 bp, Homo sapiens
ttcactattggtttttcaaccccaggactcttgggtttgcttggcgatgtaactaaagattcttggctt

SEQ ID NO: 133461 - DNA, 69 bp, Homo sapiens
tattggtttttcaaccccaggactcttgggtttgcttggcgatgtaactaaagattcttggctttcact

SEQ ID NO: 133462 - DNA, 70 bp, Homo sapiens
cccaggactcttgggtttgcttggcgatgtaactaaagattcttggctttcacttttgttataattagaa

SEQ ID NO: 133463 - DNA, 71 bp, Homo sapiens
actcttgggtttgcttggcgatgtaactaaagattcttggctttcacttttgttataattagaagctgtgg

SEQ ID NO: 133464 - DNA, 74 bp, Homo sapiens
tttgcttggcgatgtaactaaagattcttggctttcacttttgttataattagaagctgtggtgagatggttct

SEQ ID NO: 133465 - DNA, 77 bp, Homo sapiens
aagattcttggctttcacttttgttataattagaagctgtggtgagatggttcttctcagattcctgttcagcagag

SEQ ID NO: 133466 - DNA, 78 bp, Homo sapiens
ctttcacttttgttataattagaagctgtggtgagatggttcttctcagattcctgttcagcagaggtgactggcttc

SEQ ID NO: 133467 - DNA, 83 bp, Homo sapiens
ttgttataattagaagctgtggtgagatggttcttctcagattcctgttcagcagaggtgactggcttctgctccaagagatc

SEQ ID NO: 133468 - DNA, 84 bp, Homo sapiens
tagaagctgtggtgagatggttcttctcagattcctgttcagcagaggtgactggcttctgctccaagagatcctcatcctttg

SEQ ID NO: 133469 - DNA, 82 bp, Homo sapiens
ttcttctcagattcctgttcagcagaggtgactggcttctgctccaagagatcctcatcctttgggcacttgatgggaagaa

SEQ ID NO: 133470 - DNA, 87 bp, Homo sapiens
tgttcagcagaggtgactggcttctgctccaagagatcctcatcctttgggcacttgatgggaagaatgctgctaagctcatgtgta

SEQ ID NO: 133471 - DNA, 85 bp, Homo sapiens
agaggtgactggcttctgctccaagagatcctcatcctttgggcacttgatgggaagaatgctgctaagctcatgtgtattgaga

SEQ ID NO: 133472 - DNA, 86 bp, Homo sapiens
tggcttctgctccaagagatcctcatcctttgggcacttgatgggaagaatgctgctaagctcatgtgtattgagagctgaggaaa

SEQ ID NO: 133473 - DNA, 83 bp, Homo sapiens
ctccaagagatcctcatcctttgggcacttgatgggaagaatgctgctaagctcatgtgtattgagagctgaggaaagcaggg

SEQ ID NO: 133474 - DNA, 84 bp, Homo sapiens
tttgggcacttgatgggaagaatgctgctaagctcatgtgtattgagagctgaggaaagcaggggctctgaagatgtggagaag

SEQ ID NO: 133475 - DNA, 86 bp, Homo sapiens
tgggaagaatgctgctaagctcatgtgtattgagagctgaggaaagcaggggctctgaagatgtggagaagttcggctgcacttca

SEQ ID NO: 133476 - DNA, 81 bp, Homo sapiens
atgtgtattgagagctgaggaaagcaggggctctgaagatgtggagaagttcggctgcacttcaccttggctttcacactc

SEQ ID NO: 133477 - DNA, 80 bp, Homo sapiens
tattgagagctgaggaaagcaggggctctgaagatgtggagaagttcggctgcacttcaccttggctttcacactcttct

SEQ ID NO: 133478 - DNA, 76 bp, Homo sapiens
aggaaagcaggggctctgaagatgtggagaagttcggctgcacttcaccttggctttcacactcttcttttctgcc

SEQ ID NO: 133479 - DNA, 81 bp, Homo sapiens
ctctgaagatgtggagaagttcggctgcacttcaccttggctttcacactcttcttttctgcctggtgatgacatttgcaa

SEQ ID NO: 133480 - DNA, 80 bp, Homo sapiens
atgtggagaagttcggctgcacttcaccttggctttcacactcttcttttctgcctggtgatgacatttgcaatgcttct

SEQ ID NO: 133481 - DNA, 78 bp, Homo sapiens
aagttcggctgcacttcaccttggctttcacactcttcttttctgcctggtgatgacatttgcaatgcttcttcttta

SEQ ID NO: 133482 - DNA, 78 bp, Homo sapiens
acttcaccttggctttcacactcttcttttctgcctggtgatgacatttgcaatgcttcttctttacactctgactgg

SEQ ID NO: 133483 - DNA, 79 bp, Homo sapiens
ctttcacactcttcttttctgcctggtgatgacatttgcaatgcttcttctttacactctgactgggagactactggaa

SEQ ID NO: 133484 - DNA, 80 bp, Homo sapiens
cttcttttctgcctggtgatgacatttgcaatgcttcttctttacactctgactgggagactactggaactattctgata

SEQ ID NO: 133485 - DNA, 81 bp, Homo sapiens
tttctgcctggtgatgacatttgcaatgcttcttctttacactctgactgggagactactggaactattctgataagagag

SEQ ID NO: 133486 - DNA, 81 bp, Homo sapiens
atgacatttgcaatgcttcttctttacactctgactgggagactactggaactattctgataagagaggcctctgacacag

SEQ ID NO: 133487 - DNA, 79 bp, Homo sapiens
atgcttcttctttacactctgactgggagactactggaactattctgataagagaggcctctgacacaggcatggattt

SEQ ID NO: 133488 - DNA, 79 bp, Homo sapiens
tttacactctgactgggagactactggaactattctgataagagaggcctctgacacaggcatggattttggttgttca

SEQ ID NO: 133489 - DNA, 79 bp, Homo sapiens
actctgactgggagactactggaactattctgataagagaggcctctgacacaggcatggattttggttgttcagctgg

SEQ ID NO: 133490 - DNA, 74 bp, Homo sapiens
actactggaactattctgataagagaggcctctgacacaggcatggattttggttgttcagctggggttttctt

SEQ ID NO: 133491 - DNA, 73 bp, Homo sapiens
aactattctgataagagaggcctctgacacaggcatggattttggttgttcagctggggttttctttactttg

SEQ ID NO: 133492 - DNA, 75 bp, Homo sapiens
tctgacacaggcatggattttggttgttcagctggggttttctttactttgggatcactgggagaagctgtcaat

SEQ ID NO: 133493 - DNA, 72 bp, Homo sapiens
catggattttggttgttcagctggggttttctttactttgggatcactgggagaagctgtcaatttcttaga

SEQ ID NO: 133494 - DNA, 70 bp, Homo sapiens
attttggttgttcagctggggttttctttactttgggatcactgggagaagctgtcaatttcttagaatc

SEQ ID NO: 133495 - DNA, 73 bp, Homo sapiens
ctggggttttctttactttgggatcactgggagaagctgtcaatttcttagaatcttcaaggctcaggccaga

SEQ ID NO: 133496 - DNA, 73 bp, Homo sapiens
ttctttactttgggatcactgggagaagctgtcaatttcttagaatcttcaaggctcaggccagaactaaaaa

SEQ ID NO: 133497 - DNA, 72 bp, Homo sapiens
tttgggatcactgggagaagctgtcaatttcttagaatcttcaaggctcaggccagaactaaaaaggggaaa

SEQ ID NO: 133498 - DNA, 69 bp, Homo sapiens
ggagaagctgtcaatttcttagaatcttcaaggctcaggccagaactaaaaaggggaaaaaagaaatat

SEQ ID NO: 133499 - DNA, 70 bp, Homo sapiens
tgtcaatttcttagaatcttcaaggctcaggccagaactaaaaaggggaaaaaagaaatattccagttga

SEQ ID NO: 133500 - DNA, 72 bp, Homo sapiens
tatgtaggaattaacatttggtttatagaacctgtcctaatattacctctgcccatagtagctttcaaagaa

SEQ ID NO: 133501 - DNA, 70 bp, Homo sapiens
ggaattaacatttggtttatagaacctgtcctaatattacctctgcccatagtagctttcaaagaattgt

SEQ ID NO: 133502 - DNA, 71 bp, Homo sapiens
atttggtttatagaacctgtcctaatattacctctgcccatagtagctttcaaagaattgttctttccatg

SEQ ID NO: 133503 - DNA, 70 bp, Homo sapiens
aacctgtcctaatattacctctgcccatagtagctttcaaagaattgttctttccatggctccacttttt

SEQ ID NO: 133504 - DNA, 71 bp, Homo sapiens
cctaatattacctctgcccatagtagctttcaaagaattgttctttccatggctccacttttttctccttc

SEQ ID NO: 133505 - DNA, 74 bp, Homo sapiens
tgcccatagtagctttcaaagaattgttctttccatggctccacttttttctccttctcaatctcttgtcgaat

SEQ ID NO: 133506 - DNA, 74 bp, Homo sapiens
tagtagctttcaaagaattgttctttccatggctccacttttttctccttctcaatctcttgtcgaattctcac

SEQ ID NO: 133507 - DNA, 76 bp, Homo sapiens
aattgttctttccatggctccacttttttctccttctcaatctcttgtcgaattctcacctgcatctcaggtgtaa

SEQ ID NO: 133508 - DNA, 77 bp, Homo sapiens
ttctttccatggctccacttttttctccttctcaatctcttgtcgaattctcacctgcatctcaggtgtaaactcac

SEQ ID NO: 133509 - DNA, 77 bp, Homo sapiens
cacttttttctccttctcaatctcttgtcgaattctcacctgcatctcaggtgtaaactcacctgcaatgtacccaa

SEQ ID NO: 133510 - DNA, 77 bp, Homo sapiens
tccttctcaatctcttgtcgaattctcacctgcatctcaggtgtaaactcacctgcaatgtacccaaaaaaggatat

SEQ ID NO: 133511 - DNA, 77 bp, Homo sapiens
aatctcttgtcgaattctcacctgcatctcaggtgtaaactcacctgcaatgtacccaaaaaaggatattcaataga

SEQ ID NO: 133512 - DNA, 78 bp, Homo sapiens
aggtgctctgagtgcacacaccacctgggagacacattaagtagagcacttaccttctgagagtctttccttccagcc

SEQ ID NO: 133513 - DNA, 76 bp, Homo sapiens
acacaccacctgggagacacattaagtagagcacttaccttctgagagtctttccttccagccttgggctgctgaa

SEQ ID NO: 133514 - DNA, 78 bp, Homo sapiens
tgggagacacattaagtagagcacttaccttctgagagtctttccttccagccttgggctgctgaagtgaagaattca

SEQ ID NO: 133515 - DNA, 75 bp, Homo sapiens
attaagtagagcacttaccttctgagagtctttccttccagccttgggctgctgaagtgaagaattcattgttaa

SEQ ID NO: 133516 - DNA, 77 bp, Homo sapiens
gtagagcacttaccttctgagagtctttccttccagccttgggctgctgaagtgaagaattcattgttaagggctga

SEQ ID NO: 133517 - DNA, 77 bp, Homo sapiens
tctgagagtctttccttccagccttgggctgctgaagtgaagaattcattgttaagggctgagccatttaacttcat

SEQ ID NO: 133518 - DNA, 74 bp, Homo sapiens
tttccttccagccttgggctgctgaagtgaagaattcattgttaagggctgagccatttaacttcattaaacca

SEQ ID NO: 133519 - DNA, 75 bp, Homo sapiens
agccttgggctgctgaagtgaagaattcattgttaagggctgagccatttaacttcattaaaccatctggaccaa

SEQ ID NO: 133520 - DNA, 75 bp, Homo sapiens
tgctgaagtgaagaattcattgttaagggctgagccatttaacttcattaaaccatctggaccaacctgggtcaa

SEQ ID NO: 133521 - DNA, 71 bp, Homo sapiens
aagaattcattgttaagggctgagccatttaacttcattaaaccatctggaccaacctgggtcaaagaata

SEQ ID NO: 133522 - DNA, 70 bp, Homo sapiens
attgttaagggctgagccatttaacttcattaaaccatctggaccaacctgggtcaaagaataagccaag

SEQ ID NO: 133523 - DNA, 71 bp, Homo sapiens
tgagccatttaacttcattaaaccatctggaccaacctgggtcaaagaataagccaaggaaagcttacaaa

SEQ ID NO: 133524 - DNA, 74 bp, Homo sapiens
tatacataaacagctatttttaaaatcttaaggagttcaatgacgcacctgtcgatctacctctgggagtagta

SEQ ID NO: 133525 - DNA, 70 bp, Homo sapiens
aaacagctatttttaaaatcttaaggagttcaatgacgcacctgtcgatctacctctgggagtagtaaaa

SEQ ID NO: 133526 - DNA, 76 bp, Homo sapiens
taaaatcttaaggagttcaatgacgcacctgtcgatctacctctgggagtagtaaaagcagtcgttgctggcaatc

SEQ ID NO: 133527 - DNA, 77 bp, Homo sapiens
ttaaggagttcaatgacgcacctgtcgatctacctctgggagtagtaaaagcagtcgttgctggcaatctccaggaa

SEQ ID NO: 133528 - DNA, 76 bp, Homo sapiens
aatgacgcacctgtcgatctacctctgggagtagtaaaagcagtcgttgctggcaatctccaggaaggactgaaaa

SEQ ID NO: 133529 - DNA, 80 bp, Homo sapiens
tcgatctacctctgggagtagtaaaagcagtcgttgctggcaatctccaggaaggactgaaaatgtgtgcttgttgatca

SEQ ID NO: 133530 - DNA, 80 bp, Homo sapiens
tacctctgggagtagtaaaagcagtcgttgctggcaatctccaggaaggactgaaaatgtgtgcttgttgatcagtgctc

SEQ ID NO: 133531 - DNA, 82 bp, Homo sapiens
tagtaaaagcagtcgttgctggcaatctccaggaaggactgaaaatgtgtgcttgttgatcagtgctcgcagatttgtatta

SEQ ID NO: 133532 - DNA, 81 bp, Homo sapiens
agtcgttgctggcaatctccaggaaggactgaaaatgtgtgcttgttgatcagtgctcgcagatttgtattaaccagaatg

SEQ ID NO: 133533 - DNA, 78 bp, Homo sapiens
aatctccaggaaggactgaaaatgtgtgcttgttgatcagtgctcgcagatttgtattaaccagaatggagtccggtg

SEQ ID NO: 133534 - DNA, 79 bp, Homo sapiens
aaggactgaaaatgtgtgcttgttgatcagtgctcgcagatttgtattaaccagaatggagtccggtgtctcaacgtca

SEQ ID NO: 133535 - DNA, 82 bp, Homo sapiens
aatgtgtgcttgttgatcagtgctcgcagatttgtattaaccagaatggagtccggtgtctcaacgtcaatgtcagcacatt

SEQ ID NO: 133536 - DNA, 80 bp, Homo sapiens
ttgttgatcagtgctcgcagatttgtattaaccagaatggagtccggtgtctcaacgtcaatgtcagcacatttagttct

SEQ ID NO: 133537 - DNA, 79 bp, Homo sapiens
atcagtgctcgcagatttgtattaaccagaatggagtccggtgtctcaacgtcaatgtcagcacatttagttcttttca

SEQ ID NO: 133538 - DNA, 74 bp, Homo sapiens
atttgtattaaccagaatggagtccggtgtctcaacgtcaatgtcagcacatttagttcttttcatttgtccta

SEQ ID NO: 133539 - DNA, 73 bp, Homo sapiens
attaaccagaatggagtccggtgtctcaacgtcaatgtcagcacatttagttcttttcatttgtcctacaaaa

SEQ ID NO: 133540 - DNA, 74 bp, Homo sapiens
atggagtccggtgtctcaacgtcaatgtcagcacatttagttcttttcatttgtcctacaaaaacagagaagaa

SEQ ID NO: 133541 - DNA, 74 bp, Homo sapiens
gtgtctcaacgtcaatgtcagcacatttagttcttttcatttgtcctacaaaaacagagaagaatcgtttgggc

SEQ ID NO: 133542 - DNA, 80 bp, Homo sapiens
tgataaatcatggcaatgaaaactgaagtctttgtaagcaaacttactggtatggagtctctcagatctctggaatgact

SEQ ID NO: 133543 - DNA, 79 bp, Homo sapiens
atcatggcaatgaaaactgaagtctttgtaagcaaacttactggtatggagtctctcagatctctggaatgacttcttc

SEQ ID NO: 133544 - DNA, 74 bp, Homo sapiens
aaaactgaagtctttgtaagcaaacttactggtatggagtctctcagatctctggaatgacttcttccccaagc

SEQ ID NO: 133545 - DNA, 74 bp, Homo sapiens
ttgtaagcaaacttactggtatggagtctctcagatctctggaatgacttcttccccaagcctagtaaagtatt

SEQ ID NO: 133546 - DNA, 72 bp, Homo sapiens
aaacttactggtatggagtctctcagatctctggaatgacttcttccccaagcctagtaaagtattttccac

SEQ ID NO: 133547 - DNA, 74 bp, Homo sapiens
tatggagtctctcagatctctggaatgacttcttccccaagcctagtaaagtattttccactttaactgaggaa

SEQ ID NO: 133548 - DNA, 72 bp, Homo sapiens
tctctcagatctctggaatgacttcttccccaagcctagtaaagtattttccactttaactgaggaagaaaa

SEQ ID NO: 133549 - DNA, 68 bp, Homo sapiens
tggaatgacttcttccccaagcctagtaaagtattttccactttaactgaggaagaaaagctggagtt

SEQ ID NO: 133550 - DNA, 66 bp, Homo sapiens
ttcttccccaagcctagtaaagtattttccactttaactgaggaagaaaagctggagtttgagttt

SEQ ID NO: 133551 - DNA, 68 bp, Homo sapiens
aagcctagtaaagtattttccactttaactgaggaagaaaagctggagtttgagttttgagggctgcc

SEQ ID NO: 133552 - DNA, 73 bp, Homo sapiens
taaagtattttccactttaactgaggaagaaaagctggagtttgagttttgagggctgcctgtctgtccatca

SEQ ID NO: 133553 - DNA, 74 bp, Homo sapiens
actttaactgaggaagaaaagctggagtttgagttttgagggctgcctgtctgtccatcagattgctttccttc

SEQ ID NO: 133554 - DNA, 76 bp, Homo sapiens
aggaagaaaagctggagtttgagttttgagggctgcctgtctgtccatcagattgctttccttcccatgttgctag

SEQ ID NO: 133555 - DNA, 76 bp, Homo sapiens
aaagctggagtttgagttttgagggctgcctgtctgtccatcagattgctttccttcccatgttgctaggagaaaa

SEQ ID NO: 133556 - DNA, 74 bp, Homo sapiens
agttttgagggctgcctgtctgtccatcagattgctttccttcccatgttgctaggagaaaaaaatacgtataa

SEQ ID NO: 133557 - DNA, 76 bp, Homo sapiens
ctgcctgtctgtccatcagattgctttccttcccatgttgctaggagaaaaaaatacgtataaagactggtagcac

SEQ ID NO: 133558 - DNA, 66 bp, Homo sapiens
aaaatactaggaaaaagaaacttccattgaaaaactgcccaaactgcctaccaggtttggcaggta

SEQ ID NO: 133559 - DNA, 71 bp, Homo sapiens
aaagaaacttccattgaaaaactgcccaaactgcctaccaggtttggcaggtacagagtcactggctgctt

SEQ ID NO: 133560 - DNA, 75 bp, Homo sapiens
attgaaaaactgcccaaactgcctaccaggtttggcaggtacagagtcactggctgctttgacagtctttagtga

SEQ ID NO: 133561 - DNA, 77 bp, Homo sapiens
aaaactgcccaaactgcctaccaggtttggcaggtacagagtcactggctgctttgacagtctttagtgagagatgc

SEQ ID NO: 133562 - DNA, 78 bp, Homo sapiens
aaactgcctaccaggtttggcaggtacagagtcactggctgctttgacagtctttagtgagagatgctggttggagga

SEQ ID NO: 133563 - DNA, 85 bp, Homo sapiens
tttggcaggtacagagtcactggctgctttgacagtctttagtgagagatgctggttggaggagatggatatgcttggcctgcat

SEQ ID NO: 133564 - DNA, 88 bp, Homo sapiens
aggtacagagtcactggctgctttgacagtctttagtgagagatgctggttggaggagatggatatgcttggcctgcattgctgctgc

SEQ ID NO: 133565 - DNA, 90 bp, Homo sapiens
actggctgctttgacagtctttagtgagagatgctggttggaggagatggatatgcttggcctgcattgctgctgctgcttcttctgctg

SEQ ID NO: 133566 - DNA, 91 bp, Homo sapiens
ttgacagtctttagtgagagatgctggttggaggagatggatatgcttggcctgcattgctgctgctgcttcttctgctgttgctgcttta

SEQ ID NO: 133567 - DNA, 91 bp, Homo sapiens
tagtgagagatgctggttggaggagatggatatgcttggcctgcattgctgctgctgcttcttctgctgttgctgctttagcgcctataaa

SEQ ID NO: 133568 - DNA, 88 bp, Homo sapiens
atgctggttggaggagatggatatgcttggcctgcattgctgctgctgcttcttctgctgttgctgctttagcgcctataaagataaa

SEQ ID NO: 133569 - DNA, 87 bp, Homo sapiens
aggagatggatatgcttggcctgcattgctgctgctgcttcttctgctgttgctgctttagcgcctataaagataaaacagactata

SEQ ID NO: 133570 - DNA, 85 bp, Homo sapiens
atatgcttggcctgcattgctgctgctgcttcttctgctgttgctgctttagcgcctataaagataaaacagactataagaaaca

SEQ ID NO: 133571 - DNA, 83 bp, Homo sapiens
tgcattgctgctgctgcttcttctgctgttgctgctttagcgcctataaagataaaacagactataagaaacaaaaccaatca

SEQ ID NO: 133572 - DNA, 76 bp, Homo sapiens
ttttaaatacaggaaattctacttgataaatacagactagcaatgcttacctgctttagtgccttcttgctgtgct

SEQ ID NO: 133573 - DNA, 81 bp, Homo sapiens
aaattctacttgataaatacagactagcaatgcttacctgctttagtgccttcttgctgtgcttctgtgatggagaaatga

SEQ ID NO: 133574 - DNA, 81 bp, Homo sapiens
tacttgataaatacagactagcaatgcttacctgctttagtgccttcttgctgtgcttctgtgatggagaaatgactttac

SEQ ID NO: 133575 - DNA, 82 bp, Homo sapiens
atacagactagcaatgcttacctgctttagtgccttcttgctgtgcttctgtgatggagaaatgactttacctgctggaatg

SEQ ID NO: 133576 - DNA, 80 bp, Homo sapiens
aatgcttacctgctttagtgccttcttgctgtgcttctgtgatggagaaatgactttacctgctggaatggtgggtgatg

SEQ ID NO: 133577 - DNA, 82 bp, Homo sapiens
cctgctttagtgccttcttgctgtgcttctgtgatggagaaatgactttacctgctggaatggtgggtgatgggcagcctga

SEQ ID NO: 133578 - DNA, 81 bp, Homo sapiens
ttcttgctgtgcttctgtgatggagaaatgactttacctgctggaatggtgggtgatgggcagcctgactgcggggaggac

SEQ ID NO: 133579 - DNA, 78 bp, Homo sapiens
cttctgtgatggagaaatgactttacctgctggaatggtgggtgatgggcagcctgactgcggggaggacgacgatac

SEQ ID NO: 133580 - DNA, 75 bp, Homo sapiens
ggagaaatgactttacctgctggaatggtgggtgatgggcagcctgactgcggggaggacgacgatactagggaa

SEQ ID NO: 133581 - DNA, 73 bp, Homo sapiens
aatgactttacctgctggaatggtgggtgatgggcagcctgactgcggggaggacgacgatactagggaaaaa

SEQ ID NO: 133582 - DNA, 72 bp, Homo sapiens
tggaatggtgggtgatgggcagcctgactgcggggaggacgacgatactagggaaaaaaaagtgacaataaa

SEQ ID NO: 133583 - DNA, 69 bp, Homo sapiens
ggtgatgggcagcctgactgcggggaggacgacgatactagggaaaaaaaagtgacaataaaagatttt

SEQ ID NO: 133584 - DNA, 76 bp, Homo sapiens
ttgcccaggcgggagccactttgatttaagtgaaaaaactcaatgcatcctggaggatatcctagaacagaacatg

SEQ ID NO: 133585 - DNA, 75 bp, Homo sapiens
gggagccactttgatttaagtgaaaaaactcaatgcatcctggaggatatcctagaacagaacatggaactcttc

SEQ ID NO: 133586 - DNA, 76 bp, Homo sapiens
tttgatttaagtgaaaaaactcaatgcatcctggaggatatcctagaacagaacatggaactcttctgcattcctt

SEQ ID NO: 133587 - DNA, 76 bp, Homo sapiens
ttaagtgaaaaaactcaatgcatcctggaggatatcctagaacagaacatggaactcttctgcattccttttaata

SEQ ID NO: 133588 - DNA, 78 bp, Homo sapiens
aaactcaatgcatcctggaggatatcctagaacagaacatggaactcttctgcattccttttaatagttgcatagaat

SEQ ID NO: 133589 - DNA, 70 bp, Homo sapiens
atttgtcctacagcatttagtactttattgaaggatcaggtggatttacctttccttttccacctgctct

SEQ ID NO: 133590 - DNA, 69 bp, Homo sapiens
tacagcatttagtactttattgaaggatcaggtggatttacctttccttttccacctgctcttttttcc

SEQ ID NO: 133591 - DNA, 66 bp, Homo sapiens
agtactttattgaaggatcaggtggatttacctttccttttccacctgctcttttttccctccttg

SEQ ID NO: 133592 - DNA, 70 bp, Homo sapiens
aaggatcaggtggatttacctttccttttccacctgctcttttttccctccttgttgctgccaccatcac

SEQ ID NO: 133593 - DNA, 85 bp, Homo sapiens
tgctgctgctgttctcagaactctgggaatctgactgaccatcactgctttcttctgaaccttctgacagctctttcaccccatc

SEQ ID NO: 133594 - DNA, 79 bp, Homo sapiens
ctgttctcagaactctgggaatctgactgaccatcactgctttcttctgaaccttctgacagctctttcaccccatccg

SEQ ID NO: 133595 - DNA, 78 bp, Homo sapiens
aactctgggaatctgactgaccatcactgctttcttctgaaccttctgacagctctttcaccccatccggcacatctt

SEQ ID NO: 133596 - DNA, 79 bp, Homo sapiens
aatctgactgaccatcactgctttcttctgaaccttctgacagctctttcaccccatccggcacatctttctgaaaatg

SEQ ID NO: 133597 - DNA, 78 bp, Homo sapiens
atcactgctttcttctgaaccttctgacagctctttcaccccatccggcacatctttctgaaaatgtaggcatccaat

SEQ ID NO: 133598 - DNA, 77 bp, Homo sapiens
tcttctgaaccttctgacagctctttcaccccatccggcacatctttctgaaaatgtaggcatccaattaggattaa

SEQ ID NO: 133599 - DNA, 76 bp, Homo sapiens
aaccttctgacagctctttcaccccatccggcacatctttctgaaaatgtaggcatccaattaggattaatcatta

SEQ ID NO: 133600 - DNA, 67 bp, Homo sapiens
cacttcctgttttttctttctaaatgactccccaacaaaatatttaccttcaaagtatatactccca

SEQ ID NO: 133601 - DNA, 68 bp, Homo sapiens
ttttctttctaaatgactccccaacaaaatatttaccttcaaagtatatactcccattctacctggaa

SEQ ID NO: 133602 - DNA, 69 bp, Homo sapiens
ctaaatgactccccaacaaaatatttaccttcaaagtatatactcccattctacctggaaccttataga

SEQ ID NO: 133603 - DNA, 71 bp, Homo sapiens
ccaacaaaatatttaccttcaaagtatatactcccattctacctggaaccttatagaagatgccctcttca

SEQ ID NO: 133604 - DNA, 70 bp, Homo sapiens
aaaatatttaccttcaaagtatatactcccattctacctggaaccttatagaagatgccctcttcacctc

SEQ ID NO: 133605 - DNA, 74 bp, Homo sapiens
aaagtatatactcccattctacctggaaccttatagaagatgccctcttcacctctggagtttgtgtgaagcat

SEQ ID NO: 133606 - DNA, 78 bp, Homo sapiens
atatactcccattctacctggaaccttatagaagatgccctcttcacctctggagtttgtgtgaagcattgcattcag

SEQ ID NO: 133607 - DNA, 81 bp, Homo sapiens
attctacctggaaccttatagaagatgccctcttcacctctggagtttgtgtgaagcattgcattcaggcatgcaagagga

SEQ ID NO: 133608 - DNA, 83 bp, Homo sapiens
ttatagaagatgccctcttcacctctggagtttgtgtgaagcattgcattcaggcatgcaagaggagaagtcccactgcaaaa

SEQ ID NO: 133609 - DNA, 81 bp, Homo sapiens
aagatgccctcttcacctctggagtttgtgtgaagcattgcattcaggcatgcaagaggagaagtcccactgcaaaacaaa

SEQ ID NO: 133610 - DNA, 82 bp, Homo sapiens
acctctggagtttgtgtgaagcattgcattcaggcatgcaagaggagaagtcccactgcaaaacaaagaagagatgtgataa

SEQ ID NO: 133611 - DNA, 83 bp, Homo sapiens
tttgtgtgaagcattgcattcaggcatgcaagaggagaagtcccactgcaaaacaaagaagagatgtgataaggaacacaaca

SEQ ID NO: 133612 - DNA, 70 bp, Homo sapiens
tactaccaaatactctgatcaagtattataattattactaaaaatatttaaataactcacctgatttctt

SEQ ID NO: 133613 - DNA, 71 bp, Homo sapiens
tctgatcaagtattataattattactaaaaatatttaaataactcacctgatttcttttagtccttctctc

SEQ ID NO: 133614 - DNA, 68 bp, Homo sapiens
ttataattattactaaaaatatttaaataactcacctgatttcttttagtccttctctctggataact

SEQ ID NO: 133615 - DNA, 69 bp, Homo sapiens
tactaaaaatatttaaataactcacctgatttcttttagtccttctctctggataacttgaagaatttc

SEQ ID NO: 133616 - DNA, 72 bp, Homo sapiens
atttaaataactcacctgatttcttttagtccttctctctggataacttgaagaatttctttatgactcatg

SEQ ID NO: 133617 - DNA, 74 bp, Homo sapiens
taactcacctgatttcttttagtccttctctctggataacttgaagaatttctttatgactcatgggtgtattg

SEQ ID NO: 133618 - DNA, 71 bp, Homo sapiens
gatttcttttagtccttctctctggataacttgaagaatttctttatgactcatgggtgtattggggtatt

SEQ ID NO: 133619 - DNA, 72 bp, Homo sapiens
ttagtccttctctctggataacttgaagaatttctttatgactcatgggtgtattggggtatttttctaaga

SEQ ID NO: 133620 - DNA, 70 bp, Homo sapiens
ctctggataacttgaagaatttctttatgactcatgggtgtattggggtatttttctaagacctgaaaaa

SEQ ID NO: 133621 - DNA, 69 bp, Homo sapiens
acttgaagaatttctttatgactcatgggtgtattggggtatttttctaagacctgaaaaacaagtata

SEQ ID NO: 133622 - DNA, 69 bp, Homo sapiens
tttctttatgactcatgggtgtattggggtatttttctaagacctgaaaaacaagtatataataataaa

SEQ ID NO: 133623 - DNA, 67 bp, Homo sapiens
actcatgggtgtattggggtatttttctaagacctgaaaaacaagtatataataataaattatttct

SEQ ID NO: 133624 - DNA, 63 bp, Homo sapiens
aagggaacaaaatcctcccggccttccccttcgctccctcccccttaccgtcttggcggcctc

SEQ ID NO: 133625 - DNA, 63 bp, Homo sapiens
aaaatcctcccggccttccccttcgctccctcccccttaccgtcttggcggcctccgcccagg

SEQ ID NO: 133626 - DNA, 66 bp, Homo sapiens
cttccccttcgctccctcccccttaccgtcttggcggcctccgcccaggtcctgcccttcttccta

SEQ ID NO: 133627 - DNA, 65 bp, Homo sapiens
gctccctcccccttaccgtcttggcggcctccgcccaggtcctgcccttcttcctacgtcccttt

SEQ ID NO: 133628 - DNA, 67 bp, Homo sapiens
cccttaccgtcttggcggcctccgcccaggtcctgcccttcttcctacgtcccttttccctcatgtc

SEQ ID NO: 133629 - DNA, 70 bp, Homo sapiens
ttggcggcctccgcccaggtcctgcccttcttcctacgtcccttttccctcatgtcgggtcttgaactga

SEQ ID NO: 133630 - DNA, 69 bp, Homo sapiens
cctccgcccaggtcctgcccttcttcctacgtcccttttccctcatgtcgggtcttgaactgactggga

SEQ ID NO: 133631 - DNA, 69 bp, Homo sapiens
cctgcccttcttcctacgtcccttttccctcatgtcgggtcttgaactgactgggaggctcccgtgtcc

SEQ ID NO: 133632 - DNA, 69 bp, Homo sapiens
cttcttcctacgtcccttttccctcatgtcgggtcttgaactgactgggaggctcccgtgtccgggctc

SEQ ID NO: 133633 - DNA, 68 bp, Homo sapiens
acgtcccttttccctcatgtcgggtcttgaactgactgggaggctcccgtgtccgggctccggccgcc

SEQ ID NO: 133634 - DNA, 75 bp, Homo sapiens
tccctcatgtcgggtcttgaactgactgggaggctcccgtgtccgggctccggccgccctccctgcctgctctgc

SEQ ID NO: 133635 - DNA, 76 bp, Homo sapiens
tcttgaactgactgggaggctcccgtgtccgggctccggccgccctccctgcctgctctgccctgcgctgcttttc

SEQ ID NO: 133636 - DNA, 74 bp, Homo sapiens
actgactgggaggctcccgtgtccgggctccggccgccctccctgcctgctctgccctgcgctgcttttcccgc

SEQ ID NO: 133637 - DNA, 72 bp, Homo sapiens
tcccgtgtccgggctccggccgccctccctgcctgctctgccctgcgctgcttttcccgcggtgccgggaaa

SEQ ID NO: 133638 - DNA, 72 bp, Homo sapiens
ggctccggccgccctccctgcctgctctgccctgcgctgcttttcccgcggtgccgggaaaggtgggagaaa

SEQ ID NO: 133639 - DNA, 72 bp, Homo sapiens
gccctccctgcctgctctgccctgcgctgcttttcccgcggtgccgggaaaggtgggagaaaagggaagtca

SEQ ID NO: 133640 - DNA, 69 bp, Homo sapiens
cctgctctgccctgcgctgcttttcccgcggtgccgggaaaggtgggagaaaagggaagtcagaccggg

SEQ ID NO: 133641 - DNA, 67 bp, Homo sapiens
tctgccctgcgctgcttttcccgcggtgccgggaaaggtgggagaaaagggaagtcagaccgggggg

SEQ ID NO: 133642 - DNA, 65 bp, Homo sapiens
ttttcccgcggtgccgggaaaggtgggagaaaagggaagtcagaccgggggggcacccaagcaga

SEQ ID NO: 133643 - DNA, 66 bp, Homo sapiens
ccgcggtgccgggaaaggtgggagaaaagggaagtcagaccgggggggcacccaagcagaggaagc

SEQ ID NO: 133644 - DNA, 64 bp, Homo sapiens
aaaggtgggagaaaagggaagtcagaccgggggggcacccaagcagaggaagcggcgggggtgg

SEQ ID NO: 133645 - DNA, 66 bp, Homo sapiens
ggagaaaagggaagtcagaccgggggggcacccaagcagaggaagcggcgggggtggtgcgcgggg

SEQ ID NO: 133646 - DNA, 66 bp, Homo sapiens
aagtcagaccgggggggcacccaagcagaggaagcggcgggggtggtgcgcgggggggtctatggg

SEQ ID NO: 133647 - DNA, 69 bp, Homo sapiens
gggcacccaagcagaggaagcggcgggggtggtgcgcgggggggtctatggggcggccggtcctcttgc

SEQ ID NO: 133648 - DNA, 70 bp, Homo sapiens
aagcagaggaagcggcgggggtggtgcgcgggggggtctatggggcggccggtcctcttgctgccgttgc

SEQ ID NO: 133649 - DNA, 70 bp, Homo sapiens
aagcggcgggggtggtgcgcgggggggtctatggggcggccggtcctcttgctgccgttgccactgctac

SEQ ID NO: 133650 - DNA, 75 bp, Homo sapiens
gtggtgcgcgggggggtctatggggcggccggtcctcttgctgccgttgccactgctaccgccgctgccatattg

SEQ ID NO: 133651 - DNA, 74 bp, Homo sapiens
ggggtctatggggcggccggtcctcttgctgccgttgccactgctaccgccgctgccatattgggttcttactg

SEQ ID NO: 133652 - DNA, 77 bp, Homo sapiens
gggcggccggtcctcttgctgccgttgccactgctaccgccgctgccatattgggttcttactgtacaggctgccgc

SEQ ID NO: 133653 - DNA, 71 bp, Homo sapiens
gtgcatttaatctaaagaacagaaggtaagaatttgaagacagtcggaagatctggattagaaaacctgtt

SEQ ID NO: 133654 - DNA, 69 bp, Homo sapiens
aagaacagaaggtaagaatttgaagacagtcggaagatctggattagaaaacctgtttattaagactgg

SEQ ID NO: 133655 - DNA, 71 bp, Homo sapiens
aaggtaagaatttgaagacagtcggaagatctggattagaaaacctgtttattaagactgggtcacatcca

SEQ ID NO: 133656 - DNA, 73 bp, Homo sapiens
atttgaagacagtcggaagatctggattagaaaacctgtttattaagactgggtcacatccagctagtacatt

SEQ ID NO: 133657 - DNA, 76 bp, Homo sapiens
atctggattagaaaacctgtttattaagactgggtcacatccagctagtacatttcagtgccctttctggtgctgc

SEQ ID NO: 133658 - DNA, 74 bp, Homo sapiens
aaaacctgtttattaagactgggtcacatccagctagtacatttcagtgccctttctggtgctgcctcccagga

SEQ ID NO: 133659 - DNA, 80 bp, Homo sapiens
ttattaagactgggtcacatccagctagtacatttcagtgccctttctggtgctgcctcccaggagcagacactgcaaat

SEQ ID NO: 133660 - DNA, 80 bp, Homo sapiens
tgggtcacatccagctagtacatttcagtgccctttctggtgctgcctcccaggagcagacactgcaaatttcagaaccc

SEQ ID NO: 133661 - DNA, 78 bp, Homo sapiens
tagtacatttcagtgccctttctggtgctgcctcccaggagcagacactgcaaatttcagaacccccatctagagaaa

SEQ ID NO: 133662 - DNA, 75 bp, Homo sapiens
atttcagtgccctttctggtgctgcctcccaggagcagacactgcaaatttcagaacccccatctagagaaaccc

SEQ ID NO: 133663 - DNA, 77 bp, Homo sapiens
ttctggtgctgcctcccaggagcagacactgcaaatttcagaacccccatctagagaaacccctaacctgtgatcta

SEQ ID NO: 133664 - DNA, 74 bp, Homo sapiens
cctcccaggagcagacactgcaaatttcagaacccccatctagagaaacccctaacctgtgatctagcttccga

SEQ ID NO: 133665 - DNA, 75 bp, Homo sapiens
agcagacactgcaaatttcagaacccccatctagagaaacccctaacctgtgatctagcttccgaggctcagtgt

SEQ ID NO: 133666 - DNA, 71 bp, Homo sapiens
caaatttcagaacccccatctagagaaacccctaacctgtgatctagcttccgaggctcagtgttggttct

SEQ ID NO: 133667 - DNA, 73 bp, Homo sapiens
ttcagaacccccatctagagaaacccctaacctgtgatctagcttccgaggctcagtgttggttcttgtggta

SEQ ID NO: 133668 - DNA, 77 bp, Homo sapiens
tctagagaaacccctaacctgtgatctagcttccgaggctcagtgttggttcttgtggtagtgctgatgtgtgggta

SEQ ID NO: 133669 - DNA, 78 bp, Homo sapiens
ccctaacctgtgatctagcttccgaggctcagtgttggttcttgtggtagtgctgatgtgtgggtaccactgaggcca

SEQ ID NO: 133670 - DNA, 83 bp, Homo sapiens
tgatctagcttccgaggctcagtgttggttcttgtggtagtgctgatgtgtgggtaccactgaggccaggccacagtcgcatg

SEQ ID NO: 133671 - DNA, 80 bp, Homo sapiens
agcttccgaggctcagtgttggttcttgtggtagtgctgatgtgtgggtaccactgaggccaggccacagtcgcatgtac

SEQ ID NO: 133672 - DNA, 79 bp, Homo sapiens
ctcagtgttggttcttgtggtagtgctgatgtgtgggtaccactgaggccaggccacagtcgcatgtaccctcctctgg

SEQ ID NO: 133673 - DNA, 81 bp, Homo sapiens
ttcttgtggtagtgctgatgtgtgggtaccactgaggccaggccacagtcgcatgtaccctcctctgggctgactcacgag

SEQ ID NO: 133674 - DNA, 81 bp, Homo sapiens
tagtgctgatgtgtgggtaccactgaggccaggccacagtcgcatgtaccctcctctgggctgactcacgaggctacaggg

SEQ ID NO: 133675 - DNA, 81 bp, Homo sapiens
tgtgtgggtaccactgaggccaggccacagtcgcatgtaccctcctctgggctgactcacgaggctacaggggacagcaca

SEQ ID NO: 133676 - DNA, 82 bp, Homo sapiens
tgaggccaggccacagtcgcatgtaccctcctctgggctgactcacgaggctacaggggacagcacacctaatgagcaggtc

SEQ ID NO: 133677 - DNA, 80 bp, Homo sapiens
aggccacagtcgcatgtaccctcctctgggctgactcacgaggctacaggggacagcacacctaatgagcaggtctgtcc

SEQ ID NO: 133678 - DNA, 81 bp, Homo sapiens
atgtaccctcctctgggctgactcacgaggctacaggggacagcacacctaatgagcaggtctgtcctccagacatactca

SEQ ID NO: 133679 - DNA, 79 bp, Homo sapiens
actcacgaggctacaggggacagcacacctaatgagcaggtctgtcctccagacatactcattaacaagcacgttcctg

SEQ ID NO: 133680 - DNA, 77 bp, Homo sapiens
ctacaggggacagcacacctaatgagcaggtctgtcctccagacatactcattaacaagcacgttcctggctaaaaa

SEQ ID NO: 133681 - DNA, 75 bp, Homo sapiens
taatgagcaggtctgtcctccagacatactcattaacaagcacgttcctggctaaaaaataaccagatctttttg

SEQ ID NO: 133682 - DNA, 71 bp, Homo sapiens
aggtctgtcctccagacatactcattaacaagcacgttcctggctaaaaaataaccagatctttttggccg

SEQ ID NO: 133683 - DNA, 71 bp, Homo sapiens
agacatactcattaacaagcacgttcctggctaaaaaataaccagatctttttggccgtgccctcaggttg

SEQ ID NO: 133684 - DNA, 65 bp, Homo sapiens
ctggctaaaaaataaccagatctttttggccgtgccctcaggttggagaaagaaaacttttaatt

SEQ ID NO: 133685 - DNA, 68 bp, Homo sapiens
ataaccagatctttttggccgtgccctcaggttggagaaagaaaacttttaatttggaatcactacaa

SEQ ID NO: 133686 - DNA, 68 bp, Homo sapiens
tctttttggccgtgccctcaggttggagaaagaaaacttttaatttggaatcactacaaagacaaatg

SEQ ID NO: 133687 - DNA, 65 bp, Homo sapiens
ggttggagaaagaaaacttttaatttggaatcactacaaagacaaatggtttctacaaattattt

SEQ ID NO: 133688 - DNA, 68 bp, Homo sapiens
aaacttttaatttggaatcactacaaagacaaatggtttctacaaattattttattagaatgtcagac

SEQ ID NO: 133689 - DNA, 72 bp, Homo sapiens
tggaatcactacaaagacaaatggtttctacaaattattttattagaatgtcagactcaaaagaactaccag

SEQ ID NO: 133690 - DNA, 72 bp, Homo sapiens
tacaaagacaaatggtttctacaaattattttattagaatgtcagactcaaaagaactaccaggaacatgcc

SEQ ID NO: 133691 - DNA, 77 bp, Homo sapiens
caaattattttattagaatgtcagactcaaaagaactaccaggaacatgcctgaaaatgctatatatgatttatgct

SEQ ID NO: 133692 - DNA, 80 bp, Homo sapiens
ttttattagaatgtcagactcaaaagaactaccaggaacatgcctgaaaatgctatatatgatttatgcttgacccatga

SEQ ID NO: 133693 - DNA, 83 bp, Homo sapiens
aatgtcagactcaaaagaactaccaggaacatgcctgaaaatgctatatatgatttatgcttgacccatgacacctgctgtca

SEQ ID NO: 133694 - DNA, 82 bp, Homo sapiens
aaaagaactaccaggaacatgcctgaaaatgctatatatgatttatgcttgacccatgacacctgctgtcactggatccaga

SEQ ID NO: 133695 - DNA, 84 bp, Homo sapiens
aggaacatgcctgaaaatgctatatatgatttatgcttgacccatgacacctgctgtcactggatccagagtgagcaagggaaa

SEQ ID NO: 133696 - DNA, 83 bp, Homo sapiens
atgcctgaaaatgctatatatgatttatgcttgacccatgacacctgctgtcactggatccagagtgagcaagggaaaggaag

SEQ ID NO: 133697 - DNA, 82 bp, Homo sapiens
aatgctatatatgatttatgcttgacccatgacacctgctgtcactggatccagagtgagcaagggaaaggaagtggaggta

SEQ ID NO: 133698 - DNA, 78 bp, Homo sapiens
atgatttatgcttgacccatgacacctgctgtcactggatccagagtgagcaagggaaaggaagtggaggtaggcggg

SEQ ID NO: 133699 - DNA, 77 bp, Homo sapiens
acacctgctgtcactggatccagagtgagcaagggaaaggaagtggaggtaggcggggacagcaccagccctggctg

SEQ ID NO: 133700 - DNA, 78 bp, Homo sapiens
tcactggatccagagtgagcaagggaaaggaagtggaggtaggcggggacagcaccagccctggctggccagacctga

SEQ ID NO: 133701 - DNA, 75 bp, Homo sapiens
agtgagcaagggaaaggaagtggaggtaggcggggacagcaccagccctggctggccagacctgaggcccacaga

SEQ ID NO: 133702 - DNA, 72 bp, Homo sapiens
aagggaaaggaagtggaggtaggcggggacagcaccagccctggctggccagacctgaggcccacagacctg

SEQ ID NO: 133703 - DNA, 73 bp, Homo sapiens
aagtggaggtaggcggggacagcaccagccctggctggccagacctgaggcccacagacctggtccccacaac

SEQ ID NO: 133704 - DNA, 75 bp, Homo sapiens
ggggacagcaccagccctggctggccagacctgaggcccacagacctggtccccacaaccaggattcctacaatg

SEQ ID NO: 133705 - DNA, 75 bp, Homo sapiens
accagccctggctggccagacctgaggcccacagacctggtccccacaaccaggattcctacaatgtacacattc

SEQ ID NO: 133706 - DNA, 76 bp, Homo sapiens
tggctggccagacctgaggcccacagacctggtccccacaaccaggattcctacaatgtacacattcctaattcag

SEQ ID NO: 133707 - DNA, 74 bp, Homo sapiens
agacctgaggcccacagacctggtccccacaaccaggattcctacaatgtacacattcctaattcaggctcaac

SEQ ID NO: 133708 - DNA, 72 bp, Homo sapiens
acagacctggtccccacaaccaggattcctacaatgtacacattcctaattcaggctcaactctcctttacc

SEQ ID NO: 133709 - DNA, 71 bp, Homo sapiens
tccccacaaccaggattcctacaatgtacacattcctaattcaggctcaactctcctttacccaaaagtaa

SEQ ID NO: 133710 - DNA, 72 bp, Homo sapiens
aaccaggattcctacaatgtacacattcctaattcaggctcaactctcctttacccaaaagtaaatgcctca

SEQ ID NO: 133711 - DNA, 77 bp, Homo sapiens
tacaatgtacacattcctaattcaggctcaactctcctttacccaaaagtaaatgcctcaggactcaatctgaatca

SEQ ID NO: 133712 - DNA, 77 bp, Homo sapiens
tacacattcctaattcaggctcaactctcctttacccaaaagtaaatgcctcaggactcaatctgaatcactgtctg

SEQ ID NO: 133713 - DNA, 78 bp, Homo sapiens
taattcaggctcaactctcctttacccaaaagtaaatgcctcaggactcaatctgaatcactgtctgtctcagcttct

SEQ ID NO: 133714 - DNA, 77 bp, Homo sapiens
aactctcctttacccaaaagtaaatgcctcaggactcaatctgaatcactgtctgtctcagcttctttcacatccac

SEQ ID NO: 133715 - DNA, 83 bp, Homo sapiens
agtaaatgcctcaggactcaatctgaatcactgtctgtctcagcttctttcacatccacgctgaatttgtactcctggtcaca

SEQ ID NO: 133716 - DNA, 84 bp, Homo sapiens
actcaatctgaatcactgtctgtctcagcttctttcacatccacgctgaatttgtactcctggtcacatcccatgtaagcgtca

SEQ ID NO: 133717 - DNA, 83 bp, Homo sapiens
aatcactgtctgtctcagcttctttcacatccacgctgaatttgtactcctggtcacatcccatgtaagcgtcactcatgaag

SEQ ID NO: 133718 - DNA, 84 bp, Homo sapiens
tgtctcagcttctttcacatccacgctgaatttgtactcctggtcacatcccatgtaagcgtcactcatgaagtacagagtgta

SEQ ID NO: 133719 - DNA, 78 bp, Homo sapiens
aatttgtactcctggtcacatcccatgtaagcgtcactcatgaagtacagagtgtagttgtgggcaccagtggctggg

SEQ ID NO: 133720 - DNA, 78 bp, Homo sapiens
atcccatgtaagcgtcactcatgaagtacagagtgtagttgtgggcaccagtggctggggccacaaagtccaacttca

SEQ ID NO: 133721 - DNA, 77 bp, Homo sapiens
taagcgtcactcatgaagtacagagtgtagttgtgggcaccagtggctggggccacaaagtccaacttcacctagaa

SEQ ID NO: 133722 - DNA, 78 bp, Homo sapiens
attctcacccttcccccatgccagaacaaatgctagggccagtggacacactcaccttggccttctgctgcaaggtca

SEQ ID NO: 133723 - DNA, 83 bp, Homo sapiens
cccatgccagaacaaatgctagggccagtggacacactcaccttggccttctgctgcaaggtcagcctcttgatggagatgag

SEQ ID NO: 133724 - DNA, 82 bp, Homo sapiens
aacaaatgctagggccagtggacacactcaccttggccttctgctgcaaggtcagcctcttgatggagatgaggctattgga

SEQ ID NO: 133725 - DNA, 84 bp, Homo sapiens
tagggccagtggacacactcaccttggccttctgctgcaaggtcagcctcttgatggagatgaggctattggacttggcatctc

SEQ ID NO: 133726 - DNA, 84 bp, Homo sapiens
agtggacacactcaccttggccttctgctgcaaggtcagcctcttgatggagatgaggctattggacttggcatctccaatcac

SEQ ID NO: 133727 - DNA, 82 bp, Homo sapiens
accttggccttctgctgcaaggtcagcctcttgatggagatgaggctattggacttggcatctccaatcaccacccaccagc

SEQ ID NO: 133728 - DNA, 82 bp, Homo sapiens
tgctgcaaggtcagcctcttgatggagatgaggctattggacttggcatctccaatcaccacccaccagccctcttcacgtt

SEQ ID NO: 133729 - DNA, 78 bp, Homo sapiens
aaggtcagcctcttgatggagatgaggctattggacttggcatctccaatcaccacccaccagccctcttcacgtttc

SEQ ID NO: 133730 - DNA, 81 bp, Homo sapiens
ttgatggagatgaggctattggacttggcatctccaatcaccacccaccagccctcttcacgtttctgcagtgatccaaaa

SEQ ID NO: 133731 - DNA, 76 bp, Homo sapiens
aggctattggacttggcatctccaatcaccacccaccagccctcttcacgtttctgcagtgatccaaaaccaagaa

SEQ ID NO: 133732 - DNA, 76 bp, Homo sapiens
attggacttggcatctccaatcaccacccaccagccctcttcacgtttctgcagtgatccaaaaccaagaatttca

SEQ ID NO: 133733 - DNA, 80 bp, Homo sapiens
ctagccaatggatagggtgagttgacacctgaccaagccagctaccaggacgcacctgcgggaagagaggcgcaatgaca

SEQ ID NO: 133734 - DNA, 78 bp, Homo sapiens
aatggatagggtgagttgacacctgaccaagccagctaccaggacgcacctgcgggaagagaggcgcaatgacagggc

SEQ ID NO: 133735 - DNA, 79 bp, Homo sapiens
ggtgagttgacacctgaccaagccagctaccaggacgcacctgcgggaagagaggcgcaatgacagggcctgtgacttc

SEQ ID NO: 133736 - DNA, 78 bp, Homo sapiens
acctgaccaagccagctaccaggacgcacctgcgggaagagaggcgcaatgacagggcctgtgacttcctcctctcgc

SEQ ID NO: 133737 - DNA, 82 bp, Homo sapiens
agccagctaccaggacgcacctgcgggaagagaggcgcaatgacagggcctgtgacttcctcctctcgctccagctgcacca

SEQ ID NO: 133738 - DNA, 81 bp, Homo sapiens
aggacgcacctgcgggaagagaggcgcaatgacagggcctgtgacttcctcctctcgctccagctgcaccagcaccacaac

SEQ ID NO: 133739 - DNA, 83 bp, Homo sapiens
ggaagagaggcgcaatgacagggcctgtgacttcctcctctcgctccagctgcaccagcaccacaactggcccgccactgcag

SEQ ID NO: 133740 - DNA, 81 bp, Homo sapiens
agaggcgcaatgacagggcctgtgacttcctcctctcgctccagctgcaccagcaccacaactggcccgccactgcagggg

SEQ ID NO: 133741 - DNA, 78 bp, Homo sapiens
acagggcctgtgacttcctcctctcgctccagctgcaccagcaccacaactggcccgccactgcagggggagaggagg

SEQ ID NO: 133742 - DNA, 81 bp, Homo sapiens
tgtgacttcctcctctcgctccagctgcaccagcaccacaactggcccgccactgcagggggagaggaggggcgcacgtca

SEQ ID NO: 133743 - DNA, 82 bp, Homo sapiens
tcctctcgctccagctgcaccagcaccacaactggcccgccactgcagggggagaggaggggcgcacgtcagtgatggggca

SEQ ID NO: 133744 - DNA, 84 bp, Homo sapiens
agagcacactattatgctgtgcccaacaggcaccacctctggctcacctgcggatgctgtccttatctaccacctcataagata

SEQ ID NO: 133745 - DNA, 77 bp, Homo sapiens
cccaacaggcaccacctctggctcacctgcggatgctgtccttatctaccacctcataagatagttcgatattaggg

SEQ ID NO: 133746 - DNA, 76 bp, Homo sapiens
accacctctggctcacctgcggatgctgtccttatctaccacctcataagatagttcgatattagggtagcggtta

SEQ ID NO: 133747 - DNA, 76 bp, Homo sapiens
ctctggctcacctgcggatgctgtccttatctaccacctcataagatagttcgatattagggtagcggttacaaaa

SEQ ID NO: 133748 - DNA, 78 bp, Homo sapiens
ggatgctgtccttatctaccacctcataagatagttcgatattagggtagcggttacaaaagcgagccacatctgcaa

SEQ ID NO: 133749 - DNA, 77 bp, Homo sapiens
ctgtccttatctaccacctcataagatagttcgatattagggtagcggttacaaaagcgagccacatctgcaatctg

SEQ ID NO: 133750 - DNA, 80 bp, Homo sapiens
ctaccacctcataagatagttcgatattagggtagcggttacaaaagcgagccacatctgcaatctggctgtcagtcagc

SEQ ID NO: 133751 - DNA, 81 bp, Homo sapiens
ataagatagttcgatattagggtagcggttacaaaagcgagccacatctgcaatctggctgtcagtcagctgaagcaacgc

SEQ ID NO: 133752 - DNA, 78 bp, Homo sapiens
atattagggtagcggttacaaaagcgagccacatctgcaatctggctgtcagtcagctgaagcaacgcgttccgttct

SEQ ID NO: 133753 - DNA, 81 bp, Homo sapiens
ggtagcggttacaaaagcgagccacatctgcaatctggctgtcagtcagctgaagcaacgcgttccgttcttcatcctcca

SEQ ID NO: 133754 - DNA, 85 bp, Homo sapiens
aaagcgagccacatctgcaatctggctgtcagtcagctgaagcaacgcgttccgttcttcatcctccatctccatgatgtcgaaa

SEQ ID NO: 133755 - DNA, 85 bp, Homo sapiens
acatctgcaatctggctgtcagtcagctgaagcaacgcgttccgttcttcatcctccatctccatgatgtcgaaaacactctcca

SEQ ID NO: 133756 - DNA, 81 bp, Homo sapiens
aatctggctgtcagtcagctgaagcaacgcgttccgttcttcatcctccatctccatgatgtcgaaaacactctccactcc

SEQ ID NO: 133757 - DNA, 83 bp, Homo sapiens
tcagctgaagcaacgcgttccgttcttcatcctccatctccatgatgtcgaaaacactctccactccctgcagtgagtattca

SEQ ID NO: 133758 - DNA, 79 bp, Homo sapiens
aagcaacgcgttccgttcttcatcctccatctccatgatgtcgaaaacactctccactccctgcagtgagtattcagac

SEQ ID NO: 133759 - DNA, 80 bp, Homo sapiens
ttccgttcttcatcctccatctccatgatgtcgaaaacactctccactccctgcagtgagtattcagacgtcaggaaaga

SEQ ID NO: 133760 - DNA, 81 bp, Homo sapiens
ttcatcctccatctccatgatgtcgaaaacactctccactccctgcagtgagtattcagacgtcaggaaagagagaacacg

SEQ ID NO: 133761 - DNA, 80 bp, Homo sapiens
actgggctctcaggctcacccacctgaccctctaggctgacccggctcaccttgtctgtgcaacgtttgatatgctcaga

SEQ ID NO: 133762 - DNA, 78 bp, Homo sapiens
aggctcacccacctgaccctctaggctgacccggctcaccttgtctgtgcaacgtttgatatgctcagaggtgaagtg

SEQ ID NO: 133763 - DNA, 82 bp, Homo sapiens
acctgaccctctaggctgacccggctcaccttgtctgtgcaacgtttgatatgctcagaggtgaagtgtggcagctgcttca

SEQ ID NO: 133764 - DNA, 83 bp, Homo sapiens
taggctgacccggctcaccttgtctgtgcaacgtttgatatgctcagaggtgaagtgtggcagctgcttcaggtatgagtcct

SEQ ID NO: 133765 - DNA, 81 bp, Homo sapiens
acccggctcaccttgtctgtgcaacgtttgatatgctcagaggtgaagtgtggcagctgcttcaggtatgagtccttggac

SEQ ID NO: 133766 - DNA, 85 bp, Homo sapiens
ttgtctgtgcaacgtttgatatgctcagaggtgaagtgtggcagctgcttcaggtatgagtccttggaccacatggcttgggtga

SEQ ID NO: 133767 - DNA, 82 bp, Homo sapiens
aacgtttgatatgctcagaggtgaagtgtggcagctgcttcaggtatgagtccttggaccacatggcttgggtgaccatctg

SEQ ID NO: 133768 - DNA, 83 bp, Homo sapiens
atatgctcagaggtgaagtgtggcagctgcttcaggtatgagtccttggaccacatggcttgggtgaccatctgggccagttc

SEQ ID NO: 133769 - DNA, 84 bp, Homo sapiens
aagtgtggcagctgcttcaggtatgagtccttggaccacatggcttgggtgaccatctgggccagttccatagctgccagagca

SEQ ID NO: 133770 - DNA, 86 bp, Homo sapiens
tggcagctgcttcaggtatgagtccttggaccacatggcttgggtgaccatctgggccagttccatagctgccagagcagggctga

SEQ ID NO: 133771 - DNA, 82 bp, Homo sapiens
ttcaggtatgagtccttggaccacatggcttgggtgaccatctgggccagttccatagctgccagagcagggctgagccacc

SEQ ID NO: 133772 - DNA, 82 bp, Homo sapiens
tccttggaccacatggcttgggtgaccatctgggccagttccatagctgccagagcagggctgagccacccattgctggaaa

SEQ ID NO: 133773 - DNA, 82 bp, Homo sapiens
acatggcttgggtgaccatctgggccagttccatagctgccagagcagggctgagccacccattgctggaaaggacatccac

SEQ ID NO: 133774 - DNA, 85 bp, Homo sapiens
gtgaccatctgggccagttccatagctgccagagcagggctgagccacccattgctggaaaggacatccacgcaggcctggatga

SEQ ID NO: 133775 - DNA, 83 bp, Homo sapiens
tgggccagttccatagctgccagagcagggctgagccacccattgctggaaaggacatccacgcaggcctggatgagccggat

SEQ ID NO: 133776 - DNA, 85 bp, Homo sapiens
ttccatagctgccagagcagggctgagccacccattgctggaaaggacatccacgcaggcctggatgagccggattgcctgaaca

SEQ ID NO: 133777 - DNA, 79 bp, Homo sapiens
agcagggctgagccacccattgctggaaaggacatccacgcaggcctggatgagccggattgcctgaacaggaaaagga

SEQ ID NO: 133778 - DNA, 76 bp, Homo sapiens
agccacccattgctggaaaggacatccacgcaggcctggatgagccggattgcctgaacaggaaaaggagtataaa

SEQ ID NO: 133779 - DNA, 75 bp, Homo sapiens
attgctggaaaggacatccacgcaggcctggatgagccggattgcctgaacaggaaaaggagtataaaagtgggc

SEQ ID NO: 133780 - DNA, 72 bp, Homo sapiens
aaaggacatccacgcaggcctggatgagccggattgcctgaacaggaaaaggagtataaaagtgggcggagt

SEQ ID NO: 133781 - DNA, 73 bp, Homo sapiens
atgtttagagcaccactgacccctctgccccacacccacactctaccttactaaggatttcctccgtatctga

SEQ ID NO: 133782 - DNA, 75 bp, Homo sapiens
tagagcaccactgacccctctgccccacacccacactctaccttactaaggatttcctccgtatctgactgcaac

SEQ ID NO: 133783 - DNA, 81 bp, Homo sapiens
ccctctgccccacacccacactctaccttactaaggatttcctccgtatctgactgcaactcagcactcagctgcatgcga

SEQ ID NO: 133784 - DNA, 83 bp, Homo sapiens
cacacccacactctaccttactaaggatttcctccgtatctgactgcaactcagcactcagctgcatgcgagacaagtgagcc

SEQ ID NO: 133785 - DNA, 85 bp, Homo sapiens
ccacactctaccttactaaggatttcctccgtatctgactgcaactcagcactcagctgcatgcgagacaagtgagcctgcagga

SEQ ID NO: 133786 - DNA, 85 bp, Homo sapiens
ttactaaggatttcctccgtatctgactgcaactcagcactcagctgcatgcgagacaagtgagcctgcaggagcaggttggtct

SEQ ID NO: 133787 - DNA, 89 bp, Homo sapiens
ttcctccgtatctgactgcaactcagcactcagctgcatgcgagacaagtgagcctgcaggagcaggttggtcttgacgtgcggatcat

SEQ ID NO: 133788 - DNA, 90 bp, Homo sapiens
tatctgactgcaactcagcactcagctgcatgcgagacaagtgagcctgcaggagcaggttggtcttgacgtgcggatcattgaacttag

SEQ ID NO: 133789 - DNA, 84 bp, Homo sapiens
actcagcactcagctgcatgcgagacaagtgagcctgcaggagcaggttggtcttgacgtgcggatcattgaacttagggttat

SEQ ID NO: 133790 - DNA, 83 bp, Homo sapiens
actcagctgcatgcgagacaagtgagcctgcaggagcaggttggtcttgacgtgcggatcattgaacttagggttattcagct

SEQ ID NO: 133791 - DNA, 79 bp, Homo sapiens
atgcgagacaagtgagcctgcaggagcaggttggtcttgacgtgcggatcattgaacttagggttattcagcttgtggg

SEQ ID NO: 133792 - DNA, 76 bp, Homo sapiens
agcctgcaggagcaggttggtcttgacgtgcggatcattgaacttagggttattcagcttgtgggggaccttctga

SEQ ID NO: 133793 - DNA, 74 bp, Homo sapiens
agcaggttggtcttgacgtgcggatcattgaacttagggttattcagcttgtgggggaccttctgagccaacta

SEQ ID NO: 133794 - DNA, 73 bp, Homo sapiens
ttggtcttgacgtgcggatcattgaacttagggttattcagcttgtgggggaccttctgagccaactacaaag

SEQ ID NO: 133795 - DNA, 72 bp, Homo sapiens
gtgcggatcattgaacttagggttattcagcttgtgggggaccttctgagccaactacaaagtggaagaaaa

SEQ ID NO: 133796 - DNA, 70 bp, Homo sapiens
attgaacttagggttattcagcttgtgggggaccttctgagccaactacaaagtggaagaaaaatagctg

SEQ ID NO: 133797 - DNA, 81 bp, Homo sapiens
gagtttgttgttcccaggatgctctcctgaagtctgctgtcctcacctgcctcaggagattgtcttcatggtgccggatgg

SEQ ID NO: 133798 - DNA, 84 bp, Homo sapiens
ttcccaggatgctctcctgaagtctgctgtcctcacctgcctcaggagattgtcttcatggtgccggatgggaatgttctcata

SEQ ID NO: 133799 - DNA, 87 bp, Homo sapiens
atgctctcctgaagtctgctgtcctcacctgcctcaggagattgtcttcatggtgccggatgggaatgttctcatactctgctgcat

SEQ ID NO: 133800 - DNA, 87 bp, Homo sapiens
aagtctgctgtcctcacctgcctcaggagattgtcttcatggtgccggatgggaatgttctcatactctgctgcattggagatgatc

SEQ ID NO: 133801 - DNA, 87 bp, Homo sapiens
ctgtcctcacctgcctcaggagattgtcttcatggtgccggatgggaatgttctcatactctgctgcattggagatgatctcgataa

SEQ ID NO: 133802 - DNA, 85 bp, Homo sapiens
cctcaggagattgtcttcatggtgccggatgggaatgttctcatactctgctgcattggagatgatctcgataagccctcgcacc

SEQ ID NO: 133803 - DNA, 83 bp, Homo sapiens
attgtcttcatggtgccggatgggaatgttctcatactctgctgcattggagatgatctcgataagccctcgcaccttggtct

SEQ ID NO: 133804 - DNA, 84 bp, Homo sapiens
atggtgccggatgggaatgttctcatactctgctgcattggagatgatctcgataagccctcgcaccttggtcttggcattgag

SEQ ID NO: 133805 - DNA, 86 bp, Homo sapiens
atgggaatgttctcatactctgctgcattggagatgatctcgataagccctcgcaccttggtcttggcattgagggacatgctgaa

SEQ ID NO: 133806 - DNA, 89 bp, Homo sapiens
tcatactctgctgcattggagatgatctcgataagccctcgcaccttggtcttggcattgagggacatgctgaagagctctgacagaaa

SEQ ID NO: 133807 - DNA, 84 bp, Homo sapiens
tgcattggagatgatctcgataagccctcgcaccttggtcttggcattgagggacatgctgaagagctctgacagaaaaaggaa

SEQ ID NO: 133808 - DNA, 82 bp, Homo sapiens
agatgatctcgataagccctcgcaccttggtcttggcattgagggacatgctgaagagctctgacagaaaaaggaaatgtga

SEQ ID NO: 133809 - DNA, 80 bp, Homo sapiens
ataagccctcgcaccttggtcttggcattgagggacatgctgaagagctctgacagaaaaaggaaatgtgagagaagcta

SEQ ID NO: 133810 - DNA, 75 bp, Homo sapiens
tgtaaaaaggctcccacagacaggacacgggccatgccgggcctcaccaatggtggtgtagttgatgtaatagta

SEQ ID NO: 133811 - DNA, 79 bp, Homo sapiens
tcccacagacaggacacgggccatgccgggcctcaccaatggtggtgtagttgatgtaatagtaggcggcgatcatgcc

SEQ ID NO: 133812 - DNA, 77 bp, Homo sapiens
aggacacgggccatgccgggcctcaccaatggtggtgtagttgatgtaatagtaggcggcgatcatgcctaggttca

SEQ ID NO: 133813 - DNA, 77 bp, Homo sapiens
acgggccatgccgggcctcaccaatggtggtgtagttgatgtaatagtaggcggcgatcatgcctaggttcagaggc

SEQ ID NO: 133814 - DNA, 79 bp, Homo sapiens
cctcaccaatggtggtgtagttgatgtaatagtaggcggcgatcatgcctaggttcagaggcgccacgtccatctcgtc

SEQ ID NO: 133815 - DNA, 80 bp, Homo sapiens
aatggtggtgtagttgatgtaatagtaggcggcgatcatgcctaggttcagaggcgccacgtccatctcgtcctcgatgc

SEQ ID NO: 133816 - DNA, 85 bp, Homo sapiens
tgtagttgatgtaatagtaggcggcgatcatgcctaggttcagaggcgccacgtccatctcgtcctcgatgctgatgcacttgga

SEQ ID NO: 133817 - DNA, 84 bp, Homo sapiens
gtaatagtaggcggcgatcatgcctaggttcagaggcgccacgtccatctcgtcctcgatgctgatgcacttggactgctccag

SEQ ID NO: 133818 - DNA, 87 bp, Homo sapiens
gatcatgcctaggttcagaggcgccacgtccatctcgtcctcgatgctgatgcacttggactgctccaggtcactcagggtctgctc

SEQ ID NO: 133819 - DNA, 84 bp, Homo sapiens
ctaggttcagaggcgccacgtccatctcgtcctcgatgctgatgcacttggactgctccaggtcactcagggtctgctccacca

SEQ ID NO: 133820 - DNA, 86 bp, Homo sapiens
agaggcgccacgtccatctcgtcctcgatgctgatgcacttggactgctccaggtcactcagggtctgctccaccagctctgacaa

SEQ ID NO: 133821 - DNA, 86 bp, Homo sapiens
tccatctcgtcctcgatgctgatgcacttggactgctccaggtcactcagggtctgctccaccagctctgacaagtggtccgacaa

SEQ ID NO: 133822 - DNA, 86 bp, Homo sapiens
tcctcgatgctgatgcacttggactgctccaggtcactcagggtctgctccaccagctctgacaagtggtccgacaagtgacgatg

SEQ ID NO: 133823 - DNA, 84 bp, Homo sapiens
tgcacttggactgctccaggtcactcagggtctgctccaccagctctgacaagtggtccgacaagtgacgatgggagatgccta

SEQ ID NO: 133824 - DNA, 83 bp, Homo sapiens
ttggactgctccaggtcactcagggtctgctccaccagctctgacaagtggtccgacaagtgacgatgggagatgcctatgga

SEQ ID NO: 133825 - DNA, 83 bp, Homo sapiens
tcactcagggtctgctccaccagctctgacaagtggtccgacaagtgacgatgggagatgcctatggaggcgagaggtgagtg

SEQ ID NO: 133826 - DNA, 79 bp, Homo sapiens
agggtctgctccaccagctctgacaagtggtccgacaagtgacgatgggagatgcctatggaggcgagaggtgagtggg

SEQ ID NO: 133827 - DNA, 79 bp, Homo sapiens
accagctctgacaagtggtccgacaagtgacgatgggagatgcctatggaggcgagaggtgagtggggagcctcaagaa

SEQ ID NO: 133828 - DNA, 73 bp, Homo sapiens
aaagactgtgagaaccaccaaaggatcacgtgtgctcccaagcccactgaccctgcaggttgtagtaattggg

SEQ ID NO: 133829 - DNA, 74 bp, Homo sapiens
agaaccaccaaaggatcacgtgtgctcccaagcccactgaccctgcaggttgtagtaattggggttctgtgtca

SEQ ID NO: 133830 - DNA, 76 bp, Homo sapiens
atcacgtgtgctcccaagcccactgaccctgcaggttgtagtaattggggttctgtgtcatgcggcggtacagaaa

SEQ ID NO: 133831 - DNA, 73 bp, Homo sapiens
tcccaagcccactgaccctgcaggttgtagtaattggggttctgtgtcatgcggcggtacagaaaggtccagg

SEQ ID NO: 133832 - DNA, 73 bp, Homo sapiens
actgaccctgcaggttgtagtaattggggttctgtgtcatgcggcggtacagaaaggtccaggtgaggtagtc

SEQ ID NO: 133833 - DNA, 76 bp, Homo sapiens
ctgcaggttgtagtaattggggttctgtgtcatgcggcggtacagaaaggtccaggtgaggtagtccacagcatcc

SEQ ID NO: 133834 - DNA, 78 bp, Homo sapiens
tagtaattggggttctgtgtcatgcggcggtacagaaaggtccaggtgaggtagtccacagcatcctgcttgttctca

SEQ ID NO: 133835 - DNA, 81 bp, Homo sapiens
gtcatgcggcggtacagaaaggtccaggtgaggtagtccacagcatcctgcttgttctcaatggtcttggtgacgatctca

SEQ ID NO: 133836 - DNA, 81 bp, Homo sapiens
agaaaggtccaggtgaggtagtccacagcatcctgcttgttctcaatggtcttggtgacgatctcagcattgaagtggtca

SEQ ID NO: 133837 - DNA, 85 bp, Homo sapiens
aggtgaggtagtccacagcatcctgcttgttctcaatggtcttggtgacgatctcagcattgaagtggtcatgcatacagtggtc

SEQ ID NO: 133838 - DNA, 84 bp, Homo sapiens
aggtagtccacagcatcctgcttgttctcaatggtcttggtgacgatctcagcattgaagtggtcatgcatacagtggtccagg

SEQ ID NO: 133839 - DNA, 86 bp, Homo sapiens
tcctgcttgttctcaatggtcttggtgacgatctcagcattgaagtggtcatgcatacagtggtccaggtgagattctactggcaa

SEQ ID NO: 133840 - DNA, 88 bp, Homo sapiens
ttctcaatggtcttggtgacgatctcagcattgaagtggtcatgcatacagtggtccaggtgagattctactggcaatggctcatata

SEQ ID NO: 133841 - DNA, 86 bp, Homo sapiens
atggtcttggtgacgatctcagcattgaagtggtcatgcatacagtggtccaggtgagattctactggcaatggctcatataagaa

SEQ ID NO: 133842 - DNA, 84 bp, Homo sapiens
atctcagcattgaagtggtcatgcatacagtggtccaggtgagattctactggcaatggctcatataagaacttcttgaagaaa

SEQ ID NO: 133843 - DNA, 81 bp, Homo sapiens
attgaagtggtcatgcatacagtggtccaggtgagattctactggcaatggctcatataagaacttcttgaagaaatcctg

SEQ ID NO: 133844 - DNA, 80 bp, Homo sapiens
atgcatacagtggtccaggtgagattctactggcaatggctcatataagaacttcttgaagaaatcctgtgggttggaga

SEQ ID NO: 133845 - DNA, 77 bp, Homo sapiens
tgagattctactggcaatggctcatataagaacttcttgaagaaatcctgtgggttggagagggagaaggagtaata

SEQ ID NO: 133846 - DNA, 83 bp, Homo sapiens
aatccattctgaggctacggatccaagaggctccatgagtctaggactgaccttcttggagccctgacacatgatgacacagc

SEQ ID NO: 133847 - DNA, 82 bp, Homo sapiens
tacggatccaagaggctccatgagtctaggactgaccttcttggagccctgacacatgatgacacagcgcccctcatcgtcc

SEQ ID NO: 133848 - DNA, 83 bp, Homo sapiens
atccaagaggctccatgagtctaggactgaccttcttggagccctgacacatgatgacacagcgcccctcatcgtcctgcaaa

SEQ ID NO: 133849 - DNA, 81 bp, Homo sapiens
tccatgagtctaggactgaccttcttggagccctgacacatgatgacacagcgcccctcatcgtcctgcaaagggcggttg

SEQ ID NO: 133850 - DNA, 79 bp, Homo sapiens
taggactgaccttcttggagccctgacacatgatgacacagcgcccctcatcgtcctgcaaagggcggttggcgtggcc

SEQ ID NO: 133851 - DNA, 80 bp, Homo sapiens
cttcttggagccctgacacatgatgacacagcgcccctcatcgtcctgcaaagggcggttggcgtggcccaccatctgaa

SEQ ID NO: 133852 - DNA, 83 bp, Homo sapiens
tgacacatgatgacacagcgcccctcatcgtcctgcaaagggcggttggcgtggcccaccatctgaagcacgtcatagatggg

SEQ ID NO: 133853 - DNA, 80 bp, Homo sapiens
atgatgacacagcgcccctcatcgtcctgcaaagggcggttggcgtggcccaccatctgaagcacgtcatagatggggta

SEQ ID NO: 133854 - DNA, 78 bp, Homo sapiens
ccctcatcgtcctgcaaagggcggttggcgtggcccaccatctgaagcacgtcatagatggggtaatccacatagctg

SEQ ID NO: 133855 - DNA, 79 bp, Homo sapiens
atcgtcctgcaaagggcggttggcgtggcccaccatctgaagcacgtcatagatggggtaatccacatagctggtgaca

SEQ ID NO: 133856 - DNA, 77 bp, Homo sapiens
aaagggcggttggcgtggcccaccatctgaagcacgtcatagatggggtaatccacatagctggtgacagaagcagg

SEQ ID NO: 133857 - DNA, 77 bp, Homo sapiens
cgtggcccaccatctgaagcacgtcatagatggggtaatccacatagctggtgacagaagcagggaaagaaggaaaa

SEQ ID NO: 133858 - DNA, 79 bp, Homo sapiens
atgagccactgcgctcggcactcctctagcttcttacttgtcactatataggtgtatgacctcgaccaagtcacttttc

SEQ ID NO: 133859 - DNA, 78 bp, Homo sapiens
tgcgctcggcactcctctagcttcttacttgtcactatataggtgtatgacctcgaccaagtcacttttcctaatcta

SEQ ID NO: 133860 - DNA, 75 bp, Homo sapiens
actcctctagcttcttacttgtcactatataggtgtatgacctcgaccaagtcacttttcctaatctacaagatg

SEQ ID NO: 133861 - DNA, 78 bp, Homo sapiens
ttcttacttgtcactatataggtgtatgacctcgaccaagtcacttttcctaatctacaagatgtctgagattaatga

SEQ ID NO: 133862 - DNA, 77 bp, Homo sapiens
ttgtcactatataggtgtatgacctcgaccaagtcacttttcctaatctacaagatgtctgagattaatgacgtaac

SEQ ID NO: 133863 - DNA, 75 bp, Homo sapiens
atataggtgtatgacctcgaccaagtcacttttcctaatctacaagatgtctgagattaatgacgtaacgtcaaa

SEQ ID NO: 133864 - DNA, 74 bp, Homo sapiens
atgacctcgaccaagtcacttttcctaatctacaagatgtctgagattaatgacgtaacgtcaaacattcctcc

SEQ ID NO: 133865 - DNA, 73 bp, Homo sapiens
aagtcacttttcctaatctacaagatgtctgagattaatgacgtaacgtcaaacattcctcctggctctaatt

SEQ ID NO: 133866 - DNA, 74 bp, Homo sapiens
tttcctaatctacaagatgtctgagattaatgacgtaacgtcaaacattcctcctggctctaatttcctacctc

SEQ ID NO: 133867 - DNA, 77 bp, Homo sapiens
aagatgtctgagattaatgacgtaacgtcaaacattcctcctggctctaatttcctacctctcccagctgctgaata

SEQ ID NO: 133868 - DNA, 75 bp, Homo sapiens
ctgagattaatgacgtaacgtcaaacattcctcctggctctaatttcctacctctcccagctgctgaataaggaa

SEQ ID NO: 133869 - DNA, 75 bp, Homo sapiens
taacgtcaaacattcctcctggctctaatttcctacctctcccagctgctgaataaggaagcacaatgactaaaa

SEQ ID NO: 133870 - DNA, 74 bp, Homo sapiens
aaacattcctcctggctctaatttcctacctctcccagctgctgaataaggaagcacaatgactaaaaagcaaa

SEQ ID NO: 133871 - DNA, 77 bp, Homo sapiens
tggctctaatttcctacctctcccagctgctgaataaggaagcacaatgactaaaaagcaaatgtgagcctaggtat

SEQ ID NO: 133872 - DNA, 78 bp, Homo sapiens
taatttcctacctctcccagctgctgaataaggaagcacaatgactaaaaagcaaatgtgagcctaggtattgagaca

SEQ ID NO: 133873 - DNA, 79 bp, Homo sapiens
tcccagctgctgaataaggaagcacaatgactaaaaagcaaatgtgagcctaggtattgagacacaaaactctcaaaca

SEQ ID NO: 133874 - DNA, 77 bp, Homo sapiens
ctgctgaataaggaagcacaatgactaaaaagcaaatgtgagcctaggtattgagacacaaaactctcaaacacttg

SEQ ID NO: 133875 - DNA, 78 bp, Homo sapiens
taaaaagcaaatgtgagcctaggtattgagacacaaaactctcaaacacttggctctggtggcatctcagctgttaac

SEQ ID NO: 133876 - DNA, 77 bp, Homo sapiens
aaatgtgagcctaggtattgagacacaaaactctcaaacacttggctctggtggcatctcagctgttaacttcccta

SEQ ID NO: 133877 - DNA, 74 bp, Homo sapiens
taggtattgagacacaaaactctcaaacacttggctctggtggcatctcagctgttaacttccctaacaccttt

SEQ ID NO: 133878 - DNA, 74 bp, Homo sapiens
aaactctcaaacacttggctctggtggcatctcagctgttaacttccctaacaccttttcttcatcctagctta

SEQ ID NO: 133879 - DNA, 75 bp, Homo sapiens
acacttggctctggtggcatctcagctgttaacttccctaacaccttttcttcatcctagcttactttctgtgta

SEQ ID NO: 133880 - DNA, 80 bp, Homo sapiens
tggcatctcagctgttaacttccctaacaccttttcttcatcctagcttactttctgtgtatctgcagattcacattcat

SEQ ID NO: 133881 - DNA, 75 bp, Homo sapiens
agctgttaacttccctaacaccttttcttcatcctagcttactttctgtgtatctgcagattcacattcatttta

SEQ ID NO: 133882 - DNA, 73 bp, Homo sapiens
aacttccctaacaccttttcttcatcctagcttactttctgtgtatctgcagattcacattcattttaggaag

SEQ ID NO: 133883 - DNA, 77 bp, Homo sapiens
accttttcttcatcctagcttactttctgtgtatctgcagattcacattcattttaggaaggaggtctgtgctaaca

SEQ ID NO: 133884 - DNA, 81 bp, Homo sapiens
tcctagcttactttctgtgtatctgcagattcacattcattttaggaaggaggtctgtgctaacacagagcaccagttgta

SEQ ID NO: 133885 - DNA, 80 bp, Homo sapiens
cttactttctgtgtatctgcagattcacattcattttaggaaggaggtctgtgctaacacagagcaccagttgtactcac

SEQ ID NO: 133886 - DNA, 83 bp, Homo sapiens
tatctgcagattcacattcattttaggaaggaggtctgtgctaacacagagcaccagttgtactcacgcgtggatcttgccat

SEQ ID NO: 133887 - DNA, 80 bp, Homo sapiens
ttcacattcattttaggaaggaggtctgtgctaacacagagcaccagttgtactcacgcgtggatcttgccattgtagta

SEQ ID NO: 133888 - DNA, 82 bp, Homo sapiens
aggaggtctgtgctaacacagagcaccagttgtactcacgcgtggatcttgccattgtagtactgggtatccatgatgatta

SEQ ID NO: 133889 - DNA, 81 bp, Homo sapiens
ctaacacagagcaccagttgtactcacgcgtggatcttgccattgtagtactgggtatccatgatgattaccaggtgggca

SEQ ID NO: 133890 - DNA, 79 bp, Homo sapiens
accagttgtactcacgcgtggatcttgccattgtagtactgggtatccatgatgattaccaggtgggcagccacgttca

SEQ ID NO: 133891 - DNA, 82 bp, Homo sapiens
gatcttgccattgtagtactgggtatccatgatgattaccaggtgggcagccacgttcatgccccagcagagactccgagaa

SEQ ID NO: 133892 - DNA, 79 bp, Homo sapiens
gtactgggtatccatgatgattaccaggtgggcagccacgttcatgccccagcagagactccgagaagccaccaccacc

SEQ ID NO: 133893 - DNA, 79 bp, Homo sapiens
ttaccaggtgggcagccacgttcatgccccagcagagactccgagaagccaccaccacctggatagcccctgagcagta

SEQ ID NO: 133894 - DNA, 77 bp, Homo sapiens
ccacgttcatgccccagcagagactccgagaagccaccaccacctggatagcccctgagcagtagaggggagaggaa

SEQ ID NO: 133895 - DNA, 79 bp, Homo sapiens
ttcatgccccagcagagactccgagaagccaccaccacctggatagcccctgagcagtagaggggagaggaaggctgag

SEQ ID NO: 133896 - DNA, 76 bp, Homo sapiens
agcagagactccgagaagccaccaccacctggatagcccctgagcagtagaggggagaggaaggctgagggcaggg

SEQ ID NO: 133897 - DNA, 73 bp, Homo sapiens
aagccaccaccacctggatagcccctgagcagtagaggggagaggaaggctgagggcaggggtctccgggtga

SEQ ID NO: 133898 - DNA, 72 bp, Homo sapiens
accaccacctggatagcccctgagcagtagaggggagaggaaggctgagggcaggggtctccgggtgaagta

SEQ ID NO: 133899 - DNA, 76 bp, Homo sapiens
atagcccctgagcagtagaggggagaggaaggctgagggcaggggtctccgggtgaagtaggctcactgcctcatg

SEQ ID NO: 133900 - DNA, 74 bp, Homo sapiens
agtagaggggagaggaaggctgagggcaggggtctccgggtgaagtaggctcactgcctcatgggcaggccgtg

SEQ ID NO: 133901 - DNA, 74 bp, Homo sapiens
agaggaaggctgagggcaggggtctccgggtgaagtaggctcactgcctcatgggcaggccgtggcttaccctg

SEQ ID NO: 133902 - DNA, 78 bp, Homo sapiens
tgagggcaggggtctccgggtgaagtaggctcactgcctcatgggcaggccgtggcttaccctgtgctatgtttcaga

SEQ ID NO: 133903 - DNA, 79 bp, Homo sapiens
ggtctccgggtgaagtaggctcactgcctcatgggcaggccgtggcttaccctgtgctatgtttcagaactcacagcaa

SEQ ID NO: 133904 - DNA, 82 bp, Homo sapiens
tgaagtaggctcactgcctcatgggcaggccgtggcttaccctgtgctatgtttcagaactcacagcaaggctggctaggaa

SEQ ID NO: 133905 - DNA, 81 bp, Homo sapiens
tcactgcctcatgggcaggccgtggcttaccctgtgctatgtttcagaactcacagcaaggctggctaggaacaaggtcta

SEQ ID NO: 133906 - DNA, 80 bp, Homo sapiens
cgtggcttaccctgtgctatgtttcagaactcacagcaaggctggctaggaacaaggtctaacatgaatgagagctaaca

SEQ ID NO: 133907 - DNA, 82 bp, Homo sapiens
ttaccctgtgctatgtttcagaactcacagcaaggctggctaggaacaaggtctaacatgaatgagagctaacacattgcta

SEQ ID NO: 133908 - DNA, 84 bp, Homo sapiens
tatgtttcagaactcacagcaaggctggctaggaacaaggtctaacatgaatgagagctaacacattgctatgaggtagctcca

SEQ ID NO: 133909 - DNA, 84 bp, Homo sapiens
agaactcacagcaaggctggctaggaacaaggtctaacatgaatgagagctaacacattgctatgaggtagctccacgctgctg

SEQ ID NO: 133910 - DNA, 85 bp, Homo sapiens
atgagagctaacacattgctatgaggtagctccacgctgctggtgccttgctctgggactatccaggagaaaacaagtcatcata

SEQ ID NO: 133911 - DNA, 84 bp, Homo sapiens
taacacattgctatgaggtagctccacgctgctggtgccttgctctgggactatccaggagaaaacaagtcatcatagaacaga

SEQ ID NO: 133912 - DNA, 77 bp, Homo sapiens
acgctgctggtgccttgctctgggactatccaggagaaaacaagtcatcatagaacagaacccaaagcccaggaaca

SEQ ID NO: 133913 - DNA, 76 bp, Homo sapiens
tgccttgctctgggactatccaggagaaaacaagtcatcatagaacagaacccaaagcccaggaacaccaaggcaa

SEQ ID NO: 133914 - DNA, 75 bp, Homo sapiens
aaaacaagtcatcatagaacagaacccaaagcccaggaacaccaaggcaaaactacagctgatggactgctcctc

SEQ ID NO: 133915 - DNA, 76 bp, Homo sapiens
atcatagaacagaacccaaagcccaggaacaccaaggcaaaactacagctgatggactgctcctctgaccagaaag

SEQ ID NO: 133916 - DNA, 76 bp, Homo sapiens
aacccaaagcccaggaacaccaaggcaaaactacagctgatggactgctcctctgaccagaaagtgctaacactca

SEQ ID NO: 133917 - DNA, 81 bp, Homo sapiens
aggaacaccaaggcaaaactacagctgatggactgctcctctgaccagaaagtgctaacactcatgcagccacgggctggc

SEQ ID NO: 133918 - DNA, 87 bp, Homo sapiens
aggcaaaactacagctgatggactgctcctctgaccagaaagtgctaacactcatgcagccacgggctggctcagccatgccagcaa

SEQ ID NO: 133919 - DNA, 86 bp, Homo sapiens
aaactacagctgatggactgctcctctgaccagaaagtgctaacactcatgcagccacgggctggctcagccatgccagcaaaaca

SEQ ID NO: 133920 - DNA, 87 bp, Homo sapiens
ctcctctgaccagaaagtgctaacactcatgcagccacgggctggctcagccatgccagcaaaacagagatcactctaagcatgccc

SEQ ID NO: 133921 - DNA, 86 bp, Homo sapiens
taacactcatgcagccacgggctggctcagccatgccagcaaaacagagatcactctaagcatgccccaaacaggcagattcaagg

SEQ ID NO: 133922 - DNA, 83 bp, Homo sapiens
cacgggctggctcagccatgccagcaaaacagagatcactctaagcatgccccaaacaggcagattcaagggccaaagagtga

SEQ ID NO: 133923 - DNA, 81 bp, Homo sapiens
atgccagcaaaacagagatcactctaagcatgccccaaacaggcagattcaagggccaaagagtgacaggaagtgattctg

SEQ ID NO: 133924 - DNA, 79 bp, Homo sapiens
aaaacagagatcactctaagcatgccccaaacaggcagattcaagggccaaagagtgacaggaagtgattctggcagaa

SEQ ID NO: 133925 - DNA, 78 bp, Homo sapiens
cccaaacaggcagattcaagggccaaagagtgacaggaagtgattctggcagaagaatctccaatgaggctccaataa

SEQ ID NO: 133926 - DNA, 78 bp, Homo sapiens
cagattcaagggccaaagagtgacaggaagtgattctggcagaagaatctccaatgaggctccaataaacagtattaa

SEQ ID NO: 133927 - DNA, 75 bp, Homo sapiens
ggccaaagagtgacaggaagtgattctggcagaagaatctccaatgaggctccaataaacagtattaaaacgtaa

SEQ ID NO: 133928 - DNA, 77 bp, Homo sapiens
tgacaggaagtgattctggcagaagaatctccaatgaggctccaataaacagtattaaaacgtaaatctttgcacaa

SEQ ID NO: 133929 - DNA, 74 bp, Homo sapiens
ggaagtgattctggcagaagaatctccaatgaggctccaataaacagtattaaaacgtaaatctttgcacaaaa

SEQ ID NO: 133930 - DNA, 74 bp, Homo sapiens
agaagaatctccaatgaggctccaataaacagtattaaaacgtaaatctttgcacaaaatgccacagggcaaca

SEQ ID NO: 133931 - DNA, 74 bp, Homo sapiens
aatctccaatgaggctccaataaacagtattaaaacgtaaatctttgcacaaaatgccacagggcaacaagaga

SEQ ID NO: 133932 - DNA, 75 bp, Homo sapiens
ctccaataaacagtattaaaacgtaaatctttgcacaaaatgccacagggcaacaagagacagtggccagcaaga

SEQ ID NO: 133933 - DNA, 77 bp, Homo sapiens
aacagtattaaaacgtaaatctttgcacaaaatgccacagggcaacaagagacagtggccagcaagagtgagctcaa

SEQ ID NO: 133934 - DNA, 79 bp, Homo sapiens
taaaacgtaaatctttgcacaaaatgccacagggcaacaagagacagtggccagcaagagtgagctcaagggagaatca

SEQ ID NO: 133935 - DNA, 85 bp, Homo sapiens
tttgcacaaaatgccacagggcaacaagagacagtggccagcaagagtgagctcaagggagaatcagagctctcctctgtgctaa

SEQ ID NO: 133936 - DNA, 84 bp, Homo sapiens
aatgccacagggcaacaagagacagtggccagcaagagtgagctcaagggagaatcagagctctcctctgtgctaatctctaaa

SEQ ID NO: 133937 - DNA, 82 bp, Homo sapiens
aacaagagacagtggccagcaagagtgagctcaagggagaatcagagctctcctctgtgctaatctctaaagtctaactatc

SEQ ID NO: 133938 - DNA, 83 bp, Homo sapiens
acagtggccagcaagagtgagctcaagggagaatcagagctctcctctgtgctaatctctaaagtctaactatcttggtgaga

SEQ ID NO: 133939 - DNA, 79 bp, Homo sapiens
agctcaagggagaatcagagctctcctctgtgctaatctctaaagtctaactatcttggtgagacggtttggatctgtg

SEQ ID NO: 133940 - DNA, 78 bp, Homo sapiens
aatcagagctctcctctgtgctaatctctaaagtctaactatcttggtgagacggtttggatctgtgtctccaccaaa

SEQ ID NO: 133941 - DNA, 78 bp, Homo sapiens
tctcctctgtgctaatctctaaagtctaactatcttggtgagacggtttggatctgtgtctccaccaaatctcgtcga

SEQ ID NO: 133942 - DNA, 75 bp, Homo sapiens
taatctctaaagtctaactatcttggtgagacggtttggatctgtgtctccaccaaatctcgtcgacctgtagtc

SEQ ID NO: 133943 - DNA, 75 bp, Homo sapiens
tctaaagtctaactatcttggtgagacggtttggatctgtgtctccaccaaatctcgtcgacctgtagtctccag

SEQ ID NO: 133944 - DNA, 75 bp, Homo sapiens
aactatcttggtgagacggtttggatctgtgtctccaccaaatctcgtcgacctgtagtctccagtgttggagga

SEQ ID NO: 133945 - DNA, 77 bp, Homo sapiens
tctgtgtctccaccaaatctcgtcgacctgtagtctccagtgttggaggaagggcctggtgggagatgactggctaa

SEQ ID NO: 133946 - DNA, 76 bp, Homo sapiens
tctccaccaaatctcgtcgacctgtagtctccagtgttggaggaagggcctggtgggagatgactggctaatggag

SEQ ID NO: 133947 - DNA, 76 bp, Homo sapiens
aatctcgtcgacctgtagtctccagtgttggaggaagggcctggtgggagatgactggctaatggaggcagagttc

SEQ ID NO: 133948 - DNA, 74 bp, Homo sapiens
ttctttatagcaatacaagaacggactaatacacttggggagtctggtatccacggagaatcagcggtctggtg

SEQ ID NO: 133949 - DNA, 74 bp, Homo sapiens
atagcaatacaagaacggactaatacacttggggagtctggtatccacggagaatcagcggtctggtggccaaa

SEQ ID NO: 133950 - DNA, 73 bp, Homo sapiens
cggactaatacacttggggagtctggtatccacggagaatcagcggtctggtggccaaaggtcctggactcta

SEQ ID NO: 133951 - DNA, 73 bp, Homo sapiens
taatacacttggggagtctggtatccacggagaatcagcggtctggtggccaaaggtcctggactctagaaaa

SEQ ID NO: 133952 - DNA, 72 bp, Homo sapiens
agtctggtatccacggagaatcagcggtctggtggccaaaggtcctggactctagaaaaccaggttctgaaa

SEQ ID NO: 133953 - DNA, 74 bp, Homo sapiens
gtatccacggagaatcagcggtctggtggccaaaggtcctggactctagaaaaccaggttctgaaatagcacaa

SEQ ID NO: 133954 - DNA, 75 bp, Homo sapiens
agaatcagcggtctggtggccaaaggtcctggactctagaaaaccaggttctgaaatagcacaacctgatgtgtc

SEQ ID NO: 133955 - DNA, 74 bp, Homo sapiens
gtctggtggccaaaggtcctggactctagaaaaccaggttctgaaatagcacaacctgatgtgtctgcctgttt

SEQ ID NO: 133956 - DNA, 75 bp, Homo sapiens
aaaggtcctggactctagaaaaccaggttctgaaatagcacaacctgatgtgtctgcctgttttctcacctggca

SEQ ID NO: 133957 - DNA, 77 bp, Homo sapiens
tggactctagaaaaccaggttctgaaatagcacaacctgatgtgtctgcctgttttctcacctggcaagtagggata

SEQ ID NO: 133958 - DNA, 76 bp, Homo sapiens
tctagaaaaccaggttctgaaatagcacaacctgatgtgtctgcctgttttctcacctggcaagtagggatagtgt

SEQ ID NO: 133959 - DNA, 75 bp, Homo sapiens
tagaaaaccaggttctgaaatagcacaacctgatgtgtctgcctgttttctcacctggcaagtagggatagtgtt

SEQ ID NO: 133960 - DNA, 75 bp, Homo sapiens
aaaccaggttctgaaatagcacaacctgatgtgtctgcctgttttctcacctggcaagtagggatagtgtttgtc

SEQ ID NO: 133961 - DNA, 78 bp, Homo sapiens
aggttctgaaatagcacaacctgatgtgtctgcctgttttctcacctggcaagtagggatagtgtttgtctcacctgc

SEQ ID NO: 133962 - DNA, 78 bp, Homo sapiens
aaatagcacaacctgatgtgtctgcctgttttctcacctggcaagtagggatagtgtttgtctcacctgcctcacgag

SEQ ID NO: 133963 - DNA, 76 bp, Homo sapiens
acaacctgatgtgtctgcctgttttctcacctggcaagtagggatagtgtttgtctcacctgcctcacgaggttct

SEQ ID NO: 133964 - DNA, 76 bp, Homo sapiens
tctgcctgttttctcacctggcaagtagggatagtgtttgtctcacctgcctcacgaggttcttgggaggatcaaa

SEQ ID NO: 133965 - DNA, 75 bp, Homo sapiens
tgttttctcacctggcaagtagggatagtgtttgtctcacctgcctcacgaggttcttgggaggatcaaatgagt

SEQ ID NO: 133966 - DNA, 76 bp, Homo sapiens
ctggcaagtagggatagtgtttgtctcacctgcctcacgaggttcttgggaggatcaaatgagttaacagccaaga

SEQ ID NO: 133967 - DNA, 75 bp, Homo sapiens
tagggatagtgtttgtctcacctgcctcacgaggttcttgggaggatcaaatgagttaacagccaagagtcctaa

SEQ ID NO: 133968 - DNA, 73 bp, Homo sapiens
tttgtctcacctgcctcacgaggttcttgggaggatcaaatgagttaacagccaagagtcctaaacagtattt

SEQ ID NO: 133969 - DNA, 71 bp, Homo sapiens
acctgcctcacgaggttcttgggaggatcaaatgagttaacagccaagagtcctaaacagtattttgaaaa

SEQ ID NO: 133970 - DNA, 71 bp, Homo sapiens
acgaggttcttgggaggatcaaatgagttaacagccaagagtcctaaacagtattttgaaaatctctggta

SEQ ID NO: 133971 - DNA, 74 bp, Homo sapiens
aggatcaaatgagttaacagccaagagtcctaaacagtattttgaaaatctctggtatgctgtagagaaaacac

SEQ ID NO: 133972 - DNA, 74 bp, Homo sapiens
aaatgagttaacagccaagagtcctaaacagtattttgaaaatctctggtatgctgtagagaaaacactgccac

SEQ ID NO: 133973 - DNA, 73 bp, Homo sapiens
aacagccaagagtcctaaacagtattttgaaaatctctggtatgctgtagagaaaacactgccacccgcaccc

SEQ ID NO: 133974 - DNA, 72 bp, Homo sapiens
taaacagtattttgaaaatctctggtatgctgtagagaaaacactgccacccgcacccctcaagtttaacac

SEQ ID NO: 133975 - DNA, 73 bp, Homo sapiens
aaatctctggtatgctgtagagaaaacactgccacccgcacccctcaagtttaacaccaccacttggtgatac

SEQ ID NO: 133976 - DNA, 70 bp, Homo sapiens
aaaacactgccacccgcacccctcaagtttaacaccaccacttggtgatacccttgctatgctccccttc

SEQ ID NO: 133977 - DNA, 71 bp, Homo sapiens
ccgcacccctcaagtttaacaccaccacttggtgatacccttgctatgctccccttccgtggcctgactta

SEQ ID NO: 133978 - DNA, 75 bp, Homo sapiens
tcaagtttaacaccaccacttggtgatacccttgctatgctccccttccgtggcctgacttacctgagctgaaga

SEQ ID NO: 133979 - DNA, 78 bp, Homo sapiens
ttaacaccaccacttggtgatacccttgctatgctccccttccgtggcctgacttacctgagctgaagagctgctcca

SEQ ID NO: 133980 - DNA, 80 bp, Homo sapiens
ttggtgatacccttgctatgctccccttccgtggcctgacttacctgagctgaagagctgctccaccaggcgtcgctcca

SEQ ID NO: 133981 - DNA, 79 bp, Homo sapiens
tacccttgctatgctccccttccgtggcctgacttacctgagctgaagagctgctccaccaggcgtcgctccatggggc

SEQ ID NO: 133982 - DNA, 80 bp, Homo sapiens
atgctccccttccgtggcctgacttacctgagctgaagagctgctccaccaggcgtcgctccatggggctgagcccctca

SEQ ID NO: 133983 - DNA, 83 bp, Homo sapiens
tccgtggcctgacttacctgagctgaagagctgctccaccaggcgtcgctccatggggctgagcccctcatgcaggtagccca

SEQ ID NO: 133984 - DNA, 80 bp, Homo sapiens
cttacctgagctgaagagctgctccaccaggcgtcgctccatggggctgagcccctcatgcaggtagcccaccccattta

SEQ ID NO: 133985 - DNA, 80 bp, Homo sapiens
tcgctccatggggctgagcccctcatgcaggtagcccaccccatttagcagcgtttccttgagcgtgctgtcacttagct

SEQ ID NO: 133986 - DNA, 78 bp, Homo sapiens
gggctgagcccctcatgcaggtagcccaccccatttagcagcgtttccttgagcgtgctgtcacttagcttctccagg

SEQ ID NO: 133987 - DNA, 76 bp, Homo sapiens
gtagcccaccccatttagcagcgtttccttgagcgtgctgtcacttagcttctccaggtacggaatcagatccttc

SEQ ID NO: 133988 - DNA, 80 bp, Homo sapiens
tagcagcgtttccttgagcgtgctgtcacttagcttctccaggtacggaatcagatccttctcggtgcagtgcaagaacc

SEQ ID NO: 133989 - DNA, 81 bp, Homo sapiens
tccttgagcgtgctgtcacttagcttctccaggtacggaatcagatccttctcggtgcagtgcaagaacctgtgcggtaca

SEQ ID NO: 133990 - DNA, 83 bp, Homo sapiens
tagcttctccaggtacggaatcagatccttctcggtgcagtgcaagaacctgtgcggtacaggcactggctcagctcagagta

SEQ ID NO: 133991 - DNA, 72 bp, Homo sapiens
agcctcacttaacctaaccccaacccccagacgccaggccccacctacctctgccgttggatgtctgctgca

SEQ ID NO: 133992 - DNA, 71 bp, Homo sapiens
cttaacctaaccccaacccccagacgccaggccccacctacctctgccgttggatgtctgctgcacaggtg

SEQ ID NO: 133993 - DNA, 79 bp, Homo sapiens
aacccccagacgccaggccccacctacctctgccgttggatgtctgctgcacaggtggtgaggatgtcaatggcagtga

SEQ ID NO: 133994 - DNA, 80 bp, Homo sapiens
agacgccaggccccacctacctctgccgttggatgtctgctgcacaggtggtgaggatgtcaatggcagtgaggcgggtc

SEQ ID NO: 133995 - DNA, 84 bp, Homo sapiens
acctacctctgccgttggatgtctgctgcacaggtggtgaggatgtcaatggcagtgaggcgggtctgcttgcgagacggcaca

SEQ ID NO: 133996 - DNA, 87 bp, Homo sapiens
tctgccgttggatgtctgctgcacaggtggtgaggatgtcaatggcagtgaggcgggtctgcttgcgagacggcacaaagacaatga

SEQ ID NO: 133997 - DNA, 85 bp, Homo sapiens
atgtctgctgcacaggtggtgaggatgtcaatggcagtgaggcgggtctgcttgcgagacggcacaaagacaatgacaggcttct

SEQ ID NO: 133998 - DNA, 81 bp, Homo sapiens
acaggtggtgaggatgtcaatggcagtgaggcgggtctgcttgcgagacggcacaaagacaatgacaggcttcttgggcga

SEQ ID NO: 133999 - DNA, 83 bp, Homo sapiens
ggatgtcaatggcagtgaggcgggtctgcttgcgagacggcacaaagacaatgacaggcttcttgggcgagtgcttggtgata

SEQ ID NO: 134000 - DNA, 83 bp, Homo sapiens
atggcagtgaggcgggtctgcttgcgagacggcacaaagacaatgacaggcttcttgggcgagtgcttggtgatagcatggta

SEQ ID NO: 134001 - DNA, 81 bp, Homo sapiens
cgggtctgcttgcgagacggcacaaagacaatgacaggcttcttgggcgagtgcttggtgatagcatggtacacaggcttg

SEQ ID NO: 134002 - DNA, 83 bp, Homo sapiens
cttgcgagacggcacaaagacaatgacaggcttcttgggcgagtgcttggtgatagcatggtacacaggcttggccatggaga

SEQ ID NO: 134003 - DNA, 81 bp, Homo sapiens
cacaaagacaatgacaggcttcttgggcgagtgcttggtgatagcatggtacacaggcttggccatggagagcaggcgggt

SEQ ID NO: 134004 - DNA, 81 bp, Homo sapiens
aatgacaggcttcttgggcgagtgcttggtgatagcatggtacacaggcttggccatggagagcaggcgggtttgtgtatg

SEQ ID NO: 134005 - DNA, 83 bp, Homo sapiens
ttcttgggcgagtgcttggtgatagcatggtacacaggcttggccatggagagcaggcgggtttgtgtatggctgatgttgaa

SEQ ID NO: 134006 - DNA, 83 bp, Homo sapiens
agtgcttggtgatagcatggtacacaggcttggccatggagagcaggcgggtttgtgtatggctgatgttgaagccctggcga

SEQ ID NO: 134007 - DNA, 81 bp, Homo sapiens
tggtgatagcatggtacacaggcttggccatggagagcaggcgggtttgtgtatggctgatgttgaagccctggcgaccgg

SEQ ID NO: 134008 - DNA, 77 bp, Homo sapiens
tacacaggcttggccatggagagcaggcgggtttgtgtatggctgatgttgaagccctggcgaccggggagaagaaa

SEQ ID NO: 134009 - DNA, 76 bp, Homo sapiens
ggcttggccatggagagcaggcgggtttgtgtatggctgatgttgaagccctggcgaccggggagaagaaaagaca

SEQ ID NO: 134010 - DNA, 77 bp, Homo sapiens
actcaggatctatgtgacaccccacagacggatgaggagagtgggtcctacctggatgtgcagctccaaggggacgg

SEQ ID NO: 134011 - DNA, 78 bp, Homo sapiens
tatgtgacaccccacagacggatgaggagagtgggtcctacctggatgtgcagctccaaggggacgggacgcacattg

SEQ ID NO: 134012 - DNA, 76 bp, Homo sapiens
agacggatgaggagagtgggtcctacctggatgtgcagctccaaggggacgggacgcacattgggatggaagttga

SEQ ID NO: 134013 - DNA, 75 bp, Homo sapiens
atgaggagagtgggtcctacctggatgtgcagctccaaggggacgggacgcacattgggatggaagttgaaggtg

SEQ ID NO: 134014 - DNA, 75 bp, Homo sapiens
gtgggtcctacctggatgtgcagctccaaggggacgggacgcacattgggatggaagttgaaggtggaggtggca

SEQ ID NO: 134015 - DNA, 79 bp, Homo sapiens
cctggatgtgcagctccaaggggacgggacgcacattgggatggaagttgaaggtggaggtggcactgcagcccagcca

SEQ ID NO: 134016 - DNA, 77 bp, Homo sapiens
tccaaggggacgggacgcacattgggatggaagttgaaggtggaggtggcactgcagcccagccagtgggccacatc

SEQ ID NO: 134017 - DNA, 78 bp, Homo sapiens
acgggacgcacattgggatggaagttgaaggtggaggtggcactgcagcccagccagtgggccacatccttggcattg

SEQ ID NO: 134018 - DNA, 80 bp, Homo sapiens
acattgggatggaagttgaaggtggaggtggcactgcagcccagccagtgggccacatccttggcattggagagcgaaga

SEQ ID NO: 134019 - DNA, 82 bp, Homo sapiens
aagttgaaggtggaggtggcactgcagcccagccagtgggccacatccttggcattggagagcgaagagctgagtgccacaa

SEQ ID NO: 134020 - DNA, 84 bp, Homo sapiens
aaggtggaggtggcactgcagcccagccagtgggccacatccttggcattggagagcgaagagctgagtgccacaatgcgaatg

SEQ ID NO: 134021 - DNA, 85 bp, Homo sapiens
actgcagcccagccagtgggccacatccttggcattggagagcgaagagctgagtgccacaatgcgaatgggccgctcaatctgg

SEQ ID NO: 134022 - DNA, 85 bp, Homo sapiens
gccagtgggccacatccttggcattggagagcgaagagctgagtgccacaatgcgaatgggccgctcaatctgggaggagatgta

SEQ ID NO: 134023 - DNA, 85 bp, Homo sapiens
cacatccttggcattggagagcgaagagctgagtgccacaatgcgaatgggccgctcaatctgggaggagatgtagcgcattcgg

SEQ ID NO: 134024 - DNA, 88 bp, Homo sapiens
ttggcattggagagcgaagagctgagtgccacaatgcgaatgggccgctcaatctgggaggagatgtagcgcattcgggagcagatca

SEQ ID NO: 134025 - DNA, 85 bp, Homo sapiens
tgagtgccacaatgcgaatgggccgctcaatctgggaggagatgtagcgcattcgggagcagatcacttctaagacaggctggaa

SEQ ID NO: 134026 - DNA, 81 bp, Homo sapiens
acaatgcgaatgggccgctcaatctgggaggagatgtagcgcattcgggagcagatcacttctaagacaggctggaaagag

SEQ ID NO: 134027 - DNA, 78 bp, Homo sapiens
aatgggccgctcaatctgggaggagatgtagcgcattcgggagcagatcacttctaagacaggctggaaagagggagg

SEQ ID NO: 134028 - DNA, 76 bp, Homo sapiens
agggtcactgcaggccaaggctcccatcctctgcctggaggtcccctttgtgaacagcccaacagcctcaaaatga

SEQ ID NO: 134029 - DNA, 74 bp, Homo sapiens
aggccaaggctcccatcctctgcctggaggtcccctttgtgaacagcccaacagcctcaaaatgacctcattct

SEQ ID NO: 134030 - DNA, 74 bp, Homo sapiens
tcccatcctctgcctggaggtcccctttgtgaacagcccaacagcctcaaaatgacctcattcttccttctaac

SEQ ID NO: 134031 - DNA, 76 bp, Homo sapiens
tgcctggaggtcccctttgtgaacagcccaacagcctcaaaatgacctcattcttccttctaactaggagctctca

SEQ ID NO: 134032 - DNA, 75 bp, Homo sapiens
gtcccctttgtgaacagcccaacagcctcaaaatgacctcattcttccttctaactaggagctctcatgtgtttg

SEQ ID NO: 134033 - DNA, 76 bp, Homo sapiens
ttgtgaacagcccaacagcctcaaaatgacctcattcttccttctaactaggagctctcatgtgtttggttctacc

SEQ ID NO: 134034 - DNA, 75 bp, Homo sapiens
aacagcctcaaaatgacctcattcttccttctaactaggagctctcatgtgtttggttctacctcctccacggca

SEQ ID NO: 134035 - DNA, 73 bp, Homo sapiens
aaaatgacctcattcttccttctaactaggagctctcatgtgtttggttctacctcctccacggcagccaacc

SEQ ID NO: 134036 - DNA, 74 bp, Homo sapiens
tcttccttctaactaggagctctcatgtgtttggttctacctcctccacggcagccaacctccactaaacaata

SEQ ID NO: 134037 - DNA, 73 bp, Homo sapiens
ttctaactaggagctctcatgtgtttggttctacctcctccacggcagccaacctccactaaacaatactgtt

SEQ ID NO: 134038 - DNA, 71 bp, Homo sapiens
tctcatgtgtttggttctacctcctccacggcagccaacctccactaaacaatactgttttcctaaagtac

SEQ ID NO: 134039 - DNA, 68 bp, Homo sapiens
tttggttctacctcctccacggcagccaacctccactaaacaatactgttttcctaaagtactaccaa

SEQ ID NO: 134040 - DNA, 66 bp, Homo sapiens
ctcctccacggcagccaacctccactaaacaatactgttttcctaaagtactaccaaaaaagttaa

SEQ ID NO: 134041 - DNA, 66 bp, Homo sapiens
acggcagccaacctccactaaacaatactgttttcctaaagtactaccaaaaaagttaacattgtc

SEQ ID NO: 134042 - DNA, 64 bp, Homo sapiens
caacctccactaaacaatactgttttcctaaagtactaccaaaaaagttaacattgtccctttg

SEQ ID NO: 134043 - DNA, 67 bp, Homo sapiens
caatactgttttcctaaagtactaccaaaaaagttaacattgtccctttggaatagggcagcaggta

SEQ ID NO: 134044 - DNA, 67 bp, Homo sapiens
ttttcctaaagtactaccaaaaaagttaacattgtccctttggaatagggcagcaggtagaatcctc

SEQ ID NO: 134045 - DNA, 68 bp, Homo sapiens
aagtactaccaaaaaagttaacattgtccctttggaatagggcagcaggtagaatcctctggggagaa

SEQ ID NO: 134046 - DNA, 69 bp, Homo sapiens
aaaaagttaacattgtccctttggaatagggcagcaggtagaatcctctggggagaagccccgagcctc

SEQ ID NO: 134047 - DNA, 72 bp, Homo sapiens
tgtccctttggaatagggcagcaggtagaatcctctggggagaagccccgagcctccgtcctcagacccaaa

SEQ ID NO: 134048 - DNA, 72 bp, Homo sapiens
tttggaatagggcagcaggtagaatcctctggggagaagccccgagcctccgtcctcagacccaaacattag

SEQ ID NO: 134049 - DNA, 72 bp, Homo sapiens
agcaggtagaatcctctggggagaagccccgagcctccgtcctcagacccaaacattaggtccaatgccaag

SEQ ID NO: 134050 - DNA, 71 bp, Homo sapiens
aatcctctggggagaagccccgagcctccgtcctcagacccaaacattaggtccaatgccaaggccacttg

SEQ ID NO: 134051 - DNA, 72 bp, Homo sapiens
agaagccccgagcctccgtcctcagacccaaacattaggtccaatgccaaggccacttggtcagtcccagtc

SEQ ID NO: 134052 - DNA, 80 bp, Homo sapiens
tcagacccaaacattaggtccaatgccaaggccacttggtcagtcccagtccctcatctgtgctgcaaggtcacgccata

SEQ ID NO: 134053 - DNA, 75 bp, Homo sapiens
aaggccacttggtcagtcccagtccctcatctgtgctgcaaggtcacgccataccccattctcgcccccgataag

SEQ ID NO: 134054 - DNA, 77 bp, Homo sapiens
ttggtcagtcccagtccctcatctgtgctgcaaggtcacgccataccccattctcgcccccgataaggtggacctca

SEQ ID NO: 134055 - DNA, 76 bp, Homo sapiens
agtccctcatctgtgctgcaaggtcacgccataccccattctcgcccccgataaggtggacctcatccaccacgaa

SEQ ID NO: 134056 - DNA, 76 bp, Homo sapiens
tgtgctgcaaggtcacgccataccccattctcgcccccgataaggtggacctcatccaccacgaagaggttgatgt

SEQ ID NO: 134057 - DNA, 74 bp, Homo sapiens
aaggtcacgccataccccattctcgcccccgataaggtggacctcatccaccacgaagaggttgatgttctgca

SEQ ID NO: 134058 - DNA, 74 bp, Homo sapiens
ataccccattctcgcccccgataaggtggacctcatccaccacgaagaggttgatgttctgcacgttcttgcgc

SEQ ID NO: 134059 - DNA, 78 bp, Homo sapiens
ttctcgcccccgataaggtggacctcatccaccacgaagaggttgatgttctgcacgttcttgcgctgcttccatcgc

SEQ ID NO: 134060 - DNA, 76 bp, Homo sapiens
ataaggtggacctcatccaccacgaagaggttgatgttctgcacgttcttgcgctgcttccatcgccgggaaagta

SEQ ID NO: 134061 - DNA, 76 bp, Homo sapiens
acctcatccaccacgaagaggttgatgttctgcacgttcttgcgctgcttccatcgccgggaaagtatgtcccact

SEQ ID NO: 134062 - DNA, 81 bp, Homo sapiens
ttgatgttctgcacgttcttgcgctgcttccatcgccgggaaagtatgtcccacttctcaggggtgctgatgataatgttc

SEQ ID NO: 134063 - DNA, 77 bp, Homo sapiens
ctgcacgttcttgcgctgcttccatcgccgggaaagtatgtcccacttctcaggggtgctgatgataatgttccctt

SEQ ID NO: 134064 - DNA, 79 bp, Homo sapiens
ttgcgctgcttccatcgccgggaaagtatgtcccacttctcaggggtgctgatgataatgttccctttgcccagcagct

SEQ ID NO: 134065 - DNA, 78 bp, Homo sapiens
tccatcgccgggaaagtatgtcccacttctcaggggtgctgatgataatgttccctttgcccagcagcttcaggtctg

SEQ ID NO: 134066 - DNA, 79 bp, Homo sapiens
aaagtatgtcccacttctcaggggtgctgatgataatgttccctttgcccagcagcttcaggtctgtgctggtctcgcc

SEQ ID NO: 134067 - DNA, 81 bp, Homo sapiens
acttctcaggggtgctgatgataatgttccctttgcccagcagcttcaggtctgtgctggtctcgcctgtcaggagtacca

SEQ ID NO: 134068 - DNA, 82 bp, Homo sapiens
gtgctgatgataatgttccctttgcccagcagcttcaggtctgtgctggtctcgcctgtcaggagtaccaccttcttgttga

SEQ ID NO: 134069 - DNA, 79 bp, Homo sapiens
atgataatgttccctttgcccagcagcttcaggtctgtgctggtctcgcctgtcaggagtaccaccttcttgttgagcc

SEQ ID NO: 134070 - DNA, 79 bp, Homo sapiens
tttgcccagcagcttcaggtctgtgctggtctcgcctgtcaggagtaccaccttcttgttgagcctgtcctggaacttc

SEQ ID NO: 134071 - DNA, 79 bp, Homo sapiens
tctgtgctggtctcgcctgtcaggagtaccaccttcttgttgagcctgtcctggaacttctcgtaccagtccatgtata

SEQ ID NO: 134072 - DNA, 76 bp, Homo sapiens
tggtctcgcctgtcaggagtaccaccttcttgttgagcctgtcctggaacttctcgtaccagtccatgtatacctg

SEQ ID NO: 134073 - DNA, 76 bp, Homo sapiens
ctgtcaggagtaccaccttcttgttgagcctgtcctggaacttctcgtaccagtccatgtatacctggcgggcaga

SEQ ID NO: 134074 - DNA, 74 bp, Homo sapiens
taccaccttcttgttgagcctgtcctggaacttctcgtaccagtccatgtatacctggcgggcagaggagggag

SEQ ID NO: 134075 - DNA, 77 bp, Homo sapiens
tgttgagcctgtcctggaacttctcgtaccagtccatgtatacctggcgggcagaggagggaggcagaacaacacta

SEQ ID NO: 134076 - DNA, 76 bp, Homo sapiens
tcctggaacttctcgtaccagtccatgtatacctggcgggcagaggagggaggcagaacaacactaggccatacca

SEQ ID NO: 134077 - DNA, 78 bp, Homo sapiens
ttctcgtaccagtccatgtatacctggcgggcagaggagggaggcagaacaacactaggccataccaggcatctttca

SEQ ID NO: 134078 - DNA, 78 bp, Homo sapiens
catgtatacctggcgggcagaggagggaggcagaacaacactaggccataccaggcatctttcacttatgtgaggaaa

SEQ ID NO: 134079 - DNA, 75 bp, Homo sapiens
atacctggcgggcagaggagggaggcagaacaacactaggccataccaggcatctttcacttatgtgaggaaaac

SEQ ID NO: 134080 - DNA, 77 bp, Homo sapiens
aggagggaggcagaacaacactaggccataccaggcatctttcacttatgtgaggaaaacctgagatgccaaacaga

SEQ ID NO: 134081 - DNA, 78 bp, Homo sapiens
aggcagaacaacactaggccataccaggcatctttcacttatgtgaggaaaacctgagatgccaaacagacctgttga

SEQ ID NO: 134082 - DNA, 80 bp, Homo sapiens
actaggccataccaggcatctttcacttatgtgaggaaaacctgagatgccaaacagacctgttgacctgcagatctcaa

SEQ ID NO: 134083 - DNA, 79 bp, Homo sapiens
ataccaggcatctttcacttatgtgaggaaaacctgagatgccaaacagacctgttgacctgcagatctcaagctacgt

SEQ ID NO: 134084 - DNA, 79 bp, Homo sapiens
tttcacttatgtgaggaaaacctgagatgccaaacagacctgttgacctgcagatctcaagctacgttctaatcccata

SEQ ID NO: 134085 - DNA, 82 bp, Homo sapiens
tatgtgaggaaaacctgagatgccaaacagacctgttgacctgcagatctcaagctacgttctaatcccatagcagcctcta

SEQ ID NO: 134086 - DNA, 83 bp, Homo sapiens
aaaacctgagatgccaaacagacctgttgacctgcagatctcaagctacgttctaatcccatagcagcctctatgcgatgcga

SEQ ID NO: 134087 - DNA, 81 bp, Homo sapiens
aaacagacctgttgacctgcagatctcaagctacgttctaatcccatagcagcctctatgcgatgcgatggggcagctttt

SEQ ID NO: 134088 - DNA, 80 bp, Homo sapiens
acctgttgacctgcagatctcaagctacgttctaatcccatagcagcctctatgcgatgcgatggggcagctttttcttt

SEQ ID NO: 134089 - DNA, 82 bp, Homo sapiens
atgaaatgcttcttgggaaattcacatgacacagcgccacgtcatacctgctctgccagggcctccatgggggtgatgtaca

SEQ ID NO: 134090 - DNA, 82 bp, Homo sapiens
ttcttgggaaattcacatgacacagcgccacgtcatacctgctctgccagggcctccatgggggtgatgtacacacagcgcc

SEQ ID NO: 134091 - DNA, 81 bp, Homo sapiens
aaattcacatgacacagcgccacgtcatacctgctctgccagggcctccatgggggtgatgtacacacagcgcccctccga

SEQ ID NO: 134092 - DNA, 87 bp, Homo sapiens
tgacacagcgccacgtcatacctgctctgccagggcctccatgggggtgatgtacacacagcgcccctccgagctctgcagcagcat

SEQ ID NO: 134093 - DNA, 87 bp, Homo sapiens
tcatacctgctctgccagggcctccatgggggtgatgtacacacagcgcccctccgagctctgcagcagcattcgcaggatggcaaa

SEQ ID NO: 134094 - DNA, 87 bp, Homo sapiens
tctgccagggcctccatgggggtgatgtacacacagcgcccctccgagctctgcagcagcattcgcaggatggcaaactctgcacaa

SEQ ID NO: 134095 - DNA, 84 bp, Homo sapiens
cctccatgggggtgatgtacacacagcgcccctccgagctctgcagcagcattcgcaggatggcaaactctgcacaaatagtct

SEQ ID NO: 134096 - DNA, 85 bp, Homo sapiens
gggtgatgtacacacagcgcccctccgagctctgcagcagcattcgcaggatggcaaactctgcacaaatagtcttcccgctgcc

SEQ ID NO: 134097 - DNA, 84 bp, Homo sapiens
tgtacacacagcgcccctccgagctctgcagcagcattcgcaggatggcaaactctgcacaaatagtcttcccgctgcccgtgg

SEQ ID NO: 134098 - DNA, 79 bp, Homo sapiens
cgcccctccgagctctgcagcagcattcgcaggatggcaaactctgcacaaatagtcttcccgctgcccgtgggggccc

SEQ ID NO: 134099 - DNA, 78 bp, Homo sapiens
tctgcagcagcattcgcaggatggcaaactctgcacaaatagtcttcccgctgcccgtgggggcccccacaaacacgt

SEQ ID NO: 134100 - DNA, 72 bp, Homo sapiens
attcgcaggatggcaaactctgcacaaatagtcttcccgctgcccgtgggggcccccacaaacacgttgtcg

SEQ ID NO: 134101 - DNA, 73 bp, Homo sapiens
tggcaaactctgcacaaatagtcttcccgctgcccgtgggggcccccacaaacacgttgtcgtcactgttgta

SEQ ID NO: 134102 - DNA, 72 bp, Homo sapiens
aactctgcacaaatagtcttcccgctgcccgtgggggcccccacaaacacgttgtcgtcactgttgtataca

SEQ ID NO: 134103 - DNA, 69 bp, Homo sapiens
aaatagtcttcccgctgcccgtgggggcccccacaaacacgttgtcgtcactgttgtatacagtgttaa

SEQ ID NO: 134104 - DNA, 70 bp, Homo sapiens
tgcccgtgggggcccccacaaacacgttgtcgtcactgttgtatacagtgttaaacactggaaaccaaca

SEQ ID NO: 134105 - DNA, 71 bp, Homo sapiens
gggcccccacaaacacgttgtcgtcactgttgtatacagtgttaaacactggaaaccaacagaaagaagca

SEQ ID NO: 134106 - DNA, 73 bp, Homo sapiens
aaacacgttgtcgtcactgttgtatacagtgttaaacactggaaaccaacagaaagaagcagtgtaagtatca

SEQ ID NO: 134107 - DNA, 74 bp, Homo sapiens
ttgtcgtcactgttgtatacagtgttaaacactggaaaccaacagaaagaagcagtgtaagtatcaagaaggaa

SEQ ID NO: 134108 - DNA, 73 bp, Homo sapiens
tgttgtatacagtgttaaacactggaaaccaacagaaagaagcagtgtaagtatcaagaaggaagaagagacg

SEQ ID NO: 134109 - DNA, 71 bp, Homo sapiens
agtgttaaacactggaaaccaacagaaagaagcagtgtaagtatcaagaaggaagaagagacggactggga

SEQ ID NO: 134110 - DNA, 71 bp, Homo sapiens
tcccggtgacttcaaaagcctccagaggagggatggaaacacttaccctgggtctggatgggattgaagaa

SEQ ID NO: 134111 - DNA, 69 bp, Homo sapiens
ttcaaaagcctccagaggagggatggaaacacttaccctgggtctggatgggattgaagaaaggaaatt

SEQ ID NO: 134112 - DNA, 70 bp, Homo sapiens
tccagaggagggatggaaacacttaccctgggtctggatgggattgaagaaaggaaatttatcttggtaa

SEQ ID NO: 134113 - DNA, 70 bp, Homo sapiens
ggatggaaacacttaccctgggtctggatgggattgaagaaaggaaatttatcttggtaaagactctcaa

SEQ ID NO: 134114 - DNA, 69 bp, Homo sapiens
aaacacttaccctgggtctggatgggattgaagaaaggaaatttatcttggtaaagactctcaaaggca

SEQ ID NO: 134115 - DNA, 72 bp, Homo sapiens
ccctgggtctggatgggattgaagaaaggaaatttatcttggtaaagactctcaaaggcactgtttctcaga

SEQ ID NO: 134116 - DNA, 74 bp, Homo sapiens
atgggattgaagaaaggaaatttatcttggtaaagactctcaaaggcactgtttctcagagcagacacgggcaa

SEQ ID NO: 134117 - DNA, 74 bp, Homo sapiens
aaaggaaatttatcttggtaaagactctcaaaggcactgtttctcagagcagacacgggcaagggctgcaggtc

SEQ ID NO: 134118 - DNA, 74 bp, Homo sapiens
atttatcttggtaaagactctcaaaggcactgtttctcagagcagacacgggcaagggctgcaggtccaaaagt

SEQ ID NO: 134119 - DNA, 74 bp, Homo sapiens
taaagactctcaaaggcactgtttctcagagcagacacgggcaagggctgcaggtccaaaagttcggttggagg

SEQ ID NO: 134120 - DNA, 70 bp, Homo sapiens
aaggcactgtttctcagagcagacacgggcaagggctgcaggtccaaaagttcggttggaggggggtact

SEQ ID NO: 134121 - DNA, 74 bp, Homo sapiens
tctcagagcagacacgggcaagggctgcaggtccaaaagttcggttggaggggggtacttctccggcaagatca

SEQ ID NO: 134122 - DNA, 70 bp, Homo sapiens
agacacgggcaagggctgcaggtccaaaagttcggttggaggggggtacttctccggcaagatcaggtgc

SEQ ID NO: 134123 - DNA, 68 bp, Homo sapiens
aagggctgcaggtccaaaagttcggttggaggggggtacttctccggcaagatcaggtgccggaagga

SEQ ID NO: 134124 - DNA, 69 bp, Homo sapiens
aggtccaaaagttcggttggaggggggtacttctccggcaagatcaggtgccggaaggagacaggcagc

SEQ ID NO: 134125 - DNA, 71 bp, Homo sapiens
aaagttcggttggaggggggtacttctccggcaagatcaggtgccggaaggagacaggcagctgggtctca

SEQ ID NO: 134126 - DNA, 75 bp, Homo sapiens
gggggtacttctccggcaagatcaggtgccggaaggagacaggcagctgggtctcacaagctgccagaaaagaaa

SEQ ID NO: 134127 - DNA, 77 bp, Homo sapiens
tacttctccggcaagatcaggtgccggaaggagacaggcagctgggtctcacaagctgccagaaaagaaacaggaag

SEQ ID NO: 134128 - DNA, 79 bp, Homo sapiens
aagatcaggtgccggaaggagacaggcagctgggtctcacaagctgccagaaaagaaacaggaaggatataagcactgc

SEQ ID NO: 134129 - DNA, 79 bp, Homo sapiens
tgtccttggagggactgttcctggggactctggagaggagacactcacagagccagcggtcagacaccactcggatgaa

SEQ ID NO: 134130 - DNA, 78 bp, Homo sapiens
agggactgttcctggggactctggagaggagacactcacagagccagcggtcagacaccactcggatgaagtactgag

SEQ ID NO: 134131 - DNA, 80 bp, Homo sapiens
tggggactctggagaggagacactcacagagccagcggtcagacaccactcggatgaagtactgagggggcagcggttca

SEQ ID NO: 134132 - DNA, 80 bp, Homo sapiens
tctggagaggagacactcacagagccagcggtcagacaccactcggatgaagtactgagggggcagcggttcaaagacag

SEQ ID NO: 134133 - DNA, 78 bp, Homo sapiens
actcacagagccagcggtcagacaccactcggatgaagtactgagggggcagcggttcaaagacaggcacgaagaatg

SEQ ID NO: 134134 - DNA, 78 bp, Homo sapiens
agagccagcggtcagacaccactcggatgaagtactgagggggcagcggttcaaagacaggcacgaagaatgtaatga

SEQ ID NO: 134135 - DNA, 76 bp, Homo sapiens
agacaccactcggatgaagtactgagggggcagcggttcaaagacaggcacgaagaatgtaatgaggtgctcgtcc

SEQ ID NO: 134136 - DNA, 75 bp, Homo sapiens
ggatgaagtactgagggggcagcggttcaaagacaggcacgaagaatgtaatgaggtgctcgtcctgggcgtact

SEQ ID NO: 134137 - DNA, 76 bp, Homo sapiens
tactgagggggcagcggttcaaagacaggcacgaagaatgtaatgaggtgctcgtcctgggcgtacttggccttga

SEQ ID NO: 134138 - DNA, 74 bp, Homo sapiens
agcggttcaaagacaggcacgaagaatgtaatgaggtgctcgtcctgggcgtacttggccttgaggagaaaata

SEQ ID NO: 134139 - DNA, 76 bp, Homo sapiens
ttcaaagacaggcacgaagaatgtaatgaggtgctcgtcctgggcgtacttggccttgaggagaaaatactcatgg

SEQ ID NO: 134140 - DNA, 77 bp, Homo sapiens
acgaagaatgtaatgaggtgctcgtcctgggcgtacttggccttgaggagaaaatactcatggtgcagaatcacctc

SEQ ID NO: 134141 - DNA, 80 bp, Homo sapiens
atgtaatgaggtgctcgtcctgggcgtacttggccttgaggagaaaatactcatggtgcagaatcacctcgctgtccaca

SEQ ID NO: 134142 - DNA, 79 bp, Homo sapiens
tcgtcctgggcgtacttggccttgaggagaaaatactcatggtgcagaatcacctcgctgtccacatcctccaccagaa

SEQ ID NO: 134143 - DNA, 77 bp, Homo sapiens
cgtacttggccttgaggagaaaatactcatggtgcagaatcacctcgctgtccacatcctccaccagaatccaaaaa

SEQ ID NO: 134144 - DNA, 79 bp, Homo sapiens
ttgaggagaaaatactcatggtgcagaatcacctcgctgtccacatcctccaccagaatccaaaaagcctcggatgaac

SEQ ID NO: 134145 - DNA, 79 bp, Homo sapiens
aaaatactcatggtgcagaatcacctcgctgtccacatcctccaccagaatccaaaaagcctcggatgaaccatgcacc

SEQ ID NO: 134146 - DNA, 81 bp, Homo sapiens
atggtgcagaatcacctcgctgtccacatcctccaccagaatccaaaaagcctcggatgaaccatgcacctgccaacagga

SEQ ID NO: 134147 - DNA, 78 bp, Homo sapiens
aatcacctcgctgtccacatcctccaccagaatccaaaaagcctcggatgaaccatgcacctgccaacaggagcaagg

SEQ ID NO: 134148 - DNA, 74 bp, Homo sapiens
ccacatcctccaccagaatccaaaaagcctcggatgaaccatgcacctgccaacaggagcaagggtaaaaggaa

SEQ ID NO: 134149 - DNA, 76 bp, Homo sapiens
tccaccagaatccaaaaagcctcggatgaaccatgcacctgccaacaggagcaagggtaaaaggaatgtgagtcaa

SEQ ID NO: 134150 - DNA, 82 bp, Homo sapiens
tagactgagcacctccaatccagcacctctgcccagcaaagcctcaccttttcatcccactggaagtctggcgtgatggtca

SEQ ID NO: 134151 - DNA, 79 bp, Homo sapiens
acctccaatccagcacctctgcccagcaaagcctcaccttttcatcccactggaagtctggcgtgatggtcagctccac

SEQ ID NO: 134152 - DNA, 79 bp, Homo sapiens
aatccagcacctctgcccagcaaagcctcaccttttcatcccactggaagtctggcgtgatggtcagctccaccttcag

SEQ ID NO: 134153 - DNA, 78 bp, Homo sapiens
cccagcaaagcctcaccttttcatcccactggaagtctggcgtgatggtcagctccaccttcagggtggagcgtgtga

SEQ ID NO: 134154 - DNA, 77 bp, Homo sapiens
aaagcctcaccttttcatcccactggaagtctggcgtgatggtcagctccaccttcagggtggagcgtgtgataggc

SEQ ID NO: 134155 - DNA, 83 bp, Homo sapiens
ttttcatcccactggaagtctggcgtgatggtcagctccaccttcagggtggagcgtgtgataggctgcaggtgcactgacaa

SEQ ID NO: 134156 - DNA, 81 bp, Homo sapiens
actggaagtctggcgtgatggtcagctccaccttcagggtggagcgtgtgataggctgcaggtgcactgacaactccaact

SEQ ID NO: 134157 - DNA, 82 bp, Homo sapiens
tctggcgtgatggtcagctccaccttcagggtggagcgtgtgataggctgcaggtgcactgacaactccaacttgggaaaca

SEQ ID NO: 134158 - DNA, 79 bp, Homo sapiens
agctccaccttcagggtggagcgtgtgataggctgcaggtgcactgacaactccaacttgggaaacagatggacatatt

SEQ ID NO: 134159 - DNA, 79 bp, Homo sapiens
accttcagggtggagcgtgtgataggctgcaggtgcactgacaactccaacttgggaaacagatggacatatttgtgga

SEQ ID NO: 134160 - DNA, 80 bp, Homo sapiens
gtggagcgtgtgataggctgcaggtgcactgacaactccaacttgggaaacagatggacatatttgtggatggtcttccc

SEQ ID NO: 134161 - DNA, 79 bp, Homo sapiens
ataggctgcaggtgcactgacaactccaacttgggaaacagatggacatatttgtggatggtcttccccatctttggca

SEQ ID NO: 134162 - DNA, 78 bp, Homo sapiens
aggtgcactgacaactccaacttgggaaacagatggacatatttgtggatggtcttccccatctttggcatgcggata

SEQ ID NO: 134163 - DNA, 75 bp, Homo sapiens
acaactccaacttgggaaacagatggacatatttgtggatggtcttccccatctttggcatgcggataagctccc

SEQ ID NO: 134164 - DNA, 75 bp, Homo sapiens
ttgggaaacagatggacatatttgtggatggtcttccccatctttggcatgcggataagctcccctacaaggaaa

SEQ ID NO: 134165 - DNA, 78 bp, Homo sapiens
agatggacatatttgtggatggtcttccccatctttggcatgcggataagctcccctacaaggaaatgagagtactga

SEQ ID NO: 134166 - DNA, 79 bp, Homo sapiens
tatttgtggatggtcttccccatctttggcatgcggataagctcccctacaaggaaatgagagtactgaggctgcagcc

SEQ ID NO: 134167 - DNA, 82 bp, Homo sapiens
agagacacccaggcagtgaggacaagggcgagagcatcccacacaccaatctcattatgattcaggtcgtacagacgctcaa

SEQ ID NO: 134168 - DNA, 79 bp, Homo sapiens
acccaggcagtgaggacaagggcgagagcatcccacacaccaatctcattatgattcaggtcgtacagacgctcaaagg

SEQ ID NO: 134169 - DNA, 76 bp, Homo sapiens
aggacaagggcgagagcatcccacacaccaatctcattatgattcaggtcgtacagacgctcaaaggggaaattct

SEQ ID NO: 134170 - DNA, 78 bp, Homo sapiens
agagcatcccacacaccaatctcattatgattcaggtcgtacagacgctcaaaggggaaattcttcttctcaatcttc

SEQ ID NO: 134171 - DNA, 76 bp, Homo sapiens
acacaccaatctcattatgattcaggtcgtacagacgctcaaaggggaaattcttcttctcaatcttcttcactac

SEQ ID NO: 134172 - DNA, 76 bp, Homo sapiens
aatctcattatgattcaggtcgtacagacgctcaaaggggaaattcttcttctcaatcttcttcactacttcctca

SEQ ID NO: 134173 - DNA, 74 bp, Homo sapiens
tatgattcaggtcgtacagacgctcaaaggggaaattcttcttctcaatcttcttcactacttcctcagggagt

SEQ ID NO: 134174 - DNA, 71 bp, Homo sapiens
tcgtacagacgctcaaaggggaaattcttcttctcaatcttcttcactacttcctcagggagtttccggaa

SEQ ID NO: 134175 - DNA, 70 bp, Homo sapiens
aaaggggaaattcttcttctcaatcttcttcactacttcctcagggagtttccggaactggcgcagagga

SEQ ID NO: 134176 - DNA, 75 bp, Homo sapiens
aaattcttcttctcaatcttcttcactacttcctcagggagtttccggaactggcgcagaggacacatggactgc

SEQ ID NO: 134177 - DNA, 77 bp, Homo sapiens
tcaatcttcttcactacttcctcagggagtttccggaactggcgcagaggacacatggactgccacctatccaggaa

SEQ ID NO: 134178 - DNA, 75 bp, Homo sapiens
ttcttcactacttcctcagggagtttccggaactggcgcagaggacacatggactgccacctatccaggaaggag

SEQ ID NO: 134179 - DNA, 76 bp, Homo sapiens
ttcctcagggagtttccggaactggcgcagaggacacatggactgccacctatccaggaaggaggcaaagctgttg

SEQ ID NO: 134180 - DNA, 74 bp, Homo sapiens
agtttccggaactggcgcagaggacacatggactgccacctatccaggaaggaggcaaagctgttggtcccttc

SEQ ID NO: 134181 - DNA, 80 bp, Homo sapiens
gggacccccactcatggtgaccagcatccagctcactgggtccttacatgcgtttgtcgatcatcttgcagaggttcagg

SEQ ID NO: 134182 - DNA, 83 bp, Homo sapiens
actcatggtgaccagcatccagctcactgggtccttacatgcgtttgtcgatcatcttgcagaggttcagggtcttgtctgta

SEQ ID NO: 134183 - DNA, 83 bp, Homo sapiens
cagcatccagctcactgggtccttacatgcgtttgtcgatcatcttgcagaggttcagggtcttgtctgtaagctgtgcccaa

SEQ ID NO: 134184 - DNA, 79 bp, Homo sapiens
agctcactgggtccttacatgcgtttgtcgatcatcttgcagaggttcagggtcttgtctgtaagctgtgcccaacctc

SEQ ID NO: 134185 - DNA, 79 bp, Homo sapiens
tccttacatgcgtttgtcgatcatcttgcagaggttcagggtcttgtctgtaagctgtgcccaacctcggttcaggaca

SEQ ID NO: 134186 - DNA, 76 bp, Homo sapiens
gtttgtcgatcatcttgcagaggttcagggtcttgtctgtaagctgtgcccaacctcggttcaggacaatttcaaa

SEQ ID NO: 134187 - DNA, 79 bp, Homo sapiens
atcatcttgcagaggttcagggtcttgtctgtaagctgtgcccaacctcggttcaggacaatttcaaatatcgctcgca

SEQ ID NO: 134188 - DNA, 75 bp, Homo sapiens
agaggttcagggtcttgtctgtaagctgtgcccaacctcggttcaggacaatttcaaatatcgctcgcatcaacc

SEQ ID NO: 134189 - DNA, 77 bp, Homo sapiens
tcttgtctgtaagctgtgcccaacctcggttcaggacaatttcaaatatcgctcgcatcaaccggccagccgactaa

SEQ ID NO: 134190 - DNA, 76 bp, Homo sapiens
taagctgtgcccaacctcggttcaggacaatttcaaatatcgctcgcatcaaccggccagccgactaagcaaagaa

SEQ ID NO: 134191 - DNA, 77 bp, Homo sapiens
gtgcccaacctcggttcaggacaatttcaaatatcgctcgcatcaaccggccagccgactaagcaaagaagcagcat

SEQ ID NO: 134192 - DNA, 78 bp, Homo sapiens
ttcaggacaatttcaaatatcgctcgcatcaaccggccagccgactaagcaaagaagcagcattcccactgttaagtc

SEQ ID NO: 134193 - DNA, 84 bp, Homo sapiens
agggattgaactgttcaggccccttctcacagctgccatacaactccgctctcacctgtgtgacatacaccatgtcagccatca

SEQ ID NO: 134194 - DNA, 85 bp, Homo sapiens
aactgttcaggccccttctcacagctgccatacaactccgctctcacctgtgtgacatacaccatgtcagccatcagtgcaaagc

SEQ ID NO: 134195 - DNA, 85 bp, Homo sapiens
cccttctcacagctgccatacaactccgctctcacctgtgtgacatacaccatgtcagccatcagtgcaaagccctccaatttca

SEQ ID NO: 134196 - DNA, 88 bp, Homo sapiens
agctgccatacaactccgctctcacctgtgtgacatacaccatgtcagccatcagtgcaaagccctccaatttcagctgtgagatgaa

SEQ ID NO: 134197 - DNA, 85 bp, Homo sapiens
atacaactccgctctcacctgtgtgacatacaccatgtcagccatcagtgcaaagccctccaatttcagctgtgagatgaaggct

SEQ ID NO: 134198 - DNA, 87 bp, Homo sapiens
tcacctgtgtgacatacaccatgtcagccatcagtgcaaagccctccaatttcagctgtgagatgaaggcttgcagaagaacgttga

SEQ ID NO: 134199 - DNA, 86 bp, Homo sapiens
tgacatacaccatgtcagccatcagtgcaaagccctccaatttcagctgtgagatgaaggcttgcagaagaacgttgatctgtaaa

SEQ ID NO: 134200 - DNA, 83 bp, Homo sapiens
atgtcagccatcagtgcaaagccctccaatttcagctgtgagatgaaggcttgcagaagaacgttgatctgtaaagaagcaaa

SEQ ID NO: 134201 - DNA, 82 bp, Homo sapiens
agccatcagtgcaaagccctccaatttcagctgtgagatgaaggcttgcagaagaacgttgatctgtaaagaagcaaaatca

SEQ ID NO: 134202 - DNA, 80 bp, Homo sapiens
aaagccctccaatttcagctgtgagatgaaggcttgcagaagaacgttgatctgtaaagaagcaaaatcagccagcagga

SEQ ID NO: 134203 - DNA, 83 bp, Homo sapiens
atttcagctgtgagatgaaggcttgcagaagaacgttgatctgtaaagaagcaaaatcagccagcaggagaccaatcactgaa

SEQ ID NO: 134204 - DNA, 74 bp, Homo sapiens
aagattatgaaaaccacttaatcctcatccttatcaaagcaaagaggagaggagctcaccttagcactgggttc

SEQ ID NO: 134205 - DNA, 75 bp, Homo sapiens
aaaaccacttaatcctcatccttatcaaagcaaagaggagaggagctcaccttagcactgggttcctcaatgctc

SEQ ID NO: 134206 - DNA, 77 bp, Homo sapiens
taatcctcatccttatcaaagcaaagaggagaggagctcaccttagcactgggttcctcaatgctctcctttacagg

SEQ ID NO: 134207 - DNA, 76 bp, Homo sapiens
ccttatcaaagcaaagaggagaggagctcaccttagcactgggttcctcaatgctctcctttacagggataggcac

SEQ ID NO: 134208 - DNA, 76 bp, Homo sapiens
aaagaggagaggagctcaccttagcactgggttcctcaatgctctcctttacagggataggcaccctctccagcaa

SEQ ID NO: 134209 - DNA, 79 bp, Homo sapiens
aggagctcaccttagcactgggttcctcaatgctctcctttacagggataggcaccctctccagcaacttctgcagctc

SEQ ID NO: 134210 - DNA, 79 bp, Homo sapiens
ccttagcactgggttcctcaatgctctcctttacagggataggcaccctctccagcaacttctgcagctccagcttctc

SEQ ID NO: 134211 - DNA, 81 bp, Homo sapiens
ttcctcaatgctctcctttacagggataggcaccctctccagcaacttctgcagctccagcttctcctcctgccacaagga

SEQ ID NO: 134212 - DNA, 77 bp, Homo sapiens
ctctcctttacagggataggcaccctctccagcaacttctgcagctccagcttctcctcctgccacaaggaggaaaa

SEQ ID NO: 134213 - DNA, 77 bp, Homo sapiens
ttacagggataggcaccctctccagcaacttctgcagctccagcttctcctcctgccacaaggaggaaaaggtcaag

SEQ ID NO: 134214 - DNA, 74 bp, Homo sapiens
accctctccagcaacttctgcagctccagcttctcctcctgccacaaggaggaaaaggtcaagggaaagccttg

SEQ ID NO: 134215 - DNA, 75 bp, Homo sapiens
agcaacttctgcagctccagcttctcctcctgccacaaggaggaaaaggtcaagggaaagccttgtggccgagga

SEQ ID NO: 134216 - DNA, 83 bp, Homo sapiens
acttggtgagcaccaactccccgccccatcatgctgcataggctcacctctctcactgtgatgttcttgaactcagaggacaa

SEQ ID NO: 134217 - DNA, 82 bp, Homo sapiens
accaactccccgccccatcatgctgcataggctcacctctctcactgtgatgttcttgaactcagaggacaatgagaagacc

SEQ ID NO: 134218 - DNA, 85 bp, Homo sapiens
cgccccatcatgctgcataggctcacctctctcactgtgatgttcttgaactcagaggacaatgagaagaccctgaaaagctcaa

SEQ ID NO: 134219 - DNA, 88 bp, Homo sapiens
atcatgctgcataggctcacctctctcactgtgatgttcttgaactcagaggacaatgagaagaccctgaaaagctcaatctcactca

SEQ ID NO: 134220 - DNA, 81 bp, Homo sapiens
cctctctcactgtgatgttcttgaactcagaggacaatgagaagaccctgaaaagctcaatctcactcagggtgggcttca

SEQ ID NO: 134221 - DNA, 80 bp, Homo sapiens
tgttcttgaactcagaggacaatgagaagaccctgaaaagctcaatctcactcagggtgggcttcagcagctggttgtaa

SEQ ID NO: 134222 - DNA, 82 bp, Homo sapiens
ttgaactcagaggacaatgagaagaccctgaaaagctcaatctcactcagggtgggcttcagcagctggttgtaagtctgca

SEQ ID NO: 134223 - DNA, 82 bp, Homo sapiens
aatgagaagaccctgaaaagctcaatctcactcagggtgggcttcagcagctggttgtaagtctgcactgtatcattggtga

SEQ ID NO: 134224 - DNA, 81 bp, Homo sapiens
accctgaaaagctcaatctcactcagggtgggcttcagcagctggttgtaagtctgcactgtatcattggtgatgtagtag

SEQ ID NO: 134225 - DNA, 85 bp, Homo sapiens
aagctcaatctcactcagggtgggcttcagcagctggttgtaagtctgcactgtatcattggtgatgtagtagtggctggctata

SEQ ID NO: 134226 - DNA, 81 bp, Homo sapiens
ctcagggtgggcttcagcagctggttgtaagtctgcactgtatcattggtgatgtagtagtggctggctatacggcccagt

SEQ ID NO: 134227 - DNA, 84 bp, Homo sapiens
gcttcagcagctggttgtaagtctgcactgtatcattggtgatgtagtagtggctggctatacggcccagttctgtcacctgga

SEQ ID NO: 134228 - DNA, 81 bp, Homo sapiens
agctggttgtaagtctgcactgtatcattggtgatgtagtagtggctggctatacggcccagttctgtcacctggagagaa

SEQ ID NO: 134229 - DNA, 81 bp, Homo sapiens
tgtaagtctgcactgtatcattggtgatgtagtagtggctggctatacggcccagttctgtcacctggagagaaggtagac

SEQ ID NO: 134230 - DNA, 79 bp, Homo sapiens
actgtatcattggtgatgtagtagtggctggctatacggcccagttctgtcacctggagagaaggtagactcaatccag

SEQ ID NO: 134231 - DNA, 69 bp, Homo sapiens
aacaacttttgctgagacctttgcctcaaaaccctcaccccacgcacctggaagttgcccgtcttcttg

SEQ ID NO: 134232 - DNA, 72 bp, Homo sapiens
tttgctgagacctttgcctcaaaaccctcaccccacgcacctggaagttgcccgtcttcttgtcgtacttga

SEQ ID NO: 134233 - DNA, 71 bp, Homo sapiens
tttgcctcaaaaccctcaccccacgcacctggaagttgcccgtcttcttgtcgtacttgaccagattgttc

SEQ ID NO: 134234 - DNA, 70 bp, Homo sapiens
aaaaccctcaccccacgcacctggaagttgcccgtcttcttgtcgtacttgaccagattgttcttgtcca

SEQ ID NO: 134235 - DNA, 78 bp, Homo sapiens
acgcacctggaagttgcccgtcttcttgtcgtacttgaccagattgttcttgtccagcatcagggcagctgtatgaac

SEQ ID NO: 134236 - DNA, 79 bp, Homo sapiens
aagttgcccgtcttcttgtcgtacttgaccagattgttcttgtccagcatcagggcagctgtatgaaccagatctagtc

SEQ ID NO: 134237 - DNA, 82 bp, Homo sapiens
gtcttcttgtcgtacttgaccagattgttcttgtccagcatcagggcagctgtatgaaccagatctagtcggcgctggtcca

SEQ ID NO: 134238 - DNA, 82 bp, Homo sapiens
ttgtcgtacttgaccagattgttcttgtccagcatcagggcagctgtatgaaccagatctagtcggcgctggtccagcaggg

SEQ ID NO: 134239 - DNA, 82 bp, Homo sapiens
accagattgttcttgtccagcatcagggcagctgtatgaaccagatctagtcggcgctggtccagcaggggatctcccttga

SEQ ID NO: 134240 - DNA, 87 bp, Homo sapiens
tcttgtccagcatcagggcagctgtatgaaccagatctagtcggcgctggtccagcaggggatctcccttgaggtcatcatgagaga

SEQ ID NO: 134241 - DNA, 86 bp, Homo sapiens
atcagggcagctgtatgaaccagatctagtcggcgctggtccagcaggggatctcccttgaggtcatcatgagagatgccatagag

SEQ ID NO: 134242 - DNA, 83 bp, Homo sapiens
agctgtatgaaccagatctagtcggcgctggtccagcaggggatctcccttgaggtcatcatgagagatgccatagagggttg

SEQ ID NO: 134243 - DNA, 80 bp, Homo sapiens
aaccagatctagtcggcgctggtccagcaggggatctcccttgaggtcatcatgagagatgccatagagggttggggatc

SEQ ID NO: 134244 - DNA, 84 bp, Homo sapiens
tcggcgctggtccagcaggggatctcccttgaggtcatcatgagagatgccatagagggttggggatcgcagcattcggatata

SEQ ID NO: 134245 - DNA, 83 bp, Homo sapiens
agcaggggatctcccttgaggtcatcatgagagatgccatagagggttggggatcgcagcattcggatatagaggtaggcata

SEQ ID NO: 134246 - DNA, 84 bp, Homo sapiens
atctcccttgaggtcatcatgagagatgccatagagggttggggatcgcagcattcggatatagaggtaggcatagcccagcca

SEQ ID NO: 134247 - DNA, 84 bp, Homo sapiens
ttgaggtcatcatgagagatgccatagagggttggggatcgcagcattcggatatagaggtaggcatagcccagccagttcacc

SEQ ID NO: 134248 - DNA, 81 bp, Homo sapiens
agagatgccatagagggttggggatcgcagcattcggatatagaggtaggcatagcccagccagttcaccgcatcctacaa

SEQ ID NO: 134249 - DNA, 80 bp, Homo sapiens
ccatagagggttggggatcgcagcattcggatatagaggtaggcatagcccagccagttcaccgcatcctacaagacaca

SEQ ID NO: 134250 - DNA, 85 bp, Homo sapiens
ggatcgcagcattcggatatagaggtaggcatagcccagccagttcaccgcatcctacaagacacagctcatggttcttagcatg

SEQ ID NO: 134251 - DNA, 81 bp, Homo sapiens
attcggatatagaggtaggcatagcccagccagttcaccgcatcctacaagacacagctcatggttcttagcatggagaaa

SEQ ID NO: 134252 - DNA, 77 bp, Homo sapiens
gtgtctgcggggaaagcatgaagcacaacaagcagtcctcccctaccttggcattctggacatttcctagcacgatt

SEQ ID NO: 134253 - DNA, 82 bp, Homo sapiens
ggaaagcatgaagcacaacaagcagtcctcccctaccttggcattctggacatttcctagcacgatttctgcattgagcatg

SEQ ID NO: 134254 - DNA, 82 bp, Homo sapiens
atgaagcacaacaagcagtcctcccctaccttggcattctggacatttcctagcacgatttctgcattgagcatgtcaggaa

SEQ ID NO: 134255 - DNA, 79 bp, Homo sapiens
aagcagtcctcccctaccttggcattctggacatttcctagcacgatttctgcattgagcatgtcaggaagctttgaaa

SEQ ID NO: 134256 - DNA, 79 bp, Homo sapiens
ccctaccttggcattctggacatttcctagcacgatttctgcattgagcatgtcaggaagctttgaaaccatctggctt

SEQ ID NO: 134257 - DNA, 82 bp, Homo sapiens
ttggcattctggacatttcctagcacgatttctgcattgagcatgtcaggaagctttgaaaccatctggctttcaataggaa

SEQ ID NO: 134258 - DNA, 79 bp, Homo sapiens
acatttcctagcacgatttctgcattgagcatgtcaggaagctttgaaaccatctggctttcaataggaagttgttgat

SEQ ID NO: 134259 - DNA, 79 bp, Homo sapiens
tttctgcattgagcatgtcaggaagctttgaaaccatctggctttcaataggaagttgttgattgaggagggacaggta

SEQ ID NO: 134260 - DNA, 76 bp, Homo sapiens
agcatgtcaggaagctttgaaaccatctggctttcaataggaagttgttgattgaggagggacaggtagtactgta

SEQ ID NO: 134261 - DNA, 73 bp, Homo sapiens
ggaagctttgaaaccatctggctttcaataggaagttgttgattgaggagggacaggtagtactgtagctccc

SEQ ID NO: 134262 - DNA, 78 bp, Homo sapiens
aaaccatctggctttcaataggaagttgttgattgaggagggacaggtagtactgtagctccccatgagatgtgatga

SEQ ID NO: 134263 - DNA, 79 bp, Homo sapiens
tttcaataggaagttgttgattgaggagggacaggtagtactgtagctccccatgagatgtgatgagtatgccttcacc

SEQ ID NO: 134264 - DNA, 80 bp, Homo sapiens
agttgttgattgaggagggacaggtagtactgtagctccccatgagatgtgatgagtatgccttcacccttggtgtcata

SEQ ID NO: 134265 - DNA, 77 bp, Homo sapiens
aggagggacaggtagtactgtagctccccatgagatgtgatgagtatgccttcacccttggtgtcatactggggtct

SEQ ID NO: 134266 - DNA, 78 bp, Homo sapiens
acaggtagtactgtagctccccatgagatgtgatgagtatgccttcacccttggtgtcatactggggtcttccggcac

SEQ ID NO: 134267 - DNA, 83 bp, Homo sapiens
tagctccccatgagatgtgatgagtatgccttcacccttggtgtcatactggggtcttccggcacgtcccagcatctagatca

SEQ ID NO: 134268 - DNA, 84 bp, Homo sapiens
tgagatgtgatgagtatgccttcacccttggtgtcatactggggtcttccggcacgtcccagcatctagatcagagacagcgaa

SEQ ID NO: 134269 - DNA, 79 bp, Homo sapiens
atgagtatgccttcacccttggtgtcatactggggtcttccggcacgtcccagcatctagatcagagacagcgaaccaa

SEQ ID NO: 134270 - DNA, 81 bp, Homo sapiens
ttcacccttggtgtcatactggggtcttccggcacgtcccagcatctagatcagagacagcgaaccaagaatgctatgtca

SEQ ID NO: 134271 - DNA, 80 bp, Homo sapiens
caaggatactgatccctgctgagaataaactcaaaaggctctgtacctgcagaatgtccagtgctcccagttctgtccaa

SEQ ID NO: 134272 - DNA, 79 bp, Homo sapiens
atactgatccctgctgagaataaactcaaaaggctctgtacctgcagaatgtccagtgctcccagttctgtccaacgcc

SEQ ID NO: 134273 - DNA, 77 bp, Homo sapiens
tgagaataaactcaaaaggctctgtacctgcagaatgtccagtgctcccagttctgtccaacgccccttctctggac

SEQ ID NO: 134274 - DNA, 77 bp, Homo sapiens
taaactcaaaaggctctgtacctgcagaatgtccagtgctcccagttctgtccaacgccccttctctggactgtaca

SEQ ID NO: 134275 - DNA, 78 bp, Homo sapiens
tctgtacctgcagaatgtccagtgctcccagttctgtccaacgccccttctctggactgtacacctgggtgcctttga

SEQ ID NO: 134276 - DNA, 78 bp, Homo sapiens
agaatgtccagtgctcccagttctgtccaacgccccttctctggactgtacacctgggtgcctttgatgatgactgta

SEQ ID NO: 134277 - DNA, 79 bp, Homo sapiens
agtgctcccagttctgtccaacgccccttctctggactgtacacctgggtgcctttgatgatgactgtatgtgcaggga

SEQ ID NO: 134278 - DNA, 79 bp, Homo sapiens
agttctgtccaacgccccttctctggactgtacacctgggtgcctttgatgatgactgtatgtgcagggagattcacac

SEQ ID NO: 134279 - DNA, 78 bp, Homo sapiens
aacgccccttctctggactgtacacctgggtgcctttgatgatgactgtatgtgcagggagattcacaccccaagcta

SEQ ID NO: 134280 - DNA, 82 bp, Homo sapiens
tctggactgtacacctgggtgcctttgatgatgactgtatgtgcagggagattcacaccccaagctagagttgctgtggaaa

SEQ ID NO: 134281 - DNA, 79 bp, Homo sapiens
tacacctgggtgcctttgatgatgactgtatgtgcagggagattcacaccccaagctagagttgctgtggaaactaaaa

SEQ ID NO: 134282 - DNA, 79 bp, Homo sapiens
cctttgatgatgactgtatgtgcagggagattcacaccccaagctagagttgctgtggaaactaaaacctacagaggca

SEQ ID NO: 134283 - DNA, 76 bp, Homo sapiens
atgactgtatgtgcagggagattcacaccccaagctagagttgctgtggaaactaaaacctacagaggcaaaacaa

SEQ ID NO: 134284 - DNA, 74 bp, Homo sapiens
tatgtgcagggagattcacaccccaagctagagttgctgtggaaactaaaacctacagaggcaaaacaaggtaa

SEQ ID NO: 134285 - DNA, 72 bp, Homo sapiens
agattcacaccccaagctagagttgctgtggaaactaaaacctacagaggcaaaacaaggtaatgaggagaa

SEQ ID NO: 134286 - DNA, 76 bp, Homo sapiens
tcttctgaagtatgtcccacctgctcctccaaacgctttgcaccccctcacctgaatatgtttatcagcaaaaaga

SEQ ID NO: 134287 - DNA, 76 bp, Homo sapiens
tatgtcccacctgctcctccaaacgctttgcaccccctcacctgaatatgtttatcagcaaaaagatcctccacga

SEQ ID NO: 134288 - DNA, 74 bp, Homo sapiens
tcctccaaacgctttgcaccccctcacctgaatatgtttatcagcaaaaagatcctccacgagtgttcggtcaa

SEQ ID NO: 134289 - DNA, 71 bp, Homo sapiens
aaacgctttgcaccccctcacctgaatatgtttatcagcaaaaagatcctccacgagtgttcggtcaaccc

SEQ ID NO: 134290 - DNA, 79 bp, Homo sapiens
cctcacctgaatatgtttatcagcaaaaagatcctccacgagtgttcggtcaaccctggtcatgcctgcgtgatgaata

SEQ ID NO: 134291 - DNA, 80 bp, Homo sapiens
atatgtttatcagcaaaaagatcctccacgagtgttcggtcaaccctggtcatgcctgcgtgatgaatagcaaagccata

SEQ ID NO: 134292 - DNA, 80 bp, Homo sapiens
atcagcaaaaagatcctccacgagtgttcggtcaaccctggtcatgcctgcgtgatgaatagcaaagccataaggcagaa

SEQ ID NO: 134293 - DNA, 78 bp, Homo sapiens
aaaagatcctccacgagtgttcggtcaaccctggtcatgcctgcgtgatgaatagcaaagccataaggcagaagatcc

SEQ ID NO: 134294 - DNA, 79 bp, Homo sapiens
acgagtgttcggtcaaccctggtcatgcctgcgtgatgaatagcaaagccataaggcagaagatccttcagctctaggt

SEQ ID NO: 134295 - DNA, 81 bp, Homo sapiens
gtcaaccctggtcatgcctgcgtgatgaatagcaaagccataaggcagaagatccttcagctctaggttctgtggaacaaa

SEQ ID NO: 134296 - DNA, 80 bp, Homo sapiens
tggtcatgcctgcgtgatgaatagcaaagccataaggcagaagatccttcagctctaggttctgtggaacaaagaaccgg

SEQ ID NO: 134297 - DNA, 78 bp, Homo sapiens
ctgcgtgatgaatagcaaagccataaggcagaagatccttcagctctaggttctgtggaacaaagaaccggggatgag

SEQ ID NO: 134298 - DNA, 75 bp, Homo sapiens
atagcaaagccataaggcagaagatccttcagctctaggttctgtggaacaaagaaccggggatgaggcgagcct

SEQ ID NO: 134299 - DNA, 81 bp, Homo sapiens
acagctgccaggtaggaatgagagaacccagctggcccctcctcaccttgcactgctcagcttctgttcgcaggacttctg

SEQ ID NO: 134300 - DNA, 79 bp, Homo sapiens
aggtaggaatgagagaacccagctggcccctcctcaccttgcactgctcagcttctgttcgcaggacttctgtggaggc

SEQ ID NO: 134301 - DNA, 81 bp, Homo sapiens
aatgagagaacccagctggcccctcctcaccttgcactgctcagcttctgttcgcaggacttctgtggaggctgagccctc

SEQ ID NO: 134302 - DNA, 81 bp, Homo sapiens
agctggcccctcctcaccttgcactgctcagcttctgttcgcaggacttctgtggaggctgagccctccctcagaaacaga

SEQ ID NO: 134303 - DNA, 82 bp, Homo sapiens
tcctcaccttgcactgctcagcttctgttcgcaggacttctgtggaggctgagccctccctcagaaacagacccagagtgtc

SEQ ID NO: 134304 - DNA, 79 bp, Homo sapiens
cactgctcagcttctgttcgcaggacttctgtggaggctgagccctccctcagaaacagacccagagtgtccttttcta

SEQ ID NO: 134305 - DNA, 77 bp, Homo sapiens
agcttctgttcgcaggacttctgtggaggctgagccctccctcagaaacagacccagagtgtccttttctaggcaca

SEQ ID NO: 134306 - DNA, 76 bp, Homo sapiens
caggacttctgtggaggctgagccctccctcagaaacagacccagagtgtccttttctaggcacatgtcccggatg

SEQ ID NO: 134307 - DNA, 76 bp, Homo sapiens
ttctgtggaggctgagccctccctcagaaacagacccagagtgtccttttctaggcacatgtcccggatggccctg

SEQ ID NO: 134308 - DNA, 74 bp, Homo sapiens
agccctccctcagaaacagacccagagtgtccttttctaggcacatgtcccggatggccctggctgtctttcca

SEQ ID NO: 134309 - DNA, 75 bp, Homo sapiens
tcagaaacagacccagagtgtccttttctaggcacatgtcccggatggccctggctgtctttccagtctccttcc

SEQ ID NO: 134310 - DNA, 73 bp, Homo sapiens
acagacccagagtgtccttttctaggcacatgtcccggatggccctggctgtctttccagtctccttccggga

SEQ ID NO: 134311 - DNA, 72 bp, Homo sapiens
agtgtccttttctaggcacatgtcccggatggccctggctgtctttccagtctccttccgggagtggacaaa

SEQ ID NO: 134312 - DNA, 75 bp, Homo sapiens
tctaggcacatgtcccggatggccctggctgtctttccagtctccttccgggagtggacaaacaccagcacctaa

SEQ ID NO: 134313 - DNA, 73 bp, Homo sapiens
tgtcccggatggccctggctgtctttccagtctccttccgggagtggacaaacaccagcacctaaggagaagc

SEQ ID NO: 134314 - DNA, 76 bp, Homo sapiens
tggctgtctttccagtctccttccgggagtggacaaacaccagcacctaaggagaagccacagtttgctacagtca

SEQ ID NO: 134315 - DNA, 75 bp, Homo sapiens
tttccagtctccttccgggagtggacaaacaccagcacctaaggagaagccacagtttgctacagtcacgagata

SEQ ID NO: 134316 - DNA, 68 bp, Homo sapiens
aaacattcgaaagaatggggttcaagagtaaccataaaccacgggcaaacctgattttttccagcatg

SEQ ID NO: 134317 - DNA, 68 bp, Homo sapiens
aatggggttcaagagtaaccataaaccacgggcaaacctgattttttccagcatgttccatgattttt

SEQ ID NO: 134318 - DNA, 70 bp, Homo sapiens
aagagtaaccataaaccacgggcaaacctgattttttccagcatgttccatgattttttcatagacgatt

SEQ ID NO: 134319 - DNA, 74 bp, Homo sapiens
aaccataaaccacgggcaaacctgattttttccagcatgttccatgattttttcatagacgatttcattcatga

SEQ ID NO: 134320 - DNA, 79 bp, Homo sapiens
gcaaacctgattttttccagcatgttccatgattttttcatagacgatttcattcatgatctggaaacgcttgatagct

SEQ ID NO: 134321 - DNA, 77 bp, Homo sapiens
ctgattttttccagcatgttccatgattttttcatagacgatttcattcatgatctggaaacgcttgatagcttttt

SEQ ID NO: 134322 - DNA, 80 bp, Homo sapiens
agcatgttccatgattttttcatagacgatttcattcatgatctggaaacgcttgatagcttttttctctgtgataccca

SEQ ID NO: 134323 - DNA, 80 bp, Homo sapiens
tgattttttcatagacgatttcattcatgatctggaaacgcttgatagcttttttctctgtgatacccacatatgtctgt

SEQ ID NO: 134324 - DNA, 81 bp, Homo sapiens
tttcatagacgatttcattcatgatctggaaacgcttgatagcttttttctctgtgatacccacatatgtctgttccagag

SEQ ID NO: 134325 - DNA, 80 bp, Homo sapiens
atttcattcatgatctggaaacgcttgatagcttttttctctgtgatacccacatatgtctgttccagaggcactggacg

SEQ ID NO: 134326 - DNA, 78 bp, Homo sapiens
atctggaaacgcttgatagcttttttctctgtgatacccacatatgtctgttccagaggcactggacggaagctagaa

SEQ ID NO: 134327 - DNA, 78 bp, Homo sapiens
ttgatagcttttttctctgtgatacccacatatgtctgttccagaggcactggacggaagctagaagttcaacagtta

SEQ ID NO: 134328 - DNA, 78 bp, Homo sapiens
tttttctctgtgatacccacatatgtctgttccagaggcactggacggaagctagaagttcaacagttagacaaatga

SEQ ID NO: 134329 - DNA, 79 bp, Homo sapiens
tctgtgatacccacatatgtctgttccagaggcactggacggaagctagaagttcaacagttagacaaatgaggctttg

SEQ ID NO: 134330 - DNA, 72 bp, Homo sapiens
agcaggatggtcaccttggcagaactttgcccagtctttcctgatacctgttgtcaaagtaaaagagaccct

SEQ ID NO: 134331 - DNA, 72 bp, Homo sapiens
atggtcaccttggcagaactttgcccagtctttcctgatacctgttgtcaaagtaaaagagacccttggcag

SEQ ID NO: 134332 - DNA, 70 bp, Homo sapiens
agaactttgcccagtctttcctgatacctgttgtcaaagtaaaagagacccttggcagggtcaacacgta

SEQ ID NO: 134333 - DNA, 71 bp, Homo sapiens
cagtctttcctgatacctgttgtcaaagtaaaagagacccttggcagggtcaacacgtagaaaggtggcta

SEQ ID NO: 134334 - DNA, 73 bp, Homo sapiens
tgatacctgttgtcaaagtaaaagagacccttggcagggtcaacacgtagaaaggtggctacatcttcatagt

SEQ ID NO: 134335 - DNA, 71 bp, Homo sapiens
ttgtcaaagtaaaagagacccttggcagggtcaacacgtagaaaggtggctacatcttcatagttgggtag

SEQ ID NO: 134336 - DNA, 69 bp, Homo sapiens
aagtaaaagagacccttggcagggtcaacacgtagaaaggtggctacatcttcatagttgggtagggtg

SEQ ID NO: 134337 - DNA, 74 bp, Homo sapiens
acccttggcagggtcaacacgtagaaaggtggctacatcttcatagttgggtagggtggcactgagaccaatga

SEQ ID NO: 134338 - DNA, 77 bp, Homo sapiens
tcaacacgtagaaaggtggctacatcttcatagttgggtagggtggcactgagaccaatgagtcggacatcctcttg

SEQ ID NO: 134339 - DNA, 77 bp, Homo sapiens
aaaggtggctacatcttcatagttgggtagggtggcactgagaccaatgagtcggacatcctcttgggtcatctcaa

SEQ ID NO: 134340 - DNA, 79 bp, Homo sapiens
tacatcttcatagttgggtagggtggcactgagaccaatgagtcggacatcctcttgggtcatctcaatgtttcggatg

SEQ ID NO: 134341 - DNA, 77 bp, Homo sapiens
ttcatagttgggtagggtggcactgagaccaatgagtcggacatcctcttgggtcatctcaatgtttcggatggccc

SEQ ID NO: 134342 - DNA, 77 bp, Homo sapiens
gtagggtggcactgagaccaatgagtcggacatcctcttgggtcatctcaatgtttcggatggccctggccactaaa

SEQ ID NO: 134343 - DNA, 77 bp, Homo sapiens
actgagaccaatgagtcggacatcctcttgggtcatctcaatgtttcggatggccctggccactaaagcttctaaga

SEQ ID NO: 134344 - DNA, 75 bp, Homo sapiens
aatgagtcggacatcctcttgggtcatctcaatgtttcggatggccctggccactaaagcttctaagacaggacc

SEQ ID NO: 134345 - DNA, 77 bp, Homo sapiens
ctcttgggtcatctcaatgtttcggatggccctggccactaaagcttctaagacaggacctctgtcatcgtggagaa

SEQ ID NO: 134346 - DNA, 80 bp, Homo sapiens
atctcaatgtttcggatggccctggccactaaagcttctaagacaggacctctgtcatcgtggagaagatgaatctcatc

SEQ ID NO: 134347 - DNA, 78 bp, Homo sapiens
aatgtttcggatggccctggccactaaagcttctaagacaggacctctgtcatcgtggagaagatgaatctcatccta

SEQ ID NO: 134348 - DNA, 77 bp, Homo sapiens
ctaaagcttctaagacaggacctctgtcatcgtggagaagatgaatctcatcctacggaattggaggacagaaatta

SEQ ID NO: 134349 - DNA, 79 bp, Homo sapiens
taagacaggacctctgtcatcgtggagaagatgaatctcatcctacggaattggaggacagaaattacctctagcacta

SEQ ID NO: 134350 - DNA, 79 bp, Homo sapiens
acccgccctgacacaactggactctatattctacgactgctcccaactcaccagaatgatgagccgcaccagctgggtg

SEQ ID NO: 134351 - DNA, 82 bp, Homo sapiens
acaactggactctatattctacgactgctcccaactcaccagaatgatgagccgcaccagctgggtgtaggtgcgctcacca

SEQ ID NO: 134352 - DNA, 81 bp, Homo sapiens
actctatattctacgactgctcccaactcaccagaatgatgagccgcaccagctgggtgtaggtgcgctcaccacccttgc

SEQ ID NO: 134353 - DNA, 83 bp, Homo sapiens
tacgactgctcccaactcaccagaatgatgagccgcaccagctgggtgtaggtgcgctcaccacccttgcgggtgatgatgtc

SEQ ID NO: 134354 - DNA, 80 bp, Homo sapiens
aactcaccagaatgatgagccgcaccagctgggtgtaggtgcgctcaccacccttgcgggtgatgatgtcccacttctcg

SEQ ID NO: 134355 - DNA, 80 bp, Homo sapiens
agaatgatgagccgcaccagctgggtgtaggtgcgctcaccacccttgcgggtgatgatgtcccacttctcgggggtgca

SEQ ID NO: 134356 - DNA, 81 bp, Homo sapiens
gcaccagctgggtgtaggtgcgctcaccacccttgcgggtgatgatgtcccacttctcgggggtgcagacgatgatctgag

SEQ ID NO: 134357 - DNA, 82 bp, Homo sapiens
tgggtgtaggtgcgctcaccacccttgcgggtgatgatgtcccacttctcgggggtgcagacgatgatctgagtggcactga

SEQ ID NO: 134358 - DNA, 82 bp, Homo sapiens
gtgcgctcaccacccttgcgggtgatgatgtcccacttctcgggggtgcagacgatgatctgagtggcactgatctcttctt

SEQ ID NO: 134359 - DNA, 82 bp, Homo sapiens
accacccttgcgggtgatgatgtcccacttctcgggggtgcagacgatgatctgagtggcactgatctcttctttgcacagc

SEQ ID NO: 134360 - DNA, 82 bp, Homo sapiens
cgggtgatgatgtcccacttctcgggggtgcagacgatgatctgagtggcactgatctcttctttgcacagctggtggtccc

SEQ ID NO: 134361 - DNA, 84 bp, Homo sapiens
cacttctcgggggtgcagacgatgatctgagtggcactgatctcttctttgcacagctggtggtccccagtcagttcagcaaca

SEQ ID NO: 134362 - DNA, 87 bp, Homo sapiens
gggtgcagacgatgatctgagtggcactgatctcttctttgcacagctggtggtccccagtcagttcagcaacagtgatgccataag

SEQ ID NO: 134363 - DNA, 87 bp, Homo sapiens
agacgatgatctgagtggcactgatctcttctttgcacagctggtggtccccagtcagttcagcaacagtgatgccataagtggcca

SEQ ID NO: 134364 - DNA, 87 bp, Homo sapiens
tctgagtggcactgatctcttctttgcacagctggtggtccccagtcagttcagcaacagtgatgccataagtggccaggcgctgtg

SEQ ID NO: 134365 - DNA, 81 bp, Homo sapiens
atctcttctttgcacagctggtggtccccagtcagttcagcaacagtgatgccataagtggccaggcgctgtgggaggaaa

SEQ ID NO: 134366 - DNA, 82 bp, Homo sapiens
tttgcacagctggtggtccccagtcagttcagcaacagtgatgccataagtggccaggcgctgtgggaggaaaactacatca

SEQ ID NO: 134367 - DNA, 81 bp, Homo sapiens
tggtccccagtcagttcagcaacagtgatgccataagtggccaggcgctgtgggaggaaaactacatcaggcaggaatgct

SEQ ID NO: 134368 - DNA, 75 bp, Homo sapiens
actttcataggtgcacccagtatcctctgcaggaaagttctactccctcacctttccaaagctgcccaccatctc

SEQ ID NO: 134369 - DNA, 75 bp, Homo sapiens
acccagtatcctctgcaggaaagttctactccctcacctttccaaagctgcccaccatctcctgcaccaaggagc

SEQ ID NO: 134370 - DNA, 77 bp, Homo sapiens
tatcctctgcaggaaagttctactccctcacctttccaaagctgcccaccatctcctgcaccaaggagcgcatgggg

SEQ ID NO: 134371 - DNA, 76 bp, Homo sapiens
aagttctactccctcacctttccaaagctgcccaccatctcctgcaccaaggagcgcatgggggcaatgtagataa

SEQ ID NO: 134372 - DNA, 80 bp, Homo sapiens
cctcacctttccaaagctgcccaccatctcctgcaccaaggagcgcatgggggcaatgtagataatcttgaagtcatcca

SEQ ID NO: 134373 - DNA, 82 bp, Homo sapiens
tttccaaagctgcccaccatctcctgcaccaaggagcgcatgggggcaatgtagataatcttgaagtcatccacattgatgg

SEQ ID NO: 134374 - DNA, 82 bp, Homo sapiens
ccaccatctcctgcaccaaggagcgcatgggggcaatgtagataatcttgaagtcatccacattgatggtgccgtccatgtt

SEQ ID NO: 134375 - DNA, 82 bp, Homo sapiens
tcctgcaccaaggagcgcatgggggcaatgtagataatcttgaagtcatccacattgatggtgccgtccatgtttatgtgtt

SEQ ID NO: 134376 - DNA, 79 bp, Homo sapiens
aaggagcgcatgggggcaatgtagataatcttgaagtcatccacattgatggtgccgtccatgtttatgtgtttcccaa

SEQ ID NO: 134377 - DNA, 84 bp, Homo sapiens
gggcaatgtagataatcttgaagtcatccacattgatggtgccgtccatgtttatgtgtttcccaatctctcggagcatgcaca

SEQ ID NO: 134378 - DNA, 84 bp, Homo sapiens
atgtagataatcttgaagtcatccacattgatggtgccgtccatgtttatgtgtttcccaatctctcggagcatgcacatcagg

SEQ ID NO: 134379 - DNA, 83 bp, Homo sapiens
tcttgaagtcatccacattgatggtgccgtccatgtttatgtgtttcccaatctctcggagcatgcacatcagggccacgttg

SEQ ID NO: 134380 - DNA, 80 bp, Homo sapiens
atccacattgatggtgccgtccatgtttatgtgtttcccaatctctcggagcatgcacatcagggccacgttggtcttcc

SEQ ID NO: 134381 - DNA, 78 bp, Homo sapiens
atggtgccgtccatgtttatgtgtttcccaatctctcggagcatgcacatcagggccacgttggtcttcccagcaccc

SEQ ID NO: 134382 - DNA, 77 bp, Homo sapiens
tttatgtgtttcccaatctctcggagcatgcacatcagggccacgttggtcttcccagcaccctacgggagaggtca

SEQ ID NO: 134383 - DNA, 76 bp, Homo sapiens
gtgtttcccaatctctcggagcatgcacatcagggccacgttggtcttcccagcaccctacgggagaggtcaggga

SEQ ID NO: 134384 - DNA, 79 bp, Homo sapiens
tctcggagcatgcacatcagggccacgttggtcttcccagcaccctacgggagaggtcagggatgagaacgcctattca

SEQ ID NO: 134385 - DNA, 81 bp, Homo sapiens
aaactccacaccatattctacaagaaaacagcaggcagggtggcgcttacagtaggagcacacagcagcagattctcatcc

SEQ ID NO: 134386 - DNA, 81 bp, Homo sapiens
accatattctacaagaaaacagcaggcagggtggcgcttacagtaggagcacacagcagcagattctcatccgtctcaagg

SEQ ID NO: 134387 - DNA, 82 bp, Homo sapiens
aagaaaacagcaggcagggtggcgcttacagtaggagcacacagcagcagattctcatccgtctcaagggcagcacggtaga

SEQ ID NO: 134388 - DNA, 83 bp, Homo sapiens
aggcagggtggcgcttacagtaggagcacacagcagcagattctcatccgtctcaagggcagcacggtagagcttactctgga

SEQ ID NO: 134389 - DNA, 84 bp, Homo sapiens
gcttacagtaggagcacacagcagcagattctcatccgtctcaagggcagcacggtagagcttactctggatccgattcagtgt

SEQ ID NO: 134390 - DNA, 83 bp, Homo sapiens
agtaggagcacacagcagcagattctcatccgtctcaagggcagcacggtagagcttactctggatccgattcagtgttttga

SEQ ID NO: 134391 - DNA, 80 bp, Homo sapiens
agcagcagattctcatccgtctcaagggcagcacggtagagcttactctggatccgattcagtgttttgaagccctcaaa

SEQ ID NO: 134392 - DNA, 76 bp, Homo sapiens
agattctcatccgtctcaagggcagcacggtagagcttactctggatccgattcagtgttttgaagccctcaaacc

SEQ ID NO: 134393 - DNA, 74 bp, Homo sapiens
ccgtctcaagggcagcacggtagagcttactctggatccgattcagtgttttgaagccctcaaacccagcctgg

SEQ ID NO: 134394 - DNA, 75 bp, Homo sapiens
cacggtagagcttactctggatccgattcagtgttttgaagccctcaaacccagcctgggcatactttggcagct

SEQ ID NO: 134395 - DNA, 76 bp, Homo sapiens
tagagcttactctggatccgattcagtgttttgaagccctcaaacccagcctgggcatactttggcagcttttcca

SEQ ID NO: 134396 - DNA, 75 bp, Homo sapiens
tggatccgattcagtgttttgaagccctcaaacccagcctgggcatactttggcagcttttccactggaagcagt

SEQ ID NO: 134397 - DNA, 74 bp, Homo sapiens
agtgttttgaagccctcaaacccagcctgggcatactttggcagcttttccactggaagcagttgctagaagaa

SEQ ID NO: 134398 - DNA, 74 bp, Homo sapiens
ttgaagccctcaaacccagcctgggcatactttggcagcttttccactggaagcagttgctagaagaaaagaag

SEQ ID NO: 134399 - DNA, 78 bp, Homo sapiens
acccagcctgggcatactttggcagcttttccactggaagcagttgctagaagaaaagaagtgccatcaatatcatgt

SEQ ID NO: 134400 - DNA, 79 bp, Homo sapiens
aggtgaactgagcagagaactgaagaaagcaattcacttacttcttctgagccaaagggcttgggcttcagagcaggca

SEQ ID NO: 134401 - DNA, 80 bp, Homo sapiens
agaactgaagaaagcaattcacttacttcttctgagccaaagggcttgggcttcagagcaggcacatgcacctcttcata

SEQ ID NO: 134402 - DNA, 79 bp, Homo sapiens
agaaagcaattcacttacttcttctgagccaaagggcttgggcttcagagcaggcacatgcacctcttcatagccctta

SEQ ID NO: 134403 - DNA, 79 bp, Homo sapiens
aattcacttacttcttctgagccaaagggcttgggcttcagagcaggcacatgcacctcttcatagcccttacgctggc

SEQ ID NO: 134404 - DNA, 82 bp, Homo sapiens
ttctgagccaaagggcttgggcttcagagcaggcacatgcacctcttcatagcccttacgctggcgacggaaggatccatca

SEQ ID NO: 134405 - DNA, 79 bp, Homo sapiens
ccaaagggcttgggcttcagagcaggcacatgcacctcttcatagcccttacgctggcgacggaaggatccatcaggaa

SEQ ID NO: 134406 - DNA, 82 bp, Homo sapiens
cttcagagcaggcacatgcacctcttcatagcccttacgctggcgacggaaggatccatcaggaagctgacagcgtttattg

SEQ ID NO: 134407 - DNA, 80 bp, Homo sapiens
aggcacatgcacctcttcatagcccttacgctggcgacggaaggatccatcaggaagctgacagcgtttattggccataa

SEQ ID NO: 134408 - DNA, 78 bp, Homo sapiens
atgcacctcttcatagcccttacgctggcgacggaaggatccatcaggaagctgacagcgtttattggccataaagtg

SEQ ID NO: 134409 - DNA, 75 bp, Homo sapiens
atagcccttacgctggcgacggaaggatccatcaggaagctgacagcgtttattggccataaagtggctcccttg

SEQ ID NO: 134410 - DNA, 74 bp, Homo sapiens
tacgctggcgacggaaggatccatcaggaagctgacagcgtttattggccataaagtggctcccttgggtaaaa

SEQ ID NO: 134411 - DNA, 70 bp, Homo sapiens
acggaaggatccatcaggaagctgacagcgtttattggccataaagtggctcccttgggtaaaaaccagg

SEQ ID NO: 134412 - DNA, 70 bp, Homo sapiens
aggaagctgacagcgtttattggccataaagtggctcccttgggtaaaaaccaggtcctccaagtccaga

SEQ ID NO: 134413 - DNA, 68 bp, Homo sapiens
acagcgtttattggccataaagtggctcccttgggtaaaaaccaggtcctccaagtccagaacctgcc

SEQ ID NO: 134414 - DNA, 69 bp, Homo sapiens
tttattggccataaagtggctcccttgggtaaaaaccaggtcctccaagtccagaacctgccgtggagc

SEQ ID NO: 134415 - DNA, 69 bp, Homo sapiens
ataaagtggctcccttgggtaaaaaccaggtcctccaagtccagaacctgccgtggagccagtgcctgg

SEQ ID NO: 134416 - DNA, 71 bp, Homo sapiens
ttgggtaaaaaccaggtcctccaagtccagaacctgccgtggagccagtgcctgggaatgtgaaagacaaa

SEQ ID NO: 134417 - DNA, 71 bp, Homo sapiens
aaaaaccaggtcctccaagtccagaacctgccgtggagccagtgcctgggaatgtgaaagacaaaaacaca

SEQ ID NO: 134418 - DNA, 73 bp, Homo sapiens
caagtgagttttccatccatcaaggcctgggaaataaatcgccctggatcctacctctccaccctggtcgaga

SEQ ID NO: 134419 - DNA, 73 bp, Homo sapiens
tttccatccatcaaggcctgggaaataaatcgccctggatcctacctctccaccctggtcgagatccatggtt

SEQ ID NO: 134420 - DNA, 74 bp, Homo sapiens
atcaaggcctgggaaataaatcgccctggatcctacctctccaccctggtcgagatccatggtttccagatctg

SEQ ID NO: 134421 - DNA, 76 bp, Homo sapiens
gaaataaatcgccctggatcctacctctccaccctggtcgagatccatggtttccagatctgtgtccattcgagac

SEQ ID NO: 134422 - DNA, 78 bp, Homo sapiens
aaatcgccctggatcctacctctccaccctggtcgagatccatggtttccagatctgtgtccattcgagactgacgca

SEQ ID NO: 134423 - DNA, 79 bp, Homo sapiens
atcctacctctccaccctggtcgagatccatggtttccagatctgtgtccattcgagactgacgcactcgctctctccg

SEQ ID NO: 134424 - DNA, 76 bp, Homo sapiens
accctggtcgagatccatggtttccagatctgtgtccattcgagactgacgcactcgctctctccgggacctttcc

SEQ ID NO: 134425 - DNA, 78 bp, Homo sapiens
agatccatggtttccagatctgtgtccattcgagactgacgcactcgctctctccgggacctttcctcctgtagtgga

SEQ ID NO: 134426 - DNA, 77 bp, Homo sapiens
tttccagatctgtgtccattcgagactgacgcactcgctctctccgggacctttcctcctgtagtggacaaagataa

SEQ ID NO: 134427 - DNA, 75 bp, Homo sapiens
agatctgtgtccattcgagactgacgcactcgctctctccgggacctttcctcctgtagtggacaaagataaaaa

SEQ ID NO: 134428 - DNA, 72 bp, Homo sapiens
attcgagactgacgcactcgctctctccgggacctttcctcctgtagtggacaaagataaaaatcacaaaaa

SEQ ID NO: 134429 - DNA, 74 bp, Homo sapiens
caccgttagctcagaaatcagacagataaaccaacccagtccttactcggatcagatcctccttctcggtttca

SEQ ID NO: 134430 - DNA, 77 bp, Homo sapiens
tcagaaatcagacagataaaccaacccagtccttactcggatcagatcctccttctcggtttcatgaagctggtaga

SEQ ID NO: 134431 - DNA, 73 bp, Homo sapiens
gacagataaaccaacccagtccttactcggatcagatcctccttctcggtttcatgaagctggtagaggaact

SEQ ID NO: 134432 - DNA, 73 bp, Homo sapiens
taaaccaacccagtccttactcggatcagatcctccttctcggtttcatgaagctggtagaggaacttggata

SEQ ID NO: 134433 - DNA, 76 bp, Homo sapiens
agtccttactcggatcagatcctccttctcggtttcatgaagctggtagaggaacttggatagctctgggtcagct

SEQ ID NO: 134434 - DNA, 78 bp, Homo sapiens
atcagatcctccttctcggtttcatgaagctggtagaggaacttggatagctctgggtcagcttccatctttcccata

SEQ ID NO: 134435 - DNA, 75 bp, Homo sapiens
tccttctcggtttcatgaagctggtagaggaacttggatagctctgggtcagcttccatctttcccataatcctt

SEQ ID NO: 134436 - DNA, 73 bp, Homo sapiens
ggtttcatgaagctggtagaggaacttggatagctctgggtcagcttccatctttcccataatcctttccttt

SEQ ID NO: 134437 - DNA, 73 bp, Homo sapiens
ctggtagaggaacttggatagctctgggtcagcttccatctttcccataatcctttccttttcagcttcactt

SEQ ID NO: 134438 - DNA, 75 bp, Homo sapiens
aggaacttggatagctctgggtcagcttccatctttcccataatcctttccttttcagcttcactttgtgcactg

SEQ ID NO: 134439 - DNA, 77 bp, Homo sapiens
atagctctgggtcagcttccatctttcccataatcctttccttttcagcttcactttgtgcactggccagcaaggta

SEQ ID NO: 134440 - DNA, 74 bp, Homo sapiens
agcttccatctttcccataatcctttccttttcagcttcactttgtgcactggccagcaaggtacagtataaaa

SEQ ID NO: 134441 - DNA, 72 bp, Homo sapiens
atctttcccataatcctttccttttcagcttcactttgtgcactggccagcaaggtacagtataaaactacc

SEQ ID NO: 134442 - DNA, 71 bp, Homo sapiens
aatcctttccttttcagcttcactttgtgcactggccagcaaggtacagtataaaactacccacaacaaaa

SEQ ID NO: 134443 - DNA, 71 bp, Homo sapiens
ccttttcagcttcactttgtgcactggccagcaaggtacagtataaaactacccacaacaaaaggaacaaa

SEQ ID NO: 134444 - DNA, 72 bp, Homo sapiens
ttcactttgtgcactggccagcaaggtacagtataaaactacccacaacaaaaggaacaaaggaagtgagga

SEQ ID NO: 134445 - DNA, 85 bp, Homo sapiens
cacacatatgtactcactctgcaggaagaccccaccatatactcactcatcatcctgtgctgccgcaacactttaatgaaatcaa

SEQ ID NO: 134446 - DNA, 82 bp, Homo sapiens
atatgtactcactctgcaggaagaccccaccatatactcactcatcatcctgtgctgccgcaacactttaatgaaatcaaag

SEQ ID NO: 134447 - DNA, 80 bp, Homo sapiens
tgcaggaagaccccaccatatactcactcatcatcctgtgctgccgcaacactttaatgaaatcaaaggtgttgaaacca

SEQ ID NO: 134448 - DNA, 80 bp, Homo sapiens
cccaccatatactcactcatcatcctgtgctgccgcaacactttaatgaaatcaaaggtgttgaaaccaagcagcagaac

SEQ ID NO: 134449 - DNA, 82 bp, Homo sapiens
tatactcactcatcatcctgtgctgccgcaacactttaatgaaatcaaaggtgttgaaaccaagcagcagaaccagctgatt

SEQ ID NO: 134450 - DNA, 80 bp, Homo sapiens
atcatcctgtgctgccgcaacactttaatgaaatcaaaggtgttgaaaccaagcagcagaaccagctgattttcacattc

SEQ ID NO: 134451 - DNA, 79 bp, Homo sapiens
tgccgcaacactttaatgaaatcaaaggtgttgaaaccaagcagcagaaccagctgattttcacattcccgatcatcac

SEQ ID NO: 134452 - DNA, 77 bp, Homo sapiens
aacactttaatgaaatcaaaggtgttgaaaccaagcagcagaaccagctgattttcacattcccgatcatcactggc

SEQ ID NO: 134453 - DNA, 83 bp, Homo sapiens
atgaaatcaaaggtgttgaaaccaagcagcagaaccagctgattttcacattcccgatcatcactggccgtctgcagagagca

SEQ ID NO: 134454 - DNA, 82 bp, Homo sapiens
ttgaaaccaagcagcagaaccagctgattttcacattcccgatcatcactggccgtctgcagagagcaggtaacaccaccat

SEQ ID NO: 134455 - DNA, 81 bp, Homo sapiens
accaagcagcagaaccagctgattttcacattcccgatcatcactggccgtctgcagagagcaggtaacaccaccattaag

SEQ ID NO: 134456 - DNA, 79 bp, Homo sapiens
atgtgctaagatacactaaatatacaactattgtcatcttggccataccttcaaaatctccaatacttcatctgccttc

SEQ ID NO: 134457 - DNA, 78 bp, Homo sapiens
aagatacactaaatatacaactattgtcatcttggccataccttcaaaatctccaatacttcatctgccttcttctgc

SEQ ID NO: 134458 - DNA, 85 bp, Homo sapiens
tatacaactattgtcatcttggccataccttcaaaatctccaatacttcatctgccttcttctgcgacacgatggcatcatcata

SEQ ID NO: 134459 - DNA, 84 bp, Homo sapiens
tattgtcatcttggccataccttcaaaatctccaatacttcatctgccttcttctgcgacacgatggcatcatcatagaaacga

SEQ ID NO: 134460 - DNA, 84 bp, Homo sapiens
ttggccataccttcaaaatctccaatacttcatctgccttcttctgcgacacgatggcatcatcatagaaacgactgagctgcc

SEQ ID NO: 134461 - DNA, 86 bp, Homo sapiens
ttcaaaatctccaatacttcatctgccttcttctgcgacacgatggcatcatcatagaaacgactgagctgccgctgcagccaaaa

SEQ ID NO: 134462 - DNA, 88 bp, Homo sapiens
aatacttcatctgccttcttctgcgacacgatggcatcatcatagaaacgactgagctgccgctgcagccaaaatgcatcaatatccc

SEQ ID NO: 134463 - DNA, 88 bp, Homo sapiens
tgccttcttctgcgacacgatggcatcatcatagaaacgactgagctgccgctgcagccaaaatgcatcaatatcccgagggtgcaaa

SEQ ID NO: 134464 - DNA, 87 bp, Homo sapiens
tcttctgcgacacgatggcatcatcatagaaacgactgagctgccgctgcagccaaaatgcatcaatatcccgagggtgcaaatcct

SEQ ID NO: 134465 - DNA, 84 bp, Homo sapiens
atggcatcatcatagaaacgactgagctgccgctgcagccaaaatgcatcaatatcccgagggtgcaaatccttcttcttggaa

SEQ ID NO: 134466 - DNA, 83 bp, Homo sapiens
atcatagaaacgactgagctgccgctgcagccaaaatgcatcaatatcccgagggtgcaaatccttcttcttggaactcatca

SEQ ID NO: 134467 - DNA, 81 bp, Homo sapiens
aacgactgagctgccgctgcagccaaaatgcatcaatatcccgagggtgcaaatccttcttcttggaactcatcagttcac

SEQ ID NO: 134468 - DNA, 82 bp, Homo sapiens
gctgcagccaaaatgcatcaatatcccgagggtgcaaatccttcttcttggaactcatcagttcacctgaggctacgagcta

SEQ ID NO: 134469 - DNA, 77 bp, Homo sapiens
aaatgcatcaatatcccgagggtgcaaatccttcttcttggaactcatcagttcacctgaggctacgagctataaaa

SEQ ID NO: 134470 - DNA, 75 bp, Homo sapiens
atcaatatcccgagggtgcaaatccttcttcttggaactcatcagttcacctgaggctacgagctataaaagtaa

SEQ ID NO: 134471 - DNA, 74 bp, Homo sapiens
agggtgcaaatccttcttcttggaactcatcagttcacctgaggctacgagctataaaagtaaccaggcattta

SEQ ID NO: 134472 - DNA, 75 bp, Homo sapiens
aaatccttcttcttggaactcatcagttcacctgaggctacgagctataaaagtaaccaggcatttagctcacca

SEQ ID NO: 134473 - DNA, 77 bp, Homo sapiens
taacacccagaagtaaccttgtagcaatgaggaagagcaaactgaacttacattagccgagagggtgcagcgcacga

SEQ ID NO: 134474 - DNA, 77 bp, Homo sapiens
aagtaaccttgtagcaatgaggaagagcaaactgaacttacattagccgagagggtgcagcgcacgacagcctcgtc

SEQ ID NO: 134475 - DNA, 81 bp, Homo sapiens
aatgaggaagagcaaactgaacttacattagccgagagggtgcagcgcacgacagcctcgtccccttccatgtcatcatca

SEQ ID NO: 134476 - DNA, 82 bp, Homo sapiens
agcaaactgaacttacattagccgagagggtgcagcgcacgacagcctcgtccccttccatgtcatcatcagatgcctcttc

SEQ ID NO: 134477 - DNA, 82 bp, Homo sapiens
actgaacttacattagccgagagggtgcagcgcacgacagcctcgtccccttccatgtcatcatcagatgcctcttctcgaa

SEQ ID NO: 134478 - DNA, 81 bp, Homo sapiens
tagccgagagggtgcagcgcacgacagcctcgtccccttccatgtcatcatcagatgcctcttctcgaacctccccgtata

SEQ ID NO: 134479 - DNA, 82 bp, Homo sapiens
ggtgcagcgcacgacagcctcgtccccttccatgtcatcatcagatgcctcttctcgaacctccccgtatacgtcttcatca

SEQ ID NO: 134480 - DNA, 77 bp, Homo sapiens
acgacagcctcgtccccttccatgtcatcatcagatgcctcttctcgaacctccccgtatacgtcttcatcaccttc

SEQ ID NO: 134481 - DNA, 77 bp, Homo sapiens
tcgtccccttccatgtcatcatcagatgcctcttctcgaacctccccgtatacgtcttcatcaccttcctgtggaaa

SEQ ID NO: 134482 - DNA, 78 bp, Homo sapiens
tgtcatcatcagatgcctcttctcgaacctccccgtatacgtcttcatcaccttcctgtggaaatgaccccaactcaa

SEQ ID NO: 134483 - DNA, 74 bp, Homo sapiens
agatgcctcttctcgaacctccccgtatacgtcttcatcaccttcctgtggaaatgaccccaactcaaccatga

SEQ ID NO: 134484 - DNA, 74 bp, Homo sapiens
ctcttctcgaacctccccgtatacgtcttcatcaccttcctgtggaaatgaccccaactcaaccatgatctgga

SEQ ID NO: 134485 - DNA, 68 bp, Homo sapiens
ttacactagaaggggtccctttaccttaatcaacgtcaaaaacaagaatggactgggtatgtttatca

SEQ ID NO: 134486 - DNA, 74 bp, Homo sapiens
tccctttaccttaatcaacgtcaaaaacaagaatggactgggtatgtttatcactcacctcctcatcagactca

SEQ ID NO: 134487 - DNA, 76 bp, Homo sapiens
ttaccttaatcaacgtcaaaaacaagaatggactgggtatgtttatcactcacctcctcatcagactcaaactgca

SEQ ID NO: 134488 - DNA, 81 bp, Homo sapiens
tcaaaaacaagaatggactgggtatgtttatcactcacctcctcatcagactcaaactgcacattcacaccgtatgtctca

SEQ ID NO: 134489 - DNA, 82 bp, Homo sapiens
acaagaatggactgggtatgtttatcactcacctcctcatcagactcaaactgcacattcacaccgtatgtctcatcaatgt

SEQ ID NO: 134490 - DNA, 84 bp, Homo sapiens
actgggtatgtttatcactcacctcctcatcagactcaaactgcacattcacaccgtatgtctcatcaatgttgtcatctgaaa

SEQ ID NO: 134491 - DNA, 86 bp, Homo sapiens
ttatcactcacctcctcatcagactcaaactgcacattcacaccgtatgtctcatcaatgttgtcatctgaaacaatgaaggatta

SEQ ID NO: 134492 - DNA, 82 bp, Homo sapiens
acctcctcatcagactcaaactgcacattcacaccgtatgtctcatcaatgttgtcatctgaaacaatgaaggattagaaaa

SEQ ID NO: 134493 - DNA, 80 bp, Homo sapiens
agactcaaactgcacattcacaccgtatgtctcatcaatgttgtcatctgaaacaatgaaggattagaaaaagagggcag

SEQ ID NO: 134494 - DNA, 80 bp, Homo sapiens
acattcacaccgtatgtctcatcaatgttgtcatctgaaacaatgaaggattagaaaaagagggcagtgaatggctagta

SEQ ID NO: 134495 - DNA, 77 bp, Homo sapiens
acaccgtatgtctcatcaatgttgtcatctgaaacaatgaaggattagaaaaagagggcagtgaatggctagtaaaa

SEQ ID NO: 134496 - DNA, 78 bp, Homo sapiens
tcaacaacaaccaatgaacatgatcagaacataaagcgcgcacttacccatattttggatttccttatctccaccata

SEQ ID NO: 134497 - DNA, 79 bp, Homo sapiens
caatgaacatgatcagaacataaagcgcgcacttacccatattttggatttccttatctccaccatagtctgtgatctt

SEQ ID NO: 134498 - DNA, 76 bp, Homo sapiens
aacatgatcagaacataaagcgcgcacttacccatattttggatttccttatctccaccatagtctgtgatctttt

SEQ ID NO: 134499 - DNA, 73 bp, Homo sapiens
aacataaagcgcgcacttacccatattttggatttccttatctccaccatagtctgtgatctttttgcccagg

SEQ ID NO: 134500 - DNA, 74 bp, Homo sapiens
acttacccatattttggatttccttatctccaccatagtctgtgatctttttgcccaggttcactagcacatgg

SEQ ID NO: 134501 - DNA, 78 bp, Homo sapiens
atattttggatttccttatctccaccatagtctgtgatctttttgcccaggttcactagcacatggtatctggtatca

SEQ ID NO: 134502 - DNA, 79 bp, Homo sapiens
atttccttatctccaccatagtctgtgatctttttgcccaggttcactagcacatggtatctggtatcatctgtttgac

SEQ ID NO: 134503 - DNA, 83 bp, Homo sapiens
tccaccatagtctgtgatctttttgcccaggttcactagcacatggtatctggtatcatctgtttgacccagcagcaggtcaa

SEQ ID NO: 134504 - DNA, 82 bp, Homo sapiens
tctgtgatctttttgcccaggttcactagcacatggtatctggtatcatctgtttgacccagcagcaggtcaatctcctttc

SEQ ID NO: 134505 - DNA, 78 bp, Homo sapiens
tttttgcccaggttcactagcacatggtatctggtatcatctgtttgacccagcagcaggtcaatctcctttcgcctt

SEQ ID NO: 134506 - DNA, 78 bp, Homo sapiens
aggttcactagcacatggtatctggtatcatctgtttgacccagcagcaggtcaatctcctttcgcctttccttgtcc

SEQ ID NO: 134507 - DNA, 77 bp, Homo sapiens
atggtatctggtatcatctgtttgacccagcagcaggtcaatctcctttcgcctttccttgtcccgcagcttttcat

SEQ ID NO: 134508 - DNA, 76 bp, Homo sapiens
atctggtatcatctgtttgacccagcagcaggtcaatctcctttcgcctttccttgtcccgcagcttttcattctt

SEQ ID NO: 134509 - DNA, 75 bp, Homo sapiens
tttgacccagcagcaggtcaatctcctttcgcctttccttgtcccgcagcttttcattctttagaacagctagaa

SEQ ID NO: 134510 - DNA, 77 bp, Homo sapiens
agcagcaggtcaatctcctttcgcctttccttgtcccgcagcttttcattctttagaacagctagaacttcatcagc

SEQ ID NO: 134511 - DNA, 75 bp, Homo sapiens
ggtcaatctcctttcgcctttccttgtcccgcagcttttcattctttagaacagctagaacttcatcagctgccc

SEQ ID NO: 134512 - DNA, 75 bp, Homo sapiens
tttcgcctttccttgtcccgcagcttttcattctttagaacagctagaacttcatcagctgccccacaaaggata

SEQ ID NO: 134513 - DNA, 78 bp, Homo sapiens
cttgtcccgcagcttttcattctttagaacagctagaacttcatcagctgccccacaaaggatatcacgtggctggtg

SEQ ID NO: 134514 - DNA, 77 bp, Homo sapiens
ttttcattctttagaacagctagaacttcatcagctgccccacaaaggatatcacgtggctggtggcaagaaacaac

SEQ ID NO: 134515 - DNA, 76 bp, Homo sapiens
attctttagaacagctagaacttcatcagctgccccacaaaggatatcacgtggctggtggcaagaaacaaccaac

SEQ ID NO: 134516 - DNA, 78 bp, Homo sapiens
acagctagaacttcatcagctgccccacaaaggatatcacgtggctggtggcaagaaacaaccaaccaatattgagaa

SEQ ID NO: 134517 - DNA, 78 bp, Homo sapiens
aaaatgaaataaagacctaatatatatttcacaatatcacactcacctggtccccaagagcagcctggatgaagctga

SEQ ID NO: 134518 - DNA, 79 bp, Homo sapiens
aaataaagacctaatatatatttcacaatatcacactcacctggtccccaagagcagcctggatgaagctgagtagcac

SEQ ID NO: 134519 - DNA, 82 bp, Homo sapiens
taatatatatttcacaatatcacactcacctggtccccaagagcagcctggatgaagctgagtagcacctcataggtctccc

SEQ ID NO: 134520 - DNA, 80 bp, Homo sapiens
acaatatcacactcacctggtccccaagagcagcctggatgaagctgagtagcacctcataggtctcccgagtctcttta

SEQ ID NO: 134521 - DNA, 76 bp, Homo sapiens
acactcacctggtccccaagagcagcctggatgaagctgagtagcacctcataggtctcccgagtctctttagttt

SEQ ID NO: 134522 - DNA, 79 bp, Homo sapiens
tccccaagagcagcctggatgaagctgagtagcacctcataggtctcccgagtctctttagttttgggcttgtagatga

SEQ ID NO: 134523 - DNA, 80 bp, Homo sapiens
aagagcagcctggatgaagctgagtagcacctcataggtctcccgagtctctttagttttgggcttgtagatgatgccca

SEQ ID NO: 134524 - DNA, 82 bp, Homo sapiens
atgaagctgagtagcacctcataggtctcccgagtctctttagttttgggcttgtagatgatgcccaccatctcatcaatgc

SEQ ID NO: 134525 - DNA, 78 bp, Homo sapiens
agtagcacctcataggtctcccgagtctctttagttttgggcttgtagatgatgcccaccatctcatcaatgccctcc

SEQ ID NO: 134526 - DNA, 80 bp, Homo sapiens
taggtctcccgagtctctttagttttgggcttgtagatgatgcccaccatctcatcaatgccctccgacagcagagtata

SEQ ID NO: 134527 - DNA, 79 bp, Homo sapiens
agtctctttagttttgggcttgtagatgatgcccaccatctcatcaatgccctccgacagcagagtataacccttcatc

SEQ ID NO: 134528 - DNA, 80 bp, Homo sapiens
tttagttttgggcttgtagatgatgcccaccatctcatcaatgccctccgacagcagagtataacccttcatcttgttga

SEQ ID NO: 134529 - DNA, 87 bp, Homo sapiens
ttgtagatgatgcccaccatctcatcaatgccctccgacagcagagtataacccttcatcttgttgatgtcatgccggtcctcatca

SEQ ID NO: 134530 - DNA, 83 bp, Homo sapiens
atgcccaccatctcatcaatgccctccgacagcagagtataacccttcatcttgttgatgtcatgccggtcctcatcacgctt

SEQ ID NO: 134531 - DNA, 82 bp, Homo sapiens
tcatcaatgccctccgacagcagagtataacccttcatcttgttgatgtcatgccggtcctcatcacgctttcttcgcctaa

SEQ ID NO: 134532 - DNA, 79 bp, Homo sapiens
aatgccctccgacagcagagtataacccttcatcttgttgatgtcatgccggtcctcatcacgctttcttcgcctaatg

SEQ ID NO: 134533 - DNA, 83 bp, Homo sapiens
agcagagtataacccttcatcttgttgatgtcatgccggtcctcatcacgctttcttcgcctaatggacatgcaatgtgatat

SEQ ID NO: 134534 - DNA, 85 bp, Homo sapiens
tataacccttcatcttgttgatgtcatgccggtcctcatcacgctttcttcgcctaatggacatgcaatgtgatattgaatggca

SEQ ID NO: 134535 - DNA, 83 bp, Homo sapiens
atcttgttgatgtcatgccggtcctcatcacgctttcttcgcctaatggacatgcaatgtgatattgaatggcagaacctttc

SEQ ID NO: 134536 - DNA, 75 bp, Homo sapiens
aagagactttggatctgaaggaaaaaatagtatccccttggcactcacttggctcttctttcctcctgcatctgc

SEQ ID NO: 134537 - DNA, 74 bp, Homo sapiens
tttggatctgaaggaaaaaatagtatccccttggcactcacttggctcttctttcctcctgcatctgcggtttg

SEQ ID NO: 134538 - DNA, 72 bp, Homo sapiens
aaaaatagtatccccttggcactcacttggctcttctttcctcctgcatctgcggtttggtccgttgagcct

SEQ ID NO: 134539 - DNA, 76 bp, Homo sapiens
tagtatccccttggcactcacttggctcttctttcctcctgcatctgcggtttggtccgttgagccttgtctccca

SEQ ID NO: 134540 - DNA, 74 bp, Homo sapiens
actcacttggctcttctttcctcctgcatctgcggtttggtccgttgagccttgtctcccatacgggtgccctc

SEQ ID NO: 134541 - DNA, 75 bp, Homo sapiens
ttggctcttctttcctcctgcatctgcggtttggtccgttgagccttgtctcccatacgggtgccctccagcttc

SEQ ID NO: 134542 - DNA, 73 bp, Homo sapiens
tttcctcctgcatctgcggtttggtccgttgagccttgtctcccatacgggtgccctccagcttcccaacaag

SEQ ID NO: 134543 - DNA, 72 bp, Homo sapiens
atctgcggtttggtccgttgagccttgtctcccatacgggtgccctccagcttcccaacaagggacagcacc

SEQ ID NO: 134544 - DNA, 73 bp, Homo sapiens
tttggtccgttgagccttgtctcccatacgggtgccctccagcttcccaacaagggacagcacctctcctgtg

SEQ ID NO: 134545 - DNA, 72 bp, Homo sapiens
agccttgtctcccatacgggtgccctccagcttcccaacaagggacagcacctctcctgtgggttcatcccg

SEQ ID NO: 134546 - DNA, 69 bp, Homo sapiens
atacgggtgccctccagcttcccaacaagggacagcacctctcctgtgggttcatcccggcgggtccgg

SEQ ID NO: 134547 - DNA, 72 bp, Homo sapiens
cctccagcttcccaacaagggacagcacctctcctgtgggttcatcccggcgggtccggtcaatgagagaac

SEQ ID NO: 134548 - DNA, 72 bp, Homo sapiens
ttcccaacaagggacagcacctctcctgtgggttcatcccggcgggtccggtcaatgagagaacggtcagct

SEQ ID NO: 134549 - DNA, 77 bp, Homo sapiens
gacagcacctctcctgtgggttcatcccggcgggtccggtcaatgagagaacggtcagcttggagcacaagattcga

SEQ ID NO: 134550 - DNA, 76 bp, Homo sapiens
tctcctgtgggttcatcccggcgggtccggtcaatgagagaacggtcagcttggagcacaagattcgagttctgaa

SEQ ID NO: 134551 - DNA, 74 bp, Homo sapiens
gtgggttcatcccggcgggtccggtcaatgagagaacggtcagcttggagcacaagattcgagttctgaaaaga

SEQ ID NO: 134552 - DNA, 75 bp, Homo sapiens
cgggtccggtcaatgagagaacggtcagcttggagcacaagattcgagttctgaaaagatcaaaacattattgaa

SEQ ID NO: 134553 - DNA, 80 bp, Homo sapiens
ggtcaatgagagaacggtcagcttggagcacaagattcgagttctgaaaagatcaaaacattattgaagctttgacatga

SEQ ID NO: 134554 - DNA, 73 bp, Homo sapiens
ccattggactcctgagcctggaatccttccccaagaccaaacgcaccgccttgtactcgtattgcagactacg

SEQ ID NO: 134555 - DNA, 72 bp, Homo sapiens
tcctgagcctggaatccttccccaagaccaaacgcaccgccttgtactcgtattgcagactacgggcggtta

SEQ ID NO: 134556 - DNA, 72 bp, Homo sapiens
gaatccttccccaagaccaaacgcaccgccttgtactcgtattgcagactacgggcggttacatccgccatg

SEQ ID NO: 134557 - DNA, 75 bp, Homo sapiens
ccaagaccaaacgcaccgccttgtactcgtattgcagactacgggcggttacatccgccatggccgcggctgctc

SEQ ID NO: 134558 - DNA, 74 bp, Homo sapiens
accaaacgcaccgccttgtactcgtattgcagactacgggcggttacatccgccatggccgcggctgctcggag

SEQ ID NO: 134559 - DNA, 76 bp, Homo sapiens
ccttgtactcgtattgcagactacgggcggttacatccgccatggccgcggctgctcggaggcttcagaccaccac

SEQ ID NO: 134560 - DNA, 77 bp, Homo sapiens
tcgtattgcagactacgggcggttacatccgccatggccgcggctgctcggaggcttcagaccaccacgcctcccta

SEQ ID NO: 134561 - DNA, 74 bp, Homo sapiens
agactacgggcggttacatccgccatggccgcggctgctcggaggcttcagaccaccacgcctccctaccgcaa

SEQ ID NO: 134562 - DNA, 79 bp, Homo sapiens
ttacatccgccatggccgcggctgctcggaggcttcagaccaccacgcctccctaccgcaagctgcaaacggccgcaga

SEQ ID NO: 134563 - DNA, 79 bp, Homo sapiens
atggccgcggctgctcggaggcttcagaccaccacgcctccctaccgcaagctgcaaacggccgcagatctctgctccc

SEQ ID NO: 134564 - DNA, 79 bp, Homo sapiens
tgctcggaggcttcagaccaccacgcctccctaccgcaagctgcaaacggccgcagatctctgctcccgccgcgccgga

SEQ ID NO: 134565 - DNA, 76 bp, Homo sapiens
aggcttcagaccaccacgcctccctaccgcaagctgcaaacggccgcagatctctgctcccgccgcgccggaacga

SEQ ID NO: 134566 - DNA, 75 bp, Homo sapiens
accacgcctccctaccgcaagctgcaaacggccgcagatctctgctcccgccgcgccggaacgacgcaggaaaga

SEQ ID NO: 134567 - DNA, 76 bp, Homo sapiens
cctccctaccgcaagctgcaaacggccgcagatctctgctcccgccgcgccggaacgacgcaggaaagacgcactg

SEQ ID NO: 134568 - DNA, 74 bp, Homo sapiens
aagctgcaaacggccgcagatctctgctcccgccgcgccggaacgacgcaggaaagacgcactggggaaggaaa

SEQ ID NO: 134569 - DNA, 71 bp, Homo sapiens
aacggccgcagatctctgctcccgccgcgccggaacgacgcaggaaagacgcactggggaaggaaaagaaa

SEQ ID NO: 134570 - DNA, 68 bp, Homo sapiens
atctctgctcccgccgcgccggaacgacgcaggaaagacgcactggggaaggaaaagaaacgggttcc

SEQ ID NO: 134571 - DNA, 65 bp, Homo sapiens
ccgcgccggaacgacgcaggaaagacgcactggggaaggaaaagaaacgggttcccttccgcttc

SEQ ID NO: 134572 - DNA, 64 bp, Homo sapiens
ggaacgacgcaggaaagacgcactggggaaggaaaagaaacgggttcccttccgcttccgggtc

SEQ ID NO: 134573 - DNA, 63 bp, Homo sapiens
aaagacgcactggggaaggaaaagaaacgggttcccttccgcttccgggtcgcgccccagaag

SEQ ID NO: 134574 - DNA, 68 bp, Homo sapiens
ctagtccctccccttcttctttattgccctgagttatctccctattcccataactctaatcacttttt

SEQ ID NO: 134575 - DNA, 74 bp, Homo sapiens
tcttctttattgccctgagttatctccctattcccataactctaatcacttttttcatgttctccttgagtgaa

SEQ ID NO: 134576 - DNA, 75 bp, Homo sapiens
tttattgccctgagttatctccctattcccataactctaatcacttttttcatgttctccttgagtgaaggatga

SEQ ID NO: 134577 - DNA, 74 bp, Homo sapiens
ccctattcccataactctaatcacttttttcatgttctccttgagtgaaggatgaggaaattgaaagcagagta

SEQ ID NO: 134578 - DNA, 75 bp, Homo sapiens
taactctaatcacttttttcatgttctccttgagtgaaggatgaggaaattgaaagcagagtatgcaccttttat

SEQ ID NO: 134579 - DNA, 78 bp, Homo sapiens
atgttctccttgagtgaaggatgaggaaattgaaagcagagtatgcaccttttattaggagattcaaactgcatccta

SEQ ID NO: 134580 - DNA, 79 bp, Homo sapiens
tgaaggatgaggaaattgaaagcagagtatgcaccttttattaggagattcaaactgcatcctactggattagcctcaa

SEQ ID NO: 134581 - DNA, 75 bp, Homo sapiens
aggaaattgaaagcagagtatgcaccttttattaggagattcaaactgcatcctactggattagcctcaaaagtc

SEQ ID NO: 134582 - DNA, 74 bp, Homo sapiens
aaagcagagtatgcaccttttattaggagattcaaactgcatcctactggattagcctcaaaagtcctaaaata

SEQ ID NO: 134583 - DNA, 73 bp, Homo sapiens
agtatgcaccttttattaggagattcaaactgcatcctactggattagcctcaaaagtcctaaaatacaaaga

SEQ ID NO: 134584 - DNA, 76 bp, Homo sapiens
ttttattaggagattcaaactgcatcctactggattagcctcaaaagtcctaaaatacaaagacatccatctgaca

SEQ ID NO: 134585 - DNA, 78 bp, Homo sapiens
agattcaaactgcatcctactggattagcctcaaaagtcctaaaatacaaagacatccatctgacagatcactgaggg

SEQ ID NO: 134586 - DNA, 75 bp, Homo sapiens
tcctactggattagcctcaaaagtcctaaaatacaaagacatccatctgacagatcactgaggggaggacttgtt

SEQ ID NO: 134587 - DNA, 73 bp, Homo sapiens
attagcctcaaaagtcctaaaatacaaagacatccatctgacagatcactgaggggaggacttgtttttctgt

SEQ ID NO: 134588 - DNA, 71 bp, Homo sapiens
aaaagtcctaaaatacaaagacatccatctgacagatcactgaggggaggacttgtttttctgttttagaa

SEQ ID NO: 134589 - DNA, 73 bp, Homo sapiens
tacaaagacatccatctgacagatcactgaggggaggacttgtttttctgttttagaatagtttccgattaaa

SEQ ID NO: 134590 - DNA, 70 bp, Homo sapiens
tccatctgacagatcactgaggggaggacttgtttttctgttttagaatagtttccgattaaacttttta

SEQ ID NO: 134591 - DNA, 69 bp, Homo sapiens
cagatcactgaggggaggacttgtttttctgttttagaatagtttccgattaaactttttagctcaaga

SEQ ID NO: 134592 - DNA, 66 bp, Homo sapiens
actgaggggaggacttgtttttctgttttagaatagtttccgattaaactttttagctcaagaaga

SEQ ID NO: 134593 - DNA, 66 bp, Homo sapiens
tgtttttctgttttagaatagtttccgattaaactttttagctcaagaagaaaagaagctagttat

SEQ ID NO: 134594 - DNA, 67 bp, Homo sapiens
ttttagaatagtttccgattaaactttttagctcaagaagaaaagaagctagttatttctcacccag

SEQ ID NO: 134595 - DNA, 69 bp, Homo sapiens
gaatagtttccgattaaactttttagctcaagaagaaaagaagctagttatttctcacccaggagtgga

SEQ ID NO: 134596 - DNA, 68 bp, Homo sapiens
cgattaaactttttagctcaagaagaaaagaagctagttatttctcacccaggagtggatttgtggtt

SEQ ID NO: 134597 - DNA, 73 bp, Homo sapiens
tttagctcaagaagaaaagaagctagttatttctcacccaggagtggatttgtggtttggcttcaccatggct

SEQ ID NO: 134598 - DNA, 72 bp, Homo sapiens
agaagaaaagaagctagttatttctcacccaggagtggatttgtggtttggcttcaccatggcttcctgccg

SEQ ID NO: 134599 - DNA, 72 bp, Homo sapiens
agttatttctcacccaggagtggatttgtggtttggcttcaccatggcttcctgccgtgcctggaaccttag

SEQ ID NO: 134600 - DNA, 74 bp, Homo sapiens
tttctcacccaggagtggatttgtggtttggcttcaccatggcttcctgccgtgcctggaaccttagggtgctg

SEQ ID NO: 134601 - DNA, 77 bp, Homo sapiens
tggatttgtggtttggcttcaccatggcttcctgccgtgcctggaaccttagggtgctggtggctgtcgtgtgtgga

SEQ ID NO: 134602 - DNA, 78 bp, Homo sapiens
tgtggtttggcttcaccatggcttcctgccgtgcctggaaccttagggtgctggtggctgtcgtgtgtggactactga

SEQ ID NO: 134603 - DNA, 79 bp, Homo sapiens
ttcaccatggcttcctgccgtgcctggaaccttagggtgctggtggctgtcgtgtgtggactactgactggcatcattt

SEQ ID NO: 134604 - DNA, 83 bp, Homo sapiens
ttagggtgctggtggctgtcgtgtgtggactactgactggcatcattttgggactgggcatctggaggattgtgatcaggatc

SEQ ID NO: 134605 - DNA, 82 bp, Homo sapiens
tggctgtcgtgtgtggactactgactggcatcattttgggactgggcatctggaggattgtgatcaggatccaaagaggtaa

SEQ ID NO: 134606 - DNA, 81 bp, Homo sapiens
tcgtgtgtggactactgactggcatcattttgggactgggcatctggaggattgtgatcaggatccaaagaggtaatgttg

SEQ ID NO: 134607 - DNA, 81 bp, Homo sapiens
tactgactggcatcattttgggactgggcatctggaggattgtgatcaggatccaaagaggtaatgttgtcctgctatgtt

SEQ ID NO: 134608 - DNA, 79 bp, Homo sapiens
atcattttgggactgggcatctggaggattgtgatcaggatccaaagaggtaatgttgtcctgctatgtttaactcaga

SEQ ID NO: 134609 - DNA, 78 bp, Homo sapiens
actgggcatctggaggattgtgatcaggatccaaagaggtaatgttgtcctgctatgtttaactcagagtaagagaag

SEQ ID NO: 134610 - DNA, 77 bp, Homo sapiens
atctggaggattgtgatcaggatccaaagaggtaatgttgtcctgctatgtttaactcagagtaagagaaggtatgg

SEQ ID NO: 134611 - DNA, 76 bp, Homo sapiens
attgtgatcaggatccaaagaggtaatgttgtcctgctatgtttaactcagagtaagagaaggtatgggacctctg

SEQ ID NO: 134612 - DNA, 74 bp, Homo sapiens
aggatccaaagaggtaatgttgtcctgctatgtttaactcagagtaagagaaggtatgggacctctgtccctgc

SEQ ID NO: 134613 - DNA, 77 bp, Homo sapiens
taatgttgtcctgctatgtttaactcagagtaagagaaggtatgggacctctgtccctgccacctggtgcacaagta

SEQ ID NO: 134614 - DNA, 76 bp, Homo sapiens
tgctatgtttaactcagagtaagagaaggtatgggacctctgtccctgccacctggtgcacaagtactgggaggta

SEQ ID NO: 134615 - DNA, 72 bp, Homo sapiens
tttaactcagagtaagagaaggtatgggacctctgtccctgccacctggtgcacaagtactgggaggtacct

SEQ ID NO: 134616 - DNA, 74 bp, Homo sapiens
agtaagagaaggtatgggacctctgtccctgccacctggtgcacaagtactgggaggtaccttgtccagtctga

SEQ ID NO: 134617 - DNA, 77 bp, Homo sapiens
tgtccctgccacctggtgcacaagtactgggaggtaccttgtccagtctgaggcattccaccaaggtgccatttatg

SEQ ID NO: 134618 - DNA, 73 bp, Homo sapiens
acaagtactgggaggtaccttgtccagtctgaggcattccaccaaggtgccatttatgggatataaaagacca

SEQ ID NO: 134619 - DNA, 75 bp, Homo sapiens
accttgtccagtctgaggcattccaccaaggtgccatttatgggatataaaagaccaagtcagttaagcctagca

SEQ ID NO: 134620 - DNA, 75 bp, Homo sapiens
aggcattccaccaaggtgccatttatgggatataaaagaccaagtcagttaagcctagcagatggttgaatagaa

SEQ ID NO: 134621 - DNA, 75 bp, Homo sapiens
ttccaccaaggtgccatttatgggatataaaagaccaagtcagttaagcctagcagatggttgaatagaaatgaa

SEQ ID NO: 134622 - DNA, 75 bp, Homo sapiens
atttatgggatataaaagaccaagtcagttaagcctagcagatggttgaatagaaatgaataggtgtgggtgtga

SEQ ID NO: 134623 - DNA, 75 bp, Homo sapiens
atataaaagaccaagtcagttaagcctagcagatggttgaatagaaatgaataggtgtgggtgtgagtgggcagg

SEQ ID NO: 134624 - DNA, 74 bp, Homo sapiens
aagaccaagtcagttaagcctagcagatggttgaatagaaatgaataggtgtgggtgtgagtgggcagggggaa

SEQ ID NO: 134625 - DNA, 75 bp, Homo sapiens
gatggttgaatagaaatgaataggtgtgggtgtgagtgggcagggggaagagtgacataattgaattggcctctt

SEQ ID NO: 134626 - DNA, 75 bp, Homo sapiens
atagaaatgaataggtgtgggtgtgagtgggcagggggaagagtgacataattgaattggcctctttatgctctt

SEQ ID NO: 134627 - DNA, 73 bp, Homo sapiens
aataggtgtgggtgtgagtgggcagggggaagagtgacataattgaattggcctctttatgctcttttaactc

SEQ ID NO: 134628 - DNA, 76 bp, Homo sapiens
tgtgagtgggcagggggaagagtgacataattgaattggcctctttatgctcttttaactccagactgaattggta

SEQ ID NO: 134629 - DNA, 74 bp, Homo sapiens
cagggggaagagtgacataattgaattggcctctttatgctcttttaactccagactgaattggtagaagagta

SEQ ID NO: 134630 - DNA, 74 bp, Homo sapiens
ggaagagtgacataattgaattggcctctttatgctcttttaactccagactgaattggtagaagagtaataat

SEQ ID NO: 134631 - DNA, 72 bp, Homo sapiens
cataattgaattggcctctttatgctcttttaactccagactgaattggtagaagagtaataattaaaacga

SEQ ID NO: 134632 - DNA, 71 bp, Homo sapiens
ggcctctttatgctcttttaactccagactgaattggtagaagagtaataattaaaacgattagtaacaca

SEQ ID NO: 134633 - DNA, 70 bp, Homo sapiens
gctcttttaactccagactgaattggtagaagagtaataattaaaacgattagtaacacacatttaggtc

SEQ ID NO: 134634 - DNA, 70 bp, Homo sapiens
aactccagactgaattggtagaagagtaataattaaaacgattagtaacacacatttaggtctgtttggc

SEQ ID NO: 134635 - DNA, 70 bp, Homo sapiens
ctgaattggtagaagagtaataattaaaacgattagtaacacacatttaggtctgtttggctaaattcag

SEQ ID NO: 134636 - DNA, 69 bp, Homo sapiens
taaaacgattagtaacacacatttaggtctgtttggctaaattcaggaaagggtaaatcgttatgaaca

SEQ ID NO: 134637 - DNA, 75 bp, Homo sapiens
tttaggtctgtttggctaaattcaggaaagggtaaatcgttatgaacaaggacacacacatgcatcaaacacata

SEQ ID NO: 134638 - DNA, 79 bp, Homo sapiens
acatacacacacatgcataacacacatacaatcaaacatacacagaatggaatttcattttaagagagaagttaaagaa

SEQ ID NO: 134639 - DNA, 79 bp, Homo sapiens
cacatgcataacacacatacaatcaaacatacacagaatggaatttcattttaagagagaagttaaagaaactcatcac

SEQ ID NO: 134640 - DNA, 74 bp, Homo sapiens
cacacatacaatcaaacatacacagaatggaatttcattttaagagagaagttaaagaaactcatcactaaggt

SEQ ID NO: 134641 - DNA, 71 bp, Homo sapiens
caatcaaacatacacagaatggaatttcattttaagagagaagttaaagaaactcatcactaaggtttaag

SEQ ID NO: 134642 - DNA, 74 bp, Homo sapiens
cacagaatggaatttcattttaagagagaagttaaagaaactcatcactaaggtttaagtgaaatgatctcatg

SEQ ID NO: 134643 - DNA, 73 bp, Homo sapiens
ggaatttcattttaagagagaagttaaagaaactcatcactaaggtttaagtgaaatgatctcatggtttgca

SEQ ID NO: 134644 - DNA, 74 bp, Homo sapiens
taagagagaagttaaagaaactcatcactaaggtttaagtgaaatgatctcatggtttgcatacaaatttccca

SEQ ID NO: 134645 - DNA, 73 bp, Homo sapiens
gttaaagaaactcatcactaaggtttaagtgaaatgatctcatggtttgcatacaaatttcccactttccaga

SEQ ID NO: 134646 - DNA, 74 bp, Homo sapiens
aaactcatcactaaggtttaagtgaaatgatctcatggtttgcatacaaatttcccactttccagatgtaggaa

SEQ ID NO: 134647 - DNA, 65 bp, Homo sapiens
cccactttccagatgtaggaaactaatcaaaaatttaaaaaccatttttaaatgactttcctgat

SEQ ID NO: 134648 - DNA, 65 bp, Homo sapiens
ggaaactaatcaaaaatttaaaaaccatttttaaatgactttcctgattattcaacgaacatttg

SEQ ID NO: 134649 - DNA, 65 bp, Homo sapiens
atcaaaaatttaaaaaccatttttaaatgactttcctgattattcaacgaacatttgttagtccc

SEQ ID NO: 134650 - DNA, 69 bp, Homo sapiens
aaaaaccatttttaaatgactttcctgattattcaacgaacatttgttagtcccccgctgtgtgccaga

SEQ ID NO: 134651 - DNA, 73 bp, Homo sapiens
tttaaatgactttcctgattattcaacgaacatttgttagtcccccgctgtgtgccagagctggcctggaaaa

SEQ ID NO: 134652 - DNA, 73 bp, Homo sapiens
tttcctgattattcaacgaacatttgttagtcccccgctgtgtgccagagctggcctggaaaaggaggacgtg

SEQ ID NO: 134653 - DNA, 72 bp, Homo sapiens
tattcaacgaacatttgttagtcccccgctgtgtgccagagctggcctggaaaaggaggacgtgggagggga

SEQ ID NO: 134654 - DNA, 71 bp, Homo sapiens
atttgttagtcccccgctgtgtgccagagctggcctggaaaaggaggacgtgggaggggaagtagtgagta

SEQ ID NO: 134655 - DNA, 73 bp, Homo sapiens
ccgctgtgtgccagagctggcctggaaaaggaggacgtgggaggggaagtagtgagtaaaacaatgatgttaa

SEQ ID NO: 134656 - DNA, 67 bp, Homo sapiens
cctggaaaaggaggacgtgggaggggaagtagtgagtaaaacaatgatgttaaagaaaagcccgctg

SEQ ID NO: 134657 - DNA, 66 bp, Homo sapiens
aaaaggaggacgtgggaggggaagtagtgagtaaaacaatgatgttaaagaaaagcccgctggaac

SEQ ID NO: 134658 - DNA, 72 bp, Homo sapiens
agtagtgagtaaaacaatgatgttaaagaaaagcccgctggaactcagaacgcgaaatttcaatgatcctaa

SEQ ID NO: 134659 - DNA, 73 bp, Homo sapiens
aaacaatgatgttaaagaaaagcccgctggaactcagaacgcgaaatttcaatgatcctaatgctggatccct

SEQ ID NO: 134660 - DNA, 74 bp, Homo sapiens
gttaaagaaaagcccgctggaactcagaacgcgaaatttcaatgatcctaatgctggatcccttgggctgtaga

SEQ ID NO: 134661 - DNA, 75 bp, Homo sapiens
aaaagcccgctggaactcagaacgcgaaatttcaatgatcctaatgctggatcccttgggctgtagagcttctcc

SEQ ID NO: 134662 - DNA, 75 bp, Homo sapiens
aactcagaacgcgaaatttcaatgatcctaatgctggatcccttgggctgtagagcttctccgtaaaggaattca

SEQ ID NO: 134663 - DNA, 75 bp, Homo sapiens
taatgctggatcccttgggctgtagagcttctccgtaaaggaattcaatgttggatgggctacatactccctttc

SEQ ID NO: 134664 - DNA, 75 bp, Homo sapiens
ttgggctgtagagcttctccgtaaaggaattcaatgttggatgggctacatactccctttcgtgaaaatcagaga

SEQ ID NO: 134665 - DNA, 74 bp, Homo sapiens
tgtagagcttctccgtaaaggaattcaatgttggatgggctacatactccctttcgtgaaaatcagagaaagct

SEQ ID NO: 134666 - DNA, 73 bp, Homo sapiens
gtaaaggaattcaatgttggatgggctacatactccctttcgtgaaaatcagagaaagcttctaatgaaacaa

SEQ ID NO: 134667 - DNA, 74 bp, Homo sapiens
ggaattcaatgttggatgggctacatactccctttcgtgaaaatcagagaaagcttctaatgaaacaataaata

SEQ ID NO: 134668 - DNA, 71 bp, Homo sapiens
ttggatgggctacatactccctttcgtgaaaatcagagaaagcttctaatgaaacaataaataagggtaaa

SEQ ID NO: 134669 - DNA, 70 bp, Homo sapiens
tactccctttcgtgaaaatcagagaaagcttctaatgaaacaataaataagggtaaataatgccgatcgg

SEQ ID NO: 134670 - DNA, 71 bp, Homo sapiens
tttcgtgaaaatcagagaaagcttctaatgaaacaataaataagggtaaataatgccgatcgggaaaggca

SEQ ID NO: 134671 - DNA, 72 bp, Homo sapiens
aaatcagagaaagcttctaatgaaacaataaataagggtaaataatgccgatcgggaaaggcagcaggagag

SEQ ID NO: 134672 - DNA, 73 bp, Homo sapiens
aagcttctaatgaaacaataaataagggtaaataatgccgatcgggaaaggcagcaggagaggcagtatgccc

SEQ ID NO: 134673 - DNA, 74 bp, Homo sapiens
aaacaataaataagggtaaataatgccgatcgggaaaggcagcaggagaggcagtatgccctctgagcaggtaa

SEQ ID NO: 134674 - DNA, 74 bp, Homo sapiens
aataagggtaaataatgccgatcgggaaaggcagcaggagaggcagtatgccctctgagcaggtaactggggag

SEQ ID NO: 134675 - DNA, 76 bp, Homo sapiens
aataatgccgatcgggaaaggcagcaggagaggcagtatgccctctgagcaggtaactggggaggacagaaggttg

SEQ ID NO: 134676 - DNA, 77 bp, Homo sapiens
atcgggaaaggcagcaggagaggcagtatgccctctgagcaggtaactggggaggacagaaggttggggagctagca

SEQ ID NO: 134677 - DNA, 82 bp, Homo sapiens
agtatgccctctgagcaggtaactggggaggacagaaggttggggagctagcaggagcatggagcatggctgcaaagatcca

SEQ ID NO: 134678 - DNA, 83 bp, Homo sapiens
tctgagcaggtaactggggaggacagaaggttggggagctagcaggagcatggagcatggctgcaaagatccagtgttgaaga

SEQ ID NO: 134679 - DNA, 81 bp, Homo sapiens
taactggggaggacagaaggttggggagctagcaggagcatggagcatggctgcaaagatccagtgttgaagaccaacaga

SEQ ID NO: 134680 - DNA, 83 bp, Homo sapiens
acagaaggttggggagctagcaggagcatggagcatggctgcaaagatccagtgttgaagaccaacagagggatctgacatac

SEQ ID NO: 134681 - DNA, 89 bp, Homo sapiens
ttggggagctagcaggagcatggagcatggctgcaaagatccagtgttgaagaccaacagagggatctgacatactggctgctgatgga

SEQ ID NO: 134682 - DNA, 90 bp, Homo sapiens
tagcaggagcatggagcatggctgcaaagatccagtgttgaagaccaacagagggatctgacatactggctgctgatggagtggtagctg

SEQ ID NO: 134683 - DNA, 80 bp, Homo sapiens
atccagtgttgaagaccaacagagggatctgacatactggctgctgatggagtggtagctggggatggatttgtcctccc

SEQ ID NO: 134684 - DNA, 76 bp, Homo sapiens
aagaccaacagagggatctgacatactggctgctgatggagtggtagctggggatggatttgtcctccccctaccc

SEQ ID NO: 134685 - DNA, 75 bp, Homo sapiens
gggatctgacatactggctgctgatggagtggtagctggggatggatttgtcctccccctaccccaccgccctaa

SEQ ID NO: 134686 - DNA, 72 bp, Homo sapiens
tactggctgctgatggagtggtagctggggatggatttgtcctccccctaccccaccgccctaaccagtatt

SEQ ID NO: 134687 - DNA, 71 bp, Homo sapiens
tgatggagtggtagctggggatggatttgtcctccccctaccccaccgccctaaccagtatttagagaata

SEQ ID NO: 134688 - DNA, 70 bp, Homo sapiens
gtagctggggatggatttgtcctccccctaccccaccgccctaaccagtatttagagaatactgtatcga

SEQ ID NO: 134689 - DNA, 69 bp, Homo sapiens
atggatttgtcctccccctaccccaccgccctaaccagtatttagagaatactgtatcgatagtattta

SEQ ID NO: 134690 - DNA, 69 bp, Homo sapiens
tttgtcctccccctaccccaccgccctaaccagtatttagagaatactgtatcgatagtatttagagaa

SEQ ID NO: 134691 - DNA, 72 bp, Homo sapiens
cagtatttagagaatactgtatcgatagtatttagagaactagaatgagaaaatttaccagaacaaaaatag

SEQ ID NO: 134692 - DNA, 69 bp, Homo sapiens
agaatactgtatcgatagtatttagagaactagaatgagaaaatttaccagaacaaaaatagtaaaatt

SEQ ID NO: 134693 - DNA, 69 bp, Homo sapiens
gatagtatttagagaactagaatgagaaaatttaccagaacaaaaatagtaaaatttaaacttggagca

SEQ ID NO: 134694 - DNA, 67 bp, Homo sapiens
gagaactagaatgagaaaatttaccagaacaaaaatagtaaaatttaaacttggagcaaatgtgttt

SEQ ID NO: 134695 - DNA, 66 bp, Homo sapiens
gaatgagaaaatttaccagaacaaaaatagtaaaatttaaacttggagcaaatgtgtttttgtttg

SEQ ID NO: 134696 - DNA, 65 bp, Homo sapiens
tttgtttgtttaaggttgtaaaatagtttcattcaggttaaaaaattatgaactatggattttac

SEQ ID NO: 134697 - DNA, 66 bp, Homo sapiens
taaggttgtaaaatagtttcattcaggttaaaaaattatgaactatggattttaccccattaaggc

SEQ ID NO: 134698 - DNA, 67 bp, Homo sapiens
gtaaaatagtttcattcaggttaaaaaattatgaactatggattttaccccattaaggctgccaaat

SEQ ID NO: 134699 - DNA, 69 bp, Homo sapiens
cattcaggttaaaaaattatgaactatggattttaccccattaaggctgccaaatttataagacctcat

SEQ ID NO: 134700 - DNA, 68 bp, Homo sapiens
caggttaaaaaattatgaactatggattttaccccattaaggctgccaaatttataagacctcattta

SEQ ID NO: 134701 - DNA, 68 bp, Homo sapiens
aaaaattatgaactatggattttaccccattaaggctgccaaatttataagacctcatttaaaggaca

SEQ ID NO: 134702 - DNA, 72 bp, Homo sapiens
ttatgaactatggattttaccccattaaggctgccaaatttataagacctcatttaaaggacatacttcaca

SEQ ID NO: 134703 - DNA, 70 bp, Homo sapiens
gaactatggattttaccccattaaggctgccaaatttataagacctcatttaaaggacatacttcacaaa

SEQ ID NO: 134704 - DNA, 69 bp, Homo sapiens
actatggattttaccccattaaggctgccaaatttataagacctcatttaaaggacatacttcacaaag

SEQ ID NO: 134705 - DNA, 67 bp, Homo sapiens
ggattttaccccattaaggctgccaaatttataagacctcatttaaaggacatacttcacaaagttt

SEQ ID NO: 134706 - DNA, 68 bp, Homo sapiens
cccattaaggctgccaaatttataagacctcatttaaaggacatacttcacaaagttttgtttgtttg

SEQ ID NO: 134707 - DNA, 62 bp, Homo sapiens
tcccttccttccccccgttccttttttcctttatgtaagcgacatctatttttaaagggaaa

SEQ ID NO: 134708 - DNA, 64 bp, Homo sapiens
tccttccccccgttccttttttcctttatgtaagcgacatctatttttaaagggaaatttatga

SEQ ID NO: 134709 - DNA, 66 bp, Homo sapiens
cccgttccttttttcctttatgtaagcgacatctatttttaaagggaaatttatgatgacttataa

SEQ ID NO: 134710 - DNA, 68 bp, Homo sapiens
cttttttcctttatgtaagcgacatctatttttaaagggaaatttatgatgacttataaaggacacag

SEQ ID NO: 134711 - DNA, 71 bp, Homo sapiens
cctttatgtaagcgacatctatttttaaagggaaatttatgatgacttataaaggacacagttatagcaaa

SEQ ID NO: 134712 - DNA, 71 bp, Homo sapiens
atgtaagcgacatctatttttaaagggaaatttatgatgacttataaaggacacagttatagcaaaaccat

SEQ ID NO: 134713 - DNA, 71 bp, Homo sapiens
taagcgacatctatttttaaagggaaatttatgatgacttataaaggacacagttatagcaaaaccattaa

SEQ ID NO: 134714 - DNA, 69 bp, Homo sapiens
catctatttttaaagggaaatttatgatgacttataaaggacacagttatagcaaaaccattaaaaaca

SEQ ID NO: 134715 - DNA, 68 bp, Homo sapiens
agggaaatttatgatgacttataaaggacacagttatagcaaaaccattaaaaacaaggaccaaagta

SEQ ID NO: 134716 - DNA, 69 bp, Homo sapiens
atgatgacttataaaggacacagttatagcaaaaccattaaaaacaaggaccaaagtacaaaaacaaca

SEQ ID NO: 134717 - DNA, 69 bp, Homo sapiens
gacttataaaggacacagttatagcaaaaccattaaaaacaaggaccaaagtacaaaaacaacatgaga

SEQ ID NO: 134718 - DNA, 70 bp, Homo sapiens
acagttatagcaaaaccattaaaaacaaggaccaaagtacaaaaacaacatgagaaagagtgcaggatgg

SEQ ID NO: 134719 - DNA, 68 bp, Homo sapiens
aaaaccattaaaaacaaggaccaaagtacaaaaacaacatgagaaagagtgcaggatgggggacagaa

SEQ ID NO: 134720 - DNA, 69 bp, Homo sapiens
ttaaaaacaaggaccaaagtacaaaaacaacatgagaaagagtgcaggatgggggacagaaaacctgaa

SEQ ID NO: 134721 - DNA, 69 bp, Homo sapiens
aaggaccaaagtacaaaaacaacatgagaaagagtgcaggatgggggacagaaaacctgaaagttcaag

SEQ ID NO: 134722 - DNA, 68 bp, Homo sapiens
aaaaacaacatgagaaagagtgcaggatgggggacagaaaacctgaaagttcaaggcttggggggagt

SEQ ID NO: 134723 - DNA, 71 bp, Homo sapiens
atgagaaagagtgcaggatgggggacagaaaacctgaaagttcaaggcttggggggagttgctgaaaataa

SEQ ID NO: 134724 - DNA, 70 bp, Homo sapiens
agagtgcaggatgggggacagaaaacctgaaagttcaaggcttggggggagttgctgaaaataaatacaa

SEQ ID NO: 134725 - DNA, 68 bp, Homo sapiens
ggacagaaaacctgaaagttcaaggcttggggggagttgctgaaaataaatacaaaatatattcccga

SEQ ID NO: 134726 - DNA, 68 bp, Homo sapiens
aagttcaaggcttggggggagttgctgaaaataaatacaaaatatattcccgaactttctgagtacta

SEQ ID NO: 134727 - DNA, 70 bp, Homo sapiens
ggggagttgctgaaaataaatacaaaatatattcccgaactttctgagtactaagatccaaaaggaggca

SEQ ID NO: 134728 - DNA, 71 bp, Homo sapiens
gctgaaaataaatacaaaatatattcccgaactttctgagtactaagatccaaaaggaggcataataagta

SEQ ID NO: 134729 - DNA, 71 bp, Homo sapiens
attcccgaactttctgagtactaagatccaaaaggaggcataataagtaataaagatcccatgtctaacaa

SEQ ID NO: 134730 - DNA, 75 bp, Homo sapiens
gaactttctgagtactaagatccaaaaggaggcataataagtaataaagatcccatgtctaacaatagaggcata

SEQ ID NO: 134731 - DNA, 76 bp, Homo sapiens
tactaagatccaaaaggaggcataataagtaataaagatcccatgtctaacaatagaggcataccagctcctcaaa

SEQ ID NO: 134732 - DNA, 72 bp, Homo sapiens
aaaaggaggcataataagtaataaagatcccatgtctaacaatagaggcataccagctcctcaaaaagaaaa

SEQ ID NO: 134733 - DNA, 71 bp, Homo sapiens
aggcataataagtaataaagatcccatgtctaacaatagaggcataccagctcctcaaaaagaaaaacttt

SEQ ID NO: 134734 - DNA, 71 bp, Homo sapiens
agtaataaagatcccatgtctaacaatagaggcataccagctcctcaaaaagaaaaacttttctcttgttc

SEQ ID NO: 134735 - DNA, 75 bp, Homo sapiens
catgtctaacaatagaggcataccagctcctcaaaaagaaaaacttttctcttgttctgagaagcatatttcaat

SEQ ID NO: 134736 - DNA, 74 bp, Homo sapiens
atagaggcataccagctcctcaaaaagaaaaacttttctcttgttctgagaagcatatttcaattggctgttta

SEQ ID NO: 134737 - DNA, 74 bp, Homo sapiens
gcataccagctcctcaaaaagaaaaacttttctcttgttctgagaagcatatttcaattggctgtttatataag

SEQ ID NO: 134738 - DNA, 72 bp, Homo sapiens
ctcaaaaagaaaaacttttctcttgttctgagaagcatatttcaattggctgtttatataagggtcatctct

SEQ ID NO: 134739 - DNA, 72 bp, Homo sapiens
aaaacttttctcttgttctgagaagcatatttcaattggctgtttatataagggtcatctcttagctttggg

SEQ ID NO: 134740 - DNA, 74 bp, Homo sapiens
ttgttctgagaagcatatttcaattggctgtttatataagggtcatctcttagctttggggtaaacccgatgga

SEQ ID NO: 134741 - DNA, 69 bp, Homo sapiens
tatttcaattggctgtttatataagggtcatctcttagctttggggtaaacccgatggaaaaggagagg

SEQ ID NO: 134742 - DNA, 69 bp, Homo sapiens
tttatataagggtcatctcttagctttggggtaaacccgatggaaaaggagagggttctcactgtcatt

SEQ ID NO: 134743 - DNA, 69 bp, Homo sapiens
gtaaacccgatggaaaaggagagggttctcactgtcatttaaagaaaaagagtgaaagactggcaccat

SEQ ID NO: 134744 - DNA, 72 bp, Homo sapiens
tggaaaaggagagggttctcactgtcatttaaagaaaaagagtgaaagactggcaccatttgctgttactat

SEQ ID NO: 134745 - DNA, 73 bp, Homo sapiens
gagggttctcactgtcatttaaagaaaaagagtgaaagactggcaccatttgctgttactattttgccttgta

SEQ ID NO: 134746 - DNA, 73 bp, Homo sapiens
ctcactgtcatttaaagaaaaagagtgaaagactggcaccatttgctgttactattttgccttgtacatttta

SEQ ID NO: 134747 - DNA, 73 bp, Homo sapiens
aaagaaaaagagtgaaagactggcaccatttgctgttactattttgccttgtacattttattgagagtgcatt

SEQ ID NO: 134748 - DNA, 75 bp, Homo sapiens
agtgaaagactggcaccatttgctgttactattttgccttgtacattttattgagagtgcatttgagttggtaaa

SEQ ID NO: 134749 - DNA, 72 bp, Homo sapiens
ccatttgctgttactattttgccttgtacattttattgagagtgcatttgagttggtaaattctgtttcttt

SEQ ID NO: 134750 - DNA, 73 bp, Homo sapiens
ctattttgccttgtacattttattgagagtgcatttgagttggtaaattctgtttcttttcacttcactccac

SEQ ID NO: 134751 - DNA, 74 bp, Homo sapiens
ccttgtacattttattgagagtgcatttgagttggtaaattctgtttcttttcacttcactccactccactcta

SEQ ID NO: 134752 - DNA, 74 bp, Homo sapiens
ttttattgagagtgcatttgagttggtaaattctgtttcttttcacttcactccactccactctactccacttc

SEQ ID NO: 134753 - DNA, 70 bp, Homo sapiens
agttggtaaattctgtttcttttcacttcactccactccactctactccacttctttttatcctatccca

SEQ ID NO: 134754 - DNA, 73 bp, Homo sapiens
tttcttttcacttcactccactccactctactccacttctttttatcctatcccatcccatcctatgtaattg

SEQ ID NO: 134755 - DNA, 73 bp, Homo sapiens
ctccactctactccacttctttttatcctatcccatcccatcctatgtaattgttgaatattcttgcttgggt

SEQ ID NO: 134756 - DNA, 73 bp, Homo sapiens
tcccatcccatcctatgtaattgttgaatattcttgcttgggttcctttattcaggtatagacataaattgtt

SEQ ID NO: 134757 - DNA, 71 bp, Homo sapiens
cccatcctatgtaattgttgaatattcttgcttgggttcctttattcaggtatagacataaattgttttta

SEQ ID NO: 134758 - DNA, 69 bp, Homo sapiens
tgtaattgttgaatattcttgcttgggttcctttattcaggtatagacataaattgtttttacattttt

SEQ ID NO: 134759 - DNA, 66 bp, Homo sapiens
gaatattcttgcttgggttcctttattcaggtatagacataaattgtttttacatttttttaaggg

SEQ ID NO: 134760 - DNA, 65 bp, Homo sapiens
gcttgggttcctttattcaggtatagacataaattgtttttacatttttttaagggggagagagg

SEQ ID NO: 134761 - DNA, 71 bp, Homo sapiens
ttcaggtatagacataaattgtttttacatttttttaagggggagagaggtcacacatatctctgagaaac

SEQ ID NO: 134762 - DNA, 72 bp, Homo sapiens
agacataaattgtttttacatttttttaagggggagagaggtcacacatatctctgagaaactgatgaaagc

SEQ ID NO: 134763 - DNA, 72 bp, Homo sapiens
gtttttacatttttttaagggggagagaggtcacacatatctctgagaaactgatgaaagctataaatgtct

SEQ ID NO: 134764 - DNA, 78 bp, Homo sapiens
gggagagaggtcacacatatctctgagaaactgatgaaagctataaatgtcttagtagggaaaatatatataaacaca

SEQ ID NO: 134765 - DNA, 77 bp, Homo sapiens
agaggtcacacatatctctgagaaactgatgaaagctataaatgtcttagtagggaaaatatatataaacacacaaa

SEQ ID NO: 134766 - DNA, 77 bp, Homo sapiens
catatctctgagaaactgatgaaagctataaatgtcttagtagggaaaatatatataaacacacaaaattttgcata

SEQ ID NO: 134767 - DNA, 72 bp, Homo sapiens
agaaactgatgaaagctataaatgtcttagtagggaaaatatatataaacacacaaaattttgcataaatta

SEQ ID NO: 134768 - DNA, 73 bp, Homo sapiens
gctataaatgtcttagtagggaaaatatatataaacacacaaaattttgcataaattaattttattgcattca

SEQ ID NO: 134769 - DNA, 70 bp, Homo sapiens
aatgtcttagtagggaaaatatatataaacacacaaaattttgcataaattaattttattgcattcaaaa

SEQ ID NO: 134770 - DNA, 72 bp, Homo sapiens
atatataaacacacaaaattttgcataaattaattttattgcattcaaaatttattttgaagaatcactcca

SEQ ID NO: 134771 - DNA, 74 bp, Homo sapiens
attttgcataaattaattttattgcattcaaaatttattttgaagaatcactccaggctggagtaacatatata

SEQ ID NO: 134772 - DNA, 72 bp, Homo sapiens
aaattaattttattgcattcaaaatttattttgaagaatcactccaggctggagtaacatatatataaatta

SEQ ID NO: 134773 - DNA, 74 bp, Homo sapiens
attgcattcaaaatttattttgaagaatcactccaggctggagtaacatatatataaattaaaagaacatataa

SEQ ID NO: 134774 - DNA, 72 bp, Homo sapiens
tttattttgaagaatcactccaggctggagtaacatatatataaattaaaagaacatataaattaagtctct

SEQ ID NO: 134775 - DNA, 70 bp, Homo sapiens
cactccaggctggagtaacatatatataaattaaaagaacatataaattaagtctctttcacttttattt

SEQ ID NO: 134776 - DNA, 67 bp, Homo sapiens
tatatataaattaaaagaacatataaattaagtctctttcacttttatttttcttggaaaagtaatg

SEQ ID NO: 134777 - DNA, 69 bp, Homo sapiens
gaacatataaattaagtctctttcacttttatttttcttggaaaagtaatggcctcattgtgaaaaata

SEQ ID NO: 134778 - DNA, 65 bp, Homo sapiens
aattaagtctctttcacttttatttttcttggaaaagtaatggcctcattgtgaaaaataaaaaa

SEQ ID NO: 134779 - DNA, 71 bp, Homo sapiens
aaaaaaaatttcaaattctgctctgagtaaatttcagtaagaagttactctgatttggcagtaaacactga

SEQ ID NO: 134780 - DNA, 77 bp, Homo sapiens
tcaaattctgctctgagtaaatttcagtaagaagttactctgatttggcagtaaacactgatgtacaacaatattta

SEQ ID NO: 134781 - DNA, 78 bp, Homo sapiens
ttctgctctgagtaaatttcagtaagaagttactctgatttggcagtaaacactgatgtacaacaatatttatgctat

SEQ ID NO: 134782 - DNA, 75 bp, Homo sapiens
gtaaatttcagtaagaagttactctgatttggcagtaaacactgatgtacaacaatatttatgctatttatgtat

SEQ ID NO: 134783 - DNA, 76 bp, Homo sapiens
ctctgatttggcagtaaacactgatgtacaacaatatttatgctatttatgtatttaattattataatacctatag

SEQ ID NO: 134784 - DNA, 71 bp, Homo sapiens
tgctatttatgtatttaattattataatacctatagttttaaaaattcttactatgttctaggtactatgc

SEQ ID NO: 134785 - DNA, 66 bp, Homo sapiens
tttaattattataatacctatagttttaaaaattcttactatgttctaggtactatgctaaaaact

SEQ ID NO: 134786 - DNA, 68 bp, Homo sapiens
tataatacctatagttttaaaaattcttactatgttctaggtactatgctaaaaacttagagaaaatc

SEQ ID NO: 134787 - DNA, 70 bp, Homo sapiens
ttaaaaattcttactatgttctaggtactatgctaaaaacttagagaaaatctcagttttgccagaactc

SEQ ID NO: 134788 - DNA, 71 bp, Homo sapiens
aaattcttactatgttctaggtactatgctaaaaacttagagaaaatctcagttttgccagaactccagcc

SEQ ID NO: 134789 - DNA, 71 bp, Homo sapiens
attcttactatgttctaggtactatgctaaaaacttagagaaaatctcagttttgccagaactccagcctt

SEQ ID NO: 134790 - DNA, 73 bp, Homo sapiens
tactatgttctaggtactatgctaaaaacttagagaaaatctcagttttgccagaactccagccttttcacat

SEQ ID NO: 134791 - DNA, 72 bp, Homo sapiens
atgttctaggtactatgctaaaaacttagagaaaatctcagttttgccagaactccagccttttcacattgg

SEQ ID NO: 134792 - DNA, 76 bp, Homo sapiens
tactatgctaaaaacttagagaaaatctcagttttgccagaactccagccttttcacattgggcattcttcataga

SEQ ID NO: 134793 - DNA, 71 bp, Homo sapiens
aaaaacttagagaaaatctcagttttgccagaactccagccttttcacattgggcattcttcatagaaaaa

SEQ ID NO: 134794 - DNA, 75 bp, Homo sapiens
aaaatctcagttttgccagaactccagccttttcacattgggcattcttcatagaaaaacacaagaagcagtata

SEQ ID NO: 134795 - DNA, 74 bp, Homo sapiens
gttttgccagaactccagccttttcacattgggcattcttcatagaaaaacacaagaagcagtatagcttttgg

SEQ ID NO: 134796 - DNA, 73 bp, Homo sapiens
aactccagccttttcacattgggcattcttcatagaaaaacacaagaagcagtatagcttttgggccccttca

SEQ ID NO: 134797 - DNA, 74 bp, Homo sapiens
catagaaaaacacaagaagcagtatagcttttgggccccttcactcttgatgatgaaagtaaaatgaaaacata

SEQ ID NO: 134798 - DNA, 72 bp, Homo sapiens
acaagaagcagtatagcttttgggccccttcactcttgatgatgaaagtaaaatgaaaacataattaagctt

SEQ ID NO: 134799 - DNA, 73 bp, Homo sapiens
ggccccttcactcttgatgatgaaagtaaaatgaaaacataattaagctttattatatttcttcccattggca

SEQ ID NO: 134800 - DNA, 74 bp, Homo sapiens
tcactcttgatgatgaaagtaaaatgaaaacataattaagctttattatatttcttcccattggcattttccaa

SEQ ID NO: 134801 - DNA, 72 bp, Homo sapiens
gatgaaagtaaaatgaaaacataattaagctttattatatttcttcccattggcattttccaacttgtgcta

SEQ ID NO: 134802 - DNA, 78 bp, Homo sapiens
attaagctttattatatttcttcccattggcattttccaacttgtgctaagcctgatataatcatagacagatgtcca

SEQ ID NO: 134803 - DNA, 81 bp, Homo sapiens
ttattatatttcttcccattggcattttccaacttgtgctaagcctgatataatcatagacagatgtccacaatcataatg

SEQ ID NO: 134804 - DNA, 80 bp, Homo sapiens
tttcttcccattggcattttccaacttgtgctaagcctgatataatcatagacagatgtccacaatcataatggtagaaa

SEQ ID NO: 134805 - DNA, 79 bp, Homo sapiens
ttggcattttccaacttgtgctaagcctgatataatcatagacagatgtccacaatcataatggtagaaaatgttttct

SEQ ID NO: 134806 - DNA, 77 bp, Homo sapiens
aacttgtgctaagcctgatataatcatagacagatgtccacaatcataatggtagaaaatgttttctttaactcctc

SEQ ID NO: 134807 - DNA, 75 bp, Homo sapiens
ctaagcctgatataatcatagacagatgtccacaatcataatggtagaaaatgttttctttaactcctcccaaag

SEQ ID NO: 134808 - DNA, 75 bp, Homo sapiens
tataatcatagacagatgtccacaatcataatggtagaaaatgttttctttaactcctcccaaagggagagtatc

SEQ ID NO: 134809 - DNA, 71 bp, Homo sapiens
atgtccacaatcataatggtagaaaatgttttctttaactcctcccaaagggagagtatctgaacctcaaa

SEQ ID NO: 134810 - DNA, 72 bp, Homo sapiens
tttctttaactcctcccaaagggagagtatctgaacctcaaaacacatgagtagtgccttacttgaccatat

SEQ ID NO: 134811 - DNA, 74 bp, Homo sapiens
taactcctcccaaagggagagtatctgaacctcaaaacacatgagtagtgccttacttgaccatattctacacc

SEQ ID NO: 134812 - DNA, 75 bp, Homo sapiens
tatctgaacctcaaaacacatgagtagtgccttacttgaccatattctacacctcttctggttcgtagaatttcc

SEQ ID NO: 134813 - DNA, 75 bp, Homo sapiens
aaaacacatgagtagtgccttacttgaccatattctacacctcttctggttcgtagaatttcctgctctttgcca

SEQ ID NO: 134814 - DNA, 71 bp, Homo sapiens
cttacttgaccatattctacacctcttctggttcgtagaatttcctgctctttgccaccaggactgttttt

SEQ ID NO: 134815 - DNA, 70 bp, Homo sapiens
atattctacacctcttctggttcgtagaatttcctgctctttgccaccaggactgtttttttctttatcc

SEQ ID NO: 134816 - DNA, 71 bp, Homo sapiens
tcttctggttcgtagaatttcctgctctttgccaccaggactgtttttttctttatccccgcttatctcca

SEQ ID NO: 134817 - DNA, 72 bp, Homo sapiens
ttcgtagaatttcctgctctttgccaccaggactgtttttttctttatccccgcttatctccagatattcta

SEQ ID NO: 134818 - DNA, 71 bp, Homo sapiens
tttcctgctctttgccaccaggactgtttttttctttatccccgcttatctccagatattctaaccttcat

SEQ ID NO: 134819 - DNA, 73 bp, Homo sapiens
ctttgccaccaggactgtttttttctttatccccgcttatctccagatattctaaccttcattctctatcaca

SEQ ID NO: 134820 - DNA, 73 bp, Homo sapiens
tgtttttttctttatccccgcttatctccagatattctaaccttcattctctatcacaggatacacctgttct

SEQ ID NO: 134821 - DNA, 75 bp, Homo sapiens
ttttctttatccccgcttatctccagatattctaaccttcattctctatcacaggatacacctgttcttcagtcc

SEQ ID NO: 134822 - DNA, 79 bp, Homo sapiens
cttatctccagatattctaaccttcattctctatcacaggatacacctgttcttcagtcctgcaagagatttcaggacg

SEQ ID NO: 134823 - DNA, 78 bp, Homo sapiens
gatattctaaccttcattctctatcacaggatacacctgttcttcagtcctgcaagagatttcaggacgttgaaatat

SEQ ID NO: 134824 - DNA, 78 bp, Homo sapiens
tctaaccttcattctctatcacaggatacacctgttcttcagtcctgcaagagatttcaggacgttgaaatattccca

SEQ ID NO: 134825 - DNA, 75 bp, Homo sapiens
attctctatcacaggatacacctgttcttcagtcctgcaagagatttcaggacgttgaaatattcccaaacccca

SEQ ID NO: 134826 - DNA, 73 bp, Homo sapiens
atacacctgttcttcagtcctgcaagagatttcaggacgttgaaatattcccaaaccccaaggtctgacttca

SEQ ID NO: 134827 - DNA, 76 bp, Homo sapiens
tcttcagtcctgcaagagatttcaggacgttgaaatattcccaaaccccaaggtctgacttcatagcattgataat

SEQ ID NO: 134828 - DNA, 73 bp, Homo sapiens
ctgcaagagatttcaggacgttgaaatattcccaaaccccaaggtctgacttcatagcattgataatttttgt

SEQ ID NO: 134829 - DNA, 72 bp, Homo sapiens
agatttcaggacgttgaaatattcccaaaccccaaggtctgacttcatagcattgataatttttgttgatgt

SEQ ID NO: 134830 - DNA, 71 bp, Homo sapiens
gacgttgaaatattcccaaaccccaaggtctgacttcatagcattgataatttttgttgatgttgttttat

SEQ ID NO: 134831 - DNA, 73 bp, Homo sapiens
cgcacctggcctgataattcttacactgtggaaaatacaggttgttatgaaaggtcaatgagagtttattgtt

SEQ ID NO: 134832 - DNA, 74 bp, Homo sapiens
ctggcctgataattcttacactgtggaaaatacaggttgttatgaaaggtcaatgagagtttattgtttgtcaa

SEQ ID NO: 134833 - DNA, 72 bp, Homo sapiens
cttacactgtggaaaatacaggttgttatgaaaggtcaatgagagtttattgtttgtcaaaaaataatctga

SEQ ID NO: 134834 - DNA, 73 bp, Homo sapiens
ctgtggaaaatacaggttgttatgaaaggtcaatgagagtttattgtttgtcaaaaaataatctgaccataga

SEQ ID NO: 134835 - DNA, 72 bp, Homo sapiens
acaggttgttatgaaaggtcaatgagagtttattgtttgtcaaaaaataatctgaccatagatacttggctt

SEQ ID NO: 134836 - DNA, 74 bp, Homo sapiens
atgaaaggtcaatgagagtttattgtttgtcaaaaaataatctgaccatagatacttggctttaatttcactca

SEQ ID NO: 134837 - DNA, 73 bp, Homo sapiens
tgagagtttattgtttgtcaaaaaataatctgaccatagatacttggctttaatttcactcatttacagtact

SEQ ID NO: 134838 - DNA, 74 bp, Homo sapiens
gtttgtcaaaaaataatctgaccatagatacttggctttaatttcactcatttacagtacttctttcagaggca

SEQ ID NO: 134839 - DNA, 74 bp, Homo sapiens
aaataatctgaccatagatacttggctttaatttcactcatttacagtacttctttcagaggcaaactcaataa

SEQ ID NO: 134840 - DNA, 75 bp, Homo sapiens
tctgaccatagatacttggctttaatttcactcatttacagtacttctttcagaggcaaactcaataaatctaac

SEQ ID NO: 134841 - DNA, 76 bp, Homo sapiens
gatacttggctttaatttcactcatttacagtacttctttcagaggcaaactcaataaatctaactcatgtgactg

SEQ ID NO: 134842 - DNA, 76 bp, Homo sapiens
atttcactcatttacagtacttctttcagaggcaaactcaataaatctaactcatgtgactgttcctggagtatat

SEQ ID NO: 134843 - DNA, 76 bp, Homo sapiens
atttacagtacttctttcagaggcaaactcaataaatctaactcatgtgactgttcctggagtatatttgcatttg

SEQ ID NO: 134844 - DNA, 74 bp, Homo sapiens
ttctttcagaggcaaactcaataaatctaactcatgtgactgttcctggagtatatttgcatttgggggtttaa

SEQ ID NO: 134845 - DNA, 71 bp, Homo sapiens
agaggcaaactcaataaatctaactcatgtgactgttcctggagtatatttgcatttgggggtttaaaaaa

SEQ ID NO: 134846 - DNA, 69 bp, Homo sapiens
actcaataaatctaactcatgtgactgttcctggagtatatttgcatttgggggtttaaaaaataaaaa

SEQ ID NO: 134847 - DNA, 68 bp, Homo sapiens
aaataaaaaaagtccagagtagagttttctggagagagaaagttggttttaggcagctatagtgttct

SEQ ID NO: 134848 - DNA, 69 bp, Homo sapiens
aaaaagtccagagtagagttttctggagagagaaagttggttttaggcagctatagtgttcttttgtct

SEQ ID NO: 134849 - DNA, 72 bp, Homo sapiens
tagagttttctggagagagaaagttggttttaggcagctatagtgttcttttgtcttaatcctggtgttgta

SEQ ID NO: 134850 - DNA, 70 bp, Homo sapiens
ggagagagaaagttggttttaggcagctatagtgttcttttgtcttaatcctggtgttgtaaatctttct

SEQ ID NO: 134851 - DNA, 71 bp, Homo sapiens
agaaagttggttttaggcagctatagtgttcttttgtcttaatcctggtgttgtaaatctttcttctgctc

SEQ ID NO: 134852 - DNA, 72 bp, Homo sapiens
tttaggcagctatagtgttcttttgtcttaatcctggtgttgtaaatctttcttctgctccttaaccagtct

SEQ ID NO: 134853 - DNA, 70 bp, Homo sapiens
ctatagtgttcttttgtcttaatcctggtgttgtaaatctttcttctgctccttaaccagtcttccttct

SEQ ID NO: 134854 - DNA, 73 bp, Homo sapiens
tttgtcttaatcctggtgttgtaaatctttcttctgctccttaaccagtcttccttcttgcttcctcacataa

SEQ ID NO: 134855 - DNA, 72 bp, Homo sapiens
taatcctggtgttgtaaatctttcttctgctccttaaccagtcttccttcttgcttcctcacataaccaccc

SEQ ID NO: 134856 - DNA, 69 bp, Homo sapiens
taaatctttcttctgctccttaaccagtcttccttcttgcttcctcacataaccaccccctaaattaaa

SEQ ID NO: 134857 - DNA, 67 bp, Homo sapiens
tttcttctgctccttaaccagtcttccttcttgcttcctcacataaccaccccctaaattaaaaaaa

SEQ ID NO: 134858 - DNA, 75 bp, Homo sapiens
ttaaaataaatttattccagtttggctatgtaattggctgaggggcatggattattttaatatcagaatcagtga

SEQ ID NO: 134859 - DNA, 76 bp, Homo sapiens
tttattccagtttggctatgtaattggctgaggggcatggattattttaatatcagaatcagtgatgtttaaagtg

SEQ ID NO: 134860 - DNA, 77 bp, Homo sapiens
tttggctatgtaattggctgaggggcatggattattttaatatcagaatcagtgatgtttaaagtgttgattccatt

SEQ ID NO: 134861 - DNA, 76 bp, Homo sapiens
ctatgtaattggctgaggggcatggattattttaatatcagaatcagtgatgtttaaagtgttgattccattttaa

SEQ ID NO: 134862 - DNA, 73 bp, Homo sapiens
ggctgaggggcatggattattttaatatcagaatcagtgatgtttaaagtgttgattccattttaaaagttac

SEQ ID NO: 134863 - DNA, 70 bp, Homo sapiens
ggattattttaatatcagaatcagtgatgtttaaagtgttgattccattttaaaagttactttcttgaac

SEQ ID NO: 134864 - DNA, 69 bp, Homo sapiens
tttaatatcagaatcagtgatgtttaaagtgttgattccattttaaaagttactttcttgaactaaggg

SEQ ID NO: 134865 - DNA, 69 bp, Homo sapiens
cagtgatgtttaaagtgttgattccattttaaaagttactttcttgaactaaggggctagaatcttggc

SEQ ID NO: 134866 - DNA, 67 bp, Homo sapiens
aaagtgttgattccattttaaaagttactttcttgaactaaggggctagaatcttggcttagtggat

SEQ ID NO: 134867 - DNA, 68 bp, Homo sapiens
ttccattttaaaagttactttcttgaactaaggggctagaatcttggcttagtggattattcctggat

SEQ ID NO: 134868 - DNA, 68 bp, Homo sapiens
aaagttactttcttgaactaaggggctagaatcttggcttagtggattattcctggatttcaaggtat

SEQ ID NO: 134869 - DNA, 70 bp, Homo sapiens
actttcttgaactaaggggctagaatcttggcttagtggattattcctggatttcaaggtattagatatt

SEQ ID NO: 134870 - DNA, 70 bp, Homo sapiens
aggggctagaatcttggcttagtggattattcctggatttcaaggtattagatatttttactcgaaattc

SEQ ID NO: 134871 - DNA, 73 bp, Homo sapiens
atcttggcttagtggattattcctggatttcaaggtattagatatttttactcgaaattctggatacttgctg

SEQ ID NO: 134872 - DNA, 72 bp, Homo sapiens
ggcttagtggattattcctggatttcaaggtattagatatttttactcgaaattctggatacttgctgttct

SEQ ID NO: 134873 - DNA, 73 bp, Homo sapiens
tcctggatttcaaggtattagatatttttactcgaaattctggatacttgctgttctttgatgacacaaacgt

SEQ ID NO: 134874 - DNA, 75 bp, Homo sapiens
tcaaggtattagatatttttactcgaaattctggatacttgctgttctttgatgacacaaacgttgacgatctaa

SEQ ID NO: 134875 - DNA, 76 bp, Homo sapiens
gatatttttactcgaaattctggatacttgctgttctttgatgacacaaacgttgacgatctaacatggaatatag

SEQ ID NO: 134876 - DNA, 76 bp, Homo sapiens
tttactcgaaattctggatacttgctgttctttgatgacacaaacgttgacgatctaacatggaatatagtggtta

SEQ ID NO: 134877 - DNA, 76 bp, Homo sapiens
aattctggatacttgctgttctttgatgacacaaacgttgacgatctaacatggaatatagtggttaaaatggaca

SEQ ID NO: 134878 - DNA, 77 bp, Homo sapiens
ttgctgttctttgatgacacaaacgttgacgatctaacatggaatatagtggttaaaatggacacttgagagtatag

SEQ ID NO: 134879 - DNA, 72 bp, Homo sapiens
atgacacaaacgttgacgatctaacatggaatatagtggttaaaatggacacttgagagtataggggaaaaa

SEQ ID NO: 134880 - DNA, 71 bp, Homo sapiens
acaaacgttgacgatctaacatggaatatagtggttaaaatggacacttgagagtataggggaaaaatgta

SEQ ID NO: 134881 - DNA, 71 bp, Homo sapiens
acgatctaacatggaatatagtggttaaaatggacacttgagagtataggggaaaaatgtacaagagtagg

SEQ ID NO: 134882 - DNA, 69 bp, Homo sapiens
atggaatatagtggttaaaatggacacttgagagtataggggaaaaatgtacaagagtaggggaaagaa

SEQ ID NO: 134883 - DNA, 67 bp, Homo sapiens
gtggttaaaatggacacttgagagtataggggaaaaatgtacaagagtaggggaaagaaaactctgg

SEQ ID NO: 134884 - DNA, 65 bp, Homo sapiens
agtataggggaaaaatgtacaagagtaggggaaagaaaactctggggccaaactacctgagttta

SEQ ID NO: 134885 - DNA, 72 bp, Homo sapiens
aaactacctgagtttagatcccaataatgcccctcactagctttgagcaaattattaactttgagcaaatta

SEQ ID NO: 134886 - DNA, 74 bp, Homo sapiens
cccaataatgcccctcactagctttgagcaaattattaactttgagcaaattattcaacatttttgagtctcag

SEQ ID NO: 134887 - DNA, 73 bp, Homo sapiens
ccctcactagctttgagcaaattattaactttgagcaaattattcaacatttttgagtctcagttttcctgct

SEQ ID NO: 134888 - DNA, 74 bp, Homo sapiens
ttaactttgagcaaattattcaacatttttgagtctcagttttcctgcttattatgtgcatagtagtaaaccca

SEQ ID NO: 134889 - DNA, 76 bp, Homo sapiens
gagcaaattattcaacatttttgagtctcagttttcctgcttattatgtgcatagtagtaaacccatgaggcttaa

SEQ ID NO: 134890 - DNA, 76 bp, Homo sapiens
attcaacatttttgagtctcagttttcctgcttattatgtgcatagtagtaaacccatgaggcttaaatgagtcaa

SEQ ID NO: 134891 - DNA, 75 bp, Homo sapiens
gagtctcagttttcctgcttattatgtgcatagtagtaaacccatgaggcttaaatgagtcaatatattaaaaat

SEQ ID NO: 134892 - DNA, 73 bp, Homo sapiens
cagttttcctgcttattatgtgcatagtagtaaacccatgaggcttaaatgagtcaatatattaaaaatttaa

SEQ ID NO: 134893 - DNA, 75 bp, Homo sapiens
gtgcatagtagtaaacccatgaggcttaaatgagtcaatatattaaaaatttaagatgatgtctaggacgttgta

SEQ ID NO: 134894 - DNA, 71 bp, Homo sapiens
gtaaacccatgaggcttaaatgagtcaatatattaaaaatttaagatgatgtctaggacgttgtaagtact

SEQ ID NO: 134895 - DNA, 72 bp, Homo sapiens
gcttaaatgagtcaatatattaaaaatttaagatgatgtctaggacgttgtaagtacttaataattgttggc

SEQ ID NO: 134896 - DNA, 75 bp, Homo sapiens
tgagtcaatatattaaaaatttaagatgatgtctaggacgttgtaagtacttaataattgttggctgctatcctc

SEQ ID NO: 134897 - DNA, 70 bp, Homo sapiens
aaaatttaagatgatgtctaggacgttgtaagtacttaataattgttggctgctatcctctaggtatttt

SEQ ID NO: 134898 - DNA, 76 bp, Homo sapiens
atgatgtctaggacgttgtaagtacttaataattgttggctgctatcctctaggtatttttagataattcagtgca

SEQ ID NO: 134899 - DNA, 77 bp, Homo sapiens
tctaggacgttgtaagtacttaataattgttggctgctatcctctaggtatttttagataattcagtgcagagcata

SEQ ID NO: 134900 - DNA, 76 bp, Homo sapiens
taattgttggctgctatcctctaggtatttttagataattcagtgcagagcatagttttctccactccctggttta

SEQ ID NO: 134901 - DNA, 76 bp, Homo sapiens
tgctatcctctaggtatttttagataattcagtgcagagcatagttttctccactccctggtttataccttgaata

SEQ ID NO: 134902 - DNA, 74 bp, Homo sapiens
taggtatttttagataattcagtgcagagcatagttttctccactccctggtttataccttgaatagataccat

SEQ ID NO: 134903 - DNA, 76 bp, Homo sapiens
tttagataattcagtgcagagcatagttttctccactccctggtttataccttgaatagataccattgacctagat

SEQ ID NO: 134904 - DNA, 75 bp, Homo sapiens
ttcagtgcagagcatagttttctccactccctggtttataccttgaatagataccattgacctagattggacctt

SEQ ID NO: 134905 - DNA, 74 bp, Homo sapiens
tctccactccctggtttataccttgaatagataccattgacctagattggacctttggattgagactcaaatta

SEQ ID NO: 134906 - DNA, 71 bp, Homo sapiens
accttgaatagataccattgacctagattggacctttggattgagactcaaattaccaatccaaaagttta

SEQ ID NO: 134907 - DNA, 70 bp, Homo sapiens
agataccattgacctagattggacctttggattgagactcaaattaccaatccaaaagtttacaataggt

SEQ ID NO: 134908 - DNA, 70 bp, Homo sapiens
gacctagattggacctttggattgagactcaaattaccaatccaaaagtttacaataggtttaatcatta

SEQ ID NO: 134909 - DNA, 68 bp, Homo sapiens
ggacctttggattgagactcaaattaccaatccaaaagtttacaataggtttaatcattaagttcaat

SEQ ID NO: 134910 - DNA, 71 bp, Homo sapiens
gactcaaattaccaatccaaaagtttacaataggtttaatcattaagttcaattgactagctcaaaactga

SEQ ID NO: 134911 - DNA, 70 bp, Homo sapiens
attaccaatccaaaagtttacaataggtttaatcattaagttcaattgactagctcaaaactgaaacaga

SEQ ID NO: 134912 - DNA, 69 bp, Homo sapiens
ccaaaagtttacaataggtttaatcattaagttcaattgactagctcaaaactgaaacagaaacagttc

SEQ ID NO: 134913 - DNA, 74 bp, Homo sapiens
taggtttaatcattaagttcaattgactagctcaaaactgaaacagaaacagttctaagaactggcacatcttc

SEQ ID NO: 134914 - DNA, 75 bp, Homo sapiens
ttaatcattaagttcaattgactagctcaaaactgaaacagaaacagttctaagaactggcacatcttcctgtat

SEQ ID NO: 134915 - DNA, 76 bp, Homo sapiens
ttcaattgactagctcaaaactgaaacagaaacagttctaagaactggcacatcttcctgtatttgcctttcaata

SEQ ID NO: 134916 - DNA, 76 bp, Homo sapiens
aaacagaaacagttctaagaactggcacatcttcctgtatttgcctttcaatacttatgctacactgtaccatcaa

SEQ ID NO: 134917 - DNA, 75 bp, Homo sapiens
aagaactggcacatcttcctgtatttgcctttcaatacttatgctacactgtaccatcaagaaaaatgtttatta

SEQ ID NO: 134918 - DNA, 73 bp, Homo sapiens
cacatcttcctgtatttgcctttcaatacttatgctacactgtaccatcaagaaaaatgtttattaaaatatt

SEQ ID NO: 134919 - DNA, 75 bp, Homo sapiens
ttgcctttcaatacttatgctacactgtaccatcaagaaaaatgtttattaaaatatttagtcatgcataccaaa

SEQ ID NO: 134920 - DNA, 74 bp, Homo sapiens
atgctacactgtaccatcaagaaaaatgtttattaaaatatttagtcatgcataccaaagtataataagaatta

SEQ ID NO: 134921 - DNA, 69 bp, Homo sapiens
ccatcaagaaaaatgtttattaaaatatttagtcatgcataccaaagtataataagaattaaaaaagga

SEQ ID NO: 134922 - DNA, 66 bp, Homo sapiens
agaaaaatgtttattaaaatatttagtcatgcataccaaagtataataagaattaaaaaaggaaaa

SEQ ID NO: 134923 - DNA, 66 bp, Homo sapiens
taaaatatttagtcatgcataccaaagtataataagaattaaaaaaggaaaaattatttaaccagt

SEQ ID NO: 134924 - DNA, 68 bp, Homo sapiens
tagtcatgcataccaaagtataataagaattaaaaaaggaaaaattatttaaccagtttattgaaata

SEQ ID NO: 134925 - DNA, 62 bp, Homo sapiens
aaaaaggaaaaattatttaaccagtttattgaaatatttaaccaggtagttaataccggaca

SEQ ID NO: 134926 - DNA, 64 bp, Homo sapiens
gaaatatttaaccaggtagttaataccggacaaagtttaccttaaataaagactatgtgtattt

SEQ ID NO: 134927 - DNA, 63 bp, Homo sapiens
atttaaccaggtagttaataccggacaaagtttaccttaaataaagactatgtgtattttatt

SEQ ID NO: 134928 - DNA, 66 bp, Homo sapiens
taataccggacaaagtttaccttaaataaagactatgtgtattttatttgtataaatctttcaggg

SEQ ID NO: 134929 - DNA, 64 bp, Homo sapiens
ccggacaaagtttaccttaaataaagactatgtgtattttatttgtataaatctttcagggttt

SEQ ID NO: 134930 - DNA, 67 bp, Homo sapiens
ccttaaataaagactatgtgtattttatttgtataaatctttcagggtttttctctttacaaccaga

SEQ ID NO: 134931 - DNA, 67 bp, Homo sapiens
gactatgtgtattttatttgtataaatctttcagggtttttctctttacaaccagaataaactttcc

SEQ ID NO: 134932 - DNA, 67 bp, Homo sapiens
gtgtattttatttgtataaatctttcagggtttttctctttacaaccagaataaactttcccaagca

SEQ ID NO: 134933 - DNA, 68 bp, Homo sapiens
tcagggtttttctctttacaaccagaataaactttcccaagcattgtcctctcatttaagagttaact

SEQ ID NO: 134934 - DNA, 71 bp, Homo sapiens
tctctttacaaccagaataaactttcccaagcattgtcctctcatttaagagttaactttattgtcaccaa

SEQ ID NO: 134935 - DNA, 69 bp, Homo sapiens
caaccagaataaactttcccaagcattgtcctctcatttaagagttaactttattgtcaccaaactatt

SEQ ID NO: 134936 - DNA, 70 bp, Homo sapiens
actttcccaagcattgtcctctcatttaagagttaactttattgtcaccaaactatttcaaattaggaca

SEQ ID NO: 134937 - DNA, 75 bp, Homo sapiens
gcattgtcctctcatttaagagttaactttattgtcaccaaactatttcaaattaggacaaatgagagatgcctg

SEQ ID NO: 134938 - DNA, 73 bp, Homo sapiens
gtcctctcatttaagagttaactttattgtcaccaaactatttcaaattaggacaaatgagagatgcctggat

SEQ ID NO: 134939 - DNA, 69 bp, Homo sapiens
agagttaactttattgtcaccaaactatttcaaattaggacaaatgagagatgcctggattttaaaccc

SEQ ID NO: 134940 - DNA, 70 bp, Homo sapiens
attgtcaccaaactatttcaaattaggacaaatgagagatgcctggattttaaaccccaaaagactaagc

SEQ ID NO: 134941 - DNA, 70 bp, Homo sapiens
aaactatttcaaattaggacaaatgagagatgcctggattttaaaccccaaaagactaagctaggcacta

SEQ ID NO: 134942 - DNA, 71 bp, Homo sapiens
tttcaaattaggacaaatgagagatgcctggattttaaaccccaaaagactaagctaggcactagaaagga

SEQ ID NO: 134943 - DNA, 73 bp, Homo sapiens
tgcctggattttaaaccccaaaagactaagctaggcactagaaaggatctgcagatgaaatttcttagactaa

SEQ ID NO: 134944 - DNA, 70 bp, Homo sapiens
ttttaaaccccaaaagactaagctaggcactagaaaggatctgcagatgaaatttcttagactaaggaaa

SEQ ID NO: 134945 - DNA, 69 bp, Homo sapiens
actagaaaggatctgcagatgaaatttcttagactaaggaaatatgtttttatttccctacttattaaa

SEQ ID NO: 134946 - DNA, 68 bp, Homo sapiens
atctgcagatgaaatttcttagactaaggaaatatgtttttatttccctacttattaaaatcaaactt

SEQ ID NO: 134947 - DNA, 67 bp, Homo sapiens
ttcttagactaaggaaatatgtttttatttccctacttattaaaatcaaacttttcaaagcagactc

SEQ ID NO: 134948 - DNA, 67 bp, Homo sapiens
gtttttatttccctacttattaaaatcaaacttttcaaagcagactctaattttgtctaggagaaga

SEQ ID NO: 134949 - DNA, 67 bp, Homo sapiens
atttccctacttattaaaatcaaacttttcaaagcagactctaattttgtctaggagaagaaattaa

SEQ ID NO: 134950 - DNA, 67 bp, Homo sapiens
cttattaaaatcaaacttttcaaagcagactctaattttgtctaggagaagaaattaatatttttta

SEQ ID NO: 134951 - DNA, 68 bp, Homo sapiens
tcaaacttttcaaagcagactctaattttgtctaggagaagaaattaatattttttatttggaatctt

SEQ ID NO: 134952 - DNA, 68 bp, Homo sapiens
caaagcagactctaattttgtctaggagaagaaattaatattttttatttggaatctttaatattatt

SEQ ID NO: 134953 - DNA, 69 bp, Homo sapiens
ttttgtctaggagaagaaattaatattttttatttggaatctttaatattattttatgctactttctca

SEQ ID NO: 134954 - DNA, 74 bp, Homo sapiens
gagaagaaattaatattttttatttggaatctttaatattattttatgctactttctcaagcagcatgtatgtg

SEQ ID NO: 134955 - DNA, 76 bp, Homo sapiens
taatattttttatttggaatctttaatattattttatgctactttctcaagcagcatgtatgtgttgtatatgttc

SEQ ID NO: 134956 - DNA, 77 bp, Homo sapiens
tatttggaatctttaatattattttatgctactttctcaagcagcatgtatgtgttgtatatgttctgtatttaaac

SEQ ID NO: 134957 - DNA, 77 bp, Homo sapiens
ctttaatattattttatgctactttctcaagcagcatgtatgtgttgtatatgttctgtatttaaacttccaagatg

SEQ ID NO: 134958 - DNA, 77 bp, Homo sapiens
attttatgctactttctcaagcagcatgtatgtgttgtatatgttctgtatttaaacttccaagatgtgtattaaaa

SEQ ID NO: 134959 - DNA, 80 bp, Homo sapiens
atgctactttctcaagcagcatgtatgtgttgtatatgttctgtatttaaacttccaagatgtgtattaaaagcattgaa

SEQ ID NO: 134960 - DNA, 79 bp, Homo sapiens
ctcaagcagcatgtatgtgttgtatatgttctgtatttaaacttccaagatgtgtattaaaagcattgaaaatgtgtag

SEQ ID NO: 134961 - DNA, 70 bp, Homo sapiens
ctgtatttaaacttccaagatgtgtattaaaagcattgaaaatgtgtagtaaaaacattgaaaatagggc

SEQ ID NO: 134962 - DNA, 72 bp, Homo sapiens
cttccaagatgtgtattaaaagcattgaaaatgtgtagtaaaaacattgaaaatagggctaataattctaga

SEQ ID NO: 134963 - DNA, 70 bp, Homo sapiens
gtgtattaaaagcattgaaaatgtgtagtaaaaacattgaaaatagggctaataattctagaaatactac

SEQ ID NO: 134964 - DNA, 68 bp, Homo sapiens
atgtgtagtaaaaacattgaaaatagggctaataattctagaaatactactttgtacaatttaaaaga

SEQ ID NO: 134965 - DNA, 67 bp, Homo sapiens
aaacattgaaaatagggctaataattctagaaatactactttgtacaatttaaaagaatataggaaa

SEQ ID NO: 134966 - DNA, 69 bp, Homo sapiens
atagggctaataattctagaaatactactttgtacaatttaaaagaatataggaaaattattattatca

SEQ ID NO: 134967 - DNA, 72 bp, Homo sapiens
taattctagaaatactactttgtacaatttaaaagaatataggaaaattattattatcatactgatgttata

SEQ ID NO: 134968 - DNA, 70 bp, Homo sapiens
agaaatactactttgtacaatttaaaagaatataggaaaattattattatcatactgatgttataaaaga

SEQ ID NO: 134969 - DNA, 72 bp, Homo sapiens
tgtacaatttaaaagaatataggaaaattattattatcatactgatgttataaaagaaaaatattgctacta

SEQ ID NO: 134970 - DNA, 72 bp, Homo sapiens
aagaatataggaaaattattattatcatactgatgttataaaagaaaaatattgctactaaatgtattccaa

SEQ ID NO: 134971 - DNA, 73 bp, Homo sapiens
gaaaattattattatcatactgatgttataaaagaaaaatattgctactaaatgtattccaaaatatggagcc

SEQ ID NO: 134972 - DNA, 75 bp, Homo sapiens
tgatgttataaaagaaaaatattgctactaaatgtattccaaaatatggagcctcaaataaaaggaagctgatgc

SEQ ID NO: 134973 - DNA, 76 bp, Homo sapiens
aaagaaaaatattgctactaaatgtattccaaaatatggagcctcaaataaaaggaagctgatgctgcctgttgca

SEQ ID NO: 134974 - DNA, 78 bp, Homo sapiens
aaaatattgctactaaatgtattccaaaatatggagcctcaaataaaaggaagctgatgctgcctgttgcaatcaatg

SEQ ID NO: 134975 - DNA, 80 bp, Homo sapiens
ttccaaaatatggagcctcaaataaaaggaagctgatgctgcctgttgcaatcaatggtaaaggcaggcactgtgaggaa

SEQ ID NO: 134976 - DNA, 83 bp, Homo sapiens
ataaaaggaagctgatgctgcctgttgcaatcaatggtaaaggcaggcactgtgaggaaggagcagaagcacttgatcagtta

SEQ ID NO: 134977 - DNA, 85 bp, Homo sapiens
ctgatgctgcctgttgcaatcaatggtaaaggcaggcactgtgaggaaggagcagaagcacttgatcagttacaaggaggtctga

SEQ ID NO: 134978 - DNA, 81 bp, Homo sapiens
cctgttgcaatcaatggtaaaggcaggcactgtgaggaaggagcagaagcacttgatcagttacaaggaggtctgagtcta

SEQ ID NO: 134979 - DNA, 82 bp, Homo sapiens
caggcactgtgaggaaggagcagaagcacttgatcagttacaaggaggtctgagtctagcacctgctctgctaccaattaat

SEQ ID NO: 134980 - DNA, 81 bp, Homo sapiens
acttgatcagttacaaggaggtctgagtctagcacctgctctgctaccaattaattactgatctggaactaatcactcagc

SEQ ID NO: 134981 - DNA, 80 bp, Homo sapiens
ttacaaggaggtctgagtctagcacctgctctgctaccaattaattactgatctggaactaatcactcagcctttatgta

SEQ ID NO: 134982 - DNA, 80 bp, Homo sapiens
aggtctgagtctagcacctgctctgctaccaattaattactgatctggaactaatcactcagcctttatgtagaatgagg

SEQ ID NO: 134983 - DNA, 74 bp, Homo sapiens
acctgctctgctaccaattaattactgatctggaactaatcactcagcctttatgtagaatgagggggttgggt

SEQ ID NO: 134984 - DNA, 74 bp, Homo sapiens
ctaccaattaattactgatctggaactaatcactcagcctttatgtagaatgagggggttgggttgatgaataa

SEQ ID NO: 134985 - DNA, 73 bp, Homo sapiens
aattaattactgatctggaactaatcactcagcctttatgtagaatgagggggttgggttgatgaataactaa

SEQ ID NO: 134986 - DNA, 72 bp, Homo sapiens
atctggaactaatcactcagcctttatgtagaatgagggggttgggttgatgaataactaatgtcacttttt

SEQ ID NO: 134987 - DNA, 75 bp, Homo sapiens
taatcactcagcctttatgtagaatgagggggttgggttgatgaataactaatgtcactttttttcaagatcata

SEQ ID NO: 134988 - DNA, 72 bp, Homo sapiens
agcctttatgtagaatgagggggttgggttgatgaataactaatgtcactttttttcaagatcataattcta

SEQ ID NO: 134989 - DNA, 69 bp, Homo sapiens
agaatgagggggttgggttgatgaataactaatgtcactttttttcaagatcataattctaaaactggt

SEQ ID NO: 134990 - DNA, 76 bp, Homo sapiens
tgggttgatgaataactaatgtcactttttttcaagatcataattctaaaactggttatatgatatgaacaagcca

SEQ ID NO: 134991 - DNA, 76 bp, Homo sapiens
tcactttttttcaagatcataattctaaaactggttatatgatatgaacaagccacttaatctttctgagtgtgac

SEQ ID NO: 134992 - DNA, 76 bp, Homo sapiens
tcaagatcataattctaaaactggttatatgatatgaacaagccacttaatctttctgagtgtgactttctttagg

SEQ ID NO: 134993 - DNA, 73 bp, Homo sapiens
cataattctaaaactggttatatgatatgaacaagccacttaatctttctgagtgtgactttctttaggtaaa

SEQ ID NO: 134994 - DNA, 72 bp, Homo sapiens
aaactggttatatgatatgaacaagccacttaatctttctgagtgtgactttctttaggtaaaaatacagtc

SEQ ID NO: 134995 - DNA, 73 bp, Homo sapiens
tgatatgaacaagccacttaatctttctgagtgtgactttctttaggtaaaaatacagtcttaaagataccag

SEQ ID NO: 134996 - DNA, 68 bp, Homo sapiens
gtgtgactttctttaggtaaaaatacagtcttaaagataccagtactatttttgctgtattttgtggg

SEQ ID NO: 134997 - DNA, 70 bp, Homo sapiens
aatacagtcttaaagataccagtactatttttgctgtattttgtgggtaatttaggtatttcagaggcta

SEQ ID NO: 134998 - DNA, 70 bp, Homo sapiens
agtcttaaagataccagtactatttttgctgtattttgtgggtaatttaggtatttcagaggctagagtc

SEQ ID NO: 134999 - DNA, 72 bp, Homo sapiens
agtactatttttgctgtattttgtgggtaatttaggtatttcagaggctagagtcttgaagtgtgtagtaca

SEQ ID NO: 135000 - DNA, 70 bp, Homo sapiens
gtattttgtgggtaatttaggtatttcagaggctagagtcttgaagtgtgtagtacaaggtgttaaacag

SEQ ID NO: 135001 - DNA, 74 bp, Homo sapiens
tttaggtatttcagaggctagagtcttgaagtgtgtagtacaaggtgttaaacaggtgattgtgacagaggaat

SEQ ID NO: 135002 - DNA, 75 bp, Homo sapiens
tatttcagaggctagagtcttgaagtgtgtagtacaaggtgttaaacaggtgattgtgacagaggaattgttagt

SEQ ID NO: 135003 - DNA, 74 bp, Homo sapiens
gagtcttgaagtgtgtagtacaaggtgttaaacaggtgattgtgacagaggaattgttagttcaacttggacta

SEQ ID NO: 135004 - DNA, 75 bp, Homo sapiens
ttgaagtgtgtagtacaaggtgttaaacaggtgattgtgacagaggaattgttagttcaacttggactagatatc

SEQ ID NO: 135005 - DNA, 74 bp, Homo sapiens
tagtacaaggtgttaaacaggtgattgtgacagaggaattgttagttcaacttggactagatatcctcaaccaa

SEQ ID NO: 135006 - DNA, 77 bp, Homo sapiens
ttaaacaggtgattgtgacagaggaattgttagttcaacttggactagatatcctcaaccaagatgcaaatggcaaa

SEQ ID NO: 135007 - DNA, 80 bp, Homo sapiens
gtgattgtgacagaggaattgttagttcaacttggactagatatcctcaaccaagatgcaaatggcaaagaagccagtca

SEQ ID NO: 135008 - DNA, 78 bp, Homo sapiens
agaggaattgttagttcaacttggactagatatcctcaaccaagatgcaaatggcaaagaagccagtcagcaaatgtg

SEQ ID NO: 135009 - DNA, 82 bp, Homo sapiens
tatcctcaaccaagatgcaaatggcaaagaagccagtcagcaaatgtgtgttgggtaccttctattcaatggcattgtgcta

SEQ ID NO: 135010 - DNA, 81 bp, Homo sapiens
atgcaaatggcaaagaagccagtcagcaaatgtgtgttgggtaccttctattcaatggcattgtgctaggatttgaagata

SEQ ID NO: 135011 - DNA, 77 bp, Homo sapiens
agtcagcaaatgtgtgttgggtaccttctattcaatggcattgtgctaggatttgaagatatggaccaagacccttg

SEQ ID NO: 135012 - DNA, 75 bp, Homo sapiens
aatgtgtgttgggtaccttctattcaatggcattgtgctaggatttgaagatatggaccaagacccttgttctaa

SEQ ID NO: 135013 - DNA, 74 bp, Homo sapiens
tattcaatggcattgtgctaggatttgaagatatggaccaagacccttgttctaaaaattggcaaattactcct

SEQ ID NO: 135014 - DNA, 70 bp, Homo sapiens
cattgtgctaggatttgaagatatggaccaagacccttgttctaaaaattggcaaattactccttaactt

SEQ ID NO: 135015 - DNA, 68 bp, Homo sapiens
ctaggatttgaagatatggaccaagacccttgttctaaaaattggcaaattactccttaactttaaga

SEQ ID NO: 135016 - DNA, 69 bp, Homo sapiens
gatatggaccaagacccttgttctaaaaattggcaaattactccttaactttaagaaatgactcttgac

SEQ ID NO: 135017 - DNA, 69 bp, Homo sapiens
ccaagacccttgttctaaaaattggcaaattactccttaactttaagaaatgactcttgacttacagca

SEQ ID NO: 135018 - DNA, 69 bp, Homo sapiens
ctaaaaattggcaaattactccttaactttaagaaatgactcttgacttacagcaaaaagacagaagga

SEQ ID NO: 135019 - DNA, 72 bp, Homo sapiens
attggcaaattactccttaactttaagaaatgactcttgacttacagcaaaaagacagaaggagtagacatg

SEQ ID NO: 135020 - DNA, 72 bp, Homo sapiens
cttaactttaagaaatgactcttgacttacagcaaaaagacagaaggagtagacatggatggacctccttct

SEQ ID NO: 135021 - DNA, 74 bp, Homo sapiens
ttaagaaatgactcttgacttacagcaaaaagacagaaggagtagacatggatggacctccttcttgtttacaa

SEQ ID NO: 135022 - DNA, 71 bp, Homo sapiens
agcaaaaagacagaaggagtagacatggatggacctccttcttgtttacaaacatagaagttacaaataaa

SEQ ID NO: 135023 - DNA, 72 bp, Homo sapiens
ccttcttgtttacaaacatagaagttacaaataaaatatgagaataattcaaatatgcaagcaggctttctt

SEQ ID NO: 135024 - DNA, 74 bp, Homo sapiens
ttacaaacatagaagttacaaataaaatatgagaataattcaaatatgcaagcaggctttctttcttgaggaaa

SEQ ID NO: 135025 - DNA, 75 bp, Homo sapiens
aaatatgagaataattcaaatatgcaagcaggctttctttcttgaggaaaaatcacaagtggcagaaataaagag

SEQ ID NO: 135026 - DNA, 74 bp, Homo sapiens
taattcaaatatgcaagcaggctttctttcttgaggaaaaatcacaagtggcagaaataaagagtaaagtcaac

SEQ ID NO: 135027 - DNA, 75 bp, Homo sapiens
aaatatgcaagcaggctttctttcttgaggaaaaatcacaagtggcagaaataaagagtaaagtcaaccatatga

SEQ ID NO: 135028 - DNA, 73 bp, Homo sapiens
aggctttctttcttgaggaaaaatcacaagtggcagaaataaagagtaaagtcaaccatatgaggggcagcaa

SEQ ID NO: 135029 - DNA, 78 bp, Homo sapiens
ttgaggaaaaatcacaagtggcagaaataaagagtaaagtcaaccatatgaggggcagcaagcactggtgcaatttca

SEQ ID NO: 135030 - DNA, 78 bp, Homo sapiens
aaaaatcacaagtggcagaaataaagagtaaagtcaaccatatgaggggcagcaagcactggtgcaatttcaatgcat

SEQ ID NO: 135031 - DNA, 78 bp, Homo sapiens
aagtggcagaaataaagagtaaagtcaaccatatgaggggcagcaagcactggtgcaatttcaatgcattcaggggga

SEQ ID NO: 135032 - DNA, 80 bp, Homo sapiens
ataaagagtaaagtcaaccatatgaggggcagcaagcactggtgcaatttcaatgcattcagggggacaggaggcatgat

SEQ ID NO: 135033 - DNA, 83 bp, Homo sapiens
aaagtcaaccatatgaggggcagcaagcactggtgcaatttcaatgcattcagggggacaggaggcatgatttctatgctgta

SEQ ID NO: 135034 - DNA, 85 bp, Homo sapiens
atatgaggggcagcaagcactggtgcaatttcaatgcattcagggggacaggaggcatgatttctatgctgtatgaagcaaggga

SEQ ID NO: 135035 - DNA, 81 bp, Homo sapiens
ggacaggaggcatgatttctatgctgtatgaagcaagggagctggacctgagccaccagcaaaatacctaagccttgagta

SEQ ID NO: 135036 - DNA, 81 bp, Homo sapiens
catgatttctatgctgtatgaagcaagggagctggacctgagccaccagcaaaatacctaagccttgagtaggatcaacca

SEQ ID NO: 135037 - DNA, 72 bp, Homo sapiens
agctggacctgagccaccagcaaaatacctaagccttgagtaggatcaaccaagaaaagaagattagaaaaa

SEQ ID NO: 135038 - DNA, 70 bp, Homo sapiens
tgagccaccagcaaaatacctaagccttgagtaggatcaaccaagaaaagaagattagaaaaattttact

SEQ ID NO: 135039 - DNA, 69 bp, Homo sapiens
cagcaaaatacctaagccttgagtaggatcaaccaagaaaagaagattagaaaaattttacttactagc

SEQ ID NO: 135040 - DNA, 69 bp, Homo sapiens
ctaagccttgagtaggatcaaccaagaaaagaagattagaaaaattttacttactagcccaaagaagca

SEQ ID NO: 135041 - DNA, 69 bp, Homo sapiens
tgagtaggatcaaccaagaaaagaagattagaaaaattttacttactagcccaaagaagcattaaataa

SEQ ID NO: 135042 - DNA, 71 bp, Homo sapiens
caagaaaagaagattagaaaaattttacttactagcccaaagaagcattaaataacactatcatctgttca

SEQ ID NO: 135043 - DNA, 73 bp, Homo sapiens
gaagattagaaaaattttacttactagcccaaagaagcattaaataacactatcatctgttcagagccataag

SEQ ID NO: 135044 - DNA, 72 bp, Homo sapiens
gaaaaattttacttactagcccaaagaagcattaaataacactatcatctgttcagagccataagtaaggaa

SEQ ID NO: 135045 - DNA, 72 bp, Homo sapiens
cttactagcccaaagaagcattaaataacactatcatctgttcagagccataagtaaggaaaaaaaagtcac

SEQ ID NO: 135046 - DNA, 72 bp, Homo sapiens
ccaaagaagcattaaataacactatcatctgttcagagccataagtaaggaaaaaaaagtcactaccagtaa

SEQ ID NO: 135047 - DNA, 70 bp, Homo sapiens
ttaaataacactatcatctgttcagagccataagtaaggaaaaaaaagtcactaccagtaattgaaaccc

SEQ ID NO: 135048 - DNA, 71 bp, Homo sapiens
tatcatctgttcagagccataagtaaggaaaaaaaagtcactaccagtaattgaaaccccaggctttacaa

SEQ ID NO: 135049 - DNA, 67 bp, Homo sapiens
taaggaaaaaaaagtcactaccagtaattgaaaccccaggctttacaatctaaatctgtcctaccta

SEQ ID NO: 135050 - DNA, 70 bp, Homo sapiens
accagtaattgaaaccccaggctttacaatctaaatctgtcctacctatacagtattgaaatctccaaaa

SEQ ID NO: 135051 - DNA, 70 bp, Homo sapiens
attgaaaccccaggctttacaatctaaatctgtcctacctatacagtattgaaatctccaaaaataatcc

SEQ ID NO: 135052 - DNA, 73 bp, Homo sapiens
caggctttacaatctaaatctgtcctacctatacagtattgaaatctccaaaaataatcctaatactagttca

SEQ ID NO: 135053 - DNA, 73 bp, Homo sapiens
ctaaatctgtcctacctatacagtattgaaatctccaaaaataatcctaatactagttcaagactactactga

SEQ ID NO: 135054 - DNA, 74 bp, Homo sapiens
ctgtcctacctatacagtattgaaatctccaaaaataatcctaatactagttcaagactactactgatggtgcc

SEQ ID NO: 135055 - DNA, 72 bp, Homo sapiens
agtattgaaatctccaaaaataatcctaatactagttcaagactactactgatggtgccccaggatcgtaaa

SEQ ID NO: 135056 - DNA, 73 bp, Homo sapiens
tctccaaaaataatcctaatactagttcaagactactactgatggtgccccaggatcgtaaaagaagtaatca

SEQ ID NO: 135057 - DNA, 73 bp, Homo sapiens
ttcaagactactactgatggtgccccaggatcgtaaaagaagtaatcatgaaattttcctgtggaaatatttc

SEQ ID NO: 135058 - DNA, 72 bp, Homo sapiens
tactgatggtgccccaggatcgtaaaagaagtaatcatgaaattttcctgtggaaatatttccacaaacaaa

SEQ ID NO: 135059 - DNA, 68 bp, Homo sapiens
cccaggatcgtaaaagaagtaatcatgaaattttcctgtggaaatatttccacaaacaaaacccataa

SEQ ID NO: 135060 - DNA, 69 bp, Homo sapiens
aaagaagtaatcatgaaattttcctgtggaaatatttccacaaacaaaacccataaaagtctcatggaa

SEQ ID NO: 135061 - DNA, 71 bp, Homo sapiens
gtaatcatgaaattttcctgtggaaatatttccacaaacaaaacccataaaagtctcatggaagaataata

SEQ ID NO: 135062 - DNA, 70 bp, Homo sapiens
ttcctgtggaaatatttccacaaacaaaacccataaaagtctcatggaagaataataaataagacaaaga

SEQ ID NO: 135063 - DNA, 70 bp, Homo sapiens
gtggaaatatttccacaaacaaaacccataaaagtctcatggaagaataataaataagacaaagatgagt

SEQ ID NO: 135064 - DNA, 71 bp, Homo sapiens
tccacaaacaaaacccataaaagtctcatggaagaataataaataagacaaagatgagtttacaatacaaa

SEQ ID NO: 135065 - DNA, 82 bp, Homo sapiens
tctcatggaagaataataaataagacaaagatgagtttacaatacaaaattacatgcgaaccatgatgctggagagacatca

SEQ ID NO: 135066 - DNA, 83 bp, Homo sapiens
gaataataaataagacaaagatgagtttacaatacaaaattacatgcgaaccatgatgctggagagacatcagatgtcatcaa

SEQ ID NO: 135067 - DNA, 82 bp, Homo sapiens
taagacaaagatgagtttacaatacaaaattacatgcgaaccatgatgctggagagacatcagatgtcatcaaaaggattaa

SEQ ID NO: 135068 - DNA, 79 bp, Homo sapiens
aaagatgagtttacaatacaaaattacatgcgaaccatgatgctggagagacatcagatgtcatcaaaaggattaaccc

SEQ ID NO: 135069 - DNA, 81 bp, Homo sapiens
atacaaaattacatgcgaaccatgatgctggagagacatcagatgtcatcaaaaggattaaccctcccagaattggatata

SEQ ID NO: 135070 - DNA, 80 bp, Homo sapiens
aaattacatgcgaaccatgatgctggagagacatcagatgtcatcaaaaggattaaccctcccagaattggatataacaa

SEQ ID NO: 135071 - DNA, 79 bp, Homo sapiens
aaccatgatgctggagagacatcagatgtcatcaaaaggattaaccctcccagaattggatataacaaaaccatctgaa

SEQ ID NO: 135072 - DNA, 77 bp, Homo sapiens
gagagacatcagatgtcatcaaaaggattaaccctcccagaattggatataacaaaaccatctgaaagagaatataa

SEQ ID NO: 135073 - DNA, 74 bp, Homo sapiens
acatcagatgtcatcaaaaggattaaccctcccagaattggatataacaaaaccatctgaaagagaatataaaa

SEQ ID NO: 135074 - DNA, 70 bp, Homo sapiens
cccagaattggatataacaaaaccatctgaaagagaatataaaatatgtttaacaagattaagcctttaa

SEQ ID NO: 135075 - DNA, 71 bp, Homo sapiens
gatataacaaaaccatctgaaagagaatataaaatatgtttaacaagattaagcctttaaaatacaggaga

SEQ ID NO: 135076 - DNA, 68 bp, Homo sapiens
aaccatctgaaagagaatataaaatatgtttaacaagattaagcctttaaaatacaggagaaaaataa

SEQ ID NO: 135077 - DNA, 62 bp, Homo sapiens
aaagaaaaatacagtattttaaaaagaataggagaatttgaaaaagaaccaaataatacttt

SEQ ID NO: 135078 - DNA, 66 bp, Homo sapiens
atacttttaaaatagaaaatatagtaatgataaaaaaattaatgagtgatttaaaaggaggttaga

SEQ ID NO: 135079 - DNA, 67 bp, Homo sapiens
aatagaaaatatagtaatgataaaaaaattaatgagtgatttaaaaggaggttagaaatcattaagg

SEQ ID NO: 135080 - DNA, 74 bp, Homo sapiens
atatagtaatgataaaaaaattaatgagtgatttaaaaggaggttagaaatcattaaggtgctgagcatggtga

SEQ ID NO: 135081 - DNA, 76 bp, Homo sapiens
atgataaaaaaattaatgagtgatttaaaaggaggttagaaatcattaaggtgctgagcatggtgattcatgcctg

SEQ ID NO: 135082 - DNA, 75 bp, Homo sapiens
aagacctcatctgtgcaaaacacaaaatattatttcaaaaataaccaggcgtagtggcgcctgcctgtagtctca

SEQ ID NO: 135083 - DNA, 64 bp, Homo sapiens
aaacaaataaagtcccccctccacaccctaataattacagagaaaactagggaatggaaaagaa

SEQ ID NO: 135084 - DNA, 65 bp, Homo sapiens
aataaagtcccccctccacaccctaataattacagagaaaactagggaatggaaaagaaagctag

SEQ ID NO: 135085 - DNA, 70 bp, Homo sapiens
tccacaccctaataattacagagaaaactagggaatggaaaagaaagctaggaaactgtaattcaacaca

SEQ ID NO: 135086 - DNA, 68 bp, Homo sapiens
ccctaataattacagagaaaactagggaatggaaaagaaagctaggaaactgtaattcaacacagtaa

SEQ ID NO: 135087 - DNA, 70 bp, Homo sapiens
acagagaaaactagggaatggaaaagaaagctaggaaactgtaattcaacacagtaatataaagagatgt

SEQ ID NO: 135088 - DNA, 72 bp, Homo sapiens
gggaatggaaaagaaagctaggaaactgtaattcaacacagtaatataaagagatgttaacaataatgagat

SEQ ID NO: 135089 - DNA, 71 bp, Homo sapiens
ggaaaagaaagctaggaaactgtaattcaacacagtaatataaagagatgttaacaataatgagattaaaa

SEQ ID NO: 135090 - DNA, 74 bp, Homo sapiens
gctaggaaactgtaattcaacacagtaatataaagagatgttaacaataatgagattaaaaaatttgatgtata

SEQ ID NO: 135091 - DNA, 74 bp, Homo sapiens
ttcaacacagtaatataaagagatgttaacaataatgagattaaaaaatttgatgtatagaaggctaaagtcca

SEQ ID NO: 135092 - DNA, 72 bp, Homo sapiens
taatataaagagatgttaacaataatgagattaaaaaatttgatgtatagaaggctaaagtccaacagggtc

SEQ ID NO: 135093 - DNA, 74 bp, Homo sapiens
gagatgttaacaataatgagattaaaaaatttgatgtatagaaggctaaagtccaacagggtctatgagacatt

SEQ ID NO: 135094 - DNA, 75 bp, Homo sapiens
acaataatgagattaaaaaatttgatgtatagaaggctaaagtccaacagggtctatgagacatttcagaagaga

SEQ ID NO: 135095 - DNA, 75 bp, Homo sapiens
atgagattaaaaaatttgatgtatagaaggctaaagtccaacagggtctatgagacatttcagaagagaatagaa

SEQ ID NO: 135096 - DNA, 74 bp, Homo sapiens
gagattaaaaaatttgatgtatagaaggctaaagtccaacagggtctatgagacatttcagaagagaatagaaa

SEQ ID NO: 135097 - DNA, 75 bp, Homo sapiens
aaatttgatgtatagaaggctaaagtccaacagggtctatgagacatttcagaagagaatagaaaatatgggaga

SEQ ID NO: 135098 - DNA, 76 bp, Homo sapiens
tatagaaggctaaagtccaacagggtctatgagacatttcagaagagaatagaaaatatgggagaagcaactctta

SEQ ID NO: 135099 - DNA, 73 bp, Homo sapiens
aaggctaaagtccaacagggtctatgagacatttcagaagagaatagaaaatatgggagaagcaactcttaaa

SEQ ID NO: 135100 - DNA, 74 bp, Homo sapiens
taaagtccaacagggtctatgagacatttcagaagagaatagaaaatatgggagaagcaactcttaaagaagta

SEQ ID NO: 135101 - DNA, 74 bp, Homo sapiens
tccaacagggtctatgagacatttcagaagagaatagaaaatatgggagaagcaactcttaaagaagtaataac

SEQ ID NO: 135102 - DNA, 73 bp, Homo sapiens
cagggtctatgagacatttcagaagagaatagaaaatatgggagaagcaactcttaaagaagtaataactaaa

SEQ ID NO: 135103 - DNA, 71 bp, Homo sapiens
ctatgagacatttcagaagagaatagaaaatatgggagaagcaactcttaaagaagtaataactaaaaagt

SEQ ID NO: 135104 - DNA, 71 bp, Homo sapiens
tcagaagagaatagaaaatatgggagaagcaactcttaaagaagtaataactaaaaagttttcttgattga

SEQ ID NO: 135105 - DNA, 69 bp, Homo sapiens
tagaaaatatgggagaagcaactcttaaagaagtaataactaaaaagttttcttgattgaaggatgact

SEQ ID NO: 135106 - DNA, 70 bp, Homo sapiens
gcaactcttaaagaagtaataactaaaaagttttcttgattgaaggatgacttttcaagtaggcaaagca

SEQ ID NO: 135107 - DNA, 67 bp, Homo sapiens
aaagaagtaataactaaaaagttttcttgattgaaggatgacttttcaagtaggcaaagcaaaaaca

SEQ ID NO: 135108 - DNA, 70 bp, Homo sapiens
ctaaaaagttttcttgattgaaggatgacttttcaagtaggcaaagcaaaaacaaaccacatcatggtaa

SEQ ID NO: 135109 - DNA, 76 bp, Homo sapiens
tttcttgattgaaggatgacttttcaagtaggcaaagcaaaaacaaaccacatcatggtaaaattgcagaacatca

SEQ ID NO: 135110 - DNA, 76 bp, Homo sapiens
ttgaaggatgacttttcaagtaggcaaagcaaaaacaaaccacatcatggtaaaattgcagaacatcagataaaga

SEQ ID NO: 135111 - DNA, 71 bp, Homo sapiens
acttttcaagtaggcaaagcaaaaacaaaccacatcatggtaaaattgcagaacatcagataaagaaaatt

SEQ ID NO: 135112 - DNA, 71 bp, Homo sapiens
aggcaaagcaaaaacaaaccacatcatggtaaaattgcagaacatcagataaagaaaatttaaaagatgtt

SEQ ID NO: 135113 - DNA, 70 bp, Homo sapiens
aaaacaaaccacatcatggtaaaattgcagaacatcagataaagaaaatttaaaagatgtttatagaaaa

SEQ ID NO: 135114 - DNA, 71 bp, Homo sapiens
cacatcatggtaaaattgcagaacatcagataaagaaaatttaaaagatgtttatagaaaaaagagtcccc

SEQ ID NO: 135115 - DNA, 68 bp, Homo sapiens
taaaattgcagaacatcagataaagaaaatttaaaagatgtttatagaaaaaagagtcccccaaaata

SEQ ID NO: 135116 - DNA, 70 bp, Homo sapiens
ggtattcaattagaaaaataatattttcaaggtgttgtcaacccagaattcctaccttatcaaactgaca

SEQ ID NO: 135117 - DNA, 73 bp, Homo sapiens
gaaaaataatattttcaaggtgttgtcaacccagaattcctaccttatcaaactgacaatcacagtgagagaa

SEQ ID NO: 135118 - DNA, 72 bp, Homo sapiens
aatattttcaaggtgttgtcaacccagaattcctaccttatcaaactgacaatcacagtgagagaaaaataa

SEQ ID NO: 135119 - DNA, 71 bp, Homo sapiens
aaggtgttgtcaacccagaattcctaccttatcaaactgacaatcacagtgagagaaaaataaaagcattt

SEQ ID NO: 135120 - DNA, 74 bp, Homo sapiens
tcaacccagaattcctaccttatcaaactgacaatcacagtgagagaaaaataaaagcattttcagctaaacac

SEQ ID NO: 135121 - DNA, 75 bp, Homo sapiens
attcctaccttatcaaactgacaatcacagtgagagaaaaataaaagcattttcagctaaacactggagaatctg

SEQ ID NO: 135122 - DNA, 78 bp, Homo sapiens
tatcaaactgacaatcacagtgagagaaaaataaaagcattttcagctaaacactggagaatctgtccctcacagacc

SEQ ID NO: 135123 - DNA, 76 bp, Homo sapiens
aatcacagtgagagaaaaataaaagcattttcagctaaacactggagaatctgtccctcacagaccctggctgaaa

SEQ ID NO: 135124 - DNA, 73 bp, Homo sapiens
gaaaaataaaagcattttcagctaaacactggagaatctgtccctcacagaccctggctgaaagaattattaa

SEQ ID NO: 135125 - DNA, 74 bp, Homo sapiens
aaaagcattttcagctaaacactggagaatctgtccctcacagaccctggctgaaagaattattaaatcgtata

SEQ ID NO: 135126 - DNA, 75 bp, Homo sapiens
tttcagctaaacactggagaatctgtccctcacagaccctggctgaaagaattattaaatcgtatacatcaaaaa

SEQ ID NO: 135127 - DNA, 74 bp, Homo sapiens
acactggagaatctgtccctcacagaccctggctgaaagaattattaaatcgtatacatcaaaaagcaagaaat

SEQ ID NO: 135128 - DNA, 74 bp, Homo sapiens
tccctcacagaccctggctgaaagaattattaaatcgtatacatcaaaaagcaagaaattgaatccagaagaaa

SEQ ID NO: 135129 - DNA, 73 bp, Homo sapiens
cacagaccctggctgaaagaattattaaatcgtatacatcaaaaagcaagaaattgaatccagaagaaagtaa

SEQ ID NO: 135130 - DNA, 76 bp, Homo sapiens
gctgaaagaattattaaatcgtatacatcaaaaagcaagaaattgaatccagaagaaagtaaatgcaatacagaca

SEQ ID NO: 135131 - DNA, 74 bp, Homo sapiens
attattaaatcgtatacatcaaaaagcaagaaattgaatccagaagaaagtaaatgcaatacagacacaccttg

SEQ ID NO: 135132 - DNA, 76 bp, Homo sapiens
cgtatacatcaaaaagcaagaaattgaatccagaagaaagtaaatgcaatacagacacaccttgttttattgcaca

SEQ ID NO: 135133 - DNA, 77 bp, Homo sapiens
catcaaaaagcaagaaattgaatccagaagaaagtaaatgcaatacagacacaccttgttttattgcacatcatagg

SEQ ID NO: 135134 - DNA, 77 bp, Homo sapiens
gcaagaaattgaatccagaagaaagtaaatgcaatacagacacaccttgttttattgcacatcataggtattatgtt

SEQ ID NO: 135135 - DNA, 74 bp, Homo sapiens
aattgaatccagaagaaagtaaatgcaatacagacacaccttgttttattgcacatcataggtattatgttttt

SEQ ID NO: 135136 - DNA, 73 bp, Homo sapiens
gaatccagaagaaagtaaatgcaatacagacacaccttgttttattgcacatcataggtattatgtttttttt

SEQ ID NO: 135137 - DNA, 71 bp, Homo sapiens
cagaagaaagtaaatgcaatacagacacaccttgttttattgcacatcataggtattatgttttttttttt

SEQ ID NO: 135138 - DNA, 70 bp, Homo sapiens
tttttttacaactggaagttttgtggcaactctgtgtcaagcaggtctgttggtcccatttttccaataa

SEQ ID NO: 135139 - DNA, 76 bp, Homo sapiens
tacaactggaagttttgtggcaactctgtgtcaagcaggtctgttggtcccatttttccaataacatgtgctcgct

SEQ ID NO: 135140 - DNA, 78 bp, Homo sapiens
aagttttgtggcaactctgtgtcaagcaggtctgttggtcccatttttccaataacatgtgctcgcttcatgtctctg

SEQ ID NO: 135141 - DNA, 80 bp, Homo sapiens
aactctgtgtcaagcaggtctgttggtcccatttttccaataacatgtgctcgcttcatgtctctgtgtcagtcacattt

SEQ ID NO: 135142 - DNA, 75 bp, Homo sapiens
atctttgatgttactattgcaattgtttttgggtgccgtgaaccacgtccatgtaaagatggcaaacataatcaa

SEQ ID NO: 135143 - DNA, 74 bp, Homo sapiens
atgttactattgcaattgtttttgggtgccgtgaaccacgtccatgtaaagatggcaaacataatcaataaatg

SEQ ID NO: 135144 - DNA, 73 bp, Homo sapiens
aattgtttttgggtgccgtgaaccacgtccatgtaaagatggcaaacataatcaataaatgttgtatgtgttc

SEQ ID NO: 135145 - DNA, 83 bp, Homo sapiens
atggcaaacataatcaataaatgttgtatgtgttctgactgctctacagactggcaaatccctcaactctcatactcttctca

SEQ ID NO: 135146 - DNA, 82 bp, Homo sapiens
atcaataaatgttgtatgtgttctgactgctctacagactggcaaatccctcaactctcatactcttctcaggcctctctat

SEQ ID NO: 135147 - DNA, 81 bp, Homo sapiens
taaatgttgtatgtgttctgactgctctacagactggcaaatccctcaactctcatactcttctcaggcctctctattccc

SEQ ID NO: 135148 - DNA, 81 bp, Homo sapiens
ttctgactgctctacagactggcaaatccctcaactctcatactcttctcaggcctctctattccccgagacacaacatcg

SEQ ID NO: 135149 - DNA, 78 bp, Homo sapiens
tctacagactggcaaatccctcaactctcatactcttctcaggcctctctattccccgagacacaacatcgttgaaat

SEQ ID NO: 135150 - DNA, 76 bp, Homo sapiens
agactggcaaatccctcaactctcatactcttctcaggcctctctattccccgagacacaacatcgttgaaattag

SEQ ID NO: 135151 - DNA, 75 bp, Homo sapiens
atccctcaactctcatactcttctcaggcctctctattccccgagacacaacatcgttgaaattaggccaattaa

SEQ ID NO: 135152 - DNA, 77 bp, Homo sapiens
ggccaattaataatcctacaatggcctctaactatttgagcgaaaggaagagttgcatgtctctcacttggaatcaa

SEQ ID NO: 135153 - DNA, 76 bp, Homo sapiens
attaataatcctacaatggcctctaactatttgagcgaaaggaagagttgcatgtctctcacttggaatcaaaagc

SEQ ID NO: 135154 - DNA, 77 bp, Homo sapiens
ctagaaatgattaagtttagtgagaaaagcatgtgaaagctgagaaagcagaaagctagtatgttgtgccaaacagt

SEQ ID NO: 135155 - DNA, 76 bp, Homo sapiens
ttaagtttagtgagaaaagcatgtgaaagctgagaaagcagaaagctagtatgttgtgccaaacagttagccaaat

SEQ ID NO: 135156 - DNA, 81 bp, Homo sapiens
tagtgagaaaagcatgtgaaagctgagaaagcagaaagctagtatgttgtgccaaacagttagccaaattgtgattgcaaa

SEQ ID NO: 135157 - DNA, 74 bp, Homo sapiens
gtgaacacacaaatggtaagaaaataaaagagtctttttgctgatatggagaaaatttgagtggtctggatgga

SEQ ID NO: 135158 - DNA, 73 bp, Homo sapiens
cctaatccagaacaaggctctaacttgtttcaattctatggaggctgagagagttgagaaaactacaaaggaa

SEQ ID NO: 135159 - DNA, 71 bp, Homo sapiens
aacaaggctctaacttgtttcaattctatggaggctgagagagttgagaaaactacaaaggaaaagttgga

SEQ ID NO: 135160 - DNA, 74 bp, Homo sapiens
taacttgtttcaattctatggaggctgagagagttgagaaaactacaaaggaaaagttggaatctagcagagat

SEQ ID NO: 135161 - DNA, 74 bp, Homo sapiens
tttcaattctatggaggctgagagagttgagaaaactacaaaggaaaagttggaatctagcagagattggttta

SEQ ID NO: 135162 - DNA, 74 bp, Homo sapiens
aattctatggaggctgagagagttgagaaaactacaaaggaaaagttggaatctagcagagattggtttatgaa

SEQ ID NO: 135163 - DNA, 74 bp, Homo sapiens
gaggctgagagagttgagaaaactacaaaggaaaagttggaatctagcagagattggtttatgaagtttaatga

SEQ ID NO: 135164 - DNA, 73 bp, Homo sapiens
aggctgagagagttgagaaaactacaaaggaaaagttggaatctagcagagattggtttatgaagtttaatga

SEQ ID NO: 135165 - DNA, 73 bp, Homo sapiens
tgagagagttgagaaaactacaaaggaaaagttggaatctagcagagattggtttatgaagtttaatgaaaga

SEQ ID NO: 135166 - DNA, 71 bp, Homo sapiens
gagttgagaaaactacaaaggaaaagttggaatctagcagagattggtttatgaagtttaatgaaagaagc

SEQ ID NO: 135167 - DNA, 72 bp, Homo sapiens
gagaaaactacaaaggaaaagttggaatctagcagagattggtttatgaagtttaatgaaagaagccatctc

SEQ ID NO: 135168 - DNA, 73 bp, Homo sapiens
actacaaaggaaaagttggaatctagcagagattggtttatgaagtttaatgaaagaagccatctccataaca

SEQ ID NO: 135169 - DNA, 75 bp, Homo sapiens
atctaggactttcacagctagagaggagaagtcaacaaacatctggctccaaacttcaaaggacaggttctcttg

SEQ ID NO: 135170 - DNA, 76 bp, Homo sapiens
ttcacagctagagaggagaagtcaacaaacatctggctccaaacttcaaaggacaggttctcttgttagtagctaa

SEQ ID NO: 135171 - DNA, 74 bp, Homo sapiens
gagaggagaagtcaacaaacatctggctccaaacttcaaaggacaggttctcttgttagtagctaatacggctg

SEQ ID NO: 135172 - DNA, 73 bp, Homo sapiens
gtcaacaaacatctggctccaaacttcaaaggacaggttctcttgttagtagctaatacggctggtgacctaa

SEQ ID NO: 135173 - DNA, 70 bp, Homo sapiens
aaacatctggctccaaacttcaaaggacaggttctcttgttagtagctaatacggctggtgacctaaagt

SEQ ID NO: 135174 - DNA, 71 bp, Homo sapiens
aaacttcaaaggacaggttctcttgttagtagctaatacggctggtgacctaaagttgaagccaatgttca

SEQ ID NO: 135175 - DNA, 72 bp, Homo sapiens
aaaggacaggttctcttgttagtagctaatacggctggtgacctaaagttgaagccaatgttcattcaccag

SEQ ID NO: 135176 - DNA, 75 bp, Homo sapiens
tcttgttagtagctaatacggctggtgacctaaagttgaagccaatgttcattcaccagtggtttcgagatgaaa

SEQ ID NO: 135177 - DNA, 74 bp, Homo sapiens
ttagtagctaatacggctggtgacctaaagttgaagccaatgttcattcaccagtggtttcgagatgaaactat

SEQ ID NO: 135178 - DNA, 75 bp, Homo sapiens
atacggctggtgacctaaagttgaagccaatgttcattcaccagtggtttcgagatgaaactattccacttcaga

SEQ ID NO: 135179 - DNA, 76 bp, Homo sapiens
taaagttgaagccaatgttcattcaccagtggtttcgagatgaaactattccacttcagatcattgggtattagac

SEQ ID NO: 135180 - DNA, 77 bp, Homo sapiens
aagccaatgttcattcaccagtggtttcgagatgaaactattccacttcagatcattgggtattagactctcataac

SEQ ID NO: 135181 - DNA, 80 bp, Homo sapiens
tgttcattcaccagtggtttcgagatgaaactattccacttcagatcattgggtattagactctcataacgagcgtgcaa

SEQ ID NO: 135182 - DNA, 78 bp, Homo sapiens
agtggtttcgagatgaaactattccacttcagatcattgggtattagactctcataacgagcgtgcaacctacatctc

SEQ ID NO: 135183 - DNA, 84 bp, Homo sapiens
tgaaactattccacttcagatcattgggtattagactctcataacgagcgtgcaacctacatctcttgcatgcatagttcatgt

SEQ ID NO: 135184 - DNA, 83 bp, Homo sapiens
aactattccacttcagatcattgggtattagactctcataacgagcgtgcaacctacatctcttgcatgcatagttcatgtta

SEQ ID NO: 135185 - DNA, 81 bp, Homo sapiens
ccacttcagatcattgggtattagactctcataacgagcgtgcaacctacatctcttgcatgcatagttcatgttacggtt

SEQ ID NO: 135186 - DNA, 81 bp, Homo sapiens
acttcagatcattgggtattagactctcataacgagcgtgcaacctacatctcttgcatgcatagttcatgttacggtttg

SEQ ID NO: 135187 - DNA, 82 bp, Homo sapiens
atcattgggtattagactctcataacgagcgtgcaacctacatctcttgcatgcatagttcatgttacggtttgtgctctta

SEQ ID NO: 135188 - DNA, 83 bp, Homo sapiens
tgggtattagactctcataacgagcgtgcaacctacatctcttgcatgcatagttcatgttacggtttgtgctcttatgataa

SEQ ID NO: 135189 - DNA, 84 bp, Homo sapiens
gtattagactctcataacgagcgtgcaacctacatctcttgcatgcatagttcatgttacggtttgtgctcttatgataatcta

SEQ ID NO: 135190 - DNA, 85 bp, Homo sapiens
ttagactctcataacgagcgtgcaacctacatctcttgcatgcatagttcatgttacggtttgtgctcttatgataatctaatgc

SEQ ID NO: 135191 - DNA, 90 bp, Homo sapiens
tctcataacgagcgtgcaacctacatctcttgcatgcatagttcatgttacggtttgtgctcttatgataatctaatgctgctgatctga

SEQ ID NO: 135192 - DNA, 88 bp, Homo sapiens
ataacgagcgtgcaacctacatctcttgcatgcatagttcatgttacggtttgtgctcttatgataatctaatgctgctgatctgaca

SEQ ID NO: 135193 - DNA, 70 bp, Homo sapiens
ctgctgtgtggcctggttcctaataggccatggattggtacccggggctggggacccctgtactagagtt

SEQ ID NO: 135194 - DNA, 67 bp, Homo sapiens
gcctggttcctaataggccatggattggtacccggggctggggacccctgtactagagttttatagt

SEQ ID NO: 135195 - DNA, 68 bp, Homo sapiens
gttcctaataggccatggattggtacccggggctggggacccctgtactagagttttatagttttgca

SEQ ID NO: 135196 - DNA, 77 bp, Homo sapiens
ttatagttttgcattttacgttagatctatgattcatttgagatagtttttgtgaaagatgtaagtctctctctata

SEQ ID NO: 135197 - DNA, 77 bp, Homo sapiens
gttttgcattttacgttagatctatgattcatttgagatagtttttgtgaaagatgtaagtctctctctatattcat

SEQ ID NO: 135198 - DNA, 74 bp, Homo sapiens
ttacgttagatctatgattcatttgagatagtttttgtgaaagatgtaagtctctctctatattcatttttttt

SEQ ID NO: 135199 - DNA, 76 bp, Homo sapiens
gttgaaaagactatcctctctccattgaatttcccttgcttctttgttgaggagcagttgactatatttgcatggg

SEQ ID NO: 135200 - DNA, 77 bp, Homo sapiens
agactatcctctctccattgaatttcccttgcttctttgttgaggagcagttgactatatttgcatgggtctattta

SEQ ID NO: 135201 - DNA, 78 bp, Homo sapiens
tccattgaatttcccttgcttctttgttgaggagcagttgactatatttgcatgggtctatttatggagtctctattc

SEQ ID NO: 135202 - DNA, 77 bp, Homo sapiens
ttgaatttcccttgcttctttgttgaggagcagttgactatatttgcatgggtctatttatggagtctctattctat

SEQ ID NO: 135203 - DNA, 76 bp, Homo sapiens
aatttcccttgcttctttgttgaggagcagttgactatatttgcatgggtctatttatggagtctctattctattc

SEQ ID NO: 135204 - DNA, 79 bp, Homo sapiens
ttgcttctttgttgaggagcagttgactatatttgcatgggtctatttatggagtctctattctattctattaatctat

SEQ ID NO: 135205 - DNA, 78 bp, Homo sapiens
gcttctttgttgaggagcagttgactatatttgcatgggtctatttatggagtctctattctattctattaatctatt

SEQ ID NO: 135206 - DNA, 78 bp, Homo sapiens
ctttgttgaggagcagttgactatatttgcatgggtctatttatggagtctctattctattctattaatctatttgtc

SEQ ID NO: 135207 - DNA, 79 bp, Homo sapiens
gttgaggagcagttgactatatttgcatgggtctatttatggagtctctattctattctattaatctatttgtctattc

SEQ ID NO: 135208 - DNA, 79 bp, Homo sapiens
ggagcagttgactatatttgcatgggtctatttatggagtctctattctattctattaatctatttgtctattctagtg

SEQ ID NO: 135209 - DNA, 79 bp, Homo sapiens
gactatatttgcatgggtctatttatggagtctctattctattctattaatctatttgtctattctagtgggatgtgaa

SEQ ID NO: 135210 - DNA, 79 bp, Homo sapiens
atttgcatgggtctatttatggagtctctattctattctattaatctatttgtctattctagtgggatgtgaaatgata

SEQ ID NO: 135211 - DNA, 78 bp, Homo sapiens
catgggtctatttatggagtctctattctattctattaatctatttgtctattctagtgggatgtgaaatgatattta

SEQ ID NO: 135212 - DNA, 77 bp, Homo sapiens
tttatggagtctctattctattctattaatctatttgtctattctagtgggatgtgaaatgatatttaactgtggct

SEQ ID NO: 135213 - DNA, 74 bp, Homo sapiens
attctattctattaatctatttgtctattctagtgggatgtgaaatgatatttaactgtggctttaatttgtat

SEQ ID NO: 135214 - DNA, 79 bp, Homo sapiens
tatttctctgatgactaagatgctgagtcttttcacttgtttattgcccatccatatatcttcttttattaagtgtctg

SEQ ID NO: 135215 - DNA, 75 bp, Homo sapiens
taagatgctgagtcttttcacttgtttattgcccatccatatatcttcttttattaagtgtctgttccagtcttt

SEQ ID NO: 135216 - DNA, 67 bp, Homo sapiens
ttcttttattaagtgtctgttccagtcttttgcccacttaaaaaaagcgggctgcttgggttcttat

SEQ ID NO: 135217 - DNA, 68 bp, Homo sapiens
ttattaagtgtctgttccagtcttttgcccacttaaaaaaagcgggctgcttgggttcttattattaa

SEQ ID NO: 135218 - DNA, 70 bp, Homo sapiens
tccagtcttttgcccacttaaaaaaagcgggctgcttgggttcttattattaatgtgtattcttcacaat

SEQ ID NO: 135219 - DNA, 72 bp, Homo sapiens
tgcccacttaaaaaaagcgggctgcttgggttcttattattaatgtgtattcttcacaatttacaaattgca

SEQ ID NO: 135220 - DNA, 71 bp, Homo sapiens
aaaaaagcgggctgcttgggttcttattattaatgtgtattcttcacaatttacaaattgcaattctaatc

SEQ ID NO: 135221 - DNA, 75 bp, Homo sapiens
gcgggctgcttgggttcttattattaatgtgtattcttcacaatttacaaattgcaattctaatctacaattaga

SEQ ID NO: 135222 - DNA, 73 bp, Homo sapiens
ggttcttattattaatgtgtattcttcacaatttacaaattgcaattctaatctacaattagatttacaactc

SEQ ID NO: 135223 - DNA, 73 bp, Homo sapiens
taatgtgtattcttcacaatttacaaattgcaattctaatctacaattagatttacaactctaatttacactt

SEQ ID NO: 135224 - DNA, 73 bp, Homo sapiens
tcttcacaatttacaaattgcaattctaatctacaattagatttacaactctaatttacacttttggatacaa

SEQ ID NO: 135225 - DNA, 71 bp, Homo sapiens
ttacaaattgcaattctaatctacaattagatttacaactctaatttacacttttggatacaattcctttg

SEQ ID NO: 135226 - DNA, 73 bp, Homo sapiens
aattgcaattctaatctacaattagatttacaactctaatttacacttttggatacaattcctttgtcagata

SEQ ID NO: 135227 - DNA, 74 bp, Homo sapiens
ctaatctacaattagatttacaactctaatttacacttttggatacaattcctttgtcagatatatgtaccgca

SEQ ID NO: 135228 - DNA, 72 bp, Homo sapiens
cactgtgtctggcctatttttatcttaacagtgcctttgatgacaggagtttttaatttgactaaagctaat

SEQ ID NO: 135229 - DNA, 72 bp, Homo sapiens
gtctggcctatttttatcttaacagtgcctttgatgacaggagtttttaatttgactaaagctaattatcaa

SEQ ID NO: 135230 - DNA, 68 bp, Homo sapiens
atttttatcttaacagtgcctttgatgacaggagtttttaatttgactaaagctaattatcaattttt

SEQ ID NO: 135231 - DNA, 71 bp, Homo sapiens
gtgcctttgatgacaggagtttttaatttgactaaagctaattatcaatttttttctattattcttagtgc

SEQ ID NO: 135232 - DNA, 70 bp, Homo sapiens
gatgacaggagtttttaatttgactaaagctaattatcaatttttttctattattcttagtgcttttgtg

SEQ ID NO: 135233 - DNA, 67 bp, Homo sapiens
ggagtttttaatttgactaaagctaattatcaatttttttctattattcttagtgcttttgtgtcct

SEQ ID NO: 135234 - DNA, 68 bp, Homo sapiens
ttgactaaagctaattatcaatttttttctattattcttagtgcttttgtgtcctttaaaaaacaatc

SEQ ID NO: 135235 - DNA, 68 bp, Homo sapiens
gctaattatcaatttttttctattattcttagtgcttttgtgtcctttaaaaaacaatctttagccca

SEQ ID NO: 135236 - DNA, 68 bp, Homo sapiens
tttttctattattcttagtgcttttgtgtcctttaaaaaacaatctttagcccaaagttgcaaatgta

SEQ ID NO: 135237 - DNA, 69 bp, Homo sapiens
attcttagtgcttttgtgtcctttaaaaaacaatctttagcccaaagttgcaaatgtattctcctatgt

SEQ ID NO: 135238 - DNA, 69 bp, Homo sapiens
ttcttagtgcttttgtgtcctttaaaaaacaatctttagcccaaagttgcaaatgtattctcctatgtt

SEQ ID NO: 135239 - DNA, 69 bp, Homo sapiens
tagtgcttttgtgtcctttaaaaaacaatctttagcccaaagttgcaaatgtattctcctatgttttct

SEQ ID NO: 135240 - DNA, 70 bp, Homo sapiens
gtgtcctttaaaaaacaatctttagcccaaagttgcaaatgtattctcctatgttttctttgagaagcat

SEQ ID NO: 135241 - DNA, 68 bp, Homo sapiens
aaaaacaatctttagcccaaagttgcaaatgtattctcctatgttttctttgagaagcattttagttt

SEQ ID NO: 135242 - DNA, 71 bp, Homo sapiens
caatctttagcccaaagttgcaaatgtattctcctatgttttctttgagaagcattttagttttagctttc

SEQ ID NO: 135243 - DNA, 73 bp, Homo sapiens
agttgcaaatgtattctcctatgttttctttgagaagcattttagttttagctttctgatttgaggactacag

SEQ ID NO: 135244 - DNA, 75 bp, Homo sapiens
tgcaaatgtattctcctatgttttctttgagaagcattttagttttagctttctgatttgaggactacagtccac

SEQ ID NO: 135245 - DNA, 74 bp, Homo sapiens
atgtattctcctatgttttctttgagaagcattttagttttagctttctgatttgaggactacagtccacctca

SEQ ID NO: 135246 - DNA, 73 bp, Homo sapiens
tatgttttctttgagaagcattttagttttagctttctgatttgaggactacagtccacctcagactgagttt

SEQ ID NO: 135247 - DNA, 74 bp, Homo sapiens
tgagaagcattttagttttagctttctgatttgaggactacagtccacctcagactgagttttgagggtgattt

SEQ ID NO: 135248 - DNA, 71 bp, Homo sapiens
agcattttagttttagctttctgatttgaggactacagtccacctcagactgagttttgagggtgattttt

SEQ ID NO: 135249 - DNA, 72 bp, Homo sapiens
ttttagctttctgatttgaggactacagtccacctcagactgagttttgagggtgatttttttattcagtta

SEQ ID NO: 135250 - DNA, 72 bp, Homo sapiens
atttgaggactacagtccacctcagactgagttttgagggtgatttttttattcagttagtctagcaccatt

SEQ ID NO: 135251 - DNA, 66 bp, Homo sapiens
ccatttgttgaaaaaactttcccttctcaattaaattgccttggtacgtctttaaaatgataatgg

SEQ ID NO: 135252 - DNA, 69 bp, Homo sapiens
tgaaaaaactttcccttctcaattaaattgccttggtacgtctttaaaatgataatgggccatatatgt

SEQ ID NO: 135253 - DNA, 70 bp, Homo sapiens
actttcccttctcaattaaattgccttggtacgtctttaaaatgataatgggccatatatgttttatcta

SEQ ID NO: 135254 - DNA, 70 bp, Homo sapiens
ctcaattaaattgccttggtacgtctttaaaatgataatgggccatatatgttttatctatttctaacct

SEQ ID NO: 135255 - DNA, 70 bp, Homo sapiens
ttgccttggtacgtctttaaaatgataatgggccatatatgttttatctatttctaaccttttgttctac

SEQ ID NO: 135256 - DNA, 71 bp, Homo sapiens
ggtacgtctttaaaatgataatgggccatatatgttttatctatttctaaccttttgttctacttcattga

SEQ ID NO: 135257 - DNA, 72 bp, Homo sapiens
acgtctttaaaatgataatgggccatatatgttttatctatttctaaccttttgttctacttcattgatgta

SEQ ID NO: 135258 - DNA, 73 bp, Homo sapiens
aaatgataatgggccatatatgttttatctatttctaaccttttgttctacttcattgatgtatttgtctacc

SEQ ID NO: 135259 - DNA, 74 bp, Homo sapiens
taatgggccatatatgttttatctatttctaaccttttgttctacttcattgatgtatttgtctacctttatgc

SEQ ID NO: 135260 - DNA, 75 bp, Homo sapiens
atgggccatatatgttttatctatttctaaccttttgttctacttcattgatgtatttgtctacctttatgctga

SEQ ID NO: 135261 - DNA, 75 bp, Homo sapiens
ggccatatatgttttatctatttctaaccttttgttctacttcattgatgtatttgtctacctttatgctgattc

SEQ ID NO: 135262 - DNA, 74 bp, Homo sapiens
gttttatctatttctaaccttttgttctacttcattgatgtatttgtctacctttatgctgattccatcctgtc

SEQ ID NO: 135263 - DNA, 78 bp, Homo sapiens
tatctatttctaaccttttgttctacttcattgatgtatttgtctacctttatgctgattccatcctgtcttgattgc

SEQ ID NO: 135264 - DNA, 77 bp, Homo sapiens
atttctaaccttttgttctacttcattgatgtatttgtctacctttatgctgattccatcctgtcttgattgctatg

SEQ ID NO: 135265 - DNA, 79 bp, Homo sapiens
ttttgttctacttcattgatgtatttgtctacctttatgctgattccatcctgtcttgattgctatggctttattgtaa

SEQ ID NO: 135266 - DNA, 79 bp, Homo sapiens
atgtatttgtctacctttatgctgattccatcctgtcttgattgctatggctttattgtaagtcataccctcagtaatg

SEQ ID NO: 135267 - DNA, 80 bp, Homo sapiens
tacctttatgctgattccatcctgtcttgattgctatggctttattgtaagtcataccctcagtaatgtgagccttctaa

SEQ ID NO: 135268 - DNA, 79 bp, Homo sapiens
tgattccatcctgtcttgattgctatggctttattgtaagtcataccctcagtaatgtgagccttctaaatctgttctt

SEQ ID NO: 135269 - DNA, 75 bp, Homo sapiens
atcctgtcttgattgctatggctttattgtaagtcataccctcagtaatgtgagccttctaaatctgttcttttt

SEQ ID NO: 135270 - DNA, 73 bp, Homo sapiens
gattgctatggctttattgtaagtcataccctcagtaatgtgagccttctaaatctgttcttttttccaattt

SEQ ID NO: 135271 - DNA, 69 bp, Homo sapiens
ggctttattgtaagtcataccctcagtaatgtgagccttctaaatctgttcttttttccaatttttaaa

SEQ ID NO: 135272 - DNA, 74 bp, Homo sapiens
tctttatagtggaatgatgagtatatacccactaactggattagtgggtcaaacggtatttctggtactagatc

SEQ ID NO: 135273 - DNA, 74 bp, Homo sapiens
atagtggaatgatgagtatatacccactaactggattagtgggtcaaacggtatttctggtactagatccttga

SEQ ID NO: 135274 - DNA, 70 bp, Homo sapiens
tttgcatagagttgttcttctttttggcctttctaagtgttttgcatttccataaatattttaaatccgc

SEQ ID NO: 135275 - DNA, 67 bp, Homo sapiens
agagttgttcttctttttggcctttctaagtgttttgcatttccataaatattttaaatccgcttgt

SEQ ID NO: 135276 - DNA, 67 bp, Homo sapiens
cttctttttggcctttctaagtgttttgcatttccataaatattttaaatccgcttgttaatttcta

SEQ ID NO: 135277 - DNA, 66 bp, Homo sapiens
ggcctttctaagtgttttgcatttccataaatattttaaatccgcttgttaatttctataaaaaaa

SEQ ID NO: 135278 - DNA, 68 bp, Homo sapiens
tgttttgcatttccataaatattttaaatccgcttgttaatttctataaaaaaactttcatttatgga

SEQ ID NO: 135279 - DNA, 69 bp, Homo sapiens
cataaatattttaaatccgcttgttaatttctataaaaaaactttcatttatggattttgactgtatca

SEQ ID NO: 135280 - DNA, 67 bp, Homo sapiens
aatattttaaatccgcttgttaatttctataaaaaaactttcatttatggattttgactgtatcaat

SEQ ID NO: 135281 - DNA, 67 bp, Homo sapiens
tttaaatccgcttgttaatttctataaaaaaactttcatttatggattttgactgtatcaatttggg

SEQ ID NO: 135282 - DNA, 69 bp, Homo sapiens
taaatccgcttgttaatttctataaaaaaactttcatttatggattttgactgtatcaatttggggaga

SEQ ID NO: 135283 - DNA, 69 bp, Homo sapiens
ccgcttgttaatttctataaaaaaactttcatttatggattttgactgtatcaatttggggagaataga

SEQ ID NO: 135284 - DNA, 70 bp, Homo sapiens
aatttctataaaaaaactttcatttatggattttgactgtatcaatttggggagaatagacaccttagca

SEQ ID NO: 135285 - DNA, 69 bp, Homo sapiens
ctataaaaaaactttcatttatggattttgactgtatcaatttggggagaatagacaccttagcaactt

SEQ ID NO: 135286 - DNA, 70 bp, Homo sapiens
aaaaaactttcatttatggattttgactgtatcaatttggggagaatagacaccttagcaactttgaatc

SEQ ID NO: 135287 - DNA, 74 bp, Homo sapiens
actttcatttatggattttgactgtatcaatttggggagaatagacaccttagcaactttgaatcttccatcca

SEQ ID NO: 135288 - DNA, 76 bp, Homo sapiens
ttcatttatggattttgactgtatcaatttggggagaatagacaccttagcaactttgaatcttccatccatacaa

SEQ ID NO: 135289 - DNA, 74 bp, Homo sapiens
atttatggattttgactgtatcaatttggggagaatagacaccttagcaactttgaatcttccatccatacaag

SEQ ID NO: 135290 - DNA, 75 bp, Homo sapiens
attttgactgtatcaatttggggagaatagacaccttagcaactttgaatcttccatccatacaaggtatatatc

SEQ ID NO: 135291 - DNA, 76 bp, Homo sapiens
tgtatcaatttggggagaatagacaccttagcaactttgaatcttccatccatacaaggtatatatctccatttat

SEQ ID NO: 135292 - DNA, 74 bp, Homo sapiens
gggagaatagacaccttagcaactttgaatcttccatccatacaaggtatatatctccatttatttagatcttt

SEQ ID NO: 135293 - DNA, 73 bp, Homo sapiens
atagacaccttagcaactttgaatcttccatccatacaaggtatatatctccatttatttagatcttttaaaa

SEQ ID NO: 135294 - DNA, 66 bp, Homo sapiens
aaaaaaaattatctgaacaatgagatcttgttaagtaaattttgttagatttatttccaagaattt

SEQ ID NO: 135295 - DNA, 69 bp, Homo sapiens
aacaatgagatcttgttaagtaaattttgttagatttatttccaagaattttataatttttgatgctat

SEQ ID NO: 135296 - DNA, 75 bp, Homo sapiens
ttataatttttgatgctattttaaatgaaaatgatttatgcttttatatttcaattgtttgttgctaatatgtga

SEQ ID NO: 135297 - DNA, 76 bp, Homo sapiens
tgatgctattttaaatgaaaatgatttatgcttttatatttcaattgtttgttgctaatatgtgaaaatgtcttta

SEQ ID NO: 135298 - DNA, 72 bp, Homo sapiens
ctattttaaatgaaaatgatttatgcttttatatttcaattgtttgttgctaatatgtgaaaatgtctttat

SEQ ID NO: 135299 - DNA, 79 bp, Homo sapiens
atgatttatgcttttatatttcaattgtttgttgctaatatgtgaaaatgtctttattttatgtcatgcagtcttgcta

SEQ ID NO: 135300 - DNA, 77 bp, Homo sapiens
gcttttatatttcaattgtttgttgctaatatgtgaaaatgtctttattttatgtcatgcagtcttgctaaattcac

SEQ ID NO: 135301 - DNA, 76 bp, Homo sapiens
atttcaattgtttgttgctaatatgtgaaaatgtctttattttatgtcatgcagtcttgctaaattcacttattaa

SEQ ID NO: 135302 - DNA, 76 bp, Homo sapiens
tttgttgctaatatgtgaaaatgtctttattttatgtcatgcagtcttgctaaattcacttattaattatagtaac

SEQ ID NO: 135303 - DNA, 75 bp, Homo sapiens
tgtgaaaatgtctttattttatgtcatgcagtcttgctaaattcacttattaattatagtaactttttggagata

SEQ ID NO: 135304 - DNA, 75 bp, Homo sapiens
gtctttattttatgtcatgcagtcttgctaaattcacttattaattatagtaactttttggagatatcttagcat

SEQ ID NO: 135305 - DNA, 80 bp, Homo sapiens
atgtcatgcagtcttgctaaattcacttattaattatagtaactttttggagatatcttagcatttcatatatttgatga

SEQ ID NO: 135306 - DNA, 80 bp, Homo sapiens
gcagtcttgctaaattcacttattaattatagtaactttttggagatatcttagcatttcatatatttgatgatatcatc

SEQ ID NO: 135307 - DNA, 79 bp, Homo sapiens
attcacttattaattatagtaactttttggagatatcttagcatttcatatatttgatgatatcatctgcaattccttc

SEQ ID NO: 135308 - DNA, 78 bp, Homo sapiens
cttattaattatagtaactttttggagatatcttagcatttcatatatttgatgatatcatctgcaattccttcttaa

SEQ ID NO: 135309 - DNA, 77 bp, Homo sapiens
atagtaactttttggagatatcttagcatttcatatatttgatgatatcatctgcaattccttcttaattttacact

SEQ ID NO: 135310 - DNA, 77 bp, Homo sapiens
tttggagatatcttagcatttcatatatttgatgatatcatctgcaattccttcttaattttacacttttgtttctt

SEQ ID NO: 135311 - DNA, 79 bp, Homo sapiens
tatttgatgatatcatctgcaattccttcttaattttacacttttgtttctttttcctgcgtattgcactgctagcatc

SEQ ID NO: 135312 - DNA, 80 bp, Homo sapiens
atgatatcatctgcaattccttcttaattttacacttttgtttctttttcctgcgtattgcactgctagcatcttcagca

SEQ ID NO: 135313 - DNA, 75 bp, Homo sapiens
aattccttcttaattttacacttttgtttctttttcctgcgtattgcactgctagcatcttcagcaccatgttga

SEQ ID NO: 135314 - DNA, 79 bp, Homo sapiens
cttttgtttctttttcctgcgtattgcactgctagcatcttcagcaccatgttgaatcgaagtggttatagcaattata

SEQ ID NO: 135315 - DNA, 81 bp, Homo sapiens
tttctttttcctgcgtattgcactgctagcatcttcagcaccatgttgaatcgaagtggttatagcaattatattgaactg

SEQ ID NO: 135316 - DNA, 82 bp, Homo sapiens
gtattgcactgctagcatcttcagcaccatgttgaatcgaagtggttatagcaattatattgaactgtgtttttgtcagtct

SEQ ID NO: 135317 - DNA, 76 bp, Homo sapiens
accatgttgaatcgaagtggttatagcaattatattgaactgtgtttttgtcagtcttaggagagacagtattcaa

SEQ ID NO: 135318 - DNA, 75 bp, Homo sapiens
tgaactgtgtttttgtcagtcttaggagagacagtattcaatattacactgttaagtatgatatttgtagtaggt

SEQ ID NO: 135319 - DNA, 75 bp, Homo sapiens
ttttgtcagtcttaggagagacagtattcaatattacactgttaagtatgatatttgtagtaggttcttcacagg

SEQ ID NO: 135320 - DNA, 75 bp, Homo sapiens
cagtcttaggagagacagtattcaatattacactgttaagtatgatatttgtagtaggttcttcacaggtgattt

SEQ ID NO: 135321 - DNA, 77 bp, Homo sapiens
gagagacagtattcaatattacactgttaagtatgatatttgtagtaggttcttcacaggtgattttatcagtttga

SEQ ID NO: 135322 - DNA, 75 bp, Homo sapiens
caatattacactgttaagtatgatatttgtagtaggttcttcacaggtgattttatcagtttgaagatgttctgt

SEQ ID NO: 135323 - DNA, 73 bp, Homo sapiens
acactgttaagtatgatatttgtagtaggttcttcacaggtgattttatcagtttgaagatgttctgttttat

SEQ ID NO: 135324 - DNA, 75 bp, Homo sapiens
gatatttgtagtaggttcttcacaggtgattttatcagtttgaagatgttctgttttatttctcgtttgctgaga

SEQ ID NO: 135325 - DNA, 73 bp, Homo sapiens
gtagtaggttcttcacaggtgattttatcagtttgaagatgttctgttttatttctcgtttgctgagagttta

SEQ ID NO: 135326 - DNA, 72 bp, Homo sapiens
cacaggtgattttatcagtttgaagatgttctgttttatttctcgtttgctgagagtttaaaaaaagtgaga

SEQ ID NO: 135327 - DNA, 72 bp, Homo sapiens
ttatcagtttgaagatgttctgttttatttctcgtttgctgagagtttaaaaaaagtgagatgctttttgtc

SEQ ID NO: 135328 - DNA, 73 bp, Homo sapiens
gtttgaagatgttctgttttatttctcgtttgctgagagtttaaaaaaagtgagatgctttttgtctcctgca

SEQ ID NO: 135329 - DNA, 73 bp, Homo sapiens
gttctgttttatttctcgtttgctgagagtttaaaaaaagtgagatgctttttgtctcctgcatttattgaga

SEQ ID NO: 135330 - DNA, 76 bp, Homo sapiens
ttctcgtttgctgagagtttaaaaaaagtgagatgctttttgtctcctgcatttattgagatgatcgtgaagttta

SEQ ID NO: 135331 - DNA, 79 bp, Homo sapiens
aaaaagtgagatgctttttgtctcctgcatttattgagatgatcgtgaagtttatctcctttattctatcatatgatta

SEQ ID NO: 135332 - DNA, 78 bp, Homo sapiens
ttattgagatgatcgtgaagtttatctcctttattctatcatatgattaattaaattaattgattttctattgattgc

SEQ ID NO: 135333 - DNA, 77 bp, Homo sapiens
gagatgatcgtgaagtttatctcctttattctatcatatgattaattaaattaattgattttctattgattgccaac

SEQ ID NO: 135334 - DNA, 75 bp, Homo sapiens
tttatctcctttattctatcatatgattaattaaattaattgattttctattgattgccaacctaaccttgcatc

SEQ ID NO: 135335 - DNA, 74 bp, Homo sapiens
ctcctttattctatcatatgattaattaaattaattgattttctattgattgccaacctaaccttgcatccctg

SEQ ID NO: 135336 - DNA, 76 bp, Homo sapiens
gataaatctcacttggtcatgatgtattattagttttatatgttgagagatttgacttcctgctatttttaaagga

SEQ ID NO: 135337 - DNA, 73 bp, Homo sapiens
ctcacttggtcatgatgtattattagttttatatgttgagagatttgacttcctgctatttttaaaggatttt

SEQ ID NO: 135338 - DNA, 73 bp, Homo sapiens
gatgtattattagttttatatgttgagagatttgacttcctgctatttttaaaggatttttttggcatctgtg

SEQ ID NO: 135339 - DNA, 72 bp, Homo sapiens
tagttttatatgttgagagatttgacttcctgctatttttaaaggatttttttggcatctgtgtaaacgtga

SEQ ID NO: 135340 - DNA, 72 bp, Homo sapiens
tgttgagagatttgacttcctgctatttttaaaggatttttttggcatctgtgtaaacgtgatttattggcc

SEQ ID NO: 135341 - DNA, 68 bp, Homo sapiens
cttcctgctatttttaaaggatttttttggcatctgtgtaaacgtgatttattggcctgtaactttat

SEQ ID NO: 135342 - DNA, 68 bp, Homo sapiens
tttaaaggatttttttggcatctgtgtaaacgtgatttattggcctgtaactttattttcttgtaatg

SEQ ID NO: 135343 - DNA, 72 bp, Homo sapiens
tttggcatctgtgtaaacgtgatttattggcctgtaactttattttcttgtaatgtctttgtcagattttgg

SEQ ID NO: 135344 - DNA, 71 bp, Homo sapiens
tctgtgtaaacgtgatttattggcctgtaactttattttcttgtaatgtctttgtcagattttggtataag

SEQ ID NO: 135345 - DNA, 73 bp, Homo sapiens
gtgatttattggcctgtaactttattttcttgtaatgtctttgtcagattttggtataagggttatgctggca

SEQ ID NO: 135346 - DNA, 75 bp, Homo sapiens
tggcctgtaactttattttcttgtaatgtctttgtcagattttggtataagggttatgctggcattatgaaatga

SEQ ID NO: 135347 - DNA, 73 bp, Homo sapiens
tattttcttgtaatgtctttgtcagattttggtataagggttatgctggcattatgaaatgatttgggaagtt

SEQ ID NO: 135348 - DNA, 74 bp, Homo sapiens
gtaatgtctttgtcagattttggtataagggttatgctggcattatgaaatgatttgggaagtttcttcatttc

SEQ ID NO: 135349 - DNA, 72 bp, Homo sapiens
ctttgtcagattttggtataagggttatgctggcattatgaaatgatttgggaagtttcttcatttctttat

SEQ ID NO: 135350 - DNA, 71 bp, Homo sapiens
tggtataagggttatgctggcattatgaaatgatttgggaagtttcttcatttctttattttctaaaagag

SEQ ID NO: 135351 - DNA, 72 bp, Homo sapiens
gggttatgctggcattatgaaatgatttgggaagtttcttcatttctttattttctaaaagagtttgtatga

SEQ ID NO: 135352 - DNA, 72 bp, Homo sapiens
ctggcattatgaaatgatttgggaagtttcttcatttctttattttctaaaagagtttgtatgagattggtg

SEQ ID NO: 135353 - DNA, 69 bp, Homo sapiens
gaaatgatttgggaagtttcttcatttctttattttctaaaagagtttgtatgagattggtgttatttc

SEQ ID NO: 135354 - DNA, 68 bp, Homo sapiens
cttcatttctttattttctaaaagagtttgtatgagattggtgttatttcttttctaatttacgagta

SEQ ID NO: 135355 - DNA, 68 bp, Homo sapiens
tattttctaaaagagtttgtatgagattggtgttatttcttttctaatttacgagtaaaactatctgg

SEQ ID NO: 135356 - DNA, 70 bp, Homo sapiens
ttcttttctaatttacgagtaaaactatctgggctggcagttggatactttcaggattttctccttatct

SEQ ID NO: 135357 - DNA, 71 bp, Homo sapiens
aatttacgagtaaaactatctgggctggcagttggatactttcaggattttctccttatctttgagtttca

SEQ ID NO: 135358 - DNA, 75 bp, Homo sapiens
taaaactatctgggctggcagttggatactttcaggattttctccttatctttgagtttcagcagtttgactgac

SEQ ID NO: 135359 - DNA, 80 bp, Homo sapiens
ctggcagttggatactttcaggattttctccttatctttgagtttcagcagtttgactgactgtgaagtgtctatgcatg

SEQ ID NO: 135360 - DNA, 76 bp, Homo sapiens
atactttcaggattttctccttatctttgagtttcagcagtttgactgactgtgaagtgtctatgcatggtttttc

SEQ ID NO: 135361 - DNA, 78 bp, Homo sapiens
ttcaggattttctccttatctttgagtttcagcagtttgactgactgtgaagtgtctatgcatggtttttcttgcatt

SEQ ID NO: 135362 - DNA, 77 bp, Homo sapiens
tctccttatctttgagtttcagcagtttgactgactgtgaagtgtctatgcatggtttttcttgcatttgtttttct

SEQ ID NO: 135363 - DNA, 78 bp, Homo sapiens
tttgagtttcagcagtttgactgactgtgaagtgtctatgcatggtttttcttgcatttgtttttcttgtgattcttc

SEQ ID NO: 135364 - DNA, 80 bp, Homo sapiens
tttgactgactgtgaagtgtctatgcatggtttttcttgcatttgtttttcttgtgattcttctgagcctcttggatcta

SEQ ID NO: 135365 - DNA, 80 bp, Homo sapiens
actgtgaagtgtctatgcatggtttttcttgcatttgtttttcttgtgattcttctgagcctcttggatctataagctga

SEQ ID NO: 135366 - DNA, 77 bp, Homo sapiens
aagtgtctatgcatggtttttcttgcatttgtttttcttgtgattcttctgagcctcttggatctataagctgaagt

SEQ ID NO: 135367 - DNA, 75 bp, Homo sapiens
catggtttttcttgcatttgtttttcttgtgattcttctgagcctcttggatctataagctgaagttcttaacaa

SEQ ID NO: 135368 - DNA, 75 bp, Homo sapiens
tcttgcatttgtttttcttgtgattcttctgagcctcttggatctataagctgaagttcttaacaaaatttggga

SEQ ID NO: 135369 - DNA, 73 bp, Homo sapiens
gcatttgtttttcttgtgattcttctgagcctcttggatctataagctgaagttcttaacaaaatttgggaaa

SEQ ID NO: 135370 - DNA, 75 bp, Homo sapiens
ttcttgtgattcttctgagcctcttggatctataagctgaagttcttaacaaaatttgggaaattttgacatgat

SEQ ID NO: 135371 - DNA, 74 bp, Homo sapiens
cttgtgattcttctgagcctcttggatctataagctgaagttcttaacaaaatttgggaaattttgacatgatt

SEQ ID NO: 135372 - DNA, 75 bp, Homo sapiens
cttctgagcctcttggatctataagctgaagttcttaacaaaatttgggaaattttgacatgatttcttctgata

SEQ ID NO: 135373 - DNA, 70 bp, Homo sapiens
agctgaagttcttaacaaaatttgggaaattttgacatgatttcttctgatattttatcttccctattcc

SEQ ID NO: 135374 - DNA, 69 bp, Homo sapiens
taacaaaatttgggaaattttgacatgatttcttctgatattttatcttccctattccttctcttttcc

SEQ ID NO: 135375 - DNA, 70 bp, Homo sapiens
tgggaaattttgacatgatttcttctgatattttatcttccctattccttctcttttccccttctaggac

SEQ ID NO: 135376 - DNA, 74 bp, Homo sapiens
tgacatgatttcttctgatattttatcttccctattccttctcttttccccttctaggactccaattgcttata

SEQ ID NO: 135377 - DNA, 73 bp, Homo sapiens
tcttctgatattttatcttccctattccttctcttttccccttctaggactccaattgcttatatgttagaca

SEQ ID NO: 135378 - DNA, 72 bp, Homo sapiens
ttttatcttccctattccttctcttttccccttctaggactccaattgcttatatgttagacaatatgttga

SEQ ID NO: 135379 - DNA, 76 bp, Homo sapiens
ttctcttttccccttctaggactccaattgcttatatgttagacaatatgttgatattgtcccacagattcttgaa

SEQ ID NO: 135380 - DNA, 77 bp, Homo sapiens
cttctaggactccaattgcttatatgttagacaatatgttgatattgtcccacagattcttgaagctctgtttattt

SEQ ID NO: 135381 - DNA, 76 bp, Homo sapiens
ggactccaattgcttatatgttagacaatatgttgatattgtcccacagattcttgaagctctgtttattttttta

SEQ ID NO: 135382 - DNA, 65 bp, Homo sapiens
ttatttttttaaatcttttttctccctggatttgagagtaatttctacacaaactttgagtttct

SEQ ID NO: 135383 - DNA, 69 bp, Homo sapiens
aaatcttttttctccctggatttgagagtaatttctacacaaactttgagtttcttttctatatggctc

SEQ ID NO: 135384 - DNA, 71 bp, Homo sapiens
tctccctggatttgagagtaatttctacacaaactttgagtttcttttctatatggctccttttattctgg

SEQ ID NO: 135385 - DNA, 72 bp, Homo sapiens
ctggatttgagagtaatttctacacaaactttgagtttcttttctatatggctccttttattctgggatatc

SEQ ID NO: 135386 - DNA, 71 bp, Homo sapiens
gagtaatttctacacaaactttgagtttcttttctatatggctccttttattctgggatatctaccttcaa

SEQ ID NO: 135387 - DNA, 70 bp, Homo sapiens
acacaaactttgagtttcttttctatatggctccttttattctgggatatctaccttcaatttccagttg

SEQ ID NO: 135388 - DNA, 70 bp, Homo sapiens
agtttcttttctatatggctccttttattctgggatatctaccttcaatttccagttgttcttgcaaccc

SEQ ID NO: 135389 - DNA, 71 bp, Homo sapiens
ttctatatggctccttttattctgggatatctaccttcaatttccagttgttcttgcaaccccaaagagtt

SEQ ID NO: 135390 - DNA, 70 bp, Homo sapiens
ttttattctgggatatctaccttcaatttccagttgttcttgcaaccccaaagagtttcctgtcatacct

SEQ ID NO: 135391 - DNA, 70 bp, Homo sapiens
ggatatctaccttcaatttccagttgttcttgcaaccccaaagagtttcctgtcataccttaacccatta

SEQ ID NO: 135392 - DNA, 69 bp, Homo sapiens
taccttcaatttccagttgttcttgcaaccccaaagagtttcctgtcataccttaacccattaagactg

SEQ ID NO: 135393 - DNA, 73 bp, Homo sapiens
ttcttgcaaccccaaagagtttcctgtcataccttaacccattaagactggctttctgatcaagtttcagcca

SEQ ID NO: 135394 - DNA, 75 bp, Homo sapiens
aaagagtttcctgtcataccttaacccattaagactggctttctgatcaagtttcagccacttctgccatagaga

SEQ ID NO: 135395 - DNA, 76 bp, Homo sapiens
tttcctgtcataccttaacccattaagactggctttctgatcaagtttcagccacttctgccatagagactgggta

SEQ ID NO: 135396 - DNA, 75 bp, Homo sapiens
taccttaacccattaagactggctttctgatcaagtttcagccacttctgccatagagactgggtagtgccctta

SEQ ID NO: 135397 - DNA, 77 bp, Homo sapiens
ttaagactggctttctgatcaagtttcagccacttctgccatagagactgggtagtgcccttagtggaaatactata

SEQ ID NO: 135398 - DNA, 78 bp, Homo sapiens
ttctgatcaagtttcagccacttctgccatagagactgggtagtgcccttagtggaaatactatagagacttcgaata

SEQ ID NO: 135399 - DNA, 73 bp, Homo sapiens
agtttcagccacttctgccatagagactgggtagtgcccttagtggaaatactatagagacttcgaatacctt

SEQ ID NO: 135400 - DNA, 73 bp, Homo sapiens
ccacttctgccatagagactgggtagtgcccttagtggaaatactatagagacttcgaatacctttcagtttc

SEQ ID NO: 135401 - DNA, 71 bp, Homo sapiens
atagagactgggtagtgcccttagtggaaatactatagagacttcgaatacctttcagtttctgcctgttt

SEQ ID NO: 135402 - DNA, 74 bp, Homo sapiens
tagtgcccttagtggaaatactatagagacttcgaatacctttcagtttctgcctgtttttcattgctgtccaa

SEQ ID NO: 135403 - DNA, 75 bp, Homo sapiens
ttagtggaaatactatagagacttcgaatacctttcagtttctgcctgtttttcattgctgtccaatgccttcaa

SEQ ID NO: 135404 - DNA, 73 bp, Homo sapiens
aatactatagagacttcgaatacctttcagtttctgcctgtttttcattgctgtccaatgccttcaagtagtt

SEQ ID NO: 135405 - DNA, 69 bp, Homo sapiens
agacttcgaatacctttcagtttctgcctgtttttcattgctgtccaatgccttcaagtagtttttttt

SEQ ID NO: 135406 - DNA, 70 bp, Homo sapiens
ttttttaaaaacgtttgtgcaattattaccattgttatctatgagagggttaatatggtacaatctattc

SEQ ID NO: 135407 - DNA, 75 bp, Homo sapiens
acgtttgtgcaattattaccattgttatctatgagagggttaatatggtacaatctattccatcattattgaaac

SEQ ID NO: 135408 - DNA, 78 bp, Homo sapiens
gcaattattaccattgttatctatgagagggttaatatggtacaatctattccatcattattgaaactagaactctgc

SEQ ID NO: 135409 - DNA, 76 bp, Homo sapiens
accattgttatctatgagagggttaatatggtacaatctattccatcattattgaaactagaactctgccacttgt

SEQ ID NO: 135410 - DNA, 73 bp, Homo sapiens
atctatgagagggttaatatggtacaatctattccatcattattgaaactagaactctgccacttgttttttt

SEQ ID NO: 135411 - DNA, 69 bp, Homo sapiens
agggttaatatggtacaatctattccatcattattgaaactagaactctgccacttgttttttttgttt

SEQ ID NO: 135412 - DNA, 71 bp, Homo sapiens
agccactgcacacaaccctgtattcttccacttagttaatttgttcacctttcactctgttttacaattta

SEQ ID NO: 135413 - DNA, 69 bp, Homo sapiens
gcacacaaccctgtattcttccacttagttaatttgttcacctttcactctgttttacaatttagaaac

SEQ ID NO: 135414 - DNA, 70 bp, Homo sapiens
ctgtattcttccacttagttaatttgttcacctttcactctgttttacaatttagaaactctgctatccc

SEQ ID NO: 135415 - DNA, 69 bp, Homo sapiens
ccacttagttaatttgttcacctttcactctgttttacaatttagaaactctgctatccccaactcaaa

SEQ ID NO: 135416 - DNA, 72 bp, Homo sapiens
ttgttcacctttcactctgttttacaatttagaaactctgctatccccaactcaaaataactagtcattaga

SEQ ID NO: 135417 - DNA, 72 bp, Homo sapiens
cacctttcactctgttttacaatttagaaactctgctatccccaactcaaaataactagtcattagatccta

SEQ ID NO: 135418 - DNA, 72 bp, Homo sapiens
tttacaatttagaaactctgctatccccaactcaaaataactagtcattagatcctaacaattctttctcag

SEQ ID NO: 135419 - DNA, 74 bp, Homo sapiens
tttagaaactctgctatccccaactcaaaataactagtcattagatcctaacaattctttctcaggtatgcttc

SEQ ID NO: 135420 - DNA, 74 bp, Homo sapiens
ctatccccaactcaaaataactagtcattagatcctaacaattctttctcaggtatgcttcctgaacctagtga

SEQ ID NO: 135421 - DNA, 73 bp, Homo sapiens
aactcaaaataactagtcattagatcctaacaattctttctcaggtatgcttcctgaacctagtgacacctaa

SEQ ID NO: 135422 - DNA, 73 bp, Homo sapiens
ataactagtcattagatcctaacaattctttctcaggtatgcttcctgaacctagtgacacctaactttctta

SEQ ID NO: 135423 - DNA, 75 bp, Homo sapiens
ctagtcattagatcctaacaattctttctcaggtatgcttcctgaacctagtgacacctaactttcttagagtca

SEQ ID NO: 135424 - DNA, 74 bp, Homo sapiens
attagatcctaacaattctttctcaggtatgcttcctgaacctagtgacacctaactttcttagagtcactgct

SEQ ID NO: 135425 - DNA, 75 bp, Homo sapiens
taacaattctttctcaggtatgcttcctgaacctagtgacacctaactttcttagagtcactgcttgagttctag

SEQ ID NO: 135426 - DNA, 76 bp, Homo sapiens
ttctcaggtatgcttcctgaacctagtgacacctaactttcttagagtcactgcttgagttctagttctcatttaa

SEQ ID NO: 135427 - DNA, 74 bp, Homo sapiens
tatgcttcctgaacctagtgacacctaactttcttagagtcactgcttgagttctagttctcatttaactggtt

SEQ ID NO: 135428 - DNA, 71 bp, Homo sapiens
cttcctgaacctagtgacacctaactttcttagagtcactgcttgagttctagttctcatttaactggttt

SEQ ID NO: 135429 - DNA, 70 bp, Homo sapiens
acctagtgacacctaactttcttagagtcactgcttgagttctagttctcatttaactggttttccttcc

SEQ ID NO: 135430 - DNA, 68 bp, Homo sapiens
acacctaactttcttagagtcactgcttgagttctagttctcatttaactggttttccttccccctta

SEQ ID NO: 135431 - DNA, 71 bp, Homo sapiens
tttcttagagtcactgcttgagttctagttctcatttaactggttttccttcccccttagcctcagtcatt

SEQ ID NO: 135432 - DNA, 71 bp, Homo sapiens
agtcactgcttgagttctagttctcatttaactggttttccttcccccttagcctcagtcatttcccatac

SEQ ID NO: 135433 - DNA, 67 bp, Homo sapiens
atttaactggttttccttcccccttagcctcagtcatttcccatactccttcacttatcctcctaaa

SEQ ID NO: 135434 - DNA, 67 bp, Homo sapiens
ttttccttcccccttagcctcagtcatttcccatactccttcacttatcctcctaaaaataattcct

SEQ ID NO: 135435 - DNA, 69 bp, Homo sapiens
agcctcagtcatttcccatactccttcacttatcctcctaaaaataattccttatgttactcctttgtt

SEQ ID NO: 135436 - DNA, 67 bp, Homo sapiens
tttcccatactccttcacttatcctcctaaaaataattccttatgttactcctttgttttatgaccc

SEQ ID NO: 135437 - DNA, 65 bp, Homo sapiens
cctcctaaaaataattccttatgttactcctttgttttatgacccctctaaggttccttcaagat

SEQ ID NO: 135438 - DNA, 66 bp, Homo sapiens
cttatgttactcctttgttttatgacccctctaaggttccttcaagattaaatcttcttggtttgg

SEQ ID NO: 135439 - DNA, 65 bp, Homo sapiens
ttgttttatgacccctctaaggttccttcaagattaaatcttcttggtttggtttataaagtccc

SEQ ID NO: 135440 - DNA, 65 bp, Homo sapiens
atgacccctctaaggttccttcaagattaaatcttcttggtttggtttataaagtcccttccaat

SEQ ID NO: 135441 - DNA, 70 bp, Homo sapiens
ggttccttcaagattaaatcttcttggtttggtttataaagtcccttccaattgaatctatgtcctgatg

SEQ ID NO: 135442 - DNA, 73 bp, Homo sapiens
gattaaatcttcttggtttggtttataaagtcccttccaattgaatctatgtcctgatgttgttccacataga

SEQ ID NO: 135443 - DNA, 72 bp, Homo sapiens
aatcttcttggtttggtttataaagtcccttccaattgaatctatgtcctgatgttgttccacatagaacca

SEQ ID NO: 135444 - DNA, 75 bp, Homo sapiens
ttggtttataaagtcccttccaattgaatctatgtcctgatgttgttccacatagaaccaatgctgatgttaaat

SEQ ID NO: 135445 - DNA, 77 bp, Homo sapiens
taaagtcccttccaattgaatctatgtcctgatgttgttccacatagaaccaatgctgatgttaaattcttctctgt

SEQ ID NO: 135446 - DNA, 81 bp, Homo sapiens
aattgaatctatgtcctgatgttgttccacatagaaccaatgctgatgttaaattcttctctgttccttagacacatcaga

SEQ ID NO: 135447 - DNA, 80 bp, Homo sapiens
tctatgtcctgatgttgttccacatagaaccaatgctgatgttaaattcttctctgttccttagacacatcagaactttc

SEQ ID NO: 135448 - DNA, 76 bp, Homo sapiens
atgttgttccacatagaaccaatgctgatgttaaattcttctctgttccttagacacatcagaactttccatgttt

SEQ ID NO: 135449 - DNA, 76 bp, Homo sapiens
cacatagaaccaatgctgatgttaaattcttctctgttccttagacacatcagaactttccatgtttttgtgattt

SEQ ID NO: 135450 - DNA, 76 bp, Homo sapiens
atgctgatgttaaattcttctctgttccttagacacatcagaactttccatgtttttgtgatttttgcagttcgta

SEQ ID NO: 135451 - DNA, 76 bp, Homo sapiens
tctctgttccttagacacatcagaactttccatgtttttgtgatttttgcagttcgtatcctgcctactcgggtca

SEQ ID NO: 135452 - DNA, 73 bp, Homo sapiens
ttagacacatcagaactttccatgtttttgtgatttttgcagttcgtatcctgcctactcgggtcacccattt

SEQ ID NO: 135453 - DNA, 70 bp, Homo sapiens
aactttccatgtttttgtgatttttgcagttcgtatcctgcctactcgggtcacccattttcatctggtt

SEQ ID NO: 135454 - DNA, 72 bp, Homo sapiens
ttttgtgatttttgcagttcgtatcctgcctactcgggtcacccattttcatctggtttttcaagatgtaat

SEQ ID NO: 135455 - DNA, 70 bp, Homo sapiens
atttttgcagttcgtatcctgcctactcgggtcacccattttcatctggtttttcaagatgtaattttaa

SEQ ID NO: 135456 - DNA, 69 bp, Homo sapiens
agttcgtatcctgcctactcgggtcacccattttcatctggtttttcaagatgtaattttaaaatccag

SEQ ID NO: 135457 - DNA, 72 bp, Homo sapiens
tactcgggtcacccattttcatctggtttttcaagatgtaattttaaaatccagtccacatactatctctta

SEQ ID NO: 135458 - DNA, 69 bp, Homo sapiens
acccattttcatctggtttttcaagatgtaattttaaaatccagtccacatactatctcttaccgggtc

SEQ ID NO: 135459 - DNA, 69 bp, Homo sapiens
tttttcaagatgtaattttaaaatccagtccacatactatctcttaccgggtcttcttggctaggttac

SEQ ID NO: 135460 - DNA, 70 bp, Homo sapiens
aattttaaaatccagtccacatactatctcttaccgggtcttcttggctaggttacctctgtcatcaacc

SEQ ID NO: 135461 - DNA, 73 bp, Homo sapiens
aaaatccagtccacatactatctcttaccgggtcttcttggctaggttacctctgtcatcaacctctctccta

SEQ ID NO: 135462 - DNA, 72 bp, Homo sapiens
acatactatctcttaccgggtcttcttggctaggttacctctgtcatcaacctctctcctatgtgtttttac

SEQ ID NO: 135463 - DNA, 71 bp, Homo sapiens
ttaccgggtcttcttggctaggttacctctgtcatcaacctctctcctatgtgtttttactgtacttataa

SEQ ID NO: 135464 - DNA, 76 bp, Homo sapiens
tcttcttggctaggttacctctgtcatcaacctctctcctatgtgtttttactgtacttataagcctccatgttga

SEQ ID NO: 135465 - DNA, 74 bp, Homo sapiens
ctatctacttaccatctatataatttctgatttctcaggggattctaatctccttggtcaaagtattatgtctt

SEQ ID NO: 135466 - DNA, 75 bp, Homo sapiens
accatctatataatttctgatttctcaggggattctaatctccttggtcaaagtattatgtctttcaactacatc

SEQ ID NO: 135467 - DNA, 76 bp, Homo sapiens
ttctgatttctcaggggattctaatctccttggtcaaagtattatgtctttcaactacatctttctggtatccata

SEQ ID NO: 135468 - DNA, 77 bp, Homo sapiens
tttctcaggggattctaatctccttggtcaaagtattatgtctttcaactacatctttctggtatccatagcatcta

SEQ ID NO: 135469 - DNA, 78 bp, Homo sapiens
ggattctaatctccttggtcaaagtattatgtctttcaactacatctttctggtatccatagcatctagtaagcattg

SEQ ID NO: 135470 - DNA, 78 bp, Homo sapiens
attctaatctccttggtcaaagtattatgtctttcaactacatctttctggtatccatagcatctagtaagcattgta

SEQ ID NO: 135471 - DNA, 80 bp, Homo sapiens
taatctccttggtcaaagtattatgtctttcaactacatctttctggtatccatagcatctagtaagcattgtacatcta

SEQ ID NO: 135472 - DNA, 83 bp, Homo sapiens
tattatgtctttcaactacatctttctggtatccatagcatctagtaagcattgtacatctagtgtagattctcagtgtatat

SEQ ID NO: 135473 - DNA, 82 bp, Homo sapiens
attatgtctttcaactacatctttctggtatccatagcatctagtaagcattgtacatctagtgtagattctcagtgtatat

SEQ ID NO: 135474 - DNA, 82 bp, Homo sapiens
caactacatctttctggtatccatagcatctagtaagcattgtacatctagtgtagattctcagtgtatattttattaatga

SEQ ID NO: 135475 - DNA, 83 bp, Homo sapiens
ctttctggtatccatagcatctagtaagcattgtacatctagtgtagattctcagtgtatattttattaatgatgatattaca

SEQ ID NO: 135476 - DNA, 82 bp, Homo sapiens
tccatagcatctagtaagcattgtacatctagtgtagattctcagtgtatattttattaatgatgatattacaaagaatatt

SEQ ID NO: 135477 - DNA, 83 bp, Homo sapiens
catctagtgtagattctcagtgtatattttattaatgatgatattacaaagaatatttctcagcaatgatactcaaagcagtg

SEQ ID NO: 135478 - DNA, 80 bp, Homo sapiens
agtgtagattctcagtgtatattttattaatgatgatattacaaagaatatttctcagcaatgatactcaaagcagtggt

SEQ ID NO: 135479 - DNA, 76 bp, Homo sapiens
attaatgatgatattacaaagaatatttctcagcaatgatactcaaagcagtggttttacgtgtagaaattaagtg

SEQ ID NO: 135480 - DNA, 76 bp, Homo sapiens
atgatattacaaagaatatttctcagcaatgatactcaaagcagtggttttacgtgtagaaattaagtggccacag

SEQ ID NO: 135481 - DNA, 77 bp, Homo sapiens
tttctcagcaatgatactcaaagcagtggttttacgtgtagaaattaagtggccacaggcatgaaaggagaaatgaa

SEQ ID NO: 135482 - DNA, 76 bp, Homo sapiens
atactcaaagcagtggttttacgtgtagaaattaagtggccacaggcatgaaaggagaaatgaatcagccagttca

SEQ ID NO: 135483 - DNA, 76 bp, Homo sapiens
aagcagtggttttacgtgtagaaattaagtggccacaggcatgaaaggagaaatgaatcagccagttcatgactat

SEQ ID NO: 135484 - DNA, 77 bp, Homo sapiens
tttacgtgtagaaattaagtggccacaggcatgaaaggagaaatgaatcagccagttcatgactattctgttattta

SEQ ID NO: 135485 - DNA, 75 bp, Homo sapiens
aaattaagtggccacaggcatgaaaggagaaatgaatcagccagttcatgactattctgttatttattgtttctt

SEQ ID NO: 135486 - DNA, 75 bp, Homo sapiens
aggagaaatgaatcagccagttcatgactattctgttatttattgtttctttaggaaaatctacttcctcatcaa

SEQ ID NO: 135487 - DNA, 75 bp, Homo sapiens
aatgaatcagccagttcatgactattctgttatttattgtttctttaggaaaatctacttcctcatcaagcaccc

SEQ ID NO: 135488 - DNA, 72 bp, Homo sapiens
agttcatgactattctgttatttattgtttctttaggaaaatctacttcctcatcaagcacccctacagagt

SEQ ID NO: 135489 - DNA, 74 bp, Homo sapiens
tattctgttatttattgtttctttaggaaaatctacttcctcatcaagcacccctacagagttctgcaggaatg

SEQ ID NO: 135490 - DNA, 73 bp, Homo sapiens
ttattgtttctttaggaaaatctacttcctcatcaagcacccctacagagttctgcaggaatggtggaacctg

SEQ ID NO: 135491 - DNA, 72 bp, Homo sapiens
ttctttaggaaaatctacttcctcatcaagcacccctacagagttctgcaggaatggtggaacctgggaaaa

SEQ ID NO: 135492 - DNA, 75 bp, Homo sapiens
aaatctacttcctcatcaagcacccctacagagttctgcaggaatggtggaacctgggaaaatggcagatgtatt

SEQ ID NO: 135493 - DNA, 76 bp, Homo sapiens
cctacagagttctgcaggaatggtggaacctgggaaaatggcagatgtatttgtacagaagagtggaaaggactga

SEQ ID NO: 135494 - DNA, 77 bp, Homo sapiens
ttctgcaggaatggtggaacctgggaaaatggcagatgtatttgtacagaagagtggaaaggactgagatgtacaat

SEQ ID NO: 135495 - DNA, 74 bp, Homo sapiens
aatggtggaacctgggaaaatggcagatgtatttgtacagaagagtggaaaggactgagatgtacaattggtaa

SEQ ID NO: 135496 - DNA, 72 bp, Homo sapiens
aacctgggaaaatggcagatgtatttgtacagaagagtggaaaggactgagatgtacaattggtaaattact

SEQ ID NO: 135497 - DNA, 76 bp, Homo sapiens
atggcagatgtatttgtacagaagagtggaaaggactgagatgtacaattggtaaattacttgggataatgctaaa

SEQ ID NO: 135498 - DNA, 69 bp, Homo sapiens
aagagtggaaaggactgagatgtacaattggtaaattacttgggataatgctaaagtgtaaggtttacg

SEQ ID NO: 135499 - DNA, 71 bp, Homo sapiens
gatgtacaattggtaaattacttgggataatgctaaagtgtaaggtttacgtcactcttgtgttaataaga

SEQ ID NO: 135500 - DNA, 71 bp, Homo sapiens
ttggtaaattacttgggataatgctaaagtgtaaggtttacgtcactcttgtgttaataagaatagcaata

SEQ ID NO: 135501 - DNA, 72 bp, Homo sapiens
acttgggataatgctaaagtgtaaggtttacgtcactcttgtgttaataagaatagcaataaagcttctaga

SEQ ID NO: 135502 - DNA, 73 bp, Homo sapiens
atgctaaagtgtaaggtttacgtcactcttgtgttaataagaatagcaataaagcttctagaagcttcagtta

SEQ ID NO: 135503 - DNA, 73 bp, Homo sapiens
taaggtttacgtcactcttgtgttaataagaatagcaataaagcttctagaagcttcagttaatggttacaga

SEQ ID NO: 135504 - DNA, 75 bp, Homo sapiens
cgtcactcttgtgttaataagaatagcaataaagcttctagaagcttcagttaatggttacagaaacaatggaca

SEQ ID NO: 135505 - DNA, 78 bp, Homo sapiens
gtgttaataagaatagcaataaagcttctagaagcttcagttaatggttacagaaacaatggacataatgatgatggc

SEQ ID NO: 135506 - DNA, 80 bp, Homo sapiens
ttctagaagcttcagttaatggttacagaaacaatggacataatgatgatggctttaggatgtgtttatcagctcaatag

SEQ ID NO: 135507 - DNA, 78 bp, Homo sapiens
aagcttcagttaatggttacagaaacaatggacataatgatgatggctttaggatgtgtttatcagctcaatagtaaa

SEQ ID NO: 135508 - DNA, 77 bp, Homo sapiens
aatggttacagaaacaatggacataatgatgatggctttaggatgtgtttatcagctcaatagtaaaagctgagttt

SEQ ID NO: 135509 - DNA, 78 bp, Homo sapiens
acaatggacataatgatgatggctttaggatgtgtttatcagctcaatagtaaaagctgagttttcttcttggccaat

SEQ ID NO: 135510 - DNA, 77 bp, Homo sapiens
ttatcagctcaatagtaaaagctgagttttcttcttggccaatttatcagtatattcaatgcaccttatctgtttcc

SEQ ID NO: 135511 - DNA, 74 bp, Homo sapiens
gtaaaagctgagttttcttcttggccaatttatcagtatattcaatgcaccttatctgtttcctgactactaag

SEQ ID NO: 135512 - DNA, 73 bp, Homo sapiens
gctgagttttcttcttggccaatttatcagtatattcaatgcaccttatctgtttcctgactactaagttttt

SEQ ID NO: 135513 - DNA, 75 bp, Homo sapiens
tcttggccaatttatcagtatattcaatgcaccttatctgtttcctgactactaagtttttttgcaaactcacag

SEQ ID NO: 135514 - DNA, 74 bp, Homo sapiens
ttatcagtatattcaatgcaccttatctgtttcctgactactaagtttttttgcaaactcacagtcgtgtttcc

SEQ ID NO: 135515 - DNA, 73 bp, Homo sapiens
accttatctgtttcctgactactaagtttttttgcaaactcacagtcgtgtttcctggctgcaatgactaatc

SEQ ID NO: 135516 - DNA, 75 bp, Homo sapiens
tttcctgactactaagtttttttgcaaactcacagtcgtgtttcctggctgcaatgactaatccagggcaatgaa

SEQ ID NO: 135517 - DNA, 79 bp, Homo sapiens
tactaagtttttttgcaaactcacagtcgtgtttcctggctgcaatgactaatccagggcaatgaatgacatgattctc

SEQ ID NO: 135518 - DNA, 80 bp, Homo sapiens
tttttgcaaactcacagtcgtgtttcctggctgcaatgactaatccagggcaatgaatgacatgattctctcaggtcctt

SEQ ID NO: 135519 - DNA, 80 bp, Homo sapiens
acagtcgtgtttcctggctgcaatgactaatccagggcaatgaatgacatgattctctcaggtcctttcaattggtaata

SEQ ID NO: 135520 - DNA, 83 bp, Homo sapiens
tttcctggctgcaatgactaatccagggcaatgaatgacatgattctctcaggtcctttcaattggtaatatgccataatata

SEQ ID NO: 135521 - DNA, 80 bp, Homo sapiens
aatgactaatccagggcaatgaatgacatgattctctcaggtcctttcaattggtaatatgccataatataccatttcaa

SEQ ID NO: 135522 - DNA, 81 bp, Homo sapiens
taatccagggcaatgaatgacatgattctctcaggtcctttcaattggtaatatgccataatataccatttcaaatatcac

SEQ ID NO: 135523 - DNA, 74 bp, Homo sapiens
tcaggtcctttcaattggtaatatgccataatataccatttcaaatatcactactctaatatatttaacttttc

SEQ ID NO: 135524 - DNA, 79 bp, Homo sapiens
tggtaatatgccataatataccatttcaaatatcactactctaatatatttaacttttctgaaatcaatatgcatcttc

SEQ ID NO: 135525 - DNA, 80 bp, Homo sapiens
tgccataatataccatttcaaatatcactactctaatatatttaacttttctgaaatcaatatgcatcttcctgagtata

SEQ ID NO: 135526 - DNA, 77 bp, Homo sapiens
tcaaatatcactactctaatatatttaacttttctgaaatcaatatgcatcttcctgagtatatacttatattaaat

SEQ ID NO: 135527 - DNA, 74 bp, Homo sapiens
ctactctaatatatttaacttttctgaaatcaatatgcatcttcctgagtatatacttatattaaatttttatc

SEQ ID NO: 135528 - DNA, 73 bp, Homo sapiens
taacttttctgaaatcaatatgcatcttcctgagtatatacttatattaaatttttatcttttcttcctctac

SEQ ID NO: 135529 - DNA, 75 bp, Homo sapiens
tctgaaatcaatatgcatcttcctgagtatatacttatattaaatttttatcttttcttcctctaccttgaagag

SEQ ID NO: 135530 - DNA, 73 bp, Homo sapiens
caatatgcatcttcctgagtatatacttatattaaatttttatcttttcttcctctaccttgaagagttgtta

SEQ ID NO: 135531 - DNA, 66 bp, Homo sapiens
cttatattaaatttttatcttttcttcctctaccttgaagagttgttattaagttagtggtttgat

SEQ ID NO: 135532 - DNA, 68 bp, Homo sapiens
atttttatcttttcttcctctaccttgaagagttgttattaagttagtggtttgatttcaatcaattg

SEQ ID NO: 135533 - DNA, 73 bp, Homo sapiens
cttttcttcctctaccttgaagagttgttattaagttagtggtttgatttcaatcaattgtgtctcagaatca

SEQ ID NO: 135534 - DNA, 73 bp, Homo sapiens
ctaccttgaagagttgttattaagttagtggtttgatttcaatcaattgtgtctcagaatcaaagttcaaggc

SEQ ID NO: 135535 - DNA, 72 bp, Homo sapiens
gaagagttgttattaagttagtggtttgatttcaatcaattgtgtctcagaatcaaagttcaaggccatttt

SEQ ID NO: 135536 - DNA, 72 bp, Homo sapiens
taagttagtggtttgatttcaatcaattgtgtctcagaatcaaagttcaaggccatttttaaatttgaggtg

SEQ ID NO: 135537 - DNA, 74 bp, Homo sapiens
tttgatttcaatcaattgtgtctcagaatcaaagttcaaggccatttttaaatttgaggtgtgcttcccaacac

SEQ ID NO: 135538 - DNA, 73 bp, Homo sapiens
tttcaatcaattgtgtctcagaatcaaagttcaaggccatttttaaatttgaggtgtgcttcccaacaccgta

SEQ ID NO: 135539 - DNA, 73 bp, Homo sapiens
aatcaaagttcaaggccatttttaaatttgaggtgtgcttcccaacaccgtacacttcatgctgtctgcttag

SEQ ID NO: 135540 - DNA, 75 bp, Homo sapiens
gccatttttaaatttgaggtgtgcttcccaacaccgtacacttcatgctgtctgcttagggttcagagccctaga

SEQ ID NO: 135541 - DNA, 76 bp, Homo sapiens
ttttaaatttgaggtgtgcttcccaacaccgtacacttcatgctgtctgcttagggttcagagccctagatatcca

SEQ ID NO: 135542 - DNA, 81 bp, Homo sapiens
gtgtgcttcccaacaccgtacacttcatgctgtctgcttagggttcagagccctagatatccactgctatcatttcctata

SEQ ID NO: 135543 - DNA, 79 bp, Homo sapiens
aacaccgtacacttcatgctgtctgcttagggttcagagccctagatatccactgctatcatttcctatactcctacca

SEQ ID NO: 135544 - DNA, 83 bp, Homo sapiens
tacacttcatgctgtctgcttagggttcagagccctagatatccactgctatcatttcctatactcctaccagtcaatatatc

SEQ ID NO: 135545 - DNA, 81 bp, Homo sapiens
ctgtctgcttagggttcagagccctagatatccactgctatcatttcctatactcctaccagtcaatatatcccacagatc

SEQ ID NO: 135546 - DNA, 78 bp, Homo sapiens
agccctagatatccactgctatcatttcctatactcctaccagtcaatatatcccacagatcccatgaatttgccttt

SEQ ID NO: 135547 - DNA, 79 bp, Homo sapiens
tatccactgctatcatttcctatactcctaccagtcaatatatcccacagatcccatgaatttgcctttttgctttgcc

SEQ ID NO: 135548 - DNA, 79 bp, Homo sapiens
tatcatttcctatactcctaccagtcaatatatcccacagatcccatgaatttgcctttttgctttgcccacatcctca

SEQ ID NO: 135549 - DNA, 77 bp, Homo sapiens
agtcaatatatcccacagatcccatgaatttgcctttttgctttgcccacatcctcatggtaccgttgaccactata

SEQ ID NO: 135550 - DNA, 76 bp, Homo sapiens
cacagatcccatgaatttgcctttttgctttgcccacatcctcatggtaccgttgaccactataggctctatattt

SEQ ID NO: 135551 - DNA, 73 bp, Homo sapiens
atgaatttgcctttttgctttgcccacatcctcatggtaccgttgaccactataggctctatatttttagttc

SEQ ID NO: 135552 - DNA, 74 bp, Homo sapiens
ctttttgctttgcccacatcctcatggtaccgttgaccactataggctctatatttttagttctgaagattcca

SEQ ID NO: 135553 - DNA, 76 bp, Homo sapiens
tgcccacatcctcatggtaccgttgaccactataggctctatatttttagttctgaagattccaactaatctgtta

SEQ ID NO: 135554 - DNA, 74 bp, Homo sapiens
atcctcatggtaccgttgaccactataggctctatatttttagttctgaagattccaactaatctgttacagta

SEQ ID NO: 135555 - DNA, 76 bp, Homo sapiens
taccgttgaccactataggctctatatttttagttctgaagattccaactaatctgttacagtatcctagctcaca

SEQ ID NO: 135556 - DNA, 76 bp, Homo sapiens
actataggctctatatttttagttctgaagattccaactaatctgttacagtatcctagctcacattccctctcta

SEQ ID NO: 135557 - DNA, 72 bp, Homo sapiens
atatttttagttctgaagattccaactaatctgttacagtatcctagctcacattccctctctacccaggtt

SEQ ID NO: 135558 - DNA, 74 bp, Homo sapiens
tttagttctgaagattccaactaatctgttacagtatcctagctcacattccctctctacccaggtttatattg

SEQ ID NO: 135559 - DNA, 75 bp, Homo sapiens
aagattccaactaatctgttacagtatcctagctcacattccctctctacccaggtttatattgtgcacatttta

SEQ ID NO: 135560 - DNA, 75 bp, Homo sapiens
taatctgttacagtatcctagctcacattccctctctacccaggtttatattgtgcacattttaactggaacctg

SEQ ID NO: 135561 - DNA, 73 bp, Homo sapiens
aacctgttgtctaacatactagttattctaacggcaatgacttaaccagatagcaaagtatagaagttcctca

SEQ ID NO: 135562 - DNA, 74 bp, Homo sapiens
ctaacatactagttattctaacggcaatgacttaaccagatagcaaagtatagaagttcctcacaggccagtgg

SEQ ID NO: 135563 - DNA, 73 bp, Homo sapiens
agttattctaacggcaatgacttaaccagatagcaaagtatagaagttcctcacaggccagtgggttctataa

SEQ ID NO: 135564 - DNA, 73 bp, Homo sapiens
aatgacttaaccagatagcaaagtatagaagttcctcacaggccagtgggttctataagccttctattgcctt

SEQ ID NO: 135565 - DNA, 73 bp, Homo sapiens
ttaaccagatagcaaagtatagaagttcctcacaggccagtgggttctataagccttctattgcctttcaaat

SEQ ID NO: 135566 - DNA, 73 bp, Homo sapiens
aagtatagaagttcctcacaggccagtgggttctataagccttctattgcctttcaaatttcactgcataggt

SEQ ID NO: 135567 - DNA, 73 bp, Homo sapiens
agttcctcacaggccagtgggttctataagccttctattgcctttcaaatttcactgcataggttctgacctt

SEQ ID NO: 135568 - DNA, 72 bp, Homo sapiens
aggccagtgggttctataagccttctattgcctttcaaatttcactgcataggttctgacctttgactttta

SEQ ID NO: 135569 - DNA, 73 bp, Homo sapiens
gttctataagccttctattgcctttcaaatttcactgcataggttctgacctttgacttttatctggtttcaa

SEQ ID NO: 135570 - DNA, 70 bp, Homo sapiens
aagccttctattgcctttcaaatttcactgcataggttctgacctttgacttttatctggtttcaatttt

SEQ ID NO: 135571 - DNA, 68 bp, Homo sapiens
attgcctttcaaatttcactgcataggttctgacctttgacttttatctggtttcaatttttttaaaa

SEQ ID NO: 135572 - DNA, 67 bp, Homo sapiens
aaatttcactgcataggttctgacctttgacttttatctggtttcaatttttttaaaatacaattta

SEQ ID NO: 135573 - DNA, 71 bp, Homo sapiens
agctaatttttgtgaaaatagtacctatatgggttttacttttgccagaatcccagtgggcagatatggac

SEQ ID NO: 135574 - DNA, 71 bp, Homo sapiens
tttttgtgaaaatagtacctatatgggttttacttttgccagaatcccagtgggcagatatggaccatcct

SEQ ID NO: 135575 - DNA, 76 bp, Homo sapiens
aatagtacctatatgggttttacttttgccagaatcccagtgggcagatatggaccatccttgcaaacatgtggca

SEQ ID NO: 135576 - DNA, 76 bp, Homo sapiens
ggttttacttttgccagaatcccagtgggcagatatggaccatccttgcaaacatgtggcaaggatactccaaatg

SEQ ID NO: 135577 - DNA, 78 bp, Homo sapiens
ttttgccagaatcccagtgggcagatatggaccatccttgcaaacatgtggcaaggatactccaaatggtatgtgttt

SEQ ID NO: 135578 - DNA, 76 bp, Homo sapiens
aatcccagtgggcagatatggaccatccttgcaaacatgtggcaaggatactccaaatggtatgtgttttcccaaa

SEQ ID NO: 135579 - DNA, 78 bp, Homo sapiens
agatatggaccatccttgcaaacatgtggcaaggatactccaaatggtatgtgttttcccaaacatttactctatgca

SEQ ID NO: 135580 - DNA, 65 bp, Homo sapiens
ataaatacttatttttaataaaaaatttctttgtattaaagcgggcaatccaatggcagtccggt

SEQ ID NO: 135581 - DNA, 70 bp, Homo sapiens
atttttaataaaaaatttctttgtattaaagcgggcaatccaatggcagtccggttgtgcagtctctctc

SEQ ID NO: 135582 - DNA, 76 bp, Homo sapiens
aaaaatttctttgtattaaagcgggcaatccaatggcagtccggttgtgcagtctctctctatatggagagataga

SEQ ID NO: 135583 - DNA, 77 bp, Homo sapiens
tttgtattaaagcgggcaatccaatggcagtccggttgtgcagtctctctctatatggagagatagaattacaaaaa

SEQ ID NO: 135584 - DNA, 78 bp, Homo sapiens
ttaaagcgggcaatccaatggcagtccggttgtgcagtctctctctatatggagagatagaattacaaaaagtgacaa

SEQ ID NO: 135585 - DNA, 79 bp, Homo sapiens
aatccaatggcagtccggttgtgcagtctctctctatatggagagatagaattacaaaaagtgacaataggaaattgca

SEQ ID NO: 135586 - DNA, 77 bp, Homo sapiens
agtccggttgtgcagtctctctctatatggagagatagaattacaaaaagtgacaataggaaattgcaatgaaaatc

SEQ ID NO: 135587 - DNA, 75 bp, Homo sapiens
agtctctctctatatggagagatagaattacaaaaagtgacaataggaaattgcaatgaaaatctggaaaccctg

SEQ ID NO: 135588 - DNA, 74 bp, Homo sapiens
ctctctatatggagagatagaattacaaaaagtgacaataggaaattgcaatgaaaatctggaaaccctggaaa

SEQ ID NO: 135589 - DNA, 74 bp, Homo sapiens
gatagaattacaaaaagtgacaataggaaattgcaatgaaaatctggaaaccctggaaaagcaggtatgccata

SEQ ID NO: 135590 - DNA, 73 bp, Homo sapiens
aattacaaaaagtgacaataggaaattgcaatgaaaatctggaaaccctggaaaagcaggtatgccatatgac

SEQ ID NO: 135591 - DNA, 78 bp, Homo sapiens
caataggaaattgcaatgaaaatctggaaaccctggaaaagcaggtatgccatatgactcactgatgggcaactggaa

SEQ ID NO: 135592 - DNA, 77 bp, Homo sapiens
aaactgagtggacatggtgttcaggagattgaggctcagctaaattccagcttatttacctgcagttgcttacaaag

SEQ ID NO: 135593 - DNA, 77 bp, Homo sapiens
atggtgttcaggagattgaggctcagctaaattccagcttatttacctgcagttgcttacaaagtgtttggacataa

SEQ ID NO: 135594 - DNA, 76 bp, Homo sapiens
agattgaggctcagctaaattccagcttatttacctgcagttgcttacaaagtgtttggacataattgtgtaaagc

SEQ ID NO: 135595 - DNA, 73 bp, Homo sapiens
tcagctaaattccagcttatttacctgcagttgcttacaaagtgtttggacataattgtgtaaagctagggtt

SEQ ID NO: 135596 - DNA, 69 bp, Homo sapiens
aattccagcttatttacctgcagttgcttacaaagtgtttggacataattgtgtaaagctagggttttt

SEQ ID NO: 135597 - DNA, 68 bp, Homo sapiens
cttatttacctgcagttgcttacaaagtgtttggacataattgtgtaaagctagggttttttttctgg

SEQ ID NO: 135598 - DNA, 66 bp, Homo sapiens
gcagttgcttacaaagtgtttggacataattgtgtaaagctagggttttttttctggtttttaaaa

SEQ ID NO: 135599 - DNA, 63 bp, Homo sapiens
agtgtttggacataattgtgtaaagctagggttttttttctggtttttaaaacaggtaaagga

SEQ ID NO: 135600 - DNA, 67 bp, Homo sapiens
cataattgtgtaaagctagggttttttttctggtttttaaaacaggtaaaggatgtcacagcaccac

SEQ ID NO: 135601 - DNA, 66 bp, Homo sapiens
ttgtgtaaagctagggttttttttctggtttttaaaacaggtaaaggatgtcacagcaccacttaa

SEQ ID NO: 135602 - DNA, 65 bp, Homo sapiens
gggttttttttctggtttttaaaacaggtaaaggatgtcacagcaccacttaataacatttcttc

SEQ ID NO: 135603 - DNA, 70 bp, Homo sapiens
ctggtttttaaaacaggtaaaggatgtcacagcaccacttaataacatttcttctgaagtccagatttta

SEQ ID NO: 135604 - DNA, 75 bp, Homo sapiens
tttaaaacaggtaaaggatgtcacagcaccacttaataacatttcttctgaagtccagattttaacatctgatgc

SEQ ID NO: 135605 - DNA, 75 bp, Homo sapiens
aaaggatgtcacagcaccacttaataacatttcttctgaagtccagattttaacatctgatgccaataaattaac

SEQ ID NO: 135606 - DNA, 79 bp, Homo sapiens
gcaccacttaataacatttcttctgaagtccagattttaacatctgatgccaataaattaactgctgagaacatcacta

SEQ ID NO: 135607 - DNA, 79 bp, Homo sapiens
ttaataacatttcttctgaagtccagattttaacatctgatgccaataaattaactgctgagaacatcactagtgctac

SEQ ID NO: 135608 - DNA, 79 bp, Homo sapiens
tttcttctgaagtccagattttaacatctgatgccaataaattaactgctgagaacatcactagtgctacgcgagtggt

SEQ ID NO: 135609 - DNA, 82 bp, Homo sapiens
cagattttaacatctgatgccaataaattaactgctgagaacatcactagtgctacgcgagtggttggacagatattcaaca

SEQ ID NO: 135610 - DNA, 81 bp, Homo sapiens
tttaacatctgatgccaataaattaactgctgagaacatcactagtgctacgcgagtggttggacagatattcaacacttc

SEQ ID NO: 135611 - DNA, 80 bp, Homo sapiens
caataaattaactgctgagaacatcactagtgctacgcgagtggttggacagatattcaacacttccagaaatgcttcac

SEQ ID NO: 135612 - DNA, 80 bp, Homo sapiens
aattaactgctgagaacatcactagtgctacgcgagtggttggacagatattcaacacttccagaaatgcttcacctgag

SEQ ID NO: 135613 - DNA, 78 bp, Homo sapiens
agaacatcactagtgctacgcgagtggttggacagatattcaacacttccagaaatgcttcacctgaggtaaaactca

SEQ ID NO: 135614 - DNA, 77 bp, Homo sapiens
tgctacgcgagtggttggacagatattcaacacttccagaaatgcttcacctgaggtaaaactcacagagctttaaa

SEQ ID NO: 135615 - DNA, 74 bp, Homo sapiens
cgcgagtggttggacagatattcaacacttccagaaatgcttcacctgaggtaaaactcacagagctttaaaaa

SEQ ID NO: 135616 - DNA, 84 bp, Homo sapiens
ataatgtatgatatatgcttctctgatgatcagtatcttctctttggcaggcaaagaaagttgccatagtaacagtgagtcaac

SEQ ID NO: 135617 - DNA, 84 bp, Homo sapiens
atatatgcttctctgatgatcagtatcttctctttggcaggcaaagaaagttgccatagtaacagtgagtcaactcctagatgc

SEQ ID NO: 135618 - DNA, 84 bp, Homo sapiens
tgatgatcagtatcttctctttggcaggcaaagaaagttgccatagtaacagtgagtcaactcctagatgccagtgaagatgct

SEQ ID NO: 135619 - DNA, 80 bp, Homo sapiens
tatcttctctttggcaggcaaagaaagttgccatagtaacagtgagtcaactcctagatgccagtgaagatgcttttcaa

SEQ ID NO: 135620 - DNA, 78 bp, Homo sapiens
tctttggcaggcaaagaaagttgccatagtaacagtgagtcaactcctagatgccagtgaagatgcttttcaaagagt

SEQ ID NO: 135621 - DNA, 80 bp, Homo sapiens
aaagaaagttgccatagtaacagtgagtcaactcctagatgccagtgaagatgcttttcaaagagttgctgctactgcta

SEQ ID NO: 135622 - DNA, 85 bp, Homo sapiens
catagtaacagtgagtcaactcctagatgccagtgaagatgcttttcaaagagttgctgctactgctaatgatgatgcccttaca

SEQ ID NO: 135623 - DNA, 82 bp, Homo sapiens
agtgagtcaactcctagatgccagtgaagatgcttttcaaagagttgctgctactgctaatgatgatgcccttacaacgtaa

SEQ ID NO: 135624 - DNA, 83 bp, Homo sapiens
tcctagatgccagtgaagatgcttttcaaagagttgctgctactgctaatgatgatgcccttacaacgtaagcacaaattcaa

SEQ ID NO: 135625 - DNA, 80 bp, Homo sapiens
cagtgaagatgcttttcaaagagttgctgctactgctaatgatgatgcccttacaacgtaagcacaaattcaatttggaa

SEQ ID NO: 135626 - DNA, 77 bp, Homo sapiens
atgcttttcaaagagttgctgctactgctaatgatgatgcccttacaacgtaagcacaaattcaatttggaaagaaa

SEQ ID NO: 135627 - DNA, 76 bp, Homo sapiens
aagagttgctgctactgctaatgatgatgcccttacaacgtaagcacaaattcaatttggaaagaaaacttgacta

SEQ ID NO: 135628 - DNA, 75 bp, Homo sapiens
tttatgacaaaatcttgagtattaaattgtgttttattatatgcaggcttattgagcaaatggagacttattcct

SEQ ID NO: 135629 - DNA, 75 bp, Homo sapiens
gacaaaatcttgagtattaaattgtgttttattatatgcaggcttattgagcaaatggagacttattccttgtct

SEQ ID NO: 135630 - DNA, 75 bp, Homo sapiens
gagtattaaattgtgttttattatatgcaggcttattgagcaaatggagacttattccttgtctttgggtaatca

SEQ ID NO: 135631 - DNA, 75 bp, Homo sapiens
gttttattatatgcaggcttattgagcaaatggagacttattccttgtctttgggtaatcaatcagtggtggaac

SEQ ID NO: 135632 - DNA, 77 bp, Homo sapiens
ttatatgcaggcttattgagcaaatggagacttattccttgtctttgggtaatcaatcagtggtggaacctaacata

SEQ ID NO: 135633 - DNA, 77 bp, Homo sapiens
ttattgagcaaatggagacttattccttgtctttgggtaatcaatcagtggtggaacctaacatagcaatacagtca

SEQ ID NO: 135634 - DNA, 74 bp, Homo sapiens
aaatggagacttattccttgtctttgggtaatcaatcagtggtggaacctaacatagcaatacagtcagcaaat

SEQ ID NO: 135635 - DNA, 75 bp, Homo sapiens
acttattccttgtctttgggtaatcaatcagtggtggaacctaacatagcaatacagtcagcaaatttctcttca

SEQ ID NO: 135636 - DNA, 77 bp, Homo sapiens
tgtctttgggtaatcaatcagtggtggaacctaacatagcaatacagtcagcaaatttctcttcagaaaatgcggtg

SEQ ID NO: 135637 - DNA, 77 bp, Homo sapiens
taatcaatcagtggtggaacctaacatagcaatacagtcagcaaatttctcttcagaaaatgcggtggggccttcaa

SEQ ID NO: 135638 - DNA, 76 bp, Homo sapiens
tggaacctaacatagcaatacagtcagcaaatttctcttcagaaaatgcggtggggccttcaaatgttcgcttctc

SEQ ID NO: 135639 - DNA, 79 bp, Homo sapiens
taacatagcaatacagtcagcaaatttctcttcagaaaatgcggtggggccttcaaatgttcgcttctctgtgcagaaa

SEQ ID NO: 135640 - DNA, 77 bp, Homo sapiens
agtcagcaaatttctcttcagaaaatgcggtggggccttcaaatgttcgcttctctgtgcagaaaggtgagctgtta

SEQ ID NO: 135641 - DNA, 75 bp, Homo sapiens
aatttctcttcagaaaatgcggtggggccttcaaatgttcgcttctctgtgcagaaaggtgagctgttaatctta

SEQ ID NO: 135642 - DNA, 78 bp, Homo sapiens
ttcagaaaatgcggtggggccttcaaatgttcgcttctctgtgcagaaaggtgagctgttaatcttatgtgcttgtaa

SEQ ID NO: 135643 - DNA, 76 bp, Homo sapiens
tactcatgataatgtagacttttacaattctactctttcccttctcataggagctagcagttctctagtttctagt

SEQ ID NO: 135644 - DNA, 74 bp, Homo sapiens
taatgtagacttttacaattctactctttcccttctcataggagctagcagttctctagtttctagttcaacat

SEQ ID NO: 135645 - DNA, 75 bp, Homo sapiens
ttttacaattctactctttcccttctcataggagctagcagttctctagtttctagttcaacatttatacataca

SEQ ID NO: 135646 - DNA, 76 bp, Homo sapiens
ctttcccttctcataggagctagcagttctctagtttctagttcaacatttatacatacaaatgtggatggcctta

SEQ ID NO: 135647 - DNA, 77 bp, Homo sapiens
cttctcataggagctagcagttctctagtttctagttcaacatttatacatacaaatgtggatggccttaacccaga

SEQ ID NO: 135648 - DNA, 81 bp, Homo sapiens
tagcagttctctagtttctagttcaacatttatacatacaaatgtggatggccttaacccagatgcacagactgagcttca

SEQ ID NO: 135649 - DNA, 79 bp, Homo sapiens
tctctagtttctagttcaacatttatacatacaaatgtggatggccttaacccagatgcacagactgagcttcaggtct

SEQ ID NO: 135650 - DNA, 80 bp, Homo sapiens
ttctagttcaacatttatacatacaaatgtggatggccttaacccagatgcacagactgagcttcaggtcttgcttaata

SEQ ID NO: 135651 - DNA, 79 bp, Homo sapiens
ttatacatacaaatgtggatggccttaacccagatgcacagactgagcttcaggtcttgcttaatatgacgaaaagtaa

SEQ ID NO: 135652 - DNA, 77 bp, Homo sapiens
aaatgtggatggccttaacccagatgcacagactgagcttcaggtcttgcttaatatgacgaaaagtaagtctcaaa

SEQ ID NO: 135653 - DNA, 77 bp, Homo sapiens
atggccttaacccagatgcacagactgagcttcaggtcttgcttaatatgacgaaaagtaagtctcaaactttgtga

SEQ ID NO: 135654 - DNA, 76 bp, Homo sapiens
aacccagatgcacagactgagcttcaggtcttgcttaatatgacgaaaagtaagtctcaaactttgtgacatttaa

SEQ ID NO: 135655 - DNA, 73 bp, Homo sapiens
cacagactgagcttcaggtcttgcttaatatgacgaaaagtaagtctcaaactttgtgacatttaaaaaaatg

SEQ ID NO: 135656 - DNA, 74 bp, Homo sapiens
ttaccttacagtgcacttattgattttaatgtctttttctccctatagattacaccaagacatgcggctttgta

SEQ ID NO: 135657 - DNA, 75 bp, Homo sapiens
acagtgcacttattgattttaatgtctttttctccctatagattacaccaagacatgcggctttgtagtttatca

SEQ ID NO: 135658 - DNA, 73 bp, Homo sapiens
gattttaatgtctttttctccctatagattacaccaagacatgcggctttgtagtttatcaaaatgacaagct

SEQ ID NO: 135659 - DNA, 73 bp, Homo sapiens
ctttttctccctatagattacaccaagacatgcggctttgtagtttatcaaaatgacaagcttttccaatcaa

SEQ ID NO: 135660 - DNA, 71 bp, Homo sapiens
ccctatagattacaccaagacatgcggctttgtagtttatcaaaatgacaagcttttccaatcaaaaactt

SEQ ID NO: 135661 - DNA, 73 bp, Homo sapiens
gattacaccaagacatgcggctttgtagtttatcaaaatgacaagcttttccaatcaaaaacttttacagcta

SEQ ID NO: 135662 - DNA, 71 bp, Homo sapiens
agacatgcggctttgtagtttatcaaaatgacaagcttttccaatcaaaaacttttacagctaaatcggat

SEQ ID NO: 135663 - DNA, 69 bp, Homo sapiens
ctttgtagtttatcaaaatgacaagcttttccaatcaaaaacttttacagctaaatcggattttagtca

SEQ ID NO: 135664 - DNA, 69 bp, Homo sapiens
caaaatgacaagcttttccaatcaaaaacttttacagctaaatcggattttagtcaaaaaattatctca

SEQ ID NO: 135665 - DNA, 69 bp, Homo sapiens
gcttttccaatcaaaaacttttacagctaaatcggattttagtcaaaaaattatctcaagcaaaactga

SEQ ID NO: 135666 - DNA, 72 bp, Homo sapiens
atcaaaaacttttacagctaaatcggattttagtcaaaaaattatctcaagcaaaactgatgaaaatgagca

SEQ ID NO: 135667 - DNA, 78 bp, Homo sapiens
ttacagctaaatcggattttagtcaaaaaattatctcaagcaaaactgatgaaaatgagcaagatcagagtgcttctg

SEQ ID NO: 135668 - DNA, 78 bp, Homo sapiens
ctaaatcggattttagtcaaaaaattatctcaagcaaaactgatgaaaatgagcaagatcagagtgcttctgttgaca

SEQ ID NO: 135669 - DNA, 78 bp, Homo sapiens
ttttagtcaaaaaattatctcaagcaaaactgatgaaaatgagcaagatcagagtgcttctgttgacatggtctttag

SEQ ID NO: 135670 - DNA, 79 bp, Homo sapiens
aaaattatctcaagcaaaactgatgaaaatgagcaagatcagagtgcttctgttgacatggtctttagtccaaaggtga

SEQ ID NO: 135671 - DNA, 77 bp, Homo sapiens
aagcaaaactgatgaaaatgagcaagatcagagtgcttctgttgacatggtctttagtccaaaggtgagtttttcat

SEQ ID NO: 135672 - DNA, 79 bp, Homo sapiens
aaaatgagcaagatcagagtgcttctgttgacatggtctttagtccaaaggtgagtttttcattgcagatgcaagaaaa

SEQ ID NO: 135673 - DNA, 77 bp, Homo sapiens
aagatcagagtgcttctgttgacatggtctttagtccaaaggtgagtttttcattgcagatgcaagaaaaaagtgtc

SEQ ID NO: 135674 - DNA, 68 bp, Homo sapiens
cccaattaagtatttagaaacagtaattgtaattgtcttatcaattcatagtacaaccaaaaagaatt

SEQ ID NO: 135675 - DNA, 73 bp, Homo sapiens
tagaaacagtaattgtaattgtcttatcaattcatagtacaaccaaaaagaatttcaactctattcctatgcc

SEQ ID NO: 135676 - DNA, 75 bp, Homo sapiens
attgtaattgtcttatcaattcatagtacaaccaaaaagaatttcaactctattcctatgcctgtgtctattgga

SEQ ID NO: 135677 - DNA, 76 bp, Homo sapiens
gtcttatcaattcatagtacaaccaaaaagaatttcaactctattcctatgcctgtgtctattggaatttgtcagc

SEQ ID NO: 135678 - DNA, 74 bp, Homo sapiens
aattcatagtacaaccaaaaagaatttcaactctattcctatgcctgtgtctattggaatttgtcagcgaagga

SEQ ID NO: 135679 - DNA, 74 bp, Homo sapiens
aaccaaaaagaatttcaactctattcctatgcctgtgtctattggaatttgtcagcgaaggactgggacacata

SEQ ID NO: 135680 - DNA, 77 bp, Homo sapiens
aatttcaactctattcctatgcctgtgtctattggaatttgtcagcgaaggactgggacacatatggctgtcaaaaa

SEQ ID NO: 135681 - DNA, 77 bp, Homo sapiens
aactctattcctatgcctgtgtctattggaatttgtcagcgaaggactgggacacatatggctgtcaaaaagacaag

SEQ ID NO: 135682 - DNA, 81 bp, Homo sapiens
tatgcctgtgtctattggaatttgtcagcgaaggactgggacacatatggctgtcaaaaagacaagggcactgatggattc

SEQ ID NO: 135683 - DNA, 81 bp, Homo sapiens
tctattggaatttgtcagcgaaggactgggacacatatggctgtcaaaaagacaagggcactgatggattcctgcgctgcc

SEQ ID NO: 135684 - DNA, 83 bp, Homo sapiens
tttgtcagcgaaggactgggacacatatggctgtcaaaaagacaagggcactgatggattcctgcgctgccgctgcaaccata

SEQ ID NO: 135685 - DNA, 79 bp, Homo sapiens
actgggacacatatggctgtcaaaaagacaagggcactgatggattcctgcgctgccgctgcaaccatactactaattt

SEQ ID NO: 135686 - DNA, 80 bp, Homo sapiens
atatggctgtcaaaaagacaagggcactgatggattcctgcgctgccgctgcaaccatactactaattttgctgtattaa

SEQ ID NO: 135687 - DNA, 79 bp, Homo sapiens
tgtcaaaaagacaagggcactgatggattcctgcgctgccgctgcaaccatactactaattttgctgtattaatggtaa

SEQ ID NO: 135688 - DNA, 80 bp, Homo sapiens
acaagggcactgatggattcctgcgctgccgctgcaaccatactactaattttgctgtattaatggtaaggatatacata

SEQ ID NO: 135689 - DNA, 80 bp, Homo sapiens
atggattcctgcgctgccgctgcaaccatactactaattttgctgtattaatggtaaggatatacatagcaatctctttc

SEQ ID NO: 135690 - DNA, 80 bp, Homo sapiens
cgctgccgctgcaaccatactactaattttgctgtattaatggtaaggatatacatagcaatctctttccagatgagaat

SEQ ID NO: 135691 - DNA, 70 bp, Homo sapiens
acacttcagggatgactaattaaaaatatgagtcttaccttgtttttcagactttcaaaaaggattatca

SEQ ID NO: 135692 - DNA, 70 bp, Homo sapiens
ggatgactaattaaaaatatgagtcttaccttgtttttcagactttcaaaaaggattatcaatatcccaa

SEQ ID NO: 135693 - DNA, 73 bp, Homo sapiens
aatatgagtcttaccttgtttttcagactttcaaaaaggattatcaatatcccaaatcacttgacatattatc

SEQ ID NO: 135694 - DNA, 72 bp, Homo sapiens
gagtcttaccttgtttttcagactttcaaaaaggattatcaatatcccaaatcacttgacatattatccaac

SEQ ID NO: 135695 - DNA, 76 bp, Homo sapiens
tttttcagactttcaaaaaggattatcaatatcccaaatcacttgacatattatccaacgttggatgtgcactgtc

SEQ ID NO: 135696 - DNA, 76 bp, Homo sapiens
actttcaaaaaggattatcaatatcccaaatcacttgacatattatccaacgttggatgtgcactgtctgttactg

SEQ ID NO: 135697 - DNA, 82 bp, Homo sapiens
ttatcaatatcccaaatcacttgacatattatccaacgttggatgtgcactgtctgttactggtctggctctcacagttata

SEQ ID NO: 135698 - DNA, 79 bp, Homo sapiens
aatatcccaaatcacttgacatattatccaacgttggatgtgcactgtctgttactggtctggctctcacagttatatt

SEQ ID NO: 135699 - DNA, 82 bp, Homo sapiens
ttgacatattatccaacgttggatgtgcactgtctgttactggtctggctctcacagttatatttcagattgtcaccaggta

SEQ ID NO: 135700 - DNA, 80 bp, Homo sapiens
atattatccaacgttggatgtgcactgtctgttactggtctggctctcacagttatatttcagattgtcaccaggtaaga

SEQ ID NO: 135701 - DNA, 83 bp, Homo sapiens
ttggatgtgcactgtctgttactggtctggctctcacagttatatttcagattgtcaccaggtaagagcagaagcaggctctt

SEQ ID NO: 135702 - DNA, 80 bp, Homo sapiens
actgtctgttactggtctggctctcacagttatatttcagattgtcaccaggtaagagcagaagcaggctcttttcagaa

SEQ ID NO: 135703 - DNA, 79 bp, Homo sapiens
ttactggtctggctctcacagttatatttcagattgtcaccaggtaagagcagaagcaggctcttttcagaagagaaat

SEQ ID NO: 135704 - DNA, 70 bp, Homo sapiens
ttctcccagtgcgcgggtcagttggaggttctcccggtacacctttatactaggttgtctcacgtggagg

SEQ ID NO: 135705 - DNA, 69 bp, Homo sapiens
agttggaggttctcccggtacacctttatactaggttgtctcacgtggagggccatgttatgactttta

SEQ ID NO: 135706 - DNA, 72 bp, Homo sapiens
tctcccggtacacctttatactaggttgtctcacgtggagggccatgttatgacttttatgttccccaggca

SEQ ID NO: 135707 - DNA, 71 bp, Homo sapiens
acctttatactaggttgtctcacgtggagggccatgttatgacttttatgttccccaggcacttgtgcctt

SEQ ID NO: 135708 - DNA, 75 bp, Homo sapiens
ttgtctcacgtggagggccatgttatgacttttatgttccccaggcacttgtgcctttgtggaacctttcattca

SEQ ID NO: 135709 - DNA, 72 bp, Homo sapiens
acgtggagggccatgttatgacttttatgttccccaggcacttgtgcctttgtggaacctttcattcattaa

SEQ ID NO: 135710 - DNA, 72 bp, Homo sapiens
atgttatgacttttatgttccccaggcacttgtgcctttgtggaacctttcattcattaatgaaagattaaa

SEQ ID NO: 135711 - DNA, 69 bp, Homo sapiens
gacttttatgttccccaggcacttgtgcctttgtggaacctttcattcattaatgaaagattaaaaatt

SEQ ID NO: 135712 - DNA, 68 bp, Homo sapiens
gttccccaggcacttgtgcctttgtggaacctttcattcattaatgaaagattaaaaattttatttta

SEQ ID NO: 135713 - DNA, 72 bp, Homo sapiens
aaattttattttatgattgcataggtacaaagatgaatatattaatatcctttgagctaagagttctctttt

SEQ ID NO: 135714 - DNA, 76 bp, Homo sapiens
ttttatgattgcataggtacaaagatgaatatattaatatcctttgagctaagagttctcttttttcttctgagtc

SEQ ID NO: 135715 - DNA, 74 bp, Homo sapiens
gcataggtacaaagatgaatatattaatatcctttgagctaagagttctcttttttcttctgagtctaaaagaa

SEQ ID NO: 135716 - DNA, 71 bp, Homo sapiens
caaagatgaatatattaatatcctttgagctaagagttctcttttttcttctgagtctaaaagaagttaaa

SEQ ID NO: 135717 - DNA, 70 bp, Homo sapiens
tattaatatcctttgagctaagagttctcttttttcttctgagtctaaaagaagttaaaacattactatg

SEQ ID NO: 135718 - DNA, 71 bp, Homo sapiens
tttgagctaagagttctcttttttcttctgagtctaaaagaagttaaaacattactatgggatatgaacac

SEQ ID NO: 135719 - DNA, 72 bp, Homo sapiens
gctaagagttctcttttttcttctgagtctaaaagaagttaaaacattactatgggatatgaacactaagca

SEQ ID NO: 135720 - DNA, 76 bp, Homo sapiens
ttttcttctgagtctaaaagaagttaaaacattactatgggatatgaacactaagcactattgtgtctaatgcata

SEQ ID NO: 135721 - DNA, 74 bp, Homo sapiens
agtctaaaagaagttaaaacattactatgggatatgaacactaagcactattgtgtctaatgcataagtcggcc

SEQ ID NO: 135722 - DNA, 74 bp, Homo sapiens
aaaagaagttaaaacattactatgggatatgaacactaagcactattgtgtctaatgcataagtcggccttggc

SEQ ID NO: 135723 - DNA, 78 bp, Homo sapiens
aaaacattactatgggatatgaacactaagcactattgtgtctaatgcataagtcggccttggctgccaggccttctg

SEQ ID NO: 135724 - DNA, 82 bp, Homo sapiens
gatatgaacactaagcactattgtgtctaatgcataagtcggccttggctgccaggccttctgttgcatcccatcagttaaa

SEQ ID NO: 135725 - DNA, 80 bp, Homo sapiens
aacactaagcactattgtgtctaatgcataagtcggccttggctgccaggccttctgttgcatcccatcagttaaatcaa

SEQ ID NO: 135726 - DNA, 79 bp, Homo sapiens
actattgtgtctaatgcataagtcggccttggctgccaggccttctgttgcatcccatcagttaaatcaaggtacaggc

SEQ ID NO: 135727 - DNA, 75 bp, Homo sapiens
aagtcggccttggctgccaggccttctgttgcatcccatcagttaaatcaaggtacaggccaggttactgtgaag

SEQ ID NO: 135728 - DNA, 77 bp, Homo sapiens
tgccaggccttctgttgcatcccatcagttaaatcaaggtacaggccaggttactgtgaagggactacgcagggcta

SEQ ID NO: 135729 - DNA, 72 bp, Homo sapiens
tcccatcagttaaatcaaggtacaggccaggttactgtgaagggactacgcagggctacctaccaggaagta

SEQ ID NO: 135730 - DNA, 69 bp, Homo sapiens
ttactgtgaagggactacgcagggctacctaccaggaagtagggttcactgggggccatttttggagat

SEQ ID NO: 135731 - DNA, 71 bp, Homo sapiens
agggctacctaccaggaagtagggttcactgggggccatttttggagattagctatcacttttgatcagaa

SEQ ID NO: 135732 - DNA, 73 bp, Homo sapiens
taccaggaagtagggttcactgggggccatttttggagattagctatcacttttgatcagaacacagtttcaa

SEQ ID NO: 135733 - DNA, 71 bp, Homo sapiens
aagtagggttcactgggggccatttttggagattagctatcacttttgatcagaacacagtttcaagaaaa

SEQ ID NO: 135734 - DNA, 75 bp, Homo sapiens
ggggccatttttggagattagctatcacttttgatcagaacacagtttcaagaaaagatatgtcaacctgtatcc

SEQ ID NO: 135735 - DNA, 78 bp, Homo sapiens
tttggagattagctatcacttttgatcagaacacagtttcaagaaaagatatgtcaacctgtatcctttaactcatga

SEQ ID NO: 135736 - DNA, 77 bp, Homo sapiens
gattagctatcacttttgatcagaacacagtttcaagaaaagatatgtcaacctgtatcctttaactcatgactttg

SEQ ID NO: 135737 - DNA, 76 bp, Homo sapiens
cacttttgatcagaacacagtttcaagaaaagatatgtcaacctgtatcctttaactcatgactttgtggaaatga

SEQ ID NO: 135738 - DNA, 75 bp, Homo sapiens
cagaacacagtttcaagaaaagatatgtcaacctgtatcctttaactcatgactttgtggaaatgataagaggaa

SEQ ID NO: 135739 - DNA, 75 bp, Homo sapiens
tgtatcctttaactcatgactttgtggaaatgataagaggaaagtatagttttctgatgtaatcgagaaggtaga

SEQ ID NO: 135740 - DNA, 74 bp, Homo sapiens
actttgtggaaatgataagaggaaagtatagttttctgatgtaatcgagaaggtagatttaccagctgtcacaa

SEQ ID NO: 135741 - DNA, 75 bp, Homo sapiens
aagtatagttttctgatgtaatcgagaaggtagatttaccagctgtcacaactgggctatgaactgaacttacat

SEQ ID NO: 135742 - DNA, 78 bp, Homo sapiens
ttctgatgtaatcgagaaggtagatttaccagctgtcacaactgggctatgaactgaacttacattgggcaataatat

SEQ ID NO: 135743 - DNA, 76 bp, Homo sapiens
tgtaatcgagaaggtagatttaccagctgtcacaactgggctatgaactgaacttacattgggcaataatattctt

SEQ ID NO: 135744 - DNA, 75 bp, Homo sapiens
tagatttaccagctgtcacaactgggctatgaactgaacttacattgggcaataatattctttgttcccagaaat

SEQ ID NO: 135745 - DNA, 76 bp, Homo sapiens
agctgtcacaactgggctatgaactgaacttacattgggcaataatattctttgttcccagaaatttcactgcagt

SEQ ID NO: 135746 - DNA, 72 bp, Homo sapiens
aactgggctatgaactgaacttacattgggcaataatattctttgttcccagaaatttcactgcagtttgtt

SEQ ID NO: 135747 - DNA, 75 bp, Homo sapiens
tatgaactgaacttacattgggcaataatattctttgttcccagaaatttcactgcagtttgttttgtgcagttg

SEQ ID NO: 135748 - DNA, 74 bp, Homo sapiens
cttacattgggcaataatattctttgttcccagaaatttcactgcagtttgttttgtgcagttgttgtgtttca

SEQ ID NO: 135749 - DNA, 72 bp, Homo sapiens
gggcaataatattctttgttcccagaaatttcactgcagtttgttttgtgcagttgttgtgtttcatttaat

SEQ ID NO: 135750 - DNA, 69 bp, Homo sapiens
attctttgttcccagaaatttcactgcagtttgttttgtgcagttgttgtgtttcatttaattttttta

SEQ ID NO: 135751 - DNA, 62 bp, Homo sapiens
atttttttatattaatttacttattttcaggaaagtcagaaaaacctcagtaacctgggttt

SEQ ID NO: 135752 - DNA, 69 bp, Homo sapiens
attaatttacttattttcaggaaagtcagaaaaacctcagtaacctgggttttggtcaatctgtgcata

SEQ ID NO: 135753 - DNA, 72 bp, Homo sapiens
ttattttcaggaaagtcagaaaaacctcagtaacctgggttttggtcaatctgtgcatatcaatgttgattt

SEQ ID NO: 135754 - DNA, 73 bp, Homo sapiens
ttcaggaaagtcagaaaaacctcagtaacctgggttttggtcaatctgtgcatatcaatgttgattttcaacc

SEQ ID NO: 135755 - DNA, 71 bp, Homo sapiens
aaaaacctcagtaacctgggttttggtcaatctgtgcatatcaatgttgattttcaacctcctctttgtgt

SEQ ID NO: 135756 - DNA, 73 bp, Homo sapiens
taacctgggttttggtcaatctgtgcatatcaatgttgattttcaacctcctctttgtgtttggaattgaaaa

SEQ ID NO: 135757 - DNA, 74 bp, Homo sapiens
ggttttggtcaatctgtgcatatcaatgttgattttcaacctcctctttgtgtttggaattgaaaactccaata

SEQ ID NO: 135758 - DNA, 76 bp, Homo sapiens
aatctgtgcatatcaatgttgattttcaacctcctctttgtgtttggaattgaaaactccaataagaacttgcaga

SEQ ID NO: 135759 - DNA, 75 bp, Homo sapiens
tatcaatgttgattttcaacctcctctttgtgtttggaattgaaaactccaataagaacttgcagacaagtgatg

SEQ ID NO: 135760 - DNA, 75 bp, Homo sapiens
tttcaacctcctctttgtgtttggaattgaaaactccaataagaacttgcagacaagtgatggtgacatcaataa

SEQ ID NO: 135761 - DNA, 76 bp, Homo sapiens
tcctctttgtgtttggaattgaaaactccaataagaacttgcagacaagtgatggtgacatcaataatattgactt

SEQ ID NO: 135762 - DNA, 77 bp, Homo sapiens
gtgtttggaattgaaaactccaataagaacttgcagacaagtgatggtgacatcaataatattgactttgacaataa

SEQ ID NO: 135763 - DNA, 79 bp, Homo sapiens
attgaaaactccaataagaacttgcagacaagtgatggtgacatcaataatattgactttgacaataatgacataccca

SEQ ID NO: 135764 - DNA, 81 bp, Homo sapiens
taagaacttgcagacaagtgatggtgacatcaataatattgactttgacaataatgacatacccaggacagacaccattaa

SEQ ID NO: 135765 - DNA, 79 bp, Homo sapiens
agacaagtgatggtgacatcaataatattgactttgacaataatgacatacccaggacagacaccattaacatcccgaa

SEQ ID NO: 135766 - DNA, 79 bp, Homo sapiens
agtgatggtgacatcaataatattgactttgacaataatgacatacccaggacagacaccattaacatcccgaatccca

SEQ ID NO: 135767 - DNA, 80 bp, Homo sapiens
atcaataatattgactttgacaataatgacatacccaggacagacaccattaacatcccgaatcccatgtgcactgcgat

SEQ ID NO: 135768 - DNA, 80 bp, Homo sapiens
ttgactttgacaataatgacatacccaggacagacaccattaacatcccgaatcccatgtgcactgcgattgccgcctta

SEQ ID NO: 135769 - DNA, 79 bp, Homo sapiens
ataatgacatacccaggacagacaccattaacatcccgaatcccatgtgcactgcgattgccgccttactgcactattt

SEQ ID NO: 135770 - DNA, 78 bp, Homo sapiens
atacccaggacagacaccattaacatcccgaatcccatgtgcactgcgattgccgccttactgcactattttctgtta

SEQ ID NO: 135771 - DNA, 79 bp, Homo sapiens
acagacaccattaacatcccgaatcccatgtgcactgcgattgccgccttactgcactattttctgttagtgacattta

SEQ ID NO: 135772 - DNA, 77 bp, Homo sapiens
attaacatcccgaatcccatgtgcactgcgattgccgccttactgcactattttctgttagtgacatttacctggaa

SEQ ID NO: 135773 - DNA, 83 bp, Homo sapiens
aatcccatgtgcactgcgattgccgccttactgcactattttctgttagtgacatttacctggaacgcactcagcgctgcaca

SEQ ID NO: 135774 - DNA, 79 bp, Homo sapiens
cgccttactgcactattttctgttagtgacatttacctggaacgcactcagcgctgcacagctctattaccttctaata

SEQ ID NO: 135775 - DNA, 78 bp, Homo sapiens
ttttctgttagtgacatttacctggaacgcactcagcgctgcacagctctattaccttctaataaggaccatgaagcc

SEQ ID NO: 135776 - DNA, 77 bp, Homo sapiens
atttacctggaacgcactcagcgctgcacagctctattaccttctaataaggaccatgaagcctcttcctcggcatt

SEQ ID NO: 135777 - DNA, 79 bp, Homo sapiens
tggaacgcactcagcgctgcacagctctattaccttctaataaggaccatgaagcctcttcctcggcatttcattcttt

SEQ ID NO: 135778 - DNA, 79 bp, Homo sapiens
agcgctgcacagctctattaccttctaataaggaccatgaagcctcttcctcggcatttcattcttttcatctcattaa

SEQ ID NO: 135779 - DNA, 76 bp, Homo sapiens
acagctctattaccttctaataaggaccatgaagcctcttcctcggcatttcattcttttcatctcattaattgga

SEQ ID NO: 135780 - DNA, 74 bp, Homo sapiens
tcggcatttcattcttttcatctcattaattggatggggtaagtgtttgcatctcccctttctcaggaatttaa

SEQ ID NO: 135781 - DNA, 79 bp, Homo sapiens
attaatccaagtctggataaatcattaattatgtgcctctctttatcacataggagtcccagctatagtagtggctata

SEQ ID NO: 135782 - DNA, 78 bp, Homo sapiens
gataaatcattaattatgtgcctctctttatcacataggagtcccagctatagtagtggctataacagtgggagttat

SEQ ID NO: 135783 - DNA, 77 bp, Homo sapiens
atcattaattatgtgcctctctttatcacataggagtcccagctatagtagtggctataacagtgggagttatttat

SEQ ID NO: 135784 - DNA, 76 bp, Homo sapiens
cctctctttatcacataggagtcccagctatagtagtggctataacagtgggagttatttattctcagaatggaaa

SEQ ID NO: 135785 - DNA, 76 bp, Homo sapiens
ctttatcacataggagtcccagctatagtagtggctataacagtgggagttatttattctcagaatggaaataatc

SEQ ID NO: 135786 - DNA, 75 bp, Homo sapiens
gtcccagctatagtagtggctataacagtgggagttatttattctcagaatggaaataatccacagtgggaatta

SEQ ID NO: 135787 - DNA, 75 bp, Homo sapiens
agctatagtagtggctataacagtgggagttatttattctcagaatggaaataatccacagtgggaattagacta

SEQ ID NO: 135788 - DNA, 73 bp, Homo sapiens
tataacagtgggagttatttattctcagaatggaaataatccacagtgggaattagactaccggcaagagaaa

SEQ ID NO: 135789 - DNA, 72 bp, Homo sapiens
ggagttatttattctcagaatggaaataatccacagtgggaattagactaccggcaagagaaaatgtgagtt

SEQ ID NO: 135790 - DNA, 72 bp, Homo sapiens
tttattctcagaatggaaataatccacagtgggaattagactaccggcaagagaaaatgtgagtttatattt

SEQ ID NO: 135791 - DNA, 70 bp, Homo sapiens
cagaatggaaataatccacagtgggaattagactaccggcaagagaaaatgtgagtttatatttttttaa

SEQ ID NO: 135792 - DNA, 69 bp, Homo sapiens
aatccacagtgggaattagactaccggcaagagaaaatgtgagtttatatttttttaaatgtccaattg

SEQ ID NO: 135793 - DNA, 70 bp, Homo sapiens
aattttttttttcctccacagctgctggctggcaattccagaacccaatggtgttataaaaagtccgctg

SEQ ID NO: 135794 - DNA, 76 bp, Homo sapiens
tttttcctccacagctgctggctggcaattccagaacccaatggtgttataaaaagtccgctgttgtggtcattca

SEQ ID NO: 135795 - DNA, 76 bp, Homo sapiens
agctgctggctggcaattccagaacccaatggtgttataaaaagtccgctgttgtggtcattcatcgtacctgtaa

SEQ ID NO: 135796 - DNA, 74 bp, Homo sapiens
tggcaattccagaacccaatggtgttataaaaagtccgctgttgtggtcattcatcgtacctgtaaccattatc

SEQ ID NO: 135797 - DNA, 75 bp, Homo sapiens
ttccagaacccaatggtgttataaaaagtccgctgttgtggtcattcatcgtacctgtaaccattatcctcatca

SEQ ID NO: 135798 - DNA, 76 bp, Homo sapiens
gtgttataaaaagtccgctgttgtggtcattcatcgtacctgtaaccattatcctcatcagcaatgttgttatgtt

SEQ ID NO: 135799 - DNA, 76 bp, Homo sapiens
ataaaaagtccgctgttgtggtcattcatcgtacctgtaaccattatcctcatcagcaatgttgttatgtttatta

SEQ ID NO: 135800 - DNA, 79 bp, Homo sapiens
ctgttgtggtcattcatcgtacctgtaaccattatcctcatcagcaatgttgttatgtttattacaatctcgatcaaag

SEQ ID NO: 135801 - DNA, 80 bp, Homo sapiens
attcatcgtacctgtaaccattatcctcatcagcaatgttgttatgtttattacaatctcgatcaaagtgctgtggaaga

SEQ ID NO: 135802 - DNA, 79 bp, Homo sapiens
tacctgtaaccattatcctcatcagcaatgttgttatgtttattacaatctcgatcaaagtgctgtggaagaataacca

SEQ ID NO: 135803 - DNA, 79 bp, Homo sapiens
attatcctcatcagcaatgttgttatgtttattacaatctcgatcaaagtgctgtggaagaataaccagaacctgacaa

SEQ ID NO: 135804 - DNA, 75 bp, Homo sapiens
agcaatgttgttatgtttattacaatctcgatcaaagtgctgtggaagaataaccagaacctgacaaggtaagat

SEQ ID NO: 135805 - DNA, 75 bp, Homo sapiens
ttatgtttattacaatctcgatcaaagtgctgtggaagaataaccagaacctgacaaggtaagattcccaatgaa

SEQ ID NO: 135806 - DNA, 75 bp, Homo sapiens
ttattacaatctcgatcaaagtgctgtggaagaataaccagaacctgacaaggtaagattcccaatgaatgggaa

SEQ ID NO: 135807 - DNA, 77 bp, Homo sapiens
ctcgatcaaagtgctgtggaagaataaccagaacctgacaaggtaagattcccaatgaatgggaagctgccaggcaa

SEQ ID NO: 135808 - DNA, 67 bp, Homo sapiens
taaaaccctaatgaaccacattatttttcttgttttctttcacctagcacaaaaaaagtttcatcca

SEQ ID NO: 135809 - DNA, 70 bp, Homo sapiens
cctaatgaaccacattatttttcttgttttctttcacctagcacaaaaaaagtttcatccatgaagaaga

SEQ ID NO: 135810 - DNA, 73 bp, Homo sapiens
tatttttcttgttttctttcacctagcacaaaaaaagtttcatccatgaagaagattgttagcacattatctg

SEQ ID NO: 135811 - DNA, 75 bp, Homo sapiens
cttgttttctttcacctagcacaaaaaaagtttcatccatgaagaagattgttagcacattatctgttgcagttg

SEQ ID NO: 135812 - DNA, 75 bp, Homo sapiens
ctttcacctagcacaaaaaaagtttcatccatgaagaagattgttagcacattatctgttgcagttgtttttgga

SEQ ID NO: 135813 - DNA, 73 bp, Homo sapiens
aaaaaagtttcatccatgaagaagattgttagcacattatctgttgcagttgtttttggaattacctggattc

SEQ ID NO: 135814 - DNA, 77 bp, Homo sapiens
agtttcatccatgaagaagattgttagcacattatctgttgcagttgtttttggaattacctggattctagcatacc

SEQ ID NO: 135815 - DNA, 77 bp, Homo sapiens
aagaagattgttagcacattatctgttgcagttgtttttggaattacctggattctagcatacctgatgctagttaa

SEQ ID NO: 135816 - DNA, 84 bp, Homo sapiens
ttgttagcacattatctgttgcagttgtttttggaattacctggattctagcatacctgatgctagttaatgatgatagcatca

SEQ ID NO: 135817 - DNA, 82 bp, Homo sapiens
ttatctgttgcagttgtttttggaattacctggattctagcatacctgatgctagttaatgatgatagcatcaggatcgtct

SEQ ID NO: 135818 - DNA, 83 bp, Homo sapiens
ttgtttttggaattacctggattctagcatacctgatgctagttaatgatgatagcatcaggatcgtcttcagctacatattc

SEQ ID NO: 135819 - DNA, 84 bp, Homo sapiens
aattacctggattctagcatacctgatgctagttaatgatgatagcatcaggatcgtcttcagctacatattctgccttttcaa

SEQ ID NO: 135820 - DNA, 86 bp, Homo sapiens
ttctagcatacctgatgctagttaatgatgatagcatcaggatcgtcttcagctacatattctgccttttcaacactacacaggta

SEQ ID NO: 135821 - DNA, 85 bp, Homo sapiens
atacctgatgctagttaatgatgatagcatcaggatcgtcttcagctacatattctgccttttcaacactacacaggtatggtgc

SEQ ID NO: 135822 - DNA, 82 bp, Homo sapiens
agttaatgatgatagcatcaggatcgtcttcagctacatattctgccttttcaacactacacaggtatggtgcggattagtc

SEQ ID NO: 135823 - DNA, 82 bp, Homo sapiens
atgatagcatcaggatcgtcttcagctacatattctgccttttcaacactacacaggtatggtgcggattagtctgaaagta

SEQ ID NO: 135824 - DNA, 80 bp, Homo sapiens
atcaggatcgtcttcagctacatattctgccttttcaacactacacaggtatggtgcggattagtctgaaagtagcagaa

SEQ ID NO: 135825 - DNA, 75 bp, Homo sapiens
atactgtatctcagcacttacccaacattaaacttttgttctatctgcagggattgcaaatttttatcctgtaca

SEQ ID NO: 135826 - DNA, 74 bp, Homo sapiens
tcagcacttacccaacattaaacttttgttctatctgcagggattgcaaatttttatcctgtacactgttagaa

SEQ ID NO: 135827 - DNA, 70 bp, Homo sapiens
cccaacattaaacttttgttctatctgcagggattgcaaatttttatcctgtacactgttagaacaaaag

SEQ ID NO: 135828 - DNA, 73 bp, Homo sapiens
acttttgttctatctgcagggattgcaaatttttatcctgtacactgttagaacaaaagtcttccagagtgaa

SEQ ID NO: 135829 - DNA, 75 bp, Homo sapiens
tctatctgcagggattgcaaatttttatcctgtacactgttagaacaaaagtcttccagagtgaagcttccaaag

SEQ ID NO: 135830 - DNA, 75 bp, Homo sapiens
ttgcaaatttttatcctgtacactgttagaacaaaagtcttccagagtgaagcttccaaagtgttgatgttgcta

SEQ ID NO: 135831 - DNA, 75 bp, Homo sapiens
ttttatcctgtacactgttagaacaaaagtcttccagagtgaagcttccaaagtgttgatgttgctatcgtctat

SEQ ID NO: 135832 - DNA, 74 bp, Homo sapiens
actgttagaacaaaagtcttccagagtgaagcttccaaagtgttgatgttgctatcgtctattgggagaaggaa

SEQ ID NO: 135833 - DNA, 77 bp, Homo sapiens
tagaacaaaagtcttccagagtgaagcttccaaagtgttgatgttgctatcgtctattgggagaaggaagtcattgc

SEQ ID NO: 135834 - DNA, 79 bp, Homo sapiens
tcttccagagtgaagcttccaaagtgttgatgttgctatcgtctattgggagaaggaagtcattgccttcagtgacgcg

SEQ ID NO: 135835 - DNA, 78 bp, Homo sapiens
aagcttccaaagtgttgatgttgctatcgtctattgggagaaggaagtcattgccttcagtgacgcggccgaggctgc

SEQ ID NO: 135836 - DNA, 81 bp, Homo sapiens
tgttgatgttgctatcgtctattgggagaaggaagtcattgccttcagtgacgcggccgaggctgcgtgtaaagatgtata

SEQ ID NO: 135837 - DNA, 78 bp, Homo sapiens
atgttgctatcgtctattgggagaaggaagtcattgccttcagtgacgcggccgaggctgcgtgtaaagatgtataat

SEQ ID NO: 135838 - DNA, 77 bp, Homo sapiens
tattgggagaaggaagtcattgccttcagtgacgcggccgaggctgcgtgtaaagatgtataatttcctcaggtcat

SEQ ID NO: 135839 - DNA, 77 bp, Homo sapiens
ggaagtcattgccttcagtgacgcggccgaggctgcgtgtaaagatgtataatttcctcaggtcattgccaacctta

SEQ ID NO: 135840 - DNA, 75 bp, Homo sapiens
acgcggccgaggctgcgtgtaaagatgtataatttcctcaggtcattgccaaccttacatgaacgctttaggcta

SEQ ID NO: 135841 - DNA, 74 bp, Homo sapiens
aggctgcgtgtaaagatgtataatttcctcaggtcattgccaaccttacatgaacgctttaggctactggaaac

SEQ ID NO: 135842 - DNA, 72 bp, Homo sapiens
aaagatgtataatttcctcaggtcattgccaaccttacatgaacgctttaggctactggaaacctctccgag

SEQ ID NO: 135843 - DNA, 73 bp, Homo sapiens
taatttcctcaggtcattgccaaccttacatgaacgctttaggctactggaaacctctccgagtactgaggaa

SEQ ID NO: 135844 - DNA, 74 bp, Homo sapiens
aggtcattgccaaccttacatgaacgctttaggctactggaaacctctccgagtactgaggaaatcacactctc

SEQ ID NO: 135845 - DNA, 74 bp, Homo sapiens
aaccttacatgaacgctttaggctactggaaacctctccgagtactgaggaaatcacactctctgaaagtgaca

SEQ ID NO: 135846 - DNA, 77 bp, Homo sapiens
tacatgaacgctttaggctactggaaacctctccgagtactgaggaaatcacactctctgaaagtgacaatgcaaag

SEQ ID NO: 135847 - DNA, 77 bp, Homo sapiens
tttaggctactggaaacctctccgagtactgaggaaatcacactctctgaaagtgacaatgcaaaggaaagcatcta

SEQ ID NO: 135848 - DNA, 75 bp, Homo sapiens
aaacctctccgagtactgaggaaatcacactctctgaaagtgacaatgcaaaggaaagcatctagacagtaaaac

SEQ ID NO: 135849 - DNA, 76 bp, Homo sapiens
agtactgaggaaatcacactctctgaaagtgacaatgcaaaggaaagcatctagacagtaaaacttacctgttgtg

SEQ ID NO: 135850 - DNA, 73 bp, Homo sapiens
aaatcacactctctgaaagtgacaatgcaaaggaaagcatctagacagtaaaacttacctgttgtggtctttt

SEQ ID NO: 135851 - DNA, 74 bp, Homo sapiens
acactctctgaaagtgacaatgcaaaggaaagcatctagacagtaaaacttacctgttgtggtctttttaatca

SEQ ID NO: 135852 - DNA, 70 bp, Homo sapiens
agcatctagacagtaaaacttacctgttgtggtctttttaatcacctcgtttgagttttatctgtttctc

SEQ ID NO: 135853 - DNA, 67 bp, Homo sapiens
cagtaaaacttacctgttgtggtctttttaatcacctcgtttgagttttatctgtttctctccttta

SEQ ID NO: 135854 - DNA, 68 bp, Homo sapiens
tacctgttgtggtctttttaatcacctcgtttgagttttatctgtttctctcctttatttcccagtcc

SEQ ID NO: 135855 - DNA, 69 bp, Homo sapiens
tttttaatcacctcgtttgagttttatctgtttctctcctttatttcccagtcctctcagaaagtcttc

SEQ ID NO: 135856 - DNA, 70 bp, Homo sapiens
ctcgtttgagttttatctgtttctctcctttatttcccagtcctctcagaaagtcttcctcaatgtattt

SEQ ID NO: 135857 - DNA, 73 bp, Homo sapiens
ttttatctgtttctctcctttatttcccagtcctctcagaaagtcttcctcaatgtattttgctcaggattaa

SEQ ID NO: 135858 - DNA, 74 bp, Homo sapiens
ttctctcctttatttcccagtcctctcagaaagtcttcctcaatgtattttgctcaggattaagaattagataa

SEQ ID NO: 135859 - DNA, 71 bp, Homo sapiens
ctttatttcccagtcctctcagaaagtcttcctcaatgtattttgctcaggattaagaattagataaaacc

SEQ ID NO: 135860 - DNA, 72 bp, Homo sapiens
ccagtcctctcagaaagtcttcctcaatgtattttgctcaggattaagaattagataaaacctgttgtttat

SEQ ID NO: 135861 - DNA, 72 bp, Homo sapiens
gaaagtcttcctcaatgtattttgctcaggattaagaattagataaaacctgttgtttattattattcggca

SEQ ID NO: 135862 - DNA, 72 bp, Homo sapiens
caatgtattttgctcaggattaagaattagataaaacctgttgtttattattattcggcataatggacttgg

SEQ ID NO: 135863 - DNA, 71 bp, Homo sapiens
tgctcaggattaagaattagataaaacctgttgtttattattattcggcataatggacttggtagtttttc

SEQ ID NO: 135864 - DNA, 68 bp, Homo sapiens
aggattaagaattagataaaacctgttgtttattattattcggcataatggacttggtagtttttcta

SEQ ID NO: 135865 - DNA, 69 bp, Homo sapiens
ttagataaaacctgttgtttattattattcggcataatggacttggtagtttttctatttttcaataga

SEQ ID NO: 135866 - DNA, 70 bp, Homo sapiens
cctgttgtttattattattcggcataatggacttggtagtttttctatttttcaatagatttgtacttga

SEQ ID NO: 135867 - DNA, 71 bp, Homo sapiens
ttattattcggcataatggacttggtagtttttctatttttcaatagatttgtacttgaataaggtgaaga

SEQ ID NO: 135868 - DNA, 71 bp, Homo sapiens
cggcataatggacttggtagtttttctatttttcaatagatttgtacttgaataaggtgaagaatttcaca

SEQ ID NO: 135869 - DNA, 71 bp, Homo sapiens
gacttggtagtttttctatttttcaatagatttgtacttgaataaggtgaagaatttcacacaacatacaa

SEQ ID NO: 135870 - DNA, 72 bp, Homo sapiens
gtacttgaataaggtgaagaatttcacacaacatacaagagtaccattgttccttatatcgttaaatctttg

SEQ ID NO: 135871 - DNA, 75 bp, Homo sapiens
ggtgaagaatttcacacaacatacaagagtaccattgttccttatatcgttaaatctttgtgacacactttgaca

SEQ ID NO: 135872 - DNA, 73 bp, Homo sapiens
agaatttcacacaacatacaagagtaccattgttccttatatcgttaaatctttgtgacacactttgacaaaa

SEQ ID NO: 135873 - DNA, 72 bp, Homo sapiens
caacatacaagagtaccattgttccttatatcgttaaatctttgtgacacactttgacaaaaatgtagaacc

SEQ ID NO: 135874 - DNA, 70 bp, Homo sapiens
tgttccttatatcgttaaatctttgtgacacactttgacaaaaatgtagaacctataacaaattctttta

SEQ ID NO: 135875 - DNA, 68 bp, Homo sapiens
atcgttaaatctttgtgacacactttgacaaaaatgtagaacctataacaaattcttttacaagttac

SEQ ID NO: 135876 - DNA, 69 bp, Homo sapiens
ctttgtgacacactttgacaaaaatgtagaacctataacaaattcttttacaagttactataaaggaca

SEQ ID NO: 135877 - DNA, 68 bp, Homo sapiens
cactttgacaaaaatgtagaacctataacaaattcttttacaagttactataaaggacacaaagagaa

SEQ ID NO: 135878 - DNA, 65 bp, Homo sapiens
gtagaacctataacaaattcttttacaagttactataaaggacacaaagagaaaactttaccttc

SEQ ID NO: 135879 - DNA, 66 bp, Homo sapiens
cctataacaaattcttttacaagttactataaaggacacaaagagaaaactttaccttccagaaca

SEQ ID NO: 135880 - DNA, 69 bp, Homo sapiens
cttttacaagttactataaaggacacaaagagaaaactttaccttccagaacaaaatgactcctgatga

SEQ ID NO: 135881 - DNA, 70 bp, Homo sapiens
aagttactataaaggacacaaagagaaaactttaccttccagaacaaaatgactcctgatgaacagtgtg

SEQ ID NO: 135882 - DNA, 74 bp, Homo sapiens
gacacaaagagaaaactttaccttccagaacaaaatgactcctgatgaacagtgtgtggggatttgcttgtatg

SEQ ID NO: 135883 - DNA, 72 bp, Homo sapiens
agaaaactttaccttccagaacaaaatgactcctgatgaacagtgtgtggggatttgcttgtatgtattaaa

SEQ ID NO: 135884 - DNA, 73 bp, Homo sapiens
tttaccttccagaacaaaatgactcctgatgaacagtgtgtggggatttgcttgtatgtattaaacttttgac

SEQ ID NO: 135885 - DNA, 74 bp, Homo sapiens
gaacaaaatgactcctgatgaacagtgtgtggggatttgcttgtatgtattaaacttttgacctctgaatattt

SEQ ID NO: 135886 - DNA, 74 bp, Homo sapiens
actcctgatgaacagtgtgtggggatttgcttgtatgtattaaacttttgacctctgaatattttacagtcgta

SEQ ID NO: 135887 - DNA, 71 bp, Homo sapiens
gggatttgcttgtatgtattaaacttttgacctctgaatattttacagtcgtatgtgcttgtacttttatt

SEQ ID NO: 135888 - DNA, 73 bp, Homo sapiens
gcttgtatgtattaaacttttgacctctgaatattttacagtcgtatgtgcttgtacttttatttccaatgaa

SEQ ID NO: 135889 - DNA, 72 bp, Homo sapiens
acttttgacctctgaatattttacagtcgtatgtgcttgtacttttatttccaatgaagaatttggcaccaa

SEQ ID NO: 135890 - DNA, 73 bp, Homo sapiens
ttacagtcgtatgtgcttgtacttttatttccaatgaagaatttggcaccaattcaaactttgaaaagcgata

SEQ ID NO: 135891 - DNA, 71 bp, Homo sapiens
gtcgtatgtgcttgtacttttatttccaatgaagaatttggcaccaattcaaactttgaaaagcgatattt

SEQ ID NO: 135892 - DNA, 68 bp, Homo sapiens
cttgtacttttatttccaatgaagaatttggcaccaattcaaactttgaaaagcgatatttttttctg

SEQ ID NO: 135893 - DNA, 70 bp, Homo sapiens
cccattggcgagaaacggaaatacccgctttcgagaaaaccggaagtgcgtggtcacgccccgcgcatgc

SEQ ID NO: 135894 - DNA, 70 bp, Homo sapiens
agaaacggaaatacccgctttcgagaaaaccggaagtgcgtggtcacgccccgcgcatgcgtgcatcggg

SEQ ID NO: 135895 - DNA, 75 bp, Homo sapiens
aatacccgctttcgagaaaaccggaagtgcgtggtcacgccccgcgcatgcgtgcatcggggcagctcacgcttc

SEQ ID NO: 135896 - DNA, 76 bp, Homo sapiens
agaaaaccggaagtgcgtggtcacgccccgcgcatgcgtgcatcggggcagctcacgcttcctaaatcccgtcatc

SEQ ID NO: 135897 - DNA, 79 bp, Homo sapiens
cggaagtgcgtggtcacgccccgcgcatgcgtgcatcggggcagctcacgcttcctaaatcccgtcatccagtgagaaa

SEQ ID NO: 135898 - DNA, 80 bp, Homo sapiens
tggtcacgccccgcgcatgcgtgcatcggggcagctcacgcttcctaaatcccgtcatccagtgagaaagcagggactct

SEQ ID NO: 135899 - DNA, 81 bp, Homo sapiens
cgcatgcgtgcatcggggcagctcacgcttcctaaatcccgtcatccagtgagaaagcagggactcttcggcctaggcagc

SEQ ID NO: 135900 - DNA, 75 bp, Homo sapiens
atcggggcagctcacgcttcctaaatcccgtcatccagtgagaaagcagggactcttcggcctaggcagccggga

SEQ ID NO: 135901 - DNA, 75 bp, Homo sapiens
agctcacgcttcctaaatcccgtcatccagtgagaaagcagggactcttcggcctaggcagccgggacccagcca

SEQ ID NO: 135902 - DNA, 74 bp, Homo sapiens
cttcctaaatcccgtcatccagtgagaaagcagggactcttcggcctaggcagccgggacccagccagccctgc

SEQ ID NO: 135903 - DNA, 81 bp, Homo sapiens
tcatccagtgagaaagcagggactcttcggcctaggcagccgggacccagccagccctgcgcctcgcgccgtcgcgcatgc

SEQ ID NO: 135904 - DNA, 77 bp, Homo sapiens
agaaagcagggactcttcggcctaggcagccgggacccagccagccctgcgcctcgcgccgtcgcgcatgcgtcctg

SEQ ID NO: 135905 - DNA, 78 bp, Homo sapiens
ggactcttcggcctaggcagccgggacccagccagccctgcgcctcgcgccgtcgcgcatgcgtcctgggtatgtcca

SEQ ID NO: 135906 - DNA, 78 bp, Homo sapiens
cctaggcagccgggacccagccagccctgcgcctcgcgccgtcgcgcatgcgtcctgggtatgtccacgcgcaataag

SEQ ID NO: 135907 - DNA, 76 bp, Homo sapiens
agccgggacccagccagccctgcgcctcgcgccgtcgcgcatgcgtcctgggtatgtccacgcgcaataaggaggg

SEQ ID NO: 135908 - DNA, 76 bp, Homo sapiens
ccagccctgcgcctcgcgccgtcgcgcatgcgtcctgggtatgtccacgcgcaataaggaggggcgaaaggacatt

SEQ ID NO: 135909 - DNA, 74 bp, Homo sapiens
cctgcgcctcgcgccgtcgcgcatgcgtcctgggtatgtccacgcgcaataaggaggggcgaaaggacattttt

SEQ ID NO: 135910 - DNA, 70 bp, Homo sapiens
cgccgtcgcgcatgcgtcctgggtatgtccacgcgcaataaggaggggcgaaaggacatttttttttttc

SEQ ID NO: 135911 - DNA, 69 bp, Homo sapiens
ttttttttttcttgctcccgcctctgttcttcccccacctgccacgtacagagcccaagttctcgctag

SEQ ID NO: 135912 - DNA, 72 bp, Homo sapiens
tttttcttgctcccgcctctgttcttcccccacctgccacgtacagagcccaagttctcgctaggcttgttg

SEQ ID NO: 135913 - DNA, 74 bp, Homo sapiens
ccgcctctgttcttcccccacctgccacgtacagagcccaagttctcgctaggcttgttgggtcagcgcgattg

SEQ ID NO: 135914 - DNA, 74 bp, Homo sapiens
cctctgttcttcccccacctgccacgtacagagcccaagttctcgctaggcttgttgggtcagcgcgattggcc

SEQ ID NO: 135915 - DNA, 72 bp, Homo sapiens
gttcttcccccacctgccacgtacagagcccaagttctcgctaggcttgttgggtcagcgcgattggccggg

SEQ ID NO: 135916 - DNA, 76 bp, Homo sapiens
agagcccaagttctcgctaggcttgttgggtcagcgcgattggccggggcccgcgcgagcctgcgagcgaggtgcg

SEQ ID NO: 135917 - DNA, 75 bp, Homo sapiens
aagttctcgctaggcttgttgggtcagcgcgattggccggggcccgcgcgagcctgcgagcgaggtgcggcggtc

SEQ ID NO: 135918 - DNA, 76 bp, Homo sapiens
taggcttgttgggtcagcgcgattggccggggcccgcgcgagcctgcgagcgaggtgcggcggtcgcgaagggcaa

SEQ ID NO: 135919 - DNA, 74 bp, Homo sapiens
tgggtcagcgcgattggccggggcccgcgcgagcctgcgagcgaggtgcggcggtcgcgaagggcaaccgaggg

SEQ ID NO: 135920 - DNA, 71 bp, Homo sapiens
attggccggggcccgcgcgagcctgcgagcgaggtgcggcggtcgcgaagggcaaccgagggggccgtgac

SEQ ID NO: 135921 - DNA, 72 bp, Homo sapiens
gggcccgcgcgagcctgcgagcgaggtgcggcggtcgcgaagggcaaccgagggggccgtgaccaccgcctc

SEQ ID NO: 135922 - DNA, 71 bp, Homo sapiens
agcctgcgagcgaggtgcggcggtcgcgaagggcaaccgagggggccgtgaccaccgcctccccgcgacgc

SEQ ID NO: 135923 - DNA, 68 bp, Homo sapiens
aggtgcggcggtcgcgaagggcaaccgagggggccgtgaccaccgcctccccgcgacgccccagtcca

SEQ ID NO: 135924 - DNA, 69 bp, Homo sapiens
aaccgagggggccgtgaccaccgcctccccgcgacgccccagtccagtggcctcgcgtccgcccattca

SEQ ID NO: 135925 - DNA, 74 bp, Homo sapiens
gccgtgaccaccgcctccccgcgacgccccagtccagtggcctcgcgtccgcccattcagcggagacctgcgga

SEQ ID NO: 135926 - DNA, 73 bp, Homo sapiens
accaccgcctccccgcgacgccccagtccagtggcctcgcgtccgcccattcagcggagacctgcggagaggc

SEQ ID NO: 135927 - DNA, 74 bp, Homo sapiens
cccgcgacgccccagtccagtggcctcgcgtccgcccattcagcggagacctgcggagaggcggcggccgcggc

SEQ ID NO: 135928 - DNA, 74 bp, Homo sapiens
agtccagtggcctcgcgtccgcccattcagcggagacctgcggagaggcggcggccgcggcctccgcaagccgg

SEQ ID NO: 135929 - DNA, 75 bp, Homo sapiens
cctcgcgtccgcccattcagcggagacctgcggagaggcggcggccgcggcctccgcaagccggtatggccactg

SEQ ID NO: 135930 - DNA, 75 bp, Homo sapiens
cgtccgcccattcagcggagacctgcggagaggcggcggccgcggcctccgcaagccggtatggccactggagac

SEQ ID NO: 135931 - DNA, 74 bp, Homo sapiens
ttcagcggagacctgcggagaggcggcggccgcggcctccgcaagccggtatggccactggagacgggggttgc

SEQ ID NO: 135932 - DNA, 67 bp, Homo sapiens
caacttttacggtatgttttgttgtttaattatcaaaaccacttttatcagtctttctctagagttg

SEQ ID NO: 135933 - DNA, 72 bp, Homo sapiens
gttttgttgtttaattatcaaaaccacttttatcagtctttctctagagttgtatatatagaacatcctgga

SEQ ID NO: 135934 - DNA, 75 bp, Homo sapiens
ttaattatcaaaaccacttttatcagtctttctctagagttgtatatatagaacatcctggagtccaccatgaac

SEQ ID NO: 135935 - DNA, 73 bp, Homo sapiens
aaaaccacttttatcagtctttctctagagttgtatatatagaacatcctggagtccaccatgaacggacagt

SEQ ID NO: 135936 - DNA, 76 bp, Homo sapiens
acttttatcagtctttctctagagttgtatatatagaacatcctggagtccaccatgaacggacagttggatctaa

SEQ ID NO: 135937 - DNA, 78 bp, Homo sapiens
tttctctagagttgtatatatagaacatcctggagtccaccatgaacggacagttggatctaagtgggaagctaatca

SEQ ID NO: 135938 - DNA, 79 bp, Homo sapiens
ttgtatatatagaacatcctggagtccaccatgaacggacagttggatctaagtgggaagctaatcatcaaagctcaac

SEQ ID NO: 135939 - DNA, 77 bp, Homo sapiens
atatagaacatcctggagtccaccatgaacggacagttggatctaagtgggaagctaatcatcaaagctcaacttgg

SEQ ID NO: 135940 - DNA, 76 bp, Homo sapiens
tggagtccaccatgaacggacagttggatctaagtgggaagctaatcatcaaagctcaacttggggaggatattcg

SEQ ID NO: 135941 - DNA, 75 bp, Homo sapiens
tgaacggacagttggatctaagtgggaagctaatcatcaaagctcaacttggggaggatattcggcgaattccta

SEQ ID NO: 135942 - DNA, 75 bp, Homo sapiens
acagttggatctaagtgggaagctaatcatcaaagctcaacttggggaggatattcggcgaattcctattcataa

SEQ ID NO: 135943 - DNA, 76 bp, Homo sapiens
atctaagtgggaagctaatcatcaaagctcaacttggggaggatattcggcgaattcctattcataatgaagatat

SEQ ID NO: 135944 - DNA, 78 bp, Homo sapiens
taatcatcaaagctcaacttggggaggatattcggcgaattcctattcataatgaagatattacttatgatgaattag

SEQ ID NO: 135945 - DNA, 76 bp, Homo sapiens
aaagctcaacttggggaggatattcggcgaattcctattcataatgaagatattacttatgatgaattagtgctaa

SEQ ID NO: 135946 - DNA, 78 bp, Homo sapiens
aacttggggaggatattcggcgaattcctattcataatgaagatattacttatgatgaattagtgctaatgatgcaac

SEQ ID NO: 135947 - DNA, 81 bp, Homo sapiens
gatattcggcgaattcctattcataatgaagatattacttatgatgaattagtgctaatgatgcaacgagttttcagagga

SEQ ID NO: 135948 - DNA, 79 bp, Homo sapiens
ttcctattcataatgaagatattacttatgatgaattagtgctaatgatgcaacgagttttcagaggaaaacttctgag

SEQ ID NO: 135949 - DNA, 79 bp, Homo sapiens
aatgaagatattacttatgatgaattagtgctaatgatgcaacgagttttcagaggaaaacttctgagtaatgatgaag

SEQ ID NO: 135950 - DNA, 79 bp, Homo sapiens
agatattacttatgatgaattagtgctaatgatgcaacgagttttcagaggaaaacttctgagtaatgatgaagtaaca

SEQ ID NO: 135951 - DNA, 79 bp, Homo sapiens
tatgatgaattagtgctaatgatgcaacgagttttcagaggaaaacttctgagtaatgatgaagtaacaataaagtata

SEQ ID NO: 135952 - DNA, 75 bp, Homo sapiens
gctaatgatgcaacgagttttcagaggaaaacttctgagtaatgatgaagtaacaataaagtataaagatgaagg

SEQ ID NO: 135953 - DNA, 74 bp, Homo sapiens
gatgcaacgagttttcagaggaaaacttctgagtaatgatgaagtaacaataaagtataaagatgaaggtaaga

SEQ ID NO: 135954 - DNA, 70 bp, Homo sapiens
gttttcagaggaaaacttctgagtaatgatgaagtaacaataaagtataaagatgaaggtaagagtgttt

SEQ ID NO: 135955 - DNA, 70 bp, Homo sapiens
gaaaacttctgagtaatgatgaagtaacaataaagtataaagatgaaggtaagagtgtttttaaagctat

SEQ ID NO: 135956 - DNA, 68 bp, Homo sapiens
gagtaatgatgaagtaacaataaagtataaagatgaaggtaagagtgtttttaaagctattttttaaa

SEQ ID NO: 135957 - DNA, 73 bp, Homo sapiens
ttttttaaattccagatggagatcttataacaatttttgatagttctgacctttcctttgcaattcagtgcag

SEQ ID NO: 135958 - DNA, 75 bp, Homo sapiens
aaattccagatggagatcttataacaatttttgatagttctgacctttcctttgcaattcagtgcagtaggatac

SEQ ID NO: 135959 - DNA, 77 bp, Homo sapiens
gagatcttataacaatttttgatagttctgacctttcctttgcaattcagtgcagtaggatactgaaactgacatta

SEQ ID NO: 135960 - DNA, 76 bp, Homo sapiens
taacaatttttgatagttctgacctttcctttgcaattcagtgcagtaggatactgaaactgacattatttggtga

SEQ ID NO: 135961 - DNA, 76 bp, Homo sapiens
tttgatagttctgacctttcctttgcaattcagtgcagtaggatactgaaactgacattatttggtgagtagtaaa

SEQ ID NO: 135962 - DNA, 74 bp, Homo sapiens
acctttcctttgcaattcagtgcagtaggatactgaaactgacattatttggtgagtagtaaactttctaatga

SEQ ID NO: 135963 - DNA, 75 bp, Homo sapiens
ctttgcaattcagtgcagtaggatactgaaactgacattatttggtgagtagtaaactttctaatgaatttacta

SEQ ID NO: 135964 - DNA, 74 bp, Homo sapiens
cagtgcagtaggatactgaaactgacattatttggtgagtagtaaactttctaatgaatttactattttattca

SEQ ID NO: 135965 - DNA, 71 bp, Homo sapiens
ggatactgaaactgacattatttggtgagtagtaaactttctaatgaatttactattttattcattgtatt

SEQ ID NO: 135966 - DNA, 68 bp, Homo sapiens
tttggtgagtagtaaactttctaatgaatttactattttattcattgtattttaaagatgtttggctt

SEQ ID NO: 135967 - DNA, 65 bp, Homo sapiens
agtaaactttctaatgaatttactattttattcattgtattttaaagatgtttggcttttttcct

SEQ ID NO: 135968 - DNA, 67 bp, Homo sapiens
tgaatttactattttattcattgtattttaaagatgtttggcttttttccttttaaagactcaggta

SEQ ID NO: 135969 - DNA, 66 bp, Homo sapiens
ttttattcattgtattttaaagatgtttggcttttttccttttaaagactcaggtaagcaataact

SEQ ID NO: 135970 - DNA, 67 bp, Homo sapiens
cattgtattttaaagatgtttggcttttttccttttaaagactcaggtaagcaataacttattcaaa

SEQ ID NO: 135971 - DNA, 68 bp, Homo sapiens
ttaaagatgtttggcttttttccttttaaagactcaggtaagcaataacttattcaaatattattaca

SEQ ID NO: 135972 - DNA, 69 bp, Homo sapiens
gcttttttccttttaaagactcaggtaagcaataacttattcaaatattattacatttatttgtgttca

SEQ ID NO: 135973 - DNA, 70 bp, Homo sapiens
tccttttaaagactcaggtaagcaataacttattcaaatattattacatttatttgtgttcaggtagttg

SEQ ID NO: 135974 - DNA, 71 bp, Homo sapiens
gactcaggtaagcaataacttattcaaatattattacatttatttgtgttcaggtagttgttttagattac

SEQ ID NO: 135975 - DNA, 71 bp, Homo sapiens
ataacttattcaaatattattacatttatttgtgttcaggtagttgttttagattacttgaagcttatggc

SEQ ID NO: 135976 - DNA, 72 bp, Homo sapiens
caaatattattacatttatttgtgttcaggtagttgttttagattacttgaagcttatggctgtgtatgttt

SEQ ID NO: 135977 - DNA, 71 bp, Homo sapiens
attacatttatttgtgttcaggtagttgttttagattacttgaagcttatggctgtgtatgtttttaagaa

SEQ ID NO: 135978 - DNA, 72 bp, Homo sapiens
tttgtgttcaggtagttgttttagattacttgaagcttatggctgtgtatgtttttaagaaaatgatagaag

SEQ ID NO: 135979 - DNA, 74 bp, Homo sapiens
tagattacttgaagcttatggctgtgtatgtttttaagaaaatgatagaagtttaattcagtaagaacagagtg

SEQ ID NO: 135980 - DNA, 72 bp, Homo sapiens
cttgaagcttatggctgtgtatgtttttaagaaaatgatagaagtttaattcagtaagaacagagtgttaag

SEQ ID NO: 135981 - DNA, 70 bp, Homo sapiens
atggctgtgtatgtttttaagaaaatgatagaagtttaattcagtaagaacagagtgttaagtatgtttt

SEQ ID NO: 135982 - DNA, 68 bp, Homo sapiens
ttttaagaaaatgatagaagtttaattcagtaagaacagagtgttaagtatgttttttttgaaatcag

SEQ ID NO: 135983 - DNA, 68 bp, Homo sapiens
tttaattcagtaagaacagagtgttaagtatgttttttttgaaatcaggtataacttaggtatccctg

SEQ ID NO: 135984 - DNA, 70 bp, Homo sapiens
cagtaagaacagagtgttaagtatgttttttttgaaatcaggtataacttaggtatccctggtgcagtat

SEQ ID NO: 135985 - DNA, 69 bp, Homo sapiens
cagagtgttaagtatgttttttttgaaatcaggtataacttaggtatccctggtgcagtattatagttt

SEQ ID NO: 135986 - DNA, 69 bp, Homo sapiens
gtatgttttttttgaaatcaggtataacttaggtatccctggtgcagtattatagttttaatttagctg

SEQ ID NO: 135987 - DNA, 70 bp, Homo sapiens
ttgaaatcaggtataacttaggtatccctggtgcagtattatagttttaatttagctgtattagaatttt

SEQ ID NO: 135988 - DNA, 68 bp, Homo sapiens
caggtataacttaggtatccctggtgcagtattatagttttaatttagctgtattagaatttttaaat

SEQ ID NO: 135989 - DNA, 69 bp, Homo sapiens
ggtatccctggtgcagtattatagttttaatttagctgtattagaatttttaaattgtaattatcttcc

SEQ ID NO: 135990 - DNA, 69 bp, Homo sapiens
atagttttaatttagctgtattagaatttttaaattgtaattatcttccttcacattacagtatgttgt

SEQ ID NO: 135991 - DNA, 73 bp, Homo sapiens
tagctgtattagaatttttaaattgtaattatcttccttcacattacagtatgttgttacttattatcagggc

SEQ ID NO: 135992 - DNA, 71 bp, Homo sapiens
agaatttttaaattgtaattatcttccttcacattacagtatgttgttacttattatcagggcttaacatg

SEQ ID NO: 135993 - DNA, 75 bp, Homo sapiens
atcttccttcacattacagtatgttgttacttattatcagggcttaacatgtaagtctgatacttgaaaccagta

SEQ ID NO: 135994 - DNA, 76 bp, Homo sapiens
ttcacattacagtatgttgttacttattatcagggcttaacatgtaagtctgatacttgaaaccagtagtcgccaa

SEQ ID NO: 135995 - DNA, 73 bp, Homo sapiens
ttacttattatcagggcttaacatgtaagtctgatacttgaaaccagtagtcgccaacctttttgcactggaa

SEQ ID NO: 135996 - DNA, 71 bp, Homo sapiens
atcagggcttaacatgtaagtctgatacttgaaaccagtagtcgccaacctttttgcactggaaactggtt

SEQ ID NO: 135997 - DNA, 71 bp, Homo sapiens
aacatgtaagtctgatacttgaaaccagtagtcgccaacctttttgcactggaaactggtttcgtgtaaga

SEQ ID NO: 135998 - DNA, 70 bp, Homo sapiens
atacttgaaaccagtagtcgccaacctttttgcactggaaactggtttcgtgtaagacagttcttctatg

SEQ ID NO: 135999 - DNA, 68 bp, Homo sapiens
aaaccagtagtcgccaacctttttgcactggaaactggtttcgtgtaagacagttcttctatggaagg

SEQ ID NO: 136000 - DNA, 70 bp, Homo sapiens
gtcgccaacctttttgcactggaaactggtttcgtgtaagacagttcttctatggaagggggcaggagaa

SEQ ID NO: 136001 - DNA, 68 bp, Homo sapiens
tttttgcactggaaactggtttcgtgtaagacagttcttctatggaagggggcaggagaaggtttggg

SEQ ID NO: 136002 - DNA, 67 bp, Homo sapiens
aaactggtttcgtgtaagacagttcttctatggaagggggcaggagaaggtttggggatgaaactct

SEQ ID NO: 136003 - DNA, 74 bp, Homo sapiens
agttcttctatggaagggggcaggagaaggtttggggatgaaactcttccactttgcatgtgcaattcacaata

SEQ ID NO: 136004 - DNA, 75 bp, Homo sapiens
tatggaagggggcaggagaaggtttggggatgaaactcttccactttgcatgtgcaattcacaatagggttcaca

SEQ ID NO: 136005 - DNA, 82 bp, Homo sapiens
acactcctatgtgaatctaatgccactgctgaactgacaggaggcggagcccaccacttaacctcctgctgtgctgcccagc

SEQ ID NO: 136006 - DNA, 77 bp, Homo sapiens
aatctaatgccactgctgaactgacaggaggcggagcccaccacttaacctcctgctgtgctgcccagcccggtttg

SEQ ID NO: 136007 - DNA, 75 bp, Homo sapiens
cactgctgaactgacaggaggcggagcccaccacttaacctcctgctgtgctgcccagcccggtttggttcctaa

SEQ ID NO: 136008 - DNA, 73 bp, Homo sapiens
ctgaactgacaggaggcggagcccaccacttaacctcctgctgtgctgcccagcccggtttggttcctaacag

SEQ ID NO: 136009 - DNA, 68 bp, Homo sapiens
cctaacaggccacagagtagcactgggttggggacccttgctttagacagtatttcccgaggggtact

SEQ ID NO: 136010 - DNA, 68 bp, Homo sapiens
cacagagtagcactgggttggggacccttgctttagacagtatttcccgaggggtacttaaagattaa

SEQ ID NO: 136011 - DNA, 65 bp, Homo sapiens
agtagcactgggttggggacccttgctttagacagtatttcccgaggggtacttaaagattaaaa

SEQ ID NO: 136012 - DNA, 65 bp, Homo sapiens
gggacccttgctttagacagtatttcccgaggggtacttaaagattaaaaatagttctgataaaa

SEQ ID NO: 136013 - DNA, 65 bp, Homo sapiens
ccttgctttagacagtatttcccgaggggtacttaaagattaaaaatagttctgataaaaaccaa

SEQ ID NO: 136014 - DNA, 66 bp, Homo sapiens
gacagtatttcccgaggggtacttaaagattaaaaatagttctgataaaaaccaatagaagactaa

SEQ ID NO: 136015 - DNA, 64 bp, Homo sapiens
cccgaggggtacttaaagattaaaaatagttctgataaaaaccaatagaagactaattttaatc

SEQ ID NO: 136016 - DNA, 64 bp, Homo sapiens
acttaaagattaaaaatagttctgataaaaaccaatagaagactaattttaatcttttagattt

SEQ ID NO: 136017 - DNA, 65 bp, Homo sapiens
aaaatagttctgataaaaaccaatagaagactaattttaatcttttagattttttcttttagatc

SEQ ID NO: 136018 - DNA, 71 bp, Homo sapiens
tctgataaaaaccaatagaagactaattttaatcttttagattttttcttttagatcttaatagatatgca

SEQ ID NO: 136019 - DNA, 71 bp, Homo sapiens
ccaatagaagactaattttaatcttttagattttttcttttagatcttaatagatatgcaaggcagaactc

SEQ ID NO: 136020 - DNA, 70 bp, Homo sapiens
attttaatcttttagattttttcttttagatcttaatagatatgcaaggcagaactcttaagggacaaga

SEQ ID NO: 136021 - DNA, 71 bp, Homo sapiens
cttttagattttttcttttagatcttaatagatatgcaaggcagaactcttaagggacaagatagaaaaga

SEQ ID NO: 136022 - DNA, 74 bp, Homo sapiens
ttcttttagatcttaatagatatgcaaggcagaactcttaagggacaagatagaaaagattacagagttaaatg

SEQ ID NO: 136023 - DNA, 76 bp, Homo sapiens
gatcttaatagatatgcaaggcagaactcttaagggacaagatagaaaagattacagagttaaatggtagtgtgat

SEQ ID NO: 136024 - DNA, 77 bp, Homo sapiens
atagatatgcaaggcagaactcttaagggacaagatagaaaagattacagagttaaatggtagtgtgattatgtgaa

SEQ ID NO: 136025 - DNA, 72 bp, Homo sapiens
aaggcagaactcttaagggacaagatagaaaagattacagagttaaatggtagtgtgattatgtgaaaaata

SEQ ID NO: 136026 - DNA, 73 bp, Homo sapiens
tcttaagggacaagatagaaaagattacagagttaaatggtagtgtgattatgtgaaaaataaaatgtgtaca

SEQ ID NO: 136027 - DNA, 71 bp, Homo sapiens
tagaaaagattacagagttaaatggtagtgtgattatgtgaaaaataaaatgtgtacactttttccggctg

SEQ ID NO: 136028 - DNA, 70 bp, Homo sapiens
tacagagttaaatggtagtgtgattatgtgaaaaataaaatgtgtacactttttccggctgttttgttgt

SEQ ID NO: 136029 - DNA, 67 bp, Homo sapiens
agttaaatggtagtgtgattatgtgaaaaataaaatgtgtacactttttccggctgttttgttgttt

SEQ ID NO: 136030 - DNA, 76 bp, Homo sapiens
ttttaattttgttgcatgaaacttagagttcagtgtgaaatatgatcatggtctattgatttaatttgtatctatt

SEQ ID NO: 136031 - DNA, 82 bp, Homo sapiens
gttgcatgaaacttagagttcagtgtgaaatatgatcatggtctattgatttaatttgtatctatttcatctccatctagga

SEQ ID NO: 136032 - DNA, 79 bp, Homo sapiens
gaaacttagagttcagtgtgaaatatgatcatggtctattgatttaatttgtatctatttcatctccatctaggaagga

SEQ ID NO: 136033 - DNA, 83 bp, Homo sapiens
gagttcagtgtgaaatatgatcatggtctattgatttaatttgtatctatttcatctccatctaggaaggatgaatatgaata

SEQ ID NO: 136034 - DNA, 79 bp, Homo sapiens
tcatggtctattgatttaatttgtatctatttcatctccatctaggaaggatgaatatgaataatcagaatttaaatgt

SEQ ID NO: 136035 - DNA, 77 bp, Homo sapiens
ttgatttaatttgtatctatttcatctccatctaggaaggatgaatatgaataatcagaatttaaatgttaataaca

SEQ ID NO: 136036 - DNA, 72 bp, Homo sapiens
ttcatctccatctaggaaggatgaatatgaataatcagaatttaaatgttaataacaaaaactgtttaaaat

SEQ ID NO: 136037 - DNA, 69 bp, Homo sapiens
tctaggaaggatgaatatgaataatcagaatttaaatgttaataacaaaaactgtttaaaattatttaa

SEQ ID NO: 136038 - DNA, 68 bp, Homo sapiens
attatttaaaataaaggtatctttttacagtattgaatgtaaaatacttaactattgactaggcataa

SEQ ID NO: 136039 - DNA, 72 bp, Homo sapiens
ataaaggtatctttttacagtattgaatgtaaaatacttaactattgactaggcataaagcagattagataa

SEQ ID NO: 136040 - DNA, 74 bp, Homo sapiens
tacagtattgaatgtaaaatacttaactattgactaggcataaagcagattagataatctgaagacccttactt

SEQ ID NO: 136041 - DNA, 73 bp, Homo sapiens
aaaatacttaactattgactaggcataaagcagattagataatctgaagacccttactttaaacaggatctgc

SEQ ID NO: 136042 - DNA, 75 bp, Homo sapiens
taactattgactaggcataaagcagattagataatctgaagacccttactttaaacaggatctgctagataaact

SEQ ID NO: 136043 - DNA, 76 bp, Homo sapiens
tgactaggcataaagcagattagataatctgaagacccttactttaaacaggatctgctagataaacttacaaatg

SEQ ID NO: 136044 - DNA, 72 bp, Homo sapiens
aaagcagattagataatctgaagacccttactttaaacaggatctgctagataaacttacaaatgtgttttc

SEQ ID NO: 136045 - DNA, 73 bp, Homo sapiens
agataatctgaagacccttactttaaacaggatctgctagataaacttacaaatgtgttttctgaattctgta

SEQ ID NO: 136046 - DNA, 74 bp, Homo sapiens
acccttactttaaacaggatctgctagataaacttacaaatgtgttttctgaattctgtaactcagcttgcaca

SEQ ID NO: 136047 - DNA, 75 bp, Homo sapiens
atctgctagataaacttacaaatgtgttttctgaattctgtaactcagcttgcacaggaaagtaagggaaatatc

SEQ ID NO: 136048 - DNA, 72 bp, Homo sapiens
taaacttacaaatgtgttttctgaattctgtaactcagcttgcacaggaaagtaagggaaatatccagggaa

SEQ ID NO: 136049 - DNA, 70 bp, Homo sapiens
aaatgtgttttctgaattctgtaactcagcttgcacaggaaagtaagggaaatatccagggaacaaaaaa

SEQ ID NO: 136050 - DNA, 69 bp, Homo sapiens
aattctgtaactcagcttgcacaggaaagtaagggaaatatccagggaacaaaaaagtagagggaacta

SEQ ID NO: 136051 - DNA, 69 bp, Homo sapiens
tgtaactcagcttgcacaggaaagtaagggaaatatccagggaacaaaaaagtagagggaactaaaggc

SEQ ID NO: 136052 - DNA, 66 bp, Homo sapiens
acaggaaagtaagggaaatatccagggaacaaaaaagtagagggaactaaaggcctgatgtaccaa

SEQ ID NO: 136053 - DNA, 65 bp, Homo sapiens
aaagtaagggaaatatccagggaacaaaaaagtagagggaactaaaggcctgatgtaccaaaagc

SEQ ID NO: 136054 - DNA, 66 bp, Homo sapiens
aaatatccagggaacaaaaaagtagagggaactaaaggcctgatgtaccaaaagctgaaacttggg

SEQ ID NO: 136055 - DNA, 66 bp, Homo sapiens
aacaaaaaagtagagggaactaaaggcctgatgtaccaaaagctgaaacttggggtgttcttggtg

SEQ ID NO: 136056 - DNA, 69 bp, Homo sapiens
agggaactaaaggcctgatgtaccaaaagctgaaacttggggtgttcttggtggtgatagtagagattt

SEQ ID NO: 136057 - DNA, 74 bp, Homo sapiens
taaaggcctgatgtaccaaaagctgaaacttggggtgttcttggtggtgatagtagagattttagcctgcataa

SEQ ID NO: 136058 - DNA, 71 bp, Homo sapiens
taccaaaagctgaaacttggggtgttcttggtggtgatagtagagattttagcctgcataatttaaggaat

SEQ ID NO: 136059 - DNA, 73 bp, Homo sapiens
aaagctgaaacttggggtgttcttggtggtgatagtagagattttagcctgcataatttaaggaattgccatc

SEQ ID NO: 136060 - DNA, 77 bp, Homo sapiens
ggtgttcttggtggtgatagtagagattttagcctgcataatttaaggaattgccatctggtgtctacatggtgtag

SEQ ID NO: 136061 - DNA, 77 bp, Homo sapiens
ttggtggtgatagtagagattttagcctgcataatttaaggaattgccatctggtgtctacatggtgtaggcccttg

SEQ ID NO: 136062 - DNA, 75 bp, Homo sapiens
atagtagagattttagcctgcataatttaaggaattgccatctggtgtctacatggtgtaggcccttggtcctag

SEQ ID NO: 136063 - DNA, 75 bp, Homo sapiens
ttttagcctgcataatttaaggaattgccatctggtgtctacatggtgtaggcccttggtcctagtccctcagta

SEQ ID NO: 136064 - DNA, 76 bp, Homo sapiens
taatttaaggaattgccatctggtgtctacatggtgtaggcccttggtcctagtccctcagtaggccatgctttca

SEQ ID NO: 136065 - DNA, 75 bp, Homo sapiens
aattgccatctggtgtctacatggtgtaggcccttggtcctagtccctcagtaggccatgctttcaaaaagaata

SEQ ID NO: 136066 - DNA, 73 bp, Homo sapiens
atctggtgtctacatggtgtaggcccttggtcctagtccctcagtaggccatgctttcaaaaagaatatttta

SEQ ID NO: 136067 - DNA, 70 bp, Homo sapiens
atggtgtaggcccttggtcctagtccctcagtaggccatgctttcaaaaagaatattttagaaaagtcta

SEQ ID NO: 136068 - DNA, 71 bp, Homo sapiens
tagtccctcagtaggccatgctttcaaaaagaatattttagaaaagtctaccttgatacagggaaagtcaa

SEQ ID NO: 136069 - DNA, 70 bp, Homo sapiens
gtaggccatgctttcaaaaagaatattttagaaaagtctaccttgatacagggaaagtcaaggaagctta

SEQ ID NO: 136070 - DNA, 68 bp, Homo sapiens
gctttcaaaaagaatattttagaaaagtctaccttgatacagggaaagtcaaggaagcttaactctta

SEQ ID NO: 136071 - DNA, 67 bp, Homo sapiens
aatattttagaaaagtctaccttgatacagggaaagtcaaggaagcttaactcttataccttgggcc

SEQ ID NO: 136072 - DNA, 68 bp, Homo sapiens
ttagaaaagtctaccttgatacagggaaagtcaaggaagcttaactcttataccttgggccgtcaggg

SEQ ID NO: 136073 - DNA, 68 bp, Homo sapiens
ctaccttgatacagggaaagtcaaggaagcttaactcttataccttgggccgtcaggggcttgggaag

SEQ ID NO: 136074 - DNA, 70 bp, Homo sapiens
gaaagtcaaggaagcttaactcttataccttgggccgtcaggggcttgggaagtctcccttcaggattca

SEQ ID NO: 136075 - DNA, 69 bp, Homo sapiens
aaggaagcttaactcttataccttgggccgtcaggggcttgggaagtctcccttcaggattcataattg

SEQ ID NO: 136076 - DNA, 70 bp, Homo sapiens
ttaactcttataccttgggccgtcaggggcttgggaagtctcccttcaggattcataattgtggtcctta

SEQ ID NO: 136077 - DNA, 70 bp, Homo sapiens
tgggccgtcaggggcttgggaagtctcccttcaggattcataattgtggtccttaggtgagttgggttta

SEQ ID NO: 136078 - DNA, 67 bp, Homo sapiens
ggggcttgggaagtctcccttcaggattcataattgtggtccttaggtgagttgggtttaaatttaa

SEQ ID NO: 136079 - DNA, 69 bp, Homo sapiens
aagtctcccttcaggattcataattgtggtccttaggtgagttgggtttaaatttaaactatccatgta

SEQ ID NO: 136080 - DNA, 68 bp, Homo sapiens
ccttcaggattcataattgtggtccttaggtgagttgggtttaaatttaaactatccatgtagtttgg

SEQ ID NO: 136081 - DNA, 67 bp, Homo sapiens
taattgtggtccttaggtgagttgggtttaaatttaaactatccatgtagtttggtaactcccaagc

SEQ ID NO: 136082 - DNA, 68 bp, Homo sapiens
tccttaggtgagttgggtttaaatttaaactatccatgtagtttggtaactcccaagcccagatgtta

SEQ ID NO: 136083 - DNA, 67 bp, Homo sapiens
gtgagttgggtttaaatttaaactatccatgtagtttggtaactcccaagcccagatgttaccattt

SEQ ID NO: 136084 - DNA, 71 bp, Homo sapiens
tttggtaactcccaagcccagatgttaccattttagaaaaatctcagaagaaaggccaaaatctctcttga

SEQ ID NO: 136085 - DNA, 71 bp, Homo sapiens
tcccaagcccagatgttaccattttagaaaaatctcagaagaaaggccaaaatctctcttgaggggtatat

SEQ ID NO: 136086 - DNA, 72 bp, Homo sapiens
agatgttaccattttagaaaaatctcagaagaaaggccaaaatctctcttgaggggtatattctcaatccag

SEQ ID NO: 136087 - DNA, 76 bp, Homo sapiens
atctcagaagaaaggccaaaatctctcttgaggggtatattctcaatccaggtcacataggtttctcacagacaaa

SEQ ID NO: 136088 - DNA, 75 bp, Homo sapiens
aaatctctcttgaggggtatattctcaatccaggtcacataggtttctcacagacaaaaccgtaagacacatgaa

SEQ ID NO: 136089 - DNA, 75 bp, Homo sapiens
aggggtatattctcaatccaggtcacataggtttctcacagacaaaaccgtaagacacatgaagctgtcaggtaa

SEQ ID NO: 136090 - DNA, 78 bp, Homo sapiens
tatattctcaatccaggtcacataggtttctcacagacaaaaccgtaagacacatgaagctgtcaggtaagcaagaac

SEQ ID NO: 136091 - DNA, 76 bp, Homo sapiens
aggtcacataggtttctcacagacaaaaccgtaagacacatgaagctgtcaggtaagcaagaaccactggacacaa

SEQ ID NO: 136092 - DNA, 75 bp, Homo sapiens
ataggtttctcacagacaaaaccgtaagacacatgaagctgtcaggtaagcaagaaccactggacacaactaata

SEQ ID NO: 136093 - DNA, 75 bp, Homo sapiens
agacaaaaccgtaagacacatgaagctgtcaggtaagcaagaaccactggacacaactaatagcaggattagatt

SEQ ID NO: 136094 - DNA, 76 bp, Homo sapiens
aaccgtaagacacatgaagctgtcaggtaagcaagaaccactggacacaactaatagcaggattagattttcaaca

SEQ ID NO: 136095 - DNA, 77 bp, Homo sapiens
tgaagctgtcaggtaagcaagaaccactggacacaactaatagcaggattagattttcaacaacttcagttaagata

SEQ ID NO: 136096 - DNA, 75 bp, Homo sapiens
aggtaagcaagaaccactggacacaactaatagcaggattagattttcaacaacttcagttaagatatgtgatag

SEQ ID NO: 136097 - DNA, 76 bp, Homo sapiens
caagaaccactggacacaactaatagcaggattagattttcaacaacttcagttaagatatgtgatagtctacaaa

SEQ ID NO: 136098 - DNA, 74 bp, Homo sapiens
ctggacacaactaatagcaggattagattttcaacaacttcagttaagatatgtgatagtctacaaaattaaaa

SEQ ID NO: 136099 - DNA, 72 bp, Homo sapiens
agcaggattagattttcaacaacttcagttaagatatgtgatagtctacaaaattaaaagttatttaagaca

SEQ ID NO: 136100 - DNA, 71 bp, Homo sapiens
gattttcaacaacttcagttaagatatgtgatagtctacaaaattaaaagttatttaagacatagaagaag

SEQ ID NO: 136101 - DNA, 73 bp, Homo sapiens
taagatatgtgatagtctacaaaattaaaagttatttaagacatagaagaaggaataagaatataaaagcagc

SEQ ID NO: 136102 - DNA, 69 bp, Homo sapiens
gatagtctacaaaattaaaagttatttaagacatagaagaaggaataagaatataaaagcagccggccg

SEQ ID NO: 136103 - DNA, 68 bp, Homo sapiens
ctacaaaattaaaagttatttaagacatagaagaaggaataagaatataaaagcagccggccgtggtg

SEQ ID NO: 136104 - DNA, 72 bp, Homo sapiens
caaaacaaaacgagaacataagagcaagatgctattgtattatggaaaaacaataaacagattttataaaga

SEQ ID NO: 136105 - DNA, 71 bp, Homo sapiens
aaaacgagaacataagagcaagatgctattgtattatggaaaaacaataaacagattttataaagaactta

SEQ ID NO: 136106 - DNA, 70 bp, Homo sapiens
aagagcaagatgctattgtattatggaaaaacaataaacagattttataaagaacttaaagtaacttgga

SEQ ID NO: 136107 - DNA, 70 bp, Homo sapiens
agatgctattgtattatggaaaaacaataaacagattttataaagaacttaaagtaacttggaaatgaga

SEQ ID NO: 136108 - DNA, 70 bp, Homo sapiens
tatggaaaaacaataaacagattttataaagaacttaaagtaacttggaaatgagaaatataatcattga

SEQ ID NO: 136109 - DNA, 68 bp, Homo sapiens
aacaataaacagattttataaagaacttaaagtaacttggaaatgagaaatataatcattgaaattaa

SEQ ID NO: 136110 - DNA, 69 bp, Homo sapiens
gattttataaagaacttaaagtaacttggaaatgagaaatataatcattgaaattaaatactaagtgga

SEQ ID NO: 136111 - DNA, 69 bp, Homo sapiens
gaacttaaagtaacttggaaatgagaaatataatcattgaaattaaatactaagtggataggttaaaca

SEQ ID NO: 136112 - DNA, 73 bp, Homo sapiens
gtaacttggaaatgagaaatataatcattgaaattaaatactaagtggataggttaaacacattagtcatagc

SEQ ID NO: 136113 - DNA, 71 bp, Homo sapiens
aatcattgaaattaaatactaagtggataggttaaacacattagtcatagctaaaaagagaattagtgaac

SEQ ID NO: 136114 - DNA, 70 bp, Homo sapiens
attaaatactaagtggataggttaaacacattagtcatagctaaaaagagaattagtgaactgaaaagga

SEQ ID NO: 136115 - DNA, 71 bp, Homo sapiens
atactaagtggataggttaaacacattagtcatagctaaaaagagaattagtgaactgaaaaggaaatcca

SEQ ID NO: 136116 - DNA, 70 bp, Homo sapiens
ggttaaacacattagtcatagctaaaaagagaattagtgaactgaaaaggaaatccaaagaaattacaga

SEQ ID NO: 136117 - DNA, 73 bp, Homo sapiens
cacattagtcatagctaaaaagagaattagtgaactgaaaaggaaatccaaagaaattacagagtaaagcaca

SEQ ID NO: 136118 - DNA, 69 bp, Homo sapiens
gctaaaaagagaattagtgaactgaaaaggaaatccaaagaaattacagagtaaagcacaaaaacacag

SEQ ID NO: 136119 - DNA, 71 bp, Homo sapiens
gagaattagtgaactgaaaaggaaatccaaagaaattacagagtaaagcacaaaaacacaggcaaaagaga

SEQ ID NO: 136120 - DNA, 70 bp, Homo sapiens
gtgaactgaaaaggaaatccaaagaaattacagagtaaagcacaaaaacacaggcaaaagagaagttgaa

SEQ ID NO: 136121 - DNA, 72 bp, Homo sapiens
ggaaatccaaagaaattacagagtaaagcacaaaaacacaggcaaaagagaagttgaaaatgagaacatcca

SEQ ID NO: 136122 - DNA, 72 bp, Homo sapiens
aagaaattacagagtaaagcacaaaaacacaggcaaaagagaagttgaaaatgagaacatccagaatatttc

SEQ ID NO: 136123 - DNA, 74 bp, Homo sapiens
cagagtaaagcacaaaaacacaggcaaaagagaagttgaaaatgagaacatccagaatatttctattcagagtt

SEQ ID NO: 136124 - DNA, 74 bp, Homo sapiens
aaacacaggcaaaagagaagttgaaaatgagaacatccagaatatttctattcagagtttcaagaaggagagaa

SEQ ID NO: 136125 - DNA, 74 bp, Homo sapiens
aaaagagaagttgaaaatgagaacatccagaatatttctattcagagtttcaagaaggagagaatgggagagtg

SEQ ID NO: 136126 - DNA, 75 bp, Homo sapiens
agttgaaaatgagaacatccagaatatttctattcagagtttcaagaaggagagaatgggagagtggaaatacat

SEQ ID NO: 136127 - DNA, 76 bp, Homo sapiens
aatgagaacatccagaatatttctattcagagtttcaagaaggagagaatgggagagtggaaatacattgaggtaa

SEQ ID NO: 136128 - DNA, 75 bp, Homo sapiens
tctattcagagtttcaagaaggagagaatgggagagtggaaatacattgaggtaatgactaaagaaattttcaga

SEQ ID NO: 136129 - DNA, 73 bp, Homo sapiens
gtttcaagaaggagagaatgggagagtggaaatacattgaggtaatgactaaagaaattttcagagttatata

SEQ ID NO: 136130 - DNA, 73 bp, Homo sapiens
gagaatgggagagtggaaatacattgaggtaatgactaaagaaattttcagagttatataaaagctatagacc

SEQ ID NO: 136131 - DNA, 74 bp, Homo sapiens
tacattgaggtaatgactaaagaaattttcagagttatataaaagctatagaccctcagattcagaaggcacgg

SEQ ID NO: 136132 - DNA, 74 bp, Homo sapiens
taatgactaaagaaattttcagagttatataaaagctatagaccctcagattcagaaggcacggggagccttga

SEQ ID NO: 136133 - DNA, 72 bp, Homo sapiens
tataaaagctatagaccctcagattcagaaggcacggggagccttgagcagggataagtaaaagtaaatccc

SEQ ID NO: 136134 - DNA, 73 bp, Homo sapiens
atagaccctcagattcagaaggcacggggagccttgagcagggataagtaaaagtaaatccccactggacata

SEQ ID NO: 136135 - DNA, 74 bp, Homo sapiens
agattcagaaggcacggggagccttgagcagggataagtaaaagtaaatccccactggacatattgtcatgaaa

SEQ ID NO: 136136 - DNA, 71 bp, Homo sapiens
acggggagccttgagcagggataagtaaaagtaaatccccactggacatattgtcatgaaactggaaaatg

SEQ ID NO: 136137 - DNA, 75 bp, Homo sapiens
ttgagcagggataagtaaaagtaaatccccactggacatattgtcatgaaactggaaaatgtcttaagacagaga

SEQ ID NO: 136138 - DNA, 71 bp, Homo sapiens
aagtaaaagtaaatccccactggacatattgtcatgaaactggaaaatgtcttaagacagagagattacct

SEQ ID NO: 136139 - DNA, 71 bp, Homo sapiens
aagtaaatccccactggacatattgtcatgaaactggaaaatgtcttaagacagagagattaccttaaaag

SEQ ID NO: 136140 - DNA, 75 bp, Homo sapiens
actggacatattgtcatgaaactggaaaatgtcttaagacagagagattaccttaaaagtagccagagagaataa

SEQ ID NO: 136141 - DNA, 76 bp, Homo sapiens
ctggaaaatgtcttaagacagagagattaccttaaaagtagccagagagaataagactgatcacatatgaaacaat

SEQ ID NO: 136142 - DNA, 76 bp, Homo sapiens
agagagattaccttaaaagtagccagagagaataagactgatcacatatgaaacaattagactgttagtagacttc

SEQ ID NO: 136143 - DNA, 76 bp, Homo sapiens
ccttaaaagtagccagagagaataagactgatcacatatgaaacaattagactgttagtagacttcttcatagtaa

SEQ ID NO: 136144 - DNA, 77 bp, Homo sapiens
gaataagactgatcacatatgaaacaattagactgttagtagacttcttcatagtaataatagaggctaaaagacag

SEQ ID NO: 136145 - DNA, 73 bp, Homo sapiens
gtagacttcttcatagtaataatagaggctaaaagacagtattatcacagttgcaaacagtaaagaaaaataa

SEQ ID NO: 136146 - DNA, 72 bp, Homo sapiens
gtaataatagaggctaaaagacagtattatcacagttgcaaacagtaaagaaaaataactagaaaagtagca

SEQ ID NO: 136147 - DNA, 73 bp, Homo sapiens
gaggctaaaagacagtattatcacagttgcaaacagtaaagaaaaataactagaaaagtagcatcctatactc

SEQ ID NO: 136148 - DNA, 72 bp, Homo sapiens
gacagtattatcacagttgcaaacagtaaagaaaaataactagaaaagtagcatcctatactccactaaatt

SEQ ID NO: 136149 - DNA, 73 bp, Homo sapiens
tcacagttgcaaacagtaaagaaaaataactagaaaagtagcatcctatactccactaaatttcacgaatgag

SEQ ID NO: 136150 - DNA, 71 bp, Homo sapiens
gcaaacagtaaagaaaaataactagaaaagtagcatcctatactccactaaatttcacgaatgaggagaag

SEQ ID NO: 136151 - DNA, 69 bp, Homo sapiens
gaaaaataactagaaaagtagcatcctatactccactaaatttcacgaatgaggagaagtaaaaatact

SEQ ID NO: 136152 - DNA, 72 bp, Homo sapiens
ctagaaaagtagcatcctatactccactaaatttcacgaatgaggagaagtaaaaatactttgaaagactga

SEQ ID NO: 136153 - DNA, 72 bp, Homo sapiens
gcatcctatactccactaaatttcacgaatgaggagaagtaaaaatactttgaaagactgagaatttaccac

SEQ ID NO: 136154 - DNA, 71 bp, Homo sapiens
actccactaaatttcacgaatgaggagaagtaaaaatactttgaaagactgagaatttaccactcatggac

SEQ ID NO: 136155 - DNA, 69 bp, Homo sapiens
aaatttcacgaatgaggagaagtaaaaatactttgaaagactgagaatttaccactcatggacccttgt

SEQ ID NO: 136156 - DNA, 69 bp, Homo sapiens
gaatgaggagaagtaaaaatactttgaaagactgagaatttaccactcatggacccttgttaaaataat

SEQ ID NO: 136157 - DNA, 69 bp, Homo sapiens
accactcatggacccttgttaaaataatttttaacagtggtcttcatcaagaaggaaatttagtccaga

SEQ ID NO: 136158 - DNA, 73 bp, Homo sapiens
ataatttttaacagtggtcttcatcaagaaggaaatttagtccagaaggtggtgaaagatgcaagaagcaatg

SEQ ID NO: 136159 - DNA, 78 bp, Homo sapiens
tttaacagtggtcttcatcaagaaggaaatttagtccagaaggtggtgaaagatgcaagaagcaatgtgagcagataa

SEQ ID NO: 136160 - DNA, 80 bp, Homo sapiens
ttcatcaagaaggaaatttagtccagaaggtggtgaaagatgcaagaagcaatgtgagcagataaactgttgcttggtca

SEQ ID NO: 136161 - DNA, 77 bp, Homo sapiens
agaaggaaatttagtccagaaggtggtgaaagatgcaagaagcaatgtgagcagataaactgttgcttggtcagtag

SEQ ID NO: 136162 - DNA, 81 bp, Homo sapiens
ttagtccagaaggtggtgaaagatgcaagaagcaatgtgagcagataaactgttgcttggtcagtaggctatgctttcaaa

SEQ ID NO: 136163 - DNA, 78 bp, Homo sapiens
aggtggtgaaagatgcaagaagcaatgtgagcagataaactgttgcttggtcagtaggctatgctttcaaaaactatt

SEQ ID NO: 136164 - DNA, 75 bp, Homo sapiens
caagaagcaatgtgagcagataaactgttgcttggtcagtaggctatgctttcaaaaactattttagaaaagctt

SEQ ID NO: 136165 - DNA, 75 bp, Homo sapiens
gcagataaactgttgcttggtcagtaggctatgctttcaaaaactattttagaaaagcttttccattgatacaga

SEQ ID NO: 136166 - DNA, 73 bp, Homo sapiens
tgttgcttggtcagtaggctatgctttcaaaaactattttagaaaagcttttccattgatacagaaaaagtca

SEQ ID NO: 136167 - DNA, 70 bp, Homo sapiens
cagtaggctatgctttcaaaaactattttagaaaagcttttccattgatacagaaaaagtcaaggaagct

SEQ ID NO: 136168 - DNA, 67 bp, Homo sapiens
attttagaaaagcttttccattgatacagaaaaagtcaaggaagcttaactcttaaaccttgggctg

SEQ ID NO: 136169 - DNA, 72 bp, Homo sapiens
ttgatacagaaaaagtcaaggaagcttaactcttaaaccttgggctgtcaggggattgggaagcaccaatga

SEQ ID NO: 136170 - DNA, 68 bp, Homo sapiens
aaaagtcaaggaagcttaactcttaaaccttgggctgtcaggggattgggaagcaccaatgaaattta

SEQ ID NO: 136171 - DNA, 69 bp, Homo sapiens
gaagcttaactcttaaaccttgggctgtcaggggattgggaagcaccaatgaaatttatgtgtacgttt

SEQ ID NO: 136172 - DNA, 70 bp, Homo sapiens
ttaactcttaaaccttgggctgtcaggggattgggaagcaccaatgaaatttatgtgtacgttttaatga

SEQ ID NO: 136173 - DNA, 74 bp, Homo sapiens
ttgggctgtcaggggattgggaagcaccaatgaaatttatgtgtacgttttaatgagcattgattgttacaaaa

SEQ ID NO: 136174 - DNA, 73 bp, Homo sapiens
gtcaggggattgggaagcaccaatgaaatttatgtgtacgttttaatgagcattgattgttacaaaattaata

SEQ ID NO: 136175 - DNA, 72 bp, Homo sapiens
gggaagcaccaatgaaatttatgtgtacgttttaatgagcattgattgttacaaaattaatagtcttaggga

SEQ ID NO: 136176 - DNA, 70 bp, Homo sapiens
ccaatgaaatttatgtgtacgttttaatgagcattgattgttacaaaattaatagtcttagggaataaaa

SEQ ID NO: 136177 - DNA, 69 bp, Homo sapiens
gtgtacgttttaatgagcattgattgttacaaaattaatagtcttagggaataaaaacaatttgggaca

SEQ ID NO: 136178 - DNA, 69 bp, Homo sapiens
taatgagcattgattgttacaaaattaatagtcttagggaataaaaacaatttgggacaaaaatactgg

SEQ ID NO: 136179 - DNA, 69 bp, Homo sapiens
gcattgattgttacaaaattaatagtcttagggaataaaaacaatttgggacaaaaatactgggcaata

SEQ ID NO: 136180 - DNA, 67 bp, Homo sapiens
acaaaattaatagtcttagggaataaaaacaatttgggacaaaaatactgggcaataatatgtaaga

SEQ ID NO: 136181 - DNA, 68 bp, Homo sapiens
gtcttagggaataaaaacaatttgggacaaaaatactgggcaataatatgtaagaaaggaagggatga

SEQ ID NO: 136182 - DNA, 68 bp, Homo sapiens
gggaataaaaacaatttgggacaaaaatactgggcaataatatgtaagaaaggaagggatgataggaa

SEQ ID NO: 136183 - DNA, 68 bp, Homo sapiens
acaatttgggacaaaaatactgggcaataatatgtaagaaaggaagggatgataggaataaaaatatt

SEQ ID NO: 136184 - DNA, 67 bp, Homo sapiens
acaaaaatactgggcaataatatgtaagaaaggaagggatgataggaataaaaatattttaaggact

SEQ ID NO: 136185 - DNA, 69 bp, Homo sapiens
tgggcaataatatgtaagaaaggaagggatgataggaataaaaatattttaaggacttatttgggagga

SEQ ID NO: 136186 - DNA, 67 bp, Homo sapiens
tgtaagaaaggaagggatgataggaataaaaatattttaaggacttatttgggaggaacattgtaat

SEQ ID NO: 136187 - DNA, 67 bp, Homo sapiens
gaagggatgataggaataaaaatattttaaggacttatttgggaggaacattgtaattacctttaga

SEQ ID NO: 136188 - DNA, 64 bp, Homo sapiens
gataggaataaaaatattttaaggacttatttgggaggaacattgtaattacctttagattttt

SEQ ID NO: 136189 - DNA, 68 bp, Homo sapiens
tattttaaggacttatttgggaggaacattgtaattacctttagatttttttaattgcatactacata

SEQ ID NO: 136190 - DNA, 75 bp, Homo sapiens
gacttatttgggaggaacattgtaattacctttagatttttttaattgcatactacatatgcagaagtatgcatg

SEQ ID NO: 136191 - DNA, 77 bp, Homo sapiens
ttgggaggaacattgtaattacctttagatttttttaattgcatactacatatgcagaagtatgcatggtgtacatg

SEQ ID NO: 136192 - DNA, 78 bp, Homo sapiens
cattgtaattacctttagatttttttaattgcatactacatatgcagaagtatgcatggtgtacatgtaagagttata

SEQ ID NO: 136193 - DNA, 79 bp, Homo sapiens
tagatttttttaattgcatactacatatgcagaagtatgcatggtgtacatgtaagagttataattgaaaaattagaca

SEQ ID NO: 136194 - DNA, 81 bp, Homo sapiens
taattgcatactacatatgcagaagtatgcatggtgtacatgtaagagttataattgaaaaattagacattgtcaggaaag

SEQ ID NO: 136195 - DNA, 81 bp, Homo sapiens
gcatactacatatgcagaagtatgcatggtgtacatgtaagagttataattgaaaaattagacattgtcaggaaaggagaa

SEQ ID NO: 136196 - DNA, 75 bp, Homo sapiens
atgcagaagtatgcatggtgtacatgtaagagttataattgaaaaattagacattgtcaggaaaggagaaaaaaa

SEQ ID NO: 136197 - DNA, 65 bp, Homo sapiens
aaaaagaaaacaagggtacctgttcagttcagtagaaagtggtggcggaataaaagaggtagaaa

SEQ ID NO: 136198 - DNA, 70 bp, Homo sapiens
aaacaagggtacctgttcagttcagtagaaagtggtggcggaataaaagaggtagaaagctcaatagata

SEQ ID NO: 136199 - DNA, 71 bp, Homo sapiens
acaagggtacctgttcagttcagtagaaagtggtggcggaataaaagaggtagaaagctcaatagatagaa

SEQ ID NO: 136200 - DNA, 74 bp, Homo sapiens
tacctgttcagttcagtagaaagtggtggcggaataaaagaggtagaaagctcaatagatagaacagaatacta

SEQ ID NO: 136201 - DNA, 76 bp, Homo sapiens
tcagttcagtagaaagtggtggcggaataaaagaggtagaaagctcaatagatagaacagaatactaatcacagta

SEQ ID NO: 136202 - DNA, 74 bp, Homo sapiens
agttcagtagaaagtggtggcggaataaaagaggtagaaagctcaatagatagaacagaatactaatcacagta

SEQ ID NO: 136203 - DNA, 75 bp, Homo sapiens
tagaaagtggtggcggaataaaagaggtagaaagctcaatagatagaacagaatactaatcacagtacacagaaa

SEQ ID NO: 136204 - DNA, 78 bp, Homo sapiens
tggcggaataaaagaggtagaaagctcaatagatagaacagaatactaatcacagtacacagaaattgactacatata

SEQ ID NO: 136205 - DNA, 78 bp, Homo sapiens
gcggaataaaagaggtagaaagctcaatagatagaacagaatactaatcacagtacacagaaattgactacatatatc

SEQ ID NO: 136206 - DNA, 76 bp, Homo sapiens
agaggtagaaagctcaatagatagaacagaatactaatcacagtacacagaaattgactacatatatcggttaaaa

SEQ ID NO: 136207 - DNA, 75 bp, Homo sapiens
gatagaacagaatactaatcacagtacacagaaattgactacatatatcggttaaaataatctcttaatggaatt

SEQ ID NO: 136208 - DNA, 73 bp, Homo sapiens
acagaatactaatcacagtacacagaaattgactacatatatcggttaaaataatctcttaatggaattttaa

SEQ ID NO: 136209 - DNA, 70 bp, Homo sapiens
gactacatatatcggttaaaataatctcttaatggaattttaaaaaaaatccagttccatgctacttcca

SEQ ID NO: 136210 - DNA, 69 bp, Homo sapiens
atcggttaaaataatctcttaatggaattttaaaaaaaatccagttccatgctacttccaagagacata

SEQ ID NO: 136211 - DNA, 72 bp, Homo sapiens
aatctcttaatggaattttaaaaaaaatccagttccatgctacttccaagagacataaaagattattatgca

SEQ ID NO: 136212 - DNA, 72 bp, Homo sapiens
aaaaatccagttccatgctacttccaagagacataaaagattattatgcaaagcttgaaagtaaagggctag

SEQ ID NO: 136213 - DNA, 74 bp, Homo sapiens
ttccatgctacttccaagagacataaaagattattatgcaaagcttgaaagtaaagggctaggaaaagagacta

SEQ ID NO: 136214 - DNA, 74 bp, Homo sapiens
cttccaagagacataaaagattattatgcaaagcttgaaagtaaagggctaggaaaagagactagacaaatgca

SEQ ID NO: 136215 - DNA, 73 bp, Homo sapiens
cataaaagattattatgcaaagcttgaaagtaaagggctaggaaaagagactagacaaatgcaaagaaagctg

SEQ ID NO: 136216 - DNA, 72 bp, Homo sapiens
agattattatgcaaagcttgaaagtaaagggctaggaaaagagactagacaaatgcaaagaaagctggttat

SEQ ID NO: 136217 - DNA, 71 bp, Homo sapiens
caaagcttgaaagtaaagggctaggaaaagagactagacaaatgcaaagaaagctggttattaacagaata

SEQ ID NO: 136218 - DNA, 71 bp, Homo sapiens
gaaagtaaagggctaggaaaagagactagacaaatgcaaagaaagctggttattaacagaatagacttata

SEQ ID NO: 136219 - DNA, 74 bp, Homo sapiens
gagactagacaaatgcaaagaaagctggttattaacagaatagacttatataaaaacttgagtagtaatagtca

SEQ ID NO: 136220 - DNA, 74 bp, Homo sapiens
gcaaagaaagctggttattaacagaatagacttatataaaaacttgagtagtaatagtcactttatgatgataa

SEQ ID NO: 136221 - DNA, 72 bp, Homo sapiens
gaaagctggttattaacagaatagacttatataaaaacttgagtagtaatagtcactttatgatgataaaaa

SEQ ID NO: 136222 - DNA, 73 bp, Homo sapiens
acagaatagacttatataaaaacttgagtagtaatagtcactttatgatgataaaaagaataattcactagga

SEQ ID NO: 136223 - DNA, 75 bp, Homo sapiens
gacttatataaaaacttgagtagtaatagtcactttatgatgataaaaagaataattcactaggactatatagca

SEQ ID NO: 136224 - DNA, 75 bp, Homo sapiens
aaacttgagtagtaatagtcactttatgatgataaaaagaataattcactaggactatatagcaatctgaacact

SEQ ID NO: 136225 - DNA, 80 bp, Homo sapiens
gtagtaatagtcactttatgatgataaaaagaataattcactaggactatatagcaatctgaacacttatgcatgttagc

SEQ ID NO: 136226 - DNA, 80 bp, Homo sapiens
agtcactttatgatgataaaaagaataattcactaggactatatagcaatctgaacacttatgcatgttagctttagatg

SEQ ID NO: 136227 - DNA, 77 bp, Homo sapiens
gatgataaaaagaataattcactaggactatatagcaatctgaacacttatgcatgttagctttagatgttttcccc

SEQ ID NO: 136228 - DNA, 75 bp, Homo sapiens
aagaataattcactaggactatatagcaatctgaacacttatgcatgttagctttagatgttttcccctaagaaa

SEQ ID NO: 136229 - DNA, 76 bp, Homo sapiens
cactaggactatatagcaatctgaacacttatgcatgttagctttagatgttttcccctaagaaaaattgacagaa

SEQ ID NO: 136230 - DNA, 71 bp, Homo sapiens
atgcatgttagctttagatgttttcccctaagaaaaattgacagaacaaagagaaatcaataaatttacaa

SEQ ID NO: 136231 - DNA, 72 bp, Homo sapiens
ccctaagaaaaattgacagaacaaagagaaatcaataaatttacaattatgggagagccgataaatcaagca

SEQ ID NO: 136232 - DNA, 75 bp, Homo sapiens
aaattgacagaacaaagagaaatcaataaatttacaattatgggagagccgataaatcaagcaggctcaaacagc

SEQ ID NO: 136233 - DNA, 73 bp, Homo sapiens
aacaaagagaaatcaataaatttacaattatgggagagccgataaatcaagcaggctcaaacagcgttggtct

SEQ ID NO: 136234 - DNA, 77 bp, Homo sapiens
atcaataaatttacaattatgggagagccgataaatcaagcaggctcaaacagcgttggtcttgtacatctagcagt

SEQ ID NO: 136235 - DNA, 77 bp, Homo sapiens
atttacaattatgggagagccgataaatcaagcaggctcaaacagcgttggtcttgtacatctagcagttagggaga

SEQ ID NO: 136236 - DNA, 77 bp, Homo sapiens
attatgggagagccgataaatcaagcaggctcaaacagcgttggtcttgtacatctagcagttagggagaaatacag

SEQ ID NO: 136237 - DNA, 73 bp, Homo sapiens
agccgataaatcaagcaggctcaaacagcgttggtcttgtacatctagcagttagggagaaatacagtttttt

SEQ ID NO: 136238 - DNA, 71 bp, Homo sapiens
ttttttttttcgagtactcatagtgcattatagaagttgactgtaagtcaagtcttccagaaaatcccaaa

SEQ ID NO: 136239 - DNA, 75 bp, Homo sapiens
ttttcgagtactcatagtgcattatagaagttgactgtaagtcaagtcttccagaaaatcccaaaatgtaacaga

SEQ ID NO: 136240 - DNA, 77 bp, Homo sapiens
ctcatagtgcattatagaagttgactgtaagtcaagtcttccagaaaatcccaaaatgtaacagataattagatatc

SEQ ID NO: 136241 - DNA, 73 bp, Homo sapiens
tagaagttgactgtaagtcaagtcttccagaaaatcccaaaatgtaacagataattagatatcttaaaggtca

SEQ ID NO: 136242 - DNA, 74 bp, Homo sapiens
ctgtaagtcaagtcttccagaaaatcccaaaatgtaacagataattagatatcttaaaggtcatattctctggc

SEQ ID NO: 136243 - DNA, 73 bp, Homo sapiens
agtcaagtcttccagaaaatcccaaaatgtaacagataattagatatcttaaaggtcatattctctggcttct

SEQ ID NO: 136244 - DNA, 74 bp, Homo sapiens
gaaaatcccaaaatgtaacagataattagatatcttaaaggtcatattctctggcttctttagagactattgga

SEQ ID NO: 136245 - DNA, 75 bp, Homo sapiens
cccaaaatgtaacagataattagatatcttaaaggtcatattctctggcttctttagagactattggacagaata

SEQ ID NO: 136246 - DNA, 71 bp, Homo sapiens
atcttaaaggtcatattctctggcttctttagagactattggacagaatatgtaacccaaatttccctact

SEQ ID NO: 136247 - DNA, 70 bp, Homo sapiens
cttaaaggtcatattctctggcttctttagagactattggacagaatatgtaacccaaatttccctactt

SEQ ID NO: 136248 - DNA, 70 bp, Homo sapiens
aaaggtcatattctctggcttctttagagactattggacagaatatgtaacccaaatttccctacttttg

SEQ ID NO: 136249 - DNA, 70 bp, Homo sapiens
attctctggcttctttagagactattggacagaatatgtaacccaaatttccctacttttggagacaaaa

SEQ ID NO: 136250 - DNA, 70 bp, Homo sapiens
tggcttctttagagactattggacagaatatgtaacccaaatttccctacttttggagacaaaatatggt

SEQ ID NO: 136251 - DNA, 68 bp, Homo sapiens
agagactattggacagaatatgtaacccaaatttccctacttttggagacaaaatatggttttaaata

SEQ ID NO: 136252 - DNA, 67 bp, Homo sapiens
ggacagaatatgtaacccaaatttccctacttttggagacaaaatatggttttaaataagtcaaaga

SEQ ID NO: 136253 - DNA, 64 bp, Homo sapiens
gtaacccaaatttccctacttttggagacaaaatatggttttaaataagtcaaagaagaaataa

SEQ ID NO: 136254 - DNA, 66 bp, Homo sapiens
tttccctacttttggagacaaaatatggttttaaataagtcaaagaagaaataataatgggaatta

SEQ ID NO: 136255 - DNA, 68 bp, Homo sapiens
tttggagacaaaatatggttttaaataagtcaaagaagaaataataatgggaattataaataagtaga

SEQ ID NO: 136256 - DNA, 69 bp, Homo sapiens
ataagtcaaagaagaaataataatgggaattataaataagtagataatgacttctatgtaaccaagttt

SEQ ID NO: 136257 - DNA, 73 bp, Homo sapiens
gtagataatgacttctatgtaaccaagtttttagagaatgctaaagctgtacttagagtagtacttacagcct

SEQ ID NO: 136258 - DNA, 71 bp, Homo sapiens
gacttctatgtaaccaagtttttagagaatgctaaagctgtacttagagtagtacttacagccttaaatac

SEQ ID NO: 136259 - DNA, 70 bp, Homo sapiens
atgtaaccaagtttttagagaatgctaaagctgtacttagagtagtacttacagccttaaatactttata

SEQ ID NO: 136260 - DNA, 73 bp, Homo sapiens
tagagaatgctaaagctgtacttagagtagtacttacagccttaaatactttatattagtaaactggattgga

SEQ ID NO: 136261 - DNA, 69 bp, Homo sapiens
gctaaagctgtacttagagtagtacttacagccttaaatactttatattagtaaactggattggaaatt

SEQ ID NO: 136262 - DNA, 70 bp, Homo sapiens
ctgtacttagagtagtacttacagccttaaatactttatattagtaaactggattggaaatttttgagca

SEQ ID NO: 136263 - DNA, 69 bp, Homo sapiens
gtagtacttacagccttaaatactttatattagtaaactggattggaaatttttgagcaaggtattcaa

SEQ ID NO: 136264 - DNA, 69 bp, Homo sapiens
cagccttaaatactttatattagtaaactggattggaaatttttgagcaaggtattcaaacagttacaa

SEQ ID NO: 136265 - DNA, 69 bp, Homo sapiens
ttatattagtaaactggattggaaatttttgagcaaggtattcaaacagttacaaaaggacaaacctca

SEQ ID NO: 136266 - DNA, 67 bp, Homo sapiens
gtaaactggattggaaatttttgagcaaggtattcaaacagttacaaaaggacaaacctcaaataac

SEQ ID NO: 136267 - DNA, 67 bp, Homo sapiens
ggattggaaatttttgagcaaggtattcaaacagttacaaaaggacaaacctcaaataacttggaag

SEQ ID NO: 136268 - DNA, 69 bp, Homo sapiens
gtattcaaacagttacaaaaggacaaacctcaaataacttggaaggaaataataagagcagacgtgaac

SEQ ID NO: 136269 - DNA, 69 bp, Homo sapiens
gttacaaaaggacaaacctcaaataacttggaaggaaataataagagcagacgtgaactagaaattgga

SEQ ID NO: 136270 - DNA, 73 bp, Homo sapiens
aggaaataataagagcagacgtgaactagaaattggaattgttaggatcaacaattttgaaaagatgcagttg

SEQ ID NO: 136271 - DNA, 75 bp, Homo sapiens
taataagagcagacgtgaactagaaattggaattgttaggatcaacaattttgaaaagatgcagttggcaaatct

SEQ ID NO: 136272 - DNA, 73 bp, Homo sapiens
aattggaattgttaggatcaacaattttgaaaagatgcagttggcaaatctttatgaggattagttaaggaga

SEQ ID NO: 136273 - DNA, 73 bp, Homo sapiens
acaattttgaaaagatgcagttggcaaatctttatgaggattagttaaggagaaacaaggcacaaataagcaa

SEQ ID NO: 136274 - DNA, 75 bp, Homo sapiens
ttgaaaagatgcagttggcaaatctttatgaggattagttaaggagaaacaaggcacaaataagcaatgttagaa

SEQ ID NO: 136275 - DNA, 73 bp, Homo sapiens
gcagttggcaaatctttatgaggattagttaaggagaaacaaggcacaaataagcaatgttagaaatgaagtt

SEQ ID NO: 136276 - DNA, 70 bp, Homo sapiens
gaggattagttaaggagaaacaaggcacaaataagcaatgttagaaatgaagtttatagtagaaacttta

SEQ ID NO: 136277 - DNA, 68 bp, Homo sapiens
taaggagaaacaaggcacaaataagcaatgttagaaatgaagtttatagtagaaactttaaaaattta

SEQ ID NO: 136278 - DNA, 71 bp, Homo sapiens
caaggcacaaataagcaatgttagaaatgaagtttatagtagaaactttaaaaatttatatataccatgaa

SEQ ID NO: 136279 - DNA, 69 bp, Homo sapiens
ataagcaatgttagaaatgaagtttatagtagaaactttaaaaatttatatataccatgaattccttta

SEQ ID NO: 136280 - DNA, 67 bp, Homo sapiens
gaaatgaagtttatagtagaaactttaaaaatttatatataccatgaattcctttatttaaatttga

SEQ ID NO: 136281 - DNA, 68 bp, Homo sapiens
tatagtagaaactttaaaaatttatatataccatgaattcctttatttaaatttgaaaactcaggtga

SEQ ID NO: 136282 - DNA, 70 bp, Homo sapiens
ctttaaaaatttatatataccatgaattcctttatttaaatttgaaaactcaggtgacatggacagtatc

SEQ ID NO: 136283 - DNA, 70 bp, Homo sapiens
ctttatttaaatttgaaaactcaggtgacatggacagtatcctaggtaaatttaatgtactgtttcaaga

SEQ ID NO: 136284 - DNA, 70 bp, Homo sapiens
aatttgaaaactcaggtgacatggacagtatcctaggtaaatttaatgtactgtttcaagaagtagaaaa

SEQ ID NO: 136285 - DNA, 71 bp, Homo sapiens
aactcaggtgacatggacagtatcctaggtaaatttaatgtactgtttcaagaagtagaaaaattggttgc

SEQ ID NO: 136286 - DNA, 70 bp, Homo sapiens
gacatggacagtatcctaggtaaatttaatgtactgtttcaagaagtagaaaaattggttgccccaatta

SEQ ID NO: 136287 - DNA, 67 bp, Homo sapiens
gtatcctaggtaaatttaatgtactgtttcaagaagtagaaaaattggttgccccaattaacattaa

SEQ ID NO: 136288 - DNA, 66 bp, Homo sapiens
gtactgtttcaagaagtagaaaaattggttgccccaattaacattaaagaaattgggccaactatt

SEQ ID NO: 136289 - DNA, 70 bp, Homo sapiens
tggttgccccaattaacattaaagaaattgggccaactattttaccaaatatctaaggaacagatgattc

SEQ ID NO: 136290 - DNA, 68 bp, Homo sapiens
cccaattaacattaaagaaattgggccaactattttaccaaatatctaaggaacagatgattctaaat

SEQ ID NO: 136291 - DNA, 69 bp, Homo sapiens
acattaaagaaattgggccaactattttaccaaatatctaaggaacagatgattctaaattatacaaac

SEQ ID NO: 136292 - DNA, 74 bp, Homo sapiens
gggccaactattttaccaaatatctaaggaacagatgattctaaattatacaaactattcaagagcataggcaa

SEQ ID NO: 136293 - DNA, 74 bp, Homo sapiens
ctattttaccaaatatctaaggaacagatgattctaaattatacaaactattcaagagcataggcaaagaggga

SEQ ID NO: 136294 - DNA, 77 bp, Homo sapiens
atatctaaggaacagatgattctaaattatacaaactattcaagagcataggcaaagagggaatatacactaattca

SEQ ID NO: 136295 - DNA, 75 bp, Homo sapiens
acagatgattctaaattatacaaactattcaagagcataggcaaagagggaatatacactaattcattttgtggg

SEQ ID NO: 136296 - DNA, 73 bp, Homo sapiens
gattctaaattatacaaactattcaagagcataggcaaagagggaatatacactaattcattttgtggggtta

SEQ ID NO: 136297 - DNA, 73 bp, Homo sapiens
caaactattcaagagcataggcaaagagggaatatacactaattcattttgtggggttaatataacattaaca

SEQ ID NO: 136298 - DNA, 73 bp, Homo sapiens
agagcataggcaaagagggaatatacactaattcattttgtggggttaatataacattaacatgaaaaccagc

SEQ ID NO: 136299 - DNA, 71 bp, Homo sapiens
agggaatatacactaattcattttgtggggttaatataacattaacatgaaaaccagccaaggaaaatgca

SEQ ID NO: 136300 - DNA, 71 bp, Homo sapiens
attcattttgtggggttaatataacattaacatgaaaaccagccaaggaaaatgcaaaccagtgtcacgta

SEQ ID NO: 136301 - DNA, 73 bp, Homo sapiens
tttgtggggttaatataacattaacatgaaaaccagccaaggaaaatgcaaaccagtgtcacgtatgaacata

SEQ ID NO: 136302 - DNA, 75 bp, Homo sapiens
taatataacattaacatgaaaaccagccaaggaaaatgcaaaccagtgtcacgtatgaacatagatagaaaatat

SEQ ID NO: 136303 - DNA, 73 bp, Homo sapiens
attaacatgaaaaccagccaaggaaaatgcaaaccagtgtcacgtatgaacatagatagaaaatattaagtaa

SEQ ID NO: 136304 - DNA, 77 bp, Homo sapiens
gaaaatgcaaaccagtgtcacgtatgaacatagatagaaaatattaagtaatatttacaaatcaaactcatcagtga

SEQ ID NO: 136305 - DNA, 76 bp, Homo sapiens
atgaacatagatagaaaatattaagtaatatttacaaatcaaactcatcagtgaatatttaaacacaccagtgtca

SEQ ID NO: 136306 - DNA, 74 bp, Homo sapiens
ttaagtaatatttacaaatcaaactcatcagtgaatatttaaacacaccagtgtcaaaattgctcacccaagga

SEQ ID NO: 136307 - DNA, 74 bp, Homo sapiens
atttacaaatcaaactcatcagtgaatatttaaacacaccagtgtcaaaattgctcacccaaggagtctaagat

SEQ ID NO: 136308 - DNA, 75 bp, Homo sapiens
aatcaaactcatcagtgaatatttaaacacaccagtgtcaaaattgctcacccaaggagtctaagattgctttaa

SEQ ID NO: 136309 - DNA, 74 bp, Homo sapiens
catcagtgaatatttaaacacaccagtgtcaaaattgctcacccaaggagtctaagattgctttaaattagaaa

SEQ ID NO: 136310 - DNA, 72 bp, Homo sapiens
atttaaacacaccagtgtcaaaattgctcacccaaggagtctaagattgctttaaattagaaaatcacatac

SEQ ID NO: 136311 - DNA, 74 bp, Homo sapiens
caccagtgtcaaaattgctcacccaaggagtctaagattgctttaaattagaaaatcacatactattttccata

SEQ ID NO: 136312 - DNA, 72 bp, Homo sapiens
tgctcacccaaggagtctaagattgctttaaattagaaaatcacatactattttccataaaacagattaaag

SEQ ID NO: 136313 - DNA, 70 bp, Homo sapiens
cccaaggagtctaagattgctttaaattagaaaatcacatactattttccataaaacagattaaaggaga

SEQ ID NO: 136314 - DNA, 72 bp, Homo sapiens
gattgctttaaattagaaaatcacatactattttccataaaacagattaaaggagaaaaactagatcatctc

SEQ ID NO: 136315 - DNA, 72 bp, Homo sapiens
aattagaaaatcacatactattttccataaaacagattaaaggagaaaaactagatcatctctagataaaga

SEQ ID NO: 136316 - DNA, 75 bp, Homo sapiens
tcacatactattttccataaaacagattaaaggagaaaaactagatcatctctagataaagaaaagccattcata

SEQ ID NO: 136317 - DNA, 76 bp, Homo sapiens
ttttccataaaacagattaaaggagaaaaactagatcatctctagataaagaaaagccattcatatctcaatcatg

SEQ ID NO: 136318 - DNA, 76 bp, Homo sapiens
aacagattaaaggagaaaaactagatcatctctagataaagaaaagccattcatatctcaatcatgttgaaaagtc

SEQ ID NO: 136319 - DNA, 77 bp, Homo sapiens
aggagaaaaactagatcatctctagataaagaaaagccattcatatctcaatcatgttgaaaagtcgtagcaaacta

SEQ ID NO: 136320 - DNA, 77 bp, Homo sapiens
tcatctctagataaagaaaagccattcatatctcaatcatgttgaaaagtcgtagcaaactatgaataaaagggaat

SEQ ID NO: 136321 - DNA, 71 bp, Homo sapiens
aagaaaagccattcatatctcaatcatgttgaaaagtcgtagcaaactatgaataaaagggaattcttttt

SEQ ID NO: 136322 - DNA, 75 bp, Homo sapiens
ccattcatatctcaatcatgttgaaaagtcgtagcaaactatgaataaaagggaattcttttttgtgaggcagag

SEQ ID NO: 136323 - DNA, 73 bp, Homo sapiens
aatcatgttgaaaagtcgtagcaaactatgaataaaagggaattcttttttgtgaggcagagtctctcactgt

SEQ ID NO: 136324 - DNA, 73 bp, Homo sapiens
gttgaaaagtcgtagcaaactatgaataaaagggaattcttttttgtgaggcagagtctctcactgttgccca

SEQ ID NO: 136325 - DNA, 72 bp, Homo sapiens
cacgcctggccaaaagggaattcttttacctcatatgggggcatttattacgtagaacaactgctgtatgcc

SEQ ID NO: 136326 - DNA, 71 bp, Homo sapiens
caaaagggaattcttttacctcatatgggggcatttattacgtagaacaactgctgtatgcctaatataaa

SEQ ID NO: 136327 - DNA, 71 bp, Homo sapiens
gggaattcttttacctcatatgggggcatttattacgtagaacaactgctgtatgcctaatataaaaggat

SEQ ID NO: 136328 - DNA, 73 bp, Homo sapiens
ttacctcatatgggggcatttattacgtagaacaactgctgtatgcctaatataaaaggattataaatgtaac

SEQ ID NO: 136329 - DNA, 71 bp, Homo sapiens
gggcatttattacgtagaacaactgctgtatgcctaatataaaaggattataaatgtaactaaaataccta

SEQ ID NO: 136330 - DNA, 71 bp, Homo sapiens
tattacgtagaacaactgctgtatgcctaatataaaaggattataaatgtaactaaaatacctattataat

SEQ ID NO: 136331 - DNA, 72 bp, Homo sapiens
aacaactgctgtatgcctaatataaaaggattataaatgtaactaaaatacctattataattatatacaaca

SEQ ID NO: 136332 - DNA, 70 bp, Homo sapiens
gtatgcctaatataaaaggattataaatgtaactaaaatacctattataattatatacaacaaaagatac

SEQ ID NO: 136333 - DNA, 69 bp, Homo sapiens
aaggattataaatgtaactaaaatacctattataattatatacaacaaaagatacttgggataaatcta

SEQ ID NO: 136334 - DNA, 71 bp, Homo sapiens
aatgtaactaaaatacctattataattatatacaacaaaagatacttgggataaatctaacatggcaagat

SEQ ID NO: 136335 - DNA, 73 bp, Homo sapiens
aaatacctattataattatatacaacaaaagatacttgggataaatctaacatggcaagattgttttggatga

SEQ ID NO: 136336 - DNA, 73 bp, Homo sapiens
tataattatatacaacaaaagatacttgggataaatctaacatggcaagattgttttggatgaaacataaaat

SEQ ID NO: 136337 - DNA, 71 bp, Homo sapiens
ttatatacaacaaaagatacttgggataaatctaacatggcaagattgttttggatgaaacataaaatttt

SEQ ID NO: 136338 - DNA, 70 bp, Homo sapiens
caaaagatacttgggataaatctaacatggcaagattgttttggatgaaacataaaattttttaaaatca

SEQ ID NO: 136339 - DNA, 63 bp, Homo sapiens
aaattttttaaaatcaagtaggggaatgggttttgaggaaaggtactctgggagatttaatta

SEQ ID NO: 136340 - DNA, 64 bp, Homo sapiens
aattttttaaaatcaagtaggggaatgggttttgaggaaaggtactctgggagatttaattatg

SEQ ID NO: 136341 - DNA, 69 bp, Homo sapiens
ttaaaatcaagtaggggaatgggttttgaggaaaggtactctgggagatttaattatgtctatgctgtt

SEQ ID NO: 136342 - DNA, 70 bp, Homo sapiens
gggaatgggttttgaggaaaggtactctgggagatttaattatgtctatgctgtttcatttcttagtggt

SEQ ID NO: 136343 - DNA, 73 bp, Homo sapiens
ttttgaggaaaggtactctgggagatttaattatgtctatgctgtttcatttcttagtggttaggagcaaaga

SEQ ID NO: 136344 - DNA, 73 bp, Homo sapiens
ggaaaggtactctgggagatttaattatgtctatgctgtttcatttcttagtggttaggagcaaagatgaaaa

SEQ ID NO: 136345 - DNA, 73 bp, Homo sapiens
ctgggagatttaattatgtctatgctgtttcatttcttagtggttaggagcaaagatgaaaaaaatactaaga

SEQ ID NO: 136346 - DNA, 74 bp, Homo sapiens
attatgtctatgctgtttcatttcttagtggttaggagcaaagatgaaaaaaatactaagatttggccaggtgc

SEQ ID NO: 136347 - DNA, 67 bp, Homo sapiens
ctcaaaaaaaatataaatacatattaagctttaacaaagatgggtgtttagtaagtttatcttgttg

SEQ ID NO: 136348 - DNA, 71 bp, Homo sapiens
atataaatacatattaagctttaacaaagatgggtgtttagtaagtttatcttgttgtgtgcttgaaatgg

SEQ ID NO: 136349 - DNA, 71 bp, Homo sapiens
acatattaagctttaacaaagatgggtgtttagtaagtttatcttgttgtgtgcttgaaatggttcattaa

SEQ ID NO: 136350 - DNA, 72 bp, Homo sapiens
gctttaacaaagatgggtgtttagtaagtttatcttgttgtgtgcttgaaatggttcattaaagtcttatga

SEQ ID NO: 136351 - DNA, 74 bp, Homo sapiens
agatgggtgtttagtaagtttatcttgttgtgtgcttgaaatggttcattaaagtcttatgattatattcacac

SEQ ID NO: 136352 - DNA, 75 bp, Homo sapiens
gtttagtaagtttatcttgttgtgtgcttgaaatggttcattaaagtcttatgattatattcacactaatgaaga

SEQ ID NO: 136353 - DNA, 80 bp, Homo sapiens
cttgttgtgtgcttgaaatggttcattaaagtcttatgattatattcacactaatgaagatacattattatgtgtgctag

SEQ ID NO: 136354 - DNA, 79 bp, Homo sapiens
gcttgaaatggttcattaaagtcttatgattatattcacactaatgaagatacattattatgtgtgctagggttctcca

SEQ ID NO: 136355 - DNA, 77 bp, Homo sapiens
aaatggttcattaaagtcttatgattatattcacactaatgaagatacattattatgtgtgctagggttctccagag

SEQ ID NO: 136356 - DNA, 78 bp, Homo sapiens
agtcttatgattatattcacactaatgaagatacattattatgtgtgctagggttctccagagggatggaaccaataa

SEQ ID NO: 136357 - DNA, 80 bp, Homo sapiens
atgattatattcacactaatgaagatacattattatgtgtgctagggttctccagagggatggaaccaataagatacatg

SEQ ID NO: 136358 - DNA, 74 bp, Homo sapiens
ctaatgaagatacattattatgtgtgctagggttctccagagggatggaaccaataagatacatgggagttttt

SEQ ID NO: 136359 - DNA, 72 bp, Homo sapiens
aagatacattattatgtgtgctagggttctccagagggatggaaccaataagatacatgggagttttttagg

SEQ ID NO: 136360 - DNA, 74 bp, Homo sapiens
tattatgtgtgctagggttctccagagggatggaaccaataagatacatgggagttttttagggagaattgcaa

SEQ ID NO: 136361 - DNA, 71 bp, Homo sapiens
ggttctccagagggatggaaccaataagatacatgggagttttttagggagaattgcaaggtgattacaag

SEQ ID NO: 136362 - DNA, 71 bp, Homo sapiens
agagggatggaaccaataagatacatgggagttttttagggagaattgcaaggtgattacaaggcgaagtc

SEQ ID NO: 136363 - DNA, 70 bp, Homo sapiens
aaccaataagatacatgggagttttttagggagaattgcaaggtgattacaaggcgaagtccggtgatag

SEQ ID NO: 136364 - DNA, 74 bp, Homo sapiens
aagatacatgggagttttttagggagaattgcaaggtgattacaaggcgaagtccggtgataggccatctgcaa

SEQ ID NO: 136365 - DNA, 78 bp, Homo sapiens
aagctggggaaagagagaagctgatgctgatagtggctcagtggctcagtccaagtccaaaagcctgaaaaccaggga

SEQ ID NO: 136366 - DNA, 75 bp, Homo sapiens
agtccaagtccaaaagcctgaaaaccagggaagctgatagtgcagcctttgtctgttgccaaaggcctgagagtc

SEQ ID NO: 136367 - DNA, 73 bp, Homo sapiens
aaaagcctgaaaaccagggaagctgatagtgcagcctttgtctgttgccaaaggcctgagagtcccctgggaa

SEQ ID NO: 136368 - DNA, 76 bp, Homo sapiens
aaaccagggaagctgatagtgcagcctttgtctgttgccaaaggcctgagagtcccctgggaagctgctggtacaa

SEQ ID NO: 136369 - DNA, 78 bp, Homo sapiens
aagctgatagtgcagcctttgtctgttgccaaaggcctgagagtcccctgggaagctgctggtacaagccctggagtc

SEQ ID NO: 136370 - DNA, 76 bp, Homo sapiens
atagtgcagcctttgtctgttgccaaaggcctgagagtcccctgggaagctgctggtacaagccctggagtccaaa

SEQ ID NO: 136371 - DNA, 72 bp, Homo sapiens
tctgttgccaaaggcctgagagtcccctgggaagctgctggtacaagccctggagtccaaaggccaaaaaac

SEQ ID NO: 136372 - DNA, 69 bp, Homo sapiens
aaaggcctgagagtcccctgggaagctgctggtacaagccctggagtccaaaggccaaaaaacctggag

SEQ ID NO: 136373 - DNA, 70 bp, Homo sapiens
aaggcctgagagtcccctgggaagctgctggtacaagccctggagtccaaaggccaaaaaacctggagtc

SEQ ID NO: 136374 - DNA, 74 bp, Homo sapiens
ctgagagtcccctgggaagctgctggtacaagccctggagtccaaaggccaaaaaacctggagtctgatgtcca

SEQ ID NO: 136375 - DNA, 82 bp, Homo sapiens
gagtctgatgtccaagggcaggaggagtggaagcaagcatctggcataggagggagagcgagctaaagacccagcaagcaaa

SEQ ID NO: 136376 - DNA, 77 bp, Homo sapiens
ggaggagtggaagcaagcatctggcataggagggagagcgagctaaagacccagcaagcaaacttatcctaccttct

SEQ ID NO: 136377 - DNA, 78 bp, Homo sapiens
agtggaagcaagcatctggcataggagggagagcgagctaaagacccagcaagcaaacttatcctaccttcttctgcc

SEQ ID NO: 136378 - DNA, 77 bp, Homo sapiens
atctggcataggagggagagcgagctaaagacccagcaagcaaacttatcctaccttcttctgcctgttttgtgata

SEQ ID NO: 136379 - DNA, 77 bp, Homo sapiens
ataggagggagagcgagctaaagacccagcaagcaaacttatcctaccttcttctgcctgttttgtgatagctgcac

SEQ ID NO: 136380 - DNA, 79 bp, Homo sapiens
agctaaagacccagcaagcaaacttatcctaccttcttctgcctgttttgtgatagctgcactggcagctgattgggtg

SEQ ID NO: 136381 - DNA, 79 bp, Homo sapiens
aagacccagcaagcaaacttatcctaccttcttctgcctgttttgtgatagctgcactggcagctgattgggtggtgcc

SEQ ID NO: 136382 - DNA, 80 bp, Homo sapiens
taccttcttctgcctgttttgtgatagctgcactggcagctgattgggtggtgcccaccaacactgaagatgggtcttcc

SEQ ID NO: 136383 - DNA, 82 bp, Homo sapiens
tgcctgttttgtgatagctgcactggcagctgattgggtggtgcccaccaacactgaagatgggtcttcctcttctggttca

SEQ ID NO: 136384 - DNA, 81 bp, Homo sapiens
ttttgtgatagctgcactggcagctgattgggtggtgcccaccaacactgaagatgggtcttcctcttctggttcactgac

SEQ ID NO: 136385 - DNA, 79 bp, Homo sapiens
actggcagctgattgggtggtgcccaccaacactgaagatgggtcttcctcttctggttcactgactcaaatgtcagtg

SEQ ID NO: 136386 - DNA, 78 bp, Homo sapiens
ctgattgggtggtgcccaccaacactgaagatgggtcttcctcttctggttcactgactcaaatgtcagtgtcctctg

SEQ ID NO: 136387 - DNA, 74 bp, Homo sapiens
acccagaaacagtactttaccagccatctaggcattcctcactctaatcaagctgacacctaatattaacttaa

SEQ ID NO: 136388 - DNA, 74 bp, Homo sapiens
gaaacagtactttaccagccatctaggcattcctcactctaatcaagctgacacctaatattaacttaattaat

SEQ ID NO: 136389 - DNA, 74 bp, Homo sapiens
ccagccatctaggcattcctcactctaatcaagctgacacctaatattaacttaattaatttaaacttagctaa

SEQ ID NO: 136390 - DNA, 72 bp, Homo sapiens
atctaggcattcctcactctaatcaagctgacacctaatattaacttaattaatttaaacttagctaattta

SEQ ID NO: 136391 - DNA, 68 bp, Homo sapiens
tcctcactctaatcaagctgacacctaatattaacttaattaatttaaacttagctaatttaaacttt

SEQ ID NO: 136392 - DNA, 67 bp, Homo sapiens
caagctgacacctaatattaacttaattaatttaaacttagctaatttaaacttttaattgagtata

SEQ ID NO: 136393 - DNA, 65 bp, Homo sapiens
ctaatattaacttaattaatttaaacttagctaatttaaacttttaattgagtataatttggagc

SEQ ID NO: 136394 - DNA, 67 bp, Homo sapiens
cttaattaatttaaacttagctaatttaaacttttaattgagtataatttggagcttagtgctctta

SEQ ID NO: 136395 - DNA, 69 bp, Homo sapiens
taaacttagctaatttaaacttttaattgagtataatttggagcttagtgctcttaaacccactgagta

SEQ ID NO: 136396 - DNA, 71 bp, Homo sapiens
gctaatttaaacttttaattgagtataatttggagcttagtgctcttaaacccactgagtagataataaca

SEQ ID NO: 136397 - DNA, 73 bp, Homo sapiens
acttttaattgagtataatttggagcttagtgctcttaaacccactgagtagataataacagattataggcca

SEQ ID NO: 136398 - DNA, 75 bp, Homo sapiens
attgagtataatttggagcttagtgctcttaaacccactgagtagataataacagattataggccatactaggaa

SEQ ID NO: 136399 - DNA, 75 bp, Homo sapiens
agtataatttggagcttagtgctcttaaacccactgagtagataataacagattataggccatactaggaatgta

SEQ ID NO: 136400 - DNA, 75 bp, Homo sapiens
gtataatttggagcttagtgctcttaaacccactgagtagataataacagattataggccatactaggaatgtaa

SEQ ID NO: 136401 - DNA, 75 bp, Homo sapiens
tagtgctcttaaacccactgagtagataataacagattataggccatactaggaatgtaaatgcaaggttcttaa

SEQ ID NO: 136402 - DNA, 71 bp, Homo sapiens
cttaaacccactgagtagataataacagattataggccatactaggaatgtaaatgcaaggttcttaaaag

SEQ ID NO: 136403 - DNA, 72 bp, Homo sapiens
aacccactgagtagataataacagattataggccatactaggaatgtaaatgcaaggttcttaaaagttctg

SEQ ID NO: 136404 - DNA, 74 bp, Homo sapiens
ctgagtagataataacagattataggccatactaggaatgtaaatgcaaggttcttaaaagttctggtaagatg

SEQ ID NO: 136405 - DNA, 75 bp, Homo sapiens
aataacagattataggccatactaggaatgtaaatgcaaggttcttaaaagttctggtaagatgtatcagtgtgc

SEQ ID NO: 136406 - DNA, 75 bp, Homo sapiens
attataggccatactaggaatgtaaatgcaaggttcttaaaagttctggtaagatgtatcagtgtgctccaaaga

SEQ ID NO: 136407 - DNA, 74 bp, Homo sapiens
atactaggaatgtaaatgcaaggttcttaaaagttctggtaagatgtatcagtgtgctccaaagaccaccagga

SEQ ID NO: 136408 - DNA, 75 bp, Homo sapiens
tgtaaatgcaaggttcttaaaagttctggtaagatgtatcagtgtgctccaaagaccaccaggaacacacctgta

SEQ ID NO: 136409 - DNA, 74 bp, Homo sapiens
ttcttaaaagttctggtaagatgtatcagtgtgctccaaagaccaccaggaacacacctgtagttgaatgaagt

SEQ ID NO: 136410 - DNA, 74 bp, Homo sapiens
agttctggtaagatgtatcagtgtgctccaaagaccaccaggaacacacctgtagttgaatgaagttgggttta

SEQ ID NO: 136411 - DNA, 74 bp, Homo sapiens
aagatgtatcagtgtgctccaaagaccaccaggaacacacctgtagttgaatgaagttgggtttactgacttac

SEQ ID NO: 136412 - DNA, 75 bp, Homo sapiens
tgctccaaagaccaccaggaacacacctgtagttgaatgaagttgggtttactgacttactgcagcaagggagaa

SEQ ID NO: 136413 - DNA, 74 bp, Homo sapiens
aagaccaccaggaacacacctgtagttgaatgaagttgggtttactgacttactgcagcaagggagaatgaata

SEQ ID NO: 136414 - DNA, 75 bp, Homo sapiens
cacacctgtagttgaatgaagttgggtttactgacttactgcagcaagggagaatgaataccacggagaacaata

SEQ ID NO: 136415 - DNA, 73 bp, Homo sapiens
aagttgggtttactgacttactgcagcaagggagaatgaataccacggagaacaataggatgtcttacaagta

SEQ ID NO: 136416 - DNA, 75 bp, Homo sapiens
tttactgacttactgcagcaagggagaatgaataccacggagaacaataggatgtcttacaagtatgttagaaaa

SEQ ID NO: 136417 - DNA, 67 bp, Homo sapiens
aagggagaatgaataccacggagaacaataggatgtcttacaagtatgttagaaaagtatttttttt

SEQ ID NO: 136418 - DNA, 67 bp, Homo sapiens
gaataccacggagaacaataggatgtcttacaagtatgttagaaaagtatttttttttgggcttggg

SEQ ID NO: 136419 - DNA, 66 bp, Homo sapiens
gaacaataggatgtcttacaagtatgttagaaaagtatttttttttgggcttgggtttgtgttacc

SEQ ID NO: 136420 - DNA, 65 bp, Homo sapiens
agtatttttttttgggcttgggtttgtgttacctgattttggataaggttcaaggaagtagagct

SEQ ID NO: 136421 - DNA, 72 bp, Homo sapiens
tttttgggcttgggtttgtgttacctgattttggataaggttcaaggaagtagagctttgctctgcattgga

SEQ ID NO: 136422 - DNA, 77 bp, Homo sapiens
tgggtttgtgttacctgattttggataaggttcaaggaagtagagctttgctctgcattggatgctctcaggaagta

SEQ ID NO: 136423 - DNA, 81 bp, Homo sapiens
tacctgattttggataaggttcaaggaagtagagctttgctctgcattggatgctctcaggaagtagagatgattctatgt

SEQ ID NO: 136424 - DNA, 79 bp, Homo sapiens
attttggataaggttcaaggaagtagagctttgctctgcattggatgctctcaggaagtagagatgattctatgtttgg

SEQ ID NO: 136425 - DNA, 83 bp, Homo sapiens
tcaaggaagtagagctttgctctgcattggatgctctcaggaagtagagatgattctatgtttgggtatcttatcaaatctta

SEQ ID NO: 136426 - DNA, 83 bp, Homo sapiens
aagtagagctttgctctgcattggatgctctcaggaagtagagatgattctatgtttgggtatcttatcaaatcttatctaga

SEQ ID NO: 136427 - DNA, 84 bp, Homo sapiens
tctgcattggatgctctcaggaagtagagatgattctatgtttgggtatcttatcaaatcttatctagaaggtgagaggaatga

SEQ ID NO: 136428 - DNA, 77 bp, Homo sapiens
caggaagtagagatgattctatgtttgggtatcttatcaaatcttatctagaaggtgagaggaatgaatcttactaa

SEQ ID NO: 136429 - DNA, 78 bp, Homo sapiens
gatgattctatgtttgggtatcttatcaaatcttatctagaaggtgagaggaatgaatcttactaaatcttatctgga

SEQ ID NO: 136430 - DNA, 76 bp, Homo sapiens
tgtttgggtatcttatcaaatcttatctagaaggtgagaggaatgaatcttactaaatcttatctggaaggtgaga

SEQ ID NO: 136431 - DNA, 77 bp, Homo sapiens
cttatcaaatcttatctagaaggtgagaggaatgaatcttactaaatcttatctggaaggtgagaggaatgaattga

SEQ ID NO: 136432 - DNA, 76 bp, Homo sapiens
atcttatctagaaggtgagaggaatgaatcttactaaatcttatctggaaggtgagaggaatgaattgaggctaaa

SEQ ID NO: 136433 - DNA, 77 bp, Homo sapiens
gtgagaggaatgaatcttactaaatcttatctggaaggtgagaggaatgaattgaggctaaagctgcagttggtaaa

SEQ ID NO: 136434 - DNA, 75 bp, Homo sapiens
aatgaatcttactaaatcttatctggaaggtgagaggaatgaattgaggctaaagctgcagttggtaaagtagta

SEQ ID NO: 136435 - DNA, 77 bp, Homo sapiens
taaatcttatctggaaggtgagaggaatgaattgaggctaaagctgcagttggtaaagtagtagcagttactcatat

SEQ ID NO: 136436 - DNA, 78 bp, Homo sapiens
cttatctggaaggtgagaggaatgaattgaggctaaagctgcagttggtaaagtagtagcagttactcatattagcca

SEQ ID NO: 136437 - DNA, 73 bp, Homo sapiens
aatgaattgaggctaaagctgcagttggtaaagtagtagcagttactcatattagccaggataaaaggttgtt

SEQ ID NO: 136438 - DNA, 71 bp, Homo sapiens
ctaaagctgcagttggtaaagtagtagcagttactcatattagccaggataaaaggttgtttggtcatttt

SEQ ID NO: 136439 - DNA, 70 bp, Homo sapiens
agttggtaaagtagtagcagttactcatattagccaggataaaaggttgtttggtcatttttctggtgtg

SEQ ID NO: 136440 - DNA, 73 bp, Homo sapiens
tagtagcagttactcatattagccaggataaaaggttgtttggtcatttttctggtgtggtcagtgttcttgt

SEQ ID NO: 136441 - DNA, 69 bp, Homo sapiens
agttactcatattagccaggataaaaggttgtttggtcatttttctggtgtggtcagtgttcttgtttt

SEQ ID NO: 136442 - DNA, 69 bp, Homo sapiens
attagccaggataaaaggttgtttggtcatttttctggtgtggtcagtgttcttgtttttgtctggagt

SEQ ID NO: 136443 - DNA, 69 bp, Homo sapiens
taaaaggttgtttggtcatttttctggtgtggtcagtgttcttgtttttgtctggagttttgacatggt

SEQ ID NO: 136444 - DNA, 75 bp, Homo sapiens
ttggtcatttttctggtgtggtcagtgttcttgtttttgtctggagttttgacatggttatggactgttgatcta

SEQ ID NO: 136445 - DNA, 78 bp, Homo sapiens
tttttgtctggagttttgacatggttatggactgttgatctatcacagattatagtcttgtgtgatgttggtgttctt

SEQ ID NO: 136446 - DNA, 79 bp, Homo sapiens
tggagttttgacatggttatggactgttgatctatcacagattatagtcttgtgtgatgttggtgttctttgaaatatt

SEQ ID NO: 136447 - DNA, 79 bp, Homo sapiens
catggttatggactgttgatctatcacagattatagtcttgtgtgatgttggtgttctttgaaatatttatattcaacg

SEQ ID NO: 136448 - DNA, 78 bp, Homo sapiens
tctatcacagattatagtcttgtgtgatgttggtgttctttgaaatatttatattcaacgggagaacaccacagccta

SEQ ID NO: 136449 - DNA, 75 bp, Homo sapiens
attatagtcttgtgtgatgttggtgttctttgaaatatttatattcaacgggagaacaccacagcctacctgtga

SEQ ID NO: 136450 - DNA, 77 bp, Homo sapiens
tcttgtgtgatgttggtgttctttgaaatatttatattcaacgggagaacaccacagcctacctgtgagtgccaggc

SEQ ID NO: 136451 - DNA, 76 bp, Homo sapiens
tgttggtgttctttgaaatatttatattcaacgggagaacaccacagcctacctgtgagtgccaggccagcttcca

SEQ ID NO: 136452 - DNA, 75 bp, Homo sapiens
aaatatttatattcaacgggagaacaccacagcctacctgtgagtgccaggccagcttccagcaacactaaggcc

SEQ ID NO: 136453 - DNA, 77 bp, Homo sapiens
tttatattcaacgggagaacaccacagcctacctgtgagtgccaggccagcttccagcaacactaaggcctgtctta

SEQ ID NO: 136454 - DNA, 77 bp, Homo sapiens
agaacaccacagcctacctgtgagtgccaggccagcttccagcaacactaaggcctgtcttactgtaccagaccagt

SEQ ID NO: 136455 - DNA, 77 bp, Homo sapiens
accacagcctacctgtgagtgccaggccagcttccagcaacactaaggcctgtcttactgtaccagaccagtttctg

SEQ ID NO: 136456 - DNA, 79 bp, Homo sapiens
tgagtgccaggccagcttccagcaacactaaggcctgtcttactgtaccagaccagtttctggctgctaggagctgttt

SEQ ID NO: 136457 - DNA, 77 bp, Homo sapiens
aggccagcttccagcaacactaaggcctgtcttactgtaccagaccagtttctggctgctaggagctgtttttctca

SEQ ID NO: 136458 - DNA, 77 bp, Homo sapiens
ttccagcaacactaaggcctgtcttactgtaccagaccagtttctggctgctaggagctgtttttctcatcaaatat

SEQ ID NO: 136459 - DNA, 75 bp, Homo sapiens
actaaggcctgtcttactgtaccagaccagtttctggctgctaggagctgtttttctcatcaaatattggagaaa

SEQ ID NO: 136460 - DNA, 73 bp, Homo sapiens
agaccagtttctggctgctaggagctgtttttctcatcaaatattggagaaaaaacagtaataccaagtgaaa

SEQ ID NO: 136461 - DNA, 72 bp, Homo sapiens
ctggctgctaggagctgtttttctcatcaaatattggagaaaaaacagtaataccaagtgaaaaccaataat

SEQ ID NO: 136462 - DNA, 71 bp, Homo sapiens
ggagctgtttttctcatcaaatattggagaaaaaacagtaataccaagtgaaaaccaataattgatgtagg

SEQ ID NO: 136463 - DNA, 73 bp, Homo sapiens
tctcatcaaatattggagaaaaaacagtaataccaagtgaaaaccaataattgatgtaggtaggagattgtat

SEQ ID NO: 136464 - DNA, 74 bp, Homo sapiens
aaaacagtaataccaagtgaaaaccaataattgatgtaggtaggagattgtattgaacttcatagctatgcagg

SEQ ID NO: 136465 - DNA, 78 bp, Homo sapiens
taccaagtgaaaaccaataattgatgtaggtaggagattgtattgaacttcatagctatgcagggagtatgtgaatta

SEQ ID NO: 136466 - DNA, 78 bp, Homo sapiens
aataattgatgtaggtaggagattgtattgaacttcatagctatgcagggagtatgtgaattactgtgagttttcttc

SEQ ID NO: 136467 - DNA, 77 bp, Homo sapiens
gtaggagattgtattgaacttcatagctatgcagggagtatgtgaattactgtgagttttcttctaaaagcttataa

SEQ ID NO: 136468 - DNA, 76 bp, Homo sapiens
tgtattgaacttcatagctatgcagggagtatgtgaattactgtgagttttcttctaaaagcttataattggtggt

SEQ ID NO: 136469 - DNA, 74 bp, Homo sapiens
aacttcatagctatgcagggagtatgtgaattactgtgagttttcttctaaaagcttataattggtggtttgat

SEQ ID NO: 136470 - DNA, 73 bp, Homo sapiens
ctatgcagggagtatgtgaattactgtgagttttcttctaaaagcttataattggtggtttgattttgaaaca

SEQ ID NO: 136471 - DNA, 71 bp, Homo sapiens
gtatgtgaattactgtgagttttcttctaaaagcttataattggtggtttgattttgaaacatgtttaaca

SEQ ID NO: 136472 - DNA, 67 bp, Homo sapiens
cttctaaaagcttataattggtggtttgattttgaaacatgtttaacaaagaatcgccctgaacttt

SEQ ID NO: 136473 - DNA, 68 bp, Homo sapiens
gcttataattggtggtttgattttgaaacatgtttaacaaagaatcgccctgaacttttattttcacg

SEQ ID NO: 136474 - DNA, 68 bp, Homo sapiens
ggtggtttgattttgaaacatgtttaacaaagaatcgccctgaacttttattttcacgtagatgtcct

SEQ ID NO: 136475 - DNA, 70 bp, Homo sapiens
tgtttaacaaagaatcgccctgaacttttattttcacgtagatgtccttttctaattaggtgcttcagga

SEQ ID NO: 136476 - DNA, 69 bp, Homo sapiens
aaagaatcgccctgaacttttattttcacgtagatgtccttttctaattaggtgcttcaggagtttgta

SEQ ID NO: 136477 - DNA, 73 bp, Homo sapiens
gaacttttattttcacgtagatgtccttttctaattaggtgcttcaggagtttgtatgtatgtatactggcaa

SEQ ID NO: 136478 - DNA, 76 bp, Homo sapiens
agatgtccttttctaattaggtgcttcaggagtttgtatgtatgtatactggcaatgtgcaaagcattttagttta

SEQ ID NO: 136479 - DNA, 75 bp, Homo sapiens
taattaggtgcttcaggagtttgtatgtatgtatactggcaatgtgcaaagcattttagtttaatttttgaacgc

SEQ ID NO: 136480 - DNA, 74 bp, Homo sapiens
cttcaggagtttgtatgtatgtatactggcaatgtgcaaagcattttagtttaatttttgaacgcctgtcttgg

SEQ ID NO: 136481 - DNA, 76 bp, Homo sapiens
ttgtatgtatgtatactggcaatgtgcaaagcattttagtttaatttttgaacgcctgtcttggggtttgcaatca

SEQ ID NO: 136482 - DNA, 75 bp, Homo sapiens
tatgtatactggcaatgtgcaaagcattttagtttaatttttgaacgcctgtcttggggtttgcaatcagagcct

SEQ ID NO: 136483 - DNA, 72 bp, Homo sapiens
aatgtgcaaagcattttagtttaatttttgaacgcctgtcttggggtttgcaatcagagccttgtgtcactt

SEQ ID NO: 136484 - DNA, 69 bp, Homo sapiens
agcattttagtttaatttttgaacgcctgtcttggggtttgcaatcagagccttgtgtcactttctttt

SEQ ID NO: 136485 - DNA, 68 bp, Homo sapiens
ttagtttaatttttgaacgcctgtcttggggtttgcaatcagagccttgtgtcactttctttttaaaa

SEQ ID NO: 136486 - DNA, 70 bp, Homo sapiens
ttttgaacgcctgtcttggggtttgcaatcagagccttgtgtcactttctttttaaaaataacctgagtg

SEQ ID NO: 136487 - DNA, 71 bp, Homo sapiens
tcttggggtttgcaatcagagccttgtgtcactttctttttaaaaataacctgagtggtgacagtgtttgt

SEQ ID NO: 136488 - DNA, 73 bp, Homo sapiens
agagccttgtgtcactttctttttaaaaataacctgagtggtgacagtgtttgttgctgaatgaaggatttca

SEQ ID NO: 136489 - DNA, 75 bp, Homo sapiens
ataacctgagtggtgacagtgtttgttgctgaatgaaggatttcatttttttcagtcaactgaaaatcatttgga

SEQ ID NO: 136490 - DNA, 76 bp, Homo sapiens
gagtggtgacagtgtttgttgctgaatgaaggatttcatttttttcagtcaactgaaaatcatttggacaaaatga

SEQ ID NO: 136491 - DNA, 73 bp, Homo sapiens
gtgtttgttgctgaatgaaggatttcatttttttcagtcaactgaaaatcatttggacaaaatgaataataag

SEQ ID NO: 136492 - DNA, 74 bp, Homo sapiens
gctgaatgaaggatttcatttttttcagtcaactgaaaatcatttggacaaaatgaataataagtgaagtaatg

SEQ ID NO: 136493 - DNA, 73 bp, Homo sapiens
tcatttttttcagtcaactgaaaatcatttggacaaaatgaataataagtgaagtaatgttgctttcattaaa

SEQ ID NO: 136494 - DNA, 73 bp, Homo sapiens
cagtcaactgaaaatcatttggacaaaatgaataataagtgaagtaatgttgctttcattaaaaaatcacaac

SEQ ID NO: 136495 - DNA, 73 bp, Homo sapiens
ctgaaaatcatttggacaaaatgaataataagtgaagtaatgttgctttcattaaaaaatcacaactagagat

SEQ ID NO: 136496 - DNA, 73 bp, Homo sapiens
tggacaaaatgaataataagtgaagtaatgttgctttcattaaaaaatcacaactagagattaccgagtaatc

SEQ ID NO: 136497 - DNA, 73 bp, Homo sapiens
gaataataagtgaagtaatgttgctttcattaaaaaatcacaactagagattaccgagtaatctctggcattt

SEQ ID NO: 136498 - DNA, 73 bp, Homo sapiens
aagtgaagtaatgttgctttcattaaaaaatcacaactagagattaccgagtaatctctggcattttgtggct

SEQ ID NO: 136499 - DNA, 76 bp, Homo sapiens
tgctttcattaaaaaatcacaactagagattaccgagtaatctctggcattttgtggcttatatactgtttctgga

SEQ ID NO: 136500 - DNA, 72 bp, Homo sapiens
aaaaaatcacaactagagattaccgagtaatctctggcattttgtggcttatatactgtttctggaagtaac

SEQ ID NO: 136501 - DNA, 76 bp, Homo sapiens
atcacaactagagattaccgagtaatctctggcattttgtggcttatatactgtttctggaagtaactgctttgaa

SEQ ID NO: 136502 - DNA, 78 bp, Homo sapiens
ttaccgagtaatctctggcattttgtggcttatatactgtttctggaagtaactgctttgaaggacagtcatgatgta

SEQ ID NO: 136503 - DNA, 78 bp, Homo sapiens
agtaatctctggcattttgtggcttatatactgtttctggaagtaactgctttgaaggacagtcatgatgtagataag

SEQ ID NO: 136504 - DNA, 78 bp, Homo sapiens
aatctctggcattttgtggcttatatactgtttctggaagtaactgctttgaaggacagtcatgatgtagataagttc

SEQ ID NO: 136505 - DNA, 81 bp, Homo sapiens
tggcattttgtggcttatatactgtttctggaagtaactgctttgaaggacagtcatgatgtagataagttctgcatatat

SEQ ID NO: 136506 - DNA, 78 bp, Homo sapiens
attttgtggcttatatactgtttctggaagtaactgctttgaaggacagtcatgatgtagataagttctgcatatatt

SEQ ID NO: 136507 - DNA, 78 bp, Homo sapiens
tttgtggcttatatactgtttctggaagtaactgctttgaaggacagtcatgatgtagataagttctgcatatatttt

SEQ ID NO: 136508 - DNA, 77 bp, Homo sapiens
ggcttatatactgtttctggaagtaactgctttgaaggacagtcatgatgtagataagttctgcatatatttttaaa

SEQ ID NO: 136509 - DNA, 76 bp, Homo sapiens
atatactgtttctggaagtaactgctttgaaggacagtcatgatgtagataagttctgcatatatttttaaattta

SEQ ID NO: 136510 - DNA, 70 bp, Homo sapiens
ccatgcctggccctgcatatatttttttaacgatttcttttaagatcagctattttagttagctgttttt

SEQ ID NO: 136511 - DNA, 68 bp, Homo sapiens
gcctggccctgcatatatttttttaacgatttcttttaagatcagctattttagttagctgttttttt

SEQ ID NO: 136512 - DNA, 68 bp, Homo sapiens
ggccctgcatatatttttttaacgatttcttttaagatcagctattttagttagctgttttttttcaa

SEQ ID NO: 136513 - DNA, 66 bp, Homo sapiens
tatatttttttaacgatttcttttaagatcagctattttagttagctgttttttttcaagacaaag

SEQ ID NO: 136514 - DNA, 68 bp, Homo sapiens
tttttaacgatttcttttaagatcagctattttagttagctgttttttttcaagacaaagttatgcaa

SEQ ID NO: 136515 - DNA, 69 bp, Homo sapiens
aacgatttcttttaagatcagctattttagttagctgttttttttcaagacaaagttatgcaagaggga

SEQ ID NO: 136516 - DNA, 73 bp, Homo sapiens
tttaagatcagctattttagttagctgttttttttcaagacaaagttatgcaagagggataacagacctatca

SEQ ID NO: 136517 - DNA, 75 bp, Homo sapiens
gatcagctattttagttagctgttttttttcaagacaaagttatgcaagagggataacagacctatcagtcatgt

SEQ ID NO: 136518 - DNA, 74 bp, Homo sapiens
gctattttagttagctgttttttttcaagacaaagttatgcaagagggataacagacctatcagtcatgttata

SEQ ID NO: 136519 - DNA, 73 bp, Homo sapiens
tttagttagctgttttttttcaagacaaagttatgcaagagggataacagacctatcagtcatgttatatctt

SEQ ID NO: 136520 - DNA, 76 bp, Homo sapiens
tttttcaagacaaagttatgcaagagggataacagacctatcagtcatgttatatctttaaacatgtatagagtaa

SEQ ID NO: 136521 - DNA, 76 bp, Homo sapiens
caagacaaagttatgcaagagggataacagacctatcagtcatgttatatctttaaacatgtatagagtaaggtat

SEQ ID NO: 136522 - DNA, 76 bp, Homo sapiens
ttatgcaagagggataacagacctatcagtcatgttatatctttaaacatgtatagagtaaggtatttttgtatta

SEQ ID NO: 136523 - DNA, 72 bp, Homo sapiens
gggataacagacctatcagtcatgttatatctttaaacatgtatagagtaaggtatttttgtattattttaa

SEQ ID NO: 136524 - DNA, 73 bp, Homo sapiens
acctatcagtcatgttatatctttaaacatgtatagagtaaggtatttttgtattattttaagaatagcgtga

SEQ ID NO: 136525 - DNA, 71 bp, Homo sapiens
ttatatctttaaacatgtatagagtaaggtatttttgtattattttaagaatagcgtgaaataaaatgagc

SEQ ID NO: 136526 - DNA, 68 bp, Homo sapiens
ctttaaacatgtatagagtaaggtatttttgtattattttaagaatagcgtgaaataaaatgagcttt

SEQ ID NO: 136527 - DNA, 68 bp, Homo sapiens
gtatagagtaaggtatttttgtattattttaagaatagcgtgaaataaaatgagctttttaagttata

SEQ ID NO: 136528 - DNA, 66 bp, Homo sapiens
ggtatttttgtattattttaagaatagcgtgaaataaaatgagctttttaagttatataattttta

SEQ ID NO: 136529 - DNA, 66 bp, Homo sapiens
gtattattttaagaatagcgtgaaataaaatgagctttttaagttatataatttttattaaattta

SEQ ID NO: 136530 - DNA, 68 bp, Homo sapiens
aatttaataaatatttaagaacagcatgaaataaagtgagcttttgaagttatgatttttattaaatt

SEQ ID NO: 136531 - DNA, 71 bp, Homo sapiens
taaatatttaagaacagcatgaaataaagtgagcttttgaagttatgatttttattaaatttaatcatttc

SEQ ID NO: 136532 - DNA, 70 bp, Homo sapiens
gaacagcatgaaataaagtgagcttttgaagttatgatttttattaaatttaatcatttctattaaaaag

SEQ ID NO: 136533 - DNA, 69 bp, Homo sapiens
taaagtgagcttttgaagttatgatttttattaaatttaatcatttctattaaaaagtagagctcggat

SEQ ID NO: 136534 - DNA, 66 bp, Homo sapiens
gttatgatttttattaaatttaatcatttctattaaaaagtagagctcggattttcctaccaaacc

SEQ ID NO: 136535 - DNA, 65 bp, Homo sapiens
ttaaatttaatcatttctattaaaaagtagagctcggattttcctaccaaacctttttaccagta

SEQ ID NO: 136536 - DNA, 68 bp, Homo sapiens
tcatttctattaaaaagtagagctcggattttcctaccaaacctttttaccagtaaggtcataggcta

SEQ ID NO: 136537 - DNA, 67 bp, Homo sapiens
ttaaaaagtagagctcggattttcctaccaaacctttttaccagtaaggtcataggctataggtatg

SEQ ID NO: 136538 - DNA, 70 bp, Homo sapiens
attttcctaccaaacctttttaccagtaaggtcataggctataggtatggcatcaagaaagactgataat

SEQ ID NO: 136539 - DNA, 71 bp, Homo sapiens
accaaacctttttaccagtaaggtcataggctataggtatggcatcaagaaagactgataattctgctttt

SEQ ID NO: 136540 - DNA, 73 bp, Homo sapiens
ttaccagtaaggtcataggctataggtatggcatcaagaaagactgataattctgctttttttccaaaataag

SEQ ID NO: 136541 - DNA, 75 bp, Homo sapiens
ggtcataggctataggtatggcatcaagaaagactgataattctgctttttttccaaaataagttattagccata

SEQ ID NO: 136542 - DNA, 74 bp, Homo sapiens
ctataggtatggcatcaagaaagactgataattctgctttttttccaaaataagttattagccatagagaattc

SEQ ID NO: 136543 - DNA, 70 bp, Homo sapiens
ggcatcaagaaagactgataattctgctttttttccaaaataagttattagccatagagaattctttttt

SEQ ID NO: 136544 - DNA, 68 bp, Homo sapiens
ttgtttttttaaaggaattgtatttatttttccttgttgcatattattagtatacttattcatgaact

SEQ ID NO: 136545 - DNA, 69 bp, Homo sapiens
tttaaaggaattgtatttatttttccttgttgcatattattagtatacttattcatgaacttctaattt

SEQ ID NO: 136546 - DNA, 71 bp, Homo sapiens
gtatttatttttccttgttgcatattattagtatacttattcatgaacttctaattttaagcaaataaatg

SEQ ID NO: 136547 - DNA, 69 bp, Homo sapiens
atttttccttgttgcatattattagtatacttattcatgaacttctaattttaagcaaataaatgtttt

SEQ ID NO: 136548 - DNA, 73 bp, Homo sapiens
tgcatattattagtatacttattcatgaacttctaattttaagcaaataaatgtttttatttcagttaatggc

SEQ ID NO: 136549 - DNA, 71 bp, Homo sapiens
gtatacttattcatgaacttctaattttaagcaaataaatgtttttatttcagttaatggccagccaagac

SEQ ID NO: 136550 - DNA, 72 bp, Homo sapiens
tcatgaacttctaattttaagcaaataaatgtttttatttcagttaatggccagccaagaccccttgaatca

SEQ ID NO: 136551 - DNA, 69 bp, Homo sapiens
ctaattttaagcaaataaatgtttttatttcagttaatggccagccaagaccccttgaatcaagtcagg

SEQ ID NO: 136552 - DNA, 72 bp, Homo sapiens
ttaagcaaataaatgtttttatttcagttaatggccagccaagaccccttgaatcaagtcaggtgaaatatc

SEQ ID NO: 136553 - DNA, 72 bp, Homo sapiens
atgtttttatttcagttaatggccagccaagaccccttgaatcaagtcaggtgaaatatctccgtcgagaac

SEQ ID NO: 136554 - DNA, 74 bp, Homo sapiens
atttcagttaatggccagccaagaccccttgaatcaagtcaggtgaaatatctccgtcgagaactgatagaact

SEQ ID NO: 136555 - DNA, 74 bp, Homo sapiens
cagccaagaccccttgaatcaagtcaggtgaaatatctccgtcgagaactgatagaacttcgaaataaagtgaa

SEQ ID NO: 136556 - DNA, 72 bp, Homo sapiens
cccttgaatcaagtcaggtgaaatatctccgtcgagaactgatagaacttcgaaataaagtgaatcgtttat

SEQ ID NO: 136557 - DNA, 74 bp, Homo sapiens
atcaagtcaggtgaaatatctccgtcgagaactgatagaacttcgaaataaagtgaatcgtttattggatagct

SEQ ID NO: 136558 - DNA, 72 bp, Homo sapiens
aggtgaaatatctccgtcgagaactgatagaacttcgaaataaagtgaatcgtttattggatagcttggaac

SEQ ID NO: 136559 - DNA, 73 bp, Homo sapiens
tctccgtcgagaactgatagaacttcgaaataaagtgaatcgtttattggatagcttggaaccacctggagaa

SEQ ID NO: 136560 - DNA, 70 bp, Homo sapiens
actgatagaacttcgaaataaagtgaatcgtttattggatagcttggaaccacctggagaaccaggacct

SEQ ID NO: 136561 - DNA, 70 bp, Homo sapiens
ttcgaaataaagtgaatcgtttattggatagcttggaaccacctggagaaccaggaccttccaccaatat

SEQ ID NO: 136562 - DNA, 71 bp, Homo sapiens
taaagtgaatcgtttattggatagcttggaaccacctggagaaccaggaccttccaccaatattcctgaaa

SEQ ID NO: 136563 - DNA, 69 bp, Homo sapiens
cgtttattggatagcttggaaccacctggagaaccaggaccttccaccaatattcctgaaaatggtaaa

SEQ ID NO: 136564 - DNA, 70 bp, Homo sapiens
ttggaaccacctggagaaccaggaccttccaccaatattcctgaaaatggtaaaccctgaatccattgta

SEQ ID NO: 136565 - DNA, 71 bp, Homo sapiens
ctggagaaccaggaccttccaccaatattcctgaaaatggtaaaccctgaatccattgtattctgacttat

SEQ ID NO: 136566 - DNA, 68 bp, Homo sapiens
tagataaaaaggaaacaagtttttgtttattcctctatttttacagatactgtggatggtagggaaga

SEQ ID NO: 136567 - DNA, 68 bp, Homo sapiens
ggaaacaagtttttgtttattcctctatttttacagatactgtggatggtagggaagaaaagtctgct

SEQ ID NO: 136568 - DNA, 71 bp, Homo sapiens
gtttttgtttattcctctatttttacagatactgtggatggtagggaagaaaagtctgcttctgattcttc

SEQ ID NO: 136569 - DNA, 73 bp, Homo sapiens
tttattcctctatttttacagatactgtggatggtagggaagaaaagtctgcttctgattcttctggaaaaca

SEQ ID NO: 136570 - DNA, 74 bp, Homo sapiens
ttttacagatactgtggatggtagggaagaaaagtctgcttctgattcttctggaaaacagtctactcaggtta

SEQ ID NO: 136571 - DNA, 77 bp, Homo sapiens
tactgtggatggtagggaagaaaagtctgcttctgattcttctggaaaacagtctactcaggttatggcagcaagta

SEQ ID NO: 136572 - DNA, 76 bp, Homo sapiens
gtagggaagaaaagtctgcttctgattcttctggaaaacagtctactcaggttatggcagcaagtatgtctgcttt

SEQ ID NO: 136573 - DNA, 77 bp, Homo sapiens
aaagtctgcttctgattcttctggaaaacagtctactcaggttatggcagcaagtatgtctgcttttgatcctttaa

SEQ ID NO: 136574 - DNA, 75 bp, Homo sapiens
ttctgattcttctggaaaacagtctactcaggttatggcagcaagtatgtctgcttttgatcctttaaaaaacca

SEQ ID NO: 136575 - DNA, 74 bp, Homo sapiens
ttctggaaaacagtctactcaggttatggcagcaagtatgtctgcttttgatcctttaaaaaaccaagatgaaa

SEQ ID NO: 136576 - DNA, 74 bp, Homo sapiens
acagtctactcaggttatggcagcaagtatgtctgcttttgatcctttaaaaaaccaagatgaaatcaataaaa

SEQ ID NO: 136577 - DNA, 75 bp, Homo sapiens
gttatggcagcaagtatgtctgcttttgatcctttaaaaaaccaagatgaaatcaataaaaatgttatgtcagcg

SEQ ID NO: 136578 - DNA, 74 bp, Homo sapiens
cagcaagtatgtctgcttttgatcctttaaaaaaccaagatgaaatcaataaaaatgttatgtcagcgtttggc

SEQ ID NO: 136579 - DNA, 72 bp, Homo sapiens
gtctgcttttgatcctttaaaaaaccaagatgaaatcaataaaaatgttatgtcagcgtttggcttaacaga

SEQ ID NO: 136580 - DNA, 72 bp, Homo sapiens
tttaaaaaaccaagatgaaatcaataaaaatgttatgtcagcgtttggcttaacagatgatcaggtttcagg

SEQ ID NO: 136581 - DNA, 74 bp, Homo sapiens
caagatgaaatcaataaaaatgttatgtcagcgtttggcttaacagatgatcaggtttcaggtaagttggtttc

SEQ ID NO: 136582 - DNA, 72 bp, Homo sapiens
aatcaataaaaatgttatgtcagcgtttggcttaacagatgatcaggtttcaggtaagttggtttccaactc

SEQ ID NO: 136583 - DNA, 70 bp, Homo sapiens
aaaaatgttatgtcagcgtttggcttaacagatgatcaggtttcaggtaagttggtttccaactccttta

SEQ ID NO: 136584 - DNA, 73 bp, Homo sapiens
aaggccttgtgttggatactaaactgacttttttttgactatccagggccacccagtgctcctgcagaagatc

SEQ ID NO: 136585 - DNA, 75 bp, Homo sapiens
ttgtgttggatactaaactgacttttttttgactatccagggccacccagtgctcctgcagaagatcgttcagga

SEQ ID NO: 136586 - DNA, 72 bp, Homo sapiens
atactaaactgacttttttttgactatccagggccacccagtgctcctgcagaagatcgttcaggaacaccc

SEQ ID NO: 136587 - DNA, 77 bp, Homo sapiens
ttttttgactatccagggccacccagtgctcctgcagaagatcgttcaggaacacccgacagcattgcttcctcctc

SEQ ID NO: 136588 - DNA, 82 bp, Homo sapiens
actatccagggccacccagtgctcctgcagaagatcgttcaggaacacccgacagcattgcttcctcctcctcagcagctca

SEQ ID NO: 136589 - DNA, 80 bp, Homo sapiens
acccagtgctcctgcagaagatcgttcaggaacacccgacagcattgcttcctcctcctcagcagctcacccaccaggcg

SEQ ID NO: 136590 - DNA, 82 bp, Homo sapiens
ctcctgcagaagatcgttcaggaacacccgacagcattgcttcctcctcctcagcagctcacccaccaggcgttcagccaca

SEQ ID NO: 136591 - DNA, 82 bp, Homo sapiens
agaagatcgttcaggaacacccgacagcattgcttcctcctcctcagcagctcacccaccaggcgttcagccacagcagcca

SEQ ID NO: 136592 - DNA, 82 bp, Homo sapiens
aggaacacccgacagcattgcttcctcctcctcagcagctcacccaccaggcgttcagccacagcagccaccatatacagga

SEQ ID NO: 136593 - DNA, 87 bp, Homo sapiens
acagcattgcttcctcctcctcagcagctcacccaccaggcgttcagccacagcagccaccatatacaggagctcagactcaagcag

SEQ ID NO: 136594 - DNA, 87 bp, Homo sapiens
tcctcctcctcagcagctcacccaccaggcgttcagccacagcagccaccatatacaggagctcagactcaagcaggtcagattgaa

SEQ ID NO: 136595 - DNA, 83 bp, Homo sapiens
agcagctcacccaccaggcgttcagccacagcagccaccatatacaggagctcagactcaagcaggtcagattgaaggtaaaa

SEQ ID NO: 136596 - DNA, 80 bp, Homo sapiens
ccaccaggcgttcagccacagcagccaccatatacaggagctcagactcaagcaggtcagattgaaggtaaaatagagtt

SEQ ID NO: 136597 - DNA, 82 bp, Homo sapiens
ttcagccacagcagccaccatatacaggagctcagactcaagcaggtcagattgaaggtaaaatagagtttagaacacatgt

SEQ ID NO: 136598 - DNA, 79 bp, Homo sapiens
acagcagccaccatatacaggagctcagactcaagcaggtcagattgaaggtaaaatagagtttagaacacatgtttgg

SEQ ID NO: 136599 - DNA, 76 bp, Homo sapiens
atatacaggagctcagactcaagcaggtcagattgaaggtaaaatagagtttagaacacatgtttgggaaagtaca

SEQ ID NO: 136600 - DNA, 83 bp, Homo sapiens
gtgtgtgtgttttcaggtcagatgtaccaacagtaccagcaacaggccggctatggtgcacagcagccgcaggctccacctca

SEQ ID NO: 136601 - DNA, 84 bp, Homo sapiens
tgtgttttcaggtcagatgtaccaacagtaccagcaacaggccggctatggtgcacagcagccgcaggctccacctcagcagcc

SEQ ID NO: 136602 - DNA, 84 bp, Homo sapiens
agatgtaccaacagtaccagcaacaggccggctatggtgcacagcagccgcaggctccacctcagcagcctcaacagtatggta

SEQ ID NO: 136603 - DNA, 83 bp, Homo sapiens
aacagtaccagcaacaggccggctatggtgcacagcagccgcaggctccacctcagcagcctcaacagtatggtattcagtat

SEQ ID NO: 136604 - DNA, 86 bp, Homo sapiens
agcaacaggccggctatggtgcacagcagccgcaggctccacctcagcagcctcaacagtatggtattcagtattcaggtgagcag

SEQ ID NO: 136605 - DNA, 84 bp, Homo sapiens
ctatggtgcacagcagccgcaggctccacctcagcagcctcaacagtatggtattcagtattcaggtgagcaggtgttgaaagg

SEQ ID NO: 136606 - DNA, 81 bp, Homo sapiens
acagcagccgcaggctccacctcagcagcctcaacagtatggtattcagtattcaggtgagcaggtgttgaaagggagttg

SEQ ID NO: 136607 - DNA, 79 bp, Homo sapiens
aggctccacctcagcagcctcaacagtatggtattcagtattcaggtgagcaggtgttgaaagggagttggctcatggt

SEQ ID NO: 136608 - DNA, 76 bp, Homo sapiens
acctcagcagcctcaacagtatggtattcagtattcaggtgagcaggtgttgaaagggagttggctcatggttttt

SEQ ID NO: 136609 - DNA, 75 bp, Homo sapiens
gttttactaaaagataagatacatgttatttattttgccttttcagcaagctatagtcagcagactggacctcaa

SEQ ID NO: 136610 - DNA, 75 bp, Homo sapiens
actaaaagataagatacatgttatttattttgccttttcagcaagctatagtcagcagactggacctcaacaacc

SEQ ID NO: 136611 - DNA, 78 bp, Homo sapiens
aagatacatgttatttattttgccttttcagcaagctatagtcagcagactggacctcaacaacctcagcagttccag

SEQ ID NO: 136612 - DNA, 79 bp, Homo sapiens
ttatttattttgccttttcagcaagctatagtcagcagactggacctcaacaacctcagcagttccagggatatggcca

SEQ ID NO: 136613 - DNA, 80 bp, Homo sapiens
ttttcagcaagctatagtcagcagactggacctcaacaacctcagcagttccagggatatggccagcaaccaacttccca

SEQ ID NO: 136614 - DNA, 79 bp, Homo sapiens
aagctatagtcagcagactggacctcaacaacctcagcagttccagggatatggccagcaaccaacttcccaggcacca

SEQ ID NO: 136615 - DNA, 77 bp, Homo sapiens
cagactggacctcaacaacctcagcagttccagggatatggccagcaaccaacttcccaggcaccagctcctgcctt

SEQ ID NO: 136616 - DNA, 77 bp, Homo sapiens
tggacctcaacaacctcagcagttccagggatatggccagcaaccaacttcccaggcaccagctcctgccttttctg

SEQ ID NO: 136617 - DNA, 77 bp, Homo sapiens
aacctcagcagttccagggatatggccagcaaccaacttcccaggcaccagctcctgccttttctggtcagcctcaa

SEQ ID NO: 136618 - DNA, 76 bp, Homo sapiens
agttccagggatatggccagcaaccaacttcccaggcaccagctcctgccttttctggtcagcctcaacaactgcc

SEQ ID NO: 136619 - DNA, 81 bp, Homo sapiens
atatggccagcaaccaacttcccaggcaccagctcctgccttttctggtcagcctcaacaactgcctgctcagccgccaca

SEQ ID NO: 136620 - DNA, 79 bp, Homo sapiens
aaccaacttcccaggcaccagctcctgccttttctggtcagcctcaacaactgcctgctcagccgccacagcagtacca

SEQ ID NO: 136621 - DNA, 82 bp, Homo sapiens
aggcaccagctcctgccttttctggtcagcctcaacaactgcctgctcagccgccacagcagtaccaggcgagcaattatcc

SEQ ID NO: 136622 - DNA, 82 bp, Homo sapiens
ctgccttttctggtcagcctcaacaactgcctgctcagccgccacagcagtaccaggcgagcaattatcctgcacaaactta

SEQ ID NO: 136623 - DNA, 83 bp, Homo sapiens
ttttctggtcagcctcaacaactgcctgctcagccgccacagcagtaccaggcgagcaattatcctgcacaaacttacactgc

SEQ ID NO: 136624 - DNA, 82 bp, Homo sapiens
ctcaacaactgcctgctcagccgccacagcagtaccaggcgagcaattatcctgcacaaacttacactgcccaaacttctca

SEQ ID NO: 136625 - DNA, 80 bp, Homo sapiens
ctgctcagccgccacagcagtaccaggcgagcaattatcctgcacaaacttacactgcccaaacttctcagcctactaat

SEQ ID NO: 136626 - DNA, 79 bp, Homo sapiens
gccacagcagtaccaggcgagcaattatcctgcacaaacttacactgcccaaacttctcagcctactaattatactgtg

SEQ ID NO: 136627 - DNA, 76 bp, Homo sapiens
agtaccaggcgagcaattatcctgcacaaacttacactgcccaaacttctcagcctactaattatactgtggctcc

SEQ ID NO: 136628 - DNA, 78 bp, Homo sapiens
cgagcaattatcctgcacaaacttacactgcccaaacttctcagcctactaattatactgtggctcctgcctctcaac

SEQ ID NO: 136629 - DNA, 78 bp, Homo sapiens
tatcctgcacaaacttacactgcccaaacttctcagcctactaattatactgtggctcctgcctctcaacctggaatg

SEQ ID NO: 136630 - DNA, 75 bp, Homo sapiens
aaacttacactgcccaaacttctcagcctactaattatactgtggctcctgcctctcaacctggaatggctccaa

SEQ ID NO: 136631 - DNA, 74 bp, Homo sapiens
cccaaacttctcagcctactaattatactgtggctcctgcctctcaacctggaatggctccaagccaacctggg

SEQ ID NO: 136632 - DNA, 75 bp, Homo sapiens
agcctactaattatactgtggctcctgcctctcaacctggaatggctccaagccaacctggggcctatcaaccaa

SEQ ID NO: 136633 - DNA, 75 bp, Homo sapiens
taattatactgtggctcctgcctctcaacctggaatggctccaagccaacctggggcctatcaaccaagaccagg

SEQ ID NO: 136634 - DNA, 72 bp, Homo sapiens
ctcctgcctctcaacctggaatggctccaagccaacctggggcctatcaaccaagaccaggttttacttcac

SEQ ID NO: 136635 - DNA, 71 bp, Homo sapiens
tcaacctggaatggctccaagccaacctggggcctatcaaccaagaccaggttttacttcacttcctggaa

SEQ ID NO: 136636 - DNA, 71 bp, Homo sapiens
aatggctccaagccaacctggggcctatcaaccaagaccaggttttacttcacttcctggaagtaccatga

SEQ ID NO: 136637 - DNA, 68 bp, Homo sapiens
aagccaacctggggcctatcaaccaagaccaggttttacttcacttcctggaagtaccatgacccctc

SEQ ID NO: 136638 - DNA, 69 bp, Homo sapiens
gggcctatcaaccaagaccaggttttacttcacttcctggaagtaccatgacccctcctccaagtgggc

SEQ ID NO: 136639 - DNA, 69 bp, Homo sapiens
atcaaccaagaccaggttttacttcacttcctggaagtaccatgacccctcctccaagtgggcctaatc

SEQ ID NO: 136640 - DNA, 69 bp, Homo sapiens
aggttttacttcacttcctggaagtaccatgacccctcctccaagtgggcctaatccttatgcgcgtaa

SEQ ID NO: 136641 - DNA, 68 bp, Homo sapiens
acttcctggaagtaccatgacccctcctccaagtgggcctaatccttatgcgcgtaaccgtcctccct

SEQ ID NO: 136642 - DNA, 68 bp, Homo sapiens
cccctcctccaagtgggcctaatccttatgcgcgtaaccgtcctccctttggtcagggctatacccaa

SEQ ID NO: 136643 - DNA, 69 bp, Homo sapiens
cctccaagtgggcctaatccttatgcgcgtaaccgtcctccctttggtcagggctatacccaacctgga

SEQ ID NO: 136644 - DNA, 70 bp, Homo sapiens
taatccttatgcgcgtaaccgtcctccctttggtcagggctatacccaacctggacctggttatcgataa

SEQ ID NO: 136645 - DNA, 70 bp, Homo sapiens
ttatgcgcgtaaccgtcctccctttggtcagggctatacccaacctggacctggttatcgataaggaggc

SEQ ID NO: 136646 - DNA, 71 bp, Homo sapiens
tcctccctttggtcagggctatacccaacctggacctggttatcgataaggaggctcctctacaccaatta

SEQ ID NO: 136647 - DNA, 71 bp, Homo sapiens
cctttggtcagggctatacccaacctggacctggttatcgataaggaggctcctctacaccaattaatgta

SEQ ID NO: 136648 - DNA, 76 bp, Homo sapiens
tatacccaacctggacctggttatcgataaggaggctcctctacaccaattaatgtagctgctagctattggcctc

SEQ ID NO: 136649 - DNA, 74 bp, Homo sapiens
aacctggacctggttatcgataaggaggctcctctacaccaattaatgtagctgctagctattggcctcccaaa

SEQ ID NO: 136650 - DNA, 76 bp, Homo sapiens
ttatcgataaggaggctcctctacaccaattaatgtagctgctagctattggcctcccaaaagactccagtactat

SEQ ID NO: 136651 - DNA, 74 bp, Homo sapiens
ataaggaggctcctctacaccaattaatgtagctgctagctattggcctcccaaaagactccagtactatttta

SEQ ID NO: 136652 - DNA, 74 bp, Homo sapiens
tacaccaattaatgtagctgctagctattggcctcccaaaagactccagtactattttaatttgtattgaagaa

SEQ ID NO: 136653 - DNA, 74 bp, Homo sapiens
caattaatgtagctgctagctattggcctcccaaaagactccagtactattttaatttgtattgaagaagttca

SEQ ID NO: 136654 - DNA, 70 bp, Homo sapiens
ggcctcccaaaagactccagtactattttaatttgtattgaagaagttcagaaatttaaaagcagagcat

SEQ ID NO: 136655 - DNA, 73 bp, Homo sapiens
tttgtattgaagaagttcagaaatttaaaagcagagcattttttatgatatcattgttggtgttaattgaaag

SEQ ID NO: 136656 - DNA, 75 bp, Homo sapiens
cagaaatttaaaagcagagcattttttatgatatcattgttggtgttaattgaaagtataatttgctggaacaca

SEQ ID NO: 136657 - DNA, 76 bp, Homo sapiens
agcagagcattttttatgatatcattgttggtgttaattgaaagtataatttgctggaacacaaagaccaaaatga

SEQ ID NO: 136658 - DNA, 71 bp, Homo sapiens
ttttatgatatcattgttggtgttaattgaaagtataatttgctggaacacaaagaccaaaatgaaagttt

SEQ ID NO: 136659 - DNA, 69 bp, Homo sapiens
tcattgttggtgttaattgaaagtataatttgctggaacacaaagaccaaaatgaaagttttttcctcc

SEQ ID NO: 136660 - DNA, 68 bp, Homo sapiens
gttggtgttaattgaaagtataatttgctggaacacaaagaccaaaatgaaagttttttcctccctgc

SEQ ID NO: 136661 - DNA, 69 bp, Homo sapiens
aagtataatttgctggaacacaaagaccaaaatgaaagttttttcctccctgcttaaaaatgtagcagc

SEQ ID NO: 136662 - DNA, 68 bp, Homo sapiens
cacaaagaccaaaatgaaagttttttcctccctgcttaaaaatgtagcagcttcttagttactttgga

SEQ ID NO: 136663 - DNA, 68 bp, Homo sapiens
aatgaaagttttttcctccctgcttaaaaatgtagcagcttcttagttactttggaacactactctta

SEQ ID NO: 136664 - DNA, 72 bp, Homo sapiens
ttttcctccctgcttaaaaatgtagcagcttcttagttactttggaacactactcttacatgtataaagtga

SEQ ID NO: 136665 - DNA, 74 bp, Homo sapiens
cctgcttaaaaatgtagcagcttcttagttactttggaacactactcttacatgtataaagtgattgacttgac

SEQ ID NO: 136666 - DNA, 75 bp, Homo sapiens
aatgtagcagcttcttagttactttggaacactactcttacatgtataaagtgattgacttgactttctagcttc

SEQ ID NO: 136667 - DNA, 72 bp, Homo sapiens
ttcttagttactttggaacactactcttacatgtataaagtgattgacttgactttctagcttcccttgtcc

SEQ ID NO: 136668 - DNA, 73 bp, Homo sapiens
tttggaacactactcttacatgtataaagtgattgacttgactttctagcttcccttgtccggaggatattaa

SEQ ID NO: 136669 - DNA, 73 bp, Homo sapiens
aacactactcttacatgtataaagtgattgacttgactttctagcttcccttgtccggaggatattaaaatgc

SEQ ID NO: 136670 - DNA, 72 bp, Homo sapiens
tgtataaagtgattgacttgactttctagcttcccttgtccggaggatattaaaatgctagggtgaggttta

SEQ ID NO: 136671 - DNA, 71 bp, Homo sapiens
aaagtgattgacttgactttctagcttcccttgtccggaggatattaaaatgctagggtgaggtttagcca

SEQ ID NO: 136672 - DNA, 69 bp, Homo sapiens
actttctagcttcccttgtccggaggatattaaaatgctagggtgaggtttagccatcttacttggctt

SEQ ID NO: 136673 - DNA, 69 bp, Homo sapiens
ttcccttgtccggaggatattaaaatgctagggtgaggtttagccatcttacttggctttttactatta

SEQ ID NO: 136674 - DNA, 72 bp, Homo sapiens
ttaaaatgctagggtgaggtttagccatcttacttggctttttactattaacatgatgtactaaagtagagc

SEQ ID NO: 136675 - DNA, 72 bp, Homo sapiens
tagggtgaggtttagccatcttacttggctttttactattaacatgatgtactaaagtagagccctttgaga

SEQ ID NO: 136676 - DNA, 72 bp, Homo sapiens
ggtttagccatcttacttggctttttactattaacatgatgtactaaagtagagccctttgagaatacaaga

SEQ ID NO: 136677 - DNA, 72 bp, Homo sapiens
acttggctttttactattaacatgatgtactaaagtagagccctttgagaatacaagatattatgtataaaa

SEQ ID NO: 136678 - DNA, 77 bp, Homo sapiens
tttactattaacatgatgtactaaagtagagccctttgagaatacaagatattatgtataaaatgtaacactgatga

SEQ ID NO: 136679 - DNA, 76 bp, Homo sapiens
aacatgatgtactaaagtagagccctttgagaatacaagatattatgtataaaatgtaacactgatgataggttaa

SEQ ID NO: 136680 - DNA, 78 bp, Homo sapiens
gagccctttgagaatacaagatattatgtataaaatgtaacactgatgataggttaataaagatgattgaatccatta

SEQ ID NO: 136681 - DNA, 80 bp, Homo sapiens
tgagaatacaagatattatgtataaaatgtaacactgatgataggttaataaagatgattgaatccattagtggtcttga

SEQ ID NO: 136682 - DNA, 74 bp, Homo sapiens
aatgtaacactgatgataggttaataaagatgattgaatccattagtggtcttgaaattttaatttagtcacta

SEQ ID NO: 136683 - DNA, 75 bp, Homo sapiens
cactgatgataggttaataaagatgattgaatccattagtggtcttgaaattttaatttagtcactaacattatg

SEQ ID NO: 136684 - DNA, 69 bp, Homo sapiens
aaattcacacccgggacccagcaccctgggagcccacaagacaggccaggggcattcacaaaaagtatt

SEQ ID NO: 136685 - DNA, 71 bp, Homo sapiens
ggacccagcaccctgggagcccacaagacaggccaggggcattcacaaaaagtattttattattcttaaca

SEQ ID NO: 136686 - DNA, 70 bp, Homo sapiens
ccctgggagcccacaagacaggccaggggcattcacaaaaagtattttattattcttaacagtactcact

SEQ ID NO: 136687 - DNA, 69 bp, Homo sapiens
ccacaagacaggccaggggcattcacaaaaagtattttattattcttaacagtactcactttaaaggaa

SEQ ID NO: 136688 - DNA, 69 bp, Homo sapiens
gacaggccaggggcattcacaaaaagtattttattattcttaacagtactcactttaaaggaataagag

SEQ ID NO: 136689 - DNA, 71 bp, Homo sapiens
gggcattcacaaaaagtattttattattcttaacagtactcactttaaaggaataagaggatagcatacat

SEQ ID NO: 136690 - DNA, 73 bp, Homo sapiens
tattcttaacagtactcactttaaaggaataagaggatagcatacattttttacagacaatatataaatgttg

SEQ ID NO: 136691 - DNA, 74 bp, Homo sapiens
ttaacagtactcactttaaaggaataagaggatagcatacattttttacagacaatatataaatgttgtacata

SEQ ID NO: 136692 - DNA, 74 bp, Homo sapiens
tcactttaaaggaataagaggatagcatacattttttacagacaatatataaatgttgtacataattaacaata

SEQ ID NO: 136693 - DNA, 74 bp, Homo sapiens
gaataagaggatagcatacattttttacagacaatatataaatgttgtacataattaacaataacttagttcac

SEQ ID NO: 136694 - DNA, 72 bp, Homo sapiens
ttacagacaatatataaatgttgtacataattaacaataacttagttcactaatccaaaataaaacaagcca

SEQ ID NO: 136695 - DNA, 71 bp, Homo sapiens
gacaatatataaatgttgtacataattaacaataacttagttcactaatccaaaataaaacaagccaaata

SEQ ID NO: 136696 - DNA, 67 bp, Homo sapiens
cataattaacaataacttagttcactaatccaaaataaaacaagccaaataaaacataaaaacagaa

SEQ ID NO: 136697 - DNA, 67 bp, Homo sapiens
cttagttcactaatccaaaataaaacaagccaaataaaacataaaaacagaaaatactgccgattct

SEQ ID NO: 136698 - DNA, 67 bp, Homo sapiens
tcactaatccaaaataaaacaagccaaataaaacataaaaacagaaaatactgccgattctttttct

SEQ ID NO: 136699 - DNA, 69 bp, Homo sapiens
taaaacaagccaaataaaacataaaaacagaaaatactgccgattctttttcttatgcggacactagta

SEQ ID NO: 136700 - DNA, 69 bp, Homo sapiens
caagccaaataaaacataaaaacagaaaatactgccgattctttttcttatgcggacactagtacaaaa

SEQ ID NO: 136701 - DNA, 70 bp, Homo sapiens
cataaaaacagaaaatactgccgattctttttcttatgcggacactagtacaaaataagttacttctggc

SEQ ID NO: 136702 - DNA, 69 bp, Homo sapiens
aacagaaaatactgccgattctttttcttatgcggacactagtacaaaataagttacttctggccgtgg

SEQ ID NO: 136703 - DNA, 74 bp, Homo sapiens
actgccgattctttttcttatgcggacactagtacaaaataagttacttctggccgtggtgctccctgcagcga

SEQ ID NO: 136704 - DNA, 75 bp, Homo sapiens
ttttcttatgcggacactagtacaaaataagttacttctggccgtggtgctccctgcagcgactgcccgcccata

SEQ ID NO: 136705 - DNA, 76 bp, Homo sapiens
acactagtacaaaataagttacttctggccgtggtgctccctgcagcgactgcccgcccatattgcacttggtcac

SEQ ID NO: 136706 - DNA, 79 bp, Homo sapiens
aaaataagttacttctggccgtggtgctccctgcagcgactgcccgcccatattgcacttggtcactacatcagcacaa

SEQ ID NO: 136707 - DNA, 80 bp, Homo sapiens
aagttacttctggccgtggtgctccctgcagcgactgcccgcccatattgcacttggtcactacatcagcacaatcctcc

SEQ ID NO: 136708 - DNA, 81 bp, Homo sapiens
tccctgcagcgactgcccgcccatattgcacttggtcactacatcagcacaatcctcctcctgggccaggggcccctcaca

SEQ ID NO: 136709 - DNA, 76 bp, Homo sapiens
cccatattgcacttggtcactacatcagcacaatcctcctcctgggccaggggcccctcacaggccaccacacccc

SEQ ID NO: 136710 - DNA, 76 bp, Homo sapiens
atcagcacaatcctcctcctgggccaggggcccctcacaggccaccacaccccgccgtcaccgcatacagaatcta

SEQ ID NO: 136711 - DNA, 72 bp, Homo sapiens
ggccaggggcccctcacaggccaccacaccccgccgtcaccgcatacagaatctaagctcgggacacgttta

SEQ ID NO: 136712 - DNA, 73 bp, Homo sapiens
ccaccacaccccgccgtcaccgcatacagaatctaagctcgggacacgtttatatacagctgtaccttgggaa

SEQ ID NO: 136713 - DNA, 76 bp, Homo sapiens
accgcatacagaatctaagctcgggacacgtttatatacagctgtaccttgggaaggatccagacagccacagtaa

SEQ ID NO: 136714 - DNA, 76 bp, Homo sapiens
acagaatctaagctcgggacacgtttatatacagctgtaccttgggaaggatccagacagccacagtaaagctgga

SEQ ID NO: 136715 - DNA, 75 bp, Homo sapiens
agctcgggacacgtttatatacagctgtaccttgggaaggatccagacagccacagtaaagctggacctgagacc

SEQ ID NO: 136716 - DNA, 75 bp, Homo sapiens
acgtttatatacagctgtaccttgggaaggatccagacagccacagtaaagctggacctgagaccccagcaggga

SEQ ID NO: 136717 - DNA, 77 bp, Homo sapiens
acagctgtaccttgggaaggatccagacagccacagtaaagctggacctgagaccccagcagggacacagcctctcc

SEQ ID NO: 136718 - DNA, 76 bp, Homo sapiens
atccagacagccacagtaaagctggacctgagaccccagcagggacacagcctctccctgggtcctggtcctgacc

SEQ ID NO: 136719 - DNA, 75 bp, Homo sapiens
tggacctgagaccccagcagggacacagcctctccctgggtcctggtcctgacctgcccccaactcctgccttca

SEQ ID NO: 136720 - DNA, 73 bp, Homo sapiens
ccagcagggacacagcctctccctgggtcctggtcctgacctgcccccaactcctgccttcaccccctgccag

SEQ ID NO: 136721 - DNA, 73 bp, Homo sapiens
acacagcctctccctgggtcctggtcctgacctgcccccaactcctgccttcaccccctgccaggccagcaaa

SEQ ID NO: 136722 - DNA, 73 bp, Homo sapiens
ctggtcctgacctgcccccaactcctgccttcaccccctgccaggccagcaaatgccaaccagcccccagaaa

SEQ ID NO: 136723 - DNA, 70 bp, Homo sapiens
acctgcccccaactcctgccttcaccccctgccaggccagcaaatgccaaccagcccccagaaaccaagg

SEQ ID NO: 136724 - DNA, 72 bp, Homo sapiens
aactcctgccttcaccccctgccaggccagcaaatgccaaccagcccccagaaaccaagggcagcaaaggcc

SEQ ID NO: 136725 - DNA, 70 bp, Homo sapiens
ccttcaccccctgccaggccagcaaatgccaaccagcccccagaaaccaagggcagcaaaggcccctccc

SEQ ID NO: 136726 - DNA, 69 bp, Homo sapiens
aaaccaagggcagcaaaggcccctccccacccccagctttcatactagggctgtgggatcccagctctt

SEQ ID NO: 136727 - DNA, 69 bp, Homo sapiens
agcaaaggcccctccccacccccagctttcatactagggctgtgggatcccagctcttttccaaaaaga

SEQ ID NO: 136728 - DNA, 73 bp, Homo sapiens
cccagctttcatactagggctgtgggatcccagctcttttccaaaaagaattgcaaagctccaaccttgtgtg

SEQ ID NO: 136729 - DNA, 70 bp, Homo sapiens
atactagggctgtgggatcccagctcttttccaaaaagaattgcaaagctccaaccttgtgtgtaggttt

SEQ ID NO: 136730 - DNA, 71 bp, Homo sapiens
tgtgggatcccagctcttttccaaaaagaattgcaaagctccaaccttgtgtgtaggttttattcctttca

SEQ ID NO: 136731 - DNA, 71 bp, Homo sapiens
atcccagctcttttccaaaaagaattgcaaagctccaaccttgtgtgtaggttttattcctttcatagcag

SEQ ID NO: 136732 - DNA, 71 bp, Homo sapiens
ttttccaaaaagaattgcaaagctccaaccttgtgtgtaggttttattcctttcatagcagggctcctgtg

SEQ ID NO: 136733 - DNA, 74 bp, Homo sapiens
aattgcaaagctccaaccttgtgtgtaggttttattcctttcatagcagggctcctgtggctacgtacaatcaa

SEQ ID NO: 136734 - DNA, 73 bp, Homo sapiens
aagctccaaccttgtgtgtaggttttattcctttcatagcagggctcctgtggctacgtacaatcaactggac

SEQ ID NO: 136735 - DNA, 71 bp, Homo sapiens
tgtgtaggttttattcctttcatagcagggctcctgtggctacgtacaatcaactggacccaaaaagagtt

SEQ ID NO: 136736 - DNA, 69 bp, Homo sapiens
ctttcatagcagggctcctgtggctacgtacaatcaactggacccaaaaagagtttaaaaataaaacaa

SEQ ID NO: 136737 - DNA, 67 bp, Homo sapiens
agggctcctgtggctacgtacaatcaactggacccaaaaagagtttaaaaataaaacaattaactca

SEQ ID NO: 136738 - DNA, 69 bp, Homo sapiens
gctacgtacaatcaactggacccaaaaagagtttaaaaataaaacaattaactcatcagcgagttaagc

SEQ ID NO: 136739 - DNA, 70 bp, Homo sapiens
caatcaactggacccaaaaagagtttaaaaataaaacaattaactcatcagcgagttaagcctatgcatt

SEQ ID NO: 136740 - DNA, 67 bp, Homo sapiens
aatattttttcttttgtctcagagtaggaggcgagggggttgaagggttagcagaaaaaggatgtat

SEQ ID NO: 136741 - DNA, 68 bp, Homo sapiens
ttttcttttgtctcagagtaggaggcgagggggttgaagggttagcagaaaaaggatgtatttacagg

SEQ ID NO: 136742 - DNA, 69 bp, Homo sapiens
agagtaggaggcgagggggttgaagggttagcagaaaaaggatgtatttacagggtccacctgacaaga

SEQ ID NO: 136743 - DNA, 70 bp, Homo sapiens
aggcgagggggttgaagggttagcagaaaaaggatgtatttacagggtccacctgacaagacaggctgtg

SEQ ID NO: 136744 - DNA, 75 bp, Homo sapiens
ttgaagggttagcagaaaaaggatgtatttacagggtccacctgacaagacaggctgtggcttgcgctcagtaag

SEQ ID NO: 136745 - DNA, 76 bp, Homo sapiens
ttagcagaaaaaggatgtatttacagggtccacctgacaagacaggctgtggcttgcgctcagtaaggggacacag

SEQ ID NO: 136746 - DNA, 78 bp, Homo sapiens
aaaaggatgtatttacagggtccacctgacaagacaggctgtggcttgcgctcagtaaggggacacagtcacagcagc

SEQ ID NO: 136747 - DNA, 79 bp, Homo sapiens
tttacagggtccacctgacaagacaggctgtggcttgcgctcagtaaggggacacagtcacagcagcttcggcctcaaa

SEQ ID NO: 136748 - DNA, 82 bp, Homo sapiens
ctgacaagacaggctgtggcttgcgctcagtaaggggacacagtcacagcagcttcggcctcaaagccaagggagcgatctg

SEQ ID NO: 136749 - DNA, 80 bp, Homo sapiens
aagacaggctgtggcttgcgctcagtaaggggacacagtcacagcagcttcggcctcaaagccaagggagcgatctggga

SEQ ID NO: 136750 - DNA, 73 bp, Homo sapiens
acacagtcacagcagcttcggcctcaaagccaagggagcgatctgggagacgtttcccctttcaagaaaatgt

SEQ ID NO: 136751 - DNA, 68 bp, Homo sapiens
agcttcggcctcaaagccaagggagcgatctgggagacgtttcccctttcaagaaaatgttgtttcct

SEQ ID NO: 136752 - DNA, 70 bp, Homo sapiens
tcaaagccaagggagcgatctgggagacgtttcccctttcaagaaaatgttgtttccttcctgtgaccca

SEQ ID NO: 136753 - DNA, 68 bp, Homo sapiens
aagggagcgatctgggagacgtttcccctttcaagaaaatgttgtttccttcctgtgacccagccctg

SEQ ID NO: 136754 - DNA, 75 bp, Homo sapiens
aatgttgtttccttcctgtgacccagccctggcctgggaatctgtgcaggaccgcccgtgattgtctctgccctc

SEQ ID NO: 136755 - DNA, 76 bp, Homo sapiens
ccttcctgtgacccagccctggcctgggaatctgtgcaggaccgcccgtgattgtctctgccctccagggcctggc

SEQ ID NO: 136756 - DNA, 77 bp, Homo sapiens
agccctggcctgggaatctgtgcaggaccgcccgtgattgtctctgccctccagggcctggcccgtcaaagcaggca

SEQ ID NO: 136757 - DNA, 78 bp, Homo sapiens
ctgggaatctgtgcaggaccgcccgtgattgtctctgccctccagggcctggcccgtcaaagcaggcaccagctcacc

SEQ ID NO: 136758 - DNA, 78 bp, Homo sapiens
tctgtgcaggaccgcccgtgattgtctctgccctccagggcctggcccgtcaaagcaggcaccagctcaccctccctg

SEQ ID NO: 136759 - DNA, 73 bp, Homo sapiens
accgcccgtgattgtctctgccctccagggcctggcccgtcaaagcaggcaccagctcaccctccctgggccg

SEQ ID NO: 136760 - DNA, 76 bp, Homo sapiens
tctctgccctccagggcctggcccgtcaaagcaggcaccagctcaccctccctgggccgtggccactctggctttg

SEQ ID NO: 136761 - DNA, 77 bp, Homo sapiens
tccagggcctggcccgtcaaagcaggcaccagctcaccctccctgggccgtggccactctggctttggctcagccca

SEQ ID NO: 136762 - DNA, 78 bp, Homo sapiens
caggcaccagctcaccctccctgggccgtggccactctggctttggctcagcccagcctggagttcggctatttcaga

SEQ ID NO: 136763 - DNA, 76 bp, Homo sapiens
ccgtggccactctggctttggctcagcccagcctggagttcggctatttcagagagggaagccagaggagaagagg

SEQ ID NO: 136764 - DNA, 79 bp, Homo sapiens
tctggctttggctcagcccagcctggagttcggctatttcagagagggaagccagaggagaagagggtgcaggctgagg

SEQ ID NO: 136765 - DNA, 75 bp, Homo sapiens
agcccagcctggagttcggctatttcagagagggaagccagaggagaagagggtgcaggctgaggtccccacaaa

SEQ ID NO: 136766 - DNA, 75 bp, Homo sapiens
cctggagttcggctatttcagagagggaagccagaggagaagagggtgcaggctgaggtccccacaaatctgccc

SEQ ID NO: 136767 - DNA, 77 bp, Homo sapiens
tatttcagagagggaagccagaggagaagagggtgcaggctgaggtccccacaaatctgcccccagagccctggcaa

SEQ ID NO: 136768 - DNA, 76 bp, Homo sapiens
agagagggaagccagaggagaagagggtgcaggctgaggtccccacaaatctgcccccagagccctggcaagtgga

SEQ ID NO: 136769 - DNA, 73 bp, Homo sapiens
ggtgcaggctgaggtccccacaaatctgcccccagagccctggcaagtggacccgccaatcccgaggaagaac

SEQ ID NO: 136770 - DNA, 71 bp, Homo sapiens
tgaggtccccacaaatctgcccccagagccctggcaagtggacccgccaatcccgaggaagaaccggagga

SEQ ID NO: 136771 - DNA, 70 bp, Homo sapiens
acaaatctgcccccagagccctggcaagtggacccgccaatcccgaggaagaaccggaggacttgggaca

SEQ ID NO: 136772 - DNA, 72 bp, Homo sapiens
cccagagccctggcaagtggacccgccaatcccgaggaagaaccggaggacttgggacagctcagaccacca

SEQ ID NO: 136773 - DNA, 72 bp, Homo sapiens
ctggcaagtggacccgccaatcccgaggaagaaccggaggacttgggacagctcagaccaccaagtctccaa

SEQ ID NO: 136774 - DNA, 69 bp, Homo sapiens
acccgccaatcccgaggaagaaccggaggacttgggacagctcagaccaccaagtctccaagtccttgt

SEQ ID NO: 136775 - DNA, 70 bp, Homo sapiens
aatcccgaggaagaaccggaggacttgggacagctcagaccaccaagtctccaagtccttgttagaaaca

SEQ ID NO: 136776 - DNA, 70 bp, Homo sapiens
aaccggaggacttgggacagctcagaccaccaagtctccaagtccttgttagaaacaagagcaaaataaa

SEQ ID NO: 136777 - DNA, 70 bp, Homo sapiens
aggacttgggacagctcagaccaccaagtctccaagtccttgttagaaacaagagcaaaataaattattt

SEQ ID NO: 136778 - DNA, 67 bp, Homo sapiens
ccaccaagtctccaagtccttgttagaaacaagagcaaaataaattatttttgcctaatcctttttc

SEQ ID NO: 136779 - DNA, 65 bp, Homo sapiens
agaaacaagagcaaaataaattatttttgcctaatcctttttccttctaaaaatggttgccttcg

SEQ ID NO: 136780 - DNA, 66 bp, Homo sapiens
gcaaaataaattatttttgcctaatcctttttccttctaaaaatggttgccttcgtctgtcccgtc

SEQ ID NO: 136781 - DNA, 66 bp, Homo sapiens
ctaatcctttttccttctaaaaatggttgccttcgtctgtcccgtcccctccttttctctacataa

SEQ ID NO: 136782 - DNA, 68 bp, Homo sapiens
tctaaaaatggttgccttcgtctgtcccgtcccctccttttctctacataaagttgtccttgttgttc

SEQ ID NO: 136783 - DNA, 71 bp, Homo sapiens
tgtcccgtcccctccttttctctacataaagttgtccttgttgttctccaaacaactgtccatgcaggaaa

SEQ ID NO: 136784 - DNA, 74 bp, Homo sapiens
tctctacataaagttgtccttgttgttctccaaacaactgtccatgcaggaaaccccacctgggcagcggtcag

SEQ ID NO: 136785 - DNA, 77 bp, Homo sapiens
ttgttctccaaacaactgtccatgcaggaaaccccacctgggcagcggtcaggtgcggaggcagcctctcagcggtg

SEQ ID NO: 136786 - DNA, 77 bp, Homo sapiens
aactgtccatgcaggaaaccccacctgggcagcggtcaggtgcggaggcagcctctcagcggtggggaacattcaca

SEQ ID NO: 136787 - DNA, 77 bp, Homo sapiens
tccatgcaggaaaccccacctgggcagcggtcaggtgcggaggcagcctctcagcggtggggaacattcacagtaac

SEQ ID NO: 136788 - DNA, 80 bp, Homo sapiens
cccacctgggcagcggtcaggtgcggaggcagcctctcagcggtggggaacattcacagtaactgctggcaggctgctgg

SEQ ID NO: 136789 - DNA, 80 bp, Homo sapiens
agcggtcaggtgcggaggcagcctctcagcggtggggaacattcacagtaactgctggcaggctgctgggcgccctccag

SEQ ID NO: 136790 - DNA, 79 bp, Homo sapiens
aggcagcctctcagcggtggggaacattcacagtaactgctggcaggctgctgggcgccctccaggagagggggtgctg

SEQ ID NO: 136791 - DNA, 78 bp, Homo sapiens
tcagcggtggggaacattcacagtaactgctggcaggctgctgggcgccctccaggagagggggtgctgggccgagcc

SEQ ID NO: 136792 - DNA, 78 bp, Homo sapiens
aacattcacagtaactgctggcaggctgctgggcgccctccaggagagggggtgctgggccgagccgggctggcagga

SEQ ID NO: 136793 - DNA, 73 bp, Homo sapiens
aggctgctgggcgccctccaggagagggggtgctgggccgagccgggctggcaggagtggtgtcggccttcgg

SEQ ID NO: 136794 - DNA, 72 bp, Homo sapiens
cgccctccaggagagggggtgctgggccgagccgggctggcaggagtggtgtcggccttcgggaaatgctgg

SEQ ID NO: 136795 - DNA, 73 bp, Homo sapiens
aggagagggggtgctgggccgagccgggctggcaggagtggtgtcggccttcgggaaatgctgggctgctaag

SEQ ID NO: 136796 - DNA, 74 bp, Homo sapiens
gtgctgggccgagccgggctggcaggagtggtgtcggccttcgggaaatgctgggctgctaagggtttggtcca

SEQ ID NO: 136797 - DNA, 71 bp, Homo sapiens
agccgggctggcaggagtggtgtcggccttcgggaaatgctgggctgctaagggtttggtccacccatccc

SEQ ID NO: 136798 - DNA, 70 bp, Homo sapiens
caggagtggtgtcggccttcgggaaatgctgggctgctaagggtttggtccacccatcccgggagtgccc

SEQ ID NO: 136799 - DNA, 70 bp, Homo sapiens
gggaaatgctgggctgctaagggtttggtccacccatcccgggagtgcccggtcctcgacgtccatctgt

SEQ ID NO: 136800 - DNA, 71 bp, Homo sapiens
atgctgggctgctaagggtttggtccacccatcccgggagtgcccggtcctcgacgtccatctgttcccta

SEQ ID NO: 136801 - DNA, 75 bp, Homo sapiens
tggtccacccatcccgggagtgcccggtcctcgacgtccatctgttccctagcccatggcggtcaccatgctgga

SEQ ID NO: 136802 - DNA, 72 bp, Homo sapiens
atcccgggagtgcccggtcctcgacgtccatctgttccctagcccatggcggtcaccatgctggacgggtgg

SEQ ID NO: 136803 - DNA, 73 bp, Homo sapiens
ggtcctcgacgtccatctgttccctagcccatggcggtcaccatgctggacgggtgggggtggccgaaggaga

SEQ ID NO: 136804 - DNA, 75 bp, Homo sapiens
tcgacgtccatctgttccctagcccatggcggtcaccatgctggacgggtgggggtggccgaaggagaggctgga

SEQ ID NO: 136805 - DNA, 72 bp, Homo sapiens
tctgttccctagcccatggcggtcaccatgctggacgggtgggggtggccgaaggagaggctggaggagggg

SEQ ID NO: 136806 - DNA, 72 bp, Homo sapiens
atggcggtcaccatgctggacgggtgggggtggccgaaggagaggctggaggaggggtggatgggcgtcgga

SEQ ID NO: 136807 - DNA, 73 bp, Homo sapiens
tcaccatgctggacgggtgggggtggccgaaggagaggctggaggaggggtggatgggcgtcggagtgggcag

SEQ ID NO: 136808 - DNA, 72 bp, Homo sapiens
tggacgggtgggggtggccgaaggagaggctggaggaggggtggatgggcgtcggagtgggcaggatgtgtc

SEQ ID NO: 136809 - DNA, 74 bp, Homo sapiens
gtggccgaaggagaggctggaggaggggtggatgggcgtcggagtgggcaggatgtgtccggagtggctgaagg

SEQ ID NO: 136810 - DNA, 73 bp, Homo sapiens
agaggctggaggaggggtggatgggcgtcggagtgggcaggatgtgtccggagtggctgaagggcgggaggtg

SEQ ID NO: 136811 - DNA, 78 bp, Homo sapiens
tggatgggcgtcggagtgggcaggatgtgtccggagtggctgaagggcgggaggtggcccacaggtgccatgtgtcca

SEQ ID NO: 136812 - DNA, 76 bp, Homo sapiens
cgtcggagtgggcaggatgtgtccggagtggctgaagggcgggaggtggcccacaggtgccatgtgtccagccagg

SEQ ID NO: 136813 - DNA, 79 bp, Homo sapiens
aggatgtgtccggagtggctgaagggcgggaggtggcccacaggtgccatgtgtccagccagggcagctgcactgaagg

SEQ ID NO: 136814 - DNA, 80 bp, Homo sapiens
gagtggctgaagggcgggaggtggcccacaggtgccatgtgtccagccagggcagctgcactgaagggggatgacttctc

SEQ ID NO: 136815 - DNA, 83 bp, Homo sapiens
ctgaagggcgggaggtggcccacaggtgccatgtgtccagccagggcagctgcactgaagggggatgacttctcctgcatgca

SEQ ID NO: 136816 - DNA, 86 bp, Homo sapiens
gtggcccacaggtgccatgtgtccagccagggcagctgcactgaagggggatgacttctcctgcatgcactttgacagctcctcga

SEQ ID NO: 136817 - DNA, 86 bp, Homo sapiens
acaggtgccatgtgtccagccagggcagctgcactgaagggggatgacttctcctgcatgcactttgacagctcctcgaagcactc

SEQ ID NO: 136818 - DNA, 81 bp, Homo sapiens
agggcagctgcactgaagggggatgacttctcctgcatgcactttgacagctcctcgaagcactccgcccctttcttgctc

SEQ ID NO: 136819 - DNA, 78 bp, Homo sapiens
actgaagggggatgacttctcctgcatgcactttgacagctcctcgaagcactccgcccctttcttgctcttcttgga

SEQ ID NO: 136820 - DNA, 80 bp, Homo sapiens
atgacttctcctgcatgcactttgacagctcctcgaagcactccgcccctttcttgctcttcttggacttgttggacatc

SEQ ID NO: 136821 - DNA, 73 bp, Homo sapiens
agctcctcgaagcactccgcccctttcttgctcttcttggacttgttggacatcttccggttccgagtctgga

SEQ ID NO: 136822 - DNA, 71 bp, Homo sapiens
aagcactccgcccctttcttgctcttcttggacttgttggacatcttccggttccgagtctggatcccttc

SEQ ID NO: 136823 - DNA, 72 bp, Homo sapiens
agaggtcccctgggaggggcggggtggccggggcggggcgcactcacattgtgcagcttgtagtagaggcca

SEQ ID NO: 136824 - DNA, 77 bp, Homo sapiens
tgggaggggcggggtggccggggcggggcgcactcacattgtgcagcttgtagtagaggccacaggcgttgcagaca

SEQ ID NO: 136825 - DNA, 75 bp, Homo sapiens
gggtggccggggcggggcgcactcacattgtgcagcttgtagtagaggccacaggcgttgcagacagggtccccg

SEQ ID NO: 136826 - DNA, 76 bp, Homo sapiens
ggcggggcgcactcacattgtgcagcttgtagtagaggccacaggcgttgcagacagggtccccgttggcgtttcg

SEQ ID NO: 136827 - DNA, 76 bp, Homo sapiens
actcacattgtgcagcttgtagtagaggccacaggcgttgcagacagggtccccgttggcgtttcggcgccataag

SEQ ID NO: 136828 - DNA, 74 bp, Homo sapiens
attgtgcagcttgtagtagaggccacaggcgttgcagacagggtccccgttggcgtttcggcgccataaggtgg

SEQ ID NO: 136829 - DNA, 72 bp, Homo sapiens
ttgtagtagaggccacaggcgttgcagacagggtccccgttggcgtttcggcgccataaggtggtggttgtc

SEQ ID NO: 136830 - DNA, 73 bp, Homo sapiens
acaggcgttgcagacagggtccccgttggcgtttcggcgccataaggtggtggttgtcgtctgacaatttgca

SEQ ID NO: 136831 - DNA, 73 bp, Homo sapiens
cgttgcagacagggtccccgttggcgtttcggcgccataaggtggtggttgtcgtctgacaatttgcacaaca

SEQ ID NO: 136832 - DNA, 70 bp, Homo sapiens
agggtccccgttggcgtttcggcgccataaggtggtggttgtcgtctgacaatttgcacaacaggtgccg

SEQ ID NO: 136833 - DNA, 75 bp, Homo sapiens
ttggcgtttcggcgccataaggtggtggttgtcgtctgacaatttgcacaacaggtgccggctcttctggcggcc

SEQ ID NO: 136834 - DNA, 75 bp, Homo sapiens
ccataaggtggtggttgtcgtctgacaatttgcacaacaggtgccggctcttctggcggccgactgggagggcaa

SEQ ID NO: 136835 - DNA, 78 bp, Homo sapiens
gtggtggttgtcgtctgacaatttgcacaacaggtgccggctcttctggcggccgactgggagggcaaggcagcgtca

SEQ ID NO: 136836 - DNA, 81 bp, Homo sapiens
tcgtctgacaatttgcacaacaggtgccggctcttctggcggccgactgggagggcaaggcagcgtcagcaggctggactc

SEQ ID NO: 136837 - DNA, 77 bp, Homo sapiens
agctcctgcccagcagccccctcccagccacctgtgcccgctcctaccagtcttcgcttgggcttgatgagtggtcg

SEQ ID NO: 136838 - DNA, 76 bp, Homo sapiens
agcagccccctcccagccacctgtgcccgctcctaccagtcttcgcttgggcttgatgagtggtcggttctgccca

SEQ ID NO: 136839 - DNA, 78 bp, Homo sapiens
tcccagccacctgtgcccgctcctaccagtcttcgcttgggcttgatgagtggtcggttctgcccattcatcttgtgg

SEQ ID NO: 136840 - DNA, 77 bp, Homo sapiens
acctgtgcccgctcctaccagtcttcgcttgggcttgatgagtggtcggttctgcccattcatcttgtggtagaggc

SEQ ID NO: 136841 - DNA, 81 bp, Homo sapiens
tcctaccagtcttcgcttgggcttgatgagtggtcggttctgcccattcatcttgtggtagaggccacaggcattgcacag

SEQ ID NO: 136842 - DNA, 80 bp, Homo sapiens
agtcttcgcttgggcttgatgagtggtcggttctgcccattcatcttgtggtagaggccacaggcattgcacaggtagtg

SEQ ID NO: 136843 - DNA, 80 bp, Homo sapiens
cttgggcttgatgagtggtcggttctgcccattcatcttgtggtagaggccacaggcattgcacaggtagtggccggtgc

SEQ ID NO: 136844 - DNA, 78 bp, Homo sapiens
atgagtggtcggttctgcccattcatcttgtggtagaggccacaggcattgcacaggtagtggccggtgccgtcccgc

SEQ ID NO: 136845 - DNA, 78 bp, Homo sapiens
ttctgcccattcatcttgtggtagaggccacaggcattgcacaggtagtggccggtgccgtcccgccgccagagaggg

SEQ ID NO: 136846 - DNA, 77 bp, Homo sapiens
attcatcttgtggtagaggccacaggcattgcacaggtagtggccggtgccgtcccgccgccagagaggggtggctg

SEQ ID NO: 136847 - DNA, 76 bp, Homo sapiens
tagaggccacaggcattgcacaggtagtggccggtgccgtcccgccgccagagaggggtggctgtggccccacagt

SEQ ID NO: 136848 - DNA, 76 bp, Homo sapiens
aggcattgcacaggtagtggccggtgccgtcccgccgccagagaggggtggctgtggccccacagttgacacactc

SEQ ID NO: 136849 - DNA, 72 bp, Homo sapiens
acaggtagtggccggtgccgtcccgccgccagagaggggtggctgtggccccacagttgacacactcccggc

SEQ ID NO: 136850 - DNA, 74 bp, Homo sapiens
tggccggtgccgtcccgccgccagagaggggtggctgtggccccacagttgacacactcccggccttctgcagg

SEQ ID NO: 136851 - DNA, 74 bp, Homo sapiens
tcccgccgccagagaggggtggctgtggccccacagttgacacactcccggccttctgcaggggaacagggaga

SEQ ID NO: 136852 - DNA, 72 bp, Homo sapiens
agagaggggtggctgtggccccacagttgacacactcccggccttctgcaggggaacagggagagacacggg

SEQ ID NO: 136853 - DNA, 69 bp, Homo sapiens
aaaaacgcaaatgctcccctcttccacgaagtccccagcacctgcctttacctgaacaggaacgagcct

SEQ ID NO: 136854 - DNA, 75 bp, Homo sapiens
atgctcccctcttccacgaagtccccagcacctgcctttacctgaacaggaacgagccttgctgcgctgcttagg

SEQ ID NO: 136855 - DNA, 76 bp, Homo sapiens
ttccacgaagtccccagcacctgcctttacctgaacaggaacgagccttgctgcgctgcttaggggtgaagctgga

SEQ ID NO: 136856 - DNA, 74 bp, Homo sapiens
cccagcacctgcctttacctgaacaggaacgagccttgctgcgctgcttaggggtgaagctggaggccggtccc

SEQ ID NO: 136857 - DNA, 71 bp, Homo sapiens
cctttacctgaacaggaacgagccttgctgcgctgcttaggggtgaagctggaggccggtccccccaggaa

SEQ ID NO: 136858 - DNA, 72 bp, Homo sapiens
cctgaacaggaacgagccttgctgcgctgcttaggggtgaagctggaggccggtccccccaggaagcctccg

SEQ ID NO: 136859 - DNA, 70 bp, Homo sapiens
aacgagccttgctgcgctgcttaggggtgaagctggaggccggtccccccaggaagcctccggggtggaa

SEQ ID NO: 136860 - DNA, 73 bp, Homo sapiens
tgcgctgcttaggggtgaagctggaggccggtccccccaggaagcctccggggtggaagagtccgctgctgta

SEQ ID NO: 136861 - DNA, 72 bp, Homo sapiens
ggtgaagctggaggccggtccccccaggaagcctccggggtggaagagtccgctgctgtagtcgtgggcagc

SEQ ID NO: 136862 - DNA, 71 bp, Homo sapiens
agctggaggccggtccccccaggaagcctccggggtggaagagtccgctgctgtagtcgtgggcagccgcc

SEQ ID NO: 136863 - DNA, 72 bp, Homo sapiens
tccccccaggaagcctccggggtggaagagtccgctgctgtagtcgtgggcagccgccggcacataggaggg

SEQ ID NO: 136864 - DNA, 72 bp, Homo sapiens
aggaagcctccggggtggaagagtccgctgctgtagtcgtgggcagccgccggcacataggaggggtaggtg

SEQ ID NO: 136865 - DNA, 75 bp, Homo sapiens
tggaagagtccgctgctgtagtcgtgggcagccgccggcacataggaggggtaggtggggatggggtggtgtgta

SEQ ID NO: 136866 - DNA, 75 bp, Homo sapiens
agtccgctgctgtagtcgtgggcagccgccggcacataggaggggtaggtggggatggggtggtgtgtagcaggc

SEQ ID NO: 136867 - DNA, 75 bp, Homo sapiens
tagtcgtgggcagccgccggcacataggaggggtaggtggggatggggtggtgtgtagcaggctgggtgcccata

SEQ ID NO: 136868 - DNA, 74 bp, Homo sapiens
agccgccggcacataggaggggtaggtggggatggggtggtgtgtagcaggctgggtgcccatagtagctaggc

SEQ ID NO: 136869 - DNA, 74 bp, Homo sapiens
acataggaggggtaggtggggatggggtggtgtgtagcaggctgggtgcccatagtagctaggcctgggcgcag

SEQ ID NO: 136870 - DNA, 75 bp, Homo sapiens
gtaggtggggatggggtggtgtgtagcaggctgggtgcccatagtagctaggcctgggcgcaggggactgccact

SEQ ID NO: 136871 - DNA, 79 bp, Homo sapiens
atggggtggtgtgtagcaggctgggtgcccatagtagctaggcctgggcgcaggggactgccactttccatcttcatgc

SEQ ID NO: 136872 - DNA, 83 bp, Homo sapiens
tgtgtagcaggctgggtgcccatagtagctaggcctgggcgcaggggactgccactttccatcttcatgctctccgtcagtga

SEQ ID NO: 136873 - DNA, 79 bp, Homo sapiens
aggctgggtgcccatagtagctaggcctgggcgcaggggactgccactttccatcttcatgctctccgtcagtgacacc

SEQ ID NO: 136874 - DNA, 79 bp, Homo sapiens
atagtagctaggcctgggcgcaggggactgccactttccatcttcatgctctccgtcagtgacacctggtacttgacgc

SEQ ID NO: 136875 - DNA, 77 bp, Homo sapiens
taggcctgggcgcaggggactgccactttccatcttcatgctctccgtcagtgacacctggtacttgacgccgtcct

SEQ ID NO: 136876 - DNA, 77 bp, Homo sapiens
caggggactgccactttccatcttcatgctctccgtcagtgacacctggtacttgacgccgtccttgtcctctcctc

SEQ ID NO: 136877 - DNA, 78 bp, Homo sapiens
ccactttccatcttcatgctctccgtcagtgacacctggtacttgacgccgtccttgtcctctcctcgggctgcacta

SEQ ID NO: 136878 - DNA, 77 bp, Homo sapiens
ttccatcttcatgctctccgtcagtgacacctggtacttgacgccgtccttgtcctctcctcgggctgcactacccc

SEQ ID NO: 136879 - DNA, 73 bp, Homo sapiens
tctccgtcagtgacacctggtacttgacgccgtccttgtcctctcctcgggctgcactaccccccgcggaaga

SEQ ID NO: 136880 - DNA, 73 bp, Homo sapiens
agtgacacctggtacttgacgccgtccttgtcctctcctcgggctgcactaccccccgcggaagatgaggctg

SEQ ID NO: 136881 - DNA, 74 bp, Homo sapiens
gtccttgtcctctcctcgggctgcactaccccccgcggaagatgaggctggagacgcagcccccgtggtgctag

SEQ ID NO: 136882 - DNA, 74 bp, Homo sapiens
ctgcactaccccccgcggaagatgaggctggagacgcagcccccgtggtgctagggtcaggagacacttctttg

SEQ ID NO: 136883 - DNA, 73 bp, Homo sapiens
ccccgcggaagatgaggctggagacgcagcccccgtggtgctagggtcaggagacacttctttgggtggcgtg

SEQ ID NO: 136884 - DNA, 74 bp, Homo sapiens
gatgaggctggagacgcagcccccgtggtgctagggtcaggagacacttctttgggtggcgtgggtgggaagcc

SEQ ID NO: 136885 - DNA, 71 bp, Homo sapiens
tggagacgcagcccccgtggtgctagggtcaggagacacttctttgggtggcgtgggtgggaagccgaaaa

SEQ ID NO: 136886 - DNA, 68 bp, Homo sapiens
ccccgtggtgctagggtcaggagacacttctttgggtggcgtgggtgggaagccgaaaaggtgggagc

SEQ ID NO: 136887 - DNA, 70 bp, Homo sapiens
aggagacacttctttgggtggcgtgggtgggaagccgaaaaggtgggagccagagtgggctgctgtaggg

SEQ ID NO: 136888 - DNA, 69 bp, Homo sapiens
acttctttgggtggcgtgggtgggaagccgaaaaggtgggagccagagtgggctgctgtaggggtgagg

SEQ ID NO: 136889 - DNA, 75 bp, Homo sapiens
tgggaagccgaaaaggtgggagccagagtgggctgctgtaggggtgagggaggccactgagctcccgctgcctcc

SEQ ID NO: 136890 - DNA, 73 bp, Homo sapiens
aaaaggtgggagccagagtgggctgctgtaggggtgagggaggccactgagctcccgctgcctcccccgctcc

SEQ ID NO: 136891 - DNA, 74 bp, Homo sapiens
agccagagtgggctgctgtaggggtgagggaggccactgagctcccgctgcctcccccgctcccacccccagcc

SEQ ID NO: 136892 - DNA, 73 bp, Homo sapiens
tgctgtaggggtgagggaggccactgagctcccgctgcctcccccgctcccacccccagcccctgggtacaca

SEQ ID NO: 136893 - DNA, 72 bp, Homo sapiens
ggtgagggaggccactgagctcccgctgcctcccccgctcccacccccagcccctgggtacacagagagtgg

SEQ ID NO: 136894 - DNA, 74 bp, Homo sapiens
ccgctgcctcccccgctcccacccccagcccctgggtacacagagagtgggcctccagggcctccagcagctga

SEQ ID NO: 136895 - DNA, 74 bp, Homo sapiens
cccgctcccacccccagcccctgggtacacagagagtgggcctccagggcctccagcagctgaggggtgcagtg

SEQ ID NO: 136896 - DNA, 76 bp, Homo sapiens
cccccagcccctgggtacacagagagtgggcctccagggcctccagcagctgaggggtgcagtggcgtcttggaga

SEQ ID NO: 136897 - DNA, 75 bp, Homo sapiens
agcccctgggtacacagagagtgggcctccagggcctccagcagctgaggggtgcagtggcgtcttggagaaggg

SEQ ID NO: 136898 - DNA, 78 bp, Homo sapiens
tacacagagagtgggcctccagggcctccagcagctgaggggtgcagtggcgtcttggagaaggggctcacggtccag

SEQ ID NO: 136899 - DNA, 74 bp, Homo sapiens
cctccagggcctccagcagctgaggggtgcagtggcgtcttggagaaggggctcacggtccaggggttgtggtg

SEQ ID NO: 136900 - DNA, 73 bp, Homo sapiens
agggcctccagcagctgaggggtgcagtggcgtcttggagaaggggctcacggtccaggggttgtggtggtgg

SEQ ID NO: 136901 - DNA, 75 bp, Homo sapiens
tgaggggtgcagtggcgtcttggagaaggggctcacggtccaggggttgtggtggtgggccgcagcggcagagag

SEQ ID NO: 136902 - DNA, 73 bp, Homo sapiens
agtggcgtcttggagaaggggctcacggtccaggggttgtggtggtgggccgcagcggcagagagggctgctt

SEQ ID NO: 136903 - DNA, 73 bp, Homo sapiens
cgtcttggagaaggggctcacggtccaggggttgtggtggtgggccgcagcggcagagagggctgctttgccc

SEQ ID NO: 136904 - DNA, 75 bp, Homo sapiens
gctcacggtccaggggttgtggtggtgggccgcagcggcagagagggctgctttgcccccgtccagccagggcaa

SEQ ID NO: 136905 - DNA, 72 bp, Homo sapiens
cggtccaggggttgtggtggtgggccgcagcggcagagagggctgctttgcccccgtccagccagggcaaac

SEQ ID NO: 136906 - DNA, 76 bp, Homo sapiens
tgtggtggtgggccgcagcggcagagagggctgctttgcccccgtccagccagggcaaacccgggctgtgcaacaa

SEQ ID NO: 136907 - DNA, 77 bp, Homo sapiens
cgcagcggcagagagggctgctttgcccccgtccagccagggcaaacccgggctgtgcaacaagtgtgggcggcaca

SEQ ID NO: 136908 - DNA, 75 bp, Homo sapiens
agagagggctgctttgcccccgtccagccagggcaaacccgggctgtgcaacaagtgtgggcggcacatctggcc

SEQ ID NO: 136909 - DNA, 75 bp, Homo sapiens
ctgctttgcccccgtccagccagggcaaacccgggctgtgcaacaagtgtgggcggcacatctggcctccggtca

SEQ ID NO: 136910 - DNA, 75 bp, Homo sapiens
cgtccagccagggcaaacccgggctgtgcaacaagtgtgggcggcacatctggcctccggtcaggcgggctgcgg

SEQ ID NO: 136911 - DNA, 75 bp, Homo sapiens
agggcaaacccgggctgtgcaacaagtgtgggcggcacatctggcctccggtcaggcgggctgcgggcaaagaga

SEQ ID NO: 136912 - DNA, 78 bp, Homo sapiens
acccgggctgtgcaacaagtgtgggcggcacatctggcctccggtcaggcgggctgcgggcaaagagagagaggatca

SEQ ID NO: 136913 - DNA, 79 bp, Homo sapiens
tcgcctggcgcgcggcgcctgggttctcatcaccacgggcccagtgctcaccgtgcgcggggctgtaggagacgcgcgc

SEQ ID NO: 136914 - DNA, 77 bp, Homo sapiens
cgcctgggttctcatcaccacgggcccagtgctcaccgtgcgcggggctgtaggagacgcgcgcccgcgcgtgagcg

SEQ ID NO: 136915 - DNA, 79 bp, Homo sapiens
tctcatcaccacgggcccagtgctcaccgtgcgcggggctgtaggagacgcgcgcccgcgcgtgagcggggttggcata

SEQ ID NO: 136916 - DNA, 74 bp, Homo sapiens
acgggcccagtgctcaccgtgcgcggggctgtaggagacgcgcgcccgcgcgtgagcggggttggcatagtagg

SEQ ID NO: 136917 - DNA, 74 bp, Homo sapiens
agtgctcaccgtgcgcggggctgtaggagacgcgcgcccgcgcgtgagcggggttggcatagtaggggttgccc

SEQ ID NO: 136918 - DNA, 75 bp, Homo sapiens
gtgcgcggggctgtaggagacgcgcgcccgcgcgtgagcggggttggcatagtaggggttgccctgcgagtcgag

SEQ ID NO: 136919 - DNA, 76 bp, Homo sapiens
tgtaggagacgcgcgcccgcgcgtgagcggggttggcatagtaggggttgccctgcgagtcgaggtgattgaagaa

SEQ ID NO: 136920 - DNA, 74 bp, Homo sapiens
cgcgcccgcgcgtgagcggggttggcatagtaggggttgccctgcgagtcgaggtgattgaagaagacgtccac

SEQ ID NO: 136921 - DNA, 74 bp, Homo sapiens
gtgagcggggttggcatagtaggggttgccctgcgagtcgaggtgattgaagaagacgtccacctcgtctggag

SEQ ID NO: 136922 - DNA, 78 bp, Homo sapiens
gggttggcatagtaggggttgccctgcgagtcgaggtgattgaagaagacgtccacctcgtctggaggcagcagctgc

SEQ ID NO: 136923 - DNA, 76 bp, Homo sapiens
atagtaggggttgccctgcgagtcgaggtgattgaagaagacgtccacctcgtctggaggcagcagctgcgcgggt

SEQ ID NO: 136924 - DNA, 81 bp, Homo sapiens
ttgccctgcgagtcgaggtgattgaagaagacgtccacctcgtctggaggcagcagctgcgcgggttccatgtagttgtgc

SEQ ID NO: 136925 - DNA, 79 bp, Homo sapiens
agtcgaggtgattgaagaagacgtccacctcgtctggaggcagcagctgcgcgggttccatgtagttgtgcgccaggcc

SEQ ID NO: 136926 - DNA, 76 bp, Homo sapiens
attgaagaagacgtccacctcgtctggaggcagcagctgcgcgggttccatgtagttgtgcgccaggcccgggtgg

SEQ ID NO: 136927 - DNA, 76 bp, Homo sapiens
acgtccacctcgtctggaggcagcagctgcgcgggttccatgtagttgtgcgccaggcccgggtggtgtgagtcgg

SEQ ID NO: 136928 - DNA, 83 bp, Homo sapiens
tctggaggcagcagctgcgcgggttccatgtagttgtgcgccaggcccgggtggtgtgagtcggggtgctgcgcattcagcac

SEQ ID NO: 136929 - DNA, 79 bp, Homo sapiens
agcagctgcgcgggttccatgtagttgtgcgccaggcccgggtggtgtgagtcggggtgctgcgcattcagcacggccg

SEQ ID NO: 136930 - DNA, 79 bp, Homo sapiens
gttccatgtagttgtgcgccaggcccgggtggtgtgagtcggggtgctgcgcattcagcacggccgggtgcgccatcca

SEQ ID NO: 136931 - DNA, 80 bp, Homo sapiens
tgtagttgtgcgccaggcccgggtggtgtgagtcggggtgctgcgcattcagcacggccgggtgcgccatccagcgcggc

SEQ ID NO: 136932 - DNA, 79 bp, Homo sapiens
aggcccgggtggtgtgagtcggggtgctgcgcattcagcacggccgggtgcgccatccagcgcggctgctcgggcgcca

SEQ ID NO: 136933 - DNA, 81 bp, Homo sapiens
gggtggtgtgagtcggggtgctgcgcattcagcacggccgggtgcgccatccagcgcggctgctcgggcgccacctccatg

SEQ ID NO: 136934 - DNA, 81 bp, Homo sapiens
gggtgctgcgcattcagcacggccgggtgcgccatccagcgcggctgctcgggcgccacctccatggccggcggcggcggc

SEQ ID NO: 136935 - DNA, 79 bp, Homo sapiens
cattcagcacggccgggtgcgccatccagcgcggctgctcgggcgccacctccatggccggcggcggcggctcagggtc

SEQ ID NO: 136936 - DNA, 77 bp, Homo sapiens
agcacggccgggtgcgccatccagcgcggctgctcgggcgccacctccatggccggcggcggcggctcagggtctgg

SEQ ID NO: 136937 - DNA, 80 bp, Homo sapiens
ggtgcgccatccagcgcggctgctcgggcgccacctccatggccggcggcggcggctcagggtctgggtgcagacggcaa

SEQ ID NO: 136938 - DNA, 77 bp, Homo sapiens
agcgcggctgctcgggcgccacctccatggccggcggcggcggctcagggtctgggtgcagacggcaacggccctgc

SEQ ID NO: 136939 - DNA, 72 bp, Homo sapiens
acctccatggccggcggcggcggctcagggtctgggtgcagacggcaacggccctgcgcgaggaagggggag

SEQ ID NO: 136940 - DNA, 75 bp, Homo sapiens
ggcggcggcggctcagggtctgggtgcagacggcaacggccctgcgcgaggaagggggagtgaggcgtgccgcca

SEQ ID NO: 136941 - DNA, 69 bp, Homo sapiens
aaagctaggagcgccccaggcccccagccggctctcaaaccccaaacttacacacgcagccgtggggag

SEQ ID NO: 136942 - DNA, 68 bp, Homo sapiens
ccaggcccccagccggctctcaaaccccaaacttacacacgcagccgtggggaggggagggactcggc

SEQ ID NO: 136943 - DNA, 71 bp, Homo sapiens
agccggctctcaaaccccaaacttacacacgcagccgtggggaggggagggactcggcctctgagagtgaa

SEQ ID NO: 136944 - DNA, 71 bp, Homo sapiens
tctcaaaccccaaacttacacacgcagccgtggggaggggagggactcggcctctgagagtgaaggagttc

SEQ ID NO: 136945 - DNA, 70 bp, Homo sapiens
aaacttacacacgcagccgtggggaggggagggactcggcctctgagagtgaaggagttccggcgggagc

SEQ ID NO: 136946 - DNA, 69 bp, Homo sapiens
acacgcagccgtggggaggggagggactcggcctctgagagtgaaggagttccggcgggagccccgagg

SEQ ID NO: 136947 - DNA, 68 bp, Homo sapiens
ggaggggagggactcggcctctgagagtgaaggagttccggcgggagccccgagggcgacgggcccag

SEQ ID NO: 136948 - DNA, 70 bp, Homo sapiens
agggactcggcctctgagagtgaaggagttccggcgggagccccgagggcgacgggcccagggacagcac

SEQ ID NO: 136949 - DNA, 71 bp, Homo sapiens
ctctgagagtgaaggagttccggcgggagccccgagggcgacgggcccagggacagcacgtccggaggctg

SEQ ID NO: 136950 - DNA, 68 bp, Homo sapiens
agtgaaggagttccggcgggagccccgagggcgacgggcccagggacagcacgtccggaggctggcgg

SEQ ID NO: 136951 - DNA, 69 bp, Homo sapiens
gcgggagccccgagggcgacgggcccagggacagcacgtccggaggctggcggggcttacagggtagga

SEQ ID NO: 136952 - DNA, 69 bp, Homo sapiens
agccccgagggcgacgggcccagggacagcacgtccggaggctggcggggcttacagggtaggagctgg

SEQ ID NO: 136953 - DNA, 70 bp, Homo sapiens
acgggcccagggacagcacgtccggaggctggcggggcttacagggtaggagctgggggtagagtgcgcc

SEQ ID NO: 136954 - DNA, 71 bp, Homo sapiens
agggacagcacgtccggaggctggcggggcttacagggtaggagctgggggtagagtgcgcctcggcctcg

SEQ ID NO: 136955 - DNA, 69 bp, Homo sapiens
acgtccggaggctggcggggcttacagggtaggagctgggggtagagtgcgcctcggcctcgggccctc

SEQ ID NO: 136956 - DNA, 69 bp, Homo sapiens
ctggcggggcttacagggtaggagctgggggtagagtgcgcctcggcctcgggccctcccggctccggc

SEQ ID NO: 136957 - DNA, 70 bp, Homo sapiens
ttacagggtaggagctgggggtagagtgcgcctcggcctcgggccctcccggctccggcccctcggcatc

SEQ ID NO: 136958 - DNA, 68 bp, Homo sapiens
ctgggggtagagtgcgcctcggcctcgggccctcccggctccggcccctcggcatcctccggccgccc

SEQ ID NO: 136959 - DNA, 71 bp, Homo sapiens
ggtagagtgcgcctcggcctcgggccctcccggctccggcccctcggcatcctccggccgccctggcgcca

SEQ ID NO: 136960 - DNA, 74 bp, Homo sapiens
ggcctcgggccctcccggctccggcccctcggcatcctccggccgccctggcgccagctgccgactcctgcaca

SEQ ID NO: 136961 - DNA, 76 bp, Homo sapiens
cctcccggctccggcccctcggcatcctccggccgccctggcgccagctgccgactcctgcacagacatgaagcgg

SEQ ID NO: 136962 - DNA, 78 bp, Homo sapiens
tccggcccctcggcatcctccggccgccctggcgccagctgccgactcctgcacagacatgaagcgggggccgcgcac

SEQ ID NO: 136963 - DNA, 79 bp, Homo sapiens
ctcggcatcctccggccgccctggcgccagctgccgactcctgcacagacatgaagcgggggccgcgcacgcctaagaa

SEQ ID NO: 136964 - DNA, 71 bp, Homo sapiens
cgccacgctccttcaccgctgaacgtggtcagtccgagcgcagttacctacccagaccgttccctccccta

SEQ ID NO: 136965 - DNA, 72 bp, Homo sapiens
ttcaccgctgaacgtggtcagtccgagcgcagttacctacccagaccgttccctcccctagctcgggcgctg

SEQ ID NO: 136966 - DNA, 70 bp, Homo sapiens
aacgtggtcagtccgagcgcagttacctacccagaccgttccctcccctagctcgggcgctgtctgggtg

SEQ ID NO: 136967 - DNA, 69 bp, Homo sapiens
agtccgagcgcagttacctacccagaccgttccctcccctagctcgggcgctgtctgggtggactgggg

SEQ ID NO: 136968 - DNA, 67 bp, Homo sapiens
agttacctacccagaccgttccctcccctagctcgggcgctgtctgggtggactgggggttgggatg

SEQ ID NO: 136969 - DNA, 69 bp, Homo sapiens
agaccgttccctcccctagctcgggcgctgtctgggtggactgggggttgggatggttcggacgacagc

SEQ ID NO: 136970 - DNA, 73 bp, Homo sapiens
tcccctagctcgggcgctgtctgggtggactgggggttgggatggttcggacgacagcggcggaacagcagga

SEQ ID NO: 136971 - DNA, 74 bp, Homo sapiens
agctcgggcgctgtctgggtggactgggggttgggatggttcggacgacagcggcggaacagcaggagccgaga

SEQ ID NO: 136972 - DNA, 74 bp, Homo sapiens
ctgtctgggtggactgggggttgggatggttcggacgacagcggcggaacagcaggagccgagaggggcagaga

SEQ ID NO: 136973 - DNA, 73 bp, Homo sapiens
tgggggttgggatggttcggacgacagcggcggaacagcaggagccgagaggggcagagaggggcaggaacta

SEQ ID NO: 136974 - DNA, 75 bp, Homo sapiens
atggttcggacgacagcggcggaacagcaggagccgagaggggcagagaggggcaggaactacagggctctagag

SEQ ID NO: 136975 - DNA, 75 bp, Homo sapiens
acgacagcggcggaacagcaggagccgagaggggcagagaggggcaggaactacagggctctagagggcacctgg

SEQ ID NO: 136976 - DNA, 75 bp, Homo sapiens
cggaacagcaggagccgagaggggcagagaggggcaggaactacagggctctagagggcacctgggcctcggaca

SEQ ID NO: 136977 - DNA, 75 bp, Homo sapiens
agcaggagccgagaggggcagagaggggcaggaactacagggctctagagggcacctgggcctcggacacgcggc

SEQ ID NO: 136978 - DNA, 76 bp, Homo sapiens
gggcagagaggggcaggaactacagggctctagagggcacctgggcctcggacacgcggccgctcagggctgtgct

SEQ ID NO: 136979 - DNA, 76 bp, Homo sapiens
gggcaggaactacagggctctagagggcacctgggcctcggacacgcggccgctcagggctgtgcttgacccagtg

SEQ ID NO: 136980 - DNA, 75 bp, Homo sapiens
aactacagggctctagagggcacctgggcctcggacacgcggccgctcagggctgtgcttgacccagtggaggtg

SEQ ID NO: 136981 - DNA, 74 bp, Homo sapiens
tagagggcacctgggcctcggacacgcggccgctcagggctgtgcttgacccagtggaggtggcccggccggtg

SEQ ID NO: 136982 - DNA, 74 bp, Homo sapiens
ctgggcctcggacacgcggccgctcagggctgtgcttgacccagtggaggtggcccggccggtggctccagaaa

SEQ ID NO: 136983 - DNA, 72 bp, Homo sapiens
cctcggacacgcggccgctcagggctgtgcttgacccagtggaggtggcccggccggtggctccagaaaggg

SEQ ID NO: 136984 - DNA, 67 bp, Homo sapiens
ggcgggaagggccgggcccagggaaggtggaagtggaagaaactcaccgagcgaggcgcggtgggcg

SEQ ID NO: 136985 - DNA, 67 bp, Homo sapiens
aagggccgggcccagggaaggtggaagtggaagaaactcaccgagcgaggcgcggtgggcggcgccc

SEQ ID NO: 136986 - DNA, 66 bp, Homo sapiens
agggaaggtggaagtggaagaaactcaccgagcgaggcgcggtgggcggcgcccccgggcggacgg

SEQ ID NO: 136987 - DNA, 68 bp, Homo sapiens
aagtggaagaaactcaccgagcgaggcgcggtgggcggcgcccccgggcggacggggcctggagtaga

SEQ ID NO: 136988 - DNA, 69 bp, Homo sapiens
aagaaactcaccgagcgaggcgcggtgggcggcgcccccgggcggacggggcctggagtagagctggga

SEQ ID NO: 136989 - DNA, 72 bp, Homo sapiens
cgagcgaggcgcggtgggcggcgcccccgggcggacggggcctggagtagagctgggagcagggcgaggtgc

SEQ ID NO: 136990 - DNA, 73 bp, Homo sapiens
tgggcggcgcccccgggcggacggggcctggagtagagctgggagcagggcgaggtgcgcggcaggcgggctc

SEQ ID NO: 136991 - DNA, 71 bp, Homo sapiens
ccccgggcggacggggcctggagtagagctgggagcagggcgaggtgcgcggcaggcgggctcgcgggacc

SEQ ID NO: 136992 - DNA, 73 bp, Homo sapiens
cggacggggcctggagtagagctgggagcagggcgaggtgcgcggcaggcgggctcgcgggacctgggcgcgg

SEQ ID NO: 136993 - DNA, 77 bp, Homo sapiens
gagtagagctgggagcagggcgaggtgcgcggcaggcgggctcgcgggacctgggcgcggggtggcggcgctcacca

SEQ ID NO: 136994 - DNA, 78 bp, Homo sapiens
agctgggagcagggcgaggtgcgcggcaggcgggctcgcgggacctgggcgcggggtggcggcgctcaccagcagagc

SEQ ID NO: 136995 - DNA, 75 bp, Homo sapiens
agggcgaggtgcgcggcaggcgggctcgcgggacctgggcgcggggtggcggcgctcaccagcagagcctgggcg

SEQ ID NO: 136996 - DNA, 78 bp, Homo sapiens
tgcgcggcaggcgggctcgcgggacctgggcgcggggtggcggcgctcaccagcagagcctgggcggcacgccgagcg

SEQ ID NO: 136997 - DNA, 78 bp, Homo sapiens
ctcgcgggacctgggcgcggggtggcggcgctcaccagcagagcctgggcggcacgccgagcggccgcatggtgttca

SEQ ID NO: 136998 - DNA, 77 bp, Homo sapiens
acctgggcgcggggtggcggcgctcaccagcagagcctgggcggcacgccgagcggccgcatggtgttcagcggacc

SEQ ID NO: 136999 - DNA, 78 bp, Homo sapiens
ggtggcggcgctcaccagcagagcctgggcggcacgccgagcggccgcatggtgttcagcggaccgcttttgtccgcc

SEQ ID NO: 137000 - DNA, 78 bp, Homo sapiens
ctcaccagcagagcctgggcggcacgccgagcggccgcatggtgttcagcggaccgcttttgtccgcctggtgggcga

SEQ ID NO: 137001 - DNA, 73 bp, Homo sapiens
agagcctgggcggcacgccgagcggccgcatggtgttcagcggaccgcttttgtccgcctggtgggcgacggg

SEQ ID NO: 137002 - DNA, 73 bp, Homo sapiens
cggcacgccgagcggccgcatggtgttcagcggaccgcttttgtccgcctggtgggcgacggggccctgctag

SEQ ID NO: 137003 - DNA, 75 bp, Homo sapiens
cgagcggccgcatggtgttcagcggaccgcttttgtccgcctggtgggcgacggggccctgctaggatggatgtg

SEQ ID NO: 137004 - DNA, 76 bp, Homo sapiens
tggtgttcagcggaccgcttttgtccgcctggtgggcgacggggccctgctaggatggatgtggcggcaggcaata

SEQ ID NO: 137005 - DNA, 76 bp, Homo sapiens
ggaccgcttttgtccgcctggtgggcgacggggccctgctaggatggatgtggcggcaggcaatagacagacttga

SEQ ID NO: 137006 - DNA, 79 bp, Homo sapiens
ttttgtccgcctggtgggcgacggggccctgctaggatggatgtggcggcaggcaatagacagacttgagcagcgagtc

SEQ ID NO: 137007 - DNA, 78 bp, Homo sapiens
ctggtgggcgacggggccctgctaggatggatgtggcggcaggcaatagacagacttgagcagcgagtcccggggcga

SEQ ID NO: 137008 - DNA, 79 bp, Homo sapiens
ctaggatggatgtggcggcaggcaatagacagacttgagcagcgagtcccggggcgacgctggcctcgctaccttcctg

SEQ ID NO: 137009 - DNA, 80 bp, Homo sapiens
atgtggcggcaggcaatagacagacttgagcagcgagtcccggggcgacgctggcctcgctaccttcctggcgctcacgc

SEQ ID NO: 137010 - DNA, 80 bp, Homo sapiens
aggcaatagacagacttgagcagcgagtcccggggcgacgctggcctcgctaccttcctggcgctcacgctgcctctctc

SEQ ID NO: 137011 - DNA, 78 bp, Homo sapiens
acagacttgagcagcgagtcccggggcgacgctggcctcgctaccttcctggcgctcacgctgcctctctctccccca

SEQ ID NO: 137012 - DNA, 74 bp, Homo sapiens
cgagtcccggggcgacgctggcctcgctaccttcctggcgctcacgctgcctctctctcccccaccggccgcaa

SEQ ID NO: 137013 - DNA, 71 bp, Homo sapiens
ttcccaaaattaagaattaaattatgagagatcttcaacagaccaaaaacaaatgttcacagtccctgctt

SEQ ID NO: 137014 - DNA, 74 bp, Homo sapiens
gaattaaattatgagagatcttcaacagaccaaaaacaaatgttcacagtccctgctttatttccatttgttca

SEQ ID NO: 137015 - DNA, 76 bp, Homo sapiens
tatgagagatcttcaacagaccaaaaacaaatgttcacagtccctgctttatttccatttgttcacacacgcttta

SEQ ID NO: 137016 - DNA, 70 bp, Homo sapiens
cttcaacagaccaaaaacaaatgttcacagtccctgctttatttccatttgttcacacacgctttaaaaa

SEQ ID NO: 137017 - DNA, 67 bp, Homo sapiens
gaccaaaaacaaatgttcacagtccctgctttatttccatttgttcacacacgctttaaaaaaaaaa

SEQ ID NO: 137018 - DNA, 70 bp, Homo sapiens
aaaaaaaaacacatgcactcacacaatacccaaacatcagaattagaagggcataaaacagggggcttta

SEQ ID NO: 137019 - DNA, 74 bp, Homo sapiens
acatgcactcacacaatacccaaacatcagaattagaagggcataaaacagggggctttataggctgaaaaata

SEQ ID NO: 137020 - DNA, 71 bp, Homo sapiens
actcacacaatacccaaacatcagaattagaagggcataaaacagggggctttataggctgaaaaatatct

SEQ ID NO: 137021 - DNA, 71 bp, Homo sapiens
atacccaaacatcagaattagaagggcataaaacagggggctttataggctgaaaaatatcttagacttca

SEQ ID NO: 137022 - DNA, 70 bp, Homo sapiens
aattagaagggcataaaacagggggctttataggctgaaaaatatcttagacttcagaacagaataccaa

SEQ ID NO: 137023 - DNA, 71 bp, Homo sapiens
agggcataaaacagggggctttataggctgaaaaatatcttagacttcagaacagaataccaatcaaatat

SEQ ID NO: 137024 - DNA, 71 bp, Homo sapiens
acagggggctttataggctgaaaaatatcttagacttcagaacagaataccaatcaaatattgaaaattcc

SEQ ID NO: 137025 - DNA, 73 bp, Homo sapiens
taggctgaaaaatatcttagacttcagaacagaataccaatcaaatattgaaaattcctttgttcaaaacaca

SEQ ID NO: 137026 - DNA, 71 bp, Homo sapiens
aaatatcttagacttcagaacagaataccaatcaaatattgaaaattcctttgttcaaaacacaaagatgt

SEQ ID NO: 137027 - DNA, 70 bp, Homo sapiens
cttagacttcagaacagaataccaatcaaatattgaaaattcctttgttcaaaacacaaagatgttttgt

SEQ ID NO: 137028 - DNA, 68 bp, Homo sapiens
cagaataccaatcaaatattgaaaattcctttgttcaaaacacaaagatgttttgtttttaatgggag

SEQ ID NO: 137029 - DNA, 65 bp, Homo sapiens
accaatcaaatattgaaaattcctttgttcaaaacacaaagatgttttgtttttaatgggagttt

SEQ ID NO: 137030 - DNA, 63 bp, Homo sapiens
tattgaaaattcctttgttcaaaacacaaagatgttttgtttttaatgggagtttttttaaag

SEQ ID NO: 137031 - DNA, 69 bp, Homo sapiens
aaaaagaaagttaaggacaaacggcaaactcacactgcctgacgcagggcctggtttctcttccttgaa

SEQ ID NO: 137032 - DNA, 70 bp, Homo sapiens
agttaaggacaaacggcaaactcacactgcctgacgcagggcctggtttctcttccttgaaggcctttta

SEQ ID NO: 137033 - DNA, 73 bp, Homo sapiens
aaacggcaaactcacactgcctgacgcagggcctggtttctcttccttgaaggccttttacagatgtcagctt

SEQ ID NO: 137034 - DNA, 75 bp, Homo sapiens
aaactcacactgcctgacgcagggcctggtttctcttccttgaaggccttttacagatgtcagctttcactggcc

SEQ ID NO: 137035 - DNA, 77 bp, Homo sapiens
ctgacgcagggcctggtttctcttccttgaaggccttttacagatgtcagctttcactggcctccatgcacaacctc

SEQ ID NO: 137036 - DNA, 75 bp, Homo sapiens
ctggtttctcttccttgaaggccttttacagatgtcagctttcactggcctccatgcacaacctcccactaccac

SEQ ID NO: 137037 - DNA, 76 bp, Homo sapiens
ttctcttccttgaaggccttttacagatgtcagctttcactggcctccatgcacaacctcccactaccacccaatc

SEQ ID NO: 137038 - DNA, 79 bp, Homo sapiens
aggccttttacagatgtcagctttcactggcctccatgcacaacctcccactaccacccaatctgcctgccacagcaaa

SEQ ID NO: 137039 - DNA, 79 bp, Homo sapiens
agctttcactggcctccatgcacaacctcccactaccacccaatctgcctgccacagcaaagtgcaggcaccctgggcc

SEQ ID NO: 137040 - DNA, 77 bp, Homo sapiens
cctccatgcacaacctcccactaccacccaatctgcctgccacagcaaagtgcaggcaccctgggccccctggagga

SEQ ID NO: 137041 - DNA, 76 bp, Homo sapiens
acaacctcccactaccacccaatctgcctgccacagcaaagtgcaggcaccctgggccccctggaggatgcgggca

SEQ ID NO: 137042 - DNA, 76 bp, Homo sapiens
actaccacccaatctgcctgccacagcaaagtgcaggcaccctgggccccctggaggatgcgggcaggggctacag

SEQ ID NO: 137043 - DNA, 79 bp, Homo sapiens
aatctgcctgccacagcaaagtgcaggcaccctgggccccctggaggatgcgggcaggggctacagggcatccaggatg

SEQ ID NO: 137044 - DNA, 77 bp, Homo sapiens
acagcaaagtgcaggcaccctgggccccctggaggatgcgggcaggggctacagggcatccaggatgtggtcgatct

SEQ ID NO: 137045 - DNA, 77 bp, Homo sapiens
aagtgcaggcaccctgggccccctggaggatgcgggcaggggctacagggcatccaggatgtggtcgatcttggtga

SEQ ID NO: 137046 - DNA, 78 bp, Homo sapiens
tgggccccctggaggatgcgggcaggggctacagggcatccaggatgtggtcgatcttggtgaccagctcctggcgct

SEQ ID NO: 137047 - DNA, 82 bp, Homo sapiens
ctggaggatgcgggcaggggctacagggcatccaggatgtggtcgatcttggtgaccagctcctggcgctttcctgagatga

SEQ ID NO: 137048 - DNA, 84 bp, Homo sapiens
gcaggggctacagggcatccaggatgtggtcgatcttggtgaccagctcctggcgctttcctgagatgagcttctcattctcaa

SEQ ID NO: 137049 - DNA, 84 bp, Homo sapiens
tacagggcatccaggatgtggtcgatcttggtgaccagctcctggcgctttcctgagatgagcttctcattctcaatgtacgtg

SEQ ID NO: 137050 - DNA, 82 bp, Homo sapiens
aggatgtggtcgatcttggtgaccagctcctggcgctttcctgagatgagcttctcattctcaatgtacgtgtctttcttga

SEQ ID NO: 137051 - DNA, 84 bp, Homo sapiens
tggtcgatcttggtgaccagctcctggcgctttcctgagatgagcttctcattctcaatgtacgtgtctttcttgagcttgcca

SEQ ID NO: 137052 - DNA, 83 bp, Homo sapiens
ttggtgaccagctcctggcgctttcctgagatgagcttctcattctcaatgtacgtgtctttcttgagcttgccagccaccag

SEQ ID NO: 137053 - DNA, 85 bp, Homo sapiens
tcctggcgctttcctgagatgagcttctcattctcaatgtacgtgtctttcttgagcttgccagccaccaggcgctcagcctcca

SEQ ID NO: 137054 - DNA, 83 bp, Homo sapiens
tttcctgagatgagcttctcattctcaatgtacgtgtctttcttgagcttgccagccaccaggcgctcagcctccaccgccga

SEQ ID NO: 137055 - DNA, 82 bp, Homo sapiens
agcttctcattctcaatgtacgtgtctttcttgagcttgccagccaccaggcgctcagcctccaccgccgacttcagcacca

SEQ ID NO: 137056 - DNA, 80 bp, Homo sapiens
attctcaatgtacgtgtctttcttgagcttgccagccaccaggcgctcagcctccaccgccgacttcagcaccagctcct

SEQ ID NO: 137057 - DNA, 83 bp, Homo sapiens
tacgtgtctttcttgagcttgccagccaccaggcgctcagcctccaccgccgacttcagcaccagctccttgacctgtgcatc

SEQ ID NO: 137058 - DNA, 86 bp, Homo sapiens
ttcttgagcttgccagccaccaggcgctcagcctccaccgccgacttcagcaccagctccttgacctgtgcatccagcttctgcat

SEQ ID NO: 137059 - DNA, 84 bp, Homo sapiens
agccaccaggcgctcagcctccaccgccgacttcagcaccagctccttgacctgtgcatccagcttctgcatttcgctcacctg

SEQ ID NO: 137060 - DNA, 85 bp, Homo sapiens
gctcagcctccaccgccgacttcagcaccagctccttgacctgtgcatccagcttctgcatttcgctcacctggccgaggcaaga

SEQ ID NO: 137061 - DNA, 83 bp, Homo sapiens
cctccaccgccgacttcagcaccagctccttgacctgtgcatccagcttctgcatttcgctcacctggccgaggcaagagcag

SEQ ID NO: 137062 - DNA, 85 bp, Homo sapiens
acttcagcaccagctccttgacctgtgcatccagcttctgcatttcgctcacctggccgaggcaagagcagggcaggacttgtga

SEQ ID NO: 137063 - DNA, 81 bp, Homo sapiens
aggcatggagggccccaagccaagcaactctgtgacgcccgacacttactctgtcgcacagatcagagccctctgtcttca

SEQ ID NO: 137064 - DNA, 84 bp, Homo sapiens
cccaagccaagcaactctgtgacgcccgacacttactctgtcgcacagatcagagccctctgtcttcagcctggactgcagcag

SEQ ID NO: 137065 - DNA, 87 bp, Homo sapiens
aagcaactctgtgacgcccgacacttactctgtcgcacagatcagagccctctgtcttcagcctggactgcagcagtgcaatctcac

SEQ ID NO: 137066 - DNA, 88 bp, Homo sapiens
tctgtgacgcccgacacttactctgtcgcacagatcagagccctctgtcttcagcctggactgcagcagtgcaatctcactggtcaag

SEQ ID NO: 137067 - DNA, 87 bp, Homo sapiens
acacttactctgtcgcacagatcagagccctctgtcttcagcctggactgcagcagtgcaatctcactggtcaaggccttgtgttca

SEQ ID NO: 137068 - DNA, 88 bp, Homo sapiens
ctctgtcgcacagatcagagccctctgtcttcagcctggactgcagcagtgcaatctcactggtcaaggccttgtgttcagtctccag

SEQ ID NO: 137069 - DNA, 85 bp, Homo sapiens
agatcagagccctctgtcttcagcctggactgcagcagtgcaatctcactggtcaaggccttgtgttcagtctccaggctcttct

SEQ ID NO: 137070 - DNA, 86 bp, Homo sapiens
tctgtcttcagcctggactgcagcagtgcaatctcactggtcaaggccttgtgttcagtctccaggctcttcttgccactgttgag

SEQ ID NO: 137071 - DNA, 84 bp, Homo sapiens
ctggactgcagcagtgcaatctcactggtcaaggccttgtgttcagtctccaggctcttcttgccactgttgagggtggagatg

SEQ ID NO: 137072 - DNA, 80 bp, Homo sapiens
agcagtgcaatctcactggtcaaggccttgtgttcagtctccaggctcttcttgccactgttgagggtggagatgtcccg

SEQ ID NO: 137073 - DNA, 76 bp, Homo sapiens
aatctcactggtcaaggccttgtgttcagtctccaggctcttcttgccactgttgagggtggagatgtcccgggat

SEQ ID NO: 137074 - DNA, 75 bp, Homo sapiens
aaggccttgtgttcagtctccaggctcttcttgccactgttgagggtggagatgtcccgggattgcttgtaccta

SEQ ID NO: 137075 - DNA, 76 bp, Homo sapiens
ttgtgttcagtctccaggctcttcttgccactgttgagggtggagatgtcccgggattgcttgtacctattgacgg

SEQ ID NO: 137076 - DNA, 73 bp, Homo sapiens
ttgccactgttgagggtggagatgtcccgggattgcttgtacctattgacggtctcgtcaaagtgacggtaaa

SEQ ID NO: 137077 - DNA, 71 bp, Homo sapiens
ttgagggtggagatgtcccgggattgcttgtacctattgacggtctcgtcaaagtgacggtaaaggcctat

SEQ ID NO: 137078 - DNA, 72 bp, Homo sapiens
agatgtcccgggattgcttgtacctattgacggtctcgtcaaagtgacggtaaaggcctattctcttgttga

SEQ ID NO: 137079 - DNA, 70 bp, Homo sapiens
cccgggattgcttgtacctattgacggtctcgtcaaagtgacggtaaaggcctattctcttgttgaccag

SEQ ID NO: 137080 - DNA, 70 bp, Homo sapiens
cttgtacctattgacggtctcgtcaaagtgacggtaaaggcctattctcttgttgaccagggtcaagacc

SEQ ID NO: 137081 - DNA, 76 bp, Homo sapiens
acggtctcgtcaaagtgacggtaaaggcctattctcttgttgaccagggtcaagacctgctctgtgatgcaggcta

SEQ ID NO: 137082 - DNA, 76 bp, Homo sapiens
aaagtgacggtaaaggcctattctcttgttgaccagggtcaagacctgctctgtgatgcaggctaccttcatcctg

SEQ ID NO: 137083 - DNA, 78 bp, Homo sapiens
acggtaaaggcctattctcttgttgaccagggtcaagacctgctctgtgatgcaggctaccttcatcctggcttctgc

SEQ ID NO: 137084 - DNA, 83 bp, Homo sapiens
tattctcttgttgaccagggtcaagacctgctctgtgatgcaggctaccttcatcctggcttctgcggctggatcctgaagga

SEQ ID NO: 137085 - DNA, 82 bp, Homo sapiens
tgttgaccagggtcaagacctgctctgtgatgcaggctaccttcatcctggcttctgcggctggatcctgaaggaaggagag

SEQ ID NO: 137086 - DNA, 84 bp, Homo sapiens
aagacctgctctgtgatgcaggctaccttcatcctggcttctgcggctggatcctgaaggaaggagaggcaccatgtgtgacaa

SEQ ID NO: 137087 - DNA, 74 bp, Homo sapiens
aaatattaccaaggacacaaatgacaagcaggaagaaggcagagacggtaccttggtgatggagaagtccagcc

SEQ ID NO: 137088 - DNA, 78 bp, Homo sapiens
aggacacaaatgacaagcaggaagaaggcagagacggtaccttggtgatggagaagtccagccgaacatagatgataa

SEQ ID NO: 137089 - DNA, 76 bp, Homo sapiens
aagcaggaagaaggcagagacggtaccttggtgatggagaagtccagccgaacatagatgataacggtgaagaaca

SEQ ID NO: 137090 - DNA, 76 bp, Homo sapiens
aagaaggcagagacggtaccttggtgatggagaagtccagccgaacatagatgataacggtgaagaacaggatgta

SEQ ID NO: 137091 - DNA, 75 bp, Homo sapiens
agagacggtaccttggtgatggagaagtccagccgaacatagatgataacggtgaagaacaggatgtagaaggcc

SEQ ID NO: 137092 - DNA, 78 bp, Homo sapiens
cttggtgatggagaagtccagccgaacatagatgataacggtgaagaacaggatgtagaaggccgccaccaccagcag

SEQ ID NO: 137093 - DNA, 76 bp, Homo sapiens
ggagaagtccagccgaacatagatgataacggtgaagaacaggatgtagaaggccgccaccaccagcaggggctcc

SEQ ID NO: 137094 - DNA, 80 bp, Homo sapiens
aacatagatgataacggtgaagaacaggatgtagaaggccgccaccaccagcaggggctcctgcagcatgagcaccttgt

SEQ ID NO: 137095 - DNA, 80 bp, Homo sapiens
agatgataacggtgaagaacaggatgtagaaggccgccaccaccagcaggggctcctgcagcatgagcaccttgttgaac

SEQ ID NO: 137096 - DNA, 78 bp, Homo sapiens
aagaacaggatgtagaaggccgccaccaccagcaggggctcctgcagcatgagcaccttgttgaacgtgtagtggacc

SEQ ID NO: 137097 - DNA, 79 bp, Homo sapiens
aggatgtagaaggccgccaccaccagcaggggctcctgcagcatgagcaccttgttgaacgtgtagtggacctgggaga

SEQ ID NO: 137098 - DNA, 80 bp, Homo sapiens
gccaccaccagcaggggctcctgcagcatgagcaccttgttgaacgtgtagtggacctgggagaagcaagaggacaggct

SEQ ID NO: 137099 - DNA, 79 bp, Homo sapiens
agcaggggctcctgcagcatgagcaccttgttgaacgtgtagtggacctgggagaagcaagaggacaggcttcatcggg

SEQ ID NO: 137100 - DNA, 79 bp, Homo sapiens
ctgtctggggaagacgccatggaaggcaaacagtggagccactcaccacaatgtcctgaatgtgctgttctaccagatt

SEQ ID NO: 137101 - DNA, 78 bp, Homo sapiens
aagacgccatggaaggcaaacagtggagccactcaccacaatgtcctgaatgtgctgttctaccagatttttcttgta

SEQ ID NO: 137102 - DNA, 78 bp, Homo sapiens
atggaaggcaaacagtggagccactcaccacaatgtcctgaatgtgctgttctaccagatttttcttgtaggcaacaa

SEQ ID NO: 137103 - DNA, 78 bp, Homo sapiens
aaacagtggagccactcaccacaatgtcctgaatgtgctgttctaccagatttttcttgtaggcaacaatcacagggc

SEQ ID NO: 137104 - DNA, 78 bp, Homo sapiens
actcaccacaatgtcctgaatgtgctgttctaccagatttttcttgtaggcaacaatcacagggcggccaaatgtgtc

SEQ ID NO: 137105 - DNA, 78 bp, Homo sapiens
acaatgtcctgaatgtgctgttctaccagatttttcttgtaggcaacaatcacagggcggccaaatgtgtccagatag

SEQ ID NO: 137106 - DNA, 80 bp, Homo sapiens
ctgaatgtgctgttctaccagatttttcttgtaggcaacaatcacagggcggccaaatgtgtccagataggtgtagtgca

SEQ ID NO: 137107 - DNA, 80 bp, Homo sapiens
tgttctaccagatttttcttgtaggcaacaatcacagggcggccaaatgtgtccagataggtgtagtgcagctcatctgg

SEQ ID NO: 137108 - DNA, 83 bp, Homo sapiens
ttcttgtaggcaacaatcacagggcggccaaatgtgtccagataggtgtagtgcagctcatctggggcacggctgatttcata

SEQ ID NO: 137109 - DNA, 83 bp, Homo sapiens
caacaatcacagggcggccaaatgtgtccagataggtgtagtgcagctcatctggggcacggctgatttcatagggactatca

SEQ ID NO: 137110 - DNA, 80 bp, Homo sapiens
agggcggccaaatgtgtccagataggtgtagtgcagctcatctggggcacggctgatttcatagggactatcaatttcaa

SEQ ID NO: 137111 - DNA, 81 bp, Homo sapiens
aatgtgtccagataggtgtagtgcagctcatctggggcacggctgatttcatagggactatcaatttcaatgttcctggaa

SEQ ID NO: 137112 - DNA, 81 bp, Homo sapiens
gtccagataggtgtagtgcagctcatctggggcacggctgatttcatagggactatcaatttcaatgttcctggaagaaga

SEQ ID NO: 137113 - DNA, 79 bp, Homo sapiens
tagtgcagctcatctggggcacggctgatttcatagggactatcaatttcaatgttcctggaagaagatgggaataaaa

SEQ ID NO: 137114 - DNA, 75 bp, Homo sapiens
atctggggcacggctgatttcatagggactatcaatttcaatgttcctggaagaagatgggaataaaatatagcc

SEQ ID NO: 137115 - DNA, 74 bp, Homo sapiens
acggctgatttcatagggactatcaatttcaatgttcctggaagaagatgggaataaaatatagcctccaacca

SEQ ID NO: 137116 - DNA, 81 bp, Homo sapiens
tacaaccagagaaatcgggtgcaaaggagaggaacagtcacactcacttggctccttcaggcaggatgatcttcacagtca

SEQ ID NO: 137117 - DNA, 82 bp, Homo sapiens
aaatcgggtgcaaaggagaggaacagtcacactcacttggctccttcaggcaggatgatcttcacagtcagagaatctatca

SEQ ID NO: 137118 - DNA, 84 bp, Homo sapiens
caaaggagaggaacagtcacactcacttggctccttcaggcaggatgatcttcacagtcagagaatctatcacttgttcatcaa

SEQ ID NO: 137119 - DNA, 85 bp, Homo sapiens
agaggaacagtcacactcacttggctccttcaggcaggatgatcttcacagtcagagaatctatcacttgttcatcaaacacatg

SEQ ID NO: 137120 - DNA, 83 bp, Homo sapiens
acactcacttggctccttcaggcaggatgatcttcacagtcagagaatctatcacttgttcatcaaacacatggtccacaaac

SEQ ID NO: 137121 - DNA, 85 bp, Homo sapiens
ttggctccttcaggcaggatgatcttcacagtcagagaatctatcacttgttcatcaaacacatggtccacaaacctcatcttca

SEQ ID NO: 137122 - DNA, 86 bp, Homo sapiens
caggatgatcttcacagtcagagaatctatcacttgttcatcaaacacatggtccacaaacctcatcttcagtgcatactggtcac

SEQ ID NO: 137123 - DNA, 84 bp, Homo sapiens
atcttcacagtcagagaatctatcacttgttcatcaaacacatggtccacaaacctcatcttcagtgcatactggtcacctgaa

SEQ ID NO: 137124 - DNA, 83 bp, Homo sapiens
agagaatctatcacttgttcatcaaacacatggtccacaaacctcatcttcagtgcatactggtcacctgaaggatcaagcaa

SEQ ID NO: 137125 - DNA, 85 bp, Homo sapiens
tatcacttgttcatcaaacacatggtccacaaacctcatcttcagtgcatactggtcacctgaaggatcaagcaagcataagcaa

SEQ ID NO: 137126 - DNA, 84 bp, Homo sapiens
atcaaacacatggtccacaaacctcatcttcagtgcatactggtcacctgaaggatcaagcaagcataagcaatgatgtggaaa

SEQ ID NO: 137127 - DNA, 66 bp, Homo sapiens
cacgaaattaaagaaaaggttagtttctcccttactattgaagactgacccaaattatagaggtac

SEQ ID NO: 137128 - DNA, 68 bp, Homo sapiens
aaagaaaaggttagtttctcccttactattgaagactgacccaaattatagaggtactcatagcttgg

SEQ ID NO: 137129 - DNA, 72 bp, Homo sapiens
ttagtttctcccttactattgaagactgacccaaattatagaggtactcatagcttgggaggttgtagccaa

SEQ ID NO: 137130 - DNA, 74 bp, Homo sapiens
tactattgaagactgacccaaattatagaggtactcatagcttgggaggttgtagccaacgatgtaatgggtct

SEQ ID NO: 137131 - DNA, 72 bp, Homo sapiens
aagactgacccaaattatagaggtactcatagcttgggaggttgtagccaacgatgtaatgggtcttccacc

SEQ ID NO: 137132 - DNA, 72 bp, Homo sapiens
aaattatagaggtactcatagcttgggaggttgtagccaacgatgtaatgggtcttccacccgccaaagaga

SEQ ID NO: 137133 - DNA, 72 bp, Homo sapiens
agaggtactcatagcttgggaggttgtagccaacgatgtaatgggtcttccacccgccaaagagagggaagc

SEQ ID NO: 137134 - DNA, 70 bp, Homo sapiens
ttgggaggttgtagccaacgatgtaatgggtcttccacccgccaaagagagggaagcgaggccggatttc

SEQ ID NO: 137135 - DNA, 72 bp, Homo sapiens
ggttgtagccaacgatgtaatgggtcttccacccgccaaagagagggaagcgaggccggatttccatctcta

SEQ ID NO: 137136 - DNA, 73 bp, Homo sapiens
atgtaatgggtcttccacccgccaaagagagggaagcgaggccggatttccatctctacagagtcatccaaaa

SEQ ID NO: 137137 - DNA, 72 bp, Homo sapiens
atgggtcttccacccgccaaagagagggaagcgaggccggatttccatctctacagagtcatccaaaataag

SEQ ID NO: 137138 - DNA, 74 bp, Homo sapiens
gccaaagagagggaagcgaggccggatttccatctctacagagtcatccaaaataaggaggtggctggtagaaa

SEQ ID NO: 137139 - DNA, 74 bp, Homo sapiens
agggaagcgaggccggatttccatctctacagagtcatccaaaataaggaggtggctggtagaaacattgccaa

SEQ ID NO: 137140 - DNA, 76 bp, Homo sapiens
gccggatttccatctctacagagtcatccaaaataaggaggtggctggtagaaacattgccaatctcatcccggta

SEQ ID NO: 137141 - DNA, 75 bp, Homo sapiens
tttccatctctacagagtcatccaaaataaggaggtggctggtagaaacattgccaatctcatcccggtaataaa

SEQ ID NO: 137142 - DNA, 74 bp, Homo sapiens
ctacagagtcatccaaaataaggaggtggctggtagaaacattgccaatctcatcccggtaataaacatcctgg

SEQ ID NO: 137143 - DNA, 76 bp, Homo sapiens
atccaaaataaggaggtggctggtagaaacattgccaatctcatcccggtaataaacatcctgggcagcagcagga

SEQ ID NO: 137144 - DNA, 79 bp, Homo sapiens
aggtggctggtagaaacattgccaatctcatcccggtaataaacatcctgggcagcagcaggaaggatggtctgcaaga

SEQ ID NO: 137145 - DNA, 81 bp, Homo sapiens
tggtagaaacattgccaatctcatcccggtaataaacatcctgggcagcagcaggaaggatggtctgcaagagagtggata

SEQ ID NO: 137146 - DNA, 79 bp, Homo sapiens
caatctcatcccggtaataaacatcctgggcagcagcaggaaggatggtctgcaagagagtggatatgcccttctaaaa

SEQ ID NO: 137147 - DNA, 77 bp, Homo sapiens
atcccggtaataaacatcctgggcagcagcaggaaggatggtctgcaagagagtggatatgcccttctaaaactcca

SEQ ID NO: 137148 - DNA, 75 bp, Homo sapiens
tgataaagtcctcatttctcacaatgtccaagttgaacattccataccttaaaagaacggatggaggatattcca

SEQ ID NO: 137149 - DNA, 74 bp, Homo sapiens
agtcctcatttctcacaatgtccaagttgaacattccataccttaaaagaacggatggaggatattccactatc

SEQ ID NO: 137150 - DNA, 75 bp, Homo sapiens
caatgtccaagttgaacattccataccttaaaagaacggatggaggatattccactatctggctgtctctggtaa

SEQ ID NO: 137151 - DNA, 75 bp, Homo sapiens
aagttgaacattccataccttaaaagaacggatggaggatattccactatctggctgtctctggtaatcatagcg

SEQ ID NO: 137152 - DNA, 76 bp, Homo sapiens
acattccataccttaaaagaacggatggaggatattccactatctggctgtctctggtaatcatagcgtgagaaag

SEQ ID NO: 137153 - DNA, 74 bp, Homo sapiens
cttaaaagaacggatggaggatattccactatctggctgtctctggtaatcatagcgtgagaaaggccccttaa

SEQ ID NO: 137154 - DNA, 81 bp, Homo sapiens
tggaggatattccactatctggctgtctctggtaatcatagcgtgagaaaggccccttaagcacagctcctgtgtgcttta

SEQ ID NO: 137155 - DNA, 79 bp, Homo sapiens
atattccactatctggctgtctctggtaatcatagcgtgagaaaggccccttaagcacagctcctgtgtgctttaagtc

SEQ ID NO: 137156 - DNA, 79 bp, Homo sapiens
tatctggctgtctctggtaatcatagcgtgagaaaggccccttaagcacagctcctgtgtgctttaagtccacattttc

SEQ ID NO: 137157 - DNA, 78 bp, Homo sapiens
tggtaatcatagcgtgagaaaggccccttaagcacagctcctgtgtgctttaagtccacattttcttccacagcaata

SEQ ID NO: 137158 - DNA, 75 bp, Homo sapiens
atagcgtgagaaaggccccttaagcacagctcctgtgtgctttaagtccacattttcttccacagcaatattacc

SEQ ID NO: 137159 - DNA, 74 bp, Homo sapiens
agaaaggccccttaagcacagctcctgtgtgctttaagtccacattttcttccacagcaatattaccccagtga

SEQ ID NO: 137160 - DNA, 79 bp, Homo sapiens
ttaagcacagctcctgtgtgctttaagtccacattttcttccacagcaatattaccccagtgagagacttcaatgactc

SEQ ID NO: 137161 - DNA, 80 bp, Homo sapiens
tgtgtgctttaagtccacattttcttccacagcaatattaccccagtgagagacttcaatgactcgggtcatgctggtga

SEQ ID NO: 137162 - DNA, 79 bp, Homo sapiens
tttaagtccacattttcttccacagcaatattaccccagtgagagacttcaatgactcgggtcatgctggtgatggtca

SEQ ID NO: 137163 - DNA, 77 bp, Homo sapiens
acattttcttccacagcaatattaccccagtgagagacttcaatgactcgggtcatgctggtgatggtcaggaaagg

SEQ ID NO: 137164 - DNA, 79 bp, Homo sapiens
agcaatattaccccagtgagagacttcaatgactcgggtcatgctggtgatggtcaggaaagggctgttgttctcataa

SEQ ID NO: 137165 - DNA, 79 bp, Homo sapiens
tattaccccagtgagagacttcaatgactcgggtcatgctggtgatggtcaggaaagggctgttgttctcataatgtac

SEQ ID NO: 137166 - DNA, 76 bp, Homo sapiens
agagacttcaatgactcgggtcatgctggtgatggtcaggaaagggctgttgttctcataatgtactttaaaagta

SEQ ID NO: 137167 - DNA, 75 bp, Homo sapiens
aatgactcgggtcatgctggtgatggtcaggaaagggctgttgttctcataatgtactttaaaagtatcctggaa

SEQ ID NO: 137168 - DNA, 74 bp, Homo sapiens
gtcatgctggtgatggtcaggaaagggctgttgttctcataatgtactttaaaagtatcctggaaggaaggaaa

SEQ ID NO: 137169 - DNA, 69 bp, Homo sapiens
atggtcaggaaagggctgttgttctcataatgtactttaaaagtatcctggaaggaaggaaacaaatag

SEQ ID NO: 137170 - DNA, 68 bp, Homo sapiens
aggaaagggctgttgttctcataatgtactttaaaagtatcctggaaggaaggaaacaaatagttcaa

SEQ ID NO: 137171 - DNA, 82 bp, Homo sapiens
attctctgaagcagacagggatgggctggactccacctgagcttacctgactataggcaggcacatctctgaaaggcccata

SEQ ID NO: 137172 - DNA, 81 bp, Homo sapiens
agcagacagggatgggctggactccacctgagcttacctgactataggcaggcacatctctgaaaggcccataatccagta

SEQ ID NO: 137173 - DNA, 80 bp, Homo sapiens
atgggctggactccacctgagcttacctgactataggcaggcacatctctgaaaggcccataatccagtaggtcctcaga

SEQ ID NO: 137174 - DNA, 79 bp, Homo sapiens
actccacctgagcttacctgactataggcaggcacatctctgaaaggcccataatccagtaggtcctcagagcgcgtgg

SEQ ID NO: 137175 - DNA, 76 bp, Homo sapiens
agcttacctgactataggcaggcacatctctgaaaggcccataatccagtaggtcctcagagcgcgtggggttccc

SEQ ID NO: 137176 - DNA, 77 bp, Homo sapiens
ctataggcaggcacatctctgaaaggcccataatccagtaggtcctcagagcgcgtggggttccccagcttggtgta

SEQ ID NO: 137177 - DNA, 78 bp, Homo sapiens
gcacatctctgaaaggcccataatccagtaggtcctcagagcgcgtggggttccccagcttggtgtagctctccacat

SEQ ID NO: 137178 - DNA, 76 bp, Homo sapiens
tgaaaggcccataatccagtaggtcctcagagcgcgtggggttccccagcttggtgtagctctccacatttcgaga

SEQ ID NO: 137179 - DNA, 77 bp, Homo sapiens
ataatccagtaggtcctcagagcgcgtggggttccccagcttggtgtagctctccacatttcgagaggcaagcttca

SEQ ID NO: 137180 - DNA, 78 bp, Homo sapiens
taggtcctcagagcgcgtggggttccccagcttggtgtagctctccacatttcgagaggcaagcttcacacgcatggt

SEQ ID NO: 137181 - DNA, 77 bp, Homo sapiens
agagcgcgtggggttccccagcttggtgtagctctccacatttcgagaggcaagcttcacacgcatggtttgtgtct

SEQ ID NO: 137182 - DNA, 78 bp, Homo sapiens
ttccccagcttggtgtagctctccacatttcgagaggcaagcttcacacgcatggtttgtgtcttcgttggataggga

SEQ ID NO: 137183 - DNA, 78 bp, Homo sapiens
ttggtgtagctctccacatttcgagaggcaagcttcacacgcatggtttgtgtcttcgttggatagggagagtagaaa

SEQ ID NO: 137184 - DNA, 76 bp, Homo sapiens
ctctccacatttcgagaggcaagcttcacacgcatggtttgtgtcttcgttggatagggagagtagaaataatggt

SEQ ID NO: 137185 - DNA, 73 bp, Homo sapiens
atttcgagaggcaagcttcacacgcatggtttgtgtcttcgttggatagggagagtagaaataatggttcccc

SEQ ID NO: 137186 - DNA, 73 bp, Homo sapiens
aagcttcacacgcatggtttgtgtcttcgttggatagggagagtagaaataatggttcccctcaaacaccaca

SEQ ID NO: 137187 - DNA, 70 bp, Homo sapiens
catggtttgtgtcttcgttggatagggagagtagaaataatggttcccctcaaacaccacaaactgtttc

SEQ ID NO: 137188 - DNA, 71 bp, Homo sapiens
tttgtgtcttcgttggatagggagagtagaaataatggttcccctcaaacaccacaaactgtttctctgac

SEQ ID NO: 137189 - DNA, 72 bp, Homo sapiens
cgttggatagggagagtagaaataatggttcccctcaaacaccacaaactgtttctctgactgggtgatctg

SEQ ID NO: 137190 - DNA, 71 bp, Homo sapiens
agtagaaataatggttcccctcaaacaccacaaactgtttctctgactgggtgatctgggttggatacgga

SEQ ID NO: 137191 - DNA, 74 bp, Homo sapiens
aataatggttcccctcaaacaccacaaactgtttctctgactgggtgatctgggttggatacggatgaagcaca

SEQ ID NO: 137192 - DNA, 77 bp, Homo sapiens
tcaaacaccacaaactgtttctctgactgggtgatctgggttggatacggatgaagcacatgggtgtagactgtttc

SEQ ID NO: 137193 - DNA, 76 bp, Homo sapiens
accacaaactgtttctctgactgggtgatctgggttggatacggatgaagcacatgggtgtagactgtttccacaa

SEQ ID NO: 137194 - DNA, 79 bp, Homo sapiens
tttctctgactgggtgatctgggttggatacggatgaagcacatgggtgtagactgtttccacaatgactgaaatcttg

SEQ ID NO: 137195 - DNA, 80 bp, Homo sapiens
tgatctgggttggatacggatgaagcacatgggtgtagactgtttccacaatgactgaaatcttggccccaggatcaaga

SEQ ID NO: 137196 - DNA, 79 bp, Homo sapiens
tgggttggatacggatgaagcacatgggtgtagactgtttccacaatgactgaaatcttggccccaggatcaagagcaa

SEQ ID NO: 137197 - DNA, 80 bp, Homo sapiens
atgaagcacatgggtgtagactgtttccacaatgactgaaatcttggccccaggatcaagagcaactgggagcttgactg

SEQ ID NO: 137198 - DNA, 78 bp, Homo sapiens
atgggtgtagactgtttccacaatgactgaaatcttggccccaggatcaagagcaactgggagcttgactgtgaagaa

SEQ ID NO: 137199 - DNA, 78 bp, Homo sapiens
tgtttccacaatgactgaaatcttggccccaggatcaagagcaactgggagcttgactgtgaagaatctcccactaaa

SEQ ID NO: 137200 - DNA, 76 bp, Homo sapiens
aatgactgaaatcttggccccaggatcaagagcaactgggagcttgactgtgaagaatctcccactaaaggaagaa

SEQ ID NO: 137201 - DNA, 76 bp, Homo sapiens
aggatcaagagcaactgggagcttgactgtgaagaatctcccactaaaggaagaacaaggcaagagaagtaagaga

SEQ ID NO: 137202 - DNA, 66 bp, Homo sapiens
ccctgacataacctttaacaagagacaaggtatattgtttgtcagcttaccttttacccttaattt

SEQ ID NO: 137203 - DNA, 67 bp, Homo sapiens
taacaagagacaaggtatattgtttgtcagcttaccttttacccttaattttggtttcacgtacttc

SEQ ID NO: 137204 - DNA, 66 bp, Homo sapiens
gacaaggtatattgtttgtcagcttaccttttacccttaattttggtttcacgtacttccaaattg

SEQ ID NO: 137205 - DNA, 68 bp, Homo sapiens
tgtttgtcagcttaccttttacccttaattttggtttcacgtacttccaaattgttctcttcctcatc

SEQ ID NO: 137206 - DNA, 66 bp, Homo sapiens
agcttaccttttacccttaattttggtttcacgtacttccaaattgttctcttcctcatcttctcc

SEQ ID NO: 137207 - DNA, 67 bp, Homo sapiens
tacccttaattttggtttcacgtacttccaaattgttctcttcctcatcttctccctttacctacaa

SEQ ID NO: 137208 - DNA, 68 bp, Homo sapiens
ttttggtttcacgtacttccaaattgttctcttcctcatcttctccctttacctacaacagaaaaaga

SEQ ID NO: 137209 - DNA, 69 bp, Homo sapiens
ttcacgtacttccaaattgttctcttcctcatcttctccctttacctacaacagaaaaagatagtttat

SEQ ID NO: 137210 - DNA, 70 bp, Homo sapiens
ccaaattgttctcttcctcatcttctccctttacctacaacagaaaaagatagtttattattcatgtctt

SEQ ID NO: 137211 - DNA, 71 bp, Homo sapiens
ctcttcctcatcttctccctttacctacaacagaaaaagatagtttattattcatgtcttttggcttctaa

SEQ ID NO: 137212 - DNA, 69 bp, Homo sapiens
ctccctttacctacaacagaaaaagatagtttattattcatgtcttttggcttctaaattttgagtcaa

SEQ ID NO: 137213 - DNA, 70 bp, Homo sapiens
cctacaacagaaaaagatagtttattattcatgtcttttggcttctaaattttgagtcaataattaacca

SEQ ID NO: 137214 - DNA, 70 bp, Homo sapiens
cagaaaaagatagtttattattcatgtcttttggcttctaaattttgagtcaataattaaccaagtgctt

SEQ ID NO: 137215 - DNA, 70 bp, Homo sapiens
agtttattattcatgtcttttggcttctaaattttgagtcaataattaaccaagtgctttagaacatccc

SEQ ID NO: 137216 - DNA, 73 bp, Homo sapiens
catgtcttttggcttctaaattttgagtcaataattaaccaagtgctttagaacatccccattaaagcagtca

SEQ ID NO: 137217 - DNA, 73 bp, Homo sapiens
ggcttctaaattttgagtcaataattaaccaagtgctttagaacatccccattaaagcagtcaaactatcaga

SEQ ID NO: 137218 - DNA, 73 bp, Homo sapiens
ttgagtcaataattaaccaagtgctttagaacatccccattaaagcagtcaaactatcagaactttttagaga

SEQ ID NO: 137219 - DNA, 72 bp, Homo sapiens
caataattaaccaagtgctttagaacatccccattaaagcagtcaaactatcagaactttttagagattgaa

SEQ ID NO: 137220 - DNA, 70 bp, Homo sapiens
accaagtgctttagaacatccccattaaagcagtcaaactatcagaactttttagagattgaattttctt

SEQ ID NO: 137221 - DNA, 71 bp, Homo sapiens
ttagaacatccccattaaagcagtcaaactatcagaactttttagagattgaattttcttttcagtaacaa

SEQ ID NO: 137222 - DNA, 67 bp, Homo sapiens
cccattaaagcagtcaaactatcagaactttttagagattgaattttcttttcagtaacaatttttt

SEQ ID NO: 137223 - DNA, 70 bp, Homo sapiens
ttcagtaacaatttttttttctctgaaacacaagaatattgtcaaagacttacttttacaaagtggcata

SEQ ID NO: 137224 - DNA, 72 bp, Homo sapiens
atttttttttctctgaaacacaagaatattgtcaaagacttacttttacaaagtggcatatggccaggcgca

SEQ ID NO: 137225 - DNA, 75 bp, Homo sapiens
tttttctctgaaacacaagaatattgtcaaagacttacttttacaaagtggcatatggccaggcgcaggggctca

SEQ ID NO: 137226 - DNA, 73 bp, Homo sapiens
aaacacaagaatattgtcaaagacttacttttacaaagtggcatatggccaggcgcaggggctcacacccgta

SEQ ID NO: 137227 - DNA, 72 bp, Homo sapiens
aaaaaaaagtggcataaaaccgctataaatgcgtaacattttcctgaatgatgaaatacacacagctgggtg

SEQ ID NO: 137228 - DNA, 72 bp, Homo sapiens
acacatacacaaaaagattacacttccaaatatacttcccaaaggcctctttcttgatgcttttctcattta

SEQ ID NO: 137229 - DNA, 73 bp, Homo sapiens
tacacaaaaagattacacttccaaatatacttcccaaaggcctctttcttgatgcttttctcatttacattca

SEQ ID NO: 137230 - DNA, 75 bp, Homo sapiens
ttacacttccaaatatacttcccaaaggcctctttcttgatgcttttctcatttacattcaaataagcatactca

SEQ ID NO: 137231 - DNA, 73 bp, Homo sapiens
ccaaatatacttcccaaaggcctctttcttgatgcttttctcatttacattcaaataagcatactcaaagaaa

SEQ ID NO: 137232 - DNA, 75 bp, Homo sapiens
cccaaaggcctctttcttgatgcttttctcatttacattcaaataagcatactcaaagaaatgtatttagtgatg

SEQ ID NO: 137233 - DNA, 78 bp, Homo sapiens
ttcttgatgcttttctcatttacattcaaataagcatactcaaagaaatgtatttagtgatgtaatagaaaagtctca

SEQ ID NO: 137234 - DNA, 76 bp, Homo sapiens
gcttttctcatttacattcaaataagcatactcaaagaaatgtatttagtgatgtaatagaaaagtctcagggctg

SEQ ID NO: 137235 - DNA, 76 bp, Homo sapiens
atttacattcaaataagcatactcaaagaaatgtatttagtgatgtaatagaaaagtctcagggctgggcgcagtg

SEQ ID NO: 137236 - DNA, 70 bp, Homo sapiens
attacaggcacgagataccacgcccagcctaaaactgtttcttcactaatataaaagttaaaactgggca

SEQ ID NO: 137237 - DNA, 70 bp, Homo sapiens
acgagataccacgcccagcctaaaactgtttcttcactaatataaaagttaaaactgggcaggcatggtg

SEQ ID NO: 137238 - DNA, 64 bp, Homo sapiens
aaaaaaaaaaatggttaacagtggcaaaatacccttggggaggagccaatgaccactgtttggg

SEQ ID NO: 137239 - DNA, 68 bp, Homo sapiens
aaaatggttaacagtggcaaaatacccttggggaggagccaatgaccactgtttggggtaccctcaca

SEQ ID NO: 137240 - DNA, 72 bp, Homo sapiens
agtggcaaaatacccttggggaggagccaatgaccactgtttggggtaccctcacagcaacaagatacataa

SEQ ID NO: 137241 - DNA, 71 bp, Homo sapiens
aatacccttggggaggagccaatgaccactgtttggggtaccctcacagcaacaagatacataaccaggaa

SEQ ID NO: 137242 - DNA, 74 bp, Homo sapiens
aggagccaatgaccactgtttggggtaccctcacagcaacaagatacataaccaggaaaaggatgttcactcca

SEQ ID NO: 137243 - DNA, 77 bp, Homo sapiens
aatgaccactgtttggggtaccctcacagcaacaagatacataaccaggaaaaggatgttcactccagcaggctgca

SEQ ID NO: 137244 - DNA, 76 bp, Homo sapiens
gggtaccctcacagcaacaagatacataaccaggaaaaggatgttcactccagcaggctgcaggggttttctgaga

SEQ ID NO: 137245 - DNA, 75 bp, Homo sapiens
acagcaacaagatacataaccaggaaaaggatgttcactccagcaggctgcaggggttttctgagaaagagtagt

SEQ ID NO: 137246 - DNA, 74 bp, Homo sapiens
aacaagatacataaccaggaaaaggatgttcactccagcaggctgcaggggttttctgagaaagagtagttatc

SEQ ID NO: 137247 - DNA, 75 bp, Homo sapiens
ataaccaggaaaaggatgttcactccagcaggctgcaggggttttctgagaaagagtagttatctccaatcataa

SEQ ID NO: 137248 - DNA, 76 bp, Homo sapiens
aggaaaaggatgttcactccagcaggctgcaggggttttctgagaaagagtagttatctccaatcataagactgtg

SEQ ID NO: 137249 - DNA, 79 bp, Homo sapiens
aaaggatgttcactccagcaggctgcaggggttttctgagaaagagtagttatctccaatcataagactgtggagcaga

SEQ ID NO: 137250 - DNA, 81 bp, Homo sapiens
atgttcactccagcaggctgcaggggttttctgagaaagagtagttatctccaatcataagactgtggagcagactgcaag

SEQ ID NO: 137251 - DNA, 79 bp, Homo sapiens
cagcaggctgcaggggttttctgagaaagagtagttatctccaatcataagactgtggagcagactgcaagggagaagg

SEQ ID NO: 137252 - DNA, 77 bp, Homo sapiens
ggctgcaggggttttctgagaaagagtagttatctccaatcataagactgtggagcagactgcaagggagaagggta

SEQ ID NO: 137253 - DNA, 76 bp, Homo sapiens
caggggttttctgagaaagagtagttatctccaatcataagactgtggagcagactgcaagggagaagggtataca

SEQ ID NO: 137254 - DNA, 78 bp, Homo sapiens
gttttctgagaaagagtagttatctccaatcataagactgtggagcagactgcaagggagaagggtatacatatccca

SEQ ID NO: 137255 - DNA, 80 bp, Homo sapiens
tttctgagaaagagtagttatctccaatcataagactgtggagcagactgcaagggagaagggtatacatatcccactga

SEQ ID NO: 137256 - DNA, 80 bp, Homo sapiens
agaaagagtagttatctccaatcataagactgtggagcagactgcaagggagaagggtatacatatcccactgatctctc

SEQ ID NO: 137257 - DNA, 81 bp, Homo sapiens
aaagagtagttatctccaatcataagactgtggagcagactgcaagggagaagggtatacatatcccactgatctctctgc

SEQ ID NO: 137258 - DNA, 81 bp, Homo sapiens
gtagttatctccaatcataagactgtggagcagactgcaagggagaagggtatacatatcccactgatctctctgccaacc

SEQ ID NO: 137259 - DNA, 79 bp, Homo sapiens
aatcataagactgtggagcagactgcaagggagaagggtatacatatcccactgatctctctgccaacccaccctcaac

SEQ ID NO: 137260 - DNA, 77 bp, Homo sapiens
actgtggagcagactgcaagggagaagggtatacatatcccactgatctctctgccaacccaccctcaactgaaaaa

SEQ ID NO: 137261 - DNA, 73 bp, Homo sapiens
agactgcaagggagaagggtatacatatcccactgatctctctgccaacccaccctcaactgaaaaaaacaaa

SEQ ID NO: 137262 - DNA, 68 bp, Homo sapiens
aaaaacaaaaattagactatcttttaggactgaagtagtgattcccagtaagatacaaaaagctgtat

SEQ ID NO: 137263 - DNA, 69 bp, Homo sapiens
actatcttttaggactgaagtagtgattcccagtaagatacaaaaagctgtattggagaacttttaaaa

SEQ ID NO: 137264 - DNA, 71 bp, Homo sapiens
ggactgaagtagtgattcccagtaagatacaaaaagctgtattggagaacttttaaaatatatcaaaaagc

SEQ ID NO: 137265 - DNA, 69 bp, Homo sapiens
gtgattcccagtaagatacaaaaagctgtattggagaacttttaaaatatatcaaaaagcctaaaaaca

SEQ ID NO: 137266 - DNA, 71 bp, Homo sapiens
agatacaaaaagctgtattggagaacttttaaaatatatcaaaaagcctaaaaacaatcatacaatcatcc

SEQ ID NO: 137267 - DNA, 73 bp, Homo sapiens
agctgtattggagaacttttaaaatatatcaaaaagcctaaaaacaatcatacaatcatcctcaataaagctg

SEQ ID NO: 137268 - DNA, 73 bp, Homo sapiens
ggagaacttttaaaatatatcaaaaagcctaaaaacaatcatacaatcatcctcaataaagctgtacagtcta

SEQ ID NO: 137269 - DNA, 73 bp, Homo sapiens
aaaatatatcaaaaagcctaaaaacaatcatacaatcatcctcaataaagctgtacagtctaatacaaacaag

SEQ ID NO: 137270 - DNA, 73 bp, Homo sapiens
caaaaagcctaaaaacaatcatacaatcatcctcaataaagctgtacagtctaatacaaacaagtttcattac

SEQ ID NO: 137271 - DNA, 75 bp, Homo sapiens
gcctaaaaacaatcatacaatcatcctcaataaagctgtacagtctaatacaaacaagtttcattactttgacta

SEQ ID NO: 137272 - DNA, 77 bp, Homo sapiens
tacaatcatcctcaataaagctgtacagtctaatacaaacaagtttcattactttgactagaatcttatcacagtgg

SEQ ID NO: 137273 - DNA, 75 bp, Homo sapiens
ctcaataaagctgtacagtctaatacaaacaagtttcattactttgactagaatcttatcacagtgggaatattc

SEQ ID NO: 137274 - DNA, 76 bp, Homo sapiens
taaagctgtacagtctaatacaaacaagtttcattactttgactagaatcttatcacagtgggaatattccagcca

SEQ ID NO: 137275 - DNA, 76 bp, Homo sapiens
agtctaatacaaacaagtttcattactttgactagaatcttatcacagtgggaatattccagccaggccaagtgca

SEQ ID NO: 137276 - DNA, 75 bp, Homo sapiens
tatgtgtgtgtatcaggaactctcattgtgttcagttatacagacttatttgttttattgaaaaatattgttact

SEQ ID NO: 137277 - DNA, 73 bp, Homo sapiens
gtgtgtatcaggaactctcattgtgttcagttatacagacttatttgttttattgaaaaatattgttacttaa

SEQ ID NO: 137278 - DNA, 72 bp, Homo sapiens
tgtgttcagttatacagacttatttgttttattgaaaaatattgttacttaataaaatattagcatgccaaa

SEQ ID NO: 137279 - DNA, 72 bp, Homo sapiens
cagacttatttgttttattgaaaaatattgttacttaataaaatattagcatgccaaaatatttcagataca

SEQ ID NO: 137280 - DNA, 72 bp, Homo sapiens
tgttttattgaaaaatattgttacttaataaaatattagcatgccaaaatatttcagatacaggatccaaaa

SEQ ID NO: 137281 - DNA, 72 bp, Homo sapiens
gaaaaatattgttacttaataaaatattagcatgccaaaatatttcagatacaggatccaaaagagaggaaa

SEQ ID NO: 137282 - DNA, 75 bp, Homo sapiens
tgttacttaataaaatattagcatgccaaaatatttcagatacaggatccaaaagagaggaaaaatcattagatg

SEQ ID NO: 137283 - DNA, 74 bp, Homo sapiens
aaatattagcatgccaaaatatttcagatacaggatccaaaagagaggaaaaatcattagatgggtccttggtg

SEQ ID NO: 137284 - DNA, 71 bp, Homo sapiens
atgccaaaatatttcagatacaggatccaaaagagaggaaaaatcattagatgggtccttggtggtaaaaa

SEQ ID NO: 137285 - DNA, 72 bp, Homo sapiens
aatatttcagatacaggatccaaaagagaggaaaaatcattagatgggtccttggtggtaaaaagagaagca

SEQ ID NO: 137286 - DNA, 71 bp, Homo sapiens
agatacaggatccaaaagagaggaaaaatcattagatgggtccttggtggtaaaaagagaagcaaccactg

SEQ ID NO: 137287 - DNA, 71 bp, Homo sapiens
aagagaggaaaaatcattagatgggtccttggtggtaaaaagagaagcaaccactggctcctagtcagtaa

SEQ ID NO: 137288 - DNA, 71 bp, Homo sapiens
aaaaatcattagatgggtccttggtggtaaaaagagaagcaaccactggctcctagtcagtaaccaccatg

SEQ ID NO: 137289 - DNA, 70 bp, Homo sapiens
attagatgggtccttggtggtaaaaagagaagcaaccactggctcctagtcagtaaccaccatggtccct

SEQ ID NO: 137290 - DNA, 73 bp, Homo sapiens
tggtggtaaaaagagaagcaaccactggctcctagtcagtaaccaccatggtcccttctgctagctcctaaaa

SEQ ID NO: 137291 - DNA, 73 bp, Homo sapiens
aaaagagaagcaaccactggctcctagtcagtaaccaccatggtcccttctgctagctcctaaaattctacaa

SEQ ID NO: 137292 - DNA, 71 bp, Homo sapiens
aaccactggctcctagtcagtaaccaccatggtcccttctgctagctcctaaaattctacaagggtttgaa

SEQ ID NO: 137293 - DNA, 69 bp, Homo sapiens
ctcctagtcagtaaccaccatggtcccttctgctagctcctaaaattctacaagggtttgaaaataacc

SEQ ID NO: 137294 - DNA, 68 bp, Homo sapiens
agtaaccaccatggtcccttctgctagctcctaaaattctacaagggtttgaaaataacccactgaag

SEQ ID NO: 137295 - DNA, 69 bp, Homo sapiens
atggtcccttctgctagctcctaaaattctacaagggtttgaaaataacccactgaaggccaggaatgg

SEQ ID NO: 137296 - DNA, 69 bp, Homo sapiens
aaaagaaaagaacccactgaaaaacatttcagcaacctcatcagtttccaacacaactgttggaaaata

SEQ ID NO: 137297 - DNA, 72 bp, Homo sapiens
aaaagaacccactgaaaaacatttcagcaacctcatcagtttccaacacaactgttggaaaatatacatctc

SEQ ID NO: 137298 - DNA, 72 bp, Homo sapiens
ctgaaaaacatttcagcaacctcatcagtttccaacacaactgttggaaaatatacatctccttgttaagtt

SEQ ID NO: 137299 - DNA, 73 bp, Homo sapiens
agcaacctcatcagtttccaacacaactgttggaaaatatacatctccttgttaagtttatcatccagttgtt

SEQ ID NO: 137300 - DNA, 72 bp, Homo sapiens
atcagtttccaacacaactgttggaaaatatacatctccttgttaagtttatcatccagttgtttcccactg

SEQ ID NO: 137301 - DNA, 72 bp, Homo sapiens
ttccaacacaactgttggaaaatatacatctccttgttaagtttatcatccagttgtttcccactgggatag

SEQ ID NO: 137302 - DNA, 71 bp, Homo sapiens
gttggaaaatatacatctccttgttaagtttatcatccagttgtttcccactgggataggagtacaaaata

SEQ ID NO: 137303 - DNA, 75 bp, Homo sapiens
aatatacatctccttgttaagtttatcatccagttgtttcccactgggataggagtacaaaatagcacatatatc

SEQ ID NO: 137304 - DNA, 73 bp, Homo sapiens
ttgttaagtttatcatccagttgtttcccactgggataggagtacaaaatagcacatatatccatttaactgg

SEQ ID NO: 137305 - DNA, 76 bp, Homo sapiens
ttatcatccagttgtttcccactgggataggagtacaaaatagcacatatatccatttaactggtgtcttggacta

SEQ ID NO: 137306 - DNA, 74 bp, Homo sapiens
tgtttcccactgggataggagtacaaaatagcacatatatccatttaactggtgtcttggactacaaaattgaa

SEQ ID NO: 137307 - DNA, 74 bp, Homo sapiens
ccactgggataggagtacaaaatagcacatatatccatttaactggtgtcttggactacaaaattgaaaatgat

SEQ ID NO: 137308 - DNA, 72 bp, Homo sapiens
aggagtacaaaatagcacatatatccatttaactggtgtcttggactacaaaattgaaaatgattttaaata

SEQ ID NO: 137309 - DNA, 74 bp, Homo sapiens
gcacatatatccatttaactggtgtcttggactacaaaattgaaaatgattttaaataaatctgttaatgtgac

SEQ ID NO: 137310 - DNA, 72 bp, Homo sapiens
ccatttaactggtgtcttggactacaaaattgaaaatgattttaaataaatctgttaatgtgactgcaagtc

SEQ ID NO: 137311 - DNA, 73 bp, Homo sapiens
ctggtgtcttggactacaaaattgaaaatgattttaaataaatctgttaatgtgactgcaagtcttataccca

SEQ ID NO: 137312 - DNA, 76 bp, Homo sapiens
gaaaatgattttaaataaatctgttaatgtgactgcaagtcttatacccaatacaatcctatctcacagccataaa

SEQ ID NO: 137313 - DNA, 77 bp, Homo sapiens
tttaaataaatctgttaatgtgactgcaagtcttatacccaatacaatcctatctcacagccataaaagccagaaga

SEQ ID NO: 137314 - DNA, 80 bp, Homo sapiens
atctgttaatgtgactgcaagtcttatacccaatacaatcctatctcacagccataaaagccagaagaggcaacattata

SEQ ID NO: 137315 - DNA, 81 bp, Homo sapiens
aatgtgactgcaagtcttatacccaatacaatcctatctcacagccataaaagccagaagaggcaacattatacagtgtga

SEQ ID NO: 137316 - DNA, 79 bp, Homo sapiens
aagtcttatacccaatacaatcctatctcacagccataaaagccagaagaggcaacattatacagtgtgagaacacaca

SEQ ID NO: 137317 - DNA, 78 bp, Homo sapiens
atacaatcctatctcacagccataaaagccagaagaggcaacattatacagtgtgagaacacacaacttacggaataa

SEQ ID NO: 137318 - DNA, 79 bp, Homo sapiens
atcctatctcacagccataaaagccagaagaggcaacattatacagtgtgagaacacacaacttacggaataagctgga

SEQ ID NO: 137319 - DNA, 78 bp, Homo sapiens
agaagaggcaacattatacagtgtgagaacacacaacttacggaataagctggagccctgacttactctgcactgtaa

SEQ ID NO: 137320 - DNA, 79 bp, Homo sapiens
acattatacagtgtgagaacacacaacttacggaataagctggagccctgacttactctgcactgtaagaccgcatgta

SEQ ID NO: 137321 - DNA, 77 bp, Homo sapiens
atacagtgtgagaacacacaacttacggaataagctggagccctgacttactctgcactgtaagaccgcatgtaagg

SEQ ID NO: 137322 - DNA, 74 bp, Homo sapiens
aacacacaacttacggaataagctggagccctgacttactctgcactgtaagaccgcatgtaaggggctaaata

SEQ ID NO: 137323 - DNA, 72 bp, Homo sapiens
acttacggaataagctggagccctgacttactctgcactgtaagaccgcatgtaaggggctaaataacttaa

SEQ ID NO: 137324 - DNA, 76 bp, Homo sapiens
taagctggagccctgacttactctgcactgtaagaccgcatgtaaggggctaaataacttaacctgacagactaca

SEQ ID NO: 137325 - DNA, 73 bp, Homo sapiens
ccctgacttactctgcactgtaagaccgcatgtaaggggctaaataacttaacctgacagactacagcctcct

SEQ ID NO: 137326 - DNA, 76 bp, Homo sapiens
cactgtaagaccgcatgtaaggggctaaataacttaacctgacagactacagcctccttgcctgctatatgaggat

SEQ ID NO: 137327 - DNA, 76 bp, Homo sapiens
taagaccgcatgtaaggggctaaataacttaacctgacagactacagcctccttgcctgctatatgaggatttata

SEQ ID NO: 137328 - DNA, 73 bp, Homo sapiens
tgtaaggggctaaataacttaacctgacagactacagcctccttgcctgctatatgaggatttataccttaaa

SEQ ID NO: 137329 - DNA, 76 bp, Homo sapiens
taaataacttaacctgacagactacagcctccttgcctgctatatgaggatttataccttaaatggttgctatgag

SEQ ID NO: 137330 - DNA, 80 bp, Homo sapiens
tgacagactacagcctccttgcctgctatatgaggatttataccttaaatggttgctatgagggctaaatgagaatatat

SEQ ID NO: 137331 - DNA, 77 bp, Homo sapiens
tacagcctccttgcctgctatatgaggatttataccttaaatggttgctatgagggctaaatgagaatatatttaaa

SEQ ID NO: 137332 - DNA, 75 bp, Homo sapiens
tgaggatttataccttaaatggttgctatgagggctaaatgagaatatatttaaaatacccaccataatatctga

SEQ ID NO: 137333 - DNA, 76 bp, Homo sapiens
tgagaatatatttaaaatacccaccataatatctgacacacagtagagtcccagtaagaaagtatcttaccacaga

SEQ ID NO: 137334 - DNA, 71 bp, Homo sapiens
aatatctgacacacagtagagtcccagtaagaaagtatcttaccacagaaacaaacaaactaaaggacaaa

SEQ ID NO: 137335 - DNA, 67 bp, Homo sapiens
cacagtagagtcccagtaagaaagtatcttaccacagaaacaaacaaactaaaggacaaaaggaaac

SEQ ID NO: 137336 - DNA, 68 bp, Homo sapiens
cagtaagaaagtatcttaccacagaaacaaacaaactaaaggacaaaaggaaacttctggaggtgaca

SEQ ID NO: 137337 - DNA, 69 bp, Homo sapiens
gaaagtatcttaccacagaaacaaacaaactaaaggacaaaaggaaacttctggaggtgacagatatgt

SEQ ID NO: 137338 - DNA, 67 bp, Homo sapiens
cagaaacaaacaaactaaaggacaaaaggaaacttctggaggtgacagatatgtttattacccggat

SEQ ID NO: 137339 - DNA, 67 bp, Homo sapiens
aacaaactaaaggacaaaaggaaacttctggaggtgacagatatgtttattacccggattgtggtaa

SEQ ID NO: 137340 - DNA, 70 bp, Homo sapiens
aacttctggaggtgacagatatgtttattacccggattgtggtaatggttacaccagtgtatacgtattt

SEQ ID NO: 137341 - DNA, 72 bp, Homo sapiens
ggtgacagatatgtttattacccggattgtggtaatggttacaccagtgtatacgtattttgaatatactaa

SEQ ID NO: 137342 - DNA, 69 bp, Homo sapiens
attacccggattgtggtaatggttacaccagtgtatacgtattttgaatatactaataataggcagttt

SEQ ID NO: 137343 - DNA, 71 bp, Homo sapiens
ggttacaccagtgtatacgtattttgaatatactaataataggcagttttttgtataccaattatacctca

SEQ ID NO: 137344 - DNA, 77 bp, Homo sapiens
aaaataaaaacaagataaaataagtacattaacctagctcgcaggcatgatggcaggatagccgagctcctgctgtg

SEQ ID NO: 137345 - DNA, 81 bp, Homo sapiens
gataaaataagtacattaacctagctcgcaggcatgatggcaggatagccgagctcctgctgtggtccacttatactgtaa

SEQ ID NO: 137346 - DNA, 81 bp, Homo sapiens
aataagtacattaacctagctcgcaggcatgatggcaggatagccgagctcctgctgtggtccacttatactgtaacaagc

SEQ ID NO: 137347 - DNA, 85 bp, Homo sapiens
tcgcaggcatgatggcaggatagccgagctcctgctgtggtccacttatactgtaacaagctcattaaatcacaactggcttcta

SEQ ID NO: 137348 - DNA, 83 bp, Homo sapiens
ggcatgatggcaggatagccgagctcctgctgtggtccacttatactgtaacaagctcattaaatcacaactggcttctataa

SEQ ID NO: 137349 - DNA, 81 bp, Homo sapiens
atgatggcaggatagccgagctcctgctgtggtccacttatactgtaacaagctcattaaatcacaactggcttctataaa

SEQ ID NO: 137350 - DNA, 80 bp, Homo sapiens
atggcaggatagccgagctcctgctgtggtccacttatactgtaacaagctcattaaatcacaactggcttctataaaga

SEQ ID NO: 137351 - DNA, 75 bp, Homo sapiens
tcctgctgtggtccacttatactgtaacaagctcattaaatcacaactggcttctataaagaacgggatttaaca

SEQ ID NO: 137352 - DNA, 74 bp, Homo sapiens
tgtggtccacttatactgtaacaagctcattaaatcacaactggcttctataaagaacgggatttaacattcaa

SEQ ID NO: 137353 - DNA, 74 bp, Homo sapiens
ctcattaaatcacaactggcttctataaagaacgggatttaacattcaagacattcaaagatggcaaggcaaat

SEQ ID NO: 137354 - DNA, 75 bp, Homo sapiens
aatcacaactggcttctataaagaacgggatttaacattcaagacattcaaagatggcaaggcaaatttacatga

SEQ ID NO: 137355 - DNA, 75 bp, Homo sapiens
gaacgggatttaacattcaagacattcaaagatggcaaggcaaatttacatgaagttttgatctatctttccaca

SEQ ID NO: 137356 - DNA, 76 bp, Homo sapiens
aacattcaagacattcaaagatggcaaggcaaatttacatgaagttttgatctatctttccacaagcctttgagta

SEQ ID NO: 137357 - DNA, 75 bp, Homo sapiens
tcaagacattcaaagatggcaaggcaaatttacatgaagttttgatctatctttccacaagcctttgagtaaaac

SEQ ID NO: 137358 - DNA, 75 bp, Homo sapiens
gcaaatttacatgaagttttgatctatctttccacaagcctttgagtaaaactttatttcatcatggacaacgca

SEQ ID NO: 137359 - DNA, 75 bp, Homo sapiens
catgaagttttgatctatctttccacaagcctttgagtaaaactttatttcatcatggacaacgcatgaaagaaa

SEQ ID NO: 137360 - DNA, 74 bp, Homo sapiens
ctttccacaagcctttgagtaaaactttatttcatcatggacaacgcatgaaagaaaataggagtcatttcaga

SEQ ID NO: 137361 - DNA, 73 bp, Homo sapiens
gcctttgagtaaaactttatttcatcatggacaacgcatgaaagaaaataggagtcatttcagaaacgtaatc

SEQ ID NO: 137362 - DNA, 74 bp, Homo sapiens
ctttatttcatcatggacaacgcatgaaagaaaataggagtcatttcagaaacgtaatctctataaacccatct

SEQ ID NO: 137363 - DNA, 77 bp, Homo sapiens
ttcatcatggacaacgcatgaaagaaaataggagtcatttcagaaacgtaatctctataaacccatctttatagctc

SEQ ID NO: 137364 - DNA, 76 bp, Homo sapiens
acgcatgaaagaaaataggagtcatttcagaaacgtaatctctataaacccatctttatagctccatattcagtca

SEQ ID NO: 137365 - DNA, 74 bp, Homo sapiens
aaataggagtcatttcagaaacgtaatctctataaacccatctttatagctccatattcagtcagagaacgaag

SEQ ID NO: 137366 - DNA, 78 bp, Homo sapiens
tcatttcagaaacgtaatctctataaacccatctttatagctccatattcagtcagagaacgaagtgtgcttagaaga

SEQ ID NO: 137367 - DNA, 75 bp, Homo sapiens
agaaacgtaatctctataaacccatctttatagctccatattcagtcagagaacgaagtgtgcttagaagaaatg

SEQ ID NO: 137368 - DNA, 79 bp, Homo sapiens
tataaacccatctttatagctccatattcagtcagagaacgaagtgtgcttagaagaaatgtgacactataatgactat

SEQ ID NO: 137369 - DNA, 81 bp, Homo sapiens
atctttatagctccatattcagtcagagaacgaagtgtgcttagaagaaatgtgacactataatgactattctctcaacaa

SEQ ID NO: 137370 - DNA, 74 bp, Homo sapiens
gaaatgtgacactataatgactattctctcaacaaataattaggtaatcatttaatgaaattgtttaacaacaa

SEQ ID NO: 137371 - DNA, 72 bp, Homo sapiens
actataatgactattctctcaacaaataattaggtaatcatttaatgaaattgtttaacaacaatagtaata

SEQ ID NO: 137372 - DNA, 69 bp, Homo sapiens
ctattctctcaacaaataattaggtaatcatttaatgaaattgtttaacaacaatagtaataaaaacca

SEQ ID NO: 137373 - DNA, 69 bp, Homo sapiens
gtaatcatttaatgaaattgtttaacaacaatagtaataaaaaccaaacctctgtgtatgtacattccc

SEQ ID NO: 137374 - DNA, 68 bp, Homo sapiens
tgaaattgtttaacaacaatagtaataaaaaccaaacctctgtgtatgtacattccctttactcccaa

SEQ ID NO: 137375 - DNA, 66 bp, Homo sapiens
gtttaacaacaatagtaataaaaaccaaacctctgtgtatgtacattccctttactcccaaaccca

SEQ ID NO: 137376 - DNA, 68 bp, Homo sapiens
taaaaaccaaacctctgtgtatgtacattccctttactcccaaacccaacattttctttggtgatcac

SEQ ID NO: 137377 - DNA, 71 bp, Homo sapiens
tgtgtatgtacattccctttactcccaaacccaacattttctttggtgatcactgaaatacctggaaacat

SEQ ID NO: 137378 - DNA, 69 bp, Homo sapiens
atgtacattccctttactcccaaacccaacattttctttggtgatcactgaaatacctggaaacattta

SEQ ID NO: 137379 - DNA, 69 bp, Homo sapiens
ctttactcccaaacccaacattttctttggtgatcactgaaatacctggaaacatttaagccaaacaca

SEQ ID NO: 137380 - DNA, 72 bp, Homo sapiens
attttctttggtgatcactgaaatacctggaaacatttaagccaaacacagccatttattgccgaggtgtaa

SEQ ID NO: 137381 - DNA, 76 bp, Homo sapiens
atcactgaaatacctggaaacatttaagccaaacacagccatttattgccgaggtgtaagaatgagaagcagcagg

SEQ ID NO: 137382 - DNA, 72 bp, Homo sapiens
aaacatttaagccaaacacagccatttattgccgaggtgtaagaatgagaagcagcagggggaagggagaaa

SEQ ID NO: 137383 - DNA, 71 bp, Homo sapiens
acacagccatttattgccgaggtgtaagaatgagaagcagcagggggaagggagaaaattggactttcctt

SEQ ID NO: 137384 - DNA, 72 bp, Homo sapiens
aggtgtaagaatgagaagcagcagggggaagggagaaaattggactttccttttctgtacagcataagagaa

SEQ ID NO: 137385 - DNA, 72 bp, Homo sapiens
aatgagaagcagcagggggaagggagaaaattggactttccttttctgtacagcataagagaacttatatta

SEQ ID NO: 137386 - DNA, 70 bp, Homo sapiens
cagggggaagggagaaaattggactttccttttctgtacagcataagagaacttatattacgtgcaggag

SEQ ID NO: 137387 - DNA, 70 bp, Homo sapiens
gaagggagaaaattggactttccttttctgtacagcataagagaacttatattacgtgcaggagttttaa

SEQ ID NO: 137388 - DNA, 67 bp, Homo sapiens
ccttttctgtacagcataagagaacttatattacgtgcaggagttttaaaactaactttaaaaagag

SEQ ID NO: 137389 - DNA, 67 bp, Homo sapiens
gtacagcataagagaacttatattacgtgcaggagttttaaaactaactttaaaaagagttttaaca

SEQ ID NO: 137390 - DNA, 64 bp, Homo sapiens
gaacttatattacgtgcaggagttttaaaactaactttaaaaagagttttaacatttagaaagc

SEQ ID NO: 137391 - DNA, 61 bp, Homo sapiens
ggagttttaaaactaactttaaaaagagttttaacatttagaaagcgttcactaggaacct

SEQ ID NO: 137392 - DNA, 68 bp, Homo sapiens
aactttaaaaagagttttaacatttagaaagcgttcactaggaaccttaaaatgcatcacattcatag

SEQ ID NO: 137393 - DNA, 72 bp, Homo sapiens
agagttttaacatttagaaagcgttcactaggaaccttaaaatgcatcacattcatagggatttcaagtgat

SEQ ID NO: 137394 - DNA, 72 bp, Homo sapiens
aacatttagaaagcgttcactaggaaccttaaaatgcatcacattcatagggatttcaagtgattaccaact

SEQ ID NO: 137395 - DNA, 72 bp, Homo sapiens
aaagcgttcactaggaaccttaaaatgcatcacattcatagggatttcaagtgattaccaacttaaaaatgc

SEQ ID NO: 137396 - DNA, 75 bp, Homo sapiens
aatgcatcacattcatagggatttcaagtgattaccaacttaaaaatgcgaaacctgttacatttctgatggttc

SEQ ID NO: 137397 - DNA, 72 bp, Homo sapiens
agggatttcaagtgattaccaacttaaaaatgcgaaacctgttacatttctgatggttctctatgtctagaa

SEQ ID NO: 137398 - DNA, 74 bp, Homo sapiens
tgattaccaacttaaaaatgcgaaacctgttacatttctgatggttctctatgtctagaaagaagcacctacaa

SEQ ID NO: 137399 - DNA, 71 bp, Homo sapiens
aacttaaaaatgcgaaacctgttacatttctgatggttctctatgtctagaaagaagcacctacaacggac

SEQ ID NO: 137400 - DNA, 74 bp, Homo sapiens
aaacctgttacatttctgatggttctctatgtctagaaagaagcacctacaacggaccagatactgaattaaga

SEQ ID NO: 137401 - DNA, 76 bp, Homo sapiens
ttacatttctgatggttctctatgtctagaaagaagcacctacaacggaccagatactgaattaagagaatgaaat

SEQ ID NO: 137402 - DNA, 74 bp, Homo sapiens
atggttctctatgtctagaaagaagcacctacaacggaccagatactgaattaagagaatgaaattcactttaa

SEQ ID NO: 137403 - DNA, 74 bp, Homo sapiens
ctatgtctagaaagaagcacctacaacggaccagatactgaattaagagaatgaaattcactttaattcattta

SEQ ID NO: 137404 - DNA, 73 bp, Homo sapiens
gaagcacctacaacggaccagatactgaattaagagaatgaaattcactttaattcatttatttgtcctctac

SEQ ID NO: 137405 - DNA, 72 bp, Homo sapiens
aacggaccagatactgaattaagagaatgaaattcactttaattcatttatttgtcctctacttgagccacc

SEQ ID NO: 137406 - DNA, 73 bp, Homo sapiens
accagatactgaattaagagaatgaaattcactttaattcatttatttgtcctctacttgagccacctcgtcg

SEQ ID NO: 137407 - DNA, 72 bp, Homo sapiens
ttaagagaatgaaattcactttaattcatttatttgtcctctacttgagccacctcgtcgggccgtgagaaa

SEQ ID NO: 137408 - DNA, 72 bp, Homo sapiens
aatgaaattcactttaattcatttatttgtcctctacttgagccacctcgtcgggccgtgagaaatgaagtc

SEQ ID NO: 137409 - DNA, 74 bp, Homo sapiens
aattcatttatttgtcctctacttgagccacctcgtcgggccgtgagaaatgaagtctggcgcccgctggcacc

SEQ ID NO: 137410 - DNA, 73 bp, Homo sapiens
atttatttgtcctctacttgagccacctcgtcgggccgtgagaaatgaagtctggcgcccgctggcaccgggc

SEQ ID NO: 137411 - DNA, 74 bp, Homo sapiens
cctctacttgagccacctcgtcgggccgtgagaaatgaagtctggcgcccgctggcaccgggccgaggggctgc

SEQ ID NO: 137412 - DNA, 73 bp, Homo sapiens
acctcgtcgggccgtgagaaatgaagtctggcgcccgctggcaccgggccgaggggctgccgcgctcgcctta

SEQ ID NO: 137413 - DNA, 72 bp, Homo sapiens
ccgtgagaaatgaagtctggcgcccgctggcaccgggccgaggggctgccgcgctcgccttacggaagggag

SEQ ID NO: 137414 - DNA, 73 bp, Homo sapiens
atgaagtctggcgcccgctggcaccgggccgaggggctgccgcgctcgccttacggaagggaggtgcgttcta

SEQ ID NO: 137415 - DNA, 72 bp, Homo sapiens
tctggcgcccgctggcaccgggccgaggggctgccgcgctcgccttacggaagggaggtgcgttctaccggc

SEQ ID NO: 137416 - DNA, 70 bp, Homo sapiens
tggcaccgggccgaggggctgccgcgctcgccttacggaagggaggtgcgttctaccggcccgaggtctc

SEQ ID NO: 137417 - DNA, 68 bp, Homo sapiens
ccgcgctcgccttacggaagggaggtgcgttctaccggcccgaggtctcccgagcggtgccgagaacg

SEQ ID NO: 137418 - DNA, 67 bp, Homo sapiens
cttacggaagggaggtgcgttctaccggcccgaggtctcccgagcggtgccgagaacggcccaaaca

SEQ ID NO: 137419 - DNA, 71 bp, Homo sapiens
aggtctcccgagcggtgccgagaacggcccaaacaggggcaagctccgaggctggtcggccgcggatccca

SEQ ID NO: 137420 - DNA, 75 bp, Homo sapiens
tcccgagcggtgccgagaacggcccaaacaggggcaagctccgaggctggtcggccgcggatcccagcagctgcc

SEQ ID NO: 137421 - DNA, 76 bp, Homo sapiens
ccaaacaggggcaagctccgaggctggtcggccgcggatcccagcagctgcccacgtgagcagcgacccgcgcggg

SEQ ID NO: 137422 - DNA, 77 bp, Homo sapiens
aagctccgaggctggtcggccgcggatcccagcagctgcccacgtgagcagcgacccgcgcgggggcaggccggtgc

SEQ ID NO: 137423 - DNA, 78 bp, Homo sapiens
aggctggtcggccgcggatcccagcagctgcccacgtgagcagcgacccgcgcgggggcaggccggtgctgacgtggc

SEQ ID NO: 137424 - DNA, 79 bp, Homo sapiens
tcggccgcggatcccagcagctgcccacgtgagcagcgacccgcgcgggggcaggccggtgctgacgtggcccaggcag

SEQ ID NO: 137425 - DNA, 77 bp, Homo sapiens
atcccagcagctgcccacgtgagcagcgacccgcgcgggggcaggccggtgctgacgtggcccaggcaggagggcgg

SEQ ID NO: 137426 - DNA, 76 bp, Homo sapiens
tgcccacgtgagcagcgacccgcgcgggggcaggccggtgctgacgtggcccaggcaggagggcgggcgcgcaccg

SEQ ID NO: 137427 - DNA, 74 bp, Homo sapiens
agcagcgacccgcgcgggggcaggccggtgctgacgtggcccaggcaggagggcgggcgcgcaccgggggcagc

SEQ ID NO: 137428 - DNA, 71 bp, Homo sapiens
cgggggcaggccggtgctgacgtggcccaggcaggagggcgggcgcgcaccgggggcagcggaggcgccgg

SEQ ID NO: 137429 - DNA, 71 bp, Homo sapiens
ctgacgtggcccaggcaggagggcgggcgcgcaccgggggcagcggaggcgccggggcccctggccaccca

SEQ ID NO: 137430 - DNA, 70 bp, Homo sapiens
aggcaggagggcgggcgcgcaccgggggcagcggaggcgccggggcccctggccacccaggactcctcgc

SEQ ID NO: 137431 - DNA, 68 bp, Homo sapiens
agggcgggcgcgcaccgggggcagcggaggcgccggggcccctggccacccaggactcctcgcgggcc

SEQ ID NO: 137432 - DNA, 67 bp, Homo sapiens
accgggggcagcggaggcgccggggcccctggccacccaggactcctcgcgggccccgaggcaatcc

SEQ ID NO: 137433 - DNA, 66 bp, Homo sapiens
ccggggcccctggccacccaggactcctcgcgggccccgaggcaatcccacggaccccctgtgccc

SEQ ID NO: 137434 - DNA, 68 bp, Homo sapiens
cctggccacccaggactcctcgcgggccccgaggcaatcccacggaccccctgtgccccgcccgccgc

SEQ ID NO: 137435 - DNA, 66 bp, Homo sapiens
aggactcctcgcgggccccgaggcaatcccacggaccccctgtgccccgcccgccgcccgggtctc

SEQ ID NO: 137436 - DNA, 67 bp, Homo sapiens
cgggccccgaggcaatcccacggaccccctgtgccccgcccgccgcccgggtctccgcatttcctga

SEQ ID NO: 137437 - DNA, 68 bp, Homo sapiens
aggcaatcccacggaccccctgtgccccgcccgccgcccgggtctccgcatttcctgaggcctagagg

SEQ ID NO: 137438 - DNA, 67 bp, Homo sapiens
acggaccccctgtgccccgcccgccgcccgggtctccgcatttcctgaggcctagaggggcgcgggc

SEQ ID NO: 137439 - DNA, 68 bp, Homo sapiens
ctgtgccccgcccgccgcccgggtctccgcatttcctgaggcctagaggggcgcgggcggagtcgggg

SEQ ID NO: 137440 - DNA, 67 bp, Homo sapiens
ccgcccgggtctccgcatttcctgaggcctagaggggcgcgggcggagtcgggggaccgccaggaag

SEQ ID NO: 137441 - DNA, 65 bp, Homo sapiens
atttcctgaggcctagaggggcgcgggcggagtcgggggaccgccaggaagggaggcgggaaggg

SEQ ID NO: 137442 - DNA, 64 bp, Homo sapiens
ctagaggggcgcgggcggagtcgggggaccgccaggaagggaggcgggaagggtcccgggagcg

SEQ ID NO: 137443 - DNA, 63 bp, Homo sapiens
cgggcggagtcgggggaccgccaggaagggaggcgggaagggtcccgggagcggcggcgaggg

SEQ ID NO: 137444 - DNA, 66 bp, Homo sapiens
ggggaccgccaggaagggaggcgggaagggtcccgggagcggcggcgaggggtcgcccacactcac

SEQ ID NO: 137445 - DNA, 68 bp, Homo sapiens
aggaagggaggcgggaagggtcccgggagcggcggcgaggggtcgcccacactcacctgcacgcccag

SEQ ID NO: 137446 - DNA, 71 bp, Homo sapiens
aggcgggaagggtcccgggagcggcggcgaggggtcgcccacactcacctgcacgcccaggtgcgccagcc

SEQ ID NO: 137447 - DNA, 71 bp, Homo sapiens
aagggtcccgggagcggcggcgaggggtcgcccacactcacctgcacgcccaggtgcgccagccgggcctc

SEQ ID NO: 137448 - DNA, 77 bp, Homo sapiens
ggagcggcggcgaggggtcgcccacactcacctgcacgcccaggtgcgccagccgggcctcgagctcaggctccaaa

SEQ ID NO: 137449 - DNA, 78 bp, Homo sapiens
gggtcgcccacactcacctgcacgcccaggtgcgccagccgggcctcgagctcaggctccaaagccagcaggaaagag

SEQ ID NO: 137450 - DNA, 78 bp, Homo sapiens
ctgcacgcccaggtgcgccagccgggcctcgagctcaggctccaaagccagcaggaaagaggtagctcgggacgtgga

SEQ ID NO: 137451 - DNA, 77 bp, Homo sapiens
ggcctcgagctcaggctccaaagccagcaggaaagaggtagctcgggacgtggagccgccgcccaggtgcgccagga

SEQ ID NO: 137452 - DNA, 75 bp, Homo sapiens
tcaggctccaaagccagcaggaaagaggtagctcgggacgtggagccgccgcccaggtgcgccaggaccacctcg

SEQ ID NO: 137453 - DNA, 73 bp, Homo sapiens
aaagccagcaggaaagaggtagctcgggacgtggagccgccgcccaggtgcgccaggaccacctcggccgtca

SEQ ID NO: 137454 - DNA, 72 bp, Homo sapiens
gaaagaggtagctcgggacgtggagccgccgcccaggtgcgccaggaccacctcggccgtcaccttagccag

SEQ ID NO: 137455 - DNA, 72 bp, Homo sapiens
aggtagctcgggacgtggagccgccgcccaggtgcgccaggaccacctcggccgtcaccttagccaggtggc

SEQ ID NO: 137456 - DNA, 73 bp, Homo sapiens
acgtggagccgccgcccaggtgcgccaggaccacctcggccgtcaccttagccaggtggctgcttaggtccac

SEQ ID NO: 137457 - DNA, 76 bp, Homo sapiens
gcccaggtgcgccaggaccacctcggccgtcaccttagccaggtggctgcttaggtccactgtgcgcttcacgtcc

SEQ ID NO: 137458 - DNA, 80 bp, Homo sapiens
gtgcgccaggaccacctcggccgtcaccttagccaggtggctgcttaggtccactgtgcgcttcacgtcctcattgatca

SEQ ID NO: 137459 - DNA, 77 bp, Homo sapiens
accacctcggccgtcaccttagccaggtggctgcttaggtccactgtgcgcttcacgtcctcattgatcagcggcgg

SEQ ID NO: 137460 - DNA, 81 bp, Homo sapiens
tagccaggtggctgcttaggtccactgtgcgcttcacgtcctcattgatcagcggcggtgcctcggaggaggcgctgcccg

SEQ ID NO: 137461 - DNA, 78 bp, Homo sapiens
ctgcttaggtccactgtgcgcttcacgtcctcattgatcagcggcggtgcctcggaggaggcgctgcccggcgccggg

SEQ ID NO: 137462 - DNA, 78 bp, Homo sapiens
tccactgtgcgcttcacgtcctcattgatcagcggcggtgcctcggaggaggcgctgcccggcgccggggcccaagtc

SEQ ID NO: 137463 - DNA, 76 bp, Homo sapiens
ttcacgtcctcattgatcagcggcggtgcctcggaggaggcgctgcccggcgccggggcccaagtcccaagcaaca

SEQ ID NO: 137464 - DNA, 77 bp, Homo sapiens
tcattgatcagcggcggtgcctcggaggaggcgctgcccggcgccggggcccaagtcccaagcaacaggagcagaaa

SEQ ID NO: 137465 - DNA, 73 bp, Homo sapiens
agcggcggtgcctcggaggaggcgctgcccggcgccggggcccaagtcccaagcaacaggagcagaaacaagc

SEQ ID NO: 137466 - DNA, 72 bp, Homo sapiens
cctcggaggaggcgctgcccggcgccggggcccaagtcccaagcaacaggagcagaaacaagccggcggctg

SEQ ID NO: 137467 - DNA, 73 bp, Homo sapiens
tgcccggcgccggggcccaagtcccaagcaacaggagcagaaacaagccggcggctggcgcctccatgaccgg

SEQ ID NO: 137468 - DNA, 75 bp, Homo sapiens
cggggcccaagtcccaagcaacaggagcagaaacaagccggcggctggcgcctccatgaccgggaagagcagtgc

SEQ ID NO: 137469 - DNA, 76 bp, Homo sapiens
aagtcccaagcaacaggagcagaaacaagccggcggctggcgcctccatgaccgggaagagcagtgcgccagggcg

SEQ ID NO: 137470 - DNA, 75 bp, Homo sapiens
aagcaacaggagcagaaacaagccggcggctggcgcctccatgaccgggaagagcagtgcgccagggcgggtagg

SEQ ID NO: 137471 - DNA, 73 bp, Homo sapiens
agcagaaacaagccggcggctggcgcctccatgaccgggaagagcagtgcgccagggcgggtagggcccgggc

SEQ ID NO: 137472 - DNA, 72 bp, Homo sapiens
agccggcggctggcgcctccatgaccgggaagagcagtgcgccagggcgggtagggcccgggcgcggtagcc

SEQ ID NO: 137473 - DNA, 71 bp, Homo sapiens
tggcgcctccatgaccgggaagagcagtgcgccagggcgggtagggcccgggcgcggtagcccgccctccc

SEQ ID NO: 137474 - DNA, 72 bp, Homo sapiens
atgaccgggaagagcagtgcgccagggcgggtagggcccgggcgcggtagcccgccctcccgccactgagca

SEQ ID NO: 137475 - DNA, 73 bp, Homo sapiens
agagcagtgcgccagggcgggtagggcccgggcgcggtagcccgccctcccgccactgagcagccgttcattg

SEQ ID NO: 137476 - DNA, 74 bp, Homo sapiens
tagggcccgggcgcggtagcccgccctcccgccactgagcagccgttcattgggcaagggctggtgacacaaga

SEQ ID NO: 137477 - DNA, 78 bp, Homo sapiens
cccacgccaggccatgacccccatatggctcactgcgcaagctcacacccagtcccaggaagcgagccccacgtcgcc

SEQ ID NO: 137478 - DNA, 81 bp, Homo sapiens
aggccatgacccccatatggctcactgcgcaagctcacacccagtcccaggaagcgagccccacgtcgccccagctctgca

SEQ ID NO: 137479 - DNA, 83 bp, Homo sapiens
ccatatggctcactgcgcaagctcacacccagtcccaggaagcgagccccacgtcgccccagctctgcattcacagccgccaa

SEQ ID NO: 137480 - DNA, 81 bp, Homo sapiens
tcactgcgcaagctcacacccagtcccaggaagcgagccccacgtcgccccagctctgcattcacagccgccaagcggtcc

SEQ ID NO: 137481 - DNA, 76 bp, Homo sapiens
agctcacacccagtcccaggaagcgagccccacgtcgccccagctctgcattcacagccgccaagcggtcccggaa

SEQ ID NO: 137482 - DNA, 75 bp, Homo sapiens
agtcccaggaagcgagccccacgtcgccccagctctgcattcacagccgccaagcggtcccggaagccgaatgcc

SEQ ID NO: 137483 - DNA, 76 bp, Homo sapiens
aagcgagccccacgtcgccccagctctgcattcacagccgccaagcggtcccggaagccgaatgccggataggtca

SEQ ID NO: 137484 - DNA, 76 bp, Homo sapiens
acgtcgccccagctctgcattcacagccgccaagcggtcccggaagccgaatgccggataggtcaaagacagcgcc

SEQ ID NO: 137485 - DNA, 79 bp, Homo sapiens
agctctgcattcacagccgccaagcggtcccggaagccgaatgccggataggtcaaagacagcgccgctgctccggcac

SEQ ID NO: 137486 - DNA, 77 bp, Homo sapiens
attcacagccgccaagcggtcccggaagccgaatgccggataggtcaaagacagcgccgctgctccggcactgccgc

SEQ ID NO: 137487 - DNA, 75 bp, Homo sapiens
ccgccaagcggtcccggaagccgaatgccggataggtcaaagacagcgccgctgctccggcactgccgccagagg

SEQ ID NO: 137488 - DNA, 76 bp, Homo sapiens
ggtcccggaagccgaatgccggataggtcaaagacagcgccgctgctccggcactgccgccagagggcgcggagtc

SEQ ID NO: 137489 - DNA, 79 bp, Homo sapiens
aatgccggataggtcaaagacagcgccgctgctccggcactgccgccagagggcgcggagtcgccgtgttggcctgcac

SEQ ID NO: 137490 - DNA, 77 bp, Homo sapiens
ataggtcaaagacagcgccgctgctccggcactgccgccagagggcgcggagtcgccgtgttggcctgcacctccct

SEQ ID NO: 137491 - DNA, 79 bp, Homo sapiens
aagacagcgccgctgctccggcactgccgccagagggcgcggagtcgccgtgttggcctgcacctcccttgtcacgtca

SEQ ID NO: 137492 - DNA, 78 bp, Homo sapiens
tgctccggcactgccgccagagggcgcggagtcgccgtgttggcctgcacctcccttgtcacgtcagccgaacggcta

SEQ ID NO: 137493 - DNA, 77 bp, Homo sapiens
tgccgccagagggcgcggagtcgccgtgttggcctgcacctcccttgtcacgtcagccgaacggctacggcaatgga

SEQ ID NO: 137494 - DNA, 73 bp, Homo sapiens
agggcgcggagtcgccgtgttggcctgcacctcccttgtcacgtcagccgaacggctacggcaatggaggatt

SEQ ID NO: 137495 - DNA, 75 bp, Homo sapiens
agtcgccgtgttggcctgcacctcccttgtcacgtcagccgaacggctacggcaatggaggattttgccgtatgc

SEQ ID NO: 137496 - DNA, 78 bp, Homo sapiens
ttggcctgcacctcccttgtcacgtcagccgaacggctacggcaatggaggattttgccgtatgcgacgacaggatga

SEQ ID NO: 137497 - DNA, 76 bp, Homo sapiens
acctcccttgtcacgtcagccgaacggctacggcaatggaggattttgccgtatgcgacgacaggatgactgcttc

SEQ ID NO: 137498 - DNA, 75 bp, Homo sapiens
aacggctacggcaatggaggattttgccgtatgcgacgacaggatgactgcttcccctgaagcttcaccaaacac

SEQ ID NO: 137499 - DNA, 75 bp, Homo sapiens
aatggaggattttgccgtatgcgacgacaggatgactgcttcccctgaagcttcaccaaacacggagaggctttc

SEQ ID NO: 137500 - DNA, 75 bp, Homo sapiens
aggattttgccgtatgcgacgacaggatgactgcttcccctgaagcttcaccaaacacggagaggctttcctgtc

SEQ ID NO: 137501 - DNA, 75 bp, Homo sapiens
cgtatgcgacgacaggatgactgcttcccctgaagcttcaccaaacacggagaggctttcctgtccctgggagac

SEQ ID NO: 137502 - DNA, 76 bp, Homo sapiens
acaggatgactgcttcccctgaagcttcaccaaacacggagaggctttcctgtccctgggagacgcggtgatgtga

SEQ ID NO: 137503 - DNA, 76 bp, Homo sapiens
ttcccctgaagcttcaccaaacacggagaggctttcctgtccctgggagacgcggtgatgtgacgcagcggttgca

SEQ ID NO: 137504 - DNA, 74 bp, Homo sapiens
cttcaccaaacacggagaggctttcctgtccctgggagacgcggtgatgtgacgcagcggttgcagcgaaggtt

SEQ ID NO: 137505 - DNA, 74 bp, Homo sapiens
aaacacggagaggctttcctgtccctgggagacgcggtgatgtgacgcagcggttgcagcgaaggtttcttgta

SEQ ID NO: 137506 - DNA, 76 bp, Homo sapiens
ctttcctgtccctgggagacgcggtgatgtgacgcagcggttgcagcgaaggtttcttgtaaaagatggccgctgc

SEQ ID NO: 137507 - DNA, 78 bp, Homo sapiens
tccctgggagacgcggtgatgtgacgcagcggttgcagcgaaggtttcttgtaaaagatggccgctgcggagttgcta

SEQ ID NO: 137508 - DNA, 78 bp, Homo sapiens
agacgcggtgatgtgacgcagcggttgcagcgaaggtttcttgtaaaagatggccgctgcggagttgctaggtgtctc

SEQ ID NO: 137509 - DNA, 78 bp, Homo sapiens
atgtgacgcagcggttgcagcgaaggtttcttgtaaaagatggccgctgcggagttgctaggtgtctcctggcaggcg

SEQ ID NO: 137510 - DNA, 65 bp, Homo sapiens
atcccaaagggaaagtaaaattgcatgaaggaaaaataccacacagtggggaaaaatactccttt

SEQ ID NO: 137511 - DNA, 66 bp, Homo sapiens
gaaagtaaaattgcatgaaggaaaaataccacacagtggggaaaaatactcctttttgtaagtctt

SEQ ID NO: 137512 - DNA, 66 bp, Homo sapiens
ttgcatgaaggaaaaataccacacagtggggaaaaatactcctttttgtaagtctttattttttag

SEQ ID NO: 137513 - DNA, 66 bp, Homo sapiens
ataccacacagtggggaaaaatactcctttttgtaagtctttattttttagttgctcctcccatag

SEQ ID NO: 137514 - DNA, 69 bp, Homo sapiens
cagtggggaaaaatactcctttttgtaagtctttattttttagttgctcctcccatagtaatgcactga

SEQ ID NO: 137515 - DNA, 70 bp, Homo sapiens
cctttttgtaagtctttattttttagttgctcctcccatagtaatgcactgaaaggcataacagtttata

SEQ ID NO: 137516 - DNA, 75 bp, Homo sapiens
ttattttttagttgctcctcccatagtaatgcactgaaaggcataacagtttatattgtacaaagcatttgaaga

SEQ ID NO: 137517 - DNA, 75 bp, Homo sapiens
tttagttgctcctcccatagtaatgcactgaaaggcataacagtttatattgtacaaagcatttgaagaaagtac

SEQ ID NO: 137518 - DNA, 77 bp, Homo sapiens
ccatagtaatgcactgaaaggcataacagtttatattgtacaaagcatttgaagaaagtacctcaacttgctgatta

SEQ ID NO: 137519 - DNA, 77 bp, Homo sapiens
gtaatgcactgaaaggcataacagtttatattgtacaaagcatttgaagaaagtacctcaacttgctgattatttca

SEQ ID NO: 137520 - DNA, 75 bp, Homo sapiens
gaaaggcataacagtttatattgtacaaagcatttgaagaaagtacctcaacttgctgattatttcaaaatgaga

SEQ ID NO: 137521 - DNA, 74 bp, Homo sapiens
cagtttatattgtacaaagcatttgaagaaagtacctcaacttgctgattatttcaaaatgagattacaaacaa

SEQ ID NO: 137522 - DNA, 72 bp, Homo sapiens
ttgtacaaagcatttgaagaaagtacctcaacttgctgattatttcaaaatgagattacaaacaaaaagaaa

SEQ ID NO: 137523 - DNA, 67 bp, Homo sapiens
aacaaaaagaaaacaaatctggttcctcaataaagggcaaaataactgaatacagtctgttatttac

SEQ ID NO: 137524 - DNA, 69 bp, Homo sapiens
agaaaacaaatctggttcctcaataaagggcaaaataactgaatacagtctgttatttacttctctctt

SEQ ID NO: 137525 - DNA, 70 bp, Homo sapiens
acaaatctggttcctcaataaagggcaaaataactgaatacagtctgttatttacttctctcttttaaca

SEQ ID NO: 137526 - DNA, 69 bp, Homo sapiens
ctggttcctcaataaagggcaaaataactgaatacagtctgttatttacttctctcttttaacataagg

SEQ ID NO: 137527 - DNA, 69 bp, Homo sapiens
cctcaataaagggcaaaataactgaatacagtctgttatttacttctctcttttaacataaggttggga

SEQ ID NO: 137528 - DNA, 69 bp, Homo sapiens
agggcaaaataactgaatacagtctgttatttacttctctcttttaacataaggttgggaacacttcat

SEQ ID NO: 137529 - DNA, 69 bp, Homo sapiens
ggcaaaataactgaatacagtctgttatttacttctctcttttaacataaggttgggaacacttcattt

SEQ ID NO: 137530 - DNA, 69 bp, Homo sapiens
aataactgaatacagtctgttatttacttctctcttttaacataaggttgggaacacttcattttacaa

SEQ ID NO: 137531 - DNA, 70 bp, Homo sapiens
ctgaatacagtctgttatttacttctctcttttaacataaggttgggaacacttcattttacaaatagga

SEQ ID NO: 137532 - DNA, 69 bp, Homo sapiens
cagtctgttatttacttctctcttttaacataaggttgggaacacttcattttacaaataggattaaca

SEQ ID NO: 137533 - DNA, 69 bp, Homo sapiens
gttatttacttctctcttttaacataaggttgggaacacttcattttacaaataggattaacatgaaca

SEQ ID NO: 137534 - DNA, 72 bp, Homo sapiens
acttctctcttttaacataaggttgggaacacttcattttacaaataggattaacatgaacataacatcgca

SEQ ID NO: 137535 - DNA, 76 bp, Homo sapiens
tttaacataaggttgggaacacttcattttacaaataggattaacatgaacataacatcgcacaagcttgcagaca

SEQ ID NO: 137536 - DNA, 78 bp, Homo sapiens
taaggttgggaacacttcattttacaaataggattaacatgaacataacatcgcacaagcttgcagacaaccagcata

SEQ ID NO: 137537 - DNA, 78 bp, Homo sapiens
ttacaaataggattaacatgaacataacatcgcacaagcttgcagacaaccagcataaaatatggagtacagttttta

SEQ ID NO: 137538 - DNA, 80 bp, Homo sapiens
attaacatgaacataacatcgcacaagcttgcagacaaccagcataaaatatggagtacagtttttaatcagaagaatca

SEQ ID NO: 137539 - DNA, 82 bp, Homo sapiens
atgaacataacatcgcacaagcttgcagacaaccagcataaaatatggagtacagtttttaatcagaagaatcatgcttcca

SEQ ID NO: 137540 - DNA, 79 bp, Homo sapiens
cacaagcttgcagacaaccagcataaaatatggagtacagtttttaatcagaagaatcatgcttccatgaaagaaatta

SEQ ID NO: 137541 - DNA, 79 bp, Homo sapiens
gcttgcagacaaccagcataaaatatggagtacagtttttaatcagaagaatcatgcttccatgaaagaaattataatc

SEQ ID NO: 137542 - DNA, 76 bp, Homo sapiens
ccagcataaaatatggagtacagtttttaatcagaagaatcatgcttccatgaaagaaattataatcgtttataca

SEQ ID NO: 137543 - DNA, 75 bp, Homo sapiens
cagtttttaatcagaagaatcatgcttccatgaaagaaattataatcgtttatacaattgaatcgatttcagtat

SEQ ID NO: 137544 - DNA, 76 bp, Homo sapiens
tcagaagaatcatgcttccatgaaagaaattataatcgtttatacaattgaatcgatttcagtattacaaaaacta

SEQ ID NO: 137545 - DNA, 75 bp, Homo sapiens
catgcttccatgaaagaaattataatcgtttatacaattgaatcgatttcagtattacaaaaactaagttgcatc

SEQ ID NO: 137546 - DNA, 71 bp, Homo sapiens
aagaaattataatcgtttatacaattgaatcgatttcagtattacaaaaactaagttgcatctattcgtat

SEQ ID NO: 137547 - DNA, 73 bp, Homo sapiens
tataatcgtttatacaattgaatcgatttcagtattacaaaaactaagttgcatctattcgtatttagttcat

SEQ ID NO: 137548 - DNA, 73 bp, Homo sapiens
ttatacaattgaatcgatttcagtattacaaaaactaagttgcatctattcgtatttagttcattaagaagga

SEQ ID NO: 137549 - DNA, 70 bp, Homo sapiens
gaatcgatttcagtattacaaaaactaagttgcatctattcgtatttagttcattaagaaggaaaacaaa

SEQ ID NO: 137550 - DNA, 69 bp, Homo sapiens
acaaacaaaaaggaatgttaagaaaagccaaacaccatttggcactctcatacacaggtcgggtcacct

SEQ ID NO: 137551 - DNA, 71 bp, Homo sapiens
taagaaaagccaaacaccatttggcactctcatacacaggtcgggtcaccttggtccttgaaattcggaaa

SEQ ID NO: 137552 - DNA, 70 bp, Homo sapiens
aaacaccatttggcactctcatacacaggtcgggtcaccttggtccttgaaattcggaaaggggtgtgcc

SEQ ID NO: 137553 - DNA, 74 bp, Homo sapiens
ttggcactctcatacacaggtcgggtcaccttggtccttgaaattcggaaaggggtgtgcctcagacgtcataa

SEQ ID NO: 137554 - DNA, 70 bp, Homo sapiens
atacacaggtcgggtcaccttggtccttgaaattcggaaaggggtgtgcctcagacgtcataaagtagtg

SEQ ID NO: 137555 - DNA, 72 bp, Homo sapiens
tcgggtcaccttggtccttgaaattcggaaaggggtgtgcctcagacgtcataaagtagtggctgactggaa

SEQ ID NO: 137556 - DNA, 73 bp, Homo sapiens
ttggtccttgaaattcggaaaggggtgtgcctcagacgtcataaagtagtggctgactggaacagtgctattt

SEQ ID NO: 137557 - DNA, 75 bp, Homo sapiens
ttgaaattcggaaaggggtgtgcctcagacgtcataaagtagtggctgactggaacagtgctattttaatcaaca

SEQ ID NO: 137558 - DNA, 76 bp, Homo sapiens
gggtgtgcctcagacgtcataaagtagtggctgactggaacagtgctattttaatcaacaaacaatagtttgccaa

SEQ ID NO: 137559 - DNA, 75 bp, Homo sapiens
tcagacgtcataaagtagtggctgactggaacagtgctattttaatcaacaaacaatagtttgccaacaaataaa

SEQ ID NO: 137560 - DNA, 76 bp, Homo sapiens
gtcataaagtagtggctgactggaacagtgctattttaatcaacaaacaatagtttgccaacaaataaatacatga

SEQ ID NO: 137561 - DNA, 78 bp, Homo sapiens
ctgactggaacagtgctattttaatcaacaaacaatagtttgccaacaaataaatacatgatacacgcaacacacaca

SEQ ID NO: 137562 - DNA, 75 bp, Homo sapiens
ggaacagtgctattttaatcaacaaacaatagtttgccaacaaataaatacatgatacacgcaacacacacaaaa

SEQ ID NO: 137563 - DNA, 71 bp, Homo sapiens
cacaaaaaaataaacattaaaaacagtgacatgattgtctaaaattaagatgttattacaaggatttggca

SEQ ID NO: 137564 - DNA, 70 bp, Homo sapiens
aaacattaaaaacagtgacatgattgtctaaaattaagatgttattacaaggatttggcaaacaatttat

SEQ ID NO: 137565 - DNA, 73 bp, Homo sapiens
aacagtgacatgattgtctaaaattaagatgttattacaaggatttggcaaacaatttattagtggtacagcg

SEQ ID NO: 137566 - DNA, 73 bp, Homo sapiens
tgattgtctaaaattaagatgttattacaaggatttggcaaacaatttattagtggtacagcggtactggtga

SEQ ID NO: 137567 - DNA, 71 bp, Homo sapiens
aagatgttattacaaggatttggcaaacaatttattagtggtacagcggtactggtgatgaataggttact

SEQ ID NO: 137568 - DNA, 73 bp, Homo sapiens
tacaaggatttggcaaacaatttattagtggtacagcggtactggtgatgaataggttacttcactgacttaa

SEQ ID NO: 137569 - DNA, 71 bp, Homo sapiens
aacaatttattagtggtacagcggtactggtgatgaataggttacttcactgacttaacctctttgagtgt

SEQ ID NO: 137570 - DNA, 73 bp, Homo sapiens
tttattagtggtacagcggtactggtgatgaataggttacttcactgacttaacctctttgagtgttaacatc

SEQ ID NO: 137571 - DNA, 73 bp, Homo sapiens
agcggtactggtgatgaataggttacttcactgacttaacctctttgagtgttaacatccatagtttacaata

SEQ ID NO: 137572 - DNA, 75 bp, Homo sapiens
ctggtgatgaataggttacttcactgacttaacctctttgagtgttaacatccatagtttacaatatacacatac

SEQ ID NO: 137573 - DNA, 70 bp, Homo sapiens
cttcactgacttaacctctttgagtgttaacatccatagtttacaatatacacataccctttttccctag

SEQ ID NO: 137574 - DNA, 69 bp, Homo sapiens
cactgacttaacctctttgagtgttaacatccatagtttacaatatacacataccctttttccctagtt

SEQ ID NO: 137575 - DNA, 68 bp, Homo sapiens
taacctctttgagtgttaacatccatagtttacaatatacacataccctttttccctagttttaaaca

SEQ ID NO: 137576 - DNA, 68 bp, Homo sapiens
cctctttgagtgttaacatccatagtttacaatatacacataccctttttccctagttttaaacaatg

SEQ ID NO: 137577 - DNA, 69 bp, Homo sapiens
tctttgagtgttaacatccatagtttacaatatacacataccctttttccctagttttaaacaatgtac

SEQ ID NO: 137578 - DNA, 68 bp, Homo sapiens
gagtgttaacatccatagtttacaatatacacataccctttttccctagttttaaacaatgtacttaa

SEQ ID NO: 137579 - DNA, 68 bp, Homo sapiens
acatccatagtttacaatatacacataccctttttccctagttttaaacaatgtacttaagaaggcaa

SEQ ID NO: 137580 - DNA, 65 bp, Homo sapiens
tagtttacaatatacacataccctttttccctagttttaaacaatgtacttaagaaggcaaaagg

SEQ ID NO: 137581 - DNA, 64 bp, Homo sapiens
gtttacaatatacacataccctttttccctagttttaaacaatgtacttaagaaggcaaaaggg

SEQ ID NO: 137582 - DNA, 65 bp, Homo sapiens
caatatacacataccctttttccctagttttaaacaatgtacttaagaaggcaaaagggggaaca

SEQ ID NO: 137583 - DNA, 63 bp, Homo sapiens
cacataccctttttccctagttttaaacaatgtacttaagaaggcaaaagggggaacaagtac

SEQ ID NO: 137584 - DNA, 65 bp, Homo sapiens
ttttccctagttttaaacaatgtacttaagaaggcaaaagggggaacaagtactccctgttatca

SEQ ID NO: 137585 - DNA, 66 bp, Homo sapiens
ctagttttaaacaatgtacttaagaaggcaaaagggggaacaagtactccctgttatcagtttcta

SEQ ID NO: 137586 - DNA, 69 bp, Homo sapiens
acaatgtacttaagaaggcaaaagggggaacaagtactccctgttatcagtttctataataattgactg

SEQ ID NO: 137587 - DNA, 74 bp, Homo sapiens
agtactccctgttatcagtttctataataattgactgtgcatttcatccaactacttctgtcttcaaagggtta

SEQ ID NO: 137588 - DNA, 71 bp, Homo sapiens
tttctataataattgactgtgcatttcatccaactacttctgtcttcaaagggttaaattacataaaactt

SEQ ID NO: 137589 - DNA, 69 bp, Homo sapiens
gactgtgcatttcatccaactacttctgtcttcaaagggttaaattacataaaactttaacgaagaaaa

SEQ ID NO: 137590 - DNA, 66 bp, Homo sapiens
gcatttcatccaactacttctgtcttcaaagggttaaattacataaaactttaacgaagaaaaaaa

SEQ ID NO: 137591 - DNA, 63 bp, Homo sapiens
caactacttctgtcttcaaagggttaaattacataaaactttaacgaagaaaaaaattaaatc

SEQ ID NO: 137592 - DNA, 63 bp, Homo sapiens
tgtcttcaaagggttaaattacataaaactttaacgaagaaaaaaattaaatctgtaattaaa

SEQ ID NO: 137593 - DNA, 68 bp, Homo sapiens
aaactttaacgaagaaaaaaattaaatctgtaattaaaagcaactgttcccaatcatgtcaggtgatc

SEQ ID NO: 137594 - DNA, 71 bp, Homo sapiens
cgaagaaaaaaattaaatctgtaattaaaagcaactgttcccaatcatgtcaggtgatcttgtacaaaaga

SEQ ID NO: 137595 - DNA, 74 bp, Homo sapiens
attaaatctgtaattaaaagcaactgttcccaatcatgtcaggtgatcttgtacaaaagagaattcagtttcta

SEQ ID NO: 137596 - DNA, 76 bp, Homo sapiens
taattaaaagcaactgttcccaatcatgtcaggtgatcttgtacaaaagagaattcagtttctatggagtgttcat

SEQ ID NO: 137597 - DNA, 79 bp, Homo sapiens
aaagcaactgttcccaatcatgtcaggtgatcttgtacaaaagagaattcagtttctatggagtgttcattcatatcaa

SEQ ID NO: 137598 - DNA, 84 bp, Homo sapiens
gttcccaatcatgtcaggtgatcttgtacaaaagagaattcagtttctatggagtgttcattcatatcaatgctgccatctcaa

SEQ ID NO: 137599 - DNA, 83 bp, Homo sapiens
atgtcaggtgatcttgtacaaaagagaattcagtttctatggagtgttcattcatatcaatgctgccatctcaactgcccttc

SEQ ID NO: 137600 - DNA, 81 bp, Homo sapiens
atcttgtacaaaagagaattcagtttctatggagtgttcattcatatcaatgctgccatctcaactgcccttctcacccac

SEQ ID NO: 137601 - DNA, 80 bp, Homo sapiens
agagaattcagtttctatggagtgttcattcatatcaatgctgccatctcaactgcccttctcacccacccataccctaa

SEQ ID NO: 137602 - DNA, 77 bp, Homo sapiens
tgttcattcatatcaatgctgccatctcaactgcccttctcacccacccataccctaaggtggggtaaactggaaga

SEQ ID NO: 137603 - DNA, 72 bp, Homo sapiens
ccatctcaactgcccttctcacccacccataccctaaggtggggtaaactggaagatgccttcagcccacca

SEQ ID NO: 137604 - DNA, 67 bp, Homo sapiens
ttctcacccacccataccctaaggtggggtaaactggaagatgccttcagcccaccaagttttttgt

SEQ ID NO: 137605 - DNA, 67 bp, Homo sapiens
aaggtggggtaaactggaagatgccttcagcccaccaagttttttgttttcactgaatcactttaag

SEQ ID NO: 137606 - DNA, 73 bp, Homo sapiens
aaactggaagatgccttcagcccaccaagttttttgttttcactgaatcactttaagtcgcattgattgatct

SEQ ID NO: 137607 - DNA, 77 bp, Homo sapiens
atgccttcagcccaccaagttttttgttttcactgaatcactttaagtcgcattgattgatcttccagaagtcagca

SEQ ID NO: 137608 - DNA, 77 bp, Homo sapiens
accaagttttttgttttcactgaatcactttaagtcgcattgattgatcttccagaagtcagcagctgcctttgctg

SEQ ID NO: 137609 - DNA, 81 bp, Homo sapiens
ttgttttcactgaatcactttaagtcgcattgattgatcttccagaagtcagcagctgcctttgctgtgcaaaacaaaata

SEQ ID NO: 137610 - DNA, 80 bp, Homo sapiens
aatcactttaagtcgcattgattgatcttccagaagtcagcagctgcctttgctgtgcaaaacaaaatatcgagaataaa

SEQ ID NO: 137611 - DNA, 79 bp, Homo sapiens
tttaagtcgcattgattgatcttccagaagtcagcagctgcctttgctgtgcaaaacaaaatatcgagaataaatagtt

SEQ ID NO: 137612 - DNA, 76 bp, Homo sapiens
attgattgatcttccagaagtcagcagctgcctttgctgtgcaaaacaaaatatcgagaataaatagtttcttttt

SEQ ID NO: 137613 - DNA, 77 bp, Homo sapiens
tttttaaatcattcagtttaaggtcactagactttagatgagtgaccctgcaggtttataaggcattctgctcagca

SEQ ID NO: 137614 - DNA, 78 bp, Homo sapiens
ttcagtttaaggtcactagactttagatgagtgaccctgcaggtttataaggcattctgctcagcagtcttgtaaata

SEQ ID NO: 137615 - DNA, 81 bp, Homo sapiens
tagactttagatgagtgaccctgcaggtttataaggcattctgctcagcagtcttgtaaatagtcctatatgaaagagcca

SEQ ID NO: 137616 - DNA, 82 bp, Homo sapiens
atgagtgaccctgcaggtttataaggcattctgctcagcagtcttgtaaatagtcctatatgaaagagccatgctactgttg

SEQ ID NO: 137617 - DNA, 78 bp, Homo sapiens
aggtttataaggcattctgctcagcagtcttgtaaatagtcctatatgaaagagccatgctactgttggacttggtcc

SEQ ID NO: 137618 - DNA, 81 bp, Homo sapiens
tataaggcattctgctcagcagtcttgtaaatagtcctatatgaaagagccatgctactgttggacttggtcccactctgg

SEQ ID NO: 137619 - DNA, 79 bp, Homo sapiens
tcagcagtcttgtaaatagtcctatatgaaagagccatgctactgttggacttggtcccactctggtcaaccttgataa

SEQ ID NO: 137620 - DNA, 77 bp, Homo sapiens
ttgtaaatagtcctatatgaaagagccatgctactgttggacttggtcccactctggtcaaccttgataacgtcata

SEQ ID NO: 137621 - DNA, 78 bp, Homo sapiens
tcctatatgaaagagccatgctactgttggacttggtcccactctggtcaaccttgataacgtcatacgtggcttatg

SEQ ID NO: 137622 - DNA, 77 bp, Homo sapiens
tactgttggacttggtcccactctggtcaaccttgataacgtcatacgtggcttatggactggatagcactggattc

SEQ ID NO: 137623 - DNA, 76 bp, Homo sapiens
ttggacttggtcccactctggtcaaccttgataacgtcatacgtggcttatggactggatagcactggattccgcc

SEQ ID NO: 137624 - DNA, 78 bp, Homo sapiens
actctggtcaaccttgataacgtcatacgtggcttatggactggatagcactggattccgccgcagccctggccatac

SEQ ID NO: 137625 - DNA, 79 bp, Homo sapiens
aaccttgataacgtcatacgtggcttatggactggatagcactggattccgccgcagccctggccatactgtgccacac

SEQ ID NO: 137626 - DNA, 79 bp, Homo sapiens
ataacgtcatacgtggcttatggactggatagcactggattccgccgcagccctggccatactgtgccacacgttggaa

SEQ ID NO: 137627 - DNA, 81 bp, Homo sapiens
tggcttatggactggatagcactggattccgccgcagccctggccatactgtgccacacgttggaagaactgtgggatgta

SEQ ID NO: 137628 - DNA, 79 bp, Homo sapiens
actggatagcactggattccgccgcagccctggccatactgtgccacacgttggaagaactgtgggatgtagaatggag

SEQ ID NO: 137629 - DNA, 76 bp, Homo sapiens
actggattccgccgcagccctggccatactgtgccacacgttggaagaactgtgggatgtagaatggagggactcc

SEQ ID NO: 137630 - DNA, 80 bp, Homo sapiens
cgcagccctggccatactgtgccacacgttggaagaactgtgggatgtagaatggagggactccttgtcagacagtgaca

SEQ ID NO: 137631 - DNA, 85 bp, Homo sapiens
tggccatactgtgccacacgttggaagaactgtgggatgtagaatggagggactccttgtcagacagtgacagcatcatagcata

SEQ ID NO: 137632 - DNA, 80 bp, Homo sapiens
ttggaagaactgtgggatgtagaatggagggactccttgtcagacagtgacagcatcatagcatatgcctggggtaaaaa

SEQ ID NO: 137633 - DNA, 80 bp, Homo sapiens
aactgtgggatgtagaatggagggactccttgtcagacagtgacagcatcatagcatatgcctggggtaaaaaggagaga

SEQ ID NO: 137634 - DNA, 81 bp, Homo sapiens
tgtagaatggagggactccttgtcagacagtgacagcatcatagcatatgcctggggtaaaaaggagagagactcagtaaa

SEQ ID NO: 137635 - DNA, 64 bp, Homo sapiens
gataaaaaggagtacaaagaaaattttggaatttaaattttaatcctgcctttaaacctgcctc

SEQ ID NO: 137636 - DNA, 67 bp, Homo sapiens
gtacaaagaaaattttggaatttaaattttaatcctgcctttaaacctgcctctactcacctagctg

SEQ ID NO: 137637 - DNA, 69 bp, Homo sapiens
aagaaaattttggaatttaaattttaatcctgcctttaaacctgcctctactcacctagctgtgtgatc

SEQ ID NO: 137638 - DNA, 73 bp, Homo sapiens
aatttaaattttaatcctgcctttaaacctgcctctactcacctagctgtgtgatcttgagcaagttgcttaa

SEQ ID NO: 137639 - DNA, 73 bp, Homo sapiens
ttttaatcctgcctttaaacctgcctctactcacctagctgtgtgatcttgagcaagttgcttaaccttttaa

SEQ ID NO: 137640 - DNA, 72 bp, Homo sapiens
ctttaaacctgcctctactcacctagctgtgtgatcttgagcaagttgcttaaccttttaagctttactttc

SEQ ID NO: 137641 - DNA, 73 bp, Homo sapiens
ctctactcacctagctgtgtgatcttgagcaagttgcttaaccttttaagctttactttcctcctataaaaca

SEQ ID NO: 137642 - DNA, 74 bp, Homo sapiens
ctagctgtgtgatcttgagcaagttgcttaaccttttaagctttactttcctcctataaaacagatgatagtaa

SEQ ID NO: 137643 - DNA, 72 bp, Homo sapiens
gatcttgagcaagttgcttaaccttttaagctttactttcctcctataaaacagatgatagtaataacagta

SEQ ID NO: 137644 - DNA, 68 bp, Homo sapiens
aagttgcttaaccttttaagctttactttcctcctataaaacagatgatagtaataacagtattggcc

SEQ ID NO: 137645 - DNA, 69 bp, Homo sapiens
accttttaagctttactttcctcctataaaacagatgatagtaataacagtattggcctccaagagttg

SEQ ID NO: 137646 - DNA, 72 bp, Homo sapiens
ttaagctttactttcctcctataaaacagatgatagtaataacagtattggcctccaagagttgtggaggaa

SEQ ID NO: 137647 - DNA, 77 bp, Homo sapiens
acgtttcatgcataatgtaaccatgatgctgtactatgggaaaatctgtacctgcgatttggactttctgtgtaacg

SEQ ID NO: 137648 - DNA, 76 bp, Homo sapiens
taatgtaaccatgatgctgtactatgggaaaatctgtacctgcgatttggactttctgtgtaacggctgcttaagt

SEQ ID NO: 137649 - DNA, 78 bp, Homo sapiens
atgatgctgtactatgggaaaatctgtacctgcgatttggactttctgtgtaacggctgcttaagttcctctggcaca

SEQ ID NO: 137650 - DNA, 75 bp, Homo sapiens
tactatgggaaaatctgtacctgcgatttggactttctgtgtaacggctgcttaagttcctctggcacatgggaa

SEQ ID NO: 137651 - DNA, 73 bp, Homo sapiens
aaatctgtacctgcgatttggactttctgtgtaacggctgcttaagttcctctggcacatgggaagtactaaa

SEQ ID NO: 137652 - DNA, 75 bp, Homo sapiens
gatttggactttctgtgtaacggctgcttaagttcctctggcacatgggaagtactaaaagaagacagctcagct

SEQ ID NO: 137653 - DNA, 78 bp, Homo sapiens
tttctgtgtaacggctgcttaagttcctctggcacatgggaagtactaaaagaagacagctcagcttcagaatattga

SEQ ID NO: 137654 - DNA, 78 bp, Homo sapiens
tgtaacggctgcttaagttcctctggcacatgggaagtactaaaagaagacagctcagcttcagaatattgattatct

SEQ ID NO: 137655 - DNA, 76 bp, Homo sapiens
cttaagttcctctggcacatgggaagtactaaaagaagacagctcagcttcagaatattgattatcttccattttc

SEQ ID NO: 137656 - DNA, 79 bp, Homo sapiens
gcacatgggaagtactaaaagaagacagctcagcttcagaatattgattatcttccattttcctcattttgaggctatc

SEQ ID NO: 137657 - DNA, 77 bp, Homo sapiens
aagtactaaaagaagacagctcagcttcagaatattgattatcttccattttcctcattttgaggctatctgtgaag

SEQ ID NO: 137658 - DNA, 80 bp, Homo sapiens
taaaagaagacagctcagcttcagaatattgattatcttccattttcctcattttgaggctatctgtgaagtgccttata

SEQ ID NO: 137659 - DNA, 83 bp, Homo sapiens
tcagcttcagaatattgattatcttccattttcctcattttgaggctatctgtgaagtgccttatatgatctagagcagaaag

SEQ ID NO: 137660 - DNA, 79 bp, Homo sapiens
atattgattatcttccattttcctcattttgaggctatctgtgaagtgccttatatgatctagagcagaaagtccactt

SEQ ID NO: 137661 - DNA, 78 bp, Homo sapiens
ttatcttccattttcctcattttgaggctatctgtgaagtgccttatatgatctagagcagaaagtccacttttatat

SEQ ID NO: 137662 - DNA, 77 bp, Homo sapiens
tttcctcattttgaggctatctgtgaagtgccttatatgatctagagcagaaagtccacttttatattcttcctctt

SEQ ID NO: 137663 - DNA, 77 bp, Homo sapiens
tttgaggctatctgtgaagtgccttatatgatctagagcagaaagtccacttttatattcttcctctttatacctaa

SEQ ID NO: 137664 - DNA, 76 bp, Homo sapiens
tctgtgaagtgccttatatgatctagagcagaaagtccacttttatattcttcctctttatacctaaaatgaacca

SEQ ID NO: 137665 - DNA, 73 bp, Homo sapiens
gtgccttatatgatctagagcagaaagtccacttttatattcttcctctttatacctaaaatgaaccaacgaa

SEQ ID NO: 137666 - DNA, 71 bp, Homo sapiens
gatctagagcagaaagtccacttttatattcttcctctttatacctaaaatgaaccaacgaaaaacacaga

SEQ ID NO: 137667 - DNA, 66 bp, Homo sapiens
cagaaagtccacttttatattcttcctctttatacctaaaatgaaccaacgaaaaacacagaaatt

SEQ ID NO: 137668 - DNA, 78 bp, Homo sapiens
tacatggatctactctagcttagtttctaaagtcacccaaggtactcacctcactggggatgtcttgcaactcatctc

SEQ ID NO: 137669 - DNA, 77 bp, Homo sapiens
tctactctagcttagtttctaaagtcacccaaggtactcacctcactggggatgtcttgcaactcatctccagggca

SEQ ID NO: 137670 - DNA, 76 bp, Homo sapiens
tttctaaagtcacccaaggtactcacctcactggggatgtcttgcaactcatctccagggcactggtttcttcata

SEQ ID NO: 137671 - DNA, 77 bp, Homo sapiens
aaagtcacccaaggtactcacctcactggggatgtcttgcaactcatctccagggcactggtttcttcatagtcatc

SEQ ID NO: 137672 - DNA, 76 bp, Homo sapiens
aaggtactcacctcactggggatgtcttgcaactcatctccagggcactggtttcttcatagtcatcctcagggtt

SEQ ID NO: 137673 - DNA, 77 bp, Homo sapiens
ctggggatgtcttgcaactcatctccagggcactggtttcttcatagtcatcctcagggtttccttcatgtaaatta

SEQ ID NO: 137674 - DNA, 78 bp, Homo sapiens
atgtcttgcaactcatctccagggcactggtttcttcatagtcatcctcagggtttccttcatgtaaattacttgtca

SEQ ID NO: 137675 - DNA, 74 bp, Homo sapiens
aactcatctccagggcactggtttcttcatagtcatcctcagggtttccttcatgtaaattacttgtcactggt

SEQ ID NO: 137676 - DNA, 71 bp, Homo sapiens
cactggtttcttcatagtcatcctcagggtttccttcatgtaaattacttgtcactggttcctttcctgtt

SEQ ID NO: 137677 - DNA, 70 bp, Homo sapiens
gtttcttcatagtcatcctcagggtttccttcatgtaaattacttgtcactggttcctttcctgtttttc

SEQ ID NO: 137678 - DNA, 70 bp, Homo sapiens
atcctcagggtttccttcatgtaaattacttgtcactggttcctttcctgtttttccagtaatatcattg

SEQ ID NO: 137679 - DNA, 70 bp, Homo sapiens
agggtttccttcatgtaaattacttgtcactggttcctttcctgtttttccagtaatatcattgtcttca

SEQ ID NO: 137680 - DNA, 74 bp, Homo sapiens
taaattacttgtcactggttcctttcctgtttttccagtaatatcattgtcttcatcctcctcatctaacaaca

SEQ ID NO: 137681 - DNA, 77 bp, Homo sapiens
tgtcactggttcctttcctgtttttccagtaatatcattgtcttcatcctcctcatctaacaacacctcatcttcaa

SEQ ID NO: 137682 - DNA, 76 bp, Homo sapiens
ttcctttcctgtttttccagtaatatcattgtcttcatcctcctcatctaacaacacctcatcttcaacttcttca

SEQ ID NO: 137683 - DNA, 82 bp, Homo sapiens
ttttccagtaatatcattgtcttcatcctcctcatctaacaacacctcatcttcaacttcttcatcatccagcaagtctgaa

SEQ ID NO: 137684 - DNA, 82 bp, Homo sapiens
agtaatatcattgtcttcatcctcctcatctaacaacacctcatcttcaacttcttcatcatccagcaagtctgaattttga

SEQ ID NO: 137685 - DNA, 80 bp, Homo sapiens
cttcatcctcctcatctaacaacacctcatcttcaacttcttcatcatccagcaagtctgaattttgactggtcaccaaa

SEQ ID NO: 137686 - DNA, 79 bp, Homo sapiens
ctcatctaacaacacctcatcttcaacttcttcatcatccagcaagtctgaattttgactggtcaccaaagccttttca

SEQ ID NO: 137687 - DNA, 76 bp, Homo sapiens
aacacctcatcttcaacttcttcatcatccagcaagtctgaattttgactggtcaccaaagccttttcatctttaa

SEQ ID NO: 137688 - DNA, 77 bp, Homo sapiens
ctcatcttcaacttcttcatcatccagcaagtctgaattttgactggtcaccaaagccttttcatctttaaaatgac

SEQ ID NO: 137689 - DNA, 78 bp, Homo sapiens
ttcttcatcatccagcaagtctgaattttgactggtcaccaaagccttttcatctttaaaatgactgccattcattct

SEQ ID NO: 137690 - DNA, 75 bp, Homo sapiens
atccagcaagtctgaattttgactggtcaccaaagccttttcatctttaaaatgactgccattcattctttcaaa

SEQ ID NO: 137691 - DNA, 74 bp, Homo sapiens
gtctgaattttgactggtcaccaaagccttttcatctttaaaatgactgccattcattctttcaaaagcattaa

SEQ ID NO: 137692 - DNA, 71 bp, Homo sapiens
tgactggtcaccaaagccttttcatctttaaaatgactgccattcattctttcaaaagcattaaaaaaaaa

SEQ ID NO: 137693 - DNA, 72 bp, Homo sapiens
tgttcatttcagtcgtcacagagtttaaaaagtaaaagacagctttacctctcctccacattcctgggagat

SEQ ID NO: 137694 - DNA, 74 bp, Homo sapiens
ttcagtcgtcacagagtttaaaaagtaaaagacagctttacctctcctccacattcctgggagattggctgcca

SEQ ID NO: 137695 - DNA, 72 bp, Homo sapiens
gtttaaaaagtaaaagacagctttacctctcctccacattcctgggagattggctgccatggttgctgttcc

SEQ ID NO: 137696 - DNA, 74 bp, Homo sapiens
agtaaaagacagctttacctctcctccacattcctgggagattggctgccatggttgctgttcccaatgaaatt

SEQ ID NO: 137697 - DNA, 76 bp, Homo sapiens
ctttacctctcctccacattcctgggagattggctgccatggttgctgttcccaatgaaatttcgaatttctgtga

SEQ ID NO: 137698 - DNA, 78 bp, Homo sapiens
tcctccacattcctgggagattggctgccatggttgctgttcccaatgaaatttcgaatttctgtgaagtaagcatct

SEQ ID NO: 137699 - DNA, 76 bp, Homo sapiens
attcctgggagattggctgccatggttgctgttcccaatgaaatttcgaatttctgtgaagtaagcatcttctttg

SEQ ID NO: 137700 - DNA, 79 bp, Homo sapiens
agattggctgccatggttgctgttcccaatgaaatttcgaatttctgtgaagtaagcatcttctttgtcatccagaatc

SEQ ID NO: 137701 - DNA, 77 bp, Homo sapiens
tggttgctgttcccaatgaaatttcgaatttctgtgaagtaagcatcttctttgtcatccagaatcgcacctgtact

SEQ ID NO: 137702 - DNA, 75 bp, Homo sapiens
ttcccaatgaaatttcgaatttctgtgaagtaagcatcttctttgtcatccagaatcgcacctgtactttccagt

SEQ ID NO: 137703 - DNA, 76 bp, Homo sapiens
aaatttcgaatttctgtgaagtaagcatcttctttgtcatccagaatcgcacctgtactttccagttcagaatgag

SEQ ID NO: 137704 - DNA, 78 bp, Homo sapiens
aatttctgtgaagtaagcatcttctttgtcatccagaatcgcacctgtactttccagttcagaatgaggcgacgatgt

SEQ ID NO: 137705 - DNA, 79 bp, Homo sapiens
aagtaagcatcttctttgtcatccagaatcgcacctgtactttccagttcagaatgaggcgacgatgttgctgtacctg

SEQ ID NO: 137706 - DNA, 81 bp, Homo sapiens
ttctttgtcatccagaatcgcacctgtactttccagttcagaatgaggcgacgatgttgctgtacctgtgtggagcagaaa

SEQ ID NO: 137707 - DNA, 79 bp, Homo sapiens
agaatcgcacctgtactttccagttcagaatgaggcgacgatgttgctgtacctgtgtggagcagaaagccttttatga

SEQ ID NO: 137708 - DNA, 78 bp, Homo sapiens
tgtactttccagttcagaatgaggcgacgatgttgctgtacctgtgtggagcagaaagccttttatgacaaagattat

SEQ ID NO: 137709 - DNA, 71 bp, Homo sapiens
aacacgaaaaagaagtcatctttgacttataacacaatttattacgtaccggacatgttcccattctcatg

SEQ ID NO: 137710 - DNA, 71 bp, Homo sapiens
aagtcatctttgacttataacacaatttattacgtaccggacatgttcccattctcatgtttctttaggtg

SEQ ID NO: 137711 - DNA, 71 bp, Homo sapiens
gacttataacacaatttattacgtaccggacatgttcccattctcatgtttctttaggtgtctgtctaaat

SEQ ID NO: 137712 - DNA, 69 bp, Homo sapiens
acaatttattacgtaccggacatgttcccattctcatgtttctttaggtgtctgtctaaattggtttgt

SEQ ID NO: 137713 - DNA, 71 bp, Homo sapiens
ttattacgtaccggacatgttcccattctcatgtttctttaggtgtctgtctaaattggtttgttgaccaa

SEQ ID NO: 137714 - DNA, 73 bp, Homo sapiens
acatgttcccattctcatgtttctttaggtgtctgtctaaattggtttgttgaccaaaacacctatcacataa

SEQ ID NO: 137715 - DNA, 73 bp, Homo sapiens
ttctcatgtttctttaggtgtctgtctaaattggtttgttgaccaaaacacctatcacataagtgacacttaa

SEQ ID NO: 137716 - DNA, 71 bp, Homo sapiens
tttctttaggtgtctgtctaaattggtttgttgaccaaaacacctatcacataagtgacacttaaatggct

SEQ ID NO: 137717 - DNA, 72 bp, Homo sapiens
aggtgtctgtctaaattggtttgttgaccaaaacacctatcacataagtgacacttaaatggcttctcttta

SEQ ID NO: 137718 - DNA, 74 bp, Homo sapiens
taaattggtttgttgaccaaaacacctatcacataagtgacacttaaatggcttctctttattgtggatgttgc

SEQ ID NO: 137719 - DNA, 78 bp, Homo sapiens
ttgaccaaaacacctatcacataagtgacacttaaatggcttctctttattgtggatgttgcgaacatgcctttgcaa

SEQ ID NO: 137720 - DNA, 78 bp, Homo sapiens
acctatcacataagtgacacttaaatggcttctctttattgtggatgttgcgaacatgcctttgcaagttagaagata

SEQ ID NO: 137721 - DNA, 79 bp, Homo sapiens
ataagtgacacttaaatggcttctctttattgtggatgttgcgaacatgcctttgcaagttagaagatatgctaaatga

SEQ ID NO: 137722 - DNA, 81 bp, Homo sapiens
taaatggcttctctttattgtggatgttgcgaacatgcctttgcaagttagaagatatgctaaatgatctgtcacagtatt

SEQ ID NO: 137723 - DNA, 84 bp, Homo sapiens
ttctctttattgtggatgttgcgaacatgcctttgcaagttagaagatatgctaaatgatctgtcacagtatttgcatctgaaa

SEQ ID NO: 137724 - DNA, 83 bp, Homo sapiens
tattgtggatgttgcgaacatgcctttgcaagttagaagatatgctaaatgatctgtcacagtatttgcatctgaaaaataaa

SEQ ID NO: 137725 - DNA, 81 bp, Homo sapiens
ttgcgaacatgcctttgcaagttagaagatatgctaaatgatctgtcacagtatttgcatctgaaaaataaacaaagagaa

SEQ ID NO: 137726 - DNA, 78 bp, Homo sapiens
gcctttgcaagttagaagatatgctaaatgatctgtcacagtatttgcatctgaaaaataaacaaagagaaaatatta

SEQ ID NO: 137727 - DNA, 80 bp, Homo sapiens
gttagaagatatgctaaatgatctgtcacagtatttgcatctgaaaaataaacaaagagaaaatattagcaagcacatta

SEQ ID NO: 137728 - DNA, 76 bp, Homo sapiens
ataaactttaattattacaatatttatcaagatatttagcaaatatcattgtcagacctgtaaggctgctctcctg

SEQ ID NO: 137729 - DNA, 79 bp, Homo sapiens
attattacaatatttatcaagatatttagcaaatatcattgtcagacctgtaaggctgctctcctgtgtgggttctcaa

SEQ ID NO: 137730 - DNA, 80 bp, Homo sapiens
tatttatcaagatatttagcaaatatcattgtcagacctgtaaggctgctctcctgtgtgggttctcaagtgccgtgtta

SEQ ID NO: 137731 - DNA, 76 bp, Homo sapiens
aagatatttagcaaatatcattgtcagacctgtaaggctgctctcctgtgtgggttctcaagtgccgtgttaggtt

SEQ ID NO: 137732 - DNA, 77 bp, Homo sapiens
aaatatcattgtcagacctgtaaggctgctctcctgtgtgggttctcaagtgccgtgttaggtttgcagaccttgga

SEQ ID NO: 137733 - DNA, 74 bp, Homo sapiens
attgtcagacctgtaaggctgctctcctgtgtgggttctcaagtgccgtgttaggtttgcagaccttggaaaaa

SEQ ID NO: 137734 - DNA, 76 bp, Homo sapiens
tgtaaggctgctctcctgtgtgggttctcaagtgccgtgttaggtttgcagaccttggaaaaatcttgccacagta

SEQ ID NO: 137735 - DNA, 76 bp, Homo sapiens
tctcctgtgtgggttctcaagtgccgtgttaggtttgcagaccttggaaaaatcttgccacagtatctgttatgaa

SEQ ID NO: 137736 - DNA, 73 bp, Homo sapiens
ggttctcaagtgccgtgttaggtttgcagaccttggaaaaatcttgccacagtatctgttatgaaaagatgtt

SEQ ID NO: 137737 - DNA, 73 bp, Homo sapiens
aagtgccgtgttaggtttgcagaccttggaaaaatcttgccacagtatctgttatgaaaagatgtttataaga

SEQ ID NO: 137738 - DNA, 76 bp, Homo sapiens
tgttaggtttgcagaccttggaaaaatcttgccacagtatctgttatgaaaagatgtttataagagaaagtcagca

SEQ ID NO: 137739 - DNA, 76 bp, Homo sapiens
gaccttggaaaaatcttgccacagtatctgttatgaaaagatgtttataagagaaagtcagcacagttgactatat

SEQ ID NO: 137740 - DNA, 75 bp, Homo sapiens
atcagaggggagatttctggaaagtcagccataattaactgtgcagttacctgcaggtatagcgctcctttccct

SEQ ID NO: 137741 - DNA, 74 bp, Homo sapiens
tttctggaaagtcagccataattaactgtgcagttacctgcaggtatagcgctcctttcccttccgcagaaggt

SEQ ID NO: 137742 - DNA, 76 bp, Homo sapiens
aaagtcagccataattaactgtgcagttacctgcaggtatagcgctcctttcccttccgcagaaggttctctggca

SEQ ID NO: 137743 - DNA, 75 bp, Homo sapiens
ataattaactgtgcagttacctgcaggtatagcgctcctttcccttccgcagaaggttctctggcagggcattgg

SEQ ID NO: 137744 - DNA, 74 bp, Homo sapiens
agttacctgcaggtatagcgctcctttcccttccgcagaaggttctctggcagggcattgggaggcgccctgaa

SEQ ID NO: 137745 - DNA, 74 bp, Homo sapiens
aggtatagcgctcctttcccttccgcagaaggttctctggcagggcattgggaggcgccctgaagttgaacata

SEQ ID NO: 137746 - DNA, 75 bp, Homo sapiens
ctcctttcccttccgcagaaggttctctggcagggcattgggaggcgccctgaagttgaacatagagggcactga

SEQ ID NO: 137747 - DNA, 76 bp, Homo sapiens
ttcccttccgcagaaggttctctggcagggcattgggaggcgccctgaagttgaacatagagggcactgactgtaa

SEQ ID NO: 137748 - DNA, 79 bp, Homo sapiens
aaggttctctggcagggcattgggaggcgccctgaagttgaacatagagggcactgactgtaagagctcactggcctca

SEQ ID NO: 137749 - DNA, 80 bp, Homo sapiens
tctggcagggcattgggaggcgccctgaagttgaacatagagggcactgactgtaagagctcactggcctcaggtttcag

SEQ ID NO: 137750 - DNA, 78 bp, Homo sapiens
attgggaggcgccctgaagttgaacatagagggcactgactgtaagagctcactggcctcaggtttcagggcactgaa

SEQ ID NO: 137751 - DNA, 80 bp, Homo sapiens
ctgaagttgaacatagagggcactgactgtaagagctcactggcctcaggtttcagggcactgaagctctctagcttttc

SEQ ID NO: 137752 - DNA, 82 bp, Homo sapiens
ttgaacatagagggcactgactgtaagagctcactggcctcaggtttcagggcactgaagctctctagcttttctgccatgt

SEQ ID NO: 137753 - DNA, 82 bp, Homo sapiens
actgactgtaagagctcactggcctcaggtttcagggcactgaagctctctagcttttctgccatgttttcaatagctgaca

SEQ ID NO: 137754 - DNA, 83 bp, Homo sapiens
tgtaagagctcactggcctcaggtttcagggcactgaagctctctagcttttctgccatgttttcaatagctgacatctgaaa

SEQ ID NO: 137755 - DNA, 78 bp, Homo sapiens
actggcctcaggtttcagggcactgaagctctctagcttttctgccatgttttcaatagctgacatctgaaaggtaaa

SEQ ID NO: 137756 - DNA, 81 bp, Homo sapiens
ttcagggcactgaagctctctagcttttctgccatgttttcaatagctgacatctgaaaggtaaaagcacaagaccatgaa

SEQ ID NO: 137757 - DNA, 78 bp, Homo sapiens
actgaagctctctagcttttctgccatgttttcaatagctgacatctgaaaggtaaaagcacaagaccatgaagcgtt

SEQ ID NO: 137758 - DNA, 74 bp, Homo sapiens
tgtctgtacagcaatttagaatgtaagctgttttctttttaatgctacatcactttagtcaaaaatataagtag

SEQ ID NO: 137759 - DNA, 72 bp, Homo sapiens
gtacagcaatttagaatgtaagctgttttctttttaatgctacatcactttagtcaaaaatataagtaggaa

SEQ ID NO: 137760 - DNA, 69 bp, Homo sapiens
agaatgtaagctgttttctttttaatgctacatcactttagtcaaaaatataagtaggaaacttaccca

SEQ ID NO: 137761 - DNA, 70 bp, Homo sapiens
ttttctttttaatgctacatcactttagtcaaaaatataagtaggaaacttacccaagttctctgatcag

SEQ ID NO: 137762 - DNA, 73 bp, Homo sapiens
ttaatgctacatcactttagtcaaaaatataagtaggaaacttacccaagttctctgatcaggcagttggaac

SEQ ID NO: 137763 - DNA, 72 bp, Homo sapiens
atcactttagtcaaaaatataagtaggaaacttacccaagttctctgatcaggcagttggaactgggagcaa

SEQ ID NO: 137764 - DNA, 70 bp, Homo sapiens
aaaaatataagtaggaaacttacccaagttctctgatcaggcagttggaactgggagcaaaattgaaaca

SEQ ID NO: 137765 - DNA, 71 bp, Homo sapiens
tataagtaggaaacttacccaagttctctgatcaggcagttggaactgggagcaaaattgaaacaaaaaca

SEQ ID NO: 137766 - DNA, 71 bp, Homo sapiens
caggatcaacaagttagtttacaagctggaaatctcaaatccaaaatacttacttgtgggtgaaacaagaa

SEQ ID NO: 137767 - DNA, 70 bp, Homo sapiens
caacaagttagtttacaagctggaaatctcaaatccaaaatacttacttgtgggtgaaacaagaatcctg

SEQ ID NO: 137768 - DNA, 72 bp, Homo sapiens
tttacaagctggaaatctcaaatccaaaatacttacttgtgggtgaaacaagaatcctggagaaggcctcaa

SEQ ID NO: 137769 - DNA, 70 bp, Homo sapiens
aatctcaaatccaaaatacttacttgtgggtgaaacaagaatcctggagaaggcctcaagtatttctctt

SEQ ID NO: 137770 - DNA, 68 bp, Homo sapiens
aaatccaaaatacttacttgtgggtgaaacaagaatcctggagaaggcctcaagtatttctcttttaa

SEQ ID NO: 137771 - DNA, 70 bp, Homo sapiens
tacttacttgtgggtgaaacaagaatcctggagaaggcctcaagtatttctcttttaaagcttcaagtgg

SEQ ID NO: 137772 - DNA, 70 bp, Homo sapiens
tgaaacaagaatcctggagaaggcctcaagtatttctcttttaaagcttcaagtgggtcagttagttttc

SEQ ID NO: 137773 - DNA, 67 bp, Homo sapiens
aagaatcctggagaaggcctcaagtatttctcttttaaagcttcaagtgggtcagttagttttcttt

SEQ ID NO: 137774 - DNA, 69 bp, Homo sapiens
agaaggcctcaagtatttctcttttaaagcttcaagtgggtcagttagttttcttttctctactctgaa

SEQ ID NO: 137775 - DNA, 67 bp, Homo sapiens
caagtatttctcttttaaagcttcaagtgggtcagttagttttcttttctctactctgaaaggttaa

SEQ ID NO: 137776 - DNA, 68 bp, Homo sapiens
taaagcttcaagtgggtcagttagttttcttttctctactctgaaaggttaaaattagattttggaga

SEQ ID NO: 137777 - DNA, 70 bp, Homo sapiens
caagtgggtcagttagttttcttttctctactctgaaaggttaaaattagattttggagatgaagcagtc

SEQ ID NO: 137778 - DNA, 75 bp, Homo sapiens
accgcctttcatacatctgctcatatttcgtcatcttccatacacgcttacctgtaaatagggtccataaagaaa

SEQ ID NO: 137779 - DNA, 75 bp, Homo sapiens
tacatctgctcatatttcgtcatcttccatacacgcttacctgtaaatagggtccataaagaaaggagtgggtct

SEQ ID NO: 137780 - DNA, 76 bp, Homo sapiens
atatttcgtcatcttccatacacgcttacctgtaaatagggtccataaagaaaggagtgggtcttgcatgctgcaa

SEQ ID NO: 137781 - DNA, 76 bp, Homo sapiens
ttccatacacgcttacctgtaaatagggtccataaagaaaggagtgggtcttgcatgctgcaaggaaccatctgaa

SEQ ID NO: 137782 - DNA, 76 bp, Homo sapiens
tacacgcttacctgtaaatagggtccataaagaaaggagtgggtcttgcatgctgcaaggaaccatctgaagcagg

SEQ ID NO: 137783 - DNA, 76 bp, Homo sapiens
taaatagggtccataaagaaaggagtgggtcttgcatgctgcaaggaaccatctgaagcaggtcttgattcgacgt

SEQ ID NO: 137784 - DNA, 76 bp, Homo sapiens
cataaagaaaggagtgggtcttgcatgctgcaaggaaccatctgaagcaggtcttgattcgacgttgcttcctttt

SEQ ID NO: 137785 - DNA, 75 bp, Homo sapiens
agaaaggagtgggtcttgcatgctgcaaggaaccatctgaagcaggtcttgattcgacgttgcttcctttttttc

SEQ ID NO: 137786 - DNA, 75 bp, Homo sapiens
tcttgcatgctgcaaggaaccatctgaagcaggtcttgattcgacgttgcttcctttttttcccccaaacacgtg

SEQ ID NO: 137787 - DNA, 67 bp, Homo sapiens
caaggaaccatctgaagcaggtcttgattcgacgttgcttcctttttttcccccaaacacgtggttt

SEQ ID NO: 137788 - DNA, 66 bp, Homo sapiens
aaccatctgaagcaggtcttgattcgacgttgcttcctttttttcccccaaacacgtggttttttc

SEQ ID NO: 137789 - DNA, 67 bp, Homo sapiens
gtcttgattcgacgttgcttcctttttttcccccaaacacgtggttttttcgaggctcagtcagctt

SEQ ID NO: 137790 - DNA, 66 bp, Homo sapiens
attcgacgttgcttcctttttttcccccaaacacgtggttttttcgaggctcagtcagctttgtcc

SEQ ID NO: 137791 - DNA, 74 bp, Homo sapiens
aacacgtggttttttcgaggctcagtcagctttgtcccactggctctactcctactgcccatacttagatccag

SEQ ID NO: 137792 - DNA, 76 bp, Homo sapiens
tttttcgaggctcagtcagctttgtcccactggctctactcctactgcccatacttagatccaggggctggtcttg

SEQ ID NO: 137793 - DNA, 77 bp, Homo sapiens
agtcagctttgtcccactggctctactcctactgcccatacttagatccaggggctggtcttggcttgtggcaggtg

SEQ ID NO: 137794 - DNA, 78 bp, Homo sapiens
tttgtcccactggctctactcctactgcccatacttagatccaggggctggtcttggcttgtggcaggtgtcactgga

SEQ ID NO: 137795 - DNA, 78 bp, Homo sapiens
tggctctactcctactgcccatacttagatccaggggctggtcttggcttgtggcaggtgtcactggaggcttggagg

SEQ ID NO: 137796 - DNA, 78 bp, Homo sapiens
tactgcccatacttagatccaggggctggtcttggcttgtggcaggtgtcactggaggcttggaggggactggagtca

SEQ ID NO: 137797 - DNA, 75 bp, Homo sapiens
atacttagatccaggggctggtcttggcttgtggcaggtgtcactggaggcttggaggggactggagtcaagggc

SEQ ID NO: 137798 - DNA, 76 bp, Homo sapiens
ggctggtcttggcttgtggcaggtgtcactggaggcttggaggggactggagtcaagggcttctcatcctttcgct

SEQ ID NO: 137799 - DNA, 77 bp, Homo sapiens
ttggcttgtggcaggtgtcactggaggcttggaggggactggagtcaagggcttctcatcctttcgcttagtggtga

SEQ ID NO: 137800 - DNA, 74 bp, Homo sapiens
aggtgtcactggaggcttggaggggactggagtcaagggcttctcatcctttcgcttagtggtgagatcaaagg

SEQ ID NO: 137801 - DNA, 75 bp, Homo sapiens
tggaggcttggaggggactggagtcaagggcttctcatcctttcgcttagtggtgagatcaaagggggactcaga

SEQ ID NO: 137802 - DNA, 74 bp, Homo sapiens
aggggactggagtcaagggcttctcatcctttcgcttagtggtgagatcaaagggggactcagagctgcccttc

SEQ ID NO: 137803 - DNA, 76 bp, Homo sapiens
ttctcatcctttcgcttagtggtgagatcaaagggggactcagagctgcccttctgcagtttctttacttcacctg

SEQ ID NO: 137804 - DNA, 75 bp, Homo sapiens
atcctttcgcttagtggtgagatcaaagggggactcagagctgcccttctgcagtttctttacttcacctggtga

SEQ ID NO: 137805 - DNA, 74 bp, Homo sapiens
tggtgagatcaaagggggactcagagctgcccttctgcagtttctttacttcacctggtgattggggttccatt

SEQ ID NO: 137806 - DNA, 73 bp, Homo sapiens
cttctgcagtttctttacttcacctggtgattggggttccattttcaaaggtaacgatctcaagtctctatca

SEQ ID NO: 137807 - DNA, 73 bp, Homo sapiens
ttcacctggtgattggggttccattttcaaaggtaacgatctcaagtctctatcaggaaatgggtacattgat

SEQ ID NO: 137808 - DNA, 74 bp, Homo sapiens
ggtgattggggttccattttcaaaggtaacgatctcaagtctctatcaggaaatgggtacattgattgagagaa

SEQ ID NO: 137809 - DNA, 75 bp, Homo sapiens
gttccattttcaaaggtaacgatctcaagtctctatcaggaaatgggtacattgattgagagaatgctggaaaaa

SEQ ID NO: 137810 - DNA, 73 bp, Homo sapiens
aaaggtaacgatctcaagtctctatcaggaaatgggtacattgattgagagaatgctggaaaaaatgggaggg

SEQ ID NO: 137811 - DNA, 75 bp, Homo sapiens
atctcaagtctctatcaggaaatgggtacattgattgagagaatgctggaaaaaatgggaggggaaacatggaag

SEQ ID NO: 137812 - DNA, 72 bp, Homo sapiens
tatcaggaaatgggtacattgattgagagaatgctggaaaaaatgggaggggaaacatggaagggtaaggta

SEQ ID NO: 137813 - DNA, 69 bp, Homo sapiens
aaatgggtacattgattgagagaatgctggaaaaaatgggaggggaaacatggaagggtaaggtaaagc

SEQ ID NO: 137814 - DNA, 66 bp, Homo sapiens
attgagagaatgctggaaaaaatgggaggggaaacatggaagggtaaggtaaagctccaacttttt

SEQ ID NO: 137815 - DNA, 65 bp, Homo sapiens
agaatgctggaaaaaatgggaggggaaacatggaagggtaaggtaaagctccaacttttttgtct

SEQ ID NO: 137816 - DNA, 65 bp, Homo sapiens
aaaaatgggaggggaaacatggaagggtaaggtaaagctccaacttttttgtcttgcagccccac

SEQ ID NO: 137817 - DNA, 66 bp, Homo sapiens
aagggtaaggtaaagctccaacttttttgtcttgcagccccaccagtcctgttgaaccaaagtatt

SEQ ID NO: 137818 - DNA, 70 bp, Homo sapiens
aggtaaagctccaacttttttgtcttgcagccccaccagtcctgttgaaccaaagtatttttcagcaata

SEQ ID NO: 137819 - DNA, 73 bp, Homo sapiens
ttttttgtcttgcagccccaccagtcctgttgaaccaaagtatttttcagcaatagaagcaatagcctttata

SEQ ID NO: 137820 - DNA, 78 bp, Homo sapiens
tgtcttgcagccccaccagtcctgttgaaccaaagtatttttcagcaatagaagcaatagcctttatagaatcattca

SEQ ID NO: 137821 - DNA, 77 bp, Homo sapiens
accagtcctgttgaaccaaagtatttttcagcaatagaagcaatagcctttatagaatcattcacagctcctgacac

SEQ ID NO: 137822 - DNA, 78 bp, Homo sapiens
cctgttgaaccaaagtatttttcagcaatagaagcaatagcctttatagaatcattcacagctcctgacaccgcagtc

SEQ ID NO: 137823 - DNA, 79 bp, Homo sapiens
aaagtatttttcagcaatagaagcaatagcctttatagaatcattcacagctcctgacaccgcagtctgctcctctaaa

SEQ ID NO: 137824 - DNA, 83 bp, Homo sapiens
ttcagcaatagaagcaatagcctttatagaatcattcacagctcctgacaccgcagtctgctcctctaaagatggtgagaaaa

SEQ ID NO: 137825 - DNA, 81 bp, Homo sapiens
aagcaatagcctttatagaatcattcacagctcctgacaccgcagtctgctcctctaaagatggtgagaaaatggaatgat

SEQ ID NO: 137826 - DNA, 82 bp, Homo sapiens
tttatagaatcattcacagctcctgacaccgcagtctgctcctctaaagatggtgagaaaatggaatgattgctgtattctt

SEQ ID NO: 137827 - DNA, 80 bp, Homo sapiens
attcacagctcctgacaccgcagtctgctcctctaaagatggtgagaaaatggaatgattgctgtattctttcttattat

SEQ ID NO: 137828 - DNA, 79 bp, Homo sapiens
tcctgacaccgcagtctgctcctctaaagatggtgagaaaatggaatgattgctgtattctttcttattatttattgaa

SEQ ID NO: 137829 - DNA, 79 bp, Homo sapiens
agtctgctcctctaaagatggtgagaaaatggaatgattgctgtattctttcttattatttattgaagccagattctga

SEQ ID NO: 137830 - DNA, 76 bp, Homo sapiens
ctaaagatggtgagaaaatggaatgattgctgtattctttcttattatttattgaagccagattctgaagagggct

SEQ ID NO: 137831 - DNA, 76 bp, Homo sapiens
gtgagaaaatggaatgattgctgtattctttcttattatttattgaagccagattctgaagagggcttactttgtc

SEQ ID NO: 137832 - DNA, 75 bp, Homo sapiens
ggaatgattgctgtattctttcttattatttattgaagccagattctgaagagggcttactttgtctttgaacat

SEQ ID NO: 137833 - DNA, 73 bp, Homo sapiens
gctgtattctttcttattatttattgaagccagattctgaagagggcttactttgtctttgaacattttacca

SEQ ID NO: 137834 - DNA, 70 bp, Homo sapiens
ctttcttattatttattgaagccagattctgaagagggcttactttgtctttgaacattttaccattttc

SEQ ID NO: 137835 - DNA, 70 bp, Homo sapiens
ttattgaagccagattctgaagagggcttactttgtctttgaacattttaccattttctttaaatttctc

SEQ ID NO: 137836 - DNA, 73 bp, Homo sapiens
ttgtctttgaacattttaccattttctttaaatttctctttatcactttcaatgtcactttccagatcagagc

SEQ ID NO: 137837 - DNA, 71 bp, Homo sapiens
gaacattttaccattttctttaaatttctctttatcactttcaatgtcactttccagatcagagcccgagg

SEQ ID NO: 137838 - DNA, 74 bp, Homo sapiens
ttaaatttctctttatcactttcaatgtcactttccagatcagagcccgaggttgtttccaggtcactgccact

SEQ ID NO: 137839 - DNA, 79 bp, Homo sapiens
aatgtcactttccagatcagagcccgaggttgtttccaggtcactgccacttggtgtactgacatcatcaaggtcacta

SEQ ID NO: 137840 - DNA, 78 bp, Homo sapiens
actttccagatcagagcccgaggttgtttccaggtcactgccacttggtgtactgacatcatcaaggtcactactctc

SEQ ID NO: 137841 - DNA, 80 bp, Homo sapiens
gttgtttccaggtcactgccacttggtgtactgacatcatcaaggtcactactctctgactggtcactgattttctcaaa

SEQ ID NO: 137842 - DNA, 83 bp, Homo sapiens
tcactgccacttggtgtactgacatcatcaaggtcactactctctgactggtcactgattttctcaaagggcctctcttcaga

SEQ ID NO: 137843 - DNA, 79 bp, Homo sapiens
acttggtgtactgacatcatcaaggtcactactctctgactggtcactgattttctcaaagggcctctcttcagaggac

SEQ ID NO: 137844 - DNA, 78 bp, Homo sapiens
atcaaggtcactactctctgactggtcactgattttctcaaagggcctctcttcagaggacctctcgggctggagctc

SEQ ID NO: 137845 - DNA, 78 bp, Homo sapiens
tactctctgactggtcactgattttctcaaagggcctctcttcagaggacctctcgggctggagctccactggcttat

SEQ ID NO: 137846 - DNA, 75 bp, Homo sapiens
actggtcactgattttctcaaagggcctctcttcagaggacctctcgggctggagctccactggcttattgtccc

SEQ ID NO: 137847 - DNA, 74 bp, Homo sapiens
attttctcaaagggcctctcttcagaggacctctcgggctggagctccactggcttattgtcccctacagatgg

SEQ ID NO: 137848 - DNA, 73 bp, Homo sapiens
aaagggcctctcttcagaggacctctcgggctggagctccactggcttattgtcccctacagatgggtgttta

SEQ ID NO: 137849 - DNA, 74 bp, Homo sapiens
agaggacctctcgggctggagctccactggcttattgtcccctacagatgggtgtttagatagtgccttcaaaa

SEQ ID NO: 137850 - DNA, 78 bp, Homo sapiens
agctccactggcttattgtcccctacagatgggtgtttagatagtgccttcaaaatatcctgtgtagctggcagtatc

SEQ ID NO: 137851 - DNA, 80 bp, Homo sapiens
cttattgtcccctacagatgggtgtttagatagtgccttcaaaatatcctgtgtagctggcagtatctgaggatgtgtca

SEQ ID NO: 137852 - DNA, 79 bp, Homo sapiens
ttagatagtgccttcaaaatatcctgtgtagctggcagtatctgaggatgtgtcatgaggggactttgacttttgtttg

SEQ ID NO: 137853 - DNA, 79 bp, Homo sapiens
tgtgtagctggcagtatctgaggatgtgtcatgaggggactttgacttttgtttgtctgttcagtacttgatagtcctt

SEQ ID NO: 137854 - DNA, 76 bp, Homo sapiens
cagtatctgaggatgtgtcatgaggggactttgacttttgtttgtctgttcagtacttgatagtcctttaacagga

SEQ ID NO: 137855 - DNA, 73 bp, Homo sapiens
aggatgtgtcatgaggggactttgacttttgtttgtctgttcagtacttgatagtcctttaacaggagaacta

SEQ ID NO: 137856 - DNA, 73 bp, Homo sapiens
tgaggggactttgacttttgtttgtctgttcagtacttgatagtcctttaacaggagaactagcaggtatcaa

SEQ ID NO: 137857 - DNA, 71 bp, Homo sapiens
actttgacttttgtttgtctgttcagtacttgatagtcctttaacaggagaactagcaggtatcaaaggag

SEQ ID NO: 137858 - DNA, 74 bp, Homo sapiens
ttgtttgtctgttcagtacttgatagtcctttaacaggagaactagcaggtatcaaaggaggcctgtggtacaa

SEQ ID NO: 137859 - DNA, 73 bp, Homo sapiens
tcagtacttgatagtcctttaacaggagaactagcaggtatcaaaggaggcctgtggtacaagccggaaggaa

SEQ ID NO: 137860 - DNA, 70 bp, Homo sapiens
ctttaacaggagaactagcaggtatcaaaggaggcctgtggtacaagccggaaggaaacagaccagggaa

SEQ ID NO: 137861 - DNA, 69 bp, Homo sapiens
aactagcaggtatcaaaggaggcctgtggtacaagccggaaggaaacagaccagggaagctaaaagaaa

SEQ ID NO: 137862 - DNA, 69 bp, Homo sapiens
ctgtggtacaagccggaaggaaacagaccagggaagctaaaagaaaatccaggagctgttggaaaggta

SEQ ID NO: 137863 - DNA, 69 bp, Homo sapiens
tacaagccggaaggaaacagaccagggaagctaaaagaaaatccaggagctgttggaaaggtaagacca

SEQ ID NO: 137864 - DNA, 71 bp, Homo sapiens
aggaaacagaccagggaagctaaaagaaaatccaggagctgttggaaaggtaagaccagcaggatgcctat

SEQ ID NO: 137865 - DNA, 72 bp, Homo sapiens
agggaagctaaaagaaaatccaggagctgttggaaaggtaagaccagcaggatgcctattggcgccaaaata

SEQ ID NO: 137866 - DNA, 74 bp, Homo sapiens
ctaaaagaaaatccaggagctgttggaaaggtaagaccagcaggatgcctattggcgccaaaatagtcagcaag

SEQ ID NO: 137867 - DNA, 76 bp, Homo sapiens
aggagctgttggaaaggtaagaccagcaggatgcctattggcgccaaaatagtcagcaaggcccgggttggcatga

SEQ ID NO: 137868 - DNA, 78 bp, Homo sapiens
taagaccagcaggatgcctattggcgccaaaatagtcagcaaggcccgggttggcatgactcatattaaccatggacg

SEQ ID NO: 137869 - DNA, 76 bp, Homo sapiens
atgcctattggcgccaaaatagtcagcaaggcccgggttggcatgactcatattaaccatggacgttttatccata

SEQ ID NO: 137870 - DNA, 76 bp, Homo sapiens
tattggcgccaaaatagtcagcaaggcccgggttggcatgactcatattaaccatggacgttttatccatagctgg

SEQ ID NO: 137871 - DNA, 73 bp, Homo sapiens
aaaatagtcagcaaggcccgggttggcatgactcatattaaccatggacgttttatccatagctggggttcca

SEQ ID NO: 137872 - DNA, 71 bp, Homo sapiens
aaggcccgggttggcatgactcatattaaccatggacgttttatccatagctggggttccaggaagtgaaa

SEQ ID NO: 137873 - DNA, 75 bp, Homo sapiens
ttggcatgactcatattaaccatggacgttttatccatagctggggttccaggaagtgaaatgccttggccaaaa

SEQ ID NO: 137874 - DNA, 71 bp, Homo sapiens
actcatattaaccatggacgttttatccatagctggggttccaggaagtgaaatgccttggccaaaaaatc

SEQ ID NO: 137875 - DNA, 71 bp, Homo sapiens
tttatccatagctggggttccaggaagtgaaatgccttggccaaaaaatccacctgccgcaaaatggttct

SEQ ID NO: 137876 - DNA, 70 bp, Homo sapiens
gggttccaggaagtgaaatgccttggccaaaaaatccacctgccgcaaaatggttcttgccctcacaaaa

SEQ ID NO: 137877 - DNA, 70 bp, Homo sapiens
aagtgaaatgccttggccaaaaaatccacctgccgcaaaatggttcttgccctcacaaaacctcctgtgt

SEQ ID NO: 137878 - DNA, 69 bp, Homo sapiens
aaatgccttggccaaaaaatccacctgccgcaaaatggttcttgccctcacaaaacctcctgtgtttat

SEQ ID NO: 137879 - DNA, 68 bp, Homo sapiens
aaaatccacctgccgcaaaatggttcttgccctcacaaaacctcctgtgtttatttaaggaagacgta

SEQ ID NO: 137880 - DNA, 72 bp, Homo sapiens
tgccgcaaaatggttcttgccctcacaaaacctcctgtgtttatttaaggaagacgtagtgctgaacatttg

SEQ ID NO: 137881 - DNA, 70 bp, Homo sapiens
aaaatggttcttgccctcacaaaacctcctgtgtttatttaaggaagacgtagtgctgaacatttgtcca

SEQ ID NO: 137882 - DNA, 73 bp, Homo sapiens
cctcacaaaacctcctgtgtttatttaaggaagacgtagtgctgaacatttgtccacagtctttgcacttgat

SEQ ID NO: 137883 - DNA, 71 bp, Homo sapiens
aaaacctcctgtgtttatttaaggaagacgtagtgctgaacatttgtccacagtctttgcacttgatttgg

SEQ ID NO: 137884 - DNA, 81 bp, Homo sapiens
tgtgtttatttaaggaagacgtagtgctgaacatttgtccacagtctttgcacttgatttgggttctgcaatcagcatgca

SEQ ID NO: 137885 - DNA, 84 bp, Homo sapiens
aagacgtagtgctgaacatttgtccacagtctttgcacttgatttgggttctgcaatcagcatgcatgcgcttatgacggcaaa

SEQ ID NO: 137886 - DNA, 84 bp, Homo sapiens
tgctgaacatttgtccacagtctttgcacttgatttgggttctgcaatcagcatgcatgcgcttatgacggcaaaggtttgaaa

SEQ ID NO: 137887 - DNA, 80 bp, Homo sapiens
acatttgtccacagtctttgcacttgatttgggttctgcaatcagcatgcatgcgcttatgacggcaaaggtttgaaaac

SEQ ID NO: 137888 - DNA, 81 bp, Homo sapiens
tctttgcacttgatttgggttctgcaatcagcatgcatgcgcttatgacggcaaaggtttgaaaactgagtataggattta

SEQ ID NO: 137889 - DNA, 81 bp, Homo sapiens
acttgatttgggttctgcaatcagcatgcatgcgcttatgacggcaaaggtttgaaaactgagtataggatttatggcaga

SEQ ID NO: 137890 - DNA, 76 bp, Homo sapiens
gggaagagacagatgtgggaaggagggctggagtgttgaaaacttacagataaagggcttcacactgctgtggatg

SEQ ID NO: 137891 - DNA, 77 bp, Homo sapiens
gatgtgggaaggagggctggagtgttgaaaacttacagataaagggcttcacactgctgtggatgtgcttgtgttgt

SEQ ID NO: 137892 - DNA, 76 bp, Homo sapiens
aaggagggctggagtgttgaaaacttacagataaagggcttcacactgctgtggatgtgcttgtgttgtttgaggc

SEQ ID NO: 137893 - DNA, 75 bp, Homo sapiens
agtgttgaaaacttacagataaagggcttcacactgctgtggatgtgcttgtgttgtttgaggcccgacgaagtg

SEQ ID NO: 137894 - DNA, 74 bp, Homo sapiens
acttacagataaagggcttcacactgctgtggatgtgcttgtgttgtttgaggcccgacgaagtggcaaacgtt

SEQ ID NO: 137895 - DNA, 76 bp, Homo sapiens
agataaagggcttcacactgctgtggatgtgcttgtgttgtttgaggcccgacgaagtggcaaacgttttgccaca

SEQ ID NO: 137896 - DNA, 80 bp, Homo sapiens
ttcacactgctgtggatgtgcttgtgttgtttgaggcccgacgaagtggcaaacgttttgccacactccgggcatgcatg

SEQ ID NO: 137897 - DNA, 76 bp, Homo sapiens
tgtggatgtgcttgtgttgtttgaggcccgacgaagtggcaaacgttttgccacactccgggcatgcatgggcccg

SEQ ID NO: 137898 - DNA, 73 bp, Homo sapiens
gtgttgtttgaggcccgacgaagtggcaaacgttttgccacactccgggcatgcatgggcccgggcaccgaca

SEQ ID NO: 137899 - DNA, 76 bp, Homo sapiens
gtttgaggcccgacgaagtggcaaacgttttgccacactccgggcatgcatgggcccgggcaccgacatgctgaga

SEQ ID NO: 137900 - DNA, 79 bp, Homo sapiens
aagtggcaaacgttttgccacactccgggcatgcatgggcccgggcaccgacatgctgagagcgaatgtgccgctgaag

SEQ ID NO: 137901 - DNA, 79 bp, Homo sapiens
aaacgttttgccacactccgggcatgcatgggcccgggcaccgacatgctgagagcgaatgtgccgctgaaggttgcta

SEQ ID NO: 137902 - DNA, 79 bp, Homo sapiens
acactccgggcatgcatgggcccgggcaccgacatgctgagagcgaatgtgccgctgaaggttgctagggtccgtgaaa

SEQ ID NO: 137903 - DNA, 79 bp, Homo sapiens
atgcatgggcccgggcaccgacatgctgagagcgaatgtgccgctgaaggttgctagggtccgtgaaaacctgctagga

SEQ ID NO: 137904 - DNA, 77 bp, Homo sapiens
ccgggcaccgacatgctgagagcgaatgtgccgctgaaggttgctagggtccgtgaaaacctgctaggaaatgagta

SEQ ID NO: 137905 - DNA, 79 bp, Homo sapiens
acatgctgagagcgaatgtgccgctgaaggttgctagggtccgtgaaaacctgctaggaaatgagtactgattaatcaa

SEQ ID NO: 137906 - DNA, 75 bp, Homo sapiens
agagcgaatgtgccgctgaaggttgctagggtccgtgaaaacctgctaggaaatgagtactgattaatcaagaaa

SEQ ID NO: 137907 - DNA, 73 bp, Homo sapiens
atgtgccgctgaaggttgctagggtccgtgaaaacctgctaggaaatgagtactgattaatcaagaaacttaa

SEQ ID NO: 137908 - DNA, 80 bp, Homo sapiens
agagagcaggatgacatagagaggccaagtagcctacaaattcactgtaccttggcacagttttcacattcatagtgctt

SEQ ID NO: 137909 - DNA, 80 bp, Homo sapiens
atgacatagagaggccaagtagcctacaaattcactgtaccttggcacagttttcacattcatagtgctttccactgtca

SEQ ID NO: 137910 - DNA, 80 bp, Homo sapiens
agaggccaagtagcctacaaattcactgtaccttggcacagttttcacattcatagtgctttccactgtcatgtgacatc

SEQ ID NO: 137911 - DNA, 80 bp, Homo sapiens
tacaaattcactgtaccttggcacagttttcacattcatagtgctttccactgtcatgtgacatctggtggcgaattaaa

SEQ ID NO: 137912 - DNA, 80 bp, Homo sapiens
attcactgtaccttggcacagttttcacattcatagtgctttccactgtcatgtgacatctggtggcgaattaaattgga

SEQ ID NO: 137913 - DNA, 79 bp, Homo sapiens
ttggcacagttttcacattcatagtgctttccactgtcatgtgacatctggtggcgaattaaattggacttccagttaa

SEQ ID NO: 137914 - DNA, 78 bp, Homo sapiens
ttttcacattcatagtgctttccactgtcatgtgacatctggtggcgaattaaattggacttccagttaaatgccttg

SEQ ID NO: 137915 - DNA, 79 bp, Homo sapiens
atagtgctttccactgtcatgtgacatctggtggcgaattaaattggacttccagttaaatgccttgggacactgatca

SEQ ID NO: 137916 - DNA, 78 bp, Homo sapiens
actgtcatgtgacatctggtggcgaattaaattggacttccagttaaatgccttgggacactgatcacacttgtattc

SEQ ID NO: 137917 - DNA, 74 bp, Homo sapiens
acatctggtggcgaattaaattggacttccagttaaatgccttgggacactgatcacacttgtattccctctct

SEQ ID NO: 137918 - DNA, 77 bp, Homo sapiens
tggcgaattaaattggacttccagttaaatgccttgggacactgatcacacttgtattccctctcttcagtatgtga

SEQ ID NO: 137919 - DNA, 79 bp, Homo sapiens
ttaaattggacttccagttaaatgccttgggacactgatcacacttgtattccctctcttcagtatgtgacagcatgtg

SEQ ID NO: 137920 - DNA, 80 bp, Homo sapiens
agttaaatgccttgggacactgatcacacttgtattccctctcttcagtatgtgacagcatgtgtttctccaggctgtta

SEQ ID NO: 137921 - DNA, 81 bp, Homo sapiens
cttgggacactgatcacacttgtattccctctcttcagtatgtgacagcatgtgtttctccaggctgttaagagaacaata

SEQ ID NO: 137922 - DNA, 80 bp, Homo sapiens
tgatcacacttgtattccctctcttcagtatgtgacagcatgtgtttctccaggctgttaagagaacaatagattttaaa

SEQ ID NO: 137923 - DNA, 76 bp, Homo sapiens
acacttgtattccctctcttcagtatgtgacagcatgtgtttctccaggctgttaagagaacaatagattttaaaa

SEQ ID NO: 137924 - DNA, 74 bp, Homo sapiens
tgcagaaaaaatacacaagttgtatggtacaacatgccatttctaacctttgcaaatcaggaaaaacttggtca

SEQ ID NO: 137925 - DNA, 73 bp, Homo sapiens
atacacaagttgtatggtacaacatgccatttctaacctttgcaaatcaggaaaaacttggtcacattcctta

SEQ ID NO: 137926 - DNA, 72 bp, Homo sapiens
aagttgtatggtacaacatgccatttctaacctttgcaaatcaggaaaaacttggtcacattccttacactc

SEQ ID NO: 137927 - DNA, 75 bp, Homo sapiens
tacaacatgccatttctaacctttgcaaatcaggaaaaacttggtcacattccttacactcctggatcgtgtgta

SEQ ID NO: 137928 - DNA, 73 bp, Homo sapiens
atttctaacctttgcaaatcaggaaaaacttggtcacattccttacactcctggatcgtgtgtatctcttgga

SEQ ID NO: 137929 - DNA, 77 bp, Homo sapiens
tttgcaaatcaggaaaaacttggtcacattccttacactcctggatcgtgtgtatctcttggagatcattctcgctt

SEQ ID NO: 137930 - DNA, 73 bp, Homo sapiens
aaaaacttggtcacattccttacactcctggatcgtgtgtatctcttggagatcattctcgctttcgagtttt

SEQ ID NO: 137931 - DNA, 78 bp, Homo sapiens
tcacattccttacactcctggatcgtgtgtatctcttggagatcattctcgctttcgagtttttgctgaaagtcctct

SEQ ID NO: 137932 - DNA, 77 bp, Homo sapiens
ttacactcctggatcgtgtgtatctcttggagatcattctcgctttcgagtttttgctgaaagtcctcttcaaccat

SEQ ID NO: 137933 - DNA, 77 bp, Homo sapiens
tcctggatcgtgtgtatctcttggagatcattctcgctttcgagtttttgctgaaagtcctcttcaaccattgaaaa

SEQ ID NO: 137934 - DNA, 79 bp, Homo sapiens
tatctcttggagatcattctcgctttcgagtttttgctgaaagtcctcttcaaccattgaaaatgctgagtgaggagta

SEQ ID NO: 137935 - DNA, 79 bp, Homo sapiens
agatcattctcgctttcgagtttttgctgaaagtcctcttcaaccattgaaaatgctgagtgaggagtactgcatggaa

SEQ ID NO: 137936 - DNA, 76 bp, Homo sapiens
ttctcgctttcgagtttttgctgaaagtcctcttcaaccattgaaaatgctgagtgaggagtactgcatggaaact

SEQ ID NO: 137937 - DNA, 78 bp, Homo sapiens
ttttgctgaaagtcctcttcaaccattgaaaatgctgagtgaggagtactgcatggaaacttttggtgatctgctagt

SEQ ID NO: 137938 - DNA, 78 bp, Homo sapiens
aagtcctcttcaaccattgaaaatgctgagtgaggagtactgcatggaaacttttggtgatctgctagttcagcctta

SEQ ID NO: 137939 - DNA, 80 bp, Homo sapiens
tcttcaaccattgaaaatgctgagtgaggagtactgcatggaaacttttggtgatctgctagttcagccttagattcaaa

SEQ ID NO: 137940 - DNA, 82 bp, Homo sapiens
ttgaaaatgctgagtgaggagtactgcatggaaacttttggtgatctgctagttcagccttagattcaaagagctggtcaca

SEQ ID NO: 137941 - DNA, 83 bp, Homo sapiens
tgaggagtactgcatggaaacttttggtgatctgctagttcagccttagattcaaagagctggtcacagtcttcgcagcgata

SEQ ID NO: 137942 - DNA, 82 bp, Homo sapiens
tgcatggaaacttttggtgatctgctagttcagccttagattcaaagagctggtcacagtcttcgcagcgatattgccgttc

SEQ ID NO: 137943 - DNA, 81 bp, Homo sapiens
ttttggtgatctgctagttcagccttagattcaaagagctggtcacagtcttcgcagcgatattgccgttcttctgtgaaa

SEQ ID NO: 137944 - DNA, 81 bp, Homo sapiens
atctgctagttcagccttagattcaaagagctggtcacagtcttcgcagcgatattgccgttcttctgtgaaaacaattca

SEQ ID NO: 137945 - DNA, 79 bp, Homo sapiens
ttcagccttagattcaaagagctggtcacagtcttcgcagcgatattgccgttcttctgtgaaaacaattcaggtgtta

SEQ ID NO: 137946 - DNA, 78 bp, Homo sapiens
tagattcaaagagctggtcacagtcttcgcagcgatattgccgttcttctgtgaaaacaattcaggtgttaggattgg

SEQ ID NO: 137947 - DNA, 76 bp, Homo sapiens
tatagtcgcgatgataaggtgataaggagggtggcgtgagtggtactaaccgtggatatccggcgccatagtttca

SEQ ID NO: 137948 - DNA, 72 bp, Homo sapiens
ataaggtgataaggagggtggcgtgagtggtactaaccgtggatatccggcgccatagtttcatggggatag

SEQ ID NO: 137949 - DNA, 73 bp, Homo sapiens
taaggagggtggcgtgagtggtactaaccgtggatatccggcgccatagtttcatggggatagtcttcgctct

SEQ ID NO: 137950 - DNA, 79 bp, Homo sapiens
tggcgtgagtggtactaaccgtggatatccggcgccatagtttcatggggatagtcttcgctcttcatgaacagcagaa

SEQ ID NO: 137951 - DNA, 79 bp, Homo sapiens
tggtactaaccgtggatatccggcgccatagtttcatggggatagtcttcgctcttcatgaacagcagaagctcctctc

SEQ ID NO: 137952 - DNA, 82 bp, Homo sapiens
atatccggcgccatagtttcatggggatagtcttcgctcttcatgaacagcagaagctcctctcccggcgcaatgtctgcaa

SEQ ID NO: 137953 - DNA, 82 bp, Homo sapiens
ccatagtttcatggggatagtcttcgctcttcatgaacagcagaagctcctctcccggcgcaatgtctgcaactactctata

SEQ ID NO: 137954 - DNA, 81 bp, Homo sapiens
atggggatagtcttcgctcttcatgaacagcagaagctcctctcccggcgcaatgtctgcaactactctatagaatatctt

SEQ ID NO: 137955 - DNA, 81 bp, Homo sapiens
atagtcttcgctcttcatgaacagcagaagctcctctcccggcgcaatgtctgcaactactctatagaatatctttaaaga

SEQ ID NO: 137956 - DNA, 79 bp, Homo sapiens
ctcttcatgaacagcagaagctcctctcccggcgcaatgtctgcaactactctatagaatatctttaaagacaaaataa

SEQ ID NO: 137957 - DNA, 75 bp, Homo sapiens
aacagcagaagctcctctcccggcgcaatgtctgcaactactctatagaatatctttaaagacaaaataaaggtg

SEQ ID NO: 137958 - DNA, 75 bp, Homo sapiens
tctcccggcgcaatgtctgcaactactctatagaatatctttaaagacaaaataaaggtggatggaatcaggaaa

SEQ ID NO: 137959 - DNA, 77 bp, Homo sapiens
caatgtctgcaactactctatagaatatctttaaagacaaaataaaggtggatggaatcaggaaagagagagatgta

SEQ ID NO: 137960 - DNA, 77 bp, Homo sapiens
ctgcaactactctatagaatatctttaaagacaaaataaaggtggatggaatcaggaaagagagagatgtatatata

SEQ ID NO: 137961 - DNA, 75 bp, Homo sapiens
ctctatagaatatctttaaagacaaaataaaggtggatggaatcaggaaagagagagatgtatatatattaacaa

SEQ ID NO: 137962 - DNA, 75 bp, Homo sapiens
ttaaagacaaaataaaggtggatggaatcaggaaagagagagatgtatatatattaacaaagggcaagatataca

SEQ ID NO: 137963 - DNA, 75 bp, Homo sapiens
aataaaggtggatggaatcaggaaagagagagatgtatatatattaacaaagggcaagatatacactaagatacc

SEQ ID NO: 137964 - DNA, 78 bp, Homo sapiens
gtggatggaatcaggaaagagagagatgtatatatattaacaaagggcaagatatacactaagatacctgtacaaaca

SEQ ID NO: 137965 - DNA, 74 bp, Homo sapiens
ggaaagagagagatgtatatatattaacaaagggcaagatatacactaagatacctgtacaaacaccttaacaa

SEQ ID NO: 137966 - DNA, 75 bp, Homo sapiens
gagagagatgtatatatattaacaaagggcaagatatacactaagatacctgtacaaacaccttaacaaacatct

SEQ ID NO: 137967 - DNA, 70 bp, Homo sapiens
atatatattaacaaagggcaagatatacactaagatacctgtacaaacaccttaacaaacatctttttct

SEQ ID NO: 137968 - DNA, 69 bp, Homo sapiens
tttttcttttttatcaaaagaagtgtgatttcctgttttatatattgaaaaccagccctctggtgacaa

SEQ ID NO: 137969 - DNA, 74 bp, Homo sapiens
aaagaagtgtgatttcctgttttatatattgaaaaccagccctctggtgacaaatggaaagctgtgactctcaa

SEQ ID NO: 137970 - DNA, 76 bp, Homo sapiens
tcctgttttatatattgaaaaccagccctctggtgacaaatggaaagctgtgactctcaagccagttcacaaatct

SEQ ID NO: 137971 - DNA, 75 bp, Homo sapiens
atatattgaaaaccagccctctggtgacaaatggaaagctgtgactctcaagccagttcacaaatcttttccaaa

SEQ ID NO: 137972 - DNA, 73 bp, Homo sapiens
aaaaccagccctctggtgacaaatggaaagctgtgactctcaagccagttcacaaatcttttccaaatcctac

SEQ ID NO: 137973 - DNA, 75 bp, Homo sapiens
tggtgacaaatggaaagctgtgactctcaagccagttcacaaatcttttccaaatcctacttcacaaatcaaatt

SEQ ID NO: 137974 - DNA, 72 bp, Homo sapiens
aaatggaaagctgtgactctcaagccagttcacaaatcttttccaaatcctacttcacaaatcaaattttct

SEQ ID NO: 137975 - DNA, 77 bp, Homo sapiens
gccagttcacaaatcttttccaaatcctacttcacaaatcaaattttcttaatgcaaggctagctgcgtcacatata

SEQ ID NO: 137976 - DNA, 76 bp, Homo sapiens
ttttccaaatcctacttcacaaatcaaattttcttaatgcaaggctagctgcgtcacatatatcctgtgtaatgtt

SEQ ID NO: 137977 - DNA, 76 bp, Homo sapiens
ttcacaaatcaaattttcttaatgcaaggctagctgcgtcacatatatcctgtgtaatgtttaacgaagaactttc

SEQ ID NO: 137978 - DNA, 73 bp, Homo sapiens
aatcaaattttcttaatgcaaggctagctgcgtcacatatatcctgtgtaatgtttaacgaagaactttccct

SEQ ID NO: 137979 - DNA, 73 bp, Homo sapiens
aaattttcttaatgcaaggctagctgcgtcacatatatcctgtgtaatgtttaacgaagaactttcccttctc

SEQ ID NO: 137980 - DNA, 77 bp, Homo sapiens
ttaatgcaaggctagctgcgtcacatatatcctgtgtaatgtttaacgaagaactttcccttctctgaatcctcaaa

SEQ ID NO: 137981 - DNA, 78 bp, Homo sapiens
aatgcaaggctagctgcgtcacatatatcctgtgtaatgtttaacgaagaactttcccttctctgaatcctcaaagca

SEQ ID NO: 137982 - DNA, 77 bp, Homo sapiens
tagctgcgtcacatatatcctgtgtaatgtttaacgaagaactttcccttctctgaatcctcaaagcaccctagcaa

SEQ ID NO: 137983 - DNA, 72 bp, Homo sapiens
tatcctgtgtaatgtttaacgaagaactttcccttctctgaatcctcaaagcaccctagcaaaccacacgta

SEQ ID NO: 137984 - DNA, 71 bp, Homo sapiens
atgtttaacgaagaactttcccttctctgaatcctcaaagcaccctagcaaaccacacgtactcacagagt

SEQ ID NO: 137985 - DNA, 73 bp, Homo sapiens
ttaacgaagaactttcccttctctgaatcctcaaagcaccctagcaaaccacacgtactcacagagttgaatc

SEQ ID NO: 137986 - DNA, 74 bp, Homo sapiens
actttcccttctctgaatcctcaaagcaccctagcaaaccacacgtactcacagagttgaatcctgcctggaat

SEQ ID NO: 137987 - DNA, 80 bp, Homo sapiens
tctgaatcctcaaagcaccctagcaaaccacacgtactcacagagttgaatcctgcctggaattctccagcagtagccta

SEQ ID NO: 137988 - DNA, 76 bp, Homo sapiens
aaagcaccctagcaaaccacacgtactcacagagttgaatcctgcctggaattctccagcagtagcctagcttacc

SEQ ID NO: 137989 - DNA, 77 bp, Homo sapiens
tagcaaaccacacgtactcacagagttgaatcctgcctggaattctccagcagtagcctagcttaccttgtaccttc

SEQ ID NO: 137990 - DNA, 76 bp, Homo sapiens
tactcacagagttgaatcctgcctggaattctccagcagtagcctagcttaccttgtaccttccccacttaagcaa

SEQ ID NO: 137991 - DNA, 73 bp, Homo sapiens
tcctgcctggaattctccagcagtagcctagcttaccttgtaccttccccacttaagcaagtttgcaaaagta

SEQ ID NO: 137992 - DNA, 71 bp, Homo sapiens
aattctccagcagtagcctagcttaccttgtaccttccccacttaagcaagtttgcaaaagtagcgccttc

SEQ ID NO: 137993 - DNA, 69 bp, Homo sapiens
agcctagcttaccttgtaccttccccacttaagcaagtttgcaaaagtagcgccttctcaacaacgtgt

SEQ ID NO: 137994 - DNA, 69 bp, Homo sapiens
ttccccacttaagcaagtttgcaaaagtagcgccttctcaacaacgtgtttggaaggtaataggttgaa

SEQ ID NO: 137995 - DNA, 69 bp, Homo sapiens
acttaagcaagtttgcaaaagtagcgccttctcaacaacgtgtttggaaggtaataggttgaaaggaca

SEQ ID NO: 137996 - DNA, 74 bp, Homo sapiens
agtagcgccttctcaacaacgtgtttggaaggtaataggttgaaaggacatgacataaaggatcatgacaacaa

SEQ ID NO: 137997 - DNA, 71 bp, Homo sapiens
aacaacgtgtttggaaggtaataggttgaaaggacatgacataaaggatcatgacaacaaaggagagtatt

SEQ ID NO: 137998 - DNA, 71 bp, Homo sapiens
gtgtttggaaggtaataggttgaaaggacatgacataaaggatcatgacaacaaaggagagtattttgttt

SEQ ID NO: 137999 - DNA, 70 bp, Homo sapiens
ggtaataggttgaaaggacatgacataaaggatcatgacaacaaaggagagtattttgtttttcaaaact

SEQ ID NO: 138000 - DNA, 70 bp, Homo sapiens
gaaaggacatgacataaaggatcatgacaacaaaggagagtattttgtttttcaaaacttaacccctctc

SEQ ID NO: 138001 - DNA, 70 bp, Homo sapiens
taaaggatcatgacaacaaaggagagtattttgtttttcaaaacttaacccctctctcaccaatcagaag

SEQ ID NO: 138002 - DNA, 71 bp, Homo sapiens
atcatgacaacaaaggagagtattttgtttttcaaaacttaacccctctctcaccaatcagaagggtgctc

SEQ ID NO: 138003 - DNA, 68 bp, Homo sapiens
aaaggagagtattttgtttttcaaaacttaacccctctctcaccaatcagaagggtgctcccatacca

SEQ ID NO: 138004 - DNA, 70 bp, Homo sapiens
tttgtttttcaaaacttaacccctctctcaccaatcagaagggtgctcccataccagggtcctgccctca

SEQ ID NO: 138005 - DNA, 72 bp, Homo sapiens
tttcaaaacttaacccctctctcaccaatcagaagggtgctcccataccagggtcctgccctcaggcccagc

SEQ ID NO: 138006 - DNA, 75 bp, Homo sapiens
accaatcagaagggtgctcccataccagggtcctgccctcaggcccagctcctgatcctctctctttgaaagtag

SEQ ID NO: 138007 - DNA, 78 bp, Homo sapiens
ggtgctcccataccagggtcctgccctcaggcccagctcctgatcctctctctttgaaagtaggcattatgcatttta

SEQ ID NO: 138008 - DNA, 78 bp, Homo sapiens
ataccagggtcctgccctcaggcccagctcctgatcctctctctttgaaagtaggcattatgcattttattgattcat

SEQ ID NO: 138009 - DNA, 75 bp, Homo sapiens
aggcccagctcctgatcctctctctttgaaagtaggcattatgcattttattgattcatttattggggtggtggg

SEQ ID NO: 138010 - DNA, 75 bp, Homo sapiens
tgatcctctctctttgaaagtaggcattatgcattttattgattcatttattggggtggtgggggtggtgcttat

SEQ ID NO: 138011 - DNA, 73 bp, Homo sapiens
tctctctttgaaagtaggcattatgcattttattgattcatttattggggtggtgggggtggtgcttattccc

SEQ ID NO: 138012 - DNA, 70 bp, Homo sapiens
aaagtaggcattatgcattttattgattcatttattggggtggtgggggtggtgcttattccccttgctt

SEQ ID NO: 138013 - DNA, 71 bp, Homo sapiens
attatgcattttattgattcatttattggggtggtgggggtggtgcttattccccttgctttctagcaaag

SEQ ID NO: 138014 - DNA, 73 bp, Homo sapiens
ttgattcatttattggggtggtgggggtggtgcttattccccttgctttctagcaaagtgctgaggagaggaa

SEQ ID NO: 138015 - DNA, 73 bp, Homo sapiens
tattggggtggtgggggtggtgcttattccccttgctttctagcaaagtgctgaggagaggaagcatttaata

SEQ ID NO: 138016 - DNA, 75 bp, Homo sapiens
cttattccccttgctttctagcaaagtgctgaggagaggaagcatttaataaatctgttaatgactgactcaaaa

SEQ ID NO: 138017 - DNA, 80 bp, Homo sapiens
ttgctttctagcaaagtgctgaggagaggaagcatttaataaatctgttaatgactgactcaaaagcagtggagcaagtg

SEQ ID NO: 138018 - DNA, 80 bp, Homo sapiens
ttctagcaaagtgctgaggagaggaagcatttaataaatctgttaatgactgactcaaaagcagtggagcaagtgtggaa

SEQ ID NO: 138019 - DNA, 77 bp, Homo sapiens
tgaggagaggaagcatttaataaatctgttaatgactgactcaaaagcagtggagcaagtgtggaaagaaccctgac

SEQ ID NO: 138020 - DNA, 74 bp, Homo sapiens
ttaataaatctgttaatgactgactcaaaagcagtggagcaagtgtggaaagaaccctgacctgaaatttccaa

SEQ ID NO: 138021 - DNA, 76 bp, Homo sapiens
actcaaaagcagtggagcaagtgtggaaagaaccctgacctgaaatttccaagagccactgcctttctcctgagca

SEQ ID NO: 138022 - DNA, 77 bp, Homo sapiens
tggagcaagtgtggaaagaaccctgacctgaaatttccaagagccactgcctttctcctgagcagcttggtgactta

SEQ ID NO: 138023 - DNA, 76 bp, Homo sapiens
tggaaagaaccctgacctgaaatttccaagagccactgcctttctcctgagcagcttggtgacttaggcaagtcat

SEQ ID NO: 138024 - DNA, 76 bp, Homo sapiens
aaatttccaagagccactgcctttctcctgagcagcttggtgacttaggcaagtcattgtccaacttacctgtcca

SEQ ID NO: 138025 - DNA, 76 bp, Homo sapiens
aagagccactgcctttctcctgagcagcttggtgacttaggcaagtcattgtccaacttacctgtccagggaccag

SEQ ID NO: 138026 - DNA, 71 bp, Homo sapiens
cctttctcctgagcagcttggtgacttaggcaagtcattgtccaacttacctgtccagggaccaggttttt

SEQ ID NO: 138027 - DNA, 70 bp, Homo sapiens
cctgagcagcttggtgacttaggcaagtcattgtccaacttacctgtccagggaccaggttttttgtttt

SEQ ID NO: 138028 - DNA, 69 bp, Homo sapiens
ttggtttttgttcatttaaaaaagcttttaagcatgaaaatctttagatgtttattcattctaccataa

SEQ ID NO: 138029 - DNA, 72 bp, Homo sapiens
gttcatttaaaaaagcttttaagcatgaaaatctttagatgtttattcattctaccataaaaatgtcatcag

SEQ ID NO: 138030 - DNA, 69 bp, Homo sapiens
aaaaagcttttaagcatgaaaatctttagatgtttattcattctaccataaaaatgtcatcagtttttt

SEQ ID NO: 138031 - DNA, 72 bp, Homo sapiens
ttaagcatgaaaatctttagatgtttattcattctaccataaaaatgtcatcagttttttttcattctaagg

SEQ ID NO: 138032 - DNA, 69 bp, Homo sapiens
tttattcattctaccataaaaatgtcatcagttttttttcattctaaggttatttattaaacaatccca

SEQ ID NO: 138033 - DNA, 72 bp, Homo sapiens
tctaccataaaaatgtcatcagttttttttcattctaaggttatttattaaacaatcccataatcagataga

SEQ ID NO: 138034 - DNA, 71 bp, Homo sapiens
tcattctaaggttatttattaaacaatcccataatcagatagaggttttagaagaaagaatgaagttctac

SEQ ID NO: 138035 - DNA, 72 bp, Homo sapiens
tatttattaaacaatcccataatcagatagaggttttagaagaaagaatgaagttctacgattaactggtga

SEQ ID NO: 138036 - DNA, 73 bp, Homo sapiens
acaatcccataatcagatagaggttttagaagaaagaatgaagttctacgattaactggtgaaaatgagacca

SEQ ID NO: 138037 - DNA, 72 bp, Homo sapiens
cccataatcagatagaggttttagaagaaagaatgaagttctacgattaactggtgaaaatgagaccaatta

SEQ ID NO: 138038 - DNA, 71 bp, Homo sapiens
gaggttttagaagaaagaatgaagttctacgattaactggtgaaaatgagaccaattatattataccacag

SEQ ID NO: 138039 - DNA, 74 bp, Homo sapiens
gaagaaagaatgaagttctacgattaactggtgaaaatgagaccaattatattataccacagtatctttgcaaa

SEQ ID NO: 138040 - DNA, 72 bp, Homo sapiens
gaagttctacgattaactggtgaaaatgagaccaattatattataccacagtatctttgcaaaaccctagag

SEQ ID NO: 138041 - DNA, 75 bp, Homo sapiens
tacgattaactggtgaaaatgagaccaattatattataccacagtatctttgcaaaaccctagagtactctgaga

SEQ ID NO: 138042 - DNA, 73 bp, Homo sapiens
ctggtgaaaatgagaccaattatattataccacagtatctttgcaaaaccctagagtactctgagaaggaaat

SEQ ID NO: 138043 - DNA, 74 bp, Homo sapiens
tgagaccaattatattataccacagtatctttgcaaaaccctagagtactctgagaaggaaattattcctttgc

SEQ ID NO: 138044 - DNA, 71 bp, Homo sapiens
accaattatattataccacagtatctttgcaaaaccctagagtactctgagaaggaaattattcctttgcc

SEQ ID NO: 138045 - DNA, 73 bp, Homo sapiens
ccaattatattataccacagtatctttgcaaaaccctagagtactctgagaaggaaattattcctttgcctca

SEQ ID NO: 138046 - DNA, 74 bp, Homo sapiens
ttataccacagtatctttgcaaaaccctagagtactctgagaaggaaattattcctttgcctcatatattcttc

SEQ ID NO: 138047 - DNA, 75 bp, Homo sapiens
tataccacagtatctttgcaaaaccctagagtactctgagaaggaaattattcctttgcctcatatattcttctc

SEQ ID NO: 138048 - DNA, 74 bp, Homo sapiens
acagtatctttgcaaaaccctagagtactctgagaaggaaattattcctttgcctcatatattcttctctctct

SEQ ID NO: 138049 - DNA, 74 bp, Homo sapiens
tctttgcaaaaccctagagtactctgagaaggaaattattcctttgcctcatatattcttctctctctttaaca

SEQ ID NO: 138050 - DNA, 73 bp, Homo sapiens
aaaccctagagtactctgagaaggaaattattcctttgcctcatatattcttctctctctttaacagtgccaa

SEQ ID NO: 138051 - DNA, 75 bp, Homo sapiens
ctagagtactctgagaaggaaattattcctttgcctcatatattcttctctctctttaacagtgccaataagtct

SEQ ID NO: 138052 - DNA, 75 bp, Homo sapiens
tagagtactctgagaaggaaattattcctttgcctcatatattcttctctctctttaacagtgccaataagtctt

SEQ ID NO: 138053 - DNA, 75 bp, Homo sapiens
tactctgagaaggaaattattcctttgcctcatatattcttctctctctttaacagtgccaataagtcttttctc

SEQ ID NO: 138054 - DNA, 72 bp, Homo sapiens
aaggaaattattcctttgcctcatatattcttctctctctttaacagtgccaataagtcttttctcccaatc

SEQ ID NO: 138055 - DNA, 74 bp, Homo sapiens
ttcctttgcctcatatattcttctctctctttaacagtgccaataagtcttttctcccaatcttcctaagaatg

SEQ ID NO: 138056 - DNA, 74 bp, Homo sapiens
atatattcttctctctctttaacagtgccaataagtcttttctcccaatcttcctaagaatgtccacaaacaga

SEQ ID NO: 138057 - DNA, 73 bp, Homo sapiens
tctctttaacagtgccaataagtcttttctcccaatcttcctaagaatgtccacaaacagaatcaatctcttt

SEQ ID NO: 138058 - DNA, 72 bp, Homo sapiens
ttaacagtgccaataagtcttttctcccaatcttcctaagaatgtccacaaacagaatcaatctcttttttc

SEQ ID NO: 138059 - DNA, 77 bp, Homo sapiens
actgcacccagcccagaatcaatcttattaagccaaaaaagtccagattctaaatatctgagcaaaacacatacaca

SEQ ID NO: 138060 - DNA, 76 bp, Homo sapiens
cacacatacactaccaaaacaataacacaacaaccaccatcatattctaagaatatattcttagaagatattactg

SEQ ID NO: 138061 - DNA, 73 bp, Homo sapiens
cactaccaaaacaataacacaacaaccaccatcatattctaagaatatattcttagaagatattactgttaac

SEQ ID NO: 138062 - DNA, 72 bp, Homo sapiens
caataacacaacaaccaccatcatattctaagaatatattcttagaagatattactgttaactatggttttt

SEQ ID NO: 138063 - DNA, 76 bp, Homo sapiens
caacaaccaccatcatattctaagaatatattcttagaagatattactgttaactatggttttttgcaagatcaca

SEQ ID NO: 138064 - DNA, 78 bp, Homo sapiens
ccatcatattctaagaatatattcttagaagatattactgttaactatggttttttgcaagatcacatgatatttcaa

SEQ ID NO: 138065 - DNA, 75 bp, Homo sapiens
ctaagaatatattcttagaagatattactgttaactatggttttttgcaagatcacatgatatttcaaactaaga

SEQ ID NO: 138066 - DNA, 76 bp, Homo sapiens
attcttagaagatattactgttaactatggttttttgcaagatcacatgatatttcaaactaagaaaagctgcata

SEQ ID NO: 138067 - DNA, 77 bp, Homo sapiens
tagaagatattactgttaactatggttttttgcaagatcacatgatatttcaaactaagaaaagctgcataagttga

SEQ ID NO: 138068 - DNA, 77 bp, Homo sapiens
gatattactgttaactatggttttttgcaagatcacatgatatttcaaactaagaaaagctgcataagttgatgtct

SEQ ID NO: 138069 - DNA, 77 bp, Homo sapiens
tactgttaactatggttttttgcaagatcacatgatatttcaaactaagaaaagctgcataagttgatgtcttataa

SEQ ID NO: 138070 - DNA, 82 bp, Homo sapiens
tatggttttttgcaagatcacatgatatttcaaactaagaaaagctgcataagttgatgtcttataagatcagcagaaatgc

SEQ ID NO: 138071 - DNA, 83 bp, Homo sapiens
tggttttttgcaagatcacatgatatttcaaactaagaaaagctgcataagttgatgtcttataagatcagcagaaatgctca

SEQ ID NO: 138072 - DNA, 83 bp, Homo sapiens
tttttgcaagatcacatgatatttcaaactaagaaaagctgcataagttgatgtcttataagatcagcagaaatgctcatact

SEQ ID NO: 138073 - DNA, 83 bp, Homo sapiens
gcaagatcacatgatatttcaaactaagaaaagctgcataagttgatgtcttataagatcagcagaaatgctcatactttaat

SEQ ID NO: 138074 - DNA, 81 bp, Homo sapiens
gatcacatgatatttcaaactaagaaaagctgcataagttgatgtcttataagatcagcagaaatgctcatactttaattt

SEQ ID NO: 138075 - DNA, 79 bp, Homo sapiens
catgatatttcaaactaagaaaagctgcataagttgatgtcttataagatcagcagaaatgctcatactttaattttat

SEQ ID NO: 138076 - DNA, 72 bp, Homo sapiens
ttatttatctatttatattttggaaagatgagaactttgtacgtgcctctttattccagtaggtggctctaa

SEQ ID NO: 138077 - DNA, 70 bp, Homo sapiens
atttatattttggaaagatgagaactttgtacgtgcctctttattccagtaggtggctctaaagtccaat

SEQ ID NO: 138078 - DNA, 70 bp, Homo sapiens
ttggaaagatgagaactttgtacgtgcctctttattccagtaggtggctctaaagtccaattgtttattt

SEQ ID NO: 138079 - DNA, 71 bp, Homo sapiens
agatgagaactttgtacgtgcctctttattccagtaggtggctctaaagtccaattgtttatttttctata

SEQ ID NO: 138080 - DNA, 69 bp, Homo sapiens
tttgtacgtgcctctttattccagtaggtggctctaaagtccaattgtttatttttctataacaagacc

SEQ ID NO: 138081 - DNA, 69 bp, Homo sapiens
ctctttattccagtaggtggctctaaagtccaattgtttatttttctataacaagaccggagcacaaaa

SEQ ID NO: 138082 - DNA, 70 bp, Homo sapiens
cagtaggtggctctaaagtccaattgtttatttttctataacaagaccggagcacaaaattgtgctaaat

SEQ ID NO: 138083 - DNA, 69 bp, Homo sapiens
gctctaaagtccaattgtttatttttctataacaagaccggagcacaaaattgtgctaaatttgaaaaa

SEQ ID NO: 138084 - DNA, 69 bp, Homo sapiens
tgtttatttttctataacaagaccggagcacaaaattgtgctaaatttgaaaaataacttaatgaggag

SEQ ID NO: 138085 - DNA, 71 bp, Homo sapiens
tttctataacaagaccggagcacaaaattgtgctaaatttgaaaaataacttaatgaggagtattttctgc

SEQ ID NO: 138086 - DNA, 71 bp, Homo sapiens
acaagaccggagcacaaaattgtgctaaatttgaaaaataacttaatgaggagtattttctgcttagcttc

SEQ ID NO: 138087 - DNA, 73 bp, Homo sapiens
gagcacaaaattgtgctaaatttgaaaaataacttaatgaggagtattttctgcttagcttctttcctgtcaa

SEQ ID NO: 138088 - DNA, 69 bp, Homo sapiens
taaaataattttttttcattcaatagtagttgaaccacctgaagctggtttatagaaaacaatgctaaa

SEQ ID NO: 138089 - DNA, 75 bp, Homo sapiens
cattcaatagtagttgaaccacctgaagctggtttatagaaaacaatgctaaacataaaatgttgctataatatg

SEQ ID NO: 138090 - DNA, 74 bp, Homo sapiens
gtagttgaaccacctgaagctggtttatagaaaacaatgctaaacataaaatgttgctataatatgttataata

SEQ ID NO: 138091 - DNA, 73 bp, Homo sapiens
tggtttatagaaaacaatgctaaacataaaatgttgctataatatgttataatataacctaagattctttgta

SEQ ID NO: 138092 - DNA, 76 bp, Homo sapiens
caatgctaaacataaaatgttgctataatatgttataatataacctaagattctttgtatttgtccacagatagaa

SEQ ID NO: 138093 - DNA, 76 bp, Homo sapiens
cataaaatgttgctataatatgttataatataacctaagattctttgtatttgtccacagatagaatccagactaa

SEQ ID NO: 138094 - DNA, 77 bp, Homo sapiens
tgttgctataatatgttataatataacctaagattctttgtatttgtccacagatagaatccagactaacttggcaa

SEQ ID NO: 138095 - DNA, 72 bp, Homo sapiens
gttataatataacctaagattctttgtatttgtccacagatagaatccagactaacttggcaaaattactcc

SEQ ID NO: 138096 - DNA, 76 bp, Homo sapiens
tataacctaagattctttgtatttgtccacagatagaatccagactaacttggcaaaattactcctcattatgtgc

SEQ ID NO: 138097 - DNA, 77 bp, Homo sapiens
gattctttgtatttgtccacagatagaatccagactaacttggcaaaattactcctcattatgtgctgtttctataa

SEQ ID NO: 138098 - DNA, 74 bp, Homo sapiens
gtatttgtccacagatagaatccagactaacttggcaaaattactcctcattatgtgctgtttctataaaaaaa

SEQ ID NO: 138099 - DNA, 72 bp, Homo sapiens
acagatagaatccagactaacttggcaaaattactcctcattatgtgctgtttctataaaaaaaatagttta

SEQ ID NO: 138100 - DNA, 71 bp, Homo sapiens
tccagactaacttggcaaaattactcctcattatgtgctgtttctataaaaaaaatagtttatttgcactt

SEQ ID NO: 138101 - DNA, 71 bp, Homo sapiens
cttggcaaaattactcctcattatgtgctgtttctataaaaaaaatagtttatttgcactttgtatcctat

SEQ ID NO: 138102 - DNA, 71 bp, Homo sapiens
tgtgctgtttctataaaaaaaatagtttatttgcactttgtatcctattaaccctagctgttcacattttc

SEQ ID NO: 138103 - DNA, 72 bp, Homo sapiens
tagtttatttgcactttgtatcctattaaccctagctgttcacattttcttttccttggaagtacactgaga

SEQ ID NO: 138104 - DNA, 72 bp, Homo sapiens
tatttgcactttgtatcctattaaccctagctgttcacattttcttttccttggaagtacactgagaacagt

SEQ ID NO: 138105 - DNA, 70 bp, Homo sapiens
ttgtatcctattaaccctagctgttcacattttcttttccttggaagtacactgagaacagttcttttta

SEQ ID NO: 138106 - DNA, 69 bp, Homo sapiens
accctagctgttcacattttcttttccttggaagtacactgagaacagttctttttaaagattaccaga

SEQ ID NO: 138107 - DNA, 67 bp, Homo sapiens
tttcttttccttggaagtacactgagaacagttctttttaaagattaccagatttaaaataataata

SEQ ID NO: 138108 - DNA, 66 bp, Homo sapiens
taaaataatgtgtgagtttgcttttttcccctaaactttccagttaaatacttataagtacactgt

SEQ ID NO: 138109 - DNA, 68 bp, Homo sapiens
taatgtgtgagtttgcttttttcccctaaactttccagttaaatacttataagtacactgtttcattc

SEQ ID NO: 138110 - DNA, 69 bp, Homo sapiens
tgtgtgagtttgcttttttcccctaaactttccagttaaatacttataagtacactgtttcattctgga

SEQ ID NO: 138111 - DNA, 67 bp, Homo sapiens
gtgagtttgcttttttcccctaaactttccagttaaatacttataagtacactgtttcattctggag

SEQ ID NO: 138112 - DNA, 66 bp, Homo sapiens
gcttttttcccctaaactttccagttaaatacttataagtacactgtttcattctggagttctatt

SEQ ID NO: 138113 - DNA, 66 bp, Homo sapiens
ttttcccctaaactttccagttaaatacttataagtacactgtttcattctggagttctatttccc

SEQ ID NO: 138114 - DNA, 67 bp, Homo sapiens
ccctaaactttccagttaaatacttataagtacactgtttcattctggagttctatttccccttaga

SEQ ID NO: 138115 - DNA, 68 bp, Homo sapiens
ctttccagttaaatacttataagtacactgtttcattctggagttctatttccccttagaaaacaatg

SEQ ID NO: 138116 - DNA, 69 bp, Homo sapiens
ttccagttaaatacttataagtacactgtttcattctggagttctatttccccttagaaaacaatggac

SEQ ID NO: 138117 - DNA, 72 bp, Homo sapiens
aagtacactgtttcattctggagttctatttccccttagaaaacaatggacttctctcaacagtttgaatca

SEQ ID NO: 138118 - DNA, 72 bp, Homo sapiens
tctatttccccttagaaaacaatggacttctctcaacagtttgaatcacctctttttttggcatctctcaaa

SEQ ID NO: 138119 - DNA, 70 bp, Homo sapiens
cttagaaaacaatggacttctctcaacagtttgaatcacctctttttttggcatctctcaaaggtttaac

SEQ ID NO: 138120 - DNA, 71 bp, Homo sapiens
acaatggacttctctcaacagtttgaatcacctctttttttggcatctctcaaaggtttaacttattagct

SEQ ID NO: 138121 - DNA, 70 bp, Homo sapiens
ctctcaacagtttgaatcacctctttttttggcatctctcaaaggtttaacttattagcttcctttccaa

SEQ ID NO: 138122 - DNA, 71 bp, Homo sapiens
cacctctttttttggcatctctcaaaggtttaacttattagcttcctttccaacaacatgttgacatttga

SEQ ID NO: 138123 - DNA, 75 bp, Homo sapiens
gcatctctcaaaggtttaacttattagcttcctttccaacaacatgttgacatttgaattgtgacatattagaac

SEQ ID NO: 138124 - DNA, 72 bp, Homo sapiens
aacttattagcttcctttccaacaacatgttgacatttgaattgtgacatattagaacttttcggtggcttc

SEQ ID NO: 138125 - DNA, 74 bp, Homo sapiens
ttcctttccaacaacatgttgacatttgaattgtgacatattagaacttttcggtggcttctcggaaatagtga

SEQ ID NO: 138126 - DNA, 72 bp, Homo sapiens
aacaacatgttgacatttgaattgtgacatattagaacttttcggtggcttctcggaaatagtgaggttaaa

SEQ ID NO: 138127 - DNA, 71 bp, Homo sapiens
acatttgaattgtgacatattagaacttttcggtggcttctcggaaatagtgaggttaaagagacaatacc

SEQ ID NO: 138128 - DNA, 70 bp, Homo sapiens
aattgtgacatattagaacttttcggtggcttctcggaaatagtgaggttaaagagacaataccctacaa

SEQ ID NO: 138129 - DNA, 69 bp, Homo sapiens
tattagaacttttcggtggcttctcggaaatagtgaggttaaagagacaataccctacaagacagtaaa

SEQ ID NO: 138130 - DNA, 73 bp, Homo sapiens
gtggcttctcggaaatagtgaggttaaagagacaataccctacaagacagtaaaacagtgcaattgtctctat

SEQ ID NO: 138131 - DNA, 72 bp, Homo sapiens
ttctcggaaatagtgaggttaaagagacaataccctacaagacagtaaaacagtgcaattgtctctattggg

SEQ ID NO: 138132 - DNA, 71 bp, Homo sapiens
aggttaaagagacaataccctacaagacagtaaaacagtgcaattgtctctattggggaatactacttaga

SEQ ID NO: 138133 - DNA, 72 bp, Homo sapiens
aaagagacaataccctacaagacagtaaaacagtgcaattgtctctattggggaatactacttagacacacg

SEQ ID NO: 138134 - DNA, 76 bp, Homo sapiens
taaaacagtgcaattgtctctattggggaatactacttagacacacgtcaggtcattttaagagagtattatgata

SEQ ID NO: 138135 - DNA, 75 bp, Homo sapiens
gtctctattggggaatactacttagacacacgtcaggtcattttaagagagtattatgatatcattatttctttg

SEQ ID NO: 138136 - DNA, 75 bp, Homo sapiens
gggaatactacttagacacacgtcaggtcattttaagagagtattatgatatcattatttctttgtagtccacta

SEQ ID NO: 138137 - DNA, 78 bp, Homo sapiens
cttagacacacgtcaggtcattttaagagagtattatgatatcattatttctttgtagtccactattaatcatgtctc

SEQ ID NO: 138138 - DNA, 75 bp, Homo sapiens
cgtcaggtcattttaagagagtattatgatatcattatttctttgtagtccactattaatcatgtctcttttaat

SEQ ID NO: 138139 - DNA, 74 bp, Homo sapiens
aagagagtattatgatatcattatttctttgtagtccactattaatcatgtctcttttaattccattttagatt

SEQ ID NO: 138140 - DNA, 74 bp, Homo sapiens
tatttctttgtagtccactattaatcatgtctcttttaattccattttagatttactcaatccaatgtgaacag

SEQ ID NO: 138141 - DNA, 73 bp, Homo sapiens
cactattaatcatgtctcttttaattccattttagatttactcaatccaatgtgaacagtctaagaaacaaaa

SEQ ID NO: 138142 - DNA, 73 bp, Homo sapiens
catgtctcttttaattccattttagatttactcaatccaatgtgaacagtctaagaaacaaaagaaattgatg

SEQ ID NO: 138143 - DNA, 75 bp, Homo sapiens
tccattttagatttactcaatccaatgtgaacagtctaagaaacaaaagaaattgatggatacactgtaactata

SEQ ID NO: 138144 - DNA, 75 bp, Homo sapiens
tttagatttactcaatccaatgtgaacagtctaagaaacaaaagaaattgatggatacactgtaactatatatta

SEQ ID NO: 138145 - DNA, 75 bp, Homo sapiens
ctcaatccaatgtgaacagtctaagaaacaaaagaaattgatggatacactgtaactatatattataaagacaat

SEQ ID NO: 138146 - DNA, 76 bp, Homo sapiens
tgtgaacagtctaagaaacaaaagaaattgatggatacactgtaactatatattataaagacaattctctttgcca

SEQ ID NO: 138147 - DNA, 77 bp, Homo sapiens
gaaacaaaagaaattgatggatacactgtaactatatattataaagacaattctctttgccaagacatagatcacta

SEQ ID NO: 138148 - DNA, 77 bp, Homo sapiens
aattgatggatacactgtaactatatattataaagacaattctctttgccaagacatagatcactactgtaatttcc

SEQ ID NO: 138149 - DNA, 75 bp, Homo sapiens
atggatacactgtaactatatattataaagacaattctctttgccaagacatagatcactactgtaatttccctt

SEQ ID NO: 138150 - DNA, 75 bp, Homo sapiens
ctatatattataaagacaattctctttgccaagacatagatcactactgtaatttccctttaagagtccagattg

SEQ ID NO: 138151 - DNA, 77 bp, Homo sapiens
ttataaagacaattctctttgccaagacatagatcactactgtaatttccctttaagagtccagattgtcatgtgaa

SEQ ID NO: 138152 - DNA, 79 bp, Homo sapiens
caagacatagatcactactgtaatttccctttaagagtccagattgtcatgtgaagaatattgagtgcatacaaaataa

SEQ ID NO: 138153 - DNA, 76 bp, Homo sapiens
tcactactgtaatttccctttaagagtccagattgtcatgtgaagaatattgagtgcatacaaaataaaagacacg

SEQ ID NO: 138154 - DNA, 79 bp, Homo sapiens
taagagtccagattgtcatgtgaagaatattgagtgcatacaaaataaaagacacggaagagtgttgatgttggcttta

SEQ ID NO: 138155 - DNA, 77 bp, Homo sapiens
agattgtcatgtgaagaatattgagtgcatacaaaataaaagacacggaagagtgttgatgttggctttatttactg

SEQ ID NO: 138156 - DNA, 72 bp, Homo sapiens
taaaagacacggaagagtgttgatgttggctttatttactggaggtaaaaggtgacattccaagccatgaaa

SEQ ID NO: 138157 - DNA, 70 bp, Homo sapiens
ttggctttatttactggaggtaaaaggtgacattccaagccatgaaaggcaaagaaaagcaaagtggatt

SEQ ID NO: 138158 - DNA, 69 bp, Homo sapiens
ttatttactggaggtaaaaggtgacattccaagccatgaaaggcaaagaaaagcaaagtggattttaac

SEQ ID NO: 138159 - DNA, 69 bp, Homo sapiens
taaaaggtgacattccaagccatgaaaggcaaagaaaagcaaagtggattttaacttcagggtgttctt

SEQ ID NO: 138160 - DNA, 70 bp, Homo sapiens
tgacattccaagccatgaaaggcaaagaaaagcaaagtggattttaacttcagggtgttcttttcaattt

SEQ ID NO: 138161 - DNA, 69 bp, Homo sapiens
caagccatgaaaggcaaagaaaagcaaagtggattttaacttcagggtgttcttttcaattttaagtga

SEQ ID NO: 138162 - DNA, 66 bp, Homo sapiens
gcaaagaaaagcaaagtggattttaacttcagggtgttcttttcaattttaagtgagtttttatgg

SEQ ID NO: 138163 - DNA, 71 bp, Homo sapiens
gcaaagtggattttaacttcagggtgttcttttcaattttaagtgagtttttatggtgctcatgaaactga

SEQ ID NO: 138164 - DNA, 68 bp, Homo sapiens
ggattttaacttcagggtgttcttttcaattttaagtgagtttttatggtgctcatgaaactgaggtt

SEQ ID NO: 138165 - DNA, 74 bp, Homo sapiens
tttcaattttaagtgagtttttatggtgctcatgaaactgaggtttgaaaagaactggcaagcgccagatataa

SEQ ID NO: 138166 - DNA, 77 bp, Homo sapiens
ttaagtgagtttttatggtgctcatgaaactgaggtttgaaaagaactggcaagcgccagatataatgagggcagat

SEQ ID NO: 138167 - DNA, 80 bp, Homo sapiens
tttttatggtgctcatgaaactgaggtttgaaaagaactggcaagcgccagatataatgagggcagattctgggcatgct

SEQ ID NO: 138168 - DNA, 79 bp, Homo sapiens
aggtttgaaaagaactggcaagcgccagatataatgagggcagattctgggcatgcttccccatatagcaataagaatg

SEQ ID NO: 138169 - DNA, 81 bp, Homo sapiens
cgccagatataatgagggcagattctgggcatgcttccccatatagcaataagaatgtccctcgaagttccatttgccata

SEQ ID NO: 138170 - DNA, 76 bp, Homo sapiens
agattctgggcatgcttccccatatagcaataagaatgtccctcgaagttccatttgccatacccttaccaagcta

SEQ ID NO: 138171 - DNA, 70 bp, Homo sapiens
ataagaatgtccctcgaagttccatttgccatacccttaccaagctagtccttttctcaaggtgtttcta

SEQ ID NO: 138172 - DNA, 70 bp, Homo sapiens
cctcgaagttccatttgccatacccttaccaagctagtccttttctcaaggtgtttctaccacctgatct

SEQ ID NO: 138173 - DNA, 71 bp, Homo sapiens
agttccatttgccatacccttaccaagctagtccttttctcaaggtgtttctaccacctgatcttcattac

SEQ ID NO: 138174 - DNA, 71 bp, Homo sapiens
atacccttaccaagctagtccttttctcaaggtgtttctaccacctgatcttcattacctctcatccctta

SEQ ID NO: 138175 - DNA, 70 bp, Homo sapiens
taccaagctagtccttttctcaaggtgtttctaccacctgatcttcattacctctcatcccttagggttt

SEQ ID NO: 138176 - DNA, 70 bp, Homo sapiens
cttttctcaaggtgtttctaccacctgatcttcattacctctcatcccttagggttttggagacacttaa

SEQ ID NO: 138177 - DNA, 70 bp, Homo sapiens
tctcatcccttagggttttggagacacttaagcaacattgttttcctcttctaattacaatggcccaaaa

SEQ ID NO: 138178 - DNA, 71 bp, Homo sapiens
ggagacacttaagcaacattgttttcctcttctaattacaatggcccaaaagtataatttgaatccttgaa

SEQ ID NO: 138179 - DNA, 72 bp, Homo sapiens
agcaacattgttttcctcttctaattacaatggcccaaaagtataatttgaatccttgaatctagggatgtc

SEQ ID NO: 138180 - DNA, 72 bp, Homo sapiens
gttttcctcttctaattacaatggcccaaaagtataatttgaatccttgaatctagggatgtctacatataa

SEQ ID NO: 138181 - DNA, 71 bp, Homo sapiens
ttctaattacaatggcccaaaagtataatttgaatccttgaatctagggatgtctacatataaatttaatt

SEQ ID NO: 138182 - DNA, 70 bp, Homo sapiens
aatggcccaaaagtataatttgaatccttgaatctagggatgtctacatataaatttaatttactttcta

SEQ ID NO: 138183 - DNA, 77 bp, Homo sapiens
tgaatccttgaatctagggatgtctacatataaatttaatttactttctaataacattaatggtatgccagcaggca

SEQ ID NO: 138184 - DNA, 77 bp, Homo sapiens
tctagggatgtctacatataaatttaatttactttctaataacattaatggtatgccagcaggcatttgagaagaga

SEQ ID NO: 138185 - DNA, 77 bp, Homo sapiens
tgtctacatataaatttaatttactttctaataacattaatggtatgccagcaggcatttgagaagagacaggagta

SEQ ID NO: 138186 - DNA, 74 bp, Homo sapiens
ttactttctaataacattaatggtatgccagcaggcatttgagaagagacaggagtaatttaaatgaaaacaaa

SEQ ID NO: 138187 - DNA, 75 bp, Homo sapiens
cattaatggtatgccagcaggcatttgagaagagacaggagtaatttaaatgaaaacaaaatgaaaatttgtagc

SEQ ID NO: 138188 - DNA, 75 bp, Homo sapiens
tatgccagcaggcatttgagaagagacaggagtaatttaaatgaaaacaaaatgaaaatttgtagccctgaaaca

SEQ ID NO: 138189 - DNA, 73 bp, Homo sapiens
gcaggcatttgagaagagacaggagtaatttaaatgaaaacaaaatgaaaatttgtagccctgaaacaatata

SEQ ID NO: 138190 - DNA, 70 bp, Homo sapiens
gagaagagacaggagtaatttaaatgaaaacaaaatgaaaatttgtagccctgaaacaatatagtgggga

SEQ ID NO: 138191 - DNA, 71 bp, Homo sapiens
gtaatttaaatgaaaacaaaatgaaaatttgtagccctgaaacaatatagtggggaaatgatgggatgtca

SEQ ID NO: 138192 - DNA, 74 bp, Homo sapiens
gaaaacaaaatgaaaatttgtagccctgaaacaatatagtggggaaatgatgggatgtcatcttagaggaatca

SEQ ID NO: 138193 - DNA, 75 bp, Homo sapiens
atttgtagccctgaaacaatatagtggggaaatgatgggatgtcatcttagaggaatcaggcctttcagaaaata

SEQ ID NO: 138194 - DNA, 75 bp, Homo sapiens
tgaaacaatatagtggggaaatgatgggatgtcatcttagaggaatcaggcctttcagaaaatatacttttatgt

SEQ ID NO: 138195 - DNA, 73 bp, Homo sapiens
gaggaatcaggcctttcagaaaatatacttttatgttataaaatagatctttcagcaaataaaaatgcaacaa

SEQ ID NO: 138196 - DNA, 72 bp, Homo sapiens
gcctttcagaaaatatacttttatgttataaaatagatctttcagcaaataaaaatgcaacaaaggagtgat

SEQ ID NO: 138197 - DNA, 75 bp, Homo sapiens
gttataaaatagatctttcagcaaataaaaatgcaacaaaggagtgatttatatagattttctcacatatttgta

SEQ ID NO: 138198 - DNA, 77 bp, Homo sapiens
gatctttcagcaaataaaaatgcaacaaaggagtgatttatatagattttctcacatatttgtatataataagtatg

SEQ ID NO: 138199 - DNA, 76 bp, Homo sapiens
gcaaataaaaatgcaacaaaggagtgatttatatagattttctcacatatttgtatataataagtatgtttgacca

SEQ ID NO: 138200 - DNA, 77 bp, Homo sapiens
aatgcaacaaaggagtgatttatatagattttctcacatatttgtatataataagtatgtttgaccatgcttataaa

SEQ ID NO: 138201 - DNA, 76 bp, Homo sapiens
caaaggagtgatttatatagattttctcacatatttgtatataataagtatgtttgaccatgcttataaaatagag

SEQ ID NO: 138202 - DNA, 77 bp, Homo sapiens
tatatagattttctcacatatttgtatataataagtatgtttgaccatgcttataaaatagagttataatgtcttta

SEQ ID NO: 138203 - DNA, 76 bp, Homo sapiens
tctcacatatttgtatataataagtatgtttgaccatgcttataaaatagagttataatgtctttaaaatctgtat

SEQ ID NO: 138204 - DNA, 75 bp, Homo sapiens
tgtatataataagtatgtttgaccatgcttataaaatagagttataatgtctttaaaatctgtattctcaaaatc

SEQ ID NO: 138205 - DNA, 74 bp, Homo sapiens
ataagtatgtttgaccatgcttataaaatagagttataatgtctttaaaatctgtattctcaaaatcttgagta

SEQ ID NO: 138206 - DNA, 78 bp, Homo sapiens
gaccatgcttataaaatagagttataatgtctttaaaatctgtattctcaaaatcttgagtatattgcagtccagtga

SEQ ID NO: 138207 - DNA, 76 bp, Homo sapiens
gcttataaaatagagttataatgtctttaaaatctgtattctcaaaatcttgagtatattgcagtccagtgaatta

SEQ ID NO: 138208 - DNA, 82 bp, Homo sapiens
tctttaaaatctgtattctcaaaatcttgagtatattgcagtccagtgaattacataccatctgtgttatgtgccataagca

SEQ ID NO: 138209 - DNA, 84 bp, Homo sapiens
tgtattctcaaaatcttgagtatattgcagtccagtgaattacataccatctgtgttatgtgccataagcagagacactactaa

SEQ ID NO: 138210 - DNA, 82 bp, Homo sapiens
agtatattgcagtccagtgaattacataccatctgtgttatgtgccataagcagagacactactaatataactctctcattt

SEQ ID NO: 138211 - DNA, 80 bp, Homo sapiens
agtccagtgaattacataccatctgtgttatgtgccataagcagagacactactaatataactctctcatttttgtgttg

SEQ ID NO: 138212 - DNA, 77 bp, Homo sapiens
tatgtgccataagcagagacactactaatataactctctcatttttgtgttggagaaaaatggaagggagtcaatta

SEQ ID NO: 138213 - DNA, 74 bp, Homo sapiens
gcagagacactactaatataactctctcatttttgtgttggagaaaaatggaagggagtcaattaatctgttaa

SEQ ID NO: 138214 - DNA, 71 bp, Homo sapiens
ctactaatataactctctcatttttgtgttggagaaaaatggaagggagtcaattaatctgttaagttcca

SEQ ID NO: 138215 - DNA, 69 bp, Homo sapiens
actctctcatttttgtgttggagaaaaatggaagggagtcaattaatctgttaagttccataaaacagt

SEQ ID NO: 138216 - DNA, 69 bp, Homo sapiens
gagaaaaatggaagggagtcaattaatctgttaagttccataaaacagttaataatgggtctcttctcc

SEQ ID NO: 138217 - DNA, 69 bp, Homo sapiens
gaagggagtcaattaatctgttaagttccataaaacagttaataatgggtctcttctcctatcagggtt

SEQ ID NO: 138218 - DNA, 70 bp, Homo sapiens
gtcaattaatctgttaagttccataaaacagttaataatgggtctcttctcctatcagggttttatgtaa

SEQ ID NO: 138219 - DNA, 69 bp, Homo sapiens
taagttccataaaacagttaataatgggtctcttctcctatcagggttttatgtaaaaagttctctgga

SEQ ID NO: 138220 - DNA, 71 bp, Homo sapiens
ggtctcttctcctatcagggttttatgtaaaaagttctctggattcaaaataaaaatatcctggatctgaa

SEQ ID NO: 138221 - DNA, 69 bp, Homo sapiens
cctatcagggttttatgtaaaaagttctctggattcaaaataaaaatatcctggatctgaaattttgta

SEQ ID NO: 138222 - DNA, 70 bp, Homo sapiens
tttatgtaaaaagttctctggattcaaaataaaaatatcctggatctgaaattttgtaatgaatataccc

SEQ ID NO: 138223 - DNA, 72 bp, Homo sapiens
tctctggattcaaaataaaaatatcctggatctgaaattttgtaatgaatatacccccaataaataaagaga

SEQ ID NO: 138224 - DNA, 71 bp, Homo sapiens
atatcctggatctgaaattttgtaatgaatatacccccaataaataaagagaggttcaaaaatattcaaca

SEQ ID NO: 138225 - DNA, 70 bp, Homo sapiens
ggatctgaaattttgtaatgaatatacccccaataaataaagagaggttcaaaaatattcaacacttaga

SEQ ID NO: 138226 - DNA, 68 bp, Homo sapiens
tgaatatacccccaataaataaagagaggttcaaaaatattcaacacttagaaaattttgagttaata

SEQ ID NO: 138227 - DNA, 68 bp, Homo sapiens
agagaggttcaaaaatattcaacacttagaaaattttgagttaatatgaaaaggttgttcatttgtta

SEQ ID NO: 138228 - DNA, 70 bp, Homo sapiens
aatattcaacacttagaaaattttgagttaatatgaaaaggttgttcatttgttatttttgctctctctc

SEQ ID NO: 138229 - DNA, 72 bp, Homo sapiens
cacttagaaaattttgagttaatatgaaaaggttgttcatttgttatttttgctctctctctcagaatgttc

SEQ ID NO: 138230 - DNA, 74 bp, Homo sapiens
ttttgagttaatatgaaaaggttgttcatttgttatttttgctctctctctcagaatgttctatgagaagaaaa

SEQ ID NO: 138231 - DNA, 74 bp, Homo sapiens
gttaatatgaaaaggttgttcatttgttatttttgctctctctctcagaatgttctatgagaagaaaaaactca

SEQ ID NO: 138232 - DNA, 73 bp, Homo sapiens
aaggttgttcatttgttatttttgctctctctctcagaatgttctatgagaagaaaaaactcaattcttccca

SEQ ID NO: 138233 - DNA, 75 bp, Homo sapiens
tgttatttttgctctctctctcagaatgttctatgagaagaaaaaactcaattcttcccaatataaggtgaaaga

SEQ ID NO: 138234 - DNA, 76 bp, Homo sapiens
ttgctctctctctcagaatgttctatgagaagaaaaaactcaattcttcccaatataaggtgaaagacaagaagaa

SEQ ID NO: 138235 - DNA, 73 bp, Homo sapiens
ctctctcagaatgttctatgagaagaaaaaactcaattcttcccaatataaggtgaaagacaagaagaatggg

SEQ ID NO: 138236 - DNA, 71 bp, Homo sapiens
gttctatgagaagaaaaaactcaattcttcccaatataaggtgaaagacaagaagaatggggcctataaga

SEQ ID NO: 138237 - DNA, 69 bp, Homo sapiens
gaagaaaaaactcaattcttcccaatataaggtgaaagacaagaagaatggggcctataagaaaataga

SEQ ID NO: 138238 - DNA, 71 bp, Homo sapiens
actcaattcttcccaatataaggtgaaagacaagaagaatggggcctataagaaaatagattatatggaaa

SEQ ID NO: 138239 - DNA, 69 bp, Homo sapiens
cccaatataaggtgaaagacaagaagaatggggcctataagaaaatagattatatggaaattccatttt

SEQ ID NO: 138240 - DNA, 67 bp, Homo sapiens
aggtgaaagacaagaagaatggggcctataagaaaatagattatatggaaattccatttttttaaaa

SEQ ID NO: 138241 - DNA, 66 bp, Homo sapiens
gtcataataaatattttaaaaccgtgttaactcctccaaaactttctatttggtagctaataccaa

SEQ ID NO: 138242 - DNA, 69 bp, Homo sapiens
aaccgtgttaactcctccaaaactttctatttggtagctaataccaaaatccagaagcacaacatgtta

SEQ ID NO: 138243 - DNA, 70 bp, Homo sapiens
cctccaaaactttctatttggtagctaataccaaaatccagaagcacaacatgttatgaactaacctaac

SEQ ID NO: 138244 - DNA, 75 bp, Homo sapiens
tttctatttggtagctaataccaaaatccagaagcacaacatgttatgaactaacctaactcccatacatctgaa

SEQ ID NO: 138245 - DNA, 75 bp, Homo sapiens
ttctatttggtagctaataccaaaatccagaagcacaacatgttatgaactaacctaactcccatacatctgaaa

SEQ ID NO: 138246 - DNA, 74 bp, Homo sapiens
atccagaagcacaacatgttatgaactaacctaactcccatacatctgaaacttttgccagttgagatggtttt

SEQ ID NO: 138247 - DNA, 73 bp, Homo sapiens
aagcacaacatgttatgaactaacctaactcccatacatctgaaacttttgccagttgagatggttttttcat

SEQ ID NO: 138248 - DNA, 71 bp, Homo sapiens
acaacatgttatgaactaacctaactcccatacatctgaaacttttgccagttgagatggttttttcattt

SEQ ID NO: 138249 - DNA, 73 bp, Homo sapiens
atgttatgaactaacctaactcccatacatctgaaacttttgccagttgagatggttttttcattttatcaca

SEQ ID NO: 138250 - DNA, 72 bp, Homo sapiens
atgaactaacctaactcccatacatctgaaacttttgccagttgagatggttttttcattttatcacataaa

SEQ ID NO: 138251 - DNA, 70 bp, Homo sapiens
ctaacctaactcccatacatctgaaacttttgccagttgagatggttttttcattttatcacataaaaaa

SEQ ID NO: 138252 - DNA, 70 bp, Homo sapiens
tcccatacatctgaaacttttgccagttgagatggttttttcattttatcacataaaaaattaaattttc

SEQ ID NO: 138253 - DNA, 71 bp, Homo sapiens
tgccagttgagatggttttttcattttatcacataaaaaattaaattttcccagtatcttgctagactctt

SEQ ID NO: 138254 - DNA, 71 bp, Homo sapiens
tcattttatcacataaaaaattaaattttcccagtatcttgctagactctttttatttttctatgaagcaa

SEQ ID NO: 138255 - DNA, 68 bp, Homo sapiens
aaaaattaaattttcccagtatcttgctagactctttttatttttctatgaagcaatatttgtgcctt

SEQ ID NO: 138256 - DNA, 74 bp, Homo sapiens
ccagtatcttgctagactctttttatttttctatgaagcaatatttgtgcctttgtaagtatgaatattatatt

SEQ ID NO: 138257 - DNA, 75 bp, Homo sapiens
gaagcaatatttgtgcctttgtaagtatgaatattatatttggatctctggatacctcaatttataaggataagt

SEQ ID NO: 138258 - DNA, 71 bp, Homo sapiens
ctttgtaagtatgaatattatatttggatctctggatacctcaatttataaggataagtttttatagtaaa

SEQ ID NO: 138259 - DNA, 71 bp, Homo sapiens
tattatatttggatctctggatacctcaatttataaggataagtttttatagtaaatgttttagtaacaga

SEQ ID NO: 138260 - DNA, 72 bp, Homo sapiens
tggatctctggatacctcaatttataaggataagtttttatagtaaatgttttagtaacagatttcttcatg

SEQ ID NO: 138261 - DNA, 70 bp, Homo sapiens
tctggatacctcaatttataaggataagtttttatagtaaatgttttagtaacagatttcttcatgttct

SEQ ID NO: 138262 - DNA, 67 bp, Homo sapiens
tcaatttataaggataagtttttatagtaaatgttttagtaacagatttcttcatgttcttttattt

SEQ ID NO: 138263 - DNA, 69 bp, Homo sapiens
ttttaaaatttgttcaaatagcacactagtgaaatttctaaatgtttatttaaaattctaaatgattca

SEQ ID NO: 138264 - DNA, 71 bp, Homo sapiens
tgttcaaatagcacactagtgaaatttctaaatgtttatttaaaattctaaatgattcaagtagttgaaaa

SEQ ID NO: 138265 - DNA, 68 bp, Homo sapiens
gcacactagtgaaatttctaaatgtttatttaaaattctaaatgattcaagtagttgaaaagtaaaac

SEQ ID NO: 138266 - DNA, 67 bp, Homo sapiens
ctagtgaaatttctaaatgtttatttaaaattctaaatgattcaagtagttgaaaagtaaaactaga

SEQ ID NO: 138267 - DNA, 65 bp, Homo sapiens
aatgtttatttaaaattctaaatgattcaagtagttgaaaagtaaaactagaaatccaaaattgt

SEQ ID NO: 138268 - DNA, 67 bp, Homo sapiens
taaaattctaaatgattcaagtagttgaaaagtaaaactagaaatccaaaattgttcagttttacca

SEQ ID NO: 138269 - DNA, 65 bp, Homo sapiens
agtagttgaaaagtaaaactagaaatccaaaattgttcagttttaccactggtaaaacccacagc

SEQ ID NO: 138270 - DNA, 66 bp, Homo sapiens
agtaaaactagaaatccaaaattgttcagttttaccactggtaaaacccacagcttaaggcataat

SEQ ID NO: 138271 - DNA, 68 bp, Homo sapiens
aactagaaatccaaaattgttcagttttaccactggtaaaacccacagcttaaggcataattataata

SEQ ID NO: 138272 - DNA, 71 bp, Homo sapiens
ccaaaattgttcagttttaccactggtaaaacccacagcttaaggcataattataatattatacatgtata

SEQ ID NO: 138273 - DNA, 72 bp, Homo sapiens
tttaccactggtaaaacccacagcttaaggcataattataatattatacatgtatatagaaattaaatgccc

SEQ ID NO: 138274 - DNA, 73 bp, Homo sapiens
ctggtaaaacccacagcttaaggcataattataatattatacatgtatatagaaattaaatgccctaaacaga

SEQ ID NO: 138275 - DNA, 74 bp, Homo sapiens
acccacagcttaaggcataattataatattatacatgtatatagaaattaaatgccctaaacagaattattata

SEQ ID NO: 138276 - DNA, 73 bp, Homo sapiens
taaggcataattataatattatacatgtatatagaaattaaatgccctaaacagaattattataattaattta

SEQ ID NO: 138277 - DNA, 72 bp, Homo sapiens
ttataatattatacatgtatatagaaattaaatgccctaaacagaattattataattaatttattttaatca

SEQ ID NO: 138278 - DNA, 70 bp, Homo sapiens
tgtatatagaaattaaatgccctaaacagaattattataattaatttattttaatcaaaccctgaaagca

SEQ ID NO: 138279 - DNA, 68 bp, Homo sapiens
gaaattaaatgccctaaacagaattattataattaatttattttaatcaaaccctgaaagcaattcca

SEQ ID NO: 138280 - DNA, 70 bp, Homo sapiens
gccctaaacagaattattataattaatttattttaatcaaaccctgaaagcaattccaaatgcaaagaga

SEQ ID NO: 138281 - DNA, 73 bp, Homo sapiens
gaattattataattaatttattttaatcaaaccctgaaagcaattccaaatgcaaagagaatatccattcagc

SEQ ID NO: 138282 - DNA, 74 bp, Homo sapiens
ttaatttattttaatcaaaccctgaaagcaattccaaatgcaaagagaatatccattcagctaatactcacaag

SEQ ID NO: 138283 - DNA, 75 bp, Homo sapiens
ccctgaaagcaattccaaatgcaaagagaatatccattcagctaatactcacaaggctaagttaagtataaaaga

SEQ ID NO: 138284 - DNA, 78 bp, Homo sapiens
attccaaatgcaaagagaatatccattcagctaatactcacaaggctaagttaagtataaaagacagtggtgatatga

SEQ ID NO: 138285 - DNA, 79 bp, Homo sapiens
gcaaagagaatatccattcagctaatactcacaaggctaagttaagtataaaagacagtggtgatatgaaattgattga

SEQ ID NO: 138286 - DNA, 76 bp, Homo sapiens
cagctaatactcacaaggctaagttaagtataaaagacagtggtgatatgaaattgattgagcaaatttagacttc

SEQ ID NO: 138287 - DNA, 75 bp, Homo sapiens
gttaagtataaaagacagtggtgatatgaaattgattgagcaaatttagacttccaaactgtacattttcatgtg

SEQ ID NO: 138288 - DNA, 75 bp, Homo sapiens
taaaagacagtggtgatatgaaattgattgagcaaatttagacttccaaactgtacattttcatgtggtgttatt

SEQ ID NO: 138289 - DNA, 75 bp, Homo sapiens
agtggtgatatgaaattgattgagcaaatttagacttccaaactgtacattttcatgtggtgttatttataaata

SEQ ID NO: 138290 - DNA, 74 bp, Homo sapiens
gaaattgattgagcaaatttagacttccaaactgtacattttcatgtggtgttatttataaatataaatgtgct

SEQ ID NO: 138291 - DNA, 76 bp, Homo sapiens
tgagcaaatttagacttccaaactgtacattttcatgtggtgttatttataaatataaatgtgcttagatatatta

SEQ ID NO: 138292 - DNA, 75 bp, Homo sapiens
tagacttccaaactgtacattttcatgtggtgttatttataaatataaatgtgcttagatatattacatatttta

SEQ ID NO: 138293 - DNA, 76 bp, Homo sapiens
actgtacattttcatgtggtgttatttataaatataaatgtgcttagatatattacatattttataatttgacata

SEQ ID NO: 138294 - DNA, 77 bp, Homo sapiens
tcatgtggtgttatttataaatataaatgtgcttagatatattacatattttataatttgacataaacatggcaaag

SEQ ID NO: 138295 - DNA, 75 bp, Homo sapiens
tttataaatataaatgtgcttagatatattacatattttataatttgacataaacatggcaaagtatatgttttg

SEQ ID NO: 138296 - DNA, 73 bp, Homo sapiens
gtgcttagatatattacatattttataatttgacataaacatggcaaagtatatgttttggagaaatttttaa

SEQ ID NO: 138297 - DNA, 79 bp, Homo sapiens
atttttaaattttcatattagtaatctcatgtatataattctatataataagaatgaatgcttcatggcacatgattaa

SEQ ID NO: 138298 - DNA, 85 bp, Homo sapiens
tttcatattagtaatctcatgtatataattctatataataagaatgaatgcttcatggcacatgattaattcttattatatatca

SEQ ID NO: 138299 - DNA, 83 bp, Homo sapiens
agtaatctcatgtatataattctatataataagaatgaatgcttcatggcacatgattaattcttattatatatcatacaagt

SEQ ID NO: 138300 - DNA, 85 bp, Homo sapiens
ctcatgtatataattctatataataagaatgaatgcttcatggcacatgattaattcttattatatatcatacaagttatatgta

SEQ ID NO: 138301 - DNA, 82 bp, Homo sapiens
aattctatataataagaatgaatgcttcatggcacatgattaattcttattatatatcatacaagttatatgtaattatata

SEQ ID NO: 138302 - DNA, 81 bp, Homo sapiens
taataagaatgaatgcttcatggcacatgattaattcttattatatatcatacaagttatatgtaattatatattatgttt

SEQ ID NO: 138303 - DNA, 78 bp, Homo sapiens
tatattatatatacttggaattagaattaatcatatatcattattcattttatttggttaagtccaagatgacagcag

SEQ ID NO: 138304 - DNA, 77 bp, Homo sapiens
tatacttggaattagaattaatcatatatcattattcattttatttggttaagtccaagatgacagcagtaaagcag

SEQ ID NO: 138305 - DNA, 79 bp, Homo sapiens
gaattagaattaatcatatatcattattcattttatttggttaagtccaagatgacagcagtaaagcaggcatagacac

SEQ ID NO: 138306 - DNA, 83 bp, Homo sapiens
tcatatatcattattcattttatttggttaagtccaagatgacagcagtaaagcaggcatagacactcataagcactttgata

SEQ ID NO: 138307 - DNA, 78 bp, Homo sapiens
ttattcattttatttggttaagtccaagatgacagcagtaaagcaggcatagacactcataagcactttgataggaaa

SEQ ID NO: 138308 - DNA, 77 bp, Homo sapiens
tttatttggttaagtccaagatgacagcagtaaagcaggcatagacactcataagcactttgataggaaagttaata

SEQ ID NO: 138309 - DNA, 79 bp, Homo sapiens
gttaagtccaagatgacagcagtaaagcaggcatagacactcataagcactttgataggaaagttaatatgccataaaa

SEQ ID NO: 138310 - DNA, 77 bp, Homo sapiens
taaagcaggcatagacactcataagcactttgataggaaagttaatatgccataaaagactttcagtctaactctgt

SEQ ID NO: 138311 - DNA, 76 bp, Homo sapiens
ggcatagacactcataagcactttgataggaaagttaatatgccataaaagactttcagtctaactctgttttata

SEQ ID NO: 138312 - DNA, 71 bp, Homo sapiens
aagcactttgataggaaagttaatatgccataaaagactttcagtctaactctgttttatactttgaagga

SEQ ID NO: 138313 - DNA, 72 bp, Homo sapiens
gataggaaagttaatatgccataaaagactttcagtctaactctgttttatactttgaaggactgctttcaa

SEQ ID NO: 138314 - DNA, 73 bp, Homo sapiens
taatatgccataaaagactttcagtctaactctgttttatactttgaaggactgctttcaaccaaatcctcta

SEQ ID NO: 138315 - DNA, 73 bp, Homo sapiens
gccataaaagactttcagtctaactctgttttatactttgaaggactgctttcaaccaaatcctctatcatta

SEQ ID NO: 138316 - DNA, 70 bp, Homo sapiens
gactttcagtctaactctgttttatactttgaaggactgctttcaaccaaatcctctatcattagttttt

SEQ ID NO: 138317 - DNA, 70 bp, Homo sapiens
gtctaactctgttttatactttgaaggactgctttcaaccaaatcctctatcattagttttttcaaatgg

SEQ ID NO: 138318 - DNA, 71 bp, Homo sapiens
tctgttttatactttgaaggactgctttcaaccaaatcctctatcattagttttttcaaatggtaatcagg

SEQ ID NO: 138319 - DNA, 70 bp, Homo sapiens
tttatactttgaaggactgctttcaaccaaatcctctatcattagttttttcaaatggtaatcaggtggg

SEQ ID NO: 138320 - DNA, 73 bp, Homo sapiens
tgaaggactgctttcaaccaaatcctctatcattagttttttcaaatggtaatcaggtgggtcttgttcatta

SEQ ID NO: 138321 - DNA, 71 bp, Homo sapiens
aaggactgctttcaaccaaatcctctatcattagttttttcaaatggtaatcaggtgggtcttgttcatta

SEQ ID NO: 138322 - DNA, 73 bp, Homo sapiens
ttcaaccaaatcctctatcattagttttttcaaatggtaatcaggtgggtcttgttcattatactagagaaca

SEQ ID NO: 138323 - DNA, 71 bp, Homo sapiens
accaaatcctctatcattagttttttcaaatggtaatcaggtgggtcttgttcattatactagagaacaaa

SEQ ID NO: 138324 - DNA, 73 bp, Homo sapiens
tcctctatcattagttttttcaaatggtaatcaggtgggtcttgttcattatactagagaacaaaaatctgga

SEQ ID NO: 138325 - DNA, 76 bp, Homo sapiens
ttcaaatggtaatcaggtgggtcttgttcattatactagagaacaaaaatctggaatctgtcagattctttatctg

SEQ ID NO: 138326 - DNA, 77 bp, Homo sapiens
gtgggtcttgttcattatactagagaacaaaaatctggaatctgtcagattctttatctgtggattgatttgaagta

SEQ ID NO: 138327 - DNA, 78 bp, Homo sapiens
ttcattatactagagaacaaaaatctggaatctgtcagattctttatctgtggattgatttgaagtattatgtttgta

SEQ ID NO: 138328 - DNA, 79 bp, Homo sapiens
gagaacaaaaatctggaatctgtcagattctttatctgtggattgatttgaagtattatgtttgtattgttgagacaga

SEQ ID NO: 138329 - DNA, 79 bp, Homo sapiens
tctgtcagattctttatctgtggattgatttgaagtattatgtttgtattgttgagacagaaaagttctgcacacaagg

SEQ ID NO: 138330 - DNA, 75 bp, Homo sapiens
tctttatctgtggattgatttgaagtattatgtttgtattgttgagacagaaaagttctgcacacaagggggaaa

SEQ ID NO: 138331 - DNA, 73 bp, Homo sapiens
tggattgatttgaagtattatgtttgtattgttgagacagaaaagttctgcacacaagggggaaaataagaaa

SEQ ID NO: 138332 - DNA, 70 bp, Homo sapiens
gaagtattatgtttgtattgttgagacagaaaagttctgcacacaagggggaaaataagaaagaaggaaa

SEQ ID NO: 138333 - DNA, 69 bp, Homo sapiens
gtttgtattgttgagacagaaaagttctgcacacaagggggaaaataagaaagaaggaaaacacattta

SEQ ID NO: 138334 - DNA, 67 bp, Homo sapiens
gttgagacagaaaagttctgcacacaagggggaaaataagaaagaaggaaaacacatttacttttaa

SEQ ID NO: 138335 - DNA, 66 bp, Homo sapiens
aagttctgcacacaagggggaaaataagaaagaaggaaaacacatttacttttaaaaagatgaaca

SEQ ID NO: 138336 - DNA, 66 bp, Homo sapiens
gggaaaataagaaagaaggaaaacacatttacttttaaaaagatgaacaaggctttattgttatga

SEQ ID NO: 138337 - DNA, 66 bp, Homo sapiens
aataagaaagaaggaaaacacatttacttttaaaaagatgaacaaggctttattgttatgaatccc

SEQ ID NO: 138338 - DNA, 65 bp, Homo sapiens
gaaagaaggaaaacacatttacttttaaaaagatgaacaaggctttattgttatgaatccccgtt

SEQ ID NO: 138339 - DNA, 65 bp, Homo sapiens
gaaggaaaacacatttacttttaaaaagatgaacaaggctttattgttatgaatccccgtttatt

SEQ ID NO: 138340 - DNA, 66 bp, Homo sapiens
aacacatttacttttaaaaagatgaacaaggctttattgttatgaatccccgtttatttttcctga

SEQ ID NO: 138341 - DNA, 68 bp, Homo sapiens
cttttaaaaagatgaacaaggctttattgttatgaatccccgtttatttttcctgatcaaacactgga

SEQ ID NO: 138342 - DNA, 67 bp, Homo sapiens
aaaaagatgaacaaggctttattgttatgaatccccgtttatttttcctgatcaaacactggaagtt

SEQ ID NO: 138343 - DNA, 69 bp, Homo sapiens
gaacaaggctttattgttatgaatccccgtttatttttcctgatcaaacactggaagttttatttatgc

SEQ ID NO: 138344 - DNA, 74 bp, Homo sapiens
tgaatccccgtttatttttcctgatcaaacactggaagttttatttatgcttaatagactgcatttggcatgtc

SEQ ID NO: 138345 - DNA, 75 bp, Homo sapiens
atttttcctgatcaaacactggaagttttatttatgcttaatagactgcatttggcatgtctaaaaatgacagaa

SEQ ID NO: 138346 - DNA, 78 bp, Homo sapiens
ggaagttttatttatgcttaatagactgcatttggcatgtctaaaaatgacagaagcgtgaattatgaatgaccttca

SEQ ID NO: 138347 - DNA, 81 bp, Homo sapiens
tttatttatgcttaatagactgcatttggcatgtctaaaaatgacagaagcgtgaattatgaatgaccttcaacctatgca

SEQ ID NO: 138348 - DNA, 80 bp, Homo sapiens
atagactgcatttggcatgtctaaaaatgacagaagcgtgaattatgaatgaccttcaacctatgcaggaagttgtaata

SEQ ID NO: 138349 - DNA, 77 bp, Homo sapiens
atttggcatgtctaaaaatgacagaagcgtgaattatgaatgaccttcaacctatgcaggaagttgtaataattgaa

SEQ ID NO: 138350 - DNA, 77 bp, Homo sapiens
catgtctaaaaatgacagaagcgtgaattatgaatgaccttcaacctatgcaggaagttgtaataattgaaataata

SEQ ID NO: 138351 - DNA, 76 bp, Homo sapiens
cagaagcgtgaattatgaatgaccttcaacctatgcaggaagttgtaataattgaaataatagagaaatatactcc

SEQ ID NO: 138352 - DNA, 76 bp, Homo sapiens
gaccttcaacctatgcaggaagttgtaataattgaaataatagagaaatatactcccagcaaaatctgtactgaga

SEQ ID NO: 138353 - DNA, 74 bp, Homo sapiens
cctatgcaggaagttgtaataattgaaataatagagaaatatactcccagcaaaatctgtactgagagaaaacc

SEQ ID NO: 138354 - DNA, 72 bp, Homo sapiens
agttgtaataattgaaataatagagaaatatactcccagcaaaatctgtactgagagaaaaccttttctggc

SEQ ID NO: 138355 - DNA, 73 bp, Homo sapiens
attgaaataatagagaaatatactcccagcaaaatctgtactgagagaaaaccttttctggctattggtgtct

SEQ ID NO: 138356 - DNA, 72 bp, Homo sapiens
atagagaaatatactcccagcaaaatctgtactgagagaaaaccttttctggctattggtgtcttttcactt

SEQ ID NO: 138357 - DNA, 71 bp, Homo sapiens
aaatatactcccagcaaaatctgtactgagagaaaaccttttctggctattggtgtcttttcactttgaag

SEQ ID NO: 138358 - DNA, 71 bp, Homo sapiens
gcaaaatctgtactgagagaaaaccttttctggctattggtgtcttttcactttgaagttaacagttgatt

SEQ ID NO: 138359 - DNA, 70 bp, Homo sapiens
tactgagagaaaaccttttctggctattggtgtcttttcactttgaagttaacagttgatttcttcctct

SEQ ID NO: 138360 - DNA, 69 bp, Homo sapiens
agaaaaccttttctggctattggtgtcttttcactttgaagttaacagttgatttcttcctcttccagc

SEQ ID NO: 138361 - DNA, 72 bp, Homo sapiens
gctattggtgtcttttcactttgaagttaacagttgatttcttcctcttccagctcccaacatttggcctaa

SEQ ID NO: 138362 - DNA, 71 bp, Homo sapiens
tcttttcactttgaagttaacagttgatttcttcctcttccagctcccaacatttggcctaaatgctttat

SEQ ID NO: 138363 - DNA, 74 bp, Homo sapiens
cagttgatttcttcctcttccagctcccaacatttggcctaaatgctttattttctataccttcattcaatata

SEQ ID NO: 138364 - DNA, 71 bp, Homo sapiens
cccaacatttggcctaaatgctttattttctataccttcattcaatatactttctgaagacaaggaaaagc

SEQ ID NO: 138365 - DNA, 72 bp, Homo sapiens
ggcctaaatgctttattttctataccttcattcaatatactttctgaagacaaggaaaagctgaatggaact

SEQ ID NO: 138366 - DNA, 74 bp, Homo sapiens
tataccttcattcaatatactttctgaagacaaggaaaagctgaatggaacttcagcaattggagggtgggtag

SEQ ID NO: 138367 - DNA, 70 bp, Homo sapiens
gaagacaaggaaaagctgaatggaacttcagcaattggagggtgggtaggagaggaggtaggtagccgtt

SEQ ID NO: 138368 - DNA, 72 bp, Homo sapiens
aaaagctgaatggaacttcagcaattggagggtgggtaggagaggaggtaggtagccgtttgcatgtttgaa

SEQ ID NO: 138369 - DNA, 76 bp, Homo sapiens
ttcagcaattggagggtgggtaggagaggaggtaggtagccgtttgcatgtttgaacaaagtcagcatttcatatg

SEQ ID NO: 138370 - DNA, 77 bp, Homo sapiens
agggtgggtaggagaggaggtaggtagccgtttgcatgtttgaacaaagtcagcatttcatatggacatatctgtca

SEQ ID NO: 138371 - DNA, 81 bp, Homo sapiens
agaggaggtaggtagccgtttgcatgtttgaacaaagtcagcatttcatatggacatatctgtcagtcttggtactgcaga

SEQ ID NO: 138372 - DNA, 80 bp, Homo sapiens
aggtaggtagccgtttgcatgtttgaacaaagtcagcatttcatatggacatatctgtcagtcttggtactgcagagagg

SEQ ID NO: 138373 - DNA, 87 bp, Homo sapiens
tttgcatgtttgaacaaagtcagcatttcatatggacatatctgtcagtcttggtactgcagagaggtggcatcaagtctacagata

SEQ ID NO: 138374 - DNA, 86 bp, Homo sapiens
tttgaacaaagtcagcatttcatatggacatatctgtcagtcttggtactgcagagaggtggcatcaagtctacagatacaatata

SEQ ID NO: 138375 - DNA, 86 bp, Homo sapiens
atatggacatatctgtcagtcttggtactgcagagaggtggcatcaagtctacagatacaatatatgcattaggaaacatagtctg

SEQ ID NO: 138376 - DNA, 85 bp, Homo sapiens
tgtcagtcttggtactgcagagaggtggcatcaagtctacagatacaatatatgcattaggaaacatagtctggaccctgatcta

SEQ ID NO: 138377 - DNA, 84 bp, Homo sapiens
ggtactgcagagaggtggcatcaagtctacagatacaatatatgcattaggaaacatagtctggaccctgatctatccatagta

SEQ ID NO: 138378 - DNA, 82 bp, Homo sapiens
agaggtggcatcaagtctacagatacaatatatgcattaggaaacatagtctggaccctgatctatccatagtaatgtggga

SEQ ID NO: 138379 - DNA, 78 bp, Homo sapiens
agatacaatatatgcattaggaaacatagtctggaccctgatctatccatagtaatgtgggaaactccaattcaggaa

SEQ ID NO: 138380 - DNA, 78 bp, Homo sapiens
tatgcattaggaaacatagtctggaccctgatctatccatagtaatgtgggaaactccaattcaggaatgatgtaaat

SEQ ID NO: 138381 - DNA, 74 bp, Homo sapiens
attaggaaacatagtctggaccctgatctatccatagtaatgtgggaaactccaattcaggaatgatgtaaatt

SEQ ID NO: 138382 - DNA, 74 bp, Homo sapiens
atagtctggaccctgatctatccatagtaatgtgggaaactccaattcaggaatgatgtaaattttaataggag

SEQ ID NO: 138383 - DNA, 76 bp, Homo sapiens
atctatccatagtaatgtgggaaactccaattcaggaatgatgtaaattttaataggagtatctgcaggaaggatc

SEQ ID NO: 138384 - DNA, 75 bp, Homo sapiens
catagtaatgtgggaaactccaattcaggaatgatgtaaattttaataggagtatctgcaggaaggatcctatta

SEQ ID NO: 138385 - DNA, 77 bp, Homo sapiens
tgtgggaaactccaattcaggaatgatgtaaattttaataggagtatctgcaggaaggatcctattatacattctga

SEQ ID NO: 138386 - DNA, 76 bp, Homo sapiens
ccaattcaggaatgatgtaaattttaataggagtatctgcaggaaggatcctattatacattctgagcctaattaa

SEQ ID NO: 138387 - DNA, 75 bp, Homo sapiens
tttaataggagtatctgcaggaaggatcctattatacattctgagcctaattaataagaggtaaagagaagtgtc

SEQ ID NO: 138388 - DNA, 78 bp, Homo sapiens
agtatctgcaggaaggatcctattatacattctgagcctaattaataagaggtaaagagaagtgtcttcagcagagat

SEQ ID NO: 138389 - DNA, 80 bp, Homo sapiens
aggatcctattatacattctgagcctaattaataagaggtaaagagaagtgtcttcagcagagattgatgactgaacata

SEQ ID NO: 138390 - DNA, 78 bp, Homo sapiens
cctattatacattctgagcctaattaataagaggtaaagagaagtgtcttcagcagagattgatgactgaacataaat

SEQ ID NO: 138391 - DNA, 77 bp, Homo sapiens
attaataagaggtaaagagaagtgtcttcagcagagattgatgactgaacataaatttgttcaacactatggaagct

SEQ ID NO: 138392 - DNA, 82 bp, Homo sapiens
aagtgtcttcagcagagattgatgactgaacataaatttgttcaacactatggaagctttatcatggctaagcattgccaaa

SEQ ID NO: 138393 - DNA, 80 bp, Homo sapiens
agagattgatgactgaacataaatttgttcaacactatggaagctttatcatggctaagcattgccaaagcaaatcaccc

SEQ ID NO: 138394 - DNA, 75 bp, Homo sapiens
actgaacataaatttgttcaacactatggaagctttatcatggctaagcattgccaaagcaaatcacccttagtt

SEQ ID NO: 138395 - DNA, 73 bp, Homo sapiens
aacactatggaagctttatcatggctaagcattgccaaagcaaatcacccttagtttctccaaagaaaaagta

SEQ ID NO: 138396 - DNA, 72 bp, Homo sapiens
aagctttatcatggctaagcattgccaaagcaaatcacccttagtttctccaaagaaaaagtatcccatatt

SEQ ID NO: 138397 - DNA, 72 bp, Homo sapiens
aagcattgccaaagcaaatcacccttagtttctccaaagaaaaagtatcccatatttgtcttcagggtcaca

SEQ ID NO: 138398 - DNA, 69 bp, Homo sapiens
aaagcaaatcacccttagtttctccaaagaaaaagtatcccatatttgtcttcagggtcacagtctaaa

SEQ ID NO: 138399 - DNA, 70 bp, Homo sapiens
ctccaaagaaaaagtatcccatatttgtcttcagggtcacagtctaaagacaagaaaatattaattgaaa

SEQ ID NO: 138400 - DNA, 73 bp, Homo sapiens
gtatcccatatttgtcttcagggtcacagtctaaagacaagaaaatattaattgaaaaagatcaagtactgcc

SEQ ID NO: 138401 - DNA, 75 bp, Homo sapiens
ttgtcttcagggtcacagtctaaagacaagaaaatattaattgaaaaagatcaagtactgccttgctatatccac

SEQ ID NO: 138402 - DNA, 75 bp, Homo sapiens
tcagggtcacagtctaaagacaagaaaatattaattgaaaaagatcaagtactgccttgctatatccacttccta

SEQ ID NO: 138403 - DNA, 76 bp, Homo sapiens
taattgaaaaagatcaagtactgccttgctatatccacttcctaaatgaaaaatatgactccacgagaccaagata

SEQ ID NO: 138404 - DNA, 75 bp, Homo sapiens
aaagatcaagtactgccttgctatatccacttcctaaatgaaaaatatgactccacgagaccaagatatctttgg

SEQ ID NO: 138405 - DNA, 72 bp, Homo sapiens
ccttgctatatccacttcctaaatgaaaaatatgactccacgagaccaagatatctttggtgtggaattttt

SEQ ID NO: 138406 - DNA, 71 bp, Homo sapiens
ctatatccacttcctaaatgaaaaatatgactccacgagaccaagatatctttggtgtggaatttttttct

SEQ ID NO: 138407 - DNA, 71 bp, Homo sapiens
cctaaatgaaaaatatgactccacgagaccaagatatctttggtgtggaatttttttcttctccacatctt

SEQ ID NO: 138408 - DNA, 74 bp, Homo sapiens
acgagaccaagatatctttggtgtggaatttttttcttctccacatctttatctctttgtcagtaacatgaaga

SEQ ID NO: 138409 - DNA, 71 bp, Homo sapiens
ggtgtggaatttttttcttctccacatctttatctctttgtcagtaacatgaagagaaaaccaagtataac

SEQ ID NO: 138410 - DNA, 74 bp, Homo sapiens
ttttcttctccacatctttatctctttgtcagtaacatgaagagaaaaccaagtataacttattgaatgaaaca

SEQ ID NO: 138411 - DNA, 75 bp, Homo sapiens
tctccacatctttatctctttgtcagtaacatgaagagaaaaccaagtataacttattgaatgaaacaaaacaga

SEQ ID NO: 138412 - DNA, 74 bp, Homo sapiens
ttatctctttgtcagtaacatgaagagaaaaccaagtataacttattgaatgaaacaaaacagagagagaattg

SEQ ID NO: 138413 - DNA, 72 bp, Homo sapiens
cagtaacatgaagagaaaaccaagtataacttattgaatgaaacaaaacagagagagaattgttagttctag

SEQ ID NO: 138414 - DNA, 74 bp, Homo sapiens
caagtataacttattgaatgaaacaaaacagagagagaattgttagttctagtttgcataaatacggcaattga

SEQ ID NO: 138415 - DNA, 77 bp, Homo sapiens
cttattgaatgaaacaaaacagagagagaattgttagttctagtttgcataaatacggcaattgataaagatgcaca

SEQ ID NO: 138416 - DNA, 76 bp, Homo sapiens
aacaaaacagagagagaattgttagttctagtttgcataaatacggcaattgataaagatgcacattattatacac

SEQ ID NO: 138417 - DNA, 78 bp, Homo sapiens
gagagagaattgttagttctagtttgcataaatacggcaattgataaagatgcacattattatacacgaagcttacag

SEQ ID NO: 138418 - DNA, 78 bp, Homo sapiens
ttctagtttgcataaatacggcaattgataaagatgcacattattatacacgaagcttacagtgtacccagcctgaaa

SEQ ID NO: 138419 - DNA, 78 bp, Homo sapiens
ataaatacggcaattgataaagatgcacattattatacacgaagcttacagtgtacccagcctgaaagccttgcaaga

SEQ ID NO: 138420 - DNA, 79 bp, Homo sapiens
ttgataaagatgcacattattatacacgaagcttacagtgtacccagcctgaaagccttgcaagatgtctccttaaata

SEQ ID NO: 138421 - DNA, 76 bp, Homo sapiens
aagatgcacattattatacacgaagcttacagtgtacccagcctgaaagccttgcaagatgtctccttaaataacc

SEQ ID NO: 138422 - DNA, 74 bp, Homo sapiens
ttattatacacgaagcttacagtgtacccagcctgaaagccttgcaagatgtctccttaaataacctctgaggg

SEQ ID NO: 138423 - DNA, 75 bp, Homo sapiens
aagcttacagtgtacccagcctgaaagccttgcaagatgtctccttaaataacctctgagggtctatctacagac

SEQ ID NO: 138424 - DNA, 71 bp, Homo sapiens
aaagccttgcaagatgtctccttaaataacctctgagggtctatctacagaccccccaaaaatatccatta

SEQ ID NO: 138425 - DNA, 71 bp, Homo sapiens
ataacctctgagggtctatctacagaccccccaaaaatatccattagccacctgtctttaatgtggtcatt

SEQ ID NO: 138426 - DNA, 75 bp, Homo sapiens
tctatctacagaccccccaaaaatatccattagccacctgtctttaatgtggtcatttcatctgactgtataaaa

SEQ ID NO: 138427 - DNA, 76 bp, Homo sapiens
aaatatccattagccacctgtctttaatgtggtcatttcatctgactgtataaaaactgatgttcattttgaatgg

SEQ ID NO: 138428 - DNA, 76 bp, Homo sapiens
cattagccacctgtctttaatgtggtcatttcatctgactgtataaaaactgatgttcattttgaatggtttccaa

SEQ ID NO: 138429 - DNA, 72 bp, Homo sapiens
cctgtctttaatgtggtcatttcatctgactgtataaaaactgatgttcattttgaatggtttccaaacctt

SEQ ID NO: 138430 - DNA, 74 bp, Homo sapiens
gtcatttcatctgactgtataaaaactgatgttcattttgaatggtttccaaacctttgggaagagttccatca

SEQ ID NO: 138431 - DNA, 73 bp, Homo sapiens
catctgactgtataaaaactgatgttcattttgaatggtttccaaacctttgggaagagttccatcattacat

SEQ ID NO: 138432 - DNA, 69 bp, Homo sapiens
aaaaactgatgttcattttgaatggtttccaaacctttgggaagagttccatcattacattacaaagaa

SEQ ID NO: 138433 - DNA, 71 bp, Homo sapiens
ctgatgttcattttgaatggtttccaaacctttgggaagagttccatcattacattacaaagaagctaaaa

SEQ ID NO: 138434 - DNA, 70 bp, Homo sapiens
gaatggtttccaaacctttgggaagagttccatcattacattacaaagaagctaaaaagatcatctttgg

SEQ ID NO: 138435 - DNA, 69 bp, Homo sapiens
ccaaacctttgggaagagttccatcattacattacaaagaagctaaaaagatcatctttggtgttttac

SEQ ID NO: 138436 - DNA, 72 bp, Homo sapiens
tttgggaagagttccatcattacattacaaagaagctaaaaagatcatctttggtgttttacttggctggag

SEQ ID NO: 138437 - DNA, 73 bp, Homo sapiens
atcattacattacaaagaagctaaaaagatcatctttggtgttttacttggctggaggcttctcttgtgtcct

SEQ ID NO: 138438 - DNA, 72 bp, Homo sapiens
ttacaaagaagctaaaaagatcatctttggtgttttacttggctggaggcttctcttgtgtccttgaccaaa

SEQ ID NO: 138439 - DNA, 76 bp, Homo sapiens
aggcttctcttgtgtccttgaccaaaacattatcctccttcatggcttgtaaagcattcttatgacttttatatgc

SEQ ID NO: 138440 - DNA, 75 bp, Homo sapiens
tccttgaccaaaacattatcctccttcatggcttgtaaagcattcttatgacttttatatgccctcccagaaata

SEQ ID NO: 138441 - DNA, 73 bp, Homo sapiens
accaaaacattatcctccttcatggcttgtaaagcattcttatgacttttatatgccctcccagaaatagtta

SEQ ID NO: 138442 - DNA, 77 bp, Homo sapiens
tatcctccttcatggcttgtaaagcattcttatgacttttatatgccctcccagaaatagttacagtctattgtgta

SEQ ID NO: 138443 - DNA, 80 bp, Homo sapiens
attcttatgacttttatatgccctcccagaaatagttacagtctattgtgtatgtgatgctttgtgatcttcctgaatga

SEQ ID NO: 138444 - DNA, 79 bp, Homo sapiens
cttttatatgccctcccagaaatagttacagtctattgtgtatgtgatgctttgtgatcttcctgaatgaaaggcgata

SEQ ID NO: 138445 - DNA, 84 bp, Homo sapiens
atatgccctcccagaaatagttacagtctattgtgtatgtgatgctttgtgatcttcctgaatgaaaggcgatatatacatgca

SEQ ID NO: 138446 - DNA, 81 bp, Homo sapiens
aaatagttacagtctattgtgtatgtgatgctttgtgatcttcctgaatgaaaggcgatatatacatgcaaacactaacta

SEQ ID NO: 138447 - DNA, 81 bp, Homo sapiens
ttacagtctattgtgtatgtgatgctttgtgatcttcctgaatgaaaggcgatatatacatgcaaacactaactacttaaa

SEQ ID NO: 138448 - DNA, 80 bp, Homo sapiens
ttgtgtatgtgatgctttgtgatcttcctgaatgaaaggcgatatatacatgcaaacactaactacttaaaatgtacact

SEQ ID NO: 138449 - DNA, 77 bp, Homo sapiens
gctttgtgatcttcctgaatgaaaggcgatatatacatgcaaacactaactacttaaaatgtacacttaatacttca

SEQ ID NO: 138450 - DNA, 76 bp, Homo sapiens
gatcttcctgaatgaaaggcgatatatacatgcaaacactaactacttaaaatgtacacttaatacttcaggtcac

SEQ ID NO: 138451 - DNA, 75 bp, Homo sapiens
tgaaaggcgatatatacatgcaaacactaactacttaaaatgtacacttaatacttcaggtcaccctctctttca

SEQ ID NO: 138452 - DNA, 74 bp, Homo sapiens
tgcaaacactaactacttaaaatgtacacttaatacttcaggtcaccctctctttcaacttatgcagtttgtga

SEQ ID NO: 138453 - DNA, 73 bp, Homo sapiens
atgtacacttaatacttcaggtcaccctctctttcaacttatgcagtttgtgaatcttaacaaaaatcctagc

SEQ ID NO: 138454 - DNA, 74 bp, Homo sapiens
taatacttcaggtcaccctctctttcaacttatgcagtttgtgaatcttaacaaaaatcctagcgttatgtcag

SEQ ID NO: 138455 - DNA, 75 bp, Homo sapiens
ccctctctttcaacttatgcagtttgtgaatcttaacaaaaatcctagcgttatgtcagtgttgcatcctaggta

SEQ ID NO: 138456 - DNA, 76 bp, Homo sapiens
tttcaacttatgcagtttgtgaatcttaacaaaaatcctagcgttatgtcagtgttgcatcctaggtattgttaca

SEQ ID NO: 138457 - DNA, 73 bp, Homo sapiens
agtttgtgaatcttaacaaaaatcctagcgttatgtcagtgttgcatcctaggtattgttacatgaaggaaac

SEQ ID NO: 138458 - DNA, 73 bp, Homo sapiens
aatcttaacaaaaatcctagcgttatgtcagtgttgcatcctaggtattgttacatgaaggaaacttcactgg

SEQ ID NO: 138459 - DNA, 73 bp, Homo sapiens
acaaaaatcctagcgttatgtcagtgttgcatcctaggtattgttacatgaaggaaacttcactggggcaggg

SEQ ID NO: 138460 - DNA, 76 bp, Homo sapiens
ttatgtcagtgttgcatcctaggtattgttacatgaaggaaacttcactggggcaggggatgaggtgatgtttgtt

SEQ ID NO: 138461 - DNA, 77 bp, Homo sapiens
tgttgcatcctaggtattgttacatgaaggaaacttcactggggcaggggatgaggtgatgtttgttttatgatgta

SEQ ID NO: 138462 - DNA, 74 bp, Homo sapiens
taggtattgttacatgaaggaaacttcactggggcaggggatgaggtgatgtttgttttatgatgtaaaaatca

SEQ ID NO: 138463 - DNA, 73 bp, Homo sapiens
aaacttcactggggcaggggatgaggtgatgtttgttttatgatgtaaaaatcaaatggcaaactatgtttga

SEQ ID NO: 138464 - DNA, 74 bp, Homo sapiens
gggcaggggatgaggtgatgtttgttttatgatgtaaaaatcaaatggcaaactatgtttgaaagagtttcatc

SEQ ID NO: 138465 - DNA, 74 bp, Homo sapiens
gggatgaggtgatgtttgttttatgatgtaaaaatcaaatggcaaactatgtttgaaagagtttcatcttcagg

SEQ ID NO: 138466 - DNA, 73 bp, Homo sapiens
gatgtttgttttatgatgtaaaaatcaaatggcaaactatgtttgaaagagtttcatcttcaggtgaaggaag

SEQ ID NO: 138467 - DNA, 73 bp, Homo sapiens
aaaaatcaaatggcaaactatgtttgaaagagtttcatcttcaggtgaaggaagtaacttgtcagccagacaa

SEQ ID NO: 138468 - DNA, 71 bp, Homo sapiens
aaactatgtttgaaagagtttcatcttcaggtgaaggaagtaacttgtcagccagacaacatccccccaaa

SEQ ID NO: 138469 - DNA, 73 bp, Homo sapiens
tttgaaagagtttcatcttcaggtgaaggaagtaacttgtcagccagacaacatccccccaaagtcagcttag

SEQ ID NO: 138470 - DNA, 75 bp, Homo sapiens
agtttcatcttcaggtgaaggaagtaacttgtcagccagacaacatccccccaaagtcagcttaggcactgttca

SEQ ID NO: 138471 - DNA, 74 bp, Homo sapiens
aggtgaaggaagtaacttgtcagccagacaacatccccccaaagtcagcttaggcactgttcacaaagccagtc

SEQ ID NO: 138472 - DNA, 77 bp, Homo sapiens
aacatccccccaaagtcagcttaggcactgttcacaaagccagtctctgggtattgccagctggcattcatcttaaa

SEQ ID NO: 138473 - DNA, 81 bp, Homo sapiens
agtcagcttaggcactgttcacaaagccagtctctgggtattgccagctggcattcatcttaaaacagcagagcataactt

SEQ ID NO: 138474 - DNA, 80 bp, Homo sapiens
gcactgttcacaaagccagtctctgggtattgccagctggcattcatcttaaaacagcagagcataactttggtataaaa

SEQ ID NO: 138475 - DNA, 77 bp, Homo sapiens
acaaagccagtctctgggtattgccagctggcattcatcttaaaacagcagagcataactttggtataaaagtggaa

SEQ ID NO: 138476 - DNA, 76 bp, Homo sapiens
tattgccagctggcattcatcttaaaacagcagagcataactttggtataaaagtggaacttgacttaaaagcaaa

SEQ ID NO: 138477 - DNA, 74 bp, Homo sapiens
ctggcattcatcttaaaacagcagagcataactttggtataaaagtggaacttgacttaaaagcaaagcaaaga

SEQ ID NO: 138478 - DNA, 70 bp, Homo sapiens
cttaaaacagcagagcataactttggtataaaagtggaacttgacttaaaagcaaagcaaagaaaatgcc

SEQ ID NO: 138479 - DNA, 71 bp, Homo sapiens
cagagcataactttggtataaaagtggaacttgacttaaaagcaaagcaaagaaaatgcccaaagccaata

SEQ ID NO: 138480 - DNA, 67 bp, Homo sapiens
actttggtataaaagtggaacttgacttaaaagcaaagcaaagaaaatgcccaaagccaataataac

SEQ ID NO: 138481 - DNA, 69 bp, Homo sapiens
agtggaacttgacttaaaagcaaagcaaagaaaatgcccaaagccaataataactttaacatcaaaaga

SEQ ID NO: 138482 - DNA, 69 bp, Homo sapiens
gacttaaaagcaaagcaaagaaaatgcccaaagccaataataactttaacatcaaaagaagtggtacaa

SEQ ID NO: 138483 - DNA, 72 bp, Homo sapiens
gcaaagcaaagaaaatgcccaaagccaataataactttaacatcaaaagaagtggtacaaaatgtggacaga

SEQ ID NO: 138484 - DNA, 70 bp, Homo sapiens
gaaaatgcccaaagccaataataactttaacatcaaaagaagtggtacaaaatgtggacagatacccttg

SEQ ID NO: 138485 - DNA, 69 bp, Homo sapiens
aactttaacatcaaaagaagtggtacaaaatgtggacagatacccttgtaaaggaagagcaaattaaca

SEQ ID NO: 138486 - DNA, 72 bp, Homo sapiens
tggtacaaaatgtggacagatacccttgtaaaggaagagcaaattaacaaattacctgacagtagacacaaa

SEQ ID NO: 138487 - DNA, 71 bp, Homo sapiens
caaaatgtggacagatacccttgtaaaggaagagcaaattaacaaattacctgacagtagacacaaacatt

SEQ ID NO: 138488 - DNA, 67 bp, Homo sapiens
aacatttttaaaaagtataaagagggtaacaaattacatttttgcagtatacatagctaatctacct

SEQ ID NO: 138489 - DNA, 72 bp, Homo sapiens
aaaagtataaagagggtaacaaattacatttttgcagtatacatagctaatctaccttgctgttttgcacaa

SEQ ID NO: 138490 - DNA, 74 bp, Homo sapiens
agagggtaacaaattacatttttgcagtatacatagctaatctaccttgctgttttgcacaaattgtactaatc

SEQ ID NO: 138491 - DNA, 78 bp, Homo sapiens
caaattacatttttgcagtatacatagctaatctaccttgctgttttgcacaaattgtactaatcgaaagatgcagga

SEQ ID NO: 138492 - DNA, 77 bp, Homo sapiens
tttttgcagtatacatagctaatctaccttgctgttttgcacaaattgtactaatcgaaagatgcaggaaagtggat

SEQ ID NO: 138493 - DNA, 74 bp, Homo sapiens
agtatacatagctaatctaccttgctgttttgcacaaattgtactaatcgaaagatgcaggaaagtggattttt

SEQ ID NO: 138494 - DNA, 74 bp, Homo sapiens
gctaatctaccttgctgttttgcacaaattgtactaatcgaaagatgcaggaaagtggattttttttcatagta

SEQ ID NO: 138495 - DNA, 72 bp, Homo sapiens
cttgctgttttgcacaaattgtactaatcgaaagatgcaggaaagtggattttttttcatagtaaaatccaa

SEQ ID NO: 138496 - DNA, 71 bp, Homo sapiens
tgcacaaattgtactaatcgaaagatgcaggaaagtggattttttttcatagtaaaatccaaagaaaataa

SEQ ID NO: 138497 - DNA, 70 bp, Homo sapiens
ctaatcgaaagatgcaggaaagtggattttttttcatagtaaaatccaaagaaaataataattgagccca

SEQ ID NO: 138498 - DNA, 73 bp, Homo sapiens
gatgcaggaaagtggattttttttcatagtaaaatccaaagaaaataataattgagcccataataagctcaca

SEQ ID NO: 138499 - DNA, 78 bp, Homo sapiens
ttcatagtaaaatccaaagaaaataataattgagcccataataagctcacaataaaatgctgttctagtgtcacagca

SEQ ID NO: 138500 - DNA, 78 bp, Homo sapiens
gtaaaatccaaagaaaataataattgagcccataataagctcacaataaaatgctgttctagtgtcacagcagtctga

SEQ ID NO: 138501 - DNA, 82 bp, Homo sapiens
aaataataattgagcccataataagctcacaataaaatgctgttctagtgtcacagcagtctgatataatcattcacgtgga

SEQ ID NO: 138502 - DNA, 82 bp, Homo sapiens
ataattgagcccataataagctcacaataaaatgctgttctagtgtcacagcagtctgatataatcattcacgtggacctaa

SEQ ID NO: 138503 - DNA, 79 bp, Homo sapiens
aataaaatgctgttctagtgtcacagcagtctgatataatcattcacgtggacctaaggagagcgaacgcggggtgcca

SEQ ID NO: 138504 - DNA, 83 bp, Homo sapiens
aatgctgttctagtgtcacagcagtctgatataatcattcacgtggacctaaggagagcgaacgcggggtgccacatcagcta

SEQ ID NO: 138505 - DNA, 82 bp, Homo sapiens
tcacagcagtctgatataatcattcacgtggacctaaggagagcgaacgcggggtgccacatcagctaggatcgtcctggaa

SEQ ID NO: 138506 - DNA, 79 bp, Homo sapiens
ctgatataatcattcacgtggacctaaggagagcgaacgcggggtgccacatcagctaggatcgtcctggaagcagtta

SEQ ID NO: 138507 - DNA, 76 bp, Homo sapiens
ataatcattcacgtggacctaaggagagcgaacgcggggtgccacatcagctaggatcgtcctggaagcagttaaa

SEQ ID NO: 138508 - DNA, 72 bp, Homo sapiens
acgtggacctaaggagagcgaacgcggggtgccacatcagctaggatcgtcctggaagcagttaaaacttta

SEQ ID NO: 138509 - DNA, 71 bp, Homo sapiens
aaggagagcgaacgcggggtgccacatcagctaggatcgtcctggaagcagttaaaactttataaggtaaa

SEQ ID NO: 138510 - DNA, 73 bp, Homo sapiens
aacgcggggtgccacatcagctaggatcgtcctggaagcagttaaaactttataaggtaaagcacaaatgaga

SEQ ID NO: 138511 - DNA, 74 bp, Homo sapiens
atcagctaggatcgtcctggaagcagttaaaactttataaggtaaagcacaaatgagaacaatgcctgttccaa

SEQ ID NO: 138512 - DNA, 71 bp, Homo sapiens
atcgtcctggaagcagttaaaactttataaggtaaagcacaaatgagaacaatgcctgttccaactgaaaa

SEQ ID NO: 138513 - DNA, 71 bp, Homo sapiens
aagcagttaaaactttataaggtaaagcacaaatgagaacaatgcctgttccaactgaaaacactgtagag

SEQ ID NO: 138514 - DNA, 73 bp, Homo sapiens
taaaactttataaggtaaagcacaaatgagaacaatgcctgttccaactgaaaacactgtagagtcttgttgc

SEQ ID NO: 138515 - DNA, 75 bp, Homo sapiens
tataaggtaaagcacaaatgagaacaatgcctgttccaactgaaaacactgtagagtcttgttgccgttcattaa

SEQ ID NO: 138516 - DNA, 74 bp, Homo sapiens
aaatgagaacaatgcctgttccaactgaaaacactgtagagtcttgttgccgttcattaaccacaagggagctg

SEQ ID NO: 138517 - DNA, 75 bp, Homo sapiens
agaacaatgcctgttccaactgaaaacactgtagagtcttgttgccgttcattaaccacaagggagctggcagaa

SEQ ID NO: 138518 - DNA, 73 bp, Homo sapiens
aaaacactgtagagtcttgttgccgttcattaaccacaagggagctggcagaatccttaagtgaattctgact

SEQ ID NO: 138519 - DNA, 77 bp, Homo sapiens
tagagtcttgttgccgttcattaaccacaagggagctggcagaatccttaagtgaattctgactttgtattctctga

SEQ ID NO: 138520 - DNA, 76 bp, Homo sapiens
cgttcattaaccacaagggagctggcagaatccttaagtgaattctgactttgtattctctgaggggcactcattc

SEQ ID NO: 138521 - DNA, 77 bp, Homo sapiens
ttaaccacaagggagctggcagaatccttaagtgaattctgactttgtattctctgaggggcactcattcttctgta

SEQ ID NO: 138522 - DNA, 78 bp, Homo sapiens
gctggcagaatccttaagtgaattctgactttgtattctctgaggggcactcattcttctgtaactcatttcttcaaa

SEQ ID NO: 138523 - DNA, 80 bp, Homo sapiens
tttgtattctctgaggggcactcattcttctgtaactcatttcttcaaaatatacatcaggcattagataatctcttatc

SEQ ID NO: 138524 - DNA, 80 bp, Homo sapiens
tgaggggcactcattcttctgtaactcatttcttcaaaatatacatcaggcattagataatctcttatcgacacatttct

SEQ ID NO: 138525 - DNA, 78 bp, Homo sapiens
ggcactcattcttctgtaactcatttcttcaaaatatacatcaggcattagataatctcttatcgacacatttctttt

SEQ ID NO: 138526 - DNA, 77 bp, Homo sapiens
tcaggcattagataatctcttatcgacacatttctttttattcagagtgaacagcagacttctctttttctacttac

SEQ ID NO: 138527 - DNA, 75 bp, Homo sapiens
cattagataatctcttatcgacacatttctttttattcagagtgaacagcagacttctctttttctacttactaa

SEQ ID NO: 138528 - DNA, 76 bp, Homo sapiens
tcttatcgacacatttctttttattcagagtgaacagcagacttctctttttctacttactaaataccagctgtca

SEQ ID NO: 138529 - DNA, 72 bp, Homo sapiens
atttctttttattcagagtgaacagcagacttctctttttctacttactaaataccagctgtcaagggccta

SEQ ID NO: 138530 - DNA, 72 bp, Homo sapiens
ttattcagagtgaacagcagacttctctttttctacttactaaataccagctgtcaagggcctacttaaaaa

SEQ ID NO: 138531 - DNA, 69 bp, Homo sapiens
tctctttttctacttactaaataccagctgtcaagggcctacttaaaaatgaaaggacttatcaccttg

SEQ ID NO: 138532 - DNA, 71 bp, Homo sapiens
actaaataccagctgtcaagggcctacttaaaaatgaaaggacttatcaccttgtgtaaatgacaagatta

SEQ ID NO: 138533 - DNA, 70 bp, Homo sapiens
gtcaagggcctacttaaaaatgaaaggacttatcaccttgtgtaaatgacaagattaataatgtcttggg

SEQ ID NO: 138534 - DNA, 71 bp, Homo sapiens
ggcctacttaaaaatgaaaggacttatcaccttgtgtaaatgacaagattaataatgtcttgggtttctga

SEQ ID NO: 138535 - DNA, 75 bp, Homo sapiens
cttatcaccttgtgtaaatgacaagattaataatgtcttgggtttctgagaactttattctactcatagaccatg

SEQ ID NO: 138536 - DNA, 75 bp, Homo sapiens
ttgtgtaaatgacaagattaataatgtcttgggtttctgagaactttattctactcatagaccatgttagggcag

SEQ ID NO: 138537 - DNA, 74 bp, Homo sapiens
aagattaataatgtcttgggtttctgagaactttattctactcatagaccatgttagggcaggccaggagtgtg

SEQ ID NO: 138538 - DNA, 73 bp, Homo sapiens
aataatgtcttgggtttctgagaactttattctactcatagaccatgttagggcaggccaggagtgtgttcct

SEQ ID NO: 138539 - DNA, 76 bp, Homo sapiens
tttctgagaactttattctactcatagaccatgttagggcaggccaggagtgtgttccttcttatggtacagaata

SEQ ID NO: 138540 - DNA, 76 bp, Homo sapiens
agaactttattctactcatagaccatgttagggcaggccaggagtgtgttccttcttatggtacagaatacacaca

SEQ ID NO: 138541 - DNA, 78 bp, Homo sapiens
tcatagaccatgttagggcaggccaggagtgtgttccttcttatggtacagaatacacacacacttacatatacaaaa

SEQ ID NO: 138542 - DNA, 76 bp, Homo sapiens
tgttagggcaggccaggagtgtgttccttcttatggtacagaatacacacacacttacatatacaaaacattatcc

SEQ ID NO: 138543 - DNA, 74 bp, Homo sapiens
aggccaggagtgtgttccttcttatggtacagaatacacacacacttacatatacaaaacattatcccaaagta

SEQ ID NO: 138544 - DNA, 74 bp, Homo sapiens
aggagtgtgttccttcttatggtacagaatacacacacacttacatatacaaaacattatcccaaagtactcgc

SEQ ID NO: 138545 - DNA, 77 bp, Homo sapiens
tccttcttatggtacagaatacacacacacttacatatacaaaacattatcccaaagtactcgcccagatcattcta

SEQ ID NO: 138546 - DNA, 78 bp, Homo sapiens
ttatggtacagaatacacacacacttacatatacaaaacattatcccaaagtactcgcccagatcattctaactatca

SEQ ID NO: 138547 - DNA, 77 bp, Homo sapiens
cacacacacttacatatacaaaacattatcccaaagtactcgcccagatcattctaactatcagtggaaaggcagat

SEQ ID NO: 138548 - DNA, 75 bp, Homo sapiens
acacacttacatatacaaaacattatcccaaagtactcgcccagatcattctaactatcagtggaaaggcagatt

SEQ ID NO: 138549 - DNA, 76 bp, Homo sapiens
tacatatacaaaacattatcccaaagtactcgcccagatcattctaactatcagtggaaaggcagatttcatttaa

SEQ ID NO: 138550 - DNA, 73 bp, Homo sapiens
aaaacattatcccaaagtactcgcccagatcattctaactatcagtggaaaggcagatttcatttaagtctaa

SEQ ID NO: 138551 - DNA, 74 bp, Homo sapiens
ttatcccaaagtactcgcccagatcattctaactatcagtggaaaggcagatttcatttaagtctaaaaagtca

SEQ ID NO: 138552 - DNA, 74 bp, Homo sapiens
gtactcgcccagatcattctaactatcagtggaaaggcagatttcatttaagtctaaaaagtcaacttacataa

SEQ ID NO: 138553 - DNA, 72 bp, Homo sapiens
tatcagtggaaaggcagatttcatttaagtctaaaaagtcaacttacataaattgtattaattgtaagtgga

SEQ ID NO: 138554 - DNA, 69 bp, Homo sapiens
catttaagtctaaaaagtcaacttacataaattgtattaattgtaagtggaaaggcaggtctcatttaa

SEQ ID NO: 138555 - DNA, 69 bp, Homo sapiens
ttgtattaattgtaagtggaaaggcaggtctcatttaaatctaaaaagccaacttaggtaaattgtgtc

SEQ ID NO: 138556 - DNA, 70 bp, Homo sapiens
ttgtaagtggaaaggcaggtctcatttaaatctaaaaagccaacttaggtaaattgtgtcttagtgactc

SEQ ID NO: 138557 - DNA, 71 bp, Homo sapiens
ggaaaggcaggtctcatttaaatctaaaaagccaacttaggtaaattgtgtcttagtgactctctgattat

SEQ ID NO: 138558 - DNA, 72 bp, Homo sapiens
ggtctcatttaaatctaaaaagccaacttaggtaaattgtgtcttagtgactctctgattattaccaatatg

SEQ ID NO: 138559 - DNA, 73 bp, Homo sapiens
ctaaaaagccaacttaggtaaattgtgtcttagtgactctctgattattaccaatatgttttcactatgaaga

SEQ ID NO: 138560 - DNA, 76 bp, Homo sapiens
gccaacttaggtaaattgtgtcttagtgactctctgattattaccaatatgttttcactatgaagatgtattagag

SEQ ID NO: 138561 - DNA, 80 bp, Homo sapiens
tgtcttagtgactctctgattattaccaatatgttttcactatgaagatgtattagagtaaagctgttgtgtccagagaa

SEQ ID NO: 138562 - DNA, 77 bp, Homo sapiens
ctgattattaccaatatgttttcactatgaagatgtattagagtaaagctgttgtgtccagagaactactccataag

SEQ ID NO: 138563 - DNA, 76 bp, Homo sapiens
tattaccaatatgttttcactatgaagatgtattagagtaaagctgttgtgtccagagaactactccataagtacc

SEQ ID NO: 138564 - DNA, 75 bp, Homo sapiens
tttcactatgaagatgtattagagtaaagctgttgtgtccagagaactactccataagtacccaaactttgtgaa

SEQ ID NO: 138565 - DNA, 76 bp, Homo sapiens
tattagagtaaagctgttgtgtccagagaactactccataagtacccaaactttgtgaatctattcaaacatgaga

SEQ ID NO: 138566 - DNA, 74 bp, Homo sapiens
aagctgttgtgtccagagaactactccataagtacccaaactttgtgaatctattcaaacatgagaactggcct

SEQ ID NO: 138567 - DNA, 75 bp, Homo sapiens
agagaactactccataagtacccaaactttgtgaatctattcaaacatgagaactggccttgtctgaggtggatg

SEQ ID NO: 138568 - DNA, 75 bp, Homo sapiens
tccataagtacccaaactttgtgaatctattcaaacatgagaactggccttgtctgaggtggatgggggtctatg

SEQ ID NO: 138569 - DNA, 74 bp, Homo sapiens
tttgtgaatctattcaaacatgagaactggccttgtctgaggtggatgggggtctatgggtaggtagccctggt

SEQ ID NO: 138570 - DNA, 75 bp, Homo sapiens
ctattcaaacatgagaactggccttgtctgaggtggatgggggtctatgggtaggtagccctggttctgatccag

SEQ ID NO: 138571 - DNA, 72 bp, Homo sapiens
aactggccttgtctgaggtggatgggggtctatgggtaggtagccctggttctgatccaggcgaagggtata

SEQ ID NO: 138572 - DNA, 70 bp, Homo sapiens
aggtggatgggggtctatgggtaggtagccctggttctgatccaggcgaagggtatatgtggggtcaaaa

SEQ ID NO: 138573 - DNA, 72 bp, Homo sapiens
gtctatgggtaggtagccctggttctgatccaggcgaagggtatatgtggggtcaaaaggagacttatcaaa

SEQ ID NO: 138574 - DNA, 73 bp, Homo sapiens
gtaggtagccctggttctgatccaggcgaagggtatatgtggggtcaaaaggagacttatcaaaggatggaga

SEQ ID NO: 138575 - DNA, 73 bp, Homo sapiens
aggcgaagggtatatgtggggtcaaaaggagacttatcaaaggatggagagagaggtgagaacagggtgagac

SEQ ID NO: 138576 - DNA, 73 bp, Homo sapiens
tatgtggggtcaaaaggagacttatcaaaggatggagagagaggtgagaacagggtgagaccgaccaaaccta

SEQ ID NO: 138577 - DNA, 74 bp, Homo sapiens
gtcaaaaggagacttatcaaaggatggagagagaggtgagaacagggtgagaccgaccaaacctaaagcaatga

SEQ ID NO: 138578 - DNA, 75 bp, Homo sapiens
agacttatcaaaggatggagagagaggtgagaacagggtgagaccgaccaaacctaaagcaatgagttatgtcca

SEQ ID NO: 138579 - DNA, 75 bp, Homo sapiens
gatggagagagaggtgagaacagggtgagaccgaccaaacctaaagcaatgagttatgtccaccaatcaaaatgg

SEQ ID NO: 138580 - DNA, 72 bp, Homo sapiens
agaggtgagaacagggtgagaccgaccaaacctaaagcaatgagttatgtccaccaatcaaaatggtttgta

SEQ ID NO: 138581 - DNA, 69 bp, Homo sapiens
acagggtgagaccgaccaaacctaaagcaatgagttatgtccaccaatcaaaatggtttgtaaaagtaa

SEQ ID NO: 138582 - DNA, 70 bp, Homo sapiens
accgaccaaacctaaagcaatgagttatgtccaccaatcaaaatggtttgtaaaagtaagacagctacaa

SEQ ID NO: 138583 - DNA, 70 bp, Homo sapiens
cctaaagcaatgagttatgtccaccaatcaaaatggtttgtaaaagtaagacagctacaagactttaaag

SEQ ID NO: 138584 - DNA, 71 bp, Homo sapiens
gcaatgagttatgtccaccaatcaaaatggtttgtaaaagtaagacagctacaagactttaaaggaaagaa

SEQ ID NO: 138585 - DNA, 69 bp, Homo sapiens
atgtccaccaatcaaaatggtttgtaaaagtaagacagctacaagactttaaaggaaagaatatctaaa

SEQ ID NO: 138586 - DNA, 66 bp, Homo sapiens
aatggtttgtaaaagtaagacagctacaagactttaaaggaaagaatatctaaataactagttttc

SEQ ID NO: 138587 - DNA, 66 bp, Homo sapiens
ttgtaaaagtaagacagctacaagactttaaaggaaagaatatctaaataactagttttctttaaa

SEQ ID NO: 138588 - DNA, 72 bp, Homo sapiens
aaaaaaaaaaacaatatatcatgtagatgtttggtttacttcacattaaacacataggtgcttctgtatgta

SEQ ID NO: 138589 - DNA, 77 bp, Homo sapiens
acaatatatcatgtagatgtttggtttacttcacattaaacacataggtgcttctgtatgtaaatgaaacctctgaa

SEQ ID NO: 138590 - DNA, 77 bp, Homo sapiens
atcatgtagatgtttggtttacttcacattaaacacataggtgcttctgtatgtaaatgaaacctctgaataatgaa

SEQ ID NO: 138591 - DNA, 73 bp, Homo sapiens
gatgtttggtttacttcacattaaacacataggtgcttctgtatgtaaatgaaacctctgaataatgaaaaaa

SEQ ID NO: 138592 - DNA, 71 bp, Homo sapiens
ttacttcacattaaacacataggtgcttctgtatgtaaatgaaacctctgaataatgaaaaaaaaacattt

SEQ ID NO: 138593 - DNA, 72 bp, Homo sapiens
aacacataggtgcttctgtatgtaaatgaaacctctgaataatgaaaaaaaaacatttttatgcttcctctc

SEQ ID NO: 138594 - DNA, 72 bp, Homo sapiens
gcttctgtatgtaaatgaaacctctgaataatgaaaaaaaaacatttttatgcttcctctctatattggtcc

SEQ ID NO: 138595 - DNA, 71 bp, Homo sapiens
acctctgaataatgaaaaaaaaacatttttatgcttcctctctatattggtcctcttgaggacctagtctg

SEQ ID NO: 138596 - DNA, 71 bp, Homo sapiens
tgaaaaaaaaacatttttatgcttcctctctatattggtcctcttgaggacctagtctggaaagagatttc

SEQ ID NO: 138597 - DNA, 70 bp, Homo sapiens
aaaaacatttttatgcttcctctctatattggtcctcttgaggacctagtctggaaagagatttccttaa

SEQ ID NO: 138598 - DNA, 74 bp, Homo sapiens
ttatgcttcctctctatattggtcctcttgaggacctagtctggaaagagatttccttaaccaactctctgctt

SEQ ID NO: 138599 - DNA, 74 bp, Homo sapiens
ctctctatattggtcctcttgaggacctagtctggaaagagatttccttaaccaactctctgcttttgctccta

SEQ ID NO: 138600 - DNA, 72 bp, Homo sapiens
aggacctagtctggaaagagatttccttaaccaactctctgcttttgctcctaccctgctctgcctttcagg

SEQ ID NO: 138601 - DNA, 73 bp, Homo sapiens
aaagagatttccttaaccaactctctgcttttgctcctaccctgctctgcctttcagggccaattcttgctcc

SEQ ID NO: 138602 - DNA, 75 bp, Homo sapiens
atttccttaaccaactctctgcttttgctcctaccctgctctgcctttcagggccaattcttgctcctgaaagca

SEQ ID NO: 138603 - DNA, 75 bp, Homo sapiens
actctctgcttttgctcctaccctgctctgcctttcagggccaattcttgctcctgaaagcaaccaaggataatt

SEQ ID NO: 138604 - DNA, 75 bp, Homo sapiens
ttgctcctaccctgctctgcctttcagggccaattcttgctcctgaaagcaaccaaggataatttcaggttgtta

SEQ ID NO: 138605 - DNA, 74 bp, Homo sapiens
cctgctctgcctttcagggccaattcttgctcctgaaagcaaccaaggataatttcaggttgttagaatgtaaa

SEQ ID NO: 138606 - DNA, 71 bp, Homo sapiens
cctttcagggccaattcttgctcctgaaagcaaccaaggataatttcaggttgttagaatgtaaatattta

SEQ ID NO: 138607 - DNA, 76 bp, Homo sapiens
caattcttgctcctgaaagcaaccaaggataatttcaggttgttagaatgtaaatatttaagcattgtctgtctca

SEQ ID NO: 138608 - DNA, 75 bp, Homo sapiens
cttgctcctgaaagcaaccaaggataatttcaggttgttagaatgtaaatatttaagcattgtctgtctcagtaa

SEQ ID NO: 138609 - DNA, 73 bp, Homo sapiens
gcaaccaaggataatttcaggttgttagaatgtaaatatttaagcattgtctgtctcagtaaaaatttccagc

SEQ ID NO: 138610 - DNA, 71 bp, Homo sapiens
taatttcaggttgttagaatgtaaatatttaagcattgtctgtctcagtaaaaatttccagctaaacaccg

SEQ ID NO: 138611 - DNA, 76 bp, Homo sapiens
ttgttagaatgtaaatatttaagcattgtctgtctcagtaaaaatttccagctaaacaccgtgccacagccataga

SEQ ID NO: 138612 - DNA, 77 bp, Homo sapiens
taaatatttaagcattgtctgtctcagtaaaaatttccagctaaacaccgtgccacagccatagacctatgtagcat

SEQ ID NO: 138613 - DNA, 78 bp, Homo sapiens
atttaagcattgtctgtctcagtaaaaatttccagctaaacaccgtgccacagccatagacctatgtagcattgtaga

SEQ ID NO: 138614 - DNA, 74 bp, Homo sapiens
gtctcagtaaaaatttccagctaaacaccgtgccacagccatagacctatgtagcattgtagagaaactttaag

SEQ ID NO: 138615 - DNA, 72 bp, Homo sapiens
taaaaatttccagctaaacaccgtgccacagccatagacctatgtagcattgtagagaaactttaagggaaa

SEQ ID NO: 138616 - DNA, 73 bp, Homo sapiens
cgtgccacagccatagacctatgtagcattgtagagaaactttaagggaaaaataattagaatgttaaggata

SEQ ID NO: 138617 - DNA, 72 bp, Homo sapiens
cagccatagacctatgtagcattgtagagaaactttaagggaaaaataattagaatgttaaggataaagaga

SEQ ID NO: 138618 - DNA, 68 bp, Homo sapiens
cctatgtagcattgtagagaaactttaagggaaaaataattagaatgttaaggataaagagacttggg

SEQ ID NO: 138619 - DNA, 67 bp, Homo sapiens
tagagaaactttaagggaaaaataattagaatgttaaggataaagagacttgggtatctttaatgga

SEQ ID NO: 138620 - DNA, 67 bp, Homo sapiens
ctttaagggaaaaataattagaatgttaaggataaagagacttgggtatctttaatggatctattat

SEQ ID NO: 138621 - DNA, 73 bp, Homo sapiens
ataattagaatgttaaggataaagagacttgggtatctttaatggatctattattttatgacttgagtgtgac

SEQ ID NO: 138622 - DNA, 76 bp, Homo sapiens
aaagagacttgggtatctttaatggatctattattttatgacttgagtgtgactgtgactcaattgactagtgtct

SEQ ID NO: 138623 - DNA, 76 bp, Homo sapiens
acttgggtatctttaatggatctattattttatgacttgagtgtgactgtgactcaattgactagtgtctttggta

SEQ ID NO: 138624 - DNA, 78 bp, Homo sapiens
ctttaatggatctattattttatgacttgagtgtgactgtgactcaattgactagtgtctttggtatagcttctttca

SEQ ID NO: 138625 - DNA, 77 bp, Homo sapiens
ttattttatgacttgagtgtgactgtgactcaattgactagtgtctttggtatagcttctttcatagaggtaaatta

SEQ ID NO: 138626 - DNA, 76 bp, Homo sapiens
acttgagtgtgactgtgactcaattgactagtgtctttggtatagcttctttcatagaggtaaattactgtagtta

SEQ ID NO: 138627 - DNA, 76 bp, Homo sapiens
agtgtgactgtgactcaattgactagtgtctttggtatagcttctttcatagaggtaaattactgtagttaataca

SEQ ID NO: 138628 - DNA, 74 bp, Homo sapiens
tgactcaattgactagtgtctttggtatagcttctttcatagaggtaaattactgtagttaatacattttttca

SEQ ID NO: 138629 - DNA, 71 bp, Homo sapiens
gactagtgtctttggtatagcttctttcatagaggtaaattactgtagttaatacattttttcaggggtga

SEQ ID NO: 138630 - DNA, 71 bp, Homo sapiens
ggtatagcttctttcatagaggtaaattactgtagttaatacattttttcaggggtgaataaagatatcag

SEQ ID NO: 138631 - DNA, 75 bp, Homo sapiens
ttcatagaggtaaattactgtagttaatacattttttcaggggtgaataaagatatcagtcagaagccacagcta

SEQ ID NO: 138632 - DNA, 73 bp, Homo sapiens
ctgtagttaatacattttttcaggggtgaataaagatatcagtcagaagccacagctacttagaaattatggt

SEQ ID NO: 138633 - DNA, 79 bp, Homo sapiens
gggtgaataaagatatcagtcagaagccacagctacttagaaattatggtttagcagtgatgtcaatgttttcagaatg

SEQ ID NO: 138634 - DNA, 82 bp, Homo sapiens
aataaagatatcagtcagaagccacagctacttagaaattatggtttagcagtgatgtcaatgttttcagaatgtgcatctc

SEQ ID NO: 138635 - DNA, 81 bp, Homo sapiens
agtcagaagccacagctacttagaaattatggtttagcagtgatgtcaatgttttcagaatgtgcatctccaaaaacatca

SEQ ID NO: 138636 - DNA, 80 bp, Homo sapiens
acagctacttagaaattatggtttagcagtgatgtcaatgttttcagaatgtgcatctccaaaaacatcactgcaataat

SEQ ID NO: 138637 - DNA, 81 bp, Homo sapiens
aaattatggtttagcagtgatgtcaatgttttcagaatgtgcatctccaaaaacatcactgcaataattttggaagcatga

SEQ ID NO: 138638 - DNA, 79 bp, Homo sapiens
tttcagaatgtgcatctccaaaaacatcactgcaataattttggaagcatgaaatgaaagagacgtctaaaatcacaaa

SEQ ID NO: 138639 - DNA, 78 bp, Homo sapiens
atgtgcatctccaaaaacatcactgcaataattttggaagcatgaaatgaaagagacgtctaaaatcacaaaacttga

SEQ ID NO: 138640 - DNA, 74 bp, Homo sapiens
aaacatcactgcaataattttggaagcatgaaatgaaagagacgtctaaaatcacaaaacttgagtctttctag

SEQ ID NO: 138641 - DNA, 75 bp, Homo sapiens
attttggaagcatgaaatgaaagagacgtctaaaatcacaaaacttgagtctttctaggcagcactgacaagaaa

SEQ ID NO: 138642 - DNA, 75 bp, Homo sapiens
aaatgaaagagacgtctaaaatcacaaaacttgagtctttctaggcagcactgacaagaaagaaagctgccacaa

SEQ ID NO: 138643 - DNA, 76 bp, Homo sapiens
aaagagacgtctaaaatcacaaaacttgagtctttctaggcagcactgacaagaaagaaagctgccacaaagctca

SEQ ID NO: 138644 - DNA, 78 bp, Homo sapiens
taaaatcacaaaacttgagtctttctaggcagcactgacaagaaagaaagctgccacaaagctcattctgtctgaaaa

SEQ ID NO: 138645 - DNA, 74 bp, Homo sapiens
aaaacttgagtctttctaggcagcactgacaagaaagaaagctgccacaaagctcattctgtctgaaaaaaaaa

SEQ ID NO: 138646 - DNA, 67 bp, Homo sapiens
aaaaaaatctgaaatgaaataactcacagaaatctactggaaaatttaaactactcaggaaaatttc

SEQ ID NO: 138647 - DNA, 68 bp, Homo sapiens
ctgaaatgaaataactcacagaaatctactggaaaatttaaactactcaggaaaatttccttaaataa

SEQ ID NO: 138648 - DNA, 69 bp, Homo sapiens
taactcacagaaatctactggaaaatttaaactactcaggaaaatttccttaaataaaatgctggtaga

SEQ ID NO: 138649 - DNA, 66 bp, Homo sapiens
cagaaatctactggaaaatttaaactactcaggaaaatttccttaaataaaatgctggtagaaagg

SEQ ID NO: 138650 - DNA, 65 bp, Homo sapiens
ctggaaaatttaaactactcaggaaaatttccttaaataaaatgctggtagaaaggtatggggaa

SEQ ID NO: 138651 - DNA, 65 bp, Homo sapiens
aactactcaggaaaatttccttaaataaaatgctggtagaaaggtatggggaaagtggtaactgg

SEQ ID NO: 138652 - DNA, 64 bp, Homo sapiens
aggaaaatttccttaaataaaatgctggtagaaaggtatggggaaagtggtaactgggttgctt

SEQ ID NO: 138653 - DNA, 65 bp, Homo sapiens
ccttaaataaaatgctggtagaaaggtatggggaaagtggtaactgggttgctttcatttttatt

SEQ ID NO: 138654 - DNA, 67 bp, Homo sapiens
tcatttttattttttctgatacaaaatagattacatcttttatcaactttacttaaaaaccaaaatc

SEQ ID NO: 138655 - DNA, 70 bp, Homo sapiens
tttttctgatacaaaatagattacatcttttatcaactttacttaaaaaccaaaatccatgctgtttcta

SEQ ID NO: 138656 - DNA, 70 bp, Homo sapiens
ctgatacaaaatagattacatcttttatcaactttacttaaaaaccaaaatccatgctgtttctagaact

SEQ ID NO: 138657 - DNA, 71 bp, Homo sapiens
tagattacatcttttatcaactttacttaaaaaccaaaatccatgctgtttctagaacttcttcacccaca

SEQ ID NO: 138658 - DNA, 67 bp, Homo sapiens
cttttatcaactttacttaaaaaccaaaatccatgctgtttctagaacttcttcacccacaaagaaa

SEQ ID NO: 138659 - DNA, 69 bp, Homo sapiens
acttaaaaaccaaaatccatgctgtttctagaacttcttcacccacaaagaaatcaaatacaggttatc

SEQ ID NO: 138660 - DNA, 75 bp, Homo sapiens
tgctgtttctagaacttcttcacccacaaagaaatcaaatacaggttatccagcatacaacattttgactgtcct

SEQ ID NO: 138661 - DNA, 76 bp, Homo sapiens
tagaacttcttcacccacaaagaaatcaaatacaggttatccagcatacaacattttgactgtccttctactatca

SEQ ID NO: 138662 - DNA, 76 bp, Homo sapiens
tcacccacaaagaaatcaaatacaggttatccagcatacaacattttgactgtccttctactatcaaactgtatta

SEQ ID NO: 138663 - DNA, 77 bp, Homo sapiens
aaatacaggttatccagcatacaacattttgactgtccttctactatcaaactgtattataatcttagcaagcacat

SEQ ID NO: 138664 - DNA, 77 bp, Homo sapiens
tatccagcatacaacattttgactgtccttctactatcaaactgtattataatcttagcaagcacatttattttctt

SEQ ID NO: 138665 - DNA, 75 bp, Homo sapiens
cattttgactgtccttctactatcaaactgtattataatcttagcaagcacatttattttctttaatatggctcc

SEQ ID NO: 138666 - DNA, 78 bp, Homo sapiens
gactgtccttctactatcaaactgtattataatcttagcaagcacatttattttctttaatatggctcctccatatca

SEQ ID NO: 138667 - DNA, 77 bp, Homo sapiens
tatcaaactgtattataatcttagcaagcacatttattttctttaatatggctcctccatatcattaaaaactgatc

SEQ ID NO: 138668 - DNA, 78 bp, Homo sapiens
ctgtattataatcttagcaagcacatttattttctttaatatggctcctccatatcattaaaaactgatctgaattga

SEQ ID NO: 138669 - DNA, 76 bp, Homo sapiens
cttagcaagcacatttattttctttaatatggctcctccatatcattaaaaactgatctgaattgattaaacttga

SEQ ID NO: 138670 - DNA, 76 bp, Homo sapiens
agcaagcacatttattttctttaatatggctcctccatatcattaaaaactgatctgaattgattaaacttgatct

SEQ ID NO: 138671 - DNA, 74 bp, Homo sapiens
agcacatttattttctttaatatggctcctccatatcattaaaaactgatctgaattgattaaacttgatcttt

SEQ ID NO: 138672 - DNA, 74 bp, Homo sapiens
ttttctttaatatggctcctccatatcattaaaaactgatctgaattgattaaacttgatcttttaacattaga

SEQ ID NO: 138673 - DNA, 74 bp, Homo sapiens
tttctttaatatggctcctccatatcattaaaaactgatctgaattgattaaacttgatcttttaacattagaa

SEQ ID NO: 138674 - DNA, 73 bp, Homo sapiens
tttaatatggctcctccatatcattaaaaactgatctgaattgattaaacttgatcttttaacattagaattt

SEQ ID NO: 138675 - DNA, 73 bp, Homo sapiens
tatggctcctccatatcattaaaaactgatctgaattgattaaacttgatcttttaacattagaatttttaaa

SEQ ID NO: 138676 - DNA, 70 bp, Homo sapiens
ctcctccatatcattaaaaactgatctgaattgattaaacttgatcttttaacattagaatttttaaaaa

SEQ ID NO: 138677 - DNA, 66 bp, Homo sapiens
tttttaaaaatatgtatctttgaaaaagtaaagttcaatttatacactcttgttttgtcctgggta

SEQ ID NO: 138678 - DNA, 65 bp, Homo sapiens
atctttgaaaaagtaaagttcaatttatacactcttgttttgtcctgggtaatctttttatttct

SEQ ID NO: 138679 - DNA, 67 bp, Homo sapiens
agtaaagttcaatttatacactcttgttttgtcctgggtaatctttttatttctttgttagatgacc

SEQ ID NO: 138680 - DNA, 71 bp, Homo sapiens
tcttgttttgtcctgggtaatctttttatttctttgttagatgacctaattattaccatgactaacttgca

SEQ ID NO: 138681 - DNA, 71 bp, Homo sapiens
tgtcctgggtaatctttttatttctttgttagatgacctaattattaccatgactaacttgcaattgaaaa

SEQ ID NO: 138682 - DNA, 72 bp, Homo sapiens
ttttatttctttgttagatgacctaattattaccatgactaacttgcaattgaaaacttcatctcaaattcc

SEQ ID NO: 138683 - DNA, 71 bp, Homo sapiens
tctttgttagatgacctaattattaccatgactaacttgcaattgaaaacttcatctcaaattccgttttt

SEQ ID NO: 138684 - DNA, 72 bp, Homo sapiens
gatgacctaattattaccatgactaacttgcaattgaaaacttcatctcaaattccgtttttttagagtcca

SEQ ID NO: 138685 - DNA, 71 bp, Homo sapiens
gactaacttgcaattgaaaacttcatctcaaattccgtttttttagagtccaggatttatacctgtcttgc

SEQ ID NO: 138686 - DNA, 70 bp, Homo sapiens
gcaattgaaaacttcatctcaaattccgtttttttagagtccaggatttatacctgtcttgctctaaaat

SEQ ID NO: 138687 - DNA, 71 bp, Homo sapiens
acttcatctcaaattccgtttttttagagtccaggatttatacctgtcttgctctaaaattcacttgataa

SEQ ID NO: 138688 - DNA, 70 bp, Homo sapiens
catctcaaattccgtttttttagagtccaggatttatacctgtcttgctctaaaattcacttgataaact

SEQ ID NO: 138689 - DNA, 69 bp, Homo sapiens
atctcaaattccgtttttttagagtccaggatttatacctgtcttgctctaaaattcacttgataaact

SEQ ID NO: 138690 - DNA, 69 bp, Homo sapiens
tccgtttttttagagtccaggatttatacctgtcttgctctaaaattcacttgataaactttatccgta

SEQ ID NO: 138691 - DNA, 73 bp, Homo sapiens
ttagagtccaggatttatacctgtcttgctctaaaattcacttgataaactttatccgtatctaaaaatcaga

SEQ ID NO: 138692 - DNA, 74 bp, Homo sapiens
agagtccaggatttatacctgtcttgctctaaaattcacttgataaactttatccgtatctaaaaatcagagca

SEQ ID NO: 138693 - DNA, 73 bp, Homo sapiens
ccaggatttatacctgtcttgctctaaaattcacttgataaactttatccgtatctaaaaatcagagcaaaga

SEQ ID NO: 138694 - DNA, 72 bp, Homo sapiens
atacctgtcttgctctaaaattcacttgataaactttatccgtatctaaaaatcagagcaaagagaaacact

SEQ ID NO: 138695 - DNA, 72 bp, Homo sapiens
tcacttgataaactttatccgtatctaaaaatcagagcaaagagaaacactttttataatttcttgtagagc

SEQ ID NO: 138696 - DNA, 71 bp, Homo sapiens
tgataaactttatccgtatctaaaaatcagagcaaagagaaacactttttataatttcttgtagagcgttc

SEQ ID NO: 138697 - DNA, 70 bp, Homo sapiens
ccgtatctaaaaatcagagcaaagagaaacactttttataatttcttgtagagcgttccatttgcttttg

SEQ ID NO: 138698 - DNA, 75 bp, Homo sapiens
cactttttataatttcttgtagagcgttccatttgcttttgtgttagacaggtgagttgatgtcattaatgctta

SEQ ID NO: 138699 - DNA, 76 bp, Homo sapiens
gtagagcgttccatttgcttttgtgttagacaggtgagttgatgtcattaatgcttaataattactcctataccag

SEQ ID NO: 138700 - DNA, 77 bp, Homo sapiens
tttgcttttgtgttagacaggtgagttgatgtcattaatgcttaataattactcctataccagggtctctctctata

SEQ ID NO: 138701 - DNA, 78 bp, Homo sapiens
tgttagacaggtgagttgatgtcattaatgcttaataattactcctataccagggtctctctctatagctaaatatta

SEQ ID NO: 138702 - DNA, 74 bp, Homo sapiens
gtcattaatgcttaataattactcctataccagggtctctctctatagctaaatattaaataatacctcccaca

SEQ ID NO: 138703 - DNA, 71 bp, Homo sapiens
cttaataattactcctataccagggtctctctctatagctaaatattaaataatacctcccacaatgggag

SEQ ID NO: 138704 - DNA, 73 bp, Homo sapiens
attactcctataccagggtctctctctatagctaaatattaaataatacctcccacaatgggagtgttcatta

SEQ ID NO: 138705 - DNA, 77 bp, Homo sapiens
gggtctctctctatagctaaatattaaataatacctcccacaatgggagtgttcattatgtgatgagttgtgcttat

SEQ ID NO: 138706 - DNA, 78 bp, Homo sapiens
tctctatagctaaatattaaataatacctcccacaatgggagtgttcattatgtgatgagttgtgcttattcaccatt

SEQ ID NO: 138707 - DNA, 79 bp, Homo sapiens
aaataatacctcccacaatgggagtgttcattatgtgatgagttgtgcttattcaccatttggcagctcctattcctca

SEQ ID NO: 138708 - DNA, 81 bp, Homo sapiens
acaatgggagtgttcattatgtgatgagttgtgcttattcaccatttggcagctcctattcctcatggaaaagagagcaaa

SEQ ID NO: 138709 - DNA, 80 bp, Homo sapiens
agtgttcattatgtgatgagttgtgcttattcaccatttggcagctcctattcctcatggaaaagagagcaaaaaacaga

SEQ ID NO: 138710 - DNA, 76 bp, Homo sapiens
agctcctattcctcatggaaaagagagcaaaaaacagacctagagaatctctttagtcagctcttttatcattgta

SEQ ID NO: 138711 - DNA, 74 bp, Homo sapiens
attcctcatggaaaagagagcaaaaaacagacctagagaatctctttagtcagctcttttatcattgtacctag

SEQ ID NO: 138712 - DNA, 74 bp, Homo sapiens
aaaagagagcaaaaaacagacctagagaatctctttagtcagctcttttatcattgtacctagtccaacattca

SEQ ID NO: 138713 - DNA, 74 bp, Homo sapiens
aaaaacagacctagagaatctctttagtcagctcttttatcattgtacctagtccaacattcacatttcaaagc

SEQ ID NO: 138714 - DNA, 76 bp, Homo sapiens
acctagagaatctctttagtcagctcttttatcattgtacctagtccaacattcacatttcaaagctgtctagaat

SEQ ID NO: 138715 - DNA, 76 bp, Homo sapiens
atctctttagtcagctcttttatcattgtacctagtccaacattcacatttcaaagctgtctagaattgctagttt

SEQ ID NO: 138716 - DNA, 75 bp, Homo sapiens
cagctcttttatcattgtacctagtccaacattcacatttcaaagctgtctagaattgctagttttaattggatt

SEQ ID NO: 138717 - DNA, 76 bp, Homo sapiens
cctagtccaacattcacatttcaaagctgtctagaattgctagttttaattggattttagaatattcatatgtgct

SEQ ID NO: 138718 - DNA, 81 bp, Homo sapiens
agctgtctagaattgctagttttaattggattttagaatattcatatgtgcttataggtgaatatgcttataatatatgca

SEQ ID NO: 138719 - DNA, 80 bp, Homo sapiens
ctagaattgctagttttaattggattttagaatattcatatgtgcttataggtgaatatgcttataatatatgcatacac

SEQ ID NO: 138720 - DNA, 79 bp, Homo sapiens
ggattttagaatattcatatgtgcttataggtgaatatgcttataatatatgcatacactatttgggtgtctcttccct

SEQ ID NO: 138721 - DNA, 81 bp, Homo sapiens
tcatatgtgcttataggtgaatatgcttataatatatgcatacactatttgggtgtctcttcccttttgtcttgtcaattg

SEQ ID NO: 138722 - DNA, 77 bp, Homo sapiens
ttataggtgaatatgcttataatatatgcatacactatttgggtgtctcttcccttttgtcttgtcaattgggctaa

SEQ ID NO: 138723 - DNA, 78 bp, Homo sapiens
atatgcttataatatatgcatacactatttgggtgtctcttcccttttgtcttgtcaattgggctaagagtgattgta

SEQ ID NO: 138724 - DNA, 78 bp, Homo sapiens
ataatatatgcatacactatttgggtgtctcttcccttttgtcttgtcaattgggctaagagtgattgtatacatcta

SEQ ID NO: 138725 - DNA, 76 bp, Homo sapiens
tatttgggtgtctcttcccttttgtcttgtcaattgggctaagagtgattgtatacatctacacgtatcatacaaa

SEQ ID NO: 138726 - DNA, 77 bp, Homo sapiens
tttgtcttgtcaattgggctaagagtgattgtatacatctacacgtatcatacaaatctgacttttacctctgactt

SEQ ID NO: 138727 - DNA, 74 bp, Homo sapiens
aattgggctaagagtgattgtatacatctacacgtatcatacaaatctgacttttacctctgactttcctccct

SEQ ID NO: 138728 - DNA, 74 bp, Homo sapiens
aagagtgattgtatacatctacacgtatcatacaaatctgacttttacctctgactttcctcccttgttgttta

SEQ ID NO: 138729 - DNA, 74 bp, Homo sapiens
gtatacatctacacgtatcatacaaatctgacttttacctctgactttcctcccttgttgtttatggatgaatt

SEQ ID NO: 138730 - DNA, 72 bp, Homo sapiens
acacgtatcatacaaatctgacttttacctctgactttcctcccttgttgtttatggatgaatttacttgaa

SEQ ID NO: 138731 - DNA, 75 bp, Homo sapiens
ttacctctgactttcctcccttgttgtttatggatgaatttacttgaatttcacaattacattatttgatatgca

SEQ ID NO: 138732 - DNA, 77 bp, Homo sapiens
tttcctcccttgttgtttatggatgaatttacttgaatttcacaattacattatttgatatgcattctgttagcatc

SEQ ID NO: 138733 - DNA, 78 bp, Homo sapiens
tcccttgttgtttatggatgaatttacttgaatttcacaattacattatttgatatgcattctgttagcatcttagat

SEQ ID NO: 138734 - DNA, 82 bp, Homo sapiens
tggatgaatttacttgaatttcacaattacattatttgatatgcattctgttagcatcttagatttctgtcagcataagagt

SEQ ID NO: 138735 - DNA, 79 bp, Homo sapiens
ttacttgaatttcacaattacattatttgatatgcattctgttagcatcttagatttctgtcagcataagagttaaaaa

SEQ ID NO: 138736 - DNA, 76 bp, Homo sapiens
acattatttgatatgcattctgttagcatcttagatttctgtcagcataagagttaaaaattaccacttaagaaaa

SEQ ID NO: 138737 - DNA, 79 bp, Homo sapiens
tgatatgcattctgttagcatcttagatttctgtcagcataagagttaaaaattaccacttaagaaaaatgtgtgtcta

SEQ ID NO: 138738 - DNA, 74 bp, Homo sapiens
ctgttagcatcttagatttctgtcagcataagagttaaaaattaccacttaagaaaaatgtgtgtctaatattg

SEQ ID NO: 138739 - DNA, 71 bp, Homo sapiens
ctgtcagcataagagttaaaaattaccacttaagaaaaatgtgtgtctaatattgtccttgtctgttttcc

SEQ ID NO: 138740 - DNA, 72 bp, Homo sapiens
taccacttaagaaaaatgtgtgtctaatattgtccttgtctgttttcccagattaagtattttctctgattc

SEQ ID NO: 138741 - DNA, 72 bp, Homo sapiens
gaaaaatgtgtgtctaatattgtccttgtctgttttcccagattaagtattttctctgattctttagtcaaa

SEQ ID NO: 138742 - DNA, 72 bp, Homo sapiens
gtgtgtctaatattgtccttgtctgttttcccagattaagtattttctctgattctttagtcaaaataagta

SEQ ID NO: 138743 - DNA, 71 bp, Homo sapiens
gtccttgtctgttttcccagattaagtattttctctgattctttagtcaaaataagtaaacacgctattca

SEQ ID NO: 138744 - DNA, 71 bp, Homo sapiens
ctgttttcccagattaagtattttctctgattctttagtcaaaataagtaaacacgctattcattaagtca

SEQ ID NO: 138745 - DNA, 73 bp, Homo sapiens
cagattaagtattttctctgattctttagtcaaaataagtaaacacgctattcattaagtcataaaactggca

SEQ ID NO: 138746 - DNA, 70 bp, Homo sapiens
aataagtaaacacgctattcattaagtcataaaactggcatattttcttttgaaaacaatggattttaca

SEQ ID NO: 138747 - DNA, 73 bp, Homo sapiens
acacgctattcattaagtcataaaactggcatattttcttttgaaaacaatggattttacaatgtatatttca

SEQ ID NO: 138748 - DNA, 72 bp, Homo sapiens
tcattaagtcataaaactggcatattttcttttgaaaacaatggattttacaatgtatatttcaaaagcaac

SEQ ID NO: 138749 - DNA, 72 bp, Homo sapiens
tcataaaactggcatattttcttttgaaaacaatggattttacaatgtatatttcaaaagcaactatggtaa

SEQ ID NO: 138750 - DNA, 70 bp, Homo sapiens
ggcatattttcttttgaaaacaatggattttacaatgtatatttcaaaagcaactatggtaaaattataa

SEQ ID NO: 138751 - DNA, 72 bp, Homo sapiens
gaaaacaatggattttacaatgtatatttcaaaagcaactatggtaaaattataaatgcctactctaatgag

SEQ ID NO: 138752 - DNA, 76 bp, Homo sapiens
tgtatatttcaaaagcaactatggtaaaattataaatgcctactctaatgagtagcctaattcatagtgagaaaca

SEQ ID NO: 138753 - DNA, 74 bp, Homo sapiens
atttcaaaagcaactatggtaaaattataaatgcctactctaatgagtagcctaattcatagtgagaaacagga

SEQ ID NO: 138754 - DNA, 71 bp, Homo sapiens
atggtaaaattataaatgcctactctaatgagtagcctaattcatagtgagaaacaggaaaacagtttccc

SEQ ID NO: 138755 - DNA, 75 bp, Homo sapiens
tataaatgcctactctaatgagtagcctaattcatagtgagaaacaggaaaacagtttccctttgcaatcaagat

SEQ ID NO: 138756 - DNA, 71 bp, Homo sapiens
cctaattcatagtgagaaacaggaaaacagtttccctttgcaatcaagattcccaatacgagtacatttat

SEQ ID NO: 138757 - DNA, 71 bp, Homo sapiens
ggaaaacagtttccctttgcaatcaagattcccaatacgagtacatttattataaaacactacacacataa

SEQ ID NO: 138758 - DNA, 74 bp, Homo sapiens
atcaagattcccaatacgagtacatttattataaaacactacacacataaatattaaatgaaaaaatggctgca

SEQ ID NO: 138759 - DNA, 72 bp, Homo sapiens
aaacactacacacataaatattaaatgaaaaaatggctgcaaatagacttagattggctacaagtcccgttc

SEQ ID NO: 138760 - DNA, 74 bp, Homo sapiens
cacacataaatattaaatgaaaaaatggctgcaaatagacttagattggctacaagtcccgttcttaaatcatc

SEQ ID NO: 138761 - DNA, 72 bp, Homo sapiens
ttaaatgaaaaaatggctgcaaatagacttagattggctacaagtcccgttcttaaatcatcttttcacgga

SEQ ID NO: 138762 - DNA, 72 bp, Homo sapiens
aaaaatggctgcaaatagacttagattggctacaagtcccgttcttaaatcatcttttcacggattctacaa

SEQ ID NO: 138763 - DNA, 71 bp, Homo sapiens
caaatagacttagattggctacaagtcccgttcttaaatcatcttttcacggattctacaacagttttatc

SEQ ID NO: 138764 - DNA, 71 bp, Homo sapiens
acttagattggctacaagtcccgttcttaaatcatcttttcacggattctacaacagttttatctgtctaa

SEQ ID NO: 138765 - DNA, 70 bp, Homo sapiens
ctacaagtcccgttcttaaatcatcttttcacggattctacaacagttttatctgtctaaggaaatagct

SEQ ID NO: 138766 - DNA, 72 bp, Homo sapiens
ccgttcttaaatcatcttttcacggattctacaacagttttatctgtctaaggaaatagcttccattgtcaa

SEQ ID NO: 138767 - DNA, 77 bp, Homo sapiens
acaacagttttatctgtctaaggaaatagcttccattgtcaataaatatgaacagcaaacaattattatgatatgat

SEQ ID NO: 138768 - DNA, 81 bp, Homo sapiens
tatctgtctaaggaaatagcttccattgtcaataaatatgaacagcaaacaattattatgatatgattatattatttcatc

SEQ ID NO: 138769 - DNA, 79 bp, Homo sapiens
ggaaatagcttccattgtcaataaatatgaacagcaaacaattattatgatatgattatattatttcatcttaaagcta

SEQ ID NO: 138770 - DNA, 81 bp, Homo sapiens
tccattgtcaataaatatgaacagcaaacaattattatgatatgattatattatttcatcttaaagctatcatttgaggtc

SEQ ID NO: 138771 - DNA, 78 bp, Homo sapiens
aatatgaacagcaaacaattattatgatatgattatattatttcatcttaaagctatcatttgaggtcctccagttcc

SEQ ID NO: 138772 - DNA, 73 bp, Homo sapiens
atttcatcttaaagctatcatttgaggtcctccagttccttttgtaaggagtataacattaattcactcacaa

SEQ ID NO: 138773 - DNA, 73 bp, Homo sapiens
aagctatcatttgaggtcctccagttccttttgtaaggagtataacattaattcactcacaatacctatgtat

SEQ ID NO: 138774 - DNA, 75 bp, Homo sapiens
tcatttgaggtcctccagttccttttgtaaggagtataacattaattcactcacaatacctatgtatttctcaca

SEQ ID NO: 138775 - DNA, 76 bp, Homo sapiens
tcctccagttccttttgtaaggagtataacattaattcactcacaatacctatgtatttctcacatctacagatag

SEQ ID NO: 138776 - DNA, 76 bp, Homo sapiens
ccttttgtaaggagtataacattaattcactcacaatacctatgtatttctcacatctacagatagtaggtactca

SEQ ID NO: 138777 - DNA, 77 bp, Homo sapiens
ggagtataacattaattcactcacaatacctatgtatttctcacatctacagatagtaggtactcaaaaaatatctg

SEQ ID NO: 138778 - DNA, 78 bp, Homo sapiens
aatacctatgtatttctcacatctacagatagtaggtactcaaaaaatatctgttgttgatggcgacagtaactcata

SEQ ID NO: 138779 - DNA, 77 bp, Homo sapiens
atctacagatagtaggtactcaaaaaatatctgttgttgatggcgacagtaactcatatgatagacggaatattttc

SEQ ID NO: 138780 - DNA, 76 bp, Homo sapiens
agtaggtactcaaaaaatatctgttgttgatggcgacagtaactcatatgatagacggaatattttctgttcacaa

SEQ ID NO: 138781 - DNA, 79 bp, Homo sapiens
ctcaaaaaatatctgttgttgatggcgacagtaactcatatgatagacggaatattttctgttcacaatcaatagctaa

SEQ ID NO: 138782 - DNA, 79 bp, Homo sapiens
atctgttgttgatggcgacagtaactcatatgatagacggaatattttctgttcacaatcaatagctaatttaataatg

SEQ ID NO: 138783 - DNA, 75 bp, Homo sapiens
acagtaactcatatgatagacggaatattttctgttcacaatcaatagctaatttaataatgttttcccttgtca

SEQ ID NO: 138784 - DNA, 70 bp, Homo sapiens
cggaatattttctgttcacaatcaatagctaatttaataatgttttcccttgtcaataattcctcttgtt

SEQ ID NO: 138785 - DNA, 73 bp, Homo sapiens
tctgttcacaatcaatagctaatttaataatgttttcccttgtcaataattcctcttgttttcttatagcaag

SEQ ID NO: 138786 - DNA, 69 bp, Homo sapiens
caatagctaatttaataatgttttcccttgtcaataattcctcttgttttcttatagcaaggagaaaaa

SEQ ID NO: 138787 - DNA, 69 bp, Homo sapiens
taataatgttttcccttgtcaataattcctcttgttttcttatagcaaggagaaaaaacaattgattgg

SEQ ID NO: 138788 - DNA, 71 bp, Homo sapiens
tgtcaataattcctcttgttttcttatagcaaggagaaaaaacaattgattggtttattatttttgatata

SEQ ID NO: 138789 - DNA, 70 bp, Homo sapiens
cctcttgttttcttatagcaaggagaaaaaacaattgattggtttattatttttgatatatgttgaagat

SEQ ID NO: 138790 - DNA, 71 bp, Homo sapiens
ttcttatagcaaggagaaaaaacaattgattggtttattatttttgatatatgttgaagatttttaaatga

SEQ ID NO: 138791 - DNA, 69 bp, Homo sapiens
ggagaaaaaacaattgattggtttattatttttgatatatgttgaagatttttaaatgatttccattta

SEQ ID NO: 138792 - DNA, 68 bp, Homo sapiens
aacaattgattggtttattatttttgatatatgttgaagatttttaaatgatttccatttaaacctaa

SEQ ID NO: 138793 - DNA, 66 bp, Homo sapiens
ggtttattatttttgatatatgttgaagatttttaaatgatttccatttaaacctaattttacaat

SEQ ID NO: 138794 - DNA, 69 bp, Homo sapiens
tgatatatgttgaagatttttaaatgatttccatttaaacctaattttacaatttactacctcttacac

SEQ ID NO: 138795 - DNA, 64 bp, Homo sapiens
gttgaagatttttaaatgatttccatttaaacctaattttacaatttactacctcttacaccgt

SEQ ID NO: 138796 - DNA, 64 bp, Homo sapiens
aaatgatttccatttaaacctaattttacaatttactacctcttacaccgtttagtcagtaaaa

SEQ ID NO: 138797 - DNA, 65 bp, Homo sapiens
tccatttaaacctaattttacaatttactacctcttacaccgtttagtcagtaaaaattatctgg

SEQ ID NO: 138798 - DNA, 70 bp, Homo sapiens
taattttacaatttactacctcttacaccgtttagtcagtaaaaattatctggtagctggtacgatgcca

SEQ ID NO: 138799 - DNA, 70 bp, Homo sapiens
acaatttactacctcttacaccgtttagtcagtaaaaattatctggtagctggtacgatgccaaagaata

SEQ ID NO: 138800 - DNA, 75 bp, Homo sapiens
caccgtttagtcagtaaaaattatctggtagctggtacgatgccaaagaataatctcataataatgaatgaaata

SEQ ID NO: 138801 - DNA, 77 bp, Homo sapiens
cagtaaaaattatctggtagctggtacgatgccaaagaataatctcataataatgaatgaaatagagtcttagacca

SEQ ID NO: 138802 - DNA, 79 bp, Homo sapiens
tggtagctggtacgatgccaaagaataatctcataataatgaatgaaatagagtcttagaccaattgacagtagcttta

SEQ ID NO: 138803 - DNA, 78 bp, Homo sapiens
gctggtacgatgccaaagaataatctcataataatgaatgaaatagagtcttagaccaattgacagtagctttattta

SEQ ID NO: 138804 - DNA, 75 bp, Homo sapiens
gccaaagaataatctcataataatgaatgaaatagagtcttagaccaattgacagtagctttatttaagttttca

SEQ ID NO: 138805 - DNA, 70 bp, Homo sapiens
atgaatgaaatagagtcttagaccaattgacagtagctttatttaagttttcaattggaaacatttaatt

SEQ ID NO: 138806 - DNA, 68 bp, Homo sapiens
gagtcttagaccaattgacagtagctttatttaagttttcaattggaaacatttaatttaaactattc

SEQ ID NO: 138807 - DNA, 68 bp, Homo sapiens
tagaccaattgacagtagctttatttaagttttcaattggaaacatttaatttaaactattcttcttc

SEQ ID NO: 138808 - DNA, 70 bp, Homo sapiens
tgacagtagctttatttaagttttcaattggaaacatttaatttaaactattcttcttcttgatggtgat

SEQ ID NO: 138809 - DNA, 71 bp, Homo sapiens
ttaagttttcaattggaaacatttaatttaaactattcttcttcttgatggtgatttcatagtagatttgc

SEQ ID NO: 138810 - DNA, 73 bp, Homo sapiens
caattggaaacatttaatttaaactattcttcttcttgatggtgatttcatagtagatttgccaagcaaccac

SEQ ID NO: 138811 - DNA, 75 bp, Homo sapiens
catttaatttaaactattcttcttcttgatggtgatttcatagtagatttgccaagcaaccacttcaatatggtc

SEQ ID NO: 138812 - DNA, 76 bp, Homo sapiens
aactattcttcttcttgatggtgatttcatagtagatttgccaagcaaccacttcaatatggtctttgaaacatat

SEQ ID NO: 138813 - DNA, 78 bp, Homo sapiens
tcttcttgatggtgatttcatagtagatttgccaagcaaccacttcaatatggtctttgaaacatatttgatttagga

SEQ ID NO: 138814 - DNA, 76 bp, Homo sapiens
gatggtgatttcatagtagatttgccaagcaaccacttcaatatggtctttgaaacatatttgatttaggaaacca

SEQ ID NO: 138815 - DNA, 73 bp, Homo sapiens
catagtagatttgccaagcaaccacttcaatatggtctttgaaacatatttgatttaggaaaccattgggtta

SEQ ID NO: 138816 - DNA, 70 bp, Homo sapiens
caaccacttcaatatggtctttgaaacatatttgatttaggaaaccattgggttaagagaaataaatgat

SEQ ID NO: 138817 - DNA, 70 bp, Homo sapiens
aatatggtctttgaaacatatttgatttaggaaaccattgggttaagagaaataaatgattataacataa

SEQ ID NO: 138818 - DNA, 71 bp, Homo sapiens
acatatttgatttaggaaaccattgggttaagagaaataaatgattataacataattaaattctagctcaa

SEQ ID NO: 138819 - DNA, 70 bp, Homo sapiens
gatttaggaaaccattgggttaagagaaataaatgattataacataattaaattctagctcaacaatgtt

SEQ ID NO: 138820 - DNA, 70 bp, Homo sapiens
gaaaccattgggttaagagaaataaatgattataacataattaaattctagctcaacaatgtttataaaa

SEQ ID NO: 138821 - DNA, 70 bp, Homo sapiens
agagaaataaatgattataacataattaaattctagctcaacaatgtttataaaacaaaaattaatgggc

SEQ ID NO: 138822 - DNA, 70 bp, Homo sapiens
attctagctcaacaatgtttataaaacaaaaattaatgggctgaatttcttgttattttaggtattgtca

SEQ ID NO: 138823 - DNA, 72 bp, Homo sapiens
gctcaacaatgtttataaaacaaaaattaatgggctgaatttcttgttattttaggtattgtcatatgatat

SEQ ID NO: 138824 - DNA, 72 bp, Homo sapiens
taaaacaaaaattaatgggctgaatttcttgttattttaggtattgtcatatgatattacaagattcataac

SEQ ID NO: 138825 - DNA, 72 bp, Homo sapiens
caaaaattaatgggctgaatttcttgttattttaggtattgtcatatgatattacaagattcataacctaat

SEQ ID NO: 138826 - DNA, 72 bp, Homo sapiens
gggctgaatttcttgttattttaggtattgtcatatgatattacaagattcataacctaattttattaagtg

SEQ ID NO: 138827 - DNA, 72 bp, Homo sapiens
ttcttgttattttaggtattgtcatatgatattacaagattcataacctaattttattaagtgtaaaatatg

SEQ ID NO: 138828 - DNA, 76 bp, Homo sapiens
gtattgtcatatgatattacaagattcataacctaattttattaagtgtaaaatatgtttcacgatattttcatga

SEQ ID NO: 138829 - DNA, 75 bp, Homo sapiens
gtcatatgatattacaagattcataacctaattttattaagtgtaaaatatgtttcacgatattttcatgatctt

SEQ ID NO: 138830 - DNA, 73 bp, Homo sapiens
tacaagattcataacctaattttattaagtgtaaaatatgtttcacgatattttcatgatctttatttcacag

SEQ ID NO: 138831 - DNA, 72 bp, Homo sapiens
tcataacctaattttattaagtgtaaaatatgtttcacgatattttcatgatctttatttcacagttattgt

SEQ ID NO: 138832 - DNA, 71 bp, Homo sapiens
attaagtgtaaaatatgtttcacgatattttcatgatctttatttcacagttattgttattaaagtcaacc

SEQ ID NO: 138833 - DNA, 75 bp, Homo sapiens
aaatatgtttcacgatattttcatgatctttatttcacagttattgttattaaagtcaacctcactgcatggtcc

SEQ ID NO: 138834 - DNA, 80 bp, Homo sapiens
tcacgatattttcatgatctttatttcacagttattgttattaaagtcaacctcactgcatggtcctccataatgtcaca

SEQ ID NO: 138835 - DNA, 76 bp, Homo sapiens
atctttatttcacagttattgttattaaagtcaacctcactgcatggtcctccataatgtcacaaagcagtttcca

SEQ ID NO: 138836 - DNA, 74 bp, Homo sapiens
ttattgttattaaagtcaacctcactgcatggtcctccataatgtcacaaagcagtttccagcagggttatttt

SEQ ID NO: 138837 - DNA, 73 bp, Homo sapiens
gttattaaagtcaacctcactgcatggtcctccataatgtcacaaagcagtttccagcagggttatttttaaa

SEQ ID NO: 138838 - DNA, 61 bp, Homo sapiens
tttttaaactttttaacatataccaaaaaaagtattttaattaatctaaaagtaagtgttc

SEQ ID NO: 138839 - DNA, 64 bp, Homo sapiens
aactttttaacatataccaaaaaaagtattttaattaatctaaaagtaagtgttctcatttata

SEQ ID NO: 138840 - DNA, 68 bp, Homo sapiens
catataccaaaaaaagtattttaattaatctaaaagtaagtgttctcatttataattaggcaaatcaa

SEQ ID NO: 138841 - DNA, 71 bp, Homo sapiens
agtattttaattaatctaaaagtaagtgttctcatttataattaggcaaatcaatataaaatgcataatta

SEQ ID NO: 138842 - DNA, 74 bp, Homo sapiens
ttaatctaaaagtaagtgttctcatttataattaggcaaatcaatataaaatgcataattagataagataacac

SEQ ID NO: 138843 - DNA, 79 bp, Homo sapiens
aagtaagtgttctcatttataattaggcaaatcaatataaaatgcataattagataagataacactgatactatgcata

SEQ ID NO: 138844 - DNA, 81 bp, Homo sapiens
gttctcatttataattaggcaaatcaatataaaatgcataattagataagataacactgatactatgcatatacatttcaa

SEQ ID NO: 138845 - DNA, 78 bp, Homo sapiens
taattaggcaaatcaatataaaatgcataattagataagataacactgatactatgcatatacatttcaaataaaacc

SEQ ID NO: 138846 - DNA, 80 bp, Homo sapiens
gcaaatcaatataaaatgcataattagataagataacactgatactatgcatatacatttcaaataaaacctatataaca

SEQ ID NO: 138847 - DNA, 80 bp, Homo sapiens
atgcataattagataagataacactgatactatgcatatacatttcaaataaaacctatataacatttcaagtatatcac

SEQ ID NO: 138848 - DNA, 79 bp, Homo sapiens
agataacactgatactatgcatatacatttcaaataaaacctatataacatttcaagtatatcacttccaatttctgca

SEQ ID NO: 138849 - DNA, 76 bp, Homo sapiens
catttcaaataaaacctatataacatttcaagtatatcacttccaatttctgcataaattcacaagatgttcttga

SEQ ID NO: 138850 - DNA, 77 bp, Homo sapiens
aaaacctatataacatttcaagtatatcacttccaatttctgcataaattcacaagatgttcttgattagctcaata

SEQ ID NO: 138851 - DNA, 78 bp, Homo sapiens
ataacatttcaagtatatcacttccaatttctgcataaattcacaagatgttcttgattagctcaataccttttatga

SEQ ID NO: 138852 - DNA, 77 bp, Homo sapiens
agtatatcacttccaatttctgcataaattcacaagatgttcttgattagctcaataccttttatgaatgtacctac

SEQ ID NO: 138853 - DNA, 80 bp, Homo sapiens
cacttccaatttctgcataaattcacaagatgttcttgattagctcaataccttttatgaatgtacctactatgatagca

SEQ ID NO: 138854 - DNA, 77 bp, Homo sapiens
ctgcataaattcacaagatgttcttgattagctcaataccttttatgaatgtacctactatgatagcaaagaaaaac

SEQ ID NO: 138855 - DNA, 75 bp, Homo sapiens
cacaagatgttcttgattagctcaataccttttatgaatgtacctactatgatagcaaagaaaaactgaacggta

SEQ ID NO: 138856 - DNA, 75 bp, Homo sapiens
tgttcttgattagctcaataccttttatgaatgtacctactatgatagcaaagaaaaactgaacggtaggcagta

SEQ ID NO: 138857 - DNA, 74 bp, Homo sapiens
gctcaataccttttatgaatgtacctactatgatagcaaagaaaaactgaacggtaggcagtaataatactcag

SEQ ID NO: 138858 - DNA, 72 bp, Homo sapiens
gtacctactatgatagcaaagaaaaactgaacggtaggcagtaataatactcagtttttaaatcagtcacac

SEQ ID NO: 138859 - DNA, 70 bp, Homo sapiens
gatagcaaagaaaaactgaacggtaggcagtaataatactcagtttttaaatcagtcacaccaagaaaac

SEQ ID NO: 138860 - DNA, 70 bp, Homo sapiens
aagaaaaactgaacggtaggcagtaataatactcagtttttaaatcagtcacaccaagaaaactggtgca

SEQ ID NO: 138861 - DNA, 74 bp, Homo sapiens
tgaacggtaggcagtaataatactcagtttttaaatcagtcacaccaagaaaactggtgcatttatgaaggata

SEQ ID NO: 138862 - DNA, 74 bp, Homo sapiens
ggcagtaataatactcagtttttaaatcagtcacaccaagaaaactggtgcatttatgaaggatactagtacaa

SEQ ID NO: 138863 - DNA, 73 bp, Homo sapiens
cagtttttaaatcagtcacaccaagaaaactggtgcatttatgaaggatactagtacaaactgaatagactac

SEQ ID NO: 138864 - DNA, 74 bp, Homo sapiens
taaatcagtcacaccaagaaaactggtgcatttatgaaggatactagtacaaactgaatagactacccaaagaa

SEQ ID NO: 138865 - DNA, 72 bp, Homo sapiens
acaccaagaaaactggtgcatttatgaaggatactagtacaaactgaatagactacccaaagaatgtaaaga

SEQ ID NO: 138866 - DNA, 71 bp, Homo sapiens
aactggtgcatttatgaaggatactagtacaaactgaatagactacccaaagaatgtaaagaaagtagtac

SEQ ID NO: 138867 - DNA, 72 bp, Homo sapiens
catttatgaaggatactagtacaaactgaatagactacccaaagaatgtaaagaaagtagtactaaatatga

SEQ ID NO: 138868 - DNA, 73 bp, Homo sapiens
gatactagtacaaactgaatagactacccaaagaatgtaaagaaagtagtactaaatatgaatttgttctgca

SEQ ID NO: 138869 - DNA, 70 bp, Homo sapiens
acaaactgaatagactacccaaagaatgtaaagaaagtagtactaaatatgaatttgttctgcattttac

SEQ ID NO: 138870 - DNA, 72 bp, Homo sapiens
agactacccaaagaatgtaaagaaagtagtactaaatatgaatttgttctgcattttacttatatttgtgca

SEQ ID NO: 138871 - DNA, 76 bp, Homo sapiens
agtagtactaaatatgaatttgttctgcattttacttatatttgtgcattatctttcacaatatcaacaaacaggc

SEQ ID NO: 138872 - DNA, 76 bp, Homo sapiens
aatatgaatttgttctgcattttacttatatttgtgcattatctttcacaatatcaacaaacaggccacaagggtc

SEQ ID NO: 138873 - DNA, 77 bp, Homo sapiens
aatttgttctgcattttacttatatttgtgcattatctttcacaatatcaacaaacaggccacaagggtctactgca

SEQ ID NO: 138874 - DNA, 76 bp, Homo sapiens
tttacttatatttgtgcattatctttcacaatatcaacaaacaggccacaagggtctactgcagcttactgttatt

SEQ ID NO: 138875 - DNA, 76 bp, Homo sapiens
atatttgtgcattatctttcacaatatcaacaaacaggccacaagggtctactgcagcttactgttatttttattc

SEQ ID NO: 138876 - DNA, 75 bp, Homo sapiens
attatctttcacaatatcaacaaacaggccacaagggtctactgcagcttactgttatttttattcttcaggctc

SEQ ID NO: 138877 - DNA, 74 bp, Homo sapiens
atatcaacaaacaggccacaagggtctactgcagcttactgttatttttattcttcaggctccagtgatacttt

SEQ ID NO: 138878 - DNA, 74 bp, Homo sapiens
aacaaacaggccacaagggtctactgcagcttactgttatttttattcttcaggctccagtgatacttttgtgc

SEQ ID NO: 138879 - DNA, 75 bp, Homo sapiens
acaagggtctactgcagcttactgttatttttattcttcaggctccagtgatacttttgtgctctcaaggaaaga

SEQ ID NO: 138880 - DNA, 75 bp, Homo sapiens
tgcagcttactgttatttttattcttcaggctccagtgatacttttgtgctctcaaggaaagacaagaaaatctt

SEQ ID NO: 138881 - DNA, 73 bp, Homo sapiens
ctgttatttttattcttcaggctccagtgatacttttgtgctctcaaggaaagacaagaaaatctttacaaca

SEQ ID NO: 138882 - DNA, 77 bp, Homo sapiens
tattcttcaggctccagtgatacttttgtgctctcaaggaaagacaagaaaatctttacaacatacctgatcattta

SEQ ID NO: 138883 - DNA, 80 bp, Homo sapiens
tccagtgatacttttgtgctctcaaggaaagacaagaaaatctttacaacatacctgatcatttatctggcatgcaacaa

SEQ ID NO: 138884 - DNA, 76 bp, Homo sapiens
atacttttgtgctctcaaggaaagacaagaaaatctttacaacatacctgatcatttatctggcatgcaacaaggt

SEQ ID NO: 138885 - DNA, 83 bp, Homo sapiens
gacaagaaaatctttacaacatacctgatcatttatctggcatgcaacaaggttgtgctgatcataacagccagcgaatctaa

SEQ ID NO: 138886 - DNA, 82 bp, Homo sapiens
aaatctttacaacatacctgatcatttatctggcatgcaacaaggttgtgctgatcataacagccagcgaatctaatgtact

SEQ ID NO: 138887 - DNA, 86 bp, Homo sapiens
acaacatacctgatcatttatctggcatgcaacaaggttgtgctgatcataacagccagcgaatctaatgtacttgagccagcttc

SEQ ID NO: 138888 - DNA, 85 bp, Homo sapiens
atttatctggcatgcaacaaggttgtgctgatcataacagccagcgaatctaatgtacttgagccagcttccaacatctggttga

SEQ ID NO: 138889 - DNA, 89 bp, Homo sapiens
catgcaacaaggttgtgctgatcataacagccagcgaatctaatgtacttgagccagcttccaacatctggttgactggcatctatgca

SEQ ID NO: 138890 - DNA, 86 bp, Homo sapiens
aacaaggttgtgctgatcataacagccagcgaatctaatgtacttgagccagcttccaacatctggttgactggcatctatgcaga

SEQ ID NO: 138891 - DNA, 85 bp, Homo sapiens
atcataacagccagcgaatctaatgtacttgagccagcttccaacatctggttgactggcatctatgcagaacttcacattgtaa

SEQ ID NO: 138892 - DNA, 82 bp, Homo sapiens
aacagccagcgaatctaatgtacttgagccagcttccaacatctggttgactggcatctatgcagaacttcacattgtaaaa

SEQ ID NO: 138893 - DNA, 80 bp, Homo sapiens
aatctaatgtacttgagccagcttccaacatctggttgactggcatctatgcagaacttcacattgtaaaattcgtctaa

SEQ ID NO: 138894 - DNA, 81 bp, Homo sapiens
tacttgagccagcttccaacatctggttgactggcatctatgcagaacttcacattgtaaaattcgtctaagatctggagg

SEQ ID NO: 138895 - DNA, 79 bp, Homo sapiens
agcttccaacatctggttgactggcatctatgcagaacttcacattgtaaaattcgtctaagatctggagggaagaaga

SEQ ID NO: 138896 - DNA, 80 bp, Homo sapiens
tggttgactggcatctatgcagaacttcacattgtaaaattcgtctaagatctggagggaagaagatgagaacaatcaat

SEQ ID NO: 138897 - DNA, 78 bp, Homo sapiens
tagaattcaggcaatcacccaattgcagattcaagtcattaactcaccatatacttcaagaaaaacccagtgctccaa

SEQ ID NO: 138898 - DNA, 75 bp, Homo sapiens
caatcacccaattgcagattcaagtcattaactcaccatatacttcaagaaaaacccagtgctccaagggcttta

SEQ ID NO: 138899 - DNA, 74 bp, Homo sapiens
aattgcagattcaagtcattaactcaccatatacttcaagaaaaacccagtgctccaagggctttagtcaagaa

SEQ ID NO: 138900 - DNA, 72 bp, Homo sapiens
attcaagtcattaactcaccatatacttcaagaaaaacccagtgctccaagggctttagtcaagaagcccta

SEQ ID NO: 138901 - DNA, 72 bp, Homo sapiens
attaactcaccatatacttcaagaaaaacccagtgctccaagggctttagtcaagaagccctatgaataagc

SEQ ID NO: 138902 - DNA, 73 bp, Homo sapiens
atatacttcaagaaaaacccagtgctccaagggctttagtcaagaagccctatgaataagcctttggccatga

SEQ ID NO: 138903 - DNA, 70 bp, Homo sapiens
aagaaaaacccagtgctccaagggctttagtcaagaagccctatgaataagcctttggccatgaggaaat

SEQ ID NO: 138904 - DNA, 73 bp, Homo sapiens
agtgctccaagggctttagtcaagaagccctatgaataagcctttggccatgaggaaattgaagggcaataag

SEQ ID NO: 138905 - DNA, 71 bp, Homo sapiens
ctttagtcaagaagccctatgaataagcctttggccatgaggaaattgaagggcaataagtcgtcccaaaa

SEQ ID NO: 138906 - DNA, 69 bp, Homo sapiens
aagaagccctatgaataagcctttggccatgaggaaattgaagggcaataagtcgtcccaaaatttaaa

SEQ ID NO: 138907 - DNA, 68 bp, Homo sapiens
cctatgaataagcctttggccatgaggaaattgaagggcaataagtcgtcccaaaatttaaaaaagaa

SEQ ID NO: 138908 - DNA, 72 bp, Homo sapiens
aaaaaaaaatccccacaatctagccaaagggtccgaatgtgactttctcgcgaagcagcacacgatgttgga

SEQ ID NO: 138909 - DNA, 76 bp, Homo sapiens
aaaatccccacaatctagccaaagggtccgaatgtgactttctcgcgaagcagcacacgatgttggacagcaaagc

SEQ ID NO: 138910 - DNA, 78 bp, Homo sapiens
aatctagccaaagggtccgaatgtgactttctcgcgaagcagcacacgatgttggacagcaaagctgttacttggcaa

SEQ ID NO: 138911 - DNA, 76 bp, Homo sapiens
aaagggtccgaatgtgactttctcgcgaagcagcacacgatgttggacagcaaagctgttacttggcaaggtggaa

SEQ ID NO: 138912 - DNA, 79 bp, Homo sapiens
aatgtgactttctcgcgaagcagcacacgatgttggacagcaaagctgttacttggcaaggtggaactcggccgagagc

SEQ ID NO: 138913 - DNA, 79 bp, Homo sapiens
tcgcgaagcagcacacgatgttggacagcaaagctgttacttggcaaggtggaactcggccgagagcggctccaaagtc

SEQ ID NO: 138914 - DNA, 76 bp, Homo sapiens
acacgatgttggacagcaaagctgttacttggcaaggtggaactcggccgagagcggctccaaagtcgcgtggcca

SEQ ID NO: 138915 - DNA, 69 bp, Homo sapiens
aggagaagagcgcaaggaaaagaggccgacaagccggcagagaaacccaccgaaggccggacgacccac

SEQ ID NO: 138916 - DNA, 65 bp, Homo sapiens
aaggaaaagaggccgacaagccggcagagaaacccaccgaaggccggacgacccaccccggagac

SEQ ID NO: 138917 - DNA, 68 bp, Homo sapiens
aagaggccgacaagccggcagagaaacccaccgaaggccggacgacccaccccggagacgtgtccaga

SEQ ID NO: 138918 - DNA, 68 bp, Homo sapiens
cggcagagaaacccaccgaaggccggacgacccaccccggagacgtgtccagaccgcaccgtttcgca

SEQ ID NO: 138919 - DNA, 66 bp, Homo sapiens
aaacccaccgaaggccggacgacccaccccggagacgtgtccagaccgcaccgtttcgcaggagga

SEQ ID NO: 138920 - DNA, 67 bp, Homo sapiens
ccgaaggccggacgacccaccccggagacgtgtccagaccgcaccgtttcgcaggaggaacaaggaa

SEQ ID NO: 138921 - DNA, 69 bp, Homo sapiens
cccaccccggagacgtgtccagaccgcaccgtttcgcaggaggaacaaggaaatcgcccggcttagcaa

SEQ ID NO: 138922 - DNA, 74 bp, Homo sapiens
agacgtgtccagaccgcaccgtttcgcaggaggaacaaggaaatcgcccggcttagcaacgtagataagcagca

SEQ ID NO: 138923 - DNA, 75 bp, Homo sapiens
tgtccagaccgcaccgtttcgcaggaggaacaaggaaatcgcccggcttagcaacgtagataagcagcagggctc

SEQ ID NO: 138924 - DNA, 74 bp, Homo sapiens
accgtttcgcaggaggaacaaggaaatcgcccggcttagcaacgtagataagcagcagggctccgcgagactgc

SEQ ID NO: 138925 - DNA, 74 bp, Homo sapiens
aggaacaaggaaatcgcccggcttagcaacgtagataagcagcagggctccgcgagactgcgggcgaggaggaa

SEQ ID NO: 138926 - DNA, 73 bp, Homo sapiens
aaggaaatcgcccggcttagcaacgtagataagcagcagggctccgcgagactgcgggcgaggaggaaagaag

SEQ ID NO: 138927 - DNA, 73 bp, Homo sapiens
cccggcttagcaacgtagataagcagcagggctccgcgagactgcgggcgaggaggaaagaaggctgggggcg

SEQ ID NO: 138928 - DNA, 71 bp, Homo sapiens
aacgtagataagcagcagggctccgcgagactgcgggcgaggaggaaagaaggctgggggcggggggcgcc

SEQ ID NO: 138929 - DNA, 71 bp, Homo sapiens
taagcagcagggctccgcgagactgcgggcgaggaggaaagaaggctgggggcggggggcgcccgtagaaa

SEQ ID NO: 138930 - DNA, 67 bp, Homo sapiens
ctccgcgagactgcgggcgaggaggaaagaaggctgggggcggggggcgcccgtagaaacggtgccc

SEQ ID NO: 138931 - DNA, 68 bp, Homo sapiens
ctttcacatcgcccagactttttttccttttaaagtgaggagttctcttacctttagatttctatggc

SEQ ID NO: 138932 - DNA, 70 bp, Homo sapiens
cagactttttttccttttaaagtgaggagttctcttacctttagatttctatggcctcaactcagcaata

SEQ ID NO: 138933 - DNA, 74 bp, Homo sapiens
tttccttttaaagtgaggagttctcttacctttagatttctatggcctcaactcagcaataataggcattcaca

SEQ ID NO: 138934 - DNA, 77 bp, Homo sapiens
taaagtgaggagttctcttacctttagatttctatggcctcaactcagcaataataggcattcacagaagaatcaaa

SEQ ID NO: 138935 - DNA, 75 bp, Homo sapiens
agttctcttacctttagatttctatggcctcaactcagcaataataggcattcacagaagaatcaaaataaacaa

SEQ ID NO: 138936 - DNA, 71 bp, Homo sapiens
aacaaaataaaataatcagcagcccccaacgctcctgcacgaaaatcctttcaaacgatcccgagcaacat

SEQ ID NO: 138937 - DNA, 73 bp, Homo sapiens
aaataatcagcagcccccaacgctcctgcacgaaaatcctttcaaacgatcccgagcaacatttagagatgtt

SEQ ID NO: 138938 - DNA, 71 bp, Homo sapiens
agcagcccccaacgctcctgcacgaaaatcctttcaaacgatcccgagcaacatttagagatgtttaaaaa

SEQ ID NO: 138939 - DNA, 71 bp, Homo sapiens
ccaacgctcctgcacgaaaatcctttcaaacgatcccgagcaacatttagagatgtttaaaaataataata

SEQ ID NO: 138940 - DNA, 69 bp, Homo sapiens
aataattttttaaaagcctcgcgtctcgatttccaaatgggtctctgacaactttgtccgtctctagga

SEQ ID NO: 138941 - DNA, 74 bp, Homo sapiens
tttttaaaagcctcgcgtctcgatttccaaatgggtctctgacaactttgtccgtctctaggatctgctctcca

SEQ ID NO: 138942 - DNA, 76 bp, Homo sapiens
tcgcgtctcgatttccaaatgggtctctgacaactttgtccgtctctaggatctgctctccaggaccacgcgtttc

SEQ ID NO: 138943 - DNA, 73 bp, Homo sapiens
tttccaaatgggtctctgacaactttgtccgtctctaggatctgctctccaggaccacgcgtttcggatttat

SEQ ID NO: 138944 - DNA, 74 bp, Homo sapiens
aatgggtctctgacaactttgtccgtctctaggatctgctctccaggaccacgcgtttcggatttattgtccgc

SEQ ID NO: 138945 - DNA, 72 bp, Homo sapiens
aactttgtccgtctctaggatctgctctccaggaccacgcgtttcggatttattgtccgccaacagtgtatt

SEQ ID NO: 138946 - DNA, 72 bp, Homo sapiens
atctgctctccaggaccacgcgtttcggatttattgtccgccaacagtgtatttttaatacaagaaatgaag

SEQ ID NO: 138947 - DNA, 68 bp, Homo sapiens
aggaccacgcgtttcggatttattgtccgccaacagtgtatttttaatacaagaaatgaagtcttctt

SEQ ID NO: 138948 - DNA, 70 bp, Homo sapiens
gtttcggatttattgtccgccaacagtgtatttttaatacaagaaatgaagtcttctttcgtctgggtga

SEQ ID NO: 138949 - DNA, 68 bp, Homo sapiens
atttattgtccgccaacagtgtatttttaatacaagaaatgaagtcttctttcgtctgggtgacccgg

SEQ ID NO: 138950 - DNA, 66 bp, Homo sapiens
aacagtgtatttttaatacaagaaatgaagtcttctttcgtctgggtgacccgggtttggtgtgtt

SEQ ID NO: 138951 - DNA, 65 bp, Homo sapiens
ttttaatacaagaaatgaagtcttctttcgtctgggtgacccgggtttggtgtgttttggctttt

SEQ ID NO: 138952 - DNA, 62 bp, Homo sapiens
aagtcttctttcgtctgggtgacccgggtttggtgtgttttggctttttcccccttcctaaa

SEQ ID NO: 138953 - DNA, 67 bp, Homo sapiens
tctgggtgacccgggtttggtgtgttttggctttttcccccttcctaaatgagctcggagctattcc

SEQ ID NO: 138954 - DNA, 71 bp, Homo sapiens
tttggtgtgttttggctttttcccccttcctaaatgagctcggagctattccttctggttcacatcacctc

SEQ ID NO: 138955 - DNA, 70 bp, Homo sapiens
tttggctttttcccccttcctaaatgagctcggagctattccttctggttcacatcacctccctcttttc

SEQ ID NO: 138956 - DNA, 77 bp, Homo sapiens
cttcctaaatgagctcggagctattccttctggttcacatcacctccctcttttctcactttctcttgctcttatca

SEQ ID NO: 138957 - DNA, 78 bp, Homo sapiens
taaatgagctcggagctattccttctggttcacatcacctccctcttttctcactttctcttgctcttatcagcccga

SEQ ID NO: 138958 - DNA, 77 bp, Homo sapiens
agctattccttctggttcacatcacctccctcttttctcactttctcttgctcttatcagcccgatgtgtaatgaaa

SEQ ID NO: 138959 - DNA, 78 bp, Homo sapiens
ttctggttcacatcacctccctcttttctcactttctcttgctcttatcagcccgatgtgtaatgaaagttatctgaa

SEQ ID NO: 138960 - DNA, 75 bp, Homo sapiens
tcacctccctcttttctcactttctcttgctcttatcagcccgatgtgtaatgaaagttatctgaaacccactaa

SEQ ID NO: 138961 - DNA, 73 bp, Homo sapiens
ttttctcactttctcttgctcttatcagcccgatgtgtaatgaaagttatctgaaacccactaaaacttctac

SEQ ID NO: 138962 - DNA, 72 bp, Homo sapiens
ttgctcttatcagcccgatgtgtaatgaaagttatctgaaacccactaaaacttctacttctccttcccagt

SEQ ID NO: 138963 - DNA, 69 bp, Homo sapiens
agcccgatgtgtaatgaaagttatctgaaacccactaaaacttctacttctccttcccagttccaatgg

SEQ ID NO: 138964 - DNA, 67 bp, Homo sapiens
taatgaaagttatctgaaacccactaaaacttctacttctccttcccagttccaatgggggaaaaca

SEQ ID NO: 138965 - DNA, 68 bp, Homo sapiens
ttatctgaaacccactaaaacttctacttctccttcccagttccaatgggggaaaacaagcaggagga

SEQ ID NO: 138966 - DNA, 67 bp, Homo sapiens
actaaaacttctacttctccttcccagttccaatgggggaaaacaagcaggaggaggagagtttgaa

SEQ ID NO: 138967 - DNA, 67 bp, Homo sapiens
acttctacttctccttcccagttccaatgggggaaaacaagcaggaggaggagagtttgaaaaggtg

SEQ ID NO: 138968 - DNA, 66 bp, Homo sapiens
ctccttcccagttccaatgggggaaaacaagcaggaggaggagagtttgaaaaggtggggggcctg

SEQ ID NO: 138969 - DNA, 67 bp, Homo sapiens
aggaggagagtttgaaaaggtggggggcctggggaggcgaggggagctctatccccctttcagatcc

SEQ ID NO: 138970 - DNA, 69 bp, Homo sapiens
aaaggtggggggcctggggaggcgaggggagctctatccccctttcagatcctccgcagcgccttcgcg

SEQ ID NO: 138971 - DNA, 72 bp, Homo sapiens
tggggaggcgaggggagctctatccccctttcagatcctccgcagcgccttcgcgggtcctggaccctcacg

SEQ ID NO: 138972 - DNA, 71 bp, Homo sapiens
aggggagctctatccccctttcagatcctccgcagcgccttcgcgggtcctggaccctcacgggatcgtcc

SEQ ID NO: 138973 - DNA, 71 bp, Homo sapiens
tatccccctttcagatcctccgcagcgccttcgcgggtcctggaccctcacgggatcgtcccctttcgcaa

SEQ ID NO: 138974 - DNA, 74 bp, Homo sapiens
tttcagatcctccgcagcgccttcgcgggtcctggaccctcacgggatcgtcccctttcgcaactccaagctca

SEQ ID NO: 138975 - DNA, 71 bp, Homo sapiens
gcagcgccttcgcgggtcctggaccctcacgggatcgtcccctttcgcaactccaagctcagccgccgggt

SEQ ID NO: 138976 - DNA, 69 bp, Homo sapiens
ttcgcgggtcctggaccctcacgggatcgtcccctttcgcaactccaagctcagccgccgggtttctat

SEQ ID NO: 138977 - DNA, 71 bp, Homo sapiens
gtcctggaccctcacgggatcgtcccctttcgcaactccaagctcagccgccgggtttctatttcatgaac

SEQ ID NO: 138978 - DNA, 70 bp, Homo sapiens
acgggatcgtcccctttcgcaactccaagctcagccgccgggtttctatttcatgaactgtctctttaaa

SEQ ID NO: 138979 - DNA, 75 bp, Homo sapiens
cctttcgcaactccaagctcagccgccgggtttctatttcatgaactgtctctttaaagaggatctgctcggcca

SEQ ID NO: 138980 - DNA, 75 bp, Homo sapiens
aactccaagctcagccgccgggtttctatttcatgaactgtctctttaaagaggatctgctcggccatccagaaa

SEQ ID NO: 138981 - DNA, 73 bp, Homo sapiens
tttctatttcatgaactgtctctttaaagaggatctgctcggccatccagaaagaacccggggcgagggagaa

SEQ ID NO: 138982 - DNA, 71 bp, Homo sapiens
atttcatgaactgtctctttaaagaggatctgctcggccatccagaaagaacccggggcgagggagaaagg

SEQ ID NO: 138983 - DNA, 72 bp, Homo sapiens
tgtctctttaaagaggatctgctcggccatccagaaagaacccggggcgagggagaaagggagctatctccc

SEQ ID NO: 138984 - DNA, 71 bp, Homo sapiens
aaagaggatctgctcggccatccagaaagaacccggggcgagggagaaagggagctatctcccgccgccca

SEQ ID NO: 138985 - DNA, 73 bp, Homo sapiens
ggccatccagaaagaacccggggcgagggagaaagggagctatctcccgccgcccagagtgatctgatcggaa

SEQ ID NO: 138986 - DNA, 72 bp, Homo sapiens
agaaagaacccggggcgagggagaaagggagctatctcccgccgcccagagtgatctgatcggaagccagac

SEQ ID NO: 138987 - DNA, 74 bp, Homo sapiens
gggcgagggagaaagggagctatctcccgccgcccagagtgatctgatcggaagccagacgggctcctctttta

SEQ ID NO: 138988 - DNA, 71 bp, Homo sapiens
agaaagggagctatctcccgccgcccagagtgatctgatcggaagccagacgggctcctcttttaaatttt

SEQ ID NO: 138989 - DNA, 73 bp, Homo sapiens
agctatctcccgccgcccagagtgatctgatcggaagccagacgggctcctcttttaaatttttaaagtgaca

SEQ ID NO: 138990 - DNA, 74 bp, Homo sapiens
ccgcccagagtgatctgatcggaagccagacgggctcctcttttaaatttttaaagtgacagcagcctcctctg

SEQ ID NO: 138991 - DNA, 74 bp, Homo sapiens
agagtgatctgatcggaagccagacgggctcctcttttaaatttttaaagtgacagcagcctcctctggcggga

SEQ ID NO: 138992 - DNA, 71 bp, Homo sapiens
gaagccagacgggctcctcttttaaatttttaaagtgacagcagcctcctctggcgggagaggtcacaaaa

SEQ ID NO: 138993 - DNA, 68 bp, Homo sapiens
agacgggctcctcttttaaatttttaaagtgacagcagcctcctctggcgggagaggtcacaaaaagg

SEQ ID NO: 138994 - DNA, 69 bp, Homo sapiens
tttaaatttttaaagtgacagcagcctcctctggcgggagaggtcacaaaaaggtcgccaagacccaag

SEQ ID NO: 138995 - DNA, 71 bp, Homo sapiens
atttttaaagtgacagcagcctcctctggcgggagaggtcacaaaaaggtcgccaagacccaagtcctata

SEQ ID NO: 138996 - DNA, 74 bp, Homo sapiens
agcagcctcctctggcgggagaggtcacaaaaaggtcgccaagacccaagtcctatagggacagactgattatg

SEQ ID NO: 138997 - DNA, 76 bp, Homo sapiens
tcctctggcgggagaggtcacaaaaaggtcgccaagacccaagtcctatagggacagactgattatggatgcacca

SEQ ID NO: 138998 - DNA, 72 bp, Homo sapiens
aggtcacaaaaaggtcgccaagacccaagtcctatagggacagactgattatggatgcaccatcccccttaa

SEQ ID NO: 138999 - DNA, 72 bp, Homo sapiens
aaaaaggtcgccaagacccaagtcctatagggacagactgattatggatgcaccatcccccttaaacatgta

SEQ ID NO: 139000 - DNA, 73 bp, Homo sapiens
agacccaagtcctatagggacagactgattatggatgcaccatcccccttaaacatgtagatttctccgggta

SEQ ID NO: 139001 - DNA, 72 bp, Homo sapiens
aagtcctatagggacagactgattatggatgcaccatcccccttaaacatgtagatttctccgggtaaacaa

SEQ ID NO: 139002 - DNA, 71 bp, Homo sapiens
agggacagactgattatggatgcaccatcccccttaaacatgtagatttctccgggtaaacaaccaatggg

SEQ ID NO: 139003 - DNA, 72 bp, Homo sapiens
attatggatgcaccatcccccttaaacatgtagatttctccgggtaaacaaccaatggggagatctcgccag

SEQ ID NO: 139004 - DNA, 70 bp, Homo sapiens
catcccccttaaacatgtagatttctccgggtaaacaaccaatggggagatctcgccaggcaggatttct

SEQ ID NO: 139005 - DNA, 69 bp, Homo sapiens
cccttaaacatgtagatttctccgggtaaacaaccaatggggagatctcgccaggcaggatttctttcc

SEQ ID NO: 139006 - DNA, 70 bp, Homo sapiens
tgtagatttctccgggtaaacaaccaatggggagatctcgccaggcaggatttctttccccagggaaata

SEQ ID NO: 139007 - DNA, 70 bp, Homo sapiens
gtaaacaaccaatggggagatctcgccaggcaggatttctttccccagggaaatagcctccgtttcgatg

SEQ ID NO: 139008 - DNA, 71 bp, Homo sapiens
aaccaatggggagatctcgccaggcaggatttctttccccagggaaatagcctccgtttcgatgtcttgaa

SEQ ID NO: 139009 - DNA, 73 bp, Homo sapiens
agatctcgccaggcaggatttctttccccagggaaatagcctccgtttcgatgtcttgaaagcacaagtgtgg

SEQ ID NO: 139010 - DNA, 73 bp, Homo sapiens
ccaggcaggatttctttccccagggaaatagcctccgtttcgatgtcttgaaagcacaagtgtggtgtgtgtg

SEQ ID NO: 139011 - DNA, 76 bp, Homo sapiens
tctgcccgccaggcgccggcaacacagctctgccttccgcctcgcccgccgttccgcgtccttccgagctacgaga

SEQ ID NO: 139012 - DNA, 74 bp, Homo sapiens
aggcgccggcaacacagctctgccttccgcctcgcccgccgttccgcgtccttccgagctacgagaggaaggca

SEQ ID NO: 139013 - DNA, 76 bp, Homo sapiens
aacacagctctgccttccgcctcgcccgccgttccgcgtccttccgagctacgagaggaaggcacactgcagtcca

SEQ ID NO: 139014 - DNA, 78 bp, Homo sapiens
cttccgcctcgcccgccgttccgcgtccttccgagctacgagaggaaggcacactgcagtccaggcatgtagacatca

SEQ ID NO: 139015 - DNA, 81 bp, Homo sapiens
tcgcccgccgttccgcgtccttccgagctacgagaggaaggcacactgcagtccaggcatgtagacatcagcctgagagaa

SEQ ID NO: 139016 - DNA, 82 bp, Homo sapiens
ttccgcgtccttccgagctacgagaggaaggcacactgcagtccaggcatgtagacatcagcctgagagaaggctattccta

SEQ ID NO: 139017 - DNA, 84 bp, Homo sapiens
cgagctacgagaggaaggcacactgcagtccaggcatgtagacatcagcctgagagaaggctattcctacgtctgagcttctct

SEQ ID NO: 139018 - DNA, 83 bp, Homo sapiens
tacgagaggaaggcacactgcagtccaggcatgtagacatcagcctgagagaaggctattcctacgtctgagcttctcttccc

SEQ ID NO: 139019 - DNA, 81 bp, Homo sapiens
cactgcagtccaggcatgtagacatcagcctgagagaaggctattcctacgtctgagcttctcttccccaaatacaaccaa

SEQ ID NO: 139020 - DNA, 80 bp, Homo sapiens
tccaggcatgtagacatcagcctgagagaaggctattcctacgtctgagcttctcttccccaaatacaaccaagagtgaa

SEQ ID NO: 139021 - DNA, 78 bp, Homo sapiens
tgtagacatcagcctgagagaaggctattcctacgtctgagcttctcttccccaaatacaaccaagagtgaacgctta

SEQ ID NO: 139022 - DNA, 74 bp, Homo sapiens
tgagagaaggctattcctacgtctgagcttctcttccccaaatacaaccaagagtgaacgcttaccctccgaga

SEQ ID NO: 139023 - DNA, 71 bp, Homo sapiens
ctattcctacgtctgagcttctcttccccaaatacaaccaagagtgaacgcttaccctccgagaccttgga

SEQ ID NO: 139024 - DNA, 72 bp, Homo sapiens
ctacgtctgagcttctcttccccaaatacaaccaagagtgaacgcttaccctccgagaccttggaagatgta

SEQ ID NO: 139025 - DNA, 70 bp, Homo sapiens
ctcttccccaaatacaaccaagagtgaacgcttaccctccgagaccttggaagatgtacctagaagaatg

SEQ ID NO: 139026 - DNA, 71 bp, Homo sapiens
aaatacaaccaagagtgaacgcttaccctccgagaccttggaagatgtacctagaagaatggagaattcat

SEQ ID NO: 139027 - DNA, 77 bp, Homo sapiens
aagagtgaacgcttaccctccgagaccttggaagatgtacctagaagaatggagaattcattgcatcatcattatta

SEQ ID NO: 139028 - DNA, 75 bp, Homo sapiens
tttacacagctgcaatatataaatgtgttaactcaaaatacattcttacctcccatccataactggggtctttca

SEQ ID NO: 139029 - DNA, 71 bp, Homo sapiens
caatatataaatgtgttaactcaaaatacattcttacctcccatccataactggggtctttcaggtttgac

SEQ ID NO: 139030 - DNA, 71 bp, Homo sapiens
ataaatgtgttaactcaaaatacattcttacctcccatccataactggggtctttcaggtttgacctctgc

SEQ ID NO: 139031 - DNA, 72 bp, Homo sapiens
aactcaaaatacattcttacctcccatccataactggggtctttcaggtttgacctctgctctcccacataa

SEQ ID NO: 139032 - DNA, 70 bp, Homo sapiens
tcttacctcccatccataactggggtctttcaggtttgacctctgctctcccacataaggcccaaacttt

SEQ ID NO: 139033 - DNA, 71 bp, Homo sapiens
catccataactggggtctttcaggtttgacctctgctctcccacataaggcccaaacttttcacctacttc

SEQ ID NO: 139034 - DNA, 70 bp, Homo sapiens
taactggggtctttcaggtttgacctctgctctcccacataaggcccaaacttttcacctacttcgatct

SEQ ID NO: 139035 - DNA, 70 bp, Homo sapiens
tctttcaggtttgacctctgctctcccacataaggcccaaacttttcacctacttcgatcttccttttgg

SEQ ID NO: 139036 - DNA, 71 bp, Homo sapiens
ctctgctctcccacataaggcccaaacttttcacctacttcgatcttccttttggtccatattcctagtcc

SEQ ID NO: 139037 - DNA, 70 bp, Homo sapiens
ctctcccacataaggcccaaacttttcacctacttcgatcttccttttggtccatattcctagtcctgcc

SEQ ID NO: 139038 - DNA, 70 bp, Homo sapiens
cccaaacttttcacctacttcgatcttccttttggtccatattcctagtcctgccccaggcatatttgac

SEQ ID NO: 139039 - DNA, 72 bp, Homo sapiens
ttttcacctacttcgatcttccttttggtccatattcctagtcctgccccaggcatatttgactctcgaagt

SEQ ID NO: 139040 - DNA, 76 bp, Homo sapiens
tacttcgatcttccttttggtccatattcctagtcctgccccaggcatatttgactctcgaagttcaaactcagca

SEQ ID NO: 139041 - DNA, 74 bp, Homo sapiens
ttccttttggtccatattcctagtcctgccccaggcatatttgactctcgaagttcaaactcagcaggaatggg

SEQ ID NO: 139042 - DNA, 79 bp, Homo sapiens
atattcctagtcctgccccaggcatatttgactctcgaagttcaaactcagcaggaatggggatatcatcagggatgta

SEQ ID NO: 139043 - DNA, 79 bp, Homo sapiens
tagtcctgccccaggcatatttgactctcgaagttcaaactcagcaggaatggggatatcatcagggatgtagatgggg

SEQ ID NO: 139044 - DNA, 78 bp, Homo sapiens
catatttgactctcgaagttcaaactcagcaggaatggggatatcatcagggatgtagatgggggctttgtaaggaga

SEQ ID NO: 139045 - DNA, 76 bp, Homo sapiens
ttgactctcgaagttcaaactcagcaggaatggggatatcatcagggatgtagatgggggctttgtaaggagaacc

SEQ ID NO: 139046 - DNA, 72 bp, Homo sapiens
aagttcaaactcagcaggaatggggatatcatcagggatgtagatgggggctttgtaaggagaaccctcctt

SEQ ID NO: 139047 - DNA, 74 bp, Homo sapiens
aggaatggggatatcatcagggatgtagatgggggctttgtaaggagaaccctcctttggagtgaatgcttcac

SEQ ID NO: 139048 - DNA, 78 bp, Homo sapiens
atatcatcagggatgtagatgggggctttgtaaggagaaccctcctttggagtgaatgcttcactggatgtggcagga

SEQ ID NO: 139049 - DNA, 78 bp, Homo sapiens
atcagggatgtagatgggggctttgtaaggagaaccctcctttggagtgaatgcttcactggatgtggcaggagagca

SEQ ID NO: 139050 - DNA, 78 bp, Homo sapiens
atgggggctttgtaaggagaaccctcctttggagtgaatgcttcactggatgtggcaggagagcatggctcttgaata

SEQ ID NO: 139051 - DNA, 79 bp, Homo sapiens
ctttgtaaggagaaccctcctttggagtgaatgcttcactggatgtggcaggagagcatggctcttgaatattgaggga

SEQ ID NO: 139052 - DNA, 81 bp, Homo sapiens
aaccctcctttggagtgaatgcttcactggatgtggcaggagagcatggctcttgaatattgagggagggagtgctggcta

SEQ ID NO: 139053 - DNA, 83 bp, Homo sapiens
tggcaggagagcatggctcttgaatattgagggagggagtgctggctactccatctgcatctggcatttcttccaaaggtatt

SEQ ID NO: 139054 - DNA, 81 bp, Homo sapiens
agagcatggctcttgaatattgagggagggagtgctggctactccatctgcatctggcatttcttccaaaggtatttcagg

SEQ ID NO: 139055 - DNA, 80 bp, Homo sapiens
tgaatattgagggagggagtgctggctactccatctgcatctggcatttcttccaaaggtatttcagggtagttgccata

SEQ ID NO: 139056 - DNA, 79 bp, Homo sapiens
attgagggagggagtgctggctactccatctgcatctggcatttcttccaaaggtatttcagggtagttgccatataca

SEQ ID NO: 139057 - DNA, 84 bp, Homo sapiens
tgctggctactccatctgcatctggcatttcttccaaaggtatttcagggtagttgccatatacacactcattatctgtgaata

SEQ ID NO: 139058 - DNA, 81 bp, Homo sapiens
tactccatctgcatctggcatttcttccaaaggtatttcagggtagttgccatatacacactcattatctgtgaataaata

SEQ ID NO: 139059 - DNA, 76 bp, Homo sapiens
tcttccaaaggtatttcagggtagttgccatatacacactcattatctgtgaataaataagaacttcatgaattcc

SEQ ID NO: 139060 - DNA, 71 bp, Homo sapiens
aagatggcagaggagggggaaaagccaatagaaaagggatattgcacctacttgtggccagtttccttgcc

SEQ ID NO: 139061 - DNA, 72 bp, Homo sapiens
ggggaaaagccaatagaaaagggatattgcacctacttgtggccagtttccttgccctgcctttggatctca

SEQ ID NO: 139062 - DNA, 76 bp, Homo sapiens
aaagccaatagaaaagggatattgcacctacttgtggccagtttccttgccctgcctttggatctcatgctgtgcc

SEQ ID NO: 139063 - DNA, 78 bp, Homo sapiens
aaaagggatattgcacctacttgtggccagtttccttgccctgcctttggatctcatgctgtgcccagtcctgcagcc

SEQ ID NO: 139064 - DNA, 79 bp, Homo sapiens
acctacttgtggccagtttccttgccctgcctttggatctcatgctgtgcccagtcctgcagccgctggtgtgtggttg

SEQ ID NO: 139065 - DNA, 78 bp, Homo sapiens
tggccagtttccttgccctgcctttggatctcatgctgtgcccagtcctgcagccgctggtgtgtggttggggctttt

SEQ ID NO: 139066 - DNA, 75 bp, Homo sapiens
gtttccttgccctgcctttggatctcatgctgtgcccagtcctgcagccgctggtgtgtggttggggcttttttt

SEQ ID NO: 139067 - DNA, 75 bp, Homo sapiens
cctttggatctcatgctgtgcccagtcctgcagccgctggtgtgtggttggggcttttttttcttggatcctttc

SEQ ID NO: 139068 - DNA, 74 bp, Homo sapiens
atctcatgctgtgcccagtcctgcagccgctggtgtgtggttggggcttttttttcttggatcctttccttctt

SEQ ID NO: 139069 - DNA, 73 bp, Homo sapiens
tgtgcccagtcctgcagccgctggtgtgtggttggggcttttttttcttggatcctttccttcttttgctctc

SEQ ID NO: 139070 - DNA, 69 bp, Homo sapiens
agccgctggtgtgtggttggggcttttttttcttggatcctttccttcttttgctctccctctcgctcc

SEQ ID NO: 139071 - DNA, 68 bp, Homo sapiens
ctggtgtgtggttggggcttttttttcttggatcctttccttcttttgctctccctctcgctccctcc

SEQ ID NO: 139072 - DNA, 83 bp, Homo sapiens
ctccctctctccctttctctcaatccacactcgctatctctccagcattgtcagtttggacaccttcgcacatgcgcgctaga

SEQ ID NO: 139073 - DNA, 82 bp, Homo sapiens
ctctccctttctctcaatccacactcgctatctctccagcattgtcagtttggacaccttcgcacatgcgcgctagacgccc

SEQ ID NO: 139074 - DNA, 86 bp, Homo sapiens
tctctcaatccacactcgctatctctccagcattgtcagtttggacaccttcgcacatgcgcgctagacgcccctccaacatctca

SEQ ID NO: 139075 - DNA, 83 bp, Homo sapiens
tcgctatctctccagcattgtcagtttggacaccttcgcacatgcgcgctagacgcccctccaacatctcagcgccgccaaaa

SEQ ID NO: 139076 - DNA, 80 bp, Homo sapiens
atctctccagcattgtcagtttggacaccttcgcacatgcgcgctagacgcccctccaacatctcagcgccgccaaaaaa

SEQ ID NO: 139077 - DNA, 75 bp, Homo sapiens
attgtcagtttggacaccttcgcacatgcgcgctagacgcccctccaacatctcagcgccgccaaaaaaagtttg

SEQ ID NO: 139078 - DNA, 76 bp, Homo sapiens
caccttcgcacatgcgcgctagacgcccctccaacatctcagcgccgccaaaaaaagtttggagcgatttatcact

SEQ ID NO: 139079 - DNA, 75 bp, Homo sapiens
acatgcgcgctagacgcccctccaacatctcagcgccgccaaaaaaagtttggagcgatttatcactttgatttg

SEQ ID NO: 139080 - DNA, 74 bp, Homo sapiens
tagacgcccctccaacatctcagcgccgccaaaaaaagtttggagcgatttatcactttgatttggagatcttg

SEQ ID NO: 139081 - DNA, 78 bp, Homo sapiens
ctccaacatctcagcgccgccaaaaaaagtttggagcgatttatcactttgatttggagatcttgtcagatggcaatc

SEQ ID NO: 139082 - DNA, 77 bp, Homo sapiens
atctcagcgccgccaaaaaaagtttggagcgatttatcactttgatttggagatcttgtcagatggcaatcgccgag

SEQ ID NO: 139083 - DNA, 74 bp, Homo sapiens
aaaaaagtttggagcgatttatcactttgatttggagatcttgtcagatggcaatcgccgaggaggcggagaaa

SEQ ID NO: 139084 - DNA, 76 bp, Homo sapiens
agtttggagcgatttatcactttgatttggagatcttgtcagatggcaatcgccgaggaggcggagaaagggagcc

SEQ ID NO: 139085 - DNA, 74 bp, Homo sapiens
atttatcactttgatttggagatcttgtcagatggcaatcgccgaggaggcggagaaagggagccgcggggagg

SEQ ID NO: 139086 - DNA, 72 bp, Homo sapiens
agtaagggacagagtgagtggaatagaaccaatccagtattcttgtcacttttaagtctttacattatatat

SEQ ID NO: 139087 - DNA, 74 bp, Homo sapiens
gagtgagtggaatagaaccaatccagtattcttgtcacttttaagtctttacattatatattaaagattacaca

SEQ ID NO: 139088 - DNA, 73 bp, Homo sapiens
gaatagaaccaatccagtattcttgtcacttttaagtctttacattatatattaaagattacacataataatc

SEQ ID NO: 139089 - DNA, 71 bp, Homo sapiens
aatccagtattcttgtcacttttaagtctttacattatatattaaagattacacataataatcctttacac

SEQ ID NO: 139090 - DNA, 73 bp, Homo sapiens
tgtcacttttaagtctttacattatatattaaagattacacataataatcctttacactatatacaataatcc

SEQ ID NO: 139091 - DNA, 73 bp, Homo sapiens
gtctttacattatatattaaagattacacataataatcctttacactatatacaataatcctttacattactg

SEQ ID NO: 139092 - DNA, 76 bp, Homo sapiens
tatatattaaagattacacataataatcctttacactatatacaataatcctttacattactgtagtagcattctg

SEQ ID NO: 139093 - DNA, 73 bp, Homo sapiens
aaagattacacataataatcctttacactatatacaataatcctttacattactgtagtagcattctggcttt

SEQ ID NO: 139094 - DNA, 77 bp, Homo sapiens
taataatcctttacactatatacaataatcctttacattactgtagtagcattctggctttttgatgacatttggca

SEQ ID NO: 139095 - DNA, 79 bp, Homo sapiens
ctttacactatatacaataatcctttacattactgtagtagcattctggctttttgatgacatttggcataagctagca

SEQ ID NO: 139096 - DNA, 78 bp, Homo sapiens
atacaataatcctttacattactgtagtagcattctggctttttgatgacatttggcataagctagcattaagtccaa

SEQ ID NO: 139097 - DNA, 79 bp, Homo sapiens
taatcctttacattactgtagtagcattctggctttttgatgacatttggcataagctagcattaagtccaatcctaca

SEQ ID NO: 139098 - DNA, 80 bp, Homo sapiens
attactgtagtagcattctggctttttgatgacatttggcataagctagcattaagtccaatcctacaagagccaatcaa

SEQ ID NO: 139099 - DNA, 80 bp, Homo sapiens
attctggctttttgatgacatttggcataagctagcattaagtccaatcctacaagagccaatcaaaatccactgagatg

SEQ ID NO: 139100 - DNA, 84 bp, Homo sapiens
tttgatgacatttggcataagctagcattaagtccaatcctacaagagccaatcaaaatccactgagatggcatgctgaaggaa

SEQ ID NO: 139101 - DNA, 82 bp, Homo sapiens
acatttggcataagctagcattaagtccaatcctacaagagccaatcaaaatccactgagatggcatgctgaaggaatattg

SEQ ID NO: 139102 - DNA, 81 bp, Homo sapiens
ataagctagcattaagtccaatcctacaagagccaatcaaaatccactgagatggcatgctgaaggaatattggaggcgtg

SEQ ID NO: 139103 - DNA, 82 bp, Homo sapiens
taagtccaatcctacaagagccaatcaaaatccactgagatggcatgctgaaggaatattggaggcgtgtccactgctaata

SEQ ID NO: 139104 - DNA, 81 bp, Homo sapiens
aatcctacaagagccaatcaaaatccactgagatggcatgctgaaggaatattggaggcgtgtccactgctaataaatcca

SEQ ID NO: 139105 - DNA, 82 bp, Homo sapiens
aatcaaaatccactgagatggcatgctgaaggaatattggaggcgtgtccactgctaataaatccagcctaatccatcctca

SEQ ID NO: 139106 - DNA, 80 bp, Homo sapiens
aatccactgagatggcatgctgaaggaatattggaggcgtgtccactgctaataaatccagcctaatccatcctcaaaat

SEQ ID NO: 139107 - DNA, 79 bp, Homo sapiens
atggcatgctgaaggaatattggaggcgtgtccactgctaataaatccagcctaatccatcctcaaaatttccatataa

SEQ ID NO: 139108 - DNA, 74 bp, Homo sapiens
aaggaatattggaggcgtgtccactgctaataaatccagcctaatccatcctcaaaatttccatataatttaca

SEQ ID NO: 139109 - DNA, 73 bp, Homo sapiens
attggaggcgtgtccactgctaataaatccagcctaatccatcctcaaaatttccatataatttacagaaatt

SEQ ID NO: 139110 - DNA, 75 bp, Homo sapiens
gtccactgctaataaatccagcctaatccatcctcaaaatttccatataatttacagaaattttgataatgcaaa

SEQ ID NO: 139111 - DNA, 72 bp, Homo sapiens
taaatccagcctaatccatcctcaaaatttccatataatttacagaaattttgataatgcaaaccaaatctt

SEQ ID NO: 139112 - DNA, 70 bp, Homo sapiens
agcctaatccatcctcaaaatttccatataatttacagaaattttgataatgcaaaccaaatctttttat

SEQ ID NO: 139113 - DNA, 70 bp, Homo sapiens
ctcaaaatttccatataatttacagaaattttgataatgcaaaccaaatctttttatttcttctcggtga

SEQ ID NO: 139114 - DNA, 71 bp, Homo sapiens
ttttatttcttctcggtgaaacttctaattctcaatttctcctcctgggccttgcagaattggaatcctag

SEQ ID NO: 139115 - DNA, 74 bp, Homo sapiens
ttctcggtgaaacttctaattctcaatttctcctcctgggccttgcagaattggaatcctagtcaatggtgtaa

SEQ ID NO: 139116 - DNA, 73 bp, Homo sapiens
aacttctaattctcaatttctcctcctgggccttgcagaattggaatcctagtcaatggtgtaagagggctaa

SEQ ID NO: 139117 - DNA, 74 bp, Homo sapiens
tcaatttctcctcctgggccttgcagaattggaatcctagtcaatggtgtaagagggctaagagctattagttt

SEQ ID NO: 139118 - DNA, 73 bp, Homo sapiens
ctcctgggccttgcagaattggaatcctagtcaatggtgtaagagggctaagagctattagttttatcttaag

SEQ ID NO: 139119 - DNA, 75 bp, Homo sapiens
ttgcagaattggaatcctagtcaatggtgtaagagggctaagagctattagttttatcttaaggcatatattcct

SEQ ID NO: 139120 - DNA, 74 bp, Homo sapiens
gaattggaatcctagtcaatggtgtaagagggctaagagctattagttttatcttaaggcatatattccttatg

SEQ ID NO: 139121 - DNA, 75 bp, Homo sapiens
tcaatggtgtaagagggctaagagctattagttttatcttaaggcatatattccttatgtaggggcaacaatgta

SEQ ID NO: 139122 - DNA, 73 bp, Homo sapiens
gtgtaagagggctaagagctattagttttatcttaaggcatatattccttatgtaggggcaacaatgtaaaca

SEQ ID NO: 139123 - DNA, 75 bp, Homo sapiens
ctaagagctattagttttatcttaaggcatatattccttatgtaggggcaacaatgtaaacattgcagaccttga

SEQ ID NO: 139124 - DNA, 76 bp, Homo sapiens
ttagttttatcttaaggcatatattccttatgtaggggcaacaatgtaaacattgcagaccttgagcattctctaa

SEQ ID NO: 139125 - DNA, 78 bp, Homo sapiens
atcttaaggcatatattccttatgtaggggcaacaatgtaaacattgcagaccttgagcattctctaacatgtagtta

SEQ ID NO: 139126 - DNA, 78 bp, Homo sapiens
tatattccttatgtaggggcaacaatgtaaacattgcagaccttgagcattctctaacatgtagttagatttccataa

SEQ ID NO: 139127 - DNA, 80 bp, Homo sapiens
tatgtaggggcaacaatgtaaacattgcagaccttgagcattctctaacatgtagttagatttccataaggaaatgtgca

SEQ ID NO: 139128 - DNA, 79 bp, Homo sapiens
aacaatgtaaacattgcagaccttgagcattctctaacatgtagttagatttccataaggaaatgtgcaagctagatcc

SEQ ID NO: 139129 - DNA, 82 bp, Homo sapiens
ttgagcattctctaacatgtagttagatttccataaggaaatgtgcaagctagatccctctcaagcgcacttcacaatagga

SEQ ID NO: 139130 - DNA, 80 bp, Homo sapiens
tgtagttagatttccataaggaaatgtgcaagctagatccctctcaagcgcacttcacaataggattcctgctatgaaaa

SEQ ID NO: 139131 - DNA, 84 bp, Homo sapiens
tttccataaggaaatgtgcaagctagatccctctcaagcgcacttcacaataggattcctgctatgaaaatctgctgttgctga

SEQ ID NO: 139132 - DNA, 86 bp, Homo sapiens
aaatgtgcaagctagatccctctcaagcgcacttcacaataggattcctgctatgaaaatctgctgttgctgatctgacaggcggc

SEQ ID NO: 139133 - DNA, 86 bp, Homo sapiens
agctagatccctctcaagcgcacttcacaataggattcctgctatgaaaatctgctgttgctgatctgacaggcggcggagctcag

SEQ ID NO: 139134 - DNA, 78 bp, Homo sapiens
ctgatctgacaggcggcggagctcaggcaatccatggccaggagatcggaaacccctgctcccaggtctacaaatctt

SEQ ID NO: 139135 - DNA, 78 bp, Homo sapiens
tgacaggcggcggagctcaggcaatccatggccaggagatcggaaacccctgctcccaggtctacaaatcttttgaca

SEQ ID NO: 139136 - DNA, 77 bp, Homo sapiens
gcggagctcaggcaatccatggccaggagatcggaaacccctgctcccaggtctacaaatcttttgacacagcctta

SEQ ID NO: 139137 - DNA, 76 bp, Homo sapiens
gctcaggcaatccatggccaggagatcggaaacccctgctcccaggtctacaaatcttttgacacagccttatttc

SEQ ID NO: 139138 - DNA, 72 bp, Homo sapiens
aatccatggccaggagatcggaaacccctgctcccaggtctacaaatcttttgacacagccttatttccact

SEQ ID NO: 139139 - DNA, 73 bp, Homo sapiens
atggccaggagatcggaaacccctgctcccaggtctacaaatcttttgacacagccttatttccacttgctgg

SEQ ID NO: 139140 - DNA, 71 bp, Homo sapiens
aggagatcggaaacccctgctcccaggtctacaaatcttttgacacagccttatttccacttgctgggacc

SEQ ID NO: 139141 - DNA, 70 bp, Homo sapiens
atcggaaacccctgctcccaggtctacaaatcttttgacacagccttatttccacttgctgggaccctgt

SEQ ID NO: 139142 - DNA, 70 bp, Homo sapiens
aaacccctgctcccaggtctacaaatcttttgacacagccttatttccacttgctgggaccctgttgatt

SEQ ID NO: 139143 - DNA, 72 bp, Homo sapiens
tcccaggtctacaaatcttttgacacagccttatttccacttgctgggaccctgttgatttcctgagaagtt

SEQ ID NO: 139144 - DNA, 73 bp, Homo sapiens
gtctacaaatcttttgacacagccttatttccacttgctgggaccctgttgatttcctgagaagtttcacaaa

SEQ ID NO: 139145 - DNA, 72 bp, Homo sapiens
aatcttttgacacagccttatttccacttgctgggaccctgttgatttcctgagaagtttcacaaaagccta

SEQ ID NO: 139146 - DNA, 70 bp, Homo sapiens
agccttatttccacttgctgggaccctgttgatttcctgagaagtttcacaaaagcctagtataaaacta

SEQ ID NO: 139147 - DNA, 70 bp, Homo sapiens
tatttccacttgctgggaccctgttgatttcctgagaagtttcacaaaagcctagtataaaactatttaa

SEQ ID NO: 139148 - DNA, 71 bp, Homo sapiens
tgttgatttcctgagaagtttcacaaaagcctagtataaaactatttaacttagcaatcttccaaatgaac

SEQ ID NO: 139149 - DNA, 69 bp, Homo sapiens
cctgagaagtttcacaaaagcctagtataaaactatttaacttagcaatcttccaaatgaactttacat

SEQ ID NO: 139150 - DNA, 67 bp, Homo sapiens
cacaaaagcctagtataaaactatttaacttagcaatcttccaaatgaactttacatttggttttag

SEQ ID NO: 139151 - DNA, 69 bp, Homo sapiens
gtataaaactatttaacttagcaatcttccaaatgaactttacatttggttttagtagtctcagcccta

SEQ ID NO: 139152 - DNA, 72 bp, Homo sapiens
ctatttaacttagcaatcttccaaatgaactttacatttggttttagtagtctcagccctacagctataaga

SEQ ID NO: 139153 - DNA, 73 bp, Homo sapiens
ccaaatgaactttacatttggttttagtagtctcagccctacagctataagaaatggattgtttgtattggca

SEQ ID NO: 139154 - DNA, 74 bp, Homo sapiens
ttacatttggttttagtagtctcagccctacagctataagaaatggattgtttgtattggcatataaaagcctc

SEQ ID NO: 139155 - DNA, 73 bp, Homo sapiens
ttttagtagtctcagccctacagctataagaaatggattgtttgtattggcatataaaagcctccaagtccct

SEQ ID NO: 139156 - DNA, 75 bp, Homo sapiens
agtctcagccctacagctataagaaatggattgtttgtattggcatataaaagcctccaagtccctttgccttga

SEQ ID NO: 139157 - DNA, 73 bp, Homo sapiens
gctataagaaatggattgtttgtattggcatataaaagcctccaagtccctttgccttgaggcagtaacttta

SEQ ID NO: 139158 - DNA, 72 bp, Homo sapiens
atggattgtttgtattggcatataaaagcctccaagtccctttgccttgaggcagtaactttaagactcaaa

SEQ ID NO: 139159 - DNA, 71 bp, Homo sapiens
ttgtttgtattggcatataaaagcctccaagtccctttgccttgaggcagtaactttaagactcaaattta

SEQ ID NO: 139160 - DNA, 69 bp, Homo sapiens
atataaaagcctccaagtccctttgccttgaggcagtaactttaagactcaaatttatcctttcccatg

SEQ ID NO: 139161 - DNA, 71 bp, Homo sapiens
tccaagtccctttgccttgaggcagtaactttaagactcaaatttatcctttcccatggcttttgtctgat

SEQ ID NO: 139162 - DNA, 75 bp, Homo sapiens
ctttgccttgaggcagtaactttaagactcaaatttatcctttcccatggcttttgtctgattcagctgcccatg

SEQ ID NO: 139163 - DNA, 78 bp, Homo sapiens
ttgaggcagtaactttaagactcaaatttatcctttcccatggcttttgtctgattcagctgcccatggcagcagtta

SEQ ID NO: 139164 - DNA, 75 bp, Homo sapiens
taactttaagactcaaatttatcctttcccatggcttttgtctgattcagctgcccatggcagcagttacctagg

SEQ ID NO: 139165 - DNA, 74 bp, Homo sapiens
actcaaatttatcctttcccatggcttttgtctgattcagctgcccatggcagcagttacctaggggttaccta

SEQ ID NO: 139166 - DNA, 72 bp, Homo sapiens
atcctttcccatggcttttgtctgattcagctgcccatggcagcagttacctaggggttacctacgggtaac

SEQ ID NO: 139167 - DNA, 76 bp, Homo sapiens
ttttgtctgattcagctgcccatggcagcagttacctaggggttacctacgggtaactgctgcctccctttcatga

SEQ ID NO: 139168 - DNA, 74 bp, Homo sapiens
catggcagcagttacctaggggttacctacgggtaactgctgcctccctttcatgaaactggcgactagcatta

SEQ ID NO: 139169 - DNA, 72 bp, Homo sapiens
agttacctaggggttacctacgggtaactgctgcctccctttcatgaaactggcgactagcattacagcaca

SEQ ID NO: 139170 - DNA, 75 bp, Homo sapiens
ggttacctacgggtaactgctgcctccctttcatgaaactggcgactagcattacagcacatcaaaagactacca

SEQ ID NO: 139171 - DNA, 80 bp, Homo sapiens
tgcctccctttcatgaaactggcgactagcattacagcacatcaaaagactaccactttgtctcactacttctcagtcta

SEQ ID NO: 139172 - DNA, 80 bp, Homo sapiens
tttcatgaaactggcgactagcattacagcacatcaaaagactaccactttgtctcactacttctcagtctatctcaact

SEQ ID NO: 139173 - DNA, 78 bp, Homo sapiens
tggcgactagcattacagcacatcaaaagactaccactttgtctcactacttctcagtctatctcaacttggtaaaat

SEQ ID NO: 139174 - DNA, 74 bp, Homo sapiens
attacagcacatcaaaagactaccactttgtctcactacttctcagtctatctcaacttggtaaaattccaaat

SEQ ID NO: 139175 - DNA, 71 bp, Homo sapiens
acatcaaaagactaccactttgtctcactacttctcagtctatctcaacttggtaaaattccaaattttcc

SEQ ID NO: 139176 - DNA, 70 bp, Homo sapiens
actaccactttgtctcactacttctcagtctatctcaacttggtaaaattccaaattttcctcagtcttt

SEQ ID NO: 139177 - DNA, 71 bp, Homo sapiens
atctcaacttggtaaaattccaaattttcctcagtcttttgcctgttaacactctttgtagccatgtcaaa

SEQ ID NO: 139178 - DNA, 70 bp, Homo sapiens
ggtaaaattccaaattttcctcagtcttttgcctgttaacactctttgtagccatgtcaaatggctaaaa

SEQ ID NO: 139179 - DNA, 74 bp, Homo sapiens
tcagtcttttgcctgttaacactctttgtagccatgtcaaatggctaaaattctttcaaatctaaaagccagaa

SEQ ID NO: 139180 - DNA, 74 bp, Homo sapiens
tgcctgttaacactctttgtagccatgtcaaatggctaaaattctttcaaatctaaaagccagaaaacaactca

SEQ ID NO: 139181 - DNA, 65 bp, Homo sapiens
atggctaaaattctttcaaatctaaaagccagaaaacaactcaaactagcctaaaaaaggaaact

SEQ ID NO: 139182 - DNA, 69 bp, Homo sapiens
ttctttcaaatctaaaagccagaaaacaactcaaactagcctaaaaaaggaaactttcaatcagcagga

SEQ ID NO: 139183 - DNA, 69 bp, Homo sapiens
atctaaaagccagaaaacaactcaaactagcctaaaaaaggaaactttcaatcagcaggataaaggatg

SEQ ID NO: 139184 - DNA, 71 bp, Homo sapiens
aaactttcaatcagcaggataaaggatggctacacaactaaagggctaaaactcaggctttaggatagaaa

SEQ ID NO: 139185 - DNA, 68 bp, Homo sapiens
ataaaggatggctacacaactaaagggctaaaactcaggctttaggatagaaaccgagggttatgttc

SEQ ID NO: 139186 - DNA, 70 bp, Homo sapiens
tacacaactaaagggctaaaactcaggctttaggatagaaaccgagggttatgttcgagattatcaggag

SEQ ID NO: 139187 - DNA, 70 bp, Homo sapiens
actaaagggctaaaactcaggctttaggatagaaaccgagggttatgttcgagattatcaggagtgtgaa

SEQ ID NO: 139188 - DNA, 75 bp, Homo sapiens
actcaggctttaggatagaaaccgagggttatgttcgagattatcaggagtgtgaactcgcaagccatcagttaa

SEQ ID NO: 139189 - DNA, 75 bp, Homo sapiens
ctttaggatagaaaccgagggttatgttcgagattatcaggagtgtgaactcgcaagccatcagttaactgatgg

SEQ ID NO: 139190 - DNA, 76 bp, Homo sapiens
ttatgttcgagattatcaggagtgtgaactcgcaagccatcagttaactgatggggagaggtttggttggggagaa

SEQ ID NO: 139191 - DNA, 74 bp, Homo sapiens
agattatcaggagtgtgaactcgcaagccatcagttaactgatggggagaggtttggttggggagaaaatggtg

SEQ ID NO: 139192 - DNA, 74 bp, Homo sapiens
tgtgaactcgcaagccatcagttaactgatggggagaggtttggttggggagaaaatggtggagaatgtagtta

SEQ ID NO: 139193 - DNA, 71 bp, Homo sapiens
aagccatcagttaactgatggggagaggtttggttggggagaaaatggtggagaatgtagttacttcagga

SEQ ID NO: 139194 - DNA, 69 bp, Homo sapiens
atcagttaactgatggggagaggtttggttggggagaaaatggtggagaatgtagttacttcaggaaag

SEQ ID NO: 139195 - DNA, 71 bp, Homo sapiens
gggagaggtttggttggggagaaaatggtggagaatgtagttacttcaggaaaggatgcctgtatatacta

SEQ ID NO: 139196 - DNA, 72 bp, Homo sapiens
tggttggggagaaaatggtggagaatgtagttacttcaggaaaggatgcctgtatatactaccacgataaaa

SEQ ID NO: 139197 - DNA, 70 bp, Homo sapiens
agaaaatggtggagaatgtagttacttcaggaaaggatgcctgtatatactaccacgataaaaccaggtt

SEQ ID NO: 139198 - DNA, 72 bp, Homo sapiens
gagaatgtagttacttcaggaaaggatgcctgtatatactaccacgataaaaccaggtttctcagcctttaa

SEQ ID NO: 139199 - DNA, 72 bp, Homo sapiens
tgtatatactaccacgataaaaccaggtttctcagcctttaatgtatccatccataacacaaccccctctgg

SEQ ID NO: 139200 - DNA, 70 bp, Homo sapiens
atactaccacgataaaaccaggtttctcagcctttaatgtatccatccataacacaaccccctctgggac

SEQ ID NO: 139201 - DNA, 69 bp, Homo sapiens
taaaaccaggtttctcagcctttaatgtatccatccataacacaaccccctctgggaccacaccctaaa

SEQ ID NO: 139202 - DNA, 69 bp, Homo sapiens
cctttaatgtatccatccataacacaaccccctctgggaccacaccctaaaactcaactttatatataa

SEQ ID NO: 139203 - DNA, 68 bp, Homo sapiens
atccataacacaaccccctctgggaccacaccctaaaactcaactttatatataaatactacaaattc

SEQ ID NO: 139204 - DNA, 68 bp, Homo sapiens
cacaaccccctctgggaccacaccctaaaactcaactttatatataaatactacaaattcttgtttca

SEQ ID NO: 139205 - DNA, 68 bp, Homo sapiens
cctctgggaccacaccctaaaactcaactttatatataaatactacaaattcttgtttcaaaactcat

SEQ ID NO: 139206 - DNA, 69 bp, Homo sapiens
cacaccctaaaactcaactttatatataaatactacaaattcttgtttcaaaactcattgagaacaatt

SEQ ID NO: 139207 - DNA, 72 bp, Homo sapiens
ataaatactacaaattcttgtttcaaaactcattgagaacaatttgaaataacccatcaggcatatactaag

SEQ ID NO: 139208 - DNA, 73 bp, Homo sapiens
caaattcttgtttcaaaactcattgagaacaatttgaaataacccatcaggcatatactaagttgtttccaca

SEQ ID NO: 139209 - DNA, 76 bp, Homo sapiens
gtttcaaaactcattgagaacaatttgaaataacccatcaggcatatactaagttgtttccacatgcttatcagaa

SEQ ID NO: 139210 - DNA, 76 bp, Homo sapiens
ctcattgagaacaatttgaaataacccatcaggcatatactaagttgtttccacatgcttatcagaaacaaaccta

SEQ ID NO: 139211 - DNA, 72 bp, Homo sapiens
aataacccatcaggcatatactaagttgtttccacatgcttatcagaaacaaacctaagggtagttctctaa

SEQ ID NO: 139212 - DNA, 73 bp, Homo sapiens
caggcatatactaagttgtttccacatgcttatcagaaacaaacctaagggtagttctctaagcatattaatt

SEQ ID NO: 139213 - DNA, 70 bp, Homo sapiens
agttgtttccacatgcttatcagaaacaaacctaagggtagttctctaagcatattaatttaccacaagt

SEQ ID NO: 139214 - DNA, 70 bp, Homo sapiens
tcagaaacaaacctaagggtagttctctaagcatattaatttaccacaagttggcaaacactgaaaacac

SEQ ID NO: 139215 - DNA, 70 bp, Homo sapiens
gtagttctctaagcatattaatttaccacaagttggcaaacactgaaaacaccctggacagtaagtttta

SEQ ID NO: 139216 - DNA, 69 bp, Homo sapiens
gcatattaatttaccacaagttggcaaacactgaaaacaccctggacagtaagttttacaaattaagac

SEQ ID NO: 139217 - DNA, 69 bp, Homo sapiens
tttaccacaagttggcaaacactgaaaacaccctggacagtaagttttacaaattaagacctgccaata

SEQ ID NO: 139218 - DNA, 74 bp, Homo sapiens
tggcaaacactgaaaacaccctggacagtaagttttacaaattaagacctgccaatactgcctatgctccatta

SEQ ID NO: 139219 - DNA, 72 bp, Homo sapiens
tgaaaacaccctggacagtaagttttacaaattaagacctgccaatactgcctatgctccattactggtatt

SEQ ID NO: 139220 - DNA, 72 bp, Homo sapiens
acaccctggacagtaagttttacaaattaagacctgccaatactgcctatgctccattactggtattttcca

SEQ ID NO: 139221 - DNA, 72 bp, Homo sapiens
agtaagttttacaaattaagacctgccaatactgcctatgctccattactggtattttccatcacccaggta

SEQ ID NO: 139222 - DNA, 76 bp, Homo sapiens
tacaaattaagacctgccaatactgcctatgctccattactggtattttccatcacccaggtacccagatttgaga

SEQ ID NO: 139223 - DNA, 82 bp, Homo sapiens
tgccaatactgcctatgctccattactggtattttccatcacccaggtacccagatttgagacatcatgatcaagagaactg

SEQ ID NO: 139224 - DNA, 79 bp, Homo sapiens
cctatgctccattactggtattttccatcacccaggtacccagatttgagacatcatgatcaagagaactgtggactaa

SEQ ID NO: 139225 - DNA, 78 bp, Homo sapiens
attactggtattttccatcacccaggtacccagatttgagacatcatgatcaagagaactgtggactaagatcaccta

SEQ ID NO: 139226 - DNA, 78 bp, Homo sapiens
tattttccatcacccaggtacccagatttgagacatcatgatcaagagaactgtggactaagatcacctaggttcaat

SEQ ID NO: 139227 - DNA, 83 bp, Homo sapiens
cagatttgagacatcatgatcaagagaactgtggactaagatcacctaggttcaattcagatcgtggcattgccacttaaaca

SEQ ID NO: 139228 - DNA, 81 bp, Homo sapiens
agacatcatgatcaagagaactgtggactaagatcacctaggttcaattcagatcgtggcattgccacttaaacagctatt

SEQ ID NO: 139229 - DNA, 78 bp, Homo sapiens
atcaagagaactgtggactaagatcacctaggttcaattcagatcgtggcattgccacttaaacagctatttgaacta

SEQ ID NO: 139230 - DNA, 75 bp, Homo sapiens
aactgtggactaagatcacctaggttcaattcagatcgtggcattgccacttaaacagctatttgaactaaggta

SEQ ID NO: 139231 - DNA, 76 bp, Homo sapiens
taggttcaattcagatcgtggcattgccacttaaacagctatttgaactaaggtaagttactctacatcatttcat

SEQ ID NO: 139232 - DNA, 77 bp, Homo sapiens
gatcgtggcattgccacttaaacagctatttgaactaaggtaagttactctacatcatttcattgctaaagattata

SEQ ID NO: 139233 - DNA, 76 bp, Homo sapiens
ggcattgccacttaaacagctatttgaactaaggtaagttactctacatcatttcattgctaaagattatatgtaa

SEQ ID NO: 139234 - DNA, 73 bp, Homo sapiens
aacagctatttgaactaaggtaagttactctacatcatttcattgctaaagattatatgtaaagttcttccca

SEQ ID NO: 139235 - DNA, 72 bp, Homo sapiens
gaactaaggtaagttactctacatcatttcattgctaaagattatatgtaaagttcttcccaaagtacctga

SEQ ID NO: 139236 - DNA, 72 bp, Homo sapiens
ggtaagttactctacatcatttcattgctaaagattatatgtaaagttcttcccaaagtacctgaaacatac

SEQ ID NO: 139237 - DNA, 73 bp, Homo sapiens
tcattgctaaagattatatgtaaagttcttcccaaagtacctgaaacatactaatacctagatgcgataaagg

SEQ ID NO: 139238 - DNA, 72 bp, Homo sapiens
attatatgtaaagttcttcccaaagtacctgaaacatactaatacctagatgcgataaaggttagcaaggca

SEQ ID NO: 139239 - DNA, 70 bp, Homo sapiens
aagttcttcccaaagtacctgaaacatactaatacctagatgcgataaaggttagcaaggcaacaaaata

SEQ ID NO: 139240 - DNA, 74 bp, Homo sapiens
tgaaacatactaatacctagatgcgataaaggttagcaaggcaacaaaataacccacctgtagcaacatcccta

SEQ ID NO: 139241 - DNA, 72 bp, Homo sapiens
atactaatacctagatgcgataaaggttagcaaggcaacaaaataacccacctgtagcaacatccctacaat

SEQ ID NO: 139242 - DNA, 71 bp, Homo sapiens
taaaggttagcaaggcaacaaaataacccacctgtagcaacatccctacaattggtcatgaaaattactta

SEQ ID NO: 139243 - DNA, 72 bp, Homo sapiens
caaggcaacaaaataacccacctgtagcaacatccctacaattggtcatgaaaattacttaaatgcaaaata

SEQ ID NO: 139244 - DNA, 72 bp, Homo sapiens
aataacccacctgtagcaacatccctacaattggtcatgaaaattacttaaatgcaaaataataagaacatg

SEQ ID NO: 139245 - DNA, 73 bp, Homo sapiens
cctgtagcaacatccctacaattggtcatgaaaattacttaaatgcaaaataataagaacatgtattaaagta

SEQ ID NO: 139246 - DNA, 71 bp, Homo sapiens
gtcatgaaaattacttaaatgcaaaataataagaacatgtattaaagtacccgcagtctagttatttactg

SEQ ID NO: 139247 - DNA, 71 bp, Homo sapiens
gcaaaataataagaacatgtattaaagtacccgcagtctagttatttactgtaactccatccccaaatgga

SEQ ID NO: 139248 - DNA, 73 bp, Homo sapiens
agaacatgtattaaagtacccgcagtctagttatttactgtaactccatccccaaatggagatcactctaata

SEQ ID NO: 139249 - DNA, 72 bp, Homo sapiens
atgtattaaagtacccgcagtctagttatttactgtaactccatccccaaatggagatcactctaataccta

SEQ ID NO: 139250 - DNA, 75 bp, Homo sapiens
cgcagtctagttatttactgtaactccatccccaaatggagatcactctaatacctagttatgcactctgaattt

SEQ ID NO: 139251 - DNA, 75 bp, Homo sapiens
tctagttatttactgtaactccatccccaaatggagatcactctaatacctagttatgcactctgaattttccag

SEQ ID NO: 139252 - DNA, 76 bp, Homo sapiens
tactgtaactccatccccaaatggagatcactctaatacctagttatgcactctgaattttccaggaatacagaaa

SEQ ID NO: 139253 - DNA, 73 bp, Homo sapiens
cccaaatggagatcactctaatacctagttatgcactctgaattttccaggaatacagaaattcatccccccc

SEQ ID NO: 139254 - DNA, 74 bp, Homo sapiens
atggagatcactctaatacctagttatgcactctgaattttccaggaatacagaaattcatccccccctcaacc

SEQ ID NO: 139255 - DNA, 71 bp, Homo sapiens
taatacctagttatgcactctgaattttccaggaatacagaaattcatccccccctcaacccagcccaaaa

SEQ ID NO: 139256 - DNA, 73 bp, Homo sapiens
tagttatgcactctgaattttccaggaatacagaaattcatccccccctcaacccagcccaaaatagcaaaga

SEQ ID NO: 139257 - DNA, 71 bp, Homo sapiens
aggaatacagaaattcatccccccctcaacccagcccaaaatagcaaagatacacctcagcccaaggaaca

SEQ ID NO: 139258 - DNA, 71 bp, Homo sapiens
aaattcatccccccctcaacccagcccaaaatagcaaagatacacctcagcccaaggaacacactgcccta

SEQ ID NO: 139259 - DNA, 72 bp, Homo sapiens
agcccaaaatagcaaagatacacctcagcccaaggaacacactgccctaacgattaaactacagaagaactc

SEQ ID NO: 139260 - DNA, 72 bp, Homo sapiens
atacacctcagcccaaggaacacactgccctaacgattaaactacagaagaactctaattataatagaacaa

SEQ ID NO: 139261 - DNA, 72 bp, Homo sapiens
acactgccctaacgattaaactacagaagaactctaattataatagaacaagaacacttctttgtgaacagc

SEQ ID NO: 139262 - DNA, 73 bp, Homo sapiens
cctaacgattaaactacagaagaactctaattataatagaacaagaacacttctttgtgaacagctgcaccaa

SEQ ID NO: 139263 - DNA, 72 bp, Homo sapiens
aaactacagaagaactctaattataatagaacaagaacacttctttgtgaacagctgcaccaacatttttct

SEQ ID NO: 139264 - DNA, 73 bp, Homo sapiens
gaactctaattataatagaacaagaacacttctttgtgaacagctgcaccaacatttttcttttcatttgcgt

SEQ ID NO: 139265 - DNA, 72 bp, Homo sapiens
atagaacaagaacacttctttgtgaacagctgcaccaacatttttcttttcatttgcgtttatttaaacaca

SEQ ID NO: 139266 - DNA, 73 bp, Homo sapiens
caagaacacttctttgtgaacagctgcaccaacatttttcttttcatttgcgtttatttaaacacagttctca

SEQ ID NO: 139267 - DNA, 74 bp, Homo sapiens
ttgtgaacagctgcaccaacatttttcttttcatttgcgtttatttaaacacagttctcaaaacatttgagtga

SEQ ID NO: 139268 - DNA, 72 bp, Homo sapiens
cagctgcaccaacatttttcttttcatttgcgtttatttaaacacagttctcaaaacatttgagtgaaattg

SEQ ID NO: 139269 - DNA, 67 bp, Homo sapiens
tttttcttttcatttgcgtttatttaaacacagttctcaaaacatttgagtgaaattgggcctcctt

SEQ ID NO: 139270 - DNA, 70 bp, Homo sapiens
tcatttgcgtttatttaaacacagttctcaaaacatttgagtgaaattgggcctcctttggtaagcaaag

SEQ ID NO: 139271 - DNA, 69 bp, Homo sapiens
tatttaaacacagttctcaaaacatttgagtgaaattgggcctcctttggtaagcaaaggacctgaaaa

SEQ ID NO: 139272 - DNA, 69 bp, Homo sapiens
aaacacagttctcaaaacatttgagtgaaattgggcctcctttggtaagcaaaggacctgaaaataata

SEQ ID NO: 139273 - DNA, 69 bp, Homo sapiens
ttgagtgaaattgggcctcctttggtaagcaaaggacctgaaaataatatttaaaaaatgaacaggcaa

SEQ ID NO: 139274 - DNA, 70 bp, Homo sapiens
gcctcctttggtaagcaaaggacctgaaaataatatttaaaaaatgaacaggcaaagtcttcagttcatc

SEQ ID NO: 139275 - DNA, 72 bp, Homo sapiens
aggcaaagtcttcagttcatccatgacaggtatagtgttcccttatcatgtactttgaagcacccggttttt

SEQ ID NO: 139276 - DNA, 70 bp, Homo sapiens
aggtatagtgttcccttatcatgtactttgaagcacccggttttttcatatagtctaaaagctagaagaa

SEQ ID NO: 139277 - DNA, 70 bp, Homo sapiens
cccttatcatgtactttgaagcacccggttttttcatatagtctaaaagctagaagaacaagagtgtatt

SEQ ID NO: 139278 - DNA, 71 bp, Homo sapiens
tgtactttgaagcacccggttttttcatatagtctaaaagctagaagaacaagagtgtatttgtggtggaa

SEQ ID NO: 139279 - DNA, 70 bp, Homo sapiens
acccggttttttcatatagtctaaaagctagaagaacaagagtgtatttgtggtggaatgtattgtcact

SEQ ID NO: 139280 - DNA, 78 bp, Homo sapiens
tcatatagtctaaaagctagaagaacaagagtgtatttgtggtggaatgtattgtcacttgctgataactagttgaaa

SEQ ID NO: 139281 - DNA, 76 bp, Homo sapiens
tctaaaagctagaagaacaagagtgtatttgtggtggaatgtattgtcacttgctgataactagttgaaataccat

SEQ ID NO: 139282 - DNA, 75 bp, Homo sapiens
tagaagaacaagagtgtatttgtggtggaatgtattgtcacttgctgataactagttgaaataccattatcccct

SEQ ID NO: 139283 - DNA, 73 bp, Homo sapiens
ttgtggtggaatgtattgtcacttgctgataactagttgaaataccattatccccttgtaacacctttaagaa

SEQ ID NO: 139284 - DNA, 71 bp, Homo sapiens
aatgtattgtcacttgctgataactagttgaaataccattatccccttgtaacacctttaagaaacagcct

SEQ ID NO: 139285 - DNA, 70 bp, Homo sapiens
cttgctgataactagttgaaataccattatccccttgtaacacctttaagaaacagccttttaaggcata

SEQ ID NO: 139286 - DNA, 68 bp, Homo sapiens
aaataccattatccccttgtaacacctttaagaaacagccttttaaggcatacactgtgtaactcttc

SEQ ID NO: 139287 - DNA, 72 bp, Homo sapiens
cttgtaacacctttaagaaacagccttttaaggcatacactgtgtaactcttcgtatttcctgctatacata

SEQ ID NO: 139288 - DNA, 72 bp, Homo sapiens
aacacctttaagaaacagccttttaaggcatacactgtgtaactcttcgtatttcctgctatacatattaca

SEQ ID NO: 139289 - DNA, 74 bp, Homo sapiens
aacagccttttaaggcatacactgtgtaactcttcgtatttcctgctatacatattacagattacataaaagcc

SEQ ID NO: 139290 - DNA, 76 bp, Homo sapiens
tttaaggcatacactgtgtaactcttcgtatttcctgctatacatattacagattacataaaagccgacaaatcca

SEQ ID NO: 139291 - DNA, 78 bp, Homo sapiens
actgtgtaactcttcgtatttcctgctatacatattacagattacataaaagccgacaaatccacattgatataagca

SEQ ID NO: 139292 - DNA, 78 bp, Homo sapiens
actcttcgtatttcctgctatacatattacagattacataaaagccgacaaatccacattgatataagcattaagcac

SEQ ID NO: 139293 - DNA, 79 bp, Homo sapiens
tttcctgctatacatattacagattacataaaagccgacaaatccacattgatataagcattaagcactggctgtattt

SEQ ID NO: 139294 - DNA, 77 bp, Homo sapiens
atacatattacagattacataaaagccgacaaatccacattgatataagcattaagcactggctgtattttaagatt

SEQ ID NO: 139295 - DNA, 75 bp, Homo sapiens
cagattacataaaagccgacaaatccacattgatataagcattaagcactggctgtattttaagatttttagttc

SEQ ID NO: 139296 - DNA, 77 bp, Homo sapiens
gccgacaaatccacattgatataagcattaagcactggctgtattttaagatttttagttctaatactagcagtaca

SEQ ID NO: 139297 - DNA, 79 bp, Homo sapiens
cacattgatataagcattaagcactggctgtattttaagatttttagttctaatactagcagtacagagttacagagca

SEQ ID NO: 139298 - DNA, 77 bp, Homo sapiens
gatataagcattaagcactggctgtattttaagatttttagttctaatactagcagtacagagttacagagcataat

SEQ ID NO: 139299 - DNA, 73 bp, Homo sapiens
agcactggctgtattttaagatttttagttctaatactagcagtacagagttacagagcataattttaaacac

SEQ ID NO: 139300 - DNA, 71 bp, Homo sapiens
ggctgtattttaagatttttagttctaatactagcagtacagagttacagagcataattttaaacacttag

SEQ ID NO: 139301 - DNA, 73 bp, Homo sapiens
gatttttagttctaatactagcagtacagagttacagagcataattttaaacacttagttgcaggtatataag

SEQ ID NO: 139302 - DNA, 75 bp, Homo sapiens
agttctaatactagcagtacagagttacagagcataattttaaacacttagttgcaggtatataagtatggtatg

SEQ ID NO: 139303 - DNA, 75 bp, Homo sapiens
agtacagagttacagagcataattttaaacacttagttgcaggtatataagtatggtatgtttcatggactggag

SEQ ID NO: 139304 - DNA, 70 bp, Homo sapiens
aattttaaacacttagttgcaggtatataagtatggtatgtttcatggactggaggaaaacgggcatttg

SEQ ID NO: 139305 - DNA, 72 bp, Homo sapiens
taaacacttagttgcaggtatataagtatggtatgtttcatggactggaggaaaacgggcatttgtctttaa

SEQ ID NO: 139306 - DNA, 71 bp, Homo sapiens
aggtatataagtatggtatgtttcatggactggaggaaaacgggcatttgtctttaaatttactactgaca

SEQ ID NO: 139307 - DNA, 72 bp, Homo sapiens
aagtatggtatgtttcatggactggaggaaaacgggcatttgtctttaaatttactactgacaatctgaata

SEQ ID NO: 139308 - DNA, 76 bp, Homo sapiens
tggaggaaaacgggcatttgtctttaaatttactactgacaatctgaatagttctgctaagcattgatatgttaga

SEQ ID NO: 139309 - DNA, 75 bp, Homo sapiens
gaaaacgggcatttgtctttaaatttactactgacaatctgaatagttctgctaagcattgatatgttagaaaga

SEQ ID NO: 139310 - DNA, 73 bp, Homo sapiens
atttgtctttaaatttactactgacaatctgaatagttctgctaagcattgatatgttagaaagaaaagtaaa

SEQ ID NO: 139311 - DNA, 75 bp, Homo sapiens
ctgacaatctgaatagttctgctaagcattgatatgttagaaagaaaagtaaaaatcaaactgtttattgttgct

SEQ ID NO: 139312 - DNA, 73 bp, Homo sapiens
gctaagcattgatatgttagaaagaaaagtaaaaatcaaactgtttattgttgctttttgccatttggtagca

SEQ ID NO: 139313 - DNA, 69 bp, Homo sapiens
tgttagaaagaaaagtaaaaatcaaactgtttattgttgctttttgccatttggtagcattttacacag

SEQ ID NO: 139314 - DNA, 71 bp, Homo sapiens
aaagtaaaaatcaaactgtttattgttgctttttgccatttggtagcattttacacaggcttcgatcttca

SEQ ID NO: 139315 - DNA, 72 bp, Homo sapiens
aaatcaaactgtttattgttgctttttgccatttggtagcattttacacaggcttcgatcttcagaataccc

SEQ ID NO: 139316 - DNA, 75 bp, Homo sapiens
tattgttgctttttgccatttggtagcattttacacaggcttcgatcttcagaataccctggattcagtagaaaa

SEQ ID NO: 139317 - DNA, 71 bp, Homo sapiens
tttttgccatttggtagcattttacacaggcttcgatcttcagaataccctggattcagtagaaaaacctt

SEQ ID NO: 139318 - DNA, 71 bp, Homo sapiens
tggtagcattttacacaggcttcgatcttcagaataccctggattcagtagaaaaaccttttaaatgaagt

SEQ ID NO: 139319 - DNA, 70 bp, Homo sapiens
caggcttcgatcttcagaataccctggattcagtagaaaaaccttttaaatgaagttttgtacaatagaa

SEQ ID NO: 139320 - DNA, 71 bp, Homo sapiens
cagaataccctggattcagtagaaaaaccttttaaatgaagttttgtacaatagaaacttctcagcagtca

SEQ ID NO: 139321 - DNA, 68 bp, Homo sapiens
accctggattcagtagaaaaaccttttaaatgaagttttgtacaatagaaacttctcagcagtcaaaa

SEQ ID NO: 139322 - DNA, 68 bp, Homo sapiens
ccttttaaatgaagttttgtacaatagaaacttctcagcagtcaaaatttagactgtaaaaaaataca

SEQ ID NO: 139323 - DNA, 72 bp, Homo sapiens
tgaagttttgtacaatagaaacttctcagcagtcaaaatttagactgtaaaaaaatacatgcaaaacatact

SEQ ID NO: 139324 - DNA, 71 bp, Homo sapiens
atagaaacttctcagcagtcaaaatttagactgtaaaaaaatacatgcaaaacatacttttctgaaaacac

SEQ ID NO: 139325 - DNA, 71 bp, Homo sapiens
ctcagcagtcaaaatttagactgtaaaaaaatacatgcaaaacatacttttctgaaaacacttaacttgga

SEQ ID NO: 139326 - DNA, 68 bp, Homo sapiens
aaatttagactgtaaaaaaatacatgcaaaacatacttttctgaaaacacttaacttggaacaaagca

SEQ ID NO: 139327 - DNA, 70 bp, Homo sapiens
tgtaaaaaaatacatgcaaaacatacttttctgaaaacacttaacttggaacaaagcaccaaactacaca

SEQ ID NO: 139328 - DNA, 74 bp, Homo sapiens
atacatgcaaaacatacttttctgaaaacacttaacttggaacaaagcaccaaactacacaaatgcagaatgaa

SEQ ID NO: 139329 - DNA, 72 bp, Homo sapiens
gcaaaacatacttttctgaaaacacttaacttggaacaaagcaccaaactacacaaatgcagaatgaaaaca

SEQ ID NO: 139330 - DNA, 74 bp, Homo sapiens
tttctgaaaacacttaacttggaacaaagcaccaaactacacaaatgcagaatgaaaacagcatttcaactcca

SEQ ID NO: 139331 - DNA, 72 bp, Homo sapiens
aacacttaacttggaacaaagcaccaaactacacaaatgcagaatgaaaacagcatttcaactccaccaaaa

SEQ ID NO: 139332 - DNA, 73 bp, Homo sapiens
aacaaagcaccaaactacacaaatgcagaatgaaaacagcatttcaactccaccaaaagtagtcatcgtaaaa

SEQ ID NO: 139333 - DNA, 71 bp, Homo sapiens
aaatgcagaatgaaaacagcatttcaactccaccaaaagtagtcatcgtaaaaggtgtaaaagtcacctaa

SEQ ID NO: 139334 - DNA, 70 bp, Homo sapiens
atttcaactccaccaaaagtagtcatcgtaaaaggtgtaaaagtcacctaacttcactaggcactgttca

SEQ ID NO: 139335 - DNA, 68 bp, Homo sapiens
caccaaaagtagtcatcgtaaaaggtgtaaaagtcacctaacttcactaggcactgttcactttttaa

SEQ ID NO: 139336 - DNA, 67 bp, Homo sapiens
cgtaaaaggtgtaaaagtcacctaacttcactaggcactgttcactttttaaacaagagacaataaa

SEQ ID NO: 139337 - DNA, 70 bp, Homo sapiens
agtcacctaacttcactaggcactgttcactttttaaacaagagacaataaaaaatattgcccacaaaca

SEQ ID NO: 139338 - DNA, 71 bp, Homo sapiens
acttcactaggcactgttcactttttaaacaagagacaataaaaaatattgcccacaaacaatatcccagc

SEQ ID NO: 139339 - DNA, 71 bp, Homo sapiens
ctaggcactgttcactttttaaacaagagacaataaaaaatattgcccacaaacaatatcccagctctagg

SEQ ID NO: 139340 - DNA, 73 bp, Homo sapiens
aaaaatattgcccacaaacaatatcccagctctagggcaggtttcagaaagtcttcatgctttaatagcgacc

SEQ ID NO: 139341 - DNA, 74 bp, Homo sapiens
aatatcccagctctagggcaggtttcagaaagtcttcatgctttaatagcgacctgggaagaaaagaatgaaca

SEQ ID NO: 139342 - DNA, 74 bp, Homo sapiens
tctagggcaggtttcagaaagtcttcatgctttaatagcgacctgggaagaaaagaatgaacatgctttaatat

SEQ ID NO: 139343 - DNA, 80 bp, Homo sapiens
actgtcatcagagcaagccatactacaatataaacaatcatattaagataaaaacttacgaggtgagtatgatcgagatc

SEQ ID NO: 139344 - DNA, 77 bp, Homo sapiens
agagcaagccatactacaatataaacaatcatattaagataaaaacttacgaggtgagtatgatcgagatctggaac

SEQ ID NO: 139345 - DNA, 77 bp, Homo sapiens
ccatactacaatataaacaatcatattaagataaaaacttacgaggtgagtatgatcgagatctggaacgtgatctg

SEQ ID NO: 139346 - DNA, 77 bp, Homo sapiens
aatataaacaatcatattaagataaaaacttacgaggtgagtatgatcgagatctggaacgtgatctgtatcctcca

SEQ ID NO: 139347 - DNA, 76 bp, Homo sapiens
tattaagataaaaacttacgaggtgagtatgatcgagatctggaacgtgatctgtatcctccacgactatagtaag

SEQ ID NO: 139348 - DNA, 76 bp, Homo sapiens
agataaaaacttacgaggtgagtatgatcgagatctggaacgtgatctgtatcctccacgactatagtaaggagaa

SEQ ID NO: 139349 - DNA, 78 bp, Homo sapiens
aggtgagtatgatcgagatctggaacgtgatctgtatcctccacgactatagtaaggagaaggtgaccgccttctata

SEQ ID NO: 139350 - DNA, 77 bp, Homo sapiens
tatgatcgagatctggaacgtgatctgtatcctccacgactatagtaaggagaaggtgaccgccttctataaacaaa

SEQ ID NO: 139351 - DNA, 75 bp, Homo sapiens
agatctggaacgtgatctgtatcctccacgactatagtaaggagaaggtgaccgccttctataaacaaatgtcaa

SEQ ID NO: 139352 - DNA, 74 bp, Homo sapiens
atctgtatcctccacgactatagtaaggagaaggtgaccgccttctataaacaaatgtcaagattgtctaagtc

SEQ ID NO: 139353 - DNA, 74 bp, Homo sapiens
atcctccacgactatagtaaggagaaggtgaccgccttctataaacaaatgtcaagattgtctaagtctcaata

SEQ ID NO: 139354 - DNA, 75 bp, Homo sapiens
actatagtaaggagaaggtgaccgccttctataaacaaatgtcaagattgtctaagtctcaatagatcacaatta

SEQ ID NO: 139355 - DNA, 77 bp, Homo sapiens
attactaggcaaacatctttatgtgaagctttatactgttgtacagatgctaagtcctctcctggcatacctataaa

SEQ ID NO: 139356 - DNA, 78 bp, Homo sapiens
aaacatctttatgtgaagctttatactgttgtacagatgctaagtcctctcctggcatacctataaatctgatccctg

SEQ ID NO: 139357 - DNA, 82 bp, Homo sapiens
tatgtgaagctttatactgttgtacagatgctaagtcctctcctggcatacctataaatctgatccctgtcttgggcagctc

SEQ ID NO: 139358 - DNA, 81 bp, Homo sapiens
tttatactgttgtacagatgctaagtcctctcctggcatacctataaatctgatccctgtcttgggcagctctccatcctc

SEQ ID NO: 139359 - DNA, 72 bp, Homo sapiens
cctcctcctccacctcctcctctgtgaagacagaaaggcaacacaacacgcattcagtttgtaagttttaaa

SEQ ID NO: 139360 - DNA, 70 bp, Homo sapiens
cctccacctcctcctctgtgaagacagaaaggcaacacaacacgcattcagtttgtaagttttaaaaaat

SEQ ID NO: 139361 - DNA, 80 bp, Homo sapiens
tgctctgtacactgtactgagattcagacgttgacctttctacctcataacttacctgtatgatctgctatagtagtccc

SEQ ID NO: 139362 - DNA, 80 bp, Homo sapiens
actgtactgagattcagacgttgacctttctacctcataacttacctgtatgatctgctatagtagtcccgatcatcata

SEQ ID NO: 139363 - DNA, 79 bp, Homo sapiens
attcagacgttgacctttctacctcataacttacctgtatgatctgctatagtagtcccgatcatcatagccccgatca

SEQ ID NO: 139364 - DNA, 83 bp, Homo sapiens
tgacctttctacctcataacttacctgtatgatctgctatagtagtcccgatcatcatagccccgatcatatcctctgtcata

SEQ ID NO: 139365 - DNA, 82 bp, Homo sapiens
tttctacctcataacttacctgtatgatctgctatagtagtcccgatcatcatagccccgatcatatcctctgtcatagtaa

SEQ ID NO: 139366 - DNA, 80 bp, Homo sapiens
ataacttacctgtatgatctgctatagtagtcccgatcatcatagccccgatcatatcctctgtcatagtaatcccgacg

SEQ ID NO: 139367 - DNA, 86 bp, Homo sapiens
tgtatgatctgctatagtagtcccgatcatcatagccccgatcatatcctctgtcatagtaatcccgacggcgagagctgccacta

SEQ ID NO: 139368 - DNA, 82 bp, Homo sapiens
tatagtagtcccgatcatcatagccccgatcatatcctctgtcatagtaatcccgacggcgagagctgccactatgaagaaa

SEQ ID NO: 139369 - DNA, 80 bp, Homo sapiens
tcccgatcatcatagccccgatcatatcctctgtcatagtaatcccgacggcgagagctgccactatgaagaaaaaaata

SEQ ID NO: 139370 - DNA, 78 bp, Homo sapiens
atagccccgatcatatcctctgtcatagtaatcccgacggcgagagctgccactatgaagaaaaaaatattcaggtga

SEQ ID NO: 139371 - DNA, 75 bp, Homo sapiens
atatcctctgtcatagtaatcccgacggcgagagctgccactatgaagaaaaaaatattcaggtgacctccctta

SEQ ID NO: 139372 - DNA, 69 bp, Homo sapiens
tgacaagtgaaaaactgccaattatatttattttgaaaataaacttactaggtaggtctccccatgtaa

SEQ ID NO: 139373 - DNA, 67 bp, Homo sapiens
aactgccaattatatttattttgaaaataaacttactaggtaggtctccccatgtaaattcctggtg

SEQ ID NO: 139374 - DNA, 69 bp, Homo sapiens
tatatttattttgaaaataaacttactaggtaggtctccccatgtaaattcctggtgttggcgtatgtg

SEQ ID NO: 139375 - DNA, 67 bp, Homo sapiens
tttgaaaataaacttactaggtaggtctccccatgtaaattcctggtgttggcgtatgtggtctttt

SEQ ID NO: 139376 - DNA, 68 bp, Homo sapiens
aataaacttactaggtaggtctccccatgtaaattcctggtgttggcgtatgtggtctttttgttata

SEQ ID NO: 139377 - DNA, 74 bp, Homo sapiens
taggtctccccatgtaaattcctggtgttggcgtatgtggtctttttgttatagagaaatcaactctgatccta

SEQ ID NO: 139378 - DNA, 75 bp, Homo sapiens
ccatgtaaattcctggtgttggcgtatgtggtctttttgttatagagaaatcaactctgatcctacgcccatcaa

SEQ ID NO: 139379 - DNA, 75 bp, Homo sapiens
aattcctggtgttggcgtatgtggtctttttgttatagagaaatcaactctgatcctacgcccatcaagctccat

SEQ ID NO: 139380 - DNA, 77 bp, Homo sapiens
ttggcgtatgtggtctttttgttatagagaaatcaactctgatcctacgcccatcaagctccattccattggcacgt

SEQ ID NO: 139381 - DNA, 77 bp, Homo sapiens
tctttttgttatagagaaatcaactctgatcctacgcccatcaagctccattccattggcacgttctttagccttca

SEQ ID NO: 139382 - DNA, 76 bp, Homo sapiens
tatagagaaatcaactctgatcctacgcccatcaagctccattccattggcacgttctttagccttcaaaaggtaa

SEQ ID NO: 139383 - DNA, 73 bp, Homo sapiens
aaatcaactctgatcctacgcccatcaagctccattccattggcacgttctttagccttcaaaaggtaaataa

SEQ ID NO: 139384 - DNA, 72 bp, Homo sapiens
atcctacgcccatcaagctccattccattggcacgttctttagccttcaaaaggtaaataaattgttacata

SEQ ID NO: 139385 - DNA, 69 bp, Homo sapiens
gttaacaatagaactgatggtttacaaaggaacgggcttttacttacttccttggcatcatctacattt

SEQ ID NO: 139386 - DNA, 69 bp, Homo sapiens
aatagaactgatggtttacaaaggaacgggcttttacttacttccttggcatcatctacattttcaaaa

SEQ ID NO: 139387 - DNA, 70 bp, Homo sapiens
tggtttacaaaggaacgggcttttacttacttccttggcatcatctacattttcaaaatatacaaaggca

SEQ ID NO: 139388 - DNA, 70 bp, Homo sapiens
aacgggcttttacttacttccttggcatcatctacattttcaaaatatacaaaggcaaatcctcttgaac

SEQ ID NO: 139389 - DNA, 72 bp, Homo sapiens
cttttacttacttccttggcatcatctacattttcaaaatatacaaaggcaaatcctcttgaacgcctagac

SEQ ID NO: 139390 - DNA, 79 bp, Homo sapiens
ttccttggcatcatctacattttcaaaatatacaaaggcaaatcctcttgaacgcctagactgctggtcatatacaata

SEQ ID NO: 139391 - DNA, 79 bp, Homo sapiens
atcatctacattttcaaaatatacaaaggcaaatcctcttgaacgcctagactgctggtcatatacaatagacacatcg

SEQ ID NO: 139392 - DNA, 78 bp, Homo sapiens
aaaatatacaaaggcaaatcctcttgaacgcctagactgctggtcatatacaatagacacatcggcaatgggaccata

SEQ ID NO: 139393 - DNA, 79 bp, Homo sapiens
atacaaaggcaaatcctcttgaacgcctagactgctggtcatatacaatagacacatcggcaatgggaccatatttaga

SEQ ID NO: 139394 - DNA, 78 bp, Homo sapiens
aaatcctcttgaacgcctagactgctggtcatatacaatagacacatcggcaatgggaccatatttagagaacacttc

SEQ ID NO: 139395 - DNA, 79 bp, Homo sapiens
aacgcctagactgctggtcatatacaatagacacatcggcaatgggaccatatttagagaacacttctcttagatctct

SEQ ID NO: 139396 - DNA, 80 bp, Homo sapiens
atatacaatagacacatcggcaatgggaccatatttagagaacacttctcttagatctctttctgtggtgtacaagctca

SEQ ID NO: 139397 - DNA, 78 bp, Homo sapiens
acacatcggcaatgggaccatatttagagaacacttctcttagatctctttctgtggtgtacaagctcagcccaaata

SEQ ID NO: 139398 - DNA, 76 bp, Homo sapiens
aatgggaccatatttagagaacacttctcttagatctctttctgtggtgtacaagctcagcccaaatactccaaga

SEQ ID NO: 139399 - DNA, 76 bp, Homo sapiens
acacttctcttagatctctttctgtggtgtacaagctcagcccaaatactccaagacaacagttaggatcaggatt

SEQ ID NO: 139400 - DNA, 75 bp, Homo sapiens
tctctttctgtggtgtacaagctcagcccaaatactccaagacaacagttaggatcaggatttgcctagggaaaa

SEQ ID NO: 139401 - DNA, 73 bp, Homo sapiens
ttctgtggtgtacaagctcagcccaaatactccaagacaacagttaggatcaggatttgcctagggaaaaaaa

SEQ ID NO: 139402 - DNA, 69 bp, Homo sapiens
tacaagctcagcccaaatactccaagacaacagttaggatcaggatttgcctagggaaaaaaaaaagtt

SEQ ID NO: 139403 - DNA, 60 bp, Homo sapiens
aaaaaaagttttaaactttggaaaagttgtcataaaatcaaagttgtttaaaaagggagc

SEQ ID NO: 139404 - DNA, 61 bp, Homo sapiens
aaaaaagttttaaactttggaaaagttgtcataaaatcaaagttgtttaaaaagggagctg

SEQ ID NO: 139405 - DNA, 67 bp, Homo sapiens
taaactttggaaaagttgtcataaaatcaaagttgtttaaaaagggagctgtatactagccaaaatg

SEQ ID NO: 139406 - DNA, 69 bp, Homo sapiens
ggaaaagttgtcataaaatcaaagttgtttaaaaagggagctgtatactagccaaaatgtcactaacaa

SEQ ID NO: 139407 - DNA, 70 bp, Homo sapiens
gtcataaaatcaaagttgtttaaaaagggagctgtatactagccaaaatgtcactaacaagaaaagtaca

SEQ ID NO: 139408 - DNA, 71 bp, Homo sapiens
agttgtttaaaaagggagctgtatactagccaaaatgtcactaacaagaaaagtacataatgattagacca

SEQ ID NO: 139409 - DNA, 74 bp, Homo sapiens
aaagggagctgtatactagccaaaatgtcactaacaagaaaagtacataatgattagaccaaacactgcttaga

SEQ ID NO: 139410 - DNA, 76 bp, Homo sapiens
gagctgtatactagccaaaatgtcactaacaagaaaagtacataatgattagaccaaacactgcttagaaattaca

SEQ ID NO: 139411 - DNA, 74 bp, Homo sapiens
gccaaaatgtcactaacaagaaaagtacataatgattagaccaaacactgcttagaaattacaaaattacagca

SEQ ID NO: 139412 - DNA, 73 bp, Homo sapiens
cactaacaagaaaagtacataatgattagaccaaacactgcttagaaattacaaaattacagcaagtactaca

SEQ ID NO: 139413 - DNA, 71 bp, Homo sapiens
aagtacataatgattagaccaaacactgcttagaaattacaaaattacagcaagtactacaagtatttttg

SEQ ID NO: 139414 - DNA, 67 bp, Homo sapiens
attacaaaattacagcaagtactacaagtatttttgggaatgggtaggaaagaatgcaaaagaaaaa

SEQ ID NO: 139415 - DNA, 66 bp, Homo sapiens
acagcaagtactacaagtatttttgggaatgggtaggaaagaatgcaaaagaaaaaatttcaacct

SEQ ID NO: 139416 - DNA, 65 bp, Homo sapiens
caagtatttttgggaatgggtaggaaagaatgcaaaagaaaaaatttcaaccttagaattaagta

SEQ ID NO: 139417 - DNA, 64 bp, Homo sapiens
gtatttttgggaatgggtaggaaagaatgcaaaagaaaaaatttcaaccttagaattaagtagg

SEQ ID NO: 139418 - DNA, 66 bp, Homo sapiens
gggaatgggtaggaaagaatgcaaaagaaaaaatttcaaccttagaattaagtaggtaaacaagca

SEQ ID NO: 139419 - DNA, 68 bp, Homo sapiens
tgggtaggaaagaatgcaaaagaaaaaatttcaaccttagaattaagtaggtaaacaagcactcgtgc

SEQ ID NO: 139420 - DNA, 70 bp, Homo sapiens
taggaaagaatgcaaaagaaaaaatttcaaccttagaattaagtaggtaaacaagcactcgtgctggcga

SEQ ID NO: 139421 - DNA, 68 bp, Homo sapiens
gcaaaagaaaaaatttcaaccttagaattaagtaggtaaacaagcactcgtgctggcgaaaagcaact

SEQ ID NO: 139422 - DNA, 70 bp, Homo sapiens
agaaaaaatttcaaccttagaattaagtaggtaaacaagcactcgtgctggcgaaaagcaacttggcatc

SEQ ID NO: 139423 - DNA, 69 bp, Homo sapiens
aaaaatttcaaccttagaattaagtaggtaaacaagcactcgtgctggcgaaaagcaacttggcatctt

SEQ ID NO: 139424 - DNA, 70 bp, Homo sapiens
aaatttcaaccttagaattaagtaggtaaacaagcactcgtgctggcgaaaagcaacttggcatctttcc

SEQ ID NO: 139425 - DNA, 72 bp, Homo sapiens
aaccttagaattaagtaggtaaacaagcactcgtgctggcgaaaagcaacttggcatctttccttctatgaa

SEQ ID NO: 139426 - DNA, 73 bp, Homo sapiens
taggtaaacaagcactcgtgctggcgaaaagcaacttggcatctttccttctatgaatttattctaagaaaaa

SEQ ID NO: 139427 - DNA, 76 bp, Homo sapiens
cactcgtgctggcgaaaagcaacttggcatctttccttctatgaatttattctaagaaaaattcacatattcataa

SEQ ID NO: 139428 - DNA, 79 bp, Homo sapiens
tgctggcgaaaagcaacttggcatctttccttctatgaatttattctaagaaaaattcacatattcataacatgacata

SEQ ID NO: 139429 - DNA, 77 bp, Homo sapiens
gcaacttggcatctttccttctatgaatttattctaagaaaaattcacatattcataacatgacatacaaggataac

SEQ ID NO: 139430 - DNA, 80 bp, Homo sapiens
tgaatttattctaagaaaaattcacatattcataacatgacatacaaggataactggaaccacactgtgtctatcagcta

SEQ ID NO: 139431 - DNA, 78 bp, Homo sapiens
ttctaagaaaaattcacatattcataacatgacatacaaggataactggaaccacactgtgtctatcagctagaaaaa

SEQ ID NO: 139432 - DNA, 81 bp, Homo sapiens
ttcacatattcataacatgacatacaaggataactggaaccacactgtgtctatcagctagaaaaaattgtaatgttgaca

SEQ ID NO: 139433 - DNA, 79 bp, Homo sapiens
atattcataacatgacatacaaggataactggaaccacactgtgtctatcagctagaaaaaattgtaatgttgacacac

SEQ ID NO: 139434 - DNA, 77 bp, Homo sapiens
catacaaggataactggaaccacactgtgtctatcagctagaaaaaattgtaatgttgacacaccttccattcaata

SEQ ID NO: 139435 - DNA, 79 bp, Homo sapiens
cacactgtgtctatcagctagaaaaaattgtaatgttgacacaccttccattcaatagaatgctctgaattgccaaaaa

SEQ ID NO: 139436 - DNA, 82 bp, Homo sapiens
tctatcagctagaaaaaattgtaatgttgacacaccttccattcaatagaatgctctgaattgccaaaaagatgagcatgta

SEQ ID NO: 139437 - DNA, 78 bp, Homo sapiens
agaaaaaattgtaatgttgacacaccttccattcaatagaatgctctgaattgccaaaaagatgagcatgtatggttc

SEQ ID NO: 139438 - DNA, 78 bp, Homo sapiens
attgtaatgttgacacaccttccattcaatagaatgctctgaattgccaaaaagatgagcatgtatggttcgattttt

SEQ ID NO: 139439 - DNA, 78 bp, Homo sapiens
acaccttccattcaatagaatgctctgaattgccaaaaagatgagcatgtatggttcgattttttcagaaacacaata

SEQ ID NO: 139440 - DNA, 78 bp, Homo sapiens
ttcaatagaatgctctgaattgccaaaaagatgagcatgtatggttcgattttttcagaaacacaatacacaagtaag

SEQ ID NO: 139441 - DNA, 78 bp, Homo sapiens
agaatgctctgaattgccaaaaagatgagcatgtatggttcgattttttcagaaacacaatacacaagtaagtacata

SEQ ID NO: 139442 - DNA, 74 bp, Homo sapiens
ttgccaaaaagatgagcatgtatggttcgattttttcagaaacacaatacacaagtaagtacataaacgaagcc

SEQ ID NO: 139443 - DNA, 73 bp, Homo sapiens
aaaagatgagcatgtatggttcgattttttcagaaacacaatacacaagtaagtacataaacgaagcctgagg

SEQ ID NO: 139444 - DNA, 72 bp, Homo sapiens
atgtatggttcgattttttcagaaacacaatacacaagtaagtacataaacgaagcctgaggggatgcgtac

SEQ ID NO: 139445 - DNA, 70 bp, Homo sapiens
tttttcagaaacacaatacacaagtaagtacataaacgaagcctgaggggatgcgtaccaaaccatttta

SEQ ID NO: 139446 - DNA, 71 bp, Homo sapiens
aacacaatacacaagtaagtacataaacgaagcctgaggggatgcgtaccaaaccattttacaggtcataa

SEQ ID NO: 139447 - DNA, 71 bp, Homo sapiens
atacacaagtaagtacataaacgaagcctgaggggatgcgtaccaaaccattttacaggtcataaacagct

SEQ ID NO: 139448 - DNA, 73 bp, Homo sapiens
tacataaacgaagcctgaggggatgcgtaccaaaccattttacaggtcataaacagcttgcaatcgtaagaaa

SEQ ID NO: 139449 - DNA, 72 bp, Homo sapiens
aagcctgaggggatgcgtaccaaaccattttacaggtcataaacagcttgcaatcgtaagaaacaagagttg

SEQ ID NO: 139450 - DNA, 74 bp, Homo sapiens
gggatgcgtaccaaaccattttacaggtcataaacagcttgcaatcgtaagaaacaagagttggccaggcgcag

SEQ ID NO: 139451 - DNA, 79 bp, Homo sapiens
tcaaaaaaagatgacaagaggaaagaataaagagtgagccatatgttgctaacattccagatgctgtgatgaatttacc

SEQ ID NO: 139452 - DNA, 78 bp, Homo sapiens
aaaagatgacaagaggaaagaataaagagtgagccatatgttgctaacattccagatgctgtgatgaatttacctaaa

SEQ ID NO: 139453 - DNA, 77 bp, Homo sapiens
ggaaagaataaagagtgagccatatgttgctaacattccagatgctgtgatgaatttacctaaagattccatttatt

SEQ ID NO: 139454 - DNA, 79 bp, Homo sapiens
agagtgagccatatgttgctaacattccagatgctgtgatgaatttacctaaagattccatttatttcataaactaaca

SEQ ID NO: 139455 - DNA, 77 bp, Homo sapiens
gagccatatgttgctaacattccagatgctgtgatgaatttacctaaagattccatttatttcataaactaacaatt

SEQ ID NO: 139456 - DNA, 75 bp, Homo sapiens
tgctaacattccagatgctgtgatgaatttacctaaagattccatttatttcataaactaacaatttactaggga

SEQ ID NO: 139457 - DNA, 71 bp, Homo sapiens
cagatgctgtgatgaatttacctaaagattccatttatttcataaactaacaatttactagggaaaaattc

SEQ ID NO: 139458 - DNA, 68 bp, Homo sapiens
gtgatgaatttacctaaagattccatttatttcataaactaacaatttactagggaaaaattctactc

SEQ ID NO: 139459 - DNA, 66 bp, Homo sapiens
cctaaagattccatttatttcataaactaacaatttactagggaaaaattctactctactctaaaa

SEQ ID NO: 139460 - DNA, 65 bp, Homo sapiens
tttatttcataaactaacaatttactagggaaaaattctactctactctaaaaacattaagtccc

SEQ ID NO: 139461 - DNA, 64 bp, Homo sapiens
aaactaacaatttactagggaaaaattctactctactctaaaaacattaagtccccccctgcac

SEQ ID NO: 139462 - DNA, 64 bp, Homo sapiens
aacaatttactagggaaaaattctactctactctaaaaacattaagtccccccctgcaccctcc

SEQ ID NO: 139463 - DNA, 65 bp, Homo sapiens
aaaaattctactctactctaaaaacattaagtccccccctgcaccctcctcctaaaccacttgga

SEQ ID NO: 139464 - DNA, 69 bp, Homo sapiens
tactctactctaaaaacattaagtccccccctgcaccctcctcctaaaccacttggattatacagtgaa

SEQ ID NO: 139465 - DNA, 69 bp, Homo sapiens
taaaaacattaagtccccccctgcaccctcctcctaaaccacttggattatacagtgaaatcacaataa

SEQ ID NO: 139466 - DNA, 73 bp, Homo sapiens
attaagtccccccctgcaccctcctcctaaaccacttggattatacagtgaaatcacaataaatatcatctca

SEQ ID NO: 139467 - DNA, 78 bp, Homo sapiens
tgcaccctcctcctaaaccacttggattatacagtgaaatcacaataaatatcatctcatttgaagcctttcatgaaa

SEQ ID NO: 139468 - DNA, 77 bp, Homo sapiens
ctcctcctaaaccacttggattatacagtgaaatcacaataaatatcatctcatttgaagcctttcatgaaatgtaa

SEQ ID NO: 139469 - DNA, 76 bp, Homo sapiens
accacttggattatacagtgaaatcacaataaatatcatctcatttgaagcctttcatgaaatgtaaaaaatgcct

SEQ ID NO: 139470 - DNA, 75 bp, Homo sapiens
cagtgaaatcacaataaatatcatctcatttgaagcctttcatgaaatgtaaaaaatgccttaacaacacccaaa

SEQ ID NO: 139471 - DNA, 73 bp, Homo sapiens
atcacaataaatatcatctcatttgaagcctttcatgaaatgtaaaaaatgccttaacaacacccaaaagaaa

SEQ ID NO: 139472 - DNA, 72 bp, Homo sapiens
tcatctcatttgaagcctttcatgaaatgtaaaaaatgccttaacaacacccaaaagaaattagcttcaaat

SEQ ID NO: 139473 - DNA, 69 bp, Homo sapiens
tgaagcctttcatgaaatgtaaaaaatgccttaacaacacccaaaagaaattagcttcaaattaaatgg

SEQ ID NO: 139474 - DNA, 68 bp, Homo sapiens
catgaaatgtaaaaaatgccttaacaacacccaaaagaaattagcttcaaattaaatgggaaagtcag

SEQ ID NO: 139475 - DNA, 69 bp, Homo sapiens
gtaaaaaatgccttaacaacacccaaaagaaattagcttcaaattaaatgggaaagtcaggagagcatc

SEQ ID NO: 139476 - DNA, 68 bp, Homo sapiens
ccttaacaacacccaaaagaaattagcttcaaattaaatgggaaagtcaggagagcatctaactaggt

SEQ ID NO: 139477 - DNA, 72 bp, Homo sapiens
ccaaaagaaattagcttcaaattaaatgggaaagtcaggagagcatctaactaggtttatgcagcctggaaa

SEQ ID NO: 139478 - DNA, 75 bp, Homo sapiens
attaaatgggaaagtcaggagagcatctaactaggtttatgcagcctggaaagagttaatgttagcatagaacta

SEQ ID NO: 139479 - DNA, 75 bp, Homo sapiens
aaagtcaggagagcatctaactaggtttatgcagcctggaaagagttaatgttagcatagaactatattttgaac

SEQ ID NO: 139480 - DNA, 76 bp, Homo sapiens
aggagagcatctaactaggtttatgcagcctggaaagagttaatgttagcatagaactatattttgaactaatgta

SEQ ID NO: 139481 - DNA, 73 bp, Homo sapiens
ctaactaggtttatgcagcctggaaagagttaatgttagcatagaactatattttgaactaatgtactaatac

SEQ ID NO: 139482 - DNA, 76 bp, Homo sapiens
atgcagcctggaaagagttaatgttagcatagaactatattttgaactaatgtactaatactatactacagtatag

SEQ ID NO: 139483 - DNA, 75 bp, Homo sapiens
aagagttaatgttagcatagaactatattttgaactaatgtactaatactatactacagtatagtaatgcagtcg

SEQ ID NO: 139484 - DNA, 73 bp, Homo sapiens
gttagcatagaactatattttgaactaatgtactaatactatactacagtatagtaatgcagtcggaagtttt

SEQ ID NO: 139485 - DNA, 76 bp, Homo sapiens
tttttgatgggctaaggagttacaccattgtgtcagtattatgcttaattgacaggcagcccaaatgcagaccccg

SEQ ID NO: 139486 - DNA, 68 bp, Homo sapiens
aaaaagtaaatttaggcagttgactgcttcaaaaccagtttttcatcttacccgattcccaacatgac

SEQ ID NO: 139487 - DNA, 75 bp, Homo sapiens
tttaggcagttgactgcttcaaaaccagtttttcatcttacccgattcccaacatgacgcctgcgagtagacatg

SEQ ID NO: 139488 - DNA, 75 bp, Homo sapiens
actgcttcaaaaccagtttttcatcttacccgattcccaacatgacgcctgcgagtagacatgggagaatggctg

SEQ ID NO: 139489 - DNA, 76 bp, Homo sapiens
aaaaccagtttttcatcttacccgattcccaacatgacgcctgcgagtagacatgggagaatggctgtggctgtgc

SEQ ID NO: 139490 - DNA, 80 bp, Homo sapiens
tttcatcttacccgattcccaacatgacgcctgcgagtagacatgggagaatggctgtggctgtgccgtctacgataatc

SEQ ID NO: 139491 - DNA, 80 bp, Homo sapiens
attcccaacatgacgcctgcgagtagacatgggagaatggctgtggctgtgccgtctacgataatctcgactgtaagacc

SEQ ID NO: 139492 - DNA, 81 bp, Homo sapiens
aacatgacgcctgcgagtagacatgggagaatggctgtggctgtgccgtctacgataatctcgactgtaagacctgctacg

SEQ ID NO: 139493 - DNA, 81 bp, Homo sapiens
agtagacatgggagaatggctgtggctgtgccgtctacgataatctcgactgtaagacctgctacgtgatcgtctatggga

SEQ ID NO: 139494 - DNA, 80 bp, Homo sapiens
atgggagaatggctgtggctgtgccgtctacgataatctcgactgtaagacctgctacgtgatcgtctatgggagcggga

SEQ ID NO: 139495 - DNA, 80 bp, Homo sapiens
tgtggctgtgccgtctacgataatctcgactgtaagacctgctacgtgatcgtctatgggagcgggagcgagaccgtgac

SEQ ID NO: 139496 - DNA, 77 bp, Homo sapiens
ctgtgccgtctacgataatctcgactgtaagacctgctacgtgatcgtctatgggagcgggagcgagaccgtgaccg

SEQ ID NO: 139497 - DNA, 75 bp, Homo sapiens
ataatctcgactgtaagacctgctacgtgatcgtctatgggagcgggagcgagaccgtgaccgggtataatgcct

SEQ ID NO: 139498 - DNA, 75 bp, Homo sapiens
tcgactgtaagacctgctacgtgatcgtctatgggagcgggagcgagaccgtgaccgggtataatgccttcggga

SEQ ID NO: 139499 - DNA, 74 bp, Homo sapiens
acctgctacgtgatcgtctatgggagcgggagcgagaccgtgaccgggtataatgccttcgggagcttcttctg

SEQ ID NO: 139500 - DNA, 76 bp, Homo sapiens
atcgtctatgggagcgggagcgagaccgtgaccgggtataatgccttcgggagcttcttctggatctagacctgca

SEQ ID NO: 139501 - DNA, 75 bp, Homo sapiens
atgggagcgggagcgagaccgtgaccgggtataatgccttcgggagcttcttctggatctagacctgcaagacaa

SEQ ID NO: 139502 - DNA, 72 bp, Homo sapiens
agaccgtgaccgggtataatgccttcgggagcttcttctggatctagacctgcaagacaaagacctcctaag

SEQ ID NO: 139503 - DNA, 74 bp, Homo sapiens
cgggtataatgccttcgggagcttcttctggatctagacctgcaagacaaagacctcctaaggttatgactgaa

SEQ ID NO: 139504 - DNA, 73 bp, Homo sapiens
tttcagagctaagagtaacgaggaaatctcaagacagtctttcttacctagattcagatcgggacctggactt

SEQ ID NO: 139505 - DNA, 74 bp, Homo sapiens
taagagtaacgaggaaatctcaagacagtctttcttacctagattcagatcgggacctggactttgatctggaa

SEQ ID NO: 139506 - DNA, 74 bp, Homo sapiens
ggaaatctcaagacagtctttcttacctagattcagatcgggacctggactttgatctggaacgcctggaatct

SEQ ID NO: 139507 - DNA, 73 bp, Homo sapiens
aagacagtctttcttacctagattcagatcgggacctggactttgatctggaacgcctggaatcttccttgga

SEQ ID NO: 139508 - DNA, 73 bp, Homo sapiens
tttcttacctagattcagatcgggacctggactttgatctggaacgcctggaatcttccttggagcgagacct

SEQ ID NO: 139509 - DNA, 75 bp, Homo sapiens
ctagattcagatcgggacctggactttgatctggaacgcctggaatcttccttggagcgagaccttgcaggggta

SEQ ID NO: 139510 - DNA, 76 bp, Homo sapiens
ggacctggactttgatctggaacgcctggaatcttccttggagcgagaccttgcaggggtatgccttgcagatttc

SEQ ID NO: 139511 - DNA, 75 bp, Homo sapiens
actttgatctggaacgcctggaatcttccttggagcgagaccttgcaggggtatgccttgcagatttccccgatc

SEQ ID NO: 139512 - DNA, 75 bp, Homo sapiens
aacgcctggaatcttccttggagcgagaccttgcaggggtatgccttgcagatttccccgatccgtgagcacttc

SEQ ID NO: 139513 - DNA, 76 bp, Homo sapiens
ctggaatcttccttggagcgagaccttgcaggggtatgccttgcagatttccccgatccgtgagcacttccacttc

SEQ ID NO: 139514 - DNA, 77 bp, Homo sapiens
ccttggagcgagaccttgcaggggtatgccttgcagatttccccgatccgtgagcacttccacttctggaagcagaa

SEQ ID NO: 139515 - DNA, 76 bp, Homo sapiens
ttgcaggggtatgccttgcagatttccccgatccgtgagcacttccacttctggaagcagaacgggattcctacac

SEQ ID NO: 139516 - DNA, 77 bp, Homo sapiens
tatgccttgcagatttccccgatccgtgagcacttccacttctggaagcagaacgggattcctacacgtagatgtta

SEQ ID NO: 139517 - DNA, 74 bp, Homo sapiens
ttgcagatttccccgatccgtgagcacttccacttctggaagcagaacgggattcctacacgtagatgttaaaa

SEQ ID NO: 139518 - DNA, 70 bp, Homo sapiens
ccgatccgtgagcacttccacttctggaagcagaacgggattcctacacgtagatgttaaaagtttaatt

SEQ ID NO: 139519 - DNA, 76 bp, Homo sapiens
catgtttagcaaaatatacagggacacataaacagactagtaattacttagcgtagtgctttctgattccagatta

SEQ ID NO: 139520 - DNA, 75 bp, Homo sapiens
gcaaaatatacagggacacataaacagactagtaattacttagcgtagtgctttctgattccagattacttctta

SEQ ID NO: 139521 - DNA, 74 bp, Homo sapiens
gggacacataaacagactagtaattacttagcgtagtgctttctgattccagattacttcttatcttaacttca

SEQ ID NO: 139522 - DNA, 72 bp, Homo sapiens
cataaacagactagtaattacttagcgtagtgctttctgattccagattacttcttatcttaacttcatttt

SEQ ID NO: 139523 - DNA, 70 bp, Homo sapiens
ctagtaattacttagcgtagtgctttctgattccagattacttcttatcttaacttcatttttatttctt

SEQ ID NO: 139524 - DNA, 71 bp, Homo sapiens
tttatttcttttcttcattcttccgtttcaaattctgacttctttcatcttccccacttcacacaaattgc

SEQ ID NO: 139525 - DNA, 75 bp, Homo sapiens
ttcttcattcttccgtttcaaattctgacttctttcatcttccccacttcacacaaattgctcaatattctacaa

SEQ ID NO: 139526 - DNA, 73 bp, Homo sapiens
attcttccgtttcaaattctgacttctttcatcttccccacttcacacaaattgctcaatattctacaagtgg

SEQ ID NO: 139527 - DNA, 76 bp, Homo sapiens
aattctgacttctttcatcttccccacttcacacaaattgctcaatattctacaagtgggacttctggtctgataa

SEQ ID NO: 139528 - DNA, 80 bp, Homo sapiens
tctttcatcttccccacttcacacaaattgctcaatattctacaagtgggacttctggtctgataattagcatgcattct

SEQ ID NO: 139529 - DNA, 77 bp, Homo sapiens
ttccccacttcacacaaattgctcaatattctacaagtgggacttctggtctgataattagcatgcattctttcttt

SEQ ID NO: 139530 - DNA, 76 bp, Homo sapiens
acttcacacaaattgctcaatattctacaagtgggacttctggtctgataattagcatgcattctttcttttattt

SEQ ID NO: 139531 - DNA, 71 bp, Homo sapiens
ttcttttattttttcaaatttcagcttcacttattcctgagcttcaaatactcatttataaaacttgtcaa

SEQ ID NO: 139532 - DNA, 73 bp, Homo sapiens
ttttcaaatttcagcttcacttattcctgagcttcaaatactcatttataaaacttgtcaaatgacgacttcc

SEQ ID NO: 139533 - DNA, 74 bp, Homo sapiens
ttcagcttcacttattcctgagcttcaaatactcatttataaaacttgtcaaatgacgacttccgcattttcct

SEQ ID NO: 139534 - DNA, 74 bp, Homo sapiens
ttcacttattcctgagcttcaaatactcatttataaaacttgtcaaatgacgacttccgcattttccttcttca

SEQ ID NO: 139535 - DNA, 72 bp, Homo sapiens
ctgagcttcaaatactcatttataaaacttgtcaaatgacgacttccgcattttccttcttcaacattaacc

SEQ ID NO: 139536 - DNA, 69 bp, Homo sapiens
ctcatttataaaacttgtcaaatgacgacttccgcattttccttcttcaacattaaccttaatagaaaa

SEQ ID NO: 139537 - DNA, 68 bp, Homo sapiens
aaacttgtcaaatgacgacttccgcattttccttcttcaacattaaccttaatagaaaaagaacagga

SEQ ID NO: 139538 - DNA, 71 bp, Homo sapiens
gtcaaatgacgacttccgcattttccttcttcaacattaaccttaatagaaaaagaacaggatgaagaata

SEQ ID NO: 139539 - DNA, 67 bp, Homo sapiens
caccacctgaattccttttcaaccttttggcaaaaccagtagtacttaccttataaaatcacctgta

SEQ ID NO: 139540 - DNA, 68 bp, Homo sapiens
ccttttcaaccttttggcaaaaccagtagtacttaccttataaaatcacctgtaatgtcagcttgaaa

SEQ ID NO: 139541 - DNA, 71 bp, Homo sapiens
cttttggcaaaaccagtagtacttaccttataaaatcacctgtaatgtcagcttgaaaatgtcacgttcta

SEQ ID NO: 139542 - DNA, 71 bp, Homo sapiens
aaaaccagtagtacttaccttataaaatcacctgtaatgtcagcttgaaaatgtcacgttctagttccaga

SEQ ID NO: 139543 - DNA, 75 bp, Homo sapiens
gtacttaccttataaaatcacctgtaatgtcagcttgaaaatgtcacgttctagttccagacaatatccacaata

SEQ ID NO: 139544 - DNA, 76 bp, Homo sapiens
ccttataaaatcacctgtaatgtcagcttgaaaatgtcacgttctagttccagacaatatccacaatattaaagca

SEQ ID NO: 139545 - DNA, 75 bp, Homo sapiens
cctgtaatgtcagcttgaaaatgtcacgttctagttccagacaatatccacaatattaaagcattcttgtttaaa

SEQ ID NO: 139546 - DNA, 75 bp, Homo sapiens
tgtcagcttgaaaatgtcacgttctagttccagacaatatccacaatattaaagcattcttgtttaaaaccaaga

SEQ ID NO: 139547 - DNA, 69 bp, Homo sapiens
aaaatgtcacgttctagttccagacaatatccacaatattaaagcattcttgtttaaaaccaagaaaaa

SEQ ID NO: 139548 - DNA, 69 bp, Homo sapiens
tctagttccagacaatatccacaatattaaagcattcttgtttaaaaccaagaaaaaaatatttcaacc

SEQ ID NO: 139549 - DNA, 67 bp, Homo sapiens
gacaatatccacaatattaaagcattcttgtttaaaaccaagaaaaaaatatttcaaccgggtttca

SEQ ID NO: 139550 - DNA, 67 bp, Homo sapiens
cacaatattaaagcattcttgtttaaaaccaagaaaaaaatatttcaaccgggtttcaagagactga

SEQ ID NO: 139551 - DNA, 65 bp, Homo sapiens
gcattcttgtttaaaaccaagaaaaaaatatttcaaccgggtttcaagagactgataaacctaac

SEQ ID NO: 139552 - DNA, 66 bp, Homo sapiens
aaaaccaagaaaaaaatatttcaaccgggtttcaagagactgataaacctaaccagactcacaata

SEQ ID NO: 139553 - DNA, 66 bp, Homo sapiens
aaaaaatatttcaaccgggtttcaagagactgataaacctaaccagactcacaatacaaaacaatt

SEQ ID NO: 139554 - DNA, 69 bp, Homo sapiens
atatttcaaccgggtttcaagagactgataaacctaaccagactcacaatacaaaacaatttcctccta

SEQ ID NO: 139555 - DNA, 71 bp, Homo sapiens
gggtttcaagagactgataaacctaaccagactcacaatacaaaacaatttcctcctatttgacaattcaa

SEQ ID NO: 139556 - DNA, 70 bp, Homo sapiens
gagactgataaacctaaccagactcacaatacaaaacaatttcctcctatttgacaattcaatccttttt

SEQ ID NO: 139557 - DNA, 67 bp, Homo sapiens
aacctaaccagactcacaatacaaaacaatttcctcctatttgacaattcaatccttttttaaagga

SEQ ID NO: 139558 - DNA, 69 bp, Homo sapiens
cacaatacaaaacaatttcctcctatttgacaattcaatccttttttaaaggaaatttggtgagatggc

SEQ ID NO: 139559 - DNA, 70 bp, Homo sapiens
caaaacaatttcctcctatttgacaattcaatccttttttaaaggaaatttggtgagatggctgcaattc

SEQ ID NO: 139560 - DNA, 71 bp, Homo sapiens
ttcctcctatttgacaattcaatccttttttaaaggaaatttggtgagatggctgcaattctttagaaaga

SEQ ID NO: 139561 - DNA, 73 bp, Homo sapiens
gacaattcaatccttttttaaaggaaatttggtgagatggctgcaattctttagaaagaagtagattcagaga

SEQ ID NO: 139562 - DNA, 71 bp, Homo sapiens
ccttttttaaaggaaatttggtgagatggctgcaattctttagaaagaagtagattcagagatgtttcagt

SEQ ID NO: 139563 - DNA, 74 bp, Homo sapiens
aggaaatttggtgagatggctgcaattctttagaaagaagtagattcagagatgtttcagttttgaaaattaga

SEQ ID NO: 139564 - DNA, 74 bp, Homo sapiens
ggtgagatggctgcaattctttagaaagaagtagattcagagatgtttcagttttgaaaattagaatttagagt

SEQ ID NO: 139565 - DNA, 73 bp, Homo sapiens
gctgcaattctttagaaagaagtagattcagagatgtttcagttttgaaaattagaatttagagtttaggagc

SEQ ID NO: 139566 - DNA, 69 bp, Homo sapiens
gaaagaagtagattcagagatgtttcagttttgaaaattagaatttagagtttaggagctaaaaccaag

SEQ ID NO: 139567 - DNA, 69 bp, Homo sapiens
aagtagattcagagatgtttcagttttgaaaattagaatttagagtttaggagctaaaaccaaggaata

SEQ ID NO: 139568 - DNA, 68 bp, Homo sapiens
gagatgtttcagttttgaaaattagaatttagagtttaggagctaaaaccaaggaatataaaaagaca

SEQ ID NO: 139569 - DNA, 71 bp, Homo sapiens
ttgaaaattagaatttagagtttaggagctaaaaccaaggaatataaaaagacatcccaagattcagcaga

SEQ ID NO: 139570 - DNA, 73 bp, Homo sapiens
attagaatttagagtttaggagctaaaaccaaggaatataaaaagacatcccaagattcagcagaagatgaga

SEQ ID NO: 139571 - DNA, 73 bp, Homo sapiens
agtttaggagctaaaaccaaggaatataaaaagacatcccaagattcagcagaagatgagaaaaactgcagaa

SEQ ID NO: 139572 - DNA, 75 bp, Homo sapiens
gctaaaaccaaggaatataaaaagacatcccaagattcagcagaagatgagaaaaactgcagaatttgaaaagca

SEQ ID NO: 139573 - DNA, 83 bp, Homo sapiens
gattcagcagaagatgagaaaaactgcagaatttgaaaagcagtttgatgggttggtgtccagatgctgctattcatctctaa

SEQ ID NO: 139574 - DNA, 80 bp, Homo sapiens
aagatgagaaaaactgcagaatttgaaaagcagtttgatgggttggtgtccagatgctgctattcatctctaatgataaa

SEQ ID NO: 139575 - DNA, 78 bp, Homo sapiens
aaaaactgcagaatttgaaaagcagtttgatgggttggtgtccagatgctgctattcatctctaatgataaagattac

SEQ ID NO: 139576 - DNA, 81 bp, Homo sapiens
atttgaaaagcagtttgatgggttggtgtccagatgctgctattcatctctaatgataaagattacgtgcctatgttgcaa

SEQ ID NO: 139577 - DNA, 83 bp, Homo sapiens
aaaagcagtttgatgggttggtgtccagatgctgctattcatctctaatgataaagattacgtgcctatgttgcaatcacatc

SEQ ID NO: 139578 - DNA, 81 bp, Homo sapiens
ggttggtgtccagatgctgctattcatctctaatgataaagattacgtgcctatgttgcaatcacatcggctttacaaaaa

SEQ ID NO: 139579 - DNA, 80 bp, Homo sapiens
gctattcatctctaatgataaagattacgtgcctatgttgcaatcacatcggctttacaaaaataatagccagtattcta

SEQ ID NO: 139580 - DNA, 80 bp, Homo sapiens
tctaatgataaagattacgtgcctatgttgcaatcacatcggctttacaaaaataatagccagtattctatcagagtatc

SEQ ID NO: 139581 - DNA, 79 bp, Homo sapiens
ataaagattacgtgcctatgttgcaatcacatcggctttacaaaaataatagccagtattctatcagagtatctgctgg

SEQ ID NO: 139582 - DNA, 78 bp, Homo sapiens
ctatgttgcaatcacatcggctttacaaaaataatagccagtattctatcagagtatctgctgggtcaaaacattttc

SEQ ID NO: 139583 - DNA, 77 bp, Homo sapiens
ttgcaatcacatcggctttacaaaaataatagccagtattctatcagagtatctgctgggtcaaaacattttcttta

SEQ ID NO: 139584 - DNA, 76 bp, Homo sapiens
aaaaataatagccagtattctatcagagtatctgctgggtcaaaacattttctttaacatctggtccatacatcag

SEQ ID NO: 139585 - DNA, 76 bp, Homo sapiens
agtattctatcagagtatctgctgggtcaaaacattttctttaacatctggtccatacatcagtgtctccttagtt

SEQ ID NO: 139586 - DNA, 72 bp, Homo sapiens
ctgggtcaaaacattttctttaacatctggtccatacatcagtgtctccttagtttctggattcctttagta

SEQ ID NO: 139587 - DNA, 74 bp, Homo sapiens
tctttaacatctggtccatacatcagtgtctccttagtttctggattcctttagtaaagactcactcgtagaaa

SEQ ID NO: 139588 - DNA, 74 bp, Homo sapiens
gtccatacatcagtgtctccttagtttctggattcctttagtaaagactcactcgtagaaactcattacaatat

SEQ ID NO: 139589 - DNA, 75 bp, Homo sapiens
ttagtttctggattcctttagtaaagactcactcgtagaaactcattacaatattgagaggctcagaacattaca

SEQ ID NO: 139590 - DNA, 77 bp, Homo sapiens
attcctttagtaaagactcactcgtagaaactcattacaatattgagaggctcagaacattacactgcgtgcaagac

SEQ ID NO: 139591 - DNA, 79 bp, Homo sapiens
tttagtaaagactcactcgtagaaactcattacaatattgagaggctcagaacattacactgcgtgcaagaccaacata

SEQ ID NO: 139592 - DNA, 80 bp, Homo sapiens
actcgtagaaactcattacaatattgagaggctcagaacattacactgcgtgcaagaccaacatacaaatctcacacaac

SEQ ID NO: 139593 - DNA, 80 bp, Homo sapiens
agaaactcattacaatattgagaggctcagaacattacactgcgtgcaagaccaacatacaaatctcacacaacctatac

SEQ ID NO: 139594 - DNA, 81 bp, Homo sapiens
aatattgagaggctcagaacattacactgcgtgcaagaccaacatacaaatctcacacaacctatacgctgtgaccattat

SEQ ID NO: 139595 - DNA, 79 bp, Homo sapiens
acattacactgcgtgcaagaccaacatacaaatctcacacaacctatacgctgtgaccattattgggctctaaagatta

SEQ ID NO: 139596 - DNA, 76 bp, Homo sapiens
acatacaaatctcacacaacctatacgctgtgaccattattgggctctaaagattaccctgcacttcatcaacttt

SEQ ID NO: 139597 - DNA, 74 bp, Homo sapiens
tatacgctgtgaccattattgggctctaaagattaccctgcacttcatcaactttttattcaacttcttgtaat

SEQ ID NO: 139598 - DNA, 74 bp, Homo sapiens
tgtgaccattattgggctctaaagattaccctgcacttcatcaactttttattcaacttcttgtaattgtgact

SEQ ID NO: 139599 - DNA, 72 bp, Homo sapiens
ctaaagattaccctgcacttcatcaactttttattcaacttcttgtaattgtgacttaaaggccaggagtgc

SEQ ID NO: 139600 - DNA, 71 bp, Homo sapiens
gcacttcatcaactttttattcaacttcttgtaattgtgacttaaaggccaggagtgcctctttttacaaa

SEQ ID NO: 139601 - DNA, 69 bp, Homo sapiens
catcaactttttattcaacttcttgtaattgtgacttaaaggccaggagtgcctctttttacaaagaaa

SEQ ID NO: 139602 - DNA, 72 bp, Homo sapiens
ttattcaacttcttgtaattgtgacttaaaggccaggagtgcctctttttacaaagaaatggtgctagtcaa

SEQ ID NO: 139603 - DNA, 69 bp, Homo sapiens
ccaggagtgcctctttttacaaagaaatggtgctagtcaacccctttacaaaatgcaagcaattttggg

SEQ ID NO: 139604 - DNA, 69 bp, Homo sapiens
aaagaaatggtgctagtcaacccctttacaaaatgcaagcaattttgggggaagagtcttgaatccgga

SEQ ID NO: 139605 - DNA, 71 bp, Homo sapiens
tagtcaacccctttacaaaatgcaagcaattttgggggaagagtcttgaatccggagatgaaaacgagatc

SEQ ID NO: 139606 - DNA, 71 bp, Homo sapiens
ctttacaaaatgcaagcaattttgggggaagagtcttgaatccggagatgaaaacgagatcttacttttga

SEQ ID NO: 139607 - DNA, 70 bp, Homo sapiens
aaaatgcaagcaattttgggggaagagtcttgaatccggagatgaaaacgagatcttacttttgaaagtg

SEQ ID NO: 139608 - DNA, 71 bp, Homo sapiens
aagagtcttgaatccggagatgaaaacgagatcttacttttgaaagtggtttggccagatcaggttaagcc

SEQ ID NO: 139609 - DNA, 73 bp, Homo sapiens
ttgaatccggagatgaaaacgagatcttacttttgaaagtggtttggccagatcaggttaagcctgctaatta

SEQ ID NO: 139610 - DNA, 71 bp, Homo sapiens
atgaaaacgagatcttacttttgaaagtggtttggccagatcaggttaagcctgctaattagacccctata

SEQ ID NO: 139611 - DNA, 71 bp, Homo sapiens
aaagtggtttggccagatcaggttaagcctgctaattagacccctatagacagattttagtgttaatctat

SEQ ID NO: 139612 - DNA, 73 bp, Homo sapiens
tttggccagatcaggttaagcctgctaattagacccctatagacagattttagtgttaatctattacctttga

SEQ ID NO: 139613 - DNA, 68 bp, Homo sapiens
agcctgctaattagacccctatagacagattttagtgttaatctattacctttgagaggggggaaaaa

SEQ ID NO: 139614 - DNA, 68 bp, Homo sapiens
tagacagattttagtgttaatctattacctttgagaggggggaaaaaataaatcccacagaccaacga

SEQ ID NO: 139615 - DNA, 67 bp, Homo sapiens
tttagtgttaatctattacctttgagaggggggaaaaaataaatcccacagaccaacgagggatgag

SEQ ID NO: 139616 - DNA, 67 bp, Homo sapiens
tttgagaggggggaaaaaataaatcccacagaccaacgagggatgagggacacaccagttctttaaa

SEQ ID NO: 139617 - DNA, 71 bp, Homo sapiens
aaaataaatcccacagaccaacgagggatgagggacacaccagttctttaaatgtcattatattcacccaa

SEQ ID NO: 139618 - DNA, 72 bp, Homo sapiens
aaatcccacagaccaacgagggatgagggacacaccagttctttaaatgtcattatattcacccaaatgtat

SEQ ID NO: 139619 - DNA, 78 bp, Homo sapiens
gatgagggacacaccagttctttaaatgtcattatattcacccaaatgtattctattgagtgatcaaactgagaataa

SEQ ID NO: 139620 - DNA, 77 bp, Homo sapiens
cagttctttaaatgtcattatattcacccaaatgtattctattgagtgatcaaactgagaataatttatcccacaca

SEQ ID NO: 139621 - DNA, 75 bp, Homo sapiens
aatgtcattatattcacccaaatgtattctattgagtgatcaaactgagaataatttatcccacacacccaacct

SEQ ID NO: 139622 - DNA, 72 bp, Homo sapiens
atattcacccaaatgtattctattgagtgatcaaactgagaataatttatcccacacacccaaccttaaagg

SEQ ID NO: 139623 - DNA, 71 bp, Homo sapiens
aaatgtattctattgagtgatcaaactgagaataatttatcccacacacccaaccttaaaggggagggaca

SEQ ID NO: 139624 - DNA, 71 bp, Homo sapiens
attctattgagtgatcaaactgagaataatttatcccacacacccaaccttaaaggggagggacacaacaa

SEQ ID NO: 139625 - DNA, 67 bp, Homo sapiens
ttatcccacacacccaaccttaaaggggagggacacaacaacaaactcctacagtcactggaaaagg

SEQ ID NO: 139626 - DNA, 67 bp, Homo sapiens
acccaaccttaaaggggagggacacaacaacaaactcctacagtcactggaaaaggtggggcacaga

SEQ ID NO: 139627 - DNA, 69 bp, Homo sapiens
gggagggacacaacaacaaactcctacagtcactggaaaaggtggggcacagaggggtggggttgtctg

SEQ ID NO: 139628 - DNA, 71 bp, Homo sapiens
aaactcctacagtcactggaaaaggtggggcacagaggggtggggttgtctggattagagacagataaata

SEQ ID NO: 139629 - DNA, 70 bp, Homo sapiens
aaaggtggggcacagaggggtggggttgtctggattagagacagataaataagggagaattccactgatt

SEQ ID NO: 139630 - DNA, 73 bp, Homo sapiens
agaggggtggggttgtctggattagagacagataaataagggagaattccactgatttgaagagattagtgat

SEQ ID NO: 139631 - DNA, 75 bp, Homo sapiens
gggttgtctggattagagacagataaataagggagaattccactgatttgaagagattagtgatttacattaaga

SEQ ID NO: 139632 - DNA, 76 bp, Homo sapiens
tggattagagacagataaataagggagaattccactgatttgaagagattagtgatttacattaagacccagttca

SEQ ID NO: 139633 - DNA, 74 bp, Homo sapiens
agacagataaataagggagaattccactgatttgaagagattagtgatttacattaagacccagttcagaagcc

SEQ ID NO: 139634 - DNA, 75 bp, Homo sapiens
taagggagaattccactgatttgaagagattagtgatttacattaagacccagttcagaagcctggagttgaata

SEQ ID NO: 139635 - DNA, 74 bp, Homo sapiens
actgatttgaagagattagtgatttacattaagacccagttcagaagcctggagttgaataacactcatttttc

SEQ ID NO: 139636 - DNA, 75 bp, Homo sapiens
tttgaagagattagtgatttacattaagacccagttcagaagcctggagttgaataacactcatttttctggctc

SEQ ID NO: 139637 - DNA, 77 bp, Homo sapiens
acattaagacccagttcagaagcctggagttgaataacactcatttttctggctccagagaagcatcatttacacca

SEQ ID NO: 139638 - DNA, 82 bp, Homo sapiens
ttcagaagcctggagttgaataacactcatttttctggctccagagaagcatcatttacaccacaggcatgtctaagatcaa

SEQ ID NO: 139639 - DNA, 82 bp, Homo sapiens
tggagttgaataacactcatttttctggctccagagaagcatcatttacaccacaggcatgtctaagatcaagctgttccat

SEQ ID NO: 139640 - DNA, 82 bp, Homo sapiens
ataacactcatttttctggctccagagaagcatcatttacaccacaggcatgtctaagatcaagctgttccattgagcttta

SEQ ID NO: 139641 - DNA, 79 bp, Homo sapiens
atttttctggctccagagaagcatcatttacaccacaggcatgtctaagatcaagctgttccattgagctttatggttt

SEQ ID NO: 139642 - DNA, 80 bp, Homo sapiens
cagagaagcatcatttacaccacaggcatgtctaagatcaagctgttccattgagctttatggttttcccaagcttgctt

SEQ ID NO: 139643 - DNA, 79 bp, Homo sapiens
aagcatcatttacaccacaggcatgtctaagatcaagctgttccattgagctttatggttttcccaagcttgctttgga

SEQ ID NO: 139644 - DNA, 79 bp, Homo sapiens
tacaccacaggcatgtctaagatcaagctgttccattgagctttatggttttcccaagcttgctttggaagcctagaca

SEQ ID NO: 139645 - DNA, 77 bp, Homo sapiens
tctaagatcaagctgttccattgagctttatggttttcccaagcttgctttggaagcctagacacgtgtttgattca

SEQ ID NO: 139646 - DNA, 74 bp, Homo sapiens
ttccattgagctttatggttttcccaagcttgctttggaagcctagacacgtgtttgattcaggtgtattccaa

SEQ ID NO: 139647 - DNA, 70 bp, Homo sapiens
aagcttgctttggaagcctagacacgtgtttgattcaggtgtattccaacccttaaaggttccaattgga

SEQ ID NO: 139648 - DNA, 69 bp, Homo sapiens
tttggaagcctagacacgtgtttgattcaggtgtattccaacccttaaaggttccaattggaacacaaa

SEQ ID NO: 139649 - DNA, 69 bp, Homo sapiens
cctagacacgtgtttgattcaggtgtattccaacccttaaaggttccaattggaacacaaacacgcaaa

SEQ ID NO: 139650 - DNA, 69 bp, Homo sapiens
gtgtttgattcaggtgtattccaacccttaaaggttccaattggaacacaaacacgcaaacaccaaaca

SEQ ID NO: 139651 - DNA, 68 bp, Homo sapiens
aggtgtattccaacccttaaaggttccaattggaacacaaacacgcaaacaccaaacacaacaatatg

SEQ ID NO: 139652 - DNA, 68 bp, Homo sapiens
aacccttaaaggttccaattggaacacaaacacgcaaacaccaaacacaacaatatggaagtatttca

SEQ ID NO: 139653 - DNA, 69 bp, Homo sapiens
gttccaattggaacacaaacacgcaaacaccaaacacaacaatatggaagtatttcacaacgtaaaagt

SEQ ID NO: 139654 - DNA, 70 bp, Homo sapiens
aacacaaacacgcaaacaccaaacacaacaatatggaagtatttcacaacgtaaaagtttagagatctcg

SEQ ID NO: 139655 - DNA, 71 bp, Homo sapiens
acacgcaaacaccaaacacaacaatatggaagtatttcacaacgtaaaagtttagagatctcggccagaaa

SEQ ID NO: 139656 - DNA, 71 bp, Homo sapiens
aaacacaacaatatggaagtatttcacaacgtaaaagtttagagatctcggccagaaagcgaagactctta

SEQ ID NO: 139657 - DNA, 71 bp, Homo sapiens
aatatggaagtatttcacaacgtaaaagtttagagatctcggccagaaagcgaagactcttatgtaagaaa

SEQ ID NO: 139658 - DNA, 68 bp, Homo sapiens
aagtatttcacaacgtaaaagtttagagatctcggccagaaagcgaagactcttatgtaagaaaaaaa

SEQ ID NO: 139659 - DNA, 67 bp, Homo sapiens
caacgtaaaagtttagagatctcggccagaaagcgaagactcttatgtaagaaaaaaaactcaattt

SEQ ID NO: 139660 - DNA, 69 bp, Homo sapiens
gtttagagatctcggccagaaagcgaagactcttatgtaagaaaaaaaactcaatttttaacacattaa

SEQ ID NO: 139661 - DNA, 66 bp, Homo sapiens
ctcggccagaaagcgaagactcttatgtaagaaaaaaaactcaatttttaacacattaagttaacc

SEQ ID NO: 139662 - DNA, 67 bp, Homo sapiens
tgtaagaaaaaaaactcaatttttaacacattaagttaacctccctctacaattcaaagattgcgaa

SEQ ID NO: 139663 - DNA, 67 bp, Homo sapiens
aaaactcaatttttaacacattaagttaacctccctctacaattcaaagattgcgaaaaacacagtg

SEQ ID NO: 139664 - DNA, 68 bp, Homo sapiens
ttttaacacattaagttaacctccctctacaattcaaagattgcgaaaaacacagtgtacttttacta

SEQ ID NO: 139665 - DNA, 70 bp, Homo sapiens
cctccctctacaattcaaagattgcgaaaaacacagtgtacttttactagtaaaaagataacccatcaga

SEQ ID NO: 139666 - DNA, 69 bp, Homo sapiens
ttttactagtaaaaagataacccatcagaaaatttcaaatttctcttgagccgagtctcaaactggaac

SEQ ID NO: 139667 - DNA, 70 bp, Homo sapiens
gtaaaaagataacccatcagaaaatttcaaatttctcttgagccgagtctcaaactggaacctagtttca

SEQ ID NO: 139668 - DNA, 70 bp, Homo sapiens
ataacccatcagaaaatttcaaatttctcttgagccgagtctcaaactggaacctagtttcaattgtttc

SEQ ID NO: 139669 - DNA, 69 bp, Homo sapiens
aatttcaaatttctcttgagccgagtctcaaactggaacctagtttcaattgtttcccttctcacgtaa

SEQ ID NO: 139670 - DNA, 69 bp, Homo sapiens
aaatttctcttgagccgagtctcaaactggaacctagtttcaattgtttcccttctcacgtaaaatata

SEQ ID NO: 139671 - DNA, 71 bp, Homo sapiens
ttgagccgagtctcaaactggaacctagtttcaattgtttcccttctcacgtaaaatatactaatgaactc

SEQ ID NO: 139672 - DNA, 70 bp, Homo sapiens
tctcaaactggaacctagtttcaattgtttcccttctcacgtaaaatatactaatgaactctgggcaatt

SEQ ID NO: 139673 - DNA, 77 bp, Homo sapiens
cttctcacgtaaaatatactaatgaactctgggcaattttccattctcaagcattcttcacgtgtattcaatcgaga

SEQ ID NO: 139674 - DNA, 75 bp, Homo sapiens
attcttcacgtgtattcaatcgagagctctagtcagaagccagtcatttagtatttttgaagagtagaaaggtac

SEQ ID NO: 139675 - DNA, 76 bp, Homo sapiens
tgtattcaatcgagagctctagtcagaagccagtcatttagtatttttgaagagtagaaaggtacccaataattga

SEQ ID NO: 139676 - DNA, 72 bp, Homo sapiens
aatcgagagctctagtcagaagccagtcatttagtatttttgaagagtagaaaggtacccaataattgaatt

SEQ ID NO: 139677 - DNA, 70 bp, Homo sapiens
ctctagtcagaagccagtcatttagtatttttgaagagtagaaaggtacccaataattgaatttttctgt

SEQ ID NO: 139678 - DNA, 68 bp, Homo sapiens
agccagtcatttagtatttttgaagagtagaaaggtacccaataattgaatttttctgtttaataaca

SEQ ID NO: 139679 - DNA, 65 bp, Homo sapiens
gtatttttgaagagtagaaaggtacccaataattgaatttttctgtttaataacaaaagacttta

SEQ ID NO: 139680 - DNA, 65 bp, Homo sapiens
gagtagaaaggtacccaataattgaatttttctgtttaataacaaaagactttaaaatcgcttac

SEQ ID NO: 139681 - DNA, 67 bp, Homo sapiens
ggtacccaataattgaatttttctgtttaataacaaaagactttaaaatcgcttactttgcagtcca

SEQ ID NO: 139682 - DNA, 68 bp, Homo sapiens
attgaatttttctgtttaataacaaaagactttaaaatcgcttactttgcagtccaaacaccaatgac

SEQ ID NO: 139683 - DNA, 71 bp, Homo sapiens
tctgtttaataacaaaagactttaaaatcgcttactttgcagtccaaacaccaatgactgttataacagat

SEQ ID NO: 139684 - DNA, 76 bp, Homo sapiens
aagactttaaaatcgcttactttgcagtccaaacaccaatgactgttataacagattcaactgccaatgatcagaa

SEQ ID NO: 139685 - DNA, 76 bp, Homo sapiens
cttactttgcagtccaaacaccaatgactgttataacagattcaactgccaatgatcagaagtcacgactttttaa

SEQ ID NO: 139686 - DNA, 73 bp, Homo sapiens
agtccaaacaccaatgactgttataacagattcaactgccaatgatcagaagtcacgactttttaacaacttt

SEQ ID NO: 139687 - DNA, 76 bp, Homo sapiens
aaacaccaatgactgttataacagattcaactgccaatgatcagaagtcacgactttttaacaacttttgagctca

SEQ ID NO: 139688 - DNA, 74 bp, Homo sapiens
ttataacagattcaactgccaatgatcagaagtcacgactttttaacaacttttgagctcaatcccaactttct

SEQ ID NO: 139689 - DNA, 72 bp, Homo sapiens
attcaactgccaatgatcagaagtcacgactttttaacaacttttgagctcaatcccaactttcttacccaa

SEQ ID NO: 139690 - DNA, 67 bp, Homo sapiens
agaagtcacgactttttaacaacttttgagctcaatcccaactttcttacccaagaaagcaagaact

SEQ ID NO: 139691 - DNA, 68 bp, Homo sapiens
aaatctaaaacactcgtgacattggagtcaatcggcttcgggaaaaacatcaaaaactaaaaactcta

SEQ ID NO: 139692 - DNA, 74 bp, Homo sapiens
tcgtgacattggagtcaatcggcttcgggaaaaacatcaaaaactaaaaactctatgctcatccgagtatgtaa

SEQ ID NO: 139693 - DNA, 71 bp, Homo sapiens
acattggagtcaatcggcttcgggaaaaacatcaaaaactaaaaactctatgctcatccgagtatgtaaac

SEQ ID NO: 139694 - DNA, 72 bp, Homo sapiens
attggagtcaatcggcttcgggaaaaacatcaaaaactaaaaactctatgctcatccgagtatgtaaacgca

SEQ ID NO: 139695 - DNA, 71 bp, Homo sapiens
aaacatcaaaaactaaaaactctatgctcatccgagtatgtaaacgcaaggcttgattagttcaaaccaaa

SEQ ID NO: 139696 - DNA, 73 bp, Homo sapiens
tcaaaaactaaaaactctatgctcatccgagtatgtaaacgcaaggcttgattagttcaaaccaaattaagca

SEQ ID NO: 139697 - DNA, 71 bp, Homo sapiens
aactaaaaactctatgctcatccgagtatgtaaacgcaaggcttgattagttcaaaccaaattaagcagtt

SEQ ID NO: 139698 - DNA, 70 bp, Homo sapiens
gtatgtaaacgcaaggcttgattagttcaaaccaaattaagcagtttgggctccaaaattacgcaggaaa

SEQ ID NO: 139699 - DNA, 71 bp, Homo sapiens
attagttcaaaccaaattaagcagtttgggctccaaaattacgcaggaaactcacgcttcatcactgaaaa

SEQ ID NO: 139700 - DNA, 71 bp, Homo sapiens
attaagcagtttgggctccaaaattacgcaggaaactcacgcttcatcactgaaaatttcttcctaaaata

SEQ ID NO: 139701 - DNA, 74 bp, Homo sapiens
ctccaaaattacgcaggaaactcacgcttcatcactgaaaatttcttcctaaaatactctgaggaatcatataa

SEQ ID NO: 139702 - DNA, 73 bp, Homo sapiens
aaattacgcaggaaactcacgcttcatcactgaaaatttcttcctaaaatactctgaggaatcatataaaatc

SEQ ID NO: 139703 - DNA, 74 bp, Homo sapiens
ctcacgcttcatcactgaaaatttcttcctaaaatactctgaggaatcatataaaatcttaatcaaaagtttgc

SEQ ID NO: 139704 - DNA, 74 bp, Homo sapiens
gcttcatcactgaaaatttcttcctaaaatactctgaggaatcatataaaatcttaatcaaaagtttgctaaga

SEQ ID NO: 139705 - DNA, 71 bp, Homo sapiens
atttcttcctaaaatactctgaggaatcatataaaatcttaatcaaaagtttgctaagacatttaatagtc

SEQ ID NO: 139706 - DNA, 71 bp, Homo sapiens
ttcctaaaatactctgaggaatcatataaaatcttaatcaaaagtttgctaagacatttaatagtcttatt

SEQ ID NO: 139707 - DNA, 74 bp, Homo sapiens
ctctgaggaatcatataaaatcttaatcaaaagtttgctaagacatttaatagtcttatttacctgataaatca

SEQ ID NO: 139708 - DNA, 74 bp, Homo sapiens
catataaaatcttaatcaaaagtttgctaagacatttaatagtcttatttacctgataaatcatattcagatct

SEQ ID NO: 139709 - DNA, 74 bp, Homo sapiens
tcttaatcaaaagtttgctaagacatttaatagtcttatttacctgataaatcatattcagatcttaaggtagc

SEQ ID NO: 139710 - DNA, 73 bp, Homo sapiens
ttgctaagacatttaatagtcttatttacctgataaatcatattcagatcttaaggtagctttaccaacaagg

SEQ ID NO: 139711 - DNA, 71 bp, Homo sapiens
agacatttaatagtcttatttacctgataaatcatattcagatcttaaggtagctttaccaacaaggggaa

SEQ ID NO: 139712 - DNA, 69 bp, Homo sapiens
cttatttacctgataaatcatattcagatcttaaggtagctttaccaacaaggggaaacttaggtaaca

SEQ ID NO: 139713 - DNA, 69 bp, Homo sapiens
tacctgataaatcatattcagatcttaaggtagctttaccaacaaggggaaacttaggtaacaaattgt

SEQ ID NO: 139714 - DNA, 65 bp, Homo sapiens
aatcatattcagatcttaaggtagctttaccaacaaggggaaacttaggtaacaaattgtttttt

SEQ ID NO: 139715 - DNA, 69 bp, Homo sapiens
ttttttaaaaaagcacaaattattcccacagcctcaaaaatcaatttctatggtgcttttctatcaccc

SEQ ID NO: 139716 - DNA, 73 bp, Homo sapiens
aaagcacaaattattcccacagcctcaaaaatcaatttctatggtgcttttctatcacccttctaacagattc

SEQ ID NO: 139717 - DNA, 74 bp, Homo sapiens
tattcccacagcctcaaaaatcaatttctatggtgcttttctatcacccttctaacagattcctcttaattcta

SEQ ID NO: 139718 - DNA, 74 bp, Homo sapiens
agcctcaaaaatcaatttctatggtgcttttctatcacccttctaacagattcctcttaattctagcaagcctc

SEQ ID NO: 139719 - DNA, 73 bp, Homo sapiens
aaaatcaatttctatggtgcttttctatcacccttctaacagattcctcttaattctagcaagcctcgtatgt

SEQ ID NO: 139720 - DNA, 77 bp, Homo sapiens
ttttctatcacccttctaacagattcctcttaattctagcaagcctcgtatgttcgcatcattcaatgctttccgaa

SEQ ID NO: 139721 - DNA, 76 bp, Homo sapiens
acccttctaacagattcctcttaattctagcaagcctcgtatgttcgcatcattcaatgctttccgaatccaatac

SEQ ID NO: 139722 - DNA, 78 bp, Homo sapiens
agattcctcttaattctagcaagcctcgtatgttcgcatcattcaatgctttccgaatccaatacccagagccccaca

SEQ ID NO: 139723 - DNA, 79 bp, Homo sapiens
ttaattctagcaagcctcgtatgttcgcatcattcaatgctttccgaatccaatacccagagccccacagaccagctac

SEQ ID NO: 139724 - DNA, 78 bp, Homo sapiens
ctcgtatgttcgcatcattcaatgctttccgaatccaatacccagagccccacagaccagctacgtatgctgtttaaa

SEQ ID NO: 139725 - DNA, 77 bp, Homo sapiens
tgttcgcatcattcaatgctttccgaatccaatacccagagccccacagaccagctacgtatgctgtttaaacccta

SEQ ID NO: 139726 - DNA, 73 bp, Homo sapiens
attcaatgctttccgaatccaatacccagagccccacagaccagctacgtatgctgtttaaaccctagaactg

SEQ ID NO: 139727 - DNA, 72 bp, Homo sapiens
tttccgaatccaatacccagagccccacagaccagctacgtatgctgtttaaaccctagaactgtcttgttc

SEQ ID NO: 139728 - DNA, 72 bp, Homo sapiens
aatacccagagccccacagaccagctacgtatgctgtttaaaccctagaactgtcttgttcccgcaattcaa

SEQ ID NO: 139729 - DNA, 71 bp, Homo sapiens
ctacgtatgctgtttaaaccctagaactgtcttgttcccgcaattcaatcaaccctcactgaacaccttta

SEQ ID NO: 139730 - DNA, 71 bp, Homo sapiens
tatgctgtttaaaccctagaactgtcttgttcccgcaattcaatcaaccctcactgaacacctttaagagg

SEQ ID NO: 139731 - DNA, 68 bp, Homo sapiens
aaaccctagaactgtcttgttcccgcaattcaatcaaccctcactgaacacctttaagaggtggaaac

SEQ ID NO: 139732 - DNA, 68 bp, Homo sapiens
caattcaatcaaccctcactgaacacctttaagaggtggaaacttaagggaaagaaaactgtagccaa

SEQ ID NO: 139733 - DNA, 67 bp, Homo sapiens
aatcaaccctcactgaacacctttaagaggtggaaacttaagggaaagaaaactgtagccaacacac

SEQ ID NO: 139734 - DNA, 68 bp, Homo sapiens
tgaacacctttaagaggtggaaacttaagggaaagaaaactgtagccaacacacgctgtggttctaag

SEQ ID NO: 139735 - DNA, 68 bp, Homo sapiens
tttaagaggtggaaacttaagggaaagaaaactgtagccaacacacgctgtggttctaagtattagaa

SEQ ID NO: 139736 - DNA, 68 bp, Homo sapiens
aacttaagggaaagaaaactgtagccaacacacgctgtggttctaagtattagaacgcctcaaaacaa

SEQ ID NO: 139737 - DNA, 68 bp, Homo sapiens
aagggaaagaaaactgtagccaacacacgctgtggttctaagtattagaacgcctcaaaacaaaggaa

SEQ ID NO: 139738 - DNA, 67 bp, Homo sapiens
aacacacgctgtggttctaagtattagaacgcctcaaaacaaaggaaataacggcgccgtaaatggt

SEQ ID NO: 139739 - DNA, 67 bp, Homo sapiens
ttctaagtattagaacgcctcaaaacaaaggaaataacggcgccgtaaatggttgcccgccaatttc

SEQ ID NO: 139740 - DNA, 66 bp, Homo sapiens
agtattagaacgcctcaaaacaaaggaaataacggcgccgtaaatggttgcccgccaatttctcct

SEQ ID NO: 139741 - DNA, 67 bp, Homo sapiens
caaaacaaaggaaataacggcgccgtaaatggttgcccgccaatttctccttcacaatcccgtggaa

SEQ ID NO: 139742 - DNA, 69 bp, Homo sapiens
aaaggaaataacggcgccgtaaatggttgcccgccaatttctccttcacaatcccgtggaaatgcgatg

SEQ ID NO: 139743 - DNA, 73 bp, Homo sapiens
cgccgtaaatggttgcccgccaatttctccttcacaatcccgtggaaatgcgatgtccacaaaatcatcttaa

SEQ ID NO: 139744 - DNA, 73 bp, Homo sapiens
taaatggttgcccgccaatttctccttcacaatcccgtggaaatgcgatgtccacaaaatcatcttaacgact

SEQ ID NO: 139745 - DNA, 74 bp, Homo sapiens
caatttctccttcacaatcccgtggaaatgcgatgtccacaaaatcatcttaacgactttgtggtctgtcctaa

SEQ ID NO: 139746 - DNA, 75 bp, Homo sapiens
cgtggaaatgcgatgtccacaaaatcatcttaacgactttgtggtctgtcctaatagaatactgatacagatttt

SEQ ID NO: 139747 - DNA, 76 bp, Homo sapiens
aaatgcgatgtccacaaaatcatcttaacgactttgtggtctgtcctaatagaatactgatacagatttttgcctg

SEQ ID NO: 139748 - DNA, 71 bp, Homo sapiens
aaaatcatcttaacgactttgtggtctgtcctaatagaatactgatacagatttttgcctgggaagccctt

SEQ ID NO: 139749 - DNA, 74 bp, Homo sapiens
atcttaacgactttgtggtctgtcctaatagaatactgatacagatttttgcctgggaagccctttcggcatca

SEQ ID NO: 139750 - DNA, 74 bp, Homo sapiens
actttgtggtctgtcctaatagaatactgatacagatttttgcctgggaagccctttcggcatcagagaaaagc

SEQ ID NO: 139751 - DNA, 74 bp, Homo sapiens
atactgatacagatttttgcctgggaagccctttcggcatcagagaaaagcgcttcatttaggccaaacacaaa

SEQ ID NO: 139752 - DNA, 74 bp, Homo sapiens
tgggaagccctttcggcatcagagaaaagcgcttcatttaggccaaacacaaagccctcacgcaatcccctcca

SEQ ID NO: 139753 - DNA, 72 bp, Homo sapiens
ccctttcggcatcagagaaaagcgcttcatttaggccaaacacaaagccctcacgcaatcccctccacctaa

SEQ ID NO: 139754 - DNA, 70 bp, Homo sapiens
agagaaaagcgcttcatttaggccaaacacaaagccctcacgcaatcccctccacctaacgggcccagaa

SEQ ID NO: 139755 - DNA, 69 bp, Homo sapiens
aagcgcttcatttaggccaaacacaaagccctcacgcaatcccctccacctaacgggcccagaacttag

SEQ ID NO: 139756 - DNA, 69 bp, Homo sapiens
gccaaacacaaagccctcacgcaatcccctccacctaacgggcccagaacttagtcggccttggattag

SEQ ID NO: 139757 - DNA, 68 bp, Homo sapiens
acaaagccctcacgcaatcccctccacctaacgggcccagaacttagtcggccttggattagtttcca

SEQ ID NO: 139758 - DNA, 69 bp, Homo sapiens
ctcacgcaatcccctccacctaacgggcccagaacttagtcggccttggattagtttccatcttaagag

SEQ ID NO: 139759 - DNA, 69 bp, Homo sapiens
taacgggcccagaacttagtcggccttggattagtttccatcttaagaggccccaaagacatcccagac

SEQ ID NO: 139760 - DNA, 68 bp, Homo sapiens
aacttagtcggccttggattagtttccatcttaagaggccccaaagacatcccagactccgtcctttc

SEQ ID NO: 139761 - DNA, 70 bp, Homo sapiens
ttggattagtttccatcttaagaggccccaaagacatcccagactccgtcctttccgtggaggcaaagac

SEQ ID NO: 139762 - DNA, 69 bp, Homo sapiens
ttagtttccatcttaagaggccccaaagacatcccagactccgtcctttccgtggaggcaaagacggtc

SEQ ID NO: 139763 - DNA, 65 bp, Homo sapiens
aaagacatcccagactccgtcctttccgtggaggcaaagacggtccttcgttaacctaaacaccg

SEQ ID NO: 139764 - DNA, 64 bp, Homo sapiens
agactccgtcctttccgtggaggcaaagacggtccttcgttaacctaaacaccggcccaaagac

SEQ ID NO: 139765 - DNA, 63 bp, Homo sapiens
gtcctttccgtggaggcaaagacggtccttcgttaacctaaacaccggcccaaagacccaaaa

SEQ ID NO: 139766 - DNA, 64 bp, Homo sapiens
aggcaaagacggtccttcgttaacctaaacaccggcccaaagacccaaaagaacgtcgtctgtc

SEQ ID NO: 139767 - DNA, 65 bp, Homo sapiens
ttcgttaacctaaacaccggcccaaagacccaaaagaacgtcgtctgtccccttgcaccccacca

SEQ ID NO: 139768 - DNA, 68 bp, Homo sapiens
aaaagaacgtcgtctgtccccttgcaccccaccacgcggccttacgaagcgcggcccgctgcgggtcg

SEQ ID NO: 139769 - DNA, 71 bp, Homo sapiens
tcgtctgtccccttgcaccccaccacgcggccttacgaagcgcggcccgctgcgggtcgggtccgcgttgc

SEQ ID NO: 139770 - DNA, 70 bp, Homo sapiens
caccccaccacgcggccttacgaagcgcggcccgctgcgggtcgggtccgcgttgccgcgcggcttctcc

SEQ ID NO: 139771 - DNA, 74 bp, Homo sapiens
aaggagctaggaccacacagccaccccctaccgcagctctacgtacccgctcgccgtagttctgctcgccgctg

SEQ ID NO: 139772 - DNA, 78 bp, Homo sapiens
gaccacacagccaccccctaccgcagctctacgtacccgctcgccgtagttctgctcgccgctgtcgctcatgactcc

SEQ ID NO: 139773 - DNA, 79 bp, Homo sapiens
acagccaccccctaccgcagctctacgtacccgctcgccgtagttctgctcgccgctgtcgctcatgactcctggctgc

SEQ ID NO: 139774 - DNA, 82 bp, Homo sapiens
taccgcagctctacgtacccgctcgccgtagttctgctcgccgctgtcgctcatgactcctggctgctgtcgccggtcgatg

SEQ ID NO: 139775 - DNA, 83 bp, Homo sapiens
tctacgtacccgctcgccgtagttctgctcgccgctgtcgctcatgactcctggctgctgtcgccggtcgatgtgcttcaatc

SEQ ID NO: 139776 - DNA, 85 bp, Homo sapiens
tcgccgtagttctgctcgccgctgtcgctcatgactcctggctgctgtcgccggtcgatgtgcttcaatcgaagctgccaacctc

SEQ ID NO: 139777 - DNA, 86 bp, Homo sapiens
gtagttctgctcgccgctgtcgctcatgactcctggctgctgtcgccggtcgatgtgcttcaatcgaagctgccaacctcttgcac

SEQ ID NO: 139778 - DNA, 82 bp, Homo sapiens
ccgctgtcgctcatgactcctggctgctgtcgccggtcgatgtgcttcaatcgaagctgccaacctcttgcaccttccttaa

SEQ ID NO: 139779 - DNA, 79 bp, Homo sapiens
atgactcctggctgctgtcgccggtcgatgtgcttcaatcgaagctgccaacctcttgcaccttccttaaggaggctcc

SEQ ID NO: 139780 - DNA, 80 bp, Homo sapiens
tcctggctgctgtcgccggtcgatgtgcttcaatcgaagctgccaacctcttgcaccttccttaaggaggctccgccgca

SEQ ID NO: 139781 - DNA, 78 bp, Homo sapiens
tgtcgccggtcgatgtgcttcaatcgaagctgccaacctcttgcaccttccttaaggaggctccgccgcagccccgca

SEQ ID NO: 139782 - DNA, 76 bp, Homo sapiens
atgtgcttcaatcgaagctgccaacctcttgcaccttccttaaggaggctccgccgcagccccgcacgacgcgccg

SEQ ID NO: 139783 - DNA, 73 bp, Homo sapiens
aatcgaagctgccaacctcttgcaccttccttaaggaggctccgccgcagccccgcacgacgcgccggtcgcc

SEQ ID NO: 139784 - DNA, 76 bp, Homo sapiens
tgccaacctcttgcaccttccttaaggaggctccgccgcagccccgcacgacgcgccggtcgcccagccgctcaga

SEQ ID NO: 139785 - DNA, 76 bp, Homo sapiens
cttaaggaggctccgccgcagccccgcacgacgcgccggtcgcccagccgctcagagccgaaatgctccgcaccgc

SEQ ID NO: 139786 - DNA, 77 bp, Homo sapiens
ccgcagccccgcacgacgcgccggtcgcccagccgctcagagccgaaatgctccgcaccgcctccgcacgggctcta

SEQ ID NO: 139787 - DNA, 76 bp, Homo sapiens
cccgcacgacgcgccggtcgcccagccgctcagagccgaaatgctccgcaccgcctccgcacgggctctaactcta

SEQ ID NO: 139788 - DNA, 76 bp, Homo sapiens
ccggtcgcccagccgctcagagccgaaatgctccgcaccgcctccgcacgggctctaactctaccggatgtgacgc

SEQ ID NO: 139789 - DNA, 77 bp, Homo sapiens
agccgctcagagccgaaatgctccgcaccgcctccgcacgggctctaactctaccggatgtgacgcggcgctcctta

SEQ ID NO: 139790 - DNA, 77 bp, Homo sapiens
ctcagagccgaaatgctccgcaccgcctccgcacgggctctaactctaccggatgtgacgcggcgctccttagccag

SEQ ID NO: 139791 - DNA, 75 bp, Homo sapiens
aaatgctccgcaccgcctccgcacgggctctaactctaccggatgtgacgcggcgctccttagccaggctcctcc

SEQ ID NO: 139792 - DNA, 72 bp, Homo sapiens
cctccgcacgggctctaactctaccggatgtgacgcggcgctccttagccaggctcctcccctcccagaaac

SEQ ID NO: 139793 - DNA, 73 bp, Homo sapiens
ggctctaactctaccggatgtgacgcggcgctccttagccaggctcctcccctcccagaaacgcgcgctttct

SEQ ID NO: 139794 - DNA, 73 bp, Homo sapiens
taactctaccggatgtgacgcggcgctccttagccaggctcctcccctcccagaaacgcgcgctttcttggcc

SEQ ID NO: 139795 - DNA, 73 bp, Homo sapiens
atgtgacgcggcgctccttagccaggctcctcccctcccagaaacgcgcgctttcttggcctcgcccctcctc

SEQ ID NO: 139796 - DNA, 72 bp, Homo sapiens
ctccttagccaggctcctcccctcccagaaacgcgcgctttcttggcctcgcccctcctcgctctgcctttc

SEQ ID NO: 139797 - DNA, 75 bp, Homo sapiens
aggctcctcccctcccagaaacgcgcgctttcttggcctcgcccctcctcgctctgcctttcctctccagctgca

SEQ ID NO: 139798 - DNA, 77 bp, Homo sapiens
cctcccagaaacgcgcgctttcttggcctcgcccctcctcgctctgcctttcctctccagctgcagcgcgtcccgca

SEQ ID NO: 139799 - DNA, 77 bp, Homo sapiens
agaaacgcgcgctttcttggcctcgcccctcctcgctctgcctttcctctccagctgcagcgcgtcccgcacaggaa

SEQ ID NO: 139800 - DNA, 77 bp, Homo sapiens
tttcttggcctcgcccctcctcgctctgcctttcctctccagctgcagcgcgtcccgcacaggaagtgacgtgaccc

SEQ ID NO: 139801 - DNA, 78 bp, Homo sapiens
tcgcccctcctcgctctgcctttcctctccagctgcagcgcgtcccgcacaggaagtgacgtgaccccgcccctcgca

SEQ ID NO: 139802 - DNA, 77 bp, Homo sapiens
tcctcgctctgcctttcctctccagctgcagcgcgtcccgcacaggaagtgacgtgaccccgcccctcgcagggccc

SEQ ID NO: 139803 - DNA, 69 bp, Homo sapiens
ttacctgaactggtgttttcacgaaccaggaagaatgcgatcaaacactttctttggaaggtgtttatt

SEQ ID NO: 139804 - DNA, 70 bp, Homo sapiens
actggtgttttcacgaaccaggaagaatgcgatcaaacactttctttggaaggtgtttatttggttcatg

SEQ ID NO: 139805 - DNA, 70 bp, Homo sapiens
aaccaggaagaatgcgatcaaacactttctttggaaggtgtttatttggttcatgtcctggccaaataaa

SEQ ID NO: 139806 - DNA, 69 bp, Homo sapiens
aagaatgcgatcaaacactttctttggaaggtgtttatttggttcatgtcctggccaaataaaaacttg

SEQ ID NO: 139807 - DNA, 70 bp, Homo sapiens
atcaaacactttctttggaaggtgtttatttggttcatgtcctggccaaataaaaacttggagatgagct

SEQ ID NO: 139808 - DNA, 73 bp, Homo sapiens
ttctttggaaggtgtttatttggttcatgtcctggccaaataaaaacttggagatgagcttcctctgtgtgaa

SEQ ID NO: 139809 - DNA, 72 bp, Homo sapiens
aggtgtttatttggttcatgtcctggccaaataaaaacttggagatgagcttcctctgtgtgaaggagaacc

SEQ ID NO: 139810 - DNA, 77 bp, Homo sapiens
ttggttcatgtcctggccaaataaaaacttggagatgagcttcctctgtgtgaaggagaaccgcttgctgtactgaa

SEQ ID NO: 139811 - DNA, 75 bp, Homo sapiens
gccaaataaaaacttggagatgagcttcctctgtgtgaaggagaaccgcttgctgtactgaaatgggatgttgtt

SEQ ID NO: 139812 - DNA, 75 bp, Homo sapiens
taaaaacttggagatgagcttcctctgtgtgaaggagaaccgcttgctgtactgaaatgggatgttgttttagat

SEQ ID NO: 139813 - DNA, 74 bp, Homo sapiens
atgagcttcctctgtgtgaaggagaaccgcttgctgtactgaaatgggatgttgttttagatttacctttggtg

SEQ ID NO: 139814 - DNA, 74 bp, Homo sapiens
ttcctctgtgtgaaggagaaccgcttgctgtactgaaatgggatgttgttttagatttacctttggtgtgggca

SEQ ID NO: 139815 - DNA, 71 bp, Homo sapiens
aggagaaccgcttgctgtactgaaatgggatgttgttttagatttacctttggtgtgggcactggttgctt

SEQ ID NO: 139816 - DNA, 74 bp, Homo sapiens
tgctgtactgaaatgggatgttgttttagatttacctttggtgtgggcactggttgcttttgcttgcccaccat

SEQ ID NO: 139817 - DNA, 71 bp, Homo sapiens
aaatgggatgttgttttagatttacctttggtgtgggcactggttgcttttgcttgcccaccattctcttc

SEQ ID NO: 139818 - DNA, 72 bp, Homo sapiens
atgttgttttagatttacctttggtgtgggcactggttgcttttgcttgcccaccattctcttccacttata

SEQ ID NO: 139819 - DNA, 76 bp, Homo sapiens
tagatttacctttggtgtgggcactggttgcttttgcttgcccaccattctcttccacttatagcagcaagactta

SEQ ID NO: 139820 - DNA, 75 bp, Homo sapiens
tttggtgtgggcactggttgcttttgcttgcccaccattctcttccacttatagcagcaagacttagaattttct

SEQ ID NO: 139821 - DNA, 76 bp, Homo sapiens
actggttgcttttgcttgcccaccattctcttccacttatagcagcaagacttagaattttctttcaggaatcatc

SEQ ID NO: 139822 - DNA, 77 bp, Homo sapiens
ttttgcttgcccaccattctcttccacttatagcagcaagacttagaattttctttcaggaatcatcttgcctcaac

SEQ ID NO: 139823 - DNA, 78 bp, Homo sapiens
ccattctcttccacttatagcagcaagacttagaattttctttcaggaatcatcttgcctcaactctcagtccatagt

SEQ ID NO: 139824 - DNA, 79 bp, Homo sapiens
ttccacttatagcagcaagacttagaattttctttcaggaatcatcttgcctcaactctcagtccatagtttagatgaa

SEQ ID NO: 139825 - DNA, 82 bp, Homo sapiens
tatagcagcaagacttagaattttctttcaggaatcatcttgcctcaactctcagtccatagtttagatgaagctgactgtc

SEQ ID NO: 139826 - DNA, 77 bp, Homo sapiens
ttagaattttctttcaggaatcatcttgcctcaactctcagtccatagtttagatgaagctgactgtccctctttcc

SEQ ID NO: 139827 - DNA, 77 bp, Homo sapiens
ttttctttcaggaatcatcttgcctcaactctcagtccatagtttagatgaagctgactgtccctctttcccctcac

SEQ ID NO: 139828 - DNA, 77 bp, Homo sapiens
atcatcttgcctcaactctcagtccatagtttagatgaagctgactgtccctctttcccctcacccagttccaggat

SEQ ID NO: 139829 - DNA, 77 bp, Homo sapiens
tcaactctcagtccatagtttagatgaagctgactgtccctctttcccctcacccagttccaggattcctgaggata

SEQ ID NO: 139830 - DNA, 72 bp, Homo sapiens
agtccatagtttagatgaagctgactgtccctctttcccctcacccagttccaggattcctgaggataaggt

SEQ ID NO: 139831 - DNA, 72 bp, Homo sapiens
aagctgactgtccctctttcccctcacccagttccaggattcctgaggataaggttggttatgcatctgttt

SEQ ID NO: 139832 - DNA, 73 bp, Homo sapiens
ctttcccctcacccagttccaggattcctgaggataaggttggttatgcatctgttttcctcaccacagtgat

SEQ ID NO: 139833 - DNA, 76 bp, Homo sapiens
acccagttccaggattcctgaggataaggttggttatgcatctgttttcctcaccacagtgattggctcaggaatg

SEQ ID NO: 139834 - DNA, 81 bp, Homo sapiens
gttggttatgcatctgttttcctcaccacagtgattggctcaggaatgggcacatgactgaacttgggccagtgagaatta

SEQ ID NO: 139835 - DNA, 79 bp, Homo sapiens
tctgttttcctcaccacagtgattggctcaggaatgggcacatgactgaacttgggccagtgagaattaggccagaatt

SEQ ID NO: 139836 - DNA, 80 bp, Homo sapiens
tcaccacagtgattggctcaggaatgggcacatgactgaacttgggccagtgagaattaggccagaattttcattagaat

SEQ ID NO: 139837 - DNA, 78 bp, Homo sapiens
agtgattggctcaggaatgggcacatgactgaacttgggccagtgagaattaggccagaattttcattagaattgttg

SEQ ID NO: 139838 - DNA, 75 bp, Homo sapiens
aggaatgggcacatgactgaacttgggccagtgagaattaggccagaattttcattagaattgttggagaaaaga

SEQ ID NO: 139839 - DNA, 73 bp, Homo sapiens
acatgactgaacttgggccagtgagaattaggccagaattttcattagaattgttggagaaaagaaattctcc

SEQ ID NO: 139840 - DNA, 72 bp, Homo sapiens
cttgggccagtgagaattaggccagaattttcattagaattgttggagaaaagaaattctcctttcactata

SEQ ID NO: 139841 - DNA, 73 bp, Homo sapiens
gccagtgagaattaggccagaattttcattagaattgttggagaaaagaaattctcctttcactatatttgga

SEQ ID NO: 139842 - DNA, 74 bp, Homo sapiens
gccagaattttcattagaattgttggagaaaagaaattctcctttcactatatttggagctgtaaagctcatcc

SEQ ID NO: 139843 - DNA, 75 bp, Homo sapiens
tttcattagaattgttggagaaaagaaattctcctttcactatatttggagctgtaaagctcatcctggagctat

SEQ ID NO: 139844 - DNA, 75 bp, Homo sapiens
aattgttggagaaaagaaattctcctttcactatatttggagctgtaaagctcatcctggagctattggaggcca

SEQ ID NO: 139845 - DNA, 74 bp, Homo sapiens
aagaaattctcctttcactatatttggagctgtaaagctcatcctggagctattggaggccaccgtaaggtgaa

SEQ ID NO: 139846 - DNA, 75 bp, Homo sapiens
attctcctttcactatatttggagctgtaaagctcatcctggagctattggaggccaccgtaaggtgaaaggcca

SEQ ID NO: 139847 - DNA, 77 bp, Homo sapiens
agctcatcctggagctattggaggccaccgtaaggtgaaaggccatgtgaatgttaagtctacatgaatgacaaaaa

SEQ ID NO: 139848 - DNA, 73 bp, Homo sapiens
agctattggaggccaccgtaaggtgaaaggccatgtgaatgttaagtctacatgaatgacaaaaaaaggagct

SEQ ID NO: 139849 - DNA, 75 bp, Homo sapiens
caccgtaaggtgaaaggccatgtgaatgttaagtctacatgaatgacaaaaaaaggagcttcctgagaatactga

SEQ ID NO: 139850 - DNA, 80 bp, Homo sapiens
tacatgaatgacaaaaaaaggagcttcctgagaatactgagtaagtgcacccagatccagccatgcctgaagctttggta

SEQ ID NO: 139851 - DNA, 81 bp, Homo sapiens
tactgagtaagtgcacccagatccagccatgcctgaagctttggtatgcaataccctagatcccagatattaaagtcaata

SEQ ID NO: 139852 - DNA, 79 bp, Homo sapiens
gtaagtgcacccagatccagccatgcctgaagctttggtatgcaataccctagatcccagatattaaagtcaataatta

SEQ ID NO: 139853 - DNA, 78 bp, Homo sapiens
atccagccatgcctgaagctttggtatgcaataccctagatcccagatattaaagtcaataattagctttctgcttaa

SEQ ID NO: 139854 - DNA, 74 bp, Homo sapiens
cctgaagctttggtatgcaataccctagatcccagatattaaagtcaataattagctttctgcttaagccagtt

SEQ ID NO: 139855 - DNA, 74 bp, Homo sapiens
ctttggtatgcaataccctagatcccagatattaaagtcaataattagctttctgcttaagccagtttgagtta

SEQ ID NO: 139856 - DNA, 74 bp, Homo sapiens
tgcaataccctagatcccagatattaaagtcaataattagctttctgcttaagccagtttgagttagctttttg

SEQ ID NO: 139857 - DNA, 73 bp, Homo sapiens
aaagtcaataattagctttctgcttaagccagtttgagttagctttttgttacttgtcatagaaagaatctca

SEQ ID NO: 139858 - DNA, 76 bp, Homo sapiens
tgcttaagccagtttgagttagctttttgttacttgtcatagaaagaatctcaattaacatgtgttcagggcaaca

SEQ ID NO: 139859 - DNA, 76 bp, Homo sapiens
agtttgagttagctttttgttacttgtcatagaaagaatctcaattaacatgtgttcagggcaacagagattgaga

SEQ ID NO: 139860 - DNA, 78 bp, Homo sapiens
gttagctttttgttacttgtcatagaaagaatctcaattaacatgtgttcagggcaacagagattgagatatatgttg

SEQ ID NO: 139861 - DNA, 83 bp, Homo sapiens
tagaaagaatctcaattaacatgtgttcagggcaacagagattgagatatatgttggcagctgatgttaacataattccatta

SEQ ID NO: 139862 - DNA, 82 bp, Homo sapiens
aatctcaattaacatgtgttcagggcaacagagattgagatatatgttggcagctgatgttaacataattccattagtaata

SEQ ID NO: 139863 - DNA, 81 bp, Homo sapiens
atgtgttcagggcaacagagattgagatatatgttggcagctgatgttaacataattccattagtaatattcctgaataat

SEQ ID NO: 139864 - DNA, 84 bp, Homo sapiens
gagattgagatatatgttggcagctgatgttaacataattccattagtaatattcctgaataatttgagatgagaagatgaatg

SEQ ID NO: 139865 - DNA, 81 bp, Homo sapiens
atgttggcagctgatgttaacataattccattagtaatattcctgaataatttgagatgagaagatgaatgttgtccttga

SEQ ID NO: 139866 - DNA, 82 bp, Homo sapiens
cagctgatgttaacataattccattagtaatattcctgaataatttgagatgagaagatgaatgttgtccttgagctgcaaa

SEQ ID NO: 139867 - DNA, 78 bp, Homo sapiens
acataattccattagtaatattcctgaataatttgagatgagaagatgaatgttgtccttgagctgcaaaacttcacc

SEQ ID NO: 139868 - DNA, 78 bp, Homo sapiens
attagtaatattcctgaataatttgagatgagaagatgaatgttgtccttgagctgcaaaacttcacctctctcctcc

SEQ ID NO: 139869 - DNA, 79 bp, Homo sapiens
atattcctgaataatttgagatgagaagatgaatgttgtccttgagctgcaaaacttcacctctctcctcccttcatct

SEQ ID NO: 139870 - DNA, 78 bp, Homo sapiens
ataatttgagatgagaagatgaatgttgtccttgagctgcaaaacttcacctctctcctcccttcatctttgtggccc

SEQ ID NO: 139871 - DNA, 75 bp, Homo sapiens
agaagatgaatgttgtccttgagctgcaaaacttcacctctctcctcccttcatctttgtggccccttccaaaga

SEQ ID NO: 139872 - DNA, 72 bp, Homo sapiens
aatgttgtccttgagctgcaaaacttcacctctctcctcccttcatctttgtggccccttccaaagaggtaa

SEQ ID NO: 139873 - DNA, 72 bp, Homo sapiens
ttgagctgcaaaacttcacctctctcctcccttcatctttgtggccccttccaaagaggtaaccccccatca

SEQ ID NO: 139874 - DNA, 70 bp, Homo sapiens
ttcacctctctcctcccttcatctttgtggccccttccaaagaggtaaccccccatcagcattttactta

SEQ ID NO: 139875 - DNA, 68 bp, Homo sapiens
ccttcatctttgtggccccttccaaagaggtaaccccccatcagcattttacttagtttcttctctcc

SEQ ID NO: 139876 - DNA, 68 bp, Homo sapiens
aaagaggtaaccccccatcagcattttacttagtttcttctctccctccatagtttcttctcaagtaa

SEQ ID NO: 139877 - DNA, 71 bp, Homo sapiens
ccccatcagcattttacttagtttcttctctccctccatagtttcttctcaagtaaatttgcttattctag

SEQ ID NO: 139878 - DNA, 73 bp, Homo sapiens
tcagcattttacttagtttcttctctccctccatagtttcttctcaagtaaatttgcttattctagtagatgt

SEQ ID NO: 139879 - DNA, 72 bp, Homo sapiens
cttagtttcttctctccctccatagtttcttctcaagtaaatttgcttattctagtagatgtttatttatga

SEQ ID NO: 139880 - DNA, 71 bp, Homo sapiens
gtttcttctcaagtaaatttgcttattctagtagatgtttatttatgaaataaatgtccttacatccgtgg

SEQ ID NO: 139881 - DNA, 72 bp, Homo sapiens
tctcaagtaaatttgcttattctagtagatgtttatttatgaaataaatgtccttacatccgtggttccgtc

SEQ ID NO: 139882 - DNA, 76 bp, Homo sapiens
tctagtagatgtttatttatgaaataaatgtccttacatccgtggttccgtcttttggcagcagctgaagtgagaa

SEQ ID NO: 139883 - DNA, 76 bp, Homo sapiens
atttatgaaataaatgtccttacatccgtggttccgtcttttggcagcagctgaagtgagaagagcaggcaactct

SEQ ID NO: 139884 - DNA, 76 bp, Homo sapiens
aaataaatgtccttacatccgtggttccgtcttttggcagcagctgaagtgagaagagcaggcaactctttgccta

SEQ ID NO: 139885 - DNA, 78 bp, Homo sapiens
ttacatccgtggttccgtcttttggcagcagctgaagtgagaagagcaggcaactctttgcctatgtagaaaataata

SEQ ID NO: 139886 - DNA, 76 bp, Homo sapiens
cgtggttccgtcttttggcagcagctgaagtgagaagagcaggcaactctttgcctatgtagaaaataataatatt

SEQ ID NO: 139887 - DNA, 78 bp, Homo sapiens
tcttttggcagcagctgaagtgagaagagcaggcaactctttgcctatgtagaaaataataatatttaaagaaagaga

SEQ ID NO: 139888 - DNA, 75 bp, Homo sapiens
cagctgaagtgagaagagcaggcaactctttgcctatgtagaaaataataatatttaaagaaagagacaggaaaa

SEQ ID NO: 139889 - DNA, 75 bp, Homo sapiens
gtgagaagagcaggcaactctttgcctatgtagaaaataataatatttaaagaaagagacaggaaaatatatctg

SEQ ID NO: 139890 - DNA, 73 bp, Homo sapiens
caggcaactctttgcctatgtagaaaataataatatttaaagaaagagacaggaaaatatatctgttataagc

SEQ ID NO: 139891 - DNA, 67 bp, Homo sapiens
taatatttaaagaaagagacaggaaaatatatctgttataagctttttcttttttagaatttaagct

SEQ ID NO: 139892 - DNA, 69 bp, Homo sapiens
agaaagagacaggaaaatatatctgttataagctttttcttttttagaatttaagcttatgagtttatc

SEQ ID NO: 139893 - DNA, 69 bp, Homo sapiens
caggaaaatatatctgttataagctttttcttttttagaatttaagcttatgagtttatctacgcccac

SEQ ID NO: 139894 - DNA, 72 bp, Homo sapiens
tatatctgttataagctttttcttttttagaatttaagcttatgagtttatctacgcccactatattcataa

SEQ ID NO: 139895 - DNA, 74 bp, Homo sapiens
tttttagaatttaagcttatgagtttatctacgcccactatattcataattacagttttatatctgcatacaaa

SEQ ID NO: 139896 - DNA, 76 bp, Homo sapiens
agaatttaagcttatgagtttatctacgcccactatattcataattacagttttatatctgcatacaaaagctatg

SEQ ID NO: 139897 - DNA, 76 bp, Homo sapiens
cttatgagtttatctacgcccactatattcataattacagttttatatctgcatacaaaagctatgtaaaaatcca

SEQ ID NO: 139898 - DNA, 74 bp, Homo sapiens
atctacgcccactatattcataattacagttttatatctgcatacaaaagctatgtaaaaatccatttttccca

SEQ ID NO: 139899 - DNA, 74 bp, Homo sapiens
cactatattcataattacagttttatatctgcatacaaaagctatgtaaaaatccatttttcccaaatatacaa

SEQ ID NO: 139900 - DNA, 68 bp, Homo sapiens
aattacagttttatatctgcatacaaaagctatgtaaaaatccatttttcccaaatatacaaattttt

SEQ ID NO: 139901 - DNA, 66 bp, Homo sapiens
gcatacaaaagctatgtaaaaatccatttttcccaaatatacaaattttttttggatagtttaaaa

SEQ ID NO: 139902 - DNA, 67 bp, Homo sapiens
gctatgtaaaaatccatttttcccaaatatacaaattttttttggatagtttaaaacattttgatca

SEQ ID NO: 139903 - DNA, 67 bp, Homo sapiens
tgtaaaaatccatttttcccaaatatacaaattttttttggatagtttaaaacattttgatcacaga

SEQ ID NO: 139904 - DNA, 67 bp, Homo sapiens
aatccatttttcccaaatatacaaattttttttggatagtttaaaacattttgatcacagatttcaa

SEQ ID NO: 139905 - DNA, 70 bp, Homo sapiens
caaatatacaaattttttttggatagtttaaaacattttgatcacagatttcaacagagttttaggctga

SEQ ID NO: 139906 - DNA, 67 bp, Homo sapiens
acaaattttttttggatagtttaaaacattttgatcacagatttcaacagagttttaggctgaaaaa

SEQ ID NO: 139907 - DNA, 74 bp, Homo sapiens
tttggatagtttaaaacattttgatcacagatttcaacagagttttaggctgaaaaaaatatcaccatctagca

SEQ ID NO: 139908 - DNA, 74 bp, Homo sapiens
gtttaaaacattttgatcacagatttcaacagagttttaggctgaaaaaaatatcaccatctagcaatatcact

SEQ ID NO: 139909 - DNA, 76 bp, Homo sapiens
cacagatttcaacagagttttaggctgaaaaaaatatcaccatctagcaatatcacttaacactgtttgcaaaaca

SEQ ID NO: 139910 - DNA, 75 bp, Homo sapiens
cagagttttaggctgaaaaaaatatcaccatctagcaatatcacttaacactgtttgcaaaacacaaatcttcca

SEQ ID NO: 139911 - DNA, 75 bp, Homo sapiens
aaatatcaccatctagcaatatcacttaacactgtttgcaaaacacaaatcttccaatgactgtaaatctttttc

SEQ ID NO: 139912 - DNA, 72 bp, Homo sapiens
cttaacactgtttgcaaaacacaaatcttccaatgactgtaaatctttttctattctgtagtatttttctga

SEQ ID NO: 139913 - DNA, 74 bp, Homo sapiens
gtttgcaaaacacaaatcttccaatgactgtaaatctttttctattctgtagtatttttctgattctcagggca

SEQ ID NO: 139914 - DNA, 74 bp, Homo sapiens
acacaaatcttccaatgactgtaaatctttttctattctgtagtatttttctgattctcagggcatgaaaacat

SEQ ID NO: 139915 - DNA, 74 bp, Homo sapiens
cttccaatgactgtaaatctttttctattctgtagtatttttctgattctcagggcatgaaaacattatgggaa

SEQ ID NO: 139916 - DNA, 71 bp, Homo sapiens
tctattctgtagtatttttctgattctcagggcatgaaaacattatgggaaaaaaaaggattttctacgaa

SEQ ID NO: 139917 - DNA, 71 bp, Homo sapiens
gtatttttctgattctcagggcatgaaaacattatgggaaaaaaaaggattttctacgaagaaagcatgga

SEQ ID NO: 139918 - DNA, 71 bp, Homo sapiens
ctgattctcagggcatgaaaacattatgggaaaaaaaaggattttctacgaagaaagcatggagaactaat

SEQ ID NO: 139919 - DNA, 71 bp, Homo sapiens
gcatgaaaacattatgggaaaaaaaaggattttctacgaagaaagcatggagaactaatttggctctatgg

SEQ ID NO: 139920 - DNA, 69 bp, Homo sapiens
acattatgggaaaaaaaaggattttctacgaagaaagcatggagaactaatttggctctatggtcaaat

SEQ ID NO: 139921 - DNA, 69 bp, Homo sapiens
aaaaaaggattttctacgaagaaagcatggagaactaatttggctctatggtcaaattaaaaatgccaa

SEQ ID NO: 139922 - DNA, 71 bp, Homo sapiens
tttctacgaagaaagcatggagaactaatttggctctatggtcaaattaaaaatgccaagttaataaggga

SEQ ID NO: 139923 - DNA, 70 bp, Homo sapiens
acgaagaaagcatggagaactaatttggctctatggtcaaattaaaaatgccaagttaataagggagaac

SEQ ID NO: 139924 - DNA, 69 bp, Homo sapiens
catggagaactaatttggctctatggtcaaattaaaaatgccaagttaataagggagaaccaaaagaaa

SEQ ID NO: 139925 - DNA, 75 bp, Homo sapiens
gtcaaattaaaaatgccaagttaataagggagaaccaaaagaaagaagtggcataatgtcacatcagctcattca

SEQ ID NO: 139926 - DNA, 77 bp, Homo sapiens
aaatgccaagttaataagggagaaccaaaagaaagaagtggcataatgtcacatcagctcattcatgccctgataat

SEQ ID NO: 139927 - DNA, 82 bp, Homo sapiens
agaaccaaaagaaagaagtggcataatgtcacatcagctcattcatgccctgataatttctgtatcaacaatacatatgtaa

SEQ ID NO: 139928 - DNA, 84 bp, Homo sapiens
gcataatgtcacatcagctcattcatgccctgataatttctgtatcaacaatacatatgtaaagtgtctccttttgtcttacat

SEQ ID NO: 139929 - DNA, 84 bp, Homo sapiens
atgtcacatcagctcattcatgccctgataatttctgtatcaacaatacatatgtaaagtgtctccttttgtcttacattgtgc

SEQ ID NO: 139930 - DNA, 80 bp, Homo sapiens
ctcattcatgccctgataatttctgtatcaacaatacatatgtaaagtgtctccttttgtcttacattgtgctccataat

SEQ ID NO: 139931 - DNA, 79 bp, Homo sapiens
gccctgataatttctgtatcaacaatacatatgtaaagtgtctccttttgtcttacattgtgctccataatttacatga

SEQ ID NO: 139932 - DNA, 83 bp, Homo sapiens
tgtatcaacaatacatatgtaaagtgtctccttttgtcttacattgtgctccataatttacatgagtattatctgcatcctga

SEQ ID NO: 139933 - DNA, 80 bp, Homo sapiens
aacaatacatatgtaaagtgtctccttttgtcttacattgtgctccataatttacatgagtattatctgcatcctgagga

SEQ ID NO: 139934 - DNA, 80 bp, Homo sapiens
cttttgtcttacattgtgctccataatttacatgagtattatctgcatcctgaggaggacagatttatatttgattgtct

SEQ ID NO: 139935 - DNA, 84 bp, Homo sapiens
gtcttacattgtgctccataatttacatgagtattatctgcatcctgaggaggacagatttatatttgattgtcttgtgcatag

SEQ ID NO: 139936 - DNA, 82 bp, Homo sapiens
tccataatttacatgagtattatctgcatcctgaggaggacagatttatatttgattgtcttgtgcatagggtgggtcagct

SEQ ID NO: 139937 - DNA, 80 bp, Homo sapiens
atttacatgagtattatctgcatcctgaggaggacagatttatatttgattgtcttgtgcatagggtgggtcagctttaa

SEQ ID NO: 139938 - DNA, 82 bp, Homo sapiens
tattatctgcatcctgaggaggacagatttatatttgattgtcttgtgcatagggtgggtcagctttaactgtgcaacagaa

SEQ ID NO: 139939 - DNA, 79 bp, Homo sapiens
tgaggaggacagatttatatttgattgtcttgtgcatagggtgggtcagctttaactgtgcaacagaaagccacaaaca

SEQ ID NO: 139940 - DNA, 75 bp, Homo sapiens
agatttatatttgattgtcttgtgcatagggtgggtcagctttaactgtgcaacagaaagccacaaacagcgttt

SEQ ID NO: 139941 - DNA, 78 bp, Homo sapiens
tatatttgattgtcttgtgcatagggtgggtcagctttaactgtgcaacagaaagccacaaacagcgttttacctgca

SEQ ID NO: 139942 - DNA, 79 bp, Homo sapiens
ttgtgcatagggtgggtcagctttaactgtgcaacagaaagccacaaacagcgttttacctgcacaatattgctcttga

SEQ ID NO: 139943 - DNA, 75 bp, Homo sapiens
atagggtgggtcagctttaactgtgcaacagaaagccacaaacagcgttttacctgcacaatattgctcttgaag

SEQ ID NO: 139944 - DNA, 76 bp, Homo sapiens
tttaactgtgcaacagaaagccacaaacagcgttttacctgcacaatattgctcttgaaggcggcattaattaatg

SEQ ID NO: 139945 - DNA, 75 bp, Homo sapiens
aagccacaaacagcgttttacctgcacaatattgctcttgaaggcggcattaattaatgtggaaacacactataa

SEQ ID NO: 139946 - DNA, 80 bp, Homo sapiens
tgcacaatattgctcttgaaggcggcattaattaatgtggaaacacactataaatgcacacttttcgcatttgcaaacat

SEQ ID NO: 139947 - DNA, 77 bp, Homo sapiens
gcggcattaattaatgtggaaacacactataaatgcacacttttcgcatttgcaaacatttatacagcacagtaaaa

SEQ ID NO: 139948 - DNA, 77 bp, Homo sapiens
attaatgtggaaacacactataaatgcacacttttcgcatttgcaaacatttatacagcacagtaaaaattctgtga

SEQ ID NO: 139949 - DNA, 77 bp, Homo sapiens
gaaacacactataaatgcacacttttcgcatttgcaaacatttatacagcacagtaaaaattctgtgataaggccaa

SEQ ID NO: 139950 - DNA, 74 bp, Homo sapiens
ctataaatgcacacttttcgcatttgcaaacatttatacagcacagtaaaaattctgtgataaggccaaacctt

SEQ ID NO: 139951 - DNA, 70 bp, Homo sapiens
cacttttcgcatttgcaaacatttatacagcacagtaaaaattctgtgataaggccaaaccttttttccc

SEQ ID NO: 139952 - DNA, 69 bp, Homo sapiens
tgcaaacatttatacagcacagtaaaaattctgtgataaggccaaaccttttttcccccagtctggttt

SEQ ID NO: 139953 - DNA, 66 bp, Homo sapiens
acatttatacagcacagtaaaaattctgtgataaggccaaaccttttttcccccagtctggttttt

SEQ ID NO: 139954 - DNA, 62 bp, Homo sapiens
agcacagtaaaaattctgtgataaggccaaaccttttttcccccagtctggttttttttttt

SEQ ID NO: 139955 - DNA, 68 bp, Homo sapiens
tgagtgtgtttttaatgcattttttttaaagattaaagtaaaatgtctcaattgtaaaaaatacacac

SEQ ID NO: 139956 - DNA, 67 bp, Homo sapiens
tgcattttttttaaagattaaagtaaaatgtctcaattgtaaaaaatacacaccgggcaaatcctta

SEQ ID NO: 139957 - DNA, 68 bp, Homo sapiens
ttaaagattaaagtaaaatgtctcaattgtaaaaaatacacaccgggcaaatccttacctggataata

SEQ ID NO: 139958 - DNA, 71 bp, Homo sapiens
aagtaaaatgtctcaattgtaaaaaatacacaccgggcaaatccttacctggataataaatatctacatca

SEQ ID NO: 139959 - DNA, 73 bp, Homo sapiens
aatgtctcaattgtaaaaaatacacaccgggcaaatccttacctggataataaatatctacatcacagtacaa

SEQ ID NO: 139960 - DNA, 70 bp, Homo sapiens
gtaaaaaatacacaccgggcaaatccttacctggataataaatatctacatcacagtacaataaaatttc

SEQ ID NO: 139961 - DNA, 73 bp, Homo sapiens
atacacaccgggcaaatccttacctggataataaatatctacatcacagtacaataaaatttcttctctataa

SEQ ID NO: 139962 - DNA, 71 bp, Homo sapiens
ggcaaatccttacctggataataaatatctacatcacagtacaataaaatttcttctctataaaatttaaa

SEQ ID NO: 139963 - DNA, 76 bp, Homo sapiens
tatctacatcacagtacaataaaatttcttctctataaaatttaaatatggattatagtctatcactatcaaaaga

SEQ ID NO: 139964 - DNA, 74 bp, Homo sapiens
catcacagtacaataaaatttcttctctataaaatttaaatatggattatagtctatcactatcaaaagaaaca

SEQ ID NO: 139965 - DNA, 73 bp, Homo sapiens
caataaaatttcttctctataaaatttaaatatggattatagtctatcactatcaaaagaaacactatgctaa

SEQ ID NO: 139966 - DNA, 75 bp, Homo sapiens
cttctctataaaatttaaatatggattatagtctatcactatcaaaagaaacactatgctaatatttccatatta

SEQ ID NO: 139967 - DNA, 74 bp, Homo sapiens
tttaaatatggattatagtctatcactatcaaaagaaacactatgctaatatttccatattattaaaataacag

SEQ ID NO: 139968 - DNA, 74 bp, Homo sapiens
atatggattatagtctatcactatcaaaagaaacactatgctaatatttccatattattaaaataacaggaaaa

SEQ ID NO: 139969 - DNA, 70 bp, Homo sapiens
tcaaaagaaacactatgctaatatttccatattattaaaataacaggaaaaattacgagcttattttaga

SEQ ID NO: 139970 - DNA, 70 bp, Homo sapiens
atttccatattattaaaataacaggaaaaattacgagcttattttagaacctgatgccatagccgttgga

SEQ ID NO: 139971 - DNA, 70 bp, Homo sapiens
aacaggaaaaattacgagcttattttagaacctgatgccatagccgttggaaagggcaaagagattcaaa

SEQ ID NO: 139972 - DNA, 78 bp, Homo sapiens
ttattttagaacctgatgccatagccgttggaaagggcaaagagattcaaatgtcgatcatcactctccatttgagga

SEQ ID NO: 139973 - DNA, 78 bp, Homo sapiens
agaacctgatgccatagccgttggaaagggcaaagagattcaaatgtcgatcatcactctccatttgaggaggaactg

SEQ ID NO: 139974 - DNA, 76 bp, Homo sapiens
atagccgttggaaagggcaaagagattcaaatgtcgatcatcactctccatttgaggaggaactgtggcttggtta

SEQ ID NO: 139975 - DNA, 78 bp, Homo sapiens
agattcaaatgtcgatcatcactctccatttgaggaggaactgtggcttggttattcacttaaattcagttcatgaaa

SEQ ID NO: 139976 - DNA, 75 bp, Homo sapiens
aaatgtcgatcatcactctccatttgaggaggaactgtggcttggttattcacttaaattcagttcatgaaaaag

SEQ ID NO: 139977 - DNA, 70 bp, Homo sapiens
actctccatttgaggaggaactgtggcttggttattcacttaaattcagttcatgaaaaaggtttagcct

SEQ ID NO: 139978 - DNA, 70 bp, Homo sapiens
catttgaggaggaactgtggcttggttattcacttaaattcagttcatgaaaaaggtttagccttacaaa

SEQ ID NO: 139979 - DNA, 71 bp, Homo sapiens
aactgtggcttggttattcacttaaattcagttcatgaaaaaggtttagccttacaaatgctggctacatt

SEQ ID NO: 139980 - DNA, 71 bp, Homo sapiens
gcttggttattcacttaaattcagttcatgaaaaaggtttagccttacaaatgctggctacatttcaaaaa

SEQ ID NO: 139981 - DNA, 72 bp, Homo sapiens
cacttaaattcagttcatgaaaaaggtttagccttacaaatgctggctacatttcaaaaactgtaagactga

SEQ ID NO: 139982 - DNA, 72 bp, Homo sapiens
cagttcatgaaaaaggtttagccttacaaatgctggctacatttcaaaaactgtaagactgatttcataatt

SEQ ID NO: 139983 - DNA, 77 bp, Homo sapiens
aaaggtttagccttacaaatgctggctacatttcaaaaactgtaagactgatttcataatttatgactcatgcagca

SEQ ID NO: 139984 - DNA, 78 bp, Homo sapiens
ccttacaaatgctggctacatttcaaaaactgtaagactgatttcataatttatgactcatgcagcaaaaggtcaata

SEQ ID NO: 139985 - DNA, 77 bp, Homo sapiens
caaaaactgtaagactgatttcataatttatgactcatgcagcaaaaggtcaatatgacacgaataggttagagttc

SEQ ID NO: 139986 - DNA, 79 bp, Homo sapiens
gtaagactgatttcataatttatgactcatgcagcaaaaggtcaatatgacacgaataggttagagttccatagaataa

SEQ ID NO: 139987 - DNA, 78 bp, Homo sapiens
tcataatttatgactcatgcagcaaaaggtcaatatgacacgaataggttagagttccatagaataaaaaggtatcac

SEQ ID NO: 139988 - DNA, 78 bp, Homo sapiens
atttatgactcatgcagcaaaaggtcaatatgacacgaataggttagagttccatagaataaaaaggtatcactgaca

SEQ ID NO: 139989 - DNA, 77 bp, Homo sapiens
agcaaaaggtcaatatgacacgaataggttagagttccatagaataaaaaggtatcactgacaatgacatgcttcaa

SEQ ID NO: 139990 - DNA, 76 bp, Homo sapiens
acacgaataggttagagttccatagaataaaaaggtatcactgacaatgacatgcttcaagggtgctcagcggttc

SEQ ID NO: 139991 - DNA, 75 bp, Homo sapiens
aggttagagttccatagaataaaaaggtatcactgacaatgacatgcttcaagggtgctcagcggttccttggag

SEQ ID NO: 139992 - DNA, 79 bp, Homo sapiens
tccatagaataaaaaggtatcactgacaatgacatgcttcaagggtgctcagcggttccttggaggctgagtctgtggg

SEQ ID NO: 139993 - DNA, 77 bp, Homo sapiens
actgacaatgacatgcttcaagggtgctcagcggttccttggaggctgagtctgtggggggcttagtgtcgaggagg

SEQ ID NO: 139994 - DNA, 74 bp, Homo sapiens
acatgcttcaagggtgctcagcggttccttggaggctgagtctgtggggggcttagtgtcgaggaggggccagg

SEQ ID NO: 139995 - DNA, 72 bp, Homo sapiens
aagggtgctcagcggttccttggaggctgagtctgtggggggcttagtgtcgaggaggggccagggcttgta

SEQ ID NO: 139996 - DNA, 72 bp, Homo sapiens
ttccttggaggctgagtctgtggggggcttagtgtcgaggaggggccagggcttgtacccctgttcatggag

SEQ ID NO: 139997 - DNA, 74 bp, Homo sapiens
gctgagtctgtggggggcttagtgtcgaggaggggccagggcttgtacccctgttcatggaggagcaacaagaa

SEQ ID NO: 139998 - DNA, 71 bp, Homo sapiens
gtctgtggggggcttagtgtcgaggaggggccagggcttgtacccctgttcatggaggagcaacaagaacg

SEQ ID NO: 139999 - DNA, 75 bp, Homo sapiens
cttagtgtcgaggaggggccagggcttgtacccctgttcatggaggagcaacaagaacggcgttgctggcacaga

SEQ ID NO: 140000 - DNA, 76 bp, Homo sapiens
aggggccagggcttgtacccctgttcatggaggagcaacaagaacggcgttgctggcacagagcgaaggcctggca

SEQ ID NO: 140001 - DNA, 76 bp, Homo sapiens
agggcttgtacccctgttcatggaggagcaacaagaacggcgttgctggcacagagcgaaggcctggcagtccacc

SEQ ID NO: 140002 - DNA, 82 bp, Homo sapiens
cctgttcatggaggagcaacaagaacggcgttgctggcacagagcgaaggcctggcagtccaccccaggcctgcactgcaca

SEQ ID NO: 140003 - DNA, 82 bp, Homo sapiens
atggaggagcaacaagaacggcgttgctggcacagagcgaaggcctggcagtccaccccaggcctgcactgcacactgaaga

SEQ ID NO: 140004 - DNA, 81 bp, Homo sapiens
aacaagaacggcgttgctggcacagagcgaaggcctggcagtccaccccaggcctgcactgcacactgaagagctgtcgcc

SEQ ID NO: 140005 - DNA, 78 bp, Homo sapiens
agagcgaaggcctggcagtccaccccaggcctgcactgcacactgaagagctgtcgcccggggcacaggtgaggggct

SEQ ID NO: 140006 - DNA, 78 bp, Homo sapiens
aaggcctggcagtccaccccaggcctgcactgcacactgaagagctgtcgcccggggcacaggtgaggggcttcgctg

SEQ ID NO: 140007 - DNA, 80 bp, Homo sapiens
accccaggcctgcactgcacactgaagagctgtcgcccggggcacaggtgaggggcttcgctgggctgaggcatcaacag

SEQ ID NO: 140008 - DNA, 84 bp, Homo sapiens
tgcactgcacactgaagagctgtcgcccggggcacaggtgaggggcttcgctgggctgaggcatcaacaggtcaagcgcgtcat

SEQ ID NO: 140009 - DNA, 78 bp, Homo sapiens
gggcacaggtgaggggcttcgctgggctgaggcatcaacaggtcaagcgcgtcattgaggaccgaggctctagaaaaa

SEQ ID NO: 140010 - DNA, 79 bp, Homo sapiens
aggtgaggggcttcgctgggctgaggcatcaacaggtcaagcgcgtcattgaggaccgaggctctagaaaaagctctga

SEQ ID NO: 140011 - DNA, 79 bp, Homo sapiens
aggcatcaacaggtcaagcgcgtcattgaggaccgaggctctagaaaaagctctgaggcggcacgtggtgttttgagca

SEQ ID NO: 140012 - DNA, 78 bp, Homo sapiens
aggtcaagcgcgtcattgaggaccgaggctctagaaaaagctctgaggcggcacgtggtgttttgagcagaatcataa

SEQ ID NO: 140013 - DNA, 74 bp, Homo sapiens
accgaggctctagaaaaagctctgaggcggcacgtggtgttttgagcagaatcataaagaagaaaacatcttac

SEQ ID NO: 140014 - DNA, 72 bp, Homo sapiens
ctctagaaaaagctctgaggcggcacgtggtgttttgagcagaatcataaagaagaaaacatcttacttttt

SEQ ID NO: 140015 - DNA, 73 bp, Homo sapiens
aagctctgaggcggcacgtggtgttttgagcagaatcataaagaagaaaacatcttacttttttcattgtttc

SEQ ID NO: 140016 - DNA, 71 bp, Homo sapiens
cggcacgtggtgttttgagcagaatcataaagaagaaaacatcttacttttttcattgtttctggaaatac

SEQ ID NO: 140017 - DNA, 76 bp, Homo sapiens
ttgagcagaatcataaagaagaaaacatcttacttttttcattgtttctggaaatactgcacgtctaaattgagca

SEQ ID NO: 140018 - DNA, 73 bp, Homo sapiens
tcataaagaagaaaacatcttacttttttcattgtttctggaaatactgcacgtctaaattgagcaaagtaca

SEQ ID NO: 140019 - DNA, 73 bp, Homo sapiens
atcttacttttttcattgtttctggaaatactgcacgtctaaattgagcaaagtacacttgagggtcacacac

SEQ ID NO: 140020 - DNA, 80 bp, Homo sapiens
tttcattgtttctggaaatactgcacgtctaaattgagcaaagtacacttgagggtcacacacgcacgcgcatacactca

SEQ ID NO: 140021 - DNA, 82 bp, Homo sapiens
ttctggaaatactgcacgtctaaattgagcaaagtacacttgagggtcacacacgcacgcgcatacactcacacgcacacac

SEQ ID NO: 140022 - DNA, 81 bp, Homo sapiens
actgcacgtctaaattgagcaaagtacacttgagggtcacacacgcacgcgcatacactcacacgcacacacgccccacac

SEQ ID NO: 140023 - DNA, 81 bp, Homo sapiens
ttgagcaaagtacacttgagggtcacacacgcacgcgcatacactcacacgcacacacgccccacaccgctcatccctaaa

SEQ ID NO: 140024 - DNA, 77 bp, Homo sapiens
aaagtacacttgagggtcacacacgcacgcgcatacactcacacgcacacacgccccacaccgctcatccctaaaag

SEQ ID NO: 140025 - DNA, 78 bp, Homo sapiens
gtcacacacgcacgcgcatacactcacacgcacacacgccccacaccgctcatccctaaaagggaagtgatttataaa

SEQ ID NO: 140026 - DNA, 75 bp, Homo sapiens
cactcacacgcacacacgccccacaccgctcatccctaaaagggaagtgatttataaatacaaatcccagcataa

SEQ ID NO: 140027 - DNA, 73 bp, Homo sapiens
cacacacgccccacaccgctcatccctaaaagggaagtgatttataaatacaaatcccagcataatgggtgtg

SEQ ID NO: 140028 - DNA, 73 bp, Homo sapiens
ccacaccgctcatccctaaaagggaagtgatttataaatacaaatcccagcataatgggtgtgttctcctcta

SEQ ID NO: 140029 - DNA, 74 bp, Homo sapiens
tcatccctaaaagggaagtgatttataaatacaaatcccagcataatgggtgtgttctcctctactgagacgtc

SEQ ID NO: 140030 - DNA, 72 bp, Homo sapiens
ctaaaagggaagtgatttataaatacaaatcccagcataatgggtgtgttctcctctactgagacgtctccc

SEQ ID NO: 140031 - DNA, 73 bp, Homo sapiens
tttataaatacaaatcccagcataatgggtgtgttctcctctactgagacgtctccctgccgagggggtggga

SEQ ID NO: 140032 - DNA, 74 bp, Homo sapiens
aaatacaaatcccagcataatgggtgtgttctcctctactgagacgtctccctgccgagggggtgggagcgcag

SEQ ID NO: 140033 - DNA, 75 bp, Homo sapiens
cataatgggtgtgttctcctctactgagacgtctccctgccgagggggtgggagcgcaggtgtgaagggtatctc

SEQ ID NO: 140034 - DNA, 77 bp, Homo sapiens
tgtgttctcctctactgagacgtctccctgccgagggggtgggagcgcaggtgtgaagggtatctccatcaggtcca

SEQ ID NO: 140035 - DNA, 76 bp, Homo sapiens
tctactgagacgtctccctgccgagggggtgggagcgcaggtgtgaagggtatctccatcaggtccacactggatt

SEQ ID NO: 140036 - DNA, 75 bp, Homo sapiens
agacgtctccctgccgagggggtgggagcgcaggtgtgaagggtatctccatcaggtccacactggatttgcaag

SEQ ID NO: 140037 - DNA, 78 bp, Homo sapiens
cgagggggtgggagcgcaggtgtgaagggtatctccatcaggtccacactggatttgcaagtctggacaatagatgaa

SEQ ID NO: 140038 - DNA, 77 bp, Homo sapiens
gggtgggagcgcaggtgtgaagggtatctccatcaggtccacactggatttgcaagtctggacaatagatgaaaaaa

SEQ ID NO: 140039 - DNA, 78 bp, Homo sapiens
tatctccatcaggtccacactggatttgcaagtctggacaatagatgaaaaaatgtttagaaaaatctagagcaaatc

SEQ ID NO: 140040 - DNA, 76 bp, Homo sapiens
atcaggtccacactggatttgcaagtctggacaatagatgaaaaaatgtttagaaaaatctagagcaaatccctca

SEQ ID NO: 140041 - DNA, 75 bp, Homo sapiens
cactggatttgcaagtctggacaatagatgaaaaaatgtttagaaaaatctagagcaaatccctcacaaatgagt

SEQ ID NO: 140042 - DNA, 76 bp, Homo sapiens
gcaagtctggacaatagatgaaaaaatgtttagaaaaatctagagcaaatccctcacaaatgagttttatgagatg

SEQ ID NO: 140043 - DNA, 77 bp, Homo sapiens
agatggagtcttgagatgcactaagtacctctgtcagcttcagaaggaaggagtttagtttcagagtcattatcttt

SEQ ID NO: 140044 - DNA, 78 bp, Homo sapiens
tcttgagatgcactaagtacctctgtcagcttcagaaggaaggagtttagtttcagagtcattatcttttgagtccta

SEQ ID NO: 140045 - DNA, 74 bp, Homo sapiens
taagtacctctgtcagcttcagaaggaaggagtttagtttcagagtcattatcttttgagtcctatggcctttc

SEQ ID NO: 140046 - DNA, 69 bp, Homo sapiens
aaggaaggagtttagtttcagagtcattatcttttgagtcctatggcctttcctttcaacctgaaggtg

SEQ ID NO: 140047 - DNA, 70 bp, Homo sapiens
aggagtttagtttcagagtcattatcttttgagtcctatggcctttcctttcaacctgaaggtgggctaa

SEQ ID NO: 140048 - DNA, 72 bp, Homo sapiens
tttcagagtcattatcttttgagtcctatggcctttcctttcaacctgaaggtgggctaaggcttgtcctac

SEQ ID NO: 140049 - DNA, 74 bp, Homo sapiens
tcctatggcctttcctttcaacctgaaggtgggctaaggcttgtcctactccgcatgaagtattcagccttcaa

SEQ ID NO: 140050 - DNA, 73 bp, Homo sapiens
tttcctttcaacctgaaggtgggctaaggcttgtcctactccgcatgaagtattcagccttcaacgagatttc

SEQ ID NO: 140051 - DNA, 75 bp, Homo sapiens
aacctgaaggtgggctaaggcttgtcctactccgcatgaagtattcagccttcaacgagatttccagaccagcag

SEQ ID NO: 140052 - DNA, 78 bp, Homo sapiens
tgggctaaggcttgtcctactccgcatgaagtattcagccttcaacgagatttccagaccagcagtttgcctattgaa

SEQ ID NO: 140053 - DNA, 80 bp, Homo sapiens
ttgtcctactccgcatgaagtattcagccttcaacgagatttccagaccagcagtttgcctattgaaggcaatcaatcat

SEQ ID NO: 140054 - DNA, 78 bp, Homo sapiens
actccgcatgaagtattcagccttcaacgagatttccagaccagcagtttgcctattgaaggcaatcaatcatttaag

SEQ ID NO: 140055 - DNA, 79 bp, Homo sapiens
tattcagccttcaacgagatttccagaccagcagtttgcctattgaaggcaatcaatcatttaaggtgccaaggatcaa

SEQ ID NO: 140056 - DNA, 76 bp, Homo sapiens
ttcaacgagatttccagaccagcagtttgcctattgaaggcaatcaatcatttaaggtgccaaggatcaaacgttc

SEQ ID NO: 140057 - DNA, 73 bp, Homo sapiens
tttccagaccagcagtttgcctattgaaggcaatcaatcatttaaggtgccaaggatcaaacgttcctttact

SEQ ID NO: 140058 - DNA, 76 bp, Homo sapiens
ttgaaggcaatcaatcatttaaggtgccaaggatcaaacgttcctttacttgcggctggctggatggctgtttata

SEQ ID NO: 140059 - DNA, 77 bp, Homo sapiens
tcaatcatttaaggtgccaaggatcaaacgttcctttacttgcggctggctggatggctgtttatatgccatactat

SEQ ID NO: 140060 - DNA, 74 bp, Homo sapiens
atttaaggtgccaaggatcaaacgttcctttacttgcggctggctggatggctgtttatatgccatactatttg

SEQ ID NO: 140061 - DNA, 77 bp, Homo sapiens
aaggatcaaacgttcctttacttgcggctggctggatggctgtttatatgccatactatttggccaattctcgatca

SEQ ID NO: 140062 - DNA, 76 bp, Homo sapiens
aaacgttcctttacttgcggctggctggatggctgtttatatgccatactatttggccaattctcgatcatggtta

SEQ ID NO: 140063 - DNA, 79 bp, Homo sapiens
ttacttgcggctggctggatggctgtttatatgccatactatttggccaattctcgatcatggttagtccccaaagcat

SEQ ID NO: 140064 - DNA, 81 bp, Homo sapiens
tggatggctgtttatatgccatactatttggccaattctcgatcatggttagtccccaaagcattctgatttagcttgaga

SEQ ID NO: 140065 - DNA, 79 bp, Homo sapiens
atactatttggccaattctcgatcatggttagtccccaaagcattctgatttagcttgagatcaggctctgaacttata

SEQ ID NO: 140066 - DNA, 79 bp, Homo sapiens
atttggccaattctcgatcatggttagtccccaaagcattctgatttagcttgagatcaggctctgaacttatattcaa

SEQ ID NO: 140067 - DNA, 82 bp, Homo sapiens
gatcatggttagtccccaaagcattctgatttagcttgagatcaggctctgaacttatattcaaatctgggtgtctgatgta

SEQ ID NO: 140068 - DNA, 81 bp, Homo sapiens
tggttagtccccaaagcattctgatttagcttgagatcaggctctgaacttatattcaaatctgggtgtctgatgtactga

SEQ ID NO: 140069 - DNA, 81 bp, Homo sapiens
aagcattctgatttagcttgagatcaggctctgaacttatattcaaatctgggtgtctgatgtactgaggaccctgtcaaa

SEQ ID NO: 140070 - DNA, 79 bp, Homo sapiens
atttagcttgagatcaggctctgaacttatattcaaatctgggtgtctgatgtactgaggaccctgtcaaacaaaatga

SEQ ID NO: 140071 - DNA, 75 bp, Homo sapiens
atcaggctctgaacttatattcaaatctgggtgtctgatgtactgaggaccctgtcaaacaaaatgaggaaactt

SEQ ID NO: 140072 - DNA, 73 bp, Homo sapiens
tatattcaaatctgggtgtctgatgtactgaggaccctgtcaaacaaaatgaggaaactttccccagaaggcc

SEQ ID NO: 140073 - DNA, 76 bp, Homo sapiens
tctgggtgtctgatgtactgaggaccctgtcaaacaaaatgaggaaactttccccagaaggcctgacgctgcagga

SEQ ID NO: 140074 - DNA, 74 bp, Homo sapiens
atgtactgaggaccctgtcaaacaaaatgaggaaactttccccagaaggcctgacgctgcaggaccctgcctgc

SEQ ID NO: 140075 - DNA, 72 bp, Homo sapiens
aggaccctgtcaaacaaaatgaggaaactttccccagaaggcctgacgctgcaggaccctgcctgcttgcct

SEQ ID NO: 140076 - DNA, 72 bp, Homo sapiens
aaaatgaggaaactttccccagaaggcctgacgctgcaggaccctgcctgcttgccttcctctcattccctt

SEQ ID NO: 140077 - DNA, 72 bp, Homo sapiens
aaactttccccagaaggcctgacgctgcaggaccctgcctgcttgccttcctctcattccctttggaaagaa

SEQ ID NO: 140078 - DNA, 76 bp, Homo sapiens
agaaggcctgacgctgcaggaccctgcctgcttgccttcctctcattccctttggaaagaaagcttgccccagaca

SEQ ID NO: 140079 - DNA, 79 bp, Homo sapiens
acgctgcaggaccctgcctgcttgccttcctctcattccctttggaaagaaagcttgccccagacagcagagcttctca

SEQ ID NO: 140080 - DNA, 75 bp, Homo sapiens
accctgcctgcttgccttcctctcattccctttggaaagaaagcttgccccagacagcagagcttctcagggtta

SEQ ID NO: 140081 - DNA, 75 bp, Homo sapiens
ttcctctcattccctttggaaagaaagcttgccccagacagcagagcttctcagggttaccctggagcacagagg

SEQ ID NO: 140082 - DNA, 75 bp, Homo sapiens
tttggaaagaaagcttgccccagacagcagagcttctcagggttaccctggagcacagaggtggctaagtgtttg

SEQ ID NO: 140083 - DNA, 75 bp, Homo sapiens
aaagaaagcttgccccagacagcagagcttctcagggttaccctggagcacagaggtggctaagtgtttgtcttc

SEQ ID NO: 140084 - DNA, 72 bp, Homo sapiens
agcttctcagggttaccctggagcacagaggtggctaagtgtttgtcttccaaagagcggttggttcctcaa

SEQ ID NO: 140085 - DNA, 72 bp, Homo sapiens
aggtggctaagtgtttgtcttccaaagagcggttggttcctcaaggagtcaagagaggaagctgaaatatta

SEQ ID NO: 140086 - DNA, 77 bp, Homo sapiens
tgtttgtcttccaaagagcggttggttcctcaaggagtcaagagaggaagctgaaatattagcagagcaagcaatta

SEQ ID NO: 140087 - DNA, 77 bp, Homo sapiens
tcttccaaagagcggttggttcctcaaggagtcaagagaggaagctgaaatattagcagagcaagcaattaaggagc

SEQ ID NO: 140088 - DNA, 77 bp, Homo sapiens
agcggttggttcctcaaggagtcaagagaggaagctgaaatattagcagagcaagcaattaaggagcctggccagag

SEQ ID NO: 140089 - DNA, 78 bp, Homo sapiens
aaggagtcaagagaggaagctgaaatattagcagagcaagcaattaaggagcctggccagaggctgcctagacaaaac

SEQ ID NO: 140090 - DNA, 74 bp, Homo sapiens
aagctgaaatattagcagagcaagcaattaaggagcctggccagaggctgcctagacaaaaccaaaccccaaaa

SEQ ID NO: 140091 - DNA, 76 bp, Homo sapiens
tattagcagagcaagcaattaaggagcctggccagaggctgcctagacaaaaccaaaccccaaaacaatctgtctg

SEQ ID NO: 140092 - DNA, 72 bp, Homo sapiens
aagcaattaaggagcctggccagaggctgcctagacaaaaccaaaccccaaaacaatctgtctgtagataaa

SEQ ID NO: 140093 - DNA, 73 bp, Homo sapiens
agaggctgcctagacaaaaccaaaccccaaaacaatctgtctgtagataaagcaggtaatctgccaatgaatt

SEQ ID NO: 140094 - DNA, 73 bp, Homo sapiens
gacaaaaccaaaccccaaaacaatctgtctgtagataaagcaggtaatctgccaatgaatttcgtgcttataa

SEQ ID NO: 140095 - DNA, 73 bp, Homo sapiens
aaccccaaaacaatctgtctgtagataaagcaggtaatctgccaatgaatttcgtgcttataattgtaaatct

SEQ ID NO: 140096 - DNA, 75 bp, Homo sapiens
aacaatctgtctgtagataaagcaggtaatctgccaatgaatttcgtgcttataattgtaaatcttttcacttcc

SEQ ID NO: 140097 - DNA, 74 bp, Homo sapiens
tgccaatgaatttcgtgcttataattgtaaatcttttcacttcctttctctgggtaacaagttccatagcaatg

SEQ ID NO: 140098 - DNA, 71 bp, Homo sapiens
gaatttcgtgcttataattgtaaatcttttcacttcctttctctgggtaacaagttccatagcaatgttct

SEQ ID NO: 140099 - DNA, 70 bp, Homo sapiens
gcttataattgtaaatcttttcacttcctttctctgggtaacaagttccatagcaatgttcttgtttcct

SEQ ID NO: 140100 - DNA, 68 bp, Homo sapiens
gtaaatcttttcacttcctttctctgggtaacaagttccatagcaatgttcttgtttcctttttccca

SEQ ID NO: 140101 - DNA, 71 bp, Homo sapiens
tcctttctctgggtaacaagttccatagcaatgttcttgtttcctttttcccagaagccagtacaattgct

SEQ ID NO: 140102 - DNA, 75 bp, Homo sapiens
tgggtaacaagttccatagcaatgttcttgtttcctttttcccagaagccagtacaattgctttcatgcattgaa

SEQ ID NO: 140103 - DNA, 75 bp, Homo sapiens
acaagttccatagcaatgttcttgtttcctttttcccagaagccagtacaattgctttcatgcattgaatattta

SEQ ID NO: 140104 - DNA, 72 bp, Homo sapiens
aatgttcttgtttcctttttcccagaagccagtacaattgctttcatgcattgaatatttaattccccgctc

SEQ ID NO: 140105 - DNA, 72 bp, Homo sapiens
tttcctttttcccagaagccagtacaattgctttcatgcattgaatatttaattccccgctcccagataatt

SEQ ID NO: 140106 - DNA, 76 bp, Homo sapiens
ttttcccagaagccagtacaattgctttcatgcattgaatatttaattccccgctcccagataatttccaatcata

SEQ ID NO: 140107 - DNA, 76 bp, Homo sapiens
cagtacaattgctttcatgcattgaatatttaattccccgctcccagataatttccaatcatacttggaattttca

SEQ ID NO: 140108 - DNA, 76 bp, Homo sapiens
attgctttcatgcattgaatatttaattccccgctcccagataatttccaatcatacttggaattttcagtgctgt

SEQ ID NO: 140109 - DNA, 72 bp, Homo sapiens
ttgaatatttaattccccgctcccagataatttccaatcatacttggaattttcagtgctgttcctcttctt

SEQ ID NO: 140110 - DNA, 70 bp, Homo sapiens
atttaattccccgctcccagataatttccaatcatacttggaattttcagtgctgttcctcttctttttc

SEQ ID NO: 140111 - DNA, 72 bp, Homo sapiens
tcccagataatttccaatcatacttggaattttcagtgctgttcctcttctttttccaaggcctctaaatgg

SEQ ID NO: 140112 - DNA, 72 bp, Homo sapiens
taatttccaatcatacttggaattttcagtgctgttcctcttctttttccaaggcctctaaatggttgacta

SEQ ID NO: 140113 - DNA, 72 bp, Homo sapiens
tacttggaattttcagtgctgttcctcttctttttccaaggcctctaaatggttgactagtattgtgtcaaa

SEQ ID NO: 140114 - DNA, 72 bp, Homo sapiens
gaattttcagtgctgttcctcttctttttccaaggcctctaaatggttgactagtattgtgtcaaattatta

SEQ ID NO: 140115 - DNA, 71 bp, Homo sapiens
gttcctcttctttttccaaggcctctaaatggttgactagtattgtgtcaaattattatttcgagccaata

SEQ ID NO: 140116 - DNA, 70 bp, Homo sapiens
cttctttttccaaggcctctaaatggttgactagtattgtgtcaaattattatttcgagccaataacaaa

SEQ ID NO: 140117 - DNA, 70 bp, Homo sapiens
caaggcctctaaatggttgactagtattgtgtcaaattattatttcgagccaataacaaatttacgttcc

SEQ ID NO: 140118 - DNA, 68 bp, Homo sapiens
ggttgactagtattgtgtcaaattattatttcgagccaataacaaatttacgttccttaactgttaag

SEQ ID NO: 140119 - DNA, 69 bp, Homo sapiens
gtattgtgtcaaattattatttcgagccaataacaaatttacgttccttaactgttaagtgggccatac

SEQ ID NO: 140120 - DNA, 68 bp, Homo sapiens
caaattattatttcgagccaataacaaatttacgttccttaactgttaagtgggccatacttcttgtc

SEQ ID NO: 140121 - DNA, 67 bp, Homo sapiens
cgagccaataacaaatttacgttccttaactgttaagtgggccatacttcttgtctaataaagttag

SEQ ID NO: 140122 - DNA, 66 bp, Homo sapiens
caataacaaatttacgttccttaactgttaagtgggccatacttcttgtctaataaagttaggaat

SEQ ID NO: 140123 - DNA, 66 bp, Homo sapiens
tttacgttccttaactgttaagtgggccatacttcttgtctaataaagttaggaatttaagtgtta

SEQ ID NO: 140124 - DNA, 68 bp, Homo sapiens
gattttttttttccccttgaaattcagacaatattaagggcaggaagggttttagagatcatgactta

SEQ ID NO: 140125 - DNA, 71 bp, Homo sapiens
tttccccttgaaattcagacaatattaagggcaggaagggttttagagatcatgacttattcaccaggtaa

SEQ ID NO: 140126 - DNA, 70 bp, Homo sapiens
aaattcagacaatattaagggcaggaagggttttagagatcatgacttattcaccaggtaagaaaaccaa

SEQ ID NO: 140127 - DNA, 70 bp, Homo sapiens
tattaagggcaggaagggttttagagatcatgacttattcaccaggtaagaaaaccaagacctagaatta

SEQ ID NO: 140128 - DNA, 69 bp, Homo sapiens
aggaagggttttagagatcatgacttattcaccaggtaagaaaaccaagacctagaattacaaatctac

SEQ ID NO: 140129 - DNA, 73 bp, Homo sapiens
gttttagagatcatgacttattcaccaggtaagaaaaccaagacctagaattacaaatctaccagttgacaga

SEQ ID NO: 140130 - DNA, 73 bp, Homo sapiens
tgacttattcaccaggtaagaaaaccaagacctagaattacaaatctaccagttgacagagcacgaactagaa

SEQ ID NO: 140131 - DNA, 73 bp, Homo sapiens
tattcaccaggtaagaaaaccaagacctagaattacaaatctaccagttgacagagcacgaactagaactcag

SEQ ID NO: 140132 - DNA, 72 bp, Homo sapiens
aagaaaaccaagacctagaattacaaatctaccagttgacagagcacgaactagaactcaggcacccagact

SEQ ID NO: 140133 - DNA, 75 bp, Homo sapiens
agacctagaattacaaatctaccagttgacagagcacgaactagaactcaggcacccagacttctgggccagtta

SEQ ID NO: 140134 - DNA, 77 bp, Homo sapiens
attacaaatctaccagttgacagagcacgaactagaactcaggcacccagacttctgggccagttatgctccaccaa

SEQ ID NO: 140135 - DNA, 76 bp, Homo sapiens
acagagcacgaactagaactcaggcacccagacttctgggccagttatgctccaccaaacttacaaaaagcatcta

SEQ ID NO: 140136 - DNA, 72 bp, Homo sapiens
actagaactcaggcacccagacttctgggccagttatgctccaccaaacttacaaaaagcatctacttggtt

SEQ ID NO: 140137 - DNA, 71 bp, Homo sapiens
acccagacttctgggccagttatgctccaccaaacttacaaaaagcatctacttggtttccatagtgactt

SEQ ID NO: 140138 - DNA, 71 bp, Homo sapiens
acttctgggccagttatgctccaccaaacttacaaaaagcatctacttggtttccatagtgactttccttc

SEQ ID NO: 140139 - DNA, 68 bp, Homo sapiens
agttatgctccaccaaacttacaaaaagcatctacttggtttccatagtgactttccttcctttgttt

SEQ ID NO: 140140 - DNA, 66 bp, Homo sapiens
ccaccaaacttacaaaaagcatctacttggtttccatagtgactttccttcctttgtttttaggta

SEQ ID NO: 140141 - DNA, 70 bp, Homo sapiens
aaaagcatctacttggtttccatagtgactttccttcctttgtttttaggtaaatctcactgatatggct

SEQ ID NO: 140142 - DNA, 69 bp, Homo sapiens
tacttggtttccatagtgactttccttcctttgtttttaggtaaatctcactgatatggcttattttcc

SEQ ID NO: 140143 - DNA, 68 bp, Homo sapiens
cttggtttccatagtgactttccttcctttgtttttaggtaaatctcactgatatggcttattttccc

SEQ ID NO: 140144 - DNA, 69 bp, Homo sapiens
gtttccatagtgactttccttcctttgtttttaggtaaatctcactgatatggcttattttccccaata

SEQ ID NO: 140145 - DNA, 69 bp, Homo sapiens
gtgactttccttcctttgtttttaggtaaatctcactgatatggcttattttccccaatatttccagga

SEQ ID NO: 140146 - DNA, 70 bp, Homo sapiens
ttccttcctttgtttttaggtaaatctcactgatatggcttattttccccaatatttccaggataaggca

SEQ ID NO: 140147 - DNA, 70 bp, Homo sapiens
cttcctttgtttttaggtaaatctcactgatatggcttattttccccaatatttccaggataaggcagta

SEQ ID NO: 140148 - DNA, 71 bp, Homo sapiens
tttaggtaaatctcactgatatggcttattttccccaatatttccaggataaggcagtaaaaggtaggcaa

SEQ ID NO: 140149 - DNA, 72 bp, Homo sapiens
taaatctcactgatatggcttattttccccaatatttccaggataaggcagtaaaaggtaggcaaaggaata

SEQ ID NO: 140150 - DNA, 70 bp, Homo sapiens
gatatggcttattttccccaatatttccaggataaggcagtaaaaggtaggcaaaggaatagtttatatc

SEQ ID NO: 140151 - DNA, 70 bp, Homo sapiens
attttccccaatatttccaggataaggcagtaaaaggtaggcaaaggaatagtttatatctactatgcca

SEQ ID NO: 140152 - DNA, 78 bp, Homo sapiens
aaaggtaggcaaaggaatagtttatatctactatgccagtggagaatgagatacattcaattgcatgggtacattcta

SEQ ID NO: 140153 - DNA, 79 bp, Homo sapiens
aaaggaatagtttatatctactatgccagtggagaatgagatacattcaattgcatgggtacattctatgcccattttc

SEQ ID NO: 140154 - DNA, 86 bp, Homo sapiens
ctactatgccagtggagaatgagatacattcaattgcatgggtacattctatgcccattttctgacgctgaagagatgaagtgtca

SEQ ID NO: 140155 - DNA, 81 bp, Homo sapiens
agaatgagatacattcaattgcatgggtacattctatgcccattttctgacgctgaagagatgaagtgtcactgtttgttt

SEQ ID NO: 140156 - DNA, 80 bp, Homo sapiens
agatacattcaattgcatgggtacattctatgcccattttctgacgctgaagagatgaagtgtcactgtttgttttctgg

SEQ ID NO: 140157 - DNA, 80 bp, Homo sapiens
aattgcatgggtacattctatgcccattttctgacgctgaagagatgaagtgtcactgtttgttttctgggcacaagcta

SEQ ID NO: 140158 - DNA, 81 bp, Homo sapiens
gtacattctatgcccattttctgacgctgaagagatgaagtgtcactgtttgttttctgggcacaagctattctagcatgg

SEQ ID NO: 140159 - DNA, 79 bp, Homo sapiens
atgcccattttctgacgctgaagagatgaagtgtcactgtttgttttctgggcacaagctattctagcatgggccgttg

SEQ ID NO: 140160 - DNA, 76 bp, Homo sapiens
acgctgaagagatgaagtgtcactgtttgttttctgggcacaagctattctagcatgggccgttggggaggcaggt

SEQ ID NO: 140161 - DNA, 75 bp, Homo sapiens
atgaagtgtcactgtttgttttctgggcacaagctattctagcatgggccgttggggaggcaggttgggcaggaa

SEQ ID NO: 140162 - DNA, 71 bp, Homo sapiens
actgtttgttttctgggcacaagctattctagcatgggccgttggggaggcaggttgggcaggaaagttaa

SEQ ID NO: 140163 - DNA, 75 bp, Homo sapiens
ttgttttctgggcacaagctattctagcatgggccgttggggaggcaggttgggcaggaaagttaagtgtgcaca

SEQ ID NO: 140164 - DNA, 75 bp, Homo sapiens
aagctattctagcatgggccgttggggaggcaggttgggcaggaaagttaagtgtgcacatggtctgcaggtgtt

SEQ ID NO: 140165 - DNA, 75 bp, Homo sapiens
attctagcatgggccgttggggaggcaggttgggcaggaaagttaagtgtgcacatggtctgcaggtgttttcta

SEQ ID NO: 140166 - DNA, 80 bp, Homo sapiens
caggttgggcaggaaagttaagtgtgcacatggtctgcaggtgttttctattgagtatctgtcagggtatgctatgagag

SEQ ID NO: 140167 - DNA, 79 bp, Homo sapiens
aggaaagttaagtgtgcacatggtctgcaggtgttttctattgagtatctgtcagggtatgctatgagagggacaggag

SEQ ID NO: 140168 - DNA, 80 bp, Homo sapiens
agttaagtgtgcacatggtctgcaggtgttttctattgagtatctgtcagggtatgctatgagagggacaggagggtcag

SEQ ID NO: 140169 - DNA, 80 bp, Homo sapiens
acatggtctgcaggtgttttctattgagtatctgtcagggtatgctatgagagggacaggagggtcagtggcagggccag

SEQ ID NO: 140170 - DNA, 79 bp, Homo sapiens
gtgttttctattgagtatctgtcagggtatgctatgagagggacaggagggtcagtggcagggccagtctctgtttaga

SEQ ID NO: 140171 - DNA, 80 bp, Homo sapiens
gtatgctatgagagggacaggagggtcagtggcagggccagtctctgtttagagatagtcaagctatttagttcctcaga

SEQ ID NO: 140172 - DNA, 74 bp, Homo sapiens
agggtcagtggcagggccagtctctgtttagagatagtcaagctatttagttcctcagagtcagagggaaaaag

SEQ ID NO: 140173 - DNA, 72 bp, Homo sapiens
agggccagtctctgtttagagatagtcaagctatttagttcctcagagtcagagggaaaaaggggactagga

SEQ ID NO: 140174 - DNA, 76 bp, Homo sapiens
tagagatagtcaagctatttagttcctcagagtcagagggaaaaaggggactaggagacatttgtcaatgaggcaa

SEQ ID NO: 140175 - DNA, 74 bp, Homo sapiens
aagctatttagttcctcagagtcagagggaaaaaggggactaggagacatttgtcaatgaggcaaggagcttga

SEQ ID NO: 140176 - DNA, 74 bp, Homo sapiens
agttcctcagagtcagagggaaaaaggggactaggagacatttgtcaatgaggcaaggagcttgaggatctaac

SEQ ID NO: 140177 - DNA, 73 bp, Homo sapiens
agtcagagggaaaaaggggactaggagacatttgtcaatgaggcaaggagcttgaggatctaaccaggaggaa

SEQ ID NO: 140178 - DNA, 73 bp, Homo sapiens
aaaaaggggactaggagacatttgtcaatgaggcaaggagcttgaggatctaaccaggaggaagcgtcctcca

SEQ ID NO: 140179 - DNA, 77 bp, Homo sapiens
agacatttgtcaatgaggcaaggagcttgaggatctaaccaggaggaagcgtcctccagccatcaggacacaaaggg

SEQ ID NO: 140180 - DNA, 76 bp, Homo sapiens
tttgtcaatgaggcaaggagcttgaggatctaaccaggaggaagcgtcctccagccatcaggacacaaaggggccc

SEQ ID NO: 140181 - DNA, 76 bp, Homo sapiens
aaggagcttgaggatctaaccaggaggaagcgtcctccagccatcaggacacaaaggggccctcagaacactgcat

SEQ ID NO: 140182 - DNA, 76 bp, Homo sapiens
taaccaggaggaagcgtcctccagccatcaggacacaaaggggccctcagaacactgcatttccttcaactcagaa

SEQ ID NO: 140183 - DNA, 82 bp, Homo sapiens
catcaggacacaaaggggccctcagaacactgcatttccttcaactcagaatgtagctgcactaatctcgcctcagcatttc

SEQ ID NO: 140184 - DNA, 82 bp, Homo sapiens
ctcagaacactgcatttccttcaactcagaatgtagctgcactaatctcgcctcagcatttctccagaagaagactgaagtt

SEQ ID NO: 140185 - DNA, 79 bp, Homo sapiens
ttcaactcagaatgtagctgcactaatctcgcctcagcatttctccagaagaagactgaagtttcaccgtatctttcct

SEQ ID NO: 140186 - DNA, 79 bp, Homo sapiens
atgtagctgcactaatctcgcctcagcatttctccagaagaagactgaagtttcaccgtatctttccttgattagaata

SEQ ID NO: 140187 - DNA, 76 bp, Homo sapiens
actaatctcgcctcagcatttctccagaagaagactgaagtttcaccgtatctttccttgattagaatatttgatc

SEQ ID NO: 140188 - DNA, 76 bp, Homo sapiens
cctcagcatttctccagaagaagactgaagtttcaccgtatctttccttgattagaatatttgatccatagagaaa

SEQ ID NO: 140189 - DNA, 75 bp, Homo sapiens
tttctccagaagaagactgaagtttcaccgtatctttccttgattagaatatttgatccatagagaaatctgttg

SEQ ID NO: 140190 - DNA, 78 bp, Homo sapiens
aagactgaagtttcaccgtatctttccttgattagaatatttgatccatagagaaatctgttgtcagctcagcaaaga

SEQ ID NO: 140191 - DNA, 77 bp, Homo sapiens
aagtttcaccgtatctttccttgattagaatatttgatccatagagaaatctgttgtcagctcagcaaagatacaac

SEQ ID NO: 140192 - DNA, 79 bp, Homo sapiens
tatctttccttgattagaatatttgatccatagagaaatctgttgtcagctcagcaaagatacaacctggataaagaac

SEQ ID NO: 140193 - DNA, 79 bp, Homo sapiens
attagaatatttgatccatagagaaatctgttgtcagctcagcaaagatacaacctggataaagaacttcaggagcttg

SEQ ID NO: 140194 - DNA, 79 bp, Homo sapiens
aatatttgatccatagagaaatctgttgtcagctcagcaaagatacaacctggataaagaacttcaggagcttgggaga

SEQ ID NO: 140195 - DNA, 84 bp, Homo sapiens
atagagaaatctgttgtcagctcagcaaagatacaacctggataaagaacttcaggagcttgggagatgacagatcagatgcca

SEQ ID NO: 140196 - DNA, 83 bp, Homo sapiens
atctgttgtcagctcagcaaagatacaacctggataaagaacttcaggagcttgggagatgacagatcagatgccacagaaaa

SEQ ID NO: 140197 - DNA, 78 bp, Homo sapiens
agcaaagatacaacctggataaagaacttcaggagcttgggagatgacagatcagatgccacagaaaaggggtgccac

SEQ ID NO: 140198 - DNA, 75 bp, Homo sapiens
aggagcttgggagatgacagatcagatgccacagaaaaggggtgccaccctgtaaataggtttgatttctgtaaa

SEQ ID NO: 140199 - DNA, 73 bp, Homo sapiens
atcagatgccacagaaaaggggtgccaccctgtaaataggtttgatttctgtaaaagtgttctctgagcctaa

SEQ ID NO: 140200 - DNA, 69 bp, Homo sapiens
acagaaaaggggtgccaccctgtaaataggtttgatttctgtaaaagtgttctctgagcctaaatggga

SEQ ID NO: 140201 - DNA, 68 bp, Homo sapiens
accctgtaaataggtttgatttctgtaaaagtgttctctgagcctaaatgggaaagaagccttcctac

SEQ ID NO: 140202 - DNA, 71 bp, Homo sapiens
ataggtttgatttctgtaaaagtgttctctgagcctaaatgggaaagaagccttcctactgtgaggtaata

SEQ ID NO: 140203 - DNA, 71 bp, Homo sapiens
gtaaaagtgttctctgagcctaaatgggaaagaagccttcctactgtgaggtaatactatgtgaatttttg

SEQ ID NO: 140204 - DNA, 75 bp, Homo sapiens
taaatgggaaagaagccttcctactgtgaggtaatactatgtgaatttttggaaaccatgcagtcactgacattg

SEQ ID NO: 140205 - DNA, 75 bp, Homo sapiens
aagaagccttcctactgtgaggtaatactatgtgaatttttggaaaccatgcagtcactgacattggtgaagatt

SEQ ID NO: 140206 - DNA, 76 bp, Homo sapiens
ttcctactgtgaggtaatactatgtgaatttttggaaaccatgcagtcactgacattggtgaagatttctaatttc

SEQ ID NO: 140207 - DNA, 73 bp, Homo sapiens
tttttggaaaccatgcagtcactgacattggtgaagatttctaatttctctgggctcactgaaaaaaaatatt

SEQ ID NO: 140208 - DNA, 74 bp, Homo sapiens
atgcagtcactgacattggtgaagatttctaatttctctgggctcactgaaaaaaaatattttccttgttggcc

SEQ ID NO: 140209 - DNA, 73 bp, Homo sapiens
acattggtgaagatttctaatttctctgggctcactgaaaaaaaatattttccttgttggcctccatcagtca

SEQ ID NO: 140210 - DNA, 75 bp, Homo sapiens
taatttctctgggctcactgaaaaaaaatattttccttgttggcctccatcagtcaatacctgcacatccttgag

SEQ ID NO: 140211 - DNA, 76 bp, Homo sapiens
tcactgaaaaaaaatattttccttgttggcctccatcagtcaatacctgcacatccttgagtcacacctttgtata

SEQ ID NO: 140212 - DNA, 74 bp, Homo sapiens
attttccttgttggcctccatcagtcaatacctgcacatccttgagtcacacctttgtataacttgaattaaac

SEQ ID NO: 140213 - DNA, 74 bp, Homo sapiens
ctccatcagtcaatacctgcacatccttgagtcacacctttgtataacttgaattaaaccataacgttataaaa

SEQ ID NO: 140214 - DNA, 74 bp, Homo sapiens
cagtcaatacctgcacatccttgagtcacacctttgtataacttgaattaaaccataacgttataaaaatgata

SEQ ID NO: 140215 - DNA, 73 bp, Homo sapiens
gcacatccttgagtcacacctttgtataacttgaattaaaccataacgttataaaaatgatattggaagggca

SEQ ID NO: 140216 - DNA, 72 bp, Homo sapiens
cttgagtcacacctttgtataacttgaattaaaccataacgttataaaaatgatattggaagggcagctgat

SEQ ID NO: 140217 - DNA, 67 bp, Homo sapiens
acctttgtataacttgaattaaaccataacgttataaaaatgatattggaagggcagctgatttttt

SEQ ID NO: 140218 - DNA, 72 bp, Homo sapiens
ccataacgttataaaaatgatattggaagggcagctgatttttttaggacacaaatattcctgtacattcca

SEQ ID NO: 140219 - DNA, 73 bp, Homo sapiens
aaaaatgatattggaagggcagctgatttttttaggacacaaatattcctgtacattccaagttatgctccta

SEQ ID NO: 140220 - DNA, 75 bp, Homo sapiens
tattggaagggcagctgatttttttaggacacaaatattcctgtacattccaagttatgctcctaggagaccata

SEQ ID NO: 140221 - DNA, 76 bp, Homo sapiens
agctgatttttttaggacacaaatattcctgtacattccaagttatgctcctaggagaccataaagagtgctgcaa

SEQ ID NO: 140222 - DNA, 79 bp, Homo sapiens
ttttaggacacaaatattcctgtacattccaagttatgctcctaggagaccataaagagtgctgcaaacagcatgctct

SEQ ID NO: 140223 - DNA, 81 bp, Homo sapiens
aaatattcctgtacattccaagttatgctcctaggagaccataaagagtgctgcaaacagcatgctcttgaatagatgaaa

SEQ ID NO: 140224 - DNA, 81 bp, Homo sapiens
ttcctgtacattccaagttatgctcctaggagaccataaagagtgctgcaaacagcatgctcttgaatagatgaaaatttg

SEQ ID NO: 140225 - DNA, 79 bp, Homo sapiens
aagttatgctcctaggagaccataaagagtgctgcaaacagcatgctcttgaatagatgaaaatttgttcgagtctttc

SEQ ID NO: 140226 - DNA, 77 bp, Homo sapiens
ctgcaaacagcatgctcttgaatagatgaaaatttgttcgagtctttccctaaaaggctgaaagccacatctaacta

SEQ ID NO: 140227 - DNA, 74 bp, Homo sapiens
aacagcatgctcttgaatagatgaaaatttgttcgagtctttccctaaaaggctgaaagccacatctaactaaa

SEQ ID NO: 140228 - DNA, 71 bp, Homo sapiens
ttgaatagatgaaaatttgttcgagtctttccctaaaaggctgaaagccacatctaactaaaggtggtctg

SEQ ID NO: 140229 - DNA, 70 bp, Homo sapiens
aaaatttgttcgagtctttccctaaaaggctgaaagccacatctaactaaaggtggtctgtgctctgtta

SEQ ID NO: 140230 - DNA, 72 bp, Homo sapiens
gttcgagtctttccctaaaaggctgaaagccacatctaactaaaggtggtctgtgctctgttaacttcagcc

SEQ ID NO: 140231 - DNA, 76 bp, Homo sapiens
taaaaggctgaaagccacatctaactaaaggtggtctgtgctctgttaacttcagccctgcgaacatcaggattgg

SEQ ID NO: 140232 - DNA, 75 bp, Homo sapiens
taaaggtggtctgtgctctgttaacttcagccctgcgaacatcaggattgggtggaggtggtcgtattatcttgg

SEQ ID NO: 140233 - DNA, 72 bp, Homo sapiens
ctctgttaacttcagccctgcgaacatcaggattgggtggaggtggtcgtattatcttggttttaaggcttc

SEQ ID NO: 140234 - DNA, 71 bp, Homo sapiens
ttaacttcagccctgcgaacatcaggattgggtggaggtggtcgtattatcttggttttaaggcttcttta

SEQ ID NO: 140235 - DNA, 71 bp, Homo sapiens
ccctgcgaacatcaggattgggtggaggtggtcgtattatcttggttttaaggcttctttagtgtcctgtg

SEQ ID NO: 140236 - DNA, 70 bp, Homo sapiens
atcaggattgggtggaggtggtcgtattatcttggttttaaggcttctttagtgtcctgtggcgccattt

SEQ ID NO: 140237 - DNA, 72 bp, Homo sapiens
aggtggtcgtattatcttggttttaaggcttctttagtgtcctgtggcgccattttgctgactcaagtcttg

SEQ ID NO: 140238 - DNA, 73 bp, Homo sapiens
tattatcttggttttaaggcttctttagtgtcctgtggcgccattttgctgactcaagtcttggaccagggac

SEQ ID NO: 140239 - DNA, 71 bp, Homo sapiens
ttggttttaaggcttctttagtgtcctgtggcgccattttgctgactcaagtcttggaccagggacgggtg

SEQ ID NO: 140240 - DNA, 76 bp, Homo sapiens
ttctttagtgtcctgtggcgccattttgctgactcaagtcttggaccagggacgggtgggagctggtgatgcttgg

SEQ ID NO: 140241 - DNA, 79 bp, Homo sapiens
tcctgtggcgccattttgctgactcaagtcttggaccagggacgggtgggagctggtgatgcttggtgctggtgagtta

SEQ ID NO: 140242 - DNA, 78 bp, Homo sapiens
cattttgctgactcaagtcttggaccagggacgggtgggagctggtgatgcttggtgctggtgagttaatgattgtcc

SEQ ID NO: 140243 - DNA, 74 bp, Homo sapiens
actcaagtcttggaccagggacgggtgggagctggtgatgcttggtgctggtgagttaatgattgtcccccacc

SEQ ID NO: 140244 - DNA, 73 bp, Homo sapiens
agtcttggaccagggacgggtgggagctggtgatgcttggtgctggtgagttaatgattgtcccccaccccac

SEQ ID NO: 140245 - DNA, 73 bp, Homo sapiens
acgggtgggagctggtgatgcttggtgctggtgagttaatgattgtcccccaccccacctccacaaccataaa

SEQ ID NO: 140246 - DNA, 74 bp, Homo sapiens
gtgagttaatgattgtcccccaccccacctccacaaccataaaaccttcagagcattcacatcacaggaccgga

SEQ ID NO: 140247 - DNA, 75 bp, Homo sapiens
caccccacctccacaaccataaaaccttcagagcattcacatcacaggaccggagaacgaaatgcaatagtttca

SEQ ID NO: 140248 - DNA, 74 bp, Homo sapiens
ataaaaccttcagagcattcacatcacaggaccggagaacgaaatgcaatagtttcaagtacccgcattcaagg

SEQ ID NO: 140249 - DNA, 78 bp, Homo sapiens
ttcagagcattcacatcacaggaccggagaacgaaatgcaatagtttcaagtacccgcattcaaggggcaatttcatc

SEQ ID NO: 140250 - DNA, 70 bp, Homo sapiens
atttcatccatgtctatgccaaggactacttcccttttccctcccaaataatccctcccaacacaaagaa

SEQ ID NO: 140251 - DNA, 68 bp, Homo sapiens
atgtctatgccaaggactacttcccttttccctcccaaataatccctcccaacacaaagaaacaaaca

SEQ ID NO: 140252 - DNA, 76 bp, Homo sapiens
aacaaacaaaaaagagctaggcaatggaatgaaatgacacccagtagtgctgtaggaattatgagaatgaatccag

SEQ ID NO: 140253 - DNA, 79 bp, Homo sapiens
aaaaagagctaggcaatggaatgaaatgacacccagtagtgctgtaggaattatgagaatgaatccagtcagtctaatc

SEQ ID NO: 140254 - DNA, 80 bp, Homo sapiens
taggcaatggaatgaaatgacacccagtagtgctgtaggaattatgagaatgaatccagtcagtctaatcctcgaacact

SEQ ID NO: 140255 - DNA, 78 bp, Homo sapiens
aatgaaatgacacccagtagtgctgtaggaattatgagaatgaatccagtcagtctaatcctcgaacacttccaagaa

SEQ ID NO: 140256 - DNA, 75 bp, Homo sapiens
acacccagtagtgctgtaggaattatgagaatgaatccagtcagtctaatcctcgaacacttccaagaacaaagg

SEQ ID NO: 140257 - DNA, 72 bp, Homo sapiens
aattatgagaatgaatccagtcagtctaatcctcgaacacttccaagaacaaaggggggaagagttctgtgg

SEQ ID NO: 140258 - DNA, 72 bp, Homo sapiens
aatgaatccagtcagtctaatcctcgaacacttccaagaacaaaggggggaagagttctgtggggcattcca

SEQ ID NO: 140259 - DNA, 73 bp, Homo sapiens
tctaatcctcgaacacttccaagaacaaaggggggaagagttctgtggggcattccaccttcatgtgcaggaa

SEQ ID NO: 140260 - DNA, 73 bp, Homo sapiens
tcctcgaacacttccaagaacaaaggggggaagagttctgtggggcattccaccttcatgtgcaggaagcggc

SEQ ID NO: 140261 - DNA, 76 bp, Homo sapiens
aagaacaaaggggggaagagttctgtggggcattccaccttcatgtgcaggaagcggctggcatggcaggctccta

SEQ ID NO: 140262 - DNA, 84 bp, Homo sapiens
gggggaagagttctgtggggcattccaccttcatgtgcaggaagcggctggcatggcaggctcctatcatccgcagatctgtca

SEQ ID NO: 140263 - DNA, 85 bp, Homo sapiens
aagagttctgtggggcattccaccttcatgtgcaggaagcggctggcatggcaggctcctatcatccgcagatctgtcaccttca

SEQ ID NO: 140264 - DNA, 86 bp, Homo sapiens
cattccaccttcatgtgcaggaagcggctggcatggcaggctcctatcatccgcagatctgtcaccttcatcaggagttttggcca

SEQ ID NO: 140265 - DNA, 83 bp, Homo sapiens
accttcatgtgcaggaagcggctggcatggcaggctcctatcatccgcagatctgtcaccttcatcaggagttttggccaaaa

SEQ ID NO: 140266 - DNA, 81 bp, Homo sapiens
aggaagcggctggcatggcaggctcctatcatccgcagatctgtcaccttcatcaggagttttggccaaaagtgtgtcacg

SEQ ID NO: 140267 - DNA, 81 bp, Homo sapiens
tggcatggcaggctcctatcatccgcagatctgtcaccttcatcaggagttttggccaaaagtgtgtcacgtggtgttttc

SEQ ID NO: 140268 - DNA, 75 bp, Homo sapiens
ctcctatcatccgcagatctgtcaccttcatcaggagttttggccaaaagtgtgtcacgtggtgttttcggtaat

SEQ ID NO: 140269 - DNA, 77 bp, Homo sapiens
atcatccgcagatctgtcaccttcatcaggagttttggccaaaagtgtgtcacgtggtgttttcggtaattgatata

SEQ ID NO: 140270 - DNA, 73 bp, Homo sapiens
tgtcaccttcatcaggagttttggccaaaagtgtgtcacgtggtgttttcggtaattgatatagtgttcaaag

SEQ ID NO: 140271 - DNA, 74 bp, Homo sapiens
ttcatcaggagttttggccaaaagtgtgtcacgtggtgttttcggtaattgatatagtgttcaaaggccagcag

SEQ ID NO: 140272 - DNA, 72 bp, Homo sapiens
tttggccaaaagtgtgtcacgtggtgttttcggtaattgatatagtgttcaaaggccagcaggaaactatct

SEQ ID NO: 140273 - DNA, 71 bp, Homo sapiens
aaaagtgtgtcacgtggtgttttcggtaattgatatagtgttcaaaggccagcaggaaactatcttggtac

SEQ ID NO: 140274 - DNA, 70 bp, Homo sapiens
acgtggtgttttcggtaattgatatagtgttcaaaggccagcaggaaactatcttggtacttttctattc

SEQ ID NO: 140275 - DNA, 75 bp, Homo sapiens
tttcggtaattgatatagtgttcaaaggccagcaggaaactatcttggtacttttctattctctcaacacaggca

SEQ ID NO: 140276 - DNA, 73 bp, Homo sapiens
atatagtgttcaaaggccagcaggaaactatcttggtacttttctattctctcaacacaggcaagccccgggc

SEQ ID NO: 140277 - DNA, 72 bp, Homo sapiens
aggaaactatcttggtacttttctattctctcaacacaggcaagccccgggcgatctgcggggaagagagaa

SEQ ID NO: 140278 - DNA, 77 bp, Homo sapiens
ttggtacttttctattctctcaacacaggcaagccccgggcgatctgcggggaagagagaagatggacattgattca

SEQ ID NO: 140279 - DNA, 77 bp, Homo sapiens
aagcaaaagctctttggatgcccactaacgagtctaggcgtactcacctgaagacatcagcaggacggcctgaagga

SEQ ID NO: 140280 - DNA, 78 bp, Homo sapiens
tctttggatgcccactaacgagtctaggcgtactcacctgaagacatcagcaggacggcctgaaggagggctacttca

SEQ ID NO: 140281 - DNA, 79 bp, Homo sapiens
atgcccactaacgagtctaggcgtactcacctgaagacatcagcaggacggcctgaaggagggctacttcagtgtcatc

SEQ ID NO: 140282 - DNA, 78 bp, Homo sapiens
agtctaggcgtactcacctgaagacatcagcaggacggcctgaaggagggctacttcagtgtcatccaggttgaaaga

SEQ ID NO: 140283 - DNA, 79 bp, Homo sapiens
ggcgtactcacctgaagacatcagcaggacggcctgaaggagggctacttcagtgtcatccaggttgaaagaagacaga

SEQ ID NO: 140284 - DNA, 80 bp, Homo sapiens
agacatcagcaggacggcctgaaggagggctacttcagtgtcatccaggttgaaagaagacagagacatgcccaggtcaa

SEQ ID NO: 140285 - DNA, 78 bp, Homo sapiens
agcaggacggcctgaaggagggctacttcagtgtcatccaggttgaaagaagacagagacatgcccaggtcaaagatg

SEQ ID NO: 140286 - DNA, 80 bp, Homo sapiens
tgaaggagggctacttcagtgtcatccaggttgaaagaagacagagacatgcccaggtcaaagatggcgtctgacaccac

SEQ ID NO: 140287 - DNA, 78 bp, Homo sapiens
tacttcagtgtcatccaggttgaaagaagacagagacatgcccaggtcaaagatggcgtctgacaccaccccaagacc

SEQ ID NO: 140288 - DNA, 75 bp, Homo sapiens
tcatccaggttgaaagaagacagagacatgcccaggtcaaagatggcgtctgacaccaccccaagacccccattt

SEQ ID NO: 140289 - DNA, 73 bp, Homo sapiens
aggttgaaagaagacagagacatgcccaggtcaaagatggcgtctgacaccaccccaagacccccatttttca

SEQ ID NO: 140290 - DNA, 75 bp, Homo sapiens
acagagacatgcccaggtcaaagatggcgtctgacaccaccccaagacccccatttttcagctggccccgtgtca

SEQ ID NO: 140291 - DNA, 72 bp, Homo sapiens
cccaggtcaaagatggcgtctgacaccaccccaagacccccatttttcagctggccccgtgtcactgccatt

SEQ ID NO: 140292 - DNA, 71 bp, Homo sapiens
aaagatggcgtctgacaccaccccaagacccccatttttcagctggccccgtgtcactgccatttccccat

SEQ ID NO: 140293 - DNA, 70 bp, Homo sapiens
tgacaccaccccaagacccccatttttcagctggccccgtgtcactgccatttccccattcaaggttaaa

SEQ ID NO: 140294 - DNA, 69 bp, Homo sapiens
ccaagacccccatttttcagctggccccgtgtcactgccatttccccattcaaggttaaagtctcactt

SEQ ID NO: 140295 - DNA, 72 bp, Homo sapiens
cccatttttcagctggccccgtgtcactgccatttccccattcaaggttaaagtctcactttctgggtcata

SEQ ID NO: 140296 - DNA, 77 bp, Homo sapiens
ctggccccgtgtcactgccatttccccattcaaggttaaagtctcactttctgggtcatagcgcacagcagcgcgaa

SEQ ID NO: 140297 - DNA, 80 bp, Homo sapiens
gtgtcactgccatttccccattcaaggttaaagtctcactttctgggtcatagcgcacagcagcgcgaagggacatgatc

SEQ ID NO: 140298 - DNA, 82 bp, Homo sapiens
ccatttccccattcaaggttaaagtctcactttctgggtcatagcgcacagcagcgcgaagggacatgatctccatgcagca

SEQ ID NO: 140299 - DNA, 83 bp, Homo sapiens
attcaaggttaaagtctcactttctgggtcatagcgcacagcagcgcgaagggacatgatctccatgcagcagcctttgagga

SEQ ID NO: 140300 - DNA, 86 bp, Homo sapiens
ttaaagtctcactttctgggtcatagcgcacagcagcgcgaagggacatgatctccatgcagcagcctttgaggaggatgatctgg

SEQ ID NO: 140301 - DNA, 89 bp, Homo sapiens
actttctgggtcatagcgcacagcagcgcgaagggacatgatctccatgcagcagcctttgaggaggatgatctggtcttcacatggca

SEQ ID NO: 140302 - DNA, 86 bp, Homo sapiens
agcgcgaagggacatgatctccatgcagcagcctttgaggaggatgatctggtcttcacatggcagctgaaaagaaccagttcatg

SEQ ID NO: 140303 - DNA, 88 bp, Homo sapiens
acatgatctccatgcagcagcctttgaggaggatgatctggtcttcacatggcagctgaaaagaaccagttcatgtcagcaaagaaca

SEQ ID NO: 140304 - DNA, 86 bp, Homo sapiens
catgcagcagcctttgaggaggatgatctggtcttcacatggcagctgaaaagaaccagttcatgtcagcaaagaacaaatgcaaa

SEQ ID NO: 140305 - DNA, 73 bp, Homo sapiens
ctgatgaaactataattaagaataatgcagaaggaaaaacaacatcctcacctcacaaaacataggcaacttt

SEQ ID NO: 140306 - DNA, 72 bp, Homo sapiens
attaagaataatgcagaaggaaaaacaacatcctcacctcacaaaacataggcaactttttggcaaaatcca

SEQ ID NO: 140307 - DNA, 72 bp, Homo sapiens
aataatgcagaaggaaaaacaacatcctcacctcacaaaacataggcaactttttggcaaaatccaccactc

SEQ ID NO: 140308 - DNA, 69 bp, Homo sapiens
aaggaaaaacaacatcctcacctcacaaaacataggcaactttttggcaaaatccaccactctggtaat

SEQ ID NO: 140309 - DNA, 74 bp, Homo sapiens
atcctcacctcacaaaacataggcaactttttggcaaaatccaccactctggtaattgctggtgtgatgatttt

SEQ ID NO: 140310 - DNA, 73 bp, Homo sapiens
ctcacaaaacataggcaactttttggcaaaatccaccactctggtaattgctggtgtgatgatttttgtaaaa

SEQ ID NO: 140311 - DNA, 74 bp, Homo sapiens
ataggcaactttttggcaaaatccaccactctggtaattgctggtgtgatgatttttgtaaaatggctgaaggc

SEQ ID NO: 140312 - DNA, 75 bp, Homo sapiens
ttttggcaaaatccaccactctggtaattgctggtgtgatgatttttgtaaaatggctgaaggcttccaagtcaa

SEQ ID NO: 140313 - DNA, 74 bp, Homo sapiens
aatccaccactctggtaattgctggtgtgatgatttttgtaaaatggctgaaggcttccaagtcaacctttcca

SEQ ID NO: 140314 - DNA, 73 bp, Homo sapiens
tctggtaattgctggtgtgatgatttttgtaaaatggctgaaggcttccaagtcaacctttccaccttctggg

SEQ ID NO: 140315 - DNA, 74 bp, Homo sapiens
tggtgtgatgatttttgtaaaatggctgaaggcttccaagtcaacctttccaccttctggggcattgactattg

SEQ ID NO: 140316 - DNA, 71 bp, Homo sapiens
atttttgtaaaatggctgaaggcttccaagtcaacctttccaccttctggggcattgactattggtgcttg

SEQ ID NO: 140317 - DNA, 73 bp, Homo sapiens
aaaatggctgaaggcttccaagtcaacctttccaccttctggggcattgactattggtgcttgtccaatgtct

SEQ ID NO: 140318 - DNA, 73 bp, Homo sapiens
aaggcttccaagtcaacctttccaccttctggggcattgactattggtgcttgtccaatgtcttctggctaag

SEQ ID NO: 140319 - DNA, 73 bp, Homo sapiens
agtcaacctttccaccttctggggcattgactattggtgcttgtccaatgtcttctggctaaggaggagaaaa

SEQ ID NO: 140320 - DNA, 72 bp, Homo sapiens
accttctggggcattgactattggtgcttgtccaatgtcttctggctaaggaggagaaaaaagaaagattta

SEQ ID NO: 140321 - DNA, 72 bp, Homo sapiens
aaaacactggcatataagtgaaactgatctgtgcaaggaagccttaccaggaatttccgtttttgcttccag

SEQ ID NO: 140322 - DNA, 73 bp, Homo sapiens
atataagtgaaactgatctgtgcaaggaagccttaccaggaatttccgtttttgcttccagtggctgccttgg

SEQ ID NO: 140323 - DNA, 71 bp, Homo sapiens
aaactgatctgtgcaaggaagccttaccaggaatttccgtttttgcttccagtggctgccttgggcgttgg

SEQ ID NO: 140324 - DNA, 73 bp, Homo sapiens
atctgtgcaaggaagccttaccaggaatttccgtttttgcttccagtggctgccttgggcgttggtcgccaca

SEQ ID NO: 140325 - DNA, 70 bp, Homo sapiens
aagccttaccaggaatttccgtttttgcttccagtggctgccttgggcgttggtcgccacatgggcttcg

SEQ ID NO: 140326 - DNA, 73 bp, Homo sapiens
aatttccgtttttgcttccagtggctgccttgggcgttggtcgccacatgggcttcggtgacagttttgatga

SEQ ID NO: 140327 - DNA, 76 bp, Homo sapiens
tttttgcttccagtggctgccttgggcgttggtcgccacatgggcttcggtgacagttttgatgagctcccattcc

SEQ ID NO: 140328 - DNA, 77 bp, Homo sapiens
agtggctgccttgggcgttggtcgccacatgggcttcggtgacagttttgatgagctcccattcctcgtctgtgggc

SEQ ID NO: 140329 - DNA, 76 bp, Homo sapiens
ccttgggcgttggtcgccacatgggcttcggtgacagttttgatgagctcccattcctcgtctgtgggctctggct

SEQ ID NO: 140330 - DNA, 80 bp, Homo sapiens
ttggtcgccacatgggcttcggtgacagttttgatgagctcccattcctcgtctgtgggctctggcttgtgcccgatgga

SEQ ID NO: 140331 - DNA, 81 bp, Homo sapiens
acatgggcttcggtgacagttttgatgagctcccattcctcgtctgtgggctctggcttgtgcccgatggacttctgcagc

SEQ ID NO: 140332 - DNA, 79 bp, Homo sapiens
acagttttgatgagctcccattcctcgtctgtgggctctggcttgtgcccgatggacttctgcagctcttcccgccgtc

SEQ ID NO: 140333 - DNA, 79 bp, Homo sapiens
tttgatgagctcccattcctcgtctgtgggctctggcttgtgcccgatggacttctgcagctcttcccgccgtcttttc

SEQ ID NO: 140334 - DNA, 74 bp, Homo sapiens
attcctcgtctgtgggctctggcttgtgcccgatggacttctgcagctcttcccgccgtcttttctcccggttc

SEQ ID NO: 140335 - DNA, 77 bp, Homo sapiens
tgtgggctctggcttgtgcccgatggacttctgcagctcttcccgccgtcttttctcccggttctcctctatcagct

SEQ ID NO: 140336 - DNA, 76 bp, Homo sapiens
tctggcttgtgcccgatggacttctgcagctcttcccgccgtcttttctcccggttctcctctatcagcttcctct

SEQ ID NO: 140337 - DNA, 75 bp, Homo sapiens
cgatggacttctgcagctcttcccgccgtcttttctcccggttctcctctatcagcttcctcttggccagcctct

SEQ ID NO: 140338 - DNA, 77 bp, Homo sapiens
acttctgcagctcttcccgccgtcttttctcccggttctcctctatcagcttcctcttggccagcctcttgctgtca

SEQ ID NO: 140339 - DNA, 77 bp, Homo sapiens
ctcttcccgccgtcttttctcccggttctcctctatcagcttcctcttggccagcctcttgctgtcatccagcacca

SEQ ID NO: 140340 - DNA, 76 bp, Homo sapiens
cgtcttttctcccggttctcctctatcagcttcctcttggccagcctcttgctgtcatccagcaccactgggaggg

SEQ ID NO: 140341 - DNA, 80 bp, Homo sapiens
ggttctcctctatcagcttcctcttggccagcctcttgctgtcatccagcaccactgggagggggagaaagatgagacaa

SEQ ID NO: 140342 - DNA, 83 bp, Homo sapiens
ctctatcagcttcctcttggccagcctcttgctgtcatccagcaccactgggagggggagaaagatgagacaaggcacacaga

SEQ ID NO: 140343 - DNA, 83 bp, Homo sapiens
ttcctaatcaacattccttgaatatgaagcaagtgaagatctacttacaatctgttgccatgccaacatagatgcatttctta

SEQ ID NO: 140344 - DNA, 82 bp, Homo sapiens
attccttgaatatgaagcaagtgaagatctacttacaatctgttgccatgccaacatagatgcatttcttaaagcgacattc

SEQ ID NO: 140345 - DNA, 84 bp, Homo sapiens
tatgaagcaagtgaagatctacttacaatctgttgccatgccaacatagatgcatttcttaaagcgacattcctggcactgatt

SEQ ID NO: 140346 - DNA, 81 bp, Homo sapiens
aagtgaagatctacttacaatctgttgccatgccaacatagatgcatttcttaaagcgacattcctggcactgatttcgcg

SEQ ID NO: 140347 - DNA, 82 bp, Homo sapiens
tacttacaatctgttgccatgccaacatagatgcatttcttaaagcgacattcctggcactgatttcgcgtgactttgtcta

SEQ ID NO: 140348 - DNA, 83 bp, Homo sapiens
aatctgttgccatgccaacatagatgcatttcttaaagcgacattcctggcactgatttcgcgtgactttgtctatgacacat

SEQ ID NO: 140349 - DNA, 81 bp, Homo sapiens
atgccaacatagatgcatttcttaaagcgacattcctggcactgatttcgcgtgactttgtctatgacacattttccttca

SEQ ID NO: 140350 - DNA, 79 bp, Homo sapiens
atagatgcatttcttaaagcgacattcctggcactgatttcgcgtgactttgtctatgacacattttccttcatattta

SEQ ID NO: 140351 - DNA, 77 bp, Homo sapiens
ttcttaaagcgacattcctggcactgatttcgcgtgactttgtctatgacacattttccttcatatttacaggaata

SEQ ID NO: 140352 - DNA, 78 bp, Homo sapiens
attcctggcactgatttcgcgtgactttgtctatgacacattttccttcatatttacaggaataggatggatggagat

SEQ ID NO: 140353 - DNA, 77 bp, Homo sapiens
actgatttcgcgtgactttgtctatgacacattttccttcatatttacaggaataggatggatggagatttttctga

SEQ ID NO: 140354 - DNA, 76 bp, Homo sapiens
gactttgtctatgacacattttccttcatatttacaggaataggatggatggagatttttctgaatggttcttcta

SEQ ID NO: 140355 - DNA, 75 bp, Homo sapiens
gtctatgacacattttccttcatatttacaggaataggatggatggagatttttctgaatggttcttctaaagaa

SEQ ID NO: 140356 - DNA, 73 bp, Homo sapiens
ttccttcatatttacaggaataggatggatggagatttttctgaatggttcttctaaagaaaccctatatgaa

SEQ ID NO: 140357 - DNA, 72 bp, Homo sapiens
catatttacaggaataggatggatggagatttttctgaatggttcttctaaagaaaccctatatgaaaaaca

SEQ ID NO: 140358 - DNA, 70 bp, Homo sapiens
ggaataggatggatggagatttttctgaatggttcttctaaagaaaccctatatgaaaaacaaagaccca

SEQ ID NO: 140359 - DNA, 70 bp, Homo sapiens
tggatggagatttttctgaatggttcttctaaagaaaccctatatgaaaaacaaagacccaagacaacag

SEQ ID NO: 140360 - DNA, 80 bp, Homo sapiens
actggagctgggctaagctctgtgcttgtggacccagggcaattaccttgcagccttcacacgtgatacagcggtagtga

SEQ ID NO: 140361 - DNA, 79 bp, Homo sapiens
agctgggctaagctctgtgcttgtggacccagggcaattaccttgcagccttcacacgtgatacagcggtagtgatacc

SEQ ID NO: 140362 - DNA, 78 bp, Homo sapiens
tgtgcttgtggacccagggcaattaccttgcagccttcacacgtgatacagcggtagtgatacccggtggctttgtca

SEQ ID NO: 140363 - DNA, 76 bp, Homo sapiens
ttgtggacccagggcaattaccttgcagccttcacacgtgatacagcggtagtgatacccggtggctttgtcacca

SEQ ID NO: 140364 - DNA, 77 bp, Homo sapiens
agggcaattaccttgcagccttcacacgtgatacagcggtagtgatacccggtggctttgtcaccacacactacaca

SEQ ID NO: 140365 - DNA, 79 bp, Homo sapiens
cagccttcacacgtgatacagcggtagtgatacccggtggctttgtcaccacacactacacagagctcgtccttgtcta

SEQ ID NO: 140366 - DNA, 76 bp, Homo sapiens
acacgtgatacagcggtagtgatacccggtggctttgtcaccacacactacacagagctcgtccttgtctaagtaa

SEQ ID NO: 140367 - DNA, 74 bp, Homo sapiens
atacagcggtagtgatacccggtggctttgtcaccacacactacacagagctcgtccttgtctaagtaactggg

SEQ ID NO: 140368 - DNA, 74 bp, Homo sapiens
atacccggtggctttgtcaccacacactacacagagctcgtccttgtctaagtaactggggatgtaccctgtga

SEQ ID NO: 140369 - DNA, 73 bp, Homo sapiens
ctttgtcaccacacactacacagagctcgtccttgtctaagtaactggggatgtaccctgtgaaggaaataaa

SEQ ID NO: 140370 - DNA, 71 bp, Homo sapiens
acacactacacagagctcgtccttgtctaagtaactggggatgtaccctgtgaaggaaataaaagaaggaa

SEQ ID NO: 140371 - DNA, 69 bp, Homo sapiens
acagagctcgtccttgtctaagtaactggggatgtaccctgtgaaggaaataaaagaaggaatattaaa

SEQ ID NO: 140372 - DNA, 64 bp, Homo sapiens
acgaaaacaaacagtgaaactttgaacaaatttaagcaaaatggtccctaccttttttttgaga

SEQ ID NO: 140373 - DNA, 70 bp, Homo sapiens
ttgaacaaatttaagcaaaatggtccctaccttttttttgagaatacgatggcgactgcacttgagaaaa

SEQ ID NO: 140374 - DNA, 69 bp, Homo sapiens
tttaagcaaaatggtccctaccttttttttgagaatacgatggcgactgcacttgagaaaaagtaggct

SEQ ID NO: 140375 - DNA, 71 bp, Homo sapiens
tccctaccttttttttgagaatacgatggcgactgcacttgagaaaaagtaggcttttcttcagtgaaata

SEQ ID NO: 140376 - DNA, 75 bp, Homo sapiens
tttttgagaatacgatggcgactgcacttgagaaaaagtaggcttttcttcagtgaaatattcaggttggctgta

SEQ ID NO: 140377 - DNA, 77 bp, Homo sapiens
agaatacgatggcgactgcacttgagaaaaagtaggcttttcttcagtgaaatattcaggttggctgtattgattca

SEQ ID NO: 140378 - DNA, 76 bp, Homo sapiens
actgcacttgagaaaaagtaggcttttcttcagtgaaatattcaggttggctgtattgattcagggccatgtccaa

SEQ ID NO: 140379 - DNA, 75 bp, Homo sapiens
acttgagaaaaagtaggcttttcttcagtgaaatattcaggttggctgtattgattcagggccatgtccaagtca

SEQ ID NO: 140380 - DNA, 77 bp, Homo sapiens
taggcttttcttcagtgaaatattcaggttggctgtattgattcagggccatgtccaagtcagagtccttgctttta

SEQ ID NO: 140381 - DNA, 76 bp, Homo sapiens
cttcagtgaaatattcaggttggctgtattgattcagggccatgtccaagtcagagtccttgcttttaaacatgtt

SEQ ID NO: 140382 - DNA, 74 bp, Homo sapiens
aaatattcaggttggctgtattgattcagggccatgtccaagtcagagtccttgcttttaaacatgtttccagg

SEQ ID NO: 140383 - DNA, 74 bp, Homo sapiens
ctgtattgattcagggccatgtccaagtcagagtccttgcttttaaacatgtttccagggtaactacaggtata

SEQ ID NO: 140384 - DNA, 73 bp, Homo sapiens
attcagggccatgtccaagtcagagtccttgcttttaaacatgtttccagggtaactacaggtataaggctga

SEQ ID NO: 140385 - DNA, 74 bp, Homo sapiens
atgtccaagtcagagtccttgcttttaaacatgtttccagggtaactacaggtataaggctgattcactgccca

SEQ ID NO: 140386 - DNA, 72 bp, Homo sapiens
agagtccttgcttttaaacatgtttccagggtaactacaggtataaggctgattcactgcccaggcctgttc

SEQ ID NO: 140387 - DNA, 74 bp, Homo sapiens
ttttaaacatgtttccagggtaactacaggtataaggctgattcactgcccaggcctgttccatatatatgttg

SEQ ID NO: 140388 - DNA, 75 bp, Homo sapiens
aacatgtttccagggtaactacaggtataaggctgattcactgcccaggcctgttccatatatatgttgttactg

SEQ ID NO: 140389 - DNA, 79 bp, Homo sapiens
agggtaactacaggtataaggctgattcactgcccaggcctgttccatatatatgttgttactgggcacagcctgagca

SEQ ID NO: 140390 - DNA, 82 bp, Homo sapiens
tataaggctgattcactgcccaggcctgttccatatatatgttgttactgggcacagcctgagcatcgcaaccgctgtaacc

SEQ ID NO: 140391 - DNA, 79 bp, Homo sapiens
attcactgcccaggcctgttccatatatatgttgttactgggcacagcctgagcatcgcaaccgctgtaacccggacta

SEQ ID NO: 140392 - DNA, 78 bp, Homo sapiens
caggcctgttccatatatatgttgttactgggcacagcctgagcatcgcaaccgctgtaacccggactatcttcaaaa

SEQ ID NO: 140393 - DNA, 78 bp, Homo sapiens
tccatatatatgttgttactgggcacagcctgagcatcgcaaccgctgtaacccggactatcttcaaaatacgcgtaa

SEQ ID NO: 140394 - DNA, 78 bp, Homo sapiens
tatatgttgttactgggcacagcctgagcatcgcaaccgctgtaacccggactatcttcaaaatacgcgtaataatca

SEQ ID NO: 140395 - DNA, 81 bp, Homo sapiens
ggcacagcctgagcatcgcaaccgctgtaacccggactatcttcaaaatacgcgtaataatcagtggactgcatgtagcaa

SEQ ID NO: 140396 - DNA, 80 bp, Homo sapiens
agcctgagcatcgcaaccgctgtaacccggactatcttcaaaatacgcgtaataatcagtggactgcatgtagcaattgc

SEQ ID NO: 140397 - DNA, 78 bp, Homo sapiens
aaccgctgtaacccggactatcttcaaaatacgcgtaataatcagtggactgcatgtagcaattgctgccggcagctg

SEQ ID NO: 140398 - DNA, 81 bp, Homo sapiens
taacccggactatcttcaaaatacgcgtaataatcagtggactgcatgtagcaattgctgccggcagctgggtgcacttca

SEQ ID NO: 140399 - DNA, 82 bp, Homo sapiens
actatcttcaaaatacgcgtaataatcagtggactgcatgtagcaattgctgccggcagctgggtgcacttcatatatttct

SEQ ID NO: 140400 - DNA, 84 bp, Homo sapiens
aaatacgcgtaataatcagtggactgcatgtagcaattgctgccggcagctgggtgcacttcatatatttcttgcatacagtag

SEQ ID NO: 140401 - DNA, 84 bp, Homo sapiens
aataatcagtggactgcatgtagcaattgctgccggcagctgggtgcacttcatatatttcttgcatacagtagttcattttgt

SEQ ID NO: 140402 - DNA, 81 bp, Homo sapiens
actgcatgtagcaattgctgccggcagctgggtgcacttcatatatttcttgcatacagtagttcattttgtttccctggt

SEQ ID NO: 140403 - DNA, 78 bp, Homo sapiens
attgctgccggcagctgggtgcacttcatatatttcttgcatacagtagttcattttgtttccctggttcagtttcta

SEQ ID NO: 140404 - DNA, 77 bp, Homo sapiens
gcagctgggtgcacttcatatatttcttgcatacagtagttcattttgtttccctggttcagtttctagtttacata

SEQ ID NO: 140405 - DNA, 76 bp, Homo sapiens
tgggtgcacttcatatatttcttgcatacagtagttcattttgtttccctggttcagtttctagtttacatataca

SEQ ID NO: 140406 - DNA, 76 bp, Homo sapiens
tatatttcttgcatacagtagttcattttgtttccctggttcagtttctagtttacatatacacacagtctacgca

SEQ ID NO: 140407 - DNA, 79 bp, Homo sapiens
ttgcatacagtagttcattttgtttccctggttcagtttctagtttacatatacacacagtctacgcatgcattctcca

SEQ ID NO: 140408 - DNA, 77 bp, Homo sapiens
tagttcattttgtttccctggttcagtttctagtttacatatacacacagtctacgcatgcattctccagccccata

SEQ ID NO: 140409 - DNA, 78 bp, Homo sapiens
ttgtttccctggttcagtttctagtttacatatacacacagtctacgcatgcattctccagccccatacaccctgaga

SEQ ID NO: 140410 - DNA, 83 bp, Homo sapiens
agtttctagtttacatatacacacagtctacgcatgcattctccagccccatacaccctgagagctgggcatatacgcagaga

SEQ ID NO: 140411 - DNA, 88 bp, Homo sapiens
tttacatatacacacagtctacgcatgcattctccagccccatacaccctgagagctgggcatatacgcagagaagcatacatacata

SEQ ID NO: 140412 - DNA, 90 bp, Homo sapiens
tatacacacagtctacgcatgcattctccagccccatacaccctgagagctgggcatatacgcagagaagcatacatacatacacatgaa

SEQ ID NO: 140413 - DNA, 82 bp, Homo sapiens
attctccagccccatacaccctgagagctgggcatatacgcagagaagcatacatacatacacatgaaacgcgaagggaaga

SEQ ID NO: 140414 - DNA, 70 bp, Homo sapiens
atttgaagaaaaggacgcctagtaaaagaacagttggagaaaacatgggacaccatacattggaagagaa

SEQ ID NO: 140415 - DNA, 70 bp, Homo sapiens
aagaaaaggacgcctagtaaaagaacagttggagaaaacatgggacaccatacattggaagagaaatgta

SEQ ID NO: 140416 - DNA, 76 bp, Homo sapiens
tagtaaaagaacagttggagaaaacatgggacaccatacattggaagagaaatgtagatgaagtacacagctacaa

SEQ ID NO: 140417 - DNA, 76 bp, Homo sapiens
cagttggagaaaacatgggacaccatacattggaagagaaatgtagatgaagtacacagctacaacagggatattt

SEQ ID NO: 140418 - DNA, 74 bp, Homo sapiens
ggagaaaacatgggacaccatacattggaagagaaatgtagatgaagtacacagctacaacagggatatttttt

SEQ ID NO: 140419 - DNA, 75 bp, Homo sapiens
gacaccatacattggaagagaaatgtagatgaagtacacagctacaacagggatattttttttcttgttgaaaca

SEQ ID NO: 140420 - DNA, 75 bp, Homo sapiens
ttggaagagaaatgtagatgaagtacacagctacaacagggatattttttttcttgttgaaacacatgataatgg

SEQ ID NO: 140421 - DNA, 76 bp, Homo sapiens
gagaaatgtagatgaagtacacagctacaacagggatattttttttcttgttgaaacacatgataatgggctaata

SEQ ID NO: 140422 - DNA, 73 bp, Homo sapiens
tgaagtacacagctacaacagggatattttttttcttgttgaaacacatgataatgggctaataaaaatctgg

SEQ ID NO: 140423 - DNA, 70 bp, Homo sapiens
acagctacaacagggatattttttttcttgttgaaacacatgataatgggctaataaaaatctggttacc

SEQ ID NO: 140424 - DNA, 68 bp, Homo sapiens
gggatattttttttcttgttgaaacacatgataatgggctaataaaaatctggttacctttacatttc

SEQ ID NO: 140425 - DNA, 68 bp, Homo sapiens
aaacacatgataatgggctaataaaaatctggttacctttacatttcttctcctccgtttggaaggtc

SEQ ID NO: 140426 - DNA, 67 bp, Homo sapiens
ataatgggctaataaaaatctggttacctttacatttcttctcctccgtttggaaggtctgggcact

SEQ ID NO: 140427 - DNA, 70 bp, Homo sapiens
taataaaaatctggttacctttacatttcttctcctccgtttggaaggtctgggcacttgagacactctg

SEQ ID NO: 140428 - DNA, 75 bp, Homo sapiens
ttacctttacatttcttctcctccgtttggaaggtctgggcacttgagacactctggtcgttcacatcatcatgg

SEQ ID NO: 140429 - DNA, 78 bp, Homo sapiens
atttcttctcctccgtttggaaggtctgggcacttgagacactctggtcgttcacatcatcatggtccagatggaata

SEQ ID NO: 140430 - DNA, 81 bp, Homo sapiens
ttctcctccgtttggaaggtctgggcacttgagacactctggtcgttcacatcatcatggtccagatggaatattgagcta

SEQ ID NO: 140431 - DNA, 81 bp, Homo sapiens
tttggaaggtctgggcacttgagacactctggtcgttcacatcatcatggtccagatggaatattgagctagtccaagtgg

SEQ ID NO: 140432 - DNA, 86 bp, Homo sapiens
cacttgagacactctggtcgttcacatcatcatggtccagatggaatattgagctagtccaagtggtctggatgagatgtggcgac

SEQ ID NO: 140433 - DNA, 85 bp, Homo sapiens
actctggtcgttcacatcatcatggtccagatggaatattgagctagtccaagtggtctggatgagatgtggcgacgactgttca

SEQ ID NO: 140434 - DNA, 83 bp, Homo sapiens
gtcgttcacatcatcatggtccagatggaatattgagctagtccaagtggtctggatgagatgtggcgacgactgttcatttt

SEQ ID NO: 140435 - DNA, 83 bp, Homo sapiens
atcatcatggtccagatggaatattgagctagtccaagtggtctggatgagatgtggcgacgactgttcatttttcaacgtgc

SEQ ID NO: 140436 - DNA, 82 bp, Homo sapiens
atggaatattgagctagtccaagtggtctggatgagatgtggcgacgactgttcatttttcaacgtgctgcgcctctctgaa

SEQ ID NO: 140437 - DNA, 83 bp, Homo sapiens
atattgagctagtccaagtggtctggatgagatgtggcgacgactgttcatttttcaacgtgctgcgcctctctgaatggctc

SEQ ID NO: 140438 - DNA, 82 bp, Homo sapiens
aagtggtctggatgagatgtggcgacgactgttcatttttcaacgtgctgcgcctctctgaatggctcttcctatgtaggca

SEQ ID NO: 140439 - DNA, 84 bp, Homo sapiens
gatgagatgtggcgacgactgttcatttttcaacgtgctgcgcctctctgaatggctcttcctatgtaggcaggcttcagacat

SEQ ID NO: 140440 - DNA, 82 bp, Homo sapiens
tgtggcgacgactgttcatttttcaacgtgctgcgcctctctgaatggctcttcctatgtaggcaggcttcagacattccta

SEQ ID NO: 140441 - DNA, 81 bp, Homo sapiens
tgttcatttttcaacgtgctgcgcctctctgaatggctcttcctatgtaggcaggcttcagacattcctactagcttccag

SEQ ID NO: 140442 - DNA, 80 bp, Homo sapiens
ttttcaacgtgctgcgcctctctgaatggctcttcctatgtaggcaggcttcagacattcctactagcttccagtcgtgt

SEQ ID NO: 140443 - DNA, 80 bp, Homo sapiens
cgcctctctgaatggctcttcctatgtaggcaggcttcagacattcctactagcttccagtcgtgttctcggtctggaca

SEQ ID NO: 140444 - DNA, 78 bp, Homo sapiens
aatggctcttcctatgtaggcaggcttcagacattcctactagcttccagtcgtgttctcggtctggacagtgcttcg

SEQ ID NO: 140445 - DNA, 77 bp, Homo sapiens
ttcctatgtaggcaggcttcagacattcctactagcttccagtcgtgttctcggtctggacagtgcttcggtttgtc

SEQ ID NO: 140446 - DNA, 73 bp, Homo sapiens
acattcctactagcttccagtcgtgttctcggtctggacagtgcttcggtttgtcccaggctgtaaggccatt

SEQ ID NO: 140447 - DNA, 73 bp, Homo sapiens
tactagcttccagtcgtgttctcggtctggacagtgcttcggtttgtcccaggctgtaaggccattttctaaa

SEQ ID NO: 140448 - DNA, 70 bp, Homo sapiens
tcgtgttctcggtctggacagtgcttcggtttgtcccaggctgtaaggccattttctaaagggttgaaaa

SEQ ID NO: 140449 - DNA, 69 bp, Homo sapiens
ttctcggtctggacagtgcttcggtttgtcccaggctgtaaggccattttctaaagggttgaaaaacac

SEQ ID NO: 140450 - DNA, 70 bp, Homo sapiens
agtgcttcggtttgtcccaggctgtaaggccattttctaaagggttgaaaaacacgagatgacgagctgt

SEQ ID NO: 140451 - DNA, 69 bp, Homo sapiens
aaaaaaaaagatacctgtcatactgttgggagtcataggttagtaatcattctggatcccttttttcac

SEQ ID NO: 140452 - DNA, 75 bp, Homo sapiens
aaagatacctgtcatactgttgggagtcataggttagtaatcattctggatcccttttttcactgacatctccta

SEQ ID NO: 140453 - DNA, 72 bp, Homo sapiens
atactgttgggagtcataggttagtaatcattctggatcccttttttcactgacatctcctacaaggaaaaa

SEQ ID NO: 140454 - DNA, 72 bp, Homo sapiens
ttgggagtcataggttagtaatcattctggatcccttttttcactgacatctcctacaaggaaaaaatacaa

SEQ ID NO: 140455 - DNA, 74 bp, Homo sapiens
aaaacaaccatttcttatcaccacacagactgaatcttggaatacataccttacttccaacagtctactgctaa

SEQ ID NO: 140456 - DNA, 75 bp, Homo sapiens
atttcttatcaccacacagactgaatcttggaatacataccttacttccaacagtctactgctaacctctttgaa

SEQ ID NO: 140457 - DNA, 75 bp, Homo sapiens
acacagactgaatcttggaatacataccttacttccaacagtctactgctaacctctttgaataacaggctttca

SEQ ID NO: 140458 - DNA, 73 bp, Homo sapiens
aatcttggaatacataccttacttccaacagtctactgctaacctctttgaataacaggctttcagtcttcaa

SEQ ID NO: 140459 - DNA, 71 bp, Homo sapiens
aatacataccttacttccaacagtctactgctaacctctttgaataacaggctttcagtcttcaagacgtt

SEQ ID NO: 140460 - DNA, 70 bp, Homo sapiens
cttacttccaacagtctactgctaacctctttgaataacaggctttcagtcttcaagacgtttgtttttc

SEQ ID NO: 140461 - DNA, 72 bp, Homo sapiens
aacagtctactgctaacctctttgaataacaggctttcagtcttcaagacgtttgtttttctgcatttcctc

SEQ ID NO: 140462 - DNA, 72 bp, Homo sapiens
taacctctttgaataacaggctttcagtcttcaagacgtttgtttttctgcatttcctcttcctacagtgaa

SEQ ID NO: 140463 - DNA, 73 bp, Homo sapiens
tttgaataacaggctttcagtcttcaagacgtttgtttttctgcatttcctcttcctacagtgaagtcactgg

SEQ ID NO: 140464 - DNA, 75 bp, Homo sapiens
tttcagtcttcaagacgtttgtttttctgcatttcctcttcctacagtgaagtcactgggggcagatgaaatata

SEQ ID NO: 140465 - DNA, 75 bp, Homo sapiens
tcttcaagacgtttgtttttctgcatttcctcttcctacagtgaagtcactgggggcagatgaaatataaaatgc

SEQ ID NO: 140466 - DNA, 75 bp, Homo sapiens
tttgtttttctgcatttcctcttcctacagtgaagtcactgggggcagatgaaatataaaatgctggagtttgcc

SEQ ID NO: 140467 - DNA, 80 bp, Homo sapiens
tttcctcttcctacagtgaagtcactgggggcagatgaaatataaaatgctggagtttgcctctctggcgagctgcagaa

SEQ ID NO: 140468 - DNA, 79 bp, Homo sapiens
ttcctacagtgaagtcactgggggcagatgaaatataaaatgctggagtttgcctctctggcgagctgcagaaaggaat

SEQ ID NO: 140469 - DNA, 79 bp, Homo sapiens
aagtcactgggggcagatgaaatataaaatgctggagtttgcctctctggcgagctgcagaaaggaatttctgcattat

SEQ ID NO: 140470 - DNA, 82 bp, Homo sapiens
ttatgctccagctgtgccaacaaccttcgagaaacctgcgcagaagctcaccttcacacctgtgcttggtagctgccttgcc

SEQ ID NO: 140471 - DNA, 80 bp, Homo sapiens
ctgtgccaacaaccttcgagaaacctgcgcagaagctcaccttcacacctgtgcttggtagctgccttgcctgggatgcc

SEQ ID NO: 140472 - DNA, 75 bp, Homo sapiens
aaccttcgagaaacctgcgcagaagctcaccttcacacctgtgcttggtagctgccttgcctgggatgcccccct

SEQ ID NO: 140473 - DNA, 76 bp, Homo sapiens
aaacctgcgcagaagctcaccttcacacctgtgcttggtagctgccttgcctgggatgccccccttctcgttgtaa

SEQ ID NO: 140474 - DNA, 77 bp, Homo sapiens
agaagctcaccttcacacctgtgcttggtagctgccttgcctgggatgccccccttctcgttgtaacactcactcag

SEQ ID NO: 140475 - DNA, 74 bp, Homo sapiens
acacctgtgcttggtagctgccttgcctgggatgccccccttctcgttgtaacactcactcaggtgtccacttt

SEQ ID NO: 140476 - DNA, 73 bp, Homo sapiens
ttggtagctgccttgcctgggatgccccccttctcgttgtaacactcactcaggtgtccacttttcctgggaa

SEQ ID NO: 140477 - DNA, 69 bp, Homo sapiens
ccttgcctgggatgccccccttctcgttgtaacactcactcaggtgtccacttttcctgggaagacttt

SEQ ID NO: 140478 - DNA, 68 bp, Homo sapiens
cctgggatgccccccttctcgttgtaacactcactcaggtgtccacttttcctgggaagactttttct

SEQ ID NO: 140479 - DNA, 71 bp, Homo sapiens
ttctcgttgtaacactcactcaggtgtccacttttcctgggaagactttttcttgctctcttcaaggacct

SEQ ID NO: 140480 - DNA, 74 bp, Homo sapiens
ttgtaacactcactcaggtgtccacttttcctgggaagactttttcttgctctcttcaaggacctttgctatga

SEQ ID NO: 140481 - DNA, 73 bp, Homo sapiens
actcaggtgtccacttttcctgggaagactttttcttgctctcttcaaggacctttgctatgagcctccaagc

SEQ ID NO: 140482 - DNA, 70 bp, Homo sapiens
cttttcctgggaagactttttcttgctctcttcaaggacctttgctatgagcctccaagccccctgaaaa

SEQ ID NO: 140483 - DNA, 73 bp, Homo sapiens
gaagactttttcttgctctcttcaaggacctttgctatgagcctccaagccccctgaaaatacatacacattt

SEQ ID NO: 140484 - DNA, 74 bp, Homo sapiens
ctttttcttgctctcttcaaggacctttgctatgagcctccaagccccctgaaaatacatacacattttgcaaa

SEQ ID NO: 140485 - DNA, 77 bp, Homo sapiens
ctaaaaagggacaattaatagcaaagatcacaagtctgcaaatagtcaagctgacatctgaccttcttattcattaa

SEQ ID NO: 140486 - DNA, 80 bp, Homo sapiens
aattaatagcaaagatcacaagtctgcaaatagtcaagctgacatctgaccttcttattcattaaatcatgtgtggaact

SEQ ID NO: 140487 - DNA, 80 bp, Homo sapiens
aaagatcacaagtctgcaaatagtcaagctgacatctgaccttcttattcattaaatcatgtgtggaacttggcacccac

SEQ ID NO: 140488 - DNA, 81 bp, Homo sapiens
acaagtctgcaaatagtcaagctgacatctgaccttcttattcattaaatcatgtgtggaacttggcacccacgcaggaca

SEQ ID NO: 140489 - DNA, 79 bp, Homo sapiens
aaatagtcaagctgacatctgaccttcttattcattaaatcatgtgtggaacttggcacccacgcaggacagccaacca

SEQ ID NO: 140490 - DNA, 78 bp, Homo sapiens
aagctgacatctgaccttcttattcattaaatcatgtgtggaacttggcacccacgcaggacagccaaccagaaggaa

SEQ ID NO: 140491 - DNA, 78 bp, Homo sapiens
cttcttattcattaaatcatgtgtggaacttggcacccacgcaggacagccaaccagaaggaaatcgcagatctggaa

SEQ ID NO: 140492 - DNA, 76 bp, Homo sapiens
attcattaaatcatgtgtggaacttggcacccacgcaggacagccaaccagaaggaaatcgcagatctggaaaaaa

SEQ ID NO: 140493 - DNA, 76 bp, Homo sapiens
atcatgtgtggaacttggcacccacgcaggacagccaaccagaaggaaatcgcagatctggaaaaaaggaaacaca

SEQ ID NO: 140494 - DNA, 75 bp, Homo sapiens
ttggcacccacgcaggacagccaaccagaaggaaatcgcagatctggaaaaaaggaaacacagaagataaatata

SEQ ID NO: 140495 - DNA, 72 bp, Homo sapiens
acgcaggacagccaaccagaaggaaatcgcagatctggaaaaaaggaaacacagaagataaatataatttgt

SEQ ID NO: 140496 - DNA, 70 bp, Homo sapiens
acagccaaccagaaggaaatcgcagatctggaaaaaaggaaacacagaagataaatataatttgttgttt

SEQ ID NO: 140497 - DNA, 72 bp, Homo sapiens
acccactaaagaggcacagtttgtaggtcctcactctcttcgctccccagttacttagtgagcccgctcacc

SEQ ID NO: 140498 - DNA, 72 bp, Homo sapiens
aagaggcacagtttgtaggtcctcactctcttcgctccccagttacttagtgagcccgctcacctggccctt

SEQ ID NO: 140499 - DNA, 72 bp, Homo sapiens
gtttgtaggtcctcactctcttcgctccccagttacttagtgagcccgctcacctggcccttttcccatgcg

SEQ ID NO: 140500 - DNA, 76 bp, Homo sapiens
actctcttcgctccccagttacttagtgagcccgctcacctggcccttttcccatgcggccttctgcacgatgtgc

SEQ ID NO: 140501 - DNA, 77 bp, Homo sapiens
ttcgctccccagttacttagtgagcccgctcacctggcccttttcccatgcggccttctgcacgatgtgctgtgctt

SEQ ID NO: 140502 - DNA, 76 bp, Homo sapiens
agttacttagtgagcccgctcacctggcccttttcccatgcggccttctgcacgatgtgctgtgctttcctttcta

SEQ ID NO: 140503 - DNA, 79 bp, Homo sapiens
ccgctcacctggcccttttcccatgcggccttctgcacgatgtgctgtgctttcctttctaggacctgcaagcataaca

SEQ ID NO: 140504 - DNA, 80 bp, Homo sapiens
tggcccttttcccatgcggccttctgcacgatgtgctgtgctttcctttctaggacctgcaagcataacagatcatttaa

SEQ ID NO: 140505 - DNA, 84 bp, Homo sapiens
ttttcccatgcggccttctgcacgatgtgctgtgctttcctttctaggacctgcaagcataacagatcatttaattgcatatgc

SEQ ID NO: 140506 - DNA, 86 bp, Homo sapiens
ttctgcacgatgtgctgtgctttcctttctaggacctgcaagcataacagatcatttaattgcatatgcctctcatagtatttcca

SEQ ID NO: 140507 - DNA, 84 bp, Homo sapiens
tgtgctgtgctttcctttctaggacctgcaagcataacagatcatttaattgcatatgcctctcatagtatttccatggcctta

SEQ ID NO: 140508 - DNA, 84 bp, Homo sapiens
tcatcctggtgatgatgaggactatatcatgtactagcaagtgctataaggagaaattaccatgagcaagaagtggccctgtta

SEQ ID NO: 140509 - DNA, 83 bp, Homo sapiens
tgatgatgaggactatatcatgtactagcaagtgctataaggagaaattaccatgagcaagaagtggccctgttagtgaccca

SEQ ID NO: 140510 - DNA, 79 bp, Homo sapiens
actatatcatgtactagcaagtgctataaggagaaattaccatgagcaagaagtggccctgttagtgacccattgtgga

SEQ ID NO: 140511 - DNA, 76 bp, Homo sapiens
atgtactagcaagtgctataaggagaaattaccatgagcaagaagtggccctgttagtgacccattgtggagttta

SEQ ID NO: 140512 - DNA, 77 bp, Homo sapiens
aagtgctataaggagaaattaccatgagcaagaagtggccctgttagtgacccattgtggagtttatcaggatgatc

SEQ ID NO: 140513 - DNA, 77 bp, Homo sapiens
taaggagaaattaccatgagcaagaagtggccctgttagtgacccattgtggagtttatcaggatgatcctcaggaa

SEQ ID NO: 140514 - DNA, 78 bp, Homo sapiens
attaccatgagcaagaagtggccctgttagtgacccattgtggagtttatcaggatgatcctcaggaactggctgacc

SEQ ID NO: 140515 - DNA, 76 bp, Homo sapiens
aagaagtggccctgttagtgacccattgtggagtttatcaggatgatcctcaggaactggctgacctgggacataa

SEQ ID NO: 140516 - DNA, 80 bp, Homo sapiens
tgttagtgacccattgtggagtttatcaggatgatcctcaggaactggctgacctgggacataagcaaagtatgaaatga

SEQ ID NO: 140517 - DNA, 78 bp, Homo sapiens
acccattgtggagtttatcaggatgatcctcaggaactggctgacctgggacataagcaaagtatgaaatgaaatatc

SEQ ID NO: 140518 - DNA, 78 bp, Homo sapiens
agtttatcaggatgatcctcaggaactggctgacctgggacataagcaaagtatgaaatgaaatatccaggatcctta

SEQ ID NO: 140519 - DNA, 72 bp, Homo sapiens
cgcccaccctgtggacagttggaactgtcgccccctcctcctctcaccccgctgcctccgcgcggtcctcta

SEQ ID NO: 140520 - DNA, 73 bp, Homo sapiens
tggacagttggaactgtcgccccctcctcctctcaccccgctgcctccgcgcggtcctctagccaaattacca

SEQ ID NO: 140521 - DNA, 71 bp, Homo sapiens
cccctcctcctctcaccccgctgcctccgcgcggtcctctagccaaattaccagtgccctggagccggttg

SEQ ID NO: 140522 - DNA, 72 bp, Homo sapiens
cctcctctcaccccgctgcctccgcgcggtcctctagccaaattaccagtgccctggagccggttgggttga

SEQ ID NO: 140523 - DNA, 72 bp, Homo sapiens
cccgctgcctccgcgcggtcctctagccaaattaccagtgccctggagccggttgggttgagcgcccctgcc

SEQ ID NO: 140524 - DNA, 69 bp, Homo sapiens
gcggtcctctagccaaattaccagtgccctggagccggttgggttgagcgcccctgcccggggaaggta

SEQ ID NO: 140525 - DNA, 70 bp, Homo sapiens
tctagccaaattaccagtgccctggagccggttgggttgagcgcccctgcccggggaaggtagcctgcgg

SEQ ID NO: 140526 - DNA, 70 bp, Homo sapiens
aattaccagtgccctggagccggttgggttgagcgcccctgcccggggaaggtagcctgcgggctcttgc

SEQ ID NO: 140527 - DNA, 68 bp, Homo sapiens
ccctggagccggttgggttgagcgcccctgcccggggaaggtagcctgcgggctcttgccccgagccc

SEQ ID NO: 140528 - DNA, 71 bp, Homo sapiens
ttgggttgagcgcccctgcccggggaaggtagcctgcgggctcttgccccgagcccgcggagcaggaggtc

SEQ ID NO: 140529 - DNA, 69 bp, Homo sapiens
cccctgcccggggaaggtagcctgcgggctcttgccccgagcccgcggagcaggaggtctcttttccaa

SEQ ID NO: 140530 - DNA, 74 bp, Homo sapiens
gggaaggtagcctgcgggctcttgccccgagcccgcggagcaggaggtctcttttccaagcgcactcacattat

SEQ ID NO: 140531 - DNA, 77 bp, Homo sapiens
cctgcgggctcttgccccgagcccgcggagcaggaggtctcttttccaagcgcactcacattattcatgcaaagtta

SEQ ID NO: 140532 - DNA, 76 bp, Homo sapiens
gggctcttgccccgagcccgcggagcaggaggtctcttttccaagcgcactcacattattcatgcaaagttaatcc

SEQ ID NO: 140533 - DNA, 75 bp, Homo sapiens
agcccgcggagcaggaggtctcttttccaagcgcactcacattattcatgcaaagttaatccccgccgcgtcacg

SEQ ID NO: 140534 - DNA, 75 bp, Homo sapiens
agcaggaggtctcttttccaagcgcactcacattattcatgcaaagttaatccccgccgcgtcacggccgcccgc

SEQ ID NO: 140535 - DNA, 75 bp, Homo sapiens
tctcttttccaagcgcactcacattattcatgcaaagttaatccccgccgcgtcacggccgcccgcccgaggatg

SEQ ID NO: 140536 - DNA, 75 bp, Homo sapiens
aagcgcactcacattattcatgcaaagttaatccccgccgcgtcacggccgcccgcccgaggatgtgcgccttcc

SEQ ID NO: 140537 - DNA, 73 bp, Homo sapiens
acattattcatgcaaagttaatccccgccgcgtcacggccgcccgcccgaggatgtgcgccttccttggccaa

SEQ ID NO: 140538 - DNA, 69 bp, Homo sapiens
aaagttaatccccgccgcgtcacggccgcccgcccgaggatgtgcgccttccttggccaagccccgcag

SEQ ID NO: 140539 - DNA, 71 bp, Homo sapiens
cccgccgcgtcacggccgcccgcccgaggatgtgcgccttccttggccaagccccgcagtctccaccctcc

SEQ ID NO: 140540 - DNA, 71 bp, Homo sapiens
cgtcacggccgcccgcccgaggatgtgcgccttccttggccaagccccgcagtctccaccctcctccgccc

SEQ ID NO: 140541 - DNA, 70 bp, Homo sapiens
ccgcccgcccgaggatgtgcgccttccttggccaagccccgcagtctccaccctcctccgccccctcctc

SEQ ID NO: 140542 - DNA, 69 bp, Homo sapiens
aggatgtgcgccttccttggccaagccccgcagtctccaccctcctccgccccctcctcccggcggcgg

SEQ ID NO: 140543 - DNA, 65 bp, Homo sapiens
cttccttggccaagccccgcagtctccaccctcctccgccccctcctcccggcggcggggtcccg

SEQ ID NO: 140544 - DNA, 64 bp, Homo sapiens
aagccccgcagtctccaccctcctccgccccctcctcccggcggcggggtcccggggagcgccg

SEQ ID NO: 140545 - DNA, 65 bp, Homo sapiens
agtctccaccctcctccgccccctcctcccggcggcggggtcccggggagcgccggcgactgggc

SEQ ID NO: 140546 - DNA, 69 bp, Homo sapiens
ctccgccccctcctcccggcggcggggtcccggggagcgccggcgactgggcgtcgcgcgagtcctgca

SEQ ID NO: 140547 - DNA, 70 bp, Homo sapiens
cctcctcccggcggcggggtcccggggagcgccggcgactgggcgtcgcgcgagtcctgcaaaatgtcaa

SEQ ID NO: 140548 - DNA, 71 bp, Homo sapiens
ggcggggtcccggggagcgccggcgactgggcgtcgcgcgagtcctgcaaaatgtcaactccttgggcgaa

SEQ ID NO: 140549 - DNA, 76 bp, Homo sapiens
agcgccggcgactgggcgtcgcgcgagtcctgcaaaatgtcaactccttgggcgaagagaggcggccgcagccagg

SEQ ID NO: 140550 - DNA, 71 bp, Homo sapiens
agccgccgcctggccctgcgcgccccgggagcgccgtgcggccctgcccgcgggctccgggtgtgcgcggg

SEQ ID NO: 140551 - DNA, 71 bp, Homo sapiens
cctgcgcgccccgggagcgccgtgcggccctgcccgcgggctccgggtgtgcgcggggcggcgccgcggaa

SEQ ID NO: 140552 - DNA, 71 bp, Homo sapiens
cccgggagcgccgtgcggccctgcccgcgggctccgggtgtgcgcggggcggcgccgcggaacatgacggc

SEQ ID NO: 140553 - DNA, 71 bp, Homo sapiens
ccgtgcggccctgcccgcgggctccgggtgtgcgcggggcggcgccgcggaacatgacggcgccctgggtg

SEQ ID NO: 140554 - DNA, 72 bp, Homo sapiens
tgcccgcgggctccgggtgtgcgcggggcggcgccgcggaacatgacggcgccctgggtggccctcgccctc

SEQ ID NO: 140555 - DNA, 71 bp, Homo sapiens
ggctccgggtgtgcgcggggcggcgccgcggaacatgacggcgccctgggtggccctcgccctcctctggg

SEQ ID NO: 140556 - DNA, 75 bp, Homo sapiens
ggtgtgcgcggggcggcgccgcggaacatgacggcgccctgggtggccctcgccctcctctggggatcgctgtgc

SEQ ID NO: 140557 - DNA, 74 bp, Homo sapiens
gcgccgcggaacatgacggcgccctgggtggccctcgccctcctctggggatcgctgtgcgccggtaagaactg

SEQ ID NO: 140558 - DNA, 73 bp, Homo sapiens
cggaacatgacggcgccctgggtggccctcgccctcctctggggatcgctgtgcgccggtaagaactgggcgc

SEQ ID NO: 140559 - DNA, 71 bp, Homo sapiens
acggcgccctgggtggccctcgccctcctctggggatcgctgtgcgccggtaagaactgggcgcggcgcgg

SEQ ID NO: 140560 - DNA, 72 bp, Homo sapiens
gtggccctcgccctcctctggggatcgctgtgcgccggtaagaactgggcgcggcgcggggacgccgagagg

SEQ ID NO: 140561 - DNA, 71 bp, Homo sapiens
ccctcctctggggatcgctgtgcgccggtaagaactgggcgcggcgcggggacgccgagagggcgcgcggg

SEQ ID NO: 140562 - DNA, 77 bp, Homo sapiens
ggtggtggtcccaggggcatgctcagtggttctcttttctctggggcacaggctctgggcgtggggaggctgagaca

SEQ ID NO: 140563 - DNA, 81 bp, Homo sapiens
ggcatgctcagtggttctcttttctctggggcacaggctctgggcgtggggaggctgagacacgggagtgcatctactaca

SEQ ID NO: 140564 - DNA, 77 bp, Homo sapiens
ctcagtggttctcttttctctggggcacaggctctgggcgtggggaggctgagacacgggagtgcatctactacaac

SEQ ID NO: 140565 - DNA, 77 bp, Homo sapiens
tcttttctctggggcacaggctctgggcgtggggaggctgagacacgggagtgcatctactacaacgccaactggga

SEQ ID NO: 140566 - DNA, 80 bp, Homo sapiens
gcacaggctctgggcgtggggaggctgagacacgggagtgcatctactacaacgccaactgggagctggagcgcaccaac

SEQ ID NO: 140567 - DNA, 79 bp, Homo sapiens
tctgggcgtggggaggctgagacacgggagtgcatctactacaacgccaactgggagctggagcgcaccaaccagagcg

SEQ ID NO: 140568 - DNA, 83 bp, Homo sapiens
gaggctgagacacgggagtgcatctactacaacgccaactgggagctggagcgcaccaaccagagcggcctggagcgctgcga

SEQ ID NO: 140569 - DNA, 80 bp, Homo sapiens
acacgggagtgcatctactacaacgccaactgggagctggagcgcaccaaccagagcggcctggagcgctgcgaaggcga

SEQ ID NO: 140570 - DNA, 82 bp, Homo sapiens
agtgcatctactacaacgccaactgggagctggagcgcaccaaccagagcggcctggagcgctgcgaaggcgagcaggacaa

SEQ ID NO: 140571 - DNA, 82 bp, Homo sapiens
actacaacgccaactgggagctggagcgcaccaaccagagcggcctggagcgctgcgaaggcgagcaggacaagcggctgca

SEQ ID NO: 140572 - DNA, 84 bp, Homo sapiens
ctgggagctggagcgcaccaaccagagcggcctggagcgctgcgaaggcgagcaggacaagcggctgcactgctacgcctcctg

SEQ ID NO: 140573 - DNA, 85 bp, Homo sapiens
ctggagcgcaccaaccagagcggcctggagcgctgcgaaggcgagcaggacaagcggctgcactgctacgcctcctggcgcaaca

SEQ ID NO: 140574 - DNA, 85 bp, Homo sapiens
aaccagagcggcctggagcgctgcgaaggcgagcaggacaagcggctgcactgctacgcctcctggcgcaacagctctggcacca

SEQ ID NO: 140575 - DNA, 88 bp, Homo sapiens
tggagcgctgcgaaggcgagcaggacaagcggctgcactgctacgcctcctggcgcaacagctctggcaccatcgagctcgtgaagaa

SEQ ID NO: 140576 - DNA, 85 bp, Homo sapiens
cgctgcgaaggcgagcaggacaagcggctgcactgctacgcctcctggcgcaacagctctggcaccatcgagctcgtgaagaagg

SEQ ID NO: 140577 - DNA, 88 bp, Homo sapiens
agcaggacaagcggctgcactgctacgcctcctggcgcaacagctctggcaccatcgagctcgtgaagaagggctgctggctagatga

SEQ ID NO: 140578 - DNA, 86 bp, Homo sapiens
aagcggctgcactgctacgcctcctggcgcaacagctctggcaccatcgagctcgtgaagaagggctgctggctagatgacttcaa

SEQ ID NO: 140579 - DNA, 84 bp, Homo sapiens
ctacgcctcctggcgcaacagctctggcaccatcgagctcgtgaagaagggctgctggctagatgacttcaactgctacgatag

SEQ ID NO: 140580 - DNA, 83 bp, Homo sapiens
cctcctggcgcaacagctctggcaccatcgagctcgtgaagaagggctgctggctagatgacttcaactgctacgataggtac

SEQ ID NO: 140581 - DNA, 80 bp, Homo sapiens
acagctctggcaccatcgagctcgtgaagaagggctgctggctagatgacttcaactgctacgataggtaccccaagact

SEQ ID NO: 140582 - DNA, 77 bp, Homo sapiens
catcgagctcgtgaagaagggctgctggctagatgacttcaactgctacgataggtaccccaagacttgccctcctt

SEQ ID NO: 140583 - DNA, 75 bp, Homo sapiens
agctcgtgaagaagggctgctggctagatgacttcaactgctacgataggtaccccaagacttgccctcctttcc

SEQ ID NO: 140584 - DNA, 73 bp, Homo sapiens
aagggctgctggctagatgacttcaactgctacgataggtaccccaagacttgccctcctttcctcttggacc

SEQ ID NO: 140585 - DNA, 77 bp, Homo sapiens
agtcttgcatcccccaggtgaggggtatatggaaaattctgtgcctccaggcaggagtgtgtggccactgaggagaa

SEQ ID NO: 140586 - DNA, 75 bp, Homo sapiens
caggtgaggggtatatggaaaattctgtgcctccaggcaggagtgtgtggccactgaggagaacccccaggtgta

SEQ ID NO: 140587 - DNA, 80 bp, Homo sapiens
gtatatggaaaattctgtgcctccaggcaggagtgtgtggccactgaggagaacccccaggtgtacttctgctgctgtga

SEQ ID NO: 140588 - DNA, 78 bp, Homo sapiens
aaaattctgtgcctccaggcaggagtgtgtggccactgaggagaacccccaggtgtacttctgctgctgtgaaggcaa

SEQ ID NO: 140589 - DNA, 79 bp, Homo sapiens
ctccaggcaggagtgtgtggccactgaggagaacccccaggtgtacttctgctgctgtgaaggcaacttctgcaacgaa

SEQ ID NO: 140590 - DNA, 80 bp, Homo sapiens
gagtgtgtggccactgaggagaacccccaggtgtacttctgctgctgtgaaggcaacttctgcaacgaacgcttcactca

SEQ ID NO: 140591 - DNA, 79 bp, Homo sapiens
ccactgaggagaacccccaggtgtacttctgctgctgtgaaggcaacttctgcaacgaacgcttcactcatttgccaga

SEQ ID NO: 140592 - DNA, 78 bp, Homo sapiens
aggagaacccccaggtgtacttctgctgctgtgaaggcaacttctgcaacgaacgcttcactcatttgccagaggctg

SEQ ID NO: 140593 - DNA, 77 bp, Homo sapiens
aggtgtacttctgctgctgtgaaggcaacttctgcaacgaacgcttcactcatttgccagaggctgggggcccggaa

SEQ ID NO: 140594 - DNA, 76 bp, Homo sapiens
ttctgctgctgtgaaggcaacttctgcaacgaacgcttcactcatttgccagaggctgggggcccggaaggtaagg

SEQ ID NO: 140595 - DNA, 71 bp, Homo sapiens
aaggcaacttctgcaacgaacgcttcactcatttgccagaggctgggggcccggaaggtaagggggcagtg

SEQ ID NO: 140596 - DNA, 71 bp, Homo sapiens
acttctgcaacgaacgcttcactcatttgccagaggctgggggcccggaaggtaagggggcagtgtggaag

SEQ ID NO: 140597 - DNA, 70 bp, Homo sapiens
aacgcttcactcatttgccagaggctgggggcccggaaggtaagggggcagtgtggaagtggggccttga

SEQ ID NO: 140598 - DNA, 73 bp, Homo sapiens
tgggcagactgtttgacacagggctctgtgtgtcccccagtcacgtacgagccacccccgacagcccccaccc

SEQ ID NO: 140599 - DNA, 73 bp, Homo sapiens
tgtttgacacagggctctgtgtgtcccccagtcacgtacgagccacccccgacagcccccaccctgctcacgg

SEQ ID NO: 140600 - DNA, 76 bp, Homo sapiens
tctgtgtgtcccccagtcacgtacgagccacccccgacagcccccaccctgctcacggtgctggcctactcactgc

SEQ ID NO: 140601 - DNA, 75 bp, Homo sapiens
ccccagtcacgtacgagccacccccgacagcccccaccctgctcacggtgctggcctactcactgctgcccatcg

SEQ ID NO: 140602 - DNA, 73 bp, Homo sapiens
gtacgagccacccccgacagcccccaccctgctcacggtgctggcctactcactgctgcccatcgggggcctt

SEQ ID NO: 140603 - DNA, 73 bp, Homo sapiens
acccccgacagcccccaccctgctcacggtgctggcctactcactgctgcccatcgggggcctttccctcatc

SEQ ID NO: 140604 - DNA, 75 bp, Homo sapiens
cccccaccctgctcacggtgctggcctactcactgctgcccatcgggggcctttccctcatcgtcctgctggcct

SEQ ID NO: 140605 - DNA, 78 bp, Homo sapiens
tgctcacggtgctggcctactcactgctgcccatcgggggcctttccctcatcgtcctgctggccttttggatgtacc

SEQ ID NO: 140606 - DNA, 77 bp, Homo sapiens
ctggcctactcactgctgcccatcgggggcctttccctcatcgtcctgctggccttttggatgtaccggcatcgcaa

SEQ ID NO: 140607 - DNA, 72 bp, Homo sapiens
catcgggggcctttccctcatcgtcctgctggccttttggatgtaccggcatcgcaagcccccctacggtca

SEQ ID NO: 140608 - DNA, 77 bp, Homo sapiens
ctttccctcatcgtcctgctggccttttggatgtaccggcatcgcaagcccccctacggtcatgtggacatccatga

SEQ ID NO: 140609 - DNA, 78 bp, Homo sapiens
atcgtcctgctggccttttggatgtaccggcatcgcaagcccccctacggtcatgtggacatccatgaggtgagacag

SEQ ID NO: 140610 - DNA, 79 bp, Homo sapiens
ctggccttttggatgtaccggcatcgcaagcccccctacggtcatgtggacatccatgaggtgagacagtgctggcttg

SEQ ID NO: 140611 - DNA, 79 bp, Homo sapiens
tttggatgtaccggcatcgcaagcccccctacggtcatgtggacatccatgaggtgagacagtgctggcttggggcagg

SEQ ID NO: 140612 - DNA, 79 bp, Homo sapiens
atcgcaagcccccctacggtcatgtggacatccatgaggtgagacagtgctggcttggggcagggcaggatagaggtgg

SEQ ID NO: 140613 - DNA, 78 bp, Homo sapiens
cccctacggtcatgtggacatccatgaggtgagacagtgctggcttggggcagggcaggatagaggtggggaggacag

SEQ ID NO: 140614 - DNA, 80 bp, Homo sapiens
tcatgtggacatccatgaggtgagacagtgctggcttggggcagggcaggatagaggtggggaggacaggccagaccttt

SEQ ID NO: 140615 - DNA, 76 bp, Homo sapiens
acatccatgaggtgagacagtgctggcttggggcagggcaggatagaggtggggaggacaggccagacctttttaa

SEQ ID NO: 140616 - DNA, 74 bp, Homo sapiens
aggtgagacagtgctggcttggggcagggcaggatagaggtggggaggacaggccagacctttttaagccttgc

SEQ ID NO: 140617 - DNA, 72 bp, Homo sapiens
agtgctggcttggggcagggcaggatagaggtggggaggacaggccagacctttttaagccttgctctcccc

SEQ ID NO: 140618 - DNA, 70 bp, Homo sapiens
gggcagggcaggatagaggtggggaggacaggccagacctttttaagccttgctctcccccaggaccctg

SEQ ID NO: 140619 - DNA, 69 bp, Homo sapiens
aggatagaggtggggaggacaggccagacctttttaagccttgctctcccccaggaccctgggcctcca

SEQ ID NO: 140620 - DNA, 69 bp, Homo sapiens
gtggggaggacaggccagacctttttaagccttgctctcccccaggaccctgggcctccaccaccatcc

SEQ ID NO: 140621 - DNA, 68 bp, Homo sapiens
aggccagacctttttaagccttgctctcccccaggaccctgggcctccaccaccatcccctctggtgg

SEQ ID NO: 140622 - DNA, 70 bp, Homo sapiens
tttttaagccttgctctcccccaggaccctgggcctccaccaccatcccctctggtgggcctgaagccac

SEQ ID NO: 140623 - DNA, 79 bp, Homo sapiens
ttgctctcccccaggaccctgggcctccaccaccatcccctctggtgggcctgaagccactgcagctgctggagatcaa

SEQ ID NO: 140624 - DNA, 77 bp, Homo sapiens
ccaggaccctgggcctccaccaccatcccctctggtgggcctgaagccactgcagctgctggagatcaaggctcggg

SEQ ID NO: 140625 - DNA, 80 bp, Homo sapiens
ctccaccaccatcccctctggtgggcctgaagccactgcagctgctggagatcaaggctcgggggcgctttggctgtgtc

SEQ ID NO: 140626 - DNA, 79 bp, Homo sapiens
accatcccctctggtgggcctgaagccactgcagctgctggagatcaaggctcgggggcgctttggctgtgtctggaag

SEQ ID NO: 140627 - DNA, 85 bp, Homo sapiens
tggtgggcctgaagccactgcagctgctggagatcaaggctcgggggcgctttggctgtgtctggaaggcccagctcatgaatga

SEQ ID NO: 140628 - DNA, 84 bp, Homo sapiens
ctgaagccactgcagctgctggagatcaaggctcgggggcgctttggctgtgtctggaaggcccagctcatgaatgactttgta

SEQ ID NO: 140629 - DNA, 83 bp, Homo sapiens
agctgctggagatcaaggctcgggggcgctttggctgtgtctggaaggcccagctcatgaatgactttgtagctgtcaagatc

SEQ ID NO: 140630 - DNA, 80 bp, Homo sapiens
agatcaaggctcgggggcgctttggctgtgtctggaaggcccagctcatgaatgactttgtagctgtcaagatcttccca

SEQ ID NO: 140631 - DNA, 80 bp, Homo sapiens
tttggctgtgtctggaaggcccagctcatgaatgactttgtagctgtcaagatcttcccactccaggtgagtgtttgagg

SEQ ID NO: 140632 - DNA, 81 bp, Homo sapiens
tctggaaggcccagctcatgaatgactttgtagctgtcaagatcttcccactccaggtgagtgtttgaggggctccatcca

SEQ ID NO: 140633 - DNA, 80 bp, Homo sapiens
agctcatgaatgactttgtagctgtcaagatcttcccactccaggtgagtgtttgaggggctccatccaggtcctctgcc

SEQ ID NO: 140634 - DNA, 72 bp, Homo sapiens
gctaagccagccacttgtccccccaacccctcgcccccggcctcaggacaagcagtcgtggcagagtgaacg

SEQ ID NO: 140635 - DNA, 70 bp, Homo sapiens
ccacttgtccccccaacccctcgcccccggcctcaggacaagcagtcgtggcagagtgaacgggagatct

SEQ ID NO: 140636 - DNA, 75 bp, Homo sapiens
ccccaacccctcgcccccggcctcaggacaagcagtcgtggcagagtgaacgggagatcttcagcacacctggca

SEQ ID NO: 140637 - DNA, 80 bp, Homo sapiens
ctcgcccccggcctcaggacaagcagtcgtggcagagtgaacgggagatcttcagcacacctggcatgaagcacgagaac

SEQ ID NO: 140638 - DNA, 83 bp, Homo sapiens
cctcaggacaagcagtcgtggcagagtgaacgggagatcttcagcacacctggcatgaagcacgagaacctgctacagttcat

SEQ ID NO: 140639 - DNA, 85 bp, Homo sapiens
aagcagtcgtggcagagtgaacgggagatcttcagcacacctggcatgaagcacgagaacctgctacagttcattgctgccgaga

SEQ ID NO: 140640 - DNA, 85 bp, Homo sapiens
tcgtggcagagtgaacgggagatcttcagcacacctggcatgaagcacgagaacctgctacagttcattgctgccgagaagcgag

SEQ ID NO: 140641 - DNA, 83 bp, Homo sapiens
gtgaacgggagatcttcagcacacctggcatgaagcacgagaacctgctacagttcattgctgccgagaagcgaggctccaac

SEQ ID NO: 140642 - DNA, 83 bp, Homo sapiens
atcttcagcacacctggcatgaagcacgagaacctgctacagttcattgctgccgagaagcgaggctccaacctcgaagtaga

SEQ ID NO: 140643 - DNA, 83 bp, Homo sapiens
acctggcatgaagcacgagaacctgctacagttcattgctgccgagaagcgaggctccaacctcgaagtagagctgtggctca

SEQ ID NO: 140644 - DNA, 81 bp, Homo sapiens
aagcacgagaacctgctacagttcattgctgccgagaagcgaggctccaacctcgaagtagagctgtggctcatcacggcc

SEQ ID NO: 140645 - DNA, 82 bp, Homo sapiens
acctgctacagttcattgctgccgagaagcgaggctccaacctcgaagtagagctgtggctcatcacggccttccatgacaa

SEQ ID NO: 140646 - DNA, 82 bp, Homo sapiens
agttcattgctgccgagaagcgaggctccaacctcgaagtagagctgtggctcatcacggccttccatgacaaggtgagcca

SEQ ID NO: 140647 - DNA, 81 bp, Homo sapiens
cgagaagcgaggctccaacctcgaagtagagctgtggctcatcacggccttccatgacaaggtgagccacacccatcagaa

SEQ ID NO: 140648 - DNA, 82 bp, Homo sapiens
aggctccaacctcgaagtagagctgtggctcatcacggccttccatgacaaggtgagccacacccatcagaatggactctga

SEQ ID NO: 140649 - DNA, 82 bp, Homo sapiens
aacctcgaagtagagctgtggctcatcacggccttccatgacaaggtgagccacacccatcagaatggactctgagaggaga

SEQ ID NO: 140650 - DNA, 77 bp, Homo sapiens
cctgtcctgtacccagaatctgtgctcaagttctgtgctgtcttctctcagggctccctcacggattacctcaaggg

SEQ ID NO: 140651 - DNA, 81 bp, Homo sapiens
agaatctgtgctcaagttctgtgctgtcttctctcagggctccctcacggattacctcaaggggaacatcatcacatggaa

SEQ ID NO: 140652 - DNA, 79 bp, Homo sapiens
tcaagttctgtgctgtcttctctcagggctccctcacggattacctcaaggggaacatcatcacatggaacgaactgtg

SEQ ID NO: 140653 - DNA, 81 bp, Homo sapiens
ttctgtgctgtcttctctcagggctccctcacggattacctcaaggggaacatcatcacatggaacgaactgtgtcatgta

SEQ ID NO: 140654 - DNA, 82 bp, Homo sapiens
tctcagggctccctcacggattacctcaaggggaacatcatcacatggaacgaactgtgtcatgtagcagagacgatgtcac

SEQ ID NO: 140655 - DNA, 81 bp, Homo sapiens
tccctcacggattacctcaaggggaacatcatcacatggaacgaactgtgtcatgtagcagagacgatgtcacgaggcctc

SEQ ID NO: 140656 - DNA, 81 bp, Homo sapiens
acggattacctcaaggggaacatcatcacatggaacgaactgtgtcatgtagcagagacgatgtcacgaggcctctcatac

SEQ ID NO: 140657 - DNA, 87 bp, Homo sapiens
gggaacatcatcacatggaacgaactgtgtcatgtagcagagacgatgtcacgaggcctctcatacctgcatgaggatgtgccctgg

SEQ ID NO: 140658 - DNA, 88 bp, Homo sapiens
atcatcacatggaacgaactgtgtcatgtagcagagacgatgtcacgaggcctctcatacctgcatgaggatgtgccctggtgccgtg

SEQ ID NO: 140659 - DNA, 85 bp, Homo sapiens
tggaacgaactgtgtcatgtagcagagacgatgtcacgaggcctctcatacctgcatgaggatgtgccctggtgccgtggcgagg

SEQ ID NO: 140660 - DNA, 86 bp, Homo sapiens
tcatgtagcagagacgatgtcacgaggcctctcatacctgcatgaggatgtgccctggtgccgtggcgagggccacaagccgtcta

SEQ ID NO: 140661 - DNA, 82 bp, Homo sapiens
agagacgatgtcacgaggcctctcatacctgcatgaggatgtgccctggtgccgtggcgagggccacaagccgtctattgcc

SEQ ID NO: 140662 - DNA, 82 bp, Homo sapiens
tgtcacgaggcctctcatacctgcatgaggatgtgccctggtgccgtggcgagggccacaagccgtctattgcccacaggta

SEQ ID NO: 140663 - DNA, 80 bp, Homo sapiens
ctctcatacctgcatgaggatgtgccctggtgccgtggcgagggccacaagccgtctattgcccacaggtacctgggtca

SEQ ID NO: 140664 - DNA, 77 bp, Homo sapiens
atgaggatgtgccctggtgccgtggcgagggccacaagccgtctattgcccacaggtacctgggtcagcaggtgcct

SEQ ID NO: 140665 - DNA, 75 bp, Homo sapiens
atgtgccctggtgccgtggcgagggccacaagccgtctattgcccacaggtacctgggtcagcaggtgcctttcc

SEQ ID NO: 140666 - DNA, 76 bp, Homo sapiens
ttggatcatgatgttaagctttatctctgcccacttgtttccacagggactttaaaagtaagaatgtattgctgaa

SEQ ID NO: 140667 - DNA, 75 bp, Homo sapiens
atgatgttaagctttatctctgcccacttgtttccacagggactttaaaagtaagaatgtattgctgaagagcga

SEQ ID NO: 140668 - DNA, 74 bp, Homo sapiens
aagctttatctctgcccacttgtttccacagggactttaaaagtaagaatgtattgctgaagagcgacctcaca

SEQ ID NO: 140669 - DNA, 75 bp, Homo sapiens
ccacttgtttccacagggactttaaaagtaagaatgtattgctgaagagcgacctcacagccgtgctggctgact

SEQ ID NO: 140670 - DNA, 76 bp, Homo sapiens
tttccacagggactttaaaagtaagaatgtattgctgaagagcgacctcacagccgtgctggctgactttggcttg

SEQ ID NO: 140671 - DNA, 78 bp, Homo sapiens
ctttaaaagtaagaatgtattgctgaagagcgacctcacagccgtgctggctgactttggcttggctgttcgatttga

SEQ ID NO: 140672 - DNA, 80 bp, Homo sapiens
taagaatgtattgctgaagagcgacctcacagccgtgctggctgactttggcttggctgttcgatttgagccagggaaac

SEQ ID NO: 140673 - DNA, 79 bp, Homo sapiens
gtattgctgaagagcgacctcacagccgtgctggctgactttggcttggctgttcgatttgagccagggaaacctccag

SEQ ID NO: 140674 - DNA, 76 bp, Homo sapiens
agagcgacctcacagccgtgctggctgactttggcttggctgttcgatttgagccagggaaacctccaggggacac

SEQ ID NO: 140675 - DNA, 74 bp, Homo sapiens
acagccgtgctggctgactttggcttggctgttcgatttgagccagggaaacctccaggggacacccacggaca

SEQ ID NO: 140676 - DNA, 72 bp, Homo sapiens
tggctgactttggcttggctgttcgatttgagccagggaaacctccaggggacacccacggacaggtaacag

SEQ ID NO: 140677 - DNA, 72 bp, Homo sapiens
ttggcttggctgttcgatttgagccagggaaacctccaggggacacccacggacaggtaacaggcctcacag

SEQ ID NO: 140678 - DNA, 72 bp, Homo sapiens
tgttcgatttgagccagggaaacctccaggggacacccacggacaggtaacaggcctcacagggcaggaaga

SEQ ID NO: 140679 - DNA, 81 bp, Homo sapiens
tgtgtgtatggccagtcactgtaaatcctgccctcctctgtcctcacataggtaggcacgagacggtacatggctcctgag

SEQ ID NO: 140680 - DNA, 78 bp, Homo sapiens
agtcactgtaaatcctgccctcctctgtcctcacataggtaggcacgagacggtacatggctcctgaggtgctcgagg

SEQ ID NO: 140681 - DNA, 80 bp, Homo sapiens
taaatcctgccctcctctgtcctcacataggtaggcacgagacggtacatggctcctgaggtgctcgagggagccatcaa

SEQ ID NO: 140682 - DNA, 82 bp, Homo sapiens
ctctgtcctcacataggtaggcacgagacggtacatggctcctgaggtgctcgagggagccatcaacttccagagagatgcc

SEQ ID NO: 140683 - DNA, 81 bp, Homo sapiens
tcctcacataggtaggcacgagacggtacatggctcctgaggtgctcgagggagccatcaacttccagagagatgccttcc

SEQ ID NO: 140684 - DNA, 85 bp, Homo sapiens
taggcacgagacggtacatggctcctgaggtgctcgagggagccatcaacttccagagagatgccttcctgcgcattgacatgta

SEQ ID NO: 140685 - DNA, 85 bp, Homo sapiens
agacggtacatggctcctgaggtgctcgagggagccatcaacttccagagagatgccttcctgcgcattgacatgtatgccatgg

SEQ ID NO: 140686 - DNA, 85 bp, Homo sapiens
ctcctgaggtgctcgagggagccatcaacttccagagagatgccttcctgcgcattgacatgtatgccatggggttggtgctgtg

SEQ ID NO: 140687 - DNA, 85 bp, Homo sapiens
tcgagggagccatcaacttccagagagatgccttcctgcgcattgacatgtatgccatggggttggtgctgtgggagcttgtgtc

SEQ ID NO: 140688 - DNA, 87 bp, Homo sapiens
agccatcaacttccagagagatgccttcctgcgcattgacatgtatgccatggggttggtgctgtgggagcttgtgtctcgctgcaa

SEQ ID NO: 140689 - DNA, 88 bp, Homo sapiens
acttccagagagatgccttcctgcgcattgacatgtatgccatggggttggtgctgtgggagcttgtgtctcgctgcaaggctgcaga

SEQ ID NO: 140690 - DNA, 85 bp, Homo sapiens
atgccttcctgcgcattgacatgtatgccatggggttggtgctgtgggagcttgtgtctcgctgcaaggctgcagacggtaagta

SEQ ID NO: 140691 - DNA, 84 bp, Homo sapiens
cattgacatgtatgccatggggttggtgctgtgggagcttgtgtctcgctgcaaggctgcagacggtaagtaggatggcagccc

SEQ ID NO: 140692 - DNA, 82 bp, Homo sapiens
acatgtatgccatggggttggtgctgtgggagcttgtgtctcgctgcaaggctgcagacggtaagtaggatggcagccctgg

SEQ ID NO: 140693 - DNA, 82 bp, Homo sapiens
ggttggtgctgtgggagcttgtgtctcgctgcaaggctgcagacggtaagtaggatggcagccctgggcatcctagattgag

SEQ ID NO: 140694 - DNA, 79 bp, Homo sapiens
agcagtgggaccttagagtgatcctgccaggctctctctttctcctaggacccgtggatgagtacatgctgccctttga

SEQ ID NO: 140695 - DNA, 79 bp, Homo sapiens
cttagagtgatcctgccaggctctctctttctcctaggacccgtggatgagtacatgctgccctttgaggaagagattg

SEQ ID NO: 140696 - DNA, 79 bp, Homo sapiens
atcctgccaggctctctctttctcctaggacccgtggatgagtacatgctgccctttgaggaagagattggccagcacc

SEQ ID NO: 140697 - DNA, 77 bp, Homo sapiens
tctctctttctcctaggacccgtggatgagtacatgctgccctttgaggaagagattggccagcacccttcgttgga

SEQ ID NO: 140698 - DNA, 75 bp, Homo sapiens
ctttctcctaggacccgtggatgagtacatgctgccctttgaggaagagattggccagcacccttcgttggagga

SEQ ID NO: 140699 - DNA, 78 bp, Homo sapiens
ggacccgtggatgagtacatgctgccctttgaggaagagattggccagcacccttcgttggaggagctgcaggaggtg

SEQ ID NO: 140700 - DNA, 82 bp, Homo sapiens
tacatgctgccctttgaggaagagattggccagcacccttcgttggaggagctgcaggaggtggtggtgcacaagaagatga

SEQ ID NO: 140701 - DNA, 78 bp, Homo sapiens
cctttgaggaagagattggccagcacccttcgttggaggagctgcaggaggtggtggtgcacaagaagatgaggccca

SEQ ID NO: 140702 - DNA, 77 bp, Homo sapiens
aagagattggccagcacccttcgttggaggagctgcaggaggtggtggtgcacaagaagatgaggcccaccattaaa

SEQ ID NO: 140703 - DNA, 79 bp, Homo sapiens
cagcacccttcgttggaggagctgcaggaggtggtggtgcacaagaagatgaggcccaccattaaagatcactggttga

SEQ ID NO: 140704 - DNA, 77 bp, Homo sapiens
ccttcgttggaggagctgcaggaggtggtggtgcacaagaagatgaggcccaccattaaagatcactggttgaaaca

SEQ ID NO: 140705 - DNA, 74 bp, Homo sapiens
agctgcaggaggtggtggtgcacaagaagatgaggcccaccattaaagatcactggttgaaacacccggtaagg

SEQ ID NO: 140706 - DNA, 71 bp, Homo sapiens
gtggtggtgcacaagaagatgaggcccaccattaaagatcactggttgaaacacccggtaaggggcctggt

SEQ ID NO: 140707 - DNA, 70 bp, Homo sapiens
acaagaagatgaggcccaccattaaagatcactggttgaaacacccggtaaggggcctggttcaggcaac

SEQ ID NO: 140708 - DNA, 71 bp, Homo sapiens
aagatgaggcccaccattaaagatcactggttgaaacacccggtaaggggcctggttcaggcaactttgca

SEQ ID NO: 140709 - DNA, 74 bp, Homo sapiens
actgaagggtcctaacaaaggtgtctttcctgtctgccctatgctgcttagggcctggcccagctttgtgtgac

SEQ ID NO: 140710 - DNA, 78 bp, Homo sapiens
taacaaaggtgtctttcctgtctgccctatgctgcttagggcctggcccagctttgtgtgaccatcgaggagtgctgg

SEQ ID NO: 140711 - DNA, 84 bp, Homo sapiens
tgtctttcctgtctgccctatgctgcttagggcctggcccagctttgtgtgaccatcgaggagtgctgggaccatgatgcagag

SEQ ID NO: 140712 - DNA, 86 bp, Homo sapiens
tgtctgccctatgctgcttagggcctggcccagctttgtgtgaccatcgaggagtgctgggaccatgatgcagaggctcgcttgtc

SEQ ID NO: 140713 - DNA, 83 bp, Homo sapiens
tgcttagggcctggcccagctttgtgtgaccatcgaggagtgctgggaccatgatgcagaggctcgcttgtccgcgggctgtg

SEQ ID NO: 140714 - DNA, 83 bp, Homo sapiens
tggcccagctttgtgtgaccatcgaggagtgctgggaccatgatgcagaggctcgcttgtccgcgggctgtgtggaggagcgg

SEQ ID NO: 140715 - DNA, 82 bp, Homo sapiens
agctttgtgtgaccatcgaggagtgctgggaccatgatgcagaggctcgcttgtccgcgggctgtgtggaggagcgggtgtc

SEQ ID NO: 140716 - DNA, 80 bp, Homo sapiens
accatcgaggagtgctgggaccatgatgcagaggctcgcttgtccgcgggctgtgtggaggagcgggtgtccctgattcg

SEQ ID NO: 140717 - DNA, 80 bp, Homo sapiens
tgctgggaccatgatgcagaggctcgcttgtccgcgggctgtgtggaggagcgggtgtccctgattcggaggtcggtcaa

SEQ ID NO: 140718 - DNA, 78 bp, Homo sapiens
atgatgcagaggctcgcttgtccgcgggctgtgtggaggagcgggtgtccctgattcggaggtcggtcaacggcacta

SEQ ID NO: 140719 - DNA, 73 bp, Homo sapiens
agaggctcgcttgtccgcgggctgtgtggaggagcgggtgtccctgattcggaggtcggtcaacggcactacc

SEQ ID NO: 140720 - DNA, 73 bp, Homo sapiens
ttgtccgcgggctgtgtggaggagcgggtgtccctgattcggaggtcggtcaacggcactacctcggactgtc

SEQ ID NO: 140721 - DNA, 72 bp, Homo sapiens
tgtgtggaggagcgggtgtccctgattcggaggtcggtcaacggcactacctcggactgtctcgtttccctg

SEQ ID NO: 140722 - DNA, 70 bp, Homo sapiens
aggagcgggtgtccctgattcggaggtcggtcaacggcactacctcggactgtctcgtttccctggtgac

SEQ ID NO: 140723 - DNA, 73 bp, Homo sapiens
tccctgattcggaggtcggtcaacggcactacctcggactgtctcgtttccctggtgacctctgtcaccaatg

SEQ ID NO: 140724 - DNA, 72 bp, Homo sapiens
aggtcggtcaacggcactacctcggactgtctcgtttccctggtgacctctgtcaccaatgtggacctgccc

SEQ ID NO: 140725 - DNA, 71 bp, Homo sapiens
aacggcactacctcggactgtctcgtttccctggtgacctctgtcaccaatgtggacctgccccctaaaga

SEQ ID NO: 140726 - DNA, 75 bp, Homo sapiens
tacctcggactgtctcgtttccctggtgacctctgtcaccaatgtggacctgccccctaaagagtcaagcatcta

SEQ ID NO: 140727 - DNA, 76 bp, Homo sapiens
tgtctcgtttccctggtgacctctgtcaccaatgtggacctgccccctaaagagtcaagcatctaagcccaggaca

SEQ ID NO: 140728 - DNA, 81 bp, Homo sapiens
gtgacctctgtcaccaatgtggacctgccccctaaagagtcaagcatctaagcccaggacatgagtgtctgtccagactca

SEQ ID NO: 140729 - DNA, 82 bp, Homo sapiens
tcaccaatgtggacctgccccctaaagagtcaagcatctaagcccaggacatgagtgtctgtccagactcagtggatctgaa

SEQ ID NO: 140730 - DNA, 79 bp, Homo sapiens
tggacctgccccctaaagagtcaagcatctaagcccaggacatgagtgtctgtccagactcagtggatctgaagaaaaa

SEQ ID NO: 140731 - DNA, 76 bp, Homo sapiens
ccctaaagagtcaagcatctaagcccaggacatgagtgtctgtccagactcagtggatctgaagaaaaaaggaaaa

SEQ ID NO: 140732 - DNA, 64 bp, Homo sapiens
aaaaggaaaaaaagttgtgttttgttttggaaatcccataaaaccaacaaacacataaaatgca

SEQ ID NO: 140733 - DNA, 68 bp, Homo sapiens
aaagttgtgttttgttttggaaatcccataaaaccaacaaacacataaaatgcagctgctattttacc

SEQ ID NO: 140734 - DNA, 69 bp, Homo sapiens
gtgttttgttttggaaatcccataaaaccaacaaacacataaaatgcagctgctattttaccttgactt

SEQ ID NO: 140735 - DNA, 70 bp, Homo sapiens
tttggaaatcccataaaaccaacaaacacataaaatgcagctgctattttaccttgactttttattatta

SEQ ID NO: 140736 - DNA, 75 bp, Homo sapiens
attattattaatattattttttggattggatcagtttttaccagcatattgctctactgtatcacaaacagcgga

SEQ ID NO: 140737 - DNA, 77 bp, Homo sapiens
aatattattttttggattggatcagtttttaccagcatattgctctactgtatcacaaacagcggacacgtcagcag

SEQ ID NO: 140738 - DNA, 78 bp, Homo sapiens
tttttggattggatcagtttttaccagcatattgctctactgtatcacaaacagcggacacgtcagcaggcgttgagg

SEQ ID NO: 140739 - DNA, 84 bp, Homo sapiens
ttggatcagtttttaccagcatattgctctactgtatcacaaacagcggacacgtcagcaggcgttgaggtgctgagctgtgga

SEQ ID NO: 140740 - DNA, 86 bp, Homo sapiens
ttttaccagcatattgctctactgtatcacaaacagcggacacgtcagcaggcgttgaggtgctgagctgtggatgcagaaccagc

SEQ ID NO: 140741 - DNA, 89 bp, Homo sapiens
atattgctctactgtatcacaaacagcggacacgtcagcaggcgttgaggtgctgagctgtggatgcagaaccagcgccatgctgaaga

SEQ ID NO: 140742 - DNA, 89 bp, Homo sapiens
actgtatcacaaacagcggacacgtcagcaggcgttgaggtgctgagctgtggatgcagaaccagcgccatgctgaagagcctcagcca

SEQ ID NO: 140743 - DNA, 86 bp, Homo sapiens
gtcagcaggcgttgaggtgctgagctgtggatgcagaaccagcgccatgctgaagagcctcagccacctcctgtcctttgggattc

SEQ ID NO: 140744 - DNA, 82 bp, Homo sapiens
ttgaggtgctgagctgtggatgcagaaccagcgccatgctgaagagcctcagccacctcctgtcctttgggattcgtttttc

SEQ ID NO: 140745 - DNA, 77 bp, Homo sapiens
agctgtggatgcagaaccagcgccatgctgaagagcctcagccacctcctgtcctttgggattcgtttttcccgctt

SEQ ID NO: 140746 - DNA, 75 bp, Homo sapiens
atgcagaaccagcgccatgctgaagagcctcagccacctcctgtcctttgggattcgtttttcccgctttctctt

SEQ ID NO: 140747 - DNA, 72 bp, Homo sapiens
accagcgccatgctgaagagcctcagccacctcctgtcctttgggattcgtttttcccgctttctctttgtt

SEQ ID NO: 140748 - DNA, 70 bp, Homo sapiens
aagagcctcagccacctcctgtcctttgggattcgtttttcccgctttctctttgtttgtcgtctcagaa

SEQ ID NO: 140749 - DNA, 71 bp, Homo sapiens
tcctgtcctttgggattcgtttttcccgctttctctttgtttgtcgtctcagaatctgtgacacaaagaaa

SEQ ID NO: 140750 - DNA, 71 bp, Homo sapiens
attcgtttttcccgctttctctttgtttgtcgtctcagaatctgtgacacaaagaaacccatctcctgtct

SEQ ID NO: 140751 - DNA, 72 bp, Homo sapiens
tttttcccgctttctctttgtttgtcgtctcagaatctgtgacacaaagaaacccatctcctgtcttaggaa

SEQ ID NO: 140752 - DNA, 76 bp, Homo sapiens
ttctctttgtttgtcgtctcagaatctgtgacacaaagaaacccatctcctgtcttaggaaacctaatgctgcaaa

SEQ ID NO: 140753 - DNA, 76 bp, Homo sapiens
tttgtcgtctcagaatctgtgacacaaagaaacccatctcctgtcttaggaaacctaatgctgcaaactctaccta

SEQ ID NO: 140754 - DNA, 72 bp, Homo sapiens
atctgtgacacaaagaaacccatctcctgtcttaggaaacctaatgctgcaaactctacctagaggaacctt

SEQ ID NO: 140755 - DNA, 70 bp, Homo sapiens
acaaagaaacccatctcctgtcttaggaaacctaatgctgcaaactctacctagaggaacctttgaagac

SEQ ID NO: 140756 - DNA, 73 bp, Homo sapiens
atctcctgtcttaggaaacctaatgctgcaaactctacctagaggaacctttgaagactgttacataagaaca

SEQ ID NO: 140757 - DNA, 72 bp, Homo sapiens
tcttaggaaacctaatgctgcaaactctacctagaggaacctttgaagactgttacataagaacataccttc

SEQ ID NO: 140758 - DNA, 72 bp, Homo sapiens
aaacctaatgctgcaaactctacctagaggaacctttgaagactgttacataagaacataccttcctcagaa

SEQ ID NO: 140759 - DNA, 69 bp, Homo sapiens
aaactctacctagaggaacctttgaagactgttacataagaacataccttcctcagaagaggagtttcc

SEQ ID NO: 140760 - DNA, 72 bp, Homo sapiens
tacctagaggaacctttgaagactgttacataagaacataccttcctcagaagaggagtttcctctgccctc

SEQ ID NO: 140761 - DNA, 72 bp, Homo sapiens
aacctttgaagactgttacataagaacataccttcctcagaagaggagtttcctctgccctctgcccttctc

SEQ ID NO: 140762 - DNA, 71 bp, Homo sapiens
taagaacataccttcctcagaagaggagtttcctctgccctctgcccttctcccctgcctccctccctccc

SEQ ID NO: 140763 - DNA, 70 bp, Homo sapiens
ccctccctcccctccttttattttgttttagtgagcttaagaaacagcagatgtgtctttcacggatcta

SEQ ID NO: 140764 - DNA, 70 bp, Homo sapiens
cctccttttattttgttttagtgagcttaagaaacagcagatgtgtctttcacggatctaacgggtgttg

SEQ ID NO: 140765 - DNA, 74 bp, Homo sapiens
ttttgttttagtgagcttaagaaacagcagatgtgtctttcacggatctaacgggtgttgtcctgatcgagaaa

SEQ ID NO: 140766 - DNA, 73 bp, Homo sapiens
ttttagtgagcttaagaaacagcagatgtgtctttcacggatctaacgggtgttgtcctgatcgagaaaaaaa

SEQ ID NO: 140767 - DNA, 74 bp, Homo sapiens
ttaagaaacagcagatgtgtctttcacggatctaacgggtgttgtcctgatcgagaaaaaaactgggatgagaa

SEQ ID NO: 140768 - DNA, 72 bp, Homo sapiens
atgtgtctttcacggatctaacgggtgttgtcctgatcgagaaaaaaactgggatgagaatggtttggactg

SEQ ID NO: 140769 - DNA, 71 bp, Homo sapiens
tctttcacggatctaacgggtgttgtcctgatcgagaaaaaaactgggatgagaatggtttggactggagt

SEQ ID NO: 140770 - DNA, 70 bp, Homo sapiens
acggatctaacgggtgttgtcctgatcgagaaaaaaactgggatgagaatggtttggactggagttggaa

SEQ ID NO: 140771 - DNA, 69 bp, Homo sapiens
atctaacgggtgttgtcctgatcgagaaaaaaactgggatgagaatggtttggactggagttggaaggg

SEQ ID NO: 140772 - DNA, 69 bp, Homo sapiens
tcctgatcgagaaaaaaactgggatgagaatggtttggactggagttggaaggggaggacggtactggg

SEQ ID NO: 140773 - DNA, 65 bp, Homo sapiens
agaaaaaaactgggatgagaatggtttggactggagttggaaggggaggacggtactgggggtag

SEQ ID NO: 140774 - DNA, 65 bp, Homo sapiens
aaactgggatgagaatggtttggactggagttggaaggggaggacggtactgggggtagggtttg

SEQ ID NO: 140775 - DNA, 68 bp, Homo sapiens
atgagaatggtttggactggagttggaaggggaggacggtactgggggtagggtttggaacagagcta

SEQ ID NO: 140776 - DNA, 68 bp, Homo sapiens
tttggactggagttggaaggggaggacggtactgggggtagggtttggaacagagctacactggactc

SEQ ID NO: 140777 - DNA, 77 bp, Homo sapiens
gtttggaacagagctacactggactcgggcacattcggagcagcatcctttagtatggaggctacttctcaggtaac

SEQ ID NO: 140778 - DNA, 73 bp, Homo sapiens
acattcggagcagcatcctttagtatggaggctacttctcaggtaaccaggaattgaggggaaggaccttgtg

SEQ ID NO: 140779 - DNA, 73 bp, Homo sapiens
agcagcatcctttagtatggaggctacttctcaggtaaccaggaattgaggggaaggaccttgtggaggccga

SEQ ID NO: 140780 - DNA, 72 bp, Homo sapiens
aggctacttctcaggtaaccaggaattgaggggaaggaccttgtggaggccgagcattaacagcaagagcgg

SEQ ID NO: 140781 - DNA, 71 bp, Homo sapiens
ttctcaggtaaccaggaattgaggggaaggaccttgtggaggccgagcattaacagcaagagcggggtttg

SEQ ID NO: 140782 - DNA, 73 bp, Homo sapiens
gaattgaggggaaggaccttgtggaggccgagcattaacagcaagagcggggtttggagaaagtctgagattg

SEQ ID NO: 140783 - DNA, 76 bp, Homo sapiens
gaaggaccttgtggaggccgagcattaacagcaagagcggggtttggagaaagtctgagattgggtgcagccctga

SEQ ID NO: 140784 - DNA, 75 bp, Homo sapiens
accttgtggaggccgagcattaacagcaagagcggggtttggagaaagtctgagattgggtgcagccctgactta

SEQ ID NO: 140785 - DNA, 77 bp, Homo sapiens
agcattaacagcaagagcggggtttggagaaagtctgagattgggtgcagccctgacttacctgctggccctgacca

SEQ ID NO: 140786 - DNA, 75 bp, Homo sapiens
taacagcaagagcggggtttggagaaagtctgagattgggtgcagccctgacttacctgctggccctgaccagtt

SEQ ID NO: 140787 - DNA, 73 bp, Homo sapiens
gggtttggagaaagtctgagattgggtgcagccctgacttacctgctggccctgaccagtttcttttcactaa

SEQ ID NO: 140788 - DNA, 73 bp, Homo sapiens
aaagtctgagattgggtgcagccctgacttacctgctggccctgaccagtttcttttcactaacttggccttg

SEQ ID NO: 140789 - DNA, 75 bp, Homo sapiens
attgggtgcagccctgacttacctgctggccctgaccagtttcttttcactaacttggccttgggcataggatga

SEQ ID NO: 140790 - DNA, 71 bp, Homo sapiens
ccctgacttacctgctggccctgaccagtttcttttcactaacttggccttgggcataggatgaaacattt

SEQ ID NO: 140791 - DNA, 69 bp, Homo sapiens
ctgaccagtttcttttcactaacttggccttgggcataggatgaaacattttttctgccctaattttaa

SEQ ID NO: 140792 - DNA, 69 bp, Homo sapiens
tcttttcactaacttggccttgggcataggatgaaacattttttctgccctaattttaaaactaggtga

SEQ ID NO: 140793 - DNA, 68 bp, Homo sapiens
taacttggccttgggcataggatgaaacattttttctgccctaattttaaaactaggtgagggtagaa

SEQ ID NO: 140794 - DNA, 71 bp, Homo sapiens
ttgggcataggatgaaacattttttctgccctaattttaaaactaggtgagggtagaatcatcacaggtta

SEQ ID NO: 140795 - DNA, 70 bp, Homo sapiens
ggatgaaacattttttctgccctaattttaaaactaggtgagggtagaatcatcacaggttaggaataca

SEQ ID NO: 140796 - DNA, 74 bp, Homo sapiens
taattttaaaactaggtgagggtagaatcatcacaggttaggaatacattcttcataagacacgatgctgtaaa

SEQ ID NO: 140797 - DNA, 74 bp, Homo sapiens
ggtagaatcatcacaggttaggaatacattcttcataagacacgatgctgtaaatacccttaatggacgaaaag

SEQ ID NO: 140798 - DNA, 75 bp, Homo sapiens
tcatcacaggttaggaatacattcttcataagacacgatgctgtaaatacccttaatggacgaaaagttgaaata

SEQ ID NO: 140799 - DNA, 70 bp, Homo sapiens
ggttaggaatacattcttcataagacacgatgctgtaaatacccttaatggacgaaaagttgaaatactt

SEQ ID NO: 140800 - DNA, 70 bp, Homo sapiens
acattcttcataagacacgatgctgtaaatacccttaatggacgaaaagttgaaatacttttgtttcctc

SEQ ID NO: 140801 - DNA, 70 bp, Homo sapiens
taagacacgatgctgtaaatacccttaatggacgaaaagttgaaatacttttgtttcctcttggagcagt

SEQ ID NO: 140802 - DNA, 67 bp, Homo sapiens
ctgtaaatacccttaatggacgaaaagttgaaatacttttgtttcctcttggagcagttcagggaaa

SEQ ID NO: 140803 - DNA, 68 bp, Homo sapiens
acccttaatggacgaaaagttgaaatacttttgtttcctcttggagcagttcagggaaatgcccacag

SEQ ID NO: 140804 - DNA, 74 bp, Homo sapiens
aaatacttttgtttcctcttggagcagttcagggaaatgcccacaggggattgtcctgcacagatagggcaaga

SEQ ID NO: 140805 - DNA, 76 bp, Homo sapiens
ttgtttcctcttggagcagttcagggaaatgcccacaggggattgtcctgcacagatagggcaagaggatttcctg

SEQ ID NO: 140806 - DNA, 77 bp, Homo sapiens
agcagttcagggaaatgcccacaggggattgtcctgcacagatagggcaagaggatttcctgggtggagtctgccaa

SEQ ID NO: 140807 - DNA, 76 bp, Homo sapiens
agggaaatgcccacaggggattgtcctgcacagatagggcaagaggatttcctgggtggagtctgccaaggcctgc

SEQ ID NO: 140808 - DNA, 76 bp, Homo sapiens
cccacaggggattgtcctgcacagatagggcaagaggatttcctgggtggagtctgccaaggcctgcctcgctggg

SEQ ID NO: 140809 - DNA, 76 bp, Homo sapiens
attgtcctgcacagatagggcaagaggatttcctgggtggagtctgccaaggcctgcctcgctggggaccccagag

SEQ ID NO: 140810 - DNA, 75 bp, Homo sapiens
acagatagggcaagaggatttcctgggtggagtctgccaaggcctgcctcgctggggaccccagagtcctgcacc

SEQ ID NO: 140811 - DNA, 75 bp, Homo sapiens
tgggtggagtctgccaaggcctgcctcgctggggaccccagagtcctgcacctctggttccgccccaggtggtga

SEQ ID NO: 140812 - DNA, 76 bp, Homo sapiens
tctgccaaggcctgcctcgctggggaccccagagtcctgcacctctggttccgccccaggtggtgacattactgtc

SEQ ID NO: 140813 - DNA, 73 bp, Homo sapiens
tgcctcgctggggaccccagagtcctgcacctctggttccgccccaggtggtgacattactgtccccgttctg

SEQ ID NO: 140814 - DNA, 72 bp, Homo sapiens
gggaccccagagtcctgcacctctggttccgccccaggtggtgacattactgtccccgttctgtggctcgtg

SEQ ID NO: 140815 - DNA, 72 bp, Homo sapiens
agtcctgcacctctggttccgccccaggtggtgacattactgtccccgttctgtggctcgtggacaagactt

SEQ ID NO: 140816 - DNA, 72 bp, Homo sapiens
acctctggttccgccccaggtggtgacattactgtccccgttctgtggctcgtggacaagactttctccaga

SEQ ID NO: 140817 - DNA, 70 bp, Homo sapiens
cgccccaggtggtgacattactgtccccgttctgtggctcgtggacaagactttctccagaccccttaaa

SEQ ID NO: 140818 - DNA, 72 bp, Homo sapiens
tggtgacattactgtccccgttctgtggctcgtggacaagactttctccagaccccttaaagtggtacatat

SEQ ID NO: 140819 - DNA, 70 bp, Homo sapiens
attactgtccccgttctgtggctcgtggacaagactttctccagaccccttaaagtggtacatattctaa

SEQ ID NO: 140820 - DNA, 68 bp, Homo sapiens
ttctgtggctcgtggacaagactttctccagaccccttaaagtggtacatattctaaaaaactgtttt

SEQ ID NO: 140821 - DNA, 68 bp, Homo sapiens
gctcgtggacaagactttctccagaccccttaaagtggtacatattctaaaaaactgtttttctatta

SEQ ID NO: 140822 - DNA, 69 bp, Homo sapiens
tttctccagaccccttaaagtggtacatattctaaaaaactgtttttctattatgccataaccttgctc

SEQ ID NO: 140823 - DNA, 70 bp, Homo sapiens
cagaccccttaaagtggtacatattctaaaaaactgtttttctattatgccataaccttgctctagtcag

SEQ ID NO: 140824 - DNA, 74 bp, Homo sapiens
agtggtacatattctaaaaaactgtttttctattatgccataaccttgctctagtcagtgaatgttcctaatgc

SEQ ID NO: 140825 - DNA, 76 bp, Homo sapiens
tctaaaaaactgtttttctattatgccataaccttgctctagtcagtgaatgttcctaatgctgctgtttcaacat

SEQ ID NO: 140826 - DNA, 76 bp, Homo sapiens
aaaactgtttttctattatgccataaccttgctctagtcagtgaatgttcctaatgctgctgtttcaacatttgaa

SEQ ID NO: 140827 - DNA, 77 bp, Homo sapiens
ttctattatgccataaccttgctctagtcagtgaatgttcctaatgctgctgtttcaacatttgaattctttttaat

SEQ ID NO: 140828 - DNA, 76 bp, Homo sapiens
gctctagtcagtgaatgttcctaatgctgctgtttcaacatttgaattctttttaatttatgaaacatgctaaatt

SEQ ID NO: 140829 - DNA, 71 bp, Homo sapiens
gtgaatgttcctaatgctgctgtttcaacatttgaattctttttaatttatgaaacatgctaaattttttt

SEQ ID NO: 140830 - DNA, 72 bp, Homo sapiens
tttttttttcaaacaaaacacacacatccacatatacacatgcttcgctatgtggcttccaaggtttaaatt

SEQ ID NO: 140831 - DNA, 70 bp, Homo sapiens
catatacacatgcttcgctatgtggcttccaaggtttaaattttgaaaagtaaaagaattaaaacttcac

SEQ ID NO: 140832 - DNA, 69 bp, Homo sapiens
cacatgcttcgctatgtggcttccaaggtttaaattttgaaaagtaaaagaattaaaacttcacgacca

SEQ ID NO: 140833 - DNA, 68 bp, Homo sapiens
cgctatgtggcttccaaggtttaaattttgaaaagtaaaagaattaaaacttcacgaccacagatcac

SEQ ID NO: 140834 - DNA, 66 bp, Homo sapiens
ccaaggtttaaattttgaaaagtaaaagaattaaaacttcacgaccacagatcacctcaaaccaga

SEQ ID NO: 140835 - DNA, 68 bp, Homo sapiens
ttttgaaaagtaaaagaattaaaacttcacgaccacagatcacctcaaaccagaaatacctcagaatt

SEQ ID NO: 140836 - DNA, 70 bp, Homo sapiens
gtaaaagaattaaaacttcacgaccacagatcacctcaaaccagaaatacctcagaattttctacttatg

SEQ ID NO: 140837 - DNA, 70 bp, Homo sapiens
gaattaaaacttcacgaccacagatcacctcaaaccagaaatacctcagaattttctacttatgtaaggt

SEQ ID NO: 140838 - DNA, 72 bp, Homo sapiens
ttcacgaccacagatcacctcaaaccagaaatacctcagaattttctacttatgtaaggtttattatatatt

SEQ ID NO: 140839 - DNA, 70 bp, Homo sapiens
ccagaaatacctcagaattttctacttatgtaaggtttattatatattttgttagttgtgttgtcttgta

SEQ ID NO: 140840 - DNA, 69 bp, Homo sapiens
tttctacttatgtaaggtttattatatattttgttagttgtgttgtcttgtagtaagtatattttaatg

SEQ ID NO: 140841 - DNA, 70 bp, Homo sapiens
tatgtaaggtttattatatattttgttagttgtgttgtcttgtagtaagtatattttaatgtaagttggc

SEQ ID NO: 140842 - DNA, 70 bp, Homo sapiens
atatattttgttagttgtgttgtcttgtagtaagtatattttaatgtaagttggcttttgtgacaaggaa

SEQ ID NO: 140843 - DNA, 69 bp, Homo sapiens
ttgttagttgtgttgtcttgtagtaagtatattttaatgtaagttggcttttgtgacaaggaagtttaa

SEQ ID NO: 140844 - DNA, 69 bp, Homo sapiens
tgtgttgtcttgtagtaagtatattttaatgtaagttggcttttgtgacaaggaagtttaaaagaaata

SEQ ID NO: 140845 - DNA, 66 bp, Homo sapiens
gtagtaagtatattttaatgtaagttggcttttgtgacaaggaagtttaaaagaaatagagaaaaa

SEQ ID NO: 140846 - DNA, 67 bp, Homo sapiens
aagaaaaaagtttgcatcttctagggagtgctaccatttttgtttgataacgcccccttgtaaataa

SEQ ID NO: 140847 - DNA, 71 bp, Homo sapiens
aaagtttgcatcttctagggagtgctaccatttttgtttgataacgcccccttgtaaataattgtcatcaa

SEQ ID NO: 140848 - DNA, 70 bp, Homo sapiens
atcttctagggagtgctaccatttttgtttgataacgcccccttgtaaataattgtcatcaactgtaggt

SEQ ID NO: 140849 - DNA, 71 bp, Homo sapiens
ctaccatttttgtttgataacgcccccttgtaaataattgtcatcaactgtaggttggctgtctgggccaa

SEQ ID NO: 140850 - DNA, 74 bp, Homo sapiens
ataacgcccccttgtaaataattgtcatcaactgtaggttggctgtctgggccaagtctgggcatttatcagtc

SEQ ID NO: 140851 - DNA, 76 bp, Homo sapiens
taaataattgtcatcaactgtaggttggctgtctgggccaagtctgggcatttatcagtcttgtttgtgaaggctt

SEQ ID NO: 140852 - DNA, 75 bp, Homo sapiens
aattgtcatcaactgtaggttggctgtctgggccaagtctgggcatttatcagtcttgtttgtgaaggcttttcc

SEQ ID NO: 140853 - DNA, 72 bp, Homo sapiens
aactgtaggttggctgtctgggccaagtctgggcatttatcagtcttgtttgtgaaggcttttccttctggt

SEQ ID NO: 140854 - DNA, 73 bp, Homo sapiens
tgtctgggccaagtctgggcatttatcagtcttgtttgtgaaggcttttccttctggtttctttagatcattt

SEQ ID NO: 140855 - DNA, 71 bp, Homo sapiens
ccaagtctgggcatttatcagtcttgtttgtgaaggcttttccttctggtttctttagatcattttattta

SEQ ID NO: 140856 - DNA, 72 bp, Homo sapiens
gcatttatcagtcttgtttgtgaaggcttttccttctggtttctttagatcattttatttaaaaacagtgca

SEQ ID NO: 140857 - DNA, 70 bp, Homo sapiens
aaggcttttccttctggtttctttagatcattttatttaaaaacagtgcatctcttcatcgtgagggtag

SEQ ID NO: 140858 - DNA, 72 bp, Homo sapiens
tttccttctggtttctttagatcattttatttaaaaacagtgcatctcttcatcgtgagggtaggcaaggcg

SEQ ID NO: 140859 - DNA, 71 bp, Homo sapiens
tttctttagatcattttatttaaaaacagtgcatctcttcatcgtgagggtaggcaaggcgggggccgtgg

SEQ ID NO: 140860 - DNA, 70 bp, Homo sapiens
tttatttaaaaacagtgcatctcttcatcgtgagggtaggcaaggcgggggccgtggggagaggttgacc

SEQ ID NO: 140861 - DNA, 72 bp, Homo sapiens
ttaaaaacagtgcatctcttcatcgtgagggtaggcaaggcgggggccgtggggagaggttgacctgggtga

SEQ ID NO: 140862 - DNA, 72 bp, Homo sapiens
atctcttcatcgtgagggtaggcaaggcgggggccgtggggagaggttgacctgggtgagaactgaagaggc

SEQ ID NO: 140863 - DNA, 70 bp, Homo sapiens
atcgtgagggtaggcaaggcgggggccgtggggagaggttgacctgggtgagaactgaagaggccgcctc

SEQ ID NO: 140864 - DNA, 68 bp, Homo sapiens
caaggcgggggccgtggggagaggttgacctgggtgagaactgaagaggccgcctcctcttgggttgt

SEQ ID NO: 140865 - DNA, 73 bp, Homo sapiens
gccgtggggagaggttgacctgggtgagaactgaagaggccgcctcctcttgggttgtttggagcttcacatg

SEQ ID NO: 140866 - DNA, 76 bp, Homo sapiens
gaggttgacctgggtgagaactgaagaggccgcctcctcttgggttgtttggagcttcacatgtaattcacatgta

SEQ ID NO: 140867 - DNA, 76 bp, Homo sapiens
agaactgaagaggccgcctcctcttgggttgtttggagcttcacatgtaattcacatgtaacatgtaacttgatcg

SEQ ID NO: 140868 - DNA, 79 bp, Homo sapiens
cgcctcctcttgggttgtttggagcttcacatgtaattcacatgtaacatgtaacttgatcggtcagtgttcagaatga

SEQ ID NO: 140869 - DNA, 79 bp, Homo sapiens
tcttgggttgtttggagcttcacatgtaattcacatgtaacatgtaacttgatcggtcagtgttcagaatgacaagtaa

SEQ ID NO: 140870 - DNA, 78 bp, Homo sapiens
tggagcttcacatgtaattcacatgtaacatgtaacttgatcggtcagtgttcagaatgacaagtaaccccgcttaaa

SEQ ID NO: 140871 - DNA, 74 bp, Homo sapiens
atgtaattcacatgtaacatgtaacttgatcggtcagtgttcagaatgacaagtaaccccgcttaaacttggta

SEQ ID NO: 140872 - DNA, 73 bp, Homo sapiens
attcacatgtaacatgtaacttgatcggtcagtgttcagaatgacaagtaaccccgcttaaacttggtagaag

SEQ ID NO: 140873 - DNA, 72 bp, Homo sapiens
ttgatcggtcagtgttcagaatgacaagtaaccccgcttaaacttggtagaaggatggcccttagacctgaa

SEQ ID NO: 140874 - DNA, 67 bp, Homo sapiens
atgacaagtaaccccgcttaaacttggtagaaggatggcccttagacctgaatggggtgattttact

SEQ ID NO: 140875 - DNA, 67 bp, Homo sapiens
gcttaaacttggtagaaggatggcccttagacctgaatggggtgattttacttgggatttaacttct

SEQ ID NO: 140876 - DNA, 70 bp, Homo sapiens
ttggtagaaggatggcccttagacctgaatggggtgattttacttgggatttaacttcttcagcaaatta

SEQ ID NO: 140877 - DNA, 70 bp, Homo sapiens
aaggatggcccttagacctgaatggggtgattttacttgggatttaacttcttcagcaaattaacagcaa

SEQ ID NO: 140878 - DNA, 71 bp, Homo sapiens
ttagacctgaatggggtgattttacttgggatttaacttcttcagcaaattaacagcaacgttggaagaga

SEQ ID NO: 140879 - DNA, 75 bp, Homo sapiens
ggtgattttacttgggatttaacttcttcagcaaattaacagcaacgttggaagagatctgtggcgcctctgtga

SEQ ID NO: 140880 - DNA, 76 bp, Homo sapiens
ttttacttgggatttaacttcttcagcaaattaacagcaacgttggaagagatctgtggcgcctctgtgaagcaca

SEQ ID NO: 140881 - DNA, 78 bp, Homo sapiens
atttaacttcttcagcaaattaacagcaacgttggaagagatctgtggcgcctctgtgaagcacaccgtgactcaggc

SEQ ID NO: 140882 - DNA, 80 bp, Homo sapiens
agcaaattaacagcaacgttggaagagatctgtggcgcctctgtgaagcacaccgtgactcaggccagtcttttagtgca

SEQ ID NO: 140883 - DNA, 81 bp, Homo sapiens
cgttggaagagatctgtggcgcctctgtgaagcacaccgtgactcaggccagtcttttagtgcagcgtgtctgggagtgaa

SEQ ID NO: 140884 - DNA, 79 bp, Homo sapiens
atctgtggcgcctctgtgaagcacaccgtgactcaggccagtcttttagtgcagcgtgtctgggagtgaagggttttgc

SEQ ID NO: 140885 - DNA, 74 bp, Homo sapiens
acaccgtgactcaggccagtcttttagtgcagcgtgtctgggagtgaagggttttgcccttgctggtcttggag

SEQ ID NO: 140886 - DNA, 75 bp, Homo sapiens
actcaggccagtcttttagtgcagcgtgtctgggagtgaagggttttgcccttgctggtcttggagtccacagtg

SEQ ID NO: 140887 - DNA, 79 bp, Homo sapiens
agcgtgtctgggagtgaagggttttgcccttgctggtcttggagtccacagtgtgaggggcactgcacatgcctgggca

SEQ ID NO: 140888 - DNA, 78 bp, Homo sapiens
agtgaagggttttgcccttgctggtcttggagtccacagtgtgaggggcactgcacatgcctgggcatctacctagtg

SEQ ID NO: 140889 - DNA, 83 bp, Homo sapiens
ttttgcccttgctggtcttggagtccacagtgtgaggggcactgcacatgcctgggcatctacctagtgtgctatgttcagtg

SEQ ID NO: 140890 - DNA, 83 bp, Homo sapiens
ccttgctggtcttggagtccacagtgtgaggggcactgcacatgcctgggcatctacctagtgtgctatgttcagtgtctggg

SEQ ID NO: 140891 - DNA, 79 bp, Homo sapiens
tgtgaggggcactgcacatgcctgggcatctacctagtgtgctatgttcagtgtctggggcttactgccccggggtcct

SEQ ID NO: 140892 - DNA, 77 bp, Homo sapiens
actgcacatgcctgggcatctacctagtgtgctatgttcagtgtctggggcttactgccccggggtcctttcctctg

SEQ ID NO: 140893 - DNA, 73 bp, Homo sapiens
ctgggcatctacctagtgtgctatgttcagtgtctggggcttactgccccggggtcctttcctctgggtgttg

SEQ ID NO: 140894 - DNA, 72 bp, Homo sapiens
atctacctagtgtgctatgttcagtgtctggggcttactgccccggggtcctttcctctgggtgttggggca

SEQ ID NO: 140895 - DNA, 74 bp, Homo sapiens
tgtgctatgttcagtgtctggggcttactgccccggggtcctttcctctgggtgttggggcacagggtgctatg

SEQ ID NO: 140896 - DNA, 71 bp, Homo sapiens
ttcagtgtctggggcttactgccccggggtcctttcctctgggtgttggggcacagggtgctatgggaggc

SEQ ID NO: 140897 - DNA, 72 bp, Homo sapiens
cggggtcctttcctctgggtgttggggcacagggtgctatgggaggcccatttgcttccctctcggagctca

SEQ ID NO: 140898 - DNA, 73 bp, Homo sapiens
tttcctctgggtgttggggcacagggtgctatgggaggcccatttgcttccctctcggagctcagtttttgct

SEQ ID NO: 140899 - DNA, 75 bp, Homo sapiens
tgttggggcacagggtgctatgggaggcccatttgcttccctctcggagctcagtttttgcttcatgggtcaaaa

SEQ ID NO: 140900 - DNA, 75 bp, Homo sapiens
acagggtgctatgggaggcccatttgcttccctctcggagctcagtttttgcttcatgggtcaaaatgtgggctg

SEQ ID NO: 140901 - DNA, 74 bp, Homo sapiens
ggaggcccatttgcttccctctcggagctcagtttttgcttcatgggtcaaaatgtgggctggccaagtggtta

SEQ ID NO: 140902 - DNA, 74 bp, Homo sapiens
atttgcttccctctcggagctcagtttttgcttcatgggtcaaaatgtgggctggccaagtggttacaggaaca

SEQ ID NO: 140903 - DNA, 72 bp, Homo sapiens
tccctctcggagctcagtttttgcttcatgggtcaaaatgtgggctggccaagtggttacaggaacagggtt

SEQ ID NO: 140904 - DNA, 70 bp, Homo sapiens
agtttttgcttcatgggtcaaaatgtgggctggccaagtggttacaggaacagggtttcggtaagctatg

SEQ ID NO: 140905 - DNA, 70 bp, Homo sapiens
ttcatgggtcaaaatgtgggctggccaagtggttacaggaacagggtttcggtaagctatgttgtctttt

SEQ ID NO: 140906 - DNA, 65 bp, Homo sapiens
tttttttaatggtttgattttgtgctgtggtattttttttcccttagaataatttttaatggcaa

SEQ ID NO: 140907 - DNA, 67 bp, Homo sapiens
ttaatggtttgattttgtgctgtggtattttttttcccttagaataatttttaatggcaaaacaggc

SEQ ID NO: 140908 - DNA, 66 bp, Homo sapiens
ggtttgattttgtgctgtggtattttttttcccttagaataatttttaatggcaaaacaggcctta

SEQ ID NO: 140909 - DNA, 69 bp, Homo sapiens
tgattttgtgctgtggtattttttttcccttagaataatttttaatggcaaaacaggccttacagcagt

SEQ ID NO: 140910 - DNA, 69 bp, Homo sapiens
ttgtgctgtggtattttttttcccttagaataatttttaatggcaaaacaggccttacagcagttgctt

SEQ ID NO: 140911 - DNA, 69 bp, Homo sapiens
tgtgctgtggtattttttttcccttagaataatttttaatggcaaaacaggccttacagcagttgcttt

SEQ ID NO: 140912 - DNA, 66 bp, Homo sapiens
gtggtattttttttcccttagaataatttttaatggcaaaacaggccttacagcagttgcttttct

SEQ ID NO: 140913 - DNA, 67 bp, Homo sapiens
cccttagaataatttttaatggcaaaacaggccttacagcagttgcttttctttaccatttatttct

SEQ ID NO: 140914 - DNA, 68 bp, Homo sapiens
taatttttaatggcaaaacaggccttacagcagttgcttttctttaccatttatttctttaagaagct

SEQ ID NO: 140915 - DNA, 68 bp, Homo sapiens
tttaatggcaaaacaggccttacagcagttgcttttctttaccatttatttctttaagaagctttaaa

SEQ ID NO: 140916 - DNA, 67 bp, Homo sapiens
ggcaaaacaggccttacagcagttgcttttctttaccatttatttctttaagaagctttaaaatatt

SEQ ID NO: 140917 - DNA, 74 bp, Homo sapiens
ctttaaaatatttattgaaaagtgccatatctaatttctttagctttcgcctcaggcagtgcaggcatctttac

SEQ ID NO: 140918 - DNA, 76 bp, Homo sapiens
atatttattgaaaagtgccatatctaatttctttagctttcgcctcaggcagtgcaggcatctttacttttcatcc

SEQ ID NO: 140919 - DNA, 76 bp, Homo sapiens
aaaagtgccatatctaatttctttagctttcgcctcaggcagtgcaggcatctttacttttcatcctcagaagaaa

SEQ ID NO: 140920 - DNA, 76 bp, Homo sapiens
tatctaatttctttagctttcgcctcaggcagtgcaggcatctttacttttcatcctcagaagaaacaaacgacta

SEQ ID NO: 140921 - DNA, 77 bp, Homo sapiens
ctcaggcagtgcaggcatctttacttttcatcctcagaagaaacaaacgactaacaaatgtagcaaatttactgcag

SEQ ID NO: 140922 - DNA, 75 bp, Homo sapiens
tgcaggcatctttacttttcatcctcagaagaaacaaacgactaacaaatgtagcaaatttactgcaggaatagt

SEQ ID NO: 140923 - DNA, 75 bp, Homo sapiens
tttcatcctcagaagaaacaaacgactaacaaatgtagcaaatttactgcaggaatagttaggtcatgatactac

SEQ ID NO: 140924 - DNA, 74 bp, Homo sapiens
gaagaaacaaacgactaacaaatgtagcaaatttactgcaggaatagttaggtcatgatactacctgaacacta

SEQ ID NO: 140925 - DNA, 72 bp, Homo sapiens
aacgactaacaaatgtagcaaatttactgcaggaatagttaggtcatgatactacctgaacactaaacccca

SEQ ID NO: 140926 - DNA, 72 bp, Homo sapiens
aaatgtagcaaatttactgcaggaatagttaggtcatgatactacctgaacactaaaccccagcctctttgt

SEQ ID NO: 140927 - DNA, 69 bp, Homo sapiens
aatttactgcaggaatagttaggtcatgatactacctgaacactaaaccccagcctctttgtttggttt

SEQ ID NO: 140928 - DNA, 68 bp, Homo sapiens
aggaatagttaggtcatgatactacctgaacactaaaccccagcctctttgtttggttttagttcctc

SEQ ID NO: 140929 - DNA, 66 bp, Homo sapiens
atgatactacctgaacactaaaccccagcctctttgtttggttttagttcctctgggtggtttttc

SEQ ID NO: 140930 - DNA, 69 bp, Homo sapiens
tctttgtttggttttagttcctctgggtggtttttcttttgtgtgctggcttgattcttgtgagaagtt

SEQ ID NO: 140931 - DNA, 69 bp, Homo sapiens
tttggttttagttcctctgggtggtttttcttttgtgtgctggcttgattcttgtgagaagttttgacc

SEQ ID NO: 140932 - DNA, 71 bp, Homo sapiens
agttcctctgggtggtttttcttttgtgtgctggcttgattcttgtgagaagttttgacctggccaaggga

SEQ ID NO: 140933 - DNA, 73 bp, Homo sapiens
tttttcttttgtgtgctggcttgattcttgtgagaagttttgacctggccaagggagggttgagccatggttc

SEQ ID NO: 140934 - DNA, 74 bp, Homo sapiens
ttgattcttgtgagaagttttgacctggccaagggagggttgagccatggttctggtgtgggactttgcggtca

SEQ ID NO: 140935 - DNA, 74 bp, Homo sapiens
tgagaagttttgacctggccaagggagggttgagccatggttctggtgtgggactttgcggtcaagacacagta

SEQ ID NO: 140936 - DNA, 73 bp, Homo sapiens
agttttgacctggccaagggagggttgagccatggttctggtgtgggactttgcggtcaagacacagtacaga

SEQ ID NO: 140937 - DNA, 76 bp, Homo sapiens
aagggagggttgagccatggttctggtgtgggactttgcggtcaagacacagtacagacaggtcaggcctgcgtgc

SEQ ID NO: 140938 - DNA, 75 bp, Homo sapiens
agggttgagccatggttctggtgtgggactttgcggtcaagacacagtacagacaggtcaggcctgcgtgccttt

SEQ ID NO: 140939 - DNA, 76 bp, Homo sapiens
atggttctggtgtgggactttgcggtcaagacacagtacagacaggtcaggcctgcgtgccttttctctgggtggc

SEQ ID NO: 140940 - DNA, 74 bp, Homo sapiens
tgggactttgcggtcaagacacagtacagacaggtcaggcctgcgtgccttttctctgggtggcctccccgtta

SEQ ID NO: 140941 - DNA, 73 bp, Homo sapiens
gtcaagacacagtacagacaggtcaggcctgcgtgccttttctctgggtggcctccccgttaggcccaccgta

SEQ ID NO: 140942 - DNA, 73 bp, Homo sapiens
acacagtacagacaggtcaggcctgcgtgccttttctctgggtggcctccccgttaggcccaccgtacgctca

SEQ ID NO: 140943 - DNA, 73 bp, Homo sapiens
agacaggtcaggcctgcgtgccttttctctgggtggcctccccgttaggcccaccgtacgctcagccactata

SEQ ID NO: 140944 - DNA, 72 bp, Homo sapiens
tgcgtgccttttctctgggtggcctccccgttaggcccaccgtacgctcagccactatagtgtccctgtggg

SEQ ID NO: 140945 - DNA, 69 bp, Homo sapiens
cttttctctgggtggcctccccgttaggcccaccgtacgctcagccactatagtgtccctgtggggcct

SEQ ID NO: 140946 - DNA, 77 bp, Homo sapiens
tggcctccccgttaggcccaccgtacgctcagccactatagtgtccctgtggggccttgccatcagattgtgtgtca

SEQ ID NO: 140947 - DNA, 78 bp, Homo sapiens
cgttaggcccaccgtacgctcagccactatagtgtccctgtggggccttgccatcagattgtgtgtcaggagatggta

SEQ ID NO: 140948 - DNA, 76 bp, Homo sapiens
accgtacgctcagccactatagtgtccctgtggggccttgccatcagattgtgtgtcaggagatggtacctttttg

SEQ ID NO: 140949 - DNA, 76 bp, Homo sapiens
agccactatagtgtccctgtggggccttgccatcagattgtgtgtcaggagatggtacctttttggtgtggctggg

SEQ ID NO: 140950 - DNA, 75 bp, Homo sapiens
atagtgtccctgtggggccttgccatcagattgtgtgtcaggagatggtacctttttggtgtggctggggaggag

SEQ ID NO: 140951 - DNA, 78 bp, Homo sapiens
ggccttgccatcagattgtgtgtcaggagatggtacctttttggtgtggctggggaggagtgtggtccatgccagttc

SEQ ID NO: 140952 - DNA, 76 bp, Homo sapiens
ccatcagattgtgtgtcaggagatggtacctttttggtgtggctggggaggagtgtggtccatgccagttctttgg

SEQ ID NO: 140953 - DNA, 75 bp, Homo sapiens
ttgtgtgtcaggagatggtacctttttggtgtggctggggaggagtgtggtccatgccagttctttgggcttcag

SEQ ID NO: 140954 - DNA, 76 bp, Homo sapiens
tttttggtgtggctggggaggagtgtggtccatgccagttctttgggcttcaggccactcttcccctcatgctgtg

SEQ ID NO: 140955 - DNA, 77 bp, Homo sapiens
tggggaggagtgtggtccatgccagttctttgggcttcaggccactcttcccctcatgctgtggtgtaaagtgcacc

SEQ ID NO: 140956 - DNA, 78 bp, Homo sapiens
tgccagttctttgggcttcaggccactcttcccctcatgctgtggtgtaaagtgcacccatcaggtggtatatctggt

SEQ ID NO: 140957 - DNA, 79 bp, Homo sapiens
ttctttgggcttcaggccactcttcccctcatgctgtggtgtaaagtgcacccatcaggtggtatatctggttctgatg

SEQ ID NO: 140958 - DNA, 80 bp, Homo sapiens
ttcaggccactcttcccctcatgctgtggtgtaaagtgcacccatcaggtggtatatctggttctgatggcaagaagaag

SEQ ID NO: 140959 - DNA, 78 bp, Homo sapiens
ccctcatgctgtggtgtaaagtgcacccatcaggtggtatatctggttctgatggcaagaagaaggtgggggatctcc

SEQ ID NO: 140960 - DNA, 78 bp, Homo sapiens
atgctgtggtgtaaagtgcacccatcaggtggtatatctggttctgatggcaagaagaaggtgggggatctccttata

SEQ ID NO: 140961 - DNA, 76 bp, Homo sapiens
taaagtgcacccatcaggtggtatatctggttctgatggcaagaagaaggtgggggatctccttatagggcatggg

SEQ ID NO: 140962 - DNA, 78 bp, Homo sapiens
atcaggtggtatatctggttctgatggcaagaagaaggtgggggatctccttatagggcatgggtctaggagcacaga

SEQ ID NO: 140963 - DNA, 77 bp, Homo sapiens
tatatctggttctgatggcaagaagaaggtgggggatctccttatagggcatgggtctaggagcacagatgggcctt

SEQ ID NO: 140964 - DNA, 75 bp, Homo sapiens
ggatctccttatagggcatgggtctaggagcacagatgggccttttgccccgggtaaatgcttgtctgtttgctg

SEQ ID NO: 140965 - DNA, 77 bp, Homo sapiens
ttatagggcatgggtctaggagcacagatgggccttttgccccgggtaaatgcttgtctgtttgctgtcatgtgttc

SEQ ID NO: 140966 - DNA, 76 bp, Homo sapiens
atgggtctaggagcacagatgggccttttgccccgggtaaatgcttgtctgtttgctgtcatgtgttctttgagga

SEQ ID NO: 140967 - DNA, 79 bp, Homo sapiens
agcacagatgggccttttgccccgggtaaatgcttgtctgtttgctgtcatgtgttctttgaggagtgagccatctcga

SEQ ID NO: 140968 - DNA, 76 bp, Homo sapiens
ccttttgccccgggtaaatgcttgtctgtttgctgtcatgtgttctttgaggagtgagccatctcgagccctgctt

SEQ ID NO: 140969 - DNA, 78 bp, Homo sapiens
ccgggtaaatgcttgtctgtttgctgtcatgtgttctttgaggagtgagccatctcgagccctgctttgaatttactg

SEQ ID NO: 140970 - DNA, 81 bp, Homo sapiens
aaatgcttgtctgtttgctgtcatgtgttctttgaggagtgagccatctcgagccctgctttgaatttactgggtcataga

SEQ ID NO: 140971 - DNA, 81 bp, Homo sapiens
tgttctttgaggagtgagccatctcgagccctgctttgaatttactgggtcatagagcctctgcctgtgctcttttccata

SEQ ID NO: 140972 - DNA, 81 bp, Homo sapiens
tttgaggagtgagccatctcgagccctgctttgaatttactgggtcatagagcctctgcctgtgctcttttccataatgac

SEQ ID NO: 140973 - DNA, 83 bp, Homo sapiens
atctcgagccctgctttgaatttactgggtcatagagcctctgcctgtgctcttttccataatgacttcatgtgacatgcact

SEQ ID NO: 140974 - DNA, 81 bp, Homo sapiens
ctgctttgaatttactgggtcatagagcctctgcctgtgctcttttccataatgacttcatgtgacatgcacttttggtgg

SEQ ID NO: 140975 - DNA, 82 bp, Homo sapiens
tttactgggtcatagagcctctgcctgtgctcttttccataatgacttcatgtgacatgcacttttggtgggctcagataat

SEQ ID NO: 140976 - DNA, 82 bp, Homo sapiens
tcatagagcctctgcctgtgctcttttccataatgacttcatgtgacatgcacttttggtgggctcagataattggtttctt

SEQ ID NO: 140977 - DNA, 74 bp, Homo sapiens
tcttttccataatgacttcatgtgacatgcacttttggtgggctcagataattggtttctttttgtttttgacc

SEQ ID NO: 140978 - DNA, 76 bp, Homo sapiens
ataatgacttcatgtgacatgcacttttggtgggctcagataattggtttctttttgtttttgacctcaggctctg

SEQ ID NO: 140979 - DNA, 78 bp, Homo sapiens
ttcatgtgacatgcacttttggtgggctcagataattggtttctttttgtttttgacctcaggctctgtggcagactg

SEQ ID NO: 140980 - DNA, 71 bp, Homo sapiens
taattggtttctttttgtttttgacctcaggctctgtggcagactggggaaaatggggcctggcatcattt

SEQ ID NO: 140981 - DNA, 73 bp, Homo sapiens
tttttgtttttgacctcaggctctgtggcagactggggaaaatggggcctggcatcattttccctgtcaatgg

SEQ ID NO: 140982 - DNA, 74 bp, Homo sapiens
tttttgacctcaggctctgtggcagactggggaaaatggggcctggcatcattttccctgtcaatgggaggggc

SEQ ID NO: 140983 - DNA, 76 bp, Homo sapiens
tctgtggcagactggggaaaatggggcctggcatcattttccctgtcaatgggaggggctgttccatgcagggtgg

SEQ ID NO: 140984 - DNA, 72 bp, Homo sapiens
agactggggaaaatggggcctggcatcattttccctgtcaatgggaggggctgttccatgcagggtgggagg

SEQ ID NO: 140985 - DNA, 76 bp, Homo sapiens
gcatcattttccctgtcaatgggaggggctgttccatgcagggtgggaggggaccaagttagcagagagtagccaa

SEQ ID NO: 140986 - DNA, 72 bp, Homo sapiens
attttccctgtcaatgggaggggctgttccatgcagggtgggaggggaccaagttagcagagagtagccaag

SEQ ID NO: 140987 - DNA, 73 bp, Homo sapiens
aatgggaggggctgttccatgcagggtgggaggggaccaagttagcagagagtagccaaggatccttgcttct

SEQ ID NO: 140988 - DNA, 75 bp, Homo sapiens
agggtgggaggggaccaagttagcagagagtagccaaggatccttgcttcttcctttctagtgtgctgtcatcca

SEQ ID NO: 140989 - DNA, 80 bp, Homo sapiens
ggaccaagttagcagagagtagccaaggatccttgcttcttcctttctagtgtgctgtcatccaagcaggctcctggctg

SEQ ID NO: 140990 - DNA, 79 bp, Homo sapiens
aagttagcagagagtagccaaggatccttgcttcttcctttctagtgtgctgtcatccaagcaggctcctggctgtagg

SEQ ID NO: 140991 - DNA, 78 bp, Homo sapiens
agtagccaaggatccttgcttcttcctttctagtgtgctgtcatccaagcaggctcctggctgtagggatgggccttg

SEQ ID NO: 140992 - DNA, 77 bp, Homo sapiens
atccttgcttcttcctttctagtgtgctgtcatccaagcaggctcctggctgtagggatgggccttggggaagaatc

SEQ ID NO: 140993 - DNA, 81 bp, Homo sapiens
tagtgtgctgtcatccaagcaggctcctggctgtagggatgggccttggggaagaatcttctttgaaagcatctatgataa

SEQ ID NO: 140994 - DNA, 80 bp, Homo sapiens
tgtcatccaagcaggctcctggctgtagggatgggccttggggaagaatcttctttgaaagcatctatgataactgagaa

SEQ ID NO: 140995 - DNA, 76 bp, Homo sapiens
ctcctggctgtagggatgggccttggggaagaatcttctttgaaagcatctatgataactgagaagtcatccctag

SEQ ID NO: 140996 - DNA, 75 bp, Homo sapiens
tagggatgggccttggggaagaatcttctttgaaagcatctatgataactgagaagtcatccctagttggagaaa

SEQ ID NO: 140997 - DNA, 80 bp, Homo sapiens
atctatgataactgagaagtcatccctagttggagaaatccagtaatgagcagaaggaggaagcaagtgaggacagaggc

SEQ ID NO: 140998 - DNA, 80 bp, Homo sapiens
tgagaagtcatccctagttggagaaatccagtaatgagcagaaggaggaagcaagtgaggacagaggccattgtattaca

SEQ ID NO: 140999 - DNA, 78 bp, Homo sapiens
atccctagttggagaaatccagtaatgagcagaaggaggaagcaagtgaggacagaggccattgtattacagtgtcac

SEQ ID NO: 141000 - DNA, 80 bp, Homo sapiens
agaaatccagtaatgagcagaaggaggaagcaagtgaggacagaggccattgtattacagtgtcacgcagagggccctca

SEQ ID NO: 141001 - DNA, 80 bp, Homo sapiens
agtaatgagcagaaggaggaagcaagtgaggacagaggccattgtattacagtgtcacgcagagggccctcaatgatggg

SEQ ID NO: 141002 - DNA, 78 bp, Homo sapiens
agaaggaggaagcaagtgaggacagaggccattgtattacagtgtcacgcagagggccctcaatgatggggcattggg

SEQ ID NO: 141003 - DNA, 79 bp, Homo sapiens
aagcaagtgaggacagaggccattgtattacagtgtcacgcagagggccctcaatgatggggcattggggaaggctgta

SEQ ID NO: 141004 - DNA, 82 bp, Homo sapiens
acagaggccattgtattacagtgtcacgcagagggccctcaatgatggggcattggggaaggctgtagacatagtcatcaga

SEQ ID NO: 141005 - DNA, 81 bp, Homo sapiens
attgtattacagtgtcacgcagagggccctcaatgatggggcattggggaaggctgtagacatagtcatcagaacatcctg

SEQ ID NO: 141006 - DNA, 82 bp, Homo sapiens
agtgtcacgcagagggccctcaatgatggggcattggggaaggctgtagacatagtcatcagaacatcctggcctggcataa

SEQ ID NO: 141007 - DNA, 78 bp, Homo sapiens
agggccctcaatgatggggcattggggaaggctgtagacatagtcatcagaacatcctggcctggcataagctgggtt

SEQ ID NO: 141008 - DNA, 79 bp, Homo sapiens
cctcaatgatggggcattggggaaggctgtagacatagtcatcagaacatcctggcctggcataagctgggttttctcc

SEQ ID NO: 141009 - DNA, 76 bp, Homo sapiens
attggggaaggctgtagacatagtcatcagaacatcctggcctggcataagctgggttttctcctgggaccattgg

SEQ ID NO: 141010 - DNA, 79 bp, Homo sapiens
aaggctgtagacatagtcatcagaacatcctggcctggcataagctgggttttctcctgggaccattggtcctcagcag

SEQ ID NO: 141011 - DNA, 77 bp, Homo sapiens
acatagtcatcagaacatcctggcctggcataagctgggttttctcctgggaccattggtcctcagcaggagttctt

SEQ ID NO: 141012 - DNA, 78 bp, Homo sapiens
atcagaacatcctggcctggcataagctgggttttctcctgggaccattggtcctcagcaggagttctttgcatgagt

SEQ ID NO: 141013 - DNA, 78 bp, Homo sapiens
ataagctgggttttctcctgggaccattggtcctcagcaggagttctttgcatgagttgctcaggggcaagggctgca

SEQ ID NO: 141014 - DNA, 79 bp, Homo sapiens
accattggtcctcagcaggagttctttgcatgagttgctcaggggcaagggctgcaagtgggctgtgcttaggagaaag

SEQ ID NO: 141015 - DNA, 80 bp, Homo sapiens
agttctttgcatgagttgctcaggggcaagggctgcaagtgggctgtgcttaggagaaagtgacacctggcagtgaggga

SEQ ID NO: 141016 - DNA, 79 bp, Homo sapiens
gggcaagggctgcaagtgggctgtgcttaggagaaagtgacacctggcagtgagggaagatggtgagcattattagcct

SEQ ID NO: 141017 - DNA, 80 bp, Homo sapiens
ctgcaagtgggctgtgcttaggagaaagtgacacctggcagtgagggaagatggtgagcattattagcctttgttgtcca

SEQ ID NO: 141018 - DNA, 80 bp, Homo sapiens
ctgtgcttaggagaaagtgacacctggcagtgagggaagatggtgagcattattagcctttgttgtccagcatggccttc

SEQ ID NO: 141019 - DNA, 79 bp, Homo sapiens
ttaggagaaagtgacacctggcagtgagggaagatggtgagcattattagcctttgttgtccagcatggccttcttgtc

SEQ ID NO: 141020 - DNA, 82 bp, Homo sapiens
agtgacacctggcagtgagggaagatggtgagcattattagcctttgttgtccagcatggccttcttgtcctgtctgctctg

SEQ ID NO: 141021 - DNA, 81 bp, Homo sapiens
agtgagggaagatggtgagcattattagcctttgttgtccagcatggccttcttgtcctgtctgctctggagaggagcctg

SEQ ID NO: 141022 - DNA, 81 bp, Homo sapiens
aagatggtgagcattattagcctttgttgtccagcatggccttcttgtcctgtctgctctggagaggagcctgtgggacca

SEQ ID NO: 141023 - DNA, 79 bp, Homo sapiens
attattagcctttgttgtccagcatggccttcttgtcctgtctgctctggagaggagcctgtgggaccagtcctgcctg

SEQ ID NO: 141024 - DNA, 80 bp, Homo sapiens
tttgttgtccagcatggccttcttgtcctgtctgctctggagaggagcctgtgggaccagtcctgcctggggagggcata

SEQ ID NO: 141025 - DNA, 80 bp, Homo sapiens
tccagcatggccttcttgtcctgtctgctctggagaggagcctgtgggaccagtcctgcctggggagggcatacccacac

SEQ ID NO: 141026 - DNA, 80 bp, Homo sapiens
ttcttgtcctgtctgctctggagaggagcctgtgggaccagtcctgcctggggagggcatacccacacgtgccagctgat

SEQ ID NO: 141027 - DNA, 83 bp, Homo sapiens
tgctctggagaggagcctgtgggaccagtcctgcctggggagggcatacccacacgtgccagctgattctgactctgaataca

SEQ ID NO: 141028 - DNA, 82 bp, Homo sapiens
agaggagcctgtgggaccagtcctgcctggggagggcatacccacacgtgccagctgattctgactctgaatacatcatgtc

SEQ ID NO: 141029 - DNA, 81 bp, Homo sapiens
tgtgggaccagtcctgcctggggagggcatacccacacgtgccagctgattctgactctgaatacatcatgtccggacttg

SEQ ID NO: 141030 - DNA, 78 bp, Homo sapiens
ctgcctggggagggcatacccacacgtgccagctgattctgactctgaatacatcatgtccggacttgggggtgtttc

SEQ ID NO: 141031 - DNA, 78 bp, Homo sapiens
agggcatacccacacgtgccagctgattctgactctgaatacatcatgtccggacttgggggtgtttctgcagaaaaa

SEQ ID NO: 141032 - DNA, 77 bp, Homo sapiens
atacccacacgtgccagctgattctgactctgaatacatcatgtccggacttgggggtgtttctgcagaaaaaggag

SEQ ID NO: 141033 - DNA, 75 bp, Homo sapiens
ccagctgattctgactctgaatacatcatgtccggacttgggggtgtttctgcagaaaaaggaggttgtttttca

SEQ ID NO: 141034 - DNA, 72 bp, Homo sapiens
attctgactctgaatacatcatgtccggacttgggggtgtttctgcagaaaaaggaggttgtttttcagcct

SEQ ID NO: 141035 - DNA, 76 bp, Homo sapiens
cagaaaaaggaggttgtttttcagccttgaacatcttcaggaggatagagactcttgctcacatattcttagcaaa

SEQ ID NO: 141036 - DNA, 75 bp, Homo sapiens
aaggaggttgtttttcagccttgaacatcttcaggaggatagagactcttgctcacatattcttagcaaagggaa

SEQ ID NO: 141037 - DNA, 79 bp, Homo sapiens
tttttcagccttgaacatcttcaggaggatagagactcttgctcacatattcttagcaaagggaagggtctctcatctc

SEQ ID NO: 141038 - DNA, 78 bp, Homo sapiens
actcttgctcacatattcttagcaaagggaagggtctctcatctccaggccacagagatagttcttccattgccctaa

SEQ ID NO: 141039 - DNA, 76 bp, Homo sapiens
acatattcttagcaaagggaagggtctctcatctccaggccacagagatagttcttccattgccctaagaggctag

SEQ ID NO: 141040 - DNA, 76 bp, Homo sapiens
ttcttagcaaagggaagggtctctcatctccaggccacagagatagttcttccattgccctaagaggctaggctaa

SEQ ID NO: 141041 - DNA, 76 bp, Homo sapiens
aagggtctctcatctccaggccacagagatagttcttccattgccctaagaggctaggctaaccctcttgacataa

SEQ ID NO: 141042 - DNA, 77 bp, Homo sapiens
atctccaggccacagagatagttcttccattgccctaagaggctaggctaaccctcttgacataacttagacagcaa

SEQ ID NO: 141043 - DNA, 78 bp, Homo sapiens
cacagagatagttcttccattgccctaagaggctaggctaaccctcttgacataacttagacagcaaagcacttcatc

SEQ ID NO: 141044 - DNA, 76 bp, Homo sapiens
atagttcttccattgccctaagaggctaggctaaccctcttgacataacttagacagcaaagcacttcatcctgta

SEQ ID NO: 141045 - DNA, 76 bp, Homo sapiens
attgccctaagaggctaggctaaccctcttgacataacttagacagcaaagcacttcatcctgtagttgggctctg

SEQ ID NO: 141046 - DNA, 76 bp, Homo sapiens
taagaggctaggctaaccctcttgacataacttagacagcaaagcacttcatcctgtagttgggctctgtcacctt

SEQ ID NO: 141047 - DNA, 76 bp, Homo sapiens
ctaaccctcttgacataacttagacagcaaagcacttcatcctgtagttgggctctgtcacctttctcttcagttg

SEQ ID NO: 141048 - DNA, 77 bp, Homo sapiens
cataacttagacagcaaagcacttcatcctgtagttgggctctgtcacctttctcttcagttggccacattctcgtt

SEQ ID NO: 141049 - DNA, 77 bp, Homo sapiens
acttcatcctgtagttgggctctgtcacctttctcttcagttggccacattctcgtttcctccatcctgctatgctt

SEQ ID NO: 141050 - DNA, 79 bp, Homo sapiens
atcctgtagttgggctctgtcacctttctcttcagttggccacattctcgtttcctccatcctgctatgctttgtgtgc

SEQ ID NO: 141051 - DNA, 80 bp, Homo sapiens
tctgtcacctttctcttcagttggccacattctcgtttcctccatcctgctatgctttgtgtgctcgggctgtgtgtggg

SEQ ID NO: 141052 - DNA, 76 bp, Homo sapiens
tttctcttcagttggccacattctcgtttcctccatcctgctatgctttgtgtgctcgggctgtgtgtggggtttt

SEQ ID NO: 141053 - DNA, 76 bp, Homo sapiens
ttcagttggccacattctcgtttcctccatcctgctatgctttgtgtgctcgggctgtgtgtggggtttttccctg

SEQ ID NO: 141054 - DNA, 73 bp, Homo sapiens
attctcgtttcctccatcctgctatgctttgtgtgctcgggctgtgtgtggggtttttccctggtggaaggaa

SEQ ID NO: 141055 - DNA, 78 bp, Homo sapiens
tccatcctgctatgctttgtgtgctcgggctgtgtgtggggtttttccctggtggaaggaagcccagctgtgtattga

SEQ ID NO: 141056 - DNA, 75 bp, Homo sapiens
tatgctttgtgtgctcgggctgtgtgtggggtttttccctggtggaaggaagcccagctgtgtattgaatgtcct

SEQ ID NO: 141057 - DNA, 75 bp, Homo sapiens
tttgtgtgctcgggctgtgtgtggggtttttccctggtggaaggaagcccagctgtgtattgaatgtccttcatg

SEQ ID NO: 141058 - DNA, 78 bp, Homo sapiens
tgtgtgtggggtttttccctggtggaaggaagcccagctgtgtattgaatgtccttcatgtgttgtgtgtggctcaga

SEQ ID NO: 141059 - DNA, 80 bp, Homo sapiens
tccctggtggaaggaagcccagctgtgtattgaatgtccttcatgtgttgtgtgtggctcagaaagcctgtcacttggcc

SEQ ID NO: 141060 - DNA, 82 bp, Homo sapiens
aaggaagcccagctgtgtattgaatgtccttcatgtgttgtgtgtggctcagaaagcctgtcacttggcccctgtgctctga

SEQ ID NO: 141061 - DNA, 82 bp, Homo sapiens
tgtgtattgaatgtccttcatgtgttgtgtgtggctcagaaagcctgtcacttggcccctgtgctctgagccgtgagggtgg

SEQ ID NO: 141062 - DNA, 79 bp, Homo sapiens
tgttgtgtgtggctcagaaagcctgtcacttggcccctgtgctctgagccgtgagggtggggaggtggctgttccatta

SEQ ID NO: 141063 - DNA, 73 bp, Homo sapiens
acttggcccctgtgctctgagccgtgagggtggggaggtggctgttccattaaagtgggagtattggatggcc

SEQ ID NO: 141064 - DNA, 75 bp, Homo sapiens
tgtgctctgagccgtgagggtggggaggtggctgttccattaaagtgggagtattggatggccctcttgaaacta

SEQ ID NO: 141065 - DNA, 69 bp, Homo sapiens
cgtgagggtggggaggtggctgttccattaaagtgggagtattggatggccctcttgaaactagaattt

SEQ ID NO: 141066 - DNA, 72 bp, Homo sapiens
tgttccattaaagtgggagtattggatggccctcttgaaactagaattttgccttttttagtatgcagtata

SEQ ID NO: 141067 - DNA, 69 bp, Homo sapiens
aagtgggagtattggatggccctcttgaaactagaattttgccttttttagtatgcagtataaagtttc

SEQ ID NO: 141068 - DNA, 71 bp, Homo sapiens
ttttgccttttttagtatgcagtataaagtttccagcatctattggtaacacaaagatttgctggttttta

SEQ ID NO: 141069 - DNA, 74 bp, Homo sapiens
gtatgcagtataaagtttccagcatctattggtaacacaaagatttgctggtttttaaaataatacagtaagca

SEQ ID NO: 141070 - DNA, 71 bp, Homo sapiens
ccagcatctattggtaacacaaagatttgctggtttttaaaataatacagtaagcataagtatgtaagttt

SEQ ID NO: 141071 - DNA, 69 bp, Homo sapiens
tggtaacacaaagatttgctggtttttaaaataatacagtaagcataagtatgtaagtttttagaattg

SEQ ID NO: 141072 - DNA, 69 bp, Homo sapiens
caaagatttgctggtttttaaaataatacagtaagcataagtatgtaagtttttagaattggtactaga

SEQ ID NO: 141073 - DNA, 71 bp, Homo sapiens
gtatgtaagtttttagaattggtactagaagttggacagctagttattctcgagaactttatttcactaga

SEQ ID NO: 141074 - DNA, 72 bp, Homo sapiens
gtactagaagttggacagctagttattctcgagaactttatttcactagaaaaatatactaattggaaagca

SEQ ID NO: 141075 - DNA, 71 bp, Homo sapiens
ggacagctagttattctcgagaactttatttcactagaaaaatatactaattggaaagcagtttccaggag

SEQ ID NO: 141076 - DNA, 70 bp, Homo sapiens
gttattctcgagaactttatttcactagaaaaatatactaattggaaagcagtttccaggagttaactca

SEQ ID NO: 141077 - DNA, 69 bp, Homo sapiens
tcgagaactttatttcactagaaaaatatactaattggaaagcagtttccaggagttaactcagtttaa

SEQ ID NO: 141078 - DNA, 70 bp, Homo sapiens
cactagaaaaatatactaattggaaagcagtttccaggagttaactcagtttaattttcagtctcagtta

SEQ ID NO: 141079 - DNA, 70 bp, Homo sapiens
atatactaattggaaagcagtttccaggagttaactcagtttaattttcagtctcagttattttagcctg

SEQ ID NO: 141080 - DNA, 70 bp, Homo sapiens
ctaattggaaagcagtttccaggagttaactcagtttaattttcagtctcagttattttagcctgttgag

SEQ ID NO: 141081 - DNA, 71 bp, Homo sapiens
agtttccaggagttaactcagtttaattttcagtctcagttattttagcctgttgagtttttgatggcaca

SEQ ID NO: 141082 - DNA, 75 bp, Homo sapiens
ttaattttcagtctcagttattttagcctgttgagtttttgatggcacacctttggagagatggccacgcctgat

SEQ ID NO: 141083 - DNA, 76 bp, Homo sapiens
agtctcagttattttagcctgttgagtttttgatggcacacctttggagagatggccacgcctgattcccatttca

SEQ ID NO: 141084 - DNA, 73 bp, Homo sapiens
agttattttagcctgttgagtttttgatggcacacctttggagagatggccacgcctgattcccatttcaggg

SEQ ID NO: 141085 - DNA, 76 bp, Homo sapiens
ttgagtttttgatggcacacctttggagagatggccacgcctgattcccatttcaggggcatcagaccataccttt

SEQ ID NO: 141086 - DNA, 75 bp, Homo sapiens
tttttgatggcacacctttggagagatggccacgcctgattcccatttcaggggcatcagaccatacctttttaa

SEQ ID NO: 141087 - DNA, 75 bp, Homo sapiens
ctttggagagatggccacgcctgattcccatttcaggggcatcagaccatacctttttaagaagctccgtgaatc

SEQ ID NO: 141088 - DNA, 77 bp, Homo sapiens
agatggccacgcctgattcccatttcaggggcatcagaccatacctttttaagaagctccgtgaatctagtcatcta

SEQ ID NO: 141089 - DNA, 75 bp, Homo sapiens
ctgattcccatttcaggggcatcagaccatacctttttaagaagctccgtgaatctagtcatctacccttcatcc

SEQ ID NO: 141090 - DNA, 73 bp, Homo sapiens
atcagaccatacctttttaagaagctccgtgaatctagtcatctacccttcatcctgggcgaacagccaaaaa

SEQ ID NO: 141091 - DNA, 71 bp, Homo sapiens
atacctttttaagaagctccgtgaatctagtcatctacccttcatcctgggcgaacagccaaaaagagaag

SEQ ID NO: 141092 - DNA, 72 bp, Homo sapiens
tttaagaagctccgtgaatctagtcatctacccttcatcctgggcgaacagccaaaaagagaaggggacaag

SEQ ID NO: 141093 - DNA, 71 bp, Homo sapiens
tccgtgaatctagtcatctacccttcatcctgggcgaacagccaaaaagagaaggggacaaggtgtctttt

SEQ ID NO: 141094 - DNA, 72 bp, Homo sapiens
tagtcatctacccttcatcctgggcgaacagccaaaaagagaaggggacaaggtgtctttttctccttctca

SEQ ID NO: 141095 - DNA, 73 bp, Homo sapiens
ttcatcctgggcgaacagccaaaaagagaaggggacaaggtgtctttttctccttctcactggggtgacatga

SEQ ID NO: 141096 - DNA, 70 bp, Homo sapiens
gaacagccaaaaagagaaggggacaaggtgtctttttctccttctcactggggtgacatgaattctttta

SEQ ID NO: 141097 - DNA, 67 bp, Homo sapiens
aaaaagagaaggggacaaggtgtctttttctccttctcactggggtgacatgaattcttttagttaa

SEQ ID NO: 141098 - DNA, 71 bp, Homo sapiens
gtctttttctccttctcactggggtgacatgaattcttttagttaatggctgtttgcaaattctaaactaa

SEQ ID NO: 141099 - DNA, 72 bp, Homo sapiens
ctccttctcactggggtgacatgaattcttttagttaatggctgtttgcaaattctaaactaatgaaatact

SEQ ID NO: 141100 - DNA, 74 bp, Homo sapiens
gggtgacatgaattcttttagttaatggctgtttgcaaattctaaactaatgaaatacttagcagctaacatgt

SEQ ID NO: 141101 - DNA, 74 bp, Homo sapiens
gaattcttttagttaatggctgtttgcaaattctaaactaatgaaatacttagcagctaacatgttcaatctag

SEQ ID NO: 141102 - DNA, 77 bp, Homo sapiens
tagttaatggctgtttgcaaattctaaactaatgaaatacttagcagctaacatgttcaatctagtaatgatgagtt

SEQ ID NO: 141103 - DNA, 78 bp, Homo sapiens
ggctgtttgcaaattctaaactaatgaaatacttagcagctaacatgttcaatctagtaatgatgagtttaaatctca

SEQ ID NO: 141104 - DNA, 78 bp, Homo sapiens
ctaatgaaatacttagcagctaacatgttcaatctagtaatgatgagtttaaatctcaattgacagtaatgttttaga

SEQ ID NO: 141105 - DNA, 77 bp, Homo sapiens
agcagctaacatgttcaatctagtaatgatgagtttaaatctcaattgacagtaatgttttagataaacaggcccag

SEQ ID NO: 141106 - DNA, 75 bp, Homo sapiens
gagtttaaatctcaattgacagtaatgttttagataaacaggcccagtaattcagttgatgaactgtatatcttc

SEQ ID NO: 141107 - DNA, 76 bp, Homo sapiens
cagtaatgttttagataaacaggcccagtaattcagttgatgaactgtatatcttctcagtctagatttgtaaatg

SEQ ID NO: 141108 - DNA, 74 bp, Homo sapiens
gttttagataaacaggcccagtaattcagttgatgaactgtatatcttctcagtctagatttgtaaatgtttaa

SEQ ID NO: 141109 - DNA, 76 bp, Homo sapiens
caggcccagtaattcagttgatgaactgtatatcttctcagtctagatttgtaaatgtttaatgaattcagggtta

SEQ ID NO: 141110 - DNA, 76 bp, Homo sapiens
tgatgaactgtatatcttctcagtctagatttgtaaatgtttaatgaattcagggttataagcatagttctttaag

SEQ ID NO: 141111 - DNA, 74 bp, Homo sapiens
tcttctcagtctagatttgtaaatgtttaatgaattcagggttataagcatagttctttaagtaagattccaga

SEQ ID NO: 141112 - DNA, 74 bp, Homo sapiens
aaatgtttaatgaattcagggttataagcatagttctttaagtaagattccagatagttgatttgcaaccagca

SEQ ID NO: 141113 - DNA, 76 bp, Homo sapiens
taatgaattcagggttataagcatagttctttaagtaagattccagatagttgatttgcaaccagcagtctaccta

SEQ ID NO: 141114 - DNA, 76 bp, Homo sapiens
agggttataagcatagttctttaagtaagattccagatagttgatttgcaaccagcagtctacctatgaatgtatc

SEQ ID NO: 141115 - DNA, 74 bp, Homo sapiens
tagttctttaagtaagattccagatagttgatttgcaaccagcagtctacctatgaatgtatcccaaaccttta

SEQ ID NO: 141116 - DNA, 74 bp, Homo sapiens
tttaagtaagattccagatagttgatttgcaaccagcagtctacctatgaatgtatcccaaacctttagaagat

SEQ ID NO: 141117 - DNA, 73 bp, Homo sapiens
cagatagttgatttgcaaccagcagtctacctatgaatgtatcccaaacctttagaagattggaaaagatttt

SEQ ID NO: 141118 - DNA, 72 bp, Homo sapiens
agttgatttgcaaccagcagtctacctatgaatgtatcccaaacctttagaagattggaaaagatttttgaa

SEQ ID NO: 141119 - DNA, 71 bp, Homo sapiens
caaccagcagtctacctatgaatgtatcccaaacctttagaagattggaaaagatttttgaaataatgatt

SEQ ID NO: 141120 - DNA, 69 bp, Homo sapiens
tctacctatgaatgtatcccaaacctttagaagattggaaaagatttttgaaataatgatttagttttg

SEQ ID NO: 141121 - DNA, 66 bp, Homo sapiens
aatgtatcccaaacctttagaagattggaaaagatttttgaaataatgatttagttttgtaggaaa

SEQ ID NO: 141122 - DNA, 63 bp, Homo sapiens
aaacctttagaagattggaaaagatttttgaaataatgatttagttttgtaggaaaaacaccc

SEQ ID NO: 141123 - DNA, 64 bp, Homo sapiens
ttttgaaataatgatttagttttgtaggaaaaacacccccttgaaaattaattcggttgaccca

SEQ ID NO: 141124 - DNA, 63 bp, Homo sapiens
atgatttagttttgtaggaaaaacacccccttgaaaattaattcggttgacccagtaacattt

SEQ ID NO: 141125 - DNA, 63 bp, Homo sapiens
aaacacccccttgaaaattaattcggttgacccagtaacattttttaaaacaattggtggctc

SEQ ID NO: 141126 - DNA, 66 bp, Homo sapiens
aattaattcggttgacccagtaacattttttaaaacaattggtggctccaaaaggcctgccaacaa

SEQ ID NO: 141127 - DNA, 67 bp, Homo sapiens
ttttttaaaacaattggtggctccaaaaggcctgccaacaaagaaaagtccaaattatctagtggga

SEQ ID NO: 141128 - DNA, 70 bp, Homo sapiens
taaaacaattggtggctccaaaaggcctgccaacaaagaaaagtccaaattatctagtgggacattttga

SEQ ID NO: 141129 - DNA, 70 bp, Homo sapiens
gctccaaaaggcctgccaacaaagaaaagtccaaattatctagtgggacattttgaatgttttatgttta

SEQ ID NO: 141130 - DNA, 69 bp, Homo sapiens
gcctgccaacaaagaaaagtccaaattatctagtgggacattttgaatgttttatgtttattttgggtc

SEQ ID NO: 141131 - DNA, 68 bp, Homo sapiens
caacaaagaaaagtccaaattatctagtgggacattttgaatgttttatgtttattttgggtccactg

SEQ ID NO: 141132 - DNA, 69 bp, Homo sapiens
tccaaattatctagtgggacattttgaatgttttatgtttattttgggtccactgtaaactttggttca

SEQ ID NO: 141133 - DNA, 66 bp, Homo sapiens
ctagtgggacattttgaatgttttatgtttattttgggtccactgtaaactttggttcaaaaaaga

SEQ ID NO: 141134 - DNA, 66 bp, Homo sapiens
gacattttgaatgttttatgtttattttgggtccactgtaaactttggttcaaaaaagaatttgaa

SEQ ID NO: 141135 - DNA, 64 bp, Homo sapiens
ttatgtttattttgggtccactgtaaactttggttcaaaaaagaatttgaatttaaagaattta

SEQ ID NO: 141136 - DNA, 63 bp, Homo sapiens
tttattttgggtccactgtaaactttggttcaaaaaagaatttgaatttaaagaatttaccat

SEQ ID NO: 141137 - DNA, 66 bp, Homo sapiens
atttaaagaatttaccattatttaaattattaccaagtttttacattttcatgatggtattttcca

SEQ ID NO: 141138 - DNA, 70 bp, Homo sapiens
gaatttaccattatttaaattattaccaagtttttacattttcatgatggtattttccaggtatgaatga

SEQ ID NO: 141139 - DNA, 69 bp, Homo sapiens
tttaaattattaccaagtttttacattttcatgatggtattttccaggtatgaatgaaacatgactttt

SEQ ID NO: 141140 - DNA, 72 bp, Homo sapiens
taccaagtttttacattttcatgatggtattttccaggtatgaatgaaacatgactttttgattgtggtact

SEQ ID NO: 141141 - DNA, 74 bp, Homo sapiens
tttacattttcatgatggtattttccaggtatgaatgaaacatgactttttgattgtggtacttcctgtatccc

SEQ ID NO: 141142 - DNA, 74 bp, Homo sapiens
ttttcatgatggtattttccaggtatgaatgaaacatgactttttgattgtggtacttcctgtatcccctgtag

SEQ ID NO: 141143 - DNA, 73 bp, Homo sapiens
tattttccaggtatgaatgaaacatgactttttgattgtggtacttcctgtatcccctgtagtgccaaaacca

SEQ ID NO: 141144 - DNA, 74 bp, Homo sapiens
tatgaatgaaacatgactttttgattgtggtacttcctgtatcccctgtagtgccaaaaccagtgatactttat

SEQ ID NO: 141145 - DNA, 72 bp, Homo sapiens
aaacatgactttttgattgtggtacttcctgtatcccctgtagtgccaaaaccagtgatactttatttgctc

SEQ ID NO: 141146 - DNA, 77 bp, Homo sapiens
ttttgattgtggtacttcctgtatcccctgtagtgccaaaaccagtgatactttatttgctcctatggcagctcata

SEQ ID NO: 141147 - DNA, 76 bp, Homo sapiens
tggtacttcctgtatcccctgtagtgccaaaaccagtgatactttatttgctcctatggcagctcatagaggtaac

SEQ ID NO: 141148 - DNA, 75 bp, Homo sapiens
tatcccctgtagtgccaaaaccagtgatactttatttgctcctatggcagctcatagaggtaaccgaagtgattt

SEQ ID NO: 141149 - DNA, 75 bp, Homo sapiens
tgccaaaaccagtgatactttatttgctcctatggcagctcatagaggtaaccgaagtgatttttcctcagtaat

SEQ ID NO: 141150 - DNA, 76 bp, Homo sapiens
tttatttgctcctatggcagctcatagaggtaaccgaagtgatttttcctcagtaattgaaacacatattctctaa

SEQ ID NO: 141151 - DNA, 78 bp, Homo sapiens
tcctatggcagctcatagaggtaaccgaagtgatttttcctcagtaattgaaacacatattctctaaatgccaatgtg

SEQ ID NO: 141152 - DNA, 77 bp, Homo sapiens
agctcatagaggtaaccgaagtgatttttcctcagtaattgaaacacatattctctaaatgccaatgtgtggtgatg

SEQ ID NO: 141153 - DNA, 76 bp, Homo sapiens
ggtaaccgaagtgatttttcctcagtaattgaaacacatattctctaaatgccaatgtgtggtgatgggccctgca

SEQ ID NO: 141154 - DNA, 80 bp, Homo sapiens
taattgaaacacatattctctaaatgccaatgtgtggtgatgggccctgcactgccttcatttctctagggcagtgtctt

SEQ ID NO: 141155 - DNA, 79 bp, Homo sapiens
aaacacatattctctaaatgccaatgtgtggtgatgggccctgcactgccttcatttctctagggcagtgtctttggat

SEQ ID NO: 141156 - DNA, 76 bp, Homo sapiens
aatgtgtggtgatgggccctgcactgccttcatttctctagggcagtgtctttggattgtctagggcctaggtaat

SEQ ID NO: 141157 - DNA, 76 bp, Homo sapiens
atgggccctgcactgccttcatttctctagggcagtgtctttggattgtctagggcctaggtaattctgagaacta

SEQ ID NO: 141158 - DNA, 73 bp, Homo sapiens
actgccttcatttctctagggcagtgtctttggattgtctagggcctaggtaattctgagaactactgtaaac

SEQ ID NO: 141159 - DNA, 72 bp, Homo sapiens
atttctctagggcagtgtctttggattgtctagggcctaggtaattctgagaactactgtaaaccaaccaca

SEQ ID NO: 141160 - DNA, 73 bp, Homo sapiens
tctttggattgtctagggcctaggtaattctgagaactactgtaaaccaaccacagggcactaaagcaatgta

SEQ ID NO: 141161 - DNA, 72 bp, Homo sapiens
tagggcctaggtaattctgagaactactgtaaaccaaccacagggcactaaagcaatgtacacaccactctt

SEQ ID NO: 141162 - DNA, 75 bp, Homo sapiens
taggtaattctgagaactactgtaaaccaaccacagggcactaaagcaatgtacacaccactctttgtgtgtatg

SEQ ID NO: 141163 - DNA, 71 bp, Homo sapiens
aactactgtaaaccaaccacagggcactaaagcaatgtacacaccactctttgtgtgtatggaaggggtta

SEQ ID NO: 141164 - DNA, 72 bp, Homo sapiens
tgtaaaccaaccacagggcactaaagcaatgtacacaccactctttgtgtgtatggaaggggttatataaac

SEQ ID NO: 141165 - DNA, 75 bp, Homo sapiens
acagggcactaaagcaatgtacacaccactctttgtgtgtatggaaggggttatataaacctgggctatgctgga

SEQ ID NO: 141166 - DNA, 76 bp, Homo sapiens
actaaagcaatgtacacaccactctttgtgtgtatggaaggggttatataaacctgggctatgctggacatctaca

SEQ ID NO: 141167 - DNA, 75 bp, Homo sapiens
acaccactctttgtgtgtatggaaggggttatataaacctgggctatgctggacatctacagaagagtattacat

SEQ ID NO: 141168 - DNA, 77 bp, Homo sapiens
tttgtgtgtatggaaggggttatataaacctgggctatgctggacatctacagaagagtattacattcacttgcaaa

SEQ ID NO: 141169 - DNA, 75 bp, Homo sapiens
gggttatataaacctgggctatgctggacatctacagaagagtattacattcacttgcaaagtttacatttttga

SEQ ID NO: 141170 - DNA, 79 bp, Homo sapiens
tgggctatgctggacatctacagaagagtattacattcacttgcaaagtttacatttttgagctcacagttatgaaaaa

SEQ ID NO: 141171 - DNA, 77 bp, Homo sapiens
ggacatctacagaagagtattacattcacttgcaaagtttacatttttgagctcacagttatgaaaaatatgaccca

SEQ ID NO: 141172 - DNA, 74 bp, Homo sapiens
tacattcacttgcaaagtttacatttttgagctcacagttatgaaaaatatgacccacaagtttttcaggcagg

SEQ ID NO: 141173 - DNA, 73 bp, Homo sapiens
tttacatttttgagctcacagttatgaaaaatatgacccacaagtttttcaggcaggtgaggatgggtcttct

SEQ ID NO: 141174 - DNA, 76 bp, Homo sapiens
agttatgaaaaatatgacccacaagtttttcaggcaggtgaggatgggtcttcttgcaaatgcatgagttctgtct

SEQ ID NO: 141175 - DNA, 77 bp, Homo sapiens
aaatatgacccacaagtttttcaggcaggtgaggatgggtcttcttgcaaatgcatgagttctgtcttgagtcctgg

SEQ ID NO: 141176 - DNA, 79 bp, Homo sapiens
aggcaggtgaggatgggtcttcttgcaaatgcatgagttctgtcttgagtcctgggaacttctctgttggttgagtgtg

SEQ ID NO: 141177 - DNA, 79 bp, Homo sapiens
aggatgggtcttcttgcaaatgcatgagttctgtcttgagtcctgggaacttctctgttggttgagtgtgggctcattc

SEQ ID NO: 141178 - DNA, 80 bp, Homo sapiens
ttgcaaatgcatgagttctgtcttgagtcctgggaacttctctgttggttgagtgtgggctcattccctgactctcctaa

SEQ ID NO: 141179 - DNA, 77 bp, Homo sapiens
atgagttctgtcttgagtcctgggaacttctctgttggttgagtgtgggctcattccctgactctcctaatcatgtt

SEQ ID NO: 141180 - DNA, 79 bp, Homo sapiens
tcttgagtcctgggaacttctctgttggttgagtgtgggctcattccctgactctcctaatcatgtttgcgtcagaatg

SEQ ID NO: 141181 - DNA, 80 bp, Homo sapiens
tgggaacttctctgttggttgagtgtgggctcattccctgactctcctaatcatgtttgcgtcagaatgttagcattgta

SEQ ID NO: 141182 - DNA, 79 bp, Homo sapiens
ttctctgttggttgagtgtgggctcattccctgactctcctaatcatgtttgcgtcagaatgttagcattgtaaataaa

SEQ ID NO: 141183 - DNA, 77 bp, Homo sapiens
ttgagtgtgggctcattccctgactctcctaatcatgtttgcgtcagaatgttagcattgtaaataaaagaataggt

SEQ ID NO: 141184 - DNA, 77 bp, Homo sapiens
ctcattccctgactctcctaatcatgtttgcgtcagaatgttagcattgtaaataaaagaataggttgtataataga

SEQ ID NO: 141185 - DNA, 76 bp, Homo sapiens
ctaatcatgtttgcgtcagaatgttagcattgtaaataaaagaataggttgtataatagatacacaacacttgaaa

SEQ ID NO: 141186 - DNA, 73 bp, Homo sapiens
ttgcgtcagaatgttagcattgtaaataaaagaataggttgtataatagatacacaacacttgaaactttact

SEQ ID NO: 141187 - DNA, 69 bp, Homo sapiens
atgttagcattgtaaataaaagaataggttgtataatagatacacaacacttgaaactttactttaaaa

SEQ ID NO: 141188 - DNA, 67 bp, Homo sapiens
ataaaagaataggttgtataatagatacacaacacttgaaactttactttaaaaaaatcgatagttc

SEQ ID NO: 141189 - DNA, 71 bp, Homo sapiens
gaataggttgtataatagatacacaacacttgaaactttactttaaaaaaatcgatagttctacatatata

SEQ ID NO: 141190 - DNA, 71 bp, Homo sapiens
atagatacacaacacttgaaactttactttaaaaaaatcgatagttctacatatatatttagttatatcac

SEQ ID NO: 141191 - DNA, 72 bp, Homo sapiens
cacaacacttgaaactttactttaaaaaaatcgatagttctacatatatatttagttatatcacttgacaga

SEQ ID NO: 141192 - DNA, 72 bp, Homo sapiens
actttactttaaaaaaatcgatagttctacatatatatttagttatatcacttgacagatttcttctacaca

SEQ ID NO: 141193 - DNA, 79 bp, Homo sapiens
tcgatagttctacatatatatttagttatatcacttgacagatttcttctacacagtgtggagattgttttataccaca

SEQ ID NO: 141194 - DNA, 76 bp, Homo sapiens
catatatatttagttatatcacttgacagatttcttctacacagtgtggagattgttttataccacagattatttt

SEQ ID NO: 141195 - DNA, 74 bp, Homo sapiens
atcacttgacagatttcttctacacagtgtggagattgttttataccacagattatttttataaagttagtgaa

SEQ ID NO: 141196 - DNA, 74 bp, Homo sapiens
cagatttcttctacacagtgtggagattgttttataccacagattatttttataaagttagtgaatttgaatga

SEQ ID NO: 141197 - DNA, 74 bp, Homo sapiens
cagtgtggagattgttttataccacagattatttttataaagttagtgaatttgaatgattttgtaatcagagc

SEQ ID NO: 141198 - DNA, 75 bp, Homo sapiens
gagattgttttataccacagattatttttataaagttagtgaatttgaatgattttgtaatcagagctaatgagc

SEQ ID NO: 141199 - DNA, 74 bp, Homo sapiens
taccacagattatttttataaagttagtgaatttgaatgattttgtaatcagagctaatgagctttacctttca

SEQ ID NO: 141200 - DNA, 75 bp, Homo sapiens
aagttagtgaatttgaatgattttgtaatcagagctaatgagctttacctttcaagagaaacgtacactggagca

SEQ ID NO: 141201 - DNA, 72 bp, Homo sapiens
aatgagctttacctttcaagagaaacgtacactggagcatgagtggtgtggaacttttacttagtgtttata

SEQ ID NO: 141202 - DNA, 76 bp, Homo sapiens
tttcaagagaaacgtacactggagcatgagtggtgtggaacttttacttagtgtttatatggattcttgtgataca

SEQ ID NO: 141203 - DNA, 78 bp, Homo sapiens
actggagcatgagtggtgtggaacttttacttagtgtttatatggattcttgtgatacactggcagactggagtcaat

SEQ ID NO: 141204 - DNA, 74 bp, Homo sapiens
ttagtgtttatatggattcttgtgatacactggcagactggagtcaatttgcgggtcttttttggccaaaactc

SEQ ID NO: 141205 - DNA, 72 bp, Homo sapiens
atacactggcagactggagtcaatttgcgggtcttttttggccaaaactccacttgtggttgtgtaggacag

SEQ ID NO: 141206 - DNA, 73 bp, Homo sapiens
agactggagtcaatttgcgggtcttttttggccaaaactccacttgtggttgtgtaggacagtgatattcagc

SEQ ID NO: 141207 - DNA, 74 bp, Homo sapiens
agtcaatttgcgggtcttttttggccaaaactccacttgtggttgtgtaggacagtgatattcagctcagcttc

SEQ ID NO: 141208 - DNA, 76 bp, Homo sapiens
tcttttttggccaaaactccacttgtggttgtgtaggacagtgatattcagctcagcttcttgtggattgggagga

SEQ ID NO: 141209 - DNA, 79 bp, Homo sapiens
acttgtggttgtgtaggacagtgatattcagctcagcttcttgtggattgggaggagagagggcctgcaatgtgtttta

SEQ ID NO: 141210 - DNA, 81 bp, Homo sapiens
ttgtgtaggacagtgatattcagctcagcttcttgtggattgggaggagagagggcctgcaatgtgttttacattggtgct

SEQ ID NO: 141211 - DNA, 81 bp, Homo sapiens
acagtgatattcagctcagcttcttgtggattgggaggagagagggcctgcaatgtgttttacattggtgcttcctcctga

SEQ ID NO: 141212 - DNA, 79 bp, Homo sapiens
attcagctcagcttcttgtggattgggaggagagagggcctgcaatgtgttttacattggtgcttcctcctgagatttc

SEQ ID NO: 141213 - DNA, 73 bp, Homo sapiens
attgggaggagagagggcctgcaatgtgttttacattggtgcttcctcctgagatttctgttgaacaaagggt

SEQ ID NO: 141214 - DNA, 73 bp, Homo sapiens
agggcctgcaatgtgttttacattggtgcttcctcctgagatttctgttgaacaaagggttctgaggtcaaaa

SEQ ID NO: 141215 - DNA, 70 bp, Homo sapiens
atgtgttttacattggtgcttcctcctgagatttctgttgaacaaagggttctgaggtcaaaaattagtt

SEQ ID NO: 141216 - DNA, 71 bp, Homo sapiens
tttacattggtgcttcctcctgagatttctgttgaacaaagggttctgaggtcaaaaattagtttgtaagc

SEQ ID NO: 141217 - DNA, 71 bp, Homo sapiens
ttcctcctgagatttctgttgaacaaagggttctgaggtcaaaaattagtttgtaagcctttgccatagga

SEQ ID NO: 141218 - DNA, 73 bp, Homo sapiens
atttctgttgaacaaagggttctgaggtcaaaaattagtttgtaagcctttgccataggacatagtcatgtga

SEQ ID NO: 141219 - DNA, 73 bp, Homo sapiens
ttgaacaaagggttctgaggtcaaaaattagtttgtaagcctttgccataggacatagtcatgtgagagtgtt

SEQ ID NO: 141220 - DNA, 74 bp, Homo sapiens
ttctgaggtcaaaaattagtttgtaagcctttgccataggacatagtcatgtgagagtgtttgggggaacagaa

SEQ ID NO: 141221 - DNA, 72 bp, Homo sapiens
aaaaattagtttgtaagcctttgccataggacatagtcatgtgagagtgtttgggggaacagaaattgtata

SEQ ID NO: 141222 - DNA, 74 bp, Homo sapiens
tttgtaagcctttgccataggacatagtcatgtgagagtgtttgggggaacagaaattgtataggggtgcctat

SEQ ID NO: 141223 - DNA, 72 bp, Homo sapiens
atagtcatgtgagagtgtttgggggaacagaaattgtataggggtgcctattggggtgggatgggactcgaa

SEQ ID NO: 141224 - DNA, 72 bp, Homo sapiens
tgagagtgtttgggggaacagaaattgtataggggtgcctattggggtgggatgggactcgaataagattca

SEQ ID NO: 141225 - DNA, 70 bp, Homo sapiens
tgggggaacagaaattgtataggggtgcctattggggtgggatgggactcgaataagattcaggtacaaa

SEQ ID NO: 141226 - DNA, 68 bp, Homo sapiens
aaattgtataggggtgcctattggggtgggatgggactcgaataagattcaggtacaaaaactttgaa

SEQ ID NO: 141227 - DNA, 70 bp, Homo sapiens
gtataggggtgcctattggggtgggatgggactcgaataagattcaggtacaaaaactttgaaatgagaa

SEQ ID NO: 141228 - DNA, 71 bp, Homo sapiens
ttggggtgggatgggactcgaataagattcaggtacaaaaactttgaaatgagaatctggtggtttgagta

SEQ ID NO: 141229 - DNA, 72 bp, Homo sapiens
atgggactcgaataagattcaggtacaaaaactttgaaatgagaatctggtggtttgagtaatccaccagac

SEQ ID NO: 141230 - DNA, 74 bp, Homo sapiens
tcgaataagattcaggtacaaaaactttgaaatgagaatctggtggtttgagtaatccaccagactgaattatc

SEQ ID NO: 141231 - DNA, 76 bp, Homo sapiens
tcaggtacaaaaactttgaaatgagaatctggtggtttgagtaatccaccagactgaattatctaagatcacatta

SEQ ID NO: 141232 - DNA, 74 bp, Homo sapiens
aaaactttgaaatgagaatctggtggtttgagtaatccaccagactgaattatctaagatcacattatccaggt

SEQ ID NO: 141233 - DNA, 77 bp, Homo sapiens
tgagaatctggtggtttgagtaatccaccagactgaattatctaagatcacattatccaggttggggggcagaatta

SEQ ID NO: 141234 - DNA, 74 bp, Homo sapiens
tggtttgagtaatccaccagactgaattatctaagatcacattatccaggttggggggcagaattacccagtta

SEQ ID NO: 141235 - DNA, 71 bp, Homo sapiens
actgaattatctaagatcacattatccaggttggggggcagaattacccagttaagtaattgttcagaaaa

SEQ ID NO: 141236 - DNA, 70 bp, Homo sapiens
attatctaagatcacattatccaggttggggggcagaattacccagttaagtaattgttcagaaaagtgg

SEQ ID NO: 141237 - DNA, 68 bp, Homo sapiens
atcacattatccaggttggggggcagaattacccagttaagtaattgttcagaaaagtggggagggtg

SEQ ID NO: 141238 - DNA, 70 bp, Homo sapiens
aggttggggggcagaattacccagttaagtaattgttcagaaaagtggggagggtggcatgtggatgcag

SEQ ID NO: 141239 - DNA, 73 bp, Homo sapiens
agaattacccagttaagtaattgttcagaaaagtggggagggtggcatgtggatgcagtgatccaattaaatg

SEQ ID NO: 141240 - DNA, 76 bp, Homo sapiens
acccagttaagtaattgttcagaaaagtggggagggtggcatgtggatgcagtgatccaattaaatggagagctgc

SEQ ID NO: 141241 - DNA, 80 bp, Homo sapiens
taattgttcagaaaagtggggagggtggcatgtggatgcagtgatccaattaaatggagagctgccaggcacattttgtc

SEQ ID NO: 141242 - DNA, 80 bp, Homo sapiens
aaaagtggggagggtggcatgtggatgcagtgatccaattaaatggagagctgccaggcacattttgtcctctctggtca

SEQ ID NO: 141243 - DNA, 83 bp, Homo sapiens
gtggcatgtggatgcagtgatccaattaaatggagagctgccaggcacattttgtcctctctggtcagtgagaatggttgggt

SEQ ID NO: 141244 - DNA, 82 bp, Homo sapiens
atgtggatgcagtgatccaattaaatggagagctgccaggcacattttgtcctctctggtcagtgagaatggttgggttggc

SEQ ID NO: 141245 - DNA, 80 bp, Homo sapiens
atccaattaaatggagagctgccaggcacattttgtcctctctggtcagtgagaatggttgggttggctcgctgcttcaa

SEQ ID NO: 141246 - DNA, 82 bp, Homo sapiens
ttaaatggagagctgccaggcacattttgtcctctctggtcagtgagaatggttgggttggctcgctgcttcaatctgtgga

SEQ ID NO: 141247 - DNA, 83 bp, Homo sapiens
agctgccaggcacattttgtcctctctggtcagtgagaatggttgggttggctcgctgcttcaatctgtggaatcagccagga

SEQ ID NO: 141248 - DNA, 81 bp, Homo sapiens
acattttgtcctctctggtcagtgagaatggttgggttggctcgctgcttcaatctgtggaatcagccaggagcccagtga

SEQ ID NO: 141249 - DNA, 78 bp, Homo sapiens
agaatggttgggttggctcgctgcttcaatctgtggaatcagccaggagcccagtgaggaagctcagaaccccagtaa

SEQ ID NO: 141250 - DNA, 82 bp, Homo sapiens
ggttggctcgctgcttcaatctgtggaatcagccaggagcccagtgaggaagctcagaaccccagtaacagcagagcatctt

SEQ ID NO: 141251 - DNA, 85 bp, Homo sapiens
ctgcttcaatctgtggaatcagccaggagcccagtgaggaagctcagaaccccagtaacagcagagcatctttcagatagctcca

SEQ ID NO: 141252 - DNA, 82 bp, Homo sapiens
atctgtggaatcagccaggagcccagtgaggaagctcagaaccccagtaacagcagagcatctttcagatagctccagagtt

SEQ ID NO: 141253 - DNA, 82 bp, Homo sapiens
aagctcagaaccccagtaacagcagagcatctttcagatagctccagagttttcctgcttttctgaggaagctcagcatcac

SEQ ID NO: 141254 - DNA, 78 bp, Homo sapiens
atagctccagagttttcctgcttttctgaggaagctcagcatcactgccacaatacggaaagtggtcttcattttagc

SEQ ID NO: 141255 - DNA, 75 bp, Homo sapiens
ttcctgcttttctgaggaagctcagcatcactgccacaatacggaaagtggtcttcattttagcctatttatttt

SEQ ID NO: 141256 - DNA, 75 bp, Homo sapiens
cttttctgaggaagctcagcatcactgccacaatacggaaagtggtcttcattttagcctatttatttttaggca

SEQ ID NO: 141257 - DNA, 76 bp, Homo sapiens
ctcagcatcactgccacaatacggaaagtggtcttcattttagcctatttatttttaggcagagagtggatggtta

SEQ ID NO: 141258 - DNA, 72 bp, Homo sapiens
atcactgccacaatacggaaagtggtcttcattttagcctatttatttttaggcagagagtggatggttatt

SEQ ID NO: 141259 - DNA, 70 bp, Homo sapiens
acaatacggaaagtggtcttcattttagcctatttatttttaggcagagagtggatggttatttgtgtgg

SEQ ID NO: 141260 - DNA, 69 bp, Homo sapiens
aagtggtcttcattttagcctatttatttttaggcagagagtggatggttatttgtgtgggacttttgg

SEQ ID NO: 141261 - DNA, 74 bp, Homo sapiens
ttagcctatttatttttaggcagagagtggatggttatttgtgtgggacttttggtggcgatatataatgaata

SEQ ID NO: 141262 - DNA, 72 bp, Homo sapiens
atttttaggcagagagtggatggttatttgtgtgggacttttggtggcgatatataatgaataattaagtta

SEQ ID NO: 141263 - DNA, 75 bp, Homo sapiens
tggttatttgtgtgggacttttggtggcgatatataatgaataattaagttaatttctggtatgcataatggcca

SEQ ID NO: 141264 - DNA, 74 bp, Homo sapiens
atttgtgtgggacttttggtggcgatatataatgaataattaagttaatttctggtatgcataatggccagtcc

SEQ ID NO: 141265 - DNA, 78 bp, Homo sapiens
ttttggtggcgatatataatgaataattaagttaatttctggtatgcataatggccagtcctgaggcccagctgaaga

SEQ ID NO: 141266 - DNA, 77 bp, Homo sapiens
cgatatataatgaataattaagttaatttctggtatgcataatggccagtcctgaggcccagctgaagacctgtccc

SEQ ID NO: 141267 - DNA, 75 bp, Homo sapiens
aatgaataattaagttaatttctggtatgcataatggccagtcctgaggcccagctgaagacctgtcccccagac

SEQ ID NO: 141268 - DNA, 76 bp, Homo sapiens
taagttaatttctggtatgcataatggccagtcctgaggcccagctgaagacctgtcccccagaccctgcccgctg

SEQ ID NO: 141269 - DNA, 80 bp, Homo sapiens
ataatggccagtcctgaggcccagctgaagacctgtcccccagaccctgcccgctggcttcaggctgctgcttctagaca

SEQ ID NO: 141270 - DNA, 78 bp, Homo sapiens
tgaagacctgtcccccagaccctgcccgctggcttcaggctgctgcttctagacagaggtgcactggacgggatagtt

SEQ ID NO: 141271 - DNA, 79 bp, Homo sapiens
tcccccagaccctgcccgctggcttcaggctgctgcttctagacagaggtgcactggacgggatagttttatcaagaga

SEQ ID NO: 141272 - DNA, 79 bp, Homo sapiens
cctgcccgctggcttcaggctgctgcttctagacagaggtgcactggacgggatagttttatcaagagaatccctaatg

SEQ ID NO: 141273 - DNA, 79 bp, Homo sapiens
ggcttcaggctgctgcttctagacagaggtgcactggacgggatagttttatcaagagaatccctaatgtgtcatttta

SEQ ID NO: 141274 - DNA, 76 bp, Homo sapiens
aggctgctgcttctagacagaggtgcactggacgggatagttttatcaagagaatccctaatgtgtcattttaaac

SEQ ID NO: 141275 - DNA, 75 bp, Homo sapiens
tagacagaggtgcactggacgggatagttttatcaagagaatccctaatgtgtcattttaaaccagctgtgcttt

SEQ ID NO: 141276 - DNA, 72 bp, Homo sapiens
aggtgcactggacgggatagttttatcaagagaatccctaatgtgtcattttaaaccagctgtgctttttat

SEQ ID NO: 141277 - DNA, 71 bp, Homo sapiens
acgggatagttttatcaagagaatccctaatgtgtcattttaaaccagctgtgctttttattcattctggt

SEQ ID NO: 141278 - DNA, 75 bp, Homo sapiens
tatcaagagaatccctaatgtgtcattttaaaccagctgtgctttttattcattctggttgagcgtataggttta

SEQ ID NO: 141279 - DNA, 71 bp, Homo sapiens
aatccctaatgtgtcattttaaaccagctgtgctttttattcattctggttgagcgtataggtttacactt

SEQ ID NO: 141280 - DNA, 69 bp, Homo sapiens
aaccagctgtgctttttattcattctggttgagcgtataggtttacactttaccctttttatacttgga

SEQ ID NO: 141281 - DNA, 68 bp, Homo sapiens
ctgtgctttttattcattctggttgagcgtataggtttacactttaccctttttatacttggaataaa

SEQ ID NO: 141282 - DNA, 69 bp, Homo sapiens
cattctggttgagcgtataggtttacactttaccctttttatacttggaataaatttagttccagcaga

SEQ ID NO: 141283 - DNA, 70 bp, Homo sapiens
gagcgtataggtttacactttaccctttttatacttggaataaatttagttccagcagatctagtagcac

SEQ ID NO: 141284 - DNA, 69 bp, Homo sapiens
aggtttacactttaccctttttatacttggaataaatttagttccagcagatctagtagcactccagaa

SEQ ID NO: 141285 - DNA, 68 bp, Homo sapiens
actttaccctttttatacttggaataaatttagttccagcagatctagtagcactccagaaaccaacc

SEQ ID NO: 141286 - DNA, 72 bp, Homo sapiens
tacttggaataaatttagttccagcagatctagtagcactccagaaaccaaccccatctgttccccataaaa

SEQ ID NO: 141287 - DNA, 75 bp, Homo sapiens
tagttccagcagatctagtagcactccagaaaccaaccccatctgttccccataaaaagaacattttctctgctc

SEQ ID NO: 141288 - DNA, 73 bp, Homo sapiens
tccagaaaccaaccccatctgttccccataaaaagaacattttctctgctctccagccacgtgtcttggaatg

SEQ ID NO: 141289 - DNA, 72 bp, Homo sapiens
aaccccatctgttccccataaaaagaacattttctctgctctccagccacgtgtcttggaatgtaattctgt

SEQ ID NO: 141290 - DNA, 73 bp, Homo sapiens
ttccccataaaaagaacattttctctgctctccagccacgtgtcttggaatgtaattctgttgtgcctttgtt

SEQ ID NO: 141291 - DNA, 74 bp, Homo sapiens
ataaaaagaacattttctctgctctccagccacgtgtcttggaatgtaattctgttgtgcctttgtttttatca

SEQ ID NO: 141292 - DNA, 75 bp, Homo sapiens
attttctctgctctccagccacgtgtcttggaatgtaattctgttgtgcctttgtttttatcactctcttcgccc

SEQ ID NO: 141293 - DNA, 74 bp, Homo sapiens
tctccagccacgtgtcttggaatgtaattctgttgtgcctttgtttttatcactctcttcgccccaaaagcaac

SEQ ID NO: 141294 - DNA, 74 bp, Homo sapiens
tgtcttggaatgtaattctgttgtgcctttgtttttatcactctcttcgccccaaaagcaactgctgtaagctt

SEQ ID NO: 141295 - DNA, 72 bp, Homo sapiens
tggaatgtaattctgttgtgcctttgtttttatcactctcttcgccccaaaagcaactgctgtaagcttttt

SEQ ID NO: 141296 - DNA, 70 bp, Homo sapiens
ttgtgcctttgtttttatcactctcttcgccccaaaagcaactgctgtaagcttttttctacttgtcttt

SEQ ID NO: 141297 - DNA, 70 bp, Homo sapiens
tttgtttttatcactctcttcgccccaaaagcaactgctgtaagcttttttctacttgtcttttctagtc

SEQ ID NO: 141298 - DNA, 69 bp, Homo sapiens
actctcttcgccccaaaagcaactgctgtaagcttttttctacttgtcttttctagtccccaacctcta

SEQ ID NO: 141299 - DNA, 66 bp, Homo sapiens
cccaaaagcaactgctgtaagcttttttctacttgtcttttctagtccccaacctctacctttttc

SEQ ID NO: 141300 - DNA, 65 bp, Homo sapiens
aagcaactgctgtaagcttttttctacttgtcttttctagtccccaacctctacctttttccttt

SEQ ID NO: 141301 - DNA, 64 bp, Homo sapiens
tttctacttgtcttttctagtccccaacctctacctttttcctttttcccagccctaatttctg

SEQ ID NO: 141302 - DNA, 69 bp, Homo sapiens
tcttttctagtccccaacctctacctttttcctttttcccagccctaatttctggatgcacttctgtga

SEQ ID NO: 141303 - DNA, 73 bp, Homo sapiens
tttttcccagccctaatttctggatgcacttctgtgatccaggtattttaagaaccagttacctcagacctca

SEQ ID NO: 141304 - DNA, 77 bp, Homo sapiens
atgcacttctgtgatccaggtattttaagaaccagttacctcagacctcatgttgaacagtgtcgccatctgggtcc

SEQ ID NO: 141305 - DNA, 78 bp, Homo sapiens
tctgtgatccaggtattttaagaaccagttacctcagacctcatgttgaacagtgtcgccatctgggtcctcttgata

SEQ ID NO: 141306 - DNA, 76 bp, Homo sapiens
tattttaagaaccagttacctcagacctcatgttgaacagtgtcgccatctgggtcctcttgatactgcagacttt

SEQ ID NO: 141307 - DNA, 80 bp, Homo sapiens
ttacctcagacctcatgttgaacagtgtcgccatctgggtcctcttgatactgcagacttttaacgtacacatgcaggaa

SEQ ID NO: 141308 - DNA, 79 bp, Homo sapiens
tgtcgccatctgggtcctcttgatactgcagacttttaacgtacacatgcaggaaccctgctgagcgtgggcacttgtt

SEQ ID NO: 141309 - DNA, 76 bp, Homo sapiens
tctgggtcctcttgatactgcagacttttaacgtacacatgcaggaaccctgctgagcgtgggcacttgttttaaa

SEQ ID NO: 141310 - DNA, 75 bp, Homo sapiens
cctcttgatactgcagacttttaacgtacacatgcaggaaccctgctgagcgtgggcacttgttttaaagcaaaa

SEQ ID NO: 141311 - DNA, 71 bp, Homo sapiens
agacttttaacgtacacatgcaggaaccctgctgagcgtgggcacttgttttaaagcaaaactcttcccaa

SEQ ID NO: 141312 - DNA, 73 bp, Homo sapiens
ctgagcgtgggcacttgttttaaagcaaaactcttcccaaggactgaagaaagggcttctggcaagctcgtca

SEQ ID NO: 141313 - DNA, 74 bp, Homo sapiens
gcacttgttttaaagcaaaactcttcccaaggactgaagaaagggcttctggcaagctcgtcatggcattgtgg

SEQ ID NO: 141314 - DNA, 74 bp, Homo sapiens
ttttaaagcaaaactcttcccaaggactgaagaaagggcttctggcaagctcgtcatggcattgtggtgggatg

SEQ ID NO: 141315 - DNA, 74 bp, Homo sapiens
aaaactcttcccaaggactgaagaaagggcttctggcaagctcgtcatggcattgtggtgggatgggtctagag

SEQ ID NO: 141316 - DNA, 80 bp, Homo sapiens
aaggactgaagaaagggcttctggcaagctcgtcatggcattgtggtgggatgggtctagagtgtcatctgaatggtgct

SEQ ID NO: 141317 - DNA, 80 bp, Homo sapiens
aagaaagggcttctggcaagctcgtcatggcattgtggtgggatgggtctagagtgtcatctgaatggtgcttcctgtgt

SEQ ID NO: 141318 - DNA, 82 bp, Homo sapiens
ttctggcaagctcgtcatggcattgtggtgggatgggtctagagtgtcatctgaatggtgcttcctgtgttcctctttgaat

SEQ ID NO: 141319 - DNA, 81 bp, Homo sapiens
tcgtcatggcattgtggtgggatgggtctagagtgtcatctgaatggtgcttcctgtgttcctctttgaattctgccattt

SEQ ID NO: 141320 - DNA, 78 bp, Homo sapiens
attgtggtgggatgggtctagagtgtcatctgaatggtgcttcctgtgttcctctttgaattctgccattttcagtat

SEQ ID NO: 141321 - DNA, 81 bp, Homo sapiens
atgggtctagagtgtcatctgaatggtgcttcctgtgttcctctttgaattctgccattttcagtattcttgtgtgtctga

SEQ ID NO: 141322 - DNA, 80 bp, Homo sapiens
agtgtcatctgaatggtgcttcctgtgttcctctttgaattctgccattttcagtattcttgtgtgtctgaataggcaaa

SEQ ID NO: 141323 - DNA, 77 bp, Homo sapiens
ttcctgtgttcctctttgaattctgccattttcagtattcttgtgtgtctgaataggcaaagcgatttaattggctg

SEQ ID NO: 141324 - DNA, 79 bp, Homo sapiens
tctttgaattctgccattttcagtattcttgtgtgtctgaataggcaaagcgatttaattggctggtcttgcacgcaaa

SEQ ID NO: 141325 - DNA, 78 bp, Homo sapiens
tgccattttcagtattcttgtgtgtctgaataggcaaagcgatttaattggctggtcttgcacgcaaattagttccaa

SEQ ID NO: 141326 - DNA, 77 bp, Homo sapiens
ttcagtattcttgtgtgtctgaataggcaaagcgatttaattggctggtcttgcacgcaaattagttccaaagataa

SEQ ID NO: 141327 - DNA, 77 bp, Homo sapiens
ttgtgtgtctgaataggcaaagcgatttaattggctggtcttgcacgcaaattagttccaaagataagctctttgta

SEQ ID NO: 141328 - DNA, 73 bp, Homo sapiens
aataggcaaagcgatttaattggctggtcttgcacgcaaattagttccaaagataagctctttgtaacacatt

SEQ ID NO: 141329 - DNA, 78 bp, Homo sapiens
tcttgcacgcaaattagttccaaagataagctctttgtaacacatttccagtcgctaatgctcaaatgtagaacattc

SEQ ID NO: 141330 - DNA, 75 bp, Homo sapiens
aagataagctctttgtaacacatttccagtcgctaatgctcaaatgtagaacattcctttaaatggcaggataaa

SEQ ID NO: 141331 - DNA, 73 bp, Homo sapiens
atttccagtcgctaatgctcaaatgtagaacattcctttaaatggcaggataaaaaacccactatccaccata

SEQ ID NO: 141332 - DNA, 74 bp, Homo sapiens
taatgctcaaatgtagaacattcctttaaatggcaggataaaaaacccactatccaccatagtgcattttggga

SEQ ID NO: 141333 - DNA, 71 bp, Homo sapiens
aaatgtagaacattcctttaaatggcaggataaaaaacccactatccaccatagtgcattttgggaagatg

SEQ ID NO: 141334 - DNA, 74 bp, Homo sapiens
attcctttaaatggcaggataaaaaacccactatccaccatagtgcattttgggaagatgtctgtagcatatgt

SEQ ID NO: 141335 - DNA, 78 bp, Homo sapiens
ttaaatggcaggataaaaaacccactatccaccatagtgcattttgggaagatgtctgtagcatatgttgctgtgaaa

SEQ ID NO: 141336 - DNA, 76 bp, Homo sapiens
aaaaacccactatccaccatagtgcattttgggaagatgtctgtagcatatgttgctgtgaaattaggccttgtgg

SEQ ID NO: 141337 - DNA, 80 bp, Homo sapiens
actatccaccatagtgcattttgggaagatgtctgtagcatatgttgctgtgaaattaggccttgtgggatatggctgtt

SEQ ID NO: 141338 - DNA, 81 bp, Homo sapiens
atagtgcattttgggaagatgtctgtagcatatgttgctgtgaaattaggccttgtgggatatggctgtttgtcattttga

SEQ ID NO: 141339 - DNA, 79 bp, Homo sapiens
attttgggaagatgtctgtagcatatgttgctgtgaaattaggccttgtgggatatggctgtttgtcattttgatgtat

SEQ ID NO: 141340 - DNA, 67 bp, Homo sapiens
tattttttaaagagccttttttaccagttcaaaaagtttaattaaccagcagtcaccgcatctgaat

SEQ ID NO: 141341 - DNA, 69 bp, Homo sapiens
aagagccttttttaccagttcaaaaagtttaattaaccagcagtcaccgcatctgaatttttgtctctg

SEQ ID NO: 141342 - DNA, 72 bp, Homo sapiens
tttttaccagttcaaaaagtttaattaaccagcagtcaccgcatctgaatttttgtctctggggcatagatg

SEQ ID NO: 141343 - DNA, 74 bp, Homo sapiens
aaaaagtttaattaaccagcagtcaccgcatctgaatttttgtctctggggcatagatggcagaccaagattaa

SEQ ID NO: 141344 - DNA, 76 bp, Homo sapiens
tttaattaaccagcagtcaccgcatctgaatttttgtctctggggcatagatggcagaccaagattaaaagtggta

SEQ ID NO: 141345 - DNA, 79 bp, Homo sapiens
agtcaccgcatctgaatttttgtctctggggcatagatggcagaccaagattaaaagtggtaactcagctatacgagca

SEQ ID NO: 141346 - DNA, 76 bp, Homo sapiens
atttttgtctctggggcatagatggcagaccaagattaaaagtggtaactcagctatacgagcatgggctaccttc

SEQ ID NO: 141347 - DNA, 80 bp, Homo sapiens
ggcatagatggcagaccaagattaaaagtggtaactcagctatacgagcatgggctaccttcctgggctctcctgcagtc

SEQ ID NO: 141348 - DNA, 78 bp, Homo sapiens
atggcagaccaagattaaaagtggtaactcagctatacgagcatgggctaccttcctgggctctcctgcagtcctgta

SEQ ID NO: 141349 - DNA, 77 bp, Homo sapiens
attaaaagtggtaactcagctatacgagcatgggctaccttcctgggctctcctgcagtcctgtagacctgctgttc

SEQ ID NO: 141350 - DNA, 80 bp, Homo sapiens
agtggtaactcagctatacgagcatgggctaccttcctgggctctcctgcagtcctgtagacctgctgttccgcagacca

SEQ ID NO: 141351 - DNA, 81 bp, Homo sapiens
tatacgagcatgggctaccttcctgggctctcctgcagtcctgtagacctgctgttccgcagaccatgggacacaaggtca

SEQ ID NO: 141352 - DNA, 78 bp, Homo sapiens
atgggctaccttcctgggctctcctgcagtcctgtagacctgctgttccgcagaccatgggacacaaggtcagtgtgt

SEQ ID NO: 141353 - DNA, 79 bp, Homo sapiens
tcctgcagtcctgtagacctgctgttccgcagaccatgggacacaaggtcagtgtgttcccagtgagggtcccaagtca

SEQ ID NO: 141354 - DNA, 78 bp, Homo sapiens
tgtagacctgctgttccgcagaccatgggacacaaggtcagtgtgttcccagtgagggtcccaagtcagtcatcttaa

SEQ ID NO: 141355 - DNA, 75 bp, Homo sapiens
acacaaggtcagtgtgttcccagtgagggtcccaagtcagtcatcttaagtgtttgttctctgccccattcagtg

SEQ ID NO: 141356 - DNA, 75 bp, Homo sapiens
gtgtgttcccagtgagggtcccaagtcagtcatcttaagtgtttgttctctgccccattcagtggactgttgact

SEQ ID NO: 141357 - DNA, 78 bp, Homo sapiens
tcccaagtcagtcatcttaagtgtttgttctctgccccattcagtggactgttgacttcagtccctgcaagtgcttta

SEQ ID NO: 141358 - DNA, 76 bp, Homo sapiens
agtcatcttaagtgtttgttctctgccccattcagtggactgttgacttcagtccctgcaagtgctttagcccgag

SEQ ID NO: 141359 - DNA, 77 bp, Homo sapiens
ttctctgccccattcagtggactgttgacttcagtccctgcaagtgctttagcccgagtggggttttctcagagcac

SEQ ID NO: 141360 - DNA, 75 bp, Homo sapiens
agtggactgttgacttcagtccctgcaagtgctttagcccgagtggggttttctcagagcactgccacgagttaa

SEQ ID NO: 141361 - DNA, 75 bp, Homo sapiens
ttgacttcagtccctgcaagtgctttagcccgagtggggttttctcagagcactgccacgagttaagtgtgtgtt

SEQ ID NO: 141362 - DNA, 75 bp, Homo sapiens
tccctgcaagtgctttagcccgagtggggttttctcagagcactgccacgagttaagtgtgtgtttagccaaata

SEQ ID NO: 141363 - DNA, 71 bp, Homo sapiens
aagtgctttagcccgagtggggttttctcagagcactgccacgagttaagtgtgtgtttagccaaataatt

SEQ ID NO: 141364 - DNA, 71 bp, Homo sapiens
gagtggggttttctcagagcactgccacgagttaagtgtgtgtttagccaaataatttctccgtaagggaa

SEQ ID NO: 141365 - DNA, 69 bp, Homo sapiens
gggttttctcagagcactgccacgagttaagtgtgtgtttagccaaataatttctccgtaagggaaaaa

SEQ ID NO: 141366 - DNA, 69 bp, Homo sapiens
actgccacgagttaagtgtgtgtttagccaaataatttctccgtaagggaaaaatgcagtcacccaaat

SEQ ID NO: 141367 - DNA, 71 bp, Homo sapiens
tgtgtgtttagccaaataatttctccgtaagggaaaaatgcagtcacccaaattttaccaacaatgacaga

SEQ ID NO: 141368 - DNA, 71 bp, Homo sapiens
aaataatttctccgtaagggaaaaatgcagtcacccaaattttaccaacaatgacagagatgagagtagaa

SEQ ID NO: 141369 - DNA, 72 bp, Homo sapiens
tttctccgtaagggaaaaatgcagtcacccaaattttaccaacaatgacagagatgagagtagaaaagatta

SEQ ID NO: 141370 - DNA, 75 bp, Homo sapiens
aaaatgcagtcacccaaattttaccaacaatgacagagatgagagtagaaaagattaggcaacatctgagtttta

SEQ ID NO: 141371 - DNA, 74 bp, Homo sapiens
gtcacccaaattttaccaacaatgacagagatgagagtagaaaagattaggcaacatctgagttttaacttgaa

SEQ ID NO: 141372 - DNA, 74 bp, Homo sapiens
tttaccaacaatgacagagatgagagtagaaaagattaggcaacatctgagttttaacttgaaaagtgtccaag

SEQ ID NO: 141373 - DNA, 78 bp, Homo sapiens
acaatgacagagatgagagtagaaaagattaggcaacatctgagttttaacttgaaaagtgtccaagtcatcatgaaa

SEQ ID NO: 141374 - DNA, 75 bp, Homo sapiens
tagaaaagattaggcaacatctgagttttaacttgaaaagtgtccaagtcatcatgaaaggccgactgggagcaa

SEQ ID NO: 141375 - DNA, 75 bp, Homo sapiens
aacatctgagttttaacttgaaaagtgtccaagtcatcatgaaaggccgactgggagcaagtgattattagagat

SEQ ID NO: 141376 - DNA, 74 bp, Homo sapiens
agttttaacttgaaaagtgtccaagtcatcatgaaaggccgactgggagcaagtgattattagagattcttcag

SEQ ID NO: 141377 - DNA, 78 bp, Homo sapiens
aaaagtgtccaagtcatcatgaaaggccgactgggagcaagtgattattagagattcttcaggagacctcatctgaaa

SEQ ID NO: 141378 - DNA, 79 bp, Homo sapiens
atcatgaaaggccgactgggagcaagtgattattagagattcttcaggagacctcatctgaaaatgttaagactgccag

SEQ ID NO: 141379 - DNA, 75 bp, Homo sapiens
agtgattattagagattcttcaggagacctcatctgaaaatgttaagactgccagtgagggaaggaattgttaaa

SEQ ID NO: 141380 - DNA, 77 bp, Homo sapiens
tattagagattcttcaggagacctcatctgaaaatgttaagactgccagtgagggaaggaattgttaaaatgccagc

SEQ ID NO: 141381 - DNA, 73 bp, Homo sapiens
ttcaggagacctcatctgaaaatgttaagactgccagtgagggaaggaattgttaaaatgccagcggcttttt

SEQ ID NO: 141382 - DNA, 69 bp, Homo sapiens
atctgaaaatgttaagactgccagtgagggaaggaattgttaaaatgccagcggcttttttttcctctt

SEQ ID NO: 141383 - DNA, 66 bp, Homo sapiens
aaaatgttaagactgccagtgagggaaggaattgttaaaatgccagcggcttttttttcctctttt

SEQ ID NO: 141384 - DNA, 71 bp, Homo sapiens
tttcctctttttttctgtaattctgtaaaaatgcagagaaagttgagtggtacttcagaattgagggagag

SEQ ID NO: 141385 - DNA, 72 bp, Homo sapiens
tttttctgtaattctgtaaaaatgcagagaaagttgagtggtacttcagaattgagggagagggttaccgca

SEQ ID NO: 141386 - DNA, 74 bp, Homo sapiens
ttctgtaaaaatgcagagaaagttgagtggtacttcagaattgagggagagggttaccgcagagtagaaatata

SEQ ID NO: 141387 - DNA, 72 bp, Homo sapiens
aaaaatgcagagaaagttgagtggtacttcagaattgagggagagggttaccgcagagtagaaatatatttc

SEQ ID NO: 141388 - DNA, 71 bp, Homo sapiens
aaagttgagtggtacttcagaattgagggagagggttaccgcagagtagaaatatatttctagatttcagt

SEQ ID NO: 141389 - DNA, 74 bp, Homo sapiens
tacttcagaattgagggagagggttaccgcagagtagaaatatatttctagatttcagttccacaccacaaatc

SEQ ID NO: 141390 - DNA, 73 bp, Homo sapiens
attgagggagagggttaccgcagagtagaaatatatttctagatttcagttccacaccacaaatccacaacaa

SEQ ID NO: 141391 - DNA, 77 bp, Homo sapiens
tatatttctagatttcagttccacaccacaaatccacaacaatgccatttttcaactgtacaaaaatctgcttatga

SEQ ID NO: 141392 - DNA, 76 bp, Homo sapiens
ttctagatttcagttccacaccacaaatccacaacaatgccatttttcaactgtacaaaaatctgcttatgaactg

SEQ ID NO: 141393 - DNA, 78 bp, Homo sapiens
ttccacaccacaaatccacaacaatgccatttttcaactgtacaaaaatctgcttatgaactggacatgatcttaatg

SEQ ID NO: 141394 - DNA, 77 bp, Homo sapiens
aatccacaacaatgccatttttcaactgtacaaaaatctgcttatgaactggacatgatcttaatggtagtgtcaaa

SEQ ID NO: 141395 - DNA, 75 bp, Homo sapiens
aatgccatttttcaactgtacaaaaatctgcttatgaactggacatgatcttaatggtagtgtcaaaggccaagt

SEQ ID NO: 141396 - DNA, 74 bp, Homo sapiens
ttttcaactgtacaaaaatctgcttatgaactggacatgatcttaatggtagtgtcaaaggccaagtttttcac

SEQ ID NO: 141397 - DNA, 75 bp, Homo sapiens
tgtacaaaaatctgcttatgaactggacatgatcttaatggtagtgtcaaaggccaagtttttcacctgttaata

SEQ ID NO: 141398 - DNA, 74 bp, Homo sapiens
atctgcttatgaactggacatgatcttaatggtagtgtcaaaggccaagtttttcacctgttaatatttttcca

SEQ ID NO: 141399 - DNA, 71 bp, Homo sapiens
aactggacatgatcttaatggtagtgtcaaaggccaagtttttcacctgttaatatttttccacatttgtc

SEQ ID NO: 141400 - DNA, 70 bp, Homo sapiens
ggccaagtttttcacctgttaatatttttccacatttgtccttgaatctgaataactttatacagtactg

SEQ ID NO: 141401 - DNA, 69 bp, Homo sapiens
atttttccacatttgtccttgaatctgaataactttatacagtactgtaaatttaacttacatcgagtt

SEQ ID NO: 141402 - DNA, 72 bp, Homo sapiens
ccacatttgtccttgaatctgaataactttatacagtactgtaaatttaacttacatcgagtttgttgtcaa

SEQ ID NO: 141403 - DNA, 75 bp, Homo sapiens
cagtactgtaaatttaacttacatcgagtttgttgtcaattcttatgaaaagagctttctgcatgtaacacatac

SEQ ID NO: 141404 - DNA, 76 bp, Homo sapiens
ttacatcgagtttgttgtcaattcttatgaaaagagctttctgcatgtaacacatacggttaaagaacacagcaaa

SEQ ID NO: 141405 - DNA, 74 bp, Homo sapiens
agtttgttgtcaattcttatgaaaagagctttctgcatgtaacacatacggttaaagaacacagcaaaggacaa

SEQ ID NO: 141406 - DNA, 74 bp, Homo sapiens
attcttatgaaaagagctttctgcatgtaacacatacggttaaagaacacagcaaaggacaaaatttgcaggaa

SEQ ID NO: 141407 - DNA, 71 bp, Homo sapiens
aaaagagctttctgcatgtaacacatacggttaaagaacacagcaaaggacaaaatttgcaggaacagttt

SEQ ID NO: 141408 - DNA, 71 bp, Homo sapiens
catgtaacacatacggttaaagaacacagcaaaggacaaaatttgcaggaacagttttggaaccaacagaa

SEQ ID NO: 141409 - DNA, 68 bp, Homo sapiens
aacacatacggttaaagaacacagcaaaggacaaaatttgcaggaacagttttggaaccaacagaaaa

SEQ ID NO: 141410 - DNA, 68 bp, Homo sapiens
gttaaagaacacagcaaaggacaaaatttgcaggaacagttttggaaccaacagaaaatgtcaccttt

SEQ ID NO: 141411 - DNA, 70 bp, Homo sapiens
agcaaaggacaaaatttgcaggaacagttttggaaccaacagaaaatgtcaccttttatttgccatctta

SEQ ID NO: 141412 - DNA, 73 bp, Homo sapiens
aaatttgcaggaacagttttggaaccaacagaaaatgtcaccttttatttgccatcttatatatatctatcag

SEQ ID NO: 141413 - DNA, 73 bp, Homo sapiens
gaacagttttggaaccaacagaaaatgtcaccttttatttgccatcttatatatatctatcagttttaccagc

SEQ ID NO: 141414 - DNA, 74 bp, Homo sapiens
cagaaaatgtcaccttttatttgccatcttatatatatctatcagttttaccagctacttctaaatttgtacat

SEQ ID NO: 141415 - DNA, 72 bp, Homo sapiens
cttttatttgccatcttatatatatctatcagttttaccagctacttctaaatttgtacattatttgtaagg

SEQ ID NO: 141416 - DNA, 67 bp, Homo sapiens
atatctatcagttttaccagctacttctaaatttgtacattatttgtaagggaaagaaggaaaaccc

SEQ ID NO: 141417 - DNA, 66 bp, Homo sapiens
tcagttttaccagctacttctaaatttgtacattatttgtaagggaaagaaggaaaaccctaagac

SEQ ID NO: 141418 - DNA, 71 bp, Homo sapiens
ggaaagaaggaaaaccctaagacttgtctaacttagtggagaatgtgtgtgttgggcttaggatggatagc

SEQ ID NO: 141419 - DNA, 71 bp, Homo sapiens
aaaaccctaagacttgtctaacttagtggagaatgtgtgtgttgggcttaggatggatagctaagtcttat

SEQ ID NO: 141420 - DNA, 77 bp, Homo sapiens
taagacttgtctaacttagtggagaatgtgtgtgttgggcttaggatggatagctaagtcttattgagctgtgttac

SEQ ID NO: 141421 - DNA, 74 bp, Homo sapiens
agaatgtgtgtgttgggcttaggatggatagctaagtcttattgagctgtgttacctaacttgtatataaaaat

SEQ ID NO: 141422 - DNA, 73 bp, Homo sapiens
gtgtgttgggcttaggatggatagctaagtcttattgagctgtgttacctaacttgtatataaaaattgtaat

SEQ ID NO: 141423 - DNA, 71 bp, Homo sapiens
gcttaggatggatagctaagtcttattgagctgtgttacctaacttgtatataaaaattgtaattaaaagt

SEQ ID NO: 141424 - DNA, 68 bp, Homo sapiens
gctaagtcttattgagctgtgttacctaacttgtatataaaaattgtaattaaaagtttgggttcacc

SEQ ID NO: 141425 - DNA, 69 bp, Homo sapiens
ttgagctgtgttacctaacttgtatataaaaattgtaattaaaagtttgggttcacctgtttctcacag

SEQ ID NO: 141426 - DNA, 66 bp, Homo sapiens
ctgtgttacctaacttgtatataaaaattgtaattaaaagtttgggttcacctgtttctcacagtt

SEQ ID NO: 141427 - DNA, 71 bp, Homo sapiens
tgtatataaaaattgtaattaaaagtttgggttcacctgtttctcacagtttaaaatgatgagtaattgca

SEQ ID NO: 141428 - DNA, 70 bp, Homo sapiens
aattgtaattaaaagtttgggttcacctgtttctcacagtttaaaatgatgagtaattgcaaactctgga

SEQ ID NO: 141429 - DNA, 76 bp, Homo sapiens
gttcacctgtttctcacagtttaaaatgatgagtaattgcaaactctggaaatgtgactagtatatgatttaaggc

SEQ ID NO: 141430 - DNA, 78 bp, Homo sapiens
ttctcacagtttaaaatgatgagtaattgcaaactctggaaatgtgactagtatatgatttaaggctgtagaagcaag

SEQ ID NO: 141431 - DNA, 77 bp, Homo sapiens
ttaaaatgatgagtaattgcaaactctggaaatgtgactagtatatgatttaaggctgtagaagcaaggaagctctt

SEQ ID NO: 141432 - DNA, 79 bp, Homo sapiens
atgagtaattgcaaactctggaaatgtgactagtatatgatttaaggctgtagaagcaaggaagctctttcaagtgcta

SEQ ID NO: 141433 - DNA, 74 bp, Homo sapiens
aaactctggaaatgtgactagtatatgatttaaggctgtagaagcaaggaagctctttcaagtgctaaaactaa

SEQ ID NO: 141434 - DNA, 74 bp, Homo sapiens
aatgtgactagtatatgatttaaggctgtagaagcaaggaagctctttcaagtgctaaaactaaagacttctag

SEQ ID NO: 141435 - DNA, 72 bp, Homo sapiens
gactagtatatgatttaaggctgtagaagcaaggaagctctttcaagtgctaaaactaaagacttctagttt

SEQ ID NO: 141436 - DNA, 70 bp, Homo sapiens
gtagaagcaaggaagctctttcaagtgctaaaactaaagacttctagtttttggctcaaataagtactgt

SEQ ID NO: 141437 - DNA, 73 bp, Homo sapiens
caagtgctaaaactaaagacttctagtttttggctcaaataagtactgtttgtataccaggatatgtgagatg

SEQ ID NO: 141438 - DNA, 73 bp, Homo sapiens
ctaaagacttctagtttttggctcaaataagtactgtttgtataccaggatatgtgagatgtaaatgtagtag

SEQ ID NO: 141439 - DNA, 74 bp, Homo sapiens
ctagtttttggctcaaataagtactgtttgtataccaggatatgtgagatgtaaatgtagtaggtcacttttca

SEQ ID NO: 141440 - DNA, 73 bp, Homo sapiens
ttttggctcaaataagtactgtttgtataccaggatatgtgagatgtaaatgtagtaggtcacttttcaccct

SEQ ID NO: 141441 - DNA, 73 bp, Homo sapiens
aagtactgtttgtataccaggatatgtgagatgtaaatgtagtaggtcacttttcacccttgtagctataaaa

SEQ ID NO: 141442 - DNA, 72 bp, Homo sapiens
gtttgtataccaggatatgtgagatgtaaatgtagtaggtcacttttcacccttgtagctataaaataaaaa

SEQ ID NO: 141443 - DNA, 70 bp, Homo sapiens
gatgtaaatgtagtaggtcacttttcacccttgtagctataaaataaaaattttgtagaacagaaatagc

SEQ ID NO: 141444 - DNA, 70 bp, Homo sapiens
gtaggtcacttttcacccttgtagctataaaataaaaattttgtagaacagaaatagcttgtactactga

SEQ ID NO: 141445 - DNA, 69 bp, Homo sapiens
cacttttcacccttgtagctataaaataaaaattttgtagaacagaaatagcttgtactactgaattaa

SEQ ID NO: 141446 - DNA, 68 bp, Homo sapiens
ccttgtagctataaaataaaaattttgtagaacagaaatagcttgtactactgaattaacaaaagtta

SEQ ID NO: 141447 - DNA, 69 bp, Homo sapiens
ataaaaattttgtagaacagaaatagcttgtactactgaattaacaaaagttatactaaagtatcatgt

SEQ ID NO: 141448 - DNA, 69 bp, Homo sapiens
aattttgtagaacagaaatagcttgtactactgaattaacaaaagttatactaaagtatcatgtttaaa

SEQ ID NO: 141449 - DNA, 68 bp, Homo sapiens
aacagaaatagcttgtactactgaattaacaaaagttatactaaagtatcatgtttaaaaaaaatata

SEQ ID NO: 141450 - DNA, 75 bp, Homo sapiens
cacacacatacacctaaaatggcctaaagcagacatccatgtaattacagttgcaaaatgaaaacattttggaaa

SEQ ID NO: 141451 - DNA, 74 bp, Homo sapiens
catacacctaaaatggcctaaagcagacatccatgtaattacagttgcaaaatgaaaacattttggaaagaaca

SEQ ID NO: 141452 - DNA, 76 bp, Homo sapiens
ggcctaaagcagacatccatgtaattacagttgcaaaatgaaaacattttggaaagaacattgtatcatagttcat

SEQ ID NO: 141453 - DNA, 80 bp, Homo sapiens
gcagacatccatgtaattacagttgcaaaatgaaaacattttggaaagaacattgtatcatagttcattcatttgcagtg

SEQ ID NO: 141454 - DNA, 77 bp, Homo sapiens
ccatgtaattacagttgcaaaatgaaaacattttggaaagaacattgtatcatagttcattcatttgcagtggatct

SEQ ID NO: 141455 - DNA, 75 bp, Homo sapiens
acagttgcaaaatgaaaacattttggaaagaacattgtatcatagttcattcatttgcagtggatctttgttcct

SEQ ID NO: 141456 - DNA, 73 bp, Homo sapiens
gaaaacattttggaaagaacattgtatcatagttcattcatttgcagtggatctttgttcctttttactgtgg

SEQ ID NO: 141457 - DNA, 73 bp, Homo sapiens
ggaaagaacattgtatcatagttcattcatttgcagtggatctttgttcctttttactgtggtaattttagaa

SEQ ID NO: 141458 - DNA, 75 bp, Homo sapiens
gaacattgtatcatagttcattcatttgcagtggatctttgttcctttttactgtggtaattttagaaatgagtg

SEQ ID NO: 141459 - DNA, 74 bp, Homo sapiens
catagttcattcatttgcagtggatctttgttcctttttactgtggtaattttagaaatgagtgtcaagtttga

SEQ ID NO: 141460 - DNA, 72 bp, Homo sapiens
gttcattcatttgcagtggatctttgttcctttttactgtggtaattttagaaatgagtgtcaagtttgaaa

SEQ ID NO: 141461 - DNA, 73 bp, Homo sapiens
tttgcagtggatctttgttcctttttactgtggtaattttagaaatgagtgtcaagtttgaaattagatctgc

SEQ ID NO: 141462 - DNA, 73 bp, Homo sapiens
gcagtggatctttgttcctttttactgtggtaattttagaaatgagtgtcaagtttgaaattagatctgctaa

SEQ ID NO: 141463 - DNA, 71 bp, Homo sapiens
gtggatctttgttcctttttactgtggtaattttagaaatgagtgtcaagtttgaaattagatctgctaag

SEQ ID NO: 141464 - DNA, 69 bp, Homo sapiens
tttgttcctttttactgtggtaattttagaaatgagtgtcaagtttgaaattagatctgctaagttggg

SEQ ID NO: 141465 - DNA, 71 bp, Homo sapiens
tttttactgtggtaattttagaaatgagtgtcaagtttgaaattagatctgctaagttggggttttgctgc

SEQ ID NO: 141466 - DNA, 73 bp, Homo sapiens
tactgtggtaattttagaaatgagtgtcaagtttgaaattagatctgctaagttggggttttgctgcttgaac

SEQ ID NO: 141467 - DNA, 72 bp, Homo sapiens
actgtggtaattttagaaatgagtgtcaagtttgaaattagatctgctaagttggggttttgctgcttgaac

SEQ ID NO: 141468 - DNA, 74 bp, Homo sapiens
aattttagaaatgagtgtcaagtttgaaattagatctgctaagttggggttttgctgcttgaactctgcactgg

SEQ ID NO: 141469 - DNA, 75 bp, Homo sapiens
ttttagaaatgagtgtcaagtttgaaattagatctgctaagttggggttttgctgcttgaactctgcactgggtc

SEQ ID NO: 141470 - DNA, 76 bp, Homo sapiens
tgagtgtcaagtttgaaattagatctgctaagttggggttttgctgcttgaactctgcactgggtcctcaaataaa

SEQ ID NO: 141471 - DNA, 75 bp, Homo sapiens
tttgaaattagatctgctaagttggggttttgctgcttgaactctgcactgggtcctcaaataaaccgatgtgaa

SEQ ID NO: 141472 - DNA, 75 bp, Homo sapiens
attagatctgctaagttggggttttgctgcttgaactctgcactgggtcctcaaataaaccgatgtgaatgtagt

SEQ ID NO: 141473 - DNA, 71 bp, Homo sapiens
ctaagttggggttttgctgcttgaactctgcactgggtcctcaaataaaccgatgtgaatgtagttttttc

SEQ ID NO: 141474 - DNA, 74 bp, Homo sapiens
ttttgctgcttgaactctgcactgggtcctcaaataaaccgatgtgaatgtagttttttccccctgtgtgaaga

SEQ ID NO: 141475 - DNA, 73 bp, Homo sapiens
ttgaactctgcactgggtcctcaaataaaccgatgtgaatgtagttttttccccctgtgtgaagaagcagtta

SEQ ID NO: 141476 - DNA, 70 bp, Homo sapiens
tgggtcctcaaataaaccgatgtgaatgtagttttttccccctgtgtgaagaagcagttacaccccaaca

SEQ ID NO: 141477 - DNA, 68 bp, Homo sapiens
aaataaaccgatgtgaatgtagttttttccccctgtgtgaagaagcagttacaccccaacaataggag

SEQ ID NO: 141478 - DNA, 70 bp, Homo sapiens
atgtgaatgtagttttttccccctgtgtgaagaagcagttacaccccaacaataggaggaaaaatctaga

SEQ ID NO: 141479 - DNA, 68 bp, Homo sapiens
ttttttccccctgtgtgaagaagcagttacaccccaacaataggaggaaaaatctagaactatttcaa

SEQ ID NO: 141480 - DNA, 69 bp, Homo sapiens
cctgtgtgaagaagcagttacaccccaacaataggaggaaaaatctagaactatttcaagttttatctt

SEQ ID NO: 141481 - DNA, 69 bp, Homo sapiens
tgaagaagcagttacaccccaacaataggaggaaaaatctagaactatttcaagttttatctttttgta

SEQ ID NO: 141482 - DNA, 67 bp, Homo sapiens
gttacaccccaacaataggaggaaaaatctagaactatttcaagttttatctttttgtatatgaaaa

SEQ ID NO: 141483 - DNA, 67 bp, Homo sapiens
aacaataggaggaaaaatctagaactatttcaagttttatctttttgtatatgaaaataaaataata

SEQ ID NO: 141484 - DNA, 76 bp, Homo sapiens
ctatttatagcagcctcctgtcattctttcacactgtttgctacaatttgtgctttaatagtcatttgttccttta

SEQ ID NO: 141485 - DNA, 74 bp, Homo sapiens
agcctcctgtcattctttcacactgtttgctacaatttgtgctttaatagtcatttgttcctttattggttcaa

SEQ ID NO: 141486 - DNA, 74 bp, Homo sapiens
tcattctttcacactgtttgctacaatttgtgctttaatagtcatttgttcctttattggttcaagggtcagtg

SEQ ID NO: 141487 - DNA, 72 bp, Homo sapiens
tttcacactgtttgctacaatttgtgctttaatagtcatttgttcctttattggttcaagggtcagtgttgg

SEQ ID NO: 141488 - DNA, 74 bp, Homo sapiens
tttgctacaatttgtgctttaatagtcatttgttcctttattggttcaagggtcagtgttggtgtggtcactgc

SEQ ID NO: 141489 - DNA, 75 bp, Homo sapiens
tttgtgctttaatagtcatttgttcctttattggttcaagggtcagtgttggtgtggtcactgctgagtccactg

SEQ ID NO: 141490 - DNA, 76 bp, Homo sapiens
aatagtcatttgttcctttattggttcaagggtcagtgttggtgtggtcactgctgagtccactgtgcccagaaga

SEQ ID NO: 141491 - DNA, 77 bp, Homo sapiens
tgttcctttattggttcaagggtcagtgttggtgtggtcactgctgagtccactgtgcccagaagacagggtccaca

SEQ ID NO: 141492 - DNA, 81 bp, Homo sapiens
ttcaagggtcagtgttggtgtggtcactgctgagtccactgtgcccagaagacagggtccacagcaggcactccataaata

SEQ ID NO: 141493 - DNA, 83 bp, Homo sapiens
agtgttggtgtggtcactgctgagtccactgtgcccagaagacagggtccacagcaggcactccataaatacatgttgcagga

SEQ ID NO: 141494 - DNA, 85 bp, Homo sapiens
tggtcactgctgagtccactgtgcccagaagacagggtccacagcaggcactccataaatacatgttgcaggactgccctcactg

SEQ ID NO: 141495 - DNA, 85 bp, Homo sapiens
tgagtccactgtgcccagaagacagggtccacagcaggcactccataaatacatgttgcaggactgccctcactggctcactctg

SEQ ID NO: 141496 - DNA, 83 bp, Homo sapiens
actgtgcccagaagacagggtccacagcaggcactccataaatacatgttgcaggactgccctcactggctcactctgtggag

SEQ ID NO: 141497 - DNA, 81 bp, Homo sapiens
acagggtccacagcaggcactccataaatacatgttgcaggactgccctcactggctcactctgtggagtgagggacctaa

SEQ ID NO: 141498 - DNA, 82 bp, Homo sapiens
tccacagcaggcactccataaatacatgttgcaggactgccctcactggctcactctgtggagtgagggacctaatgggccc

SEQ ID NO: 141499 - DNA, 78 bp, Homo sapiens
tccataaatacatgttgcaggactgccctcactggctcactctgtggagtgagggacctaatgggccccatttaccta

SEQ ID NO: 141500 - DNA, 77 bp, Homo sapiens
aaatacatgttgcaggactgccctcactggctcactctgtggagtgagggacctaatgggccccatttacctattgc

SEQ ID NO: 141501 - DNA, 75 bp, Homo sapiens
gactgccctcactggctcactctgtggagtgagggacctaatgggccccatttacctattgcctctgaaagttaa

SEQ ID NO: 141502 - DNA, 72 bp, Homo sapiens
actggctcactctgtggagtgagggacctaatgggccccatttacctattgcctctgaaagttaaagggcag

SEQ ID NO: 141503 - DNA, 70 bp, Homo sapiens
actctgtggagtgagggacctaatgggccccatttacctattgcctctgaaagttaaagggcaggaacaa

SEQ ID NO: 141504 - DNA, 68 bp, Homo sapiens
agtgagggacctaatgggccccatttacctattgcctctgaaagttaaagggcaggaacaaggtggag

SEQ ID NO: 141505 - DNA, 69 bp, Homo sapiens
acctaatgggccccatttacctattgcctctgaaagttaaagggcaggaacaaggtggagggccactgc

SEQ ID NO: 141506 - DNA, 73 bp, Homo sapiens
ccatttacctattgcctctgaaagttaaagggcaggaacaaggtggagggccactgccctctggcctggcatg

SEQ ID NO: 141507 - DNA, 76 bp, Homo sapiens
ctattgcctctgaaagttaaagggcaggaacaaggtggagggccactgccctctggcctggcatggcccagaggca

SEQ ID NO: 141508 - DNA, 73 bp, Homo sapiens
agttaaagggcaggaacaaggtggagggccactgccctctggcctggcatggcccagaggcagcttggggtta

SEQ ID NO: 141509 - DNA, 77 bp, Homo sapiens
aggaacaaggtggagggccactgccctctggcctggcatggcccagaggcagcttggggttagctcaaggcagctaa

SEQ ID NO: 141510 - DNA, 79 bp, Homo sapiens
ctgccctctggcctggcatggcccagaggcagcttggggttagctcaaggcagctaagcaggtccagcccaagaactaa

SEQ ID NO: 141511 - DNA, 79 bp, Homo sapiens
tggcctggcatggcccagaggcagcttggggttagctcaaggcagctaagcaggtccagcccaagaactaagtcaagtg

SEQ ID NO: 141512 - DNA, 76 bp, Homo sapiens
atggcccagaggcagcttggggttagctcaaggcagctaagcaggtccagcccaagaactaagtcaagtgggccga

SEQ ID NO: 141513 - DNA, 73 bp, Homo sapiens
aaggcagctaagcaggtccagcccaagaactaagtcaagtgggccgaggaggctctgagagtggccggggccg

SEQ ID NO: 141514 - DNA, 71 bp, Homo sapiens
aggtccagcccaagaactaagtcaagtgggccgaggaggctctgagagtggccggggccggcgtacattcc

SEQ ID NO: 141515 - DNA, 73 bp, Homo sapiens
aagaactaagtcaagtgggccgaggaggctctgagagtggccggggccggcgtacattccctggcatgggtga

SEQ ID NO: 141516 - DNA, 75 bp, Homo sapiens
ctaagtcaagtgggccgaggaggctctgagagtggccggggccggcgtacattccctggcatgggtgagaactgc

SEQ ID NO: 141517 - DNA, 83 bp, Homo sapiens
tctgagagtggccggggccggcgtacattccctggcatgggtgagaactgcggctgttctggacgcacattcatctcatgcga

SEQ ID NO: 141518 - DNA, 79 bp, Homo sapiens
agtggccggggccggcgtacattccctggcatgggtgagaactgcggctgttctggacgcacattcatctcatgcgagg

SEQ ID NO: 141519 - DNA, 82 bp, Homo sapiens
cgtacattccctggcatgggtgagaactgcggctgttctggacgcacattcatctcatgcgaggtgctggggcccaagttca

SEQ ID NO: 141520 - DNA, 82 bp, Homo sapiens
attccctggcatgggtgagaactgcggctgttctggacgcacattcatctcatgcgaggtgctggggcccaagttcatgtag

SEQ ID NO: 141521 - DNA, 84 bp, Homo sapiens
atgggtgagaactgcggctgttctggacgcacattcatctcatgcgaggtgctggggcccaagttcatgtaggttgctggcagc

SEQ ID NO: 141522 - DNA, 86 bp, Homo sapiens
actgcggctgttctggacgcacattcatctcatgcgaggtgctggggcccaagttcatgtaggttgctggcagctgcacataatgg

SEQ ID NO: 141523 - DNA, 86 bp, Homo sapiens
ttctggacgcacattcatctcatgcgaggtgctggggcccaagttcatgtaggttgctggcagctgcacataatggtccccaagca

SEQ ID NO: 141524 - DNA, 86 bp, Homo sapiens
attcatctcatgcgaggtgctggggcccaagttcatgtaggttgctggcagctgcacataatggtccccaagcagtgcagacacta

SEQ ID NO: 141525 - DNA, 86 bp, Homo sapiens
atgcgaggtgctggggcccaagttcatgtaggttgctggcagctgcacataatggtccccaagcagtgcagacactatctgctcca

SEQ ID NO: 141526 - DNA, 82 bp, Homo sapiens
aagttcatgtaggttgctggcagctgcacataatggtccccaagcagtgcagacactatctgctccacctcccccactagta

SEQ ID NO: 141527 - DNA, 81 bp, Homo sapiens
aggttgctggcagctgcacataatggtccccaagcagtgcagacactatctgctccacctcccccactagtactctgaagg

SEQ ID NO: 141528 - DNA, 82 bp, Homo sapiens
tgcacataatggtccccaagcagtgcagacactatctgctccacctcccccactagtactctgaaggtgggtcgcactgctg

SEQ ID NO: 141529 - DNA, 78 bp, Homo sapiens
taatggtccccaagcagtgcagacactatctgctccacctcccccactagtactctgaaggtgggtcgcactgctggg

SEQ ID NO: 141530 - DNA, 81 bp, Homo sapiens
aagcagtgcagacactatctgctccacctcccccactagtactctgaaggtgggtcgcactgctgggtctgcctcccagca

SEQ ID NO: 141531 - DNA, 81 bp, Homo sapiens
actatctgctccacctcccccactagtactctgaaggtgggtcgcactgctgggtctgcctcccagcattgctgcatcact

SEQ ID NO: 141532 - DNA, 78 bp, Homo sapiens
tactctgaaggtgggtcgcactgctgggtctgcctcccagcattgctgcatcacttggtacctgttgggggaaaggga

SEQ ID NO: 141533 - DNA, 76 bp, Homo sapiens
atgtctctggggcccagttccctccccactaccacctccacatactcacagagaatcagggcaatactcaggctgg

SEQ ID NO: 141534 - DNA, 76 bp, Homo sapiens
ccagttccctccccactaccacctccacatactcacagagaatcagggcaatactcaggctggggcaggcgccgac

SEQ ID NO: 141535 - DNA, 77 bp, Homo sapiens
tccccactaccacctccacatactcacagagaatcagggcaatactcaggctggggcaggcgccgaccctgggccag

SEQ ID NO: 141536 - DNA, 76 bp, Homo sapiens
acctccacatactcacagagaatcagggcaatactcaggctggggcaggcgccgaccctgggccaggaagtgggta

SEQ ID NO: 141537 - DNA, 75 bp, Homo sapiens
tactcacagagaatcagggcaatactcaggctggggcaggcgccgaccctgggccaggaagtgggtaaggtcaaa

SEQ ID NO: 141538 - DNA, 71 bp, Homo sapiens
aatcagggcaatactcaggctggggcaggcgccgaccctgggccaggaagtgggtaaggtcaaaagggtca

SEQ ID NO: 141539 - DNA, 70 bp, Homo sapiens
aatactcaggctggggcaggcgccgaccctgggccaggaagtgggtaaggtcaaaagggtcaatgtggcg

SEQ ID NO: 141540 - DNA, 69 bp, Homo sapiens
tggggcaggcgccgaccctgggccaggaagtgggtaaggtcaaaagggtcaatgtggcggtatggtggg

SEQ ID NO: 141541 - DNA, 68 bp, Homo sapiens
aggcgccgaccctgggccaggaagtgggtaaggtcaaaagggtcaatgtggcggtatggtggggcacc

SEQ ID NO: 141542 - DNA, 70 bp, Homo sapiens
ggccaggaagtgggtaaggtcaaaagggtcaatgtggcggtatggtggggcaccccgtgtcagcagttcc

SEQ ID NO: 141543 - DNA, 72 bp, Homo sapiens
ggaagtgggtaaggtcaaaagggtcaatgtggcggtatggtggggcaccccgtgtcagcagttcccacagca

SEQ ID NO: 141544 - DNA, 75 bp, Homo sapiens
aaggtcaaaagggtcaatgtggcggtatggtggggcaccccgtgtcagcagttcccacagcagcacaccaaatga

SEQ ID NO: 141545 - DNA, 77 bp, Homo sapiens
gggtcaatgtggcggtatggtggggcaccccgtgtcagcagttcccacagcagcacaccaaatgaccactgtggaaa

SEQ ID NO: 141546 - DNA, 75 bp, Homo sapiens
gtatggtggggcaccccgtgtcagcagttcccacagcagcacaccaaatgaccactgtggaaagggggaggtgag

SEQ ID NO: 141547 - DNA, 74 bp, Homo sapiens
caccccgtgtcagcagttcccacagcagcacaccaaatgaccactgtggaaagggggaggtgaggggactcaac

SEQ ID NO: 141548 - DNA, 75 bp, Homo sapiens
cgtgtcagcagttcccacagcagcacaccaaatgaccactgtggaaagggggaggtgaggggactcaactcaccc

SEQ ID NO: 141549 - DNA, 77 bp, Homo sapiens
tgttcttgggtgccaaagccatgtggactgtagggcaggtggggcctcaccacatcagacttggtggtaaatctata

SEQ ID NO: 141550 - DNA, 78 bp, Homo sapiens
aaagccatgtggactgtagggcaggtggggcctcaccacatcagacttggtggtaaatctataggtctgcaggctctc

SEQ ID NO: 141551 - DNA, 80 bp, Homo sapiens
atgtggactgtagggcaggtggggcctcaccacatcagacttggtggtaaatctataggtctgcaggctctccagcgcca

SEQ ID NO: 141552 - DNA, 81 bp, Homo sapiens
gcaggtggggcctcaccacatcagacttggtggtaaatctataggtctgcaggctctccagcgccatccacttcacaggta

SEQ ID NO: 141553 - DNA, 81 bp, Homo sapiens
cctcaccacatcagacttggtggtaaatctataggtctgcaggctctccagcgccatccacttcacaggtaggcgagcgtg

SEQ ID NO: 141554 - DNA, 82 bp, Homo sapiens
atcagacttggtggtaaatctataggtctgcaggctctccagcgccatccacttcacaggtaggcgagcgtggcgatgctgt

SEQ ID NO: 141555 - DNA, 83 bp, Homo sapiens
tggtaaatctataggtctgcaggctctccagcgccatccacttcacaggtaggcgagcgtggcgatgctgttgaacactatag

SEQ ID NO: 141556 - DNA, 83 bp, Homo sapiens
aatctataggtctgcaggctctccagcgccatccacttcacaggtaggcgagcgtggcgatgctgttgaacactatagtactc

SEQ ID NO: 141557 - DNA, 81 bp, Homo sapiens
aggctctccagcgccatccacttcacaggtaggcgagcgtggcgatgctgttgaacactatagtactccctgtccaggatg

SEQ ID NO: 141558 - DNA, 81 bp, Homo sapiens
tccagcgccatccacttcacaggtaggcgagcgtggcgatgctgttgaacactatagtactccctgtccaggatgtcgcgg

SEQ ID NO: 141559 - DNA, 77 bp, Homo sapiens
cttcacaggtaggcgagcgtggcgatgctgttgaacactatagtactccctgtccaggatgtcgcgggccaaaccaa

SEQ ID NO: 141560 - DNA, 76 bp, Homo sapiens
aggtaggcgagcgtggcgatgctgttgaacactatagtactccctgtccaggatgtcgcgggccaaaccaaagtca

SEQ ID NO: 141561 - DNA, 79 bp, Homo sapiens
tggcgatgctgttgaacactatagtactccctgtccaggatgtcgcgggccaaaccaaagtcagccaccttgactgtga

SEQ ID NO: 141562 - DNA, 77 bp, Homo sapiens
tgttgaacactatagtactccctgtccaggatgtcgcgggccaaaccaaagtcagccaccttgactgtgaatgactc

SEQ ID NO: 141563 - DNA, 76 bp, Homo sapiens
tagtactccctgtccaggatgtcgcgggccaaaccaaagtcagccaccttgactgtgaatgactcgtccagcctta

SEQ ID NO: 141564 - DNA, 74 bp, Homo sapiens
ctccctgtccaggatgtcgcgggccaaaccaaagtcagccaccttgactgtgaatgactcgtccagccttaggg

SEQ ID NO: 141565 - DNA, 73 bp, Homo sapiens
aggatgtcgcgggccaaaccaaagtcagccaccttgactgtgaatgactcgtccagccttaggggtagggaga

SEQ ID NO: 141566 - DNA, 73 bp, Homo sapiens
aaaccaaagtcagccaccttgactgtgaatgactcgtccagccttaggggtagggagaggatcacacttagga

SEQ ID NO: 141567 - DNA, 74 bp, Homo sapiens
aaagtcagccaccttgactgtgaatgactcgtccagccttaggggtagggagaggatcacacttaggactggcc

SEQ ID NO: 141568 - DNA, 86 bp, Homo sapiens
ccagctactctggactctcacatgcagttccgcgcagccaggtccctgtgcacaaacttctgctctgccaggtactccatgctgcg

SEQ ID NO: 141569 - DNA, 86 bp, Homo sapiens
tactctggactctcacatgcagttccgcgcagccaggtccctgtgcacaaacttctgctctgccaggtactccatgctgcgggcta

SEQ ID NO: 141570 - DNA, 84 bp, Homo sapiens
acatgcagttccgcgcagccaggtccctgtgcacaaacttctgctctgccaggtactccatgctgcgggctacctgcaggccaa

SEQ ID NO: 141571 - DNA, 85 bp, Homo sapiens
ttccgcgcagccaggtccctgtgcacaaacttctgctctgccaggtactccatgctgcgggctacctgcaggccaaagctgatga

SEQ ID NO: 141572 - DNA, 82 bp, Homo sapiens
aggtccctgtgcacaaacttctgctctgccaggtactccatgctgcgggctacctgcaggccaaagctgatgaggtccttca

SEQ ID NO: 141573 - DNA, 82 bp, Homo sapiens
tgtgcacaaacttctgctctgccaggtactccatgctgcgggctacctgcaggccaaagctgatgaggtccttcacggtggg

SEQ ID NO: 141574 - DNA, 79 bp, Homo sapiens
acttctgctctgccaggtactccatgctgcgggctacctgcaggccaaagctgatgaggtccttcacggtggggttctg

SEQ ID NO: 141575 - DNA, 75 bp, Homo sapiens
aggtactccatgctgcgggctacctgcaggccaaagctgatgaggtccttcacggtggggttctgggggcacagg

SEQ ID NO: 141576 - DNA, 76 bp, Homo sapiens
tccatgctgcgggctacctgcaggccaaagctgatgaggtccttcacggtggggttctgggggcacaggtgggttg

SEQ ID NO: 141577 - DNA, 72 bp, Homo sapiens
ctacctgcaggccaaagctgatgaggtccttcacggtggggttctgggggcacaggtgggttggtgggcaag

SEQ ID NO: 141578 - DNA, 83 bp, Homo sapiens
ttctccagctgctgcccagcccccaacccagagccagatgaacactgacccgctgaggtgagcggatgaactggagcaggtca

SEQ ID NO: 141579 - DNA, 81 bp, Homo sapiens
tgcccagcccccaacccagagccagatgaacactgacccgctgaggtgagcggatgaactggagcaggtcaccgtggcaca

SEQ ID NO: 141580 - DNA, 85 bp, Homo sapiens
caacccagagccagatgaacactgacccgctgaggtgagcggatgaactggagcaggtcaccgtggcacatatagggcagcagca

SEQ ID NO: 141581 - DNA, 85 bp, Homo sapiens
agagccagatgaacactgacccgctgaggtgagcggatgaactggagcaggtcaccgtggcacatatagggcagcagcacatggg

SEQ ID NO: 141582 - DNA, 84 bp, Homo sapiens
tgaacactgacccgctgaggtgagcggatgaactggagcaggtcaccgtggcacatatagggcagcagcacatggggcaggccc

SEQ ID NO: 141583 - DNA, 87 bp, Homo sapiens
tgaggtgagcggatgaactggagcaggtcaccgtggcacatatagggcagcagcacatggggcaggccctcaggtggcaacatgata

SEQ ID NO: 141584 - DNA, 86 bp, Homo sapiens
ggatgaactggagcaggtcaccgtggcacatatagggcagcagcacatggggcaggccctcaggtggcaacatgataccaatgaga

SEQ ID NO: 141585 - DNA, 85 bp, Homo sapiens
aactggagcaggtcaccgtggcacatatagggcagcagcacatggggcaggccctcaggtggcaacatgataccaatgagagcca

SEQ ID NO: 141586 - DNA, 84 bp, Homo sapiens
accgtggcacatatagggcagcagcacatggggcaggccctcaggtggcaacatgataccaatgagagccagcacattcgggtg

SEQ ID NO: 141587 - DNA, 84 bp, Homo sapiens
acatatagggcagcagcacatggggcaggccctcaggtggcaacatgataccaatgagagccagcacattcgggtggttcaggc

SEQ ID NO: 141588 - DNA, 85 bp, Homo sapiens
ggcaggccctcaggtggcaacatgataccaatgagagccagcacattcgggtggttcaggccacgcatgagcagcccctctcgca

SEQ ID NO: 141589 - DNA, 83 bp, Homo sapiens
cctcaggtggcaacatgataccaatgagagccagcacattcgggtggttcaggccacgcatgagcagcccctctcgcaggaag

SEQ ID NO: 141590 - DNA, 81 bp, Homo sapiens
aacatgataccaatgagagccagcacattcgggtggttcaggccacgcatgagcagcccctctcgcaggaaggcctccacc

SEQ ID NO: 141591 - DNA, 85 bp, Homo sapiens
taccaatgagagccagcacattcgggtggttcaggccacgcatgagcagcccctctcgcaggaaggcctccacctgctgcatctc

SEQ ID NO: 141592 - DNA, 88 bp, Homo sapiens
agccagcacattcgggtggttcaggccacgcatgagcagcccctctcgcaggaaggcctccacctgctgcatctctgtgatgcctgca

SEQ ID NO: 141593 - DNA, 92 bp, Homo sapiens
gtggttcaggccacgcatgagcagcccctctcgcaggaaggcctccacctgctgcatctctgtgatgcctgcagagcagcgcaagtcaggca

SEQ ID NO: 141594 - DNA, 94 bp, Homo sapiens
tcaggccacgcatgagcagcccctctcgcaggaaggcctccacctgctgcatctctgtgatgcctgcagagcagcgcaagtcaggcacagggca

SEQ ID NO: 141595 - DNA, 90 bp, Homo sapiens
atgagcagcccctctcgcaggaaggcctccacctgctgcatctctgtgatgcctgcagagcagcgcaagtcaggcacagggcagggcgtc

SEQ ID NO: 141596 - DNA, 71 bp, Homo sapiens
aaaaagaatcctcccagcctgaggcccctccctctgccttcccatcttctgccccacttacgacttagtga

SEQ ID NO: 141597 - DNA, 76 bp, Homo sapiens
agcctgaggcccctccctctgccttcccatcttctgccccacttacgacttagtgacttgatggcacattggattc

SEQ ID NO: 141598 - DNA, 76 bp, Homo sapiens
ccctccctctgccttcccatcttctgccccacttacgacttagtgacttgatggcacattggattcgattctgggc

SEQ ID NO: 141599 - DNA, 79 bp, Homo sapiens
tgccttcccatcttctgccccacttacgacttagtgacttgatggcacattggattcgattctgggcctggtctatgta

SEQ ID NO: 141600 - DNA, 77 bp, Homo sapiens
atcttctgccccacttacgacttagtgacttgatggcacattggattcgattctgggcctggtctatgtattctccg

SEQ ID NO: 141601 - DNA, 76 bp, Homo sapiens
acttacgacttagtgacttgatggcacattggattcgattctgggcctggtctatgtattctccgtggtagacaac

SEQ ID NO: 141602 - DNA, 76 bp, Homo sapiens
acttagtgacttgatggcacattggattcgattctgggcctggtctatgtattctccgtggtagacaactccaaag

SEQ ID NO: 141603 - DNA, 76 bp, Homo sapiens
acttgatggcacattggattcgattctgggcctggtctatgtattctccgtggtagacaactccaaagtggcctgg

SEQ ID NO: 141604 - DNA, 77 bp, Homo sapiens
attggattcgattctgggcctggtctatgtattctccgtggtagacaactccaaagtggcctggtgtgaggtgcata

SEQ ID NO: 141605 - DNA, 79 bp, Homo sapiens
attctgggcctggtctatgtattctccgtggtagacaactccaaagtggcctggtgtgaggtgcataatgagtcgatga

SEQ ID NO: 141606 - DNA, 80 bp, Homo sapiens
tggtctatgtattctccgtggtagacaactccaaagtggcctggtgtgaggtgcataatgagtcgatgagaggggatcca

SEQ ID NO: 141607 - DNA, 77 bp, Homo sapiens
gtattctccgtggtagacaactccaaagtggcctggtgtgaggtgcataatgagtcgatgagaggggatccagggcc

SEQ ID NO: 141608 - DNA, 78 bp, Homo sapiens
tatgtcatcttgagactccatctctgccccagccccacctggcccccacacctttgccaatgactcggtcactgtggg

SEQ ID NO: 141609 - DNA, 74 bp, Homo sapiens
agactccatctctgccccagccccacctggcccccacacctttgccaatgactcggtcactgtgggtgaccacc

SEQ ID NO: 141610 - DNA, 74 bp, Homo sapiens
tctgccccagccccacctggcccccacacctttgccaatgactcggtcactgtgggtgaccacccgctcatggg

SEQ ID NO: 141611 - DNA, 76 bp, Homo sapiens
cacctggcccccacacctttgccaatgactcggtcactgtgggtgaccacccgctcatggggaatcagcacatcct

SEQ ID NO: 141612 - DNA, 79 bp, Homo sapiens
ccacacctttgccaatgactcggtcactgtgggtgaccacccgctcatggggaatcagcacatccttgacctcagccaa

SEQ ID NO: 141613 - DNA, 82 bp, Homo sapiens
tttgccaatgactcggtcactgtgggtgaccacccgctcatggggaatcagcacatccttgacctcagccaagagcgcagag

SEQ ID NO: 141614 - DNA, 80 bp, Homo sapiens
actcggtcactgtgggtgaccacccgctcatggggaatcagcacatccttgacctcagccaagagcgcagagtccaggtc

SEQ ID NO: 141615 - DNA, 79 bp, Homo sapiens
actgtgggtgaccacccgctcatggggaatcagcacatccttgacctcagccaagagcgcagagtccaggtcccttagc

SEQ ID NO: 141616 - DNA, 79 bp, Homo sapiens
acccgctcatggggaatcagcacatccttgacctcagccaagagcgcagagtccaggtcccttagctggatggactctt

SEQ ID NO: 141617 - DNA, 84 bp, Homo sapiens
ggaatcagcacatccttgacctcagccaagagcgcagagtccaggtcccttagctggatggactctttccgcagcagtggcaca

SEQ ID NO: 141618 - DNA, 81 bp, Homo sapiens
acatccttgacctcagccaagagcgcagagtccaggtcccttagctggatggactctttccgcagcagtggcacacaggat

SEQ ID NO: 141619 - DNA, 83 bp, Homo sapiens
cctcagccaagagcgcagagtccaggtcccttagctggatggactctttccgcagcagtggcacacaggattcatcttcacta

SEQ ID NO: 141620 - DNA, 82 bp, Homo sapiens
aagagcgcagagtccaggtcccttagctggatggactctttccgcagcagtggcacacaggattcatcttcactatcggaga

SEQ ID NO: 141621 - DNA, 81 bp, Homo sapiens
agtccaggtcccttagctggatggactctttccgcagcagtggcacacaggattcatcttcactatcggagaaggatgctc

SEQ ID NO: 141622 - DNA, 84 bp, Homo sapiens
tcccttagctggatggactctttccgcagcagtggcacacaggattcatcttcactatcggagaaggatgctccatggacacaa

SEQ ID NO: 141623 - DNA, 83 bp, Homo sapiens
atggactctttccgcagcagtggcacacaggattcatcttcactatcggagaaggatgctccatggacacaagtggtggaatc

SEQ ID NO: 141624 - DNA, 85 bp, Homo sapiens
tttccgcagcagtggcacacaggattcatcttcactatcggagaaggatgctccatggacacaagtggtggaatccagaccatca

SEQ ID NO: 141625 - DNA, 83 bp, Homo sapiens
agtggcacacaggattcatcttcactatcggagaaggatgctccatggacacaagtggtggaatccagaccatcaatggcagg

SEQ ID NO: 141626 - DNA, 83 bp, Homo sapiens
aggattcatcttcactatcggagaaggatgctccatggacacaagtggtggaatccagaccatcaatggcagggagtgctgtg

SEQ ID NO: 141627 - DNA, 81 bp, Homo sapiens
ttcactatcggagaaggatgctccatggacacaagtggtggaatccagaccatcaatggcagggagtgctgtggggagagg

SEQ ID NO: 141628 - DNA, 80 bp, Homo sapiens
aaggatgctccatggacacaagtggtggaatccagaccatcaatggcagggagtgctgtggggagagggaatgaggagct

SEQ ID NO: 141629 - DNA, 79 bp, Homo sapiens
atggacacaagtggtggaatccagaccatcaatggcagggagtgctgtggggagagggaatgaggagcttgtagggaca

SEQ ID NO: 141630 - DNA, 76 bp, Homo sapiens
acaagtggtggaatccagaccatcaatggcagggagtgctgtggggagagggaatgaggagcttgtagggacaggg

SEQ ID NO: 141631 - DNA, 77 bp, Homo sapiens
agtgctgtggggagagggaatgaggagcttgtagggacagggggtggctttagcttctcatgcctccactatctcac

SEQ ID NO: 141632 - DNA, 77 bp, Homo sapiens
tagggacagggggtggctttagcttctcatgcctccactatctcaccaaggccacttctgtagtcagagcccgagta

SEQ ID NO: 141633 - DNA, 79 bp, Homo sapiens
gggtggctttagcttctcatgcctccactatctcaccaaggccacttctgtagtcagagcccgagtacagaataggcag

SEQ ID NO: 141634 - DNA, 79 bp, Homo sapiens
tttagcttctcatgcctccactatctcaccaaggccacttctgtagtcagagcccgagtacagaataggcaggggtgtg

SEQ ID NO: 141635 - DNA, 80 bp, Homo sapiens
atgcctccactatctcaccaaggccacttctgtagtcagagcccgagtacagaataggcaggggtgtggctccagcagtc

SEQ ID NO: 141636 - DNA, 79 bp, Homo sapiens
actatctcaccaaggccacttctgtagtcagagcccgagtacagaataggcaggggtgtggctccagcagtctggtcca

SEQ ID NO: 141637 - DNA, 78 bp, Homo sapiens
aaggccacttctgtagtcagagcccgagtacagaataggcaggggtgtggctccagcagtctggtccagggatgccag

SEQ ID NO: 141638 - DNA, 80 bp, Homo sapiens
tgtagtcagagcccgagtacagaataggcaggggtgtggctccagcagtctggtccagggatgccaggtcattcaggttg

SEQ ID NO: 141639 - DNA, 76 bp, Homo sapiens
cccgagtacagaataggcaggggtgtggctccagcagtctggtccagggatgccaggtcattcaggttgggaggaa

SEQ ID NO: 141640 - DNA, 78 bp, Homo sapiens
tacagaataggcaggggtgtggctccagcagtctggtccagggatgccaggtcattcaggttgggaggaagaactgtg

SEQ ID NO: 141641 - DNA, 76 bp, Homo sapiens
ggtgtggctccagcagtctggtccagggatgccaggtcattcaggttgggaggaagaactgtggaaagagaatcct

SEQ ID NO: 141642 - DNA, 76 bp, Homo sapiens
tccagcagtctggtccagggatgccaggtcattcaggttgggaggaagaactgtggaaagagaatccttggtggct

SEQ ID NO: 141643 - DNA, 74 bp, Homo sapiens
tctggtccagggatgccaggtcattcaggttgggaggaagaactgtggaaagagaatccttggtggcttggctt

SEQ ID NO: 141644 - DNA, 78 bp, Homo sapiens
ggtaggggctgattaaaggtaggagcagagaactcacctagctgcttcctccgccaccagtagctgaagaccagtgca

SEQ ID NO: 141645 - DNA, 82 bp, Homo sapiens
ctgattaaaggtaggagcagagaactcacctagctgcttcctccgccaccagtagctgaagaccagtgcagtcgccagtgca

SEQ ID NO: 141646 - DNA, 84 bp, Homo sapiens
aggtaggagcagagaactcacctagctgcttcctccgccaccagtagctgaagaccagtgcagtcgccagtgcagccacaagca

SEQ ID NO: 141647 - DNA, 87 bp, Homo sapiens
tagctgcttcctccgccaccagtagctgaagaccagtgcagtcgccagtgcagccacaagcagcagcaaaggcagcaggataccaag

SEQ ID NO: 141648 - DNA, 88 bp, Homo sapiens
tccgccaccagtagctgaagaccagtgcagtcgccagtgcagccacaagcagcagcaaaggcagcaggataccaaggagcgtgctctg

SEQ ID NO: 141649 - DNA, 86 bp, Homo sapiens
agtagctgaagaccagtgcagtcgccagtgcagccacaagcagcagcaaaggcagcaggataccaaggagcgtgctctgtgggacc

SEQ ID NO: 141650 - DNA, 85 bp, Homo sapiens
aagaccagtgcagtcgccagtgcagccacaagcagcagcaaaggcagcaggataccaaggagcgtgctctgtgggaccccatctg

SEQ ID NO: 141651 - DNA, 83 bp, Homo sapiens
agtcgccagtgcagccacaagcagcagcaaaggcagcaggataccaaggagcgtgctctgtgggaccccatctggccctggcc

SEQ ID NO: 141652 - DNA, 82 bp, Homo sapiens
agccacaagcagcagcaaaggcagcaggataccaaggagcgtgctctgtgggaccccatctggccctggccgcaccactcta

SEQ ID NO: 141653 - DNA, 79 bp, Homo sapiens
cagcaaaggcagcaggataccaaggagcgtgctctgtgggaccccatctggccctggccgcaccactctacccaggata

SEQ ID NO: 141654 - DNA, 79 bp, Homo sapiens
agcaggataccaaggagcgtgctctgtgggaccccatctggccctggccgcaccactctacccaggatatgacattcac

SEQ ID NO: 141655 - DNA, 79 bp, Homo sapiens
ataccaaggagcgtgctctgtgggaccccatctggccctggccgcaccactctacccaggatatgacattcaccatcta

SEQ ID NO: 141656 - DNA, 80 bp, Homo sapiens
agcgtgctctgtgggaccccatctggccctggccgcaccactctacccaggatatgacattcaccatctacgcagacctg

SEQ ID NO: 141657 - DNA, 77 bp, Homo sapiens
gtgggaccccatctggccctggccgcaccactctacccaggatatgacattcaccatctacgcagacctgggggcag

SEQ ID NO: 141658 - DNA, 79 bp, Homo sapiens
atctggccctggccgcaccactctacccaggatatgacattcaccatctacgcagacctgggggcaggtggcaactcag

SEQ ID NO: 141659 - DNA, 79 bp, Homo sapiens
ccgcaccactctacccaggatatgacattcaccatctacgcagacctgggggcaggtggcaactcaggcccagcctgta

SEQ ID NO: 141660 - DNA, 76 bp, Homo sapiens
ctgtaggccctctgcccgtgtttcccagggaggtccagctgggctgcctacctgcaatggggcaccatcctggcca

SEQ ID NO: 141661 - DNA, 79 bp, Homo sapiens
tctgcccgtgtttcccagggaggtccagctgggctgcctacctgcaatggggcaccatcctggccaagctgcagggatg

SEQ ID NO: 141662 - DNA, 77 bp, Homo sapiens
tttcccagggaggtccagctgggctgcctacctgcaatggggcaccatcctggccaagctgcagggatgggggcagg

SEQ ID NO: 141663 - DNA, 81 bp, Homo sapiens
tccagctgggctgcctacctgcaatggggcaccatcctggccaagctgcagggatgggggcagggggcagacaaccatgtc

SEQ ID NO: 141664 - DNA, 77 bp, Homo sapiens
gggctgcctacctgcaatggggcaccatcctggccaagctgcagggatgggggcagggggcagacaaccatgtcccc

SEQ ID NO: 141665 - DNA, 72 bp, Homo sapiens
aatggggcaccatcctggccaagctgcagggatgggggcagggggcagacaaccatgtccccccggaactcg

SEQ ID NO: 141666 - DNA, 78 bp, Homo sapiens
catcctggccaagctgcagggatgggggcagggggcagacaaccatgtccccccggaactcgtgctggcagctctcac

SEQ ID NO: 141667 - DNA, 75 bp, Homo sapiens
aagctgcagggatgggggcagggggcagacaaccatgtccccccggaactcgtgctggcagctctcaccacccac

SEQ ID NO: 141668 - DNA, 73 bp, Homo sapiens
gatgggggcagggggcagacaaccatgtccccccggaactcgtgctggcagctctcaccacccacggtcacgt

SEQ ID NO: 141669 - DNA, 73 bp, Homo sapiens
agggggcagacaaccatgtccccccggaactcgtgctggcagctctcaccacccacggtcacgttgataccca

SEQ ID NO: 141670 - DNA, 76 bp, Homo sapiens
agacaaccatgtccccccggaactcgtgctggcagctctcaccacccacggtcacgttgatacccacacagtcagc

SEQ ID NO: 141671 - DNA, 78 bp, Homo sapiens
ccccggaactcgtgctggcagctctcaccacccacggtcacgttgatacccacacagtcagccacagcgcccagccca

SEQ ID NO: 141672 - DNA, 82 bp, Homo sapiens
aactcgtgctggcagctctcaccacccacggtcacgttgatacccacacagtcagccacagcgcccagcccaatatactgca

SEQ ID NO: 141673 - DNA, 82 bp, Homo sapiens
agctctcaccacccacggtcacgttgatacccacacagtcagccacagcgcccagcccaatatactgcagagagggtcatga

SEQ ID NO: 141674 - DNA, 79 bp, Homo sapiens
accacccacggtcacgttgatacccacacagtcagccacagcgcccagcccaatatactgcagagagggtcatgaggac

SEQ ID NO: 141675 - DNA, 83 bp, Homo sapiens
gtcacgttgatacccacacagtcagccacagcgcccagcccaatatactgcagagagggtcatgaggaccagccagtaggctg

SEQ ID NO: 141676 - DNA, 81 bp, Homo sapiens
agtcagccacagcgcccagcccaatatactgcagagagggtcatgaggaccagccagtaggctggcccctactttcagatc

SEQ ID NO: 141677 - DNA, 77 bp, Homo sapiens
cccagcccaatatactgcagagagggtcatgaggaccagccagtaggctggcccctactttcagatccccaactgtc

SEQ ID NO: 141678 - DNA, 76 bp, Homo sapiens
aatatactgcagagagggtcatgaggaccagccagtaggctggcccctactttcagatccccaactgtccctgccc

SEQ ID NO: 141679 - DNA, 72 bp, Homo sapiens
agagggtcatgaggaccagccagtaggctggcccctactttcagatccccaactgtccctgcccctatccct

SEQ ID NO: 141680 - DNA, 72 bp, Homo sapiens
atgaggaccagccagtaggctggcccctactttcagatccccaactgtccctgcccctatcccttacactta

SEQ ID NO: 141681 - DNA, 70 bp, Homo sapiens
ctggcccctactttcagatccccaactgtccctgcccctatcccttacacttacctcaaacttaatggca

SEQ ID NO: 141682 - DNA, 75 bp, Homo sapiens
tgcccctatcccttacacttacctcaaacttaatggcatgctcctcaggcttcagtggaactaggttggcactgg

SEQ ID NO: 141683 - DNA, 76 bp, Homo sapiens
tatcccttacacttacctcaaacttaatggcatgctcctcaggcttcagtggaactaggttggcactgggtggatg

SEQ ID NO: 141684 - DNA, 73 bp, Homo sapiens
acttacctcaaacttaatggcatgctcctcaggcttcagtggaactaggttggcactgggtggatggggtggg

SEQ ID NO: 141685 - DNA, 74 bp, Homo sapiens
ttaatggcatgctcctcaggcttcagtggaactaggttggcactgggtggatggggtgggggtaggaagcgaaa

SEQ ID NO: 141686 - DNA, 74 bp, Homo sapiens
atgctcctcaggcttcagtggaactaggttggcactgggtggatggggtgggggtaggaagcgaaagccaggca

SEQ ID NO: 141687 - DNA, 72 bp, Homo sapiens
ttcagtggaactaggttggcactgggtggatggggtgggggtaggaagcgaaagccaggcagtgtaaagcca

SEQ ID NO: 141688 - DNA, 73 bp, Homo sapiens
aactaggttggcactgggtggatggggtgggggtaggaagcgaaagccaggcagtgtaaagccagcagctcca

SEQ ID NO: 141689 - DNA, 73 bp, Homo sapiens
actgggtggatggggtgggggtaggaagcgaaagccaggcagtgtaaagccagcagctccatcccctcgggca

SEQ ID NO: 141690 - DNA, 73 bp, Homo sapiens
ggggtgggggtaggaagcgaaagccaggcagtgtaaagccagcagctccatcccctcgggcactcagattccc

SEQ ID NO: 141691 - DNA, 76 bp, Homo sapiens
agcgaaagccaggcagtgtaaagccagcagctccatcccctcgggcactcagattccctgccacccatccctgggg

SEQ ID NO: 141692 - DNA, 76 bp, Homo sapiens
gtgtaaagccagcagctccatcccctcgggcactcagattccctgccacccatccctgggggtctcggaccacata

SEQ ID NO: 141693 - DNA, 74 bp, Homo sapiens
atcccctcgggcactcagattccctgccacccatccctgggggtctcggaccacatattcaggaaggcggcaca

SEQ ID NO: 141694 - DNA, 80 bp, Homo sapiens
tcgggcactcagattccctgccacccatccctgggggtctcggaccacatattcaggaaggcggcacagctgctgctctg

SEQ ID NO: 141695 - DNA, 79 bp, Homo sapiens
agattccctgccacccatccctgggggtctcggaccacatattcaggaaggcggcacagctgctgctctggaagctgcc

SEQ ID NO: 141696 - DNA, 87 bp, Homo sapiens
cacatattcaggaaggcggcacagctgctgctctggaagctgcctctcacactgctgggaccaatatgagagtgattagccaggaac

SEQ ID NO: 141697 - DNA, 77 bp, Homo sapiens
ctcagggaactcatccagccttcctccctcctggccagcactcactcaccctgctttccactgccctaagcccgtca

SEQ ID NO: 141698 - DNA, 78 bp, Homo sapiens
aactcatccagccttcctccctcctggccagcactcactcaccctgctttccactgccctaagcccgtcatggaatga

SEQ ID NO: 141699 - DNA, 80 bp, Homo sapiens
ttcctccctcctggccagcactcactcaccctgctttccactgccctaagcccgtcatggaatgacagcactaagtgcca

SEQ ID NO: 141700 - DNA, 83 bp, Homo sapiens
ctggccagcactcactcaccctgctttccactgccctaagcccgtcatggaatgacagcactaagtgccatgctgaagttaga

SEQ ID NO: 141701 - DNA, 83 bp, Homo sapiens
actcactcaccctgctttccactgccctaagcccgtcatggaatgacagcactaagtgccatgctgaagttagatgctggcca

SEQ ID NO: 141702 - DNA, 86 bp, Homo sapiens
ctgctttccactgccctaagcccgtcatggaatgacagcactaagtgccatgctgaagttagatgctggccacagatggtgatgtg

SEQ ID NO: 141703 - DNA, 85 bp, Homo sapiens
actgccctaagcccgtcatggaatgacagcactaagtgccatgctgaagttagatgctggccacagatggtgatgtgggagttgc

SEQ ID NO: 141704 - DNA, 87 bp, Homo sapiens
taagcccgtcatggaatgacagcactaagtgccatgctgaagttagatgctggccacagatggtgatgtgggagttgctgtggaaga

SEQ ID NO: 141705 - DNA, 84 bp, Homo sapiens
atggaatgacagcactaagtgccatgctgaagttagatgctggccacagatggtgatgtgggagttgctgtggaagagggtagg

SEQ ID NO: 141706 - DNA, 81 bp, Homo sapiens
agcactaagtgccatgctgaagttagatgctggccacagatggtgatgtgggagttgctgtggaagagggtagggtggtag

SEQ ID NO: 141707 - DNA, 78 bp, Homo sapiens
atgctgaagttagatgctggccacagatggtgatgtgggagttgctgtggaagagggtagggtggtaggctttgggtg

SEQ ID NO: 141708 - DNA, 75 bp, Homo sapiens
aagttagatgctggccacagatggtgatgtgggagttgctgtggaagagggtagggtggtaggctttgggtgttc

SEQ ID NO: 141709 - DNA, 83 bp, Homo sapiens
tctctcattccccagaggccagagtgggcaaagaggcagtgcttacatgtagccacagttggggctgatgcttagcacgacag

SEQ ID NO: 141710 - DNA, 80 bp, Homo sapiens
cccagaggccagagtgggcaaagaggcagtgcttacatgtagccacagttggggctgatgcttagcacgacagggtcttc

SEQ ID NO: 141711 - DNA, 81 bp, Homo sapiens
agagtgggcaaagaggcagtgcttacatgtagccacagttggggctgatgcttagcacgacagggtcttctctgtactgga

SEQ ID NO: 141712 - DNA, 79 bp, Homo sapiens
aaagaggcagtgcttacatgtagccacagttggggctgatgcttagcacgacagggtcttctctgtactggaaggtcca

SEQ ID NO: 141713 - DNA, 78 bp, Homo sapiens
agtgcttacatgtagccacagttggggctgatgcttagcacgacagggtcttctctgtactggaaggtccaggaacca

SEQ ID NO: 141714 - DNA, 75 bp, Homo sapiens
atgtagccacagttggggctgatgcttagcacgacagggtcttctctgtactggaaggtccaggaaccaggtacc

SEQ ID NO: 141715 - DNA, 73 bp, Homo sapiens
agttggggctgatgcttagcacgacagggtcttctctgtactggaaggtccaggaaccaggtacctgggcacc

SEQ ID NO: 141716 - DNA, 73 bp, Homo sapiens
atgcttagcacgacagggtcttctctgtactggaaggtccaggaaccaggtacctgggcaccccccacctgca

SEQ ID NO: 141717 - DNA, 70 bp, Homo sapiens
acgacagggtcttctctgtactggaaggtccaggaaccaggtacctgggcaccccccacctgcaggctaa

SEQ ID NO: 141718 - DNA, 70 bp, Homo sapiens
ttctctgtactggaaggtccaggaaccaggtacctgggcaccccccacctgcaggctaagggggacactg

SEQ ID NO: 141719 - DNA, 68 bp, Homo sapiens
actggaaggtccaggaaccaggtacctgggcaccccccacctgcaggctaagggggacactggccacc

SEQ ID NO: 141720 - DNA, 67 bp, Homo sapiens
aggaaccaggtacctgggcaccccccacctgcaggctaagggggacactggccaccgtggccccagg

SEQ ID NO: 141721 - DNA, 70 bp, Homo sapiens
ctgggcaccccccacctgcaggctaagggggacactggccaccgtggccccagggggtgtggcacataaa

SEQ ID NO: 141722 - DNA, 72 bp, Homo sapiens
cccacctgcaggctaagggggacactggccaccgtggccccagggggtgtggcacataaaagctgcccctca

SEQ ID NO: 141723 - DNA, 71 bp, Homo sapiens
ggctaagggggacactggccaccgtggccccagggggtgtggcacataaaagctgcccctcactgacccta

SEQ ID NO: 141724 - DNA, 74 bp, Homo sapiens
gacactggccaccgtggccccagggggtgtggcacataaaagctgcccctcactgaccctacaggaacaagaga

SEQ ID NO: 141725 - DNA, 73 bp, Homo sapiens
accgtggccccagggggtgtggcacataaaagctgcccctcactgaccctacaggaacaagagattgggctca

SEQ ID NO: 141726 - DNA, 72 bp, Homo sapiens
cagggggtgtggcacataaaagctgcccctcactgaccctacaggaacaagagattgggctcaaggttaccc

SEQ ID NO: 141727 - DNA, 77 bp, Homo sapiens
acctggatagaaccctgcggcctcccatgcctgcctggtggtacttaccgtgctagcagacactcagtcccattgac

SEQ ID NO: 141728 - DNA, 80 bp, Homo sapiens
tagaaccctgcggcctcccatgcctgcctggtggtacttaccgtgctagcagacactcagtcccattgaccagcacagcc

SEQ ID NO: 141729 - DNA, 82 bp, Homo sapiens
tcccatgcctgcctggtggtacttaccgtgctagcagacactcagtcccattgaccagcacagcccggctggtgcctacaga

SEQ ID NO: 141730 - DNA, 82 bp, Homo sapiens
tgcctggtggtacttaccgtgctagcagacactcagtcccattgaccagcacagcccggctggtgcctacagacagactctg

SEQ ID NO: 141731 - DNA, 82 bp, Homo sapiens
tacttaccgtgctagcagacactcagtcccattgaccagcacagcccggctggtgcctacagacagactctggccttcaaga

SEQ ID NO: 141732 - DNA, 84 bp, Homo sapiens
ccgtgctagcagacactcagtcccattgaccagcacagcccggctggtgcctacagacagactctggccttcaagagtgagaca

SEQ ID NO: 141733 - DNA, 82 bp, Homo sapiens
agacactcagtcccattgaccagcacagcccggctggtgcctacagacagactctggccttcaagagtgagacaggtgcctc

SEQ ID NO: 141734 - DNA, 81 bp, Homo sapiens
tcccattgaccagcacagcccggctggtgcctacagacagactctggccttcaagagtgagacaggtgcctcctgcccgtg

SEQ ID NO: 141735 - DNA, 77 bp, Homo sapiens
acagcccggctggtgcctacagacagactctggccttcaagagtgagacaggtgcctcctgcccgtgggccaaagag

SEQ ID NO: 141736 - DNA, 77 bp, Homo sapiens
ctggtgcctacagacagactctggccttcaagagtgagacaggtgcctcctgcccgtgggccaaagaggggttgcac

SEQ ID NO: 141737 - DNA, 81 bp, Homo sapiens
ctacagacagactctggccttcaagagtgagacaggtgcctcctgcccgtgggccaaagaggggttgcactgctatcagca

SEQ ID NO: 141738 - DNA, 80 bp, Homo sapiens
tggccttcaagagtgagacaggtgcctcctgcccgtgggccaaagaggggttgcactgctatcagcactggctcctaaga

SEQ ID NO: 141739 - DNA, 79 bp, Homo sapiens
aagagtgagacaggtgcctcctgcccgtgggccaaagaggggttgcactgctatcagcactggctcctaagaggacata

SEQ ID NO: 141740 - DNA, 78 bp, Homo sapiens
ggtgcctcctgcccgtgggccaaagaggggttgcactgctatcagcactggctcctaagaggacatagaggtggctta

SEQ ID NO: 141741 - DNA, 76 bp, Homo sapiens
cccgtgggccaaagaggggttgcactgctatcagcactggctcctaagaggacatagaggtggcttaggcaggtcc

SEQ ID NO: 141742 - DNA, 79 bp, Homo sapiens
ttcccgtaccatgcactggccaagggcacagacagggcaaggtagcctcaccatgaaagagaagcctctcagcacggag

SEQ ID NO: 141743 - DNA, 80 bp, Homo sapiens
atgcactggccaagggcacagacagggcaaggtagcctcaccatgaaagagaagcctctcagcacggaggtgccgtctac

SEQ ID NO: 141744 - DNA, 79 bp, Homo sapiens
gcacagacagggcaaggtagcctcaccatgaaagagaagcctctcagcacggaggtgccgtctacccggaagtgcttgc

SEQ ID NO: 141745 - DNA, 75 bp, Homo sapiens
acagggcaaggtagcctcaccatgaaagagaagcctctcagcacggaggtgccgtctacccggaagtgcttgccc

SEQ ID NO: 141746 - DNA, 77 bp, Homo sapiens
cctcaccatgaaagagaagcctctcagcacggaggtgccgtctacccggaagtgcttgcccggtggcatgttagtca

SEQ ID NO: 141747 - DNA, 74 bp, Homo sapiens
aaagagaagcctctcagcacggaggtgccgtctacccggaagtgcttgcccggtggcatgttagtcacggtgag

SEQ ID NO: 141748 - DNA, 75 bp, Homo sapiens
agcctctcagcacggaggtgccgtctacccggaagtgcttgcccggtggcatgttagtcacggtgaggctgacgt

SEQ ID NO: 141749 - DNA, 73 bp, Homo sapiens
agcacggaggtgccgtctacccggaagtgcttgcccggtggcatgttagtcacggtgaggctgacgttggtag

SEQ ID NO: 141750 - DNA, 74 bp, Homo sapiens
tgccgtctacccggaagtgcttgcccggtggcatgttagtcacggtgaggctgacgttggtaggccccactgcc

SEQ ID NO: 141751 - DNA, 74 bp, Homo sapiens
cggaagtgcttgcccggtggcatgttagtcacggtgaggctgacgttggtaggccccactgcctgggtgcccaa

SEQ ID NO: 141752 - DNA, 75 bp, Homo sapiens
cggtggcatgttagtcacggtgaggctgacgttggtaggccccactgcctgggtgcccaagggctccagttcaca

SEQ ID NO: 141753 - DNA, 74 bp, Homo sapiens
atgttagtcacggtgaggctgacgttggtaggccccactgcctgggtgcccaagggctccagttcacactcaaa

SEQ ID NO: 141754 - DNA, 74 bp, Homo sapiens
gtgaggctgacgttggtaggccccactgcctgggtgcccaagggctccagttcacactcaaactcctctacaaa

SEQ ID NO: 141755 - DNA, 72 bp, Homo sapiens
tgacgttggtaggccccactgcctgggtgcccaagggctccagttcacactcaaactcctctacaaagtctt

SEQ ID NO: 141756 - DNA, 71 bp, Homo sapiens
cccactgcctgggtgcccaagggctccagttcacactcaaactcctctacaaagtctttccggggcactgg

SEQ ID NO: 141757 - DNA, 70 bp, Homo sapiens
cctgggtgcccaagggctccagttcacactcaaactcctctacaaagtctttccggggcactggtctggg

SEQ ID NO: 141758 - DNA, 70 bp, Homo sapiens
cccaagggctccagttcacactcaaactcctctacaaagtctttccggggcactggtctggggcaccagg

SEQ ID NO: 141759 - DNA, 69 bp, Homo sapiens
agttcacactcaaactcctctacaaagtctttccggggcactggtctggggcaccaggggaacccctga

SEQ ID NO: 141760 - DNA, 70 bp, Homo sapiens
ctcaaactcctctacaaagtctttccggggcactggtctggggcaccaggggaacccctgaggtcagcca

SEQ ID NO: 141761 - DNA, 72 bp, Homo sapiens
agcttcccccatccccccttgcctctgataagcagagaacagggtctcatggggaaggggctgcttggtttc

SEQ ID NO: 141762 - DNA, 71 bp, Homo sapiens
atccccccttgcctctgataagcagagaacagggtctcatggggaaggggctgcttggtttcccccttcag

SEQ ID NO: 141763 - DNA, 72 bp, Homo sapiens
ttgcctctgataagcagagaacagggtctcatggggaaggggctgcttggtttcccccttcagggaaaggga

SEQ ID NO: 141764 - DNA, 68 bp, Homo sapiens
ataagcagagaacagggtctcatggggaaggggctgcttggtttcccccttcagggaaagggagggga

SEQ ID NO: 141765 - DNA, 65 bp, Homo sapiens
agaacagggtctcatggggaaggggctgcttggtttcccccttcagggaaagggaggggagggac

SEQ ID NO: 141766 - DNA, 66 bp, Homo sapiens
atggggaaggggctgcttggtttcccccttcagggaaagggaggggagggaccagattgtacctga

SEQ ID NO: 141767 - DNA, 68 bp, Homo sapiens
ctgcttggtttcccccttcagggaaagggaggggagggaccagattgtacctgagttttgagctgtcc

SEQ ID NO: 141768 - DNA, 67 bp, Homo sapiens
tggtttcccccttcagggaaagggaggggagggaccagattgtacctgagttttgagctgtccttgg

SEQ ID NO: 141769 - DNA, 70 bp, Homo sapiens
agggaaagggaggggagggaccagattgtacctgagttttgagctgtccttgggcagtggccggcaggga

SEQ ID NO: 141770 - DNA, 72 bp, Homo sapiens
aggggagggaccagattgtacctgagttttgagctgtccttgggcagtggccggcagggactttggcccaca

SEQ ID NO: 141771 - DNA, 75 bp, Homo sapiens
accagattgtacctgagttttgagctgtccttgggcagtggccggcagggactttggcccacagtgacctgatgg

SEQ ID NO: 141772 - DNA, 75 bp, Homo sapiens
tacctgagttttgagctgtccttgggcagtggccggcagggactttggcccacagtgacctgatgggttccctca

SEQ ID NO: 141773 - DNA, 76 bp, Homo sapiens
ttttgagctgtccttgggcagtggccggcagggactttggcccacagtgacctgatgggttccctcaggcaccaga

SEQ ID NO: 141774 - DNA, 75 bp, Homo sapiens
ttgggcagtggccggcagggactttggcccacagtgacctgatgggttccctcaggcaccagaccagaagggtga

SEQ ID NO: 141775 - DNA, 72 bp, Homo sapiens
ccggcagggactttggcccacagtgacctgatgggttccctcaggcaccagaccagaagggtgaaggtagaa

SEQ ID NO: 141776 - DNA, 73 bp, Homo sapiens
actttggcccacagtgacctgatgggttccctcaggcaccagaccagaagggtgaaggtagaagttggagcca

SEQ ID NO: 141777 - DNA, 75 bp, Homo sapiens
ccacagtgacctgatgggttccctcaggcaccagaccagaagggtgaaggtagaagttggagccacacagggtca

SEQ ID NO: 141778 - DNA, 74 bp, Homo sapiens
ctgatgggttccctcaggcaccagaccagaagggtgaaggtagaagttggagccacacagggtcagccttgtac

SEQ ID NO: 141779 - DNA, 72 bp, Homo sapiens
accagaagggtgaaggtagaagttggagccacacagggtcagccttgtactgccccttagaggtccactgtg

SEQ ID NO: 141780 - DNA, 70 bp, Homo sapiens
aagggtgaaggtagaagttggagccacacagggtcagccttgtactgccccttagaggtccactgtgggg

SEQ ID NO: 141781 - DNA, 73 bp, Homo sapiens
tagaagttggagccacacagggtcagccttgtactgccccttagaggtccactgtgggggtggaactgaaatg

SEQ ID NO: 141782 - DNA, 70 bp, Homo sapiens
ccacacagggtcagccttgtactgccccttagaggtccactgtgggggtggaactgaaatgggggaaaca

SEQ ID NO: 141783 - DNA, 71 bp, Homo sapiens
agccttgtactgccccttagaggtccactgtgggggtggaactgaaatgggggaaacagcctgagtcctca

SEQ ID NO: 141784 - DNA, 72 bp, Homo sapiens
tgtactgccccttagaggtccactgtgggggtggaactgaaatgggggaaacagcctgagtcctcatgtggg

SEQ ID NO: 141785 - DNA, 74 bp, Homo sapiens
cccagcctgtcccactcttacctgtgccctgccagggaagccatacctcagtaagcttaggtgggcagtggtcc

SEQ ID NO: 141786 - DNA, 76 bp, Homo sapiens
tgtcccactcttacctgtgccctgccagggaagccatacctcagtaagcttaggtgggcagtggtcctgttgccag

SEQ ID NO: 141787 - DNA, 77 bp, Homo sapiens
tcttacctgtgccctgccagggaagccatacctcagtaagcttaggtgggcagtggtcctgttgccaggagccagga

SEQ ID NO: 141788 - DNA, 78 bp, Homo sapiens
ctgccagggaagccatacctcagtaagcttaggtgggcagtggtcctgttgccaggagccaggacactccttctgctg

SEQ ID NO: 141789 - DNA, 79 bp, Homo sapiens
ccatacctcagtaagcttaggtgggcagtggtcctgttgccaggagccaggacactccttctgctggccgcacatgttc

SEQ ID NO: 141790 - DNA, 78 bp, Homo sapiens
agtaagcttaggtgggcagtggtcctgttgccaggagccaggacactccttctgctggccgcacatgttcccacacca

SEQ ID NO: 141791 - DNA, 80 bp, Homo sapiens
cttaggtgggcagtggtcctgttgccaggagccaggacactccttctgctggccgcacatgttcccacaccagccacagc

SEQ ID NO: 141792 - DNA, 82 bp, Homo sapiens
agtggtcctgttgccaggagccaggacactccttctgctggccgcacatgttcccacaccagccacagcccatgaaatgcca

SEQ ID NO: 141793 - DNA, 82 bp, Homo sapiens
caggagccaggacactccttctgctggccgcacatgttcccacaccagccacagcccatgaaatgccatgcccttaggcaac

SEQ ID NO: 141794 - DNA, 81 bp, Homo sapiens
aggacactccttctgctggccgcacatgttcccacaccagccacagcccatgaaatgccatgcccttaggcaacgcccaca

SEQ ID NO: 141795 - DNA, 81 bp, Homo sapiens
cttctgctggccgcacatgttcccacaccagccacagcccatgaaatgccatgcccttaggcaacgcccacaggtcaggaa

SEQ ID NO: 141796 - DNA, 81 bp, Homo sapiens
cacatgttcccacaccagccacagcccatgaaatgccatgcccttaggcaacgcccacaggtcaggaagtggcggcagcca

SEQ ID NO: 141797 - DNA, 78 bp, Homo sapiens
gttcccacaccagccacagcccatgaaatgccatgcccttaggcaacgcccacaggtcaggaagtggcggcagccagg

SEQ ID NO: 141798 - DNA, 77 bp, Homo sapiens
acagcccatgaaatgccatgcccttaggcaacgcccacaggtcaggaagtggcggcagccagggccttggataggta

SEQ ID NO: 141799 - DNA, 74 bp, Homo sapiens
aaatgccatgcccttaggcaacgcccacaggtcaggaagtggcggcagccagggccttggataggtacctggaa

SEQ ID NO: 141800 - DNA, 71 bp, Homo sapiens
atgcccttaggcaacgcccacaggtcaggaagtggcggcagccagggccttggataggtacctggaaaacc

SEQ ID NO: 141801 - DNA, 70 bp, Homo sapiens
aacgcccacaggtcaggaagtggcggcagccagggccttggataggtacctggaaaacctgtgggtgaaa

SEQ ID NO: 141802 - DNA, 72 bp, Homo sapiens
acaggtcaggaagtggcggcagccagggccttggataggtacctggaaaacctgtgggtgaaagacaggtga

SEQ ID NO: 141803 - DNA, 73 bp, Homo sapiens
gtctgtgatcccacaaccctggccccaggccctgcccctgcccacctcacctggtccccagaggcaaagagta

SEQ ID NO: 141804 - DNA, 69 bp, Homo sapiens
acaaccctggccccaggccctgcccctgcccacctcacctggtccccagaggcaaagagtaggtggtcc

SEQ ID NO: 141805 - DNA, 72 bp, Homo sapiens
ccaggccctgcccctgcccacctcacctggtccccagaggcaaagagtaggtggtccccaagacgactgaca

SEQ ID NO: 141806 - DNA, 73 bp, Homo sapiens
cccctgcccacctcacctggtccccagaggcaaagagtaggtggtccccaagacgactgacatcccgctgcac

SEQ ID NO: 141807 - DNA, 74 bp, Homo sapiens
acctcacctggtccccagaggcaaagagtaggtggtccccaagacgactgacatcccgctgcacgggctgccca

SEQ ID NO: 141808 - DNA, 76 bp, Homo sapiens
tggtccccagaggcaaagagtaggtggtccccaagacgactgacatcccgctgcacgggctgcccactgtcaccca

SEQ ID NO: 141809 - DNA, 76 bp, Homo sapiens
caaagagtaggtggtccccaagacgactgacatcccgctgcacgggctgcccactgtcacccagtgagaagttgga

SEQ ID NO: 141810 - DNA, 77 bp, Homo sapiens
agtaggtggtccccaagacgactgacatcccgctgcacgggctgcccactgtcacccagtgagaagttggacacata

SEQ ID NO: 141811 - DNA, 78 bp, Homo sapiens
aagacgactgacatcccgctgcacgggctgcccactgtcacccagtgagaagttggacacatacagcaagtagtttag

SEQ ID NO: 141812 - DNA, 80 bp, Homo sapiens
actgacatcccgctgcacgggctgcccactgtcacccagtgagaagttggacacatacagcaagtagtttagtgacctga

SEQ ID NO: 141813 - DNA, 78 bp, Homo sapiens
cacgggctgcccactgtcacccagtgagaagttggacacatacagcaagtagtttagtgacctgaccagctccaccta

SEQ ID NO: 141814 - DNA, 78 bp, Homo sapiens
ccactgtcacccagtgagaagttggacacatacagcaagtagtttagtgacctgaccagctccacctaggacaggtca

SEQ ID NO: 141815 - DNA, 80 bp, Homo sapiens
ccagtgagaagttggacacatacagcaagtagtttagtgacctgaccagctccacctaggacaggtcagatgtgagcaaa

SEQ ID NO: 141816 - DNA, 78 bp, Homo sapiens
agaagttggacacatacagcaagtagtttagtgacctgaccagctccacctaggacaggtcagatgtgagcaaaatgg

SEQ ID NO: 141817 - DNA, 79 bp, Homo sapiens
acatacagcaagtagtttagtgacctgaccagctccacctaggacaggtcagatgtgagcaaaatggggatggagacaa

SEQ ID NO: 141818 - DNA, 75 bp, Homo sapiens
aagtagtttagtgacctgaccagctccacctaggacaggtcagatgtgagcaaaatggggatggagacaaggacc

SEQ ID NO: 141819 - DNA, 77 bp, Homo sapiens
tagtgacctgaccagctccacctaggacaggtcagatgtgagcaaaatggggatggagacaaggacccagggctagg

SEQ ID NO: 141820 - DNA, 75 bp, Homo sapiens
accagctccacctaggacaggtcagatgtgagcaaaatggggatggagacaaggacccagggctaggggactgtg

SEQ ID NO: 141821 - DNA, 74 bp, Homo sapiens
agctccacctaggacaggtcagatgtgagcaaaatggggatggagacaaggacccagggctaggggactgtggg

SEQ ID NO: 141822 - DNA, 75 bp, Homo sapiens
cctaggacaggtcagatgtgagcaaaatggggatggagacaaggacccagggctaggggactgtggggatgagga

SEQ ID NO: 141823 - DNA, 75 bp, Homo sapiens
atgtgagcaaaatggggatggagacaaggacccagggctaggggactgtggggatgaggacccacctgcaggata

SEQ ID NO: 141824 - DNA, 71 bp, Homo sapiens
aaaatggggatggagacaaggacccagggctaggggactgtggggatgaggacccacctgcaggatacgcc

SEQ ID NO: 141825 - DNA, 75 bp, Homo sapiens
atggagacaaggacccagggctaggggactgtggggatgaggacccacctgcaggatacgcccatccattgtgcc

SEQ ID NO: 141826 - DNA, 76 bp, Homo sapiens
aaggacccagggctaggggactgtggggatgaggacccacctgcaggatacgcccatccattgtgcccatgtgtgc

SEQ ID NO: 141827 - DNA, 80 bp, Homo sapiens
taggggactgtggggatgaggacccacctgcaggatacgcccatccattgtgcccatgtgtgccactgtgacgttgtcaa

SEQ ID NO: 141828 - DNA, 83 bp, Homo sapiens
gggatgaggacccacctgcaggatacgcccatccattgtgcccatgtgtgccactgtgacgttgtcaaggcgtgtcacataca

SEQ ID NO: 141829 - DNA, 84 bp, Homo sapiens
acccacctgcaggatacgcccatccattgtgcccatgtgtgccactgtgacgttgtcaaggcgtgtcacatacaatgcagtgac

SEQ ID NO: 141830 - DNA, 83 bp, Homo sapiens
aggatacgcccatccattgtgcccatgtgtgccactgtgacgttgtcaaggcgtgtcacatacaatgcagtgacctgtactgg

SEQ ID NO: 141831 - DNA, 83 bp, Homo sapiens
atccattgtgcccatgtgtgccactgtgacgttgtcaaggcgtgtcacatacaatgcagtgacctgtactggtcccaacagcc

SEQ ID NO: 141832 - DNA, 82 bp, Homo sapiens
cccatgtgtgccactgtgacgttgtcaaggcgtgtcacatacaatgcagtgacctgtactggtcccaacagcccattgaata

SEQ ID NO: 141833 - DNA, 80 bp, Homo sapiens
ccactgtgacgttgtcaaggcgtgtcacatacaatgcagtgacctgtactggtcccaacagcccattgaataggtccaca

SEQ ID NO: 141834 - DNA, 79 bp, Homo sapiens
acgttgtcaaggcgtgtcacatacaatgcagtgacctgtactggtcccaacagcccattgaataggtccacacgtgaga

SEQ ID NO: 141835 - DNA, 80 bp, Homo sapiens
aaggcgtgtcacatacaatgcagtgacctgtactggtcccaacagcccattgaataggtccacacgtgagaagctgctac

SEQ ID NO: 141836 - DNA, 82 bp, Homo sapiens
acatacaatgcagtgacctgtactggtcccaacagcccattgaataggtccacacgtgagaagctgctactgaccagcagag

SEQ ID NO: 141837 - DNA, 78 bp, Homo sapiens
agtgacctgtactggtcccaacagcccattgaataggtccacacgtgagaagctgctactgaccagcagagggaagtg

SEQ ID NO: 141838 - DNA, 79 bp, Homo sapiens
aacagcccattgaataggtccacacgtgagaagctgctactgaccagcagagggaagtggcggcagctggtgttggggc

SEQ ID NO: 141839 - DNA, 80 bp, Homo sapiens
acacgtgagaagctgctactgaccagcagagggaagtggcggcagctggtgttggggctgagggcttccaggccaggctg

SEQ ID NO: 141840 - DNA, 77 bp, Homo sapiens
aagctgctactgaccagcagagggaagtggcggcagctggtgttggggctgagggcttccaggccaggctgggaaag

SEQ ID NO: 141841 - DNA, 76 bp, Homo sapiens
tgaccagcagagggaagtggcggcagctggtgttggggctgagggcttccaggccaggctgggaaaggtcagggaa

SEQ ID NO: 141842 - DNA, 71 bp, Homo sapiens
agggaagtggcggcagctggtgttggggctgagggcttccaggccaggctgggaaaggtcagggaagggaa

SEQ ID NO: 141843 - DNA, 75 bp, Homo sapiens
ttcagccatgtgcatgcagctcacaagtaagggccccttctttcagcttaccgggttggggcaaaaactgggcga

SEQ ID NO: 141844 - DNA, 65 bp, Homo sapiens
aagtaagggccccttctttcagcttaccgggttggggcaaaaactgggcgactggaagaagtcga

SEQ ID NO: 141845 - DNA, 67 bp, Homo sapiens
ccttctttcagcttaccgggttggggcaaaaactgggcgactggaagaagtcgaggcctcgccggag

SEQ ID NO: 141846 - DNA, 69 bp, Homo sapiens
tttcagcttaccgggttggggcaaaaactgggcgactggaagaagtcgaggcctcgccggaggcctgga

SEQ ID NO: 141847 - DNA, 68 bp, Homo sapiens
ccgggttggggcaaaaactgggcgactggaagaagtcgaggcctcgccggaggcctggatggactggg

SEQ ID NO: 141848 - DNA, 73 bp, Homo sapiens
aaaaactgggcgactggaagaagtcgaggcctcgccggaggcctggatggactggggattcacaacagcgctc

SEQ ID NO: 141849 - DNA, 77 bp, Homo sapiens
ctggaagaagtcgaggcctcgccggaggcctggatggactggggattcacaacagcgctccacaccctcatcaatta

SEQ ID NO: 141850 - DNA, 77 bp, Homo sapiens
agaagtcgaggcctcgccggaggcctggatggactggggattcacaacagcgctccacaccctcatcaattagtgtg

SEQ ID NO: 141851 - DNA, 80 bp, Homo sapiens
ctcgccggaggcctggatggactggggattcacaacagcgctccacaccctcatcaattagtgtgtccagcaggtcaatg

SEQ ID NO: 141852 - DNA, 78 bp, Homo sapiens
aggcctggatggactggggattcacaacagcgctccacaccctcatcaattagtgtgtccagcaggtcaatggggaag

SEQ ID NO: 141853 - DNA, 80 bp, Homo sapiens
tggggattcacaacagcgctccacaccctcatcaattagtgtgtccagcaggtcaatggggaaggcacagacgacagagt

SEQ ID NO: 141854 - DNA, 80 bp, Homo sapiens
ttcacaacagcgctccacaccctcatcaattagtgtgtccagcaggtcaatggggaaggcacagacgacagagttggggc

SEQ ID NO: 141855 - DNA, 77 bp, Homo sapiens
cacaccctcatcaattagtgtgtccagcaggtcaatggggaaggcacagacgacagagttggggcccacgccaggac

SEQ ID NO: 141856 - DNA, 76 bp, Homo sapiens
atcaattagtgtgtccagcaggtcaatggggaaggcacagacgacagagttggggcccacgccaggaccaccatcc

SEQ ID NO: 141857 - DNA, 77 bp, Homo sapiens
tagtgtgtccagcaggtcaatggggaaggcacagacgacagagttggggcccacgccaggaccaccatccttgccag

SEQ ID NO: 141858 - DNA, 76 bp, Homo sapiens
agcaggtcaatggggaaggcacagacgacagagttggggcccacgccaggaccaccatccttgccagtcacaaaga

SEQ ID NO: 141859 - DNA, 73 bp, Homo sapiens
gggaaggcacagacgacagagttggggcccacgccaggaccaccatccttgccagtcacaaagaccccaaata

SEQ ID NO: 141860 - DNA, 72 bp, Homo sapiens
acagacgacagagttggggcccacgccaggaccaccatccttgccagtcacaaagaccccaaatagtacttc

SEQ ID NO: 141861 - DNA, 70 bp, Homo sapiens
agttggggcccacgccaggaccaccatccttgccagtcacaaagaccccaaatagtacttcctggccctc

SEQ ID NO: 141862 - DNA, 76 bp, Homo sapiens
acgccaggaccaccatccttgccagtcacaaagaccccaaatagtacttcctggccctcggcgatgctcagctcag

SEQ ID NO: 141863 - DNA, 76 bp, Homo sapiens
accatccttgccagtcacaaagaccccaaatagtacttcctggccctcggcgatgctcagctcagtggcaagttgg

SEQ ID NO: 141864 - DNA, 76 bp, Homo sapiens
agtcacaaagaccccaaatagtacttcctggccctcggcgatgctcagctcagtggcaagttgggcacccactgga

SEQ ID NO: 141865 - DNA, 76 bp, Homo sapiens
agaccccaaatagtacttcctggccctcggcgatgctcagctcagtggcaagttgggcacccactggagcggagtg

SEQ ID NO: 141866 - DNA, 76 bp, Homo sapiens
aaatagtacttcctggccctcggcgatgctcagctcagtggcaagttgggcacccactggagcggagtgggccacc

SEQ ID NO: 141867 - DNA, 80 bp, Homo sapiens
tcctggccctcggcgatgctcagctcagtggcaagttgggcacccactggagcggagtgggccacccgcagcacagggta

SEQ ID NO: 141868 - DNA, 78 bp, Homo sapiens
atgctcagctcagtggcaagttgggcacccactggagcggagtgggccacccgcagcacagggtagggctgtccgcct

SEQ ID NO: 141869 - DNA, 76 bp, Homo sapiens
agctcagtggcaagttgggcacccactggagcggagtgggccacccgcagcacagggtagggctgtccgccttctg

SEQ ID NO: 141870 - DNA, 71 bp, Homo sapiens
aagttgggcacccactggagcggagtgggccacccgcagcacagggtagggctgtccgccttctggggccc

SEQ ID NO: 141871 - DNA, 70 bp, Homo sapiens
acccactggagcggagtgggccacccgcagcacagggtagggctgtccgccttctggggccccccggcgc

SEQ ID NO: 141872 - DNA, 71 bp, Homo sapiens
agtgggccacccgcagcacagggtagggctgtccgccttctggggccccccggcgcctgcgttttggagca

SEQ ID NO: 141873 - DNA, 72 bp, Homo sapiens
acccgcagcacagggtagggctgtccgccttctggggccccccggcgcctgcgttttggagcaaatctgcag

SEQ ID NO: 141874 - DNA, 75 bp, Homo sapiens
tgtccgccttctggggccccccggcgcctgcgttttggagcaaatctgcagtcgaggaccagctcccgatagtca

SEQ ID NO: 141875 - DNA, 73 bp, Homo sapiens
ttctggggccccccggcgcctgcgttttggagcaaatctgcagtcgaggaccagctcccgatagtcacccaac

SEQ ID NO: 141876 - DNA, 79 bp, Homo sapiens
cggcgcctgcgttttggagcaaatctgcagtcgaggaccagctcccgatagtcacccaactctggctcagtggcgctaa

SEQ ID NO: 141877 - DNA, 79 bp, Homo sapiens
gttttggagcaaatctgcagtcgaggaccagctcccgatagtcacccaactctggctcagtggcgctaagccgtgccag

SEQ ID NO: 141878 - DNA, 81 bp, Homo sapiens
aaatctgcagtcgaggaccagctcccgatagtcacccaactctggctcagtggcgctaagccgtgccaggcgtgtgtgcag

SEQ ID NO: 141879 - DNA, 80 bp, Homo sapiens
agtcgaggaccagctcccgatagtcacccaactctggctcagtggcgctaagccgtgccaggcgtgtgtgcagggcacta

SEQ ID NO: 141880 - DNA, 83 bp, Homo sapiens
agctcccgatagtcacccaactctggctcagtggcgctaagccgtgccaggcgtgtgtgcagggcactaggatcatctgtcac

SEQ ID NO: 141881 - DNA, 83 bp, Homo sapiens
atagtcacccaactctggctcagtggcgctaagccgtgccaggcgtgtgtgcagggcactaggatcatctgtcacgctggccg

SEQ ID NO: 141882 - DNA, 85 bp, Homo sapiens
aactctggctcagtggcgctaagccgtgccaggcgtgtgtgcagggcactaggatcatctgtcacgctggccggctgtacagtca

SEQ ID NO: 141883 - DNA, 83 bp, Homo sapiens
agtggcgctaagccgtgccaggcgtgtgtgcagggcactaggatcatctgtcacgctggccggctgtacagtcaggaagtata

SEQ ID NO: 141884 - DNA, 81 bp, Homo sapiens
ctaagccgtgccaggcgtgtgtgcagggcactaggatcatctgtcacgctggccggctgtacagtcaggaagtatacgaag

SEQ ID NO: 141885 - DNA, 80 bp, Homo sapiens
cgtgtgtgcagggcactaggatcatctgtcacgctggccggctgtacagtcaggaagtatacgaaggctcccgtgtggaa

SEQ ID NO: 141886 - DNA, 80 bp, Homo sapiens
agggcactaggatcatctgtcacgctggccggctgtacagtcaggaagtatacgaaggctcccgtgtggaagctgtgcac

SEQ ID NO: 141887 - DNA, 80 bp, Homo sapiens
atcatctgtcacgctggccggctgtacagtcaggaagtatacgaaggctcccgtgtggaagctgtgcacgtattcaatac

SEQ ID NO: 141888 - DNA, 80 bp, Homo sapiens
gctgtacagtcaggaagtatacgaaggctcccgtgtggaagctgtgcacgtattcaatactgtaggagacaagatgcttg

SEQ ID NO: 141889 - DNA, 79 bp, Homo sapiens
acagtcaggaagtatacgaaggctcccgtgtggaagctgtgcacgtattcaatactgtaggagacaagatgcttgggca

SEQ ID NO: 141890 - DNA, 77 bp, Homo sapiens
acgtattcaatactgtaggagacaagatgcttgggcagcactgacaacgccacaaagcccggtgcgaatcccgaggc

SEQ ID NO: 141891 - DNA, 77 bp, Homo sapiens
aatactgtaggagacaagatgcttgggcagcactgacaacgccacaaagcccggtgcgaatcccgaggcgtcagcct

SEQ ID NO: 141892 - DNA, 80 bp, Homo sapiens
aagatgcttgggcagcactgacaacgccacaaagcccggtgcgaatcccgaggcgtcagccttgagacgcctgatagaca

SEQ ID NO: 141893 - DNA, 78 bp, Homo sapiens
acaacgccacaaagcccggtgcgaatcccgaggcgtcagccttgagacgcctgatagacactgagcgtgggctgaagc

SEQ ID NO: 141894 - DNA, 80 bp, Homo sapiens
acaaagcccggtgcgaatcccgaggcgtcagccttgagacgcctgatagacactgagcgtgggctgaagctggcagccac

SEQ ID NO: 141895 - DNA, 85 bp, Homo sapiens
aggcgtcagccttgagacgcctgatagacactgagcgtgggctgaagctggcagccacggctgcgtccagtgaggatgccacgta

SEQ ID NO: 141896 - DNA, 84 bp, Homo sapiens
cttgagacgcctgatagacactgagcgtgggctgaagctggcagccacggctgcgtccagtgaggatgccacgtagaaatagga

SEQ ID NO: 141897 - DNA, 82 bp, Homo sapiens
acgcctgatagacactgagcgtgggctgaagctggcagccacggctgcgtccagtgaggatgccacgtagaaataggaggcc

SEQ ID NO: 141898 - DNA, 82 bp, Homo sapiens
gctgaagctggcagccacggctgcgtccagtgaggatgccacgtagaaataggaggcctggccttgctcaaccacagttaca

SEQ ID NO: 141899 - DNA, 76 bp, Homo sapiens
atgccacgtagaaataggaggcctggccttgctcaaccacagttacacgggtgcccaatgggctggccacacagtc

SEQ ID NO: 141900 - DNA, 75 bp, Homo sapiens
gccttgctcaaccacagttacacgggtgcccaatgggctggccacacagtcggggcagtcatcgggccggttatg

SEQ ID NO: 141901 - DNA, 74 bp, Homo sapiens
agttacacgggtgcccaatgggctggccacacagtcggggcagtcatcgggccggttatggtgggctgagaaga

SEQ ID NO: 141902 - DNA, 83 bp, Homo sapiens
caatgggctggccacacagtcggggcagtcatcgggccggttatggtgggctgagaagaggcaggctggcgctgccagatgca

SEQ ID NO: 141903 - DNA, 83 bp, Homo sapiens
tggccacacagtcggggcagtcatcgggccggttatggtgggctgagaagaggcaggctggcgctgccagatgcacggctgtc

SEQ ID NO: 141904 - DNA, 81 bp, Homo sapiens
tcatcgggccggttatggtgggctgagaagaggcaggctggcgctgccagatgcacggctgtcccttggggctctaggtca

SEQ ID NO: 141905 - DNA, 81 bp, Homo sapiens
ccggttatggtgggctgagaagaggcaggctggcgctgccagatgcacggctgtcccttggggctctaggtcatgcaggaa

SEQ ID NO: 141906 - DNA, 86 bp, Homo sapiens
ctgagaagaggcaggctggcgctgccagatgcacggctgtcccttggggctctaggtcatgcaggaagcagcggccctgcaggctg

SEQ ID NO: 141907 - DNA, 85 bp, Homo sapiens
aagaggcaggctggcgctgccagatgcacggctgtcccttggggctctaggtcatgcaggaagcagcggccctgcaggctggagc

SEQ ID NO: 141908 - DNA, 86 bp, Homo sapiens
tggcgctgccagatgcacggctgtcccttggggctctaggtcatgcaggaagcagcggccctgcaggctggagccacaactgacca

SEQ ID NO: 141909 - DNA, 85 bp, Homo sapiens
agatgcacggctgtcccttggggctctaggtcatgcaggaagcagcggccctgcaggctggagccacaactgaccagcgcaggca

SEQ ID NO: 141910 - DNA, 84 bp, Homo sapiens
tgtcccttggggctctaggtcatgcaggaagcagcggccctgcaggctggagccacaactgaccagcgcaggcagcgcgggatc

SEQ ID NO: 141911 - DNA, 86 bp, Homo sapiens
tctaggtcatgcaggaagcagcggccctgcaggctggagccacaactgaccagcgcaggcagcgcgggatccagcaccagcacctt

SEQ ID NO: 141912 - DNA, 86 bp, Homo sapiens
atgcaggaagcagcggccctgcaggctggagccacaactgaccagcgcaggcagcgcgggatccagcaccagcacctttgtgtctg

SEQ ID NO: 141913 - DNA, 85 bp, Homo sapiens
aagcagcggccctgcaggctggagccacaactgaccagcgcaggcagcgcgggatccagcaccagcacctttgtgtctgtgtcac

SEQ ID NO: 141914 - DNA, 80 bp, Homo sapiens
aggctggagccacaactgaccagcgcaggcagcgcgggatccagcaccagcacctttgtgtctgtgtcaccgggagggcc

SEQ ID NO: 141915 - DNA, 78 bp, Homo sapiens
agccacaactgaccagcgcaggcagcgcgggatccagcaccagcacctttgtgtctgtgtcaccgggagggccgtggg

SEQ ID NO: 141916 - DNA, 77 bp, Homo sapiens
ctgaccagcgcaggcagcgcgggatccagcaccagcacctttgtgtctgtgtcaccgggagggccgtggggtcctgg

SEQ ID NO: 141917 - DNA, 77 bp, Homo sapiens
agcgcgggatccagcaccagcacctttgtgtctgtgtcaccgggagggccgtggggtcctgggccacaggctgcaca

SEQ ID NO: 141918 - DNA, 78 bp, Homo sapiens
atccagcaccagcacctttgtgtctgtgtcaccgggagggccgtggggtcctgggccacaggctgcacacgtctggca

SEQ ID NO: 141919 - DNA, 78 bp, Homo sapiens
ttgtgtctgtgtcaccgggagggccgtggggtcctgggccacaggctgcacacgtctggcagccagggtctccagcag

SEQ ID NO: 141920 - DNA, 75 bp, Homo sapiens
tcaccgggagggccgtggggtcctgggccacaggctgcacacgtctggcagccagggtctccagcagggcccgtg

SEQ ID NO: 141921 - DNA, 79 bp, Homo sapiens
gtggggtcctgggccacaggctgcacacgtctggcagccagggtctccagcagggcccgtggccaggctctggacagac

SEQ ID NO: 141922 - DNA, 84 bp, Homo sapiens
ctgcacacgtctggcagccagggtctccagcagggcccgtggccaggctctggacagacttcaggtcaggcccaagcacatgca

SEQ ID NO: 141923 - DNA, 84 bp, Homo sapiens
tctggcagccagggtctccagcagggcccgtggccaggctctggacagacttcaggtcaggcccaagcacatgcaggcgattgc

SEQ ID NO: 141924 - DNA, 82 bp, Homo sapiens
agcagggcccgtggccaggctctggacagacttcaggtcaggcccaagcacatgcaggcgattgcgtatggctacaaacaca

SEQ ID NO: 141925 - DNA, 86 bp, Homo sapiens
tggccaggctctggacagacttcaggtcaggcccaagcacatgcaggcgattgcgtatggctacaaacacagcactctcatttctg

SEQ ID NO: 141926 - DNA, 84 bp, Homo sapiens
tggacagacttcaggtcaggcccaagcacatgcaggcgattgcgtatggctacaaacacagcactctcatttctgtcgccctcg

SEQ ID NO: 141927 - DNA, 82 bp, Homo sapiens
agacttcaggtcaggcccaagcacatgcaggcgattgcgtatggctacaaacacagcactctcatttctgtcgccctcgtag

SEQ ID NO: 141928 - DNA, 83 bp, Homo sapiens
cccaagcacatgcaggcgattgcgtatggctacaaacacagcactctcatttctgtcgccctcgtaggtcaccatggcctgta

SEQ ID NO: 141929 - DNA, 82 bp, Homo sapiens
acatgcaggcgattgcgtatggctacaaacacagcactctcatttctgtcgccctcgtaggtcaccatggcctgtaccaggc

SEQ ID NO: 141930 - DNA, 78 bp, Homo sapiens
cgattgcgtatggctacaaacacagcactctcatttctgtcgccctcgtaggtcaccatggcctgtaccaggcctccg

SEQ ID NO: 141931 - DNA, 77 bp, Homo sapiens
atggctacaaacacagcactctcatttctgtcgccctcgtaggtcaccatggcctgtaccaggcctccggcggagaa

SEQ ID NO: 141932 - DNA, 74 bp, Homo sapiens
atttctgtcgccctcgtaggtcaccatggcctgtaccaggcctccggcggagaagctgggcaccacgtacttca

SEQ ID NO: 141933 - DNA, 73 bp, Homo sapiens
cctcgtaggtcaccatggcctgtaccaggcctccggcggagaagctgggcaccacgtacttcacgtcaaagtc

SEQ ID NO: 141934 - DNA, 74 bp, Homo sapiens
aggtcaccatggcctgtaccaggcctccggcggagaagctgggcaccacgtacttcacgtcaaagtcgcgagag

SEQ ID NO: 141935 - DNA, 72 bp, Homo sapiens
aggcctccggcggagaagctgggcaccacgtacttcacgtcaaagtcgcgagaggccgcgtagggggtgcgc

SEQ ID NO: 141936 - DNA, 74 bp, Homo sapiens
aagctgggcaccacgtacttcacgtcaaagtcgcgagaggccgcgtagggggtgcgcgggcactgccagtcctc

SEQ ID NO: 141937 - DNA, 72 bp, Homo sapiens
accacgtacttcacgtcaaagtcgcgagaggccgcgtagggggtgcgcgggcactgccagtcctcgcccgcc

SEQ ID NO: 141938 - DNA, 73 bp, Homo sapiens
tacttcacgtcaaagtcgcgagaggccgcgtagggggtgcgcgggcactgccagtcctcgcccgccgcgggct

SEQ ID NO: 141939 - DNA, 78 bp, Homo sapiens
agaggccgcgtagggggtgcgcgggcactgccagtcctcgcccgccgcgggcttggcaggcaacagcagcagcaacag

SEQ ID NO: 141940 - DNA, 81 bp, Homo sapiens
gggtgcgcgggcactgccagtcctcgcccgccgcgggcttggcaggcaacagcagcagcaacaggaaggactgaggcagcg

SEQ ID NO: 141941 - DNA, 81 bp, Homo sapiens
cactgccagtcctcgcccgccgcgggcttggcaggcaacagcagcagcaacaggaaggactgaggcagcggcgggaggagc

SEQ ID NO: 141942 - DNA, 80 bp, Homo sapiens
agtcctcgcccgccgcgggcttggcaggcaacagcagcagcaacaggaaggactgaggcagcggcgggaggagctccatc

SEQ ID NO: 141943 - DNA, 82 bp, Homo sapiens
ccgcgggcttggcaggcaacagcagcagcaacaggaaggactgaggcagcggcgggaggagctccatcgaggcgagctggga

SEQ ID NO: 141944 - DNA, 82 bp, Homo sapiens
ttggcaggcaacagcagcagcaacaggaaggactgaggcagcggcgggaggagctccatcgaggcgagctgggaccctagag

SEQ ID NO: 141945 - DNA, 79 bp, Homo sapiens
agcagcagcaacaggaaggactgaggcagcggcgggaggagctccatcgaggcgagctgggaccctagaggatccctac

SEQ ID NO: 141946 - DNA, 74 bp, Homo sapiens
aacaggaaggactgaggcagcggcgggaggagctccatcgaggcgagctgggaccctagaggatccctaccggc

SEQ ID NO: 141947 - DNA, 74 bp, Homo sapiens
aggactgaggcagcggcgggaggagctccatcgaggcgagctgggaccctagaggatccctaccggcctgggcc

SEQ ID NO: 141948 - DNA, 72 bp, Homo sapiens
aggagctccatcgaggcgagctgggaccctagaggatccctaccggcctgggcctggacctgggcgtgggcc

SEQ ID NO: 141949 - DNA, 71 bp, Homo sapiens
tcgaggcgagctgggaccctagaggatccctaccggcctgggcctggacctgggcgtgggcctggctgggg

SEQ ID NO: 141950 - DNA, 68 bp, Homo sapiens
accctagaggatccctaccggcctgggcctggacctgggcgtgggcctggctgggggcccgactcgag

SEQ ID NO: 141951 - DNA, 70 bp, Homo sapiens
gcctgggcctggacctgggcgtgggcctggctgggggcccgactcgaggtctggactgggccaaatttaa

SEQ ID NO: 141952 - DNA, 71 bp, Homo sapiens
tggacctgggcgtgggcctggctgggggcccgactcgaggtctggactgggccaaatttaagcagcggtcc

SEQ ID NO: 141953 - DNA, 70 bp, Homo sapiens
cgtgggcctggctgggggcccgactcgaggtctggactgggccaaatttaagcagcggtcccgacagccc

SEQ ID NO: 141954 - DNA, 71 bp, Homo sapiens
ctgggggcccgactcgaggtctggactgggccaaatttaagcagcggtcccgacagccccaagatagcgga

SEQ ID NO: 141955 - DNA, 68 bp, Homo sapiens
ggtctggactgggccaaatttaagcagcggtcccgacagccccaagatagcggacccccgccccaggt

SEQ ID NO: 141956 - DNA, 67 bp, Homo sapiens
ccaaatttaagcagcggtcccgacagccccaagatagcggacccccgccccaggttcctgtgaaacc

SEQ ID NO: 141957 - DNA, 68 bp, Homo sapiens
tttaagcagcggtcccgacagccccaagatagcggacccccgccccaggttcctgtgaaacccaaatc

SEQ ID NO: 141958 - DNA, 65 bp, Homo sapiens
ggtcccgacagccccaagatagcggacccccgccccaggttcctgtgaaacccaaatcccttccc

SEQ ID NO: 141959 - DNA, 65 bp, Homo sapiens
aagatagcggacccccgccccaggttcctgtgaaacccaaatcccttcccggccctcgggtctga

SEQ ID NO: 141960 - DNA, 66 bp, Homo sapiens
acccccgccccaggttcctgtgaaacccaaatcccttcccggccctcgggtctgagcacctgacgc

SEQ ID NO: 141961 - DNA, 72 bp, Homo sapiens
caggttcctgtgaaacccaaatcccttcccggccctcgggtctgagcacctgacgcctgcggacgcacgaca

SEQ ID NO: 141962 - DNA, 73 bp, Homo sapiens
tgtgaaacccaaatcccttcccggccctcgggtctgagcacctgacgcctgcggacgcacgacagcaacgccc

SEQ ID NO: 141963 - DNA, 76 bp, Homo sapiens
ttcccggccctcgggtctgagcacctgacgcctgcggacgcacgacagcaacgccccagccgcctcacctgccgcc

SEQ ID NO: 141964 - DNA, 81 bp, Homo sapiens
tctgagcacctgacgcctgcggacgcacgacagcaacgccccagccgcctcacctgccgccccagccgccgctgtacactg

SEQ ID NO: 141965 - DNA, 80 bp, Homo sapiens
cctgcggacgcacgacagcaacgccccagccgcctcacctgccgccccagccgccgctgtacactggcgcttagcgctca

SEQ ID NO: 141966 - DNA, 77 bp, Homo sapiens
acagcaacgccccagccgcctcacctgccgccccagccgccgctgtacactggcgcttagcgctcagccgacccgag

SEQ ID NO: 141967 - DNA, 75 bp, Homo sapiens
cccagccgcctcacctgccgccccagccgccgctgtacactggcgcttagcgctcagccgacccgagggcgccgg

SEQ ID NO: 141968 - DNA, 87 bp, Homo sapiens
tctccttcccgagcagctctgggctgcagagccagctgcgtgccatcccgctctgcttcagcgcacgctgaagacggcactaggacc

SEQ ID NO: 141969 - DNA, 87 bp, Homo sapiens
gagcagctctgggctgcagagccagctgcgtgccatcccgctctgcttcagcgcacgctgaagacggcactaggacccagggaagtc

SEQ ID NO: 141970 - DNA, 83 bp, Homo sapiens
ctctgggctgcagagccagctgcgtgccatcccgctctgcttcagcgcacgctgaagacggcactaggacccagggaagtccc

SEQ ID NO: 141971 - DNA, 79 bp, Homo sapiens
agagccagctgcgtgccatcccgctctgcttcagcgcacgctgaagacggcactaggacccagggaagtccccgagcgg

SEQ ID NO: 141972 - DNA, 76 bp, Homo sapiens
ctgcgtgccatcccgctctgcttcagcgcacgctgaagacggcactaggacccagggaagtccccgagcggggttc

SEQ ID NO: 141973 - DNA, 74 bp, Homo sapiens
ctctgcttcagcgcacgctgaagacggcactaggacccagggaagtccccgagcggggttcgcggaaaggcagc

SEQ ID NO: 141974 - DNA, 73 bp, Homo sapiens
cttcagcgcacgctgaagacggcactaggacccagggaagtccccgagcggggttcgcggaaaggcagccaga

SEQ ID NO: 141975 - DNA, 68 bp, Homo sapiens
aagacggcactaggacccagggaagtccccgagcggggttcgcggaaaggcagccagactcctcctta

SEQ ID NO: 141976 - DNA, 71 bp, Homo sapiens
taggacccagggaagtccccgagcggggttcgcggaaaggcagccagactcctccttatctccagtgtcaa

SEQ ID NO: 141977 - DNA, 71 bp, Homo sapiens
agggaagtccccgagcggggttcgcggaaaggcagccagactcctccttatctccagtgtcaaacttgaca

SEQ ID NO: 141978 - DNA, 80 bp, Homo sapiens
gagcggggttcgcggaaaggcagccagactcctccttatctccagtgtcaaacttgacatcagcctgcgagcggagcatg

SEQ ID NO: 141979 - DNA, 80 bp, Homo sapiens
ttcgcggaaaggcagccagactcctccttatctccagtgtcaaacttgacatcagcctgcgagcggagcatggtaacttc

SEQ ID NO: 141980 - DNA, 81 bp, Homo sapiens
aaaggcagccagactcctccttatctccagtgtcaaacttgacatcagcctgcgagcggagcatggtaacttctccagcaa

SEQ ID NO: 141981 - DNA, 83 bp, Homo sapiens
agactcctccttatctccagtgtcaaacttgacatcagcctgcgagcggagcatggtaacttctccagcaatcagagcgctcc

SEQ ID NO: 141982 - DNA, 85 bp, Homo sapiens
ttatctccagtgtcaaacttgacatcagcctgcgagcggagcatggtaacttctccagcaatcagagcgctccccctcacatcag

SEQ ID NO: 141983 - DNA, 87 bp, Homo sapiens
aaacttgacatcagcctgcgagcggagcatggtaacttctccagcaatcagagcgctccccctcacatcagtggcatgcttcatgga

SEQ ID NO: 141984 - DNA, 90 bp, Homo sapiens
acatcagcctgcgagcggagcatggtaacttctccagcaatcagagcgctccccctcacatcagtggcatgcttcatggagatatgctcc

SEQ ID NO: 141985 - DNA, 89 bp, Homo sapiens
cgagcggagcatggtaacttctccagcaatcagagcgctccccctcacatcagtggcatgcttcatggagatatgctcctctcactgcc

SEQ ID NO: 141986 - DNA, 89 bp, Homo sapiens
atggtaacttctccagcaatcagagcgctccccctcacatcagtggcatgcttcatggagatatgctcctctcactgccctctgcacca

SEQ ID NO: 141987 - DNA, 92 bp, Homo sapiens
ttctccagcaatcagagcgctccccctcacatcagtggcatgcttcatggagatatgctcctctcactgccctctgcaccagcaacatggat

SEQ ID NO: 141988 - DNA, 93 bp, Homo sapiens
atcagagcgctccccctcacatcagtggcatgcttcatggagatatgctcctctcactgccctctgcaccagcaacatggattgtcagctctc

SEQ ID NO: 141989 - DNA, 91 bp, Homo sapiens
cctcacatcagtggcatgcttcatggagatatgctcctctcactgccctctgcaccagcaacatggattgtcagctctccatcctcctcct

SEQ ID NO: 141990 - DNA, 92 bp, Homo sapiens
atcagtggcatgcttcatggagatatgctcctctcactgccctctgcaccagcaacatggattgtcagctctccatcctcctccttctcagc

SEQ ID NO: 141991 - DNA, 91 bp, Homo sapiens
ttcatggagatatgctcctctcactgccctctgcaccagcaacatggattgtcagctctccatcctcctccttctcagctgctctgttctc

SEQ ID NO: 141992 - DNA, 89 bp, Homo sapiens
atatgctcctctcactgccctctgcaccagcaacatggattgtcagctctccatcctcctccttctcagctgctctgttctcgacagct

SEQ ID NO: 141993 - DNA, 86 bp, Homo sapiens
ctctcactgccctctgcaccagcaacatggattgtcagctctccatcctcctccttctcagctgctctgttctcgacagcttcggg

SEQ ID NO: 141994 - DNA, 85 bp, Homo sapiens
tctgcaccagcaacatggattgtcagctctccatcctcctccttctcagctgctctgttctcgacagcttcggggaactgattcc

SEQ ID NO: 141995 - DNA, 81 bp, Homo sapiens
aacatggattgtcagctctccatcctcctccttctcagctgctctgttctcgacagcttcggggaactgattccgcagcct

SEQ ID NO: 141996 - DNA, 82 bp, Homo sapiens
ttgtcagctctccatcctcctccttctcagctgctctgttctcgacagcttcggggaactgattccgcagccttccaatgaa

SEQ ID NO: 141997 - DNA, 78 bp, Homo sapiens
atcctcctccttctcagctgctctgttctcgacagcttcggggaactgattccgcagccttccaatgaaggtaagcca

SEQ ID NO: 141998 - DNA, 75 bp, Homo sapiens
tctgttctcgacagcttcggggaactgattccgcagccttccaatgaaggtaagccaggtaccgcgacgcacgga

SEQ ID NO: 141999 - DNA, 77 bp, Homo sapiens
tctcgacagcttcggggaactgattccgcagccttccaatgaaggtaagccaggtaccgcgacgcacggagctctgc

SEQ ID NO: 142000 - DNA, 73 bp, Homo sapiens
ctcaacagaagcaaatagaaataattcactgttattaactgtgtttgtgtattatgttttattttagtcaatc

SEQ ID NO: 142001 - DNA, 74 bp, Homo sapiens
gcaaatagaaataattcactgttattaactgtgtttgtgtattatgttttattttagtcaatctactggattca

SEQ ID NO: 142002 - DNA, 72 bp, Homo sapiens
attcactgttattaactgtgtttgtgtattatgttttattttagtcaatctactggattcaaaaacaattca

SEQ ID NO: 142003 - DNA, 70 bp, Homo sapiens
ctgttattaactgtgtttgtgtattatgttttattttagtcaatctactggattcaaaaacaattcaagg

SEQ ID NO: 142004 - DNA, 73 bp, Homo sapiens
tttgtgtattatgttttattttagtcaatctactggattcaaaaacaattcaaggggagctgggctggatctc

SEQ ID NO: 142005 - DNA, 75 bp, Homo sapiens
atgttttattttagtcaatctactggattcaaaaacaattcaaggggagctgggctggatctcttatccatcaca

SEQ ID NO: 142006 - DNA, 75 bp, Homo sapiens
ttattttagtcaatctactggattcaaaaacaattcaaggggagctgggctggatctcttatccatcacatgggg

SEQ ID NO: 142007 - DNA, 76 bp, Homo sapiens
aatctactggattcaaaaacaattcaaggggagctgggctggatctcttatccatcacatggggtgagttcaataa

SEQ ID NO: 142008 - DNA, 76 bp, Homo sapiens
attcaaaaacaattcaaggggagctgggctggatctcttatccatcacatggggtgagttcaataaactatcacaa

SEQ ID NO: 142009 - DNA, 81 bp, Homo sapiens
ttattatcattaattctgcctcactctctgtttctctttgattcttcagtgggaagagatcagtggtgtggatgaacatta

SEQ ID NO: 142010 - DNA, 79 bp, Homo sapiens
attaattctgcctcactctctgtttctctttgattcttcagtgggaagagatcagtggtgtggatgaacattacacacc

SEQ ID NO: 142011 - DNA, 78 bp, Homo sapiens
actctctgtttctctttgattcttcagtgggaagagatcagtggtgtggatgaacattacacacccatcaggacttac

SEQ ID NO: 142012 - DNA, 80 bp, Homo sapiens
ctctttgattcttcagtgggaagagatcagtggtgtggatgaacattacacacccatcaggacttaccaggtgtgcaatg

SEQ ID NO: 142013 - DNA, 81 bp, Homo sapiens
attcttcagtgggaagagatcagtggtgtggatgaacattacacacccatcaggacttaccaggtgtgcaatgtcatggac

SEQ ID NO: 142014 - DNA, 81 bp, Homo sapiens
aagagatcagtggtgtggatgaacattacacacccatcaggacttaccaggtgtgcaatgtcatggaccacagtcaaaaca

SEQ ID NO: 142015 - DNA, 80 bp, Homo sapiens
atcagtggtgtggatgaacattacacacccatcaggacttaccaggtgtgcaatgtcatggaccacagtcaaaacaattg

SEQ ID NO: 142016 - DNA, 79 bp, Homo sapiens
atgaacattacacacccatcaggacttaccaggtgtgcaatgtcatggaccacagtcaaaacaattggctgagaacaaa

SEQ ID NO: 142017 - DNA, 77 bp, Homo sapiens
ttacacacccatcaggacttaccaggtgtgcaatgtcatggaccacagtcaaaacaattggctgagaacaaactggg

SEQ ID NO: 142018 - DNA, 74 bp, Homo sapiens
aggacttaccaggtgtgcaatgtcatggaccacagtcaaaacaattggctgagaacaaactgggtccccaggaa

SEQ ID NO: 142019 - DNA, 78 bp, Homo sapiens
gtgtgcaatgtcatggaccacagtcaaaacaattggctgagaacaaactgggtccccaggaactcagctcagaagatt

SEQ ID NO: 142020 - DNA, 76 bp, Homo sapiens
aatgtcatggaccacagtcaaaacaattggctgagaacaaactgggtccccaggaactcagctcagaagatttatg

SEQ ID NO: 142021 - DNA, 75 bp, Homo sapiens
acagtcaaaacaattggctgagaacaaactgggtccccaggaactcagctcagaagatttatgtggagctcaagt

SEQ ID NO: 142022 - DNA, 76 bp, Homo sapiens
aaacaattggctgagaacaaactgggtccccaggaactcagctcagaagatttatgtggagctcaagttcactcta

SEQ ID NO: 142023 - DNA, 79 bp, Homo sapiens
gaacaaactgggtccccaggaactcagctcagaagatttatgtggagctcaagttcactctacgagactgcaatagcat

SEQ ID NO: 142024 - DNA, 79 bp, Homo sapiens
aactgggtccccaggaactcagctcagaagatttatgtggagctcaagttcactctacgagactgcaatagcattccat

SEQ ID NO: 142025 - DNA, 78 bp, Homo sapiens
aactcagctcagaagatttatgtggagctcaagttcactctacgagactgcaatagcattccattggttttaggaact

SEQ ID NO: 142026 - DNA, 78 bp, Homo sapiens
agaagatttatgtggagctcaagttcactctacgagactgcaatagcattccattggttttaggaacttgcaaggaga

SEQ ID NO: 142027 - DNA, 79 bp, Homo sapiens
tttatgtggagctcaagttcactctacgagactgcaatagcattccattggttttaggaacttgcaaggagacattcaa

SEQ ID NO: 142028 - DNA, 76 bp, Homo sapiens
aagttcactctacgagactgcaatagcattccattggttttaggaacttgcaaggagacattcaacctgtactaca

SEQ ID NO: 142029 - DNA, 77 bp, Homo sapiens
actctacgagactgcaatagcattccattggttttaggaacttgcaaggagacattcaacctgtactacatggagtc

SEQ ID NO: 142030 - DNA, 82 bp, Homo sapiens
actgcaatagcattccattggttttaggaacttgcaaggagacattcaacctgtactacatggagtctgatgatgatcatgg

SEQ ID NO: 142031 - DNA, 78 bp, Homo sapiens
tccattggttttaggaacttgcaaggagacattcaacctgtactacatggagtctgatgatgatcatggggtgaaatt

SEQ ID NO: 142032 - DNA, 82 bp, Homo sapiens
ttttaggaacttgcaaggagacattcaacctgtactacatggagtctgatgatgatcatggggtgaaatttcgagagcatca

SEQ ID NO: 142033 - DNA, 83 bp, Homo sapiens
ttgcaaggagacattcaacctgtactacatggagtctgatgatgatcatggggtgaaatttcgagagcatcagtttacaaaga

SEQ ID NO: 142034 - DNA, 81 bp, Homo sapiens
attcaacctgtactacatggagtctgatgatgatcatggggtgaaatttcgagagcatcagtttacaaagattgacaccat

SEQ ID NO: 142035 - DNA, 87 bp, Homo sapiens
tgtactacatggagtctgatgatgatcatggggtgaaatttcgagagcatcagtttacaaagattgacaccattgcagctgatgaaa

SEQ ID NO: 142036 - DNA, 83 bp, Homo sapiens
atgatgatcatggggtgaaatttcgagagcatcagtttacaaagattgacaccattgcagctgatgaaagtttcactcaaatg

SEQ ID NO: 142037 - DNA, 79 bp, Homo sapiens
gggtgaaatttcgagagcatcagtttacaaagattgacaccattgcagctgatgaaagtttcactcaaatggatcttgg

SEQ ID NO: 142038 - DNA, 80 bp, Homo sapiens
agagcatcagtttacaaagattgacaccattgcagctgatgaaagtttcactcaaatggatcttggggaccgtattctga

SEQ ID NO: 142039 - DNA, 78 bp, Homo sapiens
agtttacaaagattgacaccattgcagctgatgaaagtttcactcaaatggatcttggggaccgtattctgaagctca

SEQ ID NO: 142040 - DNA, 81 bp, Homo sapiens
agattgacaccattgcagctgatgaaagtttcactcaaatggatcttggggaccgtattctgaagctcaacactgagatta

SEQ ID NO: 142041 - DNA, 79 bp, Homo sapiens
attgcagctgatgaaagtttcactcaaatggatcttggggaccgtattctgaagctcaacactgagattagagaagtag

SEQ ID NO: 142042 - DNA, 75 bp, Homo sapiens
atgaaagtttcactcaaatggatcttggggaccgtattctgaagctcaacactgagattagagaagtaggtcctg

SEQ ID NO: 142043 - DNA, 77 bp, Homo sapiens
ttcactcaaatggatcttggggaccgtattctgaagctcaacactgagattagagaagtaggtcctgtcaacaagaa

SEQ ID NO: 142044 - DNA, 73 bp, Homo sapiens
atcttggggaccgtattctgaagctcaacactgagattagagaagtaggtcctgtcaacaagaagggatttta

SEQ ID NO: 142045 - DNA, 73 bp, Homo sapiens
accgtattctgaagctcaacactgagattagagaagtaggtcctgtcaacaagaagggattttatttggcatt

SEQ ID NO: 142046 - DNA, 74 bp, Homo sapiens
aagctcaacactgagattagagaagtaggtcctgtcaacaagaagggattttatttggcatttcaagatgttgg

SEQ ID NO: 142047 - DNA, 74 bp, Homo sapiens
actgagattagagaagtaggtcctgtcaacaagaagggattttatttggcatttcaagatgttggtgcttgtgt

SEQ ID NO: 142048 - DNA, 74 bp, Homo sapiens
ttagagaagtaggtcctgtcaacaagaagggattttatttggcatttcaagatgttggtgcttgtgttgccttg

SEQ ID NO: 142049 - DNA, 78 bp, Homo sapiens
tcctgtcaacaagaagggattttatttggcatttcaagatgttggtgcttgtgttgccttggtgtctgtgagagtata

SEQ ID NO: 142050 - DNA, 75 bp, Homo sapiens
gaagggattttatttggcatttcaagatgttggtgcttgtgttgccttggtgtctgtgagagtatacttcaaaaa

SEQ ID NO: 142051 - DNA, 77 bp, Homo sapiens
ttatttggcatttcaagatgttggtgcttgtgttgccttggtgtctgtgagagtatacttcaaaaagtgcccattta

SEQ ID NO: 142052 - DNA, 77 bp, Homo sapiens
atttcaagatgttggtgcttgtgttgccttggtgtctgtgagagtatacttcaaaaagtgcccatttacagtgaaga

SEQ ID NO: 142053 - DNA, 78 bp, Homo sapiens
atgttggtgcttgtgttgccttggtgtctgtgagagtatacttcaaaaagtgcccatttacagtgaagaatctggcta

SEQ ID NO: 142054 - DNA, 78 bp, Homo sapiens
ttgtgttgccttggtgtctgtgagagtatacttcaaaaagtgcccatttacagtgaagaatctggctatgtttccaga

SEQ ID NO: 142055 - DNA, 77 bp, Homo sapiens
tgtctgtgagagtatacttcaaaaagtgcccatttacagtgaagaatctggctatgtttccagacacggtacccatg

SEQ ID NO: 142056 - DNA, 74 bp, Homo sapiens
agagtatacttcaaaaagtgcccatttacagtgaagaatctggctatgtttccagacacggtacccatggactc

SEQ ID NO: 142057 - DNA, 73 bp, Homo sapiens
acttcaaaaagtgcccatttacagtgaagaatctggctatgtttccagacacggtacccatggactcccagtc

SEQ ID NO: 142058 - DNA, 74 bp, Homo sapiens
catttacagtgaagaatctggctatgtttccagacacggtacccatggactcccagtccctggtggaggttaga

SEQ ID NO: 142059 - DNA, 73 bp, Homo sapiens
tgaagaatctggctatgtttccagacacggtacccatggactcccagtccctggtggaggttagagggtcttg

SEQ ID NO: 142060 - DNA, 71 bp, Homo sapiens
tttccagacacggtacccatggactcccagtccctggtggaggttagagggtcttgtgtcaacaattctaa

SEQ ID NO: 142061 - DNA, 69 bp, Homo sapiens
acggtacccatggactcccagtccctggtggaggttagagggtcttgtgtcaacaattctaaggaggaa

SEQ ID NO: 142062 - DNA, 72 bp, Homo sapiens
tcccagtccctggtggaggttagagggtcttgtgtcaacaattctaaggaggaagatcctccaaggatgtac

SEQ ID NO: 142063 - DNA, 74 bp, Homo sapiens
aggttagagggtcttgtgtcaacaattctaaggaggaagatcctccaaggatgtactgcagtacagaaggcgaa

SEQ ID NO: 142064 - DNA, 77 bp, Homo sapiens
ttgtgtcaacaattctaaggaggaagatcctccaaggatgtactgcagtacagaaggcgaatggcttgtacccattg

SEQ ID NO: 142065 - DNA, 82 bp, Homo sapiens
tccaaggatgtactgcagtacagaaggcgaatggcttgtacccattggcaagtgttcctgcaatgctggctatgaagaaaga

SEQ ID NO: 142066 - DNA, 79 bp, Homo sapiens
atgtactgcagtacagaaggcgaatggcttgtacccattggcaagtgttcctgcaatgctggctatgaagaaagaggtt

SEQ ID NO: 142067 - DNA, 79 bp, Homo sapiens
tacagaaggcgaatggcttgtacccattggcaagtgttcctgcaatgctggctatgaagaaagaggttttatgtgccaa

SEQ ID NO: 142068 - DNA, 76 bp, Homo sapiens
ccattggcaagtgttcctgcaatgctggctatgaagaaagaggttttatgtgccaaggtaagagccttctctattt

SEQ ID NO: 142069 - DNA, 73 bp, Homo sapiens
aagtgttcctgcaatgctggctatgaagaaagaggttttatgtgccaaggtaagagccttctctatttttctt

SEQ ID NO: 142070 - DNA, 69 bp, Homo sapiens
caaaaaaattatcacagacttttaaaagagagtcattttgtttgtagcttgtcgaccaggtttctacaa

SEQ ID NO: 142071 - DNA, 72 bp, Homo sapiens
aattatcacagacttttaaaagagagtcattttgtttgtagcttgtcgaccaggtttctacaaggcattgga

SEQ ID NO: 142072 - DNA, 72 bp, Homo sapiens
ttttaaaagagagtcattttgtttgtagcttgtcgaccaggtttctacaaggcattggatggtaatatgaag

SEQ ID NO: 142073 - DNA, 77 bp, Homo sapiens
agagagtcattttgtttgtagcttgtcgaccaggtttctacaaggcattggatggtaatatgaagtgtgctaagtgc

SEQ ID NO: 142074 - DNA, 77 bp, Homo sapiens
tttgtttgtagcttgtcgaccaggtttctacaaggcattggatggtaatatgaagtgtgctaagtgcccgcctcaca

SEQ ID NO: 142075 - DNA, 77 bp, Homo sapiens
cttgtcgaccaggtttctacaaggcattggatggtaatatgaagtgtgctaagtgcccgcctcacagttctactcag

SEQ ID NO: 142076 - DNA, 80 bp, Homo sapiens
tttctacaaggcattggatggtaatatgaagtgtgctaagtgcccgcctcacagttctactcaggaagatggttcaatga

SEQ ID NO: 142077 - DNA, 80 bp, Homo sapiens
aaggcattggatggtaatatgaagtgtgctaagtgcccgcctcacagttctactcaggaagatggttcaatgaactgcag

SEQ ID NO: 142078 - DNA, 81 bp, Homo sapiens
taatatgaagtgtgctaagtgcccgcctcacagttctactcaggaagatggttcaatgaactgcaggtgtgagaataatta

SEQ ID NO: 142079 - DNA, 78 bp, Homo sapiens
aagtgtgctaagtgcccgcctcacagttctactcaggaagatggttcaatgaactgcaggtgtgagaataattacttc

SEQ ID NO: 142080 - DNA, 78 bp, Homo sapiens
tgcccgcctcacagttctactcaggaagatggttcaatgaactgcaggtgtgagaataattacttccgggcagacaaa

SEQ ID NO: 142081 - DNA, 75 bp, Homo sapiens
acagttctactcaggaagatggttcaatgaactgcaggtgtgagaataattacttccgggcagacaaagaccctc

SEQ ID NO: 142082 - DNA, 78 bp, Homo sapiens
tactcaggaagatggttcaatgaactgcaggtgtgagaataattacttccgggcagacaaagaccctccatccatggc

SEQ ID NO: 142083 - DNA, 76 bp, Homo sapiens
agatggttcaatgaactgcaggtgtgagaataattacttccgggcagacaaagaccctccatccatggcttgtacc

SEQ ID NO: 142084 - DNA, 73 bp, Homo sapiens
ctgcaggtgtgagaataattacttccgggcagacaaagaccctccatccatggcttgtacccgtgagtagttt

SEQ ID NO: 142085 - DNA, 73 bp, Homo sapiens
gagaataattacttccgggcagacaaagaccctccatccatggcttgtacccgtgagtagttttgctgcaacc

SEQ ID NO: 142086 - DNA, 74 bp, Homo sapiens
taattacttccgggcagacaaagaccctccatccatggcttgtacccgtgagtagttttgctgcaacccatgcc

SEQ ID NO: 142087 - DNA, 76 bp, Homo sapiens
aagtgaggctcattaatctttgttgaactactttgcaggacctccatcttcaccaagaaatgttatctctaatata

SEQ ID NO: 142088 - DNA, 75 bp, Homo sapiens
tcattaatctttgttgaactactttgcaggacctccatcttcaccaagaaatgttatctctaatataaacgagac

SEQ ID NO: 142089 - DNA, 74 bp, Homo sapiens
tttgttgaactactttgcaggacctccatcttcaccaagaaatgttatctctaatataaacgagacctcagtta

SEQ ID NO: 142090 - DNA, 73 bp, Homo sapiens
acctccatcttcaccaagaaatgttatctctaatataaacgagacctcagttatcctggactggagttggccc

SEQ ID NO: 142091 - DNA, 74 bp, Homo sapiens
ttcaccaagaaatgttatctctaatataaacgagacctcagttatcctggactggagttggcccctggacacag

SEQ ID NO: 142092 - DNA, 73 bp, Homo sapiens
ttatctctaatataaacgagacctcagttatcctggactggagttggcccctggacacaggaggccggaaaga

SEQ ID NO: 142093 - DNA, 73 bp, Homo sapiens
tctaatataaacgagacctcagttatcctggactggagttggcccctggacacaggaggccggaaagatgtta

SEQ ID NO: 142094 - DNA, 74 bp, Homo sapiens
agacctcagttatcctggactggagttggcccctggacacaggaggccggaaagatgttaccttcaacatcata

SEQ ID NO: 142095 - DNA, 73 bp, Homo sapiens
ttatcctggactggagttggcccctggacacaggaggccggaaagatgttaccttcaacatcatatgtaaaaa

SEQ ID NO: 142096 - DNA, 72 bp, Homo sapiens
gagttggcccctggacacaggaggccggaaagatgttaccttcaacatcatatgtaaaaaatgtgggtggaa

SEQ ID NO: 142097 - DNA, 72 bp, Homo sapiens
cctggacacaggaggccggaaagatgttaccttcaacatcatatgtaaaaaatgtgggtggaatataaaaca

SEQ ID NO: 142098 - DNA, 73 bp, Homo sapiens
acaggaggccggaaagatgttaccttcaacatcatatgtaaaaaatgtgggtggaatataaaacagtgtgagc

SEQ ID NO: 142099 - DNA, 76 bp, Homo sapiens
aaagatgttaccttcaacatcatatgtaaaaaatgtgggtggaatataaaacagtgtgagccatgcagcccaaatg

SEQ ID NO: 142100 - DNA, 77 bp, Homo sapiens
ttaccttcaacatcatatgtaaaaaatgtgggtggaatataaaacagtgtgagccatgcagcccaaatgtccgcttc

SEQ ID NO: 142101 - DNA, 75 bp, Homo sapiens
tatgtaaaaaatgtgggtggaatataaaacagtgtgagccatgcagcccaaatgtccgcttcctccctcgacagt

SEQ ID NO: 142102 - DNA, 74 bp, Homo sapiens
aaaaatgtgggtggaatataaaacagtgtgagccatgcagcccaaatgtccgcttcctccctcgacagtttgga

SEQ ID NO: 142103 - DNA, 75 bp, Homo sapiens
aatataaaacagtgtgagccatgcagcccaaatgtccgcttcctccctcgacagtttggactcaccaacaccacg

SEQ ID NO: 142104 - DNA, 76 bp, Homo sapiens
aaaacagtgtgagccatgcagcccaaatgtccgcttcctccctcgacagtttggactcaccaacaccacggtgaca

SEQ ID NO: 142105 - DNA, 76 bp, Homo sapiens
atgcagcccaaatgtccgcttcctccctcgacagtttggactcaccaacaccacggtgacagtgacagaccttctg

SEQ ID NO: 142106 - DNA, 75 bp, Homo sapiens
aaatgtccgcttcctccctcgacagtttggactcaccaacaccacggtgacagtgacagaccttctggcacatac

SEQ ID NO: 142107 - DNA, 75 bp, Homo sapiens
ttcctccctcgacagtttggactcaccaacaccacggtgacagtgacagaccttctggcacatactaactacacc

SEQ ID NO: 142108 - DNA, 77 bp, Homo sapiens
actcaccaacaccacggtgacagtgacagaccttctggcacatactaactacacctttgagattgatgccgttaatg

SEQ ID NO: 142109 - DNA, 75 bp, Homo sapiens
aacaccacggtgacagtgacagaccttctggcacatactaactacacctttgagattgatgccgttaatggggtg

SEQ ID NO: 142110 - DNA, 79 bp, Homo sapiens
acagtgacagaccttctggcacatactaactacacctttgagattgatgccgttaatggggtgtcagagctgagctccc

SEQ ID NO: 142111 - DNA, 78 bp, Homo sapiens
acatactaactacacctttgagattgatgccgttaatggggtgtcagagctgagctccccaccaagacagtttgctgc

SEQ ID NO: 142112 - DNA, 83 bp, Homo sapiens
ttgagattgatgccgttaatggggtgtcagagctgagctccccaccaagacagtttgctgcggtcagcatcacaactaatcag

SEQ ID NO: 142113 - DNA, 83 bp, Homo sapiens
ttaatggggtgtcagagctgagctccccaccaagacagtttgctgcggtcagcatcacaactaatcaggctggtgagtacata

SEQ ID NO: 142114 - DNA, 86 bp, Homo sapiens
tgtcagagctgagctccccaccaagacagtttgctgcggtcagcatcacaactaatcaggctggtgagtacatactagatgcttct

SEQ ID NO: 142115 - DNA, 81 bp, Homo sapiens
agctccccaccaagacagtttgctgcggtcagcatcacaactaatcaggctggtgagtacatactagatgcttcttactct

SEQ ID NO: 142116 - DNA, 84 bp, Homo sapiens
accaagacagtttgctgcggtcagcatcacaactaatcaggctggtgagtacatactagatgcttcttactcttatcatatcac

SEQ ID NO: 142117 - DNA, 73 bp, Homo sapiens
attaatttgcttccttccaccttcccctcccatcctctctttacagctccatcacctgtcctgacgattaaga

SEQ ID NO: 142118 - DNA, 74 bp, Homo sapiens
tttgcttccttccaccttcccctcccatcctctctttacagctccatcacctgtcctgacgattaagaaagatc

SEQ ID NO: 142119 - DNA, 74 bp, Homo sapiens
cttcccctcccatcctctctttacagctccatcacctgtcctgacgattaagaaagatcggacctccagaaata

SEQ ID NO: 142120 - DNA, 78 bp, Homo sapiens
ccatcctctctttacagctccatcacctgtcctgacgattaagaaagatcggacctccagaaatagcatctctttgtc

SEQ ID NO: 142121 - DNA, 78 bp, Homo sapiens
tttacagctccatcacctgtcctgacgattaagaaagatcggacctccagaaatagcatctctttgtcctggcaagaa

SEQ ID NO: 142122 - DNA, 77 bp, Homo sapiens
atcacctgtcctgacgattaagaaagatcggacctccagaaatagcatctctttgtcctggcaagaacctgaacatc

SEQ ID NO: 142123 - DNA, 77 bp, Homo sapiens
tgtcctgacgattaagaaagatcggacctccagaaatagcatctctttgtcctggcaagaacctgaacatcctaatg

SEQ ID NO: 142124 - DNA, 76 bp, Homo sapiens
attaagaaagatcggacctccagaaatagcatctctttgtcctggcaagaacctgaacatcctaatgggatcatat

SEQ ID NO: 142125 - DNA, 78 bp, Homo sapiens
gacctccagaaatagcatctctttgtcctggcaagaacctgaacatcctaatgggatcatattggactacgaggtcaa

SEQ ID NO: 142126 - DNA, 78 bp, Homo sapiens
aatagcatctctttgtcctggcaagaacctgaacatcctaatgggatcatattggactacgaggtcaaatactatgaa

SEQ ID NO: 142127 - DNA, 75 bp, Homo sapiens
atctctttgtcctggcaagaacctgaacatcctaatgggatcatattggactacgaggtcaaatactatgaaaag

SEQ ID NO: 142128 - DNA, 73 bp, Homo sapiens
gcaagaacctgaacatcctaatgggatcatattggactacgaggtcaaatactatgaaaaggtggggaaacaa

SEQ ID NO: 142129 - DNA, 72 bp, Homo sapiens
ctgaacatcctaatgggatcatattggactacgaggtcaaatactatgaaaaggtggggaaacaatgtttaa

SEQ ID NO: 142130 - DNA, 69 bp, Homo sapiens
taatgggatcatattggactacgaggtcaaatactatgaaaaggtggggaaacaatgtttaagggttgg

SEQ ID NO: 142131 - DNA, 70 bp, Homo sapiens
atcatattggactacgaggtcaaatactatgaaaaggtggggaaacaatgtttaagggttgggctgtgta

SEQ ID NO: 142132 - DNA, 72 bp, Homo sapiens
gcattatgaagatttgattttaacatgaatttttttttctgacctcaaagcaggaacaagaaacaagttata

SEQ ID NO: 142133 - DNA, 72 bp, Homo sapiens
tgattttaacatgaatttttttttctgacctcaaagcaggaacaagaaacaagttataccattctgagggca

SEQ ID NO: 142134 - DNA, 72 bp, Homo sapiens
atgaatttttttttctgacctcaaagcaggaacaagaaacaagttataccattctgagggcaagaggcacaa

SEQ ID NO: 142135 - DNA, 75 bp, Homo sapiens
tttttctgacctcaaagcaggaacaagaaacaagttataccattctgagggcaagaggcacaaatgttaccatca

SEQ ID NO: 142136 - DNA, 76 bp, Homo sapiens
cctcaaagcaggaacaagaaacaagttataccattctgagggcaagaggcacaaatgttaccatcagtagcctcaa

SEQ ID NO: 142137 - DNA, 77 bp, Homo sapiens
aacaagaaacaagttataccattctgagggcaagaggcacaaatgttaccatcagtagcctcaagcctgacactata

SEQ ID NO: 142138 - DNA, 77 bp, Homo sapiens
aaacaagttataccattctgagggcaagaggcacaaatgttaccatcagtagcctcaagcctgacactatatacgta

SEQ ID NO: 142139 - DNA, 78 bp, Homo sapiens
ataccattctgagggcaagaggcacaaatgttaccatcagtagcctcaagcctgacactatatacgtattccaaatcc

SEQ ID NO: 142140 - DNA, 77 bp, Homo sapiens
caagaggcacaaatgttaccatcagtagcctcaagcctgacactatatacgtattccaaatccgagcccgaacagcc

SEQ ID NO: 142141 - DNA, 77 bp, Homo sapiens
aaatgttaccatcagtagcctcaagcctgacactatatacgtattccaaatccgagcccgaacagccgctggatatg

SEQ ID NO: 142142 - DNA, 78 bp, Homo sapiens
ttaccatcagtagcctcaagcctgacactatatacgtattccaaatccgagcccgaacagccgctggatatgggacga

SEQ ID NO: 142143 - DNA, 76 bp, Homo sapiens
tcaagcctgacactatatacgtattccaaatccgagcccgaacagccgctggatatgggacgaacagccgcaagtt

SEQ ID NO: 142144 - DNA, 73 bp, Homo sapiens
acactatatacgtattccaaatccgagcccgaacagccgctggatatgggacgaacagccgcaagtttgagtt

SEQ ID NO: 142145 - DNA, 73 bp, Homo sapiens
tatacgtattccaaatccgagcccgaacagccgctggatatgggacgaacagccgcaagtttgagtttgaaac

SEQ ID NO: 142146 - DNA, 74 bp, Homo sapiens
aatccgagcccgaacagccgctggatatgggacgaacagccgcaagtttgagtttgaaactagtccagactgta

SEQ ID NO: 142147 - DNA, 74 bp, Homo sapiens
ccgaacagccgctggatatgggacgaacagccgcaagtttgagtttgaaactagtccagactgtatgtattatt

SEQ ID NO: 142148 - DNA, 78 bp, Homo sapiens
ctggatatgggacgaacagccgcaagtttgagtttgaaactagtccagactgtatgtattatttcaatgcagtctaga

SEQ ID NO: 142149 - DNA, 76 bp, Homo sapiens
tgggacgaacagccgcaagtttgagtttgaaactagtccagactgtatgtattatttcaatgcagtctagaggagg

SEQ ID NO: 142150 - DNA, 77 bp, Homo sapiens
caagtttgagtttgaaactagtccagactgtatgtattatttcaatgcagtctagaggagggggcagggatcttgca

SEQ ID NO: 142151 - DNA, 77 bp, Homo sapiens
ttgagtttgaaactagtccagactgtatgtattatttcaatgcagtctagaggagggggcagggatcttgcaaaaga

SEQ ID NO: 142152 - DNA, 79 bp, Homo sapiens
tagtccagactgtatgtattatttcaatgcagtctagaggagggggcagggatcttgcaaaagatgtctgatcgtttat

SEQ ID NO: 142153 - DNA, 79 bp, Homo sapiens
tatgtattatttcaatgcagtctagaggagggggcagggatcttgcaaaagatgtctgatcgtttattctcactgtttc

SEQ ID NO: 142154 - DNA, 77 bp, Homo sapiens
attatttcaatgcagtctagaggagggggcagggatcttgcaaaagatgtctgatcgtttattctcactgtttctaa

SEQ ID NO: 142155 - DNA, 72 bp, Homo sapiens
agtctagaggagggggcagggatcttgcaaaagatgtctgatcgtttattctcactgtttctaagttttaaa

SEQ ID NO: 142156 - DNA, 74 bp, Homo sapiens
ggggcagggatcttgcaaaagatgtctgatcgtttattctcactgtttctaagttttaaacaaatgtgatacat

SEQ ID NO: 142157 - DNA, 73 bp, Homo sapiens
gggatcttgcaaaagatgtctgatcgtttattctcactgtttctaagttttaaacaaatgtgatacatttaag

SEQ ID NO: 142158 - DNA, 74 bp, Homo sapiens
gatgtctgatcgtttattctcactgtttctaagttttaaacaaatgtgatacatttaaggtatattgcttggga

SEQ ID NO: 142159 - DNA, 75 bp, Homo sapiens
tgatcgtttattctcactgtttctaagttttaaacaaatgtgatacatttaaggtatattgcttgggacattgca

SEQ ID NO: 142160 - DNA, 76 bp, Homo sapiens
tctcactgtttctaagttttaaacaaatgtgatacatttaaggtatattgcttgggacattgcaatttgcagagcc

SEQ ID NO: 142161 - DNA, 76 bp, Homo sapiens
aagttttaaacaaatgtgatacatttaaggtatattgcttgggacattgcaatttgcagagccctgtgtctgtata

SEQ ID NO: 142162 - DNA, 78 bp, Homo sapiens
ttaaacaaatgtgatacatttaaggtatattgcttgggacattgcaatttgcagagccctgtgtctgtatacagtatt

SEQ ID NO: 142163 - DNA, 78 bp, Homo sapiens
atacatttaaggtatattgcttgggacattgcaatttgcagagccctgtgtctgtatacagtatttgtgtttgtgtgg

SEQ ID NO: 142164 - DNA, 80 bp, Homo sapiens
tatattgcttgggacattgcaatttgcagagccctgtgtctgtatacagtatttgtgtttgtgtgggtgtacattttgtg

SEQ ID NO: 142165 - DNA, 77 bp, Homo sapiens
ttgggacattgcaatttgcagagccctgtgtctgtatacagtatttgtgtttgtgtgggtgtacattttgtgtttct

SEQ ID NO: 142166 - DNA, 73 bp, Homo sapiens
tttttttagccataaattgcttttgaggaacattatttaatatagtaacacacttccagtgtctgtcatttca

SEQ ID NO: 142167 - DNA, 76 bp, Homo sapiens
gccataaattgcttttgaggaacattatttaatatagtaacacacttccagtgtctgtcatttcagatattccagg

SEQ ID NO: 142168 - DNA, 77 bp, Homo sapiens
ttttgaggaacattatttaatatagtaacacacttccagtgtctgtcatttcagatattccaggttcattgcgtgat

SEQ ID NO: 142169 - DNA, 79 bp, Homo sapiens
acattatttaatatagtaacacacttccagtgtctgtcatttcagatattccaggttcattgcgtgattcaatgaacca

SEQ ID NO: 142170 - DNA, 78 bp, Homo sapiens
ttaatatagtaacacacttccagtgtctgtcatttcagatattccaggttcattgcgtgattcaatgaaccacaaaaa

SEQ ID NO: 142171 - DNA, 76 bp, Homo sapiens
taacacacttccagtgtctgtcatttcagatattccaggttcattgcgtgattcaatgaaccacaaaaaagaaact

SEQ ID NO: 142172 - DNA, 80 bp, Homo sapiens
gtctgtcatttcagatattccaggttcattgcgtgattcaatgaaccacaaaaaagaaacttgctgatccatgagaatct

SEQ ID NO: 142173 - DNA, 77 bp, Homo sapiens
tttcagatattccaggttcattgcgtgattcaatgaaccacaaaaaagaaacttgctgatccatgagaatcttaatt

SEQ ID NO: 142174 - DNA, 75 bp, Homo sapiens
tattccaggttcattgcgtgattcaatgaaccacaaaaaagaaacttgctgatccatgagaatcttaattttgtt

SEQ ID NO: 142175 - DNA, 75 bp, Homo sapiens
tcattgcgtgattcaatgaaccacaaaaaagaaacttgctgatccatgagaatcttaattttgttttaatcctta

SEQ ID NO: 142176 - DNA, 73 bp, Homo sapiens
ttcaatgaaccacaaaaaagaaacttgctgatccatgagaatcttaattttgttttaatccttaacacattca

SEQ ID NO: 142177 - DNA, 77 bp, Homo sapiens
gatccatgagaatcttaattttgttttaatccttaacacattcaatagcatatcacagagagaataaggattttcta

SEQ ID NO: 142178 - DNA, 72 bp, Homo sapiens
cttaattttgttttaatccttaacacattcaatagcatatcacagagagaataaggattttctaaaatgtgt

SEQ ID NO: 142179 - DNA, 78 bp, Homo sapiens
ttaatccttaacacattcaatagcatatcacagagagaataaggattttctaaaatgtgttttatcacttcattcaca

SEQ ID NO: 142180 - DNA, 79 bp, Homo sapiens
ccttaacacattcaatagcatatcacagagagaataaggattttctaaaatgtgttttatcacttcattcacattcaga

SEQ ID NO: 142181 - DNA, 79 bp, Homo sapiens
tagcatatcacagagagaataaggattttctaaaatgtgttttatcacttcattcacattcagaagtaatttgaatagc

SEQ ID NO: 142182 - DNA, 75 bp, Homo sapiens
cagagagaataaggattttctaaaatgtgttttatcacttcattcacattcagaagtaatttgaatagcctgttc

SEQ ID NO: 142183 - DNA, 70 bp, Homo sapiens
ctaaaatgtgttttatcacttcattcacattcagaagtaatttgaatagcctgttcctttaaccccaaat

SEQ ID NO: 142184 - DNA, 68 bp, Homo sapiens
tcagaagtaatttgaatagcctgttcctttaaccccaaatttggctaaaattggcctaaaactggcaa

SEQ ID NO: 142185 - DNA, 66 bp, Homo sapiens
gtaatttgaatagcctgttcctttaaccccaaatttggctaaaattggcctaaaactggcaaacat

SEQ ID NO: 142186 - DNA, 64 bp, Homo sapiens
cctgttcctttaaccccaaatttggctaaaattggcctaaaactggcaaacatttttccagtaa

SEQ ID NO: 142187 - DNA, 63 bp, Homo sapiens
ctttaaccccaaatttggctaaaattggcctaaaactggcaaacatttttccagtaacttttc

SEQ ID NO: 142188 - DNA, 65 bp, Homo sapiens
atttggctaaaattggcctaaaactggcaaacatttttccagtaacttttctttttttcaaatga

SEQ ID NO: 142189 - DNA, 66 bp, Homo sapiens
ttggcctaaaactggcaaacatttttccagtaacttttctttttttcaaatgaattttcttcatac

SEQ ID NO: 142190 - DNA, 65 bp, Homo sapiens
tccagtaacttttctttttttcaaatgaattttcttcatacttaaaaaagccctttgctaaaata

SEQ ID NO: 142191 - DNA, 65 bp, Homo sapiens
ttctttttttcaaatgaattttcttcatacttaaaaaagccctttgctaaaatataattttcaaa

SEQ ID NO: 142192 - DNA, 65 bp, Homo sapiens
ttcaaatgaattttcttcatacttaaaaaagccctttgctaaaatataattttcaaaaaggtaaa

SEQ ID NO: 142193 - DNA, 68 bp, Homo sapiens
ttcttcatacttaaaaaagccctttgctaaaatataattttcaaaaaggtaaaattatgtctatggca

SEQ ID NO: 142194 - DNA, 67 bp, Homo sapiens
cttcatacttaaaaaagccctttgctaaaatataattttcaaaaaggtaaaattatgtctatggcac

SEQ ID NO: 142195 - DNA, 67 bp, Homo sapiens
catacttaaaaaagccctttgctaaaatataattttcaaaaaggtaaaattatgtctatggcactaa

SEQ ID NO: 142196 - DNA, 68 bp, Homo sapiens
aaagccctttgctaaaatataattttcaaaaaggtaaaattatgtctatggcactaatataaaatgag

SEQ ID NO: 142197 - DNA, 70 bp, Homo sapiens
agccctttgctaaaatataattttcaaaaaggtaaaattatgtctatggcactaatataaaatgagtaga

SEQ ID NO: 142198 - DNA, 69 bp, Homo sapiens
cctttgctaaaatataattttcaaaaaggtaaaattatgtctatggcactaatataaaatgagtagaag

SEQ ID NO: 142199 - DNA, 71 bp, Homo sapiens
gctaaaatataattttcaaaaaggtaaaattatgtctatggcactaatataaaatgagtagaagttaatga

SEQ ID NO: 142200 - DNA, 68 bp, Homo sapiens
aattttcaaaaaggtaaaattatgtctatggcactaatataaaatgagtagaagttaatgattttact

SEQ ID NO: 142201 - DNA, 71 bp, Homo sapiens
tcaaaaaggtaaaattatgtctatggcactaatataaaatgagtagaagttaatgattttacttaactcat

SEQ ID NO: 142202 - DNA, 69 bp, Homo sapiens
aaggtaaaattatgtctatggcactaatataaaatgagtagaagttaatgattttacttaactcatttt

SEQ ID NO: 142203 - DNA, 69 bp, Homo sapiens
aggtaaaattatgtctatggcactaatataaaatgagtagaagttaatgattttacttaactcattttt

SEQ ID NO: 142204 - DNA, 69 bp, Homo sapiens
aaaattatgtctatggcactaatataaaatgagtagaagttaatgattttacttaactcatttttttct

SEQ ID NO: 142205 - DNA, 75 bp, Homo sapiens
gttagtcatgattataatacctgttcttattttttctcttcaacctcacagctttctccatctctggtgaaagta

SEQ ID NO: 142206 - DNA, 73 bp, Homo sapiens
attataatacctgttcttattttttctcttcaacctcacagctttctccatctctggtgaaagtagccaagtg

SEQ ID NO: 142207 - DNA, 78 bp, Homo sapiens
ttcttattttttctcttcaacctcacagctttctccatctctggtgaaagtagccaagtggtcatgatcgccatttca

SEQ ID NO: 142208 - DNA, 83 bp, Homo sapiens
tctcttcaacctcacagctttctccatctctggtgaaagtagccaagtggtcatgatcgccatttcagcggcagtagcaatta

SEQ ID NO: 142209 - DNA, 81 bp, Homo sapiens
aacctcacagctttctccatctctggtgaaagtagccaagtggtcatgatcgccatttcagcggcagtagcaattattctc

SEQ ID NO: 142210 - DNA, 83 bp, Homo sapiens
tttctccatctctggtgaaagtagccaagtggtcatgatcgccatttcagcggcagtagcaattattctcctcactgttgtca

SEQ ID NO: 142211 - DNA, 82 bp, Homo sapiens
tctggtgaaagtagccaagtggtcatgatcgccatttcagcggcagtagcaattattctcctcactgttgtcatctatgttt

SEQ ID NO: 142212 - DNA, 81 bp, Homo sapiens
aagtagccaagtggtcatgatcgccatttcagcggcagtagcaattattctcctcactgttgtcatctatgttttgattgg

SEQ ID NO: 142213 - DNA, 84 bp, Homo sapiens
tggtcatgatcgccatttcagcggcagtagcaattattctcctcactgttgtcatctatgttttgattgggaggtgagttcaca

SEQ ID NO: 142214 - DNA, 80 bp, Homo sapiens
atttcagcggcagtagcaattattctcctcactgttgtcatctatgttttgattgggaggtgagttcacagtctgtttca

SEQ ID NO: 142215 - DNA, 79 bp, Homo sapiens
cagtagcaattattctcctcactgttgtcatctatgttttgattgggaggtgagttcacagtctgtttcactattcact

SEQ ID NO: 142216 - DNA, 76 bp, Homo sapiens
aattattctcctcactgttgtcatctatgttttgattgggaggtgagttcacagtctgtttcactattcactttct

SEQ ID NO: 142217 - DNA, 72 bp, Homo sapiens
ttctgagcataggtaactattttaaatatattcctcttatgtgttcgctttccttgatttacctccaggttc

SEQ ID NO: 142218 - DNA, 70 bp, Homo sapiens
aggtaactattttaaatatattcctcttatgtgttcgctttccttgatttacctccaggttctgtggcta

SEQ ID NO: 142219 - DNA, 73 bp, Homo sapiens
ttaaatatattcctcttatgtgttcgctttccttgatttacctccaggttctgtggctataagtcaaaacatg

SEQ ID NO: 142220 - DNA, 74 bp, Homo sapiens
tcttatgtgttcgctttccttgatttacctccaggttctgtggctataagtcaaaacatggggcagatgaaaaa

SEQ ID NO: 142221 - DNA, 72 bp, Homo sapiens
tgttcgctttccttgatttacctccaggttctgtggctataagtcaaaacatggggcagatgaaaaaagact

SEQ ID NO: 142222 - DNA, 72 bp, Homo sapiens
ttccttgatttacctccaggttctgtggctataagtcaaaacatggggcagatgaaaaaagacttcattttg

SEQ ID NO: 142223 - DNA, 75 bp, Homo sapiens
tccaggttctgtggctataagtcaaaacatggggcagatgaaaaaagacttcattttggcaatgggcattgtaag

SEQ ID NO: 142224 - DNA, 74 bp, Homo sapiens
tgtggctataagtcaaaacatggggcagatgaaaaaagacttcattttggcaatgggcattgtaagtttctaaa

SEQ ID NO: 142225 - DNA, 71 bp, Homo sapiens
ataagtcaaaacatggggcagatgaaaaaagacttcattttggcaatgggcattgtaagtttctaaacttg

SEQ ID NO: 142226 - DNA, 70 bp, Homo sapiens
gggcagatgaaaaaagacttcattttggcaatgggcattgtaagtttctaaacttggctttttgttttgc

SEQ ID NO: 142227 - DNA, 67 bp, Homo sapiens
aaaaagacttcattttggcaatgggcattgtaagtttctaaacttggctttttgttttgcttcaccg

SEQ ID NO: 142228 - DNA, 68 bp, Homo sapiens
acttcattttggcaatgggcattgtaagtttctaaacttggctttttgttttgcttcaccgttttagc

SEQ ID NO: 142229 - DNA, 72 bp, Homo sapiens
tttctttctttcctcaaacagtaaaacttccaggtctcaggacttatgttgacccacatacatatgaagacc

SEQ ID NO: 142230 - DNA, 72 bp, Homo sapiens
tttcctcaaacagtaaaacttccaggtctcaggacttatgttgacccacatacatatgaagaccctacccaa

SEQ ID NO: 142231 - DNA, 73 bp, Homo sapiens
aaacagtaaaacttccaggtctcaggacttatgttgacccacatacatatgaagaccctacccaagctgttca

SEQ ID NO: 142232 - DNA, 77 bp, Homo sapiens
caggtctcaggacttatgttgacccacatacatatgaagaccctacccaagctgttcatgagtttgccaaggaattg

SEQ ID NO: 142233 - DNA, 78 bp, Homo sapiens
gacttatgttgacccacatacatatgaagaccctacccaagctgttcatgagtttgccaaggaattggatgccaccaa

SEQ ID NO: 142234 - DNA, 79 bp, Homo sapiens
atgttgacccacatacatatgaagaccctacccaagctgttcatgagtttgccaaggaattggatgccaccaacatatc

SEQ ID NO: 142235 - DNA, 79 bp, Homo sapiens
acatacatatgaagaccctacccaagctgttcatgagtttgccaaggaattggatgccaccaacatatccattgataaa

SEQ ID NO: 142236 - DNA, 75 bp, Homo sapiens
aagaccctacccaagctgttcatgagtttgccaaggaattggatgccaccaacatatccattgataaagttgttg

SEQ ID NO: 142237 - DNA, 78 bp, Homo sapiens
agctgttcatgagtttgccaaggaattggatgccaccaacatatccattgataaagttgttggagcaggtaaccacaa

SEQ ID NO: 142238 - DNA, 75 bp, Homo sapiens
agtttgccaaggaattggatgccaccaacatatccattgataaagttgttggagcaggtaaccacaatgacccta

SEQ ID NO: 142239 - DNA, 76 bp, Homo sapiens
ggaattggatgccaccaacatatccattgataaagttgttggagcaggtaaccacaatgaccctactgccaactta

SEQ ID NO: 142240 - DNA, 76 bp, Homo sapiens
atgccaccaacatatccattgataaagttgttggagcaggtaaccacaatgaccctactgccaacttagtactgta

SEQ ID NO: 142241 - DNA, 74 bp, Homo sapiens
ttttattatagaattccttacattttgttgctgttctgctttataacaggtgaatttggagaggtgtgcagtgg

SEQ ID NO: 142242 - DNA, 73 bp, Homo sapiens
aattccttacattttgttgctgttctgctttataacaggtgaatttggagaggtgtgcagtggtcgcttaaaa

SEQ ID NO: 142243 - DNA, 73 bp, Homo sapiens
tttgttgctgttctgctttataacaggtgaatttggagaggtgtgcagtggtcgcttaaaacttccttcaaaa

SEQ ID NO: 142244 - DNA, 71 bp, Homo sapiens
ttctgctttataacaggtgaatttggagaggtgtgcagtggtcgcttaaaacttccttcaaaaaaagagat

SEQ ID NO: 142245 - DNA, 70 bp, Homo sapiens
ctttataacaggtgaatttggagaggtgtgcagtggtcgcttaaaacttccttcaaaaaaagagatttca

SEQ ID NO: 142246 - DNA, 70 bp, Homo sapiens
aatttggagaggtgtgcagtggtcgcttaaaacttccttcaaaaaaagagatttcagtggccattaagac

SEQ ID NO: 142247 - DNA, 70 bp, Homo sapiens
agaggtgtgcagtggtcgcttaaaacttccttcaaaaaaagagatttcagtggccattaagaccctgaaa

SEQ ID NO: 142248 - DNA, 68 bp, Homo sapiens
agtggtcgcttaaaacttccttcaaaaaaagagatttcagtggccattaagaccctgaaagttggcta

SEQ ID NO: 142249 - DNA, 68 bp, Homo sapiens
ttaaaacttccttcaaaaaaagagatttcagtggccattaagaccctgaaagttggctacacagaaaa

SEQ ID NO: 142250 - DNA, 72 bp, Homo sapiens
aaaaaagagatttcagtggccattaagaccctgaaagttggctacacagaaaagcagaggagagacttcctg

SEQ ID NO: 142251 - DNA, 75 bp, Homo sapiens
agatttcagtggccattaagaccctgaaagttggctacacagaaaagcagaggagagacttcctgggagaagcaa

SEQ ID NO: 142252 - DNA, 76 bp, Homo sapiens
ccattaagaccctgaaagttggctacacagaaaagcagaggagagacttcctgggagaagcaagcattatgggaca

SEQ ID NO: 142253 - DNA, 76 bp, Homo sapiens
agaccctgaaagttggctacacagaaaagcagaggagagacttcctgggagaagcaagcattatgggacagtttga

SEQ ID NO: 142254 - DNA, 78 bp, Homo sapiens
gctacacagaaaagcagaggagagacttcctgggagaagcaagcattatgggacagtttgaccaccccaatatcattc

SEQ ID NO: 142255 - DNA, 76 bp, Homo sapiens
aaagcagaggagagacttcctgggagaagcaagcattatgggacagtttgaccaccccaatatcattcgactggaa

SEQ ID NO: 142256 - DNA, 74 bp, Homo sapiens
agagacttcctgggagaagcaagcattatgggacagtttgaccaccccaatatcattcgactggaaggagttgt

SEQ ID NO: 142257 - DNA, 73 bp, Homo sapiens
tgggagaagcaagcattatgggacagtttgaccaccccaatatcattcgactggaaggagttgttaccaaaag

SEQ ID NO: 142258 - DNA, 70 bp, Homo sapiens
aagcattatgggacagtttgaccaccccaatatcattcgactggaaggagttgttaccaaaagtaagtaa

SEQ ID NO: 142259 - DNA, 69 bp, Homo sapiens
ttatgggacagtttgaccaccccaatatcattcgactggaaggagttgttaccaaaagtaagtaaagta

SEQ ID NO: 142260 - DNA, 69 bp, Homo sapiens
gtttgaccaccccaatatcattcgactggaaggagttgttaccaaaagtaagtaaagtagtcataagac

SEQ ID NO: 142261 - DNA, 76 bp, Homo sapiens
tatatatgttcattgtataatacttgaactgtactgattattatttattatttactgtatatctaggtaagccagt

SEQ ID NO: 142262 - DNA, 77 bp, Homo sapiens
cattgtataatacttgaactgtactgattattatttattatttactgtatatctaggtaagccagttatgattgtca

SEQ ID NO: 142263 - DNA, 78 bp, Homo sapiens
tacttgaactgtactgattattatttattatttactgtatatctaggtaagccagttatgattgtcacagaatacatg

SEQ ID NO: 142264 - DNA, 78 bp, Homo sapiens
ctgtactgattattatttattatttactgtatatctaggtaagccagttatgattgtcacagaatacatggagaatgg

SEQ ID NO: 142265 - DNA, 77 bp, Homo sapiens
tatttattatttactgtatatctaggtaagccagttatgattgtcacagaatacatggagaatggttccttggatag

SEQ ID NO: 142266 - DNA, 76 bp, Homo sapiens
attatttactgtatatctaggtaagccagttatgattgtcacagaatacatggagaatggttccttggatagtttc

SEQ ID NO: 142267 - DNA, 76 bp, Homo sapiens
tatctaggtaagccagttatgattgtcacagaatacatggagaatggttccttggatagtttcctacgtgtaagta

SEQ ID NO: 142268 - DNA, 79 bp, Homo sapiens
taagccagttatgattgtcacagaatacatggagaatggttccttggatagtttcctacgtgtaagtaagatgcacaca

SEQ ID NO: 142269 - DNA, 73 bp, Homo sapiens
taagaaataggaacgtatcttaattgtacatttgaaatgcttcccagaaacacgatgcccagtttactgtcat

SEQ ID NO: 142270 - DNA, 75 bp, Homo sapiens
ataggaacgtatcttaattgtacatttgaaatgcttcccagaaacacgatgcccagtttactgtcattcagctag

SEQ ID NO: 142271 - DNA, 77 bp, Homo sapiens
ttaattgtacatttgaaatgcttcccagaaacacgatgcccagtttactgtcattcagctagtggggatgcttcgag

SEQ ID NO: 142272 - DNA, 79 bp, Homo sapiens
atttgaaatgcttcccagaaacacgatgcccagtttactgtcattcagctagtggggatgcttcgagggatagcatctg

SEQ ID NO: 142273 - DNA, 82 bp, Homo sapiens
atgcttcccagaaacacgatgcccagtttactgtcattcagctagtggggatgcttcgagggatagcatctggcatgaagta

SEQ ID NO: 142274 - DNA, 82 bp, Homo sapiens
aaacacgatgcccagtttactgtcattcagctagtggggatgcttcgagggatagcatctggcatgaagtacctgtcagaca

SEQ ID NO: 142275 - DNA, 83 bp, Homo sapiens
agtttactgtcattcagctagtggggatgcttcgagggatagcatctggcatgaagtacctgtcagacatgggctatgttcac

SEQ ID NO: 142276 - DNA, 85 bp, Homo sapiens
tgtcattcagctagtggggatgcttcgagggatagcatctggcatgaagtacctgtcagacatgggctatgttcaccgagacctc

SEQ ID NO: 142277 - DNA, 84 bp, Homo sapiens
tggggatgcttcgagggatagcatctggcatgaagtacctgtcagacatgggctatgttcaccgagacctcgctgctcggaaca

SEQ ID NO: 142278 - DNA, 85 bp, Homo sapiens
ttcgagggatagcatctggcatgaagtacctgtcagacatgggctatgttcaccgagacctcgctgctcggaacatcttgatcaa

SEQ ID NO: 142279 - DNA, 84 bp, Homo sapiens
tagcatctggcatgaagtacctgtcagacatgggctatgttcaccgagacctcgctgctcggaacatcttgatcaacagtaact

SEQ ID NO: 142280 - DNA, 81 bp, Homo sapiens
tgaagtacctgtcagacatgggctatgttcaccgagacctcgctgctcggaacatcttgatcaacagtaacttggtgtgta

SEQ ID NO: 142281 - DNA, 79 bp, Homo sapiens
tgtcagacatgggctatgttcaccgagacctcgctgctcggaacatcttgatcaacagtaacttggtgtgtaaggtttc

SEQ ID NO: 142282 - DNA, 76 bp, Homo sapiens
atgggctatgttcaccgagacctcgctgctcggaacatcttgatcaacagtaacttggtgtgtaaggtttctgatt

SEQ ID NO: 142283 - DNA, 74 bp, Homo sapiens
ttcaccgagacctcgctgctcggaacatcttgatcaacagtaacttggtgtgtaaggtttctgatttcggactt

SEQ ID NO: 142284 - DNA, 74 bp, Homo sapiens
acctcgctgctcggaacatcttgatcaacagtaacttggtgtgtaaggtttctgatttcggactttcgcgtgtc

SEQ ID NO: 142285 - DNA, 73 bp, Homo sapiens
aacatcttgatcaacagtaacttggtgtgtaaggtttctgatttcggactttcgcgtgtcctggaggatgacc

SEQ ID NO: 142286 - DNA, 73 bp, Homo sapiens
cttgatcaacagtaacttggtgtgtaaggtttctgatttcggactttcgcgtgtcctggaggatgacccagaa

SEQ ID NO: 142287 - DNA, 74 bp, Homo sapiens
taacttggtgtgtaaggtttctgatttcggactttcgcgtgtcctggaggatgacccagaagctgcttatacaa

SEQ ID NO: 142288 - DNA, 74 bp, Homo sapiens
aaggtttctgatttcggactttcgcgtgtcctggaggatgacccagaagctgcttatacaacaagagtgagtaa

SEQ ID NO: 142289 - DNA, 73 bp, Homo sapiens
atttcggactttcgcgtgtcctggaggatgacccagaagctgcttatacaacaagagtgagtaacttagattt

SEQ ID NO: 142290 - DNA, 73 bp, Homo sapiens
actttcgcgtgtcctggaggatgacccagaagctgcttatacaacaagagtgagtaacttagattttctcctt

SEQ ID NO: 142291 - DNA, 82 bp, Homo sapiens
tatatgttctatgcattgctgatttatgtagacatgattttatattcaaagggagggaagatcccaatcaggtggacatcac

SEQ ID NO: 142292 - DNA, 79 bp, Homo sapiens
attgctgatttatgtagacatgattttatattcaaagggagggaagatcccaatcaggtggacatcaccagaagctata

SEQ ID NO: 142293 - DNA, 77 bp, Homo sapiens
atttatgtagacatgattttatattcaaagggagggaagatcccaatcaggtggacatcaccagaagctatagccta

SEQ ID NO: 142294 - DNA, 76 bp, Homo sapiens
atgattttatattcaaagggagggaagatcccaatcaggtggacatcaccagaagctatagcctaccgcaagttca

SEQ ID NO: 142295 - DNA, 78 bp, Homo sapiens
tatattcaaagggagggaagatcccaatcaggtggacatcaccagaagctatagcctaccgcaagttcacgtcagcca

SEQ ID NO: 142296 - DNA, 81 bp, Homo sapiens
ggaagatcccaatcaggtggacatcaccagaagctatagcctaccgcaagttcacgtcagccagcgatgtatggagttatg

SEQ ID NO: 142297 - DNA, 80 bp, Homo sapiens
aatcaggtggacatcaccagaagctatagcctaccgcaagttcacgtcagccagcgatgtatggagttatgggattgttc

SEQ ID NO: 142298 - DNA, 79 bp, Homo sapiens
acatcaccagaagctatagcctaccgcaagttcacgtcagccagcgatgtatggagttatgggattgttctctgggagg

SEQ ID NO: 142299 - DNA, 79 bp, Homo sapiens
aagctatagcctaccgcaagttcacgtcagccagcgatgtatggagttatgggattgttctctgggaggtgatgtctta

SEQ ID NO: 142300 - DNA, 80 bp, Homo sapiens
atagcctaccgcaagttcacgtcagccagcgatgtatggagttatgggattgttctctgggaggtgatgtcttatggaga

SEQ ID NO: 142301 - DNA, 80 bp, Homo sapiens
aagttcacgtcagccagcgatgtatggagttatgggattgttctctgggaggtgatgtcttatggagagagaccatactg

SEQ ID NO: 142302 - DNA, 82 bp, Homo sapiens
ccagcgatgtatggagttatgggattgttctctgggaggtgatgtcttatggagagagaccatactgggagatgtccaatca

SEQ ID NO: 142303 - DNA, 81 bp, Homo sapiens
tatggagttatgggattgttctctgggaggtgatgtcttatggagagagaccatactgggagatgtccaatcaggatgtaa

SEQ ID NO: 142304 - DNA, 79 bp, Homo sapiens
ttatgggattgttctctgggaggtgatgtcttatggagagagaccatactgggagatgtccaatcaggatgtaagtatt

SEQ ID NO: 142305 - DNA, 81 bp, Homo sapiens
tctgggaggtgatgtcttatggagagagaccatactgggagatgtccaatcaggatgtaagtatttgtggtctatgagtta

SEQ ID NO: 142306 - DNA, 85 bp, Homo sapiens
tgatgtcttatggagagagaccatactgggagatgtccaatcaggatgtaagtatttgtggtctatgagttatgagttcagatga

SEQ ID NO: 142307 - DNA, 71 bp, Homo sapiens
acacttcctgaaaacttcctggttcctgaaaactttgcttctcacacaggtaattaaagctgtagatgagg

SEQ ID NO: 142308 - DNA, 73 bp, Homo sapiens
aaaacttcctggttcctgaaaactttgcttctcacacaggtaattaaagctgtagatgagggctatcgactgc

SEQ ID NO: 142309 - DNA, 75 bp, Homo sapiens
ttcctgaaaactttgcttctcacacaggtaattaaagctgtagatgagggctatcgactgccaccccccatggac

SEQ ID NO: 142310 - DNA, 75 bp, Homo sapiens
aaaactttgcttctcacacaggtaattaaagctgtagatgagggctatcgactgccaccccccatggactgccca

SEQ ID NO: 142311 - DNA, 81 bp, Homo sapiens
ttctcacacaggtaattaaagctgtagatgagggctatcgactgccaccccccatggactgcccagctgccttgtatcagc

SEQ ID NO: 142312 - DNA, 85 bp, Homo sapiens
taattaaagctgtagatgagggctatcgactgccaccccccatggactgcccagctgccttgtatcagctgatgctggactgctg

SEQ ID NO: 142313 - DNA, 87 bp, Homo sapiens
ctgtagatgagggctatcgactgccaccccccatggactgcccagctgccttgtatcagctgatgctggactgctggcagaaagaca

SEQ ID NO: 142314 - DNA, 85 bp, Homo sapiens
ctatcgactgccaccccccatggactgcccagctgccttgtatcagctgatgctggactgctggcagaaagacaggaacaacaga

SEQ ID NO: 142315 - DNA, 81 bp, Homo sapiens
caccccccatggactgcccagctgccttgtatcagctgatgctggactgctggcagaaagacaggaacaacagacccaagt

SEQ ID NO: 142316 - DNA, 85 bp, Homo sapiens
atggactgcccagctgccttgtatcagctgatgctggactgctggcagaaagacaggaacaacagacccaagtttgagcagattg

SEQ ID NO: 142317 - DNA, 83 bp, Homo sapiens
agctgccttgtatcagctgatgctggactgctggcagaaagacaggaacaacagacccaagtttgagcagattgttagtattc

SEQ ID NO: 142318 - DNA, 83 bp, Homo sapiens
ttgtatcagctgatgctggactgctggcagaaagacaggaacaacagacccaagtttgagcagattgttagtattctggacaa

SEQ ID NO: 142319 - DNA, 79 bp, Homo sapiens
atgctggactgctggcagaaagacaggaacaacagacccaagtttgagcagattgttagtattctggacaagcttatcc

SEQ ID NO: 142320 - DNA, 75 bp, Homo sapiens
tggcagaaagacaggaacaacagacccaagtttgagcagattgttagtattctggacaagcttatccggaatccc

SEQ ID NO: 142321 - DNA, 73 bp, Homo sapiens
aaagacaggaacaacagacccaagtttgagcagattgttagtattctggacaagcttatccggaatcccggca

SEQ ID NO: 142322 - DNA, 76 bp, Homo sapiens
aacaacagacccaagtttgagcagattgttagtattctggacaagcttatccggaatcccggcagcctgaagatca

SEQ ID NO: 142323 - DNA, 81 bp, Homo sapiens
aagtttgagcagattgttagtattctggacaagcttatccggaatcccggcagcctgaagatcatcaccagtgcagccgca

SEQ ID NO: 142324 - DNA, 80 bp, Homo sapiens
attgttagtattctggacaagcttatccggaatcccggcagcctgaagatcatcaccagtgcagccgcaaggtgacacat

SEQ ID NO: 142325 - DNA, 80 bp, Homo sapiens
agtattctggacaagcttatccggaatcccggcagcctgaagatcatcaccagtgcagccgcaaggtgacacattcaatt

SEQ ID NO: 142326 - DNA, 81 bp, Homo sapiens
aagcttatccggaatcccggcagcctgaagatcatcaccagtgcagccgcaaggtgacacattcaatttgttatctggcat

SEQ ID NO: 142327 - DNA, 82 bp, Homo sapiens
aatcccggcagcctgaagatcatcaccagtgcagccgcaaggtgacacattcaatttgttatctggcattcactctgaaatt

SEQ ID NO: 142328 - DNA, 74 bp, Homo sapiens
actctgctgactcctgatctgtctccctttggtgttttttttcttgcaggccatcaaaccttcttctggaccaa

SEQ ID NO: 142329 - DNA, 74 bp, Homo sapiens
ctgatctgtctccctttggtgttttttttcttgcaggccatcaaaccttcttctggaccaaagcaatgtggata

SEQ ID NO: 142330 - DNA, 74 bp, Homo sapiens
tgtctccctttggtgttttttttcttgcaggccatcaaaccttcttctggaccaaagcaatgtggatatcacta

SEQ ID NO: 142331 - DNA, 74 bp, Homo sapiens
gttttttttcttgcaggccatcaaaccttcttctggaccaaagcaatgtggatatcactaccttccgcacaaca

SEQ ID NO: 142332 - DNA, 77 bp, Homo sapiens
ttttcttgcaggccatcaaaccttcttctggaccaaagcaatgtggatatcactaccttccgcacaacaggtgactg

SEQ ID NO: 142333 - DNA, 76 bp, Homo sapiens
atcaaaccttcttctggaccaaagcaatgtggatatcactaccttccgcacaacaggtgactggcttaatggtgtc

SEQ ID NO: 142334 - DNA, 80 bp, Homo sapiens
ttcttctggaccaaagcaatgtggatatcactaccttccgcacaacaggtgactggcttaatggtgtctggacagcacac

SEQ ID NO: 142335 - DNA, 80 bp, Homo sapiens
aagcaatgtggatatcactaccttccgcacaacaggtgactggcttaatggtgtctggacagcacactgcaaggaaatct

SEQ ID NO: 142336 - DNA, 80 bp, Homo sapiens
atgtggatatcactaccttccgcacaacaggtgactggcttaatggtgtctggacagcacactgcaaggaaatcttcacg

SEQ ID NO: 142337 - DNA, 78 bp, Homo sapiens
taccttccgcacaacaggtgactggcttaatggtgtctggacagcacactgcaaggaaatcttcacgggtgtggagta

SEQ ID NO: 142338 - DNA, 78 bp, Homo sapiens
aacaggtgactggcttaatggtgtctggacagcacactgcaaggaaatcttcacgggtgtggagtacagttcttgtga

SEQ ID NO: 142339 - DNA, 80 bp, Homo sapiens
tggcttaatggtgtctggacagcacactgcaaggaaatcttcacgggtgtggagtacagttcttgtgacacaatagccaa

SEQ ID NO: 142340 - DNA, 79 bp, Homo sapiens
taatggtgtctggacagcacactgcaaggaaatcttcacgggtgtggagtacagttcttgtgacacaatagccaagatt

SEQ ID NO: 142341 - DNA, 78 bp, Homo sapiens
acagcacactgcaaggaaatcttcacgggtgtggagtacagttcttgtgacacaatagccaagatttccacagagtaa

SEQ ID NO: 142342 - DNA, 75 bp, Homo sapiens
actgcaaggaaatcttcacgggtgtggagtacagttcttgtgacacaatagccaagatttccacagagtaagaaa

SEQ ID NO: 142343 - DNA, 70 bp, Homo sapiens
tatattgttttctttttttacagtgacatgaaaaaggttggtgtcaccgtggttgggccacagaagaaga

SEQ ID NO: 142344 - DNA, 74 bp, Homo sapiens
tttttttacagtgacatgaaaaaggttggtgtcaccgtggttgggccacagaagaagatcatcagtagcattaa

SEQ ID NO: 142345 - DNA, 76 bp, Homo sapiens
agtgacatgaaaaaggttggtgtcaccgtggttgggccacagaagaagatcatcagtagcattaaagctctagaaa

SEQ ID NO: 142346 - DNA, 75 bp, Homo sapiens
aaaggttggtgtcaccgtggttgggccacagaagaagatcatcagtagcattaaagctctagaaacgcaatcaaa

SEQ ID NO: 142347 - DNA, 78 bp, Homo sapiens
ttggtgtcaccgtggttgggccacagaagaagatcatcagtagcattaaagctctagaaacgcaatcaaagaatggcc

SEQ ID NO: 142348 - DNA, 77 bp, Homo sapiens
ttgggccacagaagaagatcatcagtagcattaaagctctagaaacgcaatcaaagaatggcccagttcccgtgtaa

SEQ ID NO: 142349 - DNA, 75 bp, Homo sapiens
agaagaagatcatcagtagcattaaagctctagaaacgcaatcaaagaatggcccagttcccgtgtaaagcacgg

SEQ ID NO: 142350 - DNA, 74 bp, Homo sapiens
atcatcagtagcattaaagctctagaaacgcaatcaaagaatggcccagttcccgtgtaaagcacgggacggaa

SEQ ID NO: 142351 - DNA, 71 bp, Homo sapiens
attaaagctctagaaacgcaatcaaagaatggcccagttcccgtgtaaagcacgggacggaagtgcttctg

SEQ ID NO: 142352 - DNA, 71 bp, Homo sapiens
ctctagaaacgcaatcaaagaatggcccagttcccgtgtaaagcacgggacggaagtgcttctggacggaa

SEQ ID NO: 142353 - DNA, 71 bp, Homo sapiens
aatcaaagaatggcccagttcccgtgtaaagcacgggacggaagtgcttctggacggaagtggtggctgtg

SEQ ID NO: 142354 - DNA, 71 bp, Homo sapiens
atggcccagttcccgtgtaaagcacgggacggaagtgcttctggacggaagtggtggctgtggaaggcgta

SEQ ID NO: 142355 - DNA, 77 bp, Homo sapiens
ttcccgtgtaaagcacgggacggaagtgcttctggacggaagtggtggctgtggaaggcgtagcatcatcctgcaga

SEQ ID NO: 142356 - DNA, 78 bp, Homo sapiens
aaagcacgggacggaagtgcttctggacggaagtggtggctgtggaaggcgtagcatcatcctgcagacagacaataa

SEQ ID NO: 142357 - DNA, 81 bp, Homo sapiens
aagtgcttctggacggaagtggtggctgtggaaggcgtagcatcatcctgcagacagacaataattctggagatactggtg

SEQ ID NO: 142358 - DNA, 80 bp, Homo sapiens
ttctggacggaagtggtggctgtggaaggcgtagcatcatcctgcagacagacaataattctggagatactggtggaagt

SEQ ID NO: 142359 - DNA, 81 bp, Homo sapiens
gtggctgtggaaggcgtagcatcatcctgcagacagacaataattctggagatactggtggaagttccaagtccaataaga

SEQ ID NO: 142360 - DNA, 79 bp, Homo sapiens
aaggcgtagcatcatcctgcagacagacaataattctggagatactggtggaagttccaagtccaataagacactcaaa

SEQ ID NO: 142361 - DNA, 82 bp, Homo sapiens
gtagcatcatcctgcagacagacaataattctggagatactggtggaagttccaagtccaataagacactcaaatatgagta

SEQ ID NO: 142362 - DNA, 80 bp, Homo sapiens
atcatcctgcagacagacaataattctggagatactggtggaagttccaagtccaataagacactcaaatatgagtacaa

SEQ ID NO: 142363 - DNA, 78 bp, Homo sapiens
atcctgcagacagacaataattctggagatactggtggaagttccaagtccaataagacactcaaatatgagtacaaa

SEQ ID NO: 142364 - DNA, 76 bp, Homo sapiens
agacagacaataattctggagatactggtggaagttccaagtccaataagacactcaaatatgagtacaaatgcct

SEQ ID NO: 142365 - DNA, 75 bp, Homo sapiens
agacaataattctggagatactggtggaagttccaagtccaataagacactcaaatatgagtacaaatgccttaa

SEQ ID NO: 142366 - DNA, 74 bp, Homo sapiens
gagatactggtggaagttccaagtccaataagacactcaaatatgagtacaaatgccttaaaatggaattgaaa

SEQ ID NO: 142367 - DNA, 71 bp, Homo sapiens
ggtggaagttccaagtccaataagacactcaaatatgagtacaaatgccttaaaatggaattgaaaaactc

SEQ ID NO: 142368 - DNA, 71 bp, Homo sapiens
gaagttccaagtccaataagacactcaaatatgagtacaaatgccttaaaatggaattgaaaaactcttta

SEQ ID NO: 142369 - DNA, 69 bp, Homo sapiens
gtccaataagacactcaaatatgagtacaaatgccttaaaatggaattgaaaaactctttattttcccc

SEQ ID NO: 142370 - DNA, 70 bp, Homo sapiens
cactcaaatatgagtacaaatgccttaaaatggaattgaaaaactctttattttcccctatcatttattg

SEQ ID NO: 142371 - DNA, 67 bp, Homo sapiens
gtacaaatgccttaaaatggaattgaaaaactctttattttcccctatcatttattggatgggtggg

SEQ ID NO: 142372 - DNA, 67 bp, Homo sapiens
tgccttaaaatggaattgaaaaactctttattttcccctatcatttattggatgggtgggtggggta

SEQ ID NO: 142373 - DNA, 64 bp, Homo sapiens
aaactctttattttcccctatcatttattggatgggtgggtggggtatttttttgtaattgctt

SEQ ID NO: 142374 - DNA, 65 bp, Homo sapiens
ttcccctatcatttattggatgggtgggtggggtatttttttgtaattgcttttttaaatattag

SEQ ID NO: 142375 - DNA, 65 bp, Homo sapiens
catttattggatgggtgggtggggtatttttttgtaattgcttttttaaatattagttaatggat

SEQ ID NO: 142376 - DNA, 64 bp, Homo sapiens
gatgggtgggtggggtatttttttgtaattgcttttttaaatattagttaatggattaaattta

SEQ ID NO: 142377 - DNA, 65 bp, Homo sapiens
gggtatttttttgtaattgcttttttaaatattagttaatggattaaatttaattcttcagcgta

SEQ ID NO: 142378 - DNA, 71 bp, Homo sapiens
ttttaaatattagttaatggattaaatttaattcttcagcgtaaaatggtgaagaactagcatatagccat

SEQ ID NO: 142379 - DNA, 76 bp, Homo sapiens
tagttaatggattaaatttaattcttcagcgtaaaatggtgaagaactagcatatagccattgatcataaactgac

SEQ ID NO: 142380 - DNA, 77 bp, Homo sapiens
ggattaaatttaattcttcagcgtaaaatggtgaagaactagcatatagccattgatcataaactgactatcataaa

SEQ ID NO: 142381 - DNA, 78 bp, Homo sapiens
tttaattcttcagcgtaaaatggtgaagaactagcatatagccattgatcataaactgactatcataaaatcaaaaca

SEQ ID NO: 142382 - DNA, 79 bp, Homo sapiens
tcagcgtaaaatggtgaagaactagcatatagccattgatcataaactgactatcataaaatcaaaacaagtgaaataa

SEQ ID NO: 142383 - DNA, 79 bp, Homo sapiens
tggtgaagaactagcatatagccattgatcataaactgactatcataaaatcaaaacaagtgaaataacaaaatggaca

SEQ ID NO: 142384 - DNA, 78 bp, Homo sapiens
actagcatatagccattgatcataaactgactatcataaaatcaaaacaagtgaaataacaaaatggacatggtggct

SEQ ID NO: 142385 - DNA, 73 bp, Homo sapiens
actgactatcataaaatcaaaacaagtgaaataacaaaatggacatggtggctttgtttaggtagagccacaa

SEQ ID NO: 142386 - DNA, 70 bp, Homo sapiens
tcaaaacaagtgaaataacaaaatggacatggtggctttgtttaggtagagccacaaaagaaaagacttg

SEQ ID NO: 142387 - DNA, 69 bp, Homo sapiens
gtgaaataacaaaatggacatggtggctttgtttaggtagagccacaaaagaaaagacttgtaatattt

SEQ ID NO: 142388 - DNA, 70 bp, Homo sapiens
ggacatggtggctttgtttaggtagagccacaaaagaaaagacttgtaatatttttatatacagaggaaa

SEQ ID NO: 142389 - DNA, 68 bp, Homo sapiens
gccacaaaagaaaagacttgtaatatttttatatacagaggaaatctgtaacaggtattttgtttctt

SEQ ID NO: 142390 - DNA, 71 bp, Homo sapiens
gacttgtaatatttttatatacagaggaaatctgtaacaggtattttgtttcttttaaagcaagcaacaca

SEQ ID NO: 142391 - DNA, 72 bp, Homo sapiens
tatacagaggaaatctgtaacaggtattttgtttcttttaaagcaagcaacacagaggaatttatacctcaa

SEQ ID NO: 142392 - DNA, 72 bp, Homo sapiens
atctgtaacaggtattttgtttcttttaaagcaagcaacacagaggaatttatacctcaaactatctggcca

SEQ ID NO: 142393 - DNA, 76 bp, Homo sapiens
tcttttaaagcaagcaacacagaggaatttatacctcaaactatctggccatatttactaccttatcactgcatta

SEQ ID NO: 142394 - DNA, 76 bp, Homo sapiens
caagcaacacagaggaatttatacctcaaactatctggccatatttactaccttatcactgcattattctctttta

SEQ ID NO: 142395 - DNA, 75 bp, Homo sapiens
aacacagaggaatttatacctcaaactatctggccatatttactaccttatcactgcattattctcttttatctg

SEQ ID NO: 142396 - DNA, 77 bp, Homo sapiens
atacctcaaactatctggccatatttactaccttatcactgcattattctcttttatctgtttaaagcatatagaga

SEQ ID NO: 142397 - DNA, 77 bp, Homo sapiens
caaactatctggccatatttactaccttatcactgcattattctcttttatctgtttaaagcatatagagatgaagt

SEQ ID NO: 142398 - DNA, 77 bp, Homo sapiens
tggccatatttactaccttatcactgcattattctcttttatctgtttaaagcatatagagatgaagtttgtagttg

SEQ ID NO: 142399 - DNA, 73 bp, Homo sapiens
actaccttatcactgcattattctcttttatctgtttaaagcatatagagatgaagtttgtagttgttttaag

SEQ ID NO: 142400 - DNA, 75 bp, Homo sapiens
tcactgcattattctcttttatctgtttaaagcatatagagatgaagtttgtagttgttttaagtactacacatt

SEQ ID NO: 142401 - DNA, 70 bp, Homo sapiens
tgtttaaagcatatagagatgaagtttgtagttgttttaagtactacacatttttaaattgttagcttcc

SEQ ID NO: 142402 - DNA, 70 bp, Homo sapiens
agcatatagagatgaagtttgtagttgttttaagtactacacatttttaaattgttagcttccttaagta

SEQ ID NO: 142403 - DNA, 70 bp, Homo sapiens
gatgaagtttgtagttgttttaagtactacacatttttaaattgttagcttccttaagtatatcatgtaa

SEQ ID NO: 142404 - DNA, 69 bp, Homo sapiens
gtagttgttttaagtactacacatttttaaattgttagcttccttaagtatatcatgtaaagaaatgtc

SEQ ID NO: 142405 - DNA, 70 bp, Homo sapiens
taagtactacacatttttaaattgttagcttccttaagtatatcatgtaaagaaatgtcttaatttttga

SEQ ID NO: 142406 - DNA, 68 bp, Homo sapiens
ttttaaattgttagcttccttaagtatatcatgtaaagaaatgtcttaatttttgaaaaaagtacata

SEQ ID NO: 142407 - DNA, 71 bp, Homo sapiens
attttcttttgaattgtttttattgttttctatttatgccttgatgatttaatatggatttgttacagcca

SEQ ID NO: 142408 - DNA, 75 bp, Homo sapiens
gaattgtttttattgttttctatttatgccttgatgatttaatatggatttgttacagccaagtgccaaatgctc

SEQ ID NO: 142409 - DNA, 81 bp, Homo sapiens
tattgttttctatttatgccttgatgatttaatatggatttgttacagccaagtgccaaatgctctctcaaattgtcagca

SEQ ID NO: 142410 - DNA, 80 bp, Homo sapiens
tctatttatgccttgatgatttaatatggatttgttacagccaagtgccaaatgctctctcaaattgtcagcaatttaac

SEQ ID NO: 142411 - DNA, 81 bp, Homo sapiens
ttgatgatttaatatggatttgttacagccaagtgccaaatgctctctcaaattgtcagcaatttaactagacacagataa

SEQ ID NO: 142412 - DNA, 79 bp, Homo sapiens
tttaatatggatttgttacagccaagtgccaaatgctctctcaaattgtcagcaatttaactagacacagataataatg

SEQ ID NO: 142413 - DNA, 76 bp, Homo sapiens
atttgttacagccaagtgccaaatgctctctcaaattgtcagcaatttaactagacacagataataatgggtttct

SEQ ID NO: 142414 - DNA, 76 bp, Homo sapiens
agccaagtgccaaatgctctctcaaattgtcagcaatttaactagacacagataataatgggtttctttcagattt

SEQ ID NO: 142415 - DNA, 76 bp, Homo sapiens
tgctctctcaaattgtcagcaatttaactagacacagataataatgggtttctttcagattttttgaaccatccac

SEQ ID NO: 142416 - DNA, 73 bp, Homo sapiens
caaattgtcagcaatttaactagacacagataataatgggtttctttcagattttttgaaccatccacttaca

SEQ ID NO: 142417 - DNA, 73 bp, Homo sapiens
tcagcaatttaactagacacagataataatgggtttctttcagattttttgaaccatccacttacatatattt

SEQ ID NO: 142418 - DNA, 70 bp, Homo sapiens
tttttaaaaaatgaaatccttttcctgttcatacactaaccaaatctctcaaatctgttatcccaatcat

SEQ ID NO: 142419 - DNA, 74 bp, Homo sapiens
aaaatgaaatccttttcctgttcatacactaaccaaatctctcaaatctgttatcccaatcattgttgcctctc

SEQ ID NO: 142420 - DNA, 74 bp, Homo sapiens
cttttcctgttcatacactaaccaaatctctcaaatctgttatcccaatcattgttgcctctccgtttattata

SEQ ID NO: 142421 - DNA, 78 bp, Homo sapiens
ttcatacactaaccaaatctctcaaatctgttatcccaatcattgttgcctctccgtttattataaactgtatgctca

SEQ ID NO: 142422 - DNA, 76 bp, Homo sapiens
taaccaaatctctcaaatctgttatcccaatcattgttgcctctccgtttattataaactgtatgctcacaactta

SEQ ID NO: 142423 - DNA, 77 bp, Homo sapiens
ctctcaaatctgttatcccaatcattgttgcctctccgtttattataaactgtatgctcacaacttagtgtaatata

SEQ ID NO: 142424 - DNA, 76 bp, Homo sapiens
caaatctgttatcccaatcattgttgcctctccgtttattataaactgtatgctcacaacttagtgtaatatacca

SEQ ID NO: 142425 - DNA, 75 bp, Homo sapiens
aaatctgttatcccaatcattgttgcctctccgtttattataaactgtatgctcacaacttagtgtaatatacca

SEQ ID NO: 142426 - DNA, 78 bp, Homo sapiens
atcccaatcattgttgcctctccgtttattataaactgtatgctcacaacttagtgtaatataccagcttgtatgcaa

SEQ ID NO: 142427 - DNA, 78 bp, Homo sapiens
aatcattgttgcctctccgtttattataaactgtatgctcacaacttagtgtaatataccagcttgtatgcaatggat

SEQ ID NO: 142428 - DNA, 76 bp, Homo sapiens
attgttgcctctccgtttattataaactgtatgctcacaacttagtgtaatataccagcttgtatgcaatggattt

SEQ ID NO: 142429 - DNA, 78 bp, Homo sapiens
tattataaactgtatgctcacaacttagtgtaatataccagcttgtatgcaatggattttcaaccagataacatacct

SEQ ID NO: 142430 - DNA, 77 bp, Homo sapiens
taaactgtatgctcacaacttagtgtaatataccagcttgtatgcaatggattttcaaccagataacatacctttcc

SEQ ID NO: 142431 - DNA, 77 bp, Homo sapiens
acaacttagtgtaatataccagcttgtatgcaatggattttcaaccagataacatacctttcctgctctggtgctta

SEQ ID NO: 142432 - DNA, 81 bp, Homo sapiens
tagtgtaatataccagcttgtatgcaatggattttcaaccagataacatacctttcctgctctggtgcttagagactatca

SEQ ID NO: 142433 - DNA, 77 bp, Homo sapiens
agcttgtatgcaatggattttcaaccagataacatacctttcctgctctggtgcttagagactatcaactccctcct

SEQ ID NO: 142434 - DNA, 74 bp, Homo sapiens
aatggattttcaaccagataacatacctttcctgctctggtgcttagagactatcaactccctcctttagtgaa

SEQ ID NO: 142435 - DNA, 74 bp, Homo sapiens
ataacatacctttcctgctctggtgcttagagactatcaactccctcctttagtgaaggagccgtgttagagct

SEQ ID NO: 142436 - DNA, 75 bp, Homo sapiens
ctttcctgctctggtgcttagagactatcaactccctcctttagtgaaggagccgtgttagagcttccgagaata

SEQ ID NO: 142437 - DNA, 75 bp, Homo sapiens
agagactatcaactccctcctttagtgaaggagccgtgttagagcttccgagaatagctccactggagagaagtg

SEQ ID NO: 142438 - DNA, 80 bp, Homo sapiens
tttagtgaaggagccgtgttagagcttccgagaatagctccactggagagaagtggaatcctatatagaatgctgcacta

SEQ ID NO: 142439 - DNA, 82 bp, Homo sapiens
gtgttagagcttccgagaatagctccactggagagaagtggaatcctatatagaatgctgcactaattgacaacacagccta

SEQ ID NO: 142440 - DNA, 84 bp, Homo sapiens
aatagctccactggagagaagtggaatcctatatagaatgctgcactaattgacaacacagcctataggccaatgcatgagtaa

SEQ ID NO: 142441 - DNA, 80 bp, Homo sapiens
actggagagaagtggaatcctatatagaatgctgcactaattgacaacacagcctataggccaatgcatgagtaaaaaaa

SEQ ID NO: 142442 - DNA, 77 bp, Homo sapiens
aagtggaatcctatatagaatgctgcactaattgacaacacagcctataggccaatgcatgagtaaaaaaaaaaaca

SEQ ID NO: 142443 - DNA, 72 bp, Homo sapiens
aaaaaaaaaacaattactggctcactggctttgaaaagtcacttactattgttgctgaaacttgctgagctg

SEQ ID NO: 142444 - DNA, 75 bp, Homo sapiens
aaaaacaattactggctcactggctttgaaaagtcacttactattgttgctgaaacttgctgagctgtttataga

SEQ ID NO: 142445 - DNA, 76 bp, Homo sapiens
ctttgaaaagtcacttactattgttgctgaaacttgctgagctgtttatagagaatgatgataacagaacttttcc

SEQ ID NO: 142446 - DNA, 79 bp, Homo sapiens
aagtcacttactattgttgctgaaacttgctgagctgtttatagagaatgatgataacagaacttttcctctgtatcac

SEQ ID NO: 142447 - DNA, 79 bp, Homo sapiens
tattgttgctgaaacttgctgagctgtttatagagaatgatgataacagaacttttcctctgtatcactggtgtttagg

SEQ ID NO: 142448 - DNA, 76 bp, Homo sapiens
aaacttgctgagctgtttatagagaatgatgataacagaacttttcctctgtatcactggtgtttaggtgaattaa

SEQ ID NO: 142449 - DNA, 75 bp, Homo sapiens
gagctgtttatagagaatgatgataacagaacttttcctctgtatcactggtgtttaggtgaattaattaaacat

SEQ ID NO: 142450 - DNA, 73 bp, Homo sapiens
gataacagaacttttcctctgtatcactggtgtttaggtgaattaattaaacattgtgatcattagtaccagg

SEQ ID NO: 142451 - DNA, 73 bp, Homo sapiens
cttttcctctgtatcactggtgtttaggtgaattaattaaacattgtgatcattagtaccaggtattattatc

SEQ ID NO: 142452 - DNA, 73 bp, Homo sapiens
ctgtatcactggtgtttaggtgaattaattaaacattgtgatcattagtaccaggtattattatctttaagag

SEQ ID NO: 142453 - DNA, 71 bp, Homo sapiens
ggtgtttaggtgaattaattaaacattgtgatcattagtaccaggtattattatctttaagagtcttccac

SEQ ID NO: 142454 - DNA, 77 bp, Homo sapiens
taattaaacattgtgatcattagtaccaggtattattatctttaagagtcttccacttcaatgcacatggtgcagtt

SEQ ID NO: 142455 - DNA, 76 bp, Homo sapiens
aaacattgtgatcattagtaccaggtattattatctttaagagtcttccacttcaatgcacatggtgcagttttgg

SEQ ID NO: 142456 - DNA, 74 bp, Homo sapiens
attagtaccaggtattattatctttaagagtcttccacttcaatgcacatggtgcagttttggtgtgtaactta

SEQ ID NO: 142457 - DNA, 75 bp, Homo sapiens
tattattatctttaagagtcttccacttcaatgcacatggtgcagttttggtgtgtaacttagaaggattgaact

SEQ ID NO: 142458 - DNA, 74 bp, Homo sapiens
ttatctttaagagtcttccacttcaatgcacatggtgcagttttggtgtgtaacttagaaggattgaacttctt

SEQ ID NO: 142459 - DNA, 76 bp, Homo sapiens
ttccacttcaatgcacatggtgcagttttggtgtgtaacttagaaggattgaacttctttgaatttactggacata

SEQ ID NO: 142460 - DNA, 73 bp, Homo sapiens
catggtgcagttttggtgtgtaacttagaaggattgaacttctttgaatttactggacataacattttcagaa

SEQ ID NO: 142461 - DNA, 75 bp, Homo sapiens
gtgtgtaacttagaaggattgaacttctttgaatttactggacataacattttcagaatagttggtcatctagca

SEQ ID NO: 142462 - DNA, 73 bp, Homo sapiens
acttagaaggattgaacttctttgaatttactggacataacattttcagaatagttggtcatctagcaaccgc

SEQ ID NO: 142463 - DNA, 75 bp, Homo sapiens
tgaacttctttgaatttactggacataacattttcagaatagttggtcatctagcaaccgcctcaaaatgtgtaa

SEQ ID NO: 142464 - DNA, 77 bp, Homo sapiens
ttgaatttactggacataacattttcagaatagttggtcatctagcaaccgcctcaaaatgtgtaagcaggagagaa

SEQ ID NO: 142465 - DNA, 78 bp, Homo sapiens
tactggacataacattttcagaatagttggtcatctagcaaccgcctcaaaatgtgtaagcaggagagaaatttctca

SEQ ID NO: 142466 - DNA, 77 bp, Homo sapiens
ttttcagaatagttggtcatctagcaaccgcctcaaaatgtgtaagcaggagagaaatttctcatcacagggattta

SEQ ID NO: 142467 - DNA, 76 bp, Homo sapiens
aatagttggtcatctagcaaccgcctcaaaatgtgtaagcaggagagaaatttctcatcacagggatttagactta

SEQ ID NO: 142468 - DNA, 76 bp, Homo sapiens
ctcaaaatgtgtaagcaggagagaaatttctcatcacagggatttagacttactattacataaaggctaactatga

SEQ ID NO: 142469 - DNA, 79 bp, Homo sapiens
tgtaagcaggagagaaatttctcatcacagggatttagacttactattacataaaggctaactatgagcttgctcatta

SEQ ID NO: 142470 - DNA, 76 bp, Homo sapiens
caggagagaaatttctcatcacagggatttagacttactattacataaaggctaactatgagcttgctcattaatt

SEQ ID NO: 142471 - DNA, 76 bp, Homo sapiens
tcatcacagggatttagacttactattacataaaggctaactatgagcttgctcattaattttgaaaagatgtacc

SEQ ID NO: 142472 - DNA, 73 bp, Homo sapiens
cagggatttagacttactattacataaaggctaactatgagcttgctcattaattttgaaaagatgtacctgg

SEQ ID NO: 142473 - DNA, 76 bp, Homo sapiens
cttactattacataaaggctaactatgagcttgctcattaattttgaaaagatgtacctggtggatatctagctag

SEQ ID NO: 142474 - DNA, 79 bp, Homo sapiens
cataaaggctaactatgagcttgctcattaattttgaaaagatgtacctggtggatatctagctagtaatatattctga

SEQ ID NO: 142475 - DNA, 80 bp, Homo sapiens
gctaactatgagcttgctcattaattttgaaaagatgtacctggtggatatctagctagtaatatattctgaagcaacat

SEQ ID NO: 142476 - DNA, 78 bp, Homo sapiens
agcttgctcattaattttgaaaagatgtacctggtggatatctagctagtaatatattctgaagcaacattttagctc

SEQ ID NO: 142477 - DNA, 78 bp, Homo sapiens
tttgaaaagatgtacctggtggatatctagctagtaatatattctgaagcaacattttagctctattgatactctttc

SEQ ID NO: 142478 - DNA, 85 bp, Homo sapiens
tggtggatatctagctagtaatatattctgaagcaacattttagctctattgatactctttctaatgctgatatgatcttgagta

SEQ ID NO: 142479 - DNA, 84 bp, Homo sapiens
agctagtaatatattctgaagcaacattttagctctattgatactctttctaatgctgatatgatcttgagtataagaaatgca

SEQ ID NO: 142480 - DNA, 85 bp, Homo sapiens
attctgaagcaacattttagctctattgatactctttctaatgctgatatgatcttgagtataagaaatgcatatgtcactagaa

SEQ ID NO: 142481 - DNA, 88 bp, Homo sapiens
ttagctctattgatactctttctaatgctgatatgatcttgagtataagaaatgcatatgtcactagaatggataaaataatgctgca

SEQ ID NO: 142482 - DNA, 84 bp, Homo sapiens
tactctttctaatgctgatatgatcttgagtataagaaatgcatatgtcactagaatggataaaataatgctgcaaacttaatg

SEQ ID NO: 142483 - DNA, 87 bp, Homo sapiens
tctaatgctgatatgatcttgagtataagaaatgcatatgtcactagaatggataaaataatgctgcaaacttaatgttcttatgca

SEQ ID NO: 142484 - DNA, 81 bp, Homo sapiens
atgcatatgtcactagaatggataaaataatgctgcaaacttaatgttcttatgcaaaatggaacgctaatgaaacacagc

SEQ ID NO: 142485 - DNA, 79 bp, Homo sapiens
tagaatggataaaataatgctgcaaacttaatgttcttatgcaaaatggaacgctaatgaaacacagcttacaatcgca

SEQ ID NO: 142486 - DNA, 78 bp, Homo sapiens
ggataaaataatgctgcaaacttaatgttcttatgcaaaatggaacgctaatgaaacacagcttacaatcgcaaatca

SEQ ID NO: 142487 - DNA, 78 bp, Homo sapiens
aatgctgcaaacttaatgttcttatgcaaaatggaacgctaatgaaacacagcttacaatcgcaaatcaaaactcaca

SEQ ID NO: 142488 - DNA, 79 bp, Homo sapiens
ttaatgttcttatgcaaaatggaacgctaatgaaacacagcttacaatcgcaaatcaaaactcacaagtgctcatctgt

SEQ ID NO: 142489 - DNA, 80 bp, Homo sapiens
ttatgcaaaatggaacgctaatgaaacacagcttacaatcgcaaatcaaaactcacaagtgctcatctgttgtagattta

SEQ ID NO: 142490 - DNA, 78 bp, Homo sapiens
aacgctaatgaaacacagcttacaatcgcaaatcaaaactcacaagtgctcatctgttgtagatttagtgtaataaga

SEQ ID NO: 142491 - DNA, 77 bp, Homo sapiens
aaacacagcttacaatcgcaaatcaaaactcacaagtgctcatctgttgtagatttagtgtaataagacttagattg

SEQ ID NO: 142492 - DNA, 78 bp, Homo sapiens
agcttacaatcgcaaatcaaaactcacaagtgctcatctgttgtagatttagtgtaataagacttagattgtgctcct

SEQ ID NO: 142493 - DNA, 78 bp, Homo sapiens
atcaaaactcacaagtgctcatctgttgtagatttagtgtaataagacttagattgtgctccttcggatatgattgtt

SEQ ID NO: 142494 - DNA, 79 bp, Homo sapiens
aactcacaagtgctcatctgttgtagatttagtgtaataagacttagattgtgctccttcggatatgattgtttctcaa

SEQ ID NO: 142495 - DNA, 78 bp, Homo sapiens
catctgttgtagatttagtgtaataagacttagattgtgctccttcggatatgattgtttctcaaatcttggcaatat

SEQ ID NO: 142496 - DNA, 77 bp, Homo sapiens
gatttagtgtaataagacttagattgtgctccttcggatatgattgtttctcaaatcttggcaatattccttagtca

SEQ ID NO: 142497 - DNA, 77 bp, Homo sapiens
agtgtaataagacttagattgtgctccttcggatatgattgtttctcaaatcttggcaatattccttagtcaaatca

SEQ ID NO: 142498 - DNA, 78 bp, Homo sapiens
ttagattgtgctccttcggatatgattgtttctcaaatcttggcaatattccttagtcaaatcaggctactagaattc

SEQ ID NO: 142499 - DNA, 78 bp, Homo sapiens
tccttcggatatgattgtttctcaaatcttggcaatattccttagtcaaatcaggctactagaattctgtattggata

SEQ ID NO: 142500 - DNA, 78 bp, Homo sapiens
gtttctcaaatcttggcaatattccttagtcaaatcaggctactagaattctgtattggatatataagagcatgaaat

SEQ ID NO: 142501 - DNA, 73 bp, Homo sapiens
aatttttaaaaatacacttgtgattataaaattaatcacaaatttcacttatacctgctatcagcagctagaa

SEQ ID NO: 142502 - DNA, 73 bp, Homo sapiens
aaaaatacacttgtgattataaaattaatcacaaatttcacttatacctgctatcagcagctagaaaacattt

SEQ ID NO: 142503 - DNA, 71 bp, Homo sapiens
acttgtgattataaaattaatcacaaatttcacttatacctgctatcagcagctagaaaacattttttttt

SEQ ID NO: 142504 - DNA, 70 bp, Homo sapiens
tttttttaaatcaagtattttgtgtttggaatgttagaatgagatctgaatgtggtttcaatctaatttt

SEQ ID NO: 142505 - DNA, 73 bp, Homo sapiens
atcaagtattttgtgtttggaatgttagaatgagatctgaatgtggtttcaatctaattttttcccagactac

SEQ ID NO: 142506 - DNA, 72 bp, Homo sapiens
tttgtgtttggaatgttagaatgagatctgaatgtggtttcaatctaattttttcccagactactattttct

SEQ ID NO: 142507 - DNA, 71 bp, Homo sapiens
tggaatgttagaatgagatctgaatgtggtttcaatctaattttttcccagactactattttcttttttag

SEQ ID NO: 142508 - DNA, 72 bp, Homo sapiens
gagatctgaatgtggtttcaatctaattttttcccagactactattttcttttttaggtactattctgagca

SEQ ID NO: 142509 - DNA, 71 bp, Homo sapiens
tgtggtttcaatctaattttttcccagactactattttcttttttaggtactattctgagcatactcaaca

SEQ ID NO: 142510 - DNA, 72 bp, Homo sapiens
ttcccagactactattttcttttttaggtactattctgagcatactcaacaaaacccatgcatttcataaac

SEQ ID NO: 142511 - DNA, 71 bp, Homo sapiens
actattttcttttttaggtactattctgagcatactcaacaaaacccatgcatttcataaactaatagaag

SEQ ID NO: 142512 - DNA, 75 bp, Homo sapiens
tttttaggtactattctgagcatactcaacaaaacccatgcatttcataaactaatagaagttgaggattgttga

SEQ ID NO: 142513 - DNA, 76 bp, Homo sapiens
aggtactattctgagcatactcaacaaaacccatgcatttcataaactaatagaagttgaggattgttgaatctat

SEQ ID NO: 142514 - DNA, 73 bp, Homo sapiens
acaaaacccatgcatttcataaactaatagaagttgaggattgttgaatctatttcacttattttggctgtgg

SEQ ID NO: 142515 - DNA, 77 bp, Homo sapiens
ccatgcatttcataaactaatagaagttgaggattgttgaatctatttcacttattttggctgtggtttccatctga

SEQ ID NO: 142516 - DNA, 72 bp, Homo sapiens
aactaatagaagttgaggattgttgaatctatttcacttattttggctgtggtttccatctgaaagtagagg

SEQ ID NO: 142517 - DNA, 75 bp, Homo sapiens
tagaagttgaggattgttgaatctatttcacttattttggctgtggtttccatctgaaagtagaggttgtataca

SEQ ID NO: 142518 - DNA, 75 bp, Homo sapiens
tgttgaatctatttcacttattttggctgtggtttccatctgaaagtagaggttgtatacaccatatactgttct

SEQ ID NO: 142519 - DNA, 73 bp, Homo sapiens
tttcacttattttggctgtggtttccatctgaaagtagaggttgtatacaccatatactgttcttcattttat

SEQ ID NO: 142520 - DNA, 73 bp, Homo sapiens
cttattttggctgtggtttccatctgaaagtagaggttgtatacaccatatactgttcttcattttattaata

SEQ ID NO: 142521 - DNA, 72 bp, Homo sapiens
ctgtggtttccatctgaaagtagaggttgtatacaccatatactgttcttcattttattaatatttttctcc

SEQ ID NO: 142522 - DNA, 75 bp, Homo sapiens
catctgaaagtagaggttgtatacaccatatactgttcttcattttattaatatttttctccttgacctctcata

SEQ ID NO: 142523 - DNA, 72 bp, Homo sapiens
tagaggttgtatacaccatatactgttcttcattttattaatatttttctccttgacctctcataaatttac

SEQ ID NO: 142524 - DNA, 71 bp, Homo sapiens
caccatatactgttcttcattttattaatatttttctccttgacctctcataaatttactttacacaattc

SEQ ID NO: 142525 - DNA, 69 bp, Homo sapiens
tgttcttcattttattaatatttttctccttgacctctcataaatttactttacacaattcttaccctg

SEQ ID NO: 142526 - DNA, 72 bp, Homo sapiens
tttctccttgacctctcataaatttactttacacaattcttaccctgtacatatgtaaacataagtgtacga

SEQ ID NO: 142527 - DNA, 71 bp, Homo sapiens
ccttgacctctcataaatttactttacacaattcttaccctgtacatatgtaaacataagtgtacgattct

SEQ ID NO: 142528 - DNA, 75 bp, Homo sapiens
atatgtaaacataagtgtacgattcttaaccatggagtagaggtactagaatgcttacggccatctctttgtaca

SEQ ID NO: 142529 - DNA, 73 bp, Homo sapiens
aaacataagtgtacgattcttaaccatggagtagaggtactagaatgcttacggccatctctttgtacaggaa

SEQ ID NO: 142530 - DNA, 76 bp, Homo sapiens
tgtacgattcttaaccatggagtagaggtactagaatgcttacggccatctctttgtacaggaactgcattgactt

SEQ ID NO: 142531 - DNA, 76 bp, Homo sapiens
ttaaccatggagtagaggtactagaatgcttacggccatctctttgtacaggaactgcattgactttcagtaaaca

SEQ ID NO: 142532 - DNA, 76 bp, Homo sapiens
agtagaggtactagaatgcttacggccatctctttgtacaggaactgcattgactttcagtaaacataaagccaca

SEQ ID NO: 142533 - DNA, 78 bp, Homo sapiens
atgcttacggccatctctttgtacaggaactgcattgactttcagtaaacataaagccacaactcctacatgatgtta

SEQ ID NO: 142534 - DNA, 80 bp, Homo sapiens
ccatctctttgtacaggaactgcattgactttcagtaaacataaagccacaactcctacatgatgttatgtaccatatga

SEQ ID NO: 142535 - DNA, 79 bp, Homo sapiens
tttgtacaggaactgcattgactttcagtaaacataaagccacaactcctacatgatgttatgtaccatatgatctgtt

SEQ ID NO: 142536 - DNA, 80 bp, Homo sapiens
gaactgcattgactttcagtaaacataaagccacaactcctacatgatgttatgtaccatatgatctgttttgtatctta

SEQ ID NO: 142537 - DNA, 77 bp, Homo sapiens
aaacataaagccacaactcctacatgatgttatgtaccatatgatctgttttgtatcttaaatttgatttacatata

SEQ ID NO: 142538 - DNA, 77 bp, Homo sapiens
gccacaactcctacatgatgttatgtaccatatgatctgttttgtatcttaaatttgatttacatatattatttatt

SEQ ID NO: 142539 - DNA, 78 bp, Homo sapiens
tgatgttatgtaccatatgatctgttttgtatcttaaatttgatttacatatattatttatttctggtaactcactca

SEQ ID NO: 142540 - DNA, 76 bp, Homo sapiens
taccatatgatctgttttgtatcttaaatttgatttacatatattatttatttctggtaactcactcagtttatgc

SEQ ID NO: 142541 - DNA, 77 bp, Homo sapiens
tgatctgttttgtatcttaaatttgatttacatatattatttatttctggtaactcactcagtttatgctgtgctaa

SEQ ID NO: 142542 - DNA, 82 bp, Homo sapiens
tgatttacatatattatttatttctggtaactcactcagtttatgctgtgctaaatatcaatcaagccatgtataaatgtga

SEQ ID NO: 142543 - DNA, 83 bp, Homo sapiens
atattatttatttctggtaactcactcagtttatgctgtgctaaatatcaatcaagccatgtataaatgtgatatgattggca

SEQ ID NO: 142544 - DNA, 83 bp, Homo sapiens
atttctggtaactcactcagtttatgctgtgctaaatatcaatcaagccatgtataaatgtgatatgattggcaatatgtgtt

SEQ ID NO: 142545 - DNA, 82 bp, Homo sapiens
ggtaactcactcagtttatgctgtgctaaatatcaatcaagccatgtataaatgtgatatgattggcaatatgtgtttactt

SEQ ID NO: 142546 - DNA, 82 bp, Homo sapiens
tcagtttatgctgtgctaaatatcaatcaagccatgtataaatgtgatatgattggcaatatgtgtttactttaaacttgtc

SEQ ID NO: 142547 - DNA, 79 bp, Homo sapiens
ctgtgctaaatatcaatcaagccatgtataaatgtgatatgattggcaatatgtgtttactttaaacttgtcttttcaa

SEQ ID NO: 142548 - DNA, 77 bp, Homo sapiens
tatcaatcaagccatgtataaatgtgatatgattggcaatatgtgtttactttaaacttgtcttttcaaaatattac

SEQ ID NO: 142549 - DNA, 75 bp, Homo sapiens
gccatgtataaatgtgatatgattggcaatatgtgtttactttaaacttgtcttttcaaaatattactcagttta

SEQ ID NO: 142550 - DNA, 74 bp, Homo sapiens
gtgatatgattggcaatatgtgtttactttaaacttgtcttttcaaaatattactcagtttatgttgtacaatg

SEQ ID NO: 142551 - DNA, 70 bp, Homo sapiens
gtgtttactttaaacttgtcttttcaaaatattactcagtttatgttgtacaatgtagatggcctcttac

SEQ ID NO: 142552 - DNA, 72 bp, Homo sapiens
aacttgtcttttcaaaatattactcagtttatgttgtacaatgtagatggcctcttactaatgtaaaatgat

SEQ ID NO: 142553 - DNA, 75 bp, Homo sapiens
tcaaaatattactcagtttatgttgtacaatgtagatggcctcttactaatgtaaaatgatttgtagtggaaaca

SEQ ID NO: 142554 - DNA, 73 bp, Homo sapiens
tacaatgtagatggcctcttactaatgtaaaatgatttgtagtggaaacatttatatttttataataaacata

SEQ ID NO: 142555 - DNA, 70 bp, Homo sapiens
atggcctcttactaatgtaaaatgatttgtagtggaaacatttatatttttataataaacataatgaaaa

SEQ ID NO: 142556 - DNA, 67 bp, Homo sapiens
atttttataataaacataatgaaaatattttttacagattggaatacagaagtggtctttgaagttt

SEQ ID NO: 142557 - DNA, 67 bp, Homo sapiens
ataataaacataatgaaaatattttttacagattggaatacagaagtggtctttgaagttttttaaa

SEQ ID NO: 142558 - DNA, 80 bp, Homo sapiens
aaagtgcagctcagtagcgccgcggcgccacgtttaccctgcgcagacgccgtcgccgccgctgctgccgccgccgctgc

SEQ ID NO: 142559 - DNA, 78 bp, Homo sapiens
gcgccacgtttaccctgcgcagacgccgtcgccgccgctgctgccgccgccgctgccacagcctttgccgccacggtc

SEQ ID NO: 142560 - DNA, 76 bp, Homo sapiens
acgtttaccctgcgcagacgccgtcgccgccgctgctgccgccgccgctgccacagcctttgccgccacggtctcc

SEQ ID NO: 142561 - DNA, 81 bp, Homo sapiens
tgcgcagacgccgtcgccgccgctgctgccgccgccgctgccacagcctttgccgccacggtctccgccgccgctgtcctc

SEQ ID NO: 142562 - DNA, 81 bp, Homo sapiens
gccgccgctgctgccgccgccgctgccacagcctttgccgccacggtctccgccgccgctgtcctcgcgctgcctctggga

SEQ ID NO: 142563 - DNA, 80 bp, Homo sapiens
ccgctgccacagcctttgccgccacggtctccgccgccgctgtcctcgcgctgcctctgggagcctccattgttccagca

SEQ ID NO: 142564 - DNA, 78 bp, Homo sapiens
acagcctttgccgccacggtctccgccgccgctgtcctcgcgctgcctctgggagcctccattgttccagcagcgccc

SEQ ID NO: 142565 - DNA, 76 bp, Homo sapiens
ccacggtctccgccgccgctgtcctcgcgctgcctctgggagcctccattgttccagcagcgcccggtcccgagac

SEQ ID NO: 142566 - DNA, 77 bp, Homo sapiens
cgccgccgctgtcctcgcgctgcctctgggagcctccattgttccagcagcgcccggtcccgagaccgggcatcttg

SEQ ID NO: 142567 - DNA, 75 bp, Homo sapiens
ccgctgtcctcgcgctgcctctgggagcctccattgttccagcagcgcccggtcccgagaccgggcatcttgggg

SEQ ID NO: 142568 - DNA, 73 bp, Homo sapiens
tgcctctgggagcctccattgttccagcagcgcccggtcccgagaccgggcatcttgggggctcgcgaaacgg

SEQ ID NO: 142569 - DNA, 71 bp, Homo sapiens
agcctccattgttccagcagcgcccggtcccgagaccgggcatcttgggggctcgcgaaacgggcggcggc

SEQ ID NO: 142570 - DNA, 69 bp, Homo sapiens
attgttccagcagcgcccggtcccgagaccgggcatcttgggggctcgcgaaacgggcggcggccgacg

SEQ ID NO: 142571 - DNA, 68 bp, Homo sapiens
agcgcccggtcccgagaccgggcatcttgggggctcgcgaaacgggcggcggccgacggagttgagac

SEQ ID NO: 142572 - DNA, 67 bp, Homo sapiens
ggtcccgagaccgggcatcttgggggctcgcgaaacgggcggcggccgacggagttgagaccccagg

SEQ ID NO: 142573 - DNA, 68 bp, Homo sapiens
catcttgggggctcgcgaaacgggcggcggccgacggagttgagaccccagggcgccggcgggaccag

SEQ ID NO: 142574 - DNA, 69 bp, Homo sapiens
gggctcgcgaaacgggcggcggccgacggagttgagaccccagggcgccggcgggaccaggagcggcag

SEQ ID NO: 142575 - DNA, 68 bp, Homo sapiens
cgaaacgggcggcggccgacggagttgagaccccagggcgccggcgggaccaggagcggcaggggtca

SEQ ID NO: 142576 - DNA, 69 bp, Homo sapiens
ccgacggagttgagaccccagggcgccggcgggaccaggagcggcaggggtcagctcaggaatcccggg

SEQ ID NO: 142577 - DNA, 69 bp, Homo sapiens
agttgagaccccagggcgccggcgggaccaggagcggcaggggtcagctcaggaatcccggggagccgg

SEQ ID NO: 142578 - DNA, 69 bp, Homo sapiens
agggcgccggcgggaccaggagcggcaggggtcagctcaggaatcccggggagccgggaccaaagcgtg

SEQ ID NO: 142579 - DNA, 69 bp, Homo sapiens
cgggaccaggagcggcaggggtcagctcaggaatcccggggagccgggaccaaagcgtggggcggcagg

SEQ ID NO: 142580 - DNA, 68 bp, Homo sapiens
aggagcggcaggggtcagctcaggaatcccggggagccgggaccaaagcgtggggcggcagggggccg

SEQ ID NO: 142581 - DNA, 69 bp, Homo sapiens
tcagctcaggaatcccggggagccgggaccaaagcgtggggcggcagggggccggggtggcgaggtcta

SEQ ID NO: 142582 - DNA, 66 bp, Homo sapiens
tcaggaatcccggggagccgggaccaaagcgtggggcggcagggggccggggtggcgaggtctacg

SEQ ID NO: 142583 - DNA, 65 bp, Homo sapiens
accaaagcgtggggcggcagggggccggggtggcgaggtctacggtctccggagttggggctccc

SEQ ID NO: 142584 - DNA, 64 bp, Homo sapiens
gggcggcagggggccggggtggcgaggtctacggtctccggagttggggctcccccttcccggc

SEQ ID NO: 142585 - DNA, 63 bp, Homo sapiens
cgaggtctacggtctccggagttggggctcccccttcccggcccgactttccccgccgacctc

SEQ ID NO: 142586 - DNA, 63 bp, Homo sapiens
tctacggtctccggagttggggctcccccttcccggcccgactttccccgccgacctccccaa

SEQ ID NO: 142587 - DNA, 62 bp, Homo sapiens
agttggggctcccccttcccggcccgactttccccgccgacctccccaagtggggtcggagc

SEQ ID NO: 142588 - DNA, 61 bp, Homo sapiens
ccccttcccggcccgactttccccgccgacctccccaagtggggtcggagccccggcgggc

SEQ ID NO: 142589 - DNA, 65 bp, Homo sapiens
gcccgactttccccgccgacctccccaagtggggtcggagccccggcgggcgcccccggcgatga

SEQ ID NO: 142590 - DNA, 64 bp, Homo sapiens
actttccccgccgacctccccaagtggggtcggagccccggcgggcgcccccggcgatgagccc

SEQ ID NO: 142591 - DNA, 66 bp, Homo sapiens
acctccccaagtggggtcggagccccggcgggcgcccccggcgatgagcccggactcgaggtggcc

SEQ ID NO: 142592 - DNA, 68 bp, Homo sapiens
ggggtcggagccccggcgggcgcccccggcgatgagcccggactcgaggtggccggtgagtgcgggcc

SEQ ID NO: 142593 - DNA, 70 bp, Homo sapiens
gggcgcccccggcgatgagcccggactcgaggtggccggtgagtgcgggcctgggaccagggcgggagtg

SEQ ID NO: 142594 - DNA, 81 bp, Homo sapiens
caggaactcatccccagccttatgttaactgatctgtgtattctagatgtgacagcatgggggtggactttgatgtgaaga

SEQ ID NO: 142595 - DNA, 79 bp, Homo sapiens
actcatccccagccttatgttaactgatctgtgtattctagatgtgacagcatgggggtggactttgatgtgaagactt

SEQ ID NO: 142596 - DNA, 79 bp, Homo sapiens
ccttatgttaactgatctgtgtattctagatgtgacagcatgggggtggactttgatgtgaagactttctgccacaact

SEQ ID NO: 142597 - DNA, 81 bp, Homo sapiens
ctgatctgtgtattctagatgtgacagcatgggggtggactttgatgtgaagactttctgccacaacttgcgggcgactaa

SEQ ID NO: 142598 - DNA, 79 bp, Homo sapiens
atgtgacagcatgggggtggactttgatgtgaagactttctgccacaacttgcgggcgactaagccaccatacgagtgc

SEQ ID NO: 142599 - DNA, 75 bp, Homo sapiens
gggtggactttgatgtgaagactttctgccacaacttgcgggcgactaagccaccatacgagtgcccggtggaga

SEQ ID NO: 142600 - DNA, 76 bp, Homo sapiens
ttgatgtgaagactttctgccacaacttgcgggcgactaagccaccatacgagtgcccggtggagacctgccgaaa

SEQ ID NO: 142601 - DNA, 73 bp, Homo sapiens
actttctgccacaacttgcgggcgactaagccaccatacgagtgcccggtggagacctgccgaaaggtctaca

SEQ ID NO: 142602 - DNA, 72 bp, Homo sapiens
acaacttgcgggcgactaagccaccatacgagtgcccggtggagacctgccgaaaggtctacaagagttaca

SEQ ID NO: 142603 - DNA, 73 bp, Homo sapiens
gggcgactaagccaccatacgagtgcccggtggagacctgccgaaaggtctacaagagttacagtggtattga

SEQ ID NO: 142604 - DNA, 73 bp, Homo sapiens
taagccaccatacgagtgcccggtggagacctgccgaaaggtctacaagagttacagtggtattgagtaccac

SEQ ID NO: 142605 - DNA, 72 bp, Homo sapiens
atacgagtgcccggtggagacctgccgaaaggtctacaagagttacagtggtattgagtaccacctgtacca

SEQ ID NO: 142606 - DNA, 74 bp, Homo sapiens
tggagacctgccgaaaggtctacaagagttacagtggtattgagtaccacctgtaccactatgaccacgacaac

SEQ ID NO: 142607 - DNA, 71 bp, Homo sapiens
ccgaaaggtctacaagagttacagtggtattgagtaccacctgtaccactatgaccacgacaacccaccac

SEQ ID NO: 142608 - DNA, 72 bp, Homo sapiens
tacaagagttacagtggtattgagtaccacctgtaccactatgaccacgacaacccaccacccccacaacaa

SEQ ID NO: 142609 - DNA, 70 bp, Homo sapiens
agttacagtggtattgagtaccacctgtaccactatgaccacgacaacccaccacccccacaacaaactc

SEQ ID NO: 142610 - DNA, 74 bp, Homo sapiens
tattgagtaccacctgtaccactatgaccacgacaacccaccacccccacaacaaactccactccgcaagcaca

SEQ ID NO: 142611 - DNA, 70 bp, Homo sapiens
acctgtaccactatgaccacgacaacccaccacccccacaacaaactccactccgcaagcacaagaaaaa

SEQ ID NO: 142612 - DNA, 72 bp, Homo sapiens
tatgaccacgacaacccaccacccccacaacaaactccactccgcaagcacaagaaaaaggggcgccagtca

SEQ ID NO: 142613 - DNA, 69 bp, Homo sapiens
acgacaacccaccacccccacaacaaactccactccgcaagcacaagaaaaaggggcgccagtcacgcc

SEQ ID NO: 142614 - DNA, 73 bp, Homo sapiens
ccccacaacaaactccactccgcaagcacaagaaaaaggggcgccagtcacgcccagccaacaagcagtcacc

SEQ ID NO: 142615 - DNA, 73 bp, Homo sapiens
aacaaactccactccgcaagcacaagaaaaaggggcgccagtcacgcccagccaacaagcagtcacccagccc

SEQ ID NO: 142616 - DNA, 76 bp, Homo sapiens
actccgcaagcacaagaaaaaggggcgccagtcacgcccagccaacaagcagtcacccagcccctcagaggtctca

SEQ ID NO: 142617 - DNA, 75 bp, Homo sapiens
acaagaaaaaggggcgccagtcacgcccagccaacaagcagtcacccagcccctcagaggtctcacagtcaccag

SEQ ID NO: 142618 - DNA, 85 bp, Homo sapiens
gcgccagtcacgcccagccaacaagcagtcacccagcccctcagaggtctcacagtcaccaggccgtgaggtgatgagctatgca

SEQ ID NO: 142619 - DNA, 83 bp, Homo sapiens
cgcccagccaacaagcagtcacccagcccctcagaggtctcacagtcaccaggccgtgaggtgatgagctatgcacaggccca

SEQ ID NO: 142620 - DNA, 84 bp, Homo sapiens
aacaagcagtcacccagcccctcagaggtctcacagtcaccaggccgtgaggtgatgagctatgcacaggcccagcgcatggtg

SEQ ID NO: 142621 - DNA, 83 bp, Homo sapiens
agtcacccagcccctcagaggtctcacagtcaccaggccgtgaggtgatgagctatgcacaggcccagcgcatggtggaggtg

SEQ ID NO: 142622 - DNA, 87 bp, Homo sapiens
tcagaggtctcacagtcaccaggccgtgaggtgatgagctatgcacaggcccagcgcatggtggaggtggacttgcatggccgcgtc

SEQ ID NO: 142623 - DNA, 87 bp, Homo sapiens
aggccgtgaggtgatgagctatgcacaggcccagcgcatggtggaggtggacttgcatggccgcgtccaccgcatcagcatctttga

SEQ ID NO: 142624 - DNA, 85 bp, Homo sapiens
agctatgcacaggcccagcgcatggtggaggtggacttgcatggccgcgtccaccgcatcagcatctttgacaacctggatgtgg

SEQ ID NO: 142625 - DNA, 85 bp, Homo sapiens
cccagcgcatggtggaggtggacttgcatggccgcgtccaccgcatcagcatctttgacaacctggatgtggtgtcagaggatga

SEQ ID NO: 142626 - DNA, 80 bp, Homo sapiens
acttgcatggccgcgtccaccgcatcagcatctttgacaacctggatgtggtgtcagaggatgaggaagcccccgaggag

SEQ ID NO: 142627 - DNA, 78 bp, Homo sapiens
atggccgcgtccaccgcatcagcatctttgacaacctggatgtggtgtcagaggatgaggaagcccccgaggaggccc

SEQ ID NO: 142628 - DNA, 81 bp, Homo sapiens
tccaccgcatcagcatctttgacaacctggatgtggtgtcagaggatgaggaagcccccgaggaggcccctgagaatggca

SEQ ID NO: 142629 - DNA, 77 bp, Homo sapiens
atctttgacaacctggatgtggtgtcagaggatgaggaagcccccgaggaggcccctgagaatggcagcaacaagga

SEQ ID NO: 142630 - DNA, 77 bp, Homo sapiens
aacctggatgtggtgtcagaggatgaggaagcccccgaggaggcccctgagaatggcagcaacaaggagaacactga

SEQ ID NO: 142631 - DNA, 79 bp, Homo sapiens
atgtggtgtcagaggatgaggaagcccccgaggaggcccctgagaatggcagcaacaaggagaacactgagacaccagc

SEQ ID NO: 142632 - DNA, 77 bp, Homo sapiens
atgaggaagcccccgaggaggcccctgagaatggcagcaacaaggagaacactgagacaccagctgctactcccaag

SEQ ID NO: 142633 - DNA, 78 bp, Homo sapiens
ccccgaggaggcccctgagaatggcagcaacaaggagaacactgagacaccagctgctactcccaagtcaggcaaaca

SEQ ID NO: 142634 - DNA, 79 bp, Homo sapiens
aggcccctgagaatggcagcaacaaggagaacactgagacaccagctgctactcccaagtcaggcaaacataagaacaa

SEQ ID NO: 142635 - DNA, 80 bp, Homo sapiens
aatggcagcaacaaggagaacactgagacaccagctgctactcccaagtcaggcaaacataagaacaaggagaagcgcaa

SEQ ID NO: 142636 - DNA, 77 bp, Homo sapiens
aacaaggagaacactgagacaccagctgctactcccaagtcaggcaaacataagaacaaggagaagcgcaaggactc

SEQ ID NO: 142637 - DNA, 79 bp, Homo sapiens
agaacactgagacaccagctgctactcccaagtcaggcaaacataagaacaaggagaagcgcaaggactccaaccatca

SEQ ID NO: 142638 - DNA, 77 bp, Homo sapiens
acaccagctgctactcccaagtcaggcaaacataagaacaaggagaagcgcaaggactccaaccatcaccaccacca

SEQ ID NO: 142639 - DNA, 79 bp, Homo sapiens
atcaccaccaccacaatgtttctgcgagcaccactcccaagctgccagaggtggtctatcgggagctggaacaggacac

SEQ ID NO: 142640 - DNA, 79 bp, Homo sapiens
accacaatgtttctgcgagcaccactcccaagctgccagaggtggtctatcgggagctggaacaggacacccctgatgc

SEQ ID NO: 142641 - DNA, 73 bp, Homo sapiens
accactcccaagctgccagaggtggtctatcgggagctggaacaggacacccctgatgccccaccccggccaa

SEQ ID NO: 142642 - DNA, 73 bp, Homo sapiens
agctgccagaggtggtctatcgggagctggaacaggacacccctgatgccccaccccggccaacttcctatta

SEQ ID NO: 142643 - DNA, 69 bp, Homo sapiens
gtggtctatcgggagctggaacaggacacccctgatgccccaccccggccaacttcctattaccggtaa

SEQ ID NO: 142644 - DNA, 69 bp, Homo sapiens
tatcgggagctggaacaggacacccctgatgccccaccccggccaacttcctattaccggtaaggccac

SEQ ID NO: 142645 - DNA, 69 bp, Homo sapiens
ccctgatgccccaccccggccaacttcctattaccggtaaggccacctctaccttgcagctctggaaaa

SEQ ID NO: 142646 - DNA, 77 bp, Homo sapiens
agggagggaaatctcaaccatgtgatgctgagttccctgtttgtaccgtaggtacatcgagaagtctgcagaggagc

SEQ ID NO: 142647 - DNA, 78 bp, Homo sapiens
aaccatgtgatgctgagttccctgtttgtaccgtaggtacatcgagaagtctgcagaggagctggacgaggaagtaga

SEQ ID NO: 142648 - DNA, 79 bp, Homo sapiens
atgctgagttccctgtttgtaccgtaggtacatcgagaagtctgcagaggagctggacgaggaagtagagtatgacatg

SEQ ID NO: 142649 - DNA, 76 bp, Homo sapiens
agttccctgtttgtaccgtaggtacatcgagaagtctgcagaggagctggacgaggaagtagagtatgacatggac

SEQ ID NO: 142650 - DNA, 79 bp, Homo sapiens
ttgtaccgtaggtacatcgagaagtctgcagaggagctggacgaggaagtagagtatgacatggacgaggaggactaca

SEQ ID NO: 142651 - DNA, 86 bp, Homo sapiens
tacatcgagaagtctgcagaggagctggacgaggaagtagagtatgacatggacgaggaggactacatctggctggatatcatgaa

SEQ ID NO: 142652 - DNA, 85 bp, Homo sapiens
aagtctgcagaggagctggacgaggaagtagagtatgacatggacgaggaggactacatctggctggatatcatgaatgagcgtc

SEQ ID NO: 142653 - DNA, 83 bp, Homo sapiens
agctggacgaggaagtagagtatgacatggacgaggaggactacatctggctggatatcatgaatgagcgtcggaagacagag

SEQ ID NO: 142654 - DNA, 81 bp, Homo sapiens
aggaagtagagtatgacatggacgaggaggactacatctggctggatatcatgaatgagcgtcggaagacagagggtgtaa

SEQ ID NO: 142655 - DNA, 80 bp, Homo sapiens
acgaggaggactacatctggctggatatcatgaatgagcgtcggaagacagagggtgtaagtcccatcccgcaggagatc

SEQ ID NO: 142656 - DNA, 81 bp, Homo sapiens
tacatctggctggatatcatgaatgagcgtcggaagacagagggtgtaagtcccatcccgcaggagatctttgagtaccta

SEQ ID NO: 142657 - DNA, 78 bp, Homo sapiens
tggatatcatgaatgagcgtcggaagacagagggtgtaagtcccatcccgcaggagatctttgagtacctaatggacc

SEQ ID NO: 142658 - DNA, 76 bp, Homo sapiens
atcatgaatgagcgtcggaagacagagggtgtaagtcccatcccgcaggagatctttgagtacctaatggaccgac

SEQ ID NO: 142659 - DNA, 73 bp, Homo sapiens
agcgtcggaagacagagggtgtaagtcccatcccgcaggagatctttgagtacctaatggaccgactggagaa

SEQ ID NO: 142660 - DNA, 70 bp, Homo sapiens
agggtgtaagtcccatcccgcaggagatctttgagtacctaatggaccgactggagaaggagtcgtactt

SEQ ID NO: 142661 - DNA, 75 bp, Homo sapiens
tcccatcccgcaggagatctttgagtacctaatggaccgactggagaaggagtcgtactttgagagtcataataa

SEQ ID NO: 142662 - DNA, 73 bp, Homo sapiens
caggagatctttgagtacctaatggaccgactggagaaggagtcgtactttgagagtcataataaaggcgacc

SEQ ID NO: 142663 - DNA, 71 bp, Homo sapiens
atctttgagtacctaatggaccgactggagaaggagtcgtactttgagagtcataataaaggcgaccctaa

SEQ ID NO: 142664 - DNA, 74 bp, Homo sapiens
tacctaatggaccgactggagaaggagtcgtactttgagagtcataataaaggcgaccctaatgcgctagtgga

SEQ ID NO: 142665 - DNA, 76 bp, Homo sapiens
actggagaaggagtcgtactttgagagtcataataaaggcgaccctaatgcgctagtggacgaggatgctgtttgc

SEQ ID NO: 142666 - DNA, 79 bp, Homo sapiens
aaggagtcgtactttgagagtcataataaaggcgaccctaatgcgctagtggacgaggatgctgtttgctgtatctgca

SEQ ID NO: 142667 - DNA, 84 bp, Homo sapiens
tactttgagagtcataataaaggcgaccctaatgcgctagtggacgaggatgctgtttgctgtatctgcaatgatggtgagtgc

SEQ ID NO: 142668 - DNA, 84 bp, Homo sapiens
ataataaaggcgaccctaatgcgctagtggacgaggatgctgtttgctgtatctgcaatgatggtgagtgccagaacagcaatg

SEQ ID NO: 142669 - DNA, 88 bp, Homo sapiens
accctaatgcgctagtggacgaggatgctgtttgctgtatctgcaatgatggtgagtgccagaacagcaatgtcatcctcttctgtga

SEQ ID NO: 142670 - DNA, 92 bp, Homo sapiens
aatgcgctagtggacgaggatgctgtttgctgtatctgcaatgatggtgagtgccagaacagcaatgtcatcctcttctgtgacatgtgcaa

SEQ ID NO: 142671 - DNA, 91 bp, Homo sapiens
acgaggatgctgtttgctgtatctgcaatgatggtgagtgccagaacagcaatgtcatcctcttctgtgacatgtgcaacctggccgtgca

SEQ ID NO: 142672 - DNA, 91 bp, Homo sapiens
tttgctgtatctgcaatgatggtgagtgccagaacagcaatgtcatcctcttctgtgacatgtgcaacctggccgtgcaccaggagtgcta

SEQ ID NO: 142673 - DNA, 89 bp, Homo sapiens
tatctgcaatgatggtgagtgccagaacagcaatgtcatcctcttctgtgacatgtgcaacctggccgtgcaccaggagtgctacggtg

SEQ ID NO: 142674 - DNA, 85 bp, Homo sapiens
atgatggtgagtgccagaacagcaatgtcatcctcttctgtgacatgtgcaacctggccgtgcaccaggagtgctacggtgtccc

SEQ ID NO: 142675 - DNA, 82 bp, Homo sapiens
agaacagcaatgtcatcctcttctgtgacatgtgcaacctggccgtgcaccaggagtgctacggtgtcccctatatccctga

SEQ ID NO: 142676 - DNA, 80 bp, Homo sapiens
aatgtcatcctcttctgtgacatgtgcaacctggccgtgcaccaggagtgctacggtgtcccctatatccctgagggcca

SEQ ID NO: 142677 - DNA, 80 bp, Homo sapiens
tcctcttctgtgacatgtgcaacctggccgtgcaccaggagtgctacggtgtcccctatatccctgagggccagtggctg

SEQ ID NO: 142678 - DNA, 77 bp, Homo sapiens
acatgtgcaacctggccgtgcaccaggagtgctacggtgtcccctatatccctgagggccagtggctgtgccgccgt

SEQ ID NO: 142679 - DNA, 77 bp, Homo sapiens
aacctggccgtgcaccaggagtgctacggtgtcccctatatccctgagggccagtggctgtgccgccgttgcctgca

SEQ ID NO: 142680 - DNA, 76 bp, Homo sapiens
accaggagtgctacggtgtcccctatatccctgagggccagtggctgtgccgccgttgcctgcagtcaccctctcg

SEQ ID NO: 142681 - DNA, 80 bp, Homo sapiens
tgctacggtgtcccctatatccctgagggccagtggctgtgccgccgttgcctgcagtcaccctctcgtgctgtggattg

SEQ ID NO: 142682 - DNA, 80 bp, Homo sapiens
ccctatatccctgagggccagtggctgtgccgccgttgcctgcagtcaccctctcgtgctgtggattgtgccctgtgccc

SEQ ID NO: 142683 - DNA, 80 bp, Homo sapiens
tccctgagggccagtggctgtgccgccgttgcctgcagtcaccctctcgtgctgtggattgtgccctgtgccccaacaag

SEQ ID NO: 142684 - DNA, 80 bp, Homo sapiens
tggctgtgccgccgttgcctgcagtcaccctctcgtgctgtggattgtgccctgtgccccaacaagggcggtgccttcaa

SEQ ID NO: 142685 - DNA, 81 bp, Homo sapiens
ccgttgcctgcagtcaccctctcgtgctgtggattgtgccctgtgccccaacaagggcggtgccttcaagcagacagatga

SEQ ID NO: 142686 - DNA, 80 bp, Homo sapiens
cagtcaccctctcgtgctgtggattgtgccctgtgccccaacaagggcggtgccttcaagcagacagatgacgggcgctg

SEQ ID NO: 142687 - DNA, 81 bp, Homo sapiens
tctcgtgctgtggattgtgccctgtgccccaacaagggcggtgccttcaagcagacagatgacgggcgctgggcccatgtg

SEQ ID NO: 142688 - DNA, 79 bp, Homo sapiens
ctgtggattgtgccctgtgccccaacaagggcggtgccttcaagcagacagatgacgggcgctgggcccatgtggtgtg

SEQ ID NO: 142689 - DNA, 79 bp, Homo sapiens
ctgtgccccaacaagggcggtgccttcaagcagacagatgacgggcgctgggcccatgtggtgtgtgccttgtggatcc

SEQ ID NO: 142690 - DNA, 78 bp, Homo sapiens
cccaacaagggcggtgccttcaagcagacagatgacgggcgctgggcccatgtggtgtgtgccttgtggatccctgag

SEQ ID NO: 142691 - DNA, 82 bp, Homo sapiens
tgccttcaagcagacagatgacgggcgctgggcccatgtggtgtgtgccttgtggatccctgaggtctgcttcgccaacacg

SEQ ID NO: 142692 - DNA, 79 bp, Homo sapiens
aagcagacagatgacgggcgctgggcccatgtggtgtgtgccttgtggatccctgaggtctgcttcgccaacacggtct

SEQ ID NO: 142693 - DNA, 81 bp, Homo sapiens
ggcccatgtggtgtgtgccttgtggatccctgaggtctgcttcgccaacacggtcttcctagagcctattgacagcattga

SEQ ID NO: 142694 - DNA, 83 bp, Homo sapiens
ttgtggatccctgaggtctgcttcgccaacacggtcttcctagagcctattgacagcattgagcacatcccaccagctcgctg

SEQ ID NO: 142695 - DNA, 83 bp, Homo sapiens
ctgaggtctgcttcgccaacacggtcttcctagagcctattgacagcattgagcacatcccaccagctcgctggaagctcacc

SEQ ID NO: 142696 - DNA, 83 bp, Homo sapiens
aacacggtcttcctagagcctattgacagcattgagcacatcccaccagctcgctggaagctcacctgctacatttgcaaaca

SEQ ID NO: 142697 - DNA, 84 bp, Homo sapiens
ttcctagagcctattgacagcattgagcacatcccaccagctcgctggaagctcacctgctacatttgcaaacaacggggctca

SEQ ID NO: 142698 - DNA, 85 bp, Homo sapiens
tattgacagcattgagcacatcccaccagctcgctggaagctcacctgctacatttgcaaacaacggggctcaggggcctgcatc

SEQ ID NO: 142699 - DNA, 83 bp, Homo sapiens
attgagcacatcccaccagctcgctggaagctcacctgctacatttgcaaacaacggggctcaggggcctgcatccagtgcca

SEQ ID NO: 142700 - DNA, 79 bp, Homo sapiens
accagctcgctggaagctcacctgctacatttgcaaacaacggggctcaggggcctgcatccagtgccacaaggccaac

SEQ ID NO: 142701 - DNA, 79 bp, Homo sapiens
ctggaagctcacctgctacatttgcaaacaacggggctcaggggcctgcatccagtgccacaaggccaactgttacaca

SEQ ID NO: 142702 - DNA, 77 bp, Homo sapiens
acctgctacatttgcaaacaacggggctcaggggcctgcatccagtgccacaaggccaactgttacacagctttcca

SEQ ID NO: 142703 - DNA, 81 bp, Homo sapiens
tacatttgcaaacaacggggctcaggggcctgcatccagtgccacaaggccaactgttacacagctttccatgtgacatgc

SEQ ID NO: 142704 - DNA, 80 bp, Homo sapiens
aacaacggggctcaggggcctgcatccagtgccacaaggccaactgttacacagctttccatgtgacatgcgcccagcag

SEQ ID NO: 142705 - DNA, 84 bp, Homo sapiens
gggcctgcatccagtgccacaaggccaactgttacacagctttccatgtgacatgcgcccagcaggctggcctttacatgaaga

SEQ ID NO: 142706 - DNA, 83 bp, Homo sapiens
atccagtgccacaaggccaactgttacacagctttccatgtgacatgcgcccagcaggctggcctttacatgaagatggagcc

SEQ ID NO: 142707 - DNA, 82 bp, Homo sapiens
aaggccaactgttacacagctttccatgtgacatgcgcccagcaggctggcctttacatgaagatggagcctgtgcgggaga

SEQ ID NO: 142708 - DNA, 83 bp, Homo sapiens
aactgttacacagctttccatgtgacatgcgcccagcaggctggcctttacatgaagatggagcctgtgcgggagacaggcgc

SEQ ID NO: 142709 - DNA, 82 bp, Homo sapiens
atgtgacatgcgcccagcaggctggcctttacatgaagatggagcctgtgcgggagacaggcgccaacggcacctctttcag

SEQ ID NO: 142710 - DNA, 80 bp, Homo sapiens
agcaggctggcctttacatgaagatggagcctgtgcgggagacaggcgccaacggcacctctttcagtgtccgcaagaca

SEQ ID NO: 142711 - DNA, 79 bp, Homo sapiens
cctttacatgaagatggagcctgtgcgggagacaggcgccaacggcacctctttcagtgtccgcaagacagcctactgc

SEQ ID NO: 142712 - DNA, 80 bp, Homo sapiens
aagatggagcctgtgcgggagacaggcgccaacggcacctctttcagtgtccgcaagacagcctactgcgacatccacac

SEQ ID NO: 142713 - DNA, 80 bp, Homo sapiens
agcctgtgcgggagacaggcgccaacggcacctctttcagtgtccgcaagacagcctactgcgacatccacacgcctcca

SEQ ID NO: 142714 - DNA, 78 bp, Homo sapiens
cgggagacaggcgccaacggcacctctttcagtgtccgcaagacagcctactgcgacatccacacgcctccaggttca

SEQ ID NO: 142715 - DNA, 80 bp, Homo sapiens
aacggcacctctttcagtgtccgcaagacagcctactgcgacatccacacgcctccaggttcagcacgccgactgcctgc

SEQ ID NO: 142716 - DNA, 80 bp, Homo sapiens
acctctttcagtgtccgcaagacagcctactgcgacatccacacgcctccaggttcagcacgccgactgcctgccctgtc

SEQ ID NO: 142717 - DNA, 81 bp, Homo sapiens
agtgtccgcaagacagcctactgcgacatccacacgcctccaggttcagcacgccgactgcctgccctgtcccacagcgag

SEQ ID NO: 142718 - DNA, 82 bp, Homo sapiens
ctgcgacatccacacgcctccaggttcagcacgccgactgcctgccctgtcccacagcgagggtgaggaggatgaagatgag

SEQ ID NO: 142719 - DNA, 78 bp, Homo sapiens
aggttcagcacgccgactgcctgccctgtcccacagcgagggtgaggaggatgaagatgaggaggaggatgagggtaa

SEQ ID NO: 142720 - DNA, 81 bp, Homo sapiens
gactgcctgccctgtcccacagcgagggtgaggaggatgaagatgaggaggaggatgagggtaagggctggagctcagaga

SEQ ID NO: 142721 - DNA, 77 bp, Homo sapiens
agcgagggtgaggaggatgaagatgaggaggaggatgagggtaagggctggagctcagagaaagtcaagaaggccaa

SEQ ID NO: 142722 - DNA, 75 bp, Homo sapiens
agatgaggaggaggatgagggtaagggctggagctcagagaaagtcaagaaggccaaggccaagtcccggatcaa

SEQ ID NO: 142723 - DNA, 74 bp, Homo sapiens
gaggatgagggtaagggctggagctcagagaaagtcaagaaggccaaggccaagtcccggatcaaaatgaagaa

SEQ ID NO: 142724 - DNA, 77 bp, Homo sapiens
gagctcagagaaagtcaagaaggccaaggccaagtcccggatcaaaatgaagaaggcacggaagatcctggcagaga

SEQ ID NO: 142725 - DNA, 72 bp, Homo sapiens
aaagtcaagaaggccaaggccaagtcccggatcaaaatgaagaaggcacggaagatcctggcagagaagcgg

SEQ ID NO: 142726 - DNA, 76 bp, Homo sapiens
aagaaggccaaggccaagtcccggatcaaaatgaagaaggcacggaagatcctggcagagaagcgggcagcagcac

SEQ ID NO: 142727 - DNA, 78 bp, Homo sapiens
aaggccaagtcccggatcaaaatgaagaaggcacggaagatcctggcagagaagcgggcagcagcacctgtggtgtca

SEQ ID NO: 142728 - DNA, 81 bp, Homo sapiens
cccggatcaaaatgaagaaggcacggaagatcctggcagagaagcgggcagcagcacctgtggtgtcagtgccctgcatcc

SEQ ID NO: 142729 - DNA, 82 bp, Homo sapiens
acggaagatcctggcagagaagcgggcagcagcacctgtggtgtcagtgccctgcatcccaccacacaggtatgtggggagc

SEQ ID NO: 142730 - DNA, 83 bp, Homo sapiens
tcctggcagagaagcgggcagcagcacctgtggtgtcagtgccctgcatcccaccacacaggtatgtggggagccggtggaca

SEQ ID NO: 142731 - DNA, 82 bp, Homo sapiens
aagcgggcagcagcacctgtggtgtcagtgccctgcatcccaccacacaggtatgtggggagccggtggacaggcagatgag

SEQ ID NO: 142732 - DNA, 69 bp, Homo sapiens
ttaagagaatcagggcccaacaagttttactctttgtttcctgcctcccaggcttagtaaaatcaccaa

SEQ ID NO: 142733 - DNA, 69 bp, Homo sapiens
cccaacaagttttactctttgtttcctgcctcccaggcttagtaaaatcaccaaccgcctgaccatcca

SEQ ID NO: 142734 - DNA, 68 bp, Homo sapiens
agttttactctttgtttcctgcctcccaggcttagtaaaatcaccaaccgcctgaccatccaaaggaa

SEQ ID NO: 142735 - DNA, 75 bp, Homo sapiens
tttgtttcctgcctcccaggcttagtaaaatcaccaaccgcctgaccatccaaaggaagagccagttcatgcaga

SEQ ID NO: 142736 - DNA, 80 bp, Homo sapiens
tcccaggcttagtaaaatcaccaaccgcctgaccatccaaaggaagagccagttcatgcagaggctgcacagctactgga

SEQ ID NO: 142737 - DNA, 80 bp, Homo sapiens
cttagtaaaatcaccaaccgcctgaccatccaaaggaagagccagttcatgcagaggctgcacagctactggacactgaa

SEQ ID NO: 142738 - DNA, 83 bp, Homo sapiens
aatcaccaaccgcctgaccatccaaaggaagagccagttcatgcagaggctgcacagctactggacactgaagcggcagtcac

SEQ ID NO: 142739 - DNA, 83 bp, Homo sapiens
tgaccatccaaaggaagagccagttcatgcagaggctgcacagctactggacactgaagcggcagtcacggaatggggtccca

SEQ ID NO: 142740 - DNA, 81 bp, Homo sapiens
aaaggaagagccagttcatgcagaggctgcacagctactggacactgaagcggcagtcacggaatggggtcccattgctac

SEQ ID NO: 142741 - DNA, 85 bp, Homo sapiens
agttcatgcagaggctgcacagctactggacactgaagcggcagtcacggaatggggtcccattgctacgtcgcctgcagacaca

SEQ ID NO: 142742 - DNA, 83 bp, Homo sapiens
agaggctgcacagctactggacactgaagcggcagtcacggaatggggtcccattgctacgtcgcctgcagacacacctgcaa

SEQ ID NO: 142743 - DNA, 82 bp, Homo sapiens
acagctactggacactgaagcggcagtcacggaatggggtcccattgctacgtcgcctgcagacacacctgcaatctcagag

SEQ ID NO: 142744 - DNA, 83 bp, Homo sapiens
tggacactgaagcggcagtcacggaatggggtcccattgctacgtcgcctgcagacacacctgcaatctcagaggaactgtga

SEQ ID NO: 142745 - DNA, 79 bp, Homo sapiens
aagcggcagtcacggaatggggtcccattgctacgtcgcctgcagacacacctgcaatctcagaggaactgtgaccaag

SEQ ID NO: 142746 - DNA, 77 bp, Homo sapiens
aatggggtcccattgctacgtcgcctgcagacacacctgcaatctcagaggaactgtgaccaagttggggtactgtg

SEQ ID NO: 142747 - DNA, 79 bp, Homo sapiens
gtcccattgctacgtcgcctgcagacacacctgcaatctcagaggaactgtgaccaagttggggtactgtgtccagttc

SEQ ID NO: 142748 - DNA, 77 bp, Homo sapiens
ctacgtcgcctgcagacacacctgcaatctcagaggaactgtgaccaagttggggtactgtgtccagttccctgtgg

SEQ ID NO: 142749 - DNA, 75 bp, Homo sapiens
acacacctgcaatctcagaggaactgtgaccaagttggggtactgtgtccagttccctgtgggctctgggaacta

SEQ ID NO: 142750 - DNA, 78 bp, Homo sapiens
tcctctggctttctaatcatcctctgatcttcgttttgcctctacagagagattctgaggataagaactgggccctta

SEQ ID NO: 142751 - DNA, 76 bp, Homo sapiens
tttctaatcatcctctgatcttcgttttgcctctacagagagattctgaggataagaactgggcccttaaagaaca

SEQ ID NO: 142752 - DNA, 76 bp, Homo sapiens
atcctctgatcttcgttttgcctctacagagagattctgaggataagaactgggcccttaaagaacagctcaagtc

SEQ ID NO: 142753 - DNA, 76 bp, Homo sapiens
atcttcgttttgcctctacagagagattctgaggataagaactgggcccttaaagaacagctcaagtcctggcagc

SEQ ID NO: 142754 - DNA, 79 bp, Homo sapiens
tctacagagagattctgaggataagaactgggcccttaaagaacagctcaagtcctggcagcggctccggcatgacttg

SEQ ID NO: 142755 - DNA, 78 bp, Homo sapiens
agagattctgaggataagaactgggcccttaaagaacagctcaagtcctggcagcggctccggcatgacttggagcga

SEQ ID NO: 142756 - DNA, 78 bp, Homo sapiens
ataagaactgggcccttaaagaacagctcaagtcctggcagcggctccggcatgacttggagcgagctcggctgctcg

SEQ ID NO: 142757 - DNA, 81 bp, Homo sapiens
tgggcccttaaagaacagctcaagtcctggcagcggctccggcatgacttggagcgagctcggctgctcgtggaattgatc

SEQ ID NO: 142758 - DNA, 81 bp, Homo sapiens
aacagctcaagtcctggcagcggctccggcatgacttggagcgagctcggctgctcgtggaattgatccgcaagcgggaaa

SEQ ID NO: 142759 - DNA, 79 bp, Homo sapiens
aagtcctggcagcggctccggcatgacttggagcgagctcggctgctcgtggaattgatccgcaagcgggaaaaactca

SEQ ID NO: 142760 - DNA, 76 bp, Homo sapiens
agcggctccggcatgacttggagcgagctcggctgctcgtggaattgatccgcaagcgggaaaaactcaaaaggga

SEQ ID NO: 142761 - DNA, 76 bp, Homo sapiens
atgacttggagcgagctcggctgctcgtggaattgatccgcaagcgggaaaaactcaaaagggagacggtgagtgc

SEQ ID NO: 142762 - DNA, 76 bp, Homo sapiens
ttggagcgagctcggctgctcgtggaattgatccgcaagcgggaaaaactcaaaagggagacggtgagtgctcctg

SEQ ID NO: 142763 - DNA, 73 bp, Homo sapiens
ctgctcgtggaattgatccgcaagcgggaaaaactcaaaagggagacggtgagtgctcctgggccagccctat

SEQ ID NO: 142764 - DNA, 70 bp, Homo sapiens
aattgatccgcaagcgggaaaaactcaaaagggagacggtgagtgctcctgggccagccctattttataa

SEQ ID NO: 142765 - DNA, 84 bp, Homo sapiens
actgaactggccgaggcctggctgatcaggcctttttctatgttagatcaaggttcagcagattgccatggagatgcagctgac

SEQ ID NO: 142766 - DNA, 82 bp, Homo sapiens
ccgaggcctggctgatcaggcctttttctatgttagatcaaggttcagcagattgccatggagatgcagctgactcctttcc

SEQ ID NO: 142767 - DNA, 84 bp, Homo sapiens
tggctgatcaggcctttttctatgttagatcaaggttcagcagattgccatggagatgcagctgactcctttcctcatcctcct

SEQ ID NO: 142768 - DNA, 80 bp, Homo sapiens
cctttttctatgttagatcaaggttcagcagattgccatggagatgcagctgactcctttcctcatcctccttcgcaaaa

SEQ ID NO: 142769 - DNA, 82 bp, Homo sapiens
ttctatgttagatcaaggttcagcagattgccatggagatgcagctgactcctttcctcatcctccttcgcaaaaccttgga

SEQ ID NO: 142770 - DNA, 83 bp, Homo sapiens
atcaaggttcagcagattgccatggagatgcagctgactcctttcctcatcctccttcgcaaaaccttggagcagctccaaga

SEQ ID NO: 142771 - DNA, 83 bp, Homo sapiens
agcagattgccatggagatgcagctgactcctttcctcatcctccttcgcaaaaccttggagcagctccaagagaaggacaca

SEQ ID NO: 142772 - DNA, 82 bp, Homo sapiens
gagatgcagctgactcctttcctcatcctccttcgcaaaaccttggagcagctccaagagaaggacacaggcaacatcttca

SEQ ID NO: 142773 - DNA, 79 bp, Homo sapiens
agctgactcctttcctcatcctccttcgcaaaaccttggagcagctccaagagaaggacacaggcaacatcttcagcga

SEQ ID NO: 142774 - DNA, 77 bp, Homo sapiens
tttcctcatcctccttcgcaaaaccttggagcagctccaagagaaggacacaggcaacatcttcagcgagccggtcc

SEQ ID NO: 142775 - DNA, 78 bp, Homo sapiens
cttcgcaaaaccttggagcagctccaagagaaggacacaggcaacatcttcagcgagccggtccctctgtctgaggta

SEQ ID NO: 142776 - DNA, 75 bp, Homo sapiens
aaaaccttggagcagctccaagagaaggacacaggcaacatcttcagcgagccggtccctctgtctgaggtaacc

SEQ ID NO: 142777 - DNA, 76 bp, Homo sapiens
gctccaagagaaggacacaggcaacatcttcagcgagccggtccctctgtctgaggtaaccgaattggacgaagta

SEQ ID NO: 142778 - DNA, 73 bp, Homo sapiens
aaggacacaggcaacatcttcagcgagccggtccctctgtctgaggtaaccgaattggacgaagtaagaatcc

SEQ ID NO: 142779 - DNA, 72 bp, Homo sapiens
acaggcaacatcttcagcgagccggtccctctgtctgaggtaaccgaattggacgaagtaagaatcccttcc

SEQ ID NO: 142780 - DNA, 71 bp, Homo sapiens
atcttcagcgagccggtccctctgtctgaggtaaccgaattggacgaagtaagaatcccttcccctcactc

SEQ ID NO: 142781 - DNA, 70 bp, Homo sapiens
aataaggaggatatctccacttaaaacaaacctgccctgcccttccaggtacctgactacctagaccaca

SEQ ID NO: 142782 - DNA, 70 bp, Homo sapiens
aggatatctccacttaaaacaaacctgccctgcccttccaggtacctgactacctagaccacatcaaaaa

SEQ ID NO: 142783 - DNA, 69 bp, Homo sapiens
taaaacaaacctgccctgcccttccaggtacctgactacctagaccacatcaaaaagcccatggacttt

SEQ ID NO: 142784 - DNA, 75 bp, Homo sapiens
tgccctgcccttccaggtacctgactacctagaccacatcaaaaagcccatggactttttcaccatgaagcagaa

SEQ ID NO: 142785 - DNA, 73 bp, Homo sapiens
cttccaggtacctgactacctagaccacatcaaaaagcccatggactttttcaccatgaagcagaacttggag

SEQ ID NO: 142786 - DNA, 73 bp, Homo sapiens
ggtacctgactacctagaccacatcaaaaagcccatggactttttcaccatgaagcagaacttggaggcttac

SEQ ID NO: 142787 - DNA, 73 bp, Homo sapiens
tagaccacatcaaaaagcccatggactttttcaccatgaagcagaacttggaggcttaccgctacctgaattt

SEQ ID NO: 142788 - DNA, 71 bp, Homo sapiens
aaaaagcccatggactttttcaccatgaagcagaacttggaggcttaccgctacctgaattttgatgattt

SEQ ID NO: 142789 - DNA, 73 bp, Homo sapiens
tttttcaccatgaagcagaacttggaggcttaccgctacctgaattttgatgattttgaggaggacttcaacc

SEQ ID NO: 142790 - DNA, 75 bp, Homo sapiens
aagcagaacttggaggcttaccgctacctgaattttgatgattttgaggaggacttcaacctcatcgtcagcaac

SEQ ID NO: 142791 - DNA, 76 bp, Homo sapiens
aggcttaccgctacctgaattttgatgattttgaggaggacttcaacctcatcgtcagcaactgcctcaagtataa

SEQ ID NO: 142792 - DNA, 77 bp, Homo sapiens
ctacctgaattttgatgattttgaggaggacttcaacctcatcgtcagcaactgcctcaagtataacgccaaggaca

SEQ ID NO: 142793 - DNA, 78 bp, Homo sapiens
tttgatgattttgaggaggacttcaacctcatcgtcagcaactgcctcaagtataacgccaaggacaccatcttctac

SEQ ID NO: 142794 - DNA, 74 bp, Homo sapiens
attttgaggaggacttcaacctcatcgtcagcaactgcctcaagtataacgccaaggacaccatcttctaccgg

SEQ ID NO: 142795 - DNA, 78 bp, Homo sapiens
acttcaacctcatcgtcagcaactgcctcaagtataacgccaaggacaccatcttctaccgggcagcagtgcggcttc

SEQ ID NO: 142796 - DNA, 80 bp, Homo sapiens
acctcatcgtcagcaactgcctcaagtataacgccaaggacaccatcttctaccgggcagcagtgcggcttcgtgagcag

SEQ ID NO: 142797 - DNA, 79 bp, Homo sapiens
agcaactgcctcaagtataacgccaaggacaccatcttctaccgggcagcagtgcggcttcgtgagcagggtggtgctg

SEQ ID NO: 142798 - DNA, 80 bp, Homo sapiens
ctcaagtataacgccaaggacaccatcttctaccgggcagcagtgcggcttcgtgagcagggtggtgctgtgctccgcca

SEQ ID NO: 142799 - DNA, 78 bp, Homo sapiens
aaggacaccatcttctaccgggcagcagtgcggcttcgtgagcagggtggtgctgtgctccgccaggcccggcgccag

SEQ ID NO: 142800 - DNA, 78 bp, Homo sapiens
atcttctaccgggcagcagtgcggcttcgtgagcagggtggtgctgtgctccgccaggcccggcgccaggcagaaaaa

SEQ ID NO: 142801 - DNA, 80 bp, Homo sapiens
ggcagcagtgcggcttcgtgagcagggtggtgctgtgctccgccaggcccggcgccaggcagaaaaaatgggcattgact

SEQ ID NO: 142802 - DNA, 78 bp, Homo sapiens
agtgcggcttcgtgagcagggtggtgctgtgctccgccaggcccggcgccaggcagaaaaaatgggcattgactttga

SEQ ID NO: 142803 - DNA, 80 bp, Homo sapiens
agcagggtggtgctgtgctccgccaggcccggcgccaggcagaaaaaatgggcattgactttgagacgggcatgcatatc

SEQ ID NO: 142804 - DNA, 78 bp, Homo sapiens
ggtggtgctgtgctccgccaggcccggcgccaggcagaaaaaatgggcattgactttgagacgggcatgcatatcccc

SEQ ID NO: 142805 - DNA, 79 bp, Homo sapiens
tgctccgccaggcccggcgccaggcagaaaaaatgggcattgactttgagacgggcatgcatatcccccacagcctggc

SEQ ID NO: 142806 - DNA, 81 bp, Homo sapiens
agaaaaaatgggcattgactttgagacgggcatgcatatcccccacagcctggctggagatgaggccacacaccacactga

SEQ ID NO: 142807 - DNA, 82 bp, Homo sapiens
aaatgggcattgactttgagacgggcatgcatatcccccacagcctggctggagatgaggccacacaccacactgaagatgg

SEQ ID NO: 142808 - DNA, 84 bp, Homo sapiens
actttgagacgggcatgcatatcccccacagcctggctggagatgaggccacacaccacactgaagatggtgggtgatatatca

SEQ ID NO: 142809 - DNA, 85 bp, Homo sapiens
ccccacagcctggctggagatgaggccacacaccacactgaagatggtgggtgatatatcacacacacatataagaggccaatgc

SEQ ID NO: 142810 - DNA, 74 bp, Homo sapiens
tgagggctgccctgagtctgacctttcccctccaaccctacccctagcagccgaggaagagcggctggtcttgc

SEQ ID NO: 142811 - DNA, 73 bp, Homo sapiens
ctgagtctgacctttcccctccaaccctacccctagcagccgaggaagagcggctggtcttgctggagaacca

SEQ ID NO: 142812 - DNA, 71 bp, Homo sapiens
acctttcccctccaaccctacccctagcagccgaggaagagcggctggtcttgctggagaaccagaagcac

SEQ ID NO: 142813 - DNA, 76 bp, Homo sapiens
tccaaccctacccctagcagccgaggaagagcggctggtcttgctggagaaccagaagcacctgccagtggaagaa

SEQ ID NO: 142814 - DNA, 79 bp, Homo sapiens
ccctagcagccgaggaagagcggctggtcttgctggagaaccagaagcacctgccagtggaagaacagctaaagctgct

SEQ ID NO: 142815 - DNA, 80 bp, Homo sapiens
agccgaggaagagcggctggtcttgctggagaaccagaagcacctgccagtggaagaacagctaaagctgcttctggagc

SEQ ID NO: 142816 - DNA, 80 bp, Homo sapiens
agcggctggtcttgctggagaaccagaagcacctgccagtggaagaacagctaaagctgcttctggagcggctggacgaa

SEQ ID NO: 142817 - DNA, 83 bp, Homo sapiens
ttgctggagaaccagaagcacctgccagtggaagaacagctaaagctgcttctggagcggctggacgaagtgaatgccagcaa

SEQ ID NO: 142818 - DNA, 82 bp, Homo sapiens
aaccagaagcacctgccagtggaagaacagctaaagctgcttctggagcggctggacgaagtgaatgccagcaagcagagtg

SEQ ID NO: 142819 - DNA, 83 bp, Homo sapiens
acctgccagtggaagaacagctaaagctgcttctggagcggctggacgaagtgaatgccagcaagcagagtgtgggccgctca

SEQ ID NO: 142820 - DNA, 82 bp, Homo sapiens
aagaacagctaaagctgcttctggagcggctggacgaagtgaatgccagcaagcagagtgtgggccgctcacggcgtgcaaa

SEQ ID NO: 142821 - DNA, 85 bp, Homo sapiens
taaagctgcttctggagcggctggacgaagtgaatgccagcaagcagagtgtgggccgctcacggcgtgcaaagatgatcaagaa

SEQ ID NO: 142822 - DNA, 85 bp, Homo sapiens
cttctggagcggctggacgaagtgaatgccagcaagcagagtgtgggccgctcacggcgtgcaaagatgatcaagaaagagatga

SEQ ID NO: 142823 - DNA, 85 bp, Homo sapiens
ctggacgaagtgaatgccagcaagcagagtgtgggccgctcacggcgtgcaaagatgatcaagaaagagatgacggcactgcggc

SEQ ID NO: 142824 - DNA, 84 bp, Homo sapiens
agtgaatgccagcaagcagagtgtgggccgctcacggcgtgcaaagatgatcaagaaagagatgacggcactgcggcggaagct

SEQ ID NO: 142825 - DNA, 84 bp, Homo sapiens
aagcagagtgtgggccgctcacggcgtgcaaagatgatcaagaaagagatgacggcactgcggcggaagcttgcccatcagcga

SEQ ID NO: 142826 - DNA, 83 bp, Homo sapiens
agtgtgggccgctcacggcgtgcaaagatgatcaagaaagagatgacggcactgcggcggaagcttgcccatcagcgagagac

SEQ ID NO: 142827 - DNA, 83 bp, Homo sapiens
ctcacggcgtgcaaagatgatcaagaaagagatgacggcactgcggcggaagcttgcccatcagcgagagacgggacgtgatg

SEQ ID NO: 142828 - DNA, 81 bp, Homo sapiens
aaagatgatcaagaaagagatgacggcactgcggcggaagcttgcccatcagcgagagacgggacgtgatggccctgagcg

SEQ ID NO: 142829 - DNA, 80 bp, Homo sapiens
aagaaagagatgacggcactgcggcggaagcttgcccatcagcgagagacgggacgtgatggccctgagcggcatggccc

SEQ ID NO: 142830 - DNA, 81 bp, Homo sapiens
agatgacggcactgcggcggaagcttgcccatcagcgagagacgggacgtgatggccctgagcggcatggcccctcgagcc

SEQ ID NO: 142831 - DNA, 77 bp, Homo sapiens
actgcggcggaagcttgcccatcagcgagagacgggacgtgatggccctgagcggcatggcccctcgagccggggta

SEQ ID NO: 142832 - DNA, 77 bp, Homo sapiens
aagcttgcccatcagcgagagacgggacgtgatggccctgagcggcatggcccctcgagccggggtagtctgacacc

SEQ ID NO: 142833 - DNA, 74 bp, Homo sapiens
atcagcgagagacgggacgtgatggccctgagcggcatggcccctcgagccggggtagtctgacaccccacccg

SEQ ID NO: 142834 - DNA, 75 bp, Homo sapiens
gggacgtgatggccctgagcggcatggcccctcgagccggggtagtctgacaccccacccggcagcctgtgacaa

SEQ ID NO: 142835 - DNA, 78 bp, Homo sapiens
tgatggccctgagcggcatggcccctcgagccggggtagtctgacaccccacccggcagcctgtgacaaggatgggca

SEQ ID NO: 142836 - DNA, 76 bp, Homo sapiens
agcggcatggcccctcgagccggggtagtctgacaccccacccggcagcctgtgacaaggatgggcagacagatag

SEQ ID NO: 142837 - DNA, 78 bp, Homo sapiens
cctcgagccggggtagtctgacaccccacccggcagcctgtgacaaggatgggcagacagatagtgcggcagaggaga

SEQ ID NO: 142838 - DNA, 84 bp, Homo sapiens
ctgacaccccacccggcagcctgtgacaaggatgggcagacagatagtgcggcagaggagagcagcagccaggagacaagcaaa

SEQ ID NO: 142839 - DNA, 88 bp, Homo sapiens
gcagcctgtgacaaggatgggcagacagatagtgcggcagaggagagcagcagccaggagacaagcaaaggtctgaatcccatggcaa

SEQ ID NO: 142840 - DNA, 84 bp, Homo sapiens
acaaggatgggcagacagatagtgcggcagaggagagcagcagccaggagacaagcaaaggtctgaatcccatggcaaggtgga

SEQ ID NO: 142841 - DNA, 82 bp, Homo sapiens
ggcagacagatagtgcggcagaggagagcagcagccaggagacaagcaaaggtctgaatcccatggcaaggtggaccccaaa

SEQ ID NO: 142842 - DNA, 81 bp, Homo sapiens
atagtgcggcagaggagagcagcagccaggagacaagcaaaggtctgaatcccatggcaaggtggaccccaaagcaagtca

SEQ ID NO: 142843 - DNA, 76 bp, Homo sapiens
ttctctgctccaggcctgggtcccaacatgtcctcaacccccgcacatgaggtgggcaggagaacctcagttctgt

SEQ ID NO: 142844 - DNA, 73 bp, Homo sapiens
aggcctgggtcccaacatgtcctcaacccccgcacatgaggtgggcaggagaacctcagttctgttctccaaa

SEQ ID NO: 142845 - DNA, 72 bp, Homo sapiens
gggtcccaacatgtcctcaacccccgcacatgaggtgggcaggagaacctcagttctgttctccaaaaagaa

SEQ ID NO: 142846 - DNA, 72 bp, Homo sapiens
atgtcctcaacccccgcacatgaggtgggcaggagaacctcagttctgttctccaaaaagaacccgaagaca

SEQ ID NO: 142847 - DNA, 74 bp, Homo sapiens
gcacatgaggtgggcaggagaacctcagttctgttctccaaaaagaacccgaagacagctggaccgcccaagag

SEQ ID NO: 142848 - DNA, 70 bp, Homo sapiens
aggtgggcaggagaacctcagttctgttctccaaaaagaacccgaagacagctggaccgcccaagaggcc

SEQ ID NO: 142849 - DNA, 68 bp, Homo sapiens
aggagaacctcagttctgttctccaaaaagaacccgaagacagctggaccgcccaagaggccgggccg

SEQ ID NO: 142850 - DNA, 65 bp, Homo sapiens
ctgttctccaaaaagaacccgaagacagctggaccgcccaagaggccgggccggccccccaaaaa

SEQ ID NO: 142851 - DNA, 62 bp, Homo sapiens
aaaaagaacccgaagacagctggaccgcccaagaggccgggccggccccccaaaaaccggga

SEQ ID NO: 142852 - DNA, 67 bp, Homo sapiens
aacccgaagacagctggaccgcccaagaggccgggccggccccccaaaaaccgggagagccagatga

SEQ ID NO: 142853 - DNA, 67 bp, Homo sapiens
agctggaccgcccaagaggccgggccggccccccaaaaaccgggagagccagatgacccccagccac

SEQ ID NO: 142854 - DNA, 67 bp, Homo sapiens
aagaggccgggccggccccccaaaaaccgggagagccagatgacccccagccacggaggcagtcctg

SEQ ID NO: 142855 - DNA, 67 bp, Homo sapiens
ccgggccggccccccaaaaaccgggagagccagatgacccccagccacggaggcagtcctgtggggc

SEQ ID NO: 142856 - DNA, 68 bp, Homo sapiens
cccaaaaaccgggagagccagatgacccccagccacggaggcagtcctgtggggcccccccagctccc

SEQ ID NO: 142857 - DNA, 76 bp, Homo sapiens
agagccagatgacccccagccacggaggcagtcctgtggggcccccccagctccccatcatgagttccctgcgtca

SEQ ID NO: 142858 - DNA, 76 bp, Homo sapiens
agatgacccccagccacggaggcagtcctgtggggcccccccagctccccatcatgagttccctgcgtcagcgcaa

SEQ ID NO: 142859 - DNA, 74 bp, Homo sapiens
ccacggaggcagtcctgtggggcccccccagctccccatcatgagttccctgcgtcagcgcaagcggggtagga

SEQ ID NO: 142860 - DNA, 73 bp, Homo sapiens
aggcagtcctgtggggcccccccagctccccatcatgagttccctgcgtcagcgcaagcggggtaggagcccc

SEQ ID NO: 142861 - DNA, 72 bp, Homo sapiens
ggcccccccagctccccatcatgagttccctgcgtcagcgcaagcggggtaggagcccccggcccagttcga

SEQ ID NO: 142862 - DNA, 78 bp, Homo sapiens
agctccccatcatgagttccctgcgtcagcgcaagcggggtaggagcccccggcccagttcgagctcagacagcgaca

SEQ ID NO: 142863 - DNA, 78 bp, Homo sapiens
atcatgagttccctgcgtcagcgcaagcggggtaggagcccccggcccagttcgagctcagacagcgacagtgataag

SEQ ID NO: 142864 - DNA, 74 bp, Homo sapiens
agcgcaagcggggtaggagcccccggcccagttcgagctcagacagcgacagtgataagtccacagaagacccc

SEQ ID NO: 142865 - DNA, 74 bp, Homo sapiens
ggtaggagcccccggcccagttcgagctcagacagcgacagtgataagtccacagaagaccccccaatgggtga

SEQ ID NO: 142866 - DNA, 77 bp, Homo sapiens
ggcccagttcgagctcagacagcgacagtgataagtccacagaagaccccccaatgggtgagccttaccatcaccca

SEQ ID NO: 142867 - DNA, 76 bp, Homo sapiens
gttcgagctcagacagcgacagtgataagtccacagaagaccccccaatgggtgagccttaccatcacccagcccc

SEQ ID NO: 142868 - DNA, 70 bp, Homo sapiens
tacatcttcctgaccggttccttccctcctccccttcccttcaaccaagacttaccagccaatggcttca

SEQ ID NO: 142869 - DNA, 67 bp, Homo sapiens
accggttccttccctcctccccttcccttcaaccaagacttaccagccaatggcttcagcggtggaa

SEQ ID NO: 142870 - DNA, 69 bp, Homo sapiens
ccctcctccccttcccttcaaccaagacttaccagccaatggcttcagcggtggaaaccaaccagtgaa

SEQ ID NO: 142871 - DNA, 70 bp, Homo sapiens
cttcccttcaaccaagacttaccagccaatggcttcagcggtggaaaccaaccagtgaagaagagtttct

SEQ ID NO: 142872 - DNA, 72 bp, Homo sapiens
ttcaaccaagacttaccagccaatggcttcagcggtggaaaccaaccagtgaagaagagtttcttggtatac

SEQ ID NO: 142873 - DNA, 71 bp, Homo sapiens
acttaccagccaatggcttcagcggtggaaaccaaccagtgaagaagagtttcttggtataccgtaatgac

SEQ ID NO: 142874 - DNA, 72 bp, Homo sapiens
aatggcttcagcggtggaaaccaaccagtgaagaagagtttcttggtataccgtaatgactgcagccttccc

SEQ ID NO: 142875 - DNA, 74 bp, Homo sapiens
ggtggaaaccaaccagtgaagaagagtttcttggtataccgtaatgactgcagccttccccggagcagctcaga

SEQ ID NO: 142876 - DNA, 75 bp, Homo sapiens
aaccaaccagtgaagaagagtttcttggtataccgtaatgactgcagccttccccggagcagctcagactctgag

SEQ ID NO: 142877 - DNA, 81 bp, Homo sapiens
agaagagtttcttggtataccgtaatgactgcagccttccccggagcagctcagactctgagtccagcagcagtagcagta

SEQ ID NO: 142878 - DNA, 85 bp, Homo sapiens
tttcttggtataccgtaatgactgcagccttccccggagcagctcagactctgagtccagcagcagtagcagtagcagcgctgct

SEQ ID NO: 142879 - DNA, 87 bp, Homo sapiens
taatgactgcagccttccccggagcagctcagactctgagtccagcagcagtagcagtagcagcgctgcttcagaccggaccaggta

SEQ ID NO: 142880 - DNA, 85 bp, Homo sapiens
actgcagccttccccggagcagctcagactctgagtccagcagcagtagcagtagcagcgctgcttcagaccggaccaggtacca

SEQ ID NO: 142881 - DNA, 86 bp, Homo sapiens
cggagcagctcagactctgagtccagcagcagtagcagtagcagcgctgcttcagaccggaccaggtaccagccctccagatcgag

SEQ ID NO: 142882 - DNA, 85 bp, Homo sapiens
agctcagactctgagtccagcagcagtagcagtagcagcgctgcttcagaccggaccaggtaccagccctccagatcgaggccaa

SEQ ID NO: 142883 - DNA, 80 bp, Homo sapiens
agtccagcagcagtagcagtagcagcgctgcttcagaccggaccaggtaccagccctccagatcgaggccaacctcaggg

SEQ ID NO: 142884 - DNA, 73 bp, Homo sapiens
cccattcttcccctcctttgagctgagctcccattgtcttgtccacagcacaacgccctcaaaacaaggccgg

SEQ ID NO: 142885 - DNA, 73 bp, Homo sapiens
ctcctttgagctgagctcccattgtcttgtccacagcacaacgccctcaaaacaaggccggggcaaaccctcc

SEQ ID NO: 142886 - DNA, 75 bp, Homo sapiens
ttgagctgagctcccattgtcttgtccacagcacaacgccctcaaaacaaggccggggcaaaccctccttctctc

SEQ ID NO: 142887 - DNA, 69 bp, Homo sapiens
attgtcttgtccacagcacaacgccctcaaaacaaggccggggcaaaccctccttctctcggggcactt

SEQ ID NO: 142888 - DNA, 70 bp, Homo sapiens
ttgtccacagcacaacgccctcaaaacaaggccggggcaaaccctccttctctcggggcactttcccaga

SEQ ID NO: 142889 - DNA, 68 bp, Homo sapiens
acaacgccctcaaaacaaggccggggcaaaccctccttctctcggggcactttcccagaggacagcag

SEQ ID NO: 142890 - DNA, 70 bp, Homo sapiens
aaaacaaggccggggcaaaccctccttctctcggggcactttcccagaggacagcagtgaggatacctca

SEQ ID NO: 142891 - DNA, 76 bp, Homo sapiens
gggcaaaccctccttctctcggggcactttcccagaggacagcagtgaggatacctcaggcactgagaatgaggcc

SEQ ID NO: 142892 - DNA, 76 bp, Homo sapiens
aaccctccttctctcggggcactttcccagaggacagcagtgaggatacctcaggcactgagaatgaggcctactc

SEQ ID NO: 142893 - DNA, 79 bp, Homo sapiens
ctctcggggcactttcccagaggacagcagtgaggatacctcaggcactgagaatgaggcctactccgtgggcactggc

SEQ ID NO: 142894 - DNA, 78 bp, Homo sapiens
actttcccagaggacagcagtgaggatacctcaggcactgagaatgaggcctactccgtgggcactggccgcggcgtg

SEQ ID NO: 142895 - DNA, 79 bp, Homo sapiens
agcagtgaggatacctcaggcactgagaatgaggcctactccgtgggcactggccgcggcgtgggccacagcagtaagt

SEQ ID NO: 142896 - DNA, 77 bp, Homo sapiens
atacctcaggcactgagaatgaggcctactccgtgggcactggccgcggcgtgggccacagcagtaagttcccttgc

SEQ ID NO: 142897 - DNA, 75 bp, Homo sapiens
aggcactgagaatgaggcctactccgtgggcactggccgcggcgtgggccacagcagtaagttcccttgcccaag

SEQ ID NO: 142898 - DNA, 73 bp, Homo sapiens
agaatgaggcctactccgtgggcactggccgcggcgtgggccacagcagtaagttcccttgcccaaggccagg

SEQ ID NO: 142899 - DNA, 74 bp, Homo sapiens
ctactccgtgggcactggccgcggcgtgggccacagcagtaagttcccttgcccaaggccagggatgctgggga

SEQ ID NO: 142900 - DNA, 70 bp, Homo sapiens
agccccccagctgctgatccaccccctctcccccattcctgtgaagtggtaaggaagagtctgggccggg

SEQ ID NO: 142901 - DNA, 74 bp, Homo sapiens
ccagctgctgatccaccccctctcccccattcctgtgaagtggtaaggaagagtctgggccggggagctggctg

SEQ ID NO: 142902 - DNA, 72 bp, Homo sapiens
accccctctcccccattcctgtgaagtggtaaggaagagtctgggccggggagctggctggctgtcagagga

SEQ ID NO: 142903 - DNA, 76 bp, Homo sapiens
tctcccccattcctgtgaagtggtaaggaagagtctgggccggggagctggctggctgtcagaggatgaggactcc

SEQ ID NO: 142904 - DNA, 80 bp, Homo sapiens
tgtgaagtggtaaggaagagtctgggccggggagctggctggctgtcagaggatgaggactccccgctggatgctctgga

SEQ ID NO: 142905 - DNA, 79 bp, Homo sapiens
taaggaagagtctgggccggggagctggctggctgtcagaggatgaggactccccgctggatgctctggacctcgtgtg

SEQ ID NO: 142906 - DNA, 78 bp, Homo sapiens
agtctgggccggggagctggctggctgtcagaggatgaggactccccgctggatgctctggacctcgtgtgggccaaa

SEQ ID NO: 142907 - DNA, 85 bp, Homo sapiens
gagctggctggctgtcagaggatgaggactccccgctggatgctctggacctcgtgtgggccaaatgccgaggctatccatcata

SEQ ID NO: 142908 - DNA, 82 bp, Homo sapiens
ctggctgtcagaggatgaggactccccgctggatgctctggacctcgtgtgggccaaatgccgaggctatccatcataccca

SEQ ID NO: 142909 - DNA, 80 bp, Homo sapiens
aggatgaggactccccgctggatgctctggacctcgtgtgggccaaatgccgaggctatccatcatacccagctctggta

SEQ ID NO: 142910 - DNA, 82 bp, Homo sapiens
tccccgctggatgctctggacctcgtgtgggccaaatgccgaggctatccatcatacccagctctggtatgcttgcttctgt

SEQ ID NO: 142911 - DNA, 81 bp, Homo sapiens
atgctctggacctcgtgtgggccaaatgccgaggctatccatcatacccagctctggtatgcttgcttctgttacacttct

SEQ ID NO: 142912 - DNA, 79 bp, Homo sapiens
acctcgtgtgggccaaatgccgaggctatccatcatacccagctctggtatgcttgcttctgttacacttcttgctttc

SEQ ID NO: 142913 - DNA, 78 bp, Homo sapiens
tgggaggacatggactgaaccaaactgggctcttattatatcctcagatcattgatccaaagatgccccgagaaggta

SEQ ID NO: 142914 - DNA, 77 bp, Homo sapiens
atggactgaaccaaactgggctcttattatatcctcagatcattgatccaaagatgccccgagaaggtatgttccac

SEQ ID NO: 142915 - DNA, 75 bp, Homo sapiens
aaccaaactgggctcttattatatcctcagatcattgatccaaagatgccccgagaaggtatgttccaccatggg

SEQ ID NO: 142916 - DNA, 76 bp, Homo sapiens
ctcttattatatcctcagatcattgatccaaagatgccccgagaaggtatgttccaccatggggttcccatccctg

SEQ ID NO: 142917 - DNA, 77 bp, Homo sapiens
tatatcctcagatcattgatccaaagatgccccgagaaggtatgttccaccatggggttcccatccctgtgccccca

SEQ ID NO: 142918 - DNA, 73 bp, Homo sapiens
atcattgatccaaagatgccccgagaaggtatgttccaccatggggttcccatccctgtgcccccactggagg

SEQ ID NO: 142919 - DNA, 71 bp, Homo sapiens
aaagatgccccgagaaggtatgttccaccatggggttcccatccctgtgcccccactggaggtgctgaaac

SEQ ID NO: 142920 - DNA, 74 bp, Homo sapiens
agaaggtatgttccaccatggggttcccatccctgtgcccccactggaggtgctgaaacttggggagcagatga

SEQ ID NO: 142921 - DNA, 75 bp, Homo sapiens
tatgttccaccatggggttcccatccctgtgcccccactggaggtgctgaaacttggggagcagatgacccagga

SEQ ID NO: 142922 - DNA, 76 bp, Homo sapiens
ggttcccatccctgtgcccccactggaggtgctgaaacttggggagcagatgacccaggaagcccgagagcatctc

SEQ ID NO: 142923 - DNA, 76 bp, Homo sapiens
atccctgtgcccccactggaggtgctgaaacttggggagcagatgacccaggaagcccgagagcatctctacctcg

SEQ ID NO: 142924 - DNA, 78 bp, Homo sapiens
cactggaggtgctgaaacttggggagcagatgacccaggaagcccgagagcatctctacctcgtcctcttctttgaca

SEQ ID NO: 142925 - DNA, 77 bp, Homo sapiens
tgctgaaacttggggagcagatgacccaggaagcccgagagcatctctacctcgtcctcttctttgacaacaaacga

SEQ ID NO: 142926 - DNA, 73 bp, Homo sapiens
aacttggggagcagatgacccaggaagcccgagagcatctctacctcgtcctcttctttgacaacaaacgaac

SEQ ID NO: 142927 - DNA, 72 bp, Homo sapiens
agatgacccaggaagcccgagagcatctctacctcgtcctcttctttgacaacaaacgaacctggtaaggag

SEQ ID NO: 142928 - DNA, 71 bp, Homo sapiens
aagcccgagagcatctctacctcgtcctcttctttgacaacaaacgaacctggtaaggaggggagcatttg

SEQ ID NO: 142929 - DNA, 74 bp, Homo sapiens
agcatctctacctcgtcctcttctttgacaacaaacgaacctggtaaggaggggagcatttggtgtgactcaca

SEQ ID NO: 142930 - DNA, 78 bp, Homo sapiens
ttgttctccctgagatgatttatttgatcttcaccttatcctataggcagtggctgcccaggaccaagctggttcctc

SEQ ID NO: 142931 - DNA, 79 bp, Homo sapiens
tgagatgatttatttgatcttcaccttatcctataggcagtggctgcccaggaccaagctggttcctctgggtgtgaac

SEQ ID NO: 142932 - DNA, 75 bp, Homo sapiens
atttatttgatcttcaccttatcctataggcagtggctgcccaggaccaagctggttcctctgggtgtgaaccag

SEQ ID NO: 142933 - DNA, 76 bp, Homo sapiens
tcttcaccttatcctataggcagtggctgcccaggaccaagctggttcctctgggtgtgaaccaggacctagacaa

SEQ ID NO: 142934 - DNA, 76 bp, Homo sapiens
ttatcctataggcagtggctgcccaggaccaagctggttcctctgggtgtgaaccaggacctagacaaggagaaga

SEQ ID NO: 142935 - DNA, 77 bp, Homo sapiens
tggctgcccaggaccaagctggttcctctgggtgtgaaccaggacctagacaaggagaagatgctggagggccgcaa

SEQ ID NO: 142936 - DNA, 74 bp, Homo sapiens
aggaccaagctggttcctctgggtgtgaaccaggacctagacaaggagaagatgctggagggccgcaagtccaa

SEQ ID NO: 142937 - DNA, 77 bp, Homo sapiens
tggttcctctgggtgtgaaccaggacctagacaaggagaagatgctggagggccgcaagtccaacatccgcaagtca

SEQ ID NO: 142938 - DNA, 79 bp, Homo sapiens
tctgggtgtgaaccaggacctagacaaggagaagatgctggagggccgcaagtccaacatccgcaagtcagtacagatc

SEQ ID NO: 142939 - DNA, 77 bp, Homo sapiens
aaccaggacctagacaaggagaagatgctggagggccgcaagtccaacatccgcaagtcagtacagatcgcctacca

SEQ ID NO: 142940 - DNA, 83 bp, Homo sapiens
ctagacaaggagaagatgctggagggccgcaagtccaacatccgcaagtcagtacagatcgcctaccacagggctctgcagca

SEQ ID NO: 142941 - DNA, 84 bp, Homo sapiens
atgctggagggccgcaagtccaacatccgcaagtcagtacagatcgcctaccacagggctctgcagcaccgcagcaaggtgcaa

SEQ ID NO: 142942 - DNA, 86 bp, Homo sapiens
aagtccaacatccgcaagtcagtacagatcgcctaccacagggctctgcagcaccgcagcaaggtgcaaggcgagcagagcagtga

SEQ ID NO: 142943 - DNA, 87 bp, Homo sapiens
aagtcagtacagatcgcctaccacagggctctgcagcaccgcagcaaggtgcaaggcgagcagagcagtgagaccagcgatagtgat

SEQ ID NO: 142944 - DNA, 88 bp, Homo sapiens
agtacagatcgcctaccacagggctctgcagcaccgcagcaaggtgcaaggcgagcagagcagtgagaccagcgatagtgattgatac

SEQ ID NO: 142945 - DNA, 91 bp, Homo sapiens
taccacagggctctgcagcaccgcagcaaggtgcaaggcgagcagagcagtgagaccagcgatagtgattgatactgctcaacacagccca

SEQ ID NO: 142946 - DNA, 91 bp, Homo sapiens
tctgcagcaccgcagcaaggtgcaaggcgagcagagcagtgagaccagcgatagtgattgatactgctcaacacagcccaacctatagtgc

SEQ ID NO: 142947 - DNA, 88 bp, Homo sapiens
cgcagcaaggtgcaaggcgagcagagcagtgagaccagcgatagtgattgatactgctcaacacagcccaacctatagtgccctgtga

SEQ ID NO: 142948 - DNA, 84 bp, Homo sapiens
aaggtgcaaggcgagcagagcagtgagaccagcgatagtgattgatactgctcaacacagcccaacctatagtgccctgtgact

SEQ ID NO: 142949 - DNA, 84 bp, Homo sapiens
cgagcagagcagtgagaccagcgatagtgattgatactgctcaacacagcccaacctatagtgccctgtgacttctctcctccc

SEQ ID NO: 142950 - DNA, 80 bp, Homo sapiens
agtgagaccagcgatagtgattgatactgctcaacacagcccaacctatagtgccctgtgacttctctcctcccctttgc

SEQ ID NO: 142951 - DNA, 80 bp, Homo sapiens
atagtgattgatactgctcaacacagcccaacctatagtgccctgtgacttctctcctcccctttgctcactgtcctgga

SEQ ID NO: 142952 - DNA, 80 bp, Homo sapiens
attgatactgctcaacacagcccaacctatagtgccctgtgacttctctcctcccctttgctcactgtcctggagtggca

SEQ ID NO: 142953 - DNA, 75 bp, Homo sapiens
aacacagcccaacctatagtgccctgtgacttctctcctcccctttgctcactgtcctggagtggcaccggcctc

SEQ ID NO: 142954 - DNA, 78 bp, Homo sapiens
aacctatagtgccctgtgacttctctcctcccctttgctcactgtcctggagtggcaccggcctctgcactgactcat

SEQ ID NO: 142955 - DNA, 79 bp, Homo sapiens
ctctcctcccctttgctcactgtcctggagtggcaccggcctctgcactgactcatttctggtcttggggccagtctca

SEQ ID NO: 142956 - DNA, 77 bp, Homo sapiens
ccctttgctcactgtcctggagtggcaccggcctctgcactgactcatttctggtcttggggccagtctcaggggaa

SEQ ID NO: 142957 - DNA, 74 bp, Homo sapiens
agtggcaccggcctctgcactgactcatttctggtcttggggccagtctcaggggaagctgggtgggggaggtc

SEQ ID NO: 142958 - DNA, 74 bp, Homo sapiens
tggtcttggggccagtctcaggggaagctgggtgggggaggtccctcctgccctaagtgcagctggactgtaca

SEQ ID NO: 142959 - DNA, 74 bp, Homo sapiens
ccagtctcaggggaagctgggtgggggaggtccctcctgccctaagtgcagctggactgtacagaacactccaa

SEQ ID NO: 142960 - DNA, 73 bp, Homo sapiens
gggaagctgggtgggggaggtccctcctgccctaagtgcagctggactgtacagaacactccaagggccaatg

SEQ ID NO: 142961 - DNA, 77 bp, Homo sapiens
gtgggggaggtccctcctgccctaagtgcagctggactgtacagaacactccaagggccaatggcagttcagcgcaa

SEQ ID NO: 142962 - DNA, 78 bp, Homo sapiens
gtccctcctgccctaagtgcagctggactgtacagaacactccaagggccaatggcagttcagcgcaaggagagggag

SEQ ID NO: 142963 - DNA, 79 bp, Homo sapiens
ctgccctaagtgcagctggactgtacagaacactccaagggccaatggcagttcagcgcaaggagagggagggcccaca

SEQ ID NO: 142964 - DNA, 76 bp, Homo sapiens
agctggactgtacagaacactccaagggccaatggcagttcagcgcaaggagagggagggcccacaggtcagaaaa

SEQ ID NO: 142965 - DNA, 75 bp, Homo sapiens
actgtacagaacactccaagggccaatggcagttcagcgcaaggagagggagggcccacaggtcagaaaaagctc

SEQ ID NO: 142966 - DNA, 76 bp, Homo sapiens
acactccaagggccaatggcagttcagcgcaaggagagggagggcccacaggtcagaaaaagctccagagacctca

SEQ ID NO: 142967 - DNA, 77 bp, Homo sapiens
aatggcagttcagcgcaaggagagggagggcccacaggtcagaaaaagctccagagacctcacagcattgtagggcg

SEQ ID NO: 142968 - DNA, 74 bp, Homo sapiens
agttcagcgcaaggagagggagggcccacaggtcagaaaaagctccagagacctcacagcattgtagggcgggg

SEQ ID NO: 142969 - DNA, 72 bp, Homo sapiens
agagggagggcccacaggtcagaaaaagctccagagacctcacagcattgtagggcggggtggtgggccaaa

SEQ ID NO: 142970 - DNA, 72 bp, Homo sapiens
cccacaggtcagaaaaagctccagagacctcacagcattgtagggcggggtggtgggccaaagttaggacac

SEQ ID NO: 142971 - DNA, 71 bp, Homo sapiens
acagcattgtagggcggggtggtgggccaaagttaggacactgcgtaaaacaggccatcccaccacctcta

SEQ ID NO: 142972 - DNA, 68 bp, Homo sapiens
attgtagggcggggtggtgggccaaagttaggacactgcgtaaaacaggccatcccaccacctctacc

SEQ ID NO: 142973 - DNA, 76 bp, Homo sapiens
gtggtgggccaaagttaggacactgcgtaaaacaggccatcccaccacctctacctgctcatgccaggagaatcca

SEQ ID NO: 142974 - DNA, 78 bp, Homo sapiens
ggacactgcgtaaaacaggccatcccaccacctctacctgctcatgccaggagaatccataactgcctagaggcctgg

SEQ ID NO: 142975 - DNA, 76 bp, Homo sapiens
taaaacaggccatcccaccacctctacctgctcatgccaggagaatccataactgcctagaggcctggggccccta

SEQ ID NO: 142976 - DNA, 76 bp, Homo sapiens
caccacctctacctgctcatgccaggagaatccataactgcctagaggcctggggcccctaccggtcgtgaggtga

SEQ ID NO: 142977 - DNA, 78 bp, Homo sapiens
ctcatgccaggagaatccataactgcctagaggcctggggcccctaccggtcgtgaggtgagtgggcatctgtccagc

SEQ ID NO: 142978 - DNA, 75 bp, Homo sapiens
agaatccataactgcctagaggcctggggcccctaccggtcgtgaggtgagtgggcatctgtccagcctggaaga

SEQ ID NO: 142979 - DNA, 74 bp, Homo sapiens
actgcctagaggcctggggcccctaccggtcgtgaggtgagtgggcatctgtccagcctggaagaggggcacta

SEQ ID NO: 142980 - DNA, 73 bp, Homo sapiens
aggcctggggcccctaccggtcgtgaggtgagtgggcatctgtccagcctggaagaggggcactaggtgactc

SEQ ID NO: 142981 - DNA, 76 bp, Homo sapiens
taccggtcgtgaggtgagtgggcatctgtccagcctggaagaggggcactaggtgactccctcccctgctgttgta

SEQ ID NO: 142982 - DNA, 75 bp, Homo sapiens
aggtgagtgggcatctgtccagcctggaagaggggcactaggtgactccctcccctgctgttgtaaatactgtaa

SEQ ID NO: 142983 - DNA, 76 bp, Homo sapiens
gcatctgtccagcctggaagaggggcactaggtgactccctcccctgctgttgtaaatactgtaattatcggagaa

SEQ ID NO: 142984 - DNA, 71 bp, Homo sapiens
agcctggaagaggggcactaggtgactccctcccctgctgttgtaaatactgtaattatcggagaatttaa

SEQ ID NO: 142985 - DNA, 69 bp, Homo sapiens
aagaggggcactaggtgactccctcccctgctgttgtaaatactgtaattatcggagaatttaaattat

SEQ ID NO: 142986 - DNA, 71 bp, Homo sapiens
actaggtgactccctcccctgctgttgtaaatactgtaattatcggagaatttaaattattctcatttgta

SEQ ID NO: 142987 - DNA, 70 bp, Homo sapiens
tcccctgctgttgtaaatactgtaattatcggagaatttaaattattctcatttgtaactgcgtttccgg

SEQ ID NO: 142988 - DNA, 71 bp, Homo sapiens
ttgtaaatactgtaattatcggagaatttaaattattctcatttgtaactgcgtttccgggtcgcgccaga

SEQ ID NO: 142989 - DNA, 71 bp, Homo sapiens
atactgtaattatcggagaatttaaattattctcatttgtaactgcgtttccgggtcgcgccagagtcatt

SEQ ID NO: 142990 - DNA, 69 bp, Homo sapiens
ggagaatttaaattattctcatttgtaactgcgtttccgggtcgcgccagagtcatttggtactaaaaa

SEQ ID NO: 142991 - DNA, 67 bp, Homo sapiens
atttaaattattctcatttgtaactgcgtttccgggtcgcgccagagtcatttggtactaaaaaaaa

SEQ ID NO: 142992 - DNA, 64 bp, Homo sapiens
aaaaaaagactgggggctgtccccatttcccttctctttcccatagattcccccacctttcaaa

SEQ ID NO: 142993 - DNA, 66 bp, Homo sapiens
tgggggctgtccccatttcccttctctttcccatagattcccccacctttcaaactggtttgtatt

SEQ ID NO: 142994 - DNA, 66 bp, Homo sapiens
tccccatttcccttctctttcccatagattcccccacctttcaaactggtttgtatttatttcaaa

SEQ ID NO: 142995 - DNA, 65 bp, Homo sapiens
cccttctctttcccatagattcccccacctttcaaactggtttgtatttatttcaaaggaagaaa

SEQ ID NO: 142996 - DNA, 67 bp, Homo sapiens
ctttcccatagattcccccacctttcaaactggtttgtatttatttcaaaggaagaaaatatattga

SEQ ID NO: 142997 - DNA, 68 bp, Homo sapiens
cctttcaaactggtttgtatttatttcaaaggaagaaaatatattgattcttagaaaataaactgtca

SEQ ID NO: 142998 - DNA, 69 bp, Homo sapiens
tggtttgtatttatttcaaaggaagaaaatatattgattcttagaaaataaactgtcaatttagaattc

SEQ ID NO: 142999 - DNA, 69 bp, Homo sapiens
tttcaaaggaagaaaatatattgattcttagaaaataaactgtcaatttagaattctttgttcttgccc

SEQ ID NO: 143000 - DNA, 69 bp, Homo sapiens
atattgattcttagaaaataaactgtcaatttagaattctttgttcttgccccctgccagggcaaaggg

SEQ ID NO: 143001 - DNA, 70 bp, Homo sapiens
ctatttcaatctgtgagacgcccccttctactcagcccacgtggctaaagtaaacagaaggtgggccggg

SEQ ID NO: 143002 - DNA, 66 bp, Homo sapiens
agacgcccccttctactcagcccacgtggctaaagtaaacagaaggtgggccggggcggggagaaa

SEQ ID NO: 143003 - DNA, 69 bp, Homo sapiens
ttctactcagcccacgtggctaaagtaaacagaaggtgggccggggcggggagaaacagaactcggtca

SEQ ID NO: 143004 - DNA, 66 bp, Homo sapiens
agcccacgtggctaaagtaaacagaaggtgggccggggcggggagaaacagaactcggtcaatttc

SEQ ID NO: 143005 - DNA, 65 bp, Homo sapiens
taaagtaaacagaaggtgggccggggcggggagaaacagaactcggtcaatttcccagtttgtcg

SEQ ID NO: 143006 - DNA, 64 bp, Homo sapiens
agaaggtgggccggggcggggagaaacagaactcggtcaatttcccagtttgtcgggtctttaa

SEQ ID NO: 143007 - DNA, 64 bp, Homo sapiens
gtgggccggggcggggagaaacagaactcggtcaatttcccagtttgtcgggtctttaaaaata

SEQ ID NO: 143008 - DNA, 67 bp, Homo sapiens
gagaaacagaactcggtcaatttcccagtttgtcgggtctttaaaaatacaggcccctaaagcacta

SEQ ID NO: 143009 - DNA, 65 bp, Homo sapiens
acagaactcggtcaatttcccagtttgtcgggtctttaaaaatacaggcccctaaagcactaagg

SEQ ID NO: 143010 - DNA, 67 bp, Homo sapiens
tttcccagtttgtcgggtctttaaaaatacaggcccctaaagcactaagggcatgccctcggtgaaa

SEQ ID NO: 143011 - DNA, 66 bp, Homo sapiens
agtttgtcgggtctttaaaaatacaggcccctaaagcactaagggcatgccctcggtgaaacaggg

SEQ ID NO: 143012 - DNA, 74 bp, Homo sapiens
ttaaaaatacaggcccctaaagcactaagggcatgccctcggtgaaacaggggagcgcttctgctgaatgagat

SEQ ID NO: 143013 - DNA, 75 bp, Homo sapiens
aatacaggcccctaaagcactaagggcatgccctcggtgaaacaggggagcgcttctgctgaatgagattaaagc

SEQ ID NO: 143014 - DNA, 76 bp, Homo sapiens
taaagcactaagggcatgccctcggtgaaacaggggagcgcttctgctgaatgagattaaagcgacagaaaaggga

SEQ ID NO: 143015 - DNA, 75 bp, Homo sapiens
taagggcatgccctcggtgaaacaggggagcgcttctgctgaatgagattaaagcgacagaaaagggaaaggaga

SEQ ID NO: 143016 - DNA, 74 bp, Homo sapiens
tcggtgaaacaggggagcgcttctgctgaatgagattaaagcgacagaaaagggaaaggagagcgcgggcaacg

SEQ ID NO: 143017 - DNA, 73 bp, Homo sapiens
gggagcgcttctgctgaatgagattaaagcgacagaaaagggaaaggagagcgcgggcaacgggatctaaagg

SEQ ID NO: 143018 - DNA, 75 bp, Homo sapiens
ttctgctgaatgagattaaagcgacagaaaagggaaaggagagcgcgggcaacgggatctaaagggagatagaga

SEQ ID NO: 143019 - DNA, 71 bp, Homo sapiens
aatgagattaaagcgacagaaaagggaaaggagagcgcgggcaacgggatctaaagggagatagagacgcg

SEQ ID NO: 143020 - DNA, 71 bp, Homo sapiens
aaagcgacagaaaagggaaaggagagcgcgggcaacgggatctaaagggagatagagacgcgggcctctga

SEQ ID NO: 143021 - DNA, 69 bp, Homo sapiens
aagggaaaggagagcgcgggcaacgggatctaaagggagatagagacgcgggcctctgagggtaaggtg

SEQ ID NO: 143022 - DNA, 72 bp, Homo sapiens
agagcgcgggcaacgggatctaaagggagatagagacgcgggcctctgagggtaaggtgggcgcaagcggag

SEQ ID NO: 143023 - DNA, 71 bp, Homo sapiens
aacgggatctaaagggagatagagacgcgggcctctgagggtaaggtgggcgcaagcggaggtgtggtgcg

SEQ ID NO: 143024 - DNA, 75 bp, Homo sapiens
ggcggagcaggaggaggcccgggcggaggaggagagccggcggtagcggcagtggcagcggcgagagcttgggcg

SEQ ID NO: 143025 - DNA, 73 bp, Homo sapiens
aggaggaggcccgggcggaggaggagagccggcggtagcggcagtggcagcggcgagagcttgggcggccgcc

SEQ ID NO: 143026 - DNA, 77 bp, Homo sapiens
aggaggagagccggcggtagcggcagtggcagcggcgagagcttgggcggccgccgccgcctcctcgcgagcgccgc

SEQ ID NO: 143027 - DNA, 75 bp, Homo sapiens
cggtagcggcagtggcagcggcgagagcttgggcggccgccgccgcctcctcgcgagcgccgcgcgcccgggtcc

SEQ ID NO: 143028 - DNA, 78 bp, Homo sapiens
agtggcagcggcgagagcttgggcggccgccgccgcctcctcgcgagcgccgcgcgcccgggtcccgctcgcatgcaa

SEQ ID NO: 143029 - DNA, 76 bp, Homo sapiens
cgagagcttgggcggccgccgccgcctcctcgcgagcgccgcgcgcccgggtcccgctcgcatgcaagtcacgtcc

SEQ ID NO: 143030 - DNA, 74 bp, Homo sapiens
cttgggcggccgccgccgcctcctcgcgagcgccgcgcgcccgggtcccgctcgcatgcaagtcacgtccgccc

SEQ ID NO: 143031 - DNA, 74 bp, Homo sapiens
cgccgcctcctcgcgagcgccgcgcgcccgggtcccgctcgcatgcaagtcacgtccgccccctcggcgcggcc

SEQ ID NO: 143032 - DNA, 74 bp, Homo sapiens
tcctcgcgagcgccgcgcgcccgggtcccgctcgcatgcaagtcacgtccgccccctcggcgcggccgccccga

SEQ ID NO: 143033 - DNA, 71 bp, Homo sapiens
gcgcgcccgggtcccgctcgcatgcaagtcacgtccgccccctcggcgcggccgccccgagacgccggccc

SEQ ID NO: 143034 - DNA, 76 bp, Homo sapiens
gtcccgctcgcatgcaagtcacgtccgccccctcggcgcggccgccccgagacgccggccccgctgagtgatgaga

SEQ ID NO: 143035 - DNA, 76 bp, Homo sapiens
catgcaagtcacgtccgccccctcggcgcggccgccccgagacgccggccccgctgagtgatgagaacagacgtca

SEQ ID NO: 143036 - DNA, 72 bp, Homo sapiens
aagtcacgtccgccccctcggcgcggccgccccgagacgccggccccgctgagtgatgagaacagacgtcaa

SEQ ID NO: 143037 - DNA, 74 bp, Homo sapiens
ccctcggcgcggccgccccgagacgccggccccgctgagtgatgagaacagacgtcaaactgccttatgaatat

SEQ ID NO: 143038 - DNA, 78 bp, Homo sapiens
gccgccccgagacgccggccccgctgagtgatgagaacagacgtcaaactgccttatgaatattgatgcggaggctag

SEQ ID NO: 143039 - DNA, 80 bp, Homo sapiens
gacgccggccccgctgagtgatgagaacagacgtcaaactgccttatgaatattgatgcggaggctaggctgctttcgta

SEQ ID NO: 143040 - DNA, 82 bp, Homo sapiens
cccgctgagtgatgagaacagacgtcaaactgccttatgaatattgatgcggaggctaggctgctttcgtagagaagcagaa

SEQ ID NO: 143041 - DNA, 81 bp, Homo sapiens
atgagaacagacgtcaaactgccttatgaatattgatgcggaggctaggctgctttcgtagagaagcagaaggaagcaaga

SEQ ID NO: 143042 - DNA, 80 bp, Homo sapiens
aacagacgtcaaactgccttatgaatattgatgcggaggctaggctgctttcgtagagaagcagaaggaagcaagatggc

SEQ ID NO: 143043 - DNA, 79 bp, Homo sapiens
aaactgccttatgaatattgatgcggaggctaggctgctttcgtagagaagcagaaggaagcaagatggctgcccttta

SEQ ID NO: 143044 - DNA, 79 bp, Homo sapiens
atgaatattgatgcggaggctaggctgctttcgtagagaagcagaaggaagcaagatggctgccctttaggatttgtta

SEQ ID NO: 143045 - DNA, 75 bp, Homo sapiens
ctgctttcgtagagaagcagaaggaagcaagatggctgccctttaggatttgttagaaaggagacccgactgcaa

SEQ ID NO: 143046 - DNA, 76 bp, Homo sapiens
gtagagaagcagaaggaagcaagatggctgccctttaggatttgttagaaaggagacccgactgcaactgctggat

SEQ ID NO: 143047 - DNA, 78 bp, Homo sapiens
aaggaagcaagatggctgccctttaggatttgttagaaaggagacccgactgcaactgctggattgctgcaaggctga

SEQ ID NO: 143048 - DNA, 77 bp, Homo sapiens
aagatggctgccctttaggatttgttagaaaggagacccgactgcaactgctggattgctgcaaggctgagggacga

SEQ ID NO: 143049 - DNA, 77 bp, Homo sapiens
tttaggatttgttagaaaggagacccgactgcaactgctggattgctgcaaggctgagggacgagaacgaggtcaga

SEQ ID NO: 143050 - DNA, 80 bp, Homo sapiens
tgttagaaaggagacccgactgcaactgctggattgctgcaaggctgagggacgagaacgaggtcagagcgcttctctta

SEQ ID NO: 143051 - DNA, 80 bp, Homo sapiens
agacccgactgcaactgctggattgctgcaaggctgagggacgagaacgaggtcagagcgcttctcttatgccgcgaaac

SEQ ID NO: 143052 - DNA, 81 bp, Homo sapiens
tgcaactgctggattgctgcaaggctgagggacgagaacgaggtcagagcgcttctcttatgccgcgaaactctccctttc

SEQ ID NO: 143053 - DNA, 74 bp, Homo sapiens
accctgttcctttttgctaacttaaaaatgttcaaactctgtcttctctaggctggcaaacattcagcagcaca

SEQ ID NO: 143054 - DNA, 76 bp, Homo sapiens
tttttgctaacttaaaaatgttcaaactctgtcttctctaggctggcaaacattcagcagcacaccctctcaagat

SEQ ID NO: 143055 - DNA, 76 bp, Homo sapiens
aaaatgttcaaactctgtcttctctaggctggcaaacattcagcagcacaccctctcaagattgtttacttgcctt

SEQ ID NO: 143056 - DNA, 79 bp, Homo sapiens
aaactctgtcttctctaggctggcaaacattcagcagcacaccctctcaagattgtttacttgcctttgctcctgttga

SEQ ID NO: 143057 - DNA, 79 bp, Homo sapiens
tcttctctaggctggcaaacattcagcagcacaccctctcaagattgtttacttgcctttgctcctgttgagttacaac

SEQ ID NO: 143058 - DNA, 79 bp, Homo sapiens
gcaaacattcagcagcacaccctctcaagattgtttacttgcctttgctcctgttgagttacaacgcttggaagcagga

SEQ ID NO: 143059 - DNA, 78 bp, Homo sapiens
attcagcagcacaccctctcaagattgtttacttgcctttgctcctgttgagttacaacgcttggaagcaggagatgg

SEQ ID NO: 143060 - DNA, 79 bp, Homo sapiens
acaccctctcaagattgtttacttgcctttgctcctgttgagttacaacgcttggaagcaggagatgggctcagcagca

SEQ ID NO: 143061 - DNA, 81 bp, Homo sapiens
attgtttacttgcctttgctcctgttgagttacaacgcttggaagcaggagatgggctcagcagcagccaataggacatga

SEQ ID NO: 143062 - DNA, 83 bp, Homo sapiens
tacttgcctttgctcctgttgagttacaacgcttggaagcaggagatgggctcagcagcagccaataggacatgatccaggaa

SEQ ID NO: 143063 - DNA, 83 bp, Homo sapiens
tcctgttgagttacaacgcttggaagcaggagatgggctcagcagcagccaataggacatgatccaggaagagcagtaaggga

SEQ ID NO: 143064 - DNA, 84 bp, Homo sapiens
agttacaacgcttggaagcaggagatgggctcagcagcagccaataggacatgatccaggaagagcagtaagggactgagctgc

SEQ ID NO: 143065 - DNA, 87 bp, Homo sapiens
gaagcaggagatgggctcagcagcagccaataggacatgatccaggaagagcagtaagggactgagctgctggtaagacagtggaga

SEQ ID NO: 143066 - DNA, 86 bp, Homo sapiens
atgggctcagcagcagccaataggacatgatccaggaagagcagtaagggactgagctgctggtaagacagtggagacagttgaca

SEQ ID NO: 143067 - DNA, 82 bp, Homo sapiens
cagcagccaataggacatgatccaggaagagcagtaagggactgagctgctggtaagacagtggagacagttgacacttgtt

SEQ ID NO: 143068 - DNA, 80 bp, Homo sapiens
aataggacatgatccaggaagagcagtaagggactgagctgctggtaagacagtggagacagttgacacttgtttgtcaa

SEQ ID NO: 143069 - DNA, 73 bp, Homo sapiens
tagatagaaataaacacattttaatttttgtttccatgctctttagaattcaactagagggcagccttgtgga

SEQ ID NO: 143070 - DNA, 71 bp, Homo sapiens
aaataaacacattttaatttttgtttccatgctctttagaattcaactagagggcagccttgtggatggcc

SEQ ID NO: 143071 - DNA, 76 bp, Homo sapiens
ttttgtttccatgctctttagaattcaactagagggcagccttgtggatggccccgaagcaagcctgatggaacag

SEQ ID NO: 143072 - DNA, 77 bp, Homo sapiens
atgctctttagaattcaactagagggcagccttgtggatggccccgaagcaagcctgatggaacaggatagaaccaa

SEQ ID NO: 143073 - DNA, 76 bp, Homo sapiens
aattcaactagagggcagccttgtggatggccccgaagcaagcctgatggaacaggatagaaccaaccatgttgag

SEQ ID NO: 143074 - DNA, 78 bp, Homo sapiens
gcagccttgtggatggccccgaagcaagcctgatggaacaggatagaaccaaccatgttgagggcaacagactaagtc

SEQ ID NO: 143075 - DNA, 77 bp, Homo sapiens
ttgtggatggccccgaagcaagcctgatggaacaggatagaaccaaccatgttgagggcaacagactaagtccattc

SEQ ID NO: 143076 - DNA, 78 bp, Homo sapiens
cccgaagcaagcctgatggaacaggatagaaccaaccatgttgagggcaacagactaagtccattcctgataccatca

SEQ ID NO: 143077 - DNA, 76 bp, Homo sapiens
cctgatggaacaggatagaaccaaccatgttgagggcaacagactaagtccattcctgataccatcacctcccatt

SEQ ID NO: 143078 - DNA, 77 bp, Homo sapiens
aacaggatagaaccaaccatgttgagggcaacagactaagtccattcctgataccatcacctcccatttgccagaca

SEQ ID NO: 143079 - DNA, 76 bp, Homo sapiens
aaccaaccatgttgagggcaacagactaagtccattcctgataccatcacctcccatttgccagacagaacctctg

SEQ ID NO: 143080 - DNA, 79 bp, Homo sapiens
ttgagggcaacagactaagtccattcctgataccatcacctcccatttgccagacagaacctctggctacaaagctcca

SEQ ID NO: 143081 - DNA, 78 bp, Homo sapiens
aacagactaagtccattcctgataccatcacctcccatttgccagacagaacctctggctacaaagctccagaatgga

SEQ ID NO: 143082 - DNA, 80 bp, Homo sapiens
attcctgataccatcacctcccatttgccagacagaacctctggctacaaagctccagaatggaagcccactgcctgaga

SEQ ID NO: 143083 - DNA, 82 bp, Homo sapiens
ataccatcacctcccatttgccagacagaacctctggctacaaagctccagaatggaagcccactgcctgagagagctcatc

SEQ ID NO: 143084 - DNA, 81 bp, Homo sapiens
tcccatttgccagacagaacctctggctacaaagctccagaatggaagcccactgcctgagagagctcatccagaagtaaa

SEQ ID NO: 143085 - DNA, 80 bp, Homo sapiens
acagaacctctggctacaaagctccagaatggaagcccactgcctgagagagctcatccagaagtaaatggagacaccaa

SEQ ID NO: 143086 - DNA, 81 bp, Homo sapiens
tggctacaaagctccagaatggaagcccactgcctgagagagctcatccagaagtaaatggagacaccaagtggcactctt

SEQ ID NO: 143087 - DNA, 79 bp, Homo sapiens
aagctccagaatggaagcccactgcctgagagagctcatccagaagtaaatggagacaccaagtggcactctttcaaaa

SEQ ID NO: 143088 - DNA, 77 bp, Homo sapiens
aatggaagcccactgcctgagagagctcatccagaagtaaatggagacaccaagtggcactctttcaaaagttatta

SEQ ID NO: 143089 - DNA, 78 bp, Homo sapiens
tgcctgagagagctcatccagaagtaaatggagacaccaagtggcactctttcaaaagttattatggaataccctgta

SEQ ID NO: 143090 - DNA, 76 bp, Homo sapiens
agagagctcatccagaagtaaatggagacaccaagtggcactctttcaaaagttattatggaataccctgtatgaa

SEQ ID NO: 143091 - DNA, 72 bp, Homo sapiens
atccagaagtaaatggagacaccaagtggcactctttcaaaagttattatggaataccctgtatgaagggaa

SEQ ID NO: 143092 - DNA, 72 bp, Homo sapiens
aaatggagacaccaagtggcactctttcaaaagttattatggaataccctgtatgaagggaagccagaatag

SEQ ID NO: 143093 - DNA, 74 bp, Homo sapiens
aagtggcactctttcaaaagttattatggaataccctgtatgaagggaagccagaatagtcgtgtgagtcctga

SEQ ID NO: 143094 - DNA, 73 bp, Homo sapiens
agttattatggaataccctgtatgaagggaagccagaatagtcgtgtgagtcctgactttacacaagaaagta

SEQ ID NO: 143095 - DNA, 72 bp, Homo sapiens
aataccctgtatgaagggaagccagaatagtcgtgtgagtcctgactttacacaagaaagtagagggtattc

SEQ ID NO: 143096 - DNA, 73 bp, Homo sapiens
aagccagaatagtcgtgtgagtcctgactttacacaagaaagtagagggtattccaagtgtttgcaaaatgga

SEQ ID NO: 143097 - DNA, 71 bp, Homo sapiens
agtcgtgtgagtcctgactttacacaagaaagtagagggtattccaagtgtttgcaaaatggaggaataaa

SEQ ID NO: 143098 - DNA, 72 bp, Homo sapiens
tgactttacacaagaaagtagagggtattccaagtgtttgcaaaatggaggaataaaacgcacagttagtga

SEQ ID NO: 143099 - DNA, 69 bp, Homo sapiens
aagaaagtagagggtattccaagtgtttgcaaaatggaggaataaaacgcacagttagtgaaccttctc

SEQ ID NO: 143100 - DNA, 73 bp, Homo sapiens
aaaatggaggaataaaacgcacagttagtgaaccttctctctctgggctccttcagatcaagaaattgaaaca

SEQ ID NO: 143101 - DNA, 72 bp, Homo sapiens
aataaaacgcacagttagtgaaccttctctctctgggctccttcagatcaagaaattgaaacaagaccaaaa

SEQ ID NO: 143102 - DNA, 72 bp, Homo sapiens
aaccttctctctctgggctccttcagatcaagaaattgaaacaagaccaaaaggctaatggagaaagacgta

SEQ ID NO: 143103 - DNA, 71 bp, Homo sapiens
tctctgggctccttcagatcaagaaattgaaacaagaccaaaaggctaatggagaaagacgtaacttcggg

SEQ ID NO: 143104 - DNA, 69 bp, Homo sapiens
cttcagatcaagaaattgaaacaagaccaaaaggctaatggagaaagacgtaacttcggggtaagccaa

SEQ ID NO: 143105 - DNA, 67 bp, Homo sapiens
ttgaaacaagaccaaaaggctaatggagaaagacgtaacttcggggtaagccaagaaagaaatccag

SEQ ID NO: 143106 - DNA, 68 bp, Homo sapiens
aaaaggctaatggagaaagacgtaacttcggggtaagccaagaaagaaatccaggtgaaagcagtcaa

SEQ ID NO: 143107 - DNA, 72 bp, Homo sapiens
taacttcggggtaagccaagaaagaaatccaggtgaaagcagtcaaccaaatgtctccgatttgagtgataa

SEQ ID NO: 143108 - DNA, 75 bp, Homo sapiens
aggtgaaagcagtcaaccaaatgtctccgatttgagtgataagaaagaatctgtgagttctgtagcccaagaaaa

SEQ ID NO: 143109 - DNA, 75 bp, Homo sapiens
agtcaaccaaatgtctccgatttgagtgataagaaagaatctgtgagttctgtagcccaagaaaatgcagttaaa

SEQ ID NO: 143110 - DNA, 74 bp, Homo sapiens
accaaatgtctccgatttgagtgataagaaagaatctgtgagttctgtagcccaagaaaatgcagttaaagatt

SEQ ID NO: 143111 - DNA, 75 bp, Homo sapiens
gtgataagaaagaatctgtgagttctgtagcccaagaaaatgcagttaaagatttcaccagtttttcaacacata

SEQ ID NO: 143112 - DNA, 75 bp, Homo sapiens
agaatctgtgagttctgtagcccaagaaaatgcagttaaagatttcaccagtttttcaacacataactgcagtgg

SEQ ID NO: 143113 - DNA, 74 bp, Homo sapiens
ttctgtagcccaagaaaatgcagttaaagatttcaccagtttttcaacacataactgcagtgggcctgaaaatc

SEQ ID NO: 143114 - DNA, 75 bp, Homo sapiens
agaaaatgcagttaaagatttcaccagtttttcaacacataactgcagtgggcctgaaaatccagagcttcagat

SEQ ID NO: 143115 - DNA, 78 bp, Homo sapiens
agttaaagatttcaccagtttttcaacacataactgcagtgggcctgaaaatccagagcttcagattctgaatgagca

SEQ ID NO: 143116 - DNA, 78 bp, Homo sapiens
ttcaccagtttttcaacacataactgcagtgggcctgaaaatccagagcttcagattctgaatgagcaggaggggaaa

SEQ ID NO: 143117 - DNA, 79 bp, Homo sapiens
tttcaacacataactgcagtgggcctgaaaatccagagcttcagattctgaatgagcaggaggggaaaagtgctaatta

SEQ ID NO: 143118 - DNA, 79 bp, Homo sapiens
ataactgcagtgggcctgaaaatccagagcttcagattctgaatgagcaggaggggaaaagtgctaattaccatgacaa

SEQ ID NO: 143119 - DNA, 79 bp, Homo sapiens
gcctgaaaatccagagcttcagattctgaatgagcaggaggggaaaagtgctaattaccatgacaagaacattgtatta

SEQ ID NO: 143120 - DNA, 77 bp, Homo sapiens
aaatccagagcttcagattctgaatgagcaggaggggaaaagtgctaattaccatgacaagaacattgtattactta

SEQ ID NO: 143121 - DNA, 74 bp, Homo sapiens
ttcagattctgaatgagcaggaggggaaaagtgctaattaccatgacaagaacattgtattacttaaaaacaag

SEQ ID NO: 143122 - DNA, 73 bp, Homo sapiens
aatgagcaggaggggaaaagtgctaattaccatgacaagaacattgtattacttaaaaacaaggcagtgctaa

SEQ ID NO: 143123 - DNA, 74 bp, Homo sapiens
gggaaaagtgctaattaccatgacaagaacattgtattacttaaaaacaaggcagtgctaatgcctaatggtgc

SEQ ID NO: 143124 - DNA, 77 bp, Homo sapiens
taccatgacaagaacattgtattacttaaaaacaaggcagtgctaatgcctaatggtgctacagtttctgcctcttc

SEQ ID NO: 143125 - DNA, 77 bp, Homo sapiens
tacttaaaaacaaggcagtgctaatgcctaatggtgctacagtttctgcctcttccgtggaacacacacatggtgaa

SEQ ID NO: 143126 - DNA, 77 bp, Homo sapiens
aaggcagtgctaatgcctaatggtgctacagtttctgcctcttccgtggaacacacacatggtgaactcctggaaaa

SEQ ID NO: 143127 - DNA, 76 bp, Homo sapiens
taatgcctaatggtgctacagtttctgcctcttccgtggaacacacacatggtgaactcctggaaaaaacactgtc

SEQ ID NO: 143128 - DNA, 76 bp, Homo sapiens
taatggtgctacagtttctgcctcttccgtggaacacacacatggtgaactcctggaaaaaacactgtctcaatat

SEQ ID NO: 143129 - DNA, 76 bp, Homo sapiens
tttctgcctcttccgtggaacacacacatggtgaactcctggaaaaaacactgtctcaatattatccagattgtgt

SEQ ID NO: 143130 - DNA, 79 bp, Homo sapiens
tgaactcctggaaaaaacactgtctcaatattatccagattgtgtttccattgcggtgcagaaaaccacatctcacata

SEQ ID NO: 143131 - DNA, 79 bp, Homo sapiens
gaaaaaacactgtctcaatattatccagattgtgtttccattgcggtgcagaaaaccacatctcacataaatgccatta

SEQ ID NO: 143132 - DNA, 81 bp, Homo sapiens
aacactgtctcaatattatccagattgtgtttccattgcggtgcagaaaaccacatctcacataaatgccattaacagtca

SEQ ID NO: 143133 - DNA, 79 bp, Homo sapiens
aatattatccagattgtgtttccattgcggtgcagaaaaccacatctcacataaatgccattaacagtcaggctactaa

SEQ ID NO: 143134 - DNA, 79 bp, Homo sapiens
attgtgtttccattgcggtgcagaaaaccacatctcacataaatgccattaacagtcaggctactaatgagttgtcctg

SEQ ID NO: 143135 - DNA, 84 bp, Homo sapiens
ttccattgcggtgcagaaaaccacatctcacataaatgccattaacagtcaggctactaatgagttgtcctgtgagatcactca

SEQ ID NO: 143136 - DNA, 82 bp, Homo sapiens
agaaaaccacatctcacataaatgccattaacagtcaggctactaatgagttgtcctgtgagatcactcacccatcgcatac

SEQ ID NO: 143137 - DNA, 86 bp, Homo sapiens
tctcacataaatgccattaacagtcaggctactaatgagttgtcctgtgagatcactcacccatcgcatacctcagggcagatcaa

SEQ ID NO: 143138 - DNA, 83 bp, Homo sapiens
ataaatgccattaacagtcaggctactaatgagttgtcctgtgagatcactcacccatcgcatacctcagggcagatcaattc

SEQ ID NO: 143139 - DNA, 83 bp, Homo sapiens
attaacagtcaggctactaatgagttgtcctgtgagatcactcacccatcgcatacctcagggcagatcaattccgcacagac

SEQ ID NO: 143140 - DNA, 82 bp, Homo sapiens
aggctactaatgagttgtcctgtgagatcactcacccatcgcatacctcagggcagatcaattccgcacagacctctaactc

SEQ ID NO: 143141 - DNA, 84 bp, Homo sapiens
gttgtcctgtgagatcactcacccatcgcatacctcagggcagatcaattccgcacagacctctaactctgagctgcctccaaa

SEQ ID NO: 143142 - DNA, 88 bp, Homo sapiens
tgtgagatcactcacccatcgcatacctcagggcagatcaattccgcacagacctctaactctgagctgcctccaaagccagctgcag

SEQ ID NO: 143143 - DNA, 85 bp, Homo sapiens
atacctcagggcagatcaattccgcacagacctctaactctgagctgcctccaaagccagctgcagtggtgagtgaggcctgtga

SEQ ID NO: 143144 - DNA, 91 bp, Homo sapiens
agatcaattccgcacagacctctaactctgagctgcctccaaagccagctgcagtggtgagtgaggcctgtgatgctgatgatgctgataa

SEQ ID NO: 143145 - DNA, 92 bp, Homo sapiens
ctctaactctgagctgcctccaaagccagctgcagtggtgagtgaggcctgtgatgctgatgatgctgataatgccagtaaactagctgcaa

SEQ ID NO: 143146 - DNA, 94 bp, Homo sapiens
tctgagctgcctccaaagccagctgcagtggtgagtgaggcctgtgatgctgatgatgctgataatgccagtaaactagctgcaatgctaaata

SEQ ID NO: 143147 - DNA, 86 bp, Homo sapiens
cagtggtgagtgaggcctgtgatgctgatgatgctgataatgccagtaaactagctgcaatgctaaatacctgttcctttcagaaa

SEQ ID NO: 143148 - DNA, 85 bp, Homo sapiens
tgaggcctgtgatgctgatgatgctgataatgccagtaaactagctgcaatgctaaatacctgttcctttcagaaaccagaacaa

SEQ ID NO: 143149 - DNA, 79 bp, Homo sapiens
atgatgctgataatgccagtaaactagctgcaatgctaaatacctgttcctttcagaaaccagaacaactacaacaaca

SEQ ID NO: 143150 - DNA, 73 bp, Homo sapiens
ataatgccagtaaactagctgcaatgctaaatacctgttcctttcagaaaccagaacaactacaacaacaaaa

SEQ ID NO: 143151 - DNA, 71 bp, Homo sapiens
gtaaactagctgcaatgctaaatacctgttcctttcagaaaccagaacaactacaacaacaaaaatcagtt

SEQ ID NO: 143152 - DNA, 71 bp, Homo sapiens
aatacctgttcctttcagaaaccagaacaactacaacaacaaaaatcagtttttgagatatgcccatctcc

SEQ ID NO: 143153 - DNA, 75 bp, Homo sapiens
tttcagaaaccagaacaactacaacaacaaaaatcagtttttgagatatgcccatctcctgcagaaaataacatc

SEQ ID NO: 143154 - DNA, 75 bp, Homo sapiens
acaacaaaaatcagtttttgagatatgcccatctcctgcagaaaataacatccagggaaccacaaagctagcgtc

SEQ ID NO: 143155 - DNA, 77 bp, Homo sapiens
atcagtttttgagatatgcccatctcctgcagaaaataacatccagggaaccacaaagctagcgtctggtgaagaat

SEQ ID NO: 143156 - DNA, 78 bp, Homo sapiens
atctcctgcagaaaataacatccagggaaccacaaagctagcgtctggtgaagaattctgttcaggttccagcagcaa

SEQ ID NO: 143157 - DNA, 80 bp, Homo sapiens
aaccacaaagctagcgtctggtgaagaattctgttcaggttccagcagcaatttgcaagctcctggtggcagctctgaac

SEQ ID NO: 143158 - DNA, 79 bp, Homo sapiens
tagcgtctggtgaagaattctgttcaggttccagcagcaatttgcaagctcctggtggcagctctgaacggtatttaaa

SEQ ID NO: 143159 - DNA, 76 bp, Homo sapiens
gtgaagaattctgttcaggttccagcagcaatttgcaagctcctggtggcagctctgaacggtatttaaaacaaaa

SEQ ID NO: 143160 - DNA, 77 bp, Homo sapiens
ttctgttcaggttccagcagcaatttgcaagctcctggtggcagctctgaacggtatttaaaacaaaatgaaatgaa

SEQ ID NO: 143161 - DNA, 77 bp, Homo sapiens
agcagcaatttgcaagctcctggtggcagctctgaacggtatttaaaacaaaatgaaatgaatggtgcttacttcaa

SEQ ID NO: 143162 - DNA, 75 bp, Homo sapiens
atttgcaagctcctggtggcagctctgaacggtatttaaaacaaaatgaaatgaatggtgcttacttcaagcaaa

SEQ ID NO: 143163 - DNA, 74 bp, Homo sapiens
tctgaacggtatttaaaacaaaatgaaatgaatggtgcttacttcaagcaaagctcagtgttcactaaggattc

SEQ ID NO: 143164 - DNA, 73 bp, Homo sapiens
atttaaaacaaaatgaaatgaatggtgcttacttcaagcaaagctcagtgttcactaaggattccttttctgc

SEQ ID NO: 143165 - DNA, 76 bp, Homo sapiens
aaatgaaatgaatggtgcttacttcaagcaaagctcagtgttcactaaggattccttttctgccactaccacacca

SEQ ID NO: 143166 - DNA, 75 bp, Homo sapiens
aaatgaatggtgcttacttcaagcaaagctcagtgttcactaaggattccttttctgccactaccacaccaccac

SEQ ID NO: 143167 - DNA, 73 bp, Homo sapiens
accaccaccatcacaattgcttctttctccccctcctcctcttccacaggttcctcagcttccttcagaagga

SEQ ID NO: 143168 - DNA, 71 bp, Homo sapiens
accatcacaattgcttctttctccccctcctcctcttccacaggttcctcagcttccttcagaaggaaaaa

SEQ ID NO: 143169 - DNA, 72 bp, Homo sapiens
attgcttctttctccccctcctcctcttccacaggttcctcagcttccttcagaaggaaaaagcactctgaa

SEQ ID NO: 143170 - DNA, 72 bp, Homo sapiens
ccctcctcctcttccacaggttcctcagcttccttcagaaggaaaaagcactctgaatggtggagttttaga

SEQ ID NO: 143171 - DNA, 73 bp, Homo sapiens
tcttccacaggttcctcagcttccttcagaaggaaaaagcactctgaatggtggagttttagaagaacaccac

SEQ ID NO: 143172 - DNA, 72 bp, Homo sapiens
acaggttcctcagcttccttcagaaggaaaaagcactctgaatggtggagttttagaagaacaccaccacta

SEQ ID NO: 143173 - DNA, 69 bp, Homo sapiens
ttccttcagaaggaaaaagcactctgaatggtggagttttagaagaacaccaccactaccccaaccaaa

SEQ ID NO: 143174 - DNA, 67 bp, Homo sapiens
actctgaatggtggagttttagaagaacaccaccactaccccaaccaaagtaacacaacacttttaa

SEQ ID NO: 143175 - DNA, 65 bp, Homo sapiens
aatggtggagttttagaagaacaccaccactaccccaaccaaagtaacacaacacttttaaggga

SEQ ID NO: 143176 - DNA, 65 bp, Homo sapiens
ttttagaagaacaccaccactaccccaaccaaagtaacacaacacttttaagggaagtgaaaata

SEQ ID NO: 143177 - DNA, 64 bp, Homo sapiens
accactaccccaaccaaagtaacacaacacttttaagggaagtgaaaatagagggtaaacctga

SEQ ID NO: 143178 - DNA, 66 bp, Homo sapiens
caaccaaagtaacacaacacttttaagggaagtgaaaatagagggtaaacctgaggcaccaccttc

SEQ ID NO: 143179 - DNA, 65 bp, Homo sapiens
aaccaaagtaacacaacacttttaagggaagtgaaaatagagggtaaacctgaggcaccaccttc

SEQ ID NO: 143180 - DNA, 66 bp, Homo sapiens
aaagtaacacaacacttttaagggaagtgaaaatagagggtaaacctgaggcaccaccttcccaga

SEQ ID NO: 143181 - DNA, 67 bp, Homo sapiens
acaacacttttaagggaagtgaaaatagagggtaaacctgaggcaccaccttcccagagtcctaatc

SEQ ID NO: 143182 - DNA, 68 bp, Homo sapiens
acttttaagggaagtgaaaatagagggtaaacctgaggcaccaccttcccagagtcctaatccatcta

SEQ ID NO: 143183 - DNA, 74 bp, Homo sapiens
aagtgaaaatagagggtaaacctgaggcaccaccttcccagagtcctaatccatctacacatgtatgcagccct

SEQ ID NO: 143184 - DNA, 78 bp, Homo sapiens
gtaaacctgaggcaccaccttcccagagtcctaatccatctacacatgtatgcagcccttctccgatgctttctgaaa

SEQ ID NO: 143185 - DNA, 81 bp, Homo sapiens
ttcccagagtcctaatccatctacacatgtatgcagcccttctccgatgctttctgaaaggcctcagaataattgtgtgaa

SEQ ID NO: 143186 - DNA, 84 bp, Homo sapiens
taatccatctacacatgtatgcagcccttctccgatgctttctgaaaggcctcagaataattgtgtgaacaggaatgacataca

SEQ ID NO: 143187 - DNA, 85 bp, Homo sapiens
atctacacatgtatgcagcccttctccgatgctttctgaaaggcctcagaataattgtgtgaacaggaatgacatacagactgca

SEQ ID NO: 143188 - DNA, 84 bp, Homo sapiens
tatgcagcccttctccgatgctttctgaaaggcctcagaataattgtgtgaacaggaatgacatacagactgcagggacaatga

SEQ ID NO: 143189 - DNA, 82 bp, Homo sapiens
ttctccgatgctttctgaaaggcctcagaataattgtgtgaacaggaatgacatacagactgcagggacaatgactgttcca

SEQ ID NO: 143190 - DNA, 80 bp, Homo sapiens
ctttctgaaaggcctcagaataattgtgtgaacaggaatgacatacagactgcagggacaatgactgttccattgtgttc

SEQ ID NO: 143191 - DNA, 80 bp, Homo sapiens
aaggcctcagaataattgtgtgaacaggaatgacatacagactgcagggacaatgactgttccattgtgttctgagaaaa

SEQ ID NO: 143192 - DNA, 79 bp, Homo sapiens
aataattgtgtgaacaggaatgacatacagactgcagggacaatgactgttccattgtgttctgagaaaacaagaccaa

SEQ ID NO: 143193 - DNA, 80 bp, Homo sapiens
acatacagactgcagggacaatgactgttccattgtgttctgagaaaacaagaccaatgtcagaacacctcaagcataac

SEQ ID NO: 143194 - DNA, 75 bp, Homo sapiens
agggacaatgactgttccattgtgttctgagaaaacaagaccaatgtcagaacacctcaagcataacccaccaat

SEQ ID NO: 143195 - DNA, 74 bp, Homo sapiens
aatgactgttccattgtgttctgagaaaacaagaccaatgtcagaacacctcaagcataacccaccaatttttg

SEQ ID NO: 143196 - DNA, 75 bp, Homo sapiens
attgtgttctgagaaaacaagaccaatgtcagaacacctcaagcataacccaccaatttttggtagcagtggaga

SEQ ID NO: 143197 - DNA, 75 bp, Homo sapiens
gaaaacaagaccaatgtcagaacacctcaagcataacccaccaatttttggtagcagtggagagctacaggacaa

SEQ ID NO: 143198 - DNA, 78 bp, Homo sapiens
aagaccaatgtcagaacacctcaagcataacccaccaatttttggtagcagtggagagctacaggacaactgccagca

SEQ ID NO: 143199 - DNA, 78 bp, Homo sapiens
agaacacctcaagcataacccaccaatttttggtagcagtggagagctacaggacaactgccagcagttgatgagaaa

SEQ ID NO: 143200 - DNA, 78 bp, Homo sapiens
aagcataacccaccaatttttggtagcagtggagagctacaggacaactgccagcagttgatgagaaacaaagagcaa

SEQ ID NO: 143201 - DNA, 79 bp, Homo sapiens
accaatttttggtagcagtggagagctacaggacaactgccagcagttgatgagaaacaaagagcaagagattctgaag

SEQ ID NO: 143202 - DNA, 81 bp, Homo sapiens
ttttggtagcagtggagagctacaggacaactgccagcagttgatgagaaacaaagagcaagagattctgaagggtcgaga

SEQ ID NO: 143203 - DNA, 80 bp, Homo sapiens
agagctacaggacaactgccagcagttgatgagaaacaaagagcaagagattctgaagggtcgagacaaggagcaaacac

SEQ ID NO: 143204 - DNA, 79 bp, Homo sapiens
aggacaactgccagcagttgatgagaaacaaagagcaagagattctgaagggtcgagacaaggagcaaacacgagatct

SEQ ID NO: 143205 - DNA, 80 bp, Homo sapiens
ctgccagcagttgatgagaaacaaagagcaagagattctgaagggtcgagacaaggagcaaacacgagatcttgtgcccc

SEQ ID NO: 143206 - DNA, 79 bp, Homo sapiens
tgagaaacaaagagcaagagattctgaagggtcgagacaaggagcaaacacgagatcttgtgcccccaacacagcacta

SEQ ID NO: 143207 - DNA, 78 bp, Homo sapiens
aaagagcaagagattctgaagggtcgagacaaggagcaaacacgagatcttgtgcccccaacacagcactatctgaaa

SEQ ID NO: 143208 - DNA, 77 bp, Homo sapiens
attctgaagggtcgagacaaggagcaaacacgagatcttgtgcccccaacacagcactatctgaaaccaggatggat

SEQ ID NO: 143209 - DNA, 76 bp, Homo sapiens
aagggtcgagacaaggagcaaacacgagatcttgtgcccccaacacagcactatctgaaaccaggatggattgaat

SEQ ID NO: 143210 - DNA, 75 bp, Homo sapiens
aacacgagatcttgtgcccccaacacagcactatctgaaaccaggatggattgaattgaaggcccctcgttttca

SEQ ID NO: 143211 - DNA, 74 bp, Homo sapiens
ttgtgcccccaacacagcactatctgaaaccaggatggattgaattgaaggcccctcgttttcaccaagcggaa

SEQ ID NO: 143212 - DNA, 73 bp, Homo sapiens
acagcactatctgaaaccaggatggattgaattgaaggcccctcgttttcaccaagcggaatcccatctaaaa

SEQ ID NO: 143213 - DNA, 74 bp, Homo sapiens
aggatggattgaattgaaggcccctcgttttcaccaagcggaatcccatctaaaacgtaatgaggcatcactgc

SEQ ID NO: 143214 - DNA, 73 bp, Homo sapiens
aattgaaggcccctcgttttcaccaagcggaatcccatctaaaacgtaatgaggcatcactgccatcaattct

SEQ ID NO: 143215 - DNA, 76 bp, Homo sapiens
ctcgttttcaccaagcggaatcccatctaaaacgtaatgaggcatcactgccatcaattcttcagtatcaacccaa

SEQ ID NO: 143216 - DNA, 79 bp, Homo sapiens
tttcaccaagcggaatcccatctaaaacgtaatgaggcatcactgccatcaattcttcagtatcaacccaatctctcca

SEQ ID NO: 143217 - DNA, 79 bp, Homo sapiens
aatcccatctaaaacgtaatgaggcatcactgccatcaattcttcagtatcaacccaatctctccaatcaaatgacctc

SEQ ID NO: 143218 - DNA, 79 bp, Homo sapiens
taaaacgtaatgaggcatcactgccatcaattcttcagtatcaacccaatctctccaatcaaatgacctccaaacaata

SEQ ID NO: 143219 - DNA, 80 bp, Homo sapiens
atgaggcatcactgccatcaattcttcagtatcaacccaatctctccaatcaaatgacctccaaacaatacactggaaat

SEQ ID NO: 143220 - DNA, 77 bp, Homo sapiens
actgccatcaattcttcagtatcaacccaatctctccaatcaaatgacctccaaacaatacactggaaattccaaca

SEQ ID NO: 143221 - DNA, 72 bp, Homo sapiens
aacccaatctctccaatcaaatgacctccaaacaatacactggaaattccaacatgcctggggggctcccaa

SEQ ID NO: 143222 - DNA, 75 bp, Homo sapiens
tctccaatcaaatgacctccaaacaatacactggaaattccaacatgcctggggggctcccaaggcaagcttaca

SEQ ID NO: 143223 - DNA, 72 bp, Homo sapiens
tgacctccaaacaatacactggaaattccaacatgcctggggggctcccaaggcaagcttacacccagaaaa

SEQ ID NO: 143224 - DNA, 71 bp, Homo sapiens
aaacaatacactggaaattccaacatgcctggggggctcccaaggcaagcttacacccagaaaacaacaca

SEQ ID NO: 143225 - DNA, 74 bp, Homo sapiens
actggaaattccaacatgcctggggggctcccaaggcaagcttacacccagaaaacaacacagctggagcacaa

SEQ ID NO: 143226 - DNA, 75 bp, Homo sapiens
aacatgcctggggggctcccaaggcaagcttacacccagaaaacaacacagctggagcacaagtcacaaatgtac

SEQ ID NO: 143227 - DNA, 75 bp, Homo sapiens
aaggcaagcttacacccagaaaacaacacagctggagcacaagtcacaaatgtaccaagttgaaatgaatcaagg

SEQ ID NO: 143228 - DNA, 76 bp, Homo sapiens
ttacacccagaaaacaacacagctggagcacaagtcacaaatgtaccaagttgaaatgaatcaagggcagtcccaa

SEQ ID NO: 143229 - DNA, 75 bp, Homo sapiens
aaaacaacacagctggagcacaagtcacaaatgtaccaagttgaaatgaatcaagggcagtcccaaggtacagtg

SEQ ID NO: 143230 - DNA, 77 bp, Homo sapiens
agctggagcacaagtcacaaatgtaccaagttgaaatgaatcaagggcagtcccaaggtacagtggaccaacatctc

SEQ ID NO: 143231 - DNA, 74 bp, Homo sapiens
acaagtcacaaatgtaccaagttgaaatgaatcaagggcagtcccaaggtacagtggaccaacatctccagttc

SEQ ID NO: 143232 - DNA, 71 bp, Homo sapiens
aaatgtaccaagttgaaatgaatcaagggcagtcccaaggtacagtggaccaacatctccagttccaaaaa

SEQ ID NO: 143233 - DNA, 71 bp, Homo sapiens
aagttgaaatgaatcaagggcagtcccaaggtacagtggaccaacatctccagttccaaaaaccctcacac

SEQ ID NO: 143234 - DNA, 72 bp, Homo sapiens
aatcaagggcagtcccaaggtacagtggaccaacatctccagttccaaaaaccctcacaccaggtgcacttc

SEQ ID NO: 143235 - DNA, 71 bp, Homo sapiens
agtcccaaggtacagtggaccaacatctccagttccaaaaaccctcacaccaggtgcacttctccaaaaca

SEQ ID NO: 143236 - DNA, 71 bp, Homo sapiens
agtggaccaacatctccagttccaaaaaccctcacaccaggtgcacttctccaaaacagaccatttaccaa

SEQ ID NO: 143237 - DNA, 72 bp, Homo sapiens
aacatctccagttccaaaaaccctcacaccaggtgcacttctccaaaacagaccatttaccaaaagctcatg

SEQ ID NO: 143238 - DNA, 79 bp, Homo sapiens
aggtgcacttctccaaaacagaccatttaccaaaagctcatgtgcagtcactgtgtggcactagatttcattttcaaca

SEQ ID NO: 143239 - DNA, 80 bp, Homo sapiens
tccaaaacagaccatttaccaaaagctcatgtgcagtcactgtgtggcactagatttcattttcaacaaagagcagattc

SEQ ID NO: 143240 - DNA, 79 bp, Homo sapiens
catttaccaaaagctcatgtgcagtcactgtgtggcactagatttcattttcaacaaagagcagattcccaaactgaaa

SEQ ID NO: 143241 - DNA, 77 bp, Homo sapiens
aaaagctcatgtgcagtcactgtgtggcactagatttcattttcaacaaagagcagattcccaaactgaaaaactta

SEQ ID NO: 143242 - DNA, 77 bp, Homo sapiens
atgtgcagtcactgtgtggcactagatttcattttcaacaaagagcagattcccaaactgaaaaacttatgtcccca

SEQ ID NO: 143243 - DNA, 74 bp, Homo sapiens
tgtgtggcactagatttcattttcaacaaagagcagattcccaaactgaaaaacttatgtccccagtgttgaaa

SEQ ID NO: 143244 - DNA, 73 bp, Homo sapiens
gatttcattttcaacaaagagcagattcccaaactgaaaaacttatgtccccagtgttgaaacagcacttgaa

SEQ ID NO: 143245 - DNA, 75 bp, Homo sapiens
aaagagcagattcccaaactgaaaaacttatgtccccagtgttgaaacagcacttgaatcaacaggcttcagaga

SEQ ID NO: 143246 - DNA, 75 bp, Homo sapiens
aaactgaaaaacttatgtccccagtgttgaaacagcacttgaatcaacaggcttcagagactgagccattttcaa

SEQ ID NO: 143247 - DNA, 76 bp, Homo sapiens
aaaaacttatgtccccagtgttgaaacagcacttgaatcaacaggcttcagagactgagccattttcaaactcaca

SEQ ID NO: 143248 - DNA, 78 bp, Homo sapiens
cccagtgttgaaacagcacttgaatcaacaggcttcagagactgagccattttcaaactcacaccttttgcaacataa

SEQ ID NO: 143249 - DNA, 78 bp, Homo sapiens
aaacagcacttgaatcaacaggcttcagagactgagccattttcaaactcacaccttttgcaacataagcctcataaa

SEQ ID NO: 143250 - DNA, 81 bp, Homo sapiens
ttgaatcaacaggcttcagagactgagccattttcaaactcacaccttttgcaacataagcctcataaacaggcagcacaa

SEQ ID NO: 143251 - DNA, 79 bp, Homo sapiens
acaggcttcagagactgagccattttcaaactcacaccttttgcaacataagcctcataaacaggcagcacaaacacaa

SEQ ID NO: 143252 - DNA, 78 bp, Homo sapiens
agactgagccattttcaaactcacaccttttgcaacataagcctcataaacaggcagcacaaacacaaccatcccaga

SEQ ID NO: 143253 - DNA, 77 bp, Homo sapiens
attttcaaactcacaccttttgcaacataagcctcataaacaggcagcacaaacacaaccatcccagagttcacatc

SEQ ID NO: 143254 - DNA, 76 bp, Homo sapiens
acaccttttgcaacataagcctcataaacaggcagcacaaacacaaccatcccagagttcacatctccctcaaaac

SEQ ID NO: 143255 - DNA, 81 bp, Homo sapiens
tttgcaacataagcctcataaacaggcagcacaaacacaaccatcccagagttcacatctccctcaaaaccagcaacagca

SEQ ID NO: 143256 - DNA, 79 bp, Homo sapiens
tcataaacaggcagcacaaacacaaccatcccagagttcacatctccctcaaaaccagcaacagcagcaaaaattacaa

SEQ ID NO: 143257 - DNA, 77 bp, Homo sapiens
aacaggcagcacaaacacaaccatcccagagttcacatctccctcaaaaccagcaacagcagcaaaaattacaaata

SEQ ID NO: 143258 - DNA, 73 bp, Homo sapiens
aaacacaaccatcccagagttcacatctccctcaaaaccagcaacagcagcaaaaattacaaataaagaataa

SEQ ID NO: 143259 - DNA, 73 bp, Homo sapiens
atcccagagttcacatctccctcaaaaccagcaacagcagcaaaaattacaaataaagaataaagaggaaata

SEQ ID NO: 143260 - DNA, 71 bp, Homo sapiens
catctccctcaaaaccagcaacagcagcaaaaattacaaataaagaataaagaggaaatactccagacttt

SEQ ID NO: 143261 - DNA, 70 bp, Homo sapiens
caaaaccagcaacagcagcaaaaattacaaataaagaataaagaggaaatactccagacttttcctcacc

SEQ ID NO: 143262 - DNA, 73 bp, Homo sapiens
ataaagaggaaatactccagacttttcctcacccccaaagcaacaatgatcagcaaagagaaggatcattctt

SEQ ID NO: 143263 - DNA, 77 bp, Homo sapiens
ccaaagcaacaatgatcagcaaagagaaggatcattctttggccagactaaagtggaagaatgttttcatggtgaaa

SEQ ID NO: 143264 - DNA, 78 bp, Homo sapiens
aatgatcagcaaagagaaggatcattctttggccagactaaagtggaagaatgttttcatggtgaaaatcagtattca

SEQ ID NO: 143265 - DNA, 75 bp, Homo sapiens
caaagagaaggatcattctttggccagactaaagtggaagaatgttttcatggtgaaaatcagtattcaaaatca

SEQ ID NO: 143266 - DNA, 75 bp, Homo sapiens
atcattctttggccagactaaagtggaagaatgttttcatggtgaaaatcagtattcaaaatcaagcgagttcga

SEQ ID NO: 143267 - DNA, 76 bp, Homo sapiens
ttggccagactaaagtggaagaatgttttcatggtgaaaatcagtattcaaaatcaagcgagttcgagactcataa

SEQ ID NO: 143268 - DNA, 76 bp, Homo sapiens
taaagtggaagaatgttttcatggtgaaaatcagtattcaaaatcaagcgagttcgagactcataatgtccaaatg

SEQ ID NO: 143269 - DNA, 76 bp, Homo sapiens
aagaatgttttcatggtgaaaatcagtattcaaaatcaagcgagttcgagactcataatgtccaaatgggactgga

SEQ ID NO: 143270 - DNA, 75 bp, Homo sapiens
agtattcaaaatcaagcgagttcgagactcataatgtccaaatgggactggaggaagtacagaatataaatcgta

SEQ ID NO: 143271 - DNA, 73 bp, Homo sapiens
aaaatcaagcgagttcgagactcataatgtccaaatgggactggaggaagtacagaatataaatcgtagaaat

SEQ ID NO: 143272 - DNA, 73 bp, Homo sapiens
ataatgtccaaatgggactggaggaagtacagaatataaatcgtagaaattccccttatagtcagaccatgaa

SEQ ID NO: 143273 - DNA, 74 bp, Homo sapiens
aaatgggactggaggaagtacagaatataaatcgtagaaattccccttatagtcagaccatgaaatcaagtgca

SEQ ID NO: 143274 - DNA, 76 bp, Homo sapiens
actggaggaagtacagaatataaatcgtagaaattccccttatagtcagaccatgaaatcaagtgcatgcaaaata

SEQ ID NO: 143275 - DNA, 75 bp, Homo sapiens
agtacagaatataaatcgtagaaattccccttatagtcagaccatgaaatcaagtgcatgcaaaatacaggtttc

SEQ ID NO: 143276 - DNA, 75 bp, Homo sapiens
taaatcgtagaaattccccttatagtcagaccatgaaatcaagtgcatgcaaaatacaggtttcttgttcaaaca

SEQ ID NO: 143277 - DNA, 75 bp, Homo sapiens
aattccccttatagtcagaccatgaaatcaagtgcatgcaaaatacaggtttcttgttcaaacaatacacaccta

SEQ ID NO: 143278 - DNA, 75 bp, Homo sapiens
aagtgcatgcaaaatacaggtttcttgttcaaacaatacacacctagtttcagagaataaagaacagactacaca

SEQ ID NO: 143279 - DNA, 72 bp, Homo sapiens
atacaggtttcttgttcaaacaatacacacctagtttcagagaataaagaacagactacacatcctgaactt

SEQ ID NO: 143280 - DNA, 74 bp, Homo sapiens
ttcttgttcaaacaatacacacctagtttcagagaataaagaacagactacacatcctgaactttttgcaggaa

SEQ ID NO: 143281 - DNA, 72 bp, Homo sapiens
aaacaatacacacctagtttcagagaataaagaacagactacacatcctgaactttttgcaggaaacaagac

SEQ ID NO: 143282 - DNA, 69 bp, Homo sapiens
acctagtttcagagaataaagaacagactacacatcctgaactttttgcaggaaacaagacccaaaact

SEQ ID NO: 143283 - DNA, 75 bp, Homo sapiens
gaataaagaacagactacacatcctgaactttttgcaggaaacaagacccaaaacttgcatcacatgcaatattt

SEQ ID NO: 143284 - DNA, 75 bp, Homo sapiens
aagaacagactacacatcctgaactttttgcaggaaacaagacccaaaacttgcatcacatgcaatattttccaa

SEQ ID NO: 143285 - DNA, 75 bp, Homo sapiens
atcctgaactttttgcaggaaacaagacccaaaacttgcatcacatgcaatattttccaaataatgtgatcccaa

SEQ ID NO: 143286 - DNA, 77 bp, Homo sapiens
aggaaacaagacccaaaacttgcatcacatgcaatattttccaaataatgtgatcccaaagcaagatcttcttcaca

SEQ ID NO: 143287 - DNA, 80 bp, Homo sapiens
atcacatgcaatattttccaaataatgtgatcccaaagcaagatcttcttcacaggtgctttcaagaacaggagcagaag

SEQ ID NO: 143288 - DNA, 78 bp, Homo sapiens
aaataatgtgatcccaaagcaagatcttcttcacaggtgctttcaagaacaggagcagaagtcacaacaagcttcagt

SEQ ID NO: 143289 - DNA, 79 bp, Homo sapiens
tcccaaagcaagatcttcttcacaggtgctttcaagaacaggagcagaagtcacaacaagcttcagttctacagggata

SEQ ID NO: 143290 - DNA, 76 bp, Homo sapiens
aagatcttcttcacaggtgctttcaagaacaggagcagaagtcacaacaagcttcagttctacagggatataaaaa

SEQ ID NO: 143291 - DNA, 76 bp, Homo sapiens
tttcaagaacaggagcagaagtcacaacaagcttcagttctacagggatataaaaatagaaaccaagatatgtctg

SEQ ID NO: 143292 - DNA, 76 bp, Homo sapiens
acaggagcagaagtcacaacaagcttcagttctacagggatataaaaatagaaaccaagatatgtctggtcaacaa

SEQ ID NO: 143293 - DNA, 76 bp, Homo sapiens
agtcacaacaagcttcagttctacagggatataaaaatagaaaccaagatatgtctggtcaacaagctgcgcaact

SEQ ID NO: 143294 - DNA, 78 bp, Homo sapiens
ttcagttctacagggatataaaaatagaaaccaagatatgtctggtcaacaagctgcgcaacttgctcagcaaaggta

SEQ ID NO: 143295 - DNA, 79 bp, Homo sapiens
cagggatataaaaatagaaaccaagatatgtctggtcaacaagctgcgcaacttgctcagcaaaggtacttgatacata

SEQ ID NO: 143296 - DNA, 79 bp, Homo sapiens
aaaatagaaaccaagatatgtctggtcaacaagctgcgcaacttgctcagcaaaggtacttgatacataaccatgcaaa

SEQ ID NO: 143297 - DNA, 78 bp, Homo sapiens
aaaccaagatatgtctggtcaacaagctgcgcaacttgctcagcaaaggtacttgatacataaccatgcaaatgtttt

SEQ ID NO: 143298 - DNA, 82 bp, Homo sapiens
atatgtctggtcaacaagctgcgcaacttgctcagcaaaggtacttgatacataaccatgcaaatgtttttcctgtgcctga

SEQ ID NO: 143299 - DNA, 78 bp, Homo sapiens
aacaagctgcgcaacttgctcagcaaaggtacttgatacataaccatgcaaatgtttttcctgtgcctgaccagggag

SEQ ID NO: 143300 - DNA, 76 bp, Homo sapiens
aacttgctcagcaaaggtacttgatacataaccatgcaaatgtttttcctgtgcctgaccagggaggaagtcacac

SEQ ID NO: 143301 - DNA, 75 bp, Homo sapiens
agcaaaggtacttgatacataaccatgcaaatgtttttcctgtgcctgaccagggaggaagtcacactcagaccc

SEQ ID NO: 143302 - DNA, 73 bp, Homo sapiens
ataaccatgcaaatgtttttcctgtgcctgaccagggaggaagtcacactcagacccctccccagaaggacac

SEQ ID NO: 143303 - DNA, 72 bp, Homo sapiens
aaatgtttttcctgtgcctgaccagggaggaagtcacactcagacccctccccagaaggacactcaaaagca

SEQ ID NO: 143304 - DNA, 78 bp, Homo sapiens
gggaggaagtcacactcagacccctccccagaaggacactcaaaagcatgctgctctaaggtggcatctcttacagaa

SEQ ID NO: 143305 - DNA, 80 bp, Homo sapiens
agacccctccccagaaggacactcaaaagcatgctgctctaaggtggcatctcttacagaagcaagaacagcagcaaaca

SEQ ID NO: 143306 - DNA, 81 bp, Homo sapiens
actcaaaagcatgctgctctaaggtggcatctcttacagaagcaagaacagcagcaaacacagcaaccccaaactgagtct

SEQ ID NO: 143307 - DNA, 82 bp, Homo sapiens
atctcttacagaagcaagaacagcagcaaacacagcaaccccaaactgagtcttgccatagtcagatgcacaggccaattaa

SEQ ID NO: 143308 - DNA, 78 bp, Homo sapiens
aagaacagcagcaaacacagcaaccccaaactgagtcttgccatagtcagatgcacaggccaattaaggtggaacctg

SEQ ID NO: 143309 - DNA, 80 bp, Homo sapiens
agcaaacacagcaaccccaaactgagtcttgccatagtcagatgcacaggccaattaaggtggaacctggatgcaagcca

SEQ ID NO: 143310 - DNA, 86 bp, Homo sapiens
aaactgagtcttgccatagtcagatgcacaggccaattaaggtggaacctggatgcaagccacatgcctgtatgcacacagcacca

SEQ ID NO: 143311 - DNA, 86 bp, Homo sapiens
tcttgccatagtcagatgcacaggccaattaaggtggaacctggatgcaagccacatgcctgtatgcacacagcaccaccagaaaa

SEQ ID NO: 143312 - DNA, 83 bp, Homo sapiens
gtcagatgcacaggccaattaaggtggaacctggatgcaagccacatgcctgtatgcacacagcaccaccagaaaacaaaaca

SEQ ID NO: 143313 - DNA, 77 bp, Homo sapiens
ccaattaaggtggaacctggatgcaagccacatgcctgtatgcacacagcaccaccagaaaacaaaacatggaaaaa

SEQ ID NO: 143314 - DNA, 77 bp, Homo sapiens
gtggaacctggatgcaagccacatgcctgtatgcacacagcaccaccagaaaacaaaacatggaaaaaggtaactaa

SEQ ID NO: 143315 - DNA, 79 bp, Homo sapiens
atgcaagccacatgcctgtatgcacacagcaccaccagaaaacaaaacatggaaaaaggtaactaagcaagagaatcca

SEQ ID NO: 143316 - DNA, 78 bp, Homo sapiens
tatgcacacagcaccaccagaaaacaaaacatggaaaaaggtaactaagcaagagaatccacctgcaagctgtgataa

SEQ ID NO: 143317 - DNA, 83 bp, Homo sapiens
acatggaaaaaggtaactaagcaagagaatccacctgcaagctgtgataatgtgcagcaaaagagcatcattgagaccatgga

SEQ ID NO: 143318 - DNA, 91 bp, Homo sapiens
taactaagcaagagaatccacctgcaagctgtgataatgtgcagcaaaagagcatcattgagaccatggagcagcatctgaagcagtttca

SEQ ID NO: 143319 - DNA, 89 bp, Homo sapiens
aagagaatccacctgcaagctgtgataatgtgcagcaaaagagcatcattgagaccatggagcagcatctgaagcagtttcacgccaag

SEQ ID NO: 143320 - DNA, 87 bp, Homo sapiens
ctgtgataatgtgcagcaaaagagcatcattgagaccatggagcagcatctgaagcagtttcacgccaagtcgttatttgaccataa

SEQ ID NO: 143321 - DNA, 82 bp, Homo sapiens
agcaaaagagcatcattgagaccatggagcagcatctgaagcagtttcacgccaagtcgttatttgaccataaggctcttac

SEQ ID NO: 143322 - DNA, 83 bp, Homo sapiens
aagagcatcattgagaccatggagcagcatctgaagcagtttcacgccaagtcgttatttgaccataaggctcttactctcaa

SEQ ID NO: 143323 - DNA, 82 bp, Homo sapiens
ttgagaccatggagcagcatctgaagcagtttcacgccaagtcgttatttgaccataaggctcttactctcaaatcacagaa

SEQ ID NO: 143324 - DNA, 77 bp, Homo sapiens
agcatctgaagcagtttcacgccaagtcgttatttgaccataaggctcttactctcaaatcacagaagcaagtaaaa

SEQ ID NO: 143325 - DNA, 74 bp, Homo sapiens
aagcagtttcacgccaagtcgttatttgaccataaggctcttactctcaaatcacagaagcaagtaaaagttga

SEQ ID NO: 143326 - DNA, 75 bp, Homo sapiens
ttcacgccaagtcgttatttgaccataaggctcttactctcaaatcacagaagcaagtaaaagttgaaatgtcag

SEQ ID NO: 143327 - DNA, 75 bp, Homo sapiens
tatttgaccataaggctcttactctcaaatcacagaagcaagtaaaagttgaaatgtcagggccagtcacagttt

SEQ ID NO: 143328 - DNA, 76 bp, Homo sapiens
ataaggctcttactctcaaatcacagaagcaagtaaaagttgaaatgtcagggccagtcacagttttgactagaca

SEQ ID NO: 143329 - DNA, 75 bp, Homo sapiens
tcttactctcaaatcacagaagcaagtaaaagttgaaatgtcagggccagtcacagttttgactagacaaaccac

SEQ ID NO: 143330 - DNA, 79 bp, Homo sapiens
tcacagaagcaagtaaaagttgaaatgtcagggccagtcacagttttgactagacaaaccactgctgcagaacttgata

SEQ ID NO: 143331 - DNA, 76 bp, Homo sapiens
agtaaaagttgaaatgtcagggccagtcacagttttgactagacaaaccactgctgcagaacttgatagccacacc

SEQ ID NO: 143332 - DNA, 79 bp, Homo sapiens
ttgaaatgtcagggccagtcacagttttgactagacaaaccactgctgcagaacttgatagccacaccccagctttaga

SEQ ID NO: 143333 - DNA, 79 bp, Homo sapiens
gggccagtcacagttttgactagacaaaccactgctgcagaacttgatagccacaccccagctttagagcagcaaacaa

SEQ ID NO: 143334 - DNA, 78 bp, Homo sapiens
acagttttgactagacaaaccactgctgcagaacttgatagccacaccccagctttagagcagcaaacaacttcttca

SEQ ID NO: 143335 - DNA, 76 bp, Homo sapiens
actgctgcagaacttgatagccacaccccagctttagagcagcaaacaacttcttcagaaaagacaccaaccaaaa

SEQ ID NO: 143336 - DNA, 73 bp, Homo sapiens
agaacttgatagccacaccccagctttagagcagcaaacaacttcttcagaaaagacaccaaccaaaagaaca

SEQ ID NO: 143337 - DNA, 75 bp, Homo sapiens
atagccacaccccagctttagagcagcaaacaacttcttcagaaaagacaccaaccaaaagaacagctgcttctg

SEQ ID NO: 143338 - DNA, 74 bp, Homo sapiens
agcaaacaacttcttcagaaaagacaccaaccaaaagaacagctgcttctgttctcaataattttatagagtca

SEQ ID NO: 143339 - DNA, 71 bp, Homo sapiens
agaaaagacaccaaccaaaagaacagctgcttctgttctcaataattttatagagtcaccttccaaattac

SEQ ID NO: 143340 - DNA, 73 bp, Homo sapiens
ccaaccaaaagaacagctgcttctgttctcaataattttatagagtcaccttccaaattactagatactccta

SEQ ID NO: 143341 - DNA, 70 bp, Homo sapiens
ttctcaataattttatagagtcaccttccaaattactagatactcctataaaaaatttattggatacacc

SEQ ID NO: 143342 - DNA, 72 bp, Homo sapiens
ttttatagagtcaccttccaaattactagatactcctataaaaaatttattggatacacctgtcaagactca

SEQ ID NO: 143343 - DNA, 73 bp, Homo sapiens
agagtcaccttccaaattactagatactcctataaaaaatttattggatacacctgtcaagactcaatatgat

SEQ ID NO: 143344 - DNA, 75 bp, Homo sapiens
ccaaattactagatactcctataaaaaatttattggatacacctgtcaagactcaatatgatttcccatcttgca

SEQ ID NO: 143345 - DNA, 76 bp, Homo sapiens
tactcctataaaaaatttattggatacacctgtcaagactcaatatgatttcccatcttgcagatgtgtaggtaag

SEQ ID NO: 143346 - DNA, 77 bp, Homo sapiens
aaaaatttattggatacacctgtcaagactcaatatgatttcccatcttgcagatgtgtaggtaagtgccagaaatg

SEQ ID NO: 143347 - DNA, 82 bp, Homo sapiens
tttattggatacacctgtcaagactcaatatgatttcccatcttgcagatgtgtaggtaagtgccagaaatgtactgagaca

SEQ ID NO: 143348 - DNA, 84 bp, Homo sapiens
tgtcaagactcaatatgatttcccatcttgcagatgtgtaggtaagtgccagaaatgtactgagacacatggcgtttatccaga

SEQ ID NO: 143349 - DNA, 81 bp, Homo sapiens
actcaatatgatttcccatcttgcagatgtgtaggtaagtgccagaaatgtactgagacacatggcgtttatccagaatta

SEQ ID NO: 143350 - DNA, 78 bp, Homo sapiens
atttcccatcttgcagatgtgtaggtaagtgccagaaatgtactgagacacatggcgtttatccagaattagcaaatt

SEQ ID NO: 143351 - DNA, 82 bp, Homo sapiens
tcttgcagatgtgtaggtaagtgccagaaatgtactgagacacatggcgtttatccagaattagcaaatttatcttcagata

SEQ ID NO: 143352 - DNA, 77 bp, Homo sapiens
taggtaagtgccagaaatgtactgagacacatggcgtttatccagaattagcaaatttatcttcagatatgggattt

SEQ ID NO: 143353 - DNA, 75 bp, Homo sapiens
cagaaatgtactgagacacatggcgtttatccagaattagcaaatttatcttcagatatgggattttccttcttt

SEQ ID NO: 143354 - DNA, 73 bp, Homo sapiens
gtactgagacacatggcgtttatccagaattagcaaatttatcttcagatatgggattttccttcttttttta

SEQ ID NO: 143355 - DNA, 71 bp, Homo sapiens
tccttctttttttaaatcttgagtctggcagcaatttgtaaaggctcataaaaatctgaagcttacatttt

SEQ ID NO: 143356 - DNA, 77 bp, Homo sapiens
tggcagcaatttgtaaaggctcataaaaatctgaagcttacattttttgtcaagttaccgatgcttgtgtcttgtga

SEQ ID NO: 143357 - DNA, 75 bp, Homo sapiens
cagcaatttgtaaaggctcataaaaatctgaagcttacattttttgtcaagttaccgatgcttgtgtcttgtgaa

SEQ ID NO: 143358 - DNA, 74 bp, Homo sapiens
gcaatttgtaaaggctcataaaaatctgaagcttacattttttgtcaagttaccgatgcttgtgtcttgtgaaa

SEQ ID NO: 143359 - DNA, 74 bp, Homo sapiens
tgtaaaggctcataaaaatctgaagcttacattttttgtcaagttaccgatgcttgtgtcttgtgaaagagaac

SEQ ID NO: 143360 - DNA, 75 bp, Homo sapiens
gctcataaaaatctgaagcttacattttttgtcaagttaccgatgcttgtgtcttgtgaaagagaacttcactta

SEQ ID NO: 143361 - DNA, 76 bp, Homo sapiens
taaaaatctgaagcttacattttttgtcaagttaccgatgcttgtgtcttgtgaaagagaacttcacttacatgca

SEQ ID NO: 143362 - DNA, 74 bp, Homo sapiens
ctgaagcttacattttttgtcaagttaccgatgcttgtgtcttgtgaaagagaacttcacttacatgcagtttt

SEQ ID NO: 143363 - DNA, 73 bp, Homo sapiens
aagcttacattttttgtcaagttaccgatgcttgtgtcttgtgaaagagaacttcacttacatgcagtttttc

SEQ ID NO: 143364 - DNA, 75 bp, Homo sapiens
cgatgcttgtgtcttgtgaaagagaacttcacttacatgcagtttttccaaaagaattaaataatcgtgcatgtt

SEQ ID NO: 143365 - DNA, 72 bp, Homo sapiens
gtgtcttgtgaaagagaacttcacttacatgcagtttttccaaaagaattaaataatcgtgcatgtttattt

SEQ ID NO: 143366 - DNA, 70 bp, Homo sapiens
gaaagagaacttcacttacatgcagtttttccaaaagaattaaataatcgtgcatgtttatttttccctc

SEQ ID NO: 143367 - DNA, 73 bp, Homo sapiens
cacttacatgcagtttttccaaaagaattaaataatcgtgcatgtttatttttccctctcttcagatcctgta

SEQ ID NO: 143368 - DNA, 69 bp, Homo sapiens
gcagtttttccaaaagaattaaataatcgtgcatgtttatttttccctctcttcagatcctgtaaaatt

SEQ ID NO: 143369 - DNA, 72 bp, Homo sapiens
ccaaaagaattaaataatcgtgcatgtttatttttccctctcttcagatcctgtaaaatttgaatgtatctg

SEQ ID NO: 143370 - DNA, 75 bp, Homo sapiens
taatcgtgcatgtttatttttccctctcttcagatcctgtaaaatttgaatgtatctgttttagatcaattcgcc

SEQ ID NO: 143371 - DNA, 75 bp, Homo sapiens
ttccctctcttcagatcctgtaaaatttgaatgtatctgttttagatcaattcgcctatttagctctttgtatat

SEQ ID NO: 143372 - DNA, 78 bp, Homo sapiens
aaatttgaatgtatctgttttagatcaattcgcctatttagctctttgtatattatctcctggagagacagctaggca

SEQ ID NO: 143373 - DNA, 78 bp, Homo sapiens
aatgtatctgttttagatcaattcgcctatttagctctttgtatattatctcctggagagacagctaggcagcaaaaa

SEQ ID NO: 143374 - DNA, 77 bp, Homo sapiens
ttttagatcaattcgcctatttagctctttgtatattatctcctggagagacagctaggcagcaaaaaaacaatcta

SEQ ID NO: 143375 - DNA, 75 bp, Homo sapiens
caattcgcctatttagctctttgtatattatctcctggagagacagctaggcagcaaaaaaacaatctattaaaa

SEQ ID NO: 143376 - DNA, 75 bp, Homo sapiens
gctctttgtatattatctcctggagagacagctaggcagcaaaaaaacaatctattaaaatgagaaaataacgac

SEQ ID NO: 143377 - DNA, 77 bp, Homo sapiens
tgtatattatctcctggagagacagctaggcagcaaaaaaacaatctattaaaatgagaaaataacgaccataggca

SEQ ID NO: 143378 - DNA, 72 bp, Homo sapiens
cagctaggcagcaaaaaaacaatctattaaaatgagaaaataacgaccataggcagtctaatgtacgaactt

SEQ ID NO: 143379 - DNA, 71 bp, Homo sapiens
gcagcaaaaaaacaatctattaaaatgagaaaataacgaccataggcagtctaatgtacgaactttaaata

SEQ ID NO: 143380 - DNA, 68 bp, Homo sapiens
aacaatctattaaaatgagaaaataacgaccataggcagtctaatgtacgaactttaaatatttttta

SEQ ID NO: 143381 - DNA, 67 bp, Homo sapiens
aatgagaaaataacgaccataggcagtctaatgtacgaactttaaatattttttaattcaaggtaaa

SEQ ID NO: 143382 - DNA, 67 bp, Homo sapiens
taaatattttttaattcaaggtaaaatatattagtttcacaagatttctggctaatagggaaattat

SEQ ID NO: 143383 - DNA, 72 bp, Homo sapiens
ttaattcaaggtaaaatatattagtttcacaagatttctggctaatagggaaattattatcttcagtcttca

SEQ ID NO: 143384 - DNA, 76 bp, Homo sapiens
aagatttctggctaatagggaaattattatcttcagtcttcatgagttgggggaaatgataatgctgacactctta

SEQ ID NO: 143385 - DNA, 77 bp, Homo sapiens
gctaatagggaaattattatcttcagtcttcatgagttgggggaaatgataatgctgacactcttagtgctcctaaa

SEQ ID NO: 143386 - DNA, 74 bp, Homo sapiens
aaattattatcttcagtcttcatgagttgggggaaatgataatgctgacactcttagtgctcctaaagtttcct

SEQ ID NO: 143387 - DNA, 75 bp, Homo sapiens
attatcttcagtcttcatgagttgggggaaatgataatgctgacactcttagtgctcctaaagtttccttttctc

SEQ ID NO: 143388 - DNA, 74 bp, Homo sapiens
ttcatgagttgggggaaatgataatgctgacactcttagtgctcctaaagtttccttttctccatttatacatt

SEQ ID NO: 143389 - DNA, 75 bp, Homo sapiens
gataatgctgacactcttagtgctcctaaagtttccttttctccatttatacatttggaatgttgtgatttatat

SEQ ID NO: 143390 - DNA, 72 bp, Homo sapiens
gacactcttagtgctcctaaagtttccttttctccatttatacatttggaatgttgtgatttatattcattt

SEQ ID NO: 143391 - DNA, 71 bp, Homo sapiens
agtgctcctaaagtttccttttctccatttatacatttggaatgttgtgatttatattcattttgattccc

SEQ ID NO: 143392 - DNA, 70 bp, Homo sapiens
tccttttctccatttatacatttggaatgttgtgatttatattcattttgattcccttttctctaaaatt

SEQ ID NO: 143393 - DNA, 72 bp, Homo sapiens
ttctccatttatacatttggaatgttgtgatttatattcattttgattcccttttctctaaaatttcatctt

SEQ ID NO: 143394 - DNA, 71 bp, Homo sapiens
atacatttggaatgttgtgatttatattcattttgattcccttttctctaaaatttcatctttttgattaa

SEQ ID NO: 143395 - DNA, 73 bp, Homo sapiens
tgtgatttatattcattttgattcccttttctctaaaatttcatctttttgattaaaaaatatgatacaggca

SEQ ID NO: 143396 - DNA, 72 bp, Homo sapiens
attcattttgattcccttttctctaaaatttcatctttttgattaaaaaatatgatacaggcatacctcaga

SEQ ID NO: 143397 - DNA, 77 bp, Homo sapiens
gattaaaaaatatgatacaggcatacctcagagatattgtgggtttggctccataccacaataaaatgaatattaca

SEQ ID NO: 143398 - DNA, 78 bp, Homo sapiens
aaatatgatacaggcatacctcagagatattgtgggtttggctccataccacaataaaatgaatattacaataaagca

SEQ ID NO: 143399 - DNA, 75 bp, Homo sapiens
aggcatacctcagagatattgtgggtttggctccataccacaataaaatgaatattacaataaagcaagttgtaa

SEQ ID NO: 143400 - DNA, 73 bp, Homo sapiens
ctcagagatattgtgggtttggctccataccacaataaaatgaatattacaataaagcaagttgtaaggactt

SEQ ID NO: 143401 - DNA, 69 bp, Homo sapiens
ccacaataaaatgaatattacaataaagcaagttgtaaggactttttggtttctcactgtatgtaaaag

SEQ ID NO: 143402 - DNA, 69 bp, Homo sapiens
gaatattacaataaagcaagttgtaaggactttttggtttctcactgtatgtaaaagttatttatatac

SEQ ID NO: 143403 - DNA, 70 bp, Homo sapiens
aagcaagttgtaaggactttttggtttctcactgtatgtaaaagttatttatatactatactgtaacata

SEQ ID NO: 143404 - DNA, 73 bp, Homo sapiens
tgtaaggactttttggtttctcactgtatgtaaaagttatttatatactatactgtaacatactaagtgtgca

SEQ ID NO: 143405 - DNA, 76 bp, Homo sapiens
ttttggtttctcactgtatgtaaaagttatttatatactatactgtaacatactaagtgtgcaatagcattgtgtc

SEQ ID NO: 143406 - DNA, 76 bp, Homo sapiens
ttctcactgtatgtaaaagttatttatatactatactgtaacatactaagtgtgcaatagcattgtgtctaaaaaa

SEQ ID NO: 143407 - DNA, 73 bp, Homo sapiens
aaaagttatttatatactatactgtaacatactaagtgtgcaatagcattgtgtctaaaaaatatatacttta

SEQ ID NO: 143408 - DNA, 68 bp, Homo sapiens
tactttaaaaataatttattgttaaaaaaatgccaacaattatctgggcctttagtgagtgctaatct

SEQ ID NO: 143409 - DNA, 68 bp, Homo sapiens
aaaaataatttattgttaaaaaaatgccaacaattatctgggcctttagtgagtgctaatctttttgc

SEQ ID NO: 143410 - DNA, 78 bp, Homo sapiens
atgccaacaattatctgggcctttagtgagtgctaatctttttgctggtggagggtcgtgcttcagtattgatcgctg

SEQ ID NO: 143411 - DNA, 78 bp, Homo sapiens
aattatctgggcctttagtgagtgctaatctttttgctggtggagggtcgtgcttcagtattgatcgctgtggactga

SEQ ID NO: 143412 - DNA, 79 bp, Homo sapiens
ctttagtgagtgctaatctttttgctggtggagggtcgtgcttcagtattgatcgctgtggactgatcatggtggtagt

SEQ ID NO: 143413 - DNA, 80 bp, Homo sapiens
agtgctaatctttttgctggtggagggtcgtgcttcagtattgatcgctgtggactgatcatggtggtagttgctgaagg

SEQ ID NO: 143414 - DNA, 84 bp, Homo sapiens
ttgctggtggagggtcgtgcttcagtattgatcgctgtggactgatcatggtggtagttgctgaaggttgctgggatggctgtg

SEQ ID NO: 143415 - DNA, 83 bp, Homo sapiens
ggtggagggtcgtgcttcagtattgatcgctgtggactgatcatggtggtagttgctgaaggttgctgggatggctgtgtgtg

SEQ ID NO: 143416 - DNA, 84 bp, Homo sapiens
cgtgcttcagtattgatcgctgtggactgatcatggtggtagttgctgaaggttgctgggatggctgtgtgtgtggcaatttct

SEQ ID NO: 143417 - DNA, 83 bp, Homo sapiens
catgcaatgctgtttgatagcatttaacccacagcagaatttctttgaaaattggactcagtcctctcaaactgtgctgctgc

SEQ ID NO: 143418 - DNA, 79 bp, Homo sapiens
atgctgtttgatagcatttaacccacagcagaatttctttgaaaattggactcagtcctctcaaactgtgctgctgctt

SEQ ID NO: 143419 - DNA, 78 bp, Homo sapiens
atagcatttaacccacagcagaatttctttgaaaattggactcagtcctctcaaactgtgctgctgctttatcaacta

SEQ ID NO: 143420 - DNA, 77 bp, Homo sapiens
gtttttgtaattttctgaatcctttgttgtcatttcagcagtttacagcatcttcattggaagtatattccatctca

SEQ ID NO: 143421 - DNA, 78 bp, Homo sapiens
ttttctgaatcctttgttgtcatttcagcagtttacagcatcttcattggaagtatattccatctcaaacattctttg

SEQ ID NO: 143422 - DNA, 80 bp, Homo sapiens
tcctttgttgtcatttcagcagtttacagcatcttcattggaagtatattccatctcaaacattctttgttcatccataa

SEQ ID NO: 143423 - DNA, 79 bp, Homo sapiens
cctttgttgtcatttcagcagtttacagcatcttcattggaagtatattccatctcaaacattctttgttcatccataa

SEQ ID NO: 143424 - DNA, 81 bp, Homo sapiens
gttgtcatttcagcagtttacagcatcttcattggaagtatattccatctcaaacattctttgttcatccataagaagcaa

SEQ ID NO: 143425 - DNA, 80 bp, Homo sapiens
gcagtttacagcatcttcattggaagtatattccatctcaaacattctttgttcatccataagaagcaacttcttatcaa

SEQ ID NO: 143426 - DNA, 77 bp, Homo sapiens
cagcatcttcattggaagtatattccatctcaaacattctttgttcatccataagaagcaacttcttatcaagtttt

SEQ ID NO: 143427 - DNA, 79 bp, Homo sapiens
tggaagtatattccatctcaaacattctttgttcatccataagaagcaacttcttatcaagttttttcatgacattgca

SEQ ID NO: 143428 - DNA, 78 bp, Homo sapiens
catctcaaacattctttgttcatccataagaagcaacttcttatcaagttttttcatgacattgcagtaactcagccc

SEQ ID NO: 143429 - DNA, 76 bp, Homo sapiens
aacattctttgttcatccataagaagcaacttcttatcaagttttttcatgacattgcagtaactcagccccatct

SEQ ID NO: 143430 - DNA, 79 bp, Homo sapiens
catccataagaagcaacttcttatcaagttttttcatgacattgcagtaactcagccccatcttcaggctctacttcta

SEQ ID NO: 143431 - DNA, 76 bp, Homo sapiens
ataagaagcaacttcttatcaagttttttcatgacattgcagtaactcagccccatcttcaggctctacttctaat

SEQ ID NO: 143432 - DNA, 76 bp, Homo sapiens
acttcttatcaagttttttcatgacattgcagtaactcagccccatcttcaggctctacttctaattctggttctc

SEQ ID NO: 143433 - DNA, 80 bp, Homo sapiens
tcttcaggctctacttctaattctggttctcttgctacatctccctcatctgcagtgacctctccacggaagtcttgaac

SEQ ID NO: 143434 - DNA, 78 bp, Homo sapiens
aggctctacttctaattctggttctcttgctacatctccctcatctgcagtgacctctccacggaagtcttgaactcc

SEQ ID NO: 143435 - DNA, 79 bp, Homo sapiens
taattctggttctcttgctacatctccctcatctgcagtgacctctccacggaagtcttgaactcctcaaagtaatcca

SEQ ID NO: 143436 - DNA, 80 bp, Homo sapiens
ttctggttctcttgctacatctccctcatctgcagtgacctctccacggaagtcttgaactcctcaaagtaatccatgag

SEQ ID NO: 143437 - DNA, 79 bp, Homo sapiens
ttctcttgctacatctccctcatctgcagtgacctctccacggaagtcttgaactcctcaaagtaatccatgagggttg

SEQ ID NO: 143438 - DNA, 74 bp, Homo sapiens
ctcctgttaatgttgatatattgaccccctcccatgaattatgaatgttcttaataacttctaaatggtgatac

SEQ ID NO: 143439 - DNA, 74 bp, Homo sapiens
tgttgatatattgaccccctcccatgaattatgaatgttcttaataacttctaaatggtgatacctttccagaa

SEQ ID NO: 143440 - DNA, 72 bp, Homo sapiens
atatattgaccccctcccatgaattatgaatgttcttaataacttctaaatggtgatacctttccagaaggc

SEQ ID NO: 143441 - DNA, 72 bp, Homo sapiens
cctcccatgaattatgaatgttcttaataacttctaaatggtgatacctttccagaaggctttcaatgtact

SEQ ID NO: 143442 - DNA, 71 bp, Homo sapiens
attatgaatgttcttaataacttctaaatggtgatacctttccagaaggctttcaatgtactttgcccgga

SEQ ID NO: 143443 - DNA, 73 bp, Homo sapiens
ttaataacttctaaatggtgatacctttccagaaggctttcaatgtactttgcccggatccatcagaagacta

SEQ ID NO: 143444 - DNA, 73 bp, Homo sapiens
aacttctaaatggtgatacctttccagaaggctttcaatgtactttgcccggatccatcagaagactatcttg

SEQ ID NO: 143445 - DNA, 77 bp, Homo sapiens
agaaggctttcaatgtactttgcccggatccatcagaagactatcttggcagctgtagactaacaatatatttctta

SEQ ID NO: 143446 - DNA, 78 bp, Homo sapiens
tttcaatgtactttgcccggatccatcagaagactatcttggcagctgtagactaacaatatatttcttaaatgataa

SEQ ID NO: 143447 - DNA, 78 bp, Homo sapiens
tactttgcccggatccatcagaagactatcttggcagctgtagactaacaatatatttcttaaatgataagacttgaa

SEQ ID NO: 143448 - DNA, 77 bp, Homo sapiens
ccggatccatcagaagactatcttggcagctgtagactaacaatatatttcttaaatgataagacttgaaagtcaaa

SEQ ID NO: 143449 - DNA, 77 bp, Homo sapiens
ggatccatcagaagactatcttggcagctgtagactaacaatatatttcttaaatgataagacttgaaagtcaaaag

SEQ ID NO: 143450 - DNA, 74 bp, Homo sapiens
atttcttaaatgataagacttgaaagtcaaaagtactccttaatccataggctgcagaatcaatgttgtattaa

SEQ ID NO: 143451 - DNA, 75 bp, Homo sapiens
tttcttaaatgataagacttgaaagtcaaaagtactccttaatccataggctgcagaatcaatgttgtattaaca

SEQ ID NO: 143452 - DNA, 77 bp, Homo sapiens
taaatgataagacttgaaagtcaaaagtactccttaatccataggctgcagaatcaatgttgtattaacaggcacga

SEQ ID NO: 143453 - DNA, 76 bp, Homo sapiens
ttgaaagtcaaaagtactccttaatccataggctgcagaatcaatgttgtattaacaggcacgaaaacagcattaa

SEQ ID NO: 143454 - DNA, 78 bp, Homo sapiens
aaaagtactccttaatccataggctgcagaatcaatgttgtattaacaggcacgaaaacagcattaatcttgtgcatc

SEQ ID NO: 143455 - DNA, 83 bp, Homo sapiens
ttaatccataggctgcagaatcaatgttgtattaacaggcacgaaaacagcattaatcttgtgcatctccatcggagctcttg

SEQ ID NO: 143456 - DNA, 82 bp, Homo sapiens
ataggctgcagaatcaatgttgtattaacaggcacgaaaacagcattaatcttgtgcatctccatcggagctcttgggtgac

SEQ ID NO: 143457 - DNA, 79 bp, Homo sapiens
aatgttgtattaacaggcacgaaaacagcattaatcttgtgcatctccatcggagctcttgggtgactaggtgccttga

SEQ ID NO: 143458 - DNA, 81 bp, Homo sapiens
tattaacaggcacgaaaacagcattaatcttgtgcatctccatcggagctcttgggtgactaggtgccttgagcagtaata

SEQ ID NO: 143459 - DNA, 80 bp, Homo sapiens
ggcacgaaaacagcattaatcttgtgcatctccatcggagctcttgggtgactaggtgccttgagcagtaatattttgaa

SEQ ID NO: 143460 - DNA, 75 bp, Homo sapiens
aatattcagtaaactatgttgtaaaaagatgtgttatcatccagactttgttgttccattactctacacaagcag

SEQ ID NO: 143461 - DNA, 74 bp, Homo sapiens
taaactatgttgtaaaaagatgtgttatcatccagactttgttgttccattactctacacaagcagggtacact

SEQ ID NO: 143462 - DNA, 76 bp, Homo sapiens
atgttgtaaaaagatgtgttatcatccagactttgttgttccattactctacacaagcagggtacacttagcataa

SEQ ID NO: 143463 - DNA, 75 bp, Homo sapiens
aagatgtgttatcatccagactttgttgttccattactctacacaagcagggtacacttagcataattcttaagg

SEQ ID NO: 143464 - DNA, 72 bp, Homo sapiens
tttgttgttccattactctacacaagcagggtacacttagcataattcttaagggccttggaattttcagaa

SEQ ID NO: 143465 - DNA, 78 bp, Homo sapiens
cagcctgtcctttgaagcaaggcattgacttctatctatgaaagtcttagatggcaccttgtttcaatagtaggctgt

SEQ ID NO: 143466 - DNA, 77 bp, Homo sapiens
ctttgaagcaaggcattgacttctatctatgaaagtcttagatggcaccttgtttcaatagtaggctgtttagtaca

SEQ ID NO: 143467 - DNA, 75 bp, Homo sapiens
aaggcattgacttctatctatgaaagtcttagatggcaccttgtttcaatagtaggctgtttagtacagccacct

SEQ ID NO: 143468 - DNA, 78 bp, Homo sapiens
acttctatctatgaaagtcttagatggcaccttgtttcaatagtaggctgtttagtacagccaccttcatcagtgatc

SEQ ID NO: 143469 - DNA, 79 bp, Homo sapiens
ctatgaaagtcttagatggcaccttgtttcaatagtaggctgtttagtacagccaccttcatcagtgatcttagctaga

SEQ ID NO: 143470 - DNA, 77 bp, Homo sapiens
tacatcagcacttgctgcctcaccttgtccttttatgttatagagacagctgcgcttcttaaactttataaaccaac

SEQ ID NO: 143471 - DNA, 74 bp, Homo sapiens
acttgctgcctcaccttgtccttttatgttatagagacagctgcgcttcttaaactttataaaccaacttctgc

SEQ ID NO: 143472 - DNA, 74 bp, Homo sapiens
tcaccttgtccttttatgttatagagacagctgcgcttcttaaactttataaaccaacttctgctagcttccaa

SEQ ID NO: 143473 - DNA, 73 bp, Homo sapiens
tccttttatgttatagagacagctgcgcttcttaaactttataaaccaacttctgctagcttccaacttctct

SEQ ID NO: 143474 - DNA, 80 bp, Homo sapiens
acttctgctagcttccaacttctcttctgcagcttcctcattctcttcatagaactgaagggagtcaaggccttgctctg

SEQ ID NO: 143475 - DNA, 79 bp, Homo sapiens
ctagcttccaacttctcttctgcagcttcctcattctcttcatagaactgaagggagtcaaggccttgctctggattaa

SEQ ID NO: 143476 - DNA, 79 bp, Homo sapiens
tctgcagcttcctcattctcttcatagaactgaagggagtcaaggccttgctctggattaagctttggcttaaggaatg

SEQ ID NO: 143477 - DNA, 75 bp, Homo sapiens
cttcctcattctcttcatagaactgaagggagtcaaggccttgctctggattaagctttggcttaaggaatgttg

SEQ ID NO: 143478 - DNA, 75 bp, Homo sapiens
tattgttgtgttttagggaatagagaggcccagggagagggagagagcccaaacggctggttgatagagcaggca

SEQ ID NO: 143479 - DNA, 77 bp, Homo sapiens
ttttagggaatagagaggcccagggagagggagagagcccaaacggctggttgatagagcaggcagaatgcacacaa

SEQ ID NO: 143480 - DNA, 81 bp, Homo sapiens
tagagaggcccagggagagggagagagcccaaacggctggttgatagagcaggcagaatgcacacaacatttatcagatta

SEQ ID NO: 143481 - DNA, 81 bp, Homo sapiens
agggagagggagagagcccaaacggctggttgatagagcaggcagaatgcacacaacatttatcagattatgtttgcacca

SEQ ID NO: 143482 - DNA, 81 bp, Homo sapiens
agagagcccaaacggctggttgatagagcaggcagaatgcacacaacatttatcagattatgtttgcaccatttaccagat

SEQ ID NO: 143483 - DNA, 80 bp, Homo sapiens
aaacggctggttgatagagcaggcagaatgcacacaacatttatcagattatgtttgcaccatttaccagattatgggta

SEQ ID NO: 143484 - DNA, 80 bp, Homo sapiens
gttgatagagcaggcagaatgcacacaacatttatcagattatgtttgcaccatttaccagattatgggtacggtttgtg

SEQ ID NO: 143485 - DNA, 78 bp, Homo sapiens
agcaggcagaatgcacacaacatttatcagattatgtttgcaccatttaccagattatgggtacggtttgtggcaccc

SEQ ID NO: 143486 - DNA, 71 bp, Homo sapiens
acacaacatttatcagattatgtttgcaccatttaccagattatgggtacggtttgtggcaccccccaaaa

SEQ ID NO: 143487 - DNA, 71 bp, Homo sapiens
ttatcagattatgtttgcaccatttaccagattatgggtacggtttgtggcaccccccaaaaattagaata

SEQ ID NO: 143488 - DNA, 68 bp, Homo sapiens
attatgtttgcaccatttaccagattatgggtacggtttgtggcaccccccaaaaattagaatagtaa

SEQ ID NO: 143489 - DNA, 69 bp, Homo sapiens
accatttaccagattatgggtacggtttgtggcaccccccaaaaattagaatagtaacatcaaagatca

SEQ ID NO: 143490 - DNA, 78 bp, Homo sapiens
tgagcacatgctgttgaaaaaaatgacactgatagacatacttaacacgtgggattgccacaaaccttcagtttgtaa

SEQ ID NO: 143491 - DNA, 73 bp, Homo sapiens
atgctgttgaaaaaaatgacactgatagacatacttaacacgtgggattgccacaaaccttcagtttgtaaaa

SEQ ID NO: 143492 - DNA, 72 bp, Homo sapiens
aaaaatgacactgatagacatacttaacacgtgggattgccacaaaccttcagtttgtaaaagtcacagtaa

SEQ ID NO: 143493 - DNA, 75 bp, Homo sapiens
tgatagacatacttaacacgtgggattgccacaaaccttcagtttgtaaaagtcacagtaactgtgactcacaaa

SEQ ID NO: 143494 - DNA, 71 bp, Homo sapiens
atacttaacacgtgggattgccacaaaccttcagtttgtaaaagtcacagtaactgtgactcacaaaagaa

SEQ ID NO: 143495 - DNA, 73 bp, Homo sapiens
tgggattgccacaaaccttcagtttgtaaaagtcacagtaactgtgactcacaaaagaacaaagcacaataaa

SEQ ID NO: 143496 - DNA, 70 bp, Homo sapiens
caaaccttcagtttgtaaaagtcacagtaactgtgactcacaaaagaacaaagcacaataaaacgaggta

SEQ ID NO: 143497 - DNA, 73 bp, Homo sapiens
ttcagtttgtaaaagtcacagtaactgtgactcacaaaagaacaaagcacaataaaacgaggtatgcctgtat

SEQ ID NO: 143498 - DNA, 71 bp, Homo sapiens
gtttgtaaaagtcacagtaactgtgactcacaaaagaacaaagcacaataaaacgaggtatgcctgtattt

SEQ ID NO: 143499 - DNA, 70 bp, Homo sapiens
aaaagtcacagtaactgtgactcacaaaagaacaaagcacaataaaacgaggtatgcctgtatttttaaa

SEQ ID NO: 143500 - DNA, 68 bp, Homo sapiens
agtaactgtgactcacaaaagaacaaagcacaataaaacgaggtatgcctgtatttttaaaaaaagct

SEQ ID NO: 143501 - DNA, 69 bp, Homo sapiens
tgcctgtatttttaaaaaaagctttttgttaaaattcaggatatgtaataggtctgtaggaatagtgaa

SEQ ID NO: 143502 - DNA, 71 bp, Homo sapiens
aaaaagctttttgttaaaattcaggatatgtaataggtctgtaggaatagtgaaatatttttgctgatgga

SEQ ID NO: 143503 - DNA, 77 bp, Homo sapiens
ttgttaaaattcaggatatgtaataggtctgtaggaatagtgaaatatttttgctgatggatgtagatatatacgtg

SEQ ID NO: 143504 - DNA, 82 bp, Homo sapiens
ttcaggatatgtaataggtctgtaggaatagtgaaatatttttgctgatggatgtagatatatacgtggatagagatgaaga

SEQ ID NO: 143505 - DNA, 79 bp, Homo sapiens
gtaataggtctgtaggaatagtgaaatatttttgctgatggatgtagatatatacgtggatagagatgaagatcttaat

SEQ ID NO: 143506 - DNA, 85 bp, Homo sapiens
gtaggaatagtgaaatatttttgctgatggatgtagatatatacgtggatagagatgaagatcttaattatagctatgcagcata

SEQ ID NO: 143507 - DNA, 84 bp, Homo sapiens
gatggatgtagatatatacgtggatagagatgaagatcttaattatagctatgcagcatagatttagtcaaagacatttgaaaa

SEQ ID NO: 143508 - DNA, 82 bp, Homo sapiens
gatatatacgtggatagagatgaagatcttaattatagctatgcagcatagatttagtcaaagacatttgaaaagacaaatg

SEQ ID NO: 143509 - DNA, 78 bp, Homo sapiens
agagatgaagatcttaattatagctatgcagcatagatttagtcaaagacatttgaaaagacaaatgttaaattagtg

SEQ ID NO: 143510 - DNA, 76 bp, Homo sapiens
atagctatgcagcatagatttagtcaaagacatttgaaaagacaaatgttaaattagtgtggctaatgacctaccc

SEQ ID NO: 143511 - DNA, 74 bp, Homo sapiens
gcatagatttagtcaaagacatttgaaaagacaaatgttaaattagtgtggctaatgacctacccgtgccatgt

SEQ ID NO: 143512 - DNA, 71 bp, Homo sapiens
tttagtcaaagacatttgaaaagacaaatgttaaattagtgtggctaatgacctacccgtgccatgttttc

SEQ ID NO: 143513 - DNA, 73 bp, Homo sapiens
atttgaaaagacaaatgttaaattagtgtggctaatgacctacccgtgccatgttttccctcttgcaatgaga

SEQ ID NO: 143514 - DNA, 75 bp, Homo sapiens
ttaaattagtgtggctaatgacctacccgtgccatgttttccctcttgcaatgagataccccacactgtgtagaa

SEQ ID NO: 143515 - DNA, 76 bp, Homo sapiens
gtgtggctaatgacctacccgtgccatgttttccctcttgcaatgagataccccacactgtgtagaaggatggagg

SEQ ID NO: 143516 - DNA, 76 bp, Homo sapiens
tcttgcaatgagataccccacactgtgtagaaggatggagggaggactcctactgtccctctttgcgtgtggttat

SEQ ID NO: 143517 - DNA, 73 bp, Homo sapiens
aatgagataccccacactgtgtagaaggatggagggaggactcctactgtccctctttgcgtgtggttattaa

SEQ ID NO: 143518 - DNA, 73 bp, Homo sapiens
acactgtgtagaaggatggagggaggactcctactgtccctctttgcgtgtggttattaagttgcctcactgg

SEQ ID NO: 143519 - DNA, 73 bp, Homo sapiens
tgtagaaggatggagggaggactcctactgtccctctttgcgtgtggttattaagttgcctcactgggctaaa

SEQ ID NO: 143520 - DNA, 75 bp, Homo sapiens
ggaggactcctactgtccctctttgcgtgtggttattaagttgcctcactgggctaaaacaccacacatctcata

SEQ ID NO: 143521 - DNA, 74 bp, Homo sapiens
tggttattaagttgcctcactgggctaaaacaccacacatctcatagataatatttggtaagttgtaatcgtct

SEQ ID NO: 143522 - DNA, 75 bp, Homo sapiens
actgggctaaaacaccacacatctcatagataatatttggtaagttgtaatcgtcttcactcttctcttatcacc

SEQ ID NO: 143523 - DNA, 74 bp, Homo sapiens
aaacaccacacatctcatagataatatttggtaagttgtaatcgtcttcactcttctcttatcacccaccccta

SEQ ID NO: 143524 - DNA, 72 bp, Homo sapiens
tcatagataatatttggtaagttgtaatcgtcttcactcttctcttatcacccacccctatcttcccacttt

SEQ ID NO: 143525 - DNA, 70 bp, Homo sapiens
ataatatttggtaagttgtaatcgtcttcactcttctcttatcacccacccctatcttcccacttttcca

SEQ ID NO: 143526 - DNA, 70 bp, Homo sapiens
taagttgtaatcgtcttcactcttctcttatcacccacccctatcttcccacttttccatctttgttggt

SEQ ID NO: 143527 - DNA, 72 bp, Homo sapiens
aatcgtcttcactcttctcttatcacccacccctatcttcccacttttccatctttgttggtttgcaacagc

SEQ ID NO: 143528 - DNA, 68 bp, Homo sapiens
ttctcttatcacccacccctatcttcccacttttccatctttgttggtttgcaacagccccttctttt

SEQ ID NO: 143529 - DNA, 70 bp, Homo sapiens
tatcacccacccctatcttcccacttttccatctttgttggtttgcaacagccccttctttttgcctgac

SEQ ID NO: 143530 - DNA, 71 bp, Homo sapiens
tatcttcccacttttccatctttgttggtttgcaacagccccttctttttgcctgactctccaggattttc

SEQ ID NO: 143531 - DNA, 73 bp, Homo sapiens
ttttccatctttgttggtttgcaacagccccttctttttgcctgactctccaggattttctctcatcataaat

SEQ ID NO: 143532 - DNA, 73 bp, Homo sapiens
tttgttggtttgcaacagccccttctttttgcctgactctccaggattttctctcatcataaattgttctaaa

SEQ ID NO: 143533 - DNA, 74 bp, Homo sapiens
caacagccccttctttttgcctgactctccaggattttctctcatcataaattgttctaaagtacatactaata

SEQ ID NO: 143534 - DNA, 75 bp, Homo sapiens
ttctttttgcctgactctccaggattttctctcatcataaattgttctaaagtacatactaatatgggtctggat

SEQ ID NO: 143535 - DNA, 77 bp, Homo sapiens
ttctctcatcataaattgttctaaagtacatactaatatgggtctggattgactattcttatttgcaaaacagcaat

SEQ ID NO: 143536 - DNA, 73 bp, Homo sapiens
agtacatactaatatgggtctggattgactattcttatttgcaaaacagcaattaaatgttatagggaagtag

SEQ ID NO: 143537 - DNA, 73 bp, Homo sapiens
atactaatatgggtctggattgactattcttatttgcaaaacagcaattaaatgttatagggaagtaggaaga

SEQ ID NO: 143538 - DNA, 69 bp, Homo sapiens
gggtctggattgactattcttatttgcaaaacagcaattaaatgttatagggaagtaggaagaaaaagg

SEQ ID NO: 143539 - DNA, 69 bp, Homo sapiens
ctattcttatttgcaaaacagcaattaaatgttatagggaagtaggaagaaaaaggggtatccttgaca

SEQ ID NO: 143540 - DNA, 70 bp, Homo sapiens
tgcaaaacagcaattaaatgttatagggaagtaggaagaaaaaggggtatccttgacaataaaccaagca

SEQ ID NO: 143541 - DNA, 69 bp, Homo sapiens
gcaattaaatgttatagggaagtaggaagaaaaaggggtatccttgacaataaaccaagcaatattctg

SEQ ID NO: 143542 - DNA, 66 bp, Homo sapiens
aatgttatagggaagtaggaagaaaaaggggtatccttgacaataaaccaagcaatattctggggg

SEQ ID NO: 143543 - DNA, 69 bp, Homo sapiens
taggaagaaaaaggggtatccttgacaataaaccaagcaatattctgggggtgggatagagcaggaaat

SEQ ID NO: 143544 - DNA, 67 bp, Homo sapiens
aaaaaggggtatccttgacaataaaccaagcaatattctgggggtgggatagagcaggaaattttat

SEQ ID NO: 143545 - DNA, 69 bp, Homo sapiens
gtatccttgacaataaaccaagcaatattctgggggtgggatagagcaggaaattttatttttaatctt

SEQ ID NO: 143546 - DNA, 63 bp, Homo sapiens
tttatttttaatcttttaaaatccaagtaataggtaggcttccagttagctttaaatgttttt

SEQ ID NO: 143547 - DNA, 66 bp, Homo sapiens
atccaagtaataggtaggcttccagttagctttaaatgttttttttttccagctcaaaaaattgga

SEQ ID NO: 143548 - DNA, 68 bp, Homo sapiens
taggtaggcttccagttagctttaaatgttttttttttccagctcaaaaaattggattgtagttgata

SEQ ID NO: 143549 - DNA, 69 bp, Homo sapiens
ggcttccagttagctttaaatgttttttttttccagctcaaaaaattggattgtagttgatactacata

SEQ ID NO: 143550 - DNA, 70 bp, Homo sapiens
gctttaaatgttttttttttccagctcaaaaaattggattgtagttgatactacatataatacattctaa

SEQ ID NO: 143551 - DNA, 73 bp, Homo sapiens
tttttttccagctcaaaaaattggattgtagttgatactacatataatacattctaattccctcactgtattc

SEQ ID NO: 143552 - DNA, 74 bp, Homo sapiens
ccagctcaaaaaattggattgtagttgatactacatataatacattctaattccctcactgtattctttgttta

SEQ ID NO: 143553 - DNA, 72 bp, Homo sapiens
aaaaattggattgtagttgatactacatataatacattctaattccctcactgtattctttgtttagtttca

SEQ ID NO: 143554 - DNA, 72 bp, Homo sapiens
ttgtagttgatactacatataatacattctaattccctcactgtattctttgtttagtttcatttatttggt

SEQ ID NO: 143555 - DNA, 70 bp, Homo sapiens
tactacatataatacattctaattccctcactgtattctttgtttagtttcatttatttggtttaaaata

SEQ ID NO: 143556 - DNA, 65 bp, Homo sapiens
aatacattctaattccctcactgtattctttgtttagtttcatttatttggtttaaaataatttt

SEQ ID NO: 143557 - DNA, 72 bp, Homo sapiens
aaataattttttatcccatatctgaaatgtaatatatttttatccaacaaccagcatgtacatatacttaat

SEQ ID NO: 143558 - DNA, 79 bp, Homo sapiens
tctgaaatgtaatatatttttatccaacaaccagcatgtacatatacttaattatgtggcacattttctaatagatcag

SEQ ID NO: 143559 - DNA, 79 bp, Homo sapiens
aatatatttttatccaacaaccagcatgtacatatacttaattatgtggcacattttctaatagatcagtccatcaatc

SEQ ID NO: 143560 - DNA, 80 bp, Homo sapiens
tttatccaacaaccagcatgtacatatacttaattatgtggcacattttctaatagatcagtccatcaatctactcattt

SEQ ID NO: 143561 - DNA, 79 bp, Homo sapiens
aacaaccagcatgtacatatacttaattatgtggcacattttctaatagatcagtccatcaatctactcattttaaaga

SEQ ID NO: 143562 - DNA, 75 bp, Homo sapiens
atgtacatatacttaattatgtggcacattttctaatagatcagtccatcaatctactcattttaaagaaaaaaa

SEQ ID NO: 143563 - DNA, 64 bp, Homo sapiens
aaaaaaattttaaagtcacttttagagcccttaatgtgtagttgggggttaagctttgtggatg

SEQ ID NO: 143564 - DNA, 69 bp, Homo sapiens
taaagtcacttttagagcccttaatgtgtagttgggggttaagctttgtggatgtagcctttatattta

SEQ ID NO: 143565 - DNA, 70 bp, Homo sapiens
tcacttttagagcccttaatgtgtagttgggggttaagctttgtggatgtagcctttatatttagtataa

SEQ ID NO: 143566 - DNA, 69 bp, Homo sapiens
cccttaatgtgtagttgggggttaagctttgtggatgtagcctttatatttagtataattgaggtctaa

SEQ ID NO: 143567 - DNA, 69 bp, Homo sapiens
aatgtgtagttgggggttaagctttgtggatgtagcctttatatttagtataattgaggtctaaaataa

SEQ ID NO: 143568 - DNA, 69 bp, Homo sapiens
gtgtagttgggggttaagctttgtggatgtagcctttatatttagtataattgaggtctaaaataataa

SEQ ID NO: 143569 - DNA, 71 bp, Homo sapiens
gggttaagctttgtggatgtagcctttatatttagtataattgaggtctaaaataataatcttctattatc

SEQ ID NO: 143570 - DNA, 76 bp, Homo sapiens
agctttgtggatgtagcctttatatttagtataattgaggtctaaaataataatcttctattatctcaacagagca

SEQ ID NO: 143571 - DNA, 76 bp, Homo sapiens
tgtggatgtagcctttatatttagtataattgaggtctaaaataataatcttctattatctcaacagagcaaatta

SEQ ID NO: 143572 - DNA, 76 bp, Homo sapiens
gatgtagcctttatatttagtataattgaggtctaaaataataatcttctattatctcaacagagcaaattattga

SEQ ID NO: 143573 - DNA, 73 bp, Homo sapiens
agcctttatatttagtataattgaggtctaaaataataatcttctattatctcaacagagcaaattattgaaa

SEQ ID NO: 143574 - DNA, 73 bp, Homo sapiens
tttagtataattgaggtctaaaataataatcttctattatctcaacagagcaaattattgaaaaagatgaagg

SEQ ID NO: 143575 - DNA, 72 bp, Homo sapiens
aaataataatcttctattatctcaacagagcaaattattgaaaaagatgaaggtcctttttatacccatcta

SEQ ID NO: 143576 - DNA, 73 bp, Homo sapiens
attatctcaacagagcaaattattgaaaaagatgaaggtcctttttatacccatctaggagcaggtcctaatg

SEQ ID NO: 143577 - DNA, 74 bp, Homo sapiens
caaattattgaaaaagatgaaggtcctttttatacccatctaggagcaggtcctaatgtggcagctattagaga

SEQ ID NO: 143578 - DNA, 74 bp, Homo sapiens
aaaaagatgaaggtcctttttatacccatctaggagcaggtcctaatgtggcagctattagagaaatcatggaa

SEQ ID NO: 143579 - DNA, 73 bp, Homo sapiens
aaggtcctttttatacccatctaggagcaggtcctaatgtggcagctattagagaaatcatggaagaaaggta

SEQ ID NO: 143580 - DNA, 73 bp, Homo sapiens
ctttttatacccatctaggagcaggtcctaatgtggcagctattagagaaatcatggaagaaaggtaattaac

SEQ ID NO: 143581 - DNA, 77 bp, Homo sapiens
atctaggagcaggtcctaatgtggcagctattagagaaatcatggaagaaaggtaattaacgcaaaggcacagggca

SEQ ID NO: 143582 - DNA, 74 bp, Homo sapiens
tcctaatgtggcagctattagagaaatcatggaagaaaggtaattaacgcaaaggcacagggcagattaacgtt

SEQ ID NO: 143583 - DNA, 72 bp, Homo sapiens
gcagctattagagaaatcatggaagaaaggtaattaacgcaaaggcacagggcagattaacgtttatccttt

SEQ ID NO: 143584 - DNA, 70 bp, Homo sapiens
atggaagaaaggtaattaacgcaaaggcacagggcagattaacgtttatccttttgtatatgtcagaatt

SEQ ID NO: 143585 - DNA, 69 bp, Homo sapiens
aaaggtaattaacgcaaaggcacagggcagattaacgtttatccttttgtatatgtcagaatttttcca

SEQ ID NO: 143586 - DNA, 73 bp, Homo sapiens
aacgcaaaggcacagggcagattaacgtttatccttttgtatatgtcagaatttttccagccttcacacacaa

SEQ ID NO: 143587 - DNA, 72 bp, Homo sapiens
agggcagattaacgtttatccttttgtatatgtcagaatttttccagccttcacacacaaagcagtaaacaa

SEQ ID NO: 143588 - DNA, 72 bp, Homo sapiens
cgtttatccttttgtatatgtcagaatttttccagccttcacacacaaagcagtaaacaattgtaaattgag

SEQ ID NO: 143589 - DNA, 72 bp, Homo sapiens
ccttttgtatatgtcagaatttttccagccttcacacacaaagcagtaaacaattgtaaattgagtaattat

SEQ ID NO: 143590 - DNA, 73 bp, Homo sapiens
gtcagaatttttccagccttcacacacaaagcagtaaacaattgtaaattgagtaattattagtaggcttagc

SEQ ID NO: 143591 - DNA, 73 bp, Homo sapiens
tttccagccttcacacacaaagcagtaaacaattgtaaattgagtaattattagtaggcttagctattctagg

SEQ ID NO: 143592 - DNA, 73 bp, Homo sapiens
agcagtaaacaattgtaaattgagtaattattagtaggcttagctattctagggttgccaacactacacactg

SEQ ID NO: 143593 - DNA, 75 bp, Homo sapiens
aacaattgtaaattgagtaattattagtaggcttagctattctagggttgccaacactacacactgtgctattca

SEQ ID NO: 143594 - DNA, 77 bp, Homo sapiens
agtaattattagtaggcttagctattctagggttgccaacactacacactgtgctattcaccagagagtcacaatat

SEQ ID NO: 143595 - DNA, 79 bp, Homo sapiens
ttattagtaggcttagctattctagggttgccaacactacacactgtgctattcaccagagagtcacaatatttgacag

SEQ ID NO: 143596 - DNA, 82 bp, Homo sapiens
tagctattctagggttgccaacactacacactgtgctattcaccagagagtcacaatatttgacaggactaatagtctgcta

SEQ ID NO: 143597 - DNA, 83 bp, Homo sapiens
acactacacactgtgctattcaccagagagtcacaatatttgacaggactaatagtctgctagctggcacaggctgcccactt

SEQ ID NO: 143598 - DNA, 85 bp, Homo sapiens
acactgtgctattcaccagagagtcacaatatttgacaggactaatagtctgctagctggcacaggctgcccactttgcgatgga

SEQ ID NO: 143599 - DNA, 82 bp, Homo sapiens
acaatatttgacaggactaatagtctgctagctggcacaggctgcccactttgcgatggatgccagaaaacccaggcatgaa

SEQ ID NO: 143600 - DNA, 82 bp, Homo sapiens
atttgacaggactaatagtctgctagctggcacaggctgcccactttgcgatggatgccagaaaacccaggcatgaacagga

SEQ ID NO: 143601 - DNA, 82 bp, Homo sapiens
actaatagtctgctagctggcacaggctgcccactttgcgatggatgccagaaaacccaggcatgaacaggaatcggccagc

SEQ ID NO: 143602 - DNA, 85 bp, Homo sapiens
tagctggcacaggctgcccactttgcgatggatgccagaaaacccaggcatgaacaggaatcggccagccaggctgccagccaca

SEQ ID NO: 143603 - DNA, 80 bp, Homo sapiens
aggctgcccactttgcgatggatgccagaaaacccaggcatgaacaggaatcggccagccaggctgccagccacaaggta

SEQ ID NO: 143604 - DNA, 80 bp, Homo sapiens
actttgcgatggatgccagaaaacccaggcatgaacaggaatcggccagccaggctgccagccacaaggtactggcacag

SEQ ID NO: 143605 - DNA, 80 bp, Homo sapiens
atgccagaaaacccaggcatgaacaggaatcggccagccaggctgccagccacaaggtactggcacaggctccaacgaga

SEQ ID NO: 143606 - DNA, 77 bp, Homo sapiens
aaaacccaggcatgaacaggaatcggccagccaggctgccagccacaaggtactggcacaggctccaacgagaggtc

SEQ ID NO: 143607 - DNA, 78 bp, Homo sapiens
atgaacaggaatcggccagccaggctgccagccacaaggtactggcacaggctccaacgagaggtcccactctggctt

SEQ ID NO: 143608 - DNA, 78 bp, Homo sapiens
ggccagccaggctgccagccacaaggtactggcacaggctccaacgagaggtcccactctggctttcccacctgataa

SEQ ID NO: 143609 - DNA, 78 bp, Homo sapiens
gctgccagccacaaggtactggcacaggctccaacgagaggtcccactctggctttcccacctgataataaagtgtca

SEQ ID NO: 143610 - DNA, 75 bp, Homo sapiens
gtactggcacaggctccaacgagaggtcccactctggctttcccacctgataataaagtgtcaaagcagaaagac

SEQ ID NO: 143611 - DNA, 72 bp, Homo sapiens
aggctccaacgagaggtcccactctggctttcccacctgataataaagtgtcaaagcagaaagactggtaaa

SEQ ID NO: 143612 - DNA, 71 bp, Homo sapiens
actctggctttcccacctgataataaagtgtcaaagcagaaagactggtaaagtgtggtataagaaaagaa

SEQ ID NO: 143613 - DNA, 71 bp, Homo sapiens
ccacctgataataaagtgtcaaagcagaaagactggtaaagtgtggtataagaaaagaaccactgaattaa

SEQ ID NO: 143614 - DNA, 70 bp, Homo sapiens
aagtgtcaaagcagaaagactggtaaagtgtggtataagaaaagaaccactgaattaaattcacctagtg

SEQ ID NO: 143615 - DNA, 71 bp, Homo sapiens
aagtgtggtataagaaaagaaccactgaattaaattcacctagtgttgcaaatgagtacttatctctaagt

SEQ ID NO: 143616 - DNA, 70 bp, Homo sapiens
gaaaagaaccactgaattaaattcacctagtgttgcaaatgagtacttatctctaagttttcttttacca

SEQ ID NO: 143617 - DNA, 72 bp, Homo sapiens
ctgaattaaattcacctagtgttgcaaatgagtacttatctctaagttttcttttaccataaaaagagagca

SEQ ID NO: 143618 - DNA, 76 bp, Homo sapiens
tcacctagtgttgcaaatgagtacttatctctaagttttcttttaccataaaaagagagcaagtgtgatatgttga

SEQ ID NO: 143619 - DNA, 74 bp, Homo sapiens
tgagtacttatctctaagttttcttttaccataaaaagagagcaagtgtgatatgttgaatagaaagagaaaca

SEQ ID NO: 143620 - DNA, 72 bp, Homo sapiens
ctaagttttcttttaccataaaaagagagcaagtgtgatatgttgaatagaaagagaaacatactatttaca

SEQ ID NO: 143621 - DNA, 73 bp, Homo sapiens
cttttaccataaaaagagagcaagtgtgatatgttgaatagaaagagaaacatactatttacagctgcctttt

SEQ ID NO: 143622 - DNA, 72 bp, Homo sapiens
ccataaaaagagagcaagtgtgatatgttgaatagaaagagaaacatactatttacagctgccttttttttt

SEQ ID NO: 143623 - DNA, 72 bp, Homo sapiens
tttttttttttttcgctatcaatcacaggtatacaagtacttgcctttactcctgcatgtagaagactctta

SEQ ID NO: 143624 - DNA, 82 bp, Homo sapiens
tttttcgctatcaatcacaggtatacaagtacttgcctttactcctgcatgtagaagactcttatgagcgagataatgcaga

SEQ ID NO: 143625 - DNA, 82 bp, Homo sapiens
tatcaatcacaggtatacaagtacttgcctttactcctgcatgtagaagactcttatgagcgagataatgcagagaaggcct

SEQ ID NO: 143626 - DNA, 80 bp, Homo sapiens
tatacaagtacttgcctttactcctgcatgtagaagactcttatgagcgagataatgcagagaaggcctttcatataaat

SEQ ID NO: 143627 - DNA, 79 bp, Homo sapiens
agtacttgcctttactcctgcatgtagaagactcttatgagcgagataatgcagagaaggcctttcatataaatttata

SEQ ID NO: 143628 - DNA, 83 bp, Homo sapiens
tttactcctgcatgtagaagactcttatgagcgagataatgcagagaaggcctttcatataaatttatacagctctgagctgt

SEQ ID NO: 143629 - DNA, 82 bp, Homo sapiens
atgtagaagactcttatgagcgagataatgcagagaaggcctttcatataaatttatacagctctgagctgttcttcttcta

SEQ ID NO: 143630 - DNA, 79 bp, Homo sapiens
ttatgagcgagataatgcagagaaggcctttcatataaatttatacagctctgagctgttcttcttctagggtgccttt

SEQ ID NO: 143631 - DNA, 77 bp, Homo sapiens
ataatgcagagaaggcctttcatataaatttatacagctctgagctgttcttcttctagggtgccttttcattaaga

SEQ ID NO: 143632 - DNA, 74 bp, Homo sapiens
agagaaggcctttcatataaatttatacagctctgagctgttcttcttctagggtgccttttcattaagaggta

SEQ ID NO: 143633 - DNA, 75 bp, Homo sapiens
catataaatttatacagctctgagctgttcttcttctagggtgccttttcattaagaggtaggcagtattattat

SEQ ID NO: 143634 - DNA, 73 bp, Homo sapiens
aaatttatacagctctgagctgttcttcttctagggtgccttttcattaagaggtaggcagtattattattaa

SEQ ID NO: 143635 - DNA, 73 bp, Homo sapiens
tgagctgttcttcttctagggtgccttttcattaagaggtaggcagtattattattaaagtacttaggataca

SEQ ID NO: 143636 - DNA, 73 bp, Homo sapiens
gtgccttttcattaagaggtaggcagtattattattaaagtacttaggatacattggggcagctaggacatat

SEQ ID NO: 143637 - DNA, 76 bp, Homo sapiens
tttcattaagaggtaggcagtattattattaaagtacttaggatacattggggcagctaggacatattcagtatca

SEQ ID NO: 143638 - DNA, 78 bp, Homo sapiens
taggcagtattattattaaagtacttaggatacattggggcagctaggacatattcagtatcattcttgctccatttc

SEQ ID NO: 143639 - DNA, 75 bp, Homo sapiens
attattaaagtacttaggatacattggggcagctaggacatattcagtatcattcttgctccatttccaaattat

SEQ ID NO: 143640 - DNA, 77 bp, Homo sapiens
taaagtacttaggatacattggggcagctaggacatattcagtatcattcttgctccatttccaaattattcatttc

SEQ ID NO: 143641 - DNA, 80 bp, Homo sapiens
atacattggggcagctaggacatattcagtatcattcttgctccatttccaaattattcatttctaaattagcatgtaga

SEQ ID NO: 143642 - DNA, 80 bp, Homo sapiens
ggcagctaggacatattcagtatcattcttgctccatttccaaattattcatttctaaattagcatgtagaagttcacta

SEQ ID NO: 143643 - DNA, 77 bp, Homo sapiens
ggacatattcagtatcattcttgctccatttccaaattattcatttctaaattagcatgtagaagttcactaaataa

SEQ ID NO: 143644 - DNA, 77 bp, Homo sapiens
cattcttgctccatttccaaattattcatttctaaattagcatgtagaagttcactaaataatcatctagtggcctg

SEQ ID NO: 143645 - DNA, 77 bp, Homo sapiens
gctccatttccaaattattcatttctaaattagcatgtagaagttcactaaataatcatctagtggcctggcagaaa

SEQ ID NO: 143646 - DNA, 76 bp, Homo sapiens
attattcatttctaaattagcatgtagaagttcactaaataatcatctagtggcctggcagaaatagtgaatttcc

SEQ ID NO: 143647 - DNA, 76 bp, Homo sapiens
tcatttctaaattagcatgtagaagttcactaaataatcatctagtggcctggcagaaatagtgaatttccctaag

SEQ ID NO: 143648 - DNA, 70 bp, Homo sapiens
agaagttcactaaataatcatctagtggcctggcagaaatagtgaatttccctaagtgccttttttttgt

SEQ ID NO: 143649 - DNA, 70 bp, Homo sapiens
ttttgttttttaaacaagcagtaggtggtgctttggtcataagggaagatatagtctatttctaggacta

SEQ ID NO: 143650 - DNA, 72 bp, Homo sapiens
tttaaacaagcagtaggtggtgctttggtcataagggaagatatagtctatttctaggactattccatattt

SEQ ID NO: 143651 - DNA, 74 bp, Homo sapiens
ctttggtcataagggaagatatagtctatttctaggactattccatattttccatgtggctggatactaactat

SEQ ID NO: 143652 - DNA, 75 bp, Homo sapiens
ataagggaagatatagtctatttctaggactattccatattttccatgtggctggatactaactatttgccagcc

SEQ ID NO: 143653 - DNA, 75 bp, Homo sapiens
actattccatattttccatgtggctggatactaactatttgccagcctccttttctaaattgtgagacattcttg

SEQ ID NO: 143654 - DNA, 76 bp, Homo sapiens
tccatgtggctggatactaactatttgccagcctccttttctaaattgtgagacattcttggaggaacagttctaa

SEQ ID NO: 143655 - DNA, 72 bp, Homo sapiens
tggatactaactatttgccagcctccttttctaaattgtgagacattcttggaggaacagttctaactaaaa

SEQ ID NO: 143656 - DNA, 69 bp, Homo sapiens
cttttctaaattgtgagacattcttggaggaacagttctaactaaaatctattatgactccccaagttt

SEQ ID NO: 143657 - DNA, 71 bp, Homo sapiens
ttgtgagacattcttggaggaacagttctaactaaaatctattatgactccccaagttttaaaatagctaa

SEQ ID NO: 143658 - DNA, 67 bp, Homo sapiens
cttggaggaacagttctaactaaaatctattatgactccccaagttttaaaatagctaaatttagta

SEQ ID NO: 143659 - DNA, 65 bp, Homo sapiens
aacagttctaactaaaatctattatgactccccaagttttaaaatagctaaatttagtaagggaa

SEQ ID NO: 143660 - DNA, 63 bp, Homo sapiens
actaaaatctattatgactccccaagttttaaaatagctaaatttagtaagggaaaaaatagt

SEQ ID NO: 143661 - DNA, 64 bp, Homo sapiens
aatctattatgactccccaagttttaaaatagctaaatttagtaagggaaaaaatagtttatgt

SEQ ID NO: 143662 - DNA, 64 bp, Homo sapiens
tgactccccaagttttaaaatagctaaatttagtaagggaaaaaatagtttatgttttagaaga

SEQ ID NO: 143663 - DNA, 63 bp, Homo sapiens
cccaagttttaaaatagctaaatttagtaagggaaaaaatagtttatgttttagaagactgaa

SEQ ID NO: 143664 - DNA, 65 bp, Homo sapiens
aaaatagctaaatttagtaagggaaaaaatagtttatgttttagaagactgaacttagcaaacta

SEQ ID NO: 143665 - DNA, 66 bp, Homo sapiens
gctaaatttagtaagggaaaaaatagtttatgttttagaagactgaacttagcaaactaacctgaa

SEQ ID NO: 143666 - DNA, 67 bp, Homo sapiens
ttagtaagggaaaaaatagtttatgttttagaagactgaacttagcaaactaacctgaattttgtgc

SEQ ID NO: 143667 - DNA, 72 bp, Homo sapiens
ttagaagactgaacttagcaaactaacctgaattttgtgctttgtgaaattttatatcgaaatgagctttcc

SEQ ID NO: 143668 - DNA, 71 bp, Homo sapiens
agactgaacttagcaaactaacctgaattttgtgctttgtgaaattttatatcgaaatgagctttcccatt

SEQ ID NO: 143669 - DNA, 72 bp, Homo sapiens
agcaaactaacctgaattttgtgctttgtgaaattttatatcgaaatgagctttcccattttcacccacatg

SEQ ID NO: 143670 - DNA, 72 bp, Homo sapiens
acctgaattttgtgctttgtgaaattttatatcgaaatgagctttcccattttcacccacatgtaatttaca

SEQ ID NO: 143671 - DNA, 74 bp, Homo sapiens
tttatatcgaaatgagctttcccattttcacccacatgtaatttacaaaatagttcattacaattatctgtaca

SEQ ID NO: 143672 - DNA, 74 bp, Homo sapiens
tcgaaatgagctttcccattttcacccacatgtaatttacaaaatagttcattacaattatctgtacattttga

SEQ ID NO: 143673 - DNA, 74 bp, Homo sapiens
gctttcccattttcacccacatgtaatttacaaaatagttcattacaattatctgtacattttgatattgagga

SEQ ID NO: 143674 - DNA, 73 bp, Homo sapiens
ttcacccacatgtaatttacaaaatagttcattacaattatctgtacattttgatattgaggaaaaacaaggc

SEQ ID NO: 143675 - DNA, 69 bp, Homo sapiens
atttacaaaatagttcattacaattatctgtacattttgatattgaggaaaaacaaggcttaaaaacca

SEQ ID NO: 143676 - DNA, 72 bp, Homo sapiens
tagttcattacaattatctgtacattttgatattgaggaaaaacaaggcttaaaaaccattatccagtttgc

SEQ ID NO: 143677 - DNA, 72 bp, Homo sapiens
caattatctgtacattttgatattgaggaaaaacaaggcttaaaaaccattatccagtttgcttggcgtaga

SEQ ID NO: 143678 - DNA, 70 bp, Homo sapiens
tgtacattttgatattgaggaaaaacaaggcttaaaaaccattatccagtttgcttggcgtagacctgtt

SEQ ID NO: 143679 - DNA, 68 bp, Homo sapiens
tttgatattgaggaaaaacaaggcttaaaaaccattatccagtttgcttggcgtagacctgtttaaaa

SEQ ID NO: 143680 - DNA, 65 bp, Homo sapiens
aggaaaaacaaggcttaaaaaccattatccagtttgcttggcgtagacctgtttaaaaaataata

SEQ ID NO: 143681 - DNA, 67 bp, Homo sapiens
taaaaaccattatccagtttgcttggcgtagacctgtttaaaaaataataaaccgttcatttctcag

SEQ ID NO: 143682 - DNA, 71 bp, Homo sapiens
attatccagtttgcttggcgtagacctgtttaaaaaataataaaccgttcatttctcaggatgtggtcata

SEQ ID NO: 143683 - DNA, 70 bp, Homo sapiens
agtttgcttggcgtagacctgtttaaaaaataataaaccgttcatttctcaggatgtggtcatagaataa

SEQ ID NO: 143684 - DNA, 72 bp, Homo sapiens
gcgtagacctgtttaaaaaataataaaccgttcatttctcaggatgtggtcatagaataaagttatgctcaa

SEQ ID NO: 143685 - DNA, 71 bp, Homo sapiens
aaaaataataaaccgttcatttctcaggatgtggtcatagaataaagttatgctcaaatgttcaaatattt

SEQ ID NO: 143686 - DNA, 80 bp, Homo sapiens
ttcatttctcaggatgtggtcatagaataaagttatgctcaaatgttcaaatattttgattgcctcttgaattcatttgc

SEQ ID NO: 143687 - DNA, 70 bp, Homo sapiens
gtgtgtgtgtttctgtgggtttctttaaggtttggacagaagggtaaagctattaggattgaaagagtca

SEQ ID NO: 143688 - DNA, 70 bp, Homo sapiens
tttctgtgggtttctttaaggtttggacagaagggtaaagctattaggattgaaagagtcatctatactg

SEQ ID NO: 143689 - DNA, 69 bp, Homo sapiens
ggtttctttaaggtttggacagaagggtaaagctattaggattgaaagagtcatctatactggtaaaga

SEQ ID NO: 143690 - DNA, 70 bp, Homo sapiens
taaggtttggacagaagggtaaagctattaggattgaaagagtcatctatactggtaaagaaggcaaaag

SEQ ID NO: 143691 - DNA, 72 bp, Homo sapiens
agaagggtaaagctattaggattgaaagagtcatctatactggtaaagaaggcaaaagttctcagggatgtc

SEQ ID NO: 143692 - DNA, 74 bp, Homo sapiens
aaagctattaggattgaaagagtcatctatactggtaaagaaggcaaaagttctcagggatgtcctattgctaa

SEQ ID NO: 143693 - DNA, 73 bp, Homo sapiens
attgaaagagtcatctatactggtaaagaaggcaaaagttctcagggatgtcctattgctaagtgggtaagtg

SEQ ID NO: 143694 - DNA, 73 bp, Homo sapiens
atctatactggtaaagaaggcaaaagttctcagggatgtcctattgctaagtgggtaagtgtgacttgataaa

SEQ ID NO: 143695 - DNA, 72 bp, Homo sapiens
taaagaaggcaaaagttctcagggatgtcctattgctaagtgggtaagtgtgacttgataaagcctttggtc

SEQ ID NO: 143696 - DNA, 70 bp, Homo sapiens
aaaagttctcagggatgtcctattgctaagtgggtaagtgtgacttgataaagcctttggtcttaaatct

SEQ ID NO: 143697 - DNA, 74 bp, Homo sapiens
ttgttttggttggggtggggggtgtttgggatggaatggtgatccacgcaggtggttcgcagaagcagcagtga

SEQ ID NO: 143698 - DNA, 78 bp, Homo sapiens
tggggggtgtttgggatggaatggtgatccacgcaggtggttcgcagaagcagcagtgaagagaagctactgtgtttg

SEQ ID NO: 143699 - DNA, 80 bp, Homo sapiens
gtgtttgggatggaatggtgatccacgcaggtggttcgcagaagcagcagtgaagagaagctactgtgtttggtgcggga

SEQ ID NO: 143700 - DNA, 83 bp, Homo sapiens
atggaatggtgatccacgcaggtggttcgcagaagcagcagtgaagagaagctactgtgtttggtgcgggagcgagctggcca

SEQ ID NO: 143701 - DNA, 82 bp, Homo sapiens
atccacgcaggtggttcgcagaagcagcagtgaagagaagctactgtgtttggtgcgggagcgagctggccacacctgtgag

SEQ ID NO: 143702 - DNA, 87 bp, Homo sapiens
ttcgcagaagcagcagtgaagagaagctactgtgtttggtgcgggagcgagctggccacacctgtgaggctgcagtgattgtgattc

SEQ ID NO: 143703 - DNA, 87 bp, Homo sapiens
agaagcagcagtgaagagaagctactgtgtttggtgcgggagcgagctggccacacctgtgaggctgcagtgattgtgattctcatc

SEQ ID NO: 143704 - DNA, 83 bp, Homo sapiens
aagagaagctactgtgtttggtgcgggagcgagctggccacacctgtgaggctgcagtgattgtgattctcatcctggtgtgg

SEQ ID NO: 143705 - DNA, 83 bp, Homo sapiens
tactgtgtttggtgcgggagcgagctggccacacctgtgaggctgcagtgattgtgattctcatcctggtgtgggaaggaatc

SEQ ID NO: 143706 - DNA, 83 bp, Homo sapiens
ttggtgcgggagcgagctggccacacctgtgaggctgcagtgattgtgattctcatcctggtgtgggaaggaatcccgctgtc

SEQ ID NO: 143707 - DNA, 83 bp, Homo sapiens
agctggccacacctgtgaggctgcagtgattgtgattctcatcctggtgtgggaaggaatcccgctgtctctggctgacaaac

SEQ ID NO: 143708 - DNA, 82 bp, Homo sapiens
acacctgtgaggctgcagtgattgtgattctcatcctggtgtgggaaggaatcccgctgtctctggctgacaaactctactc

SEQ ID NO: 143709 - DNA, 81 bp, Homo sapiens
tgcagtgattgtgattctcatcctggtgtgggaaggaatcccgctgtctctggctgacaaactctactcggagcttaccga

SEQ ID NO: 143710 - DNA, 77 bp, Homo sapiens
attgtgattctcatcctggtgtgggaaggaatcccgctgtctctggctgacaaactctactcggagcttaccgagac

SEQ ID NO: 143711 - DNA, 76 bp, Homo sapiens
tcctggtgtgggaaggaatcccgctgtctctggctgacaaactctactcggagcttaccgagacgctgaggaaata

SEQ ID NO: 143712 - DNA, 77 bp, Homo sapiens
ggaaggaatcccgctgtctctggctgacaaactctactcggagcttaccgagacgctgaggaaatacggcacgctca

SEQ ID NO: 143713 - DNA, 77 bp, Homo sapiens
aatcccgctgtctctggctgacaaactctactcggagcttaccgagacgctgaggaaatacggcacgctcaccaatc

SEQ ID NO: 143714 - DNA, 78 bp, Homo sapiens
tggctgacaaactctactcggagcttaccgagacgctgaggaaatacggcacgctcaccaatcgccggtgtgccttga

SEQ ID NO: 143715 - DNA, 76 bp, Homo sapiens
acaaactctactcggagcttaccgagacgctgaggaaatacggcacgctcaccaatcgccggtgtgccttgaatga

SEQ ID NO: 143716 - DNA, 75 bp, Homo sapiens
actcggagcttaccgagacgctgaggaaatacggcacgctcaccaatcgccggtgtgccttgaatgaagagtaag

SEQ ID NO: 143717 - DNA, 76 bp, Homo sapiens
taccgagacgctgaggaaatacggcacgctcaccaatcgccggtgtgccttgaatgaagagtaagtgaagcccagg

SEQ ID NO: 143718 - DNA, 75 bp, Homo sapiens
ctgaggaaatacggcacgctcaccaatcgccggtgtgccttgaatgaagagtaagtgaagcccagggcctctccc

SEQ ID NO: 143719 - DNA, 74 bp, Homo sapiens
acggcacgctcaccaatcgccggtgtgccttgaatgaagagtaagtgaagcccagggcctctcccctctttgcg

SEQ ID NO: 143720 - DNA, 80 bp, Homo sapiens
tatataatgctatccatagcaatgaatttggtcttttgatttttcaggagaacttgcgcctgtcaggggctggatccaga

SEQ ID NO: 143721 - DNA, 77 bp, Homo sapiens
atgctatccatagcaatgaatttggtcttttgatttttcaggagaacttgcgcctgtcaggggctggatccagaaac

SEQ ID NO: 143722 - DNA, 73 bp, Homo sapiens
aatgaatttggtcttttgatttttcaggagaacttgcgcctgtcaggggctggatccagaaacctgtggtgcc

SEQ ID NO: 143723 - DNA, 73 bp, Homo sapiens
tcttttgatttttcaggagaacttgcgcctgtcaggggctggatccagaaacctgtggtgcctccttctcttt

SEQ ID NO: 143724 - DNA, 72 bp, Homo sapiens
atttttcaggagaacttgcgcctgtcaggggctggatccagaaacctgtggtgcctccttctcttttggttg

SEQ ID NO: 143725 - DNA, 77 bp, Homo sapiens
agaacttgcgcctgtcaggggctggatccagaaacctgtggtgcctccttctcttttggttgttcatggagcatgta

SEQ ID NO: 143726 - DNA, 79 bp, Homo sapiens
tgtcaggggctggatccagaaacctgtggtgcctccttctcttttggttgttcatggagcatgtactacaatggatgta

SEQ ID NO: 143727 - DNA, 78 bp, Homo sapiens
tggatccagaaacctgtggtgcctccttctcttttggttgttcatggagcatgtactacaatggatgtaagtttgcca

SEQ ID NO: 143728 - DNA, 76 bp, Homo sapiens
aaacctgtggtgcctccttctcttttggttgttcatggagcatgtactacaatggatgtaagtttgccagaagcaa

SEQ ID NO: 143729 - DNA, 76 bp, Homo sapiens
cctccttctcttttggttgttcatggagcatgtactacaatggatgtaagtttgccagaagcaagatcccaaggaa

SEQ ID NO: 143730 - DNA, 75 bp, Homo sapiens
ctcttttggttgttcatggagcatgtactacaatggatgtaagtttgccagaagcaagatcccaaggaagtttaa

SEQ ID NO: 143731 - DNA, 77 bp, Homo sapiens
gttgttcatggagcatgtactacaatggatgtaagtttgccagaagcaagatcccaaggaagtttaagctgcttggg

SEQ ID NO: 143732 - DNA, 74 bp, Homo sapiens
tgtactacaatggatgtaagtttgccagaagcaagatcccaaggaagtttaagctgcttggggatgacccaaaa

SEQ ID NO: 143733 - DNA, 71 bp, Homo sapiens
atggatgtaagtttgccagaagcaagatcccaaggaagtttaagctgcttggggatgacccaaaagaggtt

SEQ ID NO: 143734 - DNA, 69 bp, Homo sapiens
gtaagtttgccagaagcaagatcccaaggaagtttaagctgcttggggatgacccaaaagaggtttgtt

SEQ ID NO: 143735 - DNA, 71 bp, Homo sapiens
agcaagatcccaaggaagtttaagctgcttggggatgacccaaaagaggtttgtttacttcctgatgtata

SEQ ID NO: 143736 - DNA, 69 bp, Homo sapiens
aaggaagtttaagctgcttggggatgacccaaaagaggtttgtttacttcctgatgtataatcgcttta

SEQ ID NO: 143737 - DNA, 74 bp, Homo sapiens
catagagaaaatggacttagaatttaatatgtagaattattcactttatacaggaagagaaactggagtctcat

SEQ ID NO: 143738 - DNA, 72 bp, Homo sapiens
ggacttagaatttaatatgtagaattattcactttatacaggaagagaaactggagtctcatttgcaaaacc

SEQ ID NO: 143739 - DNA, 74 bp, Homo sapiens
gaatttaatatgtagaattattcactttatacaggaagagaaactggagtctcatttgcaaaacctgtccactc

SEQ ID NO: 143740 - DNA, 76 bp, Homo sapiens
tagaattattcactttatacaggaagagaaactggagtctcatttgcaaaacctgtccactcttatggcaccaaca

SEQ ID NO: 143741 - DNA, 74 bp, Homo sapiens
actttatacaggaagagaaactggagtctcatttgcaaaacctgtccactcttatggcaccaacatataagaaa

SEQ ID NO: 143742 - DNA, 76 bp, Homo sapiens
aggaagagaaactggagtctcatttgcaaaacctgtccactcttatggcaccaacatataagaaacttgcacctga

SEQ ID NO: 143743 - DNA, 79 bp, Homo sapiens
aaactggagtctcatttgcaaaacctgtccactcttatggcaccaacatataagaaacttgcacctgatgcatataata

SEQ ID NO: 143744 - DNA, 77 bp, Homo sapiens
atttgcaaaacctgtccactcttatggcaccaacatataagaaacttgcacctgatgcatataataatcaggtaagt

SEQ ID NO: 143745 - DNA, 75 bp, Homo sapiens
aaaacctgtccactcttatggcaccaacatataagaaacttgcacctgatgcatataataatcaggtaagtttaa

SEQ ID NO: 143746 - DNA, 80 bp, Homo sapiens
actcttatggcaccaacatataagaaacttgcacctgatgcatataataatcaggtaagtttaaataatcattggcagca

SEQ ID NO: 143747 - DNA, 79 bp, Homo sapiens
ggcaccaacatataagaaacttgcacctgatgcatataataatcaggtaagtttaaataatcattggcagcaattgtaa

SEQ ID NO: 143748 - DNA, 75 bp, Homo sapiens
agagtaaaactaactactttcgcattcacacacacttttatttttcagattgaatatgaacacagagcaccagag

SEQ ID NO: 143749 - DNA, 77 bp, Homo sapiens
aactaactactttcgcattcacacacacttttatttttcagattgaatatgaacacagagcaccagagtgccgtctg

SEQ ID NO: 143750 - DNA, 79 bp, Homo sapiens
tttcgcattcacacacacttttatttttcagattgaatatgaacacagagcaccagagtgccgtctgggtctgaaggaa

SEQ ID NO: 143751 - DNA, 75 bp, Homo sapiens
acacttttatttttcagattgaatatgaacacagagcaccagagtgccgtctgggtctgaaggaaggccgtccat

SEQ ID NO: 143752 - DNA, 77 bp, Homo sapiens
ttatttttcagattgaatatgaacacagagcaccagagtgccgtctgggtctgaaggaaggccgtccattctcaggg

SEQ ID NO: 143753 - DNA, 79 bp, Homo sapiens
attgaatatgaacacagagcaccagagtgccgtctgggtctgaaggaaggccgtccattctcaggggtcactgcatgtt

SEQ ID NO: 143754 - DNA, 77 bp, Homo sapiens
aacacagagcaccagagtgccgtctgggtctgaaggaaggccgtccattctcaggggtcactgcatgtttggacttc

SEQ ID NO: 143755 - DNA, 80 bp, Homo sapiens
agagtgccgtctgggtctgaaggaaggccgtccattctcaggggtcactgcatgtttggacttctgtgctcatgcccaca

SEQ ID NO: 143756 - DNA, 82 bp, Homo sapiens
tgggtctgaaggaaggccgtccattctcaggggtcactgcatgtttggacttctgtgctcatgcccacagagacttgcacaa

SEQ ID NO: 143757 - DNA, 83 bp, Homo sapiens
aaggaaggccgtccattctcaggggtcactgcatgtttggacttctgtgctcatgcccacagagacttgcacaacatgcagaa

SEQ ID NO: 143758 - DNA, 89 bp, Homo sapiens
tccattctcaggggtcactgcatgtttggacttctgtgctcatgcccacagagacttgcacaacatgcagaatggcagcacattggtaa

SEQ ID NO: 143759 - DNA, 88 bp, Homo sapiens
gggtcactgcatgtttggacttctgtgctcatgcccacagagacttgcacaacatgcagaatggcagcacattggtaagttgggctga

SEQ ID NO: 143760 - DNA, 86 bp, Homo sapiens
atgtttggacttctgtgctcatgcccacagagacttgcacaacatgcagaatggcagcacattggtaagttgggctgaggacagct

SEQ ID NO: 143761 - DNA, 88 bp, Homo sapiens
acttctgtgctcatgcccacagagacttgcacaacatgcagaatggcagcacattggtaagttgggctgaggacagcttagcagctgt

SEQ ID NO: 143762 - DNA, 87 bp, Homo sapiens
atgcccacagagacttgcacaacatgcagaatggcagcacattggtaagttgggctgaggacagcttagcagctgttgagtctgttc

SEQ ID NO: 143763 - DNA, 76 bp, Homo sapiens
acctgtagttgaggctgtaatgtcttacttccctaccaggtatgcactctcactagagaagacaatcgagaatttg

SEQ ID NO: 143764 - DNA, 76 bp, Homo sapiens
ttgaggctgtaatgtcttacttccctaccaggtatgcactctcactagagaagacaatcgagaatttggaggaaaa

SEQ ID NO: 143765 - DNA, 74 bp, Homo sapiens
aatgtcttacttccctaccaggtatgcactctcactagagaagacaatcgagaatttggaggaaaacctgagga

SEQ ID NO: 143766 - DNA, 78 bp, Homo sapiens
cctaccaggtatgcactctcactagagaagacaatcgagaatttggaggaaaacctgaggatgagcagcttcacgttc

SEQ ID NO: 143767 - DNA, 81 bp, Homo sapiens
tatgcactctcactagagaagacaatcgagaatttggaggaaaacctgaggatgagcagcttcacgttctgcctttataca

SEQ ID NO: 143768 - DNA, 75 bp, Homo sapiens
actagagaagacaatcgagaatttggaggaaaacctgaggatgagcagcttcacgttctgcctttatacaaagtc

SEQ ID NO: 143769 - DNA, 75 bp, Homo sapiens
aagacaatcgagaatttggaggaaaacctgaggatgagcagcttcacgttctgcctttatacaaagtctctgacg

SEQ ID NO: 143770 - DNA, 75 bp, Homo sapiens
aatttggaggaaaacctgaggatgagcagcttcacgttctgcctttatacaaagtctctgacgtggatgagtttg

SEQ ID NO: 143771 - DNA, 76 bp, Homo sapiens
aaaacctgaggatgagcagcttcacgttctgcctttatacaaagtctctgacgtggatgagtttgggagtgtggaa

SEQ ID NO: 143772 - DNA, 79 bp, Homo sapiens
atgagcagcttcacgttctgcctttatacaaagtctctgacgtggatgagtttgggagtgtggaagctcaggaggagaa

SEQ ID NO: 143773 - DNA, 74 bp, Homo sapiens
cttcacgttctgcctttatacaaagtctctgacgtggatgagtttgggagtgtggaagctcaggaggagaaaaa

SEQ ID NO: 143774 - DNA, 74 bp, Homo sapiens
tttatacaaagtctctgacgtggatgagtttgggagtgtggaagctcaggaggagaaaaaacggagtggtgcca

SEQ ID NO: 143775 - DNA, 74 bp, Homo sapiens
acaaagtctctgacgtggatgagtttgggagtgtggaagctcaggaggagaaaaaacggagtggtgccattcag

SEQ ID NO: 143776 - DNA, 73 bp, Homo sapiens
tggatgagtttgggagtgtggaagctcaggaggagaaaaaacggagtggtgccattcaggtactgagttcttt

SEQ ID NO: 143777 - DNA, 70 bp, Homo sapiens
agtttgggagtgtggaagctcaggaggagaaaaaacggagtggtgccattcaggtactgagttcttttcg

SEQ ID NO: 143778 - DNA, 72 bp, Homo sapiens
gaagctcaggaggagaaaaaacggagtggtgccattcaggtactgagttcttttcggcgaaaagtcaggatg

SEQ ID NO: 143779 - DNA, 71 bp, Homo sapiens
aggaggagaaaaaacggagtggtgccattcaggtactgagttcttttcggcgaaaagtcaggatgttagca

SEQ ID NO: 143780 - DNA, 73 bp, Homo sapiens
aaaaacggagtggtgccattcaggtactgagttcttttcggcgaaaagtcaggatgttagcagagccagtcaa

SEQ ID NO: 143781 - DNA, 77 bp, Homo sapiens
tgccattcaggtactgagttcttttcggcgaaaagtcaggatgttagcagagccagtcaagacttgccgacaaagga

SEQ ID NO: 143782 - DNA, 74 bp, Homo sapiens
tactgagttcttttcggcgaaaagtcaggatgttagcagagccagtcaagacttgccgacaaaggaaactagaa

SEQ ID NO: 143783 - DNA, 73 bp, Homo sapiens
agttcttttcggcgaaaagtcaggatgttagcagagccagtcaagacttgccgacaaaggaaactagaagcca

SEQ ID NO: 143784 - DNA, 77 bp, Homo sapiens
aaaagtcaggatgttagcagagccagtcaagacttgccgacaaaggaaactagaagccaagaaagctgcagctgaaa

SEQ ID NO: 143785 - DNA, 77 bp, Homo sapiens
aggatgttagcagagccagtcaagacttgccgacaaaggaaactagaagccaagaaagctgcagctgaaaagctttc

SEQ ID NO: 143786 - DNA, 75 bp, Homo sapiens
agagccagtcaagacttgccgacaaaggaaactagaagccaagaaagctgcagctgaaaagctttcctccctgga

SEQ ID NO: 143787 - DNA, 74 bp, Homo sapiens
acttgccgacaaaggaaactagaagccaagaaagctgcagctgaaaagctttcctccctggagaacagctcaaa

SEQ ID NO: 143788 - DNA, 72 bp, Homo sapiens
acaaaggaaactagaagccaagaaagctgcagctgaaaagctttcctccctggagaacagctcaaataaaaa

SEQ ID NO: 143789 - DNA, 72 bp, Homo sapiens
aaactagaagccaagaaagctgcagctgaaaagctttcctccctggagaacagctcaaataaaaatgaaaag

SEQ ID NO: 143790 - DNA, 72 bp, Homo sapiens
aagaaagctgcagctgaaaagctttcctccctggagaacagctcaaataaaaatgaaaaggaaaagtcagcc

SEQ ID NO: 143791 - DNA, 71 bp, Homo sapiens
ctgaaaagctttcctccctggagaacagctcaaataaaaatgaaaaggaaaagtcagccccatcacgtaca

SEQ ID NO: 143792 - DNA, 69 bp, Homo sapiens
tttcctccctggagaacagctcaaataaaaatgaaaaggaaaagtcagccccatcacgtacaaaacaaa

SEQ ID NO: 143793 - DNA, 70 bp, Homo sapiens
gagaacagctcaaataaaaatgaaaaggaaaagtcagccccatcacgtacaaaacaaactgaaaacgcaa

SEQ ID NO: 143794 - DNA, 70 bp, Homo sapiens
tcaaataaaaatgaaaaggaaaagtcagccccatcacgtacaaaacaaactgaaaacgcaagccaggcta

SEQ ID NO: 143795 - DNA, 69 bp, Homo sapiens
aatgaaaaggaaaagtcagccccatcacgtacaaaacaaactgaaaacgcaagccaggctaaacagttg

SEQ ID NO: 143796 - DNA, 70 bp, Homo sapiens
aagtcagccccatcacgtacaaaacaaactgaaaacgcaagccaggctaaacagttggcaggtaaattta

SEQ ID NO: 143797 - DNA, 69 bp, Homo sapiens
cccatcacgtacaaaacaaactgaaaacgcaagccaggctaaacagttggcaggtaaatttaatgtaaa

SEQ ID NO: 143798 - DNA, 71 bp, Homo sapiens
caaaacaaactgaaaacgcaagccaggctaaacagttggcaggtaaatttaatgtaaagcatttgtagata

SEQ ID NO: 143799 - DNA, 71 bp, Homo sapiens
aaactgaaaacgcaagccaggctaaacagttggcaggtaaatttaatgtaaagcatttgtagataaatgtg

SEQ ID NO: 143800 - DNA, 75 bp, Homo sapiens
atcaacatcaaagatacctgtttctgttctctcttaccctgtccacagaacttttgcgactttcaggaccagtca

SEQ ID NO: 143801 - DNA, 76 bp, Homo sapiens
aaagatacctgtttctgttctctcttaccctgtccacagaacttttgcgactttcaggaccagtcatgcagcagtc

SEQ ID NO: 143802 - DNA, 78 bp, Homo sapiens
ctgtttctgttctctcttaccctgtccacagaacttttgcgactttcaggaccagtcatgcagcagtcccagcagccc

SEQ ID NO: 143803 - DNA, 80 bp, Homo sapiens
tctcttaccctgtccacagaacttttgcgactttcaggaccagtcatgcagcagtcccagcagccccagcctctacagaa

SEQ ID NO: 143804 - DNA, 83 bp, Homo sapiens
ctgtccacagaacttttgcgactttcaggaccagtcatgcagcagtcccagcagccccagcctctacagaagcagccaccaca

SEQ ID NO: 143805 - DNA, 82 bp, Homo sapiens
aacttttgcgactttcaggaccagtcatgcagcagtcccagcagccccagcctctacagaagcagccaccacagccccagca

SEQ ID NO: 143806 - DNA, 85 bp, Homo sapiens
actttcaggaccagtcatgcagcagtcccagcagccccagcctctacagaagcagccaccacagccccagcagcagcagagaccc

SEQ ID NO: 143807 - DNA, 91 bp, Homo sapiens
accagtcatgcagcagtcccagcagccccagcctctacagaagcagccaccacagccccagcagcagcagagaccccagcagcagcagcca

SEQ ID NO: 143808 - DNA, 88 bp, Homo sapiens
agtcccagcagccccagcctctacagaagcagccaccacagccccagcagcagcagagaccccagcagcagcagccacatcaccctca

SEQ ID NO: 143809 - DNA, 88 bp, Homo sapiens
agccccagcctctacagaagcagccaccacagccccagcagcagcagagaccccagcagcagcagccacatcaccctcagacagagtc

SEQ ID NO: 143810 - DNA, 89 bp, Homo sapiens
tacagaagcagccaccacagccccagcagcagcagagaccccagcagcagcagccacatcaccctcagacagagtctgtcaactcttat

SEQ ID NO: 143811 - DNA, 88 bp, Homo sapiens
agccaccacagccccagcagcagcagagaccccagcagcagcagccacatcaccctcagacagagtctgtcaactcttattctgcttc

SEQ ID NO: 143812 - DNA, 88 bp, Homo sapiens
ccccagcagcagcagagaccccagcagcagcagccacatcaccctcagacagagtctgtcaactcttattctgcttctggatccacca

SEQ ID NO: 143813 - DNA, 87 bp, Homo sapiens
agcagagaccccagcagcagcagccacatcaccctcagacagagtctgtcaactcttattctgcttctggatccaccaatccataca

SEQ ID NO: 143814 - DNA, 84 bp, Homo sapiens
cagccacatcaccctcagacagagtctgtcaactcttattctgcttctggatccaccaatccatacatgagacggcccaatcca

SEQ ID NO: 143815 - DNA, 81 bp, Homo sapiens
atcaccctcagacagagtctgtcaactcttattctgcttctggatccaccaatccatacatgagacggcccaatccagtta

SEQ ID NO: 143816 - DNA, 79 bp, Homo sapiens
agagtctgtcaactcttattctgcttctggatccaccaatccatacatgagacggcccaatccagttagtccttatcca

SEQ ID NO: 143817 - DNA, 75 bp, Homo sapiens
aactcttattctgcttctggatccaccaatccatacatgagacggcccaatccagttagtccttatccaaactct

SEQ ID NO: 143818 - DNA, 78 bp, Homo sapiens
tattctgcttctggatccaccaatccatacatgagacggcccaatccagttagtccttatccaaactcttcacacact

SEQ ID NO: 143819 - DNA, 79 bp, Homo sapiens
atccaccaatccatacatgagacggcccaatccagttagtccttatccaaactcttcacacacttcagatatctatgga

SEQ ID NO: 143820 - DNA, 79 bp, Homo sapiens
aatccatacatgagacggcccaatccagttagtccttatccaaactcttcacacacttcagatatctatggaagcacca

SEQ ID NO: 143821 - DNA, 77 bp, Homo sapiens
agacggcccaatccagttagtccttatccaaactcttcacacacttcagatatctatggaagcaccagccctatgaa

SEQ ID NO: 143822 - DNA, 77 bp, Homo sapiens
aatccagttagtccttatccaaactcttcacacacttcagatatctatggaagcaccagccctatgaacttctattc

SEQ ID NO: 143823 - DNA, 79 bp, Homo sapiens
ttagtccttatccaaactcttcacacacttcagatatctatggaagcaccagccctatgaacttctattccacctcatc

SEQ ID NO: 143824 - DNA, 83 bp, Homo sapiens
actcttcacacacttcagatatctatggaagcaccagccctatgaacttctattccacctcatctcaagctgcaggttcatat

SEQ ID NO: 143825 - DNA, 82 bp, Homo sapiens
acacacttcagatatctatggaagcaccagccctatgaacttctattccacctcatctcaagctgcaggttcatatttgaat

SEQ ID NO: 143826 - DNA, 79 bp, Homo sapiens
aagcaccagccctatgaacttctattccacctcatctcaagctgcaggttcatatttgaattcttctaatcccatgaac

SEQ ID NO: 143827 - DNA, 77 bp, Homo sapiens
tatgaacttctattccacctcatctcaagctgcaggttcatatttgaattcttctaatcccatgaacccttaccctg

SEQ ID NO: 143828 - DNA, 76 bp, Homo sapiens
tattccacctcatctcaagctgcaggttcatatttgaattcttctaatcccatgaacccttaccctgggcttttga

SEQ ID NO: 143829 - DNA, 74 bp, Homo sapiens
tgcaggttcatatttgaattcttctaatcccatgaacccttaccctgggcttttgaatcagaatacccaatatc

SEQ ID NO: 143830 - DNA, 76 bp, Homo sapiens
aattcttctaatcccatgaacccttaccctgggcttttgaatcagaatacccaatatccatcatatcaatgcaatg

SEQ ID NO: 143831 - DNA, 75 bp, Homo sapiens
aatcccatgaacccttaccctgggcttttgaatcagaatacccaatatccatcatatcaatgcaatggaaaccta

SEQ ID NO: 143832 - DNA, 80 bp, Homo sapiens
ttttgaatcagaatacccaatatccatcatatcaatgcaatggaaacctatcagtggacaactgctccccatatctgggt

SEQ ID NO: 143833 - DNA, 80 bp, Homo sapiens
atcagaatacccaatatccatcatatcaatgcaatggaaacctatcagtggacaactgctccccatatctgggttcctat

SEQ ID NO: 143834 - DNA, 79 bp, Homo sapiens
aatatccatcatatcaatgcaatggaaacctatcagtggacaactgctccccatatctgggttcctattctccccagtc

SEQ ID NO: 143835 - DNA, 79 bp, Homo sapiens
atatcaatgcaatggaaacctatcagtggacaactgctccccatatctgggttcctattctccccagtctcagccgatg

SEQ ID NO: 143836 - DNA, 78 bp, Homo sapiens
atggaaacctatcagtggacaactgctccccatatctgggttcctattctccccagtctcagccgatggatctgtata

SEQ ID NO: 143837 - DNA, 79 bp, Homo sapiens
ctatcagtggacaactgctccccatatctgggttcctattctccccagtctcagccgatggatctgtataggtatccaa

SEQ ID NO: 143838 - DNA, 77 bp, Homo sapiens
acaactgctccccatatctgggttcctattctccccagtctcagccgatggatctgtataggtatccaagccaagac

SEQ ID NO: 143839 - DNA, 77 bp, Homo sapiens
atatctgggttcctattctccccagtctcagccgatggatctgtataggtatccaagccaagaccctctgtctaagc

SEQ ID NO: 143840 - DNA, 79 bp, Homo sapiens
ttcctattctccccagtctcagccgatggatctgtataggtatccaagccaagaccctctgtctaagctcagtctacca

SEQ ID NO: 143841 - DNA, 76 bp, Homo sapiens
atctgtataggtatccaagccaagaccctctgtctaagctcagtctaccacccatccatacactttaccagccaag

SEQ ID NO: 143842 - DNA, 73 bp, Homo sapiens
agaccctctgtctaagctcagtctaccacccatccatacactttaccagccaaggtttggaaatagccagagt

SEQ ID NO: 143843 - DNA, 74 bp, Homo sapiens
tctaagctcagtctaccacccatccatacactttaccagccaaggtttggaaatagccagagttttacatctaa

SEQ ID NO: 143844 - DNA, 70 bp, Homo sapiens
agtctaccacccatccatacactttaccagccaaggtttggaaatagccagagttttacatctaaatact

SEQ ID NO: 143845 - DNA, 71 bp, Homo sapiens
catccatacactttaccagccaaggtttggaaatagccagagttttacatctaaatacttaggttatggaa

SEQ ID NO: 143846 - DNA, 70 bp, Homo sapiens
caaggtttggaaatagccagagttttacatctaaatacttaggttatggaaaccaaaatatgcagggaga

SEQ ID NO: 143847 - DNA, 71 bp, Homo sapiens
agttttacatctaaatacttaggttatggaaaccaaaatatgcagggagatggtttcagcagttgtaccat

SEQ ID NO: 143848 - DNA, 72 bp, Homo sapiens
atctaaatacttaggttatggaaaccaaaatatgcagggagatggtttcagcagttgtaccattagaccaaa

SEQ ID NO: 143849 - DNA, 76 bp, Homo sapiens
tacttaggttatggaaaccaaaatatgcagggagatggtttcagcagttgtaccattagaccaaatgtacatcatg

SEQ ID NO: 143850 - DNA, 75 bp, Homo sapiens
aaaccaaaatatgcagggagatggtttcagcagttgtaccattagaccaaatgtacatcatgtagggaaattgcc

SEQ ID NO: 143851 - DNA, 77 bp, Homo sapiens
aaatatgcagggagatggtttcagcagttgtaccattagaccaaatgtacatcatgtagggaaattgcctccttatc

SEQ ID NO: 143852 - DNA, 79 bp, Homo sapiens
atggtttcagcagttgtaccattagaccaaatgtacatcatgtagggaaattgcctccttatcccactcatgagatgga

SEQ ID NO: 143853 - DNA, 79 bp, Homo sapiens
agttgtaccattagaccaaatgtacatcatgtagggaaattgcctccttatcccactcatgagatggatggccacttca

SEQ ID NO: 143854 - DNA, 81 bp, Homo sapiens
taccattagaccaaatgtacatcatgtagggaaattgcctccttatcccactcatgagatggatggccacttcatgggagc

SEQ ID NO: 143855 - DNA, 81 bp, Homo sapiens
aatgtacatcatgtagggaaattgcctccttatcccactcatgagatggatggccacttcatgggagccacctctagatta

SEQ ID NO: 143856 - DNA, 79 bp, Homo sapiens
atcatgtagggaaattgcctccttatcccactcatgagatggatggccacttcatgggagccacctctagattaccacc

SEQ ID NO: 143857 - DNA, 80 bp, Homo sapiens
aaattgcctccttatcccactcatgagatggatggccacttcatgggagccacctctagattaccacccaatctgagcaa

SEQ ID NO: 143858 - DNA, 83 bp, Homo sapiens
tcccactcatgagatggatggccacttcatgggagccacctctagattaccacccaatctgagcaatccaaacatggactata

SEQ ID NO: 143859 - DNA, 79 bp, Homo sapiens
atgagatggatggccacttcatgggagccacctctagattaccacccaatctgagcaatccaaacatggactataaaaa

SEQ ID NO: 143860 - DNA, 77 bp, Homo sapiens
atggccacttcatgggagccacctctagattaccacccaatctgagcaatccaaacatggactataaaaatggtgaa

SEQ ID NO: 143861 - DNA, 80 bp, Homo sapiens
tctagattaccacccaatctgagcaatccaaacatggactataaaaatggtgaacatcattcaccttctcacataatcca

SEQ ID NO: 143862 - DNA, 78 bp, Homo sapiens
attaccacccaatctgagcaatccaaacatggactataaaaatggtgaacatcattcaccttctcacataatccataa

SEQ ID NO: 143863 - DNA, 82 bp, Homo sapiens
aatctgagcaatccaaacatggactataaaaatggtgaacatcattcaccttctcacataatccataactacagtgcagctc

SEQ ID NO: 143864 - DNA, 82 bp, Homo sapiens
ataaaaatggtgaacatcattcaccttctcacataatccataactacagtgcagctccgggcatgttcaacagctctcttca

SEQ ID NO: 143865 - DNA, 86 bp, Homo sapiens
aatggtgaacatcattcaccttctcacataatccataactacagtgcagctccgggcatgttcaacagctctcttcatgccctgca

SEQ ID NO: 143866 - DNA, 84 bp, Homo sapiens
ttcaccttctcacataatccataactacagtgcagctccgggcatgttcaacagctctcttcatgccctgcatctccaaaacaa

SEQ ID NO: 143867 - DNA, 84 bp, Homo sapiens
ttctcacataatccataactacagtgcagctccgggcatgttcaacagctctcttcatgccctgcatctccaaaacaaggagaa

SEQ ID NO: 143868 - DNA, 84 bp, Homo sapiens
atccataactacagtgcagctccgggcatgttcaacagctctcttcatgccctgcatctccaaaacaaggagaatgacatgctt

SEQ ID NO: 143869 - DNA, 86 bp, Homo sapiens
tgcagctccgggcatgttcaacagctctcttcatgccctgcatctccaaaacaaggagaatgacatgctttcccacacagctaatg

SEQ ID NO: 143870 - DNA, 84 bp, Homo sapiens
gcatgttcaacagctctcttcatgccctgcatctccaaaacaaggagaatgacatgctttcccacacagctaatgggttatcaa

SEQ ID NO: 143871 - DNA, 82 bp, Homo sapiens
ttcaacagctctcttcatgccctgcatctccaaaacaaggagaatgacatgctttcccacacagctaatgggttatcaaaga

SEQ ID NO: 143872 - DNA, 83 bp, Homo sapiens
tcatgccctgcatctccaaaacaaggagaatgacatgctttcccacacagctaatgggttatcaaagatgcttccagctctta

SEQ ID NO: 143873 - DNA, 79 bp, Homo sapiens
atctccaaaacaaggagaatgacatgctttcccacacagctaatgggttatcaaagatgcttccagctcttaaccatga

SEQ ID NO: 143874 - DNA, 78 bp, Homo sapiens
aaaacaaggagaatgacatgctttcccacacagctaatgggttatcaaagatgcttccagctcttaaccatgatagaa

SEQ ID NO: 143875 - DNA, 81 bp, Homo sapiens
aatgacatgctttcccacacagctaatgggttatcaaagatgcttccagctcttaaccatgatagaactgcttgtgtccaa

SEQ ID NO: 143876 - DNA, 79 bp, Homo sapiens
ttcccacacagctaatgggttatcaaagatgcttccagctcttaaccatgatagaactgcttgtgtccaaggaggctta

SEQ ID NO: 143877 - DNA, 80 bp, Homo sapiens
ttatcaaagatgcttccagctcttaaccatgatagaactgcttgtgtccaaggaggcttacacaaattaagtgatgctaa

SEQ ID NO: 143878 - DNA, 78 bp, Homo sapiens
ttaaccatgatagaactgcttgtgtccaaggaggcttacacaaattaagtgatgctaatggtcaggaaaagcagccat

SEQ ID NO: 143879 - DNA, 80 bp, Homo sapiens
atgatagaactgcttgtgtccaaggaggcttacacaaattaagtgatgctaatggtcaggaaaagcagccattggcacta

SEQ ID NO: 143880 - DNA, 76 bp, Homo sapiens
aaggaggcttacacaaattaagtgatgctaatggtcaggaaaagcagccattggcactagtccagggtgtggcttc

SEQ ID NO: 143881 - DNA, 79 bp, Homo sapiens
acaaattaagtgatgctaatggtcaggaaaagcagccattggcactagtccagggtgtggcttctggtgcagaggacaa

SEQ ID NO: 143882 - DNA, 80 bp, Homo sapiens
aagtgatgctaatggtcaggaaaagcagccattggcactagtccagggtgtggcttctggtgcagaggacaacgatgagg

SEQ ID NO: 143883 - DNA, 80 bp, Homo sapiens
aatggtcaggaaaagcagccattggcactagtccagggtgtggcttctggtgcagaggacaacgatgaggtctggtcaga

SEQ ID NO: 143884 - DNA, 83 bp, Homo sapiens
aagcagccattggcactagtccagggtgtggcttctggtgcagaggacaacgatgaggtctggtcagacagcgagcagagctt

SEQ ID NO: 143885 - DNA, 83 bp, Homo sapiens
attggcactagtccagggtgtggcttctggtgcagaggacaacgatgaggtctggtcagacagcgagcagagctttctggatc

SEQ ID NO: 143886 - DNA, 83 bp, Homo sapiens
tccagggtgtggcttctggtgcagaggacaacgatgaggtctggtcagacagcgagcagagctttctggatcctgacattggg

SEQ ID NO: 143887 - DNA, 82 bp, Homo sapiens
ttctggtgcagaggacaacgatgaggtctggtcagacagcgagcagagctttctggatcctgacattgggggagtggccgtg

SEQ ID NO: 143888 - DNA, 81 bp, Homo sapiens
atgaggtctggtcagacagcgagcagagctttctggatcctgacattgggggagtggccgtggctccaactcatgggtcaa

SEQ ID NO: 143889 - DNA, 83 bp, Homo sapiens
tggtcagacagcgagcagagctttctggatcctgacattgggggagtggccgtggctccaactcatgggtcaattctcattga

SEQ ID NO: 143890 - DNA, 81 bp, Homo sapiens
agcagagctttctggatcctgacattgggggagtggccgtggctccaactcatgggtcaattctcattgagtgtgcaaagc

SEQ ID NO: 143891 - DNA, 83 bp, Homo sapiens
tttctggatcctgacattgggggagtggccgtggctccaactcatgggtcaattctcattgagtgtgcaaagcgtgagctgca

SEQ ID NO: 143892 - DNA, 81 bp, Homo sapiens
tggctccaactcatgggtcaattctcattgagtgtgcaaagcgtgagctgcatgccacaacccctttaaagaatcccaata

SEQ ID NO: 143893 - DNA, 78 bp, Homo sapiens
aactcatgggtcaattctcattgagtgtgcaaagcgtgagctgcatgccacaacccctttaaagaatcccaataggaa

SEQ ID NO: 143894 - DNA, 77 bp, Homo sapiens
aattctcattgagtgtgcaaagcgtgagctgcatgccacaacccctttaaagaatcccaataggaatcaccccacca

SEQ ID NO: 143895 - DNA, 77 bp, Homo sapiens
attgagtgtgcaaagcgtgagctgcatgccacaacccctttaaagaatcccaataggaatcaccccaccaggatctc

SEQ ID NO: 143896 - DNA, 72 bp, Homo sapiens
cgtgagctgcatgccacaacccctttaaagaatcccaataggaatcaccccaccaggatctccctcgtcttt

SEQ ID NO: 143897 - DNA, 70 bp, Homo sapiens
atgccacaacccctttaaagaatcccaataggaatcaccccaccaggatctccctcgtcttttaccagca

SEQ ID NO: 143898 - DNA, 72 bp, Homo sapiens
ccctttaaagaatcccaataggaatcaccccaccaggatctccctcgtcttttaccagcataagagcatgaa

SEQ ID NO: 143899 - DNA, 76 bp, Homo sapiens
taaagaatcccaataggaatcaccccaccaggatctccctcgtcttttaccagcataagagcatgaatgagccaaa

SEQ ID NO: 143900 - DNA, 77 bp, Homo sapiens
aataggaatcaccccaccaggatctccctcgtcttttaccagcataagagcatgaatgagccaaaacatggcttggc

SEQ ID NO: 143901 - DNA, 78 bp, Homo sapiens
tccctcgtcttttaccagcataagagcatgaatgagccaaaacatggcttggctctttgggaagccaaaatggctgaa

SEQ ID NO: 143902 - DNA, 76 bp, Homo sapiens
cgtcttttaccagcataagagcatgaatgagccaaaacatggcttggctctttgggaagccaaaatggctgaaaaa

SEQ ID NO: 143903 - DNA, 76 bp, Homo sapiens
ataagagcatgaatgagccaaaacatggcttggctctttgggaagccaaaatggctgaaaaagcccgtgagaaaga

SEQ ID NO: 143904 - DNA, 74 bp, Homo sapiens
atgaatgagccaaaacatggcttggctctttgggaagccaaaatggctgaaaaagcccgtgagaaagaggaaga

SEQ ID NO: 143905 - DNA, 71 bp, Homo sapiens
aaaacatggcttggctctttgggaagccaaaatggctgaaaaagcccgtgagaaagaggaagagtgtgaaa

SEQ ID NO: 143906 - DNA, 72 bp, Homo sapiens
tttgggaagccaaaatggctgaaaaagcccgtgagaaagaggaagagtgtgaaaagtatggcccagactatg

SEQ ID NO: 143907 - DNA, 74 bp, Homo sapiens
aaaatggctgaaaaagcccgtgagaaagaggaagagtgtgaaaagtatggcccagactatgtgcctcagaaatc

SEQ ID NO: 143908 - DNA, 74 bp, Homo sapiens
aaaaagcccgtgagaaagaggaagagtgtgaaaagtatggcccagactatgtgcctcagaaatcccatggcaaa

SEQ ID NO: 143909 - DNA, 72 bp, Homo sapiens
aaagaggaagagtgtgaaaagtatggcccagactatgtgcctcagaaatcccatggcaaaaaagtgaaacgg

SEQ ID NO: 143910 - DNA, 76 bp, Homo sapiens
aagagtgtgaaaagtatggcccagactatgtgcctcagaaatcccatggcaaaaaagtgaaacgggagcctgctga

SEQ ID NO: 143911 - DNA, 77 bp, Homo sapiens
aaaagtatggcccagactatgtgcctcagaaatcccatggcaaaaaagtgaaacgggagcctgctgagccacatgaa

SEQ ID NO: 143912 - DNA, 78 bp, Homo sapiens
agactatgtgcctcagaaatcccatggcaaaaaagtgaaacgggagcctgctgagccacatgaaacttcagagcccac

SEQ ID NO: 143913 - DNA, 77 bp, Homo sapiens
tgtgcctcagaaatcccatggcaaaaaagtgaaacgggagcctgctgagccacatgaaacttcagagcccacttacc

SEQ ID NO: 143914 - DNA, 76 bp, Homo sapiens
aaaaagtgaaacgggagcctgctgagccacatgaaacttcagagcccacttacctgcgtttcatcaagtctcttgc

SEQ ID NO: 143915 - DNA, 76 bp, Homo sapiens
aaacgggagcctgctgagccacatgaaacttcagagcccacttacctgcgtttcatcaagtctcttgccgaaagga

SEQ ID NO: 143916 - DNA, 79 bp, Homo sapiens
tgagccacatgaaacttcagagcccacttacctgcgtttcatcaagtctcttgccgaaaggaccatgtccgtgaccaca

SEQ ID NO: 143917 - DNA, 76 bp, Homo sapiens
atgaaacttcagagcccacttacctgcgtttcatcaagtctcttgccgaaaggaccatgtccgtgaccacagactc

SEQ ID NO: 143918 - DNA, 75 bp, Homo sapiens
agcccacttacctgcgtttcatcaagtctcttgccgaaaggaccatgtccgtgaccacagactccacagtaacta

SEQ ID NO: 143919 - DNA, 78 bp, Homo sapiens
ttacctgcgtttcatcaagtctcttgccgaaaggaccatgtccgtgaccacagactccacagtaactacatctccata

SEQ ID NO: 143920 - DNA, 80 bp, Homo sapiens
tttcatcaagtctcttgccgaaaggaccatgtccgtgaccacagactccacagtaactacatctccatatgccttcactc

SEQ ID NO: 143921 - DNA, 79 bp, Homo sapiens
tctcttgccgaaaggaccatgtccgtgaccacagactccacagtaactacatctccatatgccttcactcgggtcacag

SEQ ID NO: 143922 - DNA, 76 bp, Homo sapiens
aaaggaccatgtccgtgaccacagactccacagtaactacatctccatatgccttcactcgggtcacagggcctta

SEQ ID NO: 143923 - DNA, 80 bp, Homo sapiens
acagactccacagtaactacatctccatatgccttcactcgggtcacagggccttacaacagatatatatgatatcaccc

SEQ ID NO: 143924 - DNA, 75 bp, Homo sapiens
atctccatatgccttcactcgggtcacagggccttacaacagatatatatgatatcacccccttttgttggttac

SEQ ID NO: 143925 - DNA, 73 bp, Homo sapiens
ttcactcgggtcacagggccttacaacagatatatatgatatcacccccttttgttggttacctcacttgaaa

SEQ ID NO: 143926 - DNA, 73 bp, Homo sapiens
gtcacagggccttacaacagatatatatgatatcacccccttttgttggttacctcacttgaaaagaccacaa

SEQ ID NO: 143927 - DNA, 73 bp, Homo sapiens
ttacaacagatatatatgatatcacccccttttgttggttacctcacttgaaaagaccacaaccaacctgtca

SEQ ID NO: 143928 - DNA, 72 bp, Homo sapiens
tatatatgatatcacccccttttgttggttacctcacttgaaaagaccacaaccaacctgtcagtagtatag

SEQ ID NO: 143929 - DNA, 70 bp, Homo sapiens
atatcacccccttttgttggttacctcacttgaaaagaccacaaccaacctgtcagtagtatagttctca

SEQ ID NO: 143930 - DNA, 73 bp, Homo sapiens
ttttgttggttacctcacttgaaaagaccacaaccaacctgtcagtagtatagttctcatgacgtgggcagtg

SEQ ID NO: 143931 - DNA, 72 bp, Homo sapiens
ggttacctcacttgaaaagaccacaaccaacctgtcagtagtatagttctcatgacgtgggcagtggggaaa

SEQ ID NO: 143932 - DNA, 75 bp, Homo sapiens
aaaagaccacaaccaacctgtcagtagtatagttctcatgacgtgggcagtggggaaaggtcacagtattcatga

SEQ ID NO: 143933 - DNA, 76 bp, Homo sapiens
acaaccaacctgtcagtagtatagttctcatgacgtgggcagtggggaaaggtcacagtattcatgacaaatgtgg

SEQ ID NO: 143934 - DNA, 76 bp, Homo sapiens
ctgtcagtagtatagttctcatgacgtgggcagtggggaaaggtcacagtattcatgacaaatgtggtgggaaaaa

SEQ ID NO: 143935 - DNA, 77 bp, Homo sapiens
gtatagttctcatgacgtgggcagtggggaaaggtcacagtattcatgacaaatgtggtgggaaaaacctcagctca

SEQ ID NO: 143936 - DNA, 74 bp, Homo sapiens
acgtgggcagtggggaaaggtcacagtattcatgacaaatgtggtgggaaaaacctcagctcaccagcaacaaa

SEQ ID NO: 143937 - DNA, 74 bp, Homo sapiens
tggggaaaggtcacagtattcatgacaaatgtggtgggaaaaacctcagctcaccagcaacaaaagaggttatc

SEQ ID NO: 143938 - DNA, 75 bp, Homo sapiens
aggtcacagtattcatgacaaatgtggtgggaaaaacctcagctcaccagcaacaaaagaggttatcttaccata

SEQ ID NO: 143939 - DNA, 72 bp, Homo sapiens
atgacaaatgtggtgggaaaaacctcagctcaccagcaacaaaagaggttatcttaccatagcacttaattt

SEQ ID NO: 143940 - DNA, 71 bp, Homo sapiens
aaatgtggtgggaaaaacctcagctcaccagcaacaaaagaggttatcttaccatagcacttaattttcac

SEQ ID NO: 143941 - DNA, 72 bp, Homo sapiens
aaaaacctcagctcaccagcaacaaaagaggttatcttaccatagcacttaattttcactggctcccaagtg

SEQ ID NO: 143942 - DNA, 78 bp, Homo sapiens
tcaccagcaacaaaagaggttatcttaccatagcacttaattttcactggctcccaagtggtcacagatggcatctag

SEQ ID NO: 143943 - DNA, 77 bp, Homo sapiens
atagcacttaattttcactggctcccaagtggtcacagatggcatctaggaaaagaccaaagcattctatgcaaaaa

SEQ ID NO: 143944 - DNA, 70 bp, Homo sapiens
catctaggaaaagaccaaagcattctatgcaaaaagaaggtggggaagaaagtgttccgcaatttacatt

SEQ ID NO: 143945 - DNA, 69 bp, Homo sapiens
agcattctatgcaaaaagaaggtggggaagaaagtgttccgcaatttacatttttaaacactggttcta

SEQ ID NO: 143946 - DNA, 67 bp, Homo sapiens
gcaaaaagaaggtggggaagaaagtgttccgcaatttacatttttaaacactggttctattattgga

SEQ ID NO: 143947 - DNA, 71 bp, Homo sapiens
gtggggaagaaagtgttccgcaatttacatttttaaacactggttctattattggacgagatgatatgtaa

SEQ ID NO: 143948 - DNA, 73 bp, Homo sapiens
gaaagtgttccgcaatttacatttttaaacactggttctattattggacgagatgatatgtaaatgtgatccc
